United States Patent Application Publication US 2005/0255487 A1 - sequence listing, part 24

SEQ ID NO: 643565 - RNA, 19 nt, Homo sapiens
  misc_RNA (1)...(19): siRNA sense strand
gggaaaaccugcagaaguc

SEQ ID NO: 643566 - RNA, 19 nt, Homo sapiens
  misc_RNA (1)...(19): siRNA sense strand
ccauuaagacugagggaaa

SEQ ID NO: 643567 - RNA, 19 nt, Homo sapiens
  misc_RNA (1)...(19): siRNA sense strand
gcaacagucaaccuucuga

SEQ ID NO: 643568 - RNA, 19 nt, Homo sapiens
  misc_RNA (1)...(19): siRNA sense strand
aaagaaguggcccugguua

SEQ ID NO: 643569 - RNA, 19 nt, Homo sapiens
  misc_RNA (1)...(19): siRNA sense strand
gauagaaauggcaucagaa

SEQ ID NO: 643570 - RNA, 19 nt, Homo sapiens
  misc_RNA (1)...(19): siRNA sense strand
cugaauuccuugaagagaa

SEQ ID NO: 643571 - RNA, 19 nt, Homo sapiens
  misc_RNA (1)...(19): siRNA sense strand
gaacaagaaaguggacauc

SEQ ID NO: 643572 - RNA, 19 nt, Homo sapiens
  misc_RNA (1)...(19): siRNA sense strand
aagagcaccuccaccaguu

SEQ ID NO: 643573 - RNA, 19 nt, Homo sapiens
  misc_RNA (1)...(19): siRNA sense strand
agacauugagggagagaua

SEQ ID NO: 643574 - RNA, 19 nt, Homo sapiens
  misc_RNA (1)...(19): siRNA sense strand
aaacuagccagauugaaga

SEQ ID NO: 643575 - RNA, 19 nt, Homo sapiens
  misc_RNA (1)...(19): siRNA sense strand
ucuaaggucuccuccaagu

SEQ ID NO: 643576 - RNA, 19 nt, Homo sapiens
  misc_RNA (1)...(19): siRNA sense strand
ggacaugucuccacuauca

SEQ ID NO: 643577 - RNA, 19 nt, Homo sapiens
  misc_RNA (1)...(19): siRNA sense strand
gcacaagcauuggaaauaa

SEQ ID NO: 643578 - RNA, 19 nt, Homo sapiens
  misc_RNA (1)...(19): siRNA sense strand
ggaaucacccaccaaauua

SEQ ID NO: 643579 - RNA, 19 nt, Homo sapiens
  misc_RNA (1)...(19): siRNA sense strand
caacaccaguuccaauuaa

SEQ ID NO: 643580 - RNA, 19 nt, Homo sapiens
  misc_RNA (1)...(19): siRNA sense strand
cgaggaggauucuguguua

SEQ ID NO: 643581 - RNA, 19 nt, Homo sapiens
  misc_RNA (1)...(19): siRNA sense strand
gcaccuacuuucaugauuu

SEQ ID NO: 643582 - RNA, 19 nt, Homo sapiens
  misc_RNA (1)...(19): siRNA sense strand
ucaagaagaugacugcaaa

SEQ ID NO: 643583 - RNA, 19 nt, Homo sapiens
  misc_RNA (1)...(19): siRNA sense strand
gaagaaaccgugcucagaa

SEQ ID NO: 643584 - RNA, 19 nt, Homo sapiens
  misc_RNA (1)...(19): siRNA sense strand
caacugaauuccuugaaga

SEQ ID NO: 643585 - RNA, 19 nt, Homo sapiens
  misc_RNA (1)...(19): siRNA sense strand
gcaaagacuucaacaucga

SEQ ID NO: 643586 - RNA, 19 nt, Homo sapiens
  misc_RNA (1)...(19): siRNA sense strand
gcugauacuucaauauuug

SEQ ID NO: 643587 - RNA, 19 nt, Homo sapiens
  misc_RNA (1)...(19): siRNA sense strand
gaaauggcaucagaagaga

SEQ ID NO: 643588 - RNA, 19 nt, Homo sapiens
  misc_RNA (1)...(19): siRNA sense strand
gccagaagauaccaacuuu

SEQ ID NO: 643589 - RNA, 19 nt, Homo sapiens
  misc_RNA (1)...(19): siRNA sense strand
gaaauauccucugcugaga

SEQ ID NO: 643590 - RNA, 19 nt, Homo sapiens
  misc_RNA (1)...(19): siRNA sense strand
gcaacaccaguuccaauua

SEQ ID NO: 643591 - RNA, 19 nt, Homo sapiens
  misc_RNA (1)...(19): siRNA sense strand
ggacuucauugccacacua

SEQ ID NO: 643592 - RNA, 19 nt, Homo sapiens
  misc_RNA (1)...(19): siRNA sense strand
gaaauugcacaaacacaaa

SEQ ID NO: 643593 - RNA, 19 nt, Homo sapiens
  misc_RNA (1)...(19): siRNA sense strand
gcagaggccuuugaugaug

SEQ ID NO: 643594 - RNA, 19 nt, Homo sapiens
  misc_RNA (1)...(19): siRNA sense strand
gaaaggaaaccaugcaaca

SEQ ID NO: 643595 - RNA, 19 nt, Homo sapiens
  misc_RNA (1)...(19): siRNA sense strand
gaccaaggauaaagcacua

SEQ ID NO: 643596 - RNA, 19 nt, Homo sapiens
  misc_RNA (1)...(19): siRNA sense strand
ccacugccauuaagacuga

SEQ ID NO: 643597 - RNA, 19 nt, Homo sapiens
  misc_RNA (1)...(19): siRNA sense strand
gaaacuagccagauugaag

SEQ ID NO: 643598 - RNA, 19 nt, Homo sapiens
  misc_RNA (1)...(19): siRNA sense strand
gcacucagacuguugcaaa

SEQ ID NO: 643599 - RNA, 19 nt, Homo sapiens
  misc_RNA (1)...(19): siRNA sense strand
gaaauaaugaugggacuga

SEQ ID NO: 643600 - RNA, 19 nt, Homo sapiens
  misc_RNA (1)...(19): siRNA sense strand
ugccaggccuuccaucuua

SEQ ID NO: 643601 - RNA, 19 nt, Homo sapiens
  misc_RNA (1)...(19): siRNA sense strand
gaaaauggccuaccaggaa

SEQ ID NO: 643602 - RNA, 19 nt, Homo sapiens
  misc_RNA (1)...(19): siRNA sense strand
uggaggagaugucaagauu

SEQ ID NO: 643603 - RNA, 19 nt, Homo sapiens
  misc_RNA (1)...(19): siRNA sense strand
ccacaacuccuuucauaga

SEQ ID NO: 643604 - RNA, 19 nt, Homo sapiens
  misc_RNA (1)...(19): siRNA sense strand
ucagagaccucaggaauag

SEQ ID NO: 643605 - RNA, 19 nt, Homo sapiens
  misc_RNA (1)...(19): siRNA sense strand
uaagugaggauucccauuu

SEQ ID NO: 643606 - RNA, 19 nt, Homo sapiens
  misc_RNA (1)...(19): siRNA sense strand
ggaaauugcacaaacacaa

SEQ ID NO: 643607 - RNA, 19 nt, Homo sapiens
  misc_RNA (1)...(19): siRNA sense strand
ccaaggaugugacacuguu

SEQ ID NO: 643608 - RNA, 19 nt, Homo sapiens
  misc_RNA (1)...(19): siRNA sense strand
caaugugacuccagccaaa

SEQ ID NO: 643609 - RNA, 19 nt, Homo sapiens
  misc_RNA (1)...(19): siRNA sense strand
gaggugcugugaagacuga

SEQ ID NO: 643610 - RNA, 19 nt, Homo sapiens
  misc_RNA (1)...(19): siRNA sense strand
uagaaucucugcaggaugu

SEQ ID NO: 643611 - RNA, 19 nt, Homo sapiens
  misc_RNA (1)...(19): siRNA sense strand
gcagaugcauuaacagaac

SEQ ID NO: 643612 - RNA, 19 nt, Homo sapiens
  misc_RNA (1)...(19): siRNA sense strand
gaaaccaacgugaucuuga

SEQ ID NO: 643613 - RNA, 19 nt, Homo sapiens
  misc_RNA (1)...(19): siRNA sense strand
ugaauuccuugaagagaaa

SEQ ID NO: 643614 - RNA, 19 nt, Homo sapiens
  misc_RNA (1)...(19): siRNA sense strand
cuccacaacuccuuucaua

SEQ ID NO: 643615 - RNA, 19 nt, Homo sapiens
  misc_RNA (1)...(19): siRNA sense strand
caaaagacgugaagccaaa

SEQ ID NO: 643616 - RNA, 19 nt, Homo sapiens
  misc_RNA (1)...(19): siRNA sense strand
ccacuucucucccuaagca

SEQ ID NO: 643617 - RNA, 19 nt, Homo sapiens
  misc_RNA (1)...(19): siRNA sense strand
uaccaggaauacccaaaua

SEQ ID NO: 643618 - RNA, 19 nt, Homo sapiens
  misc_RNA (1)...(19): siRNA sense strand
ggcauuggcuaaagauaug

SEQ ID NO: 643619 - RNA, 19 nt, Homo sapiens
  misc_RNA (1)...(19): siRNA sense strand
gcagaagucaagaagauga

SEQ ID NO: 643620 - RNA, 19 nt, Homo sapiens
  misc_RNA (1)...(19): siRNA sense strand
gggagaaacuguuggaaaa

SEQ ID NO: 643621 - RNA, 19 nt, Homo sapiens
  misc_RNA (1)...(19): siRNA sense strand
caagagcacucagacuguu

SEQ ID NO: 643622 - RNA, 19 nt, Homo sapiens
  misc_RNA (1)...(19): siRNA sense strand
caaugguggucauggagua

SEQ ID NO: 643623 - RNA, 19 nt, Homo sapiens
  misc_RNA (1)...(19): siRNA sense strand
ccuuuaagauguaccauga

SEQ ID NO: 643624 - RNA, 19 nt, Homo sapiens
  misc_RNA (1)...(19): siRNA sense strand
agaaccaucuccagacauu

SEQ ID NO: 643625 - RNA, 19 nt, Homo sapiens
  misc_RNA (1)...(19): siRNA sense strand
aagugaggauucccauuua

SEQ ID NO: 643626 - RNA, 19 nt, Homo sapiens
  misc_RNA (1)...(19): siRNA sense strand
ggacauggcacuagcuaca

SEQ ID NO: 643627 - RNA, 19 nt, Homo sapiens
  misc_RNA (1)...(19): siRNA sense strand
gauugaaagucagaaguug

SEQ ID NO: 643628 - RNA, 19 nt, Homo sapiens
  misc_RNA (1)...(19): siRNA sense strand
aagaaaccgugcucagaaa

SEQ ID NO: 643629 - RNA, 19 nt, Homo sapiens
  misc_RNA (1)...(19): siRNA sense strand
gauaaagcgggacuucauu

SEQ ID NO: 643630 - RNA, 19 nt, Homo sapiens
  misc_RNA (1)...(19): siRNA sense strand
cagcugauacuucaauauu

SEQ ID NO: 643631 - RNA, 19 nt, Homo sapiens
  misc_RNA (1)...(19): siRNA sense strand
gacagcugauacuucaaua

SEQ ID NO: 643632 - RNA, 19 nt, Homo sapiens
  misc_RNA (1)...(19): siRNA sense strand
augaugaccuggcagauuu

SEQ ID NO: 643633 - RNA, 19 nt, Homo sapiens
  misc_RNA (1)...(19): siRNA sense strand
uauccagacugaucccuuu

SEQ ID NO: 643634 - RNA, 19 nt, Homo sapiens
  misc_RNA (1)...(19): siRNA sense strand
gaaguaguucucaucaaga

SEQ ID NO: 643635 - RNA, 19 nt, Homo sapiens
  misc_RNA (1)...(19): siRNA sense strand
gagggcaucuccuauaaaa

SEQ ID NO: 643636 - RNA, 19 nt, Homo sapiens
  misc_RNA (1)...(19): siRNA sense strand
gagggcaucuccuauaaaa

SEQ ID NO: 643637 - RNA, 19 nt, Homo sapiens
  misc_RNA (1)...(19): siRNA sense strand
agauagaaauggcaucaga

SEQ ID NO: 643638 - RNA, 19 nt, Homo sapiens
  misc_RNA (1)...(19): siRNA sense strand
ggucuaaggcuaacaucaa

SEQ ID NO: 643639 - RNA, 19 nt, Homo sapiens
  misc_RNA (1)...(19): siRNA sense strand
aaaccgugcucagaaacua

SEQ ID NO: 643640 - RNA, 19 nt, Homo sapiens
  misc_RNA (1)...(19): siRNA sense strand
gaagcccacugccauuaag

SEQ ID NO: 643641 - RNA, 19 nt, Homo sapiens
  misc_RNA (1)...(19): siRNA sense strand
aaacacagcccacuucucu

SEQ ID NO: 643642 - RNA, 19 nt, Homo sapiens
  misc_RNA (1)...(19): siRNA sense strand
uuaaagacauggaaauugc

SEQ ID NO: 643643 - RNA, 19 nt, Homo sapiens
  misc_RNA (1)...(19): siRNA sense strand
agacugaucccuuuaagau

SEQ ID NO: 643644 - RNA, 19 nt, Homo sapiens
  misc_RNA (1)...(19): siRNA sense strand
gauacuccaucuucuaaac

SEQ ID NO: 643645 - RNA, 19 nt, Homo sapiens
  misc_RNA (1)...(19): siRNA sense strand
uggaaucacccaccaaauu

SEQ ID NO: 643646 - RNA, 19 nt, Homo sapiens
  misc_RNA (1)...(19): siRNA sense strand
caacacuccuagccaaugg

SEQ ID NO: 643647 - RNA, 19 nt, Homo sapiens
  misc_RNA (1)...(19): siRNA sense strand
ugggaucccucgauaaugu

SEQ ID NO: 643648 - RNA, 19 nt, Homo sapiens
  misc_RNA (1)...(19): siRNA sense strand
gaaaguggacaucucuaag

SEQ ID NO: 643649 - RNA, 19 nt, Homo sapiens
  misc_RNA (1)...(19): siRNA sense strand
caacuccuuucauagacaa

SEQ ID NO: 643650 - RNA, 19 nt, Homo sapiens
  misc_RNA (1)...(19): siRNA sense strand
gugacacuguugaaagaaa

SEQ ID NO: 643651 - RNA, 19 nt, Homo sapiens
  misc_RNA (1)...(19): siRNA sense strand
ggacugaagacuacugaca

SEQ ID NO: 643652 - RNA, 19 nt, Homo sapiens
  misc_RNA (1)...(19): siRNA sense strand
gaugaugaccuggcagauu

SEQ ID NO: 643653 - RNA, 19 nt, Homo sapiens
  misc_RNA (1)...(19): siRNA sense strand
ggaguagaagggagcgaua

SEQ ID NO: 643654 - RNA, 19 nt, Homo sapiens
  misc_RNA (1)...(19): siRNA sense strand
ucucuaaggucuccuccaa

SEQ ID NO: 643655 - RNA, 19 nt, Homo sapiens
  misc_RNA (1)...(19): siRNA sense strand
cuccugaucugaagaaugu

SEQ ID NO: 643656 - RNA, 19 nt, Homo sapiens
  misc_RNA (1)...(19): siRNA sense strand
cugcagaagucaagaagau

SEQ ID NO: 643657 - RNA, 19 nt, Homo sapiens
  misc_RNA (1)...(19): siRNA sense strand
gaagggagcgauacuacag

SEQ ID NO: 643658 - RNA, 19 nt, Homo sapiens
  misc_RNA (1)...(19): siRNA sense strand
ggaaaccaacgugaucuug

SEQ ID NO: 643659 - RNA, 19 nt, Homo sapiens
  misc_RNA (1)...(19): siRNA sense strand
aagguuggcuccacggaaa

SEQ ID NO: 643660 - RNA, 19 nt, Homo sapiens
  misc_RNA (1)...(19): siRNA sense strand
caagaagcccacugccauu

SEQ ID NO: 643661 - RNA, 19 nt, Homo sapiens
  misc_RNA (1)...(19): siRNA sense strand
ccacgcuccugcccaagaa

SEQ ID NO: 643662 - RNA, 19 nt, Homo sapiens
  misc_RNA (1)...(19): siRNA sense strand
cauggaaauugcacaaaca

SEQ ID NO: 643663 - RNA, 19 nt, Homo sapiens
  misc_RNA (1)...(19): siRNA sense strand
aaugaucccuugaaagaca

SEQ ID NO: 643664 - RNA, 19 nt, Homo sapiens
  misc_RNA (1)...(19): siRNA sense strand
aaggugggaucccucgaua

SEQ ID NO: 643665 - RNA, 19 nt, Homo sapiens
  misc_RNA (1)...(19): siRNA sense strand
gggaaaaccugcagaaguc

SEQ ID NO: 643666 - RNA, 19 nt, Homo sapiens
  misc_RNA (1)...(19): siRNA sense strand
ccauuaagacugagggaaa

SEQ ID NO: 643667 - RNA, 19 nt, Homo sapiens
  misc_RNA (1)...(19): siRNA sense strand
gcaacagucaaccuucuga

SEQ ID NO: 643668 - RNA, 19 nt, Homo sapiens
  misc_RNA (1)...(19): siRNA sense strand
aaagaaguggcccugguua

SEQ ID NO: 643669 - RNA, 19 nt, Homo sapiens
  misc_RNA (1)...(19): siRNA sense strand
gauagaaauggcaucagaa

SEQ ID NO: 643670 - RNA, 19 nt, Homo sapiens
  misc_RNA (1)...(19): siRNA sense strand
cugaauuccuugaagagaa

SEQ ID NO: 643671 - RNA, 19 nt, Homo sapiens
  misc_RNA (1)...(19): siRNA sense strand
gaacaagaaaguggacauc

SEQ ID NO: 643672 - RNA, 19 nt, Homo sapiens
  misc_RNA (1)...(19): siRNA sense strand
aagagcaccuccaccaguu

SEQ ID NO: 643673 - RNA, 19 nt, Homo sapiens
  misc_RNA (1)...(19): siRNA sense strand
agacauugagggagagaua

SEQ ID NO: 643674 - RNA, 19 nt, Homo sapiens
  misc_RNA (1)...(19): siRNA sense strand
aaacuagccagauugaaga

SEQ ID NO: 643675 - RNA, 19 nt, Homo sapiens
  misc_RNA (1)...(19): siRNA sense strand
ucuaaggucuccuccaagu

SEQ ID NO: 643676 - RNA, 19 nt, Homo sapiens
  misc_RNA (1)...(19): siRNA sense strand
ggacaugucuccacuauca

SEQ ID NO: 643677 - RNA, 19 nt, Homo sapiens
  misc_RNA (1)...(19): siRNA sense strand
gcacaagcauuggaaauaa

SEQ ID NO: 643678 - RNA, 19 nt, Homo sapiens
  misc_RNA (1)...(19): siRNA sense strand
ggaaucacccaccaaauua

SEQ ID NO: 643679 - RNA, 19 nt, Homo sapiens
  misc_RNA (1)...(19): siRNA sense strand
caacaccaguuccaauuaa

SEQ ID NO: 643680 - RNA, 19 nt, Homo sapiens
  misc_RNA (1)...(19): siRNA sense strand
cgaggaggauucuguguua

SEQ ID NO: 643681 - RNA, 19 nt, Homo sapiens
  misc_RNA (1)...(19): siRNA sense strand
gcaccuacuuucaugauuu

SEQ ID NO: 643682 - RNA, 19 nt, Homo sapiens
  misc_RNA (1)...(19): siRNA sense strand
ucaagaagaugacugcaaa

SEQ ID NO: 643683 - RNA, 19 nt, Homo sapiens
  misc_RNA (1)...(19): siRNA sense strand
gaagaaaccgugcucagaa

SEQ ID NO: 643684 - RNA, 19 nt, Homo sapiens
  misc_RNA (1)...(19): siRNA sense strand
caacugaauuccuugaaga

SEQ ID NO: 643685 - RNA, 19 nt, Homo sapiens
  misc_RNA (1)...(19): siRNA sense strand
gcaaagacuucaacaucga

SEQ ID NO: 643686 - RNA, 19 nt, Homo sapiens
  misc_RNA (1)...(19): siRNA sense strand
gcugauacuucaauauuug

SEQ ID NO: 643687 - RNA, 19 nt, Homo sapiens
  misc_RNA (1)...(19): siRNA sense strand
gaaauggcaucagaagaga

SEQ ID NO: 643688 - RNA, 19 nt, Homo sapiens
  misc_RNA (1)...(19): siRNA sense strand
gccagaagauaccaacuuu

SEQ ID NO: 643689 - RNA, 19 nt, Homo sapiens
  misc_RNA (1)...(19): siRNA sense strand
gaaauauccucugcugaga

SEQ ID NO: 643690 - RNA, 19 nt, Homo sapiens
  misc_RNA (1)...(19): siRNA sense strand
gcaacaccaguuccaauua

SEQ ID NO: 643691 - RNA, 19 nt, Homo sapiens
  misc_RNA (1)...(19): siRNA sense strand
ggacuucauugccacacua

SEQ ID NO: 643692 - RNA, 19 nt, Homo sapiens
  misc_RNA (1)...(19): siRNA sense strand
gaaauugcacaaacacaaa

SEQ ID NO: 643693 - RNA, 19 nt, Homo sapiens
  misc_RNA (1)...(19): siRNA sense strand
gcagaggccuuugaugaug

SEQ ID NO: 643694 - RNA, 19 nt, Homo sapiens
  misc_RNA (1)...(19): siRNA sense strand
gaaaggaaaccaugcaaca

SEQ ID NO: 643695 - RNA, 19 nt, Homo sapiens
  misc_RNA (1)...(19): siRNA sense strand
gaccaaggauaaagcacua

SEQ ID NO: 643696 - RNA, 19 nt, Homo sapiens
  misc_RNA (1)...(19): siRNA sense strand
ccacugccauuaagacuga

SEQ ID NO: 643697 - RNA, 19 nt, Homo sapiens
  misc_RNA (1)...(19): siRNA sense strand
gaaacuagccagauugaag

SEQ ID NO: 643698 - RNA, 19 nt, Homo sapiens
  misc_RNA (1)...(19): siRNA sense strand
gcacucagacuguugcaaa

SEQ ID NO: 643699 - RNA, 19 nt, Homo sapiens
  misc_RNA (1)...(19): siRNA sense strand
gaaauaaugaugggacuga

SEQ ID NO: 643700 - RNA, 19 nt, Homo sapiens
  misc_RNA (1)...(19): siRNA sense strand
ugccaggccuuccaucuua

SEQ ID NO: 643701 - RNA, 19 nt, Homo sapiens
  misc_RNA (1)...(19): siRNA sense strand
gaaaauggccuaccaggaa

SEQ ID NO: 643702 - RNA, 19 nt, Homo sapiens
  misc_RNA (1)...(19): siRNA sense strand
uggaggagaugucaagauu

SEQ ID NO: 643703 - RNA, 19 nt, Homo sapiens
  misc_RNA (1)...(19): siRNA sense strand
ccacaacuccuuucauaga

SEQ ID NO: 643704 - RNA, 19 nt, Homo sapiens
  misc_RNA (1)...(19): siRNA sense strand
ucagagaccucaggaauag

SEQ ID NO: 643705 - RNA, 19 nt, Homo sapiens
  misc_RNA (1)...(19): siRNA sense strand
uaagugaggauucccauuu

SEQ ID NO: 643706 - RNA, 19 nt, Homo sapiens
  misc_RNA (1)...(19): siRNA sense strand
ggaaauugcacaaacacaa

SEQ ID NO: 643707 - RNA, 19 nt, Homo sapiens
  misc_RNA (1)...(19): siRNA sense strand
ccaaggaugugacacuguu

SEQ ID NO: 643708 - RNA, 19 nt, Homo sapiens
  misc_RNA (1)...(19): siRNA sense strand
caaugugacuccagccaaa

SEQ ID NO: 643709 - RNA, 19 nt, Homo sapiens
  misc_RNA (1)...(19): siRNA sense strand
gaggugcugugaagacuga

SEQ ID NO: 643710 - RNA, 19 nt, Homo sapiens
  misc_RNA (1)...(19): siRNA sense strand
uagaaucucugcaggaugu

SEQ ID NO: 643711 - RNA, 19 nt, Homo sapiens
  misc_RNA (1)...(19): siRNA sense strand
gcagaugcauuaacagaac

SEQ ID NO: 643712 - RNA, 19 nt, Homo sapiens
  misc_RNA (1)...(19): siRNA sense strand
gaaaccaacgugaucuuga

SEQ ID NO: 643713 - RNA, 19 nt, Homo sapiens
  misc_RNA (1)...(19): siRNA sense strand
ugaauuccuugaagagaaa

SEQ ID NO: 643714 - RNA, 19 nt, Homo sapiens
  misc_RNA (1)...(19): siRNA sense strand
cuccacaacuccuuucaua

SEQ ID NO: 643715 - RNA, 19 nt, Homo sapiens
  misc_RNA (1)...(19): siRNA sense strand
caaaagacgugaagccaaa

SEQ ID NO: 643716 - RNA, 19 nt, Homo sapiens
  misc_RNA (1)...(19): siRNA sense strand
ccacuucucucccuaagca

SEQ ID NO: 643717 - RNA, 19 nt, Homo sapiens
  misc_RNA (1)...(19): siRNA sense strand
uaccaggaauacccaaaua

SEQ ID NO: 643718 - RNA, 19 nt, Homo sapiens
  misc_RNA (1)...(19): siRNA sense strand
ggcauuggcuaaagauaug

SEQ ID NO: 643719 - RNA, 19 nt, Homo sapiens
  misc_RNA (1)...(19): siRNA sense strand
gcagaagucaagaagauga

SEQ ID NO: 643720 - RNA, 19 nt, Homo sapiens
  misc_RNA (1)...(19): siRNA sense strand
gggagaaacuguuggaaaa

SEQ ID NO: 643721 - RNA, 19 nt, Homo sapiens
  misc_RNA (1)...(19): siRNA sense strand
caagagcacucagacuguu

SEQ ID NO: 643722 - RNA, 19 nt, Homo sapiens
  misc_RNA (1)...(19): siRNA sense strand
caaugguggucauggagua

SEQ ID NO: 643723 - RNA, 19 nt, Homo sapiens
  misc_RNA (1)...(19): siRNA sense strand
ccuuuaagauguaccauga

SEQ ID NO: 643724 - RNA, 19 nt, Homo sapiens
  misc_RNA (1)...(19): siRNA sense strand
agaaccaucuccagacauu

SEQ ID NO: 643725 - RNA, 19 nt, Homo sapiens
  misc_RNA (1)...(19): siRNA sense strand
aagugaggauucccauuua

SEQ ID NO: 643726 - RNA, 19 nt, Homo sapiens
  misc_RNA (1)...(19): siRNA sense strand
ggacauggcacuagcuaca

SEQ ID NO: 643727 - RNA, 19 nt, Homo sapiens
  misc_RNA (1)...(19): siRNA sense strand
gauugaaagucagaaguug

SEQ ID NO: 643728 - RNA, 19 nt, Homo sapiens
  misc_RNA (1)...(19): siRNA sense strand
aagaaaccgugcucagaaa

SEQ ID NO: 643729 - RNA, 19 nt, Homo sapiens
  misc_RNA (1)...(19): siRNA sense strand
gauaaagcgggacuucauu

SEQ ID NO: 643730 - RNA, 19 nt, Homo sapiens
  misc_RNA (1)...(19): siRNA sense strand
cagcugauacuucaauauu

SEQ ID NO: 643731 - RNA, 19 nt, Homo sapiens
  misc_RNA (1)...(19): siRNA sense strand
gacagcugauacuucaaua

SEQ ID NO: 643732 - RNA, 19 nt, Homo sapiens
  misc_RNA (1)...(19): siRNA sense strand
augaugaccuggcagauuu

SEQ ID NO: 643733 - RNA, 19 nt, Homo sapiens
  misc_RNA (1)...(19): siRNA sense strand
uauccagacugaucccuuu

SEQ ID NO: 643734 - RNA, 19 nt, Homo sapiens
  misc_RNA (1)...(19): siRNA sense strand
gaaguaguucucaucaaga

SEQ ID NO: 643735 - RNA, 19 nt, Homo sapiens
  misc_RNA (1)...(19): siRNA sense strand
gagggcaucuccuauaaaa

SEQ ID NO: 643736 - RNA, 19 nt, Homo sapiens
  misc_RNA (1)...(19): siRNA sense strand
gagggcaucuccuauaaaa

SEQ ID NO: 643737 - RNA, 19 nt, Homo sapiens
  misc_RNA (1)...(19): siRNA sense strand
agauagaaauggcaucaga

SEQ ID NO: 643738 - RNA, 19 nt, Homo sapiens
  misc_RNA (1)...(19): siRNA sense strand
ggucuaaggcuaacaucaa

SEQ ID NO: 643739 - RNA, 19 nt, Homo sapiens
  misc_RNA (1)...(19): siRNA sense strand
aaaccgugcucagaaacua

SEQ ID NO: 643740 - RNA, 19 nt, Homo sapiens
  misc_RNA (1)...(19): siRNA sense strand
gaagcccacugccauuaag

SEQ ID NO: 643741 - RNA, 19 nt, Homo sapiens
  misc_RNA (1)...(19): siRNA sense strand
aaacacagcccacuucucu

SEQ ID NO: 643742 - RNA, 19 nt, Homo sapiens
  misc_RNA (1)...(19): siRNA sense strand
uuaaagacauggaaauugc

SEQ ID NO: 643743 - RNA, 19 nt, Homo sapiens
  misc_RNA (1)...(19): siRNA sense strand
agacugaucccuuuaagau

SEQ ID NO: 643744 - RNA, 19 nt, Homo sapiens
  misc_RNA (1)...(19): siRNA sense strand
gauacuccaucuucuaaac

SEQ ID NO: 643745 - RNA, 19 nt, Homo sapiens
  misc_RNA (1)...(19): siRNA sense strand
uggaaucacccaccaaauu

SEQ ID NO: 643746 - RNA, 19 nt, Homo sapiens
  misc_RNA (1)...(19): siRNA sense strand
caacacuccuagccaaugg

SEQ ID NO: 643747 - RNA, 19 nt, Homo sapiens
  misc_RNA (1)...(19): siRNA sense strand
ugggaucccucgauaaugu

SEQ ID NO: 643748 - RNA, 19 nt, Homo sapiens
  misc_RNA (1)...(19): siRNA sense strand
gaaaguggacaucucuaag

SEQ ID NO: 643749 - RNA, 19 nt, Homo sapiens
  misc_RNA (1)...(19): siRNA sense strand
caacuccuuucauagacaa

SEQ ID NO: 643750 - RNA, 19 nt, Homo sapiens
  misc_RNA (1)...(19): siRNA sense strand
gugacacuguugaaagaaa

SEQ ID NO: 643751 - RNA, 19 nt, Homo sapiens
  misc_RNA (1)...(19): siRNA sense strand
ggacugaagacuacugaca

SEQ ID NO: 643752 - RNA, 19 nt, Homo sapiens
  misc_RNA (1)...(19): siRNA sense strand
gaugaugaccuggcagauu

SEQ ID NO: 643753 - RNA, 19 nt, Homo sapiens
  misc_RNA (1)...(19): siRNA sense strand
ggaguagaagggagcgaua

SEQ ID NO: 643754 - RNA, 19 nt, Homo sapiens
  misc_RNA (1)...(19): siRNA sense strand
ucucuaaggucuccuccaa

SEQ ID NO: 643755 - RNA, 19 nt, Homo sapiens
  misc_RNA (1)...(19): siRNA sense strand
cuccugaucugaagaaugu

SEQ ID NO: 643756 - RNA, 19 nt, Homo sapiens
  misc_RNA (1)...(19): siRNA sense strand
cugcagaagucaagaagau

SEQ ID NO: 643757 - RNA, 19 nt, Homo sapiens
  misc_RNA (1)...(19): siRNA sense strand
gaagggagcgauacuacag

SEQ ID NO: 643758 - RNA, 19 nt, Homo sapiens
  misc_RNA (1)...(19): siRNA sense strand
ggaaaccaacgugaucuug

SEQ ID NO: 643759 - RNA, 19 nt, Homo sapiens
  misc_RNA (1)...(19): siRNA sense strand
aagguuggcuccacggaaa

SEQ ID NO: 643760 - RNA, 19 nt, Homo sapiens
  misc_RNA (1)...(19): siRNA sense strand
caagaagcccacugccauu

SEQ ID NO: 643761 - RNA, 19 nt, Homo sapiens
  misc_RNA (1)...(19): siRNA sense strand
ccacgcuccugcccaagaa

SEQ ID NO: 643762 - RNA, 19 nt, Homo sapiens
  misc_RNA (1)...(19): siRNA sense strand
cauggaaauugcacaaaca

SEQ ID NO: 643763 - RNA, 19 nt, Homo sapiens
  misc_RNA (1)...(19): siRNA sense strand
aaugaucccuugaaagaca

SEQ ID NO: 643764 - RNA, 19 nt, Homo sapiens
  misc_RNA (1)...(19): siRNA sense strand
aaggugggaucccucgaua

SEQ ID NO: 643765 - RNA, 19 nt, Homo sapiens
  misc_RNA (1)...(19): siRNA sense strand
gggaaaaccugcagaaguc

SEQ ID NO: 643766 - RNA, 19 nt, Homo sapiens
  misc_RNA (1)...(19): siRNA sense strand
ccauuaagacugagggaaa

SEQ ID NO: 643767 - RNA, 19 nt, Homo sapiens
  misc_RNA (1)...(19): siRNA sense strand
gcaacagucaaccuucuga

SEQ ID NO: 643768 - RNA, 19 nt, Homo sapiens
  misc_RNA (1)...(19): siRNA sense strand
aaagaaguggcccugguua

SEQ ID NO: 643769 - RNA, 19 nt, Homo sapiens
  misc_RNA (1)...(19): siRNA sense strand
gauagaaauggcaucagaa

SEQ ID NO: 643770 - RNA, 19 nt, Homo sapiens
  misc_RNA (1)...(19): siRNA sense strand
cugaauuccuugaagagaa

SEQ ID NO: 643771 - RNA, 19 nt, Homo sapiens
  misc_RNA (1)...(19): siRNA sense strand
gaacaagaaaguggacauc

SEQ ID NO: 643772 - RNA, 19 nt, Homo sapiens
  misc_RNA (1)...(19): siRNA sense strand
aagagcaccuccaccaguu

SEQ ID NO: 643773 - RNA, 19 nt, Homo sapiens
  misc_RNA (1)...(19): siRNA sense strand
agacauugagggagagaua

SEQ ID NO: 643774 - RNA, 19 nt, Homo sapiens
  misc_RNA (1)...(19): siRNA sense strand
aaacuagccagauugaaga

SEQ ID NO: 643775 - RNA, 19 nt, Homo sapiens
  misc_RNA (1)...(19): siRNA sense strand
ucuaaggucuccuccaagu

SEQ ID NO: 643776 - RNA, 19 nt, Homo sapiens
  misc_RNA (1)...(19): siRNA sense strand
ggacaugucuccacuauca

SEQ ID NO: 643777 - RNA, 19 nt, Homo sapiens
  misc_RNA (1)...(19): siRNA sense strand
gcacaagcauuggaaauaa

SEQ ID NO: 643778 - RNA, 19 nt, Homo sapiens
  misc_RNA (1)...(19): siRNA sense strand
ggaaucacccaccaaauua

SEQ ID NO: 643779 - RNA, 19 nt, Homo sapiens
  misc_RNA (1)...(19): siRNA sense strand
caacaccaguuccaauuaa

SEQ ID NO: 643780 - RNA, 19 nt, Homo sapiens
  misc_RNA (1)...(19): siRNA sense strand
cgaggaggauucuguguua

SEQ ID NO: 643781 - RNA, 19 nt, Homo sapiens
  misc_RNA (1)...(19): siRNA sense strand
gcaccuacuuucaugauuu

SEQ ID NO: 643782 - RNA, 19 nt, Homo sapiens
  misc_RNA (1)...(19): siRNA sense strand
ucaagaagaugacugcaaa

SEQ ID NO: 643783 - RNA, 19 nt, Homo sapiens
  misc_RNA (1)...(19): siRNA sense strand
gaagaaaccgugcucagaa

SEQ ID NO: 643784 - RNA, 19 nt, Homo sapiens
  misc_RNA (1)...(19): siRNA sense strand
caacugaauuccuugaaga

SEQ ID NO: 643785 - RNA, 19 nt, Homo sapiens
  misc_RNA (1)...(19): siRNA sense strand
gcaaagacuucaacaucga

SEQ ID NO: 643786 - RNA, 19 nt, Homo sapiens
  misc_RNA (1)...(19): siRNA sense strand
gcugauacuucaauauuug

SEQ ID NO: 643787 - RNA, 19 nt, Homo sapiens
  misc_RNA (1)...(19): siRNA sense strand
gaaauggcaucagaagaga

SEQ ID NO: 643788 - RNA, 19 nt, Homo sapiens
  misc_RNA (1)...(19): siRNA sense strand
gccagaagauaccaacuuu

SEQ ID NO: 643789 - RNA, 19 nt, Homo sapiens
  misc_RNA (1)...(19): siRNA sense strand
gaaauauccucugcugaga

SEQ ID NO: 643790 - RNA, 19 nt, Homo sapiens
  misc_RNA (1)...(19): siRNA sense strand
gcaacaccaguuccaauua

SEQ ID NO: 643791 - RNA, 19 nt, Homo sapiens
  misc_RNA (1)...(19): siRNA sense strand
ggacuucauugccacacua

SEQ ID NO: 643792 - RNA, 19 nt, Homo sapiens
  misc_RNA (1)...(19): siRNA sense strand
gaaauugcacaaacacaaa

SEQ ID NO: 643793 - RNA, 19 nt, Homo sapiens
  misc_RNA (1)...(19): siRNA sense strand
gcagaggccuuugaugaug

SEQ ID NO: 643794 - RNA, 19 nt, Homo sapiens
  misc_RNA (1)...(19): siRNA sense strand
gaaaggaaaccaugcaaca

SEQ ID NO: 643795 - RNA, 19 nt, Homo sapiens
  misc_RNA (1)...(19): siRNA sense strand
gaccaaggauaaagcacua

SEQ ID NO: 643796 - RNA, 19 nt, Homo sapiens
  misc_RNA (1)...(19): siRNA sense strand
ccacugccauuaagacuga

SEQ ID NO: 643797 - RNA, 19 nt, Homo sapiens
  misc_RNA (1)...(19): siRNA sense strand
gaaacuagccagauugaag

SEQ ID NO: 643798 - RNA, 19 nt, Homo sapiens
  misc_RNA (1)...(19): siRNA sense strand
gcacucagacuguugcaaa

SEQ ID NO: 643799 - RNA, 19 nt, Homo sapiens
  misc_RNA (1)...(19): siRNA sense strand
gaaauaaugaugggacuga

SEQ ID NO: 643800 - RNA, 19 nt, Homo sapiens
  misc_RNA (1)...(19): siRNA sense strand
ugccaggccuuccaucuua

SEQ ID NO: 643801 - RNA, 19 nt, Homo sapiens
  misc_RNA (1)...(19): siRNA sense strand
gaaaauggccuaccaggaa

SEQ ID NO: 643802 - RNA, 19 nt, Homo sapiens
  misc_RNA (1)...(19): siRNA sense strand
uggaggagaugucaagauu

SEQ ID NO: 643803 - RNA, 19 nt, Homo sapiens
  misc_RNA (1)...(19): siRNA sense strand
ccacaacuccuuucauaga

SEQ ID NO: 643804 - RNA, 19 nt, Homo sapiens
  misc_RNA (1)...(19): siRNA sense strand
ucagagaccucaggaauag

SEQ ID NO: 643805 - RNA, 19 nt, Homo sapiens
  misc_RNA (1)...(19): siRNA sense strand
uaagugaggauucccauuu

SEQ ID NO: 643806 - RNA, 19 nt, Homo sapiens
  misc_RNA (1)...(19): siRNA sense strand
ggaaauugcacaaacacaa

SEQ ID NO: 643807 - RNA, 19 nt, Homo sapiens
  misc_RNA (1)...(19): siRNA sense strand
ccaaggaugugacacuguu

SEQ ID NO: 643808 - RNA, 19 nt, Homo sapiens
  misc_RNA (1)...(19): siRNA sense strand
caaugugacuccagccaaa

SEQ ID NO: 643809 - RNA, 19 nt, Homo sapiens
  misc_RNA (1)...(19): siRNA sense strand
gaggugcugugaagacuga

SEQ ID NO: 643810 - RNA, 19 nt, Homo sapiens
  misc_RNA (1)...(19): siRNA sense strand
uagaaucucugcaggaugu

SEQ ID NO: 643811 - RNA, 19 nt, Homo sapiens
  misc_RNA (1)...(19): siRNA sense strand
gcagaugcauuaacagaac

SEQ ID NO: 643812 - RNA, 19 nt, Homo sapiens
  misc_RNA (1)...(19): siRNA sense strand
gaaaccaacgugaucuuga

SEQ ID NO: 643813 - RNA, 19 nt, Homo sapiens
  misc_RNA (1)...(19): siRNA sense strand
ugaauuccuugaagagaaa

SEQ ID NO: 643814 - RNA, 19 nt, Homo sapiens
  misc_RNA (1)...(19): siRNA sense strand
cuccacaacuccuuucaua

SEQ ID NO: 643815 - RNA, 19 nt, Homo sapiens
  misc_RNA (1)...(19): siRNA sense strand
caaaagacgugaagccaaa

SEQ ID NO: 643816 - RNA, 19 nt, Homo sapiens
  misc_RNA (1)...(19): siRNA sense strand
ccacuucucucccuaagca

SEQ ID NO: 643817 - RNA, 19 nt, Homo sapiens
  misc_RNA (1)...(19): siRNA sense strand
uaccaggaauacccaaaua

SEQ ID NO: 643818 - RNA, 19 nt, Homo sapiens
  misc_RNA (1)...(19): siRNA sense strand
ggcauuggcuaaagauaug

SEQ ID NO: 643819 - RNA, 19 nt, Homo sapiens
  misc_RNA (1)...(19): siRNA sense strand
gcagaagucaagaagauga

SEQ ID NO: 643820 - RNA, 19 nt, Homo sapiens
  misc_RNA (1)...(19): siRNA sense strand
gggagaaacuguuggaaaa

SEQ ID NO: 643821 - RNA, 19 nt, Homo sapiens
  misc_RNA (1)...(19): siRNA sense strand
caagagcacucagacuguu

SEQ ID NO: 643822 - RNA, 19 nt, Homo sapiens
  misc_RNA (1)...(19): siRNA sense strand
caaugguggucauggagua

SEQ ID NO: 643823 - RNA, 19 nt, Homo sapiens
  misc_RNA (1)...(19): siRNA sense strand
ccuuuaagauguaccauga

SEQ ID NO: 643824 - RNA, 19 nt, Homo sapiens
  misc_RNA (1)...(19): siRNA sense strand
agaaccaucuccagacauu

SEQ ID NO: 643825 - RNA, 19 nt, Homo sapiens
  misc_RNA (1)...(19): siRNA sense strand
aagugaggauucccauuua

SEQ ID NO: 643826 - RNA, 19 nt, Homo sapiens
  misc_RNA (1)...(19): siRNA sense strand
ggacauggcacuagcuaca

SEQ ID NO: 643827 - RNA, 19 nt, Homo sapiens
  misc_RNA (1)...(19): siRNA sense strand
gauugaaagucagaaguug

SEQ ID NO: 643828 - RNA, 19 nt, Homo sapiens
  misc_RNA (1)...(19): siRNA sense strand
aagaaaccgugcucagaaa

SEQ ID NO: 643829 - RNA, 19 nt, Homo sapiens
  misc_RNA (1)...(19): siRNA sense strand
gauaaagcgggacuucauu

SEQ ID NO: 643830 - RNA, 19 nt, Homo sapiens
  misc_RNA (1)...(19): siRNA sense strand
cagcugauacuucaauauu

SEQ ID NO: 643831 - RNA, 19 nt, Homo sapiens
  misc_RNA (1)...(19): siRNA sense strand
gacagcugauacuucaaua

SEQ ID NO: 643832 - RNA, 19 nt, Homo sapiens
  misc_RNA (1)...(19): siRNA sense strand
augaugaccuggcagauuu

SEQ ID NO: 643833 - RNA, 19 nt, Homo sapiens
  misc_RNA (1)...(19): siRNA sense strand
uauccagacugaucccuuu

SEQ ID NO: 643834 - RNA, 19 nt, Homo sapiens
  misc_RNA (1)...(19): siRNA sense strand
gaaguaguucucaucaaga

SEQ ID NO: 643835 - RNA, 19 nt, Homo sapiens
  misc_RNA (1)...(19): siRNA sense strand
gagggcaucuccuauaaaa

SEQ ID NO: 643836 - RNA, 19 nt, Homo sapiens
  misc_RNA (1)...(19): siRNA sense strand
gagggcaucuccuauaaaa

SEQ ID NO: 643837 - RNA, 19 nt, Homo sapiens
  misc_RNA (1)...(19): siRNA sense strand
agauagaaauggcaucaga

SEQ ID NO: 643838 - RNA, 19 nt, Homo sapiens
  misc_RNA (1)...(19): siRNA sense strand
ggucuaaggcuaacaucaa

SEQ ID NO: 643839 - RNA, 19 nt, Homo sapiens
  misc_RNA (1)...(19): siRNA sense strand
aaaccgugcucagaaacua

SEQ ID NO: 643840 - RNA, 19 nt, Homo sapiens
  misc_RNA (1)...(19): siRNA sense strand
gaagcccacugccauuaag

SEQ ID NO: 643841 - RNA, 19 nt, Homo sapiens
  misc_RNA (1)...(19): siRNA sense strand
aaacacagcccacuucucu

SEQ ID NO: 643842 - RNA, 19 nt, Homo sapiens
  misc_RNA (1)...(19): siRNA sense strand
uuaaagacauggaaauugc

SEQ ID NO: 643843 - RNA, 19 nt, Homo sapiens
  misc_RNA (1)...(19): siRNA sense strand
agacugaucccuuuaagau

SEQ ID NO: 643844 - RNA, 19 nt, Homo sapiens
  misc_RNA (1)...(19): siRNA sense strand
gauacuccaucuucuaaac

SEQ ID NO: 643845 - RNA, 19 nt, Homo sapiens
  misc_RNA (1)...(19): siRNA sense strand
uggaaucacccaccaaauu

SEQ ID NO: 643846 - RNA, 19 nt, Homo sapiens
  misc_RNA (1)...(19): siRNA sense strand
caacacuccuagccaaugg

SEQ ID NO: 643847 - RNA, 19 nt, Homo sapiens
  misc_RNA (1)...(19): siRNA sense strand
ugggaucccucgauaaugu

SEQ ID NO: 643848 - RNA, 19 nt, Homo sapiens
  misc_RNA (1)...(19): siRNA sense strand
gaaaguggacaucucuaag

SEQ ID NO: 643849 - RNA, 19 nt, Homo sapiens
  misc_RNA (1)...(19): siRNA sense strand
caacuccuuucauagacaa

SEQ ID NO: 643850 - RNA, 19 nt, Homo sapiens
  misc_RNA (1)...(19): siRNA sense strand
gugacacuguugaaagaaa

SEQ ID NO: 643851 - RNA, 19 nt, Homo sapiens
  misc_RNA (1)...(19): siRNA sense strand
ggacugaagacuacugaca

SEQ ID NO: 643852 - RNA, 19 nt, Homo sapiens
  misc_RNA (1)...(19): siRNA sense strand
gaugaugaccuggcagauu

SEQ ID NO: 643853 - RNA, 19 nt, Homo sapiens
  misc_RNA (1)...(19): siRNA sense strand
ggaguagaagggagcgaua

SEQ ID NO: 643854 - RNA, 19 nt, Homo sapiens
  misc_RNA (1)...(19): siRNA sense strand
ucucuaaggucuccuccaa

SEQ ID NO: 643855 - RNA, 19 nt, Homo sapiens
  misc_RNA (1)...(19): siRNA sense strand
cuccugaucugaagaaugu

SEQ ID NO: 643856 - RNA, 19 nt, Homo sapiens
  misc_RNA (1)...(19): siRNA sense strand
cugcagaagucaagaagau

SEQ ID NO: 643857 - RNA, 19 nt, Homo sapiens
  misc_RNA (1)...(19): siRNA sense strand
gaagggagcgauacuacag

SEQ ID NO: 643858 - RNA, 19 nt, Homo sapiens
  misc_RNA (1)...(19): siRNA sense strand
ggaaaccaacgugaucuug

SEQ ID NO: 643859 - RNA, 19 nt, Homo sapiens
  misc_RNA (1)...(19): siRNA sense strand
aagguuggcuccacggaaa

SEQ ID NO: 643860 - RNA, 19 nt, Homo sapiens
  misc_RNA (1)...(19): siRNA sense strand
caagaagcccacugccauu

SEQ ID NO: 643861 - RNA, 19 nt, Homo sapiens
  misc_RNA (1)...(19): siRNA sense strand
ccacgcuccugcccaagaa

SEQ ID NO: 643862 - RNA, 19 nt, Homo sapiens
  misc_RNA (1)...(19): siRNA sense strand
cauggaaauugcacaaaca

SEQ ID NO: 643863 - RNA, 19 nt, Homo sapiens
  misc_RNA (1)...(19): siRNA sense strand
aaugaucccuugaaagaca

SEQ ID NO: 643864 - RNA, 19 nt, Homo sapiens
  misc_RNA (1)...(19): siRNA sense strand
aaggugggaucccucgaua

SEQ ID NO: 643865 - RNA, 19 nt, Homo sapiens
  misc_RNA (1)...(19): siRNA sense strand
gggaaaaccugcagaaguc

SEQ ID NO: 643866 - RNA, 19 nt, Homo sapiens
  misc_RNA (1)...(19): siRNA sense strand
ccauuaagacugagggaaa

SEQ ID NO: 643867 - RNA, 19 nt, Homo sapiens
  misc_RNA (1)...(19): siRNA sense strand
gcaacagucaaccuucuga

SEQ ID NO: 643868 - RNA, 19 nt, Homo sapiens
  misc_RNA (1)...(19): siRNA sense strand
aaagaaguggcccugguua

SEQ ID NO: 643869 - RNA, 19 nt, Homo sapiens
  misc_RNA (1)...(19): siRNA sense strand
gauagaaauggcaucagaa

SEQ ID NO: 643870 - RNA, 19 nt, Homo sapiens
  misc_RNA (1)...(19): siRNA sense strand
cugaauuccuugaagagaa

SEQ ID NO: 643871 - RNA, 19 nt, Homo sapiens
  misc_RNA (1)...(19): siRNA sense strand
gaacaagaaaguggacauc

SEQ ID NO: 643872 - RNA, 19 nt, Homo sapiens
  misc_RNA (1)...(19): siRNA sense strand
aagagcaccuccaccaguu

SEQ ID NO: 643873 - RNA, 19 nt, Homo sapiens
  misc_RNA (1)...(19): siRNA sense strand
agacauugagggagagaua

SEQ ID NO: 643874 - RNA, 19 nt, Homo sapiens
  misc_RNA (1)...(19): siRNA sense strand
aaacuagccagauugaaga

SEQ ID NO: 643875 - RNA, 19 nt, Homo sapiens
  misc_RNA (1)...(19): siRNA sense strand
ucuaaggucuccuccaagu

SEQ ID NO: 643876 - RNA, 19 nt, Homo sapiens
  misc_RNA (1)...(19): siRNA sense strand
ggacaugucuccacuauca

SEQ ID NO: 643877 - RNA, 19 nt, Homo sapiens
  misc_RNA (1)...(19): siRNA sense strand
gcacaagcauuggaaauaa

SEQ ID NO: 643878 - RNA, 19 nt, Homo sapiens
  misc_RNA (1)...(19): siRNA sense strand
ggaaucacccaccaaauua

SEQ ID NO: 643879 - RNA, 19 nt, Homo sapiens
  misc_RNA (1)...(19): siRNA sense strand
caacaccaguuccaauuaa

SEQ ID NO: 643880 - RNA, 19 nt, Homo sapiens
  misc_RNA (1)...(19): siRNA sense strand
cgaggaggauucuguguua

SEQ ID NO: 643881 - RNA, 19 nt, Homo sapiens
  misc_RNA (1)...(19): siRNA sense strand
gcaccuacuuucaugauuu

SEQ ID NO: 643882 - RNA, 19 nt, Homo sapiens
  misc_RNA (1)...(19): siRNA sense strand
ucaagaagaugacugcaaa

SEQ ID NO: 643883 - RNA, 19 nt, Homo sapiens
  misc_RNA (1)...(19): siRNA sense strand
gaagaaaccgugcucagaa

SEQ ID NO: 643884 - RNA, 19 nt, Homo sapiens
  misc_RNA (1)...(19): siRNA sense strand
caacugaauuccuugaaga

SEQ ID NO: 643885 - RNA, 19 nt, Homo sapiens
  misc_RNA (1)...(19): siRNA sense strand
gcaaagacuucaacaucga

SEQ ID NO: 643886 - RNA, 19 nt, Homo sapiens
  misc_RNA (1)...(19): siRNA sense strand
gcugauacuucaauauuug

SEQ ID NO: 643887 - RNA, 19 nt, Homo sapiens
  misc_RNA (1)...(19): siRNA sense strand
gaaauggcaucagaagaga

SEQ ID NO: 643888 - RNA, 19 nt, Homo sapiens
  misc_RNA (1)...(19): siRNA sense strand
gccagaagauaccaacuuu

SEQ ID NO: 643889 - RNA, 19 nt, Homo sapiens
  misc_RNA (1)...(19): siRNA sense strand
gaaauauccucugcugaga

SEQ ID NO: 643890 - RNA, 19 nt, Homo sapiens
  misc_RNA (1)...(19): siRNA sense strand
gcaacaccaguuccaauua

SEQ ID NO: 643891 - RNA, 19 nt, Homo sapiens
  misc_RNA (1)...(19): siRNA sense strand
ggacuucauugccacacua

SEQ ID NO: 643892 - RNA, 19 nt, Homo sapiens
  misc_RNA (1)...(19): siRNA sense strand
gaaauugcacaaacacaaa

SEQ ID NO: 643893 - RNA, 19 nt, Homo sapiens
  misc_RNA (1)...(19): siRNA sense strand
gcagaggccuuugaugaug

SEQ ID NO: 643894 - RNA, 19 nt, Homo sapiens
  misc_RNA (1)...(19): siRNA sense strand
gaaaggaaaccaugcaaca

SEQ ID NO: 643895 - RNA, 19 nt, Homo sapiens
  misc_RNA (1)...(19): siRNA sense strand
gaccaaggauaaagcacua

SEQ ID NO: 643896 - RNA, 19 nt, Homo sapiens
  misc_RNA (1)...(19): siRNA sense strand
ccacugccauuaagacuga

SEQ ID NO: 643897 - RNA, 19 nt, Homo sapiens
  misc_RNA (1)...(19): siRNA sense strand
gaaacuagccagauugaag

SEQ ID NO: 643898 - RNA, 19 nt, Homo sapiens
  misc_RNA (1)...(19): siRNA sense strand
gcacucagacuguugcaaa

SEQ ID NO: 643899 - RNA, 19 nt, Homo sapiens
  misc_RNA (1)...(19): siRNA sense strand
gaaauaaugaugggacuga

SEQ ID NO: 643900 - RNA, 19 nt, Homo sapiens
  misc_RNA (1)...(19): siRNA sense strand
ugccaggccuuccaucuua

SEQ ID NO: 643901 - RNA, 19 nt, Homo sapiens
  misc_RNA (1)...(19): siRNA sense strand
gaaaauggccuaccaggaa

SEQ ID NO: 643902 - RNA, 19 nt, Homo sapiens
  misc_RNA (1)...(19): siRNA sense strand
uggaggagaugucaagauu

SEQ ID NO: 643903 - RNA, 19 nt, Homo sapiens
  misc_RNA (1)...(19): siRNA sense strand
ccacaacuccuuucauaga

SEQ ID NO: 643904 - RNA, 19 nt, Homo sapiens
  misc_RNA (1)...(19): siRNA sense strand
ucagagaccucaggaauag

SEQ ID NO: 643905 - RNA, 19 nt, Homo sapiens
  misc_RNA (1)...(19): siRNA sense strand
uaagugaggauucccauuu

SEQ ID NO: 643906 - RNA, 19 nt, Homo sapiens
  misc_RNA (1)...(19): siRNA sense strand
ggaaauugcacaaacacaa

SEQ ID NO: 643907 - RNA, 19 nt, Homo sapiens
  misc_RNA (1)...(19): siRNA sense strand
ccaaggaugugacacuguu

SEQ ID NO: 643908 - RNA, 19 nt, Homo sapiens
  misc_RNA (1)...(19): siRNA sense strand
caaugugacuccagccaaa

SEQ ID NO: 643909 - RNA, 19 nt, Homo sapiens
  misc_RNA (1)...(19): siRNA sense strand
gaggugcugugaagacuga

SEQ ID NO: 643910 - RNA, 19 nt, Homo sapiens
  misc_RNA (1)...(19): siRNA sense strand
uagaaucucugcaggaugu

SEQ ID NO: 643911 - RNA, 19 nt, Homo sapiens
  misc_RNA (1)...(19): siRNA sense strand
gcagaugcauuaacagaac

SEQ ID NO: 643912 - RNA, 19 nt, Homo sapiens
  misc_RNA (1)...(19): siRNA sense strand
gaaaccaacgugaucuuga

SEQ ID NO: 643913 - RNA, 19 nt, Homo sapiens
  misc_RNA (1)...(19): siRNA sense strand
ugaauuccuugaagagaaa

SEQ ID NO: 643914 - RNA, 19 nt, Homo sapiens
  misc_RNA (1)...(19): siRNA sense strand
cuccacaacuccuuucaua

SEQ ID NO: 643915 - RNA, 19 nt, Homo sapiens
  misc_RNA (1)...(19): siRNA sense strand
caaaagacgugaagccaaa

SEQ ID NO: 643916 - RNA, 19 nt, Homo sapiens
  misc_RNA (1)...(19): siRNA sense strand
ccacuucucucccuaagca

SEQ ID NO: 643917 - RNA, 19 nt, Homo sapiens
  misc_RNA (1)...(19): siRNA sense strand
uaccaggaauacccaaaua

SEQ ID NO: 643918 - RNA, 19 nt, Homo sapiens
  misc_RNA (1)...(19): siRNA sense strand
ggcauuggcuaaagauaug

SEQ ID NO: 643919 - RNA, 19 nt, Homo sapiens
  misc_RNA (1)...(19): siRNA sense strand
gcagaagucaagaagauga

SEQ ID NO: 643920 - RNA, 19 nt, Homo sapiens
  misc_RNA (1)...(19): siRNA sense strand
gggagaaacuguuggaaaa

SEQ ID NO: 643921 - RNA, 19 nt, Homo sapiens
  misc_RNA (1)...(19): siRNA sense strand
caagagcacucagacuguu

SEQ ID NO: 643922 - RNA, 19 nt, Homo sapiens
  misc_RNA (1)...(19): siRNA sense strand
caaugguggucauggagua

SEQ ID NO: 643923 - RNA, 19 nt, Homo sapiens
  misc_RNA (1)...(19): siRNA sense strand
ccuuuaagauguaccauga

SEQ ID NO: 643924 - RNA, 19 nt, Homo sapiens
  misc_RNA (1)...(19): siRNA sense strand
agaaccaucuccagacauu

SEQ ID NO: 643925 - RNA, 19 nt, Homo sapiens
  misc_RNA (1)...(19): siRNA sense strand
aagugaggauucccauuua

SEQ ID NO: 643926 - RNA, 19 nt, Homo sapiens
  misc_RNA (1)...(19): siRNA sense strand
ggacauggcacuagcuaca

SEQ ID NO: 643927 - RNA, 19 nt, Homo sapiens
  misc_RNA (1)...(19): siRNA sense strand
gauugaaagucagaaguug

SEQ ID NO: 643928 - RNA, 19 nt, Homo sapiens
  misc_RNA (1)...(19): siRNA sense strand
aagaaaccgugcucagaaa

SEQ ID NO: 643929 - RNA, 19 nt, Homo sapiens
  misc_RNA (1)...(19): siRNA sense strand
gauaaagcgggacuucauu

SEQ ID NO: 643930 - RNA, 19 nt, Homo sapiens
  misc_RNA (1)...(19): siRNA sense strand
cagcugauacuucaauauu

SEQ ID NO: 643931 - RNA, 19 nt, Homo sapiens
  misc_RNA (1)...(19): siRNA sense strand
gacagcugauacuucaaua

SEQ ID NO: 643932 - RNA, 19 nt, Homo sapiens
  misc_RNA (1)...(19): siRNA sense strand
augaugaccuggcagauuu

SEQ ID NO: 643933 - RNA, 19 nt, Homo sapiens
  misc_RNA (1)...(19): siRNA sense strand
uauccagacugaucccuuu

SEQ ID NO: 643934 - RNA, 19 nt, Homo sapiens
  misc_RNA (1)...(19): siRNA sense strand
gaaguaguucucaucaaga

SEQ ID NO: 643935 - RNA, 19 nt, Homo sapiens
  misc_RNA (1)...(19): siRNA sense strand
gagggcaucuccuauaaaa

SEQ ID NO: 643936 - RNA, 19 nt, Homo sapiens
  misc_RNA (1)...(19): siRNA sense strand
gagggcaucuccuauaaaa

SEQ ID NO: 643937 - RNA, 19 nt, Homo sapiens
  misc_RNA (1)...(19): siRNA sense strand
agauagaaauggcaucaga

SEQ ID NO: 643938 - RNA, 19 nt, Homo sapiens
  misc_RNA (1)...(19): siRNA sense strand
ggucuaaggcuaacaucaa

SEQ ID NO: 643939 - RNA, 19 nt, Homo sapiens
  misc_RNA (1)...(19): siRNA sense strand
aaaccgugcucagaaacua

SEQ ID NO: 643940 - RNA, 19 nt, Homo sapiens
  misc_RNA (1)...(19): siRNA sense strand
gaagcccacugccauuaag

SEQ ID NO: 643941 - RNA, 19 nt, Homo sapiens
  misc_RNA (1)...(19): siRNA sense strand
aaacacagcccacuucucu

SEQ ID NO: 643942 - RNA, 19 nt, Homo sapiens
  misc_RNA (1)...(19): siRNA sense strand
uuaaagacauggaaauugc

SEQ ID NO: 643943 - RNA, 19 nt, Homo sapiens
  misc_RNA (1)...(19): siRNA sense strand
agacugaucccuuuaagau

SEQ ID NO: 643944 - RNA, 19 nt, Homo sapiens
  misc_RNA (1)...(19): siRNA sense strand
gauacuccaucuucuaaac

SEQ ID NO: 643945 - RNA, 19 nt, Homo sapiens
  misc_RNA (1)...(19): siRNA sense strand
uggaaucacccaccaaauu

SEQ ID NO: 643946 - RNA, 19 nt, Homo sapiens
  misc_RNA (1)...(19): siRNA sense strand
caacacuccuagccaaugg

SEQ ID NO: 643947 - RNA, 19 nt, Homo sapiens
  misc_RNA (1)...(19): siRNA sense strand
ugggaucccucgauaaugu

SEQ ID NO: 643948 - RNA, 19 nt, Homo sapiens
  misc_RNA (1)...(19): siRNA sense strand
gaaaguggacaucucuaag

SEQ ID NO: 643949 - RNA, 19 nt, Homo sapiens
  misc_RNA (1)...(19): siRNA sense strand
caacuccuuucauagacaa

SEQ ID NO: 643950 - RNA, 19 nt, Homo sapiens
  misc_RNA (1)...(19): siRNA sense strand
gugacacuguugaaagaaa

SEQ ID NO: 643951 - RNA, 19 nt, Homo sapiens
  misc_RNA (1)...(19): siRNA sense strand
ggacugaagacuacugaca

SEQ ID NO: 643952 - RNA, 19 nt, Homo sapiens
  misc_RNA (1)...(19): siRNA sense strand
gaugaugaccuggcagauu

SEQ ID NO: 643953 - RNA, 19 nt, Homo sapiens
  misc_RNA (1)...(19): siRNA sense strand
ggaguagaagggagcgaua

SEQ ID NO: 643954 - RNA, 19 nt, Homo sapiens
  misc_RNA (1)...(19): siRNA sense strand
ucucuaaggucuccuccaa

SEQ ID NO: 643955 - RNA, 19 nt, Homo sapiens
  misc_RNA (1)...(19): siRNA sense strand
cuccugaucugaagaaugu

SEQ ID NO: 643956 - RNA, 19 nt, Homo sapiens
  misc_RNA (1)...(19): siRNA sense strand
cugcagaagucaagaagau

SEQ ID NO: 643957 - RNA, 19 nt, Homo sapiens
  misc_RNA (1)...(19): siRNA sense strand
gaagggagcgauacuacag

SEQ ID NO: 643958 - RNA, 19 nt, Homo sapiens
  misc_RNA (1)...(19): siRNA sense strand
ggaaaccaacgugaucuug

SEQ ID NO: 643959 - RNA, 19 nt, Homo sapiens
  misc_RNA (1)...(19): siRNA sense strand
aagguuggcuccacggaaa

SEQ ID NO: 643960 - RNA, 19 nt, Homo sapiens
  misc_RNA (1)...(19): siRNA sense strand
caagaagcccacugccauu

SEQ ID NO: 643961 - RNA, 19 nt, Homo sapiens
  misc_RNA (1)...(19): siRNA sense strand
ccacgcuccugcccaagaa

SEQ ID NO: 643962 - RNA, 19 nt, Homo sapiens
  misc_RNA (1)...(19): siRNA sense strand
cauggaaauugcacaaaca

SEQ ID NO: 643963 - RNA, 19 nt, Homo sapiens
  misc_RNA (1)...(19): siRNA sense strand
aaugaucccuugaaagaca

SEQ ID NO: 643964 - RNA, 19 nt, Homo sapiens
  misc_RNA (1)...(19): siRNA sense strand
aaggugggaucccucgaua

SEQ ID NO: 643965 - RNA, 19 nt, Homo sapiens
  misc_RNA (1)...(19): siRNA sense strand
gggaaaaccugcagaaguc

SEQ ID NO: 643966 - RNA, 19 nt, Homo sapiens
  misc_RNA (1)...(19): siRNA sense strand
ccauuaagacugagggaaa

SEQ ID NO: 643967 - RNA, 19 nt, Homo sapiens
  misc_RNA (1)...(19): siRNA sense strand
gcaacagucaaccuucuga

SEQ ID NO: 643968 - RNA, 19 nt, Homo sapiens
  misc_RNA (1)...(19): siRNA sense strand
aaagaaguggcccugguua

SEQ ID NO: 643969 - RNA, 19 nt, Homo sapiens
  misc_RNA (1)...(19): siRNA sense strand
gauagaaauggcaucagaa

SEQ ID NO: 643970 - RNA, 19 nt, Homo sapiens
  misc_RNA (1)...(19): siRNA sense strand
cugaauuccuugaagagaa

SEQ ID NO: 643971 - RNA, 19 nt, Homo sapiens
  misc_RNA (1)...(19): siRNA sense strand
gaacaagaaaguggacauc

SEQ ID NO: 643972 - RNA, 19 nt, Homo sapiens
  misc_RNA (1)...(19): siRNA sense strand
aagagcaccuccaccaguu

SEQ ID NO: 643973 - RNA, 19 nt, Homo sapiens
  misc_RNA (1)...(19): siRNA sense strand
agacauugagggagagaua

SEQ ID NO: 643974 - RNA, 19 nt, Homo sapiens
  misc_RNA (1)...(19): siRNA sense strand
aaacuagccagauugaaga

SEQ ID NO: 643975 - RNA, 19 nt, Homo sapiens
  misc_RNA (1)...(19): siRNA sense strand
ucuaaggucuccuccaagu

SEQ ID NO: 643976 - RNA, 19 nt, Homo sapiens
  misc_RNA (1)...(19): siRNA sense strand
ggaagaaacugaaggaagu

SEQ ID NO: 643977 - RNA, 19 nt, Homo sapiens
  misc_RNA (1)...(19): siRNA sense strand
gaggagagaucauugcaaa

SEQ ID NO: 643978 - RNA, 19 nt, Homo sapiens
  misc_RNA (1)...(19): siRNA sense strand
ggaggaagcuucgcagguu

SEQ ID NO: 643979 - RNA, 19 nt, Homo sapiens
  misc_RNA (1)...(19): siRNA sense strand
gagagagccugccggauga

SEQ ID NO: 643980 - RNA, 19 nt, Homo sapiens
  misc_RNA (1)...(19): siRNA sense strand
gaaacugaaggaaguauuu

SEQ ID NO: 643981 - RNA, 19 nt, Homo sapiens
  misc_RNA (1)...(19): siRNA sense strand
caaagaagauccugauggu

SEQ ID NO: 643982 - RNA, 19 nt, Homo sapiens
  misc_RNA (1)...(19): siRNA sense strand
gaauaggcacuguuacuuu

SEQ ID NO: 643983 - RNA, 19 nt, Homo sapiens
  misc_RNA (1)...(19): siRNA sense strand
ggaagaugcuaaaggacaa

SEQ ID NO: 643984 - RNA, 19 nt, Homo sapiens
  misc_RNA (1)...(19): siRNA sense strand
gaugugcuguuguugaauu

SEQ ID NO: 643985 - RNA, 19 nt, Homo sapiens
  misc_RNA (1)...(19): siRNA sense strand
gaagagaggagagaucauu

SEQ ID NO: 643986 - RNA, 19 nt, Homo sapiens
  misc_RNA (1)...(19): siRNA sense strand
aaacaugggucgauuugga

SEQ ID NO: 643987 - RNA, 19 nt, Homo sapiens
  misc_RNA (1)...(19): siRNA sense strand
gaaauggcagucacuuaaa

SEQ ID NO: 643988 - RNA, 19 nt, Homo sapiens
  misc_RNA (1)...(19): siRNA sense strand
ggcauaggauuuggaauaa

SEQ ID NO: 643989 - RNA, 19 nt, Homo sapiens
  misc_RNA (1)...(19): siRNA sense strand
uaacauacguggagcucuu

SEQ ID NO: 643990 - RNA, 19 nt, Homo sapiens
  misc_RNA (1)...(19): siRNA sense strand
gcaaucgcuuugagccaua

SEQ ID NO: 643991 - RNA, 19 nt, Homo sapiens
  misc_RNA (1)...(19): siRNA sense strand
ugaaauggcagucacuuaa

SEQ ID NO: 643992 - RNA, 19 nt, Homo sapiens
  misc_RNA (1)...(19): siRNA sense strand
gaauaaaggcaucggaaug

SEQ ID NO: 643993 - RNA, 19 nt, Homo sapiens
  misc_RNA (1)...(19): siRNA sense strand
gggaugugcuguuguugaa

SEQ ID NO: 643994 - RNA, 19 nt, Homo sapiens
  misc_RNA (1)...(19): siRNA sense strand
gaauugauagaaacgcuua

SEQ ID NO: 643995 - RNA, 19 nt, Homo sapiens
  misc_RNA (1)...(19): siRNA sense strand
gagauugacguucgaauug

SEQ ID NO: 643996 - RNA, 19 nt, Homo sapiens
  misc_RNA (1)...(19): siRNA sense strand
cauggaagaugcuaaagga

SEQ ID NO: 643997 - RNA, 19 nt, Homo sapiens
  misc_RNA (1)...(19): siRNA sense strand
ccaaucaccugaauaaagg

SEQ ID NO: 643998 - RNA, 19 nt, Homo sapiens
  misc_RNA (1)...(19): siRNA sense strand
ugagaaaucugccauucga

SEQ ID NO: 643999 - RNA, 19 nt, Homo sapiens
  misc_RNA (1)...(19): siRNA sense strand
ccacauggccuccagcauu

SEQ ID NO: 644000 - RNA, 19 nt, Homo sapiens
  misc_RNA (1)...(19): siRNA sense strand
gaacaugggcaggauaaau

SEQ ID NO: 644001 - RNA, 19 nt, Homo sapiens
  misc_RNA (1)...(19): siRNA sense strand
caagcuauaucuauguuca

SEQ ID NO: 644002 - RNA, 19 nt, Homo sapiens
  misc_RNA (1)...(19): siRNA sense strand
gaaggaaguauuuaguaug

SEQ ID NO: 644003 - RNA, 19 nt, Homo sapiens
  misc_RNA (1)...(19): siRNA sense strand
gaugaugaauggcaugaag

SEQ ID NO: 644004 - RNA, 19 nt, Homo sapiens
  misc_RNA (1)...(19): siRNA sense strand
gcauaggauuuggaauaaa

SEQ ID NO: 644005 - RNA, 19 nt, Homo sapiens
  misc_RNA (1)...(19): siRNA sense strand
gaagaaacugaaggaagua

SEQ ID NO: 644006 - RNA, 19 nt, Homo sapiens
  misc_RNA (1)...(19): siRNA sense strand
ggaauaggcacuguuacuu

SEQ ID NO: 644007 - RNA, 19 nt, Homo sapiens
  misc_RNA (1)...(19): siRNA sense strand
agaacgaccugcucagaau

SEQ ID NO: 644008 - RNA, 19 nt, Homo sapiens
  misc_RNA (1)...(19): siRNA sense strand
gagaacgaccugcucagaa

SEQ ID NO: 644009 - RNA, 19 nt, Homo sapiens
  misc_RNA (1)...(19): siRNA sense strand
ggccagcugcuauuugaua

SEQ ID NO: 644010 - RNA, 19 nt, Homo sapiens
  misc_RNA (1)...(19): siRNA sense strand
aaaguuggcuggaagaaac

SEQ ID NO: 644011 - RNA, 19 nt, Homo sapiens
  misc_RNA (1)...(19): siRNA sense strand
auacagagccuucauuaca

SEQ ID NO: 644012 - RNA, 19 nt, Homo sapiens
  misc_RNA (1)...(19): siRNA sense strand
cacauggccuccagcauug

SEQ ID NO: 644013 - RNA, 19 nt, Homo sapiens
  misc_RNA (1)...(19): siRNA sense strand
gaaggcauaggauuuggaa

SEQ ID NO: 644014 - RNA, 19 nt, Homo sapiens
  misc_RNA (1)...(19): siRNA sense strand
acagagccuucauuacaaa

SEQ ID NO: 644015 - RNA, 19 nt, Homo sapiens
  misc_RNA (1)...(19): siRNA sense strand
gaaggccugccagauauuu

SEQ ID NO: 644016 - RNA, 19 nt, Homo sapiens
  misc_RNA (1)...(19): siRNA sense strand
gauggagcguggcaacuuc

SEQ ID NO: 644017 - RNA, 19 nt, Homo sapiens
  misc_RNA (1)...(19): siRNA sense strand
aggcauaggauuuggaaua

SEQ ID NO: 644018 - RNA, 19 nt, Homo sapiens
  misc_RNA (1)...(19): siRNA sense strand
gaauggaaggcauaggauu

SEQ ID NO: 644019 - RNA, 19 nt, Homo sapiens
  misc_RNA (1)...(19): siRNA sense strand
uacagagccuucauuacaa

SEQ ID NO: 644020 - RNA, 19 nt, Homo sapiens
  misc_RNA (1)...(19): siRNA sense strand
ucacuuaaagaccugguua

SEQ ID NO: 644021 - RNA, 19 nt, Homo sapiens
  misc_RNA (1)...(19): siRNA sense strand
agauacagagccuucauua

SEQ ID NO: 644022 - RNA, 19 nt, Homo sapiens
  misc_RNA (1)...(19): siRNA sense strand
gauggaagagagcaugaaa

SEQ ID NO: 644023 - RNA, 19 nt, Homo sapiens
  misc_RNA (1)...(19): siRNA sense strand
ggaagcacaguauuuguag

SEQ ID NO: 644024 - RNA, 19 nt, Homo sapiens
  misc_RNA (1)...(19): siRNA sense strand
ucacauggaagaugcuaaa

SEQ ID NO: 644025 - RNA, 19 nt, Homo sapiens
  misc_RNA (1)...(19): siRNA sense strand
aggaaggccugccagauau

SEQ ID NO: 644026 - RNA, 19 nt, Homo sapiens
  misc_RNA (1)...(19): siRNA sense strand
gagagaucauugcaaagca

SEQ ID NO: 644027 - RNA, 19 nt, Homo sapiens
  misc_RNA (1)...(19): siRNA sense strand
gaugagagggccuuaccaa

SEQ ID NO: 644028 - RNA, 19 nt, Homo sapiens
  misc_RNA (1)...(19): siRNA sense strand
gccaaucaccugaauaaag

SEQ ID NO: 644029 - RNA, 19 nt, Homo sapiens
  misc_RNA (1)...(19): siRNA sense strand
ggagaacgaccugcucaga

SEQ ID NO: 644030 - RNA, 19 nt, Homo sapiens
  misc_RNA (1)...(19): siRNA sense strand
cuauaucuauguucaaugg

SEQ ID NO: 644031 - RNA, 19 nt, Homo sapiens
  misc_RNA (1)...(19): siRNA sense strand
cgauuuggaucugggauga

SEQ ID NO: 644032 - RNA, 19 nt, Homo sapiens
  misc_RNA (1)...(19): siRNA sense strand
gaaguccuaaacaagcaua

SEQ ID NO: 644033 - RNA, 19 nt, Homo sapiens
  misc_RNA (1)...(19): siRNA sense strand
gaacgaccugcucagaaug

SEQ ID NO: 644034 - RNA, 19 nt, Homo sapiens
  misc_RNA (1)...(19): siRNA sense strand
gggaauggaaggcauagga

SEQ ID NO: 644035 - RNA, 19 nt, Homo sapiens
  misc_RNA (1)...(19): siRNA sense strand
caucggaaugggaaacaua

SEQ ID NO: 644036 - RNA, 19 nt, Homo sapiens
  misc_RNA (1)...(19): siRNA sense strand
caaugcacgucaagaugga

SEQ ID NO: 644037 - RNA, 19 nt, Homo sapiens
  misc_RNA (1)...(19): siRNA sense strand
agaagauccugauggugaa

SEQ ID NO: 644038 - RNA, 19 nt, Homo sapiens
  misc_RNA (1)...(19): siRNA sense strand
gaaaacaugggucgauuug

SEQ ID NO: 644039 - RNA, 19 nt, Homo sapiens
  misc_RNA (1)...(19): siRNA sense strand
aaggaaguauuuaguaugg

SEQ ID NO: 644040 - RNA, 19 nt, Homo sapiens
  misc_RNA (1)...(19): siRNA sense strand
cgacggagaucaaaaugga

SEQ ID NO: 644041 - RNA, 19 nt, Homo sapiens
  misc_RNA (1)...(19): siRNA sense strand
cuaaacaagcauagucuga

SEQ ID NO: 644042 - RNA, 19 nt, Homo sapiens
  misc_RNA (1)...(19): siRNA sense strand
gauugacguucgaauugau

SEQ ID NO: 644043 - RNA, 19 nt, Homo sapiens
  misc_RNA (1)...(19): siRNA sense strand
gaugcuaaaggacaaauuc

SEQ ID NO: 644044 - RNA, 19 nt, Homo sapiens
  misc_RNA (1)...(19): siRNA sense strand
cauaugccaauccaacuaa

SEQ ID NO: 644045 - RNA, 19 nt, Homo sapiens
  misc_RNA (1)...(19): siRNA sense strand
ggagggcaacccauugaug

SEQ ID NO: 644046 - RNA, 19 nt, Homo sapiens
  misc_RNA (1)...(19): siRNA sense strand
uggaagcacaguauuugua

SEQ ID NO: 644047 - RNA, 19 nt, Homo sapiens
  misc_RNA (1)...(19): siRNA sense strand
cugcggaaguccuaaacaa

SEQ ID NO: 644048 - RNA, 19 nt, Homo sapiens
  misc_RNA (1)...(19): siRNA sense strand
ggaaggccugccagauauu

SEQ ID NO: 644049 - RNA, 19 nt, Homo sapiens
  misc_RNA (1)...(19): siRNA sense strand
uaaagaccugguuaaagaa

SEQ ID NO: 644050 - RNA, 19 nt, Homo sapiens
  misc_RNA (1)...(19): siRNA sense strand
gcacugaagagaggagaga

SEQ ID NO: 644051 - RNA, 19 nt, Homo sapiens
  misc_RNA (1)...(19): siRNA sense strand
cguggaauaggcacuguua

SEQ ID NO: 644052 - RNA, 19 nt, Homo sapiens
  misc_RNA (1)...(19): siRNA sense strand
ggaugaacaugggcaggau

SEQ ID NO: 644053 - RNA, 19 nt, Homo sapiens
  misc_RNA (1)...(19): siRNA sense strand
gaugaacaugggcaggaua

SEQ ID NO: 644054 - RNA, 19 nt, Homo sapiens
  misc_RNA (1)...(19): siRNA sense strand
aauggacgcugaaggaaag

SEQ ID NO: 644055 - RNA, 19 nt, Homo sapiens
  misc_RNA (1)...(19): siRNA sense strand
aaauggcagucacuuaaag

SEQ ID NO: 644056 - RNA, 19 nt, Homo sapiens
  misc_RNA (1)...(19): siRNA sense strand
gccagauauuugugagaaa

SEQ ID NO: 644057 - RNA, 19 nt, Homo sapiens
  misc_RNA (1)...(19): siRNA sense strand
gagagggccuuaccaaaag

SEQ ID NO: 644058 - RNA, 19 nt, Homo sapiens
  misc_RNA (1)...(19): siRNA sense strand
gaccaaugcacgucaagau

SEQ ID NO: 644059 - RNA, 19 nt, Homo sapiens
  misc_RNA (1)...(19): siRNA sense strand
uaauggacgcugaaggaaa

SEQ ID NO: 644060 - RNA, 19 nt, Homo sapiens
  misc_RNA (1)...(19): siRNA sense strand
agauugacguucgaauuga

SEQ ID NO: 644061 - RNA, 19 nt, Homo sapiens
  misc_RNA (1)...(19): siRNA sense strand
aauggaaggcauaggauuu

SEQ ID NO: 644062 - RNA, 19 nt, Homo sapiens
  misc_RNA (1)...(19): siRNA sense strand
ggaauggaaggcauaggau

SEQ ID NO: 644063 - RNA, 19 nt, Homo sapiens
  misc_RNA (1)...(19): siRNA sense strand
gagccuucauuacaaacau

SEQ ID NO: 644064 - RNA, 19 nt, Homo sapiens
  misc_RNA (1)...(19): siRNA sense strand
gguccgagcagacauucuu

SEQ ID NO: 644065 - RNA, 19 nt, Homo sapiens
  misc_RNA (1)...(19): siRNA sense strand
cugaaggaaguauuuagua

SEQ ID NO: 644066 - RNA, 19 nt, Homo sapiens
  misc_RNA (1)...(19): siRNA sense strand
uaaaguuggcuggaagaaa

SEQ ID NO: 644067 - RNA, 19 nt, Homo sapiens
  misc_RNA (1)...(19): siRNA sense strand
gccaggagagcaaugcaaa

SEQ ID NO: 644068 - RNA, 19 nt, Homo sapiens
  misc_RNA (1)...(19): siRNA sense strand
agagauugacguucgaauu

SEQ ID NO: 644069 - RNA, 19 nt, Homo sapiens
  misc_RNA (1)...(19): siRNA sense strand
ggagagaucauugcaaagc

SEQ ID NO: 644070 - RNA, 19 nt, Homo sapiens
  misc_RNA (1)...(19): siRNA sense strand
ugugcaagcuauaucuaug

SEQ ID NO: 644071 - RNA, 19 nt, Homo sapiens
  misc_RNA (1)...(19): siRNA sense strand
uaaaggacaaauucaacga

SEQ ID NO: 644072 - RNA, 19 nt, Homo sapiens
  misc_RNA (1)...(19): siRNA sense strand
ugccagauauuugugagaa

SEQ ID NO: 644073 - RNA, 19 nt, Homo sapiens
  misc_RNA (1)...(19): siRNA sense strand
aagcuucgcagguuccuuu

SEQ ID NO: 644074 - RNA, 19 nt, Homo sapiens
  misc_RNA (1)...(19): siRNA sense strand
ggauggguccuggcauuga

SEQ ID NO: 644075 - RNA, 19 nt, Homo sapiens
  misc_RNA (1)...(19): siRNA sense strand
ccauaugccaauccaacua

SEQ ID NO: 644076 - RNA, 19 nt, Homo sapiens
  misc_RNA (1)...(19): siRNA sense strand
ggaagaaacugaaggaagu

SEQ ID NO: 644077 - RNA, 19 nt, Homo sapiens
  misc_RNA (1)...(19): siRNA sense strand
gaggagagaucauugcaaa

SEQ ID NO: 644078 - RNA, 19 nt, Homo sapiens
  misc_RNA (1)...(19): siRNA sense strand
ggaggaagcuucgcagguu

SEQ ID NO: 644079 - RNA, 19 nt, Homo sapiens
  misc_RNA (1)...(19): siRNA sense strand
gagagagccugccggauga

SEQ ID NO: 644080 - RNA, 19 nt, Homo sapiens
  misc_RNA (1)...(19): siRNA sense strand
gaaacugaaggaaguauuu

SEQ ID NO: 644081 - RNA, 19 nt, Homo sapiens
  misc_RNA (1)...(19): siRNA sense strand
caaagaagauccugauggu

SEQ ID NO: 644082 - RNA, 19 nt, Homo sapiens
  misc_RNA (1)...(19): siRNA sense strand
gaauaggcacuguuacuuu

SEQ ID NO: 644083 - RNA, 19 nt, Homo sapiens
  misc_RNA (1)...(19): siRNA sense strand
ggaagaugcuaaaggacaa

SEQ ID NO: 644084 - RNA, 19 nt, Homo sapiens
  misc_RNA (1)...(19): siRNA sense strand
gaugugcuguuguugaauu

SEQ ID NO: 644085 - RNA, 19 nt, Homo sapiens
  misc_RNA (1)...(19): siRNA sense strand
gaagagaggagagaucauu

SEQ ID NO: 644086 - RNA, 19 nt, Homo sapiens
  misc_RNA (1)...(19): siRNA sense strand
aaacaugggucgauuugga

SEQ ID NO: 644087 - RNA, 19 nt, Homo sapiens
  misc_RNA (1)...(19): siRNA sense strand
gaaauggcagucacuuaaa

SEQ ID NO: 644088 - RNA, 19 nt, Homo sapiens
  misc_RNA (1)...(19): siRNA sense strand
ggcauaggauuuggaauaa

SEQ ID NO: 644089 - RNA, 19 nt, Homo sapiens
  misc_RNA (1)...(19): siRNA sense strand
uaacauacguggagcucuu

SEQ ID NO: 644090 - RNA, 19 nt, Homo sapiens
  misc_RNA (1)...(19): siRNA sense strand
gcaaucgcuuugagccaua

SEQ ID NO: 644091 - RNA, 19 nt, Homo sapiens
  misc_RNA (1)...(19): siRNA sense strand
ugaaauggcagucacuuaa

SEQ ID NO: 644092 - RNA, 19 nt, Homo sapiens
  misc_RNA (1)...(19): siRNA sense strand
gaauaaaggcaucggaaug

SEQ ID NO: 644093 - RNA, 19 nt, Homo sapiens
  misc_RNA (1)...(19): siRNA sense strand
gggaugugcuguuguugaa

SEQ ID NO: 644094 - RNA, 19 nt, Homo sapiens
  misc_RNA (1)...(19): siRNA sense strand
gaauugauagaaacgcuua

SEQ ID NO: 644095 - RNA, 19 nt, Homo sapiens
  misc_RNA (1)...(19): siRNA sense strand
gagauugacguucgaauug

SEQ ID NO: 644096 - RNA, 19 nt, Homo sapiens
  misc_RNA (1)...(19): siRNA sense strand
cauggaagaugcuaaagga

SEQ ID NO: 644097 - RNA, 19 nt, Homo sapiens
  misc_RNA (1)...(19): siRNA sense strand
ccaaucaccugaauaaagg

SEQ ID NO: 644098 - RNA, 19 nt, Homo sapiens
  misc_RNA (1)...(19): siRNA sense strand
ugagaaaucugccauucga

SEQ ID NO: 644099 - RNA, 19 nt, Homo sapiens
  misc_RNA (1)...(19): siRNA sense strand
ccacauggccuccagcauu

SEQ ID NO: 644100 - RNA, 19 nt, Homo sapiens
  misc_RNA (1)...(19): siRNA sense strand
gaacaugggcaggauaaau

SEQ ID NO: 644101 - RNA, 19 nt, Homo sapiens
  misc_RNA (1)...(19): siRNA sense strand
caagcuauaucuauguuca

SEQ ID NO: 644102 - RNA, 19 nt, Homo sapiens
  misc_RNA (1)...(19): siRNA sense strand
gaaggaaguauuuaguaug

SEQ ID NO: 644103 - RNA, 19 nt, Homo sapiens
  misc_RNA (1)...(19): siRNA sense strand
gaugaugaauggcaugaag

SEQ ID NO: 644104 - RNA, 19 nt, Homo sapiens
  misc_RNA (1)...(19): siRNA sense strand
gcauaggauuuggaauaaa

SEQ ID NO: 644105 - RNA, 19 nt, Homo sapiens
  misc_RNA (1)...(19): siRNA sense strand
gaagaaacugaaggaagua

SEQ ID NO: 644106 - RNA, 19 nt, Homo sapiens
  misc_RNA (1)...(19): siRNA sense strand
ggaauaggcacuguuacuu

SEQ ID NO: 644107 - RNA, 19 nt, Homo sapiens
  misc_RNA (1)...(19): siRNA sense strand
agaacgaccugcucagaau

SEQ ID NO: 644108 - RNA, 19 nt, Homo sapiens
  misc_RNA (1)...(19): siRNA sense strand
gagaacgaccugcucagaa

SEQ ID NO: 644109 - RNA, 19 nt, Homo sapiens
  misc_RNA (1)...(19): siRNA sense strand
ggccagcugcuauuugaua

SEQ ID NO: 644110 - RNA, 19 nt, Homo sapiens
  misc_RNA (1)...(19): siRNA sense strand
aaaguuggcuggaagaaac

SEQ ID NO: 644111 - RNA, 19 nt, Homo sapiens
  misc_RNA (1)...(19): siRNA sense strand
auacagagccuucauuaca

SEQ ID NO: 644112 - RNA, 19 nt, Homo sapiens
  misc_RNA (1)...(19): siRNA sense strand
cacauggccuccagcauug

SEQ ID NO: 644113 - RNA, 19 nt, Homo sapiens
  misc_RNA (1)...(19): siRNA sense strand
gaaggcauaggauuuggaa

SEQ ID NO: 644114 - RNA, 19 nt, Homo sapiens
  misc_RNA (1)...(19): siRNA sense strand
acagagccuucauuacaaa

SEQ ID NO: 644115 - RNA, 19 nt, Homo sapiens
  misc_RNA (1)...(19): siRNA sense strand
gaaggccugccagauauuu

SEQ ID NO: 644116 - RNA, 19 nt, Homo sapiens
  misc_RNA (1)...(19): siRNA sense strand
gauggagcguggcaacuuc

SEQ ID NO: 644117 - RNA, 19 nt, Homo sapiens
  misc_RNA (1)...(19): siRNA sense strand
aggcauaggauuuggaaua

SEQ ID NO: 644118 - RNA, 19 nt, Homo sapiens
  misc_RNA (1)...(19): siRNA sense strand
gaauggaaggcauaggauu

SEQ ID NO: 644119 - RNA, 19 nt, Homo sapiens
  misc_RNA (1)...(19): siRNA sense strand
uacagagccuucauuacaa

SEQ ID NO: 644120 - RNA, 19 nt, Homo sapiens
  misc_RNA (1)...(19): siRNA sense strand
ucacuuaaagaccugguua

SEQ ID NO: 644121 - RNA, 19 nt, Homo sapiens
  misc_RNA (1)...(19): siRNA sense strand
agauacagagccuucauua

SEQ ID NO: 644122 - RNA, 19 nt, Homo sapiens
  misc_RNA (1)...(19): siRNA sense strand
gauggaagagagcaugaaa

SEQ ID NO: 644123 - RNA, 19 nt, Homo sapiens
  misc_RNA (1)...(19): siRNA sense strand
ggaagcacaguauuuguag

SEQ ID NO: 644124 - RNA, 19 nt, Homo sapiens
  misc_RNA (1)...(19): siRNA sense strand
ucacauggaagaugcuaaa

SEQ ID NO: 644125 - RNA, 19 nt, Homo sapiens
  misc_RNA (1)...(19): siRNA sense strand
aggaaggccugccagauau

SEQ ID NO: 644126 - RNA, 19 nt, Homo sapiens
  misc_RNA (1)...(19): siRNA sense strand
gagagaucauugcaaagca

SEQ ID NO: 644127 - RNA, 19 nt, Homo sapiens
  misc_RNA (1)...(19): siRNA sense strand
gaugagagggccuuaccaa

SEQ ID NO: 644128 - RNA, 19 nt, Homo sapiens
  misc_RNA (1)...(19): siRNA sense strand
gccaaucaccugaauaaag

SEQ ID NO: 644129 - RNA, 19 nt, Homo sapiens
  misc_RNA (1)...(19): siRNA sense strand
ggagaacgaccugcucaga

SEQ ID NO: 644130 - RNA, 19 nt, Homo sapiens
  misc_RNA (1)...(19): siRNA sense strand
cuauaucuauguucaaugg

SEQ ID NO: 644131 - RNA, 19 nt, Homo sapiens
  misc_RNA (1)...(19): siRNA sense strand
cgauuuggaucugggauga

SEQ ID NO: 644132 - RNA, 19 nt, Homo sapiens
  misc_RNA (1)...(19): siRNA sense strand
gaaguccuaaacaagcaua

SEQ ID NO: 644133 - RNA, 19 nt, Homo sapiens
  misc_RNA (1)...(19): siRNA sense strand
gaacgaccugcucagaaug

SEQ ID NO: 644134 - RNA, 19 nt, Homo sapiens
  misc_RNA (1)...(19): siRNA sense strand
gggaauggaaggcauagga

SEQ ID NO: 644135 - RNA, 19 nt, Homo sapiens
  misc_RNA (1)...(19): siRNA sense strand
caucggaaugggaaacaua

SEQ ID NO: 644136 - RNA, 19 nt, Homo sapiens
  misc_RNA (1)...(19): siRNA sense strand
caaugcacgucaagaugga

SEQ ID NO: 644137 - RNA, 19 nt, Homo sapiens
  misc_RNA (1)...(19): siRNA sense strand
agaagauccugauggugaa

SEQ ID NO: 644138 - RNA, 19 nt, Homo sapiens
  misc_RNA (1)...(19): siRNA sense strand
gaaaacaugggucgauuug

SEQ ID NO: 644139 - RNA, 19 nt, Homo sapiens
  misc_RNA (1)...(19): siRNA sense strand
aaggaaguauuuaguaugg

SEQ ID NO: 644140 - RNA, 19 nt, Homo sapiens
  misc_RNA (1)...(19): siRNA sense strand
cgacggagaucaaaaugga

SEQ ID NO: 644141 - RNA, 19 nt, Homo sapiens
  misc_RNA (1)...(19): siRNA sense strand
cuaaacaagcauagucuga

SEQ ID NO: 644142 - RNA, 19 nt, Homo sapiens
  misc_RNA (1)...(19): siRNA sense strand
gauugacguucgaauugau

SEQ ID NO: 644143 - RNA, 19 nt, Homo sapiens
  misc_RNA (1)...(19): siRNA sense strand
gaugcuaaaggacaaauuc

SEQ ID NO: 644144 - RNA, 19 nt, Homo sapiens
  misc_RNA (1)...(19): siRNA sense strand
cauaugccaauccaacuaa

SEQ ID NO: 644145 - RNA, 19 nt, Homo sapiens
  misc_RNA (1)...(19): siRNA sense strand
ggagggcaacccauugaug

SEQ ID NO: 644146 - RNA, 19 nt, Homo sapiens
  misc_RNA (1)...(19): siRNA sense strand
uggaagcacaguauuugua

SEQ ID NO: 644147 - RNA, 19 nt, Homo sapiens
  misc_RNA (1)...(19): siRNA sense strand
cugcggaaguccuaaacaa

SEQ ID NO: 644148 - RNA, 19 nt, Homo sapiens
  misc_RNA (1)...(19): siRNA sense strand
ggaaggccugccagauauu

SEQ ID NO: 644149 - RNA, 19 nt, Homo sapiens
  misc_RNA (1)...(19): siRNA sense strand
uaaagaccugguuaaagaa

SEQ ID NO: 644150 - RNA, 19 nt, Homo sapiens
  misc_RNA (1)...(19): siRNA sense strand
gcacugaagagaggagaga

SEQ ID NO: 644151 - RNA, 19 nt, Homo sapiens
  misc_RNA (1)...(19): siRNA sense strand
cguggaauaggcacuguua

SEQ ID NO: 644152 - RNA, 19 nt, Homo sapiens
  misc_RNA (1)...(19): siRNA sense strand
ggaugaacaugggcaggau

SEQ ID NO: 644153 - RNA, 19 nt, Homo sapiens
  misc_RNA (1)...(19): siRNA sense strand
gaugaacaugggcaggaua

SEQ ID NO: 644154 - RNA, 19 nt, Homo sapiens
  misc_RNA (1)...(19): siRNA sense strand
aauggacgcugaaggaaag

SEQ ID NO: 644155 - RNA, 19 nt, Homo sapiens
  misc_RNA (1)...(19): siRNA sense strand
aaauggcagucacuuaaag

SEQ ID NO: 644156 - RNA, 19 nt, Homo sapiens
  misc_RNA (1)...(19): siRNA sense strand
gccagauauuugugagaaa

SEQ ID NO: 644157 - RNA, 19 nt, Homo sapiens
  misc_RNA (1)...(19): siRNA sense strand
gagagggccuuaccaaaag

SEQ ID NO: 644158 - RNA, 19 nt, Homo sapiens
  misc_RNA (1)...(19): siRNA sense strand
gaccaaugcacgucaagau

SEQ ID NO: 644159 - RNA, 19 nt, Homo sapiens
  misc_RNA (1)...(19): siRNA sense strand
uaauggacgcugaaggaaa

SEQ ID NO: 644160 - RNA, 19 nt, Homo sapiens
  misc_RNA (1)...(19): siRNA sense strand
agauugacguucgaauuga

SEQ ID NO: 644161 - RNA, 19 nt, Homo sapiens
  misc_RNA (1)...(19): siRNA sense strand
aauggaaggcauaggauuu

SEQ ID NO: 644162 - RNA, 19 nt, Homo sapiens
  misc_RNA (1)...(19): siRNA sense strand
ggaauggaaggcauaggau

SEQ ID NO: 644163 - RNA, 19 nt, Homo sapiens
  misc_RNA (1)...(19): siRNA sense strand
gagccuucauuacaaacau

SEQ ID NO: 644164 - RNA, 19 nt, Homo sapiens
  misc_RNA (1)...(19): siRNA sense strand
gguccgagcagacauucuu

SEQ ID NO: 644165 - RNA, 19 nt, Homo sapiens
  misc_RNA (1)...(19): siRNA sense strand
cugaaggaaguauuuagua

SEQ ID NO: 644166 - RNA, 19 nt, Homo sapiens
  misc_RNA (1)...(19): siRNA sense strand
uaaaguuggcuggaagaaa

SEQ ID NO: 644167 - RNA, 19 nt, Homo sapiens
  misc_RNA (1)...(19): siRNA sense strand
gccaggagagcaaugcaaa

SEQ ID NO: 644168 - RNA, 19 nt, Homo sapiens
  misc_RNA (1)...(19): siRNA sense strand
agagauugacguucgaauu

SEQ ID NO: 644169 - RNA, 19 nt, Homo sapiens
  misc_RNA (1)...(19): siRNA sense strand
ggagagaucauugcaaagc

SEQ ID NO: 644170 - RNA, 19 nt, Homo sapiens
  misc_RNA (1)...(19): siRNA sense strand
ugugcaagcuauaucuaug

SEQ ID NO: 644171 - RNA, 19 nt, Homo sapiens
  misc_RNA (1)...(19): siRNA sense strand
uaaaggacaaauucaacga

SEQ ID NO: 644172 - RNA, 19 nt, Homo sapiens
  misc_RNA (1)...(19): siRNA sense strand
ugccagauauuugugagaa

SEQ ID NO: 644173 - RNA, 19 nt, Homo sapiens
  misc_RNA (1)...(19): siRNA sense strand
aagcuucgcagguuccuuu

SEQ ID NO: 644174 - RNA, 19 nt, Homo sapiens
  misc_RNA (1)...(19): siRNA sense strand
ggauggguccuggcauuga

SEQ ID NO: 644175 - RNA, 19 nt, Homo sapiens
  misc_RNA (1)...(19): siRNA sense strand
ccauaugccaauccaacua

SEQ ID NO: 644176 - RNA, 19 nt, Homo sapiens
  misc_RNA (1)...(19): siRNA sense strand
gcaagauucucgucuguuc

SEQ ID NO: 644177 - RNA, 19 nt, Homo sapiens
  misc_RNA (1)...(19): siRNA sense strand
ggaaugaaauccggaagau

SEQ ID NO: 644178 - RNA, 19 nt, Homo sapiens
  misc_RNA (1)...(19): siRNA sense strand
gagcucaucugcccuaucu

SEQ ID NO: 644179 - RNA, 19 nt, Homo sapiens
  misc_RNA (1)...(19): siRNA sense strand
ggacaacuguuacuguucu

SEQ ID NO: 644180 - RNA, 19 nt, Homo sapiens
  misc_RNA (1)...(19): siRNA sense strand
gaacaccaagucugugaaa

SEQ ID NO: 644181 - RNA, 19 nt, Homo sapiens
  misc_RNA (1)...(19): siRNA sense strand
ugaacgaaguggccaagaa

SEQ ID NO: 644182 - RNA, 19 nt, Homo sapiens
  misc_RNA (1)...(19): siRNA sense strand
gaaagugaaccaacugaag

SEQ ID NO: 644183 - RNA, 19 nt, Homo sapiens
  misc_RNA (1)...(19): siRNA sense strand
gaggaugucagcuucauga

SEQ ID NO: 644184 - RNA, 19 nt, Homo sapiens
  misc_RNA (1)...(19): siRNA sense strand
ucaccaacaucguggagaa

SEQ ID NO: 644185 - RNA, 19 nt, Homo sapiens
  misc_RNA (1)...(19): siRNA sense strand
gaacgaaguggccaagaag

SEQ ID NO: 644186 - RNA, 19 nt, Homo sapiens
  misc_RNA (1)...(19): siRNA sense strand
guggacaacuguuacuguu

SEQ ID NO: 644187 - RNA, 19 nt, Homo sapiens
  misc_RNA (1)...(19): siRNA sense strand
uguacaaacucgagucaga

SEQ ID NO: 644188 - RNA, 19 nt, Homo sapiens
  misc_RNA (1)...(19): siRNA sense strand
gagauccgaaggaaugaaa

SEQ ID NO: 644189 - RNA, 19 nt, Homo sapiens
  misc_RNA (1)...(19): siRNA sense strand
gagaaagugaaccaacuga

SEQ ID NO: 644190 - RNA, 19 nt, Homo sapiens
  misc_RNA (1)...(19): siRNA sense strand
guggagauccgaaggaaug

SEQ ID NO: 644191 - RNA, 19 nt, Homo sapiens
  misc_RNA (1)...(19): siRNA sense strand
gaggccaguuuccuagaga

SEQ ID NO: 644192 - RNA, 19 nt, Homo sapiens
  misc_RNA (1)...(19): siRNA sense strand
ccaacaucguggagaaguu

SEQ ID NO: 644193 - RNA, 19 nt, Homo sapiens
  misc_RNA (1)...(19): siRNA sense strand
ugaagaacaccaagucugu

SEQ ID NO: 644194 - RNA, 19 nt, Homo sapiens
  misc_RNA (1)...(19): siRNA sense strand
caaggacagcggccucgua

SEQ ID NO: 644195 - RNA, 19 nt, Homo sapiens
  misc_RNA (1)...(19): siRNA sense strand
acuccaagcucuuccugaa

SEQ ID NO: 644196 - RNA, 19 nt, Homo sapiens
  misc_RNA (1)...(19): siRNA sense strand
guucuguggacaacuguua

SEQ ID NO: 644197 - RNA, 19 nt, Homo sapiens
  misc_RNA (1)...(19): siRNA sense strand
ggagaaagugaaccaacug

SEQ ID NO: 644198 - RNA, 19 nt, Homo sapiens
  misc_RNA (1)...(19): siRNA sense strand
ugcagcugcucuuugauaa

SEQ ID NO: 644199 - RNA, 19 nt, Homo sapiens
  misc_RNA (1)...(19): siRNA sense strand
gcggagaauuggaagaacu

SEQ ID NO: 644200 - RNA, 19 nt, Homo sapiens
  misc_RNA (1)...(19): siRNA sense strand
gcaugcaggaggccaagaa

SEQ ID NO: 644201 - RNA, 19 nt, Homo sapiens
  misc_RNA (1)...(19): siRNA sense strand
cugcagcugcucuuugaua

SEQ ID NO: 644202 - RNA, 19 nt, Homo sapiens
  misc_RNA (1)...(19): siRNA sense strand
cagcugccgugcaaacaca

SEQ ID NO: 644203 - RNA, 19 nt, Homo sapiens
  misc_RNA (1)...(19): siRNA sense strand
uccggaagaugcucaugaa

SEQ ID NO: 644204 - RNA, 19 nt, Homo sapiens
  misc_RNA (1)...(19): siRNA sense strand
gaaugaaauccggaagaug

SEQ ID NO: 644205 - RNA, 19 nt, Homo sapiens
  misc_RNA (1)...(19): siRNA sense strand
caacaucguggagaaguuc

SEQ ID NO: 644206 - RNA, 19 nt, Homo sapiens
  misc_RNA (1)...(19): siRNA sense strand
ccgcaagauucucgucugu

SEQ ID NO: 644207 - RNA, 19 nt, Homo sapiens
  misc_RNA (1)...(19): siRNA sense strand
cccugcagcugcucuuuga

SEQ ID NO: 644208 - RNA, 19 nt, Homo sapiens
  misc_RNA (1)...(19): siRNA sense strand
ggagcgagagcaggacauu

SEQ ID NO: 644209 - RNA, 19 nt, Homo sapiens
  misc_RNA (1)...(19): siRNA sense strand
gcaaccaggccuacaacca

SEQ ID NO: 644210 - RNA, 19 nt, Homo sapiens
  misc_RNA (1)...(19): siRNA sense strand
gcagacaguggagguccua

SEQ ID NO: 644211 - RNA, 19 nt, Homo sapiens
  misc_RNA (1)...(19): siRNA sense strand
gauaagacggaggauguca

SEQ ID NO: 644212 - RNA, 19 nt, Homo sapiens
  misc_RNA (1)...(19): siRNA sense strand
aacacuacgugacgagcua

SEQ ID NO: 644213 - RNA, 19 nt, Homo sapiens
  misc_RNA (1)...(19): siRNA sense strand
uaagaucggccaccugaac

SEQ ID NO: 644214 - RNA, 19 nt, Homo sapiens
  misc_RNA (1)...(19): siRNA sense strand
gauccgaaggaaugaaauc

SEQ ID NO: 644215 - RNA, 19 nt, Homo sapiens
  misc_RNA (1)...(19): siRNA sense strand
gaaaagcgcaagcacucaa

SEQ ID NO: 644216 - RNA, 19 nt, Homo sapiens
  misc_RNA (1)...(19): siRNA sense strand
caaacucgagucagacaag

SEQ ID NO: 644217 - RNA, 19 nt, Homo sapiens
  misc_RNA (1)...(19): siRNA sense strand
aagaacaccaagucuguga

SEQ ID NO: 644218 - RNA, 19 nt, Homo sapiens
  misc_RNA (1)...(19): siRNA sense strand
gacaacuguuacuguucuu

SEQ ID NO: 644219 - RNA, 19 nt, Homo sapiens
  misc_RNA (1)...(19): siRNA sense strand
ggagaagcagcugcggaaa

SEQ ID NO: 644220 - RNA, 19 nt, Homo sapiens
  misc_RNA (1)...(19): siRNA sense strand
agacggaggaugucagcuu

SEQ ID NO: 644221 - RNA, 19 nt, Homo sapiens
  misc_RNA (1)...(19): siRNA sense strand
gagaagcagcugcggaaaa

SEQ ID NO: 644222 - RNA, 19 nt, Homo sapiens
  misc_RNA (1)...(19): siRNA sense strand
agaauuggaagaacugcuu

SEQ ID NO: 644223 - RNA, 19 nt, Homo sapiens
  misc_RNA (1)...(19): siRNA sense strand
gcgcugcacugcguguucu

SEQ ID NO: 644224 - RNA, 19 nt, Homo sapiens
  misc_RNA (1)...(19): siRNA sense strand
aggaccagcuguacaaacu

SEQ ID NO: 644225 - RNA, 19 nt, Homo sapiens
  misc_RNA (1)...(19): siRNA sense strand
ccuaucugccugcacguuu

SEQ ID NO: 644226 - RNA, 19 nt, Homo sapiens
  misc_RNA (1)...(19): siRNA sense strand
guucuuccguggccaacca

SEQ ID NO: 644227 - RNA, 19 nt, Homo sapiens
  misc_RNA (1)...(19): siRNA sense strand
agaagcagcugcggaaaau

SEQ ID NO: 644228 - RNA, 19 nt, Homo sapiens
  misc_RNA (1)...(19): siRNA sense strand
agcgagagcaggacauuga

SEQ ID NO: 644229 - RNA, 19 nt, Homo sapiens
  misc_RNA (1)...(19): siRNA sense strand
acauugaggaccagcugua

SEQ ID NO: 644230 - RNA, 19 nt, Homo sapiens
  misc_RNA (1)...(19): siRNA sense strand
uugauaagacggaggaugu

SEQ ID NO: 644231 - RNA, 19 nt, Homo sapiens
  misc_RNA (1)...(19): siRNA sense strand
gaaccaacugaaggaggaa

SEQ ID NO: 644232 - RNA, 19 nt, Homo sapiens
  misc_RNA (1)...(19): siRNA sense strand
agaaagugaaccaacugaa

SEQ ID NO: 644233 - RNA, 19 nt, Homo sapiens
  misc_RNA (1)...(19): siRNA sense strand
gaacagagcuaaguaugag

SEQ ID NO: 644234 - RNA, 19 nt, Homo sapiens
  misc_RNA (1)...(19): siRNA sense strand
ggaauucuccaaucauaua

SEQ ID NO: 644235 - RNA, 19 nt, Homo sapiens
  misc_RNA (1)...(19): siRNA sense strand
caacaacuggcaaagaaua

SEQ ID NO: 644236 - RNA, 19 nt, Homo sapiens
  misc_RNA (1)...(19): siRNA sense strand
acaaugcucuucuugguuu

SEQ ID NO: 644237 - RNA, 19 nt, Homo sapiens
  misc_RNA (1)...(19): siRNA sense strand
uggaaaggcucagaguuua

SEQ ID NO: 644238 - RNA, 19 nt, Homo sapiens
  misc_RNA (1)...(19): siRNA sense strand
ccaagccagugauauuuaa

SEQ ID NO: 644239 - RNA, 19 nt, Homo sapiens
  misc_RNA (1)...(19): siRNA sense strand
ggaagaagagggagaagga

SEQ ID NO: 644240 - RNA, 19 nt, Homo sapiens
  misc_RNA (1)...(19): siRNA sense strand
aaggagggcuggaaacaaa

SEQ ID NO: 644241 - RNA, 19 nt, Homo sapiens
  misc_RNA (1)...(19): siRNA sense strand
ggaacagagcuaaguauga

SEQ ID NO: 644242 - RNA, 19 nt, Homo sapiens
  misc_RNA (1)...(19): siRNA sense strand
ucacggaauucuccaauca

SEQ ID NO: 644243 - RNA, 19 nt, Homo sapiens
  misc_RNA (1)...(19): siRNA sense strand
acaagggacucuaaccaaa

SEQ ID NO: 644244 - RNA, 19 nt, Homo sapiens
  misc_RNA (1)...(19): siRNA sense strand
ccacaaugcucuucuuggu

SEQ ID NO: 644245 - RNA, 19 nt, Homo sapiens
  misc_RNA (1)...(19): siRNA sense strand
gaaaggcuucuguuacuuc

SEQ ID NO: 644246 - RNA, 19 nt, Homo sapiens
  misc_RNA (1)...(19): siRNA sense strand
ccaagaagcagaaacacuu

SEQ ID NO: 644247 - RNA, 19 nt, Homo sapiens
  misc_RNA (1)...(19): siRNA sense strand
gaagacgacacgcuuugaa

SEQ ID NO: 644248 - RNA, 19 nt, Homo sapiens
  misc_RNA (1)...(19): siRNA sense strand
gaaaggcucagaguuuaga

SEQ ID NO: 644249 - RNA, 19 nt, Homo sapiens
  misc_RNA (1)...(19): siRNA sense strand
ggcaaagaauaaccuguug

SEQ ID NO: 644250 - RNA, 19 nt, Homo sapiens
  misc_RNA (1)...(19): siRNA sense strand
ggacaaugaggaagaggaa

SEQ ID NO: 644251 - RNA, 19 nt, Homo sapiens
  misc_RNA (1)...(19): siRNA sense strand
gccaagccagugauauuua

SEQ ID NO: 644252 - RNA, 19 nt, Homo sapiens
  misc_RNA (1)...(19): siRNA sense strand
ggagaaggagggcuggaaa

SEQ ID NO: 644253 - RNA, 19 nt, Homo sapiens
  misc_RNA (1)...(19): siRNA sense strand
ggaugucccugcgggcuuu

SEQ ID NO: 644254 - RNA, 19 nt, Homo sapiens
  misc_RNA (1)...(19): siRNA sense strand
ccaacgagcccauggaugu

SEQ ID NO: 644255 - RNA, 19 nt, Homo sapiens
  misc_RNA (1)...(19): siRNA sense strand
acggaauucuccaaucaua

SEQ ID NO: 644256 - RNA, 19 nt, Homo sapiens
  misc_RNA (1)...(19): siRNA sense strand
uuagguaucuugucaaacu

SEQ ID NO: 644257 - RNA, 19 nt, Homo sapiens
  misc_RNA (1)...(19): siRNA sense strand
gaccaucggcuuuagguau

SEQ ID NO: 644258 - RNA, 19 nt, Homo sapiens
  misc_RNA (1)...(19): siRNA sense strand
gcaauggguccggcuguuu

SEQ ID NO: 644259 - RNA, 19 nt, Homo sapiens
  misc_RNA (1)...(19): siRNA sense strand
gaaggagggcuggaaacaa

SEQ ID NO: 644260 - RNA, 19 nt, Homo sapiens
  misc_RNA (1)...(19): siRNA sense strand
gccaguacuuguuccaguu

SEQ ID NO: 644261 - RNA, 19 nt, Homo sapiens
  misc_RNA (1)...(19): siRNA sense strand
guagccgaguggacaauga

SEQ ID NO: 644262 - RNA, 19 nt, Homo sapiens
  misc_RNA (1)...(19): siRNA sense strand
gcagcuugccgcucuagaa

SEQ ID NO: 644263 - RNA, 19 nt, Homo sapiens
  misc_RNA (1)...(19): siRNA sense strand
gcacaagggacucuaacca

SEQ ID NO: 644264 - RNA, 19 nt, Homo sapiens
  misc_RNA (1)...(19): siRNA sense strand
ggccaagccagugauauuu

SEQ ID NO: 644265 - RNA, 19 nt, Homo sapiens
  misc_RNA (1)...(19): siRNA sense strand
ccacucaacccaagaagca

SEQ ID NO: 644266 - RNA, 19 nt, Homo sapiens
  misc_RNA (1)...(19): siRNA sense strand
ggaaaggcucagaguuuag

SEQ ID NO: 644267 - RNA, 19 nt, Homo sapiens
  misc_RNA (1)...(19): siRNA sense strand
uguguuggcuguggaaaga

SEQ ID NO: 644268 - RNA, 19 nt, Homo sapiens
  misc_RNA (1)...(19): siRNA sense strand
gggaacagagcuaaguaug

SEQ ID NO: 644269 - RNA, 19 nt, Homo sapiens
  misc_RNA (1)...(19): siRNA sense strand
aaaggguggucuccagaau

SEQ ID NO: 644270 - RNA, 19 nt, Homo sapiens
  misc_RNA (1)...(19): siRNA sense strand
ggcuuuagguaucuuguca

SEQ ID NO: 644271 - RNA, 19 nt, Homo sapiens
  misc_RNA (1)...(19): siRNA sense strand
uuggaaaggcucagaguuu

SEQ ID NO: 644272 - RNA, 19 nt, Homo sapiens
  misc_RNA (1)...(19): siRNA sense strand
ucuguuacuucacggaauu

SEQ ID NO: 644273 - RNA, 19 nt, Homo sapiens
  misc_RNA (1)...(19): siRNA sense strand
caaaggguggucuccagaa

SEQ ID NO: 644274 - RNA, 19 nt, Homo sapiens
  misc_RNA (1)...(19): siRNA sense strand
ccaagguggugggaacaga

SEQ ID NO: 644275 - RNA, 19 nt, Homo sapiens
  misc_RNA (1)...(19): siRNA sense strand
cuuuagguaucuugucaaa

SEQ ID NO: 644276 - RNA, 19 nt, Homo sapiens
  misc_RNA (1)...(19): siRNA sense strand
caaggccaagccagugaua

SEQ ID NO: 644277 - RNA, 19 nt, Homo sapiens
  misc_RNA (1)...(19): siRNA sense strand
gaccuuuaaucuguuggaa

SEQ ID NO: 644278 - RNA, 19 nt, Homo sapiens
  misc_RNA (1)...(19): siRNA sense strand
gcagcagcuugccgcucua

SEQ ID NO: 644279 - RNA, 19 nt, Homo sapiens
  misc_RNA (1)...(19): siRNA sense strand
gcugaagacgacacgcuuu

SEQ ID NO: 644280 - RNA, 19 nt, Homo sapiens
  misc_RNA (1)...(19): siRNA sense strand
aaaggcuucuguuacuuca

SEQ ID NO: 644281 - RNA, 19 nt, Homo sapiens
  misc_RNA (1)...(19): siRNA sense strand
ggagggcuggaaacaaaug

SEQ ID NO: 644282 - RNA, 19 nt, Homo sapiens
  misc_RNA (1)...(19): siRNA sense strand
ccugacaacuugcugaaaa

SEQ ID NO: 644283 - RNA, 19 nt, Homo sapiens
  misc_RNA (1)...(19): siRNA sense strand
gcuugccgcucuagaaggu

SEQ ID NO: 644284 - RNA, 19 nt, Homo sapiens
  misc_RNA (1)...(19): siRNA sense strand
uggcaaagaauaaccuguu

SEQ ID NO: 644285 - RNA, 19 nt, Homo sapiens
  misc_RNA (1)...(19): siRNA sense strand
ccugaaggaugcuguacca

SEQ ID NO: 644286 - RNA, 19 nt, Homo sapiens
  misc_RNA (1)...(19): siRNA sense strand
cacaagggacucuaaccaa

SEQ ID NO: 644287 - RNA, 19 nt, Homo sapiens
  misc_RNA (1)...(19): siRNA sense strand
acaaugaggaagaggaaga

SEQ ID NO: 644288 - RNA, 19 nt, Homo sapiens
  misc_RNA (1)...(19): siRNA sense strand
gcaaagauuccccgaagug

SEQ ID NO: 644289 - RNA, 19 nt, Homo sapiens
  misc_RNA (1)...(19): siRNA sense strand
agacgacacgcuuugaaga

SEQ ID NO: 644290 - RNA, 19 nt, Homo sapiens
  misc_RNA (1)...(19): siRNA sense strand
caagggacucuaaccaaag

SEQ ID NO: 644291 - RNA, 19 nt, Homo sapiens
  misc_RNA (1)...(19): siRNA sense strand
ggugugcgccguugacaag

SEQ ID NO: 644292 - RNA, 19 nt, Homo sapiens
  misc_RNA (1)...(19): siRNA sense strand
gaagcagaaacacuugaag

SEQ ID NO: 644293 - RNA, 19 nt, Homo sapiens
  misc_RNA (1)...(19): siRNA sense strand
ucacuaaacgcagcaaugg

SEQ ID NO: 644294 - RNA, 19 nt, Homo sapiens
  misc_RNA (1)...(19): siRNA sense strand
gaguggacaaugaggaaga

SEQ ID NO: 644295 - RNA, 19 nt, Homo sapiens
  misc_RNA (1)...(19): siRNA sense strand
gaugacaauggccacaaug

SEQ ID NO: 644296 - RNA, 19 nt, Homo sapiens
  misc_RNA (1)...(19): siRNA sense strand
guucuugccagaugacaau

SEQ ID NO: 644297 - RNA, 19 nt, Homo sapiens
  misc_RNA (1)...(19): siRNA sense strand
caagccagugauauuuaaa

SEQ ID NO: 644298 - RNA, 19 nt, Homo sapiens
  misc_RNA (1)...(19): siRNA sense strand
gugggaacagagcuaagua

SEQ ID NO: 644299 - RNA, 19 nt, Homo sapiens
  misc_RNA (1)...(19): siRNA sense strand
agaugacaauggccacaau

SEQ ID NO: 644300 - RNA, 19 nt, Homo sapiens
  misc_RNA (1)...(19): siRNA sense strand
uguuggcuguggaaagaaa

SEQ ID NO: 644301 - RNA, 19 nt, Homo sapiens
  misc_RNA (1)...(19): siRNA sense strand
caaugaggaagaggaagaa

SEQ ID NO: 644302 - RNA, 19 nt, Homo sapiens
  misc_RNA (1)...(19): siRNA sense strand
ugaggaagaggaagaagag

SEQ ID NO: 644303 - RNA, 19 nt, Homo sapiens
  misc_RNA (1)...(19): siRNA sense strand
gcaggaccagcuucugauc

SEQ ID NO: 644304 - RNA, 19 nt, Homo sapiens
  misc_RNA (1)...(19): siRNA sense strand
agagguucuugccagauga

SEQ ID NO: 644305 - RNA, 19 nt, Homo sapiens
  misc_RNA (1)...(19): siRNA sense strand
gggagaaggagggcuggaa

SEQ ID NO: 644306 - RNA, 19 nt, Homo sapiens
  misc_RNA (1)...(19): siRNA sense strand
gguggccucuggagaacca

SEQ ID NO: 644307 - RNA, 19 nt, Homo sapiens
  misc_RNA (1)...(19): siRNA sense strand
uaugagagcgcaggcaugu

SEQ ID NO: 644308 - RNA, 19 nt, Homo sapiens
  misc_RNA (1)...(19): siRNA sense strand
ugaagacgacacgcuuuga

SEQ ID NO: 644309 - RNA, 19 nt, Homo sapiens
  misc_RNA (1)...(19): siRNA sense strand
aggccaagccagugauauu

SEQ ID NO: 644310 - RNA, 19 nt, Homo sapiens
  misc_RNA (1)...(19): siRNA sense strand
agaagcagaaacacuugaa

SEQ ID NO: 644311 - RNA, 19 nt, Homo sapiens
  misc_RNA (1)...(19): siRNA sense strand
gcaaggccaagccagugau

SEQ ID NO: 644312 - RNA, 19 nt, Homo sapiens
  misc_RNA (1)...(19): siRNA sense strand
gucuguuccugacaacuug

SEQ ID NO: 644313 - RNA, 19 nt, Homo sapiens
  misc_RNA (1)...(19): siRNA sense strand
gaacagagcuaaguaugag

SEQ ID NO: 644314 - RNA, 19 nt, Homo sapiens
  misc_RNA (1)...(19): siRNA sense strand
ggaauucuccaaucauaua

SEQ ID NO: 644315 - RNA, 19 nt, Homo sapiens
  misc_RNA (1)...(19): siRNA sense strand
caacaacuggcaaagaaua

SEQ ID NO: 644316 - RNA, 19 nt, Homo sapiens
  misc_RNA (1)...(19): siRNA sense strand
acaaugcucuucuugguuu

SEQ ID NO: 644317 - RNA, 19 nt, Homo sapiens
  misc_RNA (1)...(19): siRNA sense strand
uggaaaggcucagaguuua

SEQ ID NO: 644318 - RNA, 19 nt, Homo sapiens
  misc_RNA (1)...(19): siRNA sense strand
ccaagccagugauauuuaa

SEQ ID NO: 644319 - RNA, 19 nt, Homo sapiens
  misc_RNA (1)...(19): siRNA sense strand
ggaagaagagggagaagga

SEQ ID NO: 644320 - RNA, 19 nt, Homo sapiens
  misc_RNA (1)...(19): siRNA sense strand
aaggagggcuggaaacaaa

SEQ ID NO: 644321 - RNA, 19 nt, Homo sapiens
  misc_RNA (1)...(19): siRNA sense strand
ggaacagagcuaaguauga

SEQ ID NO: 644322 - RNA, 19 nt, Homo sapiens
  misc_RNA (1)...(19): siRNA sense strand
ucacggaauucuccaauca

SEQ ID NO: 644323 - RNA, 19 nt, Homo sapiens
  misc_RNA (1)...(19): siRNA sense strand
acaagggacucuaaccaaa

SEQ ID NO: 644324 - RNA, 19 nt, Homo sapiens
  misc_RNA (1)...(19): siRNA sense strand
ccacaaugcucuucuuggu

SEQ ID NO: 644325 - RNA, 19 nt, Homo sapiens
  misc_RNA (1)...(19): siRNA sense strand
gaaaggcuucuguuacuuc

SEQ ID NO: 644326 - RNA, 19 nt, Homo sapiens
  misc_RNA (1)...(19): siRNA sense strand
ccaagaagcagaaacacuu

SEQ ID NO: 644327 - RNA, 19 nt, Homo sapiens
  misc_RNA (1)...(19): siRNA sense strand
gaagacgacacgcuuugaa

SEQ ID NO: 644328 - RNA, 19 nt, Homo sapiens
  misc_RNA (1)...(19): siRNA sense strand
gaaaggcucagaguuuaga

SEQ ID NO: 644329 - RNA, 19 nt, Homo sapiens
  misc_RNA (1)...(19): siRNA sense strand
ggcaaagaauaaccuguug

SEQ ID NO: 644330 - RNA, 19 nt, Homo sapiens
  misc_RNA (1)...(19): siRNA sense strand
ggacaaugaggaagaggaa

SEQ ID NO: 644331 - RNA, 19 nt, Homo sapiens
  misc_RNA (1)...(19): siRNA sense strand
gccaagccagugauauuua

SEQ ID NO: 644332 - RNA, 19 nt, Homo sapiens
  misc_RNA (1)...(19): siRNA sense strand
ggagaaggagggcuggaaa

SEQ ID NO: 644333 - RNA, 19 nt, Homo sapiens
  misc_RNA (1)...(19): siRNA sense strand
ggaugucccugcgggcuuu

SEQ ID NO: 644334 - RNA, 19 nt, Homo sapiens
  misc_RNA (1)...(19): siRNA sense strand
ccaacgagcccauggaugu

SEQ ID NO: 644335 - RNA, 19 nt, Homo sapiens
  misc_RNA (1)...(19): siRNA sense strand
acggaauucuccaaucaua

SEQ ID NO: 644336 - RNA, 19 nt, Homo sapiens
  misc_RNA (1)...(19): siRNA sense strand
uuagguaucuugucaaacu

SEQ ID NO: 644337 - RNA, 19 nt, Homo sapiens
  misc_RNA (1)...(19): siRNA sense strand
gaccaucggcuuuagguau

SEQ ID NO: 644338 - RNA, 19 nt, Homo sapiens
  misc_RNA (1)...(19): siRNA sense strand
gcaauggguccggcuguuu

SEQ ID NO: 644339 - RNA, 19 nt, Homo sapiens
  misc_RNA (1)...(19): siRNA sense strand
gaaggagggcuggaaacaa

SEQ ID NO: 644340 - RNA, 19 nt, Homo sapiens
  misc_RNA (1)...(19): siRNA sense strand
gccaguacuuguuccaguu

SEQ ID NO: 644341 - RNA, 19 nt, Homo sapiens
  misc_RNA (1)...(19): siRNA sense strand
guagccgaguggacaauga

SEQ ID NO: 644342 - RNA, 19 nt, Homo sapiens
  misc_RNA (1)...(19): siRNA sense strand
gcagcuugccgcucuagaa

SEQ ID NO: 644343 - RNA, 19 nt, Homo sapiens
  misc_RNA (1)...(19): siRNA sense strand
gcacaagggacucuaacca

SEQ ID NO: 644344 - RNA, 19 nt, Homo sapiens
  misc_RNA (1)...(19): siRNA sense strand
ggccaagccagugauauuu

SEQ ID NO: 644345 - RNA, 19 nt, Homo sapiens
  misc_RNA (1)...(19): siRNA sense strand
ccacucaacccaagaagca

SEQ ID NO: 644346 - RNA, 19 nt, Homo sapiens
  misc_RNA (1)...(19): siRNA sense strand
ggaaaggcucagaguuuag

SEQ ID NO: 644347 - RNA, 19 nt, Homo sapiens
  misc_RNA (1)...(19): siRNA sense strand
uguguuggcuguggaaaga

SEQ ID NO: 644348 - RNA, 19 nt, Homo sapiens
  misc_RNA (1)...(19): siRNA sense strand
gggaacagagcuaaguaug

SEQ ID NO: 644349 - RNA, 19 nt, Homo sapiens
  misc_RNA (1)...(19): siRNA sense strand
aaaggguggucuccagaau

SEQ ID NO: 644350 - RNA, 19 nt, Homo sapiens
  misc_RNA (1)...(19): siRNA sense strand
ggcuuuagguaucuuguca

SEQ ID NO: 644351 - RNA, 19 nt, Homo sapiens
  misc_RNA (1)...(19): siRNA sense strand
uuggaaaggcucagaguuu

SEQ ID NO: 644352 - RNA, 19 nt, Homo sapiens
  misc_RNA (1)...(19): siRNA sense strand
ucuguuacuucacggaauu

SEQ ID NO: 644353 - RNA, 19 nt, Homo sapiens
  misc_RNA (1)...(19): siRNA sense strand
caaaggguggucuccagaa

SEQ ID NO: 644354 - RNA, 19 nt, Homo sapiens
  misc_RNA (1)...(19): siRNA sense strand
ccaagguggugggaacaga

SEQ ID NO: 644355 - RNA, 19 nt, Homo sapiens
  misc_RNA (1)...(19): siRNA sense strand
cuuuagguaucuugucaaa

SEQ ID NO: 644356 - RNA, 19 nt, Homo sapiens
  misc_RNA (1)...(19): siRNA sense strand
caaggccaagccagugaua

SEQ ID NO: 644357 - RNA, 19 nt, Homo sapiens
  misc_RNA (1)...(19): siRNA sense strand
gaccuuuaaucuguuggaa

SEQ ID NO: 644358 - RNA, 19 nt, Homo sapiens
  misc_RNA (1)...(19): siRNA sense strand
gcagcagcuugccgcucua

SEQ ID NO: 644359 - RNA, 19 nt, Homo sapiens
  misc_RNA (1)...(19): siRNA sense strand
gcugaagacgacacgcuuu

SEQ ID NO: 644360 - RNA, 19 nt, Homo sapiens
  misc_RNA (1)...(19): siRNA sense strand
aaaggcuucuguuacuuca

SEQ ID NO: 644361 - RNA, 19 nt, Homo sapiens
  misc_RNA (1)...(19): siRNA sense strand
ggagggcuggaaacaaaug

SEQ ID NO: 644362 - RNA, 19 nt, Homo sapiens
  misc_RNA (1)...(19): siRNA sense strand
ccugacaacuugcugaaaa

SEQ ID NO: 644363 - RNA, 19 nt, Homo sapiens
  misc_RNA (1)...(19): siRNA sense strand
gcuugccgcucuagaaggu

SEQ ID NO: 644364 - RNA, 19 nt, Homo sapiens
  misc_RNA (1)...(19): siRNA sense strand
uggcaaagaauaaccuguu

SEQ ID NO: 644365 - RNA, 19 nt, Homo sapiens
  misc_RNA (1)...(19): siRNA sense strand
ccugaaggaugcuguacca

SEQ ID NO: 644366 - RNA, 19 nt, Homo sapiens
  misc_RNA (1)...(19): siRNA sense strand
cacaagggacucuaaccaa

SEQ ID NO: 644367 - RNA, 19 nt, Homo sapiens
  misc_RNA (1)...(19): siRNA sense strand
acaaugaggaagaggaaga

SEQ ID NO: 644368 - RNA, 19 nt, Homo sapiens
  misc_RNA (1)...(19): siRNA sense strand
gcaaagauuccccgaagug

SEQ ID NO: 644369 - RNA, 19 nt, Homo sapiens
  misc_RNA (1)...(19): siRNA sense strand
agacgacacgcuuugaaga

SEQ ID NO: 644370 - RNA, 19 nt, Homo sapiens
  misc_RNA (1)...(19): siRNA sense strand
caagggacucuaaccaaag

SEQ ID NO: 644371 - RNA, 19 nt, Homo sapiens
  misc_RNA (1)...(19): siRNA sense strand
ggugugcgccguugacaag

SEQ ID NO: 644372 - RNA, 19 nt, Homo sapiens
  misc_RNA (1)...(19): siRNA sense strand
gaagcagaaacacuugaag

SEQ ID NO: 644373 - RNA, 19 nt, Homo sapiens
  misc_RNA (1)...(19): siRNA sense strand
ucacuaaacgcagcaaugg

SEQ ID NO: 644374 - RNA, 19 nt, Homo sapiens
  misc_RNA (1)...(19): siRNA sense strand
gaguggacaaugaggaaga

SEQ ID NO: 644375 - RNA, 19 nt, Homo sapiens
  misc_RNA (1)...(19): siRNA sense strand
gaugacaauggccacaaug

SEQ ID NO: 644376 - RNA, 19 nt, Homo sapiens
  misc_RNA (1)...(19): siRNA sense strand
guucuugccagaugacaau

SEQ ID NO: 644377 - RNA, 19 nt, Homo sapiens
  misc_RNA (1)...(19): siRNA sense strand
caagccagugauauuuaaa

SEQ ID NO: 644378 - RNA, 19 nt, Homo sapiens
  misc_RNA (1)...(19): siRNA sense strand
gugggaacagagcuaagua

SEQ ID NO: 644379 - RNA, 19 nt, Homo sapiens
  misc_RNA (1)...(19): siRNA sense strand
agaugacaauggccacaau

SEQ ID NO: 644380 - RNA, 19 nt, Homo sapiens
  misc_RNA (1)...(19): siRNA sense strand
uguuggcuguggaaagaaa

SEQ ID NO: 644381 - RNA, 19 nt, Homo sapiens
  misc_RNA (1)...(19): siRNA sense strand
caaugaggaagaggaagaa

SEQ ID NO: 644382 - RNA, 19 nt, Homo sapiens
  misc_RNA (1)...(19): siRNA sense strand
ugaggaagaggaagaagag

SEQ ID NO: 644383 - RNA, 19 nt, Homo sapiens
  misc_RNA (1)...(19): siRNA sense strand
gcaggaccagcuucugauc

SEQ ID NO: 644384 - RNA, 19 nt, Homo sapiens
  misc_RNA (1)...(19): siRNA sense strand
agagguucuugccagauga

SEQ ID NO: 644385 - RNA, 19 nt, Homo sapiens
  misc_RNA (1)...(19): siRNA sense strand
gggagaaggagggcuggaa

SEQ ID NO: 644386 - RNA, 19 nt, Homo sapiens
  misc_RNA (1)...(19): siRNA sense strand
gguggccucuggagaacca

SEQ ID NO: 644387 - RNA, 19 nt, Homo sapiens
  misc_RNA (1)...(19): siRNA sense strand
uaugagagcgcaggcaugu

SEQ ID NO: 644388 - RNA, 19 nt, Homo sapiens
  misc_RNA (1)...(19): siRNA sense strand
ugaagacgacacgcuuuga

SEQ ID NO: 644389 - RNA, 19 nt, Homo sapiens
  misc_RNA (1)...(19): siRNA sense strand
aggccaagccagugauauu

SEQ ID NO: 644390 - RNA, 19 nt, Homo sapiens
  misc_RNA (1)...(19): siRNA sense strand
agaagcagaaacacuugaa

SEQ ID NO: 644391 - RNA, 19 nt, Homo sapiens
  misc_RNA (1)...(19): siRNA sense strand
gcaaggccaagccagugau

SEQ ID NO: 644392 - RNA, 19 nt, Homo sapiens
  misc_RNA (1)...(19): siRNA sense strand
gucuguuccugacaacuug

SEQ ID NO: 644393 - RNA, 19 nt, Homo sapiens
  misc_RNA (1)...(19): siRNA sense strand
gaacagagcuaaguaugag

SEQ ID NO: 644394 - RNA, 19 nt, Homo sapiens
  misc_RNA (1)...(19): siRNA sense strand
ggaauucuccaaucauaua

SEQ ID NO: 644395 - RNA, 19 nt, Homo sapiens
  misc_RNA (1)...(19): siRNA sense strand
caacaacuggcaaagaaua

SEQ ID NO: 644396 - RNA, 19 nt, Homo sapiens
  misc_RNA (1)...(19): siRNA sense strand
acaaugcucuucuugguuu

SEQ ID NO: 644397 - RNA, 19 nt, Homo sapiens
  misc_RNA (1)...(19): siRNA sense strand
uggaaaggcucagaguuua

SEQ ID NO: 644398 - RNA, 19 nt, Homo sapiens
  misc_RNA (1)...(19): siRNA sense strand
ccaagccagugauauuuaa

SEQ ID NO: 644399 - RNA, 19 nt, Homo sapiens
  misc_RNA (1)...(19): siRNA sense strand
ggaagaagagggagaagga

SEQ ID NO: 644400 - RNA, 19 nt, Homo sapiens
  misc_RNA (1)...(19): siRNA sense strand
aaggagggcuggaaacaaa

SEQ ID NO: 644401 - RNA, 19 nt, Homo sapiens
  misc_RNA (1)...(19): siRNA sense strand
ggaacagagcuaaguauga

SEQ ID NO: 644402 - RNA, 19 nt, Homo sapiens
  misc_RNA (1)...(19): siRNA sense strand
ucacggaauucuccaauca

SEQ ID NO: 644403 - RNA, 19 nt, Homo sapiens
  misc_RNA (1)...(19): siRNA sense strand
acaagggacucuaaccaaa

SEQ ID NO: 644404 - RNA, 19 nt, Homo sapiens
  misc_RNA (1)...(19): siRNA sense strand
ccacaaugcucuucuuggu

SEQ ID NO: 644405 - RNA, 19 nt, Homo sapiens
  misc_RNA (1)...(19): siRNA sense strand
gaaaggcuucuguuacuuc

SEQ ID NO: 644406 - RNA, 19 nt, Homo sapiens
  misc_RNA (1)...(19): siRNA sense strand
ccaagaagcagaaacacuu

SEQ ID NO: 644407 - RNA, 19 nt, Homo sapiens
  misc_RNA (1)...(19): siRNA sense strand
gaagacgacacgcuuugaa

SEQ ID NO: 644408 - RNA, 19 nt, Homo sapiens
  misc_RNA (1)...(19): siRNA sense strand
gaaaggcucagaguuuaga

SEQ ID NO: 644409 - RNA, 19 nt, Homo sapiens
  misc_RNA (1)...(19): siRNA sense strand
ggcaaagaauaaccuguug

SEQ ID NO: 644410 - RNA, 19 nt, Homo sapiens
  misc_RNA (1)...(19): siRNA sense strand
ggacaaugaggaagaggaa

SEQ ID NO: 644411 - RNA, 19 nt, Homo sapiens
  misc_RNA (1)...(19): siRNA sense strand
gccaagccagugauauuua

SEQ ID NO: 644412 - RNA, 19 nt, Homo sapiens
  misc_RNA (1)...(19): siRNA sense strand
ggagaaggagggcuggaaa

SEQ ID NO: 644413 - RNA, 19 nt, Homo sapiens
  misc_RNA (1)...(19): siRNA sense strand
ggaugucccugcgggcuuu

SEQ ID NO: 644414 - RNA, 19 nt, Homo sapiens
  misc_RNA (1)...(19): siRNA sense strand
ccaacgagcccauggaugu

SEQ ID NO: 644415 - RNA, 19 nt, Homo sapiens
  misc_RNA (1)...(19): siRNA sense strand
acggaauucuccaaucaua

SEQ ID NO: 644416 - RNA, 19 nt, Homo sapiens
  misc_RNA (1)...(19): siRNA sense strand
uuagguaucuugucaaacu

SEQ ID NO: 644417 - RNA, 19 nt, Homo sapiens
  misc_RNA (1)...(19): siRNA sense strand
gaccaucggcuuuagguau

SEQ ID NO: 644418 - RNA, 19 nt, Homo sapiens
  misc_RNA (1)...(19): siRNA sense strand
gcaauggguccggcuguuu

SEQ ID NO: 644419 - RNA, 19 nt, Homo sapiens
  misc_RNA (1)...(19): siRNA sense strand
gaaggagggcuggaaacaa

SEQ ID NO: 644420 - RNA, 19 nt, Homo sapiens
  misc_RNA (1)...(19): siRNA sense strand
gccaguacuuguuccaguu

SEQ ID NO: 644421 - RNA, 19 nt, Homo sapiens
  misc_RNA (1)...(19): siRNA sense strand
guagccgaguggacaauga

SEQ ID NO: 644422 - RNA, 19 nt, Homo sapiens
  misc_RNA (1)...(19): siRNA sense strand
gcagcuugccgcucuagaa

SEQ ID NO: 644423 - RNA, 19 nt, Homo sapiens
  misc_RNA (1)...(19): siRNA sense strand
gcacaagggacucuaacca

SEQ ID NO: 644424 - RNA, 19 nt, Homo sapiens
  misc_RNA (1)...(19): siRNA sense strand
ggccaagccagugauauuu

SEQ ID NO: 644425 - RNA, 19 nt, Homo sapiens
  misc_RNA (1)...(19): siRNA sense strand
ccacucaacccaagaagca

SEQ ID NO: 644426 - RNA, 19 nt, Homo sapiens
  misc_RNA (1)...(19): siRNA sense strand
ggaaaggcucagaguuuag

SEQ ID NO: 644427 - RNA, 19 nt, Homo sapiens
  misc_RNA (1)...(19): siRNA sense strand
uguguuggcuguggaaaga

SEQ ID NO: 644428 - RNA, 19 nt, Homo sapiens
  misc_RNA (1)...(19): siRNA sense strand
gggaacagagcuaaguaug

SEQ ID NO: 644429 - RNA, 19 nt, Homo sapiens
  misc_RNA (1)...(19): siRNA sense strand
aaaggguggucuccagaau

SEQ ID NO: 644430 - RNA, 19 nt, Homo sapiens
  misc_RNA (1)...(19): siRNA sense strand
ggcuuuagguaucuuguca

SEQ ID NO: 644431 - RNA, 19 nt, Homo sapiens
  misc_RNA (1)...(19): siRNA sense strand
uuggaaaggcucagaguuu

SEQ ID NO: 644432 - RNA, 19 nt, Homo sapiens
  misc_RNA (1)...(19): siRNA sense strand
ucuguuacuucacggaauu

SEQ ID NO: 644433 - RNA, 19 nt, Homo sapiens
  misc_RNA (1)...(19): siRNA sense strand
caaaggguggucuccagaa

SEQ ID NO: 644434 - RNA, 19 nt, Homo sapiens
  misc_RNA (1)...(19): siRNA sense strand
ccaagguggugggaacaga

SEQ ID NO: 644435 - RNA, 19 nt, Homo sapiens
  misc_RNA (1)...(19): siRNA sense strand
cuuuagguaucuugucaaa

SEQ ID NO: 644436 - RNA, 19 nt, Homo sapiens
  misc_RNA (1)...(19): siRNA sense strand
caaggccaagccagugaua

SEQ ID NO: 644437 - RNA, 19 nt, Homo sapiens
  misc_RNA (1)...(19): siRNA sense strand
gaccuuuaaucuguuggaa

SEQ ID NO: 644438 - RNA, 19 nt, Homo sapiens
  misc_RNA (1)...(19): siRNA sense strand
gcagcagcuugccgcucua

SEQ ID NO: 644439 - RNA, 19 nt, Homo sapiens
  misc_RNA (1)...(19): siRNA sense strand
gcugaagacgacacgcuuu

SEQ ID NO: 644440 - RNA, 19 nt, Homo sapiens
  misc_RNA (1)...(19): siRNA sense strand
aaaggcuucuguuacuuca

SEQ ID NO: 644441 - RNA, 19 nt, Homo sapiens
  misc_RNA (1)...(19): siRNA sense strand
ggagggcuggaaacaaaug

SEQ ID NO: 644442 - RNA, 19 nt, Homo sapiens
  misc_RNA (1)...(19): siRNA sense strand
ccugacaacuugcugaaaa

SEQ ID NO: 644443 - RNA, 19 nt, Homo sapiens
  misc_RNA (1)...(19): siRNA sense strand
gcuugccgcucuagaaggu

SEQ ID NO: 644444 - RNA, 19 nt, Homo sapiens
  misc_RNA (1)...(19): siRNA sense strand
uggcaaagaauaaccuguu

SEQ ID NO: 644445 - RNA, 19 nt, Homo sapiens
  misc_RNA (1)...(19): siRNA sense strand
ccugaaggaugcuguacca

SEQ ID NO: 644446 - RNA, 19 nt, Homo sapiens
  misc_RNA (1)...(19): siRNA sense strand
cacaagggacucuaaccaa

SEQ ID NO: 644447 - RNA, 19 nt, Homo sapiens
  misc_RNA (1)...(19): siRNA sense strand
acaaugaggaagaggaaga

SEQ ID NO: 644448 - RNA, 19 nt, Homo sapiens
  misc_RNA (1)...(19): siRNA sense strand
gcaaagauuccccgaagug

SEQ ID NO: 644449 - RNA, 19 nt, Homo sapiens
  misc_RNA (1)...(19): siRNA sense strand
agacgacacgcuuugaaga

SEQ ID NO: 644450 - RNA, 19 nt, Homo sapiens
  misc_RNA (1)...(19): siRNA sense strand
caagggacucuaaccaaag

SEQ ID NO: 644451 - RNA, 19 nt, Homo sapiens
  misc_RNA (1)...(19): siRNA sense strand
ggugugcgccguugacaag

SEQ ID NO: 644452 - RNA, 19 nt, Homo sapiens
  misc_RNA (1)...(19): siRNA sense strand
gaagcagaaacacuugaag

SEQ ID NO: 644453 - RNA, 19 nt, Homo sapiens
  misc_RNA (1)...(19): siRNA sense strand
ucacuaaacgcagcaaugg

SEQ ID NO: 644454 - RNA, 19 nt, Homo sapiens
  misc_RNA (1)...(19): siRNA sense strand
gaguggacaaugaggaaga

SEQ ID NO: 644455 - RNA, 19 nt, Homo sapiens
  misc_RNA (1)...(19): siRNA sense strand
gaugacaauggccacaaug

SEQ ID NO: 644456 - RNA, 19 nt, Homo sapiens
  misc_RNA (1)...(19): siRNA sense strand
guucuugccagaugacaau

SEQ ID NO: 644457 - RNA, 19 nt, Homo sapiens
  misc_RNA (1)...(19): siRNA sense strand
caagccagugauauuuaaa

SEQ ID NO: 644458 - RNA, 19 nt, Homo sapiens
  misc_RNA (1)...(19): siRNA sense strand
gugggaacagagcuaagua

SEQ ID NO: 644459 - RNA, 19 nt, Homo sapiens
  misc_RNA (1)...(19): siRNA sense strand
agaugacaauggccacaau

SEQ ID NO: 644460 - RNA, 19 nt, Homo sapiens
  misc_RNA (1)...(19): siRNA sense strand
uguuggcuguggaaagaaa

SEQ ID NO: 644461 - RNA, 19 nt, Homo sapiens
  misc_RNA (1)...(19): siRNA sense strand
caaugaggaagaggaagaa

SEQ ID NO: 644462 - RNA, 19 nt, Homo sapiens
  misc_RNA (1)...(19): siRNA sense strand
ugaggaagaggaagaagag

SEQ ID NO: 644463 - RNA, 19 nt, Homo sapiens
  misc_RNA (1)...(19): siRNA sense strand
gcaggaccagcuucugauc

SEQ ID NO: 644464 - RNA, 19 nt, Homo sapiens
  misc_RNA (1)...(19): siRNA sense strand
agagguucuugccagauga

SEQ ID NO: 644465 - RNA, 19 nt, Homo sapiens
  misc_RNA (1)...(19): siRNA sense strand
gggagaaggagggcuggaa

SEQ ID NO: 644466 - RNA, 19 nt, Homo sapiens
  misc_RNA (1)...(19): siRNA sense strand
gguggccucuggagaacca

SEQ ID NO: 644467 - RNA, 19 nt, Homo sapiens
  misc_RNA (1)...(19): siRNA sense strand
uaugagagcgcaggcaugu

SEQ ID NO: 644468 - RNA, 19 nt, Homo sapiens
  misc_RNA (1)...(19): siRNA sense strand
ugaagacgacacgcuuuga

SEQ ID NO: 644469 - RNA, 19 nt, Homo sapiens
  misc_RNA (1)...(19): siRNA sense strand
aggccaagccagugauauu

SEQ ID NO: 644470 - RNA, 19 nt, Homo sapiens
  misc_RNA (1)...(19): siRNA sense strand
agaagcagaaacacuugaa

SEQ ID NO: 644471 - RNA, 19 nt, Homo sapiens
  misc_RNA (1)...(19): siRNA sense strand
gcaaggccaagccagugau

SEQ ID NO: 644472 - RNA, 19 nt, Homo sapiens
  misc_RNA (1)...(19): siRNA sense strand
gucuguuccugacaacuug

SEQ ID NO: 644473 - RNA, 19 nt, Homo sapiens
  misc_RNA (1)...(19): siRNA sense strand
cagagaaacucaucuauaa

SEQ ID NO: 644474 - RNA, 19 nt, Homo sapiens
  misc_RNA (1)...(19): siRNA sense strand
uaaaggaacuucagcauga

SEQ ID NO: 644475 - RNA, 19 nt, Homo sapiens
  misc_RNA (1)...(19): siRNA sense strand
gaccacagcuccuuucaaa

SEQ ID NO: 644476 - RNA, 19 nt, Homo sapiens
  misc_RNA (1)...(19): siRNA sense strand
guacauggcuccugagguu

SEQ ID NO: 644477 - RNA, 19 nt, Homo sapiens
  misc_RNA (1)...(19): siRNA sense strand
guggagaccucgcagauua

SEQ ID NO: 644478 - RNA, 19 nt, Homo sapiens
  misc_RNA (1)...(19): siRNA sense strand
gaaagggacucucagugaa

SEQ ID NO: 644479 - RNA, 19 nt, Homo sapiens
  misc_RNA (1)...(19): siRNA sense strand
gaagaacagucgaaagaug

SEQ ID NO: 644480 - RNA, 19 nt, Homo sapiens
  misc_RNA (1)...(19): siRNA sense strand
gaacagugauauaccaaug

SEQ ID NO: 644481 - RNA, 19 nt, Homo sapiens
  misc_RNA (1)...(19): siRNA sense strand
gcaagaaacuuacagaaaa

SEQ ID NO: 644482 - RNA, 19 nt, Homo sapiens
  misc_RNA (1)...(19): siRNA sense strand
gcagagaaacucaucuaua

SEQ ID NO: 644483 - RNA, 19 nt, Homo sapiens
  misc_RNA (1)...(19): siRNA sense strand
gaacgaacgauauaaauuc

SEQ ID NO: 644484 - RNA, 19 nt, Homo sapiens
  misc_RNA (1)...(19): siRNA sense strand
gaaguuaucagaucaacaa

SEQ ID NO: 644485 - RNA, 19 nt, Homo sapiens
  misc_RNA (1)...(19): siRNA sense strand
gaccgaagauauuguuuau

SEQ ID NO: 644486 - RNA, 19 nt, Homo sapiens
  misc_RNA (1)...(19): siRNA sense strand
gagcauaggaacagugaua

SEQ ID NO: 644487 - RNA, 19 nt, Homo sapiens
  misc_RNA (1)...(19): siRNA sense strand
ucagaccacucaugugaua

SEQ ID NO: 644488 - RNA, 19 nt, Homo sapiens
  misc_RNA (1)...(19): siRNA sense strand
ccacagagaucucaaacca

SEQ ID NO: 644489 - RNA, 19 nt, Homo sapiens
  misc_RNA (1)...(19): siRNA sense strand
agagaaacaucaccuuauu

SEQ ID NO: 644490 - RNA, 19 nt, Homo sapiens
  misc_RNA (1)...(19): siRNA sense strand
guacaugguucuccaagau

SEQ ID NO: 644491 - RNA, 19 nt, Homo sapiens
  misc_RNA (1)...(19): siRNA sense strand
gcacagacaguuuaaauac

SEQ ID NO: 644492 - RNA, 19 nt, Homo sapiens
  misc_RNA (1)...(19): siRNA sense strand
cgauauaaauucugcauca

SEQ ID NO: 644493 - RNA, 19 nt, Homo sapiens
  misc_RNA (1)...(19): siRNA sense strand
ggaacacacagacaccuua

SEQ ID NO: 644494 - RNA, 19 nt, Homo sapiens
  misc_RNA (1)...(19): siRNA sense strand
uaauugugcuguagaaaug

SEQ ID NO: 644495 - RNA, 19 nt, Homo sapiens
  misc_RNA (1)...(19): siRNA sense strand
uccaagaucugcaguggua

SEQ ID NO: 644496 - RNA, 19 nt, Homo sapiens
  misc_RNA (1)...(19): siRNA sense strand
gagcagaaucuuacaucua

SEQ ID NO: 644497 - RNA, 19 nt, Homo sapiens
  misc_RNA (1)...(19): siRNA sense strand
cagaaaagcugaaucgauu

SEQ ID NO: 644498 - RNA, 19 nt, Homo sapiens
  misc_RNA (1)...(19): siRNA sense strand
gaacuucucccaccaagca

SEQ ID NO: 644499 - RNA, 19 nt, Homo sapiens
  misc_RNA (1)...(19): siRNA sense strand
cgaaagggacucucaguga

SEQ ID NO: 644500 - RNA, 19 nt, Homo sapiens
  misc_RNA (1)...(19): siRNA sense strand
cuacaaguuuccaaagauu

SEQ ID NO: 644501 - RNA, 19 nt, Homo sapiens
  misc_RNA (1)...(19): siRNA sense strand
gagaaacaucaccuuauuu

SEQ ID NO: 644502 - RNA, 19 nt, Homo sapiens
  misc_RNA (1)...(19): siRNA sense strand
ccagagaaacaucaccuua

SEQ ID NO: 644503 - RNA, 19 nt, Homo sapiens
  misc_RNA (1)...(19): siRNA sense strand
gaugaaaucaacaguguga

SEQ ID NO: 644504 - RNA, 19 nt, Homo sapiens
  misc_RNA (1)...(19): siRNA sense strand
uggagcagcugguguugua

SEQ ID NO: 644505 - RNA, 19 nt, Homo sapiens
  misc_RNA (1)...(19): siRNA sense strand
gggcagcacagacaguuua

SEQ ID NO: 644506 - RNA, 19 nt, Homo sapiens
  misc_RNA (1)...(19): siRNA sense strand
guuaucagaucaacaagga

SEQ ID NO: 644507 - RNA, 19 nt, Homo sapiens
  misc_RNA (1)...(19): siRNA sense strand
ugacacggaugacuuuguu

SEQ ID NO: 644508 - RNA, 19 nt, Homo sapiens
  misc_RNA (1)...(19): siRNA sense strand
caccaucccuuccagauau

SEQ ID NO: 644509 - RNA, 19 nt, Homo sapiens
  misc_RNA (1)...(19): siRNA sense strand
ccucaagacuuaaggaugu

SEQ ID NO: 644510 - RNA, 19 nt, Homo sapiens
  misc_RNA (1)...(19): siRNA sense strand
ucuaugauguucaggaauu

SEQ ID NO: 644511 - RNA, 19 nt, Homo sapiens
  misc_RNA (1)...(19): siRNA sense strand
caucugcuguguccuugua

SEQ ID NO: 644512 - RNA, 19 nt, Homo sapiens
  misc_RNA (1)...(19): siRNA sense strand
gcagacgugcuucaaauga

SEQ ID NO: 644513 - RNA, 19 nt, Homo sapiens
  misc_RNA (1)...(19): siRNA sense strand
ggagguagcuauuaaaagu

SEQ ID NO: 644514 - RNA, 19 nt, Homo sapiens
  misc_RNA (1)...(19): siRNA sense strand
ucacaaauacugcuuggaa

SEQ ID NO: 644515 - RNA, 19 nt, Homo sapiens
  misc_RNA (1)...(19): siRNA sense strand
gcauaggaacagugauaua

SEQ ID NO: 644516 - RNA, 19 nt, Homo sapiens
  misc_RNA (1)...(19): siRNA sense strand
cagcugguguuguacauga

SEQ ID NO: 644517 - RNA, 19 nt, Homo sapiens
  misc_RNA (1)...(19): siRNA sense strand
gcagagcaaggcaguguuu

SEQ ID NO: 644518 - RNA, 19 nt, Homo sapiens
  misc_RNA (1)...(19): siRNA sense strand
gcucguuaccuacauagua

SEQ ID NO: 644519 - RNA, 19 nt, Homo sapiens
  misc_RNA (1)...(19): siRNA sense strand
ggaauuaucagcgcauaga

SEQ ID NO: 644520 - RNA, 19 nt, Homo sapiens
  misc_RNA (1)...(19): siRNA sense strand
ggaaugagccacgggaaug

SEQ ID NO: 644521 - RNA, 19 nt, Homo sapiens
  misc_RNA (1)...(19): siRNA sense strand
gaacaagaacaaccucagu

SEQ ID NO: 644522 - RNA, 19 nt, Homo sapiens
  misc_RNA (1)...(19): siRNA sense strand
ugaaugugaugcugauguu

SEQ ID NO: 644523 - RNA, 19 nt, Homo sapiens
  misc_RNA (1)...(19): siRNA sense strand
cacaaauacugcuuggaaa

SEQ ID NO: 644524 - RNA, 19 nt, Homo sapiens
  misc_RNA (1)...(19): siRNA sense strand
ggaaagacuccuauauguc

SEQ ID NO: 644525 - RNA, 19 nt, Homo sapiens
  misc_RNA (1)...(19): siRNA sense strand
agaaacaucaccuuauuug

SEQ ID NO: 644526 - RNA, 19 nt, Homo sapiens
  misc_RNA (1)...(19): siRNA sense strand
aguagaaacuccucagguu

SEQ ID NO: 644527 - RNA, 19 nt, Homo sapiens
  misc_RNA (1)...(19): siRNA sense strand
gcauagagcagaaucuuac

SEQ ID NO: 644528 - RNA, 19 nt, Homo sapiens
  misc_RNA (1)...(19): siRNA sense strand
aagauagaauggacuuuga

SEQ ID NO: 644529 - RNA, 19 nt, Homo sapiens
  misc_RNA (1)...(19): siRNA sense strand
ggagcuuaaugccuaguau

SEQ ID NO: 644530 - RNA, 19 nt, Homo sapiens
  misc_RNA (1)...(19): siRNA sense strand
caucuauaauugugcugua

SEQ ID NO: 644531 - RNA, 19 nt, Homo sapiens
  misc_RNA (1)...(19): siRNA sense strand
acagaacgaccaauggaua

SEQ ID NO: 644532 - RNA, 19 nt, Homo sapiens
  misc_RNA (1)...(19): siRNA sense strand
ggaaucauccacagagauc

SEQ ID NO: 644533 - RNA, 19 nt, Homo sapiens
  misc_RNA (1)...(19): siRNA sense strand
ucaugggccugcugaagaa

SEQ ID NO: 644534 - RNA, 19 nt, Homo sapiens
  misc_RNA (1)...(19): siRNA sense strand
gcacagacaguuggacgaa

SEQ ID NO: 644535 - RNA, 19 nt, Homo sapiens
  misc_RNA (1)...(19): siRNA sense strand
gauauaccaaugccuaguu

SEQ ID NO: 644536 - RNA, 19 nt, Homo sapiens
  misc_RNA (1)...(19): siRNA sense strand
cagcgaaacagcaccaauu

SEQ ID NO: 644537 - RNA, 19 nt, Homo sapiens
  misc_RNA (1)...(19): siRNA sense strand
uggcagacgugcuucaaau

SEQ ID NO: 644538 - RNA, 19 nt, Homo sapiens
  misc_RNA (1)...(19): siRNA sense strand
ccucgcagauuauuugcaa

SEQ ID NO: 644539 - RNA, 19 nt, Homo sapiens
  misc_RNA (1)...(19): siRNA sense strand
gcagaccgaagauauuguu

SEQ ID NO: 644540 - RNA, 19 nt, Homo sapiens
  misc_RNA (1)...(19): siRNA sense strand
cgucagaccacucauguga

SEQ ID NO: 644541 - RNA, 19 nt, Homo sapiens
  misc_RNA (1)...(19): siRNA sense strand
gaaaacugauugggaggua

SEQ ID NO: 644542 - RNA, 19 nt, Homo sapiens
  misc_RNA (1)...(19): siRNA sense strand
gcacagcaaaggaaucauc

SEQ ID NO: 644543 - RNA, 19 nt, Homo sapiens
  misc_RNA (1)...(19): siRNA sense strand
gaacgaccaauggauauag

SEQ ID NO: 644544 - RNA, 19 nt, Homo sapiens
  misc_RNA (1)...(19): siRNA sense strand
caaguugucaagaaucuga

SEQ ID NO: 644545 - RNA, 19 nt, Homo sapiens
  misc_RNA (1)...(19): siRNA sense strand
cagcacagacaguuuaaau

SEQ ID NO: 644546 - RNA, 19 nt, Homo sapiens
  misc_RNA (1)...(19): siRNA sense strand
aaucugaacgaacgauaua

SEQ ID NO: 644547 - RNA, 19 nt, Homo sapiens
  misc_RNA (1)...(19): siRNA sense strand
cagagaaacaucaccuuau

SEQ ID NO: 644548 - RNA, 19 nt, Homo sapiens
  misc_RNA (1)...(19): siRNA sense strand
agaccgaagauauuguuua

SEQ ID NO: 644549 - RNA, 19 nt, Homo sapiens
  misc_RNA (1)...(19): siRNA sense strand
gaaucugaacgaacgauau

SEQ ID NO: 644550 - RNA, 19 nt, Homo sapiens
  misc_RNA (1)...(19): siRNA sense strand
uggguuugcuucagagaaa

SEQ ID NO: 644551 - RNA, 19 nt, Homo sapiens
  misc_RNA (1)...(19): siRNA sense strand
caaaggaaucauccacaga

SEQ ID NO: 644552 - RNA, 19 nt, Homo sapiens
  misc_RNA (1)...(19): siRNA sense strand
gagguuuauugaugaaauc

SEQ ID NO: 644553 - RNA, 19 nt, Homo sapiens
  misc_RNA (1)...(19): siRNA sense strand
aacagagguuuauugauga

SEQ ID NO: 644554 - RNA, 19 nt, Homo sapiens
  misc_RNA (1)...(19): siRNA sense strand
gcuguccucuucacuguag

SEQ ID NO: 644555 - RNA, 19 nt, Homo sapiens
  misc_RNA (1)...(19): siRNA sense strand
uaucagaucaacaaggaaa

SEQ ID NO: 644556 - RNA, 19 nt, Homo sapiens
  misc_RNA (1)...(19): siRNA sense strand
cacccucacugacaucuau

SEQ ID NO: 644557 - RNA, 19 nt, Homo sapiens
  misc_RNA (1)...(19): siRNA sense strand
cuaugauguucaggaauua

SEQ ID NO: 644558 - RNA, 19 nt, Homo sapiens
  misc_RNA (1)...(19): siRNA sense strand
caaagauucugccaguacu

SEQ ID NO: 644559 - RNA, 19 nt, Homo sapiens
  misc_RNA (1)...(19): siRNA sense strand
ccaccaucccuuccagaua

SEQ ID NO: 644560 - RNA, 19 nt, Homo sapiens
  misc_RNA (1)...(19): siRNA sense strand
gagcuuaaugccuaguauu

SEQ ID NO: 644561 - RNA, 19 nt, Homo sapiens
  misc_RNA (1)...(19): siRNA sense strand
uccaguuccuacucaaaua

SEQ ID NO: 644562 - RNA, 19 nt, Homo sapiens
  misc_RNA (1)...(19): siRNA sense strand
cuauaauugugcuguagaa

SEQ ID NO: 644563 - RNA, 19 nt, Homo sapiens
  misc_RNA (1)...(19): siRNA sense strand
gauggaguauugcaauggu

SEQ ID NO: 644564 - RNA, 19 nt, Homo sapiens
  misc_RNA (1)...(19): siRNA sense strand
caaaaucccuaaaacucaa

SEQ ID NO: 644565 - RNA, 19 nt, Homo sapiens
  misc_RNA (1)...(19): siRNA sense strand
ugacaucuaucagaacaag

SEQ ID NO: 644566 - RNA, 19 nt, Homo sapiens
  misc_RNA (1)...(19): siRNA sense strand
guaccauuccugagcaauu

SEQ ID NO: 644567 - RNA, 19 nt, Homo sapiens
  misc_RNA (1)...(19): siRNA sense strand
caauuccaguuccuacuca

SEQ ID NO: 644568 - RNA, 19 nt, Homo sapiens
  misc_RNA (1)...(19): siRNA sense strand
cugaagaacagucgaaaga

SEQ ID NO: 644569 - RNA, 19 nt, Homo sapiens
  misc_RNA (1)...(19): siRNA sense strand
aucauuggcucuccuacua

SEQ ID NO: 644570 - RNA, 19 nt, Homo sapiens
  misc_RNA (1)...(19): siRNA sense strand
cagcagaccgaagauauug

SEQ ID NO: 644571 - RNA, 19 nt, Homo sapiens
  misc_RNA (1)...(19): siRNA sense strand
gaucaaguccgggaaacug

SEQ ID NO: 644572 - RNA, 19 nt, Homo sapiens
  misc_RNA (1)...(19): siRNA sense strand
ccaaagcccagaucaaguc

SEQ ID NO: 644573 - RNA, 19 nt, Homo sapiens
  misc_RNA (1)...(19): siRNA sense strand
gaugagugcuacaacuaua

SEQ ID NO: 644574 - RNA, 19 nt, Homo sapiens
  misc_RNA (1)...(19): siRNA sense strand
ccagugaugcuguaguuua

SEQ ID NO: 644575 - RNA, 19 nt, Homo sapiens
  misc_RNA (1)...(19): siRNA sense strand
ggggaaagcugacggauga

SEQ ID NO: 644576 - RNA, 19 nt, Homo sapiens
  misc_RNA (1)...(19): siRNA sense strand
ggcuggagcuggacacuga

SEQ ID NO: 644577 - RNA, 19 nt, Homo sapiens
  misc_RNA (1)...(19): siRNA sense strand
gggcuggacuuucagagau

SEQ ID NO: 644578 - RNA, 19 nt, Homo sapiens
  misc_RNA (1)...(19): siRNA sense strand
ggacucuacuuucuauuuu

SEQ ID NO: 644579 - RNA, 19 nt, Homo sapiens
  misc_RNA (1)...(19): siRNA sense strand
ggccagugaugcuguaguu

SEQ ID NO: 644580 - RNA, 19 nt, Homo sapiens
  misc_RNA (1)...(19): siRNA sense strand
gccaagauguggagaacug

SEQ ID NO: 644581 - RNA, 19 nt, Homo sapiens
  misc_RNA (1)...(19): siRNA sense strand
ggaagcaccuccuguaccu

SEQ ID NO: 644582 - RNA, 19 nt, Homo sapiens
  misc_RNA (1)...(19): siRNA sense strand
gggacucuacuuucuauuu

SEQ ID NO: 644583 - RNA, 19 nt, Homo sapiens
  misc_RNA (1)...(19): siRNA sense strand
cccgagaccucccugauga

SEQ ID NO: 644584 - RNA, 19 nt, Homo sapiens
  misc_RNA (1)...(19): siRNA sense strand
cauggugacugccaagaug

SEQ ID NO: 644585 - RNA, 19 nt, Homo sapiens
  misc_RNA (1)...(19): siRNA sense strand
ucaagguacuuccccauua

SEQ ID NO: 644586 - RNA, 19 nt, Homo sapiens
  misc_RNA (1)...(19): siRNA sense strand
gaugauguccugaccuuca

SEQ ID NO: 644587 - RNA, 19 nt, Homo sapiens
  misc_RNA (1)...(19): siRNA sense strand
cuacaacuauauucguguu

SEQ ID NO: 644588 - RNA, 19 nt, Homo sapiens
  misc_RNA (1)...(19): siRNA sense strand
agagauuccugaccuugaa

SEQ ID NO: 644589 - RNA, 19 nt, Homo sapiens
  misc_RNA (1)...(19): siRNA sense strand
gaacuugggcuggacuuuc

SEQ ID NO: 644590 - RNA, 19 nt, Homo sapiens
  misc_RNA (1)...(19): siRNA sense strand
caacuauauucguguucuu

SEQ ID NO: 644591 - RNA, 19 nt, Homo sapiens
  misc_RNA (1)...(19): siRNA sense strand
gaccaugucuacuucuucu

SEQ ID NO: 644592 - RNA, 19 nt, Homo sapiens
  misc_RNA (1)...(19): siRNA sense strand
ccgcguagcccgaguaugu

SEQ ID NO: 644593 - RNA, 19 nt, Homo sapiens
  misc_RNA (1)...(19): siRNA sense strand
gcaggagggugaggaacug

SEQ ID NO: 644594 - RNA, 19 nt, Homo sapiens
  misc_RNA (1)...(19): siRNA sense strand
gaaccggaccuugcuagug

SEQ ID NO: 644595 - RNA, 19 nt, Homo sapiens
  misc_RNA (1)...(19): siRNA sense strand
ggaugagugcuacaacuau

SEQ ID NO: 644596 - RNA, 19 nt, Homo sapiens
  misc_RNA (1)...(19): siRNA sense strand
ggccggagguugccuuucu

SEQ ID NO: 644597 - RNA, 19 nt, Homo sapiens
  misc_RNA (1)...(19): siRNA sense strand
ggagcuguuuggcuucuca

SEQ ID NO: 644598 - RNA, 19 nt, Homo sapiens
  misc_RNA (1)...(19): siRNA sense strand
uggccgcucugcucucuuu

SEQ ID NO: 644599 - RNA, 19 nt, Homo sapiens
  misc_RNA (1)...(19): siRNA sense strand
ccaaguaugacuccaagug

SEQ ID NO: 644600 - RNA, 19 nt, Homo sapiens
  misc_RNA (1)...(19): siRNA sense strand
caacguggccaucuuugca

SEQ ID NO: 644601 - RNA, 19 nt, Homo sapiens
  misc_RNA (1)...(19): siRNA sense strand
guggagaacugugcuguac

SEQ ID NO: 644602 - RNA, 19 nt, Homo sapiens
  misc_RNA (1)...(19): siRNA sense strand
gaagcggacagcccaaaca

SEQ ID NO: 644603 - RNA, 19 nt, Homo sapiens
  misc_RNA (1)...(19): siRNA sense strand
ccaggccagugaugcugua

SEQ ID NO: 644604 - RNA, 19 nt, Homo sapiens
  misc_RNA (1)...(19): siRNA sense strand
gcagcuaugggauaacuuc

SEQ ID NO: 644605 - RNA, 19 nt, Homo sapiens
  misc_RNA (1)...(19): siRNA sense strand
ccaacaaguaucuaacaug

SEQ ID NO: 644606 - RNA, 19 nt, Homo sapiens
  misc_RNA (1)...(19): siRNA sense strand
gaagccaagauguggagaa

SEQ ID NO: 644607 - RNA, 19 nt, Homo sapiens
  misc_RNA (1)...(19): siRNA sense strand
ggccuggacuccugugucu

SEQ ID NO: 644608 - RNA, 19 nt, Homo sapiens
  misc_RNA (1)...(19): siRNA sense strand
ggcuggacuuucagagauu

SEQ ID NO: 644609 - RNA, 19 nt, Homo sapiens
  misc_RNA (1)...(19): siRNA sense strand
caagguacuuccccauuau

SEQ ID NO: 644610 - RNA, 19 nt, Homo sapiens
  misc_RNA (1)...(19): siRNA sense strand
cggaugagugcuacaacua

SEQ ID NO: 644611 - RNA, 19 nt, Homo sapiens
  misc_RNA (1)...(19): siRNA sense strand
caaacagcacgacggauca

SEQ ID NO: 644612 - RNA, 19 nt, Homo sapiens
  misc_RNA (1)...(19): siRNA sense strand
cacaguaacaucacaguca

SEQ ID NO: 644613 - RNA, 19 nt, Homo sapiens
  misc_RNA (1)...(19): siRNA sense strand
cuauauucguguucuuguu

SEQ ID NO: 644614 - RNA, 19 nt, Homo sapiens
  misc_RNA (1)...(19): siRNA sense strand
cugaugauguccugaccuu

SEQ ID NO: 644615 - RNA, 19 nt, Homo sapiens
  misc_RNA (1)...(19): siRNA sense strand
cgaggucucuguggaggau

SEQ ID NO: 644616 - RNA, 19 nt, Homo sapiens
  misc_RNA (1)...(19): siRNA sense strand
ugccgcagcuaugggauaa

SEQ ID NO: 644617 - RNA, 19 nt, Homo sapiens
  misc_RNA (1)...(19): siRNA sense strand
ggaaccagaacaggaacaa

SEQ ID NO: 644618 - RNA, 19 nt, Homo sapiens
  misc_RNA (1)...(19): siRNA sense strand
gaucuggugggacugaugu

SEQ ID NO: 644619 - RNA, 19 nt, Homo sapiens
  misc_RNA (1)...(19): siRNA sense strand
gcguagcccgaguauguaa

SEQ ID NO: 644620 - RNA, 19 nt, Homo sapiens
  misc_RNA (1)...(19): siRNA sense strand
cagugaugcuguaguuuac

SEQ ID NO: 644621 - RNA, 19 nt, Homo sapiens
  misc_RNA (1)...(19): siRNA sense strand
gcagagggcagccuguacu

SEQ ID NO: 644622 - RNA, 19 nt, Homo sapiens
  misc_RNA (1)...(19): siRNA sense strand
gcuggugcccaacaaguau

SEQ ID NO: 644623 - RNA, 19 nt, Homo sapiens
  misc_RNA (1)...(19): siRNA sense strand
ccgggaagcaccuccugua

SEQ ID NO: 644624 - RNA, 19 nt, Homo sapiens
  misc_RNA (1)...(19): siRNA sense strand
acaguaacaucacagucau

SEQ ID NO: 644625 - RNA, 19 nt, Homo sapiens
  misc_RNA (1)...(19): siRNA sense strand
agaccucccugaugauguc

SEQ ID NO: 644626 - RNA, 19 nt, Homo sapiens
  misc_RNA (1)...(19): siRNA sense strand
cagagauuccugaccuuga

SEQ ID NO: 644627 - RNA, 19 nt, Homo sapiens
  misc_RNA (1)...(19): siRNA sense strand
gcagcaggagggugaggaa

SEQ ID NO: 644628 - RNA, 19 nt, Homo sapiens
  misc_RNA (1)...(19): siRNA sense strand
uaacauggagaagccaaga

SEQ ID NO: 644629 - RNA, 19 nt, Homo sapiens
  misc_RNA (1)...(19): siRNA sense strand
ugagugcuacaacuauauu

SEQ ID NO: 644630 - RNA, 19 nt, Homo sapiens
  misc_RNA (1)...(19): siRNA sense strand
ugagauugagcguggguuu

SEQ ID NO: 644631 - RNA, 19 nt, Homo sapiens
  misc_RNA (1)...(19): siRNA sense strand
ggcuggugcccaacaagua

SEQ ID NO: 644632 - RNA, 19 nt, Homo sapiens
  misc_RNA (1)...(19): siRNA sense strand
ucaccacccuggaggaacu

SEQ ID NO: 644633 - RNA, 19 nt, Homo sapiens
  misc_RNA (1)...(19): siRNA sense strand
gaggagcuguuuggcuucu

SEQ ID NO: 644634 - RNA, 19 nt, Homo sapiens
  misc_RNA (1)...(19): siRNA sense strand
ccucuacucacucucacua

SEQ ID NO: 644635 - RNA, 19 nt, Homo sapiens
  misc_RNA (1)...(19): siRNA sense strand
gagauugagcguggguuug

SEQ ID NO: 644636 - RNA, 19 nt, Homo sapiens
  misc_RNA (1)...(19): siRNA sense strand
gcccaacaaguaucuaaca

SEQ ID NO: 644637 - RNA, 19 nt, Homo sapiens
  misc_RNA (1)...(19): siRNA sense strand
ggaaagcugacggaugagu

SEQ ID NO: 644638 - RNA, 19 nt, Homo sapiens
  misc_RNA (1)...(19): siRNA sense strand
ccaguguggccgcagcuuu

SEQ ID NO: 644639 - RNA, 19 nt, Homo sapiens
  misc_RNA (1)...(19): siRNA sense strand
gcauggugacugccaagau

SEQ ID NO: 644640 - RNA, 19 nt, Homo sapiens
  misc_RNA (1)...(19): siRNA sense strand
ccuggacuccugugucuga

SEQ ID NO: 644641 - RNA, 19 nt, Homo sapiens
  misc_RNA (1)...(19): siRNA sense strand
guccaacguggccaucuuu

SEQ ID NO: 644642 - RNA, 19 nt, Homo sapiens
  misc_RNA (1)...(19): siRNA sense strand
ggaaccaggaauccaugga

SEQ ID NO: 644643 - RNA, 19 nt, Homo sapiens
  misc_RNA (1)...(19): siRNA sense strand
aacuugggcuggacuuuca

SEQ ID NO: 644644 - RNA, 19 nt, Homo sapiens
  misc_RNA (1)...(19): siRNA sense strand
uaccaccugucacccauca

SEQ ID NO: 644645 - RNA, 19 nt, Homo sapiens
  misc_RNA (1)...(19): siRNA sense strand
agccacagcugcggauuuc

SEQ ID NO: 644646 - RNA, 19 nt, Homo sapiens
  misc_RNA (1)...(19): siRNA sense strand
gcuggacuuucagagauuc

SEQ ID NO: 644647 - RNA, 19 nt, Homo sapiens
  misc_RNA (1)...(19): siRNA sense strand
uggcuucucaggacccaua

SEQ ID NO: 644648 - RNA, 19 nt, Homo sapiens
  misc_RNA (1)...(19): siRNA sense strand
gugcccaacaaguaucuaa

SEQ ID NO: 644649 - RNA, 19 nt, Homo sapiens
  misc_RNA (1)...(19): siRNA sense strand
ucaaggagcagaggagucu

SEQ ID NO: 644650 - RNA, 19 nt, Homo sapiens
  misc_RNA (1)...(19): siRNA sense strand
ucaccacccagaccaauag

SEQ ID NO: 644651 - RNA, 19 nt, Homo sapiens
  misc_RNA (1)...(19): siRNA sense strand
ccaugucuacuucuucuuc

SEQ ID NO: 644652 - RNA, 19 nt, Homo sapiens
  misc_RNA (1)...(19): siRNA sense strand
uauauucguguucuuguuc

SEQ ID NO: 644653 - RNA, 19 nt, Homo sapiens
  misc_RNA (1)...(19): siRNA sense strand
cccaacaaguaucuaacau

SEQ ID NO: 644654 - RNA, 19 nt, Homo sapiens
  misc_RNA (1)...(19): siRNA sense strand
agauugagcguggguuuga

SEQ ID NO: 644655 - RNA, 19 nt, Homo sapiens
  misc_RNA (1)...(19): siRNA sense strand
ccuucuaccuggaugagau

SEQ ID NO: 644656 - RNA, 19 nt, Homo sapiens
  misc_RNA (1)...(19): siRNA sense strand
gggaagcggacagcccaaa

SEQ ID NO: 644657 - RNA, 19 nt, Homo sapiens
  misc_RNA (1)...(19): siRNA sense strand
ggaacgaaguggaugaugu

SEQ ID NO: 644658 - RNA, 19 nt, Homo sapiens
  misc_RNA (1)...(19): siRNA sense strand
gaacgaaguggaugauguu

SEQ ID NO: 644659 - RNA, 19 nt, Homo sapiens
  misc_RNA (1)...(19): siRNA sense strand
gcaacuacaucaccaggau

SEQ ID NO: 644660 - RNA, 19 nt, Homo sapiens
  misc_RNA (1)...(19): siRNA sense strand
gcucgagccugcacaugaa

SEQ ID NO: 644661 - RNA, 19 nt, Homo sapiens
  misc_RNA (1)...(19): siRNA sense strand
agacaggacuucaucuuca

SEQ ID NO: 644662 - RNA, 19 nt, Homo sapiens
  misc_RNA (1)...(19): siRNA sense strand
ggugaaguauggcaacaug

SEQ ID NO: 644663 - RNA, 19 nt, Homo sapiens
  misc_RNA (1)...(19): siRNA sense strand
gcagugcccugaacaagac

SEQ ID NO: 644664 - RNA, 19 nt, Homo sapiens
  misc_RNA (1)...(19): siRNA sense strand
gcgcagaaguaccaugagu

SEQ ID NO: 644665 - RNA, 19 nt, Homo sapiens
  misc_RNA (1)...(19): siRNA sense strand
ggagagacaggacuucauc

SEQ ID NO: 644666 - RNA, 19 nt, Homo sapiens
  misc_RNA (1)...(19): siRNA sense strand
gggcuuccaugggcaacua

SEQ ID NO: 644667 - RNA, 19 nt, Homo sapiens
  misc_RNA (1)...(19): siRNA sense strand
gcacacuccugggaaucuu

SEQ ID NO: 644668 - RNA, 19 nt, Homo sapiens
  misc_RNA (1)...(19): siRNA sense strand
ucaccaggauggcgcagaa

SEQ ID NO: 644669 - RNA, 19 nt, Homo sapiens
  misc_RNA (1)...(19): siRNA sense strand
gagcggaaaccucauugug

SEQ ID NO: 644670 - RNA, 19 nt, Homo sapiens
  misc_RNA (1)...(19): siRNA sense strand
ccucgugccuuucuuuauc

SEQ ID NO: 644671 - RNA, 19 nt, Homo sapiens
  misc_RNA (1)...(19): siRNA sense strand
gagacaggacuucaucuuc

SEQ ID NO: 644672 - RNA, 19 nt, Homo sapiens
  misc_RNA (1)...(19): siRNA sense strand
gcccagcugcccaugauuu

SEQ ID NO: 644673 - RNA, 19 nt, Homo sapiens
  misc_RNA (1)...(19): siRNA sense strand
ccaggauggcgcagaagua

SEQ ID NO: 644674 - RNA, 19 nt, Homo sapiens
  misc_RNA (1)...(19): siRNA sense strand
guacgaagacaaggagaga

SEQ ID NO: 644675 - RNA, 19 nt, Homo sapiens
  misc_RNA (1)...(19): siRNA sense strand
acagcuggauccucuaugu

SEQ ID NO: 644676 - RNA, 19 nt, Homo sapiens
  misc_RNA (1)...(19): siRNA sense strand
cagcugcccaugauuuauu

SEQ ID NO: 644677 - RNA, 19 nt, Homo sapiens
  misc_RNA (1)...(19): siRNA sense strand
gaaccacacgcuguacaau

SEQ ID NO: 644678 - RNA, 19 nt, Homo sapiens
  misc_RNA (1)...(19): siRNA sense strand
gacuucaucuucaccaucu

SEQ ID NO: 644679 - RNA, 19 nt, Homo sapiens
  misc_RNA (1)...(19): siRNA sense strand
cgaaguggaugauguuccu

SEQ ID NO: 644680 - RNA, 19 nt, Homo sapiens
  misc_RNA (1)...(19): siRNA sense strand
ucuccuaccugcggauuga

SEQ ID NO: 644681 - RNA, 19 nt, Homo sapiens
  misc_RNA (1)...(19): siRNA sense strand
uuuauuuccugaaccacua

SEQ ID NO: 644682 - RNA, 19 nt, Homo sapiens
  misc_RNA (1)...(19): siRNA sense strand
gaggugaaguauggcaaca

SEQ ID NO: 644683 - RNA, 19 nt, Homo sapiens
  misc_RNA (1)...(19): siRNA sense strand
caucuacgcccucuuuguc

SEQ ID NO: 644684 - RNA, 19 nt, Homo sapiens
  misc_RNA (1)...(19): siRNA sense strand
caugaguacucccacuaca

SEQ ID NO: 644685 - RNA, 19 nt, Homo sapiens
  misc_RNA (1)...(19): siRNA sense strand
uacagcuucuuccaucuga

SEQ ID NO: 644686 - RNA, 19 nt, Homo sapiens
  misc_RNA (1)...(19): siRNA sense strand
ucagcacacuccugggaau

SEQ ID NO: 644687 - RNA, 19 nt, Homo sapiens
  misc_RNA (1)...(19): siRNA sense strand
ccaccucgugccuuucuuu

SEQ ID NO: 644688 - RNA, 19 nt, Homo sapiens
  misc_RNA (1)...(19): siRNA sense strand
accacacgcuguacaaugu

SEQ ID NO: 644689 - RNA, 19 nt, Homo sapiens
  misc_RNA (1)...(19): siRNA sense strand
gcaucuacgcccucuuugu

SEQ ID NO: 644690 - RNA, 19 nt, Homo sapiens
  misc_RNA (1)...(19): siRNA sense strand
gguaucgccuugggcuaug

SEQ ID NO: 644691 - RNA, 19 nt, Homo sapiens
  misc_RNA (1)...(19): siRNA sense strand
cccagcugcccaugauuua

SEQ ID NO: 644692 - RNA, 19 nt, Homo sapiens
  misc_RNA (1)...(19): siRNA sense strand
caugauuuauuuccugaac

SEQ ID NO: 644693 - RNA, 19 nt, Homo sapiens
  misc_RNA (1)...(19): siRNA sense strand
ggcaggcuguggccaucuu

SEQ ID NO: 644694 - RNA, 19 nt, Homo sapiens
  misc_RNA (1)...(19): siRNA sense strand
gcucaccuucauccucuuu

SEQ ID NO: 644695 - RNA, 19 nt, Homo sapiens
  misc_RNA (1)...(19): siRNA sense strand
ugauuuauuuccugaacca

SEQ ID NO: 644696 - RNA, 19 nt, Homo sapiens
  misc_RNA (1)...(19): siRNA sense strand
cucagcggcuucaacaaga

SEQ ID NO: 644697 - RNA, 19 nt, Homo sapiens
  misc_RNA (1)...(19): siRNA sense strand
ggauggcgcagaaguacca

SEQ ID NO: 644698 - RNA, 19 nt, Homo sapiens
  misc_RNA (1)...(19): siRNA sense strand
caccucgugccuuucuuua

SEQ ID NO: 644699 - RNA, 19 nt, Homo sapiens
  misc_RNA (1)...(19): siRNA sense strand
gcggagcggaaaccucauu

SEQ ID NO: 644700 - RNA, 19 nt, Homo sapiens
  misc_RNA (1)...(19): siRNA sense strand
ugaguacucccacuacaag

SEQ ID NO: 644701 - RNA, 19 nt, Homo sapiens
  misc_RNA (1)...(19): siRNA sense strand
gccugggcgugcucaagaa

SEQ ID NO: 644702 - RNA, 19 nt, Homo sapiens
  misc_RNA (1)...(19): siRNA sense strand
ggucuuccaagccaucuuc

SEQ ID NO: 644703 - RNA, 19 nt, Homo sapiens
  misc_RNA (1)...(19): siRNA sense strand
gugccuuucuuuaucuaca

SEQ ID NO: 644704 - RNA, 19 nt, Homo sapiens
  misc_RNA (1)...(19): siRNA sense strand
ccugaaccacuaccuguau

SEQ ID NO: 644705 - RNA, 19 nt, Homo sapiens
  misc_RNA (1)...(19): siRNA sense strand
cgcagaaguaccaugagua

SEQ ID NO: 644706 - RNA, 19 nt, Homo sapiens
  misc_RNA (1)...(19): siRNA sense strand
gacaggacuucaucuucac

SEQ ID NO: 644707 - RNA, 19 nt, Homo sapiens
  misc_RNA (1)...(19): siRNA sense strand
cuuaccuccucguggcuua

SEQ ID NO: 644708 - RNA, 19 nt, Homo sapiens
  misc_RNA (1)...(19): siRNA sense strand
gcuucgaggugcucuuugc

SEQ ID NO: 644709 - RNA, 19 nt, Homo sapiens
  misc_RNA (1)...(19): siRNA sense strand
caucuucuacagcuucuuc

SEQ ID NO: 644710 - RNA, 19 nt, Homo sapiens
  misc_RNA (1)...(19): siRNA sense strand
cgacaucgacagcaaaaug

SEQ ID NO: 644711 - RNA, 19 nt, Homo sapiens
  misc_RNA (1)...(19): siRNA sense strand
ccucagcggcuucaacaag

SEQ ID NO: 644712 - RNA, 19 nt, Homo sapiens
  misc_RNA (1)...(19): siRNA sense strand
ugaaccacacgcuguacaa

SEQ ID NO: 644713 - RNA, 19 nt, Homo sapiens
  misc_RNA (1)...(19): siRNA sense strand
gcagugcugugaccucugu

SEQ ID NO: 644714 - RNA, 19 nt, Homo sapiens
  misc_RNA (1)...(19): siRNA sense strand
ugucaguccuggugcaaga

SEQ ID NO: 644715 - RNA, 19 nt, Homo sapiens
  misc_RNA (1)...(19): siRNA sense strand
gacgaggaccuggcuguuu

SEQ ID NO: 644716 - RNA, 19 nt, Homo sapiens
  misc_RNA (1)...(19): siRNA sense strand
gacagcaccagccacaguu

SEQ ID NO: 644717 - RNA, 19 nt, Homo sapiens
  misc_RNA (1)...(19): siRNA sense strand
gcaccagccacaguuacuu

SEQ ID NO: 644718 - RNA, 19 nt, Homo sapiens
  misc_RNA (1)...(19): siRNA sense strand
cuguggagccguuguguug

SEQ ID NO: 644719 - RNA, 19 nt, Homo sapiens
  misc_RNA (1)...(19): siRNA sense strand
caggcggucuccaaacucu

SEQ ID NO: 644720 - RNA, 19 nt, Homo sapiens
  misc_RNA (1)...(19): siRNA sense strand
gaucacaccuccagauuug

SEQ ID NO: 644721 - RNA, 19 nt, Homo sapiens
  misc_RNA (1)...(19): siRNA sense strand
gagcagggcugaaagaauc

SEQ ID NO: 644722 - RNA, 19 nt, Homo sapiens
  misc_RNA (1)...(19): siRNA sense strand
uaagagaggcucaguuaua

SEQ ID NO: 644723 - RNA, 19 nt, Homo sapiens
  misc_RNA (1)...(19): siRNA sense strand
gcugaacucuugagccuaa

SEQ ID NO: 644724 - RNA, 19 nt, Homo sapiens
  misc_RNA (1)...(19): siRNA sense strand
gaagauuguuugggaguuu

SEQ ID NO: 644725 - RNA, 19 nt, Homo sapiens
  misc_RNA (1)...(19): siRNA sense strand
gcagcuguaucacuccuua

SEQ ID NO: 644726 - RNA, 19 nt, Homo sapiens
  misc_RNA (1)...(19): siRNA sense strand
agaaccagcucgaccauuu

SEQ ID NO: 644727 - RNA, 19 nt, Homo sapiens
  misc_RNA (1)...(19): siRNA sense strand
cuaaagcaguucacagaaa

SEQ ID NO: 644728 - RNA, 19 nt, Homo sapiens
  misc_RNA (1)...(19): siRNA sense strand
gaaccagcucgaccauuua

SEQ ID NO: 644729 - RNA, 19 nt, Homo sapiens
  misc_RNA (1)...(19): siRNA sense strand
ggcacgagcugaacucuug

SEQ ID NO: 644730 - RNA, 19 nt, Homo sapiens
  misc_RNA (1)...(19): siRNA sense strand
ggagaaaauccaagaauua

SEQ ID NO: 644731 - RNA, 19 nt, Homo sapiens
  misc_RNA (1)...(19): siRNA sense strand
gcagucagauauggagaaa

SEQ ID NO: 644732 - RNA, 19 nt, Homo sapiens
  misc_RNA (1)...(19): siRNA sense strand
ggcaagugcgguacaguua

SEQ ID NO: 644733 - RNA, 19 nt, Homo sapiens
  misc_RNA (1)...(19): siRNA sense strand
ccaguucucuugcaacauc

SEQ ID NO: 644734 - RNA, 19 nt, Homo sapiens
  misc_RNA (1)...(19): siRNA sense strand
gauccucucugauaaucug

SEQ ID NO: 644735 - RNA, 19 nt, Homo sapiens
  misc_RNA (1)...(19): siRNA sense strand
uaaaggagcaugaguaucg

SEQ ID NO: 644736 - RNA, 19 nt, Homo sapiens
  misc_RNA (1)...(19): siRNA sense strand
ggaucacaccuccagauuu

SEQ ID NO: 644737 - RNA, 19 nt, Homo sapiens
  misc_RNA (1)...(19): siRNA sense strand
ucaaggagcaaauccagaa

SEQ ID NO: 644738 - RNA, 19 nt, Homo sapiens
  misc_RNA (1)...(19): siRNA sense strand
auuaagagaggcucaguua

SEQ ID NO: 644739 - RNA, 19 nt, Homo sapiens
  misc_RNA (1)...(19): siRNA sense strand
gagcuagacuuggccaucu

SEQ ID NO: 644740 - RNA, 19 nt, Homo sapiens
  misc_RNA (1)...(19): siRNA sense strand
uaaagcaguucacagaaaa

SEQ ID NO: 644741 - RNA, 19 nt, Homo sapiens
  misc_RNA (1)...(19): siRNA sense strand
ucgcucagcuagaagagaa

SEQ ID NO: 644742 - RNA, 19 nt, Homo sapiens
  misc_RNA (1)...(19): siRNA sense strand
ggaacaggcacgagcugaa

SEQ ID NO: 644743 - RNA, 19 nt, Homo sapiens
  misc_RNA (1)...(19): siRNA sense strand
caucuacaauagcaucaau

SEQ ID NO: 644744 - RNA, 19 nt, Homo sapiens
  misc_RNA (1)...(19): siRNA sense strand
ugucacaccuucacuuucu

SEQ ID NO: 644745 - RNA, 19 nt, Homo sapiens
  misc_RNA (1)...(19): siRNA sense strand
gagagggagaagauuguuu

SEQ ID NO: 644746 - RNA, 19 nt, Homo sapiens
  misc_RNA (1)...(19): siRNA sense strand
cggagagucuaaagcaguu

SEQ ID NO: 644747 - RNA, 19 nt, Homo sapiens
  misc_RNA (1)...(19): siRNA sense strand
aagagaggcucaguuauac

SEQ ID NO: 644748 - RNA, 19 nt, Homo sapiens
  misc_RNA (1)...(19): siRNA sense strand
gccugauccucucugauaa

SEQ ID NO: 644749 - RNA, 19 nt, Homo sapiens
  misc_RNA (1)...(19): siRNA sense strand
gacuuggccaucuacaaua

SEQ ID NO: 644750 - RNA, 19 nt, Homo sapiens
  misc_RNA (1)...(19): siRNA sense strand
agccugauccucucugaua

SEQ ID NO: 644751 - RNA, 19 nt, Homo sapiens
  misc_RNA (1)...(19): siRNA sense strand
agacuuggccaucuacaau

SEQ ID NO: 644752 - RNA, 19 nt, Homo sapiens
  misc_RNA (1)...(19): siRNA sense strand
cgacugcggccauaacauc

SEQ ID NO: 644753 - RNA, 19 nt, Homo sapiens
  misc_RNA (1)...(19): siRNA sense strand
ugacggagagucuaaagca

SEQ ID NO: 644754 - RNA, 19 nt, Homo sapiens
  misc_RNA (1)...(19): siRNA sense strand
ucacccaguucucuugcaa

SEQ ID NO: 644755 - RNA, 19 nt, Homo sapiens
  misc_RNA (1)...(19): siRNA sense strand
gaacaggcacgagcugaac

SEQ ID NO: 644756 - RNA, 19 nt, Homo sapiens
  misc_RNA (1)...(19): siRNA sense strand
cuccagauuugcaagagaa

SEQ ID NO: 644757 - RNA, 19 nt, Homo sapiens
  misc_RNA (1)...(19): siRNA sense strand
cagcuccucugaucaucug

SEQ ID NO: 644758 - RNA, 19 nt, Homo sapiens
  misc_RNA (1)...(19): siRNA sense strand
gagaggcucaguuauacuc

SEQ ID NO: 644759 - RNA, 19 nt, Homo sapiens
  misc_RNA (1)...(19): siRNA sense strand
agagggagaagauuguuug

SEQ ID NO: 644760 - RNA, 19 nt, Homo sapiens
  misc_RNA (1)...(19): siRNA sense strand
ggagagggagaagauuguu

SEQ ID NO: 644761 - RNA, 19 nt, Homo sapiens
  misc_RNA (1)...(19): siRNA sense strand
gucuaaagcaguucacaga

SEQ ID NO: 644762 - RNA, 19 nt, Homo sapiens
  misc_RNA (1)...(19): siRNA sense strand
ccagccugauccucucuga

SEQ ID NO: 644763 - RNA, 19 nt, Homo sapiens
  misc_RNA (1)...(19): siRNA sense strand
cuuaaaggagcaugaguau

SEQ ID NO: 644764 - RNA, 19 nt, Homo sapiens
  misc_RNA (1)...(19): siRNA sense strand
caccuucacuuucucucau

SEQ ID NO: 644765 - RNA, 19 nt, Homo sapiens
  misc_RNA (1)...(19): siRNA sense strand
aagugcagcuccucugauc

SEQ ID NO: 644766 - RNA, 19 nt, Homo sapiens
  misc_RNA (1)...(19): siRNA sense strand
agucagauauggagaaaau

SEQ ID NO: 644767 - RNA, 19 nt, Homo sapiens
  misc_RNA (1)...(19): siRNA sense strand
gcaagugcgguacaguuac

SEQ ID NO: 644768 - RNA, 19 nt, Homo sapiens
  misc_RNA (1)...(19): siRNA sense strand
cugauaaucugcggcaagu

SEQ ID NO: 644769 - RNA, 19 nt, Homo sapiens
  misc_RNA (1)...(19): siRNA sense strand
ccgugugccugcaguacuu

SEQ ID NO: 644770 - RNA, 19 nt, Homo sapiens
  misc_RNA (1)...(19): siRNA sense strand
gcacgagcugaacucuuga

SEQ ID NO: 644771 - RNA, 19 nt, Homo sapiens
  misc_RNA (1)...(19): siRNA sense strand
ggacauuggggacacauug

SEQ ID NO: 644772 - RNA, 19 nt, Homo sapiens
  misc_RNA (1)...(19): siRNA sense strand
agaagauuguuugggaguu

SEQ ID NO: 644773 - RNA, 19 nt, Homo sapiens
  misc_RNA (1)...(19): siRNA sense strand
ggaguuugagcagcuguau

SEQ ID NO: 644774 - RNA, 19 nt, Homo sapiens
  misc_RNA (1)...(19): siRNA sense strand
gaauuaagagaggcucagu

SEQ ID NO: 644775 - RNA, 19 nt, Homo sapiens
  misc_RNA (1)...(19): siRNA sense strand
aaccagcucgaccauuuaa

SEQ ID NO: 644776 - RNA, 19 nt, Homo sapiens
  misc_RNA (1)...(19): siRNA sense strand
gugcagcuccucugaucau

SEQ ID NO: 644777 - RNA, 19 nt, Homo sapiens
  misc_RNA (1)...(19): siRNA sense strand
cggcaagugcgguacaguu

SEQ ID NO: 644778 - RNA, 19 nt, Homo sapiens
  misc_RNA (1)...(19): siRNA sense strand
gcacggcagagacuaacgu

SEQ ID NO: 644779 - RNA, 19 nt, Homo sapiens
  misc_RNA (1)...(19): siRNA sense strand
guacaguuaccuccaacag

SEQ ID NO: 644780 - RNA, 19 nt, Homo sapiens
  misc_RNA (1)...(19): siRNA sense strand
ccuccagauuugcaagaga

SEQ ID NO: 644781 - RNA, 19 nt, Homo sapiens
  misc_RNA (1)...(19): siRNA sense strand
acauugagcagggcugaaa

SEQ ID NO: 644782 - RNA, 19 nt, Homo sapiens
  misc_RNA (1)...(19): siRNA sense strand
gaucacaccuccagauuug

SEQ ID NO: 644783 - RNA, 19 nt, Homo sapiens
  misc_RNA (1)...(19): siRNA sense strand
gagcagggcugaaagaauc

SEQ ID NO: 644784 - RNA, 19 nt, Homo sapiens
  misc_RNA (1)...(19): siRNA sense strand
uaagagaggcucaguuaua

SEQ ID NO: 644785 - RNA, 19 nt, Homo sapiens
  misc_RNA (1)...(19): siRNA sense strand
gcugaacucuugagccuaa

SEQ ID NO: 644786 - RNA, 19 nt, Homo sapiens
  misc_RNA (1)...(19): siRNA sense strand
gaagauuguuugggaguuu

SEQ ID NO: 644787 - RNA, 19 nt, Homo sapiens
  misc_RNA (1)...(19): siRNA sense strand
gcagcuguaucacuccuua

SEQ ID NO: 644788 - RNA, 19 nt, Homo sapiens
  misc_RNA (1)...(19): siRNA sense strand
agaaccagcucgaccauuu

SEQ ID NO: 644789 - RNA, 19 nt, Homo sapiens
  misc_RNA (1)...(19): siRNA sense strand
cuaaagcaguucacagaaa

SEQ ID NO: 644790 - RNA, 19 nt, Homo sapiens
  misc_RNA (1)...(19): siRNA sense strand
gaaccagcucgaccauuua

SEQ ID NO: 644791 - RNA, 19 nt, Homo sapiens
  misc_RNA (1)...(19): siRNA sense strand
ggcacgagcugaacucuug

SEQ ID NO: 644792 - RNA, 19 nt, Homo sapiens
  misc_RNA (1)...(19): siRNA sense strand
ggagaaaauccaagaauua

SEQ ID NO: 644793 - RNA, 19 nt, Homo sapiens
  misc_RNA (1)...(19): siRNA sense strand
gcagucagauauggagaaa

SEQ ID NO: 644794 - RNA, 19 nt, Homo sapiens
  misc_RNA (1)...(19): siRNA sense strand
ggcaagugcgguacaguua

SEQ ID NO: 644795 - RNA, 19 nt, Homo sapiens
  misc_RNA (1)...(19): siRNA sense strand
ccaguucucuugcaacauc

SEQ ID NO: 644796 - RNA, 19 nt, Homo sapiens
  misc_RNA (1)...(19): siRNA sense strand
gauccucucugauaaucug

SEQ ID NO: 644797 - RNA, 19 nt, Homo sapiens
  misc_RNA (1)...(19): siRNA sense strand
uaaaggagcaugaguaucg

SEQ ID NO: 644798 - RNA, 19 nt, Homo sapiens
  misc_RNA (1)...(19): siRNA sense strand
ggaucacaccuccagauuu

SEQ ID NO: 644799 - RNA, 19 nt, Homo sapiens
  misc_RNA (1)...(19): siRNA sense strand
ucaaggagcaaauccagaa

SEQ ID NO: 644800 - RNA, 19 nt, Homo sapiens
  misc_RNA (1)...(19): siRNA sense strand
auuaagagaggcucaguua

SEQ ID NO: 644801 - RNA, 19 nt, Homo sapiens
  misc_RNA (1)...(19): siRNA sense strand
gagcuagacuuggccaucu

SEQ ID NO: 644802 - RNA, 19 nt, Homo sapiens
  misc_RNA (1)...(19): siRNA sense strand
uaaagcaguucacagaaaa

SEQ ID NO: 644803 - RNA, 19 nt, Homo sapiens
  misc_RNA (1)...(19): siRNA sense strand
ucgcucagcuagaagagaa

SEQ ID NO: 644804 - RNA, 19 nt, Homo sapiens
  misc_RNA (1)...(19): siRNA sense strand
ggaacaggcacgagcugaa

SEQ ID NO: 644805 - RNA, 19 nt, Homo sapiens
  misc_RNA (1)...(19): siRNA sense strand
caucuacaauagcaucaau

SEQ ID NO: 644806 - RNA, 19 nt, Homo sapiens
  misc_RNA (1)...(19): siRNA sense strand
gagagggagaagauuguuu

SEQ ID NO: 644807 - RNA, 19 nt, Homo sapiens
  misc_RNA (1)...(19): siRNA sense strand
cggagagucuaaagcaguu

SEQ ID NO: 644808 - RNA, 19 nt, Homo sapiens
  misc_RNA (1)...(19): siRNA sense strand
aagagaggcucaguuauac

SEQ ID NO: 644809 - RNA, 19 nt, Homo sapiens
  misc_RNA (1)...(19): siRNA sense strand
gccugauccucucugauaa

SEQ ID NO: 644810 - RNA, 19 nt, Homo sapiens
  misc_RNA (1)...(19): siRNA sense strand
gacuuggccaucuacaaua

SEQ ID NO: 644811 - RNA, 19 nt, Homo sapiens
  misc_RNA (1)...(19): siRNA sense strand
agccugauccucucugaua

SEQ ID NO: 644812 - RNA, 19 nt, Homo sapiens
  misc_RNA (1)...(19): siRNA sense strand
agacuuggccaucuacaau

SEQ ID NO: 644813 - RNA, 19 nt, Homo sapiens
  misc_RNA (1)...(19): siRNA sense strand
cgacugcggccauaacauc

SEQ ID NO: 644814 - RNA, 19 nt, Homo sapiens
  misc_RNA (1)...(19): siRNA sense strand
ugacggagagucuaaagca

SEQ ID NO: 644815 - RNA, 19 nt, Homo sapiens
  misc_RNA (1)...(19): siRNA sense strand
ucacccaguucucuugcaa

SEQ ID NO: 644816 - RNA, 19 nt, Homo sapiens
  misc_RNA (1)...(19): siRNA sense strand
gaacaggcacgagcugaac

SEQ ID NO: 644817 - RNA, 19 nt, Homo sapiens
  misc_RNA (1)...(19): siRNA sense strand
cuccagauuugcaagagaa

SEQ ID NO: 644818 - RNA, 19 nt, Homo sapiens
  misc_RNA (1)...(19): siRNA sense strand
gagaggcucaguuauacuc

SEQ ID NO: 644819 - RNA, 19 nt, Homo sapiens
  misc_RNA (1)...(19): siRNA sense strand
agagggagaagauuguuug

SEQ ID NO: 644820 - RNA, 19 nt, Homo sapiens
  misc_RNA (1)...(19): siRNA sense strand
ggagagggagaagauuguu

SEQ ID NO: 644821 - RNA, 19 nt, Homo sapiens
  misc_RNA (1)...(19): siRNA sense strand
gucuaaagcaguucacaga

SEQ ID NO: 644822 - RNA, 19 nt, Homo sapiens
  misc_RNA (1)...(19): siRNA sense strand
ccagccugauccucucuga

SEQ ID NO: 644823 - RNA, 19 nt, Homo sapiens
  misc_RNA (1)...(19): siRNA sense strand
cuuaaaggagcaugaguau

SEQ ID NO: 644824 - RNA, 19 nt, Homo sapiens
  misc_RNA (1)...(19): siRNA sense strand
agucagauauggagaaaau

SEQ ID NO: 644825 - RNA, 19 nt, Homo sapiens
  misc_RNA (1)...(19): siRNA sense strand
gcaagugcgguacaguuac

SEQ ID NO: 644826 - RNA, 19 nt, Homo sapiens
  misc_RNA (1)...(19): siRNA sense strand
cugauaaucugcggcaagu

SEQ ID NO: 644827 - RNA, 19 nt, Homo sapiens
  misc_RNA (1)...(19): siRNA sense strand
ccgugugccugcaguacuu

SEQ ID NO: 644828 - RNA, 19 nt, Homo sapiens
  misc_RNA (1)...(19): siRNA sense strand
gcacgagcugaacucuuga

SEQ ID NO: 644829 - RNA, 19 nt, Homo sapiens
  misc_RNA (1)...(19): siRNA sense strand
ggacauuggggacacauug

SEQ ID NO: 644830 - RNA, 19 nt, Homo sapiens
  misc_RNA (1)...(19): siRNA sense strand
agaagauuguuugggaguu

SEQ ID NO: 644831 - RNA, 19 nt, Homo sapiens
  misc_RNA (1)...(19): siRNA sense strand
ggaguuugagcagcuguau

SEQ ID NO: 644832 - RNA, 19 nt, Homo sapiens
  misc_RNA (1)...(19): siRNA sense strand
gaauuaagagaggcucagu

SEQ ID NO: 644833 - RNA, 19 nt, Homo sapiens
  misc_RNA (1)...(19): siRNA sense strand
aaccagcucgaccauuuaa

SEQ ID NO: 644834 - RNA, 19 nt, Homo sapiens
  misc_RNA (1)...(19): siRNA sense strand
cggcaagugcgguacaguu

SEQ ID NO: 644835 - RNA, 19 nt, Homo sapiens
  misc_RNA (1)...(19): siRNA sense strand
gcacggcagagacuaacgu

SEQ ID NO: 644836 - RNA, 19 nt, Homo sapiens
  misc_RNA (1)...(19): siRNA sense strand
guacaguuaccuccaacag

SEQ ID NO: 644837 - RNA, 19 nt, Homo sapiens
  misc_RNA (1)...(19): siRNA sense strand
ccuccagauuugcaagaga

SEQ ID NO: 644838 - RNA, 19 nt, Homo sapiens
  misc_RNA (1)...(19): siRNA sense strand
acauugagcagggcugaaa

SEQ ID NO: 644839 - RNA, 19 nt, Homo sapiens
  misc_RNA (1)...(19): siRNA sense strand
caagggaucuguuuaauga

SEQ ID NO: 644840 - RNA, 19 nt, Homo sapiens
  misc_RNA (1)...(19): siRNA sense strand
ggagcgcucuuuaugauga

SEQ ID NO: 644841 - RNA, 19 nt, Homo sapiens
  misc_RNA (1)...(19): siRNA sense strand
gaggagcgcucuuuaugau

SEQ ID NO: 644842 - RNA, 19 nt, Homo sapiens
  misc_RNA (1)...(19): siRNA sense strand
gcacacacuugcugcuaaa

SEQ ID NO: 644843 - RNA, 19 nt, Homo sapiens
  misc_RNA (1)...(19): siRNA sense strand
gcacuaaacuuggccaaca

SEQ ID NO: 644844 - RNA, 19 nt, Homo sapiens
  misc_RNA (1)...(19): siRNA sense strand
uaaaggaucgcaccaaauu

SEQ ID NO: 644845 - RNA, 19 nt, Homo sapiens
  misc_RNA (1)...(19): siRNA sense strand
acacaaacccuuauugauu

SEQ ID NO: 644846 - RNA, 19 nt, Homo sapiens
  misc_RNA (1)...(19): siRNA sense strand
ccacggaauugcuuugaaa

SEQ ID NO: 644847 - RNA, 19 nt, Homo sapiens
  misc_RNA (1)...(19): siRNA sense strand
uaacaugcuuccacacuug

SEQ ID NO: 644848 - RNA, 19 nt, Homo sapiens
  misc_RNA (1)...(19): siRNA sense strand
gaagauagugacagguuaa

SEQ ID NO: 644849 - RNA, 19 nt, Homo sapiens
  misc_RNA (1)...(19): siRNA sense strand
gaaagcagucuguagagaa

SEQ ID NO: 644850 - RNA, 19 nt, Homo sapiens
  misc_RNA (1)...(19): siRNA sense strand
gauagugacagguuaauga

SEQ ID NO: 644851 - RNA, 19 nt, Homo sapiens
  misc_RNA (1)...(19): siRNA sense strand
cauaucaaguguacagaaa

SEQ ID NO: 644852 - RNA, 19 nt, Homo sapiens
  misc_RNA (1)...(19): siRNA sense strand
cacaaacccuuauugauuc

SEQ ID NO: 644853 - RNA, 19 nt, Homo sapiens
  misc_RNA (1)...(19): siRNA sense strand
gacaacugcucugcucaua

SEQ ID NO: 644854 - RNA, 19 nt, Homo sapiens
  misc_RNA (1)...(19): siRNA sense strand
cagauuuccuccaaacaaa

SEQ ID NO: 644855 - RNA, 19 nt, Homo sapiens
  misc_RNA (1)...(19): siRNA sense strand
guuaaugaauggucuagga

SEQ ID NO: 644856 - RNA, 19 nt, Homo sapiens
  misc_RNA (1)...(19): siRNA sense strand
gacaguuccuuuccacuug

SEQ ID NO: 644857 - RNA, 19 nt, Homo sapiens
  misc_RNA (1)...(19): siRNA sense strand
ccaccugugucccaaauga

SEQ ID NO: 644858 - RNA, 19 nt, Homo sapiens
  misc_RNA (1)...(19): siRNA sense strand
caacugcucugcucauaac

SEQ ID NO: 644859 - RNA, 19 nt, Homo sapiens
  misc_RNA (1)...(19): siRNA sense strand
ugacaagggaucuguuuaa

SEQ ID NO: 644860 - RNA, 19 nt, Homo sapiens
  misc_RNA (1)...(19): siRNA sense strand
aaugaauggucuaggaaua

SEQ ID NO: 644861 - RNA, 19 nt, Homo sapiens
  misc_RNA (1)...(19): siRNA sense strand
aagaagagguggacaucaa

SEQ ID NO: 644862 - RNA, 19 nt, Homo sapiens
  misc_RNA (1)...(19): siRNA sense strand
gagaagauagugacagguu

SEQ ID NO: 644863 - RNA, 19 nt, Homo sapiens
  misc_RNA (1)...(19): siRNA sense strand
guacagaaacuuagacagu

SEQ ID NO: 644864 - RNA, 19 nt, Homo sapiens
  misc_RNA (1)...(19): siRNA sense strand
caucgucccuauggaauuu

SEQ ID NO: 644865 - RNA, 19 nt, Homo sapiens
  misc_RNA (1)...(19): siRNA sense strand
gcagugaggaucaagaaga

SEQ ID NO: 644866 - RNA, 19 nt, Homo sapiens
  misc_RNA (1)...(19): siRNA sense strand
gacaagggaucuguuuaau

SEQ ID NO: 644867 - RNA, 19 nt, Homo sapiens
  misc_RNA (1)...(19): siRNA sense strand
agaagauagugacagguua

SEQ ID NO: 644868 - RNA, 19 nt, Homo sapiens
  misc_RNA (1)...(19): siRNA sense strand
uaaaggagaccacuguaga

SEQ ID NO: 644869 - RNA, 19 nt, Homo sapiens
  misc_RNA (1)...(19): siRNA sense strand
gaagccauaucaaguguac

SEQ ID NO: 644870 - RNA, 19 nt, Homo sapiens
  misc_RNA (1)...(19): siRNA sense strand
uaucugcccuccaacugua

SEQ ID NO: 644871 - RNA, 19 nt, Homo sapiens
  misc_RNA (1)...(19): siRNA sense strand
agacauuccugaugccauu

SEQ ID NO: 644872 - RNA, 19 nt, Homo sapiens
  misc_RNA (1)...(19): siRNA sense strand
ggaaaggugauguggcaaa

SEQ ID NO: 644873 - RNA, 19 nt, Homo sapiens
  misc_RNA (1)...(19): siRNA sense strand
uaccagagccaccuucuaa

SEQ ID NO: 644874 - RNA, 19 nt, Homo sapiens
  misc_RNA (1)...(19): siRNA sense strand
caacagcagugaggaucaa

SEQ ID NO: 644875 - RNA, 19 nt, Homo sapiens
  misc_RNA (1)...(19): siRNA sense strand
ugacacaaacccuuauuga

SEQ ID NO: 644876 - RNA, 19 nt, Homo sapiens
  misc_RNA (1)...(19): siRNA sense strand
aaccagacauugccauuga

SEQ ID NO: 644877 - RNA, 19 nt, Homo sapiens
  misc_RNA (1)...(19): siRNA sense strand
gaugacaagggaucuguuu

SEQ ID NO: 644878 - RNA, 19 nt, Homo sapiens
  misc_RNA (1)...(19): siRNA sense strand
ggaugaggagcgcucuuua

SEQ ID NO: 644879 - RNA, 19 nt, Homo sapiens
  misc_RNA (1)...(19): siRNA sense strand
ugugggagcuguagacuca

SEQ ID NO: 644880 - RNA, 19 nt, Homo sapiens
  misc_RNA (1)...(19): siRNA sense strand
cuuaaaggaucgcaccaaa

SEQ ID NO: 644881 - RNA, 19 nt, Homo sapiens
  misc_RNA (1)...(19): siRNA sense strand
ugacagcacucuuuuguug

SEQ ID NO: 644882 - RNA, 19 nt, Homo sapiens
  misc_RNA (1)...(19): siRNA sense strand
gcaccaaauuugaagaaaa

SEQ ID NO: 644883 - RNA, 19 nt, Homo sapiens
  misc_RNA (1)...(19): siRNA sense strand
ugaaagcagucuguagaga

SEQ ID NO: 644884 - RNA, 19 nt, Homo sapiens
  misc_RNA (1)...(19): siRNA sense strand
gacuacagcccagaugaua

SEQ ID NO: 644885 - RNA, 19 nt, Homo sapiens
  misc_RNA (1)...(19): siRNA sense strand
gaaccagacauugccauug

SEQ ID NO: 644886 - RNA, 19 nt, Homo sapiens
  misc_RNA (1)...(19): siRNA sense strand
caagaagcgucggcaguuc

SEQ ID NO: 644887 - RNA, 19 nt, Homo sapiens
  misc_RNA (1)...(19): siRNA sense strand
gaaaguugugggagcugua

SEQ ID NO: 644888 - RNA, 19 nt, Homo sapiens
  misc_RNA (1)...(19): siRNA sense strand
cagaagccauaucaagugu

SEQ ID NO: 644889 - RNA, 19 nt, Homo sapiens
  misc_RNA (1)...(19): siRNA sense strand
uauggaauuugcagaaugu

SEQ ID NO: 644890 - RNA, 19 nt, Homo sapiens
  misc_RNA (1)...(19): siRNA sense strand
gaugaggagcgcucuuuau

SEQ ID NO: 644891 - RNA, 19 nt, Homo sapiens
  misc_RNA (1)...(19): siRNA sense strand
cugaacagauuuagagauc

SEQ ID NO: 644892 - RNA, 19 nt, Homo sapiens
  misc_RNA (1)...(19): siRNA sense strand
caucacagaagccauauca

SEQ ID NO: 644893 - RNA, 19 nt, Homo sapiens
  misc_RNA (1)...(19): siRNA sense strand
ggauucagguuggguaucu

SEQ ID NO: 644894 - RNA, 19 nt, Homo sapiens
  misc_RNA (1)...(19): siRNA sense strand
ggacuuuguuacugcagau

SEQ ID NO: 644895 - RNA, 19 nt, Homo sapiens
  misc_RNA (1)...(19): siRNA sense strand
gaaaggugauguggcaaaa

SEQ ID NO: 644896 - RNA, 19 nt, Homo sapiens
  misc_RNA (1)...(19): siRNA sense strand
ccacugaaucuuggcauaa

SEQ ID NO: 644897 - RNA, 19 nt, Homo sapiens
  misc_RNA (1)...(19): siRNA sense strand
ucacagaagccauaucaag

SEQ ID NO: 644898 - RNA, 19 nt, Homo sapiens
  misc_RNA (1)...(19): siRNA sense strand
agugacagguuaaugaaug

SEQ ID NO: 644899 - RNA, 19 nt, Homo sapiens
  misc_RNA (1)...(19): siRNA sense strand
guaucacucccucuacuuu

SEQ ID NO: 644900 - RNA, 19 nt, Homo sapiens
  misc_RNA (1)...(19): siRNA sense strand
gcagcgugguggucaguca

SEQ ID NO: 644901 - RNA, 19 nt, Homo sapiens
  misc_RNA (1)...(19): siRNA sense strand
ccagugggcuuggaugaca

SEQ ID NO: 644902 - RNA, 19 nt, Homo sapiens
  misc_RNA (1)...(19): siRNA sense strand
uaucacucccucuacuuua

SEQ ID NO: 644903 - RNA, 19 nt, Homo sapiens
  misc_RNA (1)...(19): siRNA sense strand
gcuguagacucaggcaaga

SEQ ID NO: 644904 - RNA, 19 nt, Homo sapiens
  misc_RNA (1)...(19): siRNA sense strand
caacaugcuuggcuaugac

SEQ ID NO: 644905 - RNA, 19 nt, Homo sapiens
  misc_RNA (1)...(19): siRNA sense strand
ggugaaauguuggcagaag

SEQ ID NO: 644906 - RNA, 19 nt, Homo sapiens
  misc_RNA (1)...(19): siRNA sense strand
ucaagaaauccaugccaaa

SEQ ID NO: 644907 - RNA, 19 nt, Homo sapiens
  misc_RNA (1)...(19): siRNA sense strand
gacacaaacccuuauugau

SEQ ID NO: 644908 - RNA, 19 nt, Homo sapiens
  misc_RNA (1)...(19): siRNA sense strand
caccaucacagaagccaua

SEQ ID NO: 644909 - RNA, 19 nt, Homo sapiens
  misc_RNA (1)...(19): siRNA sense strand
gcgguugacagcacucuuu

SEQ ID NO: 644910 - RNA, 19 nt, Homo sapiens
  misc_RNA (1)...(19): siRNA sense strand
aaacuuggccaacaugcuu

SEQ ID NO: 644911 - RNA, 19 nt, Homo sapiens
  misc_RNA (1)...(19): siRNA sense strand
aaagcagucuguagagaag

SEQ ID NO: 644912 - RNA, 19 nt, Homo sapiens
  misc_RNA (1)...(19): siRNA sense strand
agagugacacaaacccuua

SEQ ID NO: 644913 - RNA, 19 nt, Homo sapiens
  misc_RNA (1)...(19): siRNA sense strand
uaaaacagauccuccucaa

SEQ ID NO: 644914 - RNA, 19 nt, Homo sapiens
  misc_RNA (1)...(19): siRNA sense strand
gcuaaaggagaccacugua

SEQ ID NO: 644915 - RNA, 19 nt, Homo sapiens
  misc_RNA (1)...(19): siRNA sense strand
ugaggagcgcucuuuauga

SEQ ID NO: 644916 - RNA, 19 nt, Homo sapiens
  misc_RNA (1)...(19): siRNA sense strand
uuacagauuuccuccaaac

SEQ ID NO: 644917 - RNA, 19 nt, Homo sapiens
  misc_RNA (1)...(19): siRNA sense strand
ugggcuggcugaacagauu

SEQ ID NO: 644918 - RNA, 19 nt, Homo sapiens
  misc_RNA (1)...(19): siRNA sense strand
uaaaacugauugcugacua

SEQ ID NO: 644919 - RNA, 19 nt, Homo sapiens
  misc_RNA (1)...(19): siRNA sense strand
aauuacagauuuccuccaa

SEQ ID NO: 644920 - RNA, 19 nt, Homo sapiens
  misc_RNA (1)...(19): siRNA sense strand
gcaggcaucgucccuaugg

SEQ ID NO: 644921 - RNA, 19 nt, Homo sapiens
  misc_RNA (1)...(19): siRNA sense strand
cacacuugcugcuaaagga

SEQ ID NO: 644922 - RNA, 19 nt, Homo sapiens
  misc_RNA (1)...(19): siRNA sense strand
aaggaucgcaccaaauuug

SEQ ID NO: 644923 - RNA, 19 nt, Homo sapiens
  misc_RNA (1)...(19): siRNA sense strand
ccucuacuuuaucuacauu

SEQ ID NO: 644924 - RNA, 19 nt, Homo sapiens
  misc_RNA (1)...(19): siRNA sense strand
cuauggaauuugcagaaug

SEQ ID NO: 644925 - RNA, 19 nt, Homo sapiens
  misc_RNA (1)...(19): siRNA sense strand
gccacggaauugcuuugaa

SEQ ID NO: 644926 - RNA, 19 nt, Homo sapiens
  misc_RNA (1)...(19): siRNA sense strand
uaucaaguguacagaaacu

SEQ ID NO: 644927 - RNA, 19 nt, Homo sapiens
  misc_RNA (1)...(19): siRNA sense strand
uaaauuuccaggacuuugu

SEQ ID NO: 644928 - RNA, 19 nt, Homo sapiens
  misc_RNA (1)...(19): siRNA sense strand
cggauccucuugcucauag

SEQ ID NO: 644929 - RNA, 19 nt, Homo sapiens
  misc_RNA (1)...(19): siRNA sense strand
ccacacugccucaagaaca

SEQ ID NO: 644930 - RNA, 19 nt, Homo sapiens
  misc_RNA (1)...(19): siRNA sense strand
ugucccaaaugaaguaaau

SEQ ID NO: 644931 - RNA, 19 nt, Homo sapiens
  misc_RNA (1)...(19): siRNA sense strand
guaccagagccaccuucua

SEQ ID NO: 644932 - RNA, 19 nt, Homo sapiens
  misc_RNA (1)...(19): siRNA sense strand
caagcaggccaucgacaug

SEQ ID NO: 644933 - RNA, 19 nt, Homo sapiens
  misc_RNA (1)...(19): siRNA sense strand
cagcagugaggaucaagaa

SEQ ID NO: 644934 - RNA, 19 nt, Homo sapiens
  misc_RNA (1)...(19): siRNA sense strand
ugaugagacaggaguguuu

SEQ ID NO: 644935 - RNA, 19 nt, Homo sapiens
  misc_RNA (1)...(19): siRNA sense strand
cacagaagccauaucaagu

SEQ ID NO: 644936 - RNA, 19 nt, Homo sapiens
  misc_RNA (1)...(19): siRNA sense strand
guaaauuuccaggacuuug

SEQ ID NO: 644937 - RNA, 19 nt, Homo sapiens
  misc_RNA (1)...(19): siRNA sense strand
ccagacauugccauugaaa

SEQ ID NO: 644938 - RNA, 19 nt, Homo sapiens
  misc_RNA (1)...(19): siRNA sense strand
cagaaucagcagccaguga

SEQ ID NO: 644939 - RNA, 19 nt, Homo sapiens
  misc_RNA (1)...(19): siRNA sense strand
ggaaauagcugauuaugaa

SEQ ID NO: 644940 - RNA, 19 nt, Homo sapiens
  misc_RNA (1)...(19): siRNA sense strand
gaacaacucugaagauaau

SEQ ID NO: 644941 - RNA, 19 nt, Homo sapiens
  misc_RNA (1)...(19): siRNA sense strand
ucaaagagauaccauguua

SEQ ID NO: 644942 - RNA, 19 nt, Homo sapiens
  misc_RNA (1)...(19): siRNA sense strand
gaaaugggaucagaaguuu

SEQ ID NO: 644943 - RNA, 19 nt, Homo sapiens
  misc_RNA (1)...(19): siRNA sense strand
gcagaaagcuauaagaauc

SEQ ID NO: 644944 - RNA, 19 nt, Homo sapiens
  misc_RNA (1)...(19): siRNA sense strand
gaaagacaguggagacauu

SEQ ID NO: 644945 - RNA, 19 nt, Homo sapiens
  misc_RNA (1)...(19): siRNA sense strand
gaacaugccacuacuguaa

SEQ ID NO: 644946 - RNA, 19 nt, Homo sapiens
  misc_RNA (1)...(19): siRNA sense strand
cgaaauagcuuccgagauc

SEQ ID NO: 644947 - RNA, 19 nt, Homo sapiens
  misc_RNA (1)...(19): siRNA sense strand
gaagugaagucucuuuaug

SEQ ID NO: 644948 - RNA, 19 nt, Homo sapiens
  misc_RNA (1)...(19): siRNA sense strand
gaucagaaguuucagaaga

SEQ ID NO: 644949 - RNA, 19 nt, Homo sapiens
  misc_RNA (1)...(19): siRNA sense strand
ggaaagaguuagaagaaau

SEQ ID NO: 644950 - RNA, 19 nt, Homo sapiens
  misc_RNA (1)...(19): siRNA sense strand
gagcagaguugauacuauu

SEQ ID NO: 644951 - RNA, 19 nt, Homo sapiens
  misc_RNA (1)...(19): siRNA sense strand
gaugaaaucugaacauaca

SEQ ID NO: 644952 - RNA, 19 nt, Homo sapiens
  misc_RNA (1)...(19): siRNA sense strand
guacaacagugaacuagaa

SEQ ID NO: 644953 - RNA, 19 nt, Homo sapiens
  misc_RNA (1)...(19): siRNA sense strand
caaauacagugaagacaaa

SEQ ID NO: 644954 - RNA, 19 nt, Homo sapiens
  misc_RNA (1)...(19): siRNA sense strand
caaaccacauugaugaaua

SEQ ID NO: 644955 - RNA, 19 nt, Homo sapiens
  misc_RNA (1)...(19): siRNA sense strand
agacaaagcuaacuuacaa

SEQ ID NO: 644956 - RNA, 19 nt, Homo sapiens
  misc_RNA (1)...(19): siRNA sense strand
caacaaaccacauugauga

SEQ ID NO: 644957 - RNA, 19 nt, Homo sapiens
  misc_RNA (1)...(19): siRNA sense strand
gaaaccagguagugaaaga

SEQ ID NO: 644958 - RNA, 19 nt, Homo sapiens
  misc_RNA (1)...(19): siRNA sense strand
gaagaaguaucucaaacau

SEQ ID NO: 644959 - RNA, 19 nt, Homo sapiens
  misc_RNA (1)...(19): siRNA sense strand
gaagaaauacagucagaaa

SEQ ID NO: 644960 - RNA, 19 nt, Homo sapiens
  misc_RNA (1)...(19): siRNA sense strand
gcacauacacacagucuuu

SEQ ID NO: 644961 - RNA, 19 nt, Homo sapiens
  misc_RNA (1)...(19): siRNA sense strand
gaacuugaaucucuucgau

SEQ ID NO: 644962 - RNA, 19 nt, Homo sapiens
  misc_RNA (1)...(19): siRNA sense strand
gaacuagauuccagcagaa

SEQ ID NO: 644963 - RNA, 19 nt, Homo sapiens
  misc_RNA (1)...(19): siRNA sense strand
gcaauuagaacuuucagaa

SEQ ID NO: 644964 - RNA, 19 nt, Homo sapiens
  misc_RNA (1)...(19): siRNA sense strand
gggaagacuuagaguuuaa

SEQ ID NO: 644965 - RNA, 19 nt, Homo sapiens
  misc_RNA (1)...(19): siRNA sense strand
gcaggaaacuguguccaaa

SEQ ID NO: 644966 - RNA, 19 nt, Homo sapiens
  misc_RNA (1)...(19): siRNA sense strand
gaagagaaagauguuguua

SEQ ID NO: 644967 - RNA, 19 nt, Homo sapiens
  misc_RNA (1)...(19): siRNA sense strand
gaaaguagagcaaacaauc

SEQ ID NO: 644968 - RNA, 19 nt, Homo sapiens
  misc_RNA (1)...(19): siRNA sense strand
agaaguaucucaaacaugu

SEQ ID NO: 644969 - RNA, 19 nt, Homo sapiens
  misc_RNA (1)...(19): siRNA sense strand
guuacuaucucaacaagaa

SEQ ID NO: 644970 - RNA, 19 nt, Homo sapiens
  misc_RNA (1)...(19): siRNA sense strand
cagcuaaccuggaauacuu

SEQ ID NO: 644971 - RNA, 19 nt, Homo sapiens
  misc_RNA (1)...(19): siRNA sense strand
gauccucugucuucaguaa

SEQ ID NO: 644972 - RNA, 19 nt, Homo sapiens
  misc_RNA (1)...(19): siRNA sense strand
gcaaagaaagaacuagauu

SEQ ID NO: 644973 - RNA, 19 nt, Homo sapiens
  misc_RNA (1)...(19): siRNA sense strand
aagaagaggugaaagaguu

SEQ ID NO: 644974 - RNA, 19 nt, Homo sapiens
  misc_RNA (1)...(19): siRNA sense strand
agcagaaacugaucacuua

SEQ ID NO: 644975 - RNA, 19 nt, Homo sapiens
  misc_RNA (1)...(19): siRNA sense strand
gauagaagauuuggagcaa

SEQ ID NO: 644976 - RNA, 19 nt, Homo sapiens
  misc_RNA (1)...(19): siRNA sense strand
gggagaaaaugaaaaguua

SEQ ID NO: 644977 - RNA, 19 nt, Homo sapiens
  misc_RNA (1)...(19): siRNA sense strand
gaaauggaugcucaacaua

SEQ ID NO: 644978 - RNA, 19 nt, Homo sapiens
  misc_RNA (1)...(19): siRNA sense strand
gauauguucuauucucuug

SEQ ID NO: 644979 - RNA, 19 nt, Homo sapiens
  misc_RNA (1)...(19): siRNA sense strand
gaacaugaagcagagauaa

SEQ ID NO: 644980 - RNA, 19 nt, Homo sapiens
  misc_RNA (1)...(19): siRNA sense strand
gagcagaaagcuauaagaa

SEQ ID NO: 644981 - RNA, 19 nt, Homo sapiens
  misc_RNA (1)...(19): siRNA sense strand
gaagaucuccuggcucgua

SEQ ID NO: 644982 - RNA, 19 nt, Homo sapiens
  misc_RNA (1)...(19): siRNA sense strand
gagauuaagugccuucaag

SEQ ID NO: 644983 - RNA, 19 nt, Homo sapiens
  misc_RNA (1)...(19): siRNA sense strand
gaacuuucagaacaacuua

SEQ ID NO: 644984 - RNA, 19 nt, Homo sapiens
  misc_RNA (1)...(19): siRNA sense strand
gagaucaagugcgacauuu

SEQ ID NO: 644985 - RNA, 19 nt, Homo sapiens
  misc_RNA (1)...(19): siRNA sense strand
ugaaaguucucucugaaga

SEQ ID NO: 644986 - RNA, 19 nt, Homo sapiens
  misc_RNA (1)...(19): siRNA sense strand
gagcuagcagguuuaaaua

SEQ ID NO: 644987 - RNA, 19 nt, Homo sapiens
  misc_RNA (1)...(19): siRNA sense strand
aaucugagcuagcagguuu

SEQ ID NO: 644988 - RNA, 19 nt, Homo sapiens
  misc_RNA (1)...(19): siRNA sense strand
gucaaacacuuagaagaua

SEQ ID NO: 644989 - RNA, 19 nt, Homo sapiens
  misc_RNA (1)...(19): siRNA sense strand
gaaaagaaggaaacaguua

SEQ ID NO: 644990 - RNA, 19 nt, Homo sapiens
  misc_RNA (1)...(19): siRNA sense strand
guugaaagcuauacaccaa

SEQ ID NO: 644991 - RNA, 19 nt, Homo sapiens
  misc_RNA (1)...(19): siRNA sense strand
cagagaacaugaugaugaa

SEQ ID NO: 644992 - RNA, 19 nt, Homo sapiens
  misc_RNA (1)...(19): siRNA sense strand
gaaggaagaacuugaaucu

SEQ ID NO: 644993 - RNA, 19 nt, Homo sapiens
  misc_RNA (1)...(19): siRNA sense strand
gaaagauguuguuaauguc

SEQ ID NO: 644994 - RNA, 19 nt, Homo sapiens
  misc_RNA (1)...(19): siRNA sense strand
gaagauaccuuaaaagaac

SEQ ID NO: 644995 - RNA, 19 nt, Homo sapiens
  misc_RNA (1)...(19): siRNA sense strand
acacuuagaagauaccuua

SEQ ID NO: 644996 - RNA, 19 nt, Homo sapiens
  misc_RNA (1)...(19): siRNA sense strand
ccacauugaugaauaugga

SEQ ID NO: 644997 - RNA, 19 nt, Homo sapiens
  misc_RNA (1)...(19): siRNA sense strand
ccaaagcaaugguagacaa

SEQ ID NO: 644998 - RNA, 19 nt, Homo sapiens
  misc_RNA (1)...(19): siRNA sense strand
gaugggagaugcacauaag

SEQ ID NO: 644999 - RNA, 19 nt, Homo sapiens
  misc_RNA (1)...(19): siRNA sense strand
ugaaauggaugcucaacau

SEQ ID NO: 645000 - RNA, 19 nt, Homo sapiens
  misc_RNA (1)...(19): siRNA sense strand
gaguugaugugccagauug

SEQ ID NO: 645001 - RNA, 19 nt, Homo sapiens
  misc_RNA (1)...(19): siRNA sense strand
gagagacuucuuccuguua

SEQ ID NO: 645002 - RNA, 19 nt, Homo sapiens
  misc_RNA (1)...(19): siRNA sense strand
gagagaagucugcagcuaa

SEQ ID NO: 645003 - RNA, 19 nt, Homo sapiens
  misc_RNA (1)...(19): siRNA sense strand
gcagucugaucuucuagaa

SEQ ID NO: 645004 - RNA, 19 nt, Homo sapiens
  misc_RNA (1)...(19): siRNA sense strand
aaaugaaaguucucucuga

SEQ ID NO: 645005 - RNA, 19 nt, Homo sapiens
  misc_RNA (1)...(19): siRNA sense strand
caagaaacccuacaagaag

SEQ ID NO: 645006 - RNA, 19 nt, Homo sapiens
  misc_RNA (1)...(19): siRNA sense strand
ugacagcacuacaggaaga

SEQ ID NO: 645007 - RNA, 19 nt, Homo sapiens
  misc_RNA (1)...(19): siRNA sense strand
aauggaugcucaacauaua

SEQ ID NO: 645008 - RNA, 19 nt, Homo sapiens
  misc_RNA (1)...(19): siRNA sense strand
uaagaagauuggaaaggaa

SEQ ID NO: 645009 - RNA, 19 nt, Homo sapiens
  misc_RNA (1)...(19): siRNA sense strand
gaaauagcuuccgagauca

SEQ ID NO: 645010 - RNA, 19 nt, Homo sapiens
  misc_RNA (1)...(19): siRNA sense strand
ugagggcgcuaaacaagaa

SEQ ID NO: 645011 - RNA, 19 nt, Homo sapiens
  misc_RNA (1)...(19): siRNA sense strand
acaagaaacccuacaagaa

SEQ ID NO: 645012 - RNA, 19 nt, Homo sapiens
  misc_RNA (1)...(19): siRNA sense strand
gaaggaaacaguuacucaa

SEQ ID NO: 645013 - RNA, 19 nt, Homo sapiens
  misc_RNA (1)...(19): siRNA sense strand
gcaguacguuccaaauaca

SEQ ID NO: 645014 - RNA, 19 nt, Homo sapiens
  misc_RNA (1)...(19): siRNA sense strand
uagaagaaauacagucaga

SEQ ID NO: 645015 - RNA, 19 nt, Homo sapiens
  misc_RNA (1)...(19): siRNA sense strand
ugagcaaguucagaaguua

SEQ ID NO: 645016 - RNA, 19 nt, Homo sapiens
  misc_RNA (1)...(19): siRNA sense strand
ggaagaaaguagagcaaac

SEQ ID NO: 645017 - RNA, 19 nt, Homo sapiens
  misc_RNA (1)...(19): siRNA sense strand
aaaccaagacaaucagaua

SEQ ID NO: 645018 - RNA, 19 nt, Homo sapiens
  misc_RNA (1)...(19): siRNA sense strand
gaaaagaacauccagaaga

SEQ ID NO: 645019 - RNA, 19 nt, Homo sapiens
  misc_RNA (1)...(19): siRNA sense strand
gaugagguaacuuauauga

SEQ ID NO: 645020 - RNA, 19 nt, Homo sapiens
  misc_RNA (1)...(19): siRNA sense strand
gcaaauuaagcuucucaaa

SEQ ID NO: 645021 - RNA, 19 nt, Homo sapiens
  misc_RNA (1)...(19): siRNA sense strand
ccaaugcaauucuuaugga

SEQ ID NO: 645022 - RNA, 19 nt, Homo sapiens
  misc_RNA (1)...(19): siRNA sense strand
gaacgagguccuucgaaau

SEQ ID NO: 645023 - RNA, 19 nt, Homo sapiens
  misc_RNA (1)...(19): siRNA sense strand
ucagagaacaugaugauga

SEQ ID NO: 645024 - RNA, 19 nt, Homo sapiens
  misc_RNA (1)...(19): siRNA sense strand
gaaacaagaaacccuacaa

SEQ ID NO: 645025 - RNA, 19 nt, Homo sapiens
  misc_RNA (1)...(19): siRNA sense strand
agaagacagugaagagaaa

SEQ ID NO: 645026 - RNA, 19 nt, Homo sapiens
  misc_RNA (1)...(19): siRNA sense strand
uaugagaguuuacgagaga

SEQ ID NO: 645027 - RNA, 19 nt, Homo sapiens
  misc_RNA (1)...(19): siRNA sense strand
cgggaagacuuagaguuua

SEQ ID NO: 645028 - RNA, 19 nt, Homo sapiens
  misc_RNA (1)...(19): siRNA sense strand
gcaaccaaugcaauucuua

SEQ ID NO: 645029 - RNA, 19 nt, Homo sapiens
  misc_RNA (1)...(19): siRNA sense strand
uagaagauuuggagcaaga

SEQ ID NO: 645030 - RNA, 19 nt, Homo sapiens
  misc_RNA (1)...(19): siRNA sense strand
gaacuucagguacaacuuc

SEQ ID NO: 645031 - RNA, 19 nt, Homo sapiens
  misc_RNA (1)...(19): siRNA sense strand
gaccuuacaagacaauuaa

SEQ ID NO: 645032 - RNA, 19 nt, Homo sapiens
  misc_RNA (1)...(19): siRNA sense strand
gaaagggaagaaagauuga

SEQ ID NO: 645033 - RNA, 19 nt, Homo sapiens
  misc_RNA (1)...(19): siRNA sense strand
ugaaagcuauacaccaaga

SEQ ID NO: 645034 - RNA, 19 nt, Homo sapiens
  misc_RNA (1)...(19): siRNA sense strand
gaaagggaacaucuggaaa

SEQ ID NO: 645035 - RNA, 19 nt, Homo sapiens
  misc_RNA (1)...(19): siRNA sense strand
ugaagacaaagcuaacuua

SEQ ID NO: 645036 - RNA, 19 nt, Homo sapiens
  misc_RNA (1)...(19): siRNA sense strand
ccagagagccaaagcaaug

SEQ ID NO: 645037 - RNA, 19 nt, Homo sapiens
  misc_RNA (1)...(19): siRNA sense strand
gaaaagagacccagacugu

SEQ ID NO: 645038 - RNA, 19 nt, Homo sapiens
  misc_RNA (1)...(19): siRNA sense strand
gaacauccagaagaaauau

SEQ ID NO: 645039 - RNA, 19 nt, Homo sapiens
  misc_RNA (1)...(19): siRNA sense strand
ggaaauagcugauuaugaa

SEQ ID NO: 645040 - RNA, 19 nt, Homo sapiens
  misc_RNA (1)...(19): siRNA sense strand
gaacaacucugaagauaau

SEQ ID NO: 645041 - RNA, 19 nt, Homo sapiens
  misc_RNA (1)...(19): siRNA sense strand
ucaaagagauaccauguua

SEQ ID NO: 645042 - RNA, 19 nt, Homo sapiens
  misc_RNA (1)...(19): siRNA sense strand
gaaaugggaucagaaguuu

SEQ ID NO: 645043 - RNA, 19 nt, Homo sapiens
  misc_RNA (1)...(19): siRNA sense strand
gcagaaagcuauaagaauc

SEQ ID NO: 645044 - RNA, 19 nt, Homo sapiens
  misc_RNA (1)...(19): siRNA sense strand
gaaagacaguggagacauu

SEQ ID NO: 645045 - RNA, 19 nt, Homo sapiens
  misc_RNA (1)...(19): siRNA sense strand
gaacaugccacuacuguaa

SEQ ID NO: 645046 - RNA, 19 nt, Homo sapiens
  misc_RNA (1)...(19): siRNA sense strand
cgaaauagcuuccgagauc

SEQ ID NO: 645047 - RNA, 19 nt, Homo sapiens
  misc_RNA (1)...(19): siRNA sense strand
gaagugaagucucuuuaug

SEQ ID NO: 645048 - RNA, 19 nt, Homo sapiens
  misc_RNA (1)...(19): siRNA sense strand
gaucagaaguuucagaaga

SEQ ID NO: 645049 - RNA, 19 nt, Homo sapiens
  misc_RNA (1)...(19): siRNA sense strand
ggaaagaguuagaagaaau

SEQ ID NO: 645050 - RNA, 19 nt, Homo sapiens
  misc_RNA (1)...(19): siRNA sense strand
gagcagaguugauacuauu

SEQ ID NO: 645051 - RNA, 19 nt, Homo sapiens
  misc_RNA (1)...(19): siRNA sense strand
gaugaaaucugaacauaca

SEQ ID NO: 645052 - RNA, 19 nt, Homo sapiens
  misc_RNA (1)...(19): siRNA sense strand
ugaaggaacuggugauauu

SEQ ID NO: 645053 - RNA, 19 nt, Homo sapiens
  misc_RNA (1)...(19): siRNA sense strand
guacaacagugaacuagaa

SEQ ID NO: 645054 - RNA, 19 nt, Homo sapiens
  misc_RNA (1)...(19): siRNA sense strand
caaauacagugaagacaaa

SEQ ID NO: 645055 - RNA, 19 nt, Homo sapiens
  misc_RNA (1)...(19): siRNA sense strand
caaaccacauugaugaaua

SEQ ID NO: 645056 - RNA, 19 nt, Homo sapiens
  misc_RNA (1)...(19): siRNA sense strand
agacaaagcuaacuuacaa

SEQ ID NO: 645057 - RNA, 19 nt, Homo sapiens
  misc_RNA (1)...(19): siRNA sense strand
caacaaaccacauugauga

SEQ ID NO: 645058 - RNA, 19 nt, Homo sapiens
  misc_RNA (1)...(19): siRNA sense strand
gaaaccagguagugaaaga

SEQ ID NO: 645059 - RNA, 19 nt, Homo sapiens
  misc_RNA (1)...(19): siRNA sense strand
gaagaaguaucucaaacau

SEQ ID NO: 645060 - RNA, 19 nt, Homo sapiens
  misc_RNA (1)...(19): siRNA sense strand
gaagaaauacagucagaaa

SEQ ID NO: 645061 - RNA, 19 nt, Homo sapiens
  misc_RNA (1)...(19): siRNA sense strand
gcacauacacacagucuuu

SEQ ID NO: 645062 - RNA, 19 nt, Homo sapiens
  misc_RNA (1)...(19): siRNA sense strand
gaacuugaaucucuucgau

SEQ ID NO: 645063 - RNA, 19 nt, Homo sapiens
  misc_RNA (1)...(19): siRNA sense strand
gaaagaaauugaagaacuc

SEQ ID NO: 645064 - RNA, 19 nt, Homo sapiens
  misc_RNA (1)...(19): siRNA sense strand
gaacuagauuccagcagaa

SEQ ID NO: 645065 - RNA, 19 nt, Homo sapiens
  misc_RNA (1)...(19): siRNA sense strand
gcaauuagaacuuucagaa

SEQ ID NO: 645066 - RNA, 19 nt, Homo sapiens
  misc_RNA (1)...(19): siRNA sense strand
gggaagacuuagaguuuaa

SEQ ID NO: 645067 - RNA, 19 nt, Homo sapiens
  misc_RNA (1)...(19): siRNA sense strand
gcaggaaacuguguccaaa

SEQ ID NO: 645068 - RNA, 19 nt, Homo sapiens
  misc_RNA (1)...(19): siRNA sense strand
gaagagaaagauguuguua

SEQ ID NO: 645069 - RNA, 19 nt, Homo sapiens
  misc_RNA (1)...(19): siRNA sense strand
gaaaguagagcaaacaauc

SEQ ID NO: 645070 - RNA, 19 nt, Homo sapiens
  misc_RNA (1)...(19): siRNA sense strand
agaaguaucucaaacaugu

SEQ ID NO: 645071 - RNA, 19 nt, Homo sapiens
  misc_RNA (1)...(19): siRNA sense strand
guuacuaucucaacaagaa

SEQ ID NO: 645072 - RNA, 19 nt, Homo sapiens
  misc_RNA (1)...(19): siRNA sense strand
cagcuaaccuggaauacuu

SEQ ID NO: 645073 - RNA, 19 nt, Homo sapiens
  misc_RNA (1)...(19): siRNA sense strand
ggagaaagaaauugaagaa

SEQ ID NO: 645074 - RNA, 19 nt, Homo sapiens
  misc_RNA (1)...(19): siRNA sense strand
gauccucugucuucaguaa

SEQ ID NO: 645075 - RNA, 19 nt, Homo sapiens
  misc_RNA (1)...(19): siRNA sense strand
gaaggaacuggugauauua

SEQ ID NO: 645076 - RNA, 19 nt, Homo sapiens
  misc_RNA (1)...(19): siRNA sense strand
gcaaagaaagaacuagauu

SEQ ID NO: 645077 - RNA, 19 nt, Homo sapiens
  misc_RNA (1)...(19): siRNA sense strand
aagaagaggugaaagaguu

SEQ ID NO: 645078 - RNA, 19 nt, Homo sapiens
  misc_RNA (1)...(19): siRNA sense strand
agcagaaacugaucacuua

SEQ ID NO: 645079 - RNA, 19 nt, Homo sapiens
  misc_RNA (1)...(19): siRNA sense strand
gauagaagauuuggagcaa

SEQ ID NO: 645080 - RNA, 19 nt, Homo sapiens
  misc_RNA (1)...(19): siRNA sense strand
gggagaaaaugaaaaguua

SEQ ID NO: 645081 - RNA, 19 nt, Homo sapiens
  misc_RNA (1)...(19): siRNA sense strand
gaaauggaugcucaacaua

SEQ ID NO: 645082 - RNA, 19 nt, Homo sapiens
  misc_RNA (1)...(19): siRNA sense strand
gauauguucuauucucuug

SEQ ID NO: 645083 - RNA, 19 nt, Homo sapiens
  misc_RNA (1)...(19): siRNA sense strand
gaacaugaagcagagauaa

SEQ ID NO: 645084 - RNA, 19 nt, Homo sapiens
  misc_RNA (1)...(19): siRNA sense strand
gagcagaaagcuauaagaa

SEQ ID NO: 645085 - RNA, 19 nt, Homo sapiens
  misc_RNA (1)...(19): siRNA sense strand
gaagaucuccuggcucgua

SEQ ID NO: 645086 - RNA, 19 nt, Homo sapiens
  misc_RNA (1)...(19): siRNA sense strand
gagauuaagugccuucaag

SEQ ID NO: 645087 - RNA, 19 nt, Homo sapiens
  misc_RNA (1)...(19): siRNA sense strand
gaacuuucagaacaacuua

SEQ ID NO: 645088 - RNA, 19 nt, Homo sapiens
  misc_RNA (1)...(19): siRNA sense strand
gagaucaagugcgacauuu

SEQ ID NO: 645089 - RNA, 19 nt, Homo sapiens
  misc_RNA (1)...(19): siRNA sense strand
ugaaaguucucucugaaga

SEQ ID NO: 645090 - RNA, 19 nt, Homo sapiens
  misc_RNA (1)...(19): siRNA sense strand
ggaacuggugauauuauua

SEQ ID NO: 645091 - RNA, 19 nt, Homo sapiens
  misc_RNA (1)...(19): siRNA sense strand
gagcuagcagguuuaaaua

SEQ ID NO: 645092 - RNA, 19 nt, Homo sapiens
  misc_RNA (1)...(19): siRNA sense strand
aaucugagcuagcagguuu

SEQ ID NO: 645093 - RNA, 19 nt, Homo sapiens
  misc_RNA (1)...(19): siRNA sense strand
gucaaacacuuagaagaua

SEQ ID NO: 645094 - RNA, 19 nt, Homo sapiens
  misc_RNA (1)...(19): siRNA sense strand
gaaaagaaggaaacaguua

SEQ ID NO: 645095 - RNA, 19 nt, Homo sapiens
  misc_RNA (1)...(19): siRNA sense strand
guugaaagcuauacaccaa

SEQ ID NO: 645096 - RNA, 19 nt, Homo sapiens
  misc_RNA (1)...(19): siRNA sense strand
cagagaacaugaugaugaa

SEQ ID NO: 645097 - RNA, 19 nt, Homo sapiens
  misc_RNA (1)...(19): siRNA sense strand
gaaggaagaacuugaaucu

SEQ ID NO: 645098 - RNA, 19 nt, Homo sapiens
  misc_RNA (1)...(19): siRNA sense strand
gaaagauguuguuaauguc

SEQ ID NO: 645099 - RNA, 19 nt, Homo sapiens
  misc_RNA (1)...(19): siRNA sense strand
gaagauaccuuaaaagaac

SEQ ID NO: 645100 - RNA, 19 nt, Homo sapiens
  misc_RNA (1)...(19): siRNA sense strand
gaugggagaugcacauaag

SEQ ID NO: 645101 - RNA, 19 nt, Homo sapiens
  misc_RNA (1)...(19): siRNA sense strand
ccacauugaugaauaugga

SEQ ID NO: 645102 - RNA, 19 nt, Homo sapiens
  misc_RNA (1)...(19): siRNA sense strand
ccaaagcaaugguagacaa

SEQ ID NO: 645103 - RNA, 19 nt, Homo sapiens
  misc_RNA (1)...(19): siRNA sense strand
ugaaauggaugcucaacau

SEQ ID NO: 645104 - RNA, 19 nt, Homo sapiens
  misc_RNA (1)...(19): siRNA sense strand
acacuuagaagauaccuua

SEQ ID NO: 645105 - RNA, 19 nt, Homo sapiens
  misc_RNA (1)...(19): siRNA sense strand
gaguugaugugccagauug

SEQ ID NO: 645106 - RNA, 19 nt, Homo sapiens
  misc_RNA (1)...(19): siRNA sense strand
gagagacuucuuccuguua

SEQ ID NO: 645107 - RNA, 19 nt, Homo sapiens
  misc_RNA (1)...(19): siRNA sense strand
gagagaagucugcagcuaa

SEQ ID NO: 645108 - RNA, 19 nt, Homo sapiens
  misc_RNA (1)...(19): siRNA sense strand
gcagucugaucuucuagaa

SEQ ID NO: 645109 - RNA, 19 nt, Homo sapiens
  misc_RNA (1)...(19): siRNA sense strand
aaaugaaaguucucucuga

SEQ ID NO: 645110 - RNA, 19 nt, Homo sapiens
  misc_RNA (1)...(19): siRNA sense strand
caagaaacccuacaagaag

SEQ ID NO: 645111 - RNA, 19 nt, Homo sapiens
  misc_RNA (1)...(19): siRNA sense strand
ugacagcacuacaggaaga

SEQ ID NO: 645112 - RNA, 19 nt, Homo sapiens
  misc_RNA (1)...(19): siRNA sense strand
aauggaugcucaacauaua

SEQ ID NO: 645113 - RNA, 19 nt, Homo sapiens
  misc_RNA (1)...(19): siRNA sense strand
uaagaagauuggaaaggaa

SEQ ID NO: 645114 - RNA, 19 nt, Homo sapiens
  misc_RNA (1)...(19): siRNA sense strand
gaaauagcuuccgagauca

SEQ ID NO: 645115 - RNA, 19 nt, Homo sapiens
  misc_RNA (1)...(19): siRNA sense strand
ugagggcgcuaaacaagaa

SEQ ID NO: 645116 - RNA, 19 nt, Homo sapiens
  misc_RNA (1)...(19): siRNA sense strand
acaagaaacccuacaagaa

SEQ ID NO: 645117 - RNA, 19 nt, Homo sapiens
  misc_RNA (1)...(19): siRNA sense strand
gcaguacguuccaaauaca

SEQ ID NO: 645118 - RNA, 19 nt, Homo sapiens
  misc_RNA (1)...(19): siRNA sense strand
uagaagaaauacagucaga

SEQ ID NO: 645119 - RNA, 19 nt, Homo sapiens
  misc_RNA (1)...(19): siRNA sense strand
ugagcaaguucagaaguua

SEQ ID NO: 645120 - RNA, 19 nt, Homo sapiens
  misc_RNA (1)...(19): siRNA sense strand
ggaagaaaguagagcaaac

SEQ ID NO: 645121 - RNA, 19 nt, Homo sapiens
  misc_RNA (1)...(19): siRNA sense strand
aaaccaagacaaucagaua

SEQ ID NO: 645122 - RNA, 19 nt, Homo sapiens
  misc_RNA (1)...(19): siRNA sense strand
gaaaagaacauccagaaga

SEQ ID NO: 645123 - RNA, 19 nt, Homo sapiens
  misc_RNA (1)...(19): siRNA sense strand
gaaggaaacaguuacucaa

SEQ ID NO: 645124 - RNA, 19 nt, Homo sapiens
  misc_RNA (1)...(19): siRNA sense strand
gaugagguaacuuauauga

SEQ ID NO: 645125 - RNA, 19 nt, Homo sapiens
  misc_RNA (1)...(19): siRNA sense strand
gcaaauuaagcuucucaaa

SEQ ID NO: 645126 - RNA, 19 nt, Homo sapiens
  misc_RNA (1)...(19): siRNA sense strand
ccaaugcaauucuuaugga

SEQ ID NO: 645127 - RNA, 19 nt, Homo sapiens
  misc_RNA (1)...(19): siRNA sense strand
gaacgagguccuucgaaau

SEQ ID NO: 645128 - RNA, 19 nt, Homo sapiens
  misc_RNA (1)...(19): siRNA sense strand
ucagagaacaugaugauga

SEQ ID NO: 645129 - RNA, 19 nt, Homo sapiens
  misc_RNA (1)...(19): siRNA sense strand
gaaacaagaaacccuacaa

SEQ ID NO: 645130 - RNA, 19 nt, Homo sapiens
  misc_RNA (1)...(19): siRNA sense strand
agaagacagugaagagaaa

SEQ ID NO: 645131 - RNA, 19 nt, Homo sapiens
  misc_RNA (1)...(19): siRNA sense strand
uaugagaguuuacgagaga

SEQ ID NO: 645132 - RNA, 19 nt, Homo sapiens
  misc_RNA (1)...(19): siRNA sense strand
gaucaaaaccuguuacuga

SEQ ID NO: 645133 - RNA, 19 nt, Homo sapiens
  misc_RNA (1)...(19): siRNA sense strand
gcaaccaaugcaauucuua

SEQ ID NO: 645134 - RNA, 19 nt, Homo sapiens
  misc_RNA (1)...(19): siRNA sense strand
uagaagauuuggagcaaga

SEQ ID NO: 645135 - RNA, 19 nt, Homo sapiens
  misc_RNA (1)...(19): siRNA sense strand
gaacuucagguacaacuuc

SEQ ID NO: 645136 - RNA, 19 nt, Homo sapiens
  misc_RNA (1)...(19): siRNA sense strand
gaccuuacaagacaauuaa

SEQ ID NO: 645137 - RNA, 19 nt, Homo sapiens
  misc_RNA (1)...(19): siRNA sense strand
gaaagggaagaaagauuga

SEQ ID NO: 645138 - RNA, 19 nt, Homo sapiens
  misc_RNA (1)...(19): siRNA sense strand
cgggaagacuuagaguuua

SEQ ID NO: 645139 - RNA, 19 nt, Homo sapiens
  misc_RNA (1)...(19): siRNA sense strand
gaagaaagguguucacaaa

SEQ ID NO: 645140 - RNA, 19 nt, Homo sapiens
  misc_RNA (1)...(19): siRNA sense strand
gcacgaggaucuucaaaug

SEQ ID NO: 645141 - RNA, 19 nt, Homo sapiens
  misc_RNA (1)...(19): siRNA sense strand
uagcaaagcucuaccauuc

SEQ ID NO: 645142 - RNA, 19 nt, Homo sapiens
  misc_RNA (1)...(19): siRNA sense strand
caaaugauguuguguuuag

SEQ ID NO: 645143 - RNA, 19 nt, Homo sapiens
  misc_RNA (1)...(19): siRNA sense strand
gaaaucggguggagaugaa

SEQ ID NO: 645144 - RNA, 19 nt, Homo sapiens
  misc_RNA (1)...(19): siRNA sense strand
gaacuggaaugacaagauc

SEQ ID NO: 645145 - RNA, 19 nt, Homo sapiens
  misc_RNA (1)...(19): siRNA sense strand
gagaauggcuacaaguuuc

SEQ ID NO: 645146 - RNA, 19 nt, Homo sapiens
  misc_RNA (1)...(19): siRNA sense strand
ccaaacagcugccagaauc

SEQ ID NO: 645147 - RNA, 19 nt, Homo sapiens
  misc_RNA (1)...(19): siRNA sense strand
gaaacaccaucucagaguu

SEQ ID NO: 645148 - RNA, 19 nt, Homo sapiens
  misc_RNA (1)...(19): siRNA sense strand
cagaagagcuugccuaagg

SEQ ID NO: 645149 - RNA, 19 nt, Homo sapiens
  misc_RNA (1)...(19): siRNA sense strand
gagaaagcaugaccaaaca

SEQ ID NO: 645150 - RNA, 19 nt, Homo sapiens
  misc_RNA (1)...(19): siRNA sense strand
ggaaacaagucaucguauc

SEQ ID NO: 645151 - RNA, 19 nt, Homo sapiens
  misc_RNA (1)...(19): siRNA sense strand
uggagcauaucauuacuua

SEQ ID NO: 645152 - RNA, 19 nt, Homo sapiens
  misc_RNA (1)...(19): siRNA sense strand
gagcauaucauuacuuauc

SEQ ID NO: 645153 - RNA, 19 nt, Homo sapiens
  misc_RNA (1)...(19): siRNA sense strand
ugaggagacugaagaagaa

SEQ ID NO: 645154 - RNA, 19 nt, Homo sapiens
  misc_RNA (1)...(19): siRNA sense strand
caagaaagaaccaaaggaa

SEQ ID NO: 645155 - RNA, 19 nt, Homo sapiens
  misc_RNA (1)...(19): siRNA sense strand
gaugauauuuaccuugaug

SEQ ID NO: 645156 - RNA, 19 nt, Homo sapiens
  misc_RNA (1)...(19): siRNA sense strand
gaaacaagucaucguauca

SEQ ID NO: 645157 - RNA, 19 nt, Homo sapiens
  misc_RNA (1)...(19): siRNA sense strand
gcagcacaacuucauauaa

SEQ ID NO: 645158 - RNA, 19 nt, Homo sapiens
  misc_RNA (1)...(19): siRNA sense strand
cagcacaacuucauauaag

SEQ ID NO: 645159 - RNA, 19 nt, Homo sapiens
  misc_RNA (1)...(19): siRNA sense strand
ggagaaagaaauacaaaca

SEQ ID NO: 645160 - RNA, 19 nt, Homo sapiens
  misc_RNA (1)...(19): siRNA sense strand
ccaaagagaaagugauuga

SEQ ID NO: 645161 - RNA, 19 nt, Homo sapiens
  misc_RNA (1)...(19): siRNA sense strand
guuccagacuguagaauau

SEQ ID NO: 645162 - RNA, 19 nt, Homo sapiens
  misc_RNA (1)...(19): siRNA sense strand
gcaaagcucuaccauucca

SEQ ID NO: 645163 - RNA, 19 nt, Homo sapiens
  misc_RNA (1)...(19): siRNA sense strand
cgaaagagagaaagcauga

SEQ ID NO: 645164 - RNA, 19 nt, Homo sapiens
  misc_RNA (1)...(19): siRNA sense strand
gcacaacuucauauaagaa

SEQ ID NO: 645165 - RNA, 19 nt, Homo sapiens
  misc_RNA (1)...(19): siRNA sense strand
gauggcagcuaucaguguu

SEQ ID NO: 645166 - RNA, 19 nt, Homo sapiens
  misc_RNA (1)...(19): siRNA sense strand
cacaggagcucgaagaauc

SEQ ID NO: 645167 - RNA, 19 nt, Homo sapiens
  misc_RNA (1)...(19): siRNA sense strand
ucagugaaguugagaagga

SEQ ID NO: 645168 - RNA, 19 nt, Homo sapiens
  misc_RNA (1)...(19): siRNA sense strand
ccagagaaguucaaaauug

SEQ ID NO: 645169 - RNA, 19 nt, Homo sapiens
  misc_RNA (1)...(19): siRNA sense strand
aagacaagaugccaaagaa

SEQ ID NO: 645170 - RNA, 19 nt, Homo sapiens
  misc_RNA (1)...(19): siRNA sense strand
gaaguugcagcucuuuauu

SEQ ID NO: 645171 - RNA, 19 nt, Homo sapiens
  misc_RNA (1)...(19): siRNA sense strand
gcagaagacacaugugaug

SEQ ID NO: 645172 - RNA, 19 nt, Homo sapiens
  misc_RNA (1)...(19): siRNA sense strand
ggacuuauagacaauccua

SEQ ID NO: 645173 - RNA, 19 nt, Homo sapiens
  misc_RNA (1)...(19): siRNA sense strand
agaaaacccuggacuuaua

SEQ ID NO: 645174 - RNA, 19 nt, Homo sapiens
  misc_RNA (1)...(19): siRNA sense strand
ccuaggacagcuacaauua

SEQ ID NO: 645175 - RNA, 19 nt, Homo sapiens
  misc_RNA (1)...(19): siRNA sense strand
gaucagagucucacaugga

SEQ ID NO: 645176 - RNA, 19 nt, Homo sapiens
  misc_RNA (1)...(19): siRNA sense strand
caaaccggcagcuaaagua

SEQ ID NO: 645177 - RNA, 19 nt, Homo sapiens
  misc_RNA (1)...(19): siRNA sense strand
gcagcaggauggcagcuau

SEQ ID NO: 645178 - RNA, 19 nt, Homo sapiens
  misc_RNA (1)...(19): siRNA sense strand
gcagaaaacccuggacuua

SEQ ID NO: 645179 - RNA, 19 nt, Homo sapiens
  misc_RNA (1)...(19): siRNA sense strand
guccugagauccaaagaga

SEQ ID NO: 645180 - RNA, 19 nt, Homo sapiens
  misc_RNA (1)...(19): siRNA sense strand
ggaccuggaugaccugucu

SEQ ID NO: 645181 - RNA, 19 nt, Homo sapiens
  misc_RNA (1)...(19): siRNA sense strand
gaaagaaccaaaggaaaca

SEQ ID NO: 645182 - RNA, 19 nt, Homo sapiens
  misc_RNA (1)...(19): siRNA sense strand
gcucuaccauuccaucaau

SEQ ID NO: 645183 - RNA, 19 nt, Homo sapiens
  misc_RNA (1)...(19): siRNA sense strand
cccaaaugauguuguguuu

SEQ ID NO: 645184 - RNA, 19 nt, Homo sapiens
  misc_RNA (1)...(19): siRNA sense strand
gacaagaugccaaagaaau

SEQ ID NO: 645185 - RNA, 19 nt, Homo sapiens
  misc_RNA (1)...(19): siRNA sense strand
gaaggagaaagaaauacaa

SEQ ID NO: 645186 - RNA, 19 nt, Homo sapiens
  misc_RNA (1)...(19): siRNA sense strand
cacaugaaguugggugaua

SEQ ID NO: 645187 - RNA, 19 nt, Homo sapiens
  misc_RNA (1)...(19): siRNA sense strand
gcagugcaguggaucuuca

SEQ ID NO: 645188 - RNA, 19 nt, Homo sapiens
  misc_RNA (1)...(19): siRNA sense strand
gcagcucccaugauccuua

SEQ ID NO: 645189 - RNA, 19 nt, Homo sapiens
  misc_RNA (1)...(19): siRNA sense strand
ccacagagaagugauagaa

SEQ ID NO: 645190 - RNA, 19 nt, Homo sapiens
  misc_RNA (1)...(19): siRNA sense strand
acaauuacaccaucagaaa

SEQ ID NO: 645191 - RNA, 19 nt, Homo sapiens
  misc_RNA (1)...(19): siRNA sense strand
ggaaaccguccaaaugaug

SEQ ID NO: 645192 - RNA, 19 nt, Homo sapiens
  misc_RNA (1)...(19): siRNA sense strand
gaaagguguucacaaaaga

SEQ ID NO: 645193 - RNA, 19 nt, Homo sapiens
  misc_RNA (1)...(19): siRNA sense strand
caaaugcuuccuugaaaga

SEQ ID NO: 645194 - RNA, 19 nt, Homo sapiens
  misc_RNA (1)...(19): siRNA sense strand
gacguuacccucucccuuu

SEQ ID NO: 645195 - RNA, 19 nt, Homo sapiens
  misc_RNA (1)...(19): siRNA sense strand
caacggcagugcaguggau

SEQ ID NO: 645196 - RNA, 19 nt, Homo sapiens
  misc_RNA (1)...(19): siRNA sense strand
uaaccaagucggaugcuuu

SEQ ID NO: 645197 - RNA, 19 nt, Homo sapiens
  misc_RNA (1)...(19): siRNA sense strand
acaagaucaucauuucuga

SEQ ID NO: 645198 - RNA, 19 nt, Homo sapiens
  misc_RNA (1)...(19): siRNA sense strand
gaucacaggagcucgaaga

SEQ ID NO: 645199 - RNA, 19 nt, Homo sapiens
  misc_RNA (1)...(19): siRNA sense strand
aaacgaaggagaaagaaau

SEQ ID NO: 645200 - RNA, 19 nt, Homo sapiens
  misc_RNA (1)...(19): siRNA sense strand
gcccuucuaugcugccuuu

SEQ ID NO: 645201 - RNA, 19 nt, Homo sapiens
  misc_RNA (1)...(19): siRNA sense strand
cugaugauauuuaccuuga

SEQ ID NO: 645202 - RNA, 19 nt, Homo sapiens
  misc_RNA (1)...(19): siRNA sense strand
gagcuccgaugaugacaag

SEQ ID NO: 645203 - RNA, 19 nt, Homo sapiens
  misc_RNA (1)...(19): siRNA sense strand
uaggacagcuacaauuaca

SEQ ID NO: 645204 - RNA, 19 nt, Homo sapiens
  misc_RNA (1)...(19): siRNA sense strand
ugagaauggcuacaaguuu

SEQ ID NO: 645205 - RNA, 19 nt, Homo sapiens
  misc_RNA (1)...(19): siRNA sense strand
ugaaagacaagaugccaaa

SEQ ID NO: 645206 - RNA, 19 nt, Homo sapiens
  misc_RNA (1)...(19): siRNA sense strand
ggagacugaagaagaauau

SEQ ID NO: 645207 - RNA, 19 nt, Homo sapiens
  misc_RNA (1)...(19): siRNA sense strand
ugacuuaaagggucuagaa

SEQ ID NO: 645208 - RNA, 19 nt, Homo sapiens
  misc_RNA (1)...(19): siRNA sense strand
ccucaccaauuccuacuga

SEQ ID NO: 645209 - RNA, 19 nt, Homo sapiens
  misc_RNA (1)...(19): siRNA sense strand
gacaagaucaucauuucug

SEQ ID NO: 645210 - RNA, 19 nt, Homo sapiens
  misc_RNA (1)...(19): siRNA sense strand
aggacaaccucaucaguga

SEQ ID NO: 645211 - RNA, 19 nt, Homo sapiens
  misc_RNA (1)...(19): siRNA sense strand
gcaguggaucuucacauga

SEQ ID NO: 645212 - RNA, 19 nt, Homo sapiens
  misc_RNA (1)...(19): siRNA sense strand
gaacucuacaagggcauua

SEQ ID NO: 645213 - RNA, 19 nt, Homo sapiens
  misc_RNA (1)...(19): siRNA sense strand
auccuuagcuugcaaguau

SEQ ID NO: 645214 - RNA, 19 nt, Homo sapiens
  misc_RNA (1)...(19): siRNA sense strand
ggacuugccugacguuacc

SEQ ID NO: 645215 - RNA, 19 nt, Homo sapiens
  misc_RNA (1)...(19): siRNA sense strand
ccgagugccucucagauuc

SEQ ID NO: 645216 - RNA, 19 nt, Homo sapiens
  misc_RNA (1)...(19): siRNA sense strand
guuagaugcugaccaccuu

SEQ ID NO: 645217 - RNA, 19 nt, Homo sapiens
  misc_RNA (1)...(19): siRNA sense strand
cagcguguccuaagaguga

SEQ ID NO: 645218 - RNA, 19 nt, Homo sapiens
  misc_RNA (1)...(19): siRNA sense strand
ggcgugagcuccgaugaug

SEQ ID NO: 645219 - RNA, 19 nt, Homo sapiens
  misc_RNA (1)...(19): siRNA sense strand
gagaagugauagaaaagaa

SEQ ID NO: 645220 - RNA, 19 nt, Homo sapiens
  misc_RNA (1)...(19): siRNA sense strand
gcuccacgauggcccaaau

SEQ ID NO: 645221 - RNA, 19 nt, Homo sapiens
  misc_RNA (1)...(19): siRNA sense strand
aaaguagacucgccgucaa

SEQ ID NO: 645222 - RNA, 19 nt, Homo sapiens
  misc_RNA (1)...(19): siRNA sense strand
ucaguaaggagcagaauuc

SEQ ID NO: 645223 - RNA, 19 nt, Homo sapiens
  misc_RNA (1)...(19): siRNA sense strand
ccccaagggugaauuaaua

SEQ ID NO: 645224 - RNA, 19 nt, Homo sapiens
  misc_RNA (1)...(19): siRNA sense strand
gaaaccguccaaaugaugu

SEQ ID NO: 645225 - RNA, 19 nt, Homo sapiens
  misc_RNA (1)...(19): siRNA sense strand
ggaacuggaaugacaagau

SEQ ID NO: 645226 - RNA, 19 nt, Homo sapiens
  misc_RNA (1)...(19): siRNA sense strand
acaugaaguugggugauaa

SEQ ID NO: 645227 - RNA, 19 nt, Homo sapiens
  misc_RNA (1)...(19): siRNA sense strand
uauagacaauccuaaccuu

SEQ ID NO: 645228 - RNA, 19 nt, Homo sapiens
  misc_RNA (1)...(19): siRNA sense strand
ccugagauccaaagagaaa

SEQ ID NO: 645229 - RNA, 19 nt, Homo sapiens
  misc_RNA (1)...(19): siRNA sense strand
cgucuaagcagcccuucua

SEQ ID NO: 645230 - RNA, 19 nt, Homo sapiens
  misc_RNA (1)...(19): siRNA sense strand
gaaaccagagaaguucaaa

SEQ ID NO: 645231 - RNA, 19 nt, Homo sapiens
  misc_RNA (1)...(19): siRNA sense strand
ccaaaugauguuguguuua

SEQ ID NO: 645232 - RNA, 19 nt, Homo sapiens
  misc_RNA (1)...(19): siRNA sense strand
ucuagaaccugaaguugca

SEQ ID NO: 645233 - RNA, 19 nt, Homo sapiens
  misc_RNA (1)...(19): siRNA sense strand
aauacaaacaggacaguaa

SEQ ID NO: 645234 - RNA, 19 nt, Homo sapiens
  misc_RNA (1)...(19): siRNA sense strand
acagagaagugauagaaaa

SEQ ID NO: 645235 - RNA, 19 nt, Homo sapiens
  misc_RNA (1)...(19): siRNA sense strand
caaugagaauggcuacaag

SEQ ID NO: 645236 - RNA, 19 nt, Homo sapiens
  misc_RNA (1)...(19): siRNA sense strand
gagaaagugauugauauag

SEQ ID NO: 645237 - RNA, 19 nt, Homo sapiens
  misc_RNA (1)...(19): siRNA sense strand
uaucacgaauuugcagaaa

SEQ ID NO: 645238 - RNA, 19 nt, Homo sapiens
  misc_RNA (1)...(19): siRNA sense strand
agaacgaucugaccaucau

SEQ ID NO: 645239 - RNA, 19 nt, Homo sapiens
  misc_RNA (1)...(19): siRNA sense strand
caacaagucugauuacuga

SEQ ID NO: 645240 - RNA, 19 nt, Homo sapiens
  misc_RNA (1)...(19): siRNA sense strand
ggaaggaucugguuauguu

SEQ ID NO: 645241 - RNA, 19 nt, Homo sapiens
  misc_RNA (1)...(19): siRNA sense strand
ggacaaagaugaaagcaau

SEQ ID NO: 645242 - RNA, 19 nt, Homo sapiens
  misc_RNA (1)...(19): siRNA sense strand
ugaaagcaauccuguaaua

SEQ ID NO: 645243 - RNA, 19 nt, Homo sapiens
  misc_RNA (1)...(19): siRNA sense strand
ggagguggcuuucagaaga

SEQ ID NO: 645244 - RNA, 19 nt, Homo sapiens
  misc_RNA (1)...(19): siRNA sense strand
gaagaagcauccacugguu

SEQ ID NO: 645245 - RNA, 19 nt, Homo sapiens
  misc_RNA (1)...(19): siRNA sense strand
gggaaacaguggcaagaua

SEQ ID NO: 645246 - RNA, 19 nt, Homo sapiens
  misc_RNA (1)...(19): siRNA sense strand
gaaagauguuuaagcagaa

SEQ ID NO: 645247 - RNA, 19 nt, Homo sapiens
  misc_RNA (1)...(19): siRNA sense strand
gagaagaagugguguaugg

SEQ ID NO: 645248 - RNA, 19 nt, Homo sapiens
  misc_RNA (1)...(19): siRNA sense strand
ucaagggccugccagaaua

SEQ ID NO: 645249 - RNA, 19 nt, Homo sapiens
  misc_RNA (1)...(19): siRNA sense strand
ggagaguucugaaaccaaa

SEQ ID NO: 645250 - RNA, 19 nt, Homo sapiens
  misc_RNA (1)...(19): siRNA sense strand
cagaagaagugccaugaaa

SEQ ID NO: 645251 - RNA, 19 nt, Homo sapiens
  misc_RNA (1)...(19): siRNA sense strand
ggugaaagcuacauucugu

SEQ ID NO: 645252 - RNA, 19 nt, Homo sapiens
  misc_RNA (1)...(19): siRNA sense strand
caagaaaagugccgauuua

SEQ ID NO: 645253 - RNA, 19 nt, Homo sapiens
  misc_RNA (1)...(19): siRNA sense strand
gaugaaagcaauccuguaa

SEQ ID NO: 645254 - RNA, 19 nt, Homo sapiens
  misc_RNA (1)...(19): siRNA sense strand
gagccaaccuguggauuaa

SEQ ID NO: 645255 - RNA, 19 nt, Homo sapiens
  misc_RNA (1)...(19): siRNA sense strand
uaagagugauggaaauuga

SEQ ID NO: 645256 - RNA, 19 nt, Homo sapiens
  misc_RNA (1)...(19): siRNA sense strand
ggacaucugugcugguuuc

SEQ ID NO: 645257 - RNA, 19 nt, Homo sapiens
  misc_RNA (1)...(19): siRNA sense strand
ugaaagccaugaagaaaug

SEQ ID NO: 645258 - RNA, 19 nt, Homo sapiens
  misc_RNA (1)...(19): siRNA sense strand
ugagaaagauguuuaagca

SEQ ID NO: 645259 - RNA, 19 nt, Homo sapiens
  misc_RNA (1)...(19): siRNA sense strand
ugagggagcuggaaacuuc

SEQ ID NO: 645260 - RNA, 19 nt, Homo sapiens
  misc_RNA (1)...(19): siRNA sense strand
ggagccaaccuguggauua

SEQ ID NO: 645261 - RNA, 19 nt, Homo sapiens
  misc_RNA (1)...(19): siRNA sense strand
gcaaguggcagaagaguau

SEQ ID NO: 645262 - RNA, 19 nt, Homo sapiens
  misc_RNA (1)...(19): siRNA sense strand
ucacuggguuguuccauaa

SEQ ID NO: 645263 - RNA, 19 nt, Homo sapiens
  misc_RNA (1)...(19): siRNA sense strand
guacaucacccgcuucuug

SEQ ID NO: 645264 - RNA, 19 nt, Homo sapiens
  misc_RNA (1)...(19): siRNA sense strand
cagaggagcuggcuugcaa

SEQ ID NO: 645265 - RNA, 19 nt, Homo sapiens
  misc_RNA (1)...(19): siRNA sense strand
ccacaggucccaccaauga

SEQ ID NO: 645266 - RNA, 19 nt, Homo sapiens
  misc_RNA (1)...(19): siRNA sense strand
ggagugaucuaugauguuc

SEQ ID NO: 645267 - RNA, 19 nt, Homo sapiens
  misc_RNA (1)...(19): siRNA sense strand
gcaagggacauaagaguga

SEQ ID NO: 645268 - RNA, 19 nt, Homo sapiens
  misc_RNA (1)...(19): siRNA sense strand
ccaaacaaaggcacuauuu

SEQ ID NO: 645269 - RNA, 19 nt, Homo sapiens
  misc_RNA (1)...(19): siRNA sense strand
gaagaaaccagagagcauu

SEQ ID NO: 645270 - RNA, 19 nt, Homo sapiens
  misc_RNA (1)...(19): siRNA sense strand
cuaaaugccuccaauuaca

SEQ ID NO: 645271 - RNA, 19 nt, Homo sapiens
  misc_RNA (1)...(19): siRNA sense strand
gagaacagccugaggacaa

SEQ ID NO: 645272 - RNA, 19 nt, Homo sapiens
  misc_RNA (1)...(19): siRNA sense strand
caaaggcacuauuuccaau

SEQ ID NO: 645273 - RNA, 19 nt, Homo sapiens
  misc_RNA (1)...(19): siRNA sense strand
aagauggccuugacaauga

SEQ ID NO: 645274 - RNA, 19 nt, Homo sapiens
  misc_RNA (1)...(19): siRNA sense strand
gaaggaaggaucugguuau

SEQ ID NO: 645275 - RNA, 19 nt, Homo sapiens
  misc_RNA (1)...(19): siRNA sense strand
gaaaauaguucaccaugca

SEQ ID NO: 645276 - RNA, 19 nt, Homo sapiens
  misc_RNA (1)...(19): siRNA sense strand
ccagaacccucaggaaaga

SEQ ID NO: 645277 - RNA, 19 nt, Homo sapiens
  misc_RNA (1)...(19): siRNA sense strand
ggauuaaaggacaguguua

SEQ ID NO: 645278 - RNA, 19 nt, Homo sapiens
  misc_RNA (1)...(19): siRNA sense strand
gaaagauggccuugacaau

SEQ ID NO: 645279 - RNA, 19 nt, Homo sapiens
  misc_RNA (1)...(19): siRNA sense strand
gugagaauguggaguccua

SEQ ID NO: 645280 - RNA, 19 nt, Homo sapiens
  misc_RNA (1)...(19): siRNA sense strand
gcagaaaguuccagaaacc

SEQ ID NO: 645281 - RNA, 19 nt, Homo sapiens
  misc_RNA (1)...(19): siRNA sense strand
gaugcaacaagucugauua

SEQ ID NO: 645282 - RNA, 19 nt, Homo sapiens
  misc_RNA (1)...(19): siRNA sense strand
gaaagcaauccuguaauau

SEQ ID NO: 645283 - RNA, 19 nt, Homo sapiens
  misc_RNA (1)...(19): siRNA sense strand
gaggaucgcugcggugugu

SEQ ID NO: 645284 - RNA, 19 nt, Homo sapiens
  misc_RNA (1)...(19): siRNA sense strand
uaacaucaaugaagauucg

SEQ ID NO: 645285 - RNA, 19 nt, Homo sapiens
  misc_RNA (1)...(19): siRNA sense strand
gcaguuguaacaucaauga

SEQ ID NO: 645286 - RNA, 19 nt, Homo sapiens
  misc_RNA (1)...(19): siRNA sense strand
caaagaugauugaauacca

SEQ ID NO: 645287 - RNA, 19 nt, Homo sapiens
  misc_RNA (1)...(19): siRNA sense strand
guuguaacaucaaugaaga

SEQ ID NO: 645288 - RNA, 19 nt, Homo sapiens
  misc_RNA (1)...(19): siRNA sense strand
ccaaacaacaugaaccaaa

SEQ ID NO: 645289 - RNA, 19 nt, Homo sapiens
  misc_RNA (1)...(19): siRNA sense strand
uacaauaccuugaccaaag

SEQ ID NO: 645290 - RNA, 19 nt, Homo sapiens
  misc_RNA (1)...(19): siRNA sense strand
ccaaacugcccauugcaua

SEQ ID NO: 645291 - RNA, 19 nt, Homo sapiens
  misc_RNA (1)...(19): siRNA sense strand
gcucagaggcaccaacauu

SEQ ID NO: 645292 - RNA, 19 nt, Homo sapiens
  misc_RNA (1)...(19): siRNA sense strand
caucugugcugguuucaau

SEQ ID NO: 645293 - RNA, 19 nt, Homo sapiens
  misc_RNA (1)...(19): siRNA sense strand
caaacaacaugaaccaaac

SEQ ID NO: 645294 - RNA, 19 nt, Homo sapiens
  misc_RNA (1)...(19): siRNA sense strand
caaacugcccauugcauaa

SEQ ID NO: 645295 - RNA, 19 nt, Homo sapiens
  misc_RNA (1)...(19): siRNA sense strand
cugaauggaggguuuauua

SEQ ID NO: 645296 - RNA, 19 nt, Homo sapiens
  misc_RNA (1)...(19): siRNA sense strand
gcucagcuccuuaacuuug

SEQ ID NO: 645297 - RNA, 19 nt, Homo sapiens
  misc_RNA (1)...(19): siRNA sense strand
gccauggacugacuggauu

SEQ ID NO: 645298 - RNA, 19 nt, Homo sapiens
  misc_RNA (1)...(19): siRNA sense strand
gaauggaggguuuauuauc

SEQ ID NO: 645299 - RNA, 19 nt, Homo sapiens
  misc_RNA (1)...(19): siRNA sense strand
ggacauaagagugauggaa

SEQ ID NO: 645300 - RNA, 19 nt, Homo sapiens
  misc_RNA (1)...(19): siRNA sense strand
guaagaugguuggcuguga

SEQ ID NO: 645301 - RNA, 19 nt, Homo sapiens
  misc_RNA (1)...(19): siRNA sense strand
caauauggacccaaugcua

SEQ ID NO: 645302 - RNA, 19 nt, Homo sapiens
  misc_RNA (1)...(19): siRNA sense strand
gaaccucucccauguuaag

SEQ ID NO: 645303 - RNA, 19 nt, Homo sapiens
  misc_RNA (1)...(19): siRNA sense strand
gaucagaguaccuggaaau

SEQ ID NO: 645304 - RNA, 19 nt, Homo sapiens
  misc_RNA (1)...(19): siRNA sense strand
gcaaucagcagcccuaguc

SEQ ID NO: 645305 - RNA, 19 nt, Homo sapiens
  misc_RNA (1)...(19): siRNA sense strand
uggcucagcuccuuaacuu

SEQ ID NO: 645306 - RNA, 19 nt, Homo sapiens
  misc_RNA (1)...(19): siRNA sense strand
gacauaagagugauggaaa

SEQ ID NO: 645307 - RNA, 19 nt, Homo sapiens
  misc_RNA (1)...(19): siRNA sense strand
cuacaagaaugaacucuac

SEQ ID NO: 645308 - RNA, 19 nt, Homo sapiens
  misc_RNA (1)...(19): siRNA sense strand
ccaggaggccucugugauu

SEQ ID NO: 645309 - RNA, 19 nt, Homo sapiens
  misc_RNA (1)...(19): siRNA sense strand
ggaaacaguggcaagauag

SEQ ID NO: 645310 - RNA, 19 nt, Homo sapiens
  misc_RNA (1)...(19): siRNA sense strand
acaaugauguugagcagau

SEQ ID NO: 645311 - RNA, 19 nt, Homo sapiens
  misc_RNA (1)...(19): siRNA sense strand
ucaaggauuucuuuccaau

SEQ ID NO: 645312 - RNA, 19 nt, Homo sapiens
  misc_RNA (1)...(19): siRNA sense strand
ucauauggcuugcacuauc

SEQ ID NO: 645313 - RNA, 19 nt, Homo sapiens
  misc_RNA (1)...(19): siRNA sense strand
caauaaaacugaagaccaa

SEQ ID NO: 645314 - RNA, 19 nt, Homo sapiens
  misc_RNA (1)...(19): siRNA sense strand
gcaacaagucugauuacug

SEQ ID NO: 645315 - RNA, 19 nt, Homo sapiens
  misc_RNA (1)...(19): siRNA sense strand
ccacuugcaccuccacuaa

SEQ ID NO: 645316 - RNA, 19 nt, Homo sapiens
  misc_RNA (1)...(19): siRNA sense strand
ccagaaagauggccuugac

SEQ ID NO: 645317 - RNA, 19 nt, Homo sapiens
  misc_RNA (1)...(19): siRNA sense strand
uggagugaguguucuguuu

SEQ ID NO: 645318 - RNA, 19 nt, Homo sapiens
  misc_RNA (1)...(19): siRNA sense strand
acccagaccuccagaauuc

SEQ ID NO: 645319 - RNA, 19 nt, Homo sapiens
  misc_RNA (1)...(19): siRNA sense strand
gcacaagcacuccagcaau

SEQ ID NO: 645320 - RNA, 19 nt, Homo sapiens
  misc_RNA (1)...(19): siRNA sense strand
cgacguggcuguccuucuc

SEQ ID NO: 645321 - RNA, 19 nt, Homo sapiens
  misc_RNA (1)...(19): siRNA sense strand
gccaaaggcccacuacuuc

SEQ ID NO: 645322 - RNA, 19 nt, Homo sapiens
  misc_RNA (1)...(19): siRNA sense strand
gaugaaccuugcgauguga

SEQ ID NO: 645323 - RNA, 19 nt, Homo sapiens
  misc_RNA (1)...(19): siRNA sense strand
ggaagaaaccagagagcau

SEQ ID NO: 645324 - RNA, 19 nt, Homo sapiens
  misc_RNA (1)...(19): siRNA sense strand
gcuacaauauggacccaau

SEQ ID NO: 645325 - RNA, 19 nt, Homo sapiens
  misc_RNA (1)...(19): siRNA sense strand
gggccugucucaccuuuca

SEQ ID NO: 645326 - RNA, 19 nt, Homo sapiens
  misc_RNA (1)...(19): siRNA sense strand
guaucaaucccaagaguga

SEQ ID NO: 645327 - RNA, 19 nt, Homo sapiens
  misc_RNA (1)...(19): siRNA sense strand
uaccacagccuccaaagaa

SEQ ID NO: 645328 - RNA, 19 nt, Homo sapiens
  misc_RNA (1)...(19): siRNA sense strand
cacaagcacuccagcaauc

SEQ ID NO: 645329 - RNA, 19 nt, Homo sapiens
  misc_RNA (1)...(19): siRNA sense strand
ugaugaaccuugcgaugug

SEQ ID NO: 645330 - RNA, 19 nt, Homo sapiens
  misc_RNA (1)...(19): siRNA sense strand
gaaauauugcacuggagaa

SEQ ID NO: 645331 - RNA, 19 nt, Homo sapiens
  misc_RNA (1)...(19): siRNA sense strand
gcagauggaacucaaugug

SEQ ID NO: 645332 - RNA, 19 nt, Homo sapiens
  misc_RNA (1)...(19): siRNA sense strand
gcagacauccguacaucau

SEQ ID NO: 645333 - RNA, 19 nt, Homo sapiens
  misc_RNA (1)...(19): siRNA sense strand
ggaaagaaaaugacuguga

SEQ ID NO: 645334 - RNA, 19 nt, Homo sapiens
  misc_RNA (1)...(19): siRNA sense strand
aaggauuucuuuccaauag

SEQ ID NO: 645335 - RNA, 19 nt, Homo sapiens
  misc_RNA (1)...(19): siRNA sense strand
caggaggccucugugauug

SEQ ID NO: 645336 - RNA, 19 nt, Homo sapiens
  misc_RNA (1)...(19): siRNA sense strand
ccauugagcaugagcugua

SEQ ID NO: 645337 - RNA, 19 nt, Homo sapiens
  misc_RNA (1)...(19): siRNA sense strand
ccuguaauauggaccaaga

SEQ ID NO: 645338 - RNA, 19 nt, Homo sapiens
  misc_RNA (1)...(19): siRNA sense strand
acuaugagaucgauuccaa

SEQ ID NO: 645339 - RNA, 19 nt, Homo sapiens
  misc_RNA (1)...(19): siRNA sense strand
gagaacagauugucuauaa

SEQ ID NO: 645340 - RNA, 19 nt, Homo sapiens
  misc_RNA (1)...(19): siRNA sense strand
gcaacgaaaucuuaguuua

SEQ ID NO: 645341 - RNA, 19 nt, Homo sapiens
  misc_RNA (1)...(19): siRNA sense strand
gaaaugcaacgaaaucuua

SEQ ID NO: 645342 - RNA, 19 nt, Homo sapiens
  misc_RNA (1)...(19): siRNA sense strand
ucagaacucuuccucauua

SEQ ID NO: 645343 - RNA, 19 nt, Homo sapiens
  misc_RNA (1)...(19): siRNA sense strand
ggagacacuuucuuuagua

SEQ ID NO: 645344 - RNA, 19 nt, Homo sapiens
  misc_RNA (1)...(19): siRNA sense strand
gaguguaacuugguauuua

SEQ ID NO: 645345 - RNA, 19 nt, Homo sapiens
  misc_RNA (1)...(19): siRNA sense strand
caacaugucucuaagaaag

SEQ ID NO: 645346 - RNA, 19 nt, Homo sapiens
  misc_RNA (1)...(19): siRNA sense strand
gaaggaagaugguucuauc

SEQ ID NO: 645347 - RNA, 19 nt, Homo sapiens
  misc_RNA (1)...(19): siRNA sense strand
caagagaaauguccgauuc

SEQ ID NO: 645348 - RNA, 19 nt, Homo sapiens
  misc_RNA (1)...(19): siRNA sense strand
gcaauaaacuggagacacu

SEQ ID NO: 645349 - RNA, 19 nt, Homo sapiens
  misc_RNA (1)...(19): siRNA sense strand
cgaauuaucuugcaacaca

SEQ ID NO: 645350 - RNA, 19 nt, Homo sapiens
  misc_RNA (1)...(19): siRNA sense strand
ugaauacccuuuaaaccua

SEQ ID NO: 645351 - RNA, 19 nt, Homo sapiens
  misc_RNA (1)...(19): siRNA sense strand
gaagaaagggaacugauga

SEQ ID NO: 645352 - RNA, 19 nt, Homo sapiens
  misc_RNA (1)...(19): siRNA sense strand
gaacaacucaagagaaaug

SEQ ID NO: 645353 - RNA, 19 nt, Homo sapiens
  misc_RNA (1)...(19): siRNA sense strand
caacgacacuggauuuauc

SEQ ID NO: 645354 - RNA, 19 nt, Homo sapiens
  misc_RNA (1)...(19): siRNA sense strand
cagaaacuguggucaauau

SEQ ID NO: 645355 - RNA, 19 nt, Homo sapiens
  misc_RNA (1)...(19): siRNA sense strand
ugaggaagcuggcaacaug

SEQ ID NO: 645356 - RNA, 19 nt, Homo sapiens
  misc_RNA (1)...(19): siRNA sense strand
cacaaucucuuccaugaaa

SEQ ID NO: 645357 - RNA, 19 nt, Homo sapiens
  misc_RNA (1)...(19): siRNA sense strand
aagaacaacucaagagaaa

SEQ ID NO: 645358 - RNA, 19 nt, Homo sapiens
  misc_RNA (1)...(19): siRNA sense strand
gaucugcccugguaucuca

SEQ ID NO: 645359 - RNA, 19 nt, Homo sapiens
  misc_RNA (1)...(19): siRNA sense strand
gaauacccuuuaaaccuaa

SEQ ID NO: 645360 - RNA, 19 nt, Homo sapiens
  misc_RNA (1)...(19): siRNA sense strand
ucacagaguuaaaugaaga

SEQ ID NO: 645361 - RNA, 19 nt, Homo sapiens
  misc_RNA (1)...(19): siRNA sense strand
caacaaggaguuaagauau

SEQ ID NO: 645362 - RNA, 19 nt, Homo sapiens
  misc_RNA (1)...(19): siRNA sense strand
gagacacuuucuuuaguaa

SEQ ID NO: 645363 - RNA, 19 nt, Homo sapiens
  misc_RNA (1)...(19): siRNA sense strand
gaagguagccugcccaucu

SEQ ID NO: 645364 - RNA, 19 nt, Homo sapiens
  misc_RNA (1)...(19): siRNA sense strand
uguaugaacugcagacauu

SEQ ID NO: 645365 - RNA, 19 nt, Homo sapiens
  misc_RNA (1)...(19): siRNA sense strand
ccaacugccucacuugaaa

SEQ ID NO: 645366 - RNA, 19 nt, Homo sapiens
  misc_RNA (1)...(19): siRNA sense strand
gcuaagacaucgguucuau

SEQ ID NO: 645367 - RNA, 19 nt, Homo sapiens
  misc_RNA (1)...(19): siRNA sense strand
guuaugaaaugcaacgaaa

SEQ ID NO: 645368 - RNA, 19 nt, Homo sapiens
  misc_RNA (1)...(19): siRNA sense strand
gaaacuguggucaauauga

SEQ ID NO: 645369 - RNA, 19 nt, Homo sapiens
  misc_RNA (1)...(19): siRNA sense strand
aaagggaacugaugaccaa

SEQ ID NO: 645370 - RNA, 19 nt, Homo sapiens
  misc_RNA (1)...(19): siRNA sense strand
gcucaucugcaucuaaaua

SEQ ID NO: 645371 - RNA, 19 nt, Homo sapiens
  misc_RNA (1)...(19): siRNA sense strand
uaagacaucgguucuauug

SEQ ID NO: 645372 - RNA, 19 nt, Homo sapiens
  misc_RNA (1)...(19): siRNA sense strand
gcagacauucacagaguua

SEQ ID NO: 645373 - RNA, 19 nt, Homo sapiens
  misc_RNA (1)...(19): siRNA sense strand
guggugccauuaugaauuu

SEQ ID NO: 645374 - RNA, 19 nt, Homo sapiens
  misc_RNA (1)...(19): siRNA sense strand
acaaauuucuggguucuuu

SEQ ID NO: 645375 - RNA, 19 nt, Homo sapiens
  misc_RNA (1)...(19): siRNA sense strand
agaaauccauuccggugua

SEQ ID NO: 645376 - RNA, 19 nt, Homo sapiens
  misc_RNA (1)...(19): siRNA sense strand
guaaguugcuuugcuaaca

SEQ ID NO: 645377 - RNA, 19 nt, Homo sapiens
  misc_RNA (1)...(19): siRNA sense strand
ccacaacgacacuggauuu

SEQ ID NO: 645378 - RNA, 19 nt, Homo sapiens
  misc_RNA (1)...(19): siRNA sense strand
gaugagaacagauugucua

SEQ ID NO: 645379 - RNA, 19 nt, Homo sapiens
  misc_RNA (1)...(19): siRNA sense strand
aaacuguggucaauaugaa

SEQ ID NO: 645380 - RNA, 19 nt, Homo sapiens
  misc_RNA (1)...(19): siRNA sense strand
ucaacaaggaguuaagaua

SEQ ID NO: 645381 - RNA, 19 nt, Homo sapiens
  misc_RNA (1)...(19): siRNA sense strand
ucuacaaucucucugauga

SEQ ID NO: 645382 - RNA, 19 nt, Homo sapiens
  misc_RNA (1)...(19): siRNA sense strand
acugaaagcucuccuggaa

SEQ ID NO: 645383 - RNA, 19 nt, Homo sapiens
  misc_RNA (1)...(19): siRNA sense strand
caacaugucacaccuggaa

SEQ ID NO: 645384 - RNA, 19 nt, Homo sapiens
  misc_RNA (1)...(19): siRNA sense strand
ugaagaguguaacuuggua

SEQ ID NO: 645385 - RNA, 19 nt, Homo sapiens
  misc_RNA (1)...(19): siRNA sense strand
uggcaggucucagguauuu

SEQ ID NO: 645386 - RNA, 19 nt, Homo sapiens
  misc_RNA (1)...(19): siRNA sense strand
gaaaacaacccaagaacaa

SEQ ID NO: 645387 - RNA, 19 nt, Homo sapiens
  misc_RNA (1)...(19): siRNA sense strand
gaaaauugcucaucugcau

SEQ ID NO: 645388 - RNA, 19 nt, Homo sapiens
  misc_RNA (1)...(19): siRNA sense strand
uuaguaaguugcuuugcua

SEQ ID NO: 645389 - RNA, 19 nt, Homo sapiens
  misc_RNA (1)...(19): siRNA sense strand
ccagagaaauguaugaacu

SEQ ID NO: 645390 - RNA, 19 nt, Homo sapiens
  misc_RNA (1)...(19): siRNA sense strand
uaaagagacuauucaucug

SEQ ID NO: 645391 - RNA, 19 nt, Homo sapiens
  misc_RNA (1)...(19): siRNA sense strand
aauccaaacuguaccuaaa

SEQ ID NO: 645392 - RNA, 19 nt, Homo sapiens
  misc_RNA (1)...(19): siRNA sense strand
ccuacgaaauuccaauauu

SEQ ID NO: 645393 - RNA, 19 nt, Homo sapiens
  misc_RNA (1)...(19): siRNA sense strand
ggugaagaaugaauugauc

SEQ ID NO: 645394 - RNA, 19 nt, Homo sapiens
  misc_RNA (1)...(19): siRNA sense strand
caagaacaacucaagagaa

SEQ ID NO: 645395 - RNA, 19 nt, Homo sapiens
  misc_RNA (1)...(19): siRNA sense strand
uaacaacacacccuuggaa

SEQ ID NO: 645396 - RNA, 19 nt, Homo sapiens
  misc_RNA (1)...(19): siRNA sense strand
caacgaaaucuuaguuuag

SEQ ID NO: 645397 - RNA, 19 nt, Homo sapiens
  misc_RNA (1)...(19): siRNA sense strand
ccaacuuuguccagaauga

SEQ ID NO: 645398 - RNA, 19 nt, Homo sapiens
  misc_RNA (1)...(19): siRNA sense strand
gcaaaagcauuagugaaaa

SEQ ID NO: 645399 - RNA, 19 nt, Homo sapiens
  misc_RNA (1)...(19): siRNA sense strand
cuacucaaauacuguaaug

SEQ ID NO: 645400 - RNA, 19 nt, Homo sapiens
  misc_RNA (1)...(19): siRNA sense strand
cuaaagagacuauucaucu

SEQ ID NO: 645401 - RNA, 19 nt, Homo sapiens
  misc_RNA (1)...(19): siRNA sense strand
cuccagagcugccagaaga

SEQ ID NO: 645402 - RNA, 19 nt, Homo sapiens
  misc_RNA (1)...(19): siRNA sense strand
gcaucuaaauacugucuuc

SEQ ID NO: 645403 - RNA, 19 nt, Homo sapiens
  misc_RNA (1)...(19): siRNA sense strand
gaaagguucccgcagacuu

SEQ ID NO: 645404 - RNA, 19 nt, Homo sapiens
  misc_RNA (1)...(19): siRNA sense strand
uaaguugcuuugcuaacaa

SEQ ID NO: 645405 - RNA, 19 nt, Homo sapiens
  misc_RNA (1)...(19): siRNA sense strand
uaaauacugucuucuuagg

SEQ ID NO: 645406 - RNA, 19 nt, Homo sapiens
  misc_RNA (1)...(19): siRNA sense strand
ggucucagguauuuagauc

SEQ ID NO: 645407 - RNA, 19 nt, Homo sapiens
  misc_RNA (1)...(19): siRNA sense strand
ugaaagcucuccuggaaaa

SEQ ID NO: 645408 - RNA, 19 nt, Homo sapiens
  misc_RNA (1)...(19): siRNA sense strand
uaaaagaacuauccaacug

SEQ ID NO: 645409 - RNA, 19 nt, Homo sapiens
  misc_RNA (1)...(19): siRNA sense strand
caucgguucuauugcuuaa

SEQ ID NO: 645410 - RNA, 19 nt, Homo sapiens
  misc_RNA (1)...(19): siRNA sense strand
agacucaucagaaacauuu

SEQ ID NO: 645411 - RNA, 19 nt, Homo sapiens
  misc_RNA (1)...(19): siRNA sense strand
cuaggucaaugcacacaaa

SEQ ID NO: 645412 - RNA, 19 nt, Homo sapiens
  misc_RNA (1)...(19): siRNA sense strand
caaauacuguaaugagaac

SEQ ID NO: 645413 - RNA, 19 nt, Homo sapiens
  misc_RNA (1)...(19): siRNA sense strand
gaacccauuccauucuauu

SEQ ID NO: 645414 - RNA, 19 nt, Homo sapiens
  misc_RNA (1)...(19): siRNA sense strand
gcuauaaguccaucuuugu

SEQ ID NO: 645415 - RNA, 19 nt, Homo sapiens
  misc_RNA (1)...(19): siRNA sense strand
auuguaagcuucauugaga

SEQ ID NO: 645416 - RNA, 19 nt, Homo sapiens
  misc_RNA (1)...(19): siRNA sense strand
gccagaaacuguggucaau

SEQ ID NO: 645417 - RNA, 19 nt, Homo sapiens
  misc_RNA (1)...(19): siRNA sense strand
gcucauggccagaaacugu

SEQ ID NO: 645418 - RNA, 19 nt, Homo sapiens
  misc_RNA (1)...(19): siRNA sense strand
caauucauuugacuacuca

SEQ ID NO: 645419 - RNA, 19 nt, Homo sapiens
  misc_RNA (1)...(19): siRNA sense strand
uaucuuaacagacgaguug

SEQ ID NO: 645420 - RNA, 19 nt, Homo sapiens
  misc_RNA (1)...(19): siRNA sense strand
caaaugccacacaugcuuu

SEQ ID NO: 645421 - RNA, 19 nt, Homo sapiens
  misc_RNA (1)...(19): siRNA sense strand
gacaauaucaaaugcacaa

SEQ ID NO: 645422 - RNA, 19 nt, Homo sapiens
  misc_RNA (1)...(19): siRNA sense strand
aggcuuaucuugaccacaa

SEQ ID NO: 645423 - RNA, 19 nt, Homo sapiens
  misc_RNA (1)...(19): siRNA sense strand
cgguguaccugugaauuaa

SEQ ID NO: 645424 - RNA, 19 nt, Homo sapiens
  misc_RNA (1)...(19): siRNA sense strand
ucuaauaacagacugaaga

SEQ ID NO: 645425 - RNA, 19 nt, Homo sapiens
  misc_RNA (1)...(19): siRNA sense strand
agaguuaaaugaagagucu

SEQ ID NO: 645426 - RNA, 19 nt, Homo sapiens
  misc_RNA (1)...(19): siRNA sense strand
uccaacaugucucuaagaa

SEQ ID NO: 645427 - RNA, 19 nt, Homo sapiens
  misc_RNA (1)...(19): siRNA sense strand
ccaagaacaacucaagaga

SEQ ID NO: 645428 - RNA, 19 nt, Homo sapiens
  misc_RNA (1)...(19): siRNA sense strand
caaacuguaccuaaagaga

SEQ ID NO: 645429 - RNA, 19 nt, Homo sapiens
  misc_RNA (1)...(19): siRNA sense strand
uaaccaaauccaaacugua

SEQ ID NO: 645430 - RNA, 19 nt, Homo sapiens
  misc_RNA (1)...(19): siRNA sense strand
gcaggucucagguauuuag

SEQ ID NO: 645431 - RNA, 19 nt, Homo sapiens
  misc_RNA (1)...(19): siRNA sense strand
aaagagacuauucaucuga

SEQ ID NO: 645432 - RNA, 19 nt, Homo sapiens
  misc_RNA (1)...(19): siRNA sense strand
ccagguaucauaaacugaa

SEQ ID NO: 645433 - RNA, 19 nt, Homo sapiens
  misc_RNA (1)...(19): siRNA sense strand
gagcugccaggaaguuaaa

SEQ ID NO: 645434 - RNA, 19 nt, Homo sapiens
  misc_RNA (1)...(19): siRNA sense strand
cauucugucuccaaacuga

SEQ ID NO: 645435 - RNA, 19 nt, Homo sapiens
  misc_RNA (1)...(19): siRNA sense strand
caccagguaucauaaacug

SEQ ID NO: 645436 - RNA, 19 nt, Homo sapiens
  misc_RNA (1)...(19): siRNA sense strand
caaacauggcacaggguua

SEQ ID NO: 645437 - RNA, 19 nt, Homo sapiens
  misc_RNA (1)...(19): siRNA sense strand
cuucugcugucuccacuuu

SEQ ID NO: 645438 - RNA, 19 nt, Homo sapiens
  misc_RNA (1)...(19): siRNA sense strand
ccgguguaccugugaauua

SEQ ID NO: 645439 - RNA, 19 nt, Homo sapiens
  misc_RNA (1)...(19): siRNA sense strand
gcaccaagaucucaagaaa

SEQ ID NO: 645440 - RNA, 19 nt, Homo sapiens
  misc_RNA (1)...(19): siRNA sense strand
gagcuuaaccauccuaaua

SEQ ID NO: 645441 - RNA, 19 nt, Homo sapiens
  misc_RNA (1)...(19): siRNA sense strand
uuacuucuaugccugauua

SEQ ID NO: 645442 - RNA, 19 nt, Homo sapiens
  misc_RNA (1)...(19): siRNA sense strand
accaagaucucaagaaauu

SEQ ID NO: 645443 - RNA, 19 nt, Homo sapiens
  misc_RNA (1)...(19): siRNA sense strand
guacaaagccagaaacaag

SEQ ID NO: 645444 - RNA, 19 nt, Homo sapiens
  misc_RNA (1)...(19): siRNA sense strand
gagaggugguggcgcuuaa

SEQ ID NO: 645445 - RNA, 19 nt, Homo sapiens
  misc_RNA (1)...(19): siRNA sense strand
gcuuaaccauccuaauauu

SEQ ID NO: 645446 - RNA, 19 nt, Homo sapiens
  misc_RNA (1)...(19): siRNA sense strand
gaagauggacggagcuugu

SEQ ID NO: 645447 - RNA, 19 nt, Homo sapiens
  misc_RNA (1)...(19): siRNA sense strand
ggccaggaguuacuucuau

SEQ ID NO: 645448 - RNA, 19 nt, Homo sapiens
  misc_RNA (1)...(19): siRNA sense strand
gaccagcucuuccggaucu

SEQ ID NO: 645449 - RNA, 19 nt, Homo sapiens
  misc_RNA (1)...(19): siRNA sense strand
ggaugucauucacacagaa

SEQ ID NO: 645450 - RNA, 19 nt, Homo sapiens
  misc_RNA (1)...(19): siRNA sense strand
gcuagcagacuuuggacua

SEQ ID NO: 645451 - RNA, 19 nt, Homo sapiens
  misc_RNA (1)...(19): siRNA sense strand
uaucgcaaaugcugcacua

SEQ ID NO: 645452 - RNA, 19 nt, Homo sapiens
  misc_RNA (1)...(19): siRNA sense strand
caagaucucaagaaauuca

SEQ ID NO: 645453 - RNA, 19 nt, Homo sapiens
  misc_RNA (1)...(19): siRNA sense strand
ggugguggcgcuuaagaaa

SEQ ID NO: 645454 - RNA, 19 nt, Homo sapiens
  misc_RNA (1)...(19): siRNA sense strand
caagcuagcagacuuugga

SEQ ID NO: 645455 - RNA, 19 nt, Homo sapiens
  misc_RNA (1)...(19): siRNA sense strand
ccaucaagcuagcagacuu

SEQ ID NO: 645456 - RNA, 19 nt, Homo sapiens
  misc_RNA (1)...(19): siRNA sense strand
ggagaggugguggcgcuua

SEQ ID NO: 645457 - RNA, 19 nt, Homo sapiens
  misc_RNA (1)...(19): siRNA sense strand
caucaagagcuaucuguuc

SEQ ID NO: 645458 - RNA, 19 nt, Homo sapiens
  misc_RNA (1)...(19): siRNA sense strand
gaccuuaaaccucagaauc

SEQ ID NO: 645459 - RNA, 19 nt, Homo sapiens
  misc_RNA (1)...(19): siRNA sense strand
ccuauucccuggagauucu

SEQ ID NO: 645460 - RNA, 19 nt, Homo sapiens
  misc_RNA (1)...(19): siRNA sense strand
gccaggaguuacuucuaug

SEQ ID NO: 645461 - RNA, 19 nt, Homo sapiens
  misc_RNA (1)...(19): siRNA sense strand
cccuggagauucugagauu

SEQ ID NO: 645462 - RNA, 19 nt, Homo sapiens
  misc_RNA (1)...(19): siRNA sense strand
cgcaaaugcugcacuacga

SEQ ID NO: 645463 - RNA, 19 nt, Homo sapiens
  misc_RNA (1)...(19): siRNA sense strand
uugaauuucugcaccaaga

SEQ ID NO: 645464 - RNA, 19 nt, Homo sapiens
  misc_RNA (1)...(19): siRNA sense strand
guacugccauccgagagau

SEQ ID NO: 645465 - RNA, 19 nt, Homo sapiens
  misc_RNA (1)...(19): siRNA sense strand
gagucccuguucguacuua

SEQ ID NO: 645466 - RNA, 19 nt, Homo sapiens
  misc_RNA (1)...(19): siRNA sense strand
caucaagcuagcagacuuu

SEQ ID NO: 645467 - RNA, 19 nt, Homo sapiens
  misc_RNA (1)...(19): siRNA sense strand
gaaucugcuuauuaacaca

SEQ ID NO: 645468 - RNA, 19 nt, Homo sapiens
  misc_RNA (1)...(19): siRNA sense strand
aaauaaacucuaccugguu

SEQ ID NO: 645469 - RNA, 19 nt, Homo sapiens
  misc_RNA (1)...(19): siRNA sense strand
uaaccauccuaauauuguc

SEQ ID NO: 645470 - RNA, 19 nt, Homo sapiens
  misc_RNA (1)...(19): siRNA sense strand
ggccuagcuuucugccauu

SEQ ID NO: 645471 - RNA, 19 nt, Homo sapiens
  misc_RNA (1)...(19): siRNA sense strand
gauggacggagcuuguuau

SEQ ID NO: 645472 - RNA, 19 nt, Homo sapiens
  misc_RNA (1)...(19): siRNA sense strand
ggagcuuguuaucgcaaau

SEQ ID NO: 645473 - RNA, 19 nt, Homo sapiens
  misc_RNA (1)...(19): siRNA sense strand
agaucucucugcuuaagga

SEQ ID NO: 645474 - RNA, 19 nt, Homo sapiens
  misc_RNA (1)...(19): siRNA sense strand
ggaugccucugcucucacu

SEQ ID NO: 645475 - RNA, 19 nt, Homo sapiens
  misc_RNA (1)...(19): siRNA sense strand
ggaugugaccaagccagua

SEQ ID NO: 645476 - RNA, 19 nt, Homo sapiens
  misc_RNA (1)...(19): siRNA sense strand
aaauccgccuggacacuga

SEQ ID NO: 645477 - RNA, 19 nt, Homo sapiens
  misc_RNA (1)...(19): siRNA sense strand
gaugucauucacacagaaa

SEQ ID NO: 645478 - RNA, 19 nt, Homo sapiens
  misc_RNA (1)...(19): siRNA sense strand
cugauuacaagccaaguuu

SEQ ID NO: 645479 - RNA, 19 nt, Homo sapiens
  misc_RNA (1)...(19): siRNA sense strand
gaauuucugcaccaagauc

SEQ ID NO: 645480 - RNA, 19 nt, Homo sapiens
  misc_RNA (1)...(19): siRNA sense strand
gaggugguggcgcuuaaga

SEQ ID NO: 645481 - RNA, 19 nt, Homo sapiens
  misc_RNA (1)...(19): siRNA sense strand
acaaagccagaaacaaguu

SEQ ID NO: 645482 - RNA, 19 nt, Homo sapiens
  misc_RNA (1)...(19): siRNA sense strand
caaagccagaaacaaguug

SEQ ID NO: 645483 - RNA, 19 nt, Homo sapiens
  misc_RNA (1)...(19): siRNA sense strand
agaaucugcuuauuaacac

SEQ ID NO: 645484 - RNA, 19 nt, Homo sapiens
  misc_RNA (1)...(19): siRNA sense strand
ucaagcugcuggaugucau

SEQ ID NO: 645485 - RNA, 19 nt, Homo sapiens
  misc_RNA (1)...(19): siRNA sense strand
gaugugaccaagccaguac

SEQ ID NO: 645486 - RNA, 19 nt, Homo sapiens
  misc_RNA (1)...(19): siRNA sense strand
uggaugucauucacacaga

SEQ ID NO: 645487 - RNA, 19 nt, Homo sapiens
  misc_RNA (1)...(19): siRNA sense strand
cuucuaugccugauuacaa

SEQ ID NO: 645488 - RNA, 19 nt, Homo sapiens
  misc_RNA (1)...(19): siRNA sense strand
agauggacggagcuuguua

SEQ ID NO: 645489 - RNA, 19 nt, Homo sapiens
  misc_RNA (1)...(19): siRNA sense strand
gcaccaagaucucaagaaa

SEQ ID NO: 645490 - RNA, 19 nt, Homo sapiens
  misc_RNA (1)...(19): siRNA sense strand
gagcuuaaccauccuaaua

SEQ ID NO: 645491 - RNA, 19 nt, Homo sapiens
  misc_RNA (1)...(19): siRNA sense strand
uuacuucuaugccugauua

SEQ ID NO: 645492 - RNA, 19 nt, Homo sapiens
  misc_RNA (1)...(19): siRNA sense strand
accaagaucucaagaaauu

SEQ ID NO: 645493 - RNA, 19 nt, Homo sapiens
  misc_RNA (1)...(19): siRNA sense strand
guacaaagccagaaacaag

SEQ ID NO: 645494 - RNA, 19 nt, Homo sapiens
  misc_RNA (1)...(19): siRNA sense strand
gagaggugguggcgcuuaa

SEQ ID NO: 645495 - RNA, 19 nt, Homo sapiens
  misc_RNA (1)...(19): siRNA sense strand
gcuuaaccauccuaauauu

SEQ ID NO: 645496 - RNA, 19 nt, Homo sapiens
  misc_RNA (1)...(19): siRNA sense strand
gaagauggacggagcuugu

SEQ ID NO: 645497 - RNA, 19 nt, Homo sapiens
  misc_RNA (1)...(19): siRNA sense strand
ggccaggaguuacuucuau

SEQ ID NO: 645498 - RNA, 19 nt, Homo sapiens
  misc_RNA (1)...(19): siRNA sense strand
gaccagcucuuccggaucu

SEQ ID NO: 645499 - RNA, 19 nt, Homo sapiens
  misc_RNA (1)...(19): siRNA sense strand
ggaugucauucacacagaa

SEQ ID NO: 645500 - RNA, 19 nt, Homo sapiens
  misc_RNA (1)...(19): siRNA sense strand
gcuagcagacuuuggacua

SEQ ID NO: 645501 - RNA, 19 nt, Homo sapiens
  misc_RNA (1)...(19): siRNA sense strand
uaucgcaaaugcugcacua

SEQ ID NO: 645502 - RNA, 19 nt, Homo sapiens
  misc_RNA (1)...(19): siRNA sense strand
caagaucucaagaaauuca

SEQ ID NO: 645503 - RNA, 19 nt, Homo sapiens
  misc_RNA (1)...(19): siRNA sense strand
ggugguggcgcuuaagaaa

SEQ ID NO: 645504 - RNA, 19 nt, Homo sapiens
  misc_RNA (1)...(19): siRNA sense strand
caagcuagcagacuuugga

SEQ ID NO: 645505 - RNA, 19 nt, Homo sapiens
  misc_RNA (1)...(19): siRNA sense strand
ccaucaagcuagcagacuu

SEQ ID NO: 645506 - RNA, 19 nt, Homo sapiens
  misc_RNA (1)...(19): siRNA sense strand
ggagaggugguggcgcuua

SEQ ID NO: 645507 - RNA, 19 nt, Homo sapiens
  misc_RNA (1)...(19): siRNA sense strand
caucaagagcuaucuguuc

SEQ ID NO: 645508 - RNA, 19 nt, Homo sapiens
  misc_RNA (1)...(19): siRNA sense strand
gaccuuaaaccucagaauc

SEQ ID NO: 645509 - RNA, 19 nt, Homo sapiens
  misc_RNA (1)...(19): siRNA sense strand
ccuauucccuggagauucu

SEQ ID NO: 645510 - RNA, 19 nt, Homo sapiens
  misc_RNA (1)...(19): siRNA sense strand
gccaggaguuacuucuaug

SEQ ID NO: 645511 - RNA, 19 nt, Homo sapiens
  misc_RNA (1)...(19): siRNA sense strand
cccuggagauucugagauu

SEQ ID NO: 645512 - RNA, 19 nt, Homo sapiens
  misc_RNA (1)...(19): siRNA sense strand
cgcaaaugcugcacuacga

SEQ ID NO: 645513 - RNA, 19 nt, Homo sapiens
  misc_RNA (1)...(19): siRNA sense strand
uugaauuucugcaccaaga

SEQ ID NO: 645514 - RNA, 19 nt, Homo sapiens
  misc_RNA (1)...(19): siRNA sense strand
guacugccauccgagagau

SEQ ID NO: 645515 - RNA, 19 nt, Homo sapiens
  misc_RNA (1)...(19): siRNA sense strand
gagucccuguucguacuua

SEQ ID NO: 645516 - RNA, 19 nt, Homo sapiens
  misc_RNA (1)...(19): siRNA sense strand
caucaagcuagcagacuuu

SEQ ID NO: 645517 - RNA, 19 nt, Homo sapiens
  misc_RNA (1)...(19): siRNA sense strand
gaaucugcuuauuaacaca

SEQ ID NO: 645518 - RNA, 19 nt, Homo sapiens
  misc_RNA (1)...(19): siRNA sense strand
aaauaaacucuaccugguu

SEQ ID NO: 645519 - RNA, 19 nt, Homo sapiens
  misc_RNA (1)...(19): siRNA sense strand
uaaccauccuaauauuguc

SEQ ID NO: 645520 - RNA, 19 nt, Homo sapiens
  misc_RNA (1)...(19): siRNA sense strand
ggccuagcuuucugccauu

SEQ ID NO: 645521 - RNA, 19 nt, Homo sapiens
  misc_RNA (1)...(19): siRNA sense strand
gauggacggagcuuguuau

SEQ ID NO: 645522 - RNA, 19 nt, Homo sapiens
  misc_RNA (1)...(19): siRNA sense strand
ggagcuuguuaucgcaaau

SEQ ID NO: 645523 - RNA, 19 nt, Homo sapiens
  misc_RNA (1)...(19): siRNA sense strand
agaucucucugcuuaagga

SEQ ID NO: 645524 - RNA, 19 nt, Homo sapiens
  misc_RNA (1)...(19): siRNA sense strand
ggaugccucugcucucacu

SEQ ID NO: 645525 - RNA, 19 nt, Homo sapiens
  misc_RNA (1)...(19): siRNA sense strand
ggaugugaccaagccagua

SEQ ID NO: 645526 - RNA, 19 nt, Homo sapiens
  misc_RNA (1)...(19): siRNA sense strand
aaauccgccuggacacuga

SEQ ID NO: 645527 - RNA, 19 nt, Homo sapiens
  misc_RNA (1)...(19): siRNA sense strand
gaugucauucacacagaaa

SEQ ID NO: 645528 - RNA, 19 nt, Homo sapiens
  misc_RNA (1)...(19): siRNA sense strand
cugauuacaagccaaguuu

SEQ ID NO: 645529 - RNA, 19 nt, Homo sapiens
  misc_RNA (1)...(19): siRNA sense strand
gaauuucugcaccaagauc

SEQ ID NO: 645530 - RNA, 19 nt, Homo sapiens
  misc_RNA (1)...(19): siRNA sense strand
gaggugguggcgcuuaaga

SEQ ID NO: 645531 - RNA, 19 nt, Homo sapiens
  misc_RNA (1)...(19): siRNA sense strand
acaaagccagaaacaaguu

SEQ ID NO: 645532 - RNA, 19 nt, Homo sapiens
  misc_RNA (1)...(19): siRNA sense strand
caaagccagaaacaaguug

SEQ ID NO: 645533 - RNA, 19 nt, Homo sapiens
  misc_RNA (1)...(19): siRNA sense strand
agaaucugcuuauuaacac

SEQ ID NO: 645534 - RNA, 19 nt, Homo sapiens
  misc_RNA (1)...(19): siRNA sense strand
ucaagcugcuggaugucau

SEQ ID NO: 645535 - RNA, 19 nt, Homo sapiens
  misc_RNA (1)...(19): siRNA sense strand
gaugugaccaagccaguac

SEQ ID NO: 645536 - RNA, 19 nt, Homo sapiens
  misc_RNA (1)...(19): siRNA sense strand
uggaugucauucacacaga

SEQ ID NO: 645537 - RNA, 19 nt, Homo sapiens
  misc_RNA (1)...(19): siRNA sense strand
cuucuaugccugauuacaa

SEQ ID NO: 645538 - RNA, 19 nt, Homo sapiens
  misc_RNA (1)...(19): siRNA sense strand
agauggacggagcuuguua

SEQ ID NO: 645539 - RNA, 19 nt, Homo sapiens
  misc_RNA (1)...(19): siRNA sense strand
gagaggagauucaagaaau

SEQ ID NO: 645540 - RNA, 19 nt, Homo sapiens
  misc_RNA (1)...(19): siRNA sense strand
gacaacaggugauuucuga

SEQ ID NO: 645541 - RNA, 19 nt, Homo sapiens
  misc_RNA (1)...(19): siRNA sense strand
cagaagcacucuaauaaga

SEQ ID NO: 645542 - RNA, 19 nt, Homo sapiens
  misc_RNA (1)...(19): siRNA sense strand
gaagcacucuaauaagaug

SEQ ID NO: 645543 - RNA, 19 nt, Homo sapiens
  misc_RNA (1)...(19): siRNA sense strand
gggaacaaauccauaagug

SEQ ID NO: 645544 - RNA, 19 nt, Homo sapiens
  misc_RNA (1)...(19): siRNA sense strand
caucagaagcacucuaaua

SEQ ID NO: 645545 - RNA, 19 nt, Homo sapiens
  misc_RNA (1)...(19): siRNA sense strand
gcaacgggaugaauuugau

SEQ ID NO: 645546 - RNA, 19 nt, Homo sapiens
  misc_RNA (1)...(19): siRNA sense strand
gcuuugaguuggacuauga

SEQ ID NO: 645547 - RNA, 19 nt, Homo sapiens
  misc_RNA (1)...(19): siRNA sense strand
gaggaaguuucuagaggaa

SEQ ID NO: 645548 - RNA, 19 nt, Homo sapiens
  misc_RNA (1)...(19): siRNA sense strand
agagggagaugaagauguu

SEQ ID NO: 645549 - RNA, 19 nt, Homo sapiens
  misc_RNA (1)...(19): siRNA sense strand
ggaaguuucuagaggaaca

SEQ ID NO: 645550 - RNA, 19 nt, Homo sapiens
  misc_RNA (1)...(19): siRNA sense strand
ggggagaucugccgguuua

SEQ ID NO: 645551 - RNA, 19 nt, Homo sapiens
  misc_RNA (1)...(19): siRNA sense strand
uugaagaacuggaggagaa

SEQ ID NO: 645552 - RNA, 19 nt, Homo sapiens
  misc_RNA (1)...(19): siRNA sense strand
guuuagugcucuuauugaa

SEQ ID NO: 645553 - RNA, 19 nt, Homo sapiens
  misc_RNA (1)...(19): siRNA sense strand
uggcagaacucaccagaca

SEQ ID NO: 645554 - RNA, 19 nt, Homo sapiens
  misc_RNA (1)...(19): siRNA sense strand
gacaucagaagcacucuaa

SEQ ID NO: 645555 - RNA, 19 nt, Homo sapiens
  misc_RNA (1)...(19): siRNA sense strand
ugagggagccggucacuau

SEQ ID NO: 645556 - RNA, 19 nt, Homo sapiens
  misc_RNA (1)...(19): siRNA sense strand
ggaacaaauccauaagugu

SEQ ID NO: 645557 - RNA, 19 nt, Homo sapiens
  misc_RNA (1)...(19): siRNA sense strand
gaggcaacgggaugaauuu

SEQ ID NO: 645558 - RNA, 19 nt, Homo sapiens
  misc_RNA (1)...(19): siRNA sense strand
cuaauaagaugugaaacca

SEQ ID NO: 645559 - RNA, 19 nt, Homo sapiens
  misc_RNA (1)...(19): siRNA sense strand
gagagaggagauucaagaa

SEQ ID NO: 645560 - RNA, 19 nt, Homo sapiens
  misc_RNA (1)...(19): siRNA sense strand
cagcucacauuucucuaga

SEQ ID NO: 645561 - RNA, 19 nt, Homo sapiens
  misc_RNA (1)...(19): siRNA sense strand
ccagaggauucgggacuuu

SEQ ID NO: 645562 - RNA, 19 nt, Homo sapiens
  misc_RNA (1)...(19): siRNA sense strand
gaacuggaggagaagaaug

SEQ ID NO: 645563 - RNA, 19 nt, Homo sapiens
  misc_RNA (1)...(19): siRNA sense strand
caagagacaacaggugauu

SEQ ID NO: 645564 - RNA, 19 nt, Homo sapiens
  misc_RNA (1)...(19): siRNA sense strand
ugaauuugauuugcugguu

SEQ ID NO: 645565 - RNA, 19 nt, Homo sapiens
  misc_RNA (1)...(19): siRNA sense strand
ccaacuggcagcuggcuaa

SEQ ID NO: 645566 - RNA, 19 nt, Homo sapiens
  misc_RNA (1)...(19): siRNA sense strand
uggcuaacgugguggagaa

SEQ ID NO: 645567 - RNA, 19 nt, Homo sapiens
  misc_RNA (1)...(19): siRNA sense strand
gcacucuaauaagauguga

SEQ ID NO: 645568 - RNA, 19 nt, Homo sapiens
  misc_RNA (1)...(19): siRNA sense strand
ucgcacaccugaggaaguu

SEQ ID NO: 645569 - RNA, 19 nt, Homo sapiens
  misc_RNA (1)...(19): siRNA sense strand
agagagaggagauucaaga

SEQ ID NO: 645570 - RNA, 19 nt, Homo sapiens
  misc_RNA (1)...(19): siRNA sense strand
ggacaucagaagcacucua

SEQ ID NO: 645571 - RNA, 19 nt, Homo sapiens
  misc_RNA (1)...(19): siRNA sense strand
caacaggugauuucugagu

SEQ ID NO: 645572 - RNA, 19 nt, Homo sapiens
  misc_RNA (1)...(19): siRNA sense strand
cgacugcggccacaacuuc

SEQ ID NO: 645573 - RNA, 19 nt, Homo sapiens
  misc_RNA (1)...(19): siRNA sense strand
gagaucugccgguuuagug

SEQ ID NO: 645574 - RNA, 19 nt, Homo sapiens
  misc_RNA (1)...(19): siRNA sense strand
gaagucaacugccccaucu

SEQ ID NO: 645575 - RNA, 19 nt, Homo sapiens
  misc_RNA (1)...(19): siRNA sense strand
gagcauccucuuagcacaa

SEQ ID NO: 645576 - RNA, 19 nt, Homo sapiens
  misc_RNA (1)...(19): siRNA sense strand
uaagaugugaaaccagaaa

SEQ ID NO: 645577 - RNA, 19 nt, Homo sapiens
  misc_RNA (1)...(19): siRNA sense strand
aucagaagcacucuaauaa

SEQ ID NO: 645578 - RNA, 19 nt, Homo sapiens
  misc_RNA (1)...(19): siRNA sense strand
ggaugcagcggcucccuau

SEQ ID NO: 645579 - RNA, 19 nt, Homo sapiens
  misc_RNA (1)...(19): siRNA sense strand
gcagaacucaccagacaac

SEQ ID NO: 645580 - RNA, 19 nt, Homo sapiens
  misc_RNA (1)...(19): siRNA sense strand
gggaugaauuugauuugcu

SEQ ID NO: 645581 - RNA, 19 nt, Homo sapiens
  misc_RNA (1)...(19): siRNA sense strand
gaugugaaaccagaaagug

SEQ ID NO: 645582 - RNA, 19 nt, Homo sapiens
  misc_RNA (1)...(19): siRNA sense strand
gaaaagagagagaggagau

SEQ ID NO: 645583 - RNA, 19 nt, Homo sapiens
  misc_RNA (1)...(19): siRNA sense strand
gaugaagauguuucuggaa

SEQ ID NO: 645584 - RNA, 19 nt, Homo sapiens
  misc_RNA (1)...(19): siRNA sense strand
gcacaccugaggaaguuuc

SEQ ID NO: 645585 - RNA, 19 nt, Homo sapiens
  misc_RNA (1)...(19): siRNA sense strand
ugaggcaacgggaugaauu

SEQ ID NO: 645586 - RNA, 19 nt, Homo sapiens
  misc_RNA (1)...(19): siRNA sense strand
agaucuacuucuucuguga

SEQ ID NO: 645587 - RNA, 19 nt, Homo sapiens
  misc_RNA (1)...(19): siRNA sense strand
gggagccggucacuaucga

SEQ ID NO: 645588 - RNA, 19 nt, Homo sapiens
  misc_RNA (1)...(19): siRNA sense strand
caacgggaugaauuugauu

SEQ ID NO: 645589 - RNA, 19 nt, Homo sapiens
  misc_RNA (1)...(19): siRNA sense strand
auagggaacaaauccauaa

SEQ ID NO: 645590 - RNA, 19 nt, Homo sapiens
  misc_RNA (1)...(19): siRNA sense strand
uauagggaacaaauccaua

SEQ ID NO: 645591 - RNA, 19 nt, Homo sapiens
  misc_RNA (1)...(19): siRNA sense strand
augaugagaugcaguugug

SEQ ID NO: 645592 - RNA, 19 nt, Homo sapiens
  misc_RNA (1)...(19): siRNA sense strand
gaagaacuggaggagaaga

SEQ ID NO: 645593 - RNA, 19 nt, Homo sapiens
  misc_RNA (1)...(19): siRNA sense strand
gguuuagugcucuuauuga

SEQ ID NO: 645594 - RNA, 19 nt, Homo sapiens
  misc_RNA (1)...(19): siRNA sense strand
ggcaacgggaugaauuuga

SEQ ID NO: 645595 - RNA, 19 nt, Homo sapiens
  misc_RNA (1)...(19): siRNA sense strand
acaggugauuucugaguuc

SEQ ID NO: 645596 - RNA, 19 nt, Homo sapiens
  misc_RNA (1)...(19): siRNA sense strand
agagaggagauucaagaaa

SEQ ID NO: 645597 - RNA, 19 nt, Homo sapiens
  misc_RNA (1)...(19): siRNA sense strand
agagacaacaggugauuuc

SEQ ID NO: 645598 - RNA, 19 nt, Homo sapiens
  misc_RNA (1)...(19): siRNA sense strand
ggcccacacuggcaucaca

SEQ ID NO: 645599 - RNA, 19 nt, Homo sapiens
  misc_RNA (1)...(19): siRNA sense strand
gaugaugagaugcaguugu

SEQ ID NO: 645600 - RNA, 19 nt, Homo sapiens
  misc_RNA (1)...(19): siRNA sense strand
gcagagggagaugaagaug

SEQ ID NO: 645601 - RNA, 19 nt, Homo sapiens
  misc_RNA (1)...(19): siRNA sense strand
ccgguuuagugcucuuauu

SEQ ID NO: 645602 - RNA, 19 nt, Homo sapiens
  misc_RNA (1)...(19): siRNA sense strand
aacaggugauuucugaguu

SEQ ID NO: 645603 - RNA, 19 nt, Homo sapiens
  misc_RNA (1)...(19): siRNA sense strand
uaacgugguggagaacauu

SEQ ID NO: 645604 - RNA, 19 nt, Homo sapiens
  misc_RNA (1)...(19): siRNA sense strand
gccagaggauucgggacuu

SEQ ID NO: 645605 - RNA, 19 nt, Homo sapiens
  misc_RNA (1)...(19): siRNA sense strand
ucagaagcacucuaauaag

SEQ ID NO: 645606 - RNA, 19 nt, Homo sapiens
  misc_RNA (1)...(19): siRNA sense strand
uucaagaaauccagucaag

SEQ ID NO: 645607 - RNA, 19 nt, Homo sapiens
  misc_RNA (1)...(19): siRNA sense strand
ggagaucugccgguuuagu

SEQ ID NO: 645608 - RNA, 19 nt, Homo sapiens
  misc_RNA (1)...(19): siRNA sense strand
ucaagaaauccagucaaga

SEQ ID NO: 645609 - RNA, 19 nt, Homo sapiens
  misc_RNA (1)...(19): siRNA sense strand
acaaauccauaagugucuu

SEQ ID NO: 645610 - RNA, 19 nt, Homo sapiens
  misc_RNA (1)...(19): siRNA sense strand
aaagagagagaggagauuc

SEQ ID NO: 645611 - RNA, 19 nt, Homo sapiens
  misc_RNA (1)...(19): siRNA sense strand
cuaacgugguggagaacau

SEQ ID NO: 645612 - RNA, 19 nt, Homo sapiens
  misc_RNA (1)...(19): siRNA sense strand
gaugcagcggcucccuaua

SEQ ID NO: 645613 - RNA, 19 nt, Homo sapiens
  misc_RNA (1)...(19): siRNA sense strand
agaagcacucuaauaagau

SEQ ID NO: 645614 - RNA, 19 nt, Homo sapiens
  misc_RNA (1)...(19): siRNA sense strand
gcacagaaguagcugcaua

SEQ ID NO: 645615 - RNA, 19 nt, Homo sapiens
  misc_RNA (1)...(19): siRNA sense strand
gagaggagauucaagaaau

SEQ ID NO: 645616 - RNA, 19 nt, Homo sapiens
  misc_RNA (1)...(19): siRNA sense strand
gacaacaggugauuucuga

SEQ ID NO: 645617 - RNA, 19 nt, Homo sapiens
  misc_RNA (1)...(19): siRNA sense strand
cagaagcacucuaauaaga

SEQ ID NO: 645618 - RNA, 19 nt, Homo sapiens
  misc_RNA (1)...(19): siRNA sense strand
gaagcacucuaauaagaug

SEQ ID NO: 645619 - RNA, 19 nt, Homo sapiens
  misc_RNA (1)...(19): siRNA sense strand
gggaacaaauccauaagug

SEQ ID NO: 645620 - RNA, 19 nt, Homo sapiens
  misc_RNA (1)...(19): siRNA sense strand
caucagaagcacucuaaua

SEQ ID NO: 645621 - RNA, 19 nt, Homo sapiens
  misc_RNA (1)...(19): siRNA sense strand
gcaacgggaugaauuugau

SEQ ID NO: 645622 - RNA, 19 nt, Homo sapiens
  misc_RNA (1)...(19): siRNA sense strand
gcuuugaguuggacuauga

SEQ ID NO: 645623 - RNA, 19 nt, Homo sapiens
  misc_RNA (1)...(19): siRNA sense strand
gaggaaguuucuagaggaa

SEQ ID NO: 645624 - RNA, 19 nt, Homo sapiens
  misc_RNA (1)...(19): siRNA sense strand
agagggagaugaagauguu

SEQ ID NO: 645625 - RNA, 19 nt, Homo sapiens
  misc_RNA (1)...(19): siRNA sense strand
ggaaguuucuagaggaaca

SEQ ID NO: 645626 - RNA, 19 nt, Homo sapiens
  misc_RNA (1)...(19): siRNA sense strand
ggggagaucugccgguuua

SEQ ID NO: 645627 - RNA, 19 nt, Homo sapiens
  misc_RNA (1)...(19): siRNA sense strand
uugaagaacuggaggagaa

SEQ ID NO: 645628 - RNA, 19 nt, Homo sapiens
  misc_RNA (1)...(19): siRNA sense strand
ugagggagccggucacuau

SEQ ID NO: 645629 - RNA, 19 nt, Homo sapiens
  misc_RNA (1)...(19): siRNA sense strand
uggcagaacucaccagaca

SEQ ID NO: 645630 - RNA, 19 nt, Homo sapiens
  misc_RNA (1)...(19): siRNA sense strand
gacaucagaagcacucuaa

SEQ ID NO: 645631 - RNA, 19 nt, Homo sapiens
  misc_RNA (1)...(19): siRNA sense strand
guuuagugcucuuauugaa

SEQ ID NO: 645632 - RNA, 19 nt, Homo sapiens
  misc_RNA (1)...(19): siRNA sense strand
ggaacaaauccauaagugu

SEQ ID NO: 645633 - RNA, 19 nt, Homo sapiens
  misc_RNA (1)...(19): siRNA sense strand
gaggcaacgggaugaauuu

SEQ ID NO: 645634 - RNA, 19 nt, Homo sapiens
  misc_RNA (1)...(19): siRNA sense strand
cuaauaagaugugaaacca

SEQ ID NO: 645635 - RNA, 19 nt, Homo sapiens
  misc_RNA (1)...(19): siRNA sense strand
gagagaggagauucaagaa

SEQ ID NO: 645636 - RNA, 19 nt, Homo sapiens
  misc_RNA (1)...(19): siRNA sense strand
cagcucacauuucucuaga

SEQ ID NO: 645637 - RNA, 19 nt, Homo sapiens
  misc_RNA (1)...(19): siRNA sense strand
ccagaggauucgggacuuu

SEQ ID NO: 645638 - RNA, 19 nt, Homo sapiens
  misc_RNA (1)...(19): siRNA sense strand
gaacuggaggagaagaaug

SEQ ID NO: 645639 - RNA, 19 nt, Homo sapiens
  misc_RNA (1)...(19): siRNA sense strand
caagagacaacaggugauu

SEQ ID NO: 645640 - RNA, 19 nt, Homo sapiens
  misc_RNA (1)...(19): siRNA sense strand
ugaauuugauuugcugguu

SEQ ID NO: 645641 - RNA, 19 nt, Homo sapiens
  misc_RNA (1)...(19): siRNA sense strand
ccaacuggcagcuggcuaa

SEQ ID NO: 645642 - RNA, 19 nt, Homo sapiens
  misc_RNA (1)...(19): siRNA sense strand
uggcuaacgugguggagaa

SEQ ID NO: 645643 - RNA, 19 nt, Homo sapiens
  misc_RNA (1)...(19): siRNA sense strand
gcacucuaauaagauguga

SEQ ID NO: 645644 - RNA, 19 nt, Homo sapiens
  misc_RNA (1)...(19): siRNA sense strand
ucgcacaccugaggaaguu

SEQ ID NO: 645645 - RNA, 19 nt, Homo sapiens
  misc_RNA (1)...(19): siRNA sense strand
agagagaggagauucaaga

SEQ ID NO: 645646 - RNA, 19 nt, Homo sapiens
  misc_RNA (1)...(19): siRNA sense strand
ggacaucagaagcacucua

SEQ ID NO: 645647 - RNA, 19 nt, Homo sapiens
  misc_RNA (1)...(19): siRNA sense strand
caacaggugauuucugagu

SEQ ID NO: 645648 - RNA, 19 nt, Homo sapiens
  misc_RNA (1)...(19): siRNA sense strand
gaagucaacugccccaucu

SEQ ID NO: 645649 - RNA, 19 nt, Homo sapiens
  misc_RNA (1)...(19): siRNA sense strand
cgacugcggccacaacuuc

SEQ ID NO: 645650 - RNA, 19 nt, Homo sapiens
  misc_RNA (1)...(19): siRNA sense strand
gagaucugccgguuuagug

SEQ ID NO: 645651 - RNA, 19 nt, Homo sapiens
  misc_RNA (1)...(19): siRNA sense strand
gagcauccucuuagcacaa

SEQ ID NO: 645652 - RNA, 19 nt, Homo sapiens
  misc_RNA (1)...(19): siRNA sense strand
uaagaugugaaaccagaaa

SEQ ID NO: 645653 - RNA, 19 nt, Homo sapiens
  misc_RNA (1)...(19): siRNA sense strand
aucagaagcacucuaauaa

SEQ ID NO: 645654 - RNA, 19 nt, Homo sapiens
  misc_RNA (1)...(19): siRNA sense strand
ggaugcagcggcucccuau

SEQ ID NO: 645655 - RNA, 19 nt, Homo sapiens
  misc_RNA (1)...(19): siRNA sense strand
gcagaacucaccagacaac

SEQ ID NO: 645656 - RNA, 19 nt, Homo sapiens
  misc_RNA (1)...(19): siRNA sense strand
gggaugaauuugauuugcu

SEQ ID NO: 645657 - RNA, 19 nt, Homo sapiens
  misc_RNA (1)...(19): siRNA sense strand
gaugugaaaccagaaagug

SEQ ID NO: 645658 - RNA, 19 nt, Homo sapiens
  misc_RNA (1)...(19): siRNA sense strand
gaaaagagagagaggagau

SEQ ID NO: 645659 - RNA, 19 nt, Homo sapiens
  misc_RNA (1)...(19): siRNA sense strand
gaugaagauguuucuggaa

SEQ ID NO: 645660 - RNA, 19 nt, Homo sapiens
  misc_RNA (1)...(19): siRNA sense strand
gcacaccugaggaaguuuc

SEQ ID NO: 645661 - RNA, 19 nt, Homo sapiens
  misc_RNA (1)...(19): siRNA sense strand
ugaggcaacgggaugaauu

SEQ ID NO: 645662 - RNA, 19 nt, Homo sapiens
  misc_RNA (1)...(19): siRNA sense strand
agaucuacuucuucuguga

SEQ ID NO: 645663 - RNA, 19 nt, Homo sapiens
  misc_RNA (1)...(19): siRNA sense strand
gggagccggucacuaucga

SEQ ID NO: 645664 - RNA, 19 nt, Homo sapiens
  misc_RNA (1)...(19): siRNA sense strand
caacgggaugaauuugauu

SEQ ID NO: 645665 - RNA, 19 nt, Homo sapiens
  misc_RNA (1)...(19): siRNA sense strand
auagggaacaaauccauaa

SEQ ID NO: 645666 - RNA, 19 nt, Homo sapiens
  misc_RNA (1)...(19): siRNA sense strand
uauagggaacaaauccaua

SEQ ID NO: 645667 - RNA, 19 nt, Homo sapiens
  misc_RNA (1)...(19): siRNA sense strand
augaugagaugcaguugug

SEQ ID NO: 645668 - RNA, 19 nt, Homo sapiens
  misc_RNA (1)...(19): siRNA sense strand
gaagaacuggaggagaaga

SEQ ID NO: 645669 - RNA, 19 nt, Homo sapiens
  misc_RNA (1)...(19): siRNA sense strand
gguuuagugcucuuauuga

SEQ ID NO: 645670 - RNA, 19 nt, Homo sapiens
  misc_RNA (1)...(19): siRNA sense strand
ggcaacgggaugaauuuga

SEQ ID NO: 645671 - RNA, 19 nt, Homo sapiens
  misc_RNA (1)...(19): siRNA sense strand
acaggugauuucugaguuc

SEQ ID NO: 645672 - RNA, 19 nt, Homo sapiens
  misc_RNA (1)...(19): siRNA sense strand
agagaggagauucaagaaa

SEQ ID NO: 645673 - RNA, 19 nt, Homo sapiens
  misc_RNA (1)...(19): siRNA sense strand
agagacaacaggugauuuc

SEQ ID NO: 645674 - RNA, 19 nt, Homo sapiens
  misc_RNA (1)...(19): siRNA sense strand
ggcccacacuggcaucaca

SEQ ID NO: 645675 - RNA, 19 nt, Homo sapiens
  misc_RNA (1)...(19): siRNA sense strand
gaugaugagaugcaguugu

SEQ ID NO: 645676 - RNA, 19 nt, Homo sapiens
  misc_RNA (1)...(19): siRNA sense strand
gcagagggagaugaagaug

SEQ ID NO: 645677 - RNA, 19 nt, Homo sapiens
  misc_RNA (1)...(19): siRNA sense strand
ccgguuuagugcucuuauu

SEQ ID NO: 645678 - RNA, 19 nt, Homo sapiens
  misc_RNA (1)...(19): siRNA sense strand
aacaggugauuucugaguu

SEQ ID NO: 645679 - RNA, 19 nt, Homo sapiens
  misc_RNA (1)...(19): siRNA sense strand
uaacgugguggagaacauu

SEQ ID NO: 645680 - RNA, 19 nt, Homo sapiens
  misc_RNA (1)...(19): siRNA sense strand
gccagaggauucgggacuu

SEQ ID NO: 645681 - RNA, 19 nt, Homo sapiens
  misc_RNA (1)...(19): siRNA sense strand
ucagaagcacucuaauaag

SEQ ID NO: 645682 - RNA, 19 nt, Homo sapiens
  misc_RNA (1)...(19): siRNA sense strand
uucaagaaauccagucaag

SEQ ID NO: 645683 - RNA, 19 nt, Homo sapiens
  misc_RNA (1)...(19): siRNA sense strand
ggagaucugccgguuuagu

SEQ ID NO: 645684 - RNA, 19 nt, Homo sapiens
  misc_RNA (1)...(19): siRNA sense strand
ucaagaaauccagucaaga

SEQ ID NO: 645685 - RNA, 19 nt, Homo sapiens
  misc_RNA (1)...(19): siRNA sense strand
acaaauccauaagugucuu

SEQ ID NO: 645686 - RNA, 19 nt, Homo sapiens
  misc_RNA (1)...(19): siRNA sense strand
aaagagagagaggagauuc

SEQ ID NO: 645687 - RNA, 19 nt, Homo sapiens
  misc_RNA (1)...(19): siRNA sense strand
cuaacgugguggagaacau

SEQ ID NO: 645688 - RNA, 19 nt, Homo sapiens
  misc_RNA (1)...(19): siRNA sense strand
gaugcagcggcucccuaua

SEQ ID NO: 645689 - RNA, 19 nt, Homo sapiens
  misc_RNA (1)...(19): siRNA sense strand
agaagcacucuaauaagau

SEQ ID NO: 645690 - RNA, 19 nt, Homo sapiens
  misc_RNA (1)...(19): siRNA sense strand
ccacagagcugcuucaucu

SEQ ID NO: 645691 - RNA, 19 nt, Homo sapiens
  misc_RNA (1)...(19): siRNA sense strand
guagccaacuugcauguga

SEQ ID NO: 645692 - RNA, 19 nt, Homo sapiens
  misc_RNA (1)...(19): siRNA sense strand
uaugcaagaugcucuacua

SEQ ID NO: 645693 - RNA, 19 nt, Homo sapiens
  misc_RNA (1)...(19): siRNA sense strand
ggugguggcuggcuucuuc

SEQ ID NO: 645694 - RNA, 19 nt, Homo sapiens
  misc_RNA (1)...(19): siRNA sense strand
aggaagaacuggacaggaa

SEQ ID NO: 645695 - RNA, 19 nt, Homo sapiens
  misc_RNA (1)...(19): siRNA sense strand
cagcagaaccuuccacaga

SEQ ID NO: 645696 - RNA, 19 nt, Homo sapiens
  misc_RNA (1)...(19): siRNA sense strand
ggacagcgguuggauugca

SEQ ID NO: 645697 - RNA, 19 nt, Homo sapiens
  misc_RNA (1)...(19): siRNA sense strand
ugucuacacuggauaauca

SEQ ID NO: 645698 - RNA, 19 nt, Homo sapiens
  misc_RNA (1)...(19): siRNA sense strand
caaauagggaucuacauca

SEQ ID NO: 645699 - RNA, 19 nt, Homo sapiens
  misc_RNA (1)...(19): siRNA sense strand
ggaagaacuggacaggaaa

SEQ ID NO: 645700 - RNA, 19 nt, Homo sapiens
  misc_RNA (1)...(19): siRNA sense strand
gguaccgacccaucuauaa

SEQ ID NO: 645701 - RNA, 19 nt, Homo sapiens
  misc_RNA (1)...(19): siRNA sense strand
gaacacuguagccaacuug

SEQ ID NO: 645702 - RNA, 19 nt, Homo sapiens
  misc_RNA (1)...(19): siRNA sense strand
ggccauaucagucaucaug

SEQ ID NO: 645703 - RNA, 19 nt, Homo sapiens
  misc_RNA (1)...(19): siRNA sense strand
aaauagggaucuacaucau

SEQ ID NO: 645704 - RNA, 19 nt, Homo sapiens
  misc_RNA (1)...(19): siRNA sense strand
agagaucccugccgacuac

SEQ ID NO: 645705 - RNA, 19 nt, Homo sapiens
  misc_RNA (1)...(19): siRNA sense strand
ucaaauagggaucuacauc

SEQ ID NO: 645706 - RNA, 19 nt, Homo sapiens
  misc_RNA (1)...(19): siRNA sense strand
gauguugcauucagugacu

SEQ ID NO: 645707 - RNA, 19 nt, Homo sapiens
  misc_RNA (1)...(19): siRNA sense strand
cagugacucuguuucugaa

SEQ ID NO: 645708 - RNA, 19 nt, Homo sapiens
  misc_RNA (1)...(19): siRNA sense strand
ucuuucagcuucuuugugu

SEQ ID NO: 645709 - RNA, 19 nt, Homo sapiens
  misc_RNA (1)...(19): siRNA sense strand
caaaugcagcgacaacagu

SEQ ID NO: 645710 - RNA, 19 nt, Homo sapiens
  misc_RNA (1)...(19): siRNA sense strand
ggauaugcaagaugcucua

SEQ ID NO: 645711 - RNA, 19 nt, Homo sapiens
  misc_RNA (1)...(19): siRNA sense strand
gaucuacaucauccaguug

SEQ ID NO: 645712 - RNA, 19 nt, Homo sapiens
  misc_RNA (1)...(19): siRNA sense strand
ucuacuaucuguggauguu

SEQ ID NO: 645713 - RNA, 19 nt, Homo sapiens
  misc_RNA (1)...(19): siRNA sense strand
gaagaacuggacaggaaag

SEQ ID NO: 645714 - RNA, 19 nt, Homo sapiens
  misc_RNA (1)...(19): siRNA sense strand
gcauucagugacucuguuu

SEQ ID NO: 645715 - RNA, 19 nt, Homo sapiens
  misc_RNA (1)...(19): siRNA sense strand
guaccgacccaucuauaag

SEQ ID NO: 645716 - RNA, 19 nt, Homo sapiens
  misc_RNA (1)...(19): siRNA sense strand
gugccuuccuuuguuggua

SEQ ID NO: 645717 - RNA, 19 nt, Homo sapiens
  misc_RNA (1)...(19): siRNA sense strand
cagcuucuuuguguucuuc

SEQ ID NO: 645718 - RNA, 19 nt, Homo sapiens
  misc_RNA (1)...(19): siRNA sense strand
gagcgggagcugcagaaca

SEQ ID NO: 645719 - RNA, 19 nt, Homo sapiens
  misc_RNA (1)...(19): siRNA sense strand
ccugugccuuccuuuguug

SEQ ID NO: 645720 - RNA, 19 nt, Homo sapiens
  misc_RNA (1)...(19): siRNA sense strand
agaacacuguagccaacuu

SEQ ID NO: 645721 - RNA, 19 nt, Homo sapiens
  misc_RNA (1)...(19): siRNA sense strand
cagagaucccugccgacua

SEQ ID NO: 645722 - RNA, 19 nt, Homo sapiens
  misc_RNA (1)...(19): siRNA sense strand
caacucuuucagcuucuuu

SEQ ID NO: 645723 - RNA, 19 nt, Homo sapiens
  misc_RNA (1)...(19): siRNA sense strand
ggaauucaaccccuucuca

SEQ ID NO: 645724 - RNA, 19 nt, Homo sapiens
  misc_RNA (1)...(19): siRNA sense strand
gugccgugcucucagucuu

SEQ ID NO: 645725 - RNA, 19 nt, Homo sapiens
  misc_RNA (1)...(19): siRNA sense strand
ggacccaguggauguaaac

SEQ ID NO: 645726 - RNA, 19 nt, Homo sapiens
  misc_RNA (1)...(19): siRNA sense strand
gaacuacucucuugccuaa

SEQ ID NO: 645727 - RNA, 19 nt, Homo sapiens
  misc_RNA (1)...(19): siRNA sense strand
ggaaauggcuucugguguu

SEQ ID NO: 645728 - RNA, 19 nt, Homo sapiens
  misc_RNA (1)...(19): siRNA sense strand
gaagagggauuaaguacau

SEQ ID NO: 645729 - RNA, 19 nt, Homo sapiens
  misc_RNA (1)...(19): siRNA sense strand
gucccaaucuugcauauua

SEQ ID NO: 645730 - RNA, 19 nt, Homo sapiens
  misc_RNA (1)...(19): siRNA sense strand
ggaacgaacuacucucuug

SEQ ID NO: 645731 - RNA, 19 nt, Homo sapiens
  misc_RNA (1)...(19): siRNA sense strand
ggacuuguaucaggucuuu

SEQ ID NO: 645732 - RNA, 19 nt, Homo sapiens
  misc_RNA (1)...(19): siRNA sense strand
gaaauggcuucugguguuu

SEQ ID NO: 645733 - RNA, 19 nt, Homo sapiens
  misc_RNA (1)...(19): siRNA sense strand
ggagccagcaauacaauua

SEQ ID NO: 645734 - RNA, 19 nt, Homo sapiens
  misc_RNA (1)...(19): siRNA sense strand
uaacguggcuacgguauug

SEQ ID NO: 645735 - RNA, 19 nt, Homo sapiens
  misc_RNA (1)...(19): siRNA sense strand
gguaugaucuuuggauguu

SEQ ID NO: 645736 - RNA, 19 nt, Homo sapiens
  misc_RNA (1)...(19): siRNA sense strand
gaugugcuauucuauacuu

SEQ ID NO: 645737 - RNA, 19 nt, Homo sapiens
  misc_RNA (1)...(19): siRNA sense strand
gugcugauauuaguuguaa

SEQ ID NO: 645738 - RNA, 19 nt, Homo sapiens
  misc_RNA (1)...(19): siRNA sense strand
gaagggagccagcaauaca

SEQ ID NO: 645739 - RNA, 19 nt, Homo sapiens
  misc_RNA (1)...(19): siRNA sense strand
gaccaacgcuggguggauu

SEQ ID NO: 645740 - RNA, 19 nt, Homo sapiens
  misc_RNA (1)...(19): siRNA sense strand
gauaaaaggccaccucuaa

SEQ ID NO: 645741 - RNA, 19 nt, Homo sapiens
  misc_RNA (1)...(19): siRNA sense strand
ccagaugggccaguauuua

SEQ ID NO: 645742 - RNA, 19 nt, Homo sapiens
  misc_RNA (1)...(19): siRNA sense strand
ucuggaaacugaucgcuuu

SEQ ID NO: 645743 - RNA, 19 nt, Homo sapiens
  misc_RNA (1)...(19): siRNA sense strand
gaguauaauuccaacuuuc

SEQ ID NO: 645744 - RNA, 19 nt, Homo sapiens
  misc_RNA (1)...(19): siRNA sense strand
acaauucucuuugguguau

SEQ ID NO: 645745 - RNA, 19 nt, Homo sapiens
  misc_RNA (1)...(19): siRNA sense strand
ggaguuacaauucucuuug

SEQ ID NO: 645746 - RNA, 19 nt, Homo sapiens
  misc_RNA (1)...(19): siRNA sense strand
ugaaugggcagcagcuaua

SEQ ID NO: 645747 - RNA, 19 nt, Homo sapiens
  misc_RNA (1)...(19): siRNA sense strand
gaacacucauucuggaaac

SEQ ID NO: 645748 - RNA, 19 nt, Homo sapiens
  misc_RNA (1)...(19): siRNA sense strand
gggccaguauuuauugcua

SEQ ID NO: 645749 - RNA, 19 nt, Homo sapiens
  misc_RNA (1)...(19): siRNA sense strand
guacugauaucggcagcuu

SEQ ID NO: 645750 - RNA, 19 nt, Homo sapiens
  misc_RNA (1)...(19): siRNA sense strand
acugaucgcuuuacccaaa

SEQ ID NO: 645751 - RNA, 19 nt, Homo sapiens
  misc_RNA (1)...(19): siRNA sense strand
aauacuagguccuccugua

SEQ ID NO: 645752 - RNA, 19 nt, Homo sapiens
  misc_RNA (1)...(19): siRNA sense strand
gaugguaccacucaauaug

SEQ ID NO: 645753 - RNA, 19 nt, Homo sapiens
  misc_RNA (1)...(19): siRNA sense strand
caauuuaccagcuggauau

SEQ ID NO: 645754 - RNA, 19 nt, Homo sapiens
  misc_RNA (1)...(19): siRNA sense strand
caaagaggcugaaaagaag

SEQ ID NO: 645755 - RNA, 19 nt, Homo sapiens
  misc_RNA (1)...(19): siRNA sense strand
caaggucuaugggcucuga

SEQ ID NO: 645756 - RNA, 19 nt, Homo sapiens
  misc_RNA (1)...(19): siRNA sense strand
uauuuggucuccuaaguga

SEQ ID NO: 645757 - RNA, 19 nt, Homo sapiens
  misc_RNA (1)...(19): siRNA sense strand
caugaugugcuauucuaua

SEQ ID NO: 645758 - RNA, 19 nt, Homo sapiens
  misc_RNA (1)...(19): siRNA sense strand
guuuguagcaggaauguuu

SEQ ID NO: 645759 - RNA, 19 nt, Homo sapiens
  misc_RNA (1)...(19): siRNA sense strand
ucacucagcucguguuuug

SEQ ID NO: 645760 - RNA, 19 nt, Homo sapiens
  misc_RNA (1)...(19): siRNA sense strand
ccaaagaggcugaaaagaa

SEQ ID NO: 645761 - RNA, 19 nt, Homo sapiens
  misc_RNA (1)...(19): siRNA sense strand
ugccaucucuucaccacua

SEQ ID NO: 645762 - RNA, 19 nt, Homo sapiens
  misc_RNA (1)...(19): siRNA sense strand
gcuggcauccuugguauuu

SEQ ID NO: 645763 - RNA, 19 nt, Homo sapiens
  misc_RNA (1)...(19): siRNA sense strand
ccggguggcuuucgagaga

SEQ ID NO: 645764 - RNA, 19 nt, Homo sapiens
  misc_RNA (1)...(19): siRNA sense strand
guaccacucaauauguaua

SEQ ID NO: 645765 - RNA, 19 nt, Homo sapiens
  misc_RNA (1)...(19): siRNA sense strand
gaugggccaguauuuauug

SEQ ID NO: 645766 - RNA, 19 nt, Homo sapiens
  misc_RNA (1)...(19): siRNA sense strand
cagaugggccaguauuuau

SEQ ID NO: 645767 - RNA, 19 nt, Homo sapiens
  misc_RNA (1)...(19): siRNA sense strand
ggaaacuaucuuguacaua

SEQ ID NO: 645768 - RNA, 19 nt, Homo sapiens
  misc_RNA (1)...(19): siRNA sense strand
ucugguguuuggcaacuua

SEQ ID NO: 645769 - RNA, 19 nt, Homo sapiens
  misc_RNA (1)...(19): siRNA sense strand
guucugggaugcgucguuu

SEQ ID NO: 645770 - RNA, 19 nt, Homo sapiens
  misc_RNA (1)...(19): siRNA sense strand
gcuaugaagugccuuuuau

SEQ ID NO: 645771 - RNA, 19 nt, Homo sapiens
  misc_RNA (1)...(19): siRNA sense strand
gcaaugacugcaucuucuu

SEQ ID NO: 645772 - RNA, 19 nt, Homo sapiens
  misc_RNA (1)...(19): siRNA sense strand
ggcagcagcuauacaaggu

SEQ ID NO: 645773 - RNA, 19 nt, Homo sapiens
  misc_RNA (1)...(19): siRNA sense strand
aagaagggagccagcaaua

SEQ ID NO: 645774 - RNA, 19 nt, Homo sapiens
  misc_RNA (1)...(19): siRNA sense strand
guauggcacuguccuaugc

SEQ ID NO: 645775 - RNA, 19 nt, Homo sapiens
  misc_RNA (1)...(19): siRNA sense strand
ggauaugugggacuaguau

SEQ ID NO: 645776 - RNA, 19 nt, Homo sapiens
  misc_RNA (1)...(19): siRNA sense strand
uccaugaugugcuauucua

SEQ ID NO: 645777 - RNA, 19 nt, Homo sapiens
  misc_RNA (1)...(19): siRNA sense strand
gaguuacaauucucuuugg

SEQ ID NO: 645778 - RNA, 19 nt, Homo sapiens
  misc_RNA (1)...(19): siRNA sense strand
uagguuccaugaugugcua

SEQ ID NO: 645779 - RNA, 19 nt, Homo sapiens
  misc_RNA (1)...(19): siRNA sense strand
ucccggaaauucucaguug

SEQ ID NO: 645780 - RNA, 19 nt, Homo sapiens
  misc_RNA (1)...(19): siRNA sense strand
ugguaccacucaauaugua

SEQ ID NO: 645781 - RNA, 19 nt, Homo sapiens
  misc_RNA (1)...(19): siRNA sense strand
gaagugccuuuuauuguuc

SEQ ID NO: 645782 - RNA, 19 nt, Homo sapiens
  misc_RNA (1)...(19): siRNA sense strand
ugaagugccuuuuauuguu

SEQ ID NO: 645783 - RNA, 19 nt, Homo sapiens
  misc_RNA (1)...(19): siRNA sense strand
gagaguaauggaugcaguu

SEQ ID NO: 645784 - RNA, 19 nt, Homo sapiens
  misc_RNA (1)...(19): siRNA sense strand
uggaaacuaucuuguacau

SEQ ID NO: 645785 - RNA, 19 nt, Homo sapiens
  misc_RNA (1)...(19): siRNA sense strand
ggucuaugggcucugauaa

SEQ ID NO: 645786 - RNA, 19 nt, Homo sapiens
  misc_RNA (1)...(19): siRNA sense strand
guaucaauccuuuggcuau

SEQ ID NO: 645787 - RNA, 19 nt, Homo sapiens
  misc_RNA (1)...(19): siRNA sense strand
caggaggaguuacaauucu

SEQ ID NO: 645788 - RNA, 19 nt, Homo sapiens
  misc_RNA (1)...(19): siRNA sense strand
ucuaugggcucugauaagu

SEQ ID NO: 645789 - RNA, 19 nt, Homo sapiens
  misc_RNA (1)...(19): siRNA sense strand
ucaauuuaccagcuggaua

SEQ ID NO: 645790 - RNA, 19 nt, Homo sapiens
  misc_RNA (1)...(19): siRNA sense strand
ucaauccuuuggcuaugaa

SEQ ID NO: 645791 - RNA, 19 nt, Homo sapiens
  misc_RNA (1)...(19): siRNA sense strand
cagcuucggugaacuuagg

SEQ ID NO: 645792 - RNA, 19 nt, Homo sapiens
  misc_RNA (1)...(19): siRNA sense strand
acuacucucuugccuaaug

SEQ ID NO: 645793 - RNA, 19 nt, Homo sapiens
  misc_RNA (1)...(19): siRNA sense strand
acaauuaucgguaugaucu

SEQ ID NO: 645794 - RNA, 19 nt, Homo sapiens
  misc_RNA (1)...(19): siRNA sense strand
ggccaguauuuauugcuau

SEQ ID NO: 645795 - RNA, 19 nt, Homo sapiens
  misc_RNA (1)...(19): siRNA sense strand
ggaaacugaucgcuuuacc

SEQ ID NO: 645796 - RNA, 19 nt, Homo sapiens
  misc_RNA (1)...(19): siRNA sense strand
gacugcaucuucuucuauc

SEQ ID NO: 645797 - RNA, 19 nt, Homo sapiens
  misc_RNA (1)...(19): siRNA sense strand
gccaguauuuauugcuaug

SEQ ID NO: 645798 - RNA, 19 nt, Homo sapiens
  misc_RNA (1)...(19): siRNA sense strand
cuugguauuuggaaacuau

SEQ ID NO: 645799 - RNA, 19 nt, Homo sapiens
  misc_RNA (1)...(19): siRNA sense strand
caucucuucaccacuauuu

SEQ ID NO: 645800 - RNA, 19 nt, Homo sapiens
  misc_RNA (1)...(19): siRNA sense strand
ccuuauagccuucgucauc

SEQ ID NO: 645801 - RNA, 19 nt, Homo sapiens
  misc_RNA (1)...(19): siRNA sense strand
cagcaaugacugcaucuuc

SEQ ID NO: 645802 - RNA, 19 nt, Homo sapiens
  misc_RNA (1)...(19): siRNA sense strand
ucaggaggaguuacaauuc

SEQ ID NO: 645803 - RNA, 19 nt, Homo sapiens
  misc_RNA (1)...(19): siRNA sense strand
gugcuauucuauacuugga

SEQ ID NO: 645804 - RNA, 19 nt, Homo sapiens
  misc_RNA (1)...(19): siRNA sense strand
cuacucucuugccuaauga

SEQ ID NO: 645805 - RNA, 19 nt, Homo sapiens
  misc_RNA (1)...(19): siRNA sense strand
uggguggauuucuguauga

SEQ ID NO: 645806 - RNA, 19 nt, Homo sapiens
  misc_RNA (1)...(19): siRNA sense strand
gagccagcaauacaauuau

SEQ ID NO: 645807 - RNA, 19 nt, Homo sapiens
  misc_RNA (1)...(19): siRNA sense strand
gcugauauuaguuguaagu

SEQ ID NO: 645808 - RNA, 19 nt, Homo sapiens
  misc_RNA (1)...(19): siRNA sense strand
ggccaccucuaaggaaaug

SEQ ID NO: 645809 - RNA, 19 nt, Homo sapiens
  misc_RNA (1)...(19): siRNA sense strand
gcacuguccuaugccaucu

SEQ ID NO: 645810 - RNA, 19 nt, Homo sapiens
  misc_RNA (1)...(19): siRNA sense strand
uaucaauccuuuggcuaug

SEQ ID NO: 645811 - RNA, 19 nt, Homo sapiens
  misc_RNA (1)...(19): siRNA sense strand
cuucuucuauccuggcaaa

SEQ ID NO: 645812 - RNA, 19 nt, Homo sapiens
  misc_RNA (1)...(19): siRNA sense strand
cauccuugguauuuggaaa

SEQ ID NO: 645813 - RNA, 19 nt, Homo sapiens
  misc_RNA (1)...(19): siRNA sense strand
gaggaacgaacuacucucu

SEQ ID NO: 645814 - RNA, 19 nt, Homo sapiens
  misc_RNA (1)...(19): siRNA sense strand
ucucaguugugcacaugaa

SEQ ID NO: 645815 - RNA, 19 nt, Homo sapiens
  misc_RNA (1)...(19): siRNA sense strand
ucccaaucuugcauauuaa

SEQ ID NO: 645816 - RNA, 19 nt, Homo sapiens
  misc_RNA (1)...(19): siRNA sense strand
ugacugcaucuucuucuau

SEQ ID NO: 645817 - RNA, 19 nt, Homo sapiens
  misc_RNA (1)...(19): siRNA sense strand
guauuuggaaacuaucuug

SEQ ID NO: 645818 - RNA, 19 nt, Homo sapiens
  misc_RNA (1)...(19): siRNA sense strand
ucgaguugcuggcauccuu

SEQ ID NO: 645819 - RNA, 19 nt, Homo sapiens
  misc_RNA (1)...(19): siRNA sense strand
ugaacacucauucuggaaa

SEQ ID NO: 645820 - RNA, 19 nt, Homo sapiens
  misc_RNA (1)...(19): siRNA sense strand
ugauccaggugaacacuca

SEQ ID NO: 645821 - RNA, 19 nt, Homo sapiens
  misc_RNA (1)...(19): siRNA sense strand
guaugaucuuuggauguuu

SEQ ID NO: 645822 - RNA, 19 nt, Homo sapiens
  misc_RNA (1)...(19): siRNA sense strand
cugaugguaccacucaaua

SEQ ID NO: 645823 - RNA, 19 nt, Homo sapiens
  misc_RNA (1)...(19): siRNA sense strand
uuggagaaguucaauuuac

SEQ ID NO: 645824 - RNA, 19 nt, Homo sapiens
  misc_RNA (1)...(19): siRNA sense strand
ccuacucugucucucuuug

SEQ ID NO: 645825 - RNA, 19 nt, Homo sapiens
  misc_RNA (1)...(19): siRNA sense strand
gcaggaagugcaggagaga

SEQ ID NO: 645826 - RNA, 19 nt, Homo sapiens
  misc_RNA (1)...(19): siRNA sense strand
uaccauagcuauagugaua

SEQ ID NO: 645827 - RNA, 19 nt, Homo sapiens
  misc_RNA (1)...(19): siRNA sense strand
gaguguggauguauuguua

SEQ ID NO: 645828 - RNA, 19 nt, Homo sapiens
  misc_RNA (1)...(19): siRNA sense strand
gauuauugcugcaucauuu

SEQ ID NO: 645829 - RNA, 19 nt, Homo sapiens
  misc_RNA (1)...(19): siRNA sense strand
acagguggcuugucuaaua

SEQ ID NO: 645830 - RNA, 19 nt, Homo sapiens
  misc_RNA (1)...(19): siRNA sense strand
gcaaugacguauuauggaa

SEQ ID NO: 645831 - RNA, 19 nt, Homo sapiens
  misc_RNA (1)...(19): siRNA sense strand
ucaaauaucucuugggaau

SEQ ID NO: 645832 - RNA, 19 nt, Homo sapiens
  misc_RNA (1)...(19): siRNA sense strand
gaacaaaacacauugcuua

SEQ ID NO: 645833 - RNA, 19 nt, Homo sapiens
  misc_RNA (1)...(19): siRNA sense strand
uuaaagagcugaaugaaca

SEQ ID NO: 645834 - RNA, 19 nt, Homo sapiens
  misc_RNA (1)...(19): siRNA sense strand
gcaaugacuguaaguauaa

SEQ ID NO: 645835 - RNA, 19 nt, Homo sapiens
  misc_RNA (1)...(19): siRNA sense strand
agacagaaauggacaguga

SEQ ID NO: 645836 - RNA, 19 nt, Homo sapiens
  misc_RNA (1)...(19): siRNA sense strand
ggaauucccucaccuagag

SEQ ID NO: 645837 - RNA, 19 nt, Homo sapiens
  misc_RNA (1)...(19): siRNA sense strand
caauaggaccuuugcuuua

SEQ ID NO: 645838 - RNA, 19 nt, Homo sapiens
  misc_RNA (1)...(19): siRNA sense strand
agaaguaguuggucauauu

SEQ ID NO: 645839 - RNA, 19 nt, Homo sapiens
  misc_RNA (1)...(19): siRNA sense strand
ggaaaacacauauggauua

SEQ ID NO: 645840 - RNA, 19 nt, Homo sapiens
  misc_RNA (1)...(19): siRNA sense strand
gcccauggccucagcaaua

SEQ ID NO: 645841 - RNA, 19 nt, Homo sapiens
  misc_RNA (1)...(19): siRNA sense strand
ggacugaagggaaugcuaa

SEQ ID NO: 645842 - RNA, 19 nt, Homo sapiens
  misc_RNA (1)...(19): siRNA sense strand
gcaggaguguggauguauu

SEQ ID NO: 645843 - RNA, 19 nt, Homo sapiens
  misc_RNA (1)...(19): siRNA sense strand
aaauaucucuugggaauga

SEQ ID NO: 645844 - RNA, 19 nt, Homo sapiens
  misc_RNA (1)...(19): siRNA sense strand
gcaauaagucauauccauu

SEQ ID NO: 645845 - RNA, 19 nt, Homo sapiens
  misc_RNA (1)...(19): siRNA sense strand
ggacugcuguuugguguug

SEQ ID NO: 645846 - RNA, 19 nt, Homo sapiens
  misc_RNA (1)...(19): siRNA sense strand
ccacuuggauucuuuuaua

SEQ ID NO: 645847 - RNA, 19 nt, Homo sapiens
  misc_RNA (1)...(19): siRNA sense strand
ucacaguccugcccuaaug

SEQ ID NO: 645848 - RNA, 19 nt, Homo sapiens
  misc_RNA (1)...(19): siRNA sense strand
uaaaguuguucuuccugua

SEQ ID NO: 645849 - RNA, 19 nt, Homo sapiens
  misc_RNA (1)...(19): siRNA sense strand
ggugaucacugaagcuuuc

SEQ ID NO: 645850 - RNA, 19 nt, Homo sapiens
  misc_RNA (1)...(19): siRNA sense strand
cuaauacaguuccgagauu

SEQ ID NO: 645851 - RNA, 19 nt, Homo sapiens
  misc_RNA (1)...(19): siRNA sense strand
cugcaucauuugcuuguua

SEQ ID NO: 645852 - RNA, 19 nt, Homo sapiens
  misc_RNA (1)...(19): siRNA sense strand
gagcaaugacuguaaguau

SEQ ID NO: 645853 - RNA, 19 nt, Homo sapiens
  misc_RNA (1)...(19): siRNA sense strand
uaaaaucgauuggggaaua

SEQ ID NO: 645854 - RNA, 19 nt, Homo sapiens
  misc_RNA (1)...(19): siRNA sense strand
gggcuuauccgacuuugaa

SEQ ID NO: 645855 - RNA, 19 nt, Homo sapiens
  misc_RNA (1)...(19): siRNA sense strand
uaauacaguuccgagauuu

SEQ ID NO: 645856 - RNA, 19 nt, Homo sapiens
  misc_RNA (1)...(19): siRNA sense strand
aaaccuagacucagagaaa

SEQ ID NO: 645857 - RNA, 19 nt, Homo sapiens
  misc_RNA (1)...(19): siRNA sense strand
gcaccacauuacaaucuga

SEQ ID NO: 645858 - RNA, 19 nt, Homo sapiens
  misc_RNA (1)...(19): siRNA sense strand
uuguacagcuuccuugaua

SEQ ID NO: 645859 - RNA, 19 nt, Homo sapiens
  misc_RNA (1)...(19): siRNA sense strand
agcaaugacuguaaguaua

SEQ ID NO: 645860 - RNA, 19 nt, Homo sapiens
  misc_RNA (1)...(19): siRNA sense strand
gcccuaaugagaaguguua

SEQ ID NO: 645861 - RNA, 19 nt, Homo sapiens
  misc_RNA (1)...(19): siRNA sense strand
guacagcuuccuugauaaa

SEQ ID NO: 645862 - RNA, 19 nt, Homo sapiens
  misc_RNA (1)...(19): siRNA sense strand
gcacccaguguuugguuua

SEQ ID NO: 645863 - RNA, 19 nt, Homo sapiens
  misc_RNA (1)...(19): siRNA sense strand
gaaggcgacugcccauuuu

SEQ ID NO: 645864 - RNA, 19 nt, Homo sapiens
  misc_RNA (1)...(19): siRNA sense strand
gaacggauugucccucaga

SEQ ID NO: 645865 - RNA, 19 nt, Homo sapiens
  misc_RNA (1)...(19): siRNA sense strand
gccuugacauccuuaauau

SEQ ID NO: 645866 - RNA, 19 nt, Homo sapiens
  misc_RNA (1)...(19): siRNA sense strand
gguaucugcugcaauaagu

SEQ ID NO: 645867 - RNA, 19 nt, Homo sapiens
  misc_RNA (1)...(19): siRNA sense strand
caagagcaaugacuguaag

SEQ ID NO: 645868 - RNA, 19 nt, Homo sapiens
  misc_RNA (1)...(19): siRNA sense strand
gauaggacgcuucccaaga

SEQ ID NO: 645869 - RNA, 19 nt, Homo sapiens
  misc_RNA (1)...(19): siRNA sense strand
gggauaauguuggcaguuc

SEQ ID NO: 645870 - RNA, 19 nt, Homo sapiens
  misc_RNA (1)...(19): siRNA sense strand
ggaaugaaaaugccauaua

SEQ ID NO: 645871 - RNA, 19 nt, Homo sapiens
  misc_RNA (1)...(19): siRNA sense strand
caacugcaaugaagaagcu

SEQ ID NO: 645872 - RNA, 19 nt, Homo sapiens
  misc_RNA (1)...(19): siRNA sense strand
gagcugaaugaacaguuua

SEQ ID NO: 645873 - RNA, 19 nt, Homo sapiens
  misc_RNA (1)...(19): siRNA sense strand
ggauuggccuuugcuguuc

SEQ ID NO: 645874 - RNA, 19 nt, Homo sapiens
  misc_RNA (1)...(19): siRNA sense strand
gaaguaguuggucauauuc

SEQ ID NO: 645875 - RNA, 19 nt, Homo sapiens
  misc_RNA (1)...(19): siRNA sense strand
ggccuuugcuguucucuca

SEQ ID NO: 645876 - RNA, 19 nt, Homo sapiens
  misc_RNA (1)...(19): siRNA sense strand
gcacaggagcgaagacaca

SEQ ID NO: 645877 - RNA, 19 nt, Homo sapiens
  misc_RNA (1)...(19): siRNA sense strand
caauaagucauauccauuc

SEQ ID NO: 645878 - RNA, 19 nt, Homo sapiens
  misc_RNA (1)...(19): siRNA sense strand
ugaagggaaugcuaauaca

SEQ ID NO: 645879 - RNA, 19 nt, Homo sapiens
  misc_RNA (1)...(19): siRNA sense strand
ucucugcggugaucacuga

SEQ ID NO: 645880 - RNA, 19 nt, Homo sapiens
  misc_RNA (1)...(19): siRNA sense strand
ccaagagcaaugacuguaa

SEQ ID NO: 645881 - RNA, 19 nt, Homo sapiens
  misc_RNA (1)...(19): siRNA sense strand
uggcuugucuaauaucuug

SEQ ID NO: 645882 - RNA, 19 nt, Homo sapiens
  misc_RNA (1)...(19): siRNA sense strand
agagcugaaugaacaguuu

SEQ ID NO: 645883 - RNA, 19 nt, Homo sapiens
  misc_RNA (1)...(19): siRNA sense strand
ggauaauguuggcaguuca

SEQ ID NO: 645884 - RNA, 19 nt, Homo sapiens
  misc_RNA (1)...(19): siRNA sense strand
gguccuuguucuuguuaaa

SEQ ID NO: 645885 - RNA, 19 nt, Homo sapiens
  misc_RNA (1)...(19): siRNA sense strand
agaaggcgacugcccauuu

SEQ ID NO: 645886 - RNA, 19 nt, Homo sapiens
  misc_RNA (1)...(19): siRNA sense strand
caaggaauucccucaccua

SEQ ID NO: 645887 - RNA, 19 nt, Homo sapiens
  misc_RNA (1)...(19): siRNA sense strand
uuaauucccuauccaaugg

SEQ ID NO: 645888 - RNA, 19 nt, Homo sapiens
  misc_RNA (1)...(19): siRNA sense strand
gaaggacggcuggccugua

SEQ ID NO: 645889 - RNA, 19 nt, Homo sapiens
  misc_RNA (1)...(19): siRNA sense strand
ggccucagcaauauaguuu

SEQ ID NO: 645890 - RNA, 19 nt, Homo sapiens
  misc_RNA (1)...(19): siRNA sense strand
gacguauuauggaaaccua

SEQ ID NO: 645891 - RNA, 19 nt, Homo sapiens
  misc_RNA (1)...(19): siRNA sense strand
gcuguuugguguuguuugu

SEQ ID NO: 645892 - RNA, 19 nt, Homo sapiens
  misc_RNA (1)...(19): siRNA sense strand
cagguggcuugucuaauau

SEQ ID NO: 645893 - RNA, 19 nt, Homo sapiens
  misc_RNA (1)...(19): siRNA sense strand
ucuguuuccugccauaauu

SEQ ID NO: 645894 - RNA, 19 nt, Homo sapiens
  misc_RNA (1)...(19): siRNA sense strand
ucagcaauauaguuucuuc

SEQ ID NO: 645895 - RNA, 19 nt, Homo sapiens
  misc_RNA (1)...(19): siRNA sense strand
gauugucccucagaacaug

SEQ ID NO: 645896 - RNA, 19 nt, Homo sapiens
  misc_RNA (1)...(19): siRNA sense strand
ugauucagguggccauguu

SEQ ID NO: 645897 - RNA, 19 nt, Homo sapiens
  misc_RNA (1)...(19): siRNA sense strand
ccagugugaagacauuaua

SEQ ID NO: 645898 - RNA, 19 nt, Homo sapiens
  misc_RNA (1)...(19): siRNA sense strand
cagaaucucaccacacaga

SEQ ID NO: 645899 - RNA, 19 nt, Homo sapiens
  misc_RNA (1)...(19): siRNA sense strand
acacagguggcuugucuaa

SEQ ID NO: 645900 - RNA, 19 nt, Homo sapiens
  misc_RNA (1)...(19): siRNA sense strand
gaaaacacauauggauuag

SEQ ID NO: 645901 - RNA, 19 nt, Homo sapiens
  misc_RNA (1)...(19): siRNA sense strand
cuucacaagucaaauaucu

SEQ ID NO: 645902 - RNA, 19 nt, Homo sapiens
  misc_RNA (1)...(19): siRNA sense strand
gcuaauacaguuccgagau

SEQ ID NO: 645903 - RNA, 19 nt, Homo sapiens
  misc_RNA (1)...(19): siRNA sense strand
aucgguaucugcugcaaua

SEQ ID NO: 645904 - RNA, 19 nt, Homo sapiens
  misc_RNA (1)...(19): siRNA sense strand
gagaaguguuauuuaaucc

SEQ ID NO: 645905 - RNA, 19 nt, Homo sapiens
  misc_RNA (1)...(19): siRNA sense strand
uuauaugggucucuguuuc

SEQ ID NO: 645906 - RNA, 19 nt, Homo sapiens
  misc_RNA (1)...(19): siRNA sense strand
ccaugcuuguugagguuua

SEQ ID NO: 645907 - RNA, 19 nt, Homo sapiens
  misc_RNA (1)...(19): siRNA sense strand
gaacaugauccaaaaggaa

SEQ ID NO: 645908 - RNA, 19 nt, Homo sapiens
  misc_RNA (1)...(19): siRNA sense strand
gguguuguuuguaccauag

SEQ ID NO: 645909 - RNA, 19 nt, Homo sapiens
  misc_RNA (1)...(19): siRNA sense strand
ccacacagaguaacacaag

SEQ ID NO: 645910 - RNA, 19 nt, Homo sapiens
  misc_RNA (1)...(19): siRNA sense strand
aauaggaccuuugcuuuac

SEQ ID NO: 645911 - RNA, 19 nt, Homo sapiens
  misc_RNA (1)...(19): siRNA sense strand
uaaagugaagacagaaaug

SEQ ID NO: 645912 - RNA, 19 nt, Homo sapiens
  misc_RNA (1)...(19): siRNA sense strand
uggauugggcaccacauua

SEQ ID NO: 645913 - RNA, 19 nt, Homo sapiens
  misc_RNA (1)...(19): siRNA sense strand
cacauuacaaucugaaaga

SEQ ID NO: 645914 - RNA, 19 nt, Homo sapiens
  misc_RNA (1)...(19): siRNA sense strand
ggaguguggauguauuguu

SEQ ID NO: 645915 - RNA, 19 nt, Homo sapiens
  misc_RNA (1)...(19): siRNA sense strand
cccaguguuugguuuauau

SEQ ID NO: 645916 - RNA, 19 nt, Homo sapiens
  misc_RNA (1)...(19): siRNA sense strand
gagucuccaugcuuguuga

SEQ ID NO: 645917 - RNA, 19 nt, Homo sapiens
  misc_RNA (1)...(19): siRNA sense strand
acauauggauuagaaguag

SEQ ID NO: 645918 - RNA, 19 nt, Homo sapiens
  misc_RNA (1)...(19): siRNA sense strand
uguucuuccuguagauuua

SEQ ID NO: 645919 - RNA, 19 nt, Homo sapiens
  misc_RNA (1)...(19): siRNA sense strand
ugcagaaucucaccacaca

SEQ ID NO: 645920 - RNA, 19 nt, Homo sapiens
  misc_RNA (1)...(19): siRNA sense strand
cuugacauccuuaauauca

SEQ ID NO: 645921 - RNA, 19 nt, Homo sapiens
  misc_RNA (1)...(19): siRNA sense strand
ggaaaccuagacucagaga

SEQ ID NO: 645922 - RNA, 19 nt, Homo sapiens
  misc_RNA (1)...(19): siRNA sense strand
gauguauuguuagcccauu

SEQ ID NO: 645923 - RNA, 19 nt, Homo sapiens
  misc_RNA (1)...(19): siRNA sense strand
ggaauaugggucaguacau

SEQ ID NO: 645924 - RNA, 19 nt, Homo sapiens
  misc_RNA (1)...(19): siRNA sense strand
gcucaaggaucugccaaaa

SEQ ID NO: 645925 - RNA, 19 nt, Homo sapiens
  misc_RNA (1)...(19): siRNA sense strand
uagaaguaguuggucauau

SEQ ID NO: 645926 - RNA, 19 nt, Homo sapiens
  misc_RNA (1)...(19): siRNA sense strand
uaccauagcuauagugaua

SEQ ID NO: 645927 - RNA, 19 nt, Homo sapiens
  misc_RNA (1)...(19): siRNA sense strand
gaguguggauguauuguua

SEQ ID NO: 645928 - RNA, 19 nt, Homo sapiens
  misc_RNA (1)...(19): siRNA sense strand
gauuauugcugcaucauuu

SEQ ID NO: 645929 - RNA, 19 nt, Homo sapiens
  misc_RNA (1)...(19): siRNA sense strand
acagguggcuugucuaaua

SEQ ID NO: 645930 - RNA, 19 nt, Homo sapiens
  misc_RNA (1)...(19): siRNA sense strand
gcaaugacguauuauggaa

SEQ ID NO: 645931 - RNA, 19 nt, Homo sapiens
  misc_RNA (1)...(19): siRNA sense strand
ucaaauaucucuugggaau

SEQ ID NO: 645932 - RNA, 19 nt, Homo sapiens
  misc_RNA (1)...(19): siRNA sense strand
gaacaaaacacauugcuua

SEQ ID NO: 645933 - RNA, 19 nt, Homo sapiens
  misc_RNA (1)...(19): siRNA sense strand
uuaaagagcugaaugaaca

SEQ ID NO: 645934 - RNA, 19 nt, Homo sapiens
  misc_RNA (1)...(19): siRNA sense strand
gcaaugacuguaaguauaa

SEQ ID NO: 645935 - RNA, 19 nt, Homo sapiens
  misc_RNA (1)...(19): siRNA sense strand
agacagaaauggacaguga

SEQ ID NO: 645936 - RNA, 19 nt, Homo sapiens
  misc_RNA (1)...(19): siRNA sense strand
ggaauucccucaccuagag

SEQ ID NO: 645937 - RNA, 19 nt, Homo sapiens
  misc_RNA (1)...(19): siRNA sense strand
caauaggaccuuugcuuua

SEQ ID NO: 645938 - RNA, 19 nt, Homo sapiens
  misc_RNA (1)...(19): siRNA sense strand
agaaguaguuggucauauu

SEQ ID NO: 645939 - RNA, 19 nt, Homo sapiens
  misc_RNA (1)...(19): siRNA sense strand
ggaaaacacauauggauua

SEQ ID NO: 645940 - RNA, 19 nt, Homo sapiens
  misc_RNA (1)...(19): siRNA sense strand
gcccauggccucagcaaua

SEQ ID NO: 645941 - RNA, 19 nt, Homo sapiens
  misc_RNA (1)...(19): siRNA sense strand
ggacugaagggaaugcuaa

SEQ ID NO: 645942 - RNA, 19 nt, Homo sapiens
  misc_RNA (1)...(19): siRNA sense strand
gcaggaguguggauguauu

SEQ ID NO: 645943 - RNA, 19 nt, Homo sapiens
  misc_RNA (1)...(19): siRNA sense strand
aaauaucucuugggaauga

SEQ ID NO: 645944 - RNA, 19 nt, Homo sapiens
  misc_RNA (1)...(19): siRNA sense strand
gcaauaagucauauccauu

SEQ ID NO: 645945 - RNA, 19 nt, Homo sapiens
  misc_RNA (1)...(19): siRNA sense strand
ggacugcuguuugguguug

SEQ ID NO: 645946 - RNA, 19 nt, Homo sapiens
  misc_RNA (1)...(19): siRNA sense strand
ccacuuggauucuuuuaua

SEQ ID NO: 645947 - RNA, 19 nt, Homo sapiens
  misc_RNA (1)...(19): siRNA sense strand
ucacaguccugcccuaaug

SEQ ID NO: 645948 - RNA, 19 nt, Homo sapiens
  misc_RNA (1)...(19): siRNA sense strand
uaaaguuguucuuccugua

SEQ ID NO: 645949 - RNA, 19 nt, Homo sapiens
  misc_RNA (1)...(19): siRNA sense strand
ggugaucacugaagcuuuc

SEQ ID NO: 645950 - RNA, 19 nt, Homo sapiens
  misc_RNA (1)...(19): siRNA sense strand
cuaauacaguuccgagauu

SEQ ID NO: 645951 - RNA, 19 nt, Homo sapiens
  misc_RNA (1)...(19): siRNA sense strand
cugcaucauuugcuuguua

SEQ ID NO: 645952 - RNA, 19 nt, Homo sapiens
  misc_RNA (1)...(19): siRNA sense strand
gagcaaugacuguaaguau

SEQ ID NO: 645953 - RNA, 19 nt, Homo sapiens
  misc_RNA (1)...(19): siRNA sense strand
uaaaaucgauuggggaaua

SEQ ID NO: 645954 - RNA, 19 nt, Homo sapiens
  misc_RNA (1)...(19): siRNA sense strand
gggcuuauccgacuuugaa

SEQ ID NO: 645955 - RNA, 19 nt, Homo sapiens
  misc_RNA (1)...(19): siRNA sense strand
uaauacaguuccgagauuu

SEQ ID NO: 645956 - RNA, 19 nt, Homo sapiens
  misc_RNA (1)...(19): siRNA sense strand
aaaccuagacucagagaaa

SEQ ID NO: 645957 - RNA, 19 nt, Homo sapiens
  misc_RNA (1)...(19): siRNA sense strand
gcaccacauuacaaucuga

SEQ ID NO: 645958 - RNA, 19 nt, Homo sapiens
  misc_RNA (1)...(19): siRNA sense strand
uuguacagcuuccuugaua

SEQ ID NO: 645959 - RNA, 19 nt, Homo sapiens
  misc_RNA (1)...(19): siRNA sense strand
agcaaugacuguaaguaua

SEQ ID NO: 645960 - RNA, 19 nt, Homo sapiens
  misc_RNA (1)...(19): siRNA sense strand
gcccuaaugagaaguguua

SEQ ID NO: 645961 - RNA, 19 nt, Homo sapiens
  misc_RNA (1)...(19): siRNA sense strand
guacagcuuccuugauaaa

SEQ ID NO: 645962 - RNA, 19 nt, Homo sapiens
  misc_RNA (1)...(19): siRNA sense strand
gcacccaguguuugguuua

SEQ ID NO: 645963 - RNA, 19 nt, Homo sapiens
  misc_RNA (1)...(19): siRNA sense strand
gaaggcgacugcccauuuu

SEQ ID NO: 645964 - RNA, 19 nt, Homo sapiens
  misc_RNA (1)...(19): siRNA sense strand
gaacggauugucccucaga

SEQ ID NO: 645965 - RNA, 19 nt, Homo sapiens
  misc_RNA (1)...(19): siRNA sense strand
gccuugacauccuuaauau

SEQ ID NO: 645966 - RNA, 19 nt, Homo sapiens
  misc_RNA (1)...(19): siRNA sense strand
gguaucugcugcaauaagu

SEQ ID NO: 645967 - RNA, 19 nt, Homo sapiens
  misc_RNA (1)...(19): siRNA sense strand
caagagcaaugacuguaag

SEQ ID NO: 645968 - RNA, 19 nt, Homo sapiens
  misc_RNA (1)...(19): siRNA sense strand
gauaggacgcuucccaaga

SEQ ID NO: 645969 - RNA, 19 nt, Homo sapiens
  misc_RNA (1)...(19): siRNA sense strand
gggauaauguuggcaguuc

SEQ ID NO: 645970 - RNA, 19 nt, Homo sapiens
  misc_RNA (1)...(19): siRNA sense strand
ggaaugaaaaugccauaua

SEQ ID NO: 645971 - RNA, 19 nt, Homo sapiens
  misc_RNA (1)...(19): siRNA sense strand
caacugcaaugaagaagcu

SEQ ID NO: 645972 - RNA, 19 nt, Homo sapiens
  misc_RNA (1)...(19): siRNA sense strand
gagcugaaugaacaguuua

SEQ ID NO: 645973 - RNA, 19 nt, Homo sapiens
  misc_RNA (1)...(19): siRNA sense strand
ggauuggccuuugcuguuc

SEQ ID NO: 645974 - RNA, 19 nt, Homo sapiens
  misc_RNA (1)...(19): siRNA sense strand
gaaguaguuggucauauuc

SEQ ID NO: 645975 - RNA, 19 nt, Homo sapiens
  misc_RNA (1)...(19): siRNA sense strand
ggccuuugcuguucucuca

SEQ ID NO: 645976 - RNA, 19 nt, Homo sapiens
  misc_RNA (1)...(19): siRNA sense strand
gcacaggagcgaagacaca

SEQ ID NO: 645977 - RNA, 19 nt, Homo sapiens
  misc_RNA (1)...(19): siRNA sense strand
caauaagucauauccauuc

SEQ ID NO: 645978 - RNA, 19 nt, Homo sapiens
  misc_RNA (1)...(19): siRNA sense strand
ugaagggaaugcuaauaca

SEQ ID NO: 645979 - RNA, 19 nt, Homo sapiens
  misc_RNA (1)...(19): siRNA sense strand
ucucugcggugaucacuga

SEQ ID NO: 645980 - RNA, 19 nt, Homo sapiens
  misc_RNA (1)...(19): siRNA sense strand
ccaagagcaaugacuguaa

SEQ ID NO: 645981 - RNA, 19 nt, Homo sapiens
  misc_RNA (1)...(19): siRNA sense strand
uggcuugucuaauaucuug

SEQ ID NO: 645982 - RNA, 19 nt, Homo sapiens
  misc_RNA (1)...(19): siRNA sense strand
agagcugaaugaacaguuu

SEQ ID NO: 645983 - RNA, 19 nt, Homo sapiens
  misc_RNA (1)...(19): siRNA sense strand
ggauaauguuggcaguuca

SEQ ID NO: 645984 - RNA, 19 nt, Homo sapiens
  misc_RNA (1)...(19): siRNA sense strand
gguccuuguucuuguuaaa

SEQ ID NO: 645985 - RNA, 19 nt, Homo sapiens
  misc_RNA (1)...(19): siRNA sense strand
agaaggcgacugcccauuu

SEQ ID NO: 645986 - RNA, 19 nt, Homo sapiens
  misc_RNA (1)...(19): siRNA sense strand
caaggaauucccucaccua

SEQ ID NO: 645987 - RNA, 19 nt, Homo sapiens
  misc_RNA (1)...(19): siRNA sense strand
uuaauucccuauccaaugg

SEQ ID NO: 645988 - RNA, 19 nt, Homo sapiens
  misc_RNA (1)...(19): siRNA sense strand
gaaggacggcuggccugua

SEQ ID NO: 645989 - RNA, 19 nt, Homo sapiens
  misc_RNA (1)...(19): siRNA sense strand
ggccucagcaauauaguuu

SEQ ID NO: 645990 - RNA, 19 nt, Homo sapiens
  misc_RNA (1)...(19): siRNA sense strand
gacguauuauggaaaccua

SEQ ID NO: 645991 - RNA, 19 nt, Homo sapiens
  misc_RNA (1)...(19): siRNA sense strand
gcuguuugguguuguuugu

SEQ ID NO: 645992 - RNA, 19 nt, Homo sapiens
  misc_RNA (1)...(19): siRNA sense strand
cagguggcuugucuaauau

SEQ ID NO: 645993 - RNA, 19 nt, Homo sapiens
  misc_RNA (1)...(19): siRNA sense strand
ucuguuuccugccauaauu

SEQ ID NO: 645994 - RNA, 19 nt, Homo sapiens
  misc_RNA (1)...(19): siRNA sense strand
ucagcaauauaguuucuuc

SEQ ID NO: 645995 - RNA, 19 nt, Homo sapiens
  misc_RNA (1)...(19): siRNA sense strand
gauugucccucagaacaug

SEQ ID NO: 645996 - RNA, 19 nt, Homo sapiens
  misc_RNA (1)...(19): siRNA sense strand
ugauucagguggccauguu

SEQ ID NO: 645997 - RNA, 19 nt, Homo sapiens
  misc_RNA (1)...(19): siRNA sense strand
ccagugugaagacauuaua

SEQ ID NO: 645998 - RNA, 19 nt, Homo sapiens
  misc_RNA (1)...(19): siRNA sense strand
cagaaucucaccacacaga

SEQ ID NO: 645999 - RNA, 19 nt, Homo sapiens
  misc_RNA (1)...(19): siRNA sense strand
acacagguggcuugucuaa

SEQ ID NO: 646000 - RNA, 19 nt, Homo sapiens
  misc_RNA (1)...(19): siRNA sense strand
gaaaacacauauggauuag

SEQ ID NO: 646001 - RNA, 19 nt, Homo sapiens
  misc_RNA (1)...(19): siRNA sense strand
cuucacaagucaaauaucu

SEQ ID NO: 646002 - RNA, 19 nt, Homo sapiens
  misc_RNA (1)...(19): siRNA sense strand
gcuaauacaguuccgagau

SEQ ID NO: 646003 - RNA, 19 nt, Homo sapiens
  misc_RNA (1)...(19): siRNA sense strand
aucgguaucugcugcaaua

SEQ ID NO: 646004 - RNA, 19 nt, Homo sapiens
  misc_RNA (1)...(19): siRNA sense strand
gagaaguguuauuuaaucc

SEQ ID NO: 646005 - RNA, 19 nt, Homo sapiens
  misc_RNA (1)...(19): siRNA sense strand
uuauaugggucucuguuuc

SEQ ID NO: 646006 - RNA, 19 nt, Homo sapiens
  misc_RNA (1)...(19): siRNA sense strand
ccaugcuuguugagguuua

SEQ ID NO: 646007 - RNA, 19 nt, Homo sapiens
  misc_RNA (1)...(19): siRNA sense strand
gaacaugauccaaaaggaa

SEQ ID NO: 646008 - RNA, 19 nt, Homo sapiens
  misc_RNA (1)...(19): siRNA sense strand
gguguuguuuguaccauag

SEQ ID NO: 646009 - RNA, 19 nt, Homo sapiens
  misc_RNA (1)...(19): siRNA sense strand
ccacacagaguaacacaag

SEQ ID NO: 646010 - RNA, 19 nt, Homo sapiens
  misc_RNA (1)...(19): siRNA sense strand
aauaggaccuuugcuuuac

SEQ ID NO: 646011 - RNA, 19 nt, Homo sapiens
  misc_RNA (1)...(19): siRNA sense strand
uaaagugaagacagaaaug

SEQ ID NO: 646012 - RNA, 19 nt, Homo sapiens
  misc_RNA (1)...(19): siRNA sense strand
uggauugggcaccacauua

SEQ ID NO: 646013 - RNA, 19 nt, Homo sapiens
  misc_RNA (1)...(19): siRNA sense strand
cacauuacaaucugaaaga

SEQ ID NO: 646014 - RNA, 19 nt, Homo sapiens
  misc_RNA (1)...(19): siRNA sense strand
ggaguguggauguauuguu

SEQ ID NO: 646015 - RNA, 19 nt, Homo sapiens
  misc_RNA (1)...(19): siRNA sense strand
cccaguguuugguuuauau

SEQ ID NO: 646016 - RNA, 19 nt, Homo sapiens
  misc_RNA (1)...(19): siRNA sense strand
gagucuccaugcuuguuga

SEQ ID NO: 646017 - RNA, 19 nt, Homo sapiens
  misc_RNA (1)...(19): siRNA sense strand
acauauggauuagaaguag

SEQ ID NO: 646018 - RNA, 19 nt, Homo sapiens
  misc_RNA (1)...(19): siRNA sense strand
uguucuuccuguagauuua

SEQ ID NO: 646019 - RNA, 19 nt, Homo sapiens
  misc_RNA (1)...(19): siRNA sense strand
ugcagaaucucaccacaca

SEQ ID NO: 646020 - RNA, 19 nt, Homo sapiens
  misc_RNA (1)...(19): siRNA sense strand
cuugacauccuuaauauca

SEQ ID NO: 646021 - RNA, 19 nt, Homo sapiens
  misc_RNA (1)...(19): siRNA sense strand
ggaaaccuagacucagaga

SEQ ID NO: 646022 - RNA, 19 nt, Homo sapiens
  misc_RNA (1)...(19): siRNA sense strand
gauguauuguuagcccauu

SEQ ID NO: 646023 - RNA, 19 nt, Homo sapiens
  misc_RNA (1)...(19): siRNA sense strand
ggaauaugggucaguacau

SEQ ID NO: 646024 - RNA, 19 nt, Homo sapiens
  misc_RNA (1)...(19): siRNA sense strand
gcucaaggaucugccaaaa

SEQ ID NO: 646025 - RNA, 19 nt, Homo sapiens
  misc_RNA (1)...(19): siRNA sense strand
uagaaguaguuggucauau

SEQ ID NO: 646026 - RNA, 19 nt, Homo sapiens
  misc_RNA (1)...(19): siRNA sense strand
gcaaugacaacuucuauua

SEQ ID NO: 646027 - RNA, 19 nt, Homo sapiens
  misc_RNA (1)...(19): siRNA sense strand
gaagauggaagcauaguua

SEQ ID NO: 646028 - RNA, 19 nt, Homo sapiens
  misc_RNA (1)...(19): siRNA sense strand
ggacguggguucacuguuu

SEQ ID NO: 646029 - RNA, 19 nt, Homo sapiens
  misc_RNA (1)...(19): siRNA sense strand
guacauagaccacgucaua

SEQ ID NO: 646030 - RNA, 19 nt, Homo sapiens
  misc_RNA (1)...(19): siRNA sense strand
gcacauggacgacuuguuu

SEQ ID NO: 646031 - RNA, 19 nt, Homo sapiens
  misc_RNA (1)...(19): siRNA sense strand
gaagcaagcuaccgcuauu

SEQ ID NO: 646032 - RNA, 19 nt, Homo sapiens
  misc_RNA (1)...(19): siRNA sense strand
ggaagaaagugauccugaa

SEQ ID NO: 646033 - RNA, 19 nt, Homo sapiens
  misc_RNA (1)...(19): siRNA sense strand
gaauaucgguccagcaaau

SEQ ID NO: 646034 - RNA, 19 nt, Homo sapiens
  misc_RNA (1)...(19): siRNA sense strand
gcaagaggcauuugauaaa

SEQ ID NO: 646035 - RNA, 19 nt, Homo sapiens
  misc_RNA (1)...(19): siRNA sense strand
cagcaucaaucacuuguuu

SEQ ID NO: 646036 - RNA, 19 nt, Homo sapiens
  misc_RNA (1)...(19): siRNA sense strand
gaacagccauugaucugau

SEQ ID NO: 646037 - RNA, 19 nt, Homo sapiens
  misc_RNA (1)...(19): siRNA sense strand
gauaacagcaguugagauu

SEQ ID NO: 646038 - RNA, 19 nt, Homo sapiens
  misc_RNA (1)...(19): siRNA sense strand
gaaggcaguugaaaauuua

SEQ ID NO: 646039 - RNA, 19 nt, Homo sapiens
  misc_RNA (1)...(19): siRNA sense strand
cugaaggucuggauuguua

SEQ ID NO: 646040 - RNA, 19 nt, Homo sapiens
  misc_RNA (1)...(19): siRNA sense strand
cagauaaagucaucauuug

SEQ ID NO: 646041 - RNA, 19 nt, Homo sapiens
  misc_RNA (1)...(19): siRNA sense strand
ucuggaagguugaauauuu

SEQ ID NO: 646042 - RNA, 19 nt, Homo sapiens
  misc_RNA (1)...(19): siRNA sense strand
ggaagagcaugaccuuguu

SEQ ID NO: 646043 - RNA, 19 nt, Homo sapiens
  misc_RNA (1)...(19): siRNA sense strand
gcaauaaagacaaaccuaa

SEQ ID NO: 646044 - RNA, 19 nt, Homo sapiens
  misc_RNA (1)...(19): siRNA sense strand
gcagauguauugaauuuac

SEQ ID NO: 646045 - RNA, 19 nt, Homo sapiens
  misc_RNA (1)...(19): siRNA sense strand
cuugaaggaucuuuaguua

SEQ ID NO: 646046 - RNA, 19 nt, Homo sapiens
  misc_RNA (1)...(19): siRNA sense strand
uacaaacccuugcaacuaa

SEQ ID NO: 646047 - RNA, 19 nt, Homo sapiens
  misc_RNA (1)...(19): siRNA sense strand
uggcagauguauugaauuu

SEQ ID NO: 646048 - RNA, 19 nt, Homo sapiens
  misc_RNA (1)...(19): siRNA sense strand
guaaugaaccucuuaaagu

SEQ ID NO: 646049 - RNA, 19 nt, Homo sapiens
  misc_RNA (1)...(19): siRNA sense strand
gcagagaauauuuccauaa

SEQ ID NO: 646050 - RNA, 19 nt, Homo sapiens
  misc_RNA (1)...(19): siRNA sense strand
gacuuugucucaucagaua

SEQ ID NO: 646051 - RNA, 19 nt, Homo sapiens
  misc_RNA (1)...(19): siRNA sense strand
ggaaggcaguugaaaauuu

SEQ ID NO: 646052 - RNA, 19 nt, Homo sapiens
  misc_RNA (1)...(19): siRNA sense strand
gaaacaacuugccaacauc

SEQ ID NO: 646053 - RNA, 19 nt, Homo sapiens
  misc_RNA (1)...(19): siRNA sense strand
gcaaggcacugacguuucu

SEQ ID NO: 646054 - RNA, 19 nt, Homo sapiens
  misc_RNA (1)...(19): siRNA sense strand
ccucgaagcucuagccaaa

SEQ ID NO: 646055 - RNA, 19 nt, Homo sapiens
  misc_RNA (1)...(19): siRNA sense strand
agaaagugauccugaauau

SEQ ID NO: 646056 - RNA, 19 nt, Homo sapiens
  misc_RNA (1)...(19): siRNA sense strand
gaagaagggcuggcaauga

SEQ ID NO: 646057 - RNA, 19 nt, Homo sapiens
  misc_RNA (1)...(19): siRNA sense strand
gcacuguuguuuggucaua

SEQ ID NO: 646058 - RNA, 19 nt, Homo sapiens
  misc_RNA (1)...(19): siRNA sense strand
ccaaagagguacacagaca

SEQ ID NO: 646059 - RNA, 19 nt, Homo sapiens
  misc_RNA (1)...(19): siRNA sense strand
ucuaaacgcuugugaugaa

SEQ ID NO: 646060 - RNA, 19 nt, Homo sapiens
  misc_RNA (1)...(19): siRNA sense strand
gcaggauacugagccaaua

SEQ ID NO: 646061 - RNA, 19 nt, Homo sapiens
  misc_RNA (1)...(19): siRNA sense strand
gauggcagauguauugaau

SEQ ID NO: 646062 - RNA, 19 nt, Homo sapiens
  misc_RNA (1)...(19): siRNA sense strand
ugaaagaaacgaucaaaga

SEQ ID NO: 646063 - RNA, 19 nt, Homo sapiens
  misc_RNA (1)...(19): siRNA sense strand
gcaguucucuuccaacaag

SEQ ID NO: 646064 - RNA, 19 nt, Homo sapiens
  misc_RNA (1)...(19): siRNA sense strand
ggaggaauccaaaccaauu

SEQ ID NO: 646065 - RNA, 19 nt, Homo sapiens
  misc_RNA (1)...(19): siRNA sense strand
uaccagccuugaaguauua

SEQ ID NO: 646066 - RNA, 19 nt, Homo sapiens
  misc_RNA (1)...(19): siRNA sense strand
gcauacaguucuaccaguu

SEQ ID NO: 646067 - RNA, 19 nt, Homo sapiens
  misc_RNA (1)...(19): siRNA sense strand
ugaaacauaucuucugugu

SEQ ID NO: 646068 - RNA, 19 nt, Homo sapiens
  misc_RNA (1)...(19): siRNA sense strand
ugaaugaaguacuggauga

SEQ ID NO: 646069 - RNA, 19 nt, Homo sapiens
  misc_RNA (1)...(19): siRNA sense strand
gaaaaugggcaaaguuaua

SEQ ID NO: 646070 - RNA, 19 nt, Homo sapiens
  misc_RNA (1)...(19): siRNA sense strand
ugccugggcuccuuacuua

SEQ ID NO: 646071 - RNA, 19 nt, Homo sapiens
  misc_RNA (1)...(19): siRNA sense strand
gaaaagcgcccacacauug

SEQ ID NO: 646072 - RNA, 19 nt, Homo sapiens
  misc_RNA (1)...(19): siRNA sense strand
gggcaaaguuauauuuaca

SEQ ID NO: 646073 - RNA, 19 nt, Homo sapiens
  misc_RNA (1)...(19): siRNA sense strand
gauggaagcauaguuauug

SEQ ID NO: 646074 - RNA, 19 nt, Homo sapiens
  misc_RNA (1)...(19): siRNA sense strand
aagaaacgaucaaagagaa

SEQ ID NO: 646075 - RNA, 19 nt, Homo sapiens
  misc_RNA (1)...(19): siRNA sense strand
gaaagaaacgaucaaagag

SEQ ID NO: 646076 - RNA, 19 nt, Homo sapiens
  misc_RNA (1)...(19): siRNA sense strand
gaacacaugcucagaagag

SEQ ID NO: 646077 - RNA, 19 nt, Homo sapiens
  misc_RNA (1)...(19): siRNA sense strand
ucaagugucccacaaauga

SEQ ID NO: 646078 - RNA, 19 nt, Homo sapiens
  misc_RNA (1)...(19): siRNA sense strand
uaacagacccggacauaca

SEQ ID NO: 646079 - RNA, 19 nt, Homo sapiens
  misc_RNA (1)...(19): siRNA sense strand
ccugaugguucaagcaaua

SEQ ID NO: 646080 - RNA, 19 nt, Homo sapiens
  misc_RNA (1)...(19): siRNA sense strand
uaacagcaguugagauucu

SEQ ID NO: 646081 - RNA, 19 nt, Homo sapiens
  misc_RNA (1)...(19): siRNA sense strand
ccacggacauuacccugaa

SEQ ID NO: 646082 - RNA, 19 nt, Homo sapiens
  misc_RNA (1)...(19): siRNA sense strand
agaaacaacuugccaacau

SEQ ID NO: 646083 - RNA, 19 nt, Homo sapiens
  misc_RNA (1)...(19): siRNA sense strand
agacacagcugauaaacag

SEQ ID NO: 646084 - RNA, 19 nt, Homo sapiens
  misc_RNA (1)...(19): siRNA sense strand
aaacuguagugcaagagua

SEQ ID NO: 646085 - RNA, 19 nt, Homo sapiens
  misc_RNA (1)...(19): siRNA sense strand
gagguuauggacaucauua

SEQ ID NO: 646086 - RNA, 19 nt, Homo sapiens
  misc_RNA (1)...(19): siRNA sense strand
caccauagccaaagaggua

SEQ ID NO: 646087 - RNA, 19 nt, Homo sapiens
  misc_RNA (1)...(19): siRNA sense strand
caagcuaccgcuauuguuu

SEQ ID NO: 646088 - RNA, 19 nt, Homo sapiens
  misc_RNA (1)...(19): siRNA sense strand
gaggaggaauccaaaccaa

SEQ ID NO: 646089 - RNA, 19 nt, Homo sapiens
  misc_RNA (1)...(19): siRNA sense strand
ucgaagcucuagccaaauu

SEQ ID NO: 646090 - RNA, 19 nt, Homo sapiens
  misc_RNA (1)...(19): siRNA sense strand
aauugaaccuccuaaacua

SEQ ID NO: 646091 - RNA, 19 nt, Homo sapiens
  misc_RNA (1)...(19): siRNA sense strand
gaaauugaaccuccuaaac

SEQ ID NO: 646092 - RNA, 19 nt, Homo sapiens
  misc_RNA (1)...(19): siRNA sense strand
ccuccaacuuccaguaaua

SEQ ID NO: 646093 - RNA, 19 nt, Homo sapiens
  misc_RNA (1)...(19): siRNA sense strand
caucuccugucuaucauuu

SEQ ID NO: 646094 - RNA, 19 nt, Homo sapiens
  misc_RNA (1)...(19): siRNA sense strand
gaacaccuccuugaugaug

SEQ ID NO: 646095 - RNA, 19 nt, Homo sapiens
  misc_RNA (1)...(19): siRNA sense strand
ucaaagagaacaucaagga

SEQ ID NO: 646096 - RNA, 19 nt, Homo sapiens
  misc_RNA (1)...(19): siRNA sense strand
guacauaccagcacaugga

SEQ ID NO: 646097 - RNA, 19 nt, Homo sapiens
  misc_RNA (1)...(19): siRNA sense strand
gauaaagucaucauuugga

SEQ ID NO: 646098 - RNA, 19 nt, Homo sapiens
  misc_RNA (1)...(19): siRNA sense strand
ucaaagauaucaccagacu

SEQ ID NO: 646099 - RNA, 19 nt, Homo sapiens
  misc_RNA (1)...(19): siRNA sense strand
ggacacaagggaccaauca

SEQ ID NO: 646100 - RNA, 19 nt, Homo sapiens
  misc_RNA (1)...(19): siRNA sense strand
ucucugggaucuuucagua

SEQ ID NO: 646101 - RNA, 19 nt, Homo sapiens
  misc_RNA (1)...(19): siRNA sense strand
gaaagacggaagcaagcua

SEQ ID NO: 646102 - RNA, 19 nt, Homo sapiens
  misc_RNA (1)...(19): siRNA sense strand
cugcaaagcuguuuauguc

SEQ ID NO: 646103 - RNA, 19 nt, Homo sapiens
  misc_RNA (1)...(19): siRNA sense strand
gaagaaagugauccugaau

SEQ ID NO: 646104 - RNA, 19 nt, Homo sapiens
  misc_RNA (1)...(19): siRNA sense strand
cuacaaacccuugcaacua

SEQ ID NO: 646105 - RNA, 19 nt, Homo sapiens
  misc_RNA (1)...(19): siRNA sense strand
gauguggaagcguugauua

SEQ ID NO: 646106 - RNA, 19 nt, Homo sapiens
  misc_RNA (1)...(19): siRNA sense strand
gagagucauugaaauucuu

SEQ ID NO: 646107 - RNA, 19 nt, Homo sapiens
  misc_RNA (1)...(19): siRNA sense strand
acacagcacuauccgaaga

SEQ ID NO: 646108 - RNA, 19 nt, Homo sapiens
  misc_RNA (1)...(19): siRNA sense strand
auaaucagccugcuuguaa

SEQ ID NO: 646109 - RNA, 19 nt, Homo sapiens
  misc_RNA (1)...(19): siRNA sense strand
ggaugaaguuugccuggau

SEQ ID NO: 646110 - RNA, 19 nt, Homo sapiens
  misc_RNA (1)...(19): siRNA sense strand
uaagugacaugcaggauac

SEQ ID NO: 646111 - RNA, 19 nt, Homo sapiens
  misc_RNA (1)...(19): siRNA sense strand
aauaggagcugaauuuggu

SEQ ID NO: 646112 - RNA, 19 nt, Homo sapiens
  misc_RNA (1)...(19): siRNA sense strand
aguaauaggagcugaauuu

SEQ ID NO: 646113 - RNA, 19 nt, Homo sapiens
  misc_RNA (1)...(19): siRNA sense strand
aaacagaaguaggaaggaa

SEQ ID NO: 646114 - RNA, 19 nt, Homo sapiens
  misc_RNA (1)...(19): siRNA sense strand
ccacugcaccguaucguuu

SEQ ID NO: 646115 - RNA, 19 nt, Homo sapiens
  misc_RNA (1)...(19): siRNA sense strand
ggucauacagcaucaauca

SEQ ID NO: 646116 - RNA, 19 nt, Homo sapiens
  misc_RNA (1)...(19): siRNA sense strand
gcuauucuuugauguggaa

SEQ ID NO: 646117 - RNA, 19 nt, Homo sapiens
  misc_RNA (1)...(19): siRNA sense strand
ugagcggaaucacagaaua

SEQ ID NO: 646118 - RNA, 19 nt, Homo sapiens
  misc_RNA (1)...(19): siRNA sense strand
gaagaacagccauugaucu

SEQ ID NO: 646119 - RNA, 19 nt, Homo sapiens
  misc_RNA (1)...(19): siRNA sense strand
cagcaucuccugucuauca

SEQ ID NO: 646120 - RNA, 19 nt, Homo sapiens
  misc_RNA (1)...(19): siRNA sense strand
guggaagcguugauuauuc

SEQ ID NO: 646121 - RNA, 19 nt, Homo sapiens
  misc_RNA (1)...(19): siRNA sense strand
aaauuagcuugcacacaua

SEQ ID NO: 646122 - RNA, 19 nt, Homo sapiens
  misc_RNA (1)...(19): siRNA sense strand
gcaaggacagauuaaacaa

SEQ ID NO: 646123 - RNA, 19 nt, Homo sapiens
  misc_RNA (1)...(19): siRNA sense strand
gcagagaagggaagaaagu

SEQ ID NO: 646124 - RNA, 19 nt, Homo sapiens
  misc_RNA (1)...(19): siRNA sense strand
gaagguugaauauuuggaa

SEQ ID NO: 646125 - RNA, 19 nt, Homo sapiens
  misc_RNA (1)...(19): siRNA sense strand
gguuguguguuccaaauau

SEQ ID NO: 646126 - RNA, 19 nt, Homo sapiens
  misc_RNA (1)...(19): siRNA sense strand
gcaaugacaacuucuauua

SEQ ID NO: 646127 - RNA, 19 nt, Homo sapiens
  misc_RNA (1)...(19): siRNA sense strand
gaagauggaagcauaguua

SEQ ID NO: 646128 - RNA, 19 nt, Homo sapiens
  misc_RNA (1)...(19): siRNA sense strand
ggacguggguucacuguuu

SEQ ID NO: 646129 - RNA, 19 nt, Homo sapiens
  misc_RNA (1)...(19): siRNA sense strand
guacauagaccacgucaua

SEQ ID NO: 646130 - RNA, 19 nt, Homo sapiens
  misc_RNA (1)...(19): siRNA sense strand
gcacauggacgacuuguuu

SEQ ID NO: 646131 - RNA, 19 nt, Homo sapiens
  misc_RNA (1)...(19): siRNA sense strand
gaagcaagcuaccgcuauu

SEQ ID NO: 646132 - RNA, 19 nt, Homo sapiens
  misc_RNA (1)...(19): siRNA sense strand
ggaagaaagugauccugaa

SEQ ID NO: 646133 - RNA, 19 nt, Homo sapiens
  misc_RNA (1)...(19): siRNA sense strand
gaauaucgguccagcaaau

SEQ ID NO: 646134 - RNA, 19 nt, Homo sapiens
  misc_RNA (1)...(19): siRNA sense strand
gcaagaggcauuugauaaa

SEQ ID NO: 646135 - RNA, 19 nt, Homo sapiens
  misc_RNA (1)...(19): siRNA sense strand
cagcaucaaucacuuguuu

SEQ ID NO: 646136 - RNA, 19 nt, Homo sapiens
  misc_RNA (1)...(19): siRNA sense strand
gaacagccauugaucugau

SEQ ID NO: 646137 - RNA, 19 nt, Homo sapiens
  misc_RNA (1)...(19): siRNA sense strand
gauaacagcaguugagauu

SEQ ID NO: 646138 - RNA, 19 nt, Homo sapiens
  misc_RNA (1)...(19): siRNA sense strand
gaaggcaguugaaaauuua

SEQ ID NO: 646139 - RNA, 19 nt, Homo sapiens
  misc_RNA (1)...(19): siRNA sense strand
cugaaggucuggauuguua

SEQ ID NO: 646140 - RNA, 19 nt, Homo sapiens
  misc_RNA (1)...(19): siRNA sense strand
cagauaaagucaucauuug

SEQ ID NO: 646141 - RNA, 19 nt, Homo sapiens
  misc_RNA (1)...(19): siRNA sense strand
ucuggaagguugaauauuu

SEQ ID NO: 646142 - RNA, 19 nt, Homo sapiens
  misc_RNA (1)...(19): siRNA sense strand
ggaagagcaugaccuuguu

SEQ ID NO: 646143 - RNA, 19 nt, Homo sapiens
  misc_RNA (1)...(19): siRNA sense strand
gcaauaaagacaaaccuaa

SEQ ID NO: 646144 - RNA, 19 nt, Homo sapiens
  misc_RNA (1)...(19): siRNA sense strand
gcagauguauugaauuuac

SEQ ID NO: 646145 - RNA, 19 nt, Homo sapiens
  misc_RNA (1)...(19): siRNA sense strand
cuugaaggaucuuuaguua

SEQ ID NO: 646146 - RNA, 19 nt, Homo sapiens
  misc_RNA (1)...(19): siRNA sense strand
uacaaacccuugcaacuaa

SEQ ID NO: 646147 - RNA, 19 nt, Homo sapiens
  misc_RNA (1)...(19): siRNA sense strand
uggcagauguauugaauuu

SEQ ID NO: 646148 - RNA, 19 nt, Homo sapiens
  misc_RNA (1)...(19): siRNA sense strand
guaaugaaccucuuaaagu

SEQ ID NO: 646149 - RNA, 19 nt, Homo sapiens
  misc_RNA (1)...(19): siRNA sense strand
gcagagaauauuuccauaa

SEQ ID NO: 646150 - RNA, 19 nt, Homo sapiens
  misc_RNA (1)...(19): siRNA sense strand
gacuuugucucaucagaua

SEQ ID NO: 646151 - RNA, 19 nt, Homo sapiens
  misc_RNA (1)...(19): siRNA sense strand
ggaaggcaguugaaaauuu

SEQ ID NO: 646152 - RNA, 19 nt, Homo sapiens
  misc_RNA (1)...(19): siRNA sense strand
gaaacaacuugccaacauc

SEQ ID NO: 646153 - RNA, 19 nt, Homo sapiens
  misc_RNA (1)...(19): siRNA sense strand
gcaaggcacugacguuucu

SEQ ID NO: 646154 - RNA, 19 nt, Homo sapiens
  misc_RNA (1)...(19): siRNA sense strand
ccucgaagcucuagccaaa

SEQ ID NO: 646155 - RNA, 19 nt, Homo sapiens
  misc_RNA (1)...(19): siRNA sense strand
agaaagugauccugaauau

SEQ ID NO: 646156 - RNA, 19 nt, Homo sapiens
  misc_RNA (1)...(19): siRNA sense strand
gaagaagggcuggcaauga

SEQ ID NO: 646157 - RNA, 19 nt, Homo sapiens
  misc_RNA (1)...(19): siRNA sense strand
gcacuguuguuuggucaua

SEQ ID NO: 646158 - RNA, 19 nt, Homo sapiens
  misc_RNA (1)...(19): siRNA sense strand
ccaaagagguacacagaca

SEQ ID NO: 646159 - RNA, 19 nt, Homo sapiens
  misc_RNA (1)...(19): siRNA sense strand
ucuaaacgcuugugaugaa

SEQ ID NO: 646160 - RNA, 19 nt, Homo sapiens
  misc_RNA (1)...(19): siRNA sense strand
gcaggauacugagccaaua

SEQ ID NO: 646161 - RNA, 19 nt, Homo sapiens
  misc_RNA (1)...(19): siRNA sense strand
gauggcagauguauugaau

SEQ ID NO: 646162 - RNA, 19 nt, Homo sapiens
  misc_RNA (1)...(19): siRNA sense strand
ugaaagaaacgaucaaaga

SEQ ID NO: 646163 - RNA, 19 nt, Homo sapiens
  misc_RNA (1)...(19): siRNA sense strand
gcaguucucuuccaacaag

SEQ ID NO: 646164 - RNA, 19 nt, Homo sapiens
  misc_RNA (1)...(19): siRNA sense strand
ggaggaauccaaaccaauu

SEQ ID NO: 646165 - RNA, 19 nt, Homo sapiens
  misc_RNA (1)...(19): siRNA sense strand
uaccagccuugaaguauua

SEQ ID NO: 646166 - RNA, 19 nt, Homo sapiens
  misc_RNA (1)...(19): siRNA sense strand
gcauacaguucuaccaguu

SEQ ID NO: 646167 - RNA, 19 nt, Homo sapiens
  misc_RNA (1)...(19): siRNA sense strand
ugaaacauaucuucugugu

SEQ ID NO: 646168 - RNA, 19 nt, Homo sapiens
  misc_RNA (1)...(19): siRNA sense strand
ugaaugaaguacuggauga

SEQ ID NO: 646169 - RNA, 19 nt, Homo sapiens
  misc_RNA (1)...(19): siRNA sense strand
gaaaaugggcaaaguuaua

SEQ ID NO: 646170 - RNA, 19 nt, Homo sapiens
  misc_RNA (1)...(19): siRNA sense strand
ugccugggcuccuuacuua

SEQ ID NO: 646171 - RNA, 19 nt, Homo sapiens
  misc_RNA (1)...(19): siRNA sense strand
gaaaagcgcccacacauug

SEQ ID NO: 646172 - RNA, 19 nt, Homo sapiens
  misc_RNA (1)...(19): siRNA sense strand
gggcaaaguuauauuuaca

SEQ ID NO: 646173 - RNA, 19 nt, Homo sapiens
  misc_RNA (1)...(19): siRNA sense strand
gauggaagcauaguuauug

SEQ ID NO: 646174 - RNA, 19 nt, Homo sapiens
  misc_RNA (1)...(19): siRNA sense strand
aagaaacgaucaaagagaa

SEQ ID NO: 646175 - RNA, 19 nt, Homo sapiens
  misc_RNA (1)...(19): siRNA sense strand
gaaagaaacgaucaaagag

SEQ ID NO: 646176 - RNA, 19 nt, Homo sapiens
  misc_RNA (1)...(19): siRNA sense strand
gaacacaugcucagaagag

SEQ ID NO: 646177 - RNA, 19 nt, Homo sapiens
  misc_RNA (1)...(19): siRNA sense strand
ucaagugucccacaaauga

SEQ ID NO: 646178 - RNA, 19 nt, Homo sapiens
  misc_RNA (1)...(19): siRNA sense strand
uaacagacccggacauaca

SEQ ID NO: 646179 - RNA, 19 nt, Homo sapiens
  misc_RNA (1)...(19): siRNA sense strand
ccugaugguucaagcaaua

SEQ ID NO: 646180 - RNA, 19 nt, Homo sapiens
  misc_RNA (1)...(19): siRNA sense strand
uaacagcaguugagauucu

SEQ ID NO: 646181 - RNA, 19 nt, Homo sapiens
  misc_RNA (1)...(19): siRNA sense strand
ccacggacauuacccugaa

SEQ ID NO: 646182 - RNA, 19 nt, Homo sapiens
  misc_RNA (1)...(19): siRNA sense strand
agaaacaacuugccaacau

SEQ ID NO: 646183 - RNA, 19 nt, Homo sapiens
  misc_RNA (1)...(19): siRNA sense strand
agacacagcugauaaacag

SEQ ID NO: 646184 - RNA, 19 nt, Homo sapiens
  misc_RNA (1)...(19): siRNA sense strand
aaacuguagugcaagagua

SEQ ID NO: 646185 - RNA, 19 nt, Homo sapiens
  misc_RNA (1)...(19): siRNA sense strand
gagguuauggacaucauua

SEQ ID NO: 646186 - RNA, 19 nt, Homo sapiens
  misc_RNA (1)...(19): siRNA sense strand
caccauagccaaagaggua

SEQ ID NO: 646187 - RNA, 19 nt, Homo sapiens
  misc_RNA (1)...(19): siRNA sense strand
caagcuaccgcuauuguuu

SEQ ID NO: 646188 - RNA, 19 nt, Homo sapiens
  misc_RNA (1)...(19): siRNA sense strand
gaggaggaauccaaaccaa

SEQ ID NO: 646189 - RNA, 19 nt, Homo sapiens
  misc_RNA (1)...(19): siRNA sense strand
ucgaagcucuagccaaauu

SEQ ID NO: 646190 - RNA, 19 nt, Homo sapiens
  misc_RNA (1)...(19): siRNA sense strand
aauugaaccuccuaaacua

SEQ ID NO: 646191 - RNA, 19 nt, Homo sapiens
  misc_RNA (1)...(19): siRNA sense strand
gaaauugaaccuccuaaac

SEQ ID NO: 646192 - RNA, 19 nt, Homo sapiens
  misc_RNA (1)...(19): siRNA sense strand
ccuccaacuuccaguaaua

SEQ ID NO: 646193 - RNA, 19 nt, Homo sapiens
  misc_RNA (1)...(19): siRNA sense strand
caucuccugucuaucauuu

SEQ ID NO: 646194 - RNA, 19 nt, Homo sapiens
  misc_RNA (1)...(19): siRNA sense strand
gaacaccuccuugaugaug

SEQ ID NO: 646195 - RNA, 19 nt, Homo sapiens
  misc_RNA (1)...(19): siRNA sense strand
ucaaagagaacaucaagga

SEQ ID NO: 646196 - RNA, 19 nt, Homo sapiens
  misc_RNA (1)...(19): siRNA sense strand
guacauaccagcacaugga

SEQ ID NO: 646197 - RNA, 19 nt, Homo sapiens
  misc_RNA (1)...(19): siRNA sense strand
gauaaagucaucauuugga

SEQ ID NO: 646198 - RNA, 19 nt, Homo sapiens
  misc_RNA (1)...(19): siRNA sense strand
ucaaagauaucaccagacu

SEQ ID NO: 646199 - RNA, 19 nt, Homo sapiens
  misc_RNA (1)...(19): siRNA sense strand
ggacacaagggaccaauca

SEQ ID NO: 646200 - RNA, 19 nt, Homo sapiens
  misc_RNA (1)...(19): siRNA sense strand
ucucugggaucuuucagua

SEQ ID NO: 646201 - RNA, 19 nt, Homo sapiens
  misc_RNA (1)...(19): siRNA sense strand
gaaagacggaagcaagcua

SEQ ID NO: 646202 - RNA, 19 nt, Homo sapiens
  misc_RNA (1)...(19): siRNA sense strand
cugcaaagcuguuuauguc

SEQ ID NO: 646203 - RNA, 19 nt, Homo sapiens
  misc_RNA (1)...(19): siRNA sense strand
gaagaaagugauccugaau

SEQ ID NO: 646204 - RNA, 19 nt, Homo sapiens
  misc_RNA (1)...(19): siRNA sense strand
cuacaaacccuugcaacua

SEQ ID NO: 646205 - RNA, 19 nt, Homo sapiens
  misc_RNA (1)...(19): siRNA sense strand
gauguggaagcguugauua

SEQ ID NO: 646206 - RNA, 19 nt, Homo sapiens
  misc_RNA (1)...(19): siRNA sense strand
gagagucauugaaauucuu

SEQ ID NO: 646207 - RNA, 19 nt, Homo sapiens
  misc_RNA (1)...(19): siRNA sense strand
acacagcacuauccgaaga

SEQ ID NO: 646208 - RNA, 19 nt, Homo sapiens
  misc_RNA (1)...(19): siRNA sense strand
auaaucagccugcuuguaa

SEQ ID NO: 646209 - RNA, 19 nt, Homo sapiens
  misc_RNA (1)...(19): siRNA sense strand
ggaugaaguuugccuggau

SEQ ID NO: 646210 - RNA, 19 nt, Homo sapiens
  misc_RNA (1)...(19): siRNA sense strand
uaagugacaugcaggauac

SEQ ID NO: 646211 - RNA, 19 nt, Homo sapiens
  misc_RNA (1)...(19): siRNA sense strand
aauaggagcugaauuuggu

SEQ ID NO: 646212 - RNA, 19 nt, Homo sapiens
  misc_RNA (1)...(19): siRNA sense strand
aguaauaggagcugaauuu

SEQ ID NO: 646213 - RNA, 19 nt, Homo sapiens
  misc_RNA (1)...(19): siRNA sense strand
aaacagaaguaggaaggaa

SEQ ID NO: 646214 - RNA, 19 nt, Homo sapiens
  misc_RNA (1)...(19): siRNA sense strand
ccacugcaccguaucguuu

SEQ ID NO: 646215 - RNA, 19 nt, Homo sapiens
  misc_RNA (1)...(19): siRNA sense strand
ggucauacagcaucaauca

SEQ ID NO: 646216 - RNA, 19 nt, Homo sapiens
  misc_RNA (1)...(19): siRNA sense strand
gcuauucuuugauguggaa

SEQ ID NO: 646217 - RNA, 19 nt, Homo sapiens
  misc_RNA (1)...(19): siRNA sense strand
ugagcggaaucacagaaua

SEQ ID NO: 646218 - RNA, 19 nt, Homo sapiens
  misc_RNA (1)...(19): siRNA sense strand
gaagaacagccauugaucu

SEQ ID NO: 646219 - RNA, 19 nt, Homo sapiens
  misc_RNA (1)...(19): siRNA sense strand
cagcaucuccugucuauca

SEQ ID NO: 646220 - RNA, 19 nt, Homo sapiens
  misc_RNA (1)...(19): siRNA sense strand
guggaagcguugauuauuc

SEQ ID NO: 646221 - RNA, 19 nt, Homo sapiens
  misc_RNA (1)...(19): siRNA sense strand
aaauuagcuugcacacaua

SEQ ID NO: 646222 - RNA, 19 nt, Homo sapiens
  misc_RNA (1)...(19): siRNA sense strand
gcaaggacagauuaaacaa

SEQ ID NO: 646223 - RNA, 19 nt, Homo sapiens
  misc_RNA (1)...(19): siRNA sense strand
gcagagaagggaagaaagu

SEQ ID NO: 646224 - RNA, 19 nt, Homo sapiens
  misc_RNA (1)...(19): siRNA sense strand
gaagguugaauauuuggaa

SEQ ID NO: 646225 - RNA, 19 nt, Homo sapiens
  misc_RNA (1)...(19): siRNA sense strand
gguuguguguuccaaauau

SEQ ID NO: 646226 - RNA, 19 nt, Homo sapiens
  misc_RNA (1)...(19): siRNA sense strand
gaaagaagaugaaaucaga

SEQ ID NO: 646227 - RNA, 19 nt, Homo sapiens
  misc_RNA (1)...(19): siRNA sense strand
gcagagaaguuaaaugaaa

SEQ ID NO: 646228 - RNA, 19 nt, Homo sapiens
  misc_RNA (1)...(19): siRNA sense strand
gcaaauagccaaagccaua

SEQ ID NO: 646229 - RNA, 19 nt, Homo sapiens
  misc_RNA (1)...(19): siRNA sense strand
gcacucagaugaaaugauu

SEQ ID NO: 646230 - RNA, 19 nt, Homo sapiens
  misc_RNA (1)...(19): siRNA sense strand
ggaaacagcuccuuggaau

SEQ ID NO: 646231 - RNA, 19 nt, Homo sapiens
  misc_RNA (1)...(19): siRNA sense strand
gaucaacgcugugaaguga

SEQ ID NO: 646232 - RNA, 19 nt, Homo sapiens
  misc_RNA (1)...(19): siRNA sense strand
cgagugaauuugaaaguua

SEQ ID NO: 646233 - RNA, 19 nt, Homo sapiens
  misc_RNA (1)...(19): siRNA sense strand
ggacaacuguaucaagauu

SEQ ID NO: 646234 - RNA, 19 nt, Homo sapiens
  misc_RNA (1)...(19): siRNA sense strand
gaagaggcauggucuccua

SEQ ID NO: 646235 - RNA, 19 nt, Homo sapiens
  misc_RNA (1)...(19): siRNA sense strand
gaagaaagaagaugaaauc

SEQ ID NO: 646236 - RNA, 19 nt, Homo sapiens
  misc_RNA (1)...(19): siRNA sense strand
ggucaagucuucaucauca

SEQ ID NO: 646237 - RNA, 19 nt, Homo sapiens
  misc_RNA (1)...(19): siRNA sense strand
ucacucagcugauaggaaa

SEQ ID NO: 646238 - RNA, 19 nt, Homo sapiens
  misc_RNA (1)...(19): siRNA sense strand
gaacuuaaaccagucagua

SEQ ID NO: 646239 - RNA, 19 nt, Homo sapiens
  misc_RNA (1)...(19): siRNA sense strand
ugacagagcucgaaacacu

SEQ ID NO: 646240 - RNA, 19 nt, Homo sapiens
  misc_RNA (1)...(19): siRNA sense strand
gcaacuuucucaugaccua

SEQ ID NO: 646241 - RNA, 19 nt, Homo sapiens
  misc_RNA (1)...(19): siRNA sense strand
uaaaggagcacuaugagaa

SEQ ID NO: 646242 - RNA, 19 nt, Homo sapiens
  misc_RNA (1)...(19): siRNA sense strand
ucacagaucuucucuugag

SEQ ID NO: 646243 - RNA, 19 nt, Homo sapiens
  misc_RNA (1)...(19): siRNA sense strand
gaaccuuaccuaaauaaug

SEQ ID NO: 646244 - RNA, 19 nt, Homo sapiens
  misc_RNA (1)...(19): siRNA sense strand
gcagaagcaugaacugaag

SEQ ID NO: 646245 - RNA, 19 nt, Homo sapiens
  misc_RNA (1)...(19): siRNA sense strand
gaaacagcuccuuggaaua

SEQ ID NO: 646246 - RNA, 19 nt, Homo sapiens
  misc_RNA (1)...(19): siRNA sense strand
cagcaggaguucaagauug

SEQ ID NO: 646247 - RNA, 19 nt, Homo sapiens
  misc_RNA (1)...(19): siRNA sense strand
caggacaacuguaucaaga

SEQ ID NO: 646248 - RNA, 19 nt, Homo sapiens
  misc_RNA (1)...(19): siRNA sense strand
uagcagagaaguuaaauga

SEQ ID NO: 646249 - RNA, 19 nt, Homo sapiens
  misc_RNA (1)...(19): siRNA sense strand
gaaaagaacuacguagaug

SEQ ID NO: 646250 - RNA, 19 nt, Homo sapiens
  misc_RNA (1)...(19): siRNA sense strand
ggauggaguucgagugaau

SEQ ID NO: 646251 - RNA, 19 nt, Homo sapiens
  misc_RNA (1)...(19): siRNA sense strand
ccacggcucugcacgagaa

SEQ ID NO: 646252 - RNA, 19 nt, Homo sapiens
  misc_RNA (1)...(19): siRNA sense strand
aaagauaccugaacaagcu

SEQ ID NO: 646253 - RNA, 19 nt, Homo sapiens
  misc_RNA (1)...(19): siRNA sense strand
ggaaguugcacccaucaaa

SEQ ID NO: 646254 - RNA, 19 nt, Homo sapiens
  misc_RNA (1)...(19): siRNA sense strand
ggagcugguucaucucuga

SEQ ID NO: 646255 - RNA, 19 nt, Homo sapiens
  misc_RNA (1)...(19): siRNA sense strand
ggaagccgauaccucauuc

SEQ ID NO: 646256 - RNA, 19 nt, Homo sapiens
  misc_RNA (1)...(19): siRNA sense strand
gaagucuacucaugaugga

SEQ ID NO: 646257 - RNA, 19 nt, Homo sapiens
  misc_RNA (1)...(19): siRNA sense strand
cuacguagaugcucuuaag

SEQ ID NO: 646258 - RNA, 19 nt, Homo sapiens
  misc_RNA (1)...(19): siRNA sense strand
gaauacggauggaguucga

SEQ ID NO: 646259 - RNA, 19 nt, Homo sapiens
  misc_RNA (1)...(19): siRNA sense strand
ggaguucgagugaauuuga

SEQ ID NO: 646260 - RNA, 19 nt, Homo sapiens
  misc_RNA (1)...(19): siRNA sense strand
gauugaaugugcugcuuau

SEQ ID NO: 646261 - RNA, 19 nt, Homo sapiens
  misc_RNA (1)...(19): siRNA sense strand
gcagcagguuguaagaaga

SEQ ID NO: 646262 - RNA, 19 nt, Homo sapiens
  misc_RNA (1)...(19): siRNA sense strand
gcugugaagugaagcaaau

SEQ ID NO: 646263 - RNA, 19 nt, Homo sapiens
  misc_RNA (1)...(19): siRNA sense strand
ccauggugcuggaugcaua

SEQ ID NO: 646264 - RNA, 19 nt, Homo sapiens
  misc_RNA (1)...(19): siRNA sense strand
gacaucagguuuacaaagg

SEQ ID NO: 646265 - RNA, 19 nt, Homo sapiens
  misc_RNA (1)...(19): siRNA sense strand
cuuauaacccugaaccuua

SEQ ID NO: 646266 - RNA, 19 nt, Homo sapiens
  misc_RNA (1)...(19): siRNA sense strand
aggaaacuaucagaacuua

SEQ ID NO: 646267 - RNA, 19 nt, Homo sapiens
  misc_RNA (1)...(19): siRNA sense strand
ugacuggacaucagguuua

SEQ ID NO: 646268 - RNA, 19 nt, Homo sapiens
  misc_RNA (1)...(19): siRNA sense strand
cagaauuuguucauugaug

SEQ ID NO: 646269 - RNA, 19 nt, Homo sapiens
  misc_RNA (1)...(19): siRNA sense strand
cgugagagcuucugauguc

SEQ ID NO: 646270 - RNA, 19 nt, Homo sapiens
  misc_RNA (1)...(19): siRNA sense strand
gccaucgucucguuucaaa

SEQ ID NO: 646271 - RNA, 19 nt, Homo sapiens
  misc_RNA (1)...(19): siRNA sense strand
gaaguugcacccaucaaau

SEQ ID NO: 646272 - RNA, 19 nt, Homo sapiens
  misc_RNA (1)...(19): siRNA sense strand
ggacuccguggaaaugaua

SEQ ID NO: 646273 - RNA, 19 nt, Homo sapiens
  misc_RNA (1)...(19): siRNA sense strand
ugucugagauggagccaaa

SEQ ID NO: 646274 - RNA, 19 nt, Homo sapiens
  misc_RNA (1)...(19): siRNA sense strand
agccaaagguucugaguga

SEQ ID NO: 646275 - RNA, 19 nt, Homo sapiens
  misc_RNA (1)...(19): siRNA sense strand
ggacagcaccaucuaugau

SEQ ID NO: 646276 - RNA, 19 nt, Homo sapiens
  misc_RNA (1)...(19): siRNA sense strand
cgaugggaaucacauuaaa

SEQ ID NO: 646277 - RNA, 19 nt, Homo sapiens
  misc_RNA (1)...(19): siRNA sense strand
cagcugauaggaaaccuua

SEQ ID NO: 646278 - RNA, 19 nt, Homo sapiens
  misc_RNA (1)...(19): siRNA sense strand
gacagaggagagauuguua

SEQ ID NO: 646279 - RNA, 19 nt, Homo sapiens
  misc_RNA (1)...(19): siRNA sense strand
gacgaugggaaucacauua

SEQ ID NO: 646280 - RNA, 19 nt, Homo sapiens
  misc_RNA (1)...(19): siRNA sense strand
cagaugauaugauagaaac

SEQ ID NO: 646281 - RNA, 19 nt, Homo sapiens
  misc_RNA (1)...(19): siRNA sense strand
ccaaagucauugagugcuu

SEQ ID NO: 646282 - RNA, 19 nt, Homo sapiens
  misc_RNA (1)...(19): siRNA sense strand
ccugaaccuuaccuaaaua

SEQ ID NO: 646283 - RNA, 19 nt, Homo sapiens
  misc_RNA (1)...(19): siRNA sense strand
uuacagcuguguucaauac

SEQ ID NO: 646284 - RNA, 19 nt, Homo sapiens
  misc_RNA (1)...(19): siRNA sense strand
aaacuuguugcaugacuua

SEQ ID NO: 646285 - RNA, 19 nt, Homo sapiens
  misc_RNA (1)...(19): siRNA sense strand
ccaaagccauaaacgaaag

SEQ ID NO: 646286 - RNA, 19 nt, Homo sapiens
  misc_RNA (1)...(19): siRNA sense strand
caucaaaugggucagauug

SEQ ID NO: 646287 - RNA, 19 nt, Homo sapiens
  misc_RNA (1)...(19): siRNA sense strand
guucaguugucgacaguga

SEQ ID NO: 646288 - RNA, 19 nt, Homo sapiens
  misc_RNA (1)...(19): siRNA sense strand
uggaggagcugguucaucu

SEQ ID NO: 646289 - RNA, 19 nt, Homo sapiens
  misc_RNA (1)...(19): siRNA sense strand
gcugauaggaaaccuuaaa

SEQ ID NO: 646290 - RNA, 19 nt, Homo sapiens
  misc_RNA (1)...(19): siRNA sense strand
cgccgagucuucauguuaa

SEQ ID NO: 646291 - RNA, 19 nt, Homo sapiens
  misc_RNA (1)...(19): siRNA sense strand
gagaagccgcugucugaga

SEQ ID NO: 646292 - RNA, 19 nt, Homo sapiens
  misc_RNA (1)...(19): siRNA sense strand
ugaaugugcugcuuauaac

SEQ ID NO: 646293 - RNA, 19 nt, Homo sapiens
  misc_RNA (1)...(19): siRNA sense strand
ggacaucagguuuacaaag

SEQ ID NO: 646294 - RNA, 19 nt, Homo sapiens
  misc_RNA (1)...(19): siRNA sense strand
gaacgccgagucuucaugu

SEQ ID NO: 646295 - RNA, 19 nt, Homo sapiens
  misc_RNA (1)...(19): siRNA sense strand
gaggagagauuguuaaaac

SEQ ID NO: 646296 - RNA, 19 nt, Homo sapiens
  misc_RNA (1)...(19): siRNA sense strand
cagagaaguuaaaugaaag

SEQ ID NO: 646297 - RNA, 19 nt, Homo sapiens
  misc_RNA (1)...(19): siRNA sense strand
ucgaaacacuagcagagaa

SEQ ID NO: 646298 - RNA, 19 nt, Homo sapiens
  misc_RNA (1)...(19): siRNA sense strand
ccugagaaguccacaguca

SEQ ID NO: 646299 - RNA, 19 nt, Homo sapiens
  misc_RNA (1)...(19): siRNA sense strand
aaaggaaacuaucagaacu

SEQ ID NO: 646300 - RNA, 19 nt, Homo sapiens
  misc_RNA (1)...(19): siRNA sense strand
guuuaaaggagcacuauga

SEQ ID NO: 646301 - RNA, 19 nt, Homo sapiens
  misc_RNA (1)...(19): siRNA sense strand
gaggacagcaccaucuaug

SEQ ID NO: 646302 - RNA, 19 nt, Homo sapiens
  misc_RNA (1)...(19): siRNA sense strand
agucaaggcuccaagaaag

SEQ ID NO: 646303 - RNA, 19 nt, Homo sapiens
  misc_RNA (1)...(19): siRNA sense strand
gaccuaacccguuuaaagg

SEQ ID NO: 646304 - RNA, 19 nt, Homo sapiens
  misc_RNA (1)...(19): siRNA sense strand
aaugaaagccagccagauu

SEQ ID NO: 646305 - RNA, 19 nt, Homo sapiens
  misc_RNA (1)...(19): siRNA sense strand
caaauagccaaagccauaa

SEQ ID NO: 646306 - RNA, 19 nt, Homo sapiens
  misc_RNA (1)...(19): siRNA sense strand
caacgacagaggagagauu

SEQ ID NO: 646307 - RNA, 19 nt, Homo sapiens
  misc_RNA (1)...(19): siRNA sense strand
cgagaaagacaaggacaaa

SEQ ID NO: 646308 - RNA, 19 nt, Homo sapiens
  misc_RNA (1)...(19): siRNA sense strand
ggucaacagcuuacagaug

SEQ ID NO: 646309 - RNA, 19 nt, Homo sapiens
  misc_RNA (1)...(19): siRNA sense strand
aaauguaauuggccaaauc

SEQ ID NO: 646310 - RNA, 19 nt, Homo sapiens
  misc_RNA (1)...(19): siRNA sense strand
ucauugauguugacugcaa

SEQ ID NO: 646311 - RNA, 19 nt, Homo sapiens
  misc_RNA (1)...(19): siRNA sense strand
ucccucugcugaauauaua

SEQ ID NO: 646312 - RNA, 19 nt, Homo sapiens
  misc_RNA (1)...(19): siRNA sense strand
ugggaucgaugacucagaa

SEQ ID NO: 646313 - RNA, 19 nt, Homo sapiens
  misc_RNA (1)...(19): siRNA sense strand
gcagcaggaguucaagauu

SEQ ID NO: 646314 - RNA, 19 nt, Homo sapiens
  misc_RNA (1)...(19): siRNA sense strand
gaacuacguagaugcucuu

SEQ ID NO: 646315 - RNA, 19 nt, Homo sapiens
  misc_RNA (1)...(19): siRNA sense strand
ucaagcaccugcaggacau

SEQ ID NO: 646316 - RNA, 19 nt, Homo sapiens
  misc_RNA (1)...(19): siRNA sense strand
gcagucaaggcuccaagaa

SEQ ID NO: 646317 - RNA, 19 nt, Homo sapiens
  misc_RNA (1)...(19): siRNA sense strand
uaaaggaaacuaucagaac

SEQ ID NO: 646318 - RNA, 19 nt, Homo sapiens
  misc_RNA (1)...(19): siRNA sense strand
cagaggagagauuguuaaa

SEQ ID NO: 646319 - RNA, 19 nt, Homo sapiens
  misc_RNA (1)...(19): siRNA sense strand
cgacagaggagagauuguu

SEQ ID NO: 646320 - RNA, 19 nt, Homo sapiens
  misc_RNA (1)...(19): siRNA sense strand
ugaccuaacccguuuaaag

SEQ ID NO: 646321 - RNA, 19 nt, Homo sapiens
  misc_RNA (1)...(19): siRNA sense strand
agaagccgcugucugagau

SEQ ID NO: 646322 - RNA, 19 nt, Homo sapiens
  misc_RNA (1)...(19): siRNA sense strand
gaaaugauaggcgaugucu

SEQ ID NO: 646323 - RNA, 19 nt, Homo sapiens
  misc_RNA (1)...(19): siRNA sense strand
ggcagaagcaugaacugaa

SEQ ID NO: 646324 - RNA, 19 nt, Homo sapiens
  misc_RNA (1)...(19): siRNA sense strand
gaguucgagugaauuugaa

SEQ ID NO: 646325 - RNA, 19 nt, Homo sapiens
  misc_RNA (1)...(19): siRNA sense strand
ggaugcauacagugaauau

SEQ ID NO: 646326 - RNA, 19 nt, Homo sapiens
  misc_RNA (1)...(19): siRNA sense strand
agacagaccuuuccgaauu

SEQ ID NO: 646327 - RNA, 19 nt, Homo sapiens
  misc_RNA (1)...(19): siRNA sense strand
gcacagaguuucuuuaacc

SEQ ID NO: 646328 - RNA, 19 nt, Homo sapiens
  misc_RNA (1)...(19): siRNA sense strand
gaccagaacggcaggauga

SEQ ID NO: 646329 - RNA, 19 nt, Homo sapiens
  misc_RNA (1)...(19): siRNA sense strand
gacccaggcuccaccaaga

SEQ ID NO: 646330 - RNA, 19 nt, Homo sapiens
  misc_RNA (1)...(19): siRNA sense strand
gacagaccuuuccgaauuc

SEQ ID NO: 646331 - RNA, 19 nt, Homo sapiens
  misc_RNA (1)...(19): siRNA sense strand
cagaagagcagcccaaugg

SEQ ID NO: 646332 - RNA, 19 nt, Homo sapiens
  misc_RNA (1)...(19): siRNA sense strand
agccagagcugcccacaga

SEQ ID NO: 646333 - RNA, 19 nt, Homo sapiens
  misc_RNA (1)...(19): siRNA sense strand
gcccaaagccuggcacaga

SEQ ID NO: 646334 - RNA, 19 nt, Homo sapiens
  misc_RNA (1)...(19): siRNA sense strand
gaacacucgccgcaagaug

SEQ ID NO: 646335 - RNA, 19 nt, Homo sapiens
  misc_RNA (1)...(19): siRNA sense strand
uggcacagaguuucuuuaa

SEQ ID NO: 646336 - RNA, 19 nt, Homo sapiens
  misc_RNA (1)...(19): siRNA sense strand
gcaccgaccagauguuucu

SEQ ID NO: 646337 - RNA, 19 nt, Homo sapiens
  misc_RNA (1)...(19): siRNA sense strand
ggcaguggcuggucuccau

SEQ ID NO: 646338 - RNA, 19 nt, Homo sapiens
  misc_RNA (1)...(19): siRNA sense strand
uggacacgcuccugcaaga

SEQ ID NO: 646339 - RNA, 19 nt, Homo sapiens
  misc_RNA (1)...(19): siRNA sense strand
gaaguugcccagggaggaa

SEQ ID NO: 646340 - RNA, 19 nt, Homo sapiens
  misc_RNA (1)...(19): siRNA sense strand
cagaacggcaggaugagaa

SEQ ID NO: 646341 - RNA, 19 nt, Homo sapiens
  misc_RNA (1)...(19): siRNA sense strand
gcgcaccgaccagauguuu

SEQ ID NO: 646342 - RNA, 19 nt, Homo sapiens
  misc_RNA (1)...(19): siRNA sense strand
cuacuuugcuguguuugau

SEQ ID NO: 646343 - RNA, 19 nt, Homo sapiens
  misc_RNA (1)...(19): siRNA sense strand
gcgccuacuuugcuguguu

SEQ ID NO: 646344 - RNA, 19 nt, Homo sapiens
  misc_RNA (1)...(19): siRNA sense strand
gcccagggaggaagaagaa

SEQ ID NO: 646345 - RNA, 19 nt, Homo sapiens
  misc_RNA (1)...(19): siRNA sense strand
uggcuucuuugacgucgua

SEQ ID NO: 646346 - RNA, 19 nt, Homo sapiens
  misc_RNA (1)...(19): siRNA sense strand
cgccuacuuugcuguguuu

SEQ ID NO: 646347 - RNA, 19 nt, Homo sapiens
  misc_RNA (1)...(19): siRNA sense strand
gcagaagcaggugccauug

SEQ ID NO: 646348 - RNA, 19 nt, Homo sapiens
  misc_RNA (1)...(19): siRNA sense strand
ugccugugauggcuucuuu

SEQ ID NO: 646349 - RNA, 19 nt, Homo sapiens
  misc_RNA (1)...(19): siRNA sense strand
ggacgaugacgaggaggaa

SEQ ID NO: 646350 - RNA, 19 nt, Homo sapiens
  misc_RNA (1)...(19): siRNA sense strand
ccagaagcccuacgugucu

SEQ ID NO: 646351 - RNA, 19 nt, Homo sapiens
  misc_RNA (1)...(19): siRNA sense strand
gcugauggagccacacaga

SEQ ID NO: 646352 - RNA, 19 nt, Homo sapiens
  misc_RNA (1)...(19): siRNA sense strand
aagaggaggaggacgauga

SEQ ID NO: 646353 - RNA, 19 nt, Homo sapiens
  misc_RNA (1)...(19): siRNA sense strand
gcguggaugcugcgaggua

SEQ ID NO: 646354 - RNA, 19 nt, Homo sapiens
  misc_RNA (1)...(19): siRNA sense strand
gacagguggugaagcugau

SEQ ID NO: 646355 - RNA, 19 nt, Homo sapiens
  misc_RNA (1)...(19): siRNA sense strand
ccagggaggaagaagaaga

SEQ ID NO: 646356 - RNA, 19 nt, Homo sapiens
  misc_RNA (1)...(19): siRNA sense strand
caaagccuggcacagaguu

SEQ ID NO: 646357 - RNA, 19 nt, Homo sapiens
  misc_RNA (1)...(19): siRNA sense strand
acacgcuccugcaagacuu

SEQ ID NO: 646358 - RNA, 19 nt, Homo sapiens
  misc_RNA (1)...(19): siRNA sense strand
cacagcugcuacagacaga

SEQ ID NO: 646359 - RNA, 19 nt, Homo sapiens
  misc_RNA (1)...(19): siRNA sense strand
ggaacacucgccgcaagau

SEQ ID NO: 646360 - RNA, 19 nt, Homo sapiens
  misc_RNA (1)...(19): siRNA sense strand
gcauuggguggcuuugugu

SEQ ID NO: 646361 - RNA, 19 nt, Homo sapiens
  misc_RNA (1)...(19): siRNA sense strand
ucacggucaugguggucuu

SEQ ID NO: 646362 - RNA, 19 nt, Homo sapiens
  misc_RNA (1)...(19): siRNA sense strand
ccugugauggcuucuuuga

SEQ ID NO: 646363 - RNA, 19 nt, Homo sapiens
  misc_RNA (1)...(19): siRNA sense strand
aaggagagaugguggauua

SEQ ID NO: 646364 - RNA, 19 nt, Homo sapiens
  misc_RNA (1)...(19): siRNA sense strand
cagcugggcuuccugguuu

SEQ ID NO: 646365 - RNA, 19 nt, Homo sapiens
  misc_RNA (1)...(19): siRNA sense strand
ccaaagacaucuccaggau

SEQ ID NO: 646366 - RNA, 19 nt, Homo sapiens
  misc_RNA (1)...(19): siRNA sense strand
gagagaugguggauuacaa

SEQ ID NO: 646367 - RNA, 19 nt, Homo sapiens
  misc_RNA (1)...(19): siRNA sense strand
aaagggaccucgcgguaaa

SEQ ID NO: 646368 - RNA, 19 nt, Homo sapiens
  misc_RNA (1)...(19): siRNA sense strand
gaugguggauuacaaugga

SEQ ID NO: 646369 - RNA, 19 nt, Homo sapiens
  misc_RNA (1)...(19): siRNA sense strand
ggauuacaauggaaacauc

SEQ ID NO: 646370 - RNA, 19 nt, Homo sapiens
  misc_RNA (1)...(19): siRNA sense strand
caagggagaaccagggaaa

SEQ ID NO: 646371 - RNA, 19 nt, Homo sapiens
  misc_RNA (1)...(19): siRNA sense strand
ggaagcaggacuagaugga

SEQ ID NO: 646372 - RNA, 19 nt, Homo sapiens
  misc_RNA (1)...(19): siRNA sense strand
caaggcugcuggaacaagu

SEQ ID NO: 646373 - RNA, 19 nt, Homo sapiens
  misc_RNA (1)...(19): siRNA sense strand
gggagaagcaggugucgau

SEQ ID NO: 646374 - RNA, 19 nt, Homo sapiens
  misc_RNA (1)...(19): siRNA sense strand
ggagaacagggaccagaug

SEQ ID NO: 646375 - RNA, 19 nt, Homo sapiens
  misc_RNA (1)...(19): siRNA sense strand
acaauggaaacaucaauga

SEQ ID NO: 646376 - RNA, 19 nt, Homo sapiens
  misc_RNA (1)...(19): siRNA sense strand
gaaaggagagaugguggau

SEQ ID NO: 646377 - RNA, 19 nt, Homo sapiens
  misc_RNA (1)...(19): siRNA sense strand
cuagagguuucccuggauu

SEQ ID NO: 646378 - RNA, 19 nt, Homo sapiens
  misc_RNA (1)...(19): siRNA sense strand
gcaaauggagacggcuauu

SEQ ID NO: 646379 - RNA, 19 nt, Homo sapiens
  misc_RNA (1)...(19): siRNA sense strand
gaaaggcuuccagggagaa

SEQ ID NO: 646380 - RNA, 19 nt, Homo sapiens
  misc_RNA (1)...(19): siRNA sense strand
gcagcugggcuuccugguu

SEQ ID NO: 646381 - RNA, 19 nt, Homo sapiens
  misc_RNA (1)...(19): siRNA sense strand
ggagagaugguggauuaca

SEQ ID NO: 646382 - RNA, 19 nt, Homo sapiens
  misc_RNA (1)...(19): siRNA sense strand
gaugcuggcaacuccauug

SEQ ID NO: 646383 - RNA, 19 nt, Homo sapiens
  misc_RNA (1)...(19): siRNA sense strand
gcguggagcagcuggagaa

SEQ ID NO: 646384 - RNA, 19 nt, Homo sapiens
  misc_RNA (1)...(19): siRNA sense strand
uggagcagcuggagaacag

SEQ ID NO: 646385 - RNA, 19 nt, Homo sapiens
  misc_RNA (1)...(19): siRNA sense strand
ggauuuccgggucccauug

SEQ ID NO: 646386 - RNA, 19 nt, Homo sapiens
  misc_RNA (1)...(19): siRNA sense strand
gagaugguggauuacaaug

SEQ ID NO: 646387 - RNA, 19 nt, Homo sapiens
  misc_RNA (1)...(19): siRNA sense strand
uagcggagcgcacccacaa

SEQ ID NO: 646388 - RNA, 19 nt, Homo sapiens
  misc_RNA (1)...(19): siRNA sense strand
gggagaaccagggaaagga

SEQ ID NO: 646389 - RNA, 19 nt, Homo sapiens
  misc_RNA (1)...(19): siRNA sense strand
gagccaggccagcauccaa

SEQ ID NO: 646390 - RNA, 19 nt, Homo sapiens
  misc_RNA (1)...(19): siRNA sense strand
gguacuccaggaccaauug

SEQ ID NO: 646391 - RNA, 19 nt, Homo sapiens
  misc_RNA (1)...(19): siRNA sense strand
aaaggagacccugggauga

SEQ ID NO: 646392 - RNA, 19 nt, Homo sapiens
  misc_RNA (1)...(19): siRNA sense strand
gagccagggaucccaggaa

SEQ ID NO: 646393 - RNA, 19 nt, Homo sapiens
  misc_RNA (1)...(19): siRNA sense strand
gaaccagggaaaggagaga

SEQ ID NO: 646394 - RNA, 19 nt, Homo sapiens
  misc_RNA (1)...(19): siRNA sense strand
gauuacaauggaaacauca

SEQ ID NO: 646395 - RNA, 19 nt, Homo sapiens
  misc_RNA (1)...(19): siRNA sense strand
ggucaaccaggaacuagag

SEQ ID NO: 646396 - RNA, 19 nt, Homo sapiens
  misc_RNA (1)...(19): siRNA sense strand
aaggagagaugguggauua

SEQ ID NO: 646397 - RNA, 19 nt, Homo sapiens
  misc_RNA (1)...(19): siRNA sense strand
cagcugggcuuccugguuu

SEQ ID NO: 646398 - RNA, 19 nt, Homo sapiens
  misc_RNA (1)...(19): siRNA sense strand
ccaaagacaucuccaggau

SEQ ID NO: 646399 - RNA, 19 nt, Homo sapiens
  misc_RNA (1)...(19): siRNA sense strand
gagagaugguggauuacaa

SEQ ID NO: 646400 - RNA, 19 nt, Homo sapiens
  misc_RNA (1)...(19): siRNA sense strand
aaagggaccucgcgguaaa

SEQ ID NO: 646401 - RNA, 19 nt, Homo sapiens
  misc_RNA (1)...(19): siRNA sense strand
gaugguggauuacaaugga

SEQ ID NO: 646402 - RNA, 19 nt, Homo sapiens
  misc_RNA (1)...(19): siRNA sense strand
ggauuacaauggaaacauc

SEQ ID NO: 646403 - RNA, 19 nt, Homo sapiens
  misc_RNA (1)...(19): siRNA sense strand
caagggagaaccagggaaa

SEQ ID NO: 646404 - RNA, 19 nt, Homo sapiens
  misc_RNA (1)...(19): siRNA sense strand
ggaagcaggacuagaugga

SEQ ID NO: 646405 - RNA, 19 nt, Homo sapiens
  misc_RNA (1)...(19): siRNA sense strand
caaggcugcuggaacaagu

SEQ ID NO: 646406 - RNA, 19 nt, Homo sapiens
  misc_RNA (1)...(19): siRNA sense strand
gggagaagcaggugucgau

SEQ ID NO: 646407 - RNA, 19 nt, Homo sapiens
  misc_RNA (1)...(19): siRNA sense strand
ggagaacagggaccagaug

SEQ ID NO: 646408 - RNA, 19 nt, Homo sapiens
  misc_RNA (1)...(19): siRNA sense strand
acaauggaaacaucaauga

SEQ ID NO: 646409 - RNA, 19 nt, Homo sapiens
  misc_RNA (1)...(19): siRNA sense strand
gaaaggagagaugguggau

SEQ ID NO: 646410 - RNA, 19 nt, Homo sapiens
  misc_RNA (1)...(19): siRNA sense strand
cuagagguuucccuggauu

SEQ ID NO: 646411 - RNA, 19 nt, Homo sapiens
  misc_RNA (1)...(19): siRNA sense strand
gcaaauggagacggcuauu

SEQ ID NO: 646412 - RNA, 19 nt, Homo sapiens
  misc_RNA (1)...(19): siRNA sense strand
gaaaggcuuccagggagaa

SEQ ID NO: 646413 - RNA, 19 nt, Homo sapiens
  misc_RNA (1)...(19): siRNA sense strand
gcagcugggcuuccugguu

SEQ ID NO: 646414 - RNA, 19 nt, Homo sapiens
  misc_RNA (1)...(19): siRNA sense strand
ggagagaugguggauuaca

SEQ ID NO: 646415 - RNA, 19 nt, Homo sapiens
  misc_RNA (1)...(19): siRNA sense strand
gaugcuggcaacuccauug

SEQ ID NO: 646416 - RNA, 19 nt, Homo sapiens
  misc_RNA (1)...(19): siRNA sense strand
gcguggagcagcuggagaa

SEQ ID NO: 646417 - RNA, 19 nt, Homo sapiens
  misc_RNA (1)...(19): siRNA sense strand
uggagcagcuggagaacag

SEQ ID NO: 646418 - RNA, 19 nt, Homo sapiens
  misc_RNA (1)...(19): siRNA sense strand
ggauuuccgggucccauug

SEQ ID NO: 646419 - RNA, 19 nt, Homo sapiens
  misc_RNA (1)...(19): siRNA sense strand
gagaugguggauuacaaug

SEQ ID NO: 646420 - RNA, 19 nt, Homo sapiens
  misc_RNA (1)...(19): siRNA sense strand
uagcggagcgcacccacaa

SEQ ID NO: 646421 - RNA, 19 nt, Homo sapiens
  misc_RNA (1)...(19): siRNA sense strand
gggagaaccagggaaagga

SEQ ID NO: 646422 - RNA, 19 nt, Homo sapiens
  misc_RNA (1)...(19): siRNA sense strand
gagccaggccagcauccaa

SEQ ID NO: 646423 - RNA, 19 nt, Homo sapiens
  misc_RNA (1)...(19): siRNA sense strand
gguacuccaggaccaauug

SEQ ID NO: 646424 - RNA, 19 nt, Homo sapiens
  misc_RNA (1)...(19): siRNA sense strand
aaaggagacccugggauga

SEQ ID NO: 646425 - RNA, 19 nt, Homo sapiens
  misc_RNA (1)...(19): siRNA sense strand
gagccagggaucccaggaa

SEQ ID NO: 646426 - RNA, 19 nt, Homo sapiens
  misc_RNA (1)...(19): siRNA sense strand
gaaccagggaaaggagaga

SEQ ID NO: 646427 - RNA, 19 nt, Homo sapiens
  misc_RNA (1)...(19): siRNA sense strand
gauuacaauggaaacauca

SEQ ID NO: 646428 - RNA, 19 nt, Homo sapiens
  misc_RNA (1)...(19): siRNA sense strand
ggucaaccaggaacuagag

SEQ ID NO: 646429 - RNA, 19 nt, Homo sapiens
  misc_RNA (1)...(19): siRNA sense strand
aaggagagaugguggauua

SEQ ID NO: 646430 - RNA, 19 nt, Homo sapiens
  misc_RNA (1)...(19): siRNA sense strand
cagcugggcuuccugguuu

SEQ ID NO: 646431 - RNA, 19 nt, Homo sapiens
  misc_RNA (1)...(19): siRNA sense strand
ccaaagacaucuccaggau

SEQ ID NO: 646432 - RNA, 19 nt, Homo sapiens
  misc_RNA (1)...(19): siRNA sense strand
gagagaugguggauuacaa

SEQ ID NO: 646433 - RNA, 19 nt, Homo sapiens
  misc_RNA (1)...(19): siRNA sense strand
aaagggaccucgcgguaaa

SEQ ID NO: 646434 - RNA, 19 nt, Homo sapiens
  misc_RNA (1)...(19): siRNA sense strand
gaugguggauuacaaugga

SEQ ID NO: 646435 - RNA, 19 nt, Homo sapiens
  misc_RNA (1)...(19): siRNA sense strand
ggauuacaauggaaacauc

SEQ ID NO: 646436 - RNA, 19 nt, Homo sapiens
  misc_RNA (1)...(19): siRNA sense strand
caagggagaaccagggaaa

SEQ ID NO: 646437 - RNA, 19 nt, Homo sapiens
  misc_RNA (1)...(19): siRNA sense strand
ggaagcaggacuagaugga

SEQ ID NO: 646438 - RNA, 19 nt, Homo sapiens
  misc_RNA (1)...(19): siRNA sense strand
caaggcugcuggaacaagu

SEQ ID NO: 646439 - RNA, 19 nt, Homo sapiens
  misc_RNA (1)...(19): siRNA sense strand
gggagaagcaggugucgau

SEQ ID NO: 646440 - RNA, 19 nt, Homo sapiens
  misc_RNA (1)...(19): siRNA sense strand
ggagaacagggaccagaug

SEQ ID NO: 646441 - RNA, 19 nt, Homo sapiens
  misc_RNA (1)...(19): siRNA sense strand
acaauggaaacaucaauga

SEQ ID NO: 646442 - RNA, 19 nt, Homo sapiens
  misc_RNA (1)...(19): siRNA sense strand
gaaaggagagaugguggau

SEQ ID NO: 646443 - RNA, 19 nt, Homo sapiens
  misc_RNA (1)...(19): siRNA sense strand
cuagagguuucccuggauu

SEQ ID NO: 646444 - RNA, 19 nt, Homo sapiens
  misc_RNA (1)...(19): siRNA sense strand
gcaaauggagacggcuauu

SEQ ID NO: 646445 - RNA, 19 nt, Homo sapiens
  misc_RNA (1)...(19): siRNA sense strand
gaaaggcuuccagggagaa

SEQ ID NO: 646446 - RNA, 19 nt, Homo sapiens
  misc_RNA (1)...(19): siRNA sense strand
gcagcugggcuuccugguu

SEQ ID NO: 646447 - RNA, 19 nt, Homo sapiens
  misc_RNA (1)...(19): siRNA sense strand
ggagagaugguggauuaca

SEQ ID NO: 646448 - RNA, 19 nt, Homo sapiens
  misc_RNA (1)...(19): siRNA sense strand
gaugcuggcaacuccauug

SEQ ID NO: 646449 - RNA, 19 nt, Homo sapiens
  misc_RNA (1)...(19): siRNA sense strand
gcguggagcagcuggagaa

SEQ ID NO: 646450 - RNA, 19 nt, Homo sapiens
  misc_RNA (1)...(19): siRNA sense strand
uggagcagcuggagaacag

SEQ ID NO: 646451 - RNA, 19 nt, Homo sapiens
  misc_RNA (1)...(19): siRNA sense strand
ggauuuccgggucccauug

SEQ ID NO: 646452 - RNA, 19 nt, Homo sapiens
  misc_RNA (1)...(19): siRNA sense strand
gagaugguggauuacaaug

SEQ ID NO: 646453 - RNA, 19 nt, Homo sapiens
  misc_RNA (1)...(19): siRNA sense strand
uagcggagcgcacccacaa

SEQ ID NO: 646454 - RNA, 19 nt, Homo sapiens
  misc_RNA (1)...(19): siRNA sense strand
gggagaaccagggaaagga

SEQ ID NO: 646455 - RNA, 19 nt, Homo sapiens
  misc_RNA (1)...(19): siRNA sense strand
gagccaggccagcauccaa

SEQ ID NO: 646456 - RNA, 19 nt, Homo sapiens
  misc_RNA (1)...(19): siRNA sense strand
gguacuccaggaccaauug

SEQ ID NO: 646457 - RNA, 19 nt, Homo sapiens
  misc_RNA (1)...(19): siRNA sense strand
aaaggagacccugggauga

SEQ ID NO: 646458 - RNA, 19 nt, Homo sapiens
  misc_RNA (1)...(19): siRNA sense strand
gagccagggaucccaggaa

SEQ ID NO: 646459 - RNA, 19 nt, Homo sapiens
  misc_RNA (1)...(19): siRNA sense strand
gaaccagggaaaggagaga

SEQ ID NO: 646460 - RNA, 19 nt, Homo sapiens
  misc_RNA (1)...(19): siRNA sense strand
gauuacaauggaaacauca

SEQ ID NO: 646461 - RNA, 19 nt, Homo sapiens
  misc_RNA (1)...(19): siRNA sense strand
ggucaaccaggaacuagag

SEQ ID NO: 646462 - RNA, 19 nt, Homo sapiens
  misc_RNA (1)...(19): siRNA sense strand
aaggagagaugguggauua

SEQ ID NO: 646463 - RNA, 19 nt, Homo sapiens
  misc_RNA (1)...(19): siRNA sense strand
cagcugggcuuccugguuu

SEQ ID NO: 646464 - RNA, 19 nt, Homo sapiens
  misc_RNA (1)...(19): siRNA sense strand
ccaaagacaucuccaggau

SEQ ID NO: 646465 - RNA, 19 nt, Homo sapiens
  misc_RNA (1)...(19): siRNA sense strand
gagagaugguggauuacaa

SEQ ID NO: 646466 - RNA, 19 nt, Homo sapiens
  misc_RNA (1)...(19): siRNA sense strand
aaagggaccucgcgguaaa

SEQ ID NO: 646467 - RNA, 19 nt, Homo sapiens
  misc_RNA (1)...(19): siRNA sense strand
gaugguggauuacaaugga

SEQ ID NO: 646468 - RNA, 19 nt, Homo sapiens
  misc_RNA (1)...(19): siRNA sense strand
ggauuacaauggaaacauc

SEQ ID NO: 646469 - RNA, 19 nt, Homo sapiens
  misc_RNA (1)...(19): siRNA sense strand
caagggagaaccagggaaa

SEQ ID NO: 646470 - RNA, 19 nt, Homo sapiens
  misc_RNA (1)...(19): siRNA sense strand
ggaagcaggacuagaugga

SEQ ID NO: 646471 - RNA, 19 nt, Homo sapiens
  misc_RNA (1)...(19): siRNA sense strand
caaggcugcuggaacaagu

SEQ ID NO: 646472 - RNA, 19 nt, Homo sapiens
  misc_RNA (1)...(19): siRNA sense strand
gggagaagcaggugucgau

SEQ ID NO: 646473 - RNA, 19 nt, Homo sapiens
  misc_RNA (1)...(19): siRNA sense strand
ggagaacagggaccagaug

SEQ ID NO: 646474 - RNA, 19 nt, Homo sapiens
  misc_RNA (1)...(19): siRNA sense strand
acaauggaaacaucaauga

SEQ ID NO: 646475 - RNA, 19 nt, Homo sapiens
  misc_RNA (1)...(19): siRNA sense strand
gaaaggagagaugguggau

SEQ ID NO: 646476 - RNA, 19 nt, Homo sapiens
  misc_RNA (1)...(19): siRNA sense strand
cuagagguuucccuggauu

SEQ ID NO: 646477 - RNA, 19 nt, Homo sapiens
  misc_RNA (1)...(19): siRNA sense strand
gcaaauggagacggcuauu

SEQ ID NO: 646478 - RNA, 19 nt, Homo sapiens
  misc_RNA (1)...(19): siRNA sense strand
gaaaggcuuccagggagaa

SEQ ID NO: 646479 - RNA, 19 nt, Homo sapiens
  misc_RNA (1)...(19): siRNA sense strand
gcagcugggcuuccugguu

SEQ ID NO: 646480 - RNA, 19 nt, Homo sapiens
  misc_RNA (1)...(19): siRNA sense strand
ggagagaugguggauuaca

SEQ ID NO: 646481 - RNA, 19 nt, Homo sapiens
  misc_RNA (1)...(19): siRNA sense strand
gaugcuggcaacuccauug

SEQ ID NO: 646482 - RNA, 19 nt, Homo sapiens
  misc_RNA (1)...(19): siRNA sense strand
gcguggagcagcuggagaa

SEQ ID NO: 646483 - RNA, 19 nt, Homo sapiens
  misc_RNA (1)...(19): siRNA sense strand
uggagcagcuggagaacag

SEQ ID NO: 646484 - RNA, 19 nt, Homo sapiens
  misc_RNA (1)...(19): siRNA sense strand
ggauuuccgggucccauug

SEQ ID NO: 646485 - RNA, 19 nt, Homo sapiens
  misc_RNA (1)...(19): siRNA sense strand
gagaugguggauuacaaug

SEQ ID NO: 646486 - RNA, 19 nt, Homo sapiens
  misc_RNA (1)...(19): siRNA sense strand
uagcggagcgcacccacaa

SEQ ID NO: 646487 - RNA, 19 nt, Homo sapiens
  misc_RNA (1)...(19): siRNA sense strand
gggagaaccagggaaagga

SEQ ID NO: 646488 - RNA, 19 nt, Homo sapiens
  misc_RNA (1)...(19): siRNA sense strand
gagccaggccagcauccaa

SEQ ID NO: 646489 - RNA, 19 nt, Homo sapiens
  misc_RNA (1)...(19): siRNA sense strand
gguacuccaggaccaauug

SEQ ID NO: 646490 - RNA, 19 nt, Homo sapiens
  misc_RNA (1)...(19): siRNA sense strand
aaaggagacccugggauga

SEQ ID NO: 646491 - RNA, 19 nt, Homo sapiens
  misc_RNA (1)...(19): siRNA sense strand
gagccagggaucccaggaa

SEQ ID NO: 646492 - RNA, 19 nt, Homo sapiens
  misc_RNA (1)...(19): siRNA sense strand
gaaccagggaaaggagaga

SEQ ID NO: 646493 - RNA, 19 nt, Homo sapiens
  misc_RNA (1)...(19): siRNA sense strand
gauuacaauggaaacauca

SEQ ID NO: 646494 - RNA, 19 nt, Homo sapiens
  misc_RNA (1)...(19): siRNA sense strand
ggucaaccaggaacuagag

SEQ ID NO: 646495 - RNA, 19 nt, Homo sapiens
  misc_RNA (1)...(19): siRNA sense strand
aaggagagaugguggauua

SEQ ID NO: 646496 - RNA, 19 nt, Homo sapiens
  misc_RNA (1)...(19): siRNA sense strand
cagcugggcuuccugguuu

SEQ ID NO: 646497 - RNA, 19 nt, Homo sapiens
  misc_RNA (1)...(19): siRNA sense strand
ccaaagacaucuccaggau

SEQ ID NO: 646498 - RNA, 19 nt, Homo sapiens
  misc_RNA (1)...(19): siRNA sense strand
gagagaugguggauuacaa

SEQ ID NO: 646499 - RNA, 19 nt, Homo sapiens
  misc_RNA (1)...(19): siRNA sense strand
aaagggaccucgcgguaaa

SEQ ID NO: 646500 - RNA, 19 nt, Homo sapiens
  misc_RNA (1)...(19): siRNA sense strand
gaugguggauuacaaugga

SEQ ID NO: 646501 - RNA, 19 nt, Homo sapiens
  misc_RNA (1)...(19): siRNA sense strand
ggauuacaauggaaacauc

SEQ ID NO: 646502 - RNA, 19 nt, Homo sapiens
  misc_RNA (1)...(19): siRNA sense strand
caagggagaaccagggaaa

SEQ ID NO: 646503 - RNA, 19 nt, Homo sapiens
  misc_RNA (1)...(19): siRNA sense strand
ggaagcaggacuagaugga

SEQ ID NO: 646504 - RNA, 19 nt, Homo sapiens
  misc_RNA (1)...(19): siRNA sense strand
caaggcugcuggaacaagu

SEQ ID NO: 646505 - RNA, 19 nt, Homo sapiens
  misc_RNA (1)...(19): siRNA sense strand
gggagaagcaggugucgau

SEQ ID NO: 646506 - RNA, 19 nt, Homo sapiens
  misc_RNA (1)...(19): siRNA sense strand
ggagaacagggaccagaug

SEQ ID NO: 646507 - RNA, 19 nt, Homo sapiens
  misc_RNA (1)...(19): siRNA sense strand
acaauggaaacaucaauga

SEQ ID NO: 646508 - RNA, 19 nt, Homo sapiens
  misc_RNA (1)...(19): siRNA sense strand
gaaaggagagaugguggau

SEQ ID NO: 646509 - RNA, 19 nt, Homo sapiens
  misc_RNA (1)...(19): siRNA sense strand
cuagagguuucccuggauu

SEQ ID NO: 646510 - RNA, 19 nt, Homo sapiens
  misc_RNA (1)...(19): siRNA sense strand
gcaaauggagacggcuauu

SEQ ID NO: 646511 - RNA, 19 nt, Homo sapiens
  misc_RNA (1)...(19): siRNA sense strand
gaaaggcuuccagggagaa

SEQ ID NO: 646512 - RNA, 19 nt, Homo sapiens
  misc_RNA (1)...(19): siRNA sense strand
gcagcugggcuuccugguu

SEQ ID NO: 646513 - RNA, 19 nt, Homo sapiens
  misc_RNA (1)...(19): siRNA sense strand
ggagagaugguggauuaca

SEQ ID NO: 646514 - RNA, 19 nt, Homo sapiens
  misc_RNA (1)...(19): siRNA sense strand
gaugcuggcaacuccauug

SEQ ID NO: 646515 - RNA, 19 nt, Homo sapiens
  misc_RNA (1)...(19): siRNA sense strand
gcguggagcagcuggagaa

SEQ ID NO: 646516 - RNA, 19 nt, Homo sapiens
  misc_RNA (1)...(19): siRNA sense strand
uggagcagcuggagaacag

SEQ ID NO: 646517 - RNA, 19 nt, Homo sapiens
  misc_RNA (1)...(19): siRNA sense strand
ggauuuccgggucccauug

SEQ ID NO: 646518 - RNA, 19 nt, Homo sapiens
  misc_RNA (1)...(19): siRNA sense strand
gagaugguggauuacaaug

SEQ ID NO: 646519 - RNA, 19 nt, Homo sapiens
  misc_RNA (1)...(19): siRNA sense strand
uagcggagcgcacccacaa

SEQ ID NO: 646520 - RNA, 19 nt, Homo sapiens
  misc_RNA (1)...(19): siRNA sense strand
gggagaaccagggaaagga

SEQ ID NO: 646521 - RNA, 19 nt, Homo sapiens
  misc_RNA (1)...(19): siRNA sense strand
gagccaggccagcauccaa

SEQ ID NO: 646522 - RNA, 19 nt, Homo sapiens
  misc_RNA (1)...(19): siRNA sense strand
gguacuccaggaccaauug

SEQ ID NO: 646523 - RNA, 19 nt, Homo sapiens
  misc_RNA (1)...(19): siRNA sense strand
aaaggagacccugggauga

SEQ ID NO: 646524 - RNA, 19 nt, Homo sapiens
  misc_RNA (1)...(19): siRNA sense strand
gagccagggaucccaggaa

SEQ ID NO: 646525 - RNA, 19 nt, Homo sapiens
  misc_RNA (1)...(19): siRNA sense strand
gaaccagggaaaggagaga

SEQ ID NO: 646526 - RNA, 19 nt, Homo sapiens
  misc_RNA (1)...(19): siRNA sense strand
gauuacaauggaaacauca

SEQ ID NO: 646527 - RNA, 19 nt, Homo sapiens
  misc_RNA (1)...(19): siRNA sense strand
ggucaaccaggaacuagag

SEQ ID NO: 646528 - RNA, 19 nt, Homo sapiens
  misc_RNA (1)...(19): siRNA sense strand
aaggagagaugguggauua

SEQ ID NO: 646529 - RNA, 19 nt, Homo sapiens
  misc_RNA (1)...(19): siRNA sense strand
cagcugggcuuccugguuu

SEQ ID NO: 646530 - RNA, 19 nt, Homo sapiens
  misc_RNA (1)...(19): siRNA sense strand
ccaaagacaucuccaggau

SEQ ID NO: 646531 - RNA, 19 nt, Homo sapiens
  misc_RNA (1)...(19): siRNA sense strand
gagagaugguggauuacaa

SEQ ID NO: 646532 - RNA, 19 nt, Homo sapiens
  misc_RNA (1)...(19): siRNA sense strand
aaagggaccucgcgguaaa

SEQ ID NO: 646533 - RNA, 19 nt, Homo sapiens
  misc_RNA (1)...(19): siRNA sense strand
gaugguggauuacaaugga

SEQ ID NO: 646534 - RNA, 19 nt, Homo sapiens
  misc_RNA (1)...(19): siRNA sense strand
ggauuacaauggaaacauc

SEQ ID NO: 646535 - RNA, 19 nt, Homo sapiens
  misc_RNA (1)...(19): siRNA sense strand
caagggagaaccagggaaa

SEQ ID NO: 646536 - RNA, 19 nt, Homo sapiens
  misc_RNA (1)...(19): siRNA sense strand
ggaagcaggacuagaugga

SEQ ID NO: 646537 - RNA, 19 nt, Homo sapiens
  misc_RNA (1)...(19): siRNA sense strand
caaggcugcuggaacaagu

SEQ ID NO: 646538 - RNA, 19 nt, Homo sapiens
  misc_RNA (1)...(19): siRNA sense strand
gggagaagcaggugucgau

SEQ ID NO: 646539 - RNA, 19 nt, Homo sapiens
  misc_RNA (1)...(19): siRNA sense strand
ggagaacagggaccagaug

SEQ ID NO: 646540 - RNA, 19 nt, Homo sapiens
  misc_RNA (1)...(19): siRNA sense strand
acaauggaaacaucaauga

SEQ ID NO: 646541 - RNA, 19 nt, Homo sapiens
  misc_RNA (1)...(19): siRNA sense strand
gaaaggagagaugguggau

SEQ ID NO: 646542 - RNA, 19 nt, Homo sapiens
  misc_RNA (1)...(19): siRNA sense strand
cuagagguuucccuggauu

SEQ ID NO: 646543 - RNA, 19 nt, Homo sapiens
  misc_RNA (1)...(19): siRNA sense strand
gcaaauggagacggcuauu

SEQ ID NO: 646544 - RNA, 19 nt, Homo sapiens
  misc_RNA (1)...(19): siRNA sense strand
gaaaggcuuccagggagaa

SEQ ID NO: 646545 - RNA, 19 nt, Homo sapiens
  misc_RNA (1)...(19): siRNA sense strand
gcagcugggcuuccugguu

SEQ ID NO: 646546 - RNA, 19 nt, Homo sapiens
  misc_RNA (1)...(19): siRNA sense strand
ggagagaugguggauuaca

SEQ ID NO: 646547 - RNA, 19 nt, Homo sapiens
  misc_RNA (1)...(19): siRNA sense strand
gaugcuggcaacuccauug

SEQ ID NO: 646548 - RNA, 19 nt, Homo sapiens
  misc_RNA (1)...(19): siRNA sense strand
gcguggagcagcuggagaa

SEQ ID NO: 646549 - RNA, 19 nt, Homo sapiens
  misc_RNA (1)...(19): siRNA sense strand
uggagcagcuggagaacag

SEQ ID NO: 646550 - RNA, 19 nt, Homo sapiens
  misc_RNA (1)...(19): siRNA sense strand
ggauuuccgggucccauug

SEQ ID NO: 646551 - RNA, 19 nt, Homo sapiens
  misc_RNA (1)...(19): siRNA sense strand
gagaugguggauuacaaug

SEQ ID NO: 646552 - RNA, 19 nt, Homo sapiens
  misc_RNA (1)...(19): siRNA sense strand
uagcggagcgcacccacaa

SEQ ID NO: 646553 - RNA, 19 nt, Homo sapiens
  misc_RNA (1)...(19): siRNA sense strand
gggagaaccagggaaagga

SEQ ID NO: 646554 - RNA, 19 nt, Homo sapiens
  misc_RNA (1)...(19): siRNA sense strand
gagccaggccagcauccaa

SEQ ID NO: 646555 - RNA, 19 nt, Homo sapiens
  misc_RNA (1)...(19): siRNA sense strand
gguacuccaggaccaauug

SEQ ID NO: 646556 - RNA, 19 nt, Homo sapiens
  misc_RNA (1)...(19): siRNA sense strand
aaaggagacccugggauga

SEQ ID NO: 646557 - RNA, 19 nt, Homo sapiens
  misc_RNA (1)...(19): siRNA sense strand
gagccagggaucccaggaa

SEQ ID NO: 646558 - RNA, 19 nt, Homo sapiens
  misc_RNA (1)...(19): siRNA sense strand
gaaccagggaaaggagaga

SEQ ID NO: 646559 - RNA, 19 nt, Homo sapiens
  misc_RNA (1)...(19): siRNA sense strand
gauuacaauggaaacauca

SEQ ID NO: 646560 - RNA, 19 nt, Homo sapiens
  misc_RNA (1)...(19): siRNA sense strand
ggucaaccaggaacuagag

SEQ ID NO: 646561 - RNA, 19 nt, Homo sapiens
  misc_RNA (1)...(19): siRNA sense strand
aaggagagaugguggauua

SEQ ID NO: 646562 - RNA, 19 nt, Homo sapiens
  misc_RNA (1)...(19): siRNA sense strand
cagcugggcuuccugguuu

SEQ ID NO: 646563 - RNA, 19 nt, Homo sapiens
  misc_RNA (1)...(19): siRNA sense strand
ccaaagacaucuccaggau

SEQ ID NO: 646564 - RNA, 19 nt, Homo sapiens
  misc_RNA (1)...(19): siRNA sense strand
gagagaugguggauuacaa

SEQ ID NO: 646565 - RNA, 19 nt, Homo sapiens
  misc_RNA (1)...(19): siRNA sense strand
aaagggaccucgcgguaaa

SEQ ID NO: 646566 - RNA, 19 nt, Homo sapiens
  misc_RNA (1)...(19): siRNA sense strand
gaugguggauuacaaugga

SEQ ID NO: 646567 - RNA, 19 nt, Homo sapiens
  misc_RNA (1)...(19): siRNA sense strand
ggauuacaauggaaacauc

SEQ ID NO: 646568 - RNA, 19 nt, Homo sapiens
  misc_RNA (1)...(19): siRNA sense strand
caagggagaaccagggaaa

SEQ ID NO: 646569 - RNA, 19 nt, Homo sapiens
  misc_RNA (1)...(19): siRNA sense strand
ggaagcaggacuagaugga

SEQ ID NO: 646570 - RNA, 19 nt, Homo sapiens
  misc_RNA (1)...(19): siRNA sense strand
caaggcugcuggaacaagu

SEQ ID NO: 646571 - RNA, 19 nt, Homo sapiens
  misc_RNA (1)...(19): siRNA sense strand
gggagaagcaggugucgau

SEQ ID NO: 646572 - RNA, 19 nt, Homo sapiens
  misc_RNA (1)...(19): siRNA sense strand
ggagaacagggaccagaug

SEQ ID NO: 646573 - RNA, 19 nt, Homo sapiens
  misc_RNA (1)...(19): siRNA sense strand
acaauggaaacaucaauga

SEQ ID NO: 646574 - RNA, 19 nt, Homo sapiens
  misc_RNA (1)...(19): siRNA sense strand
gaaaggagagaugguggau

SEQ ID NO: 646575 - RNA, 19 nt, Homo sapiens
  misc_RNA (1)...(19): siRNA sense strand
cuagagguuucccuggauu

SEQ ID NO: 646576 - RNA, 19 nt, Homo sapiens
  misc_RNA (1)...(19): siRNA sense strand
gcaaauggagacggcuauu

SEQ ID NO: 646577 - RNA, 19 nt, Homo sapiens
  misc_RNA (1)...(19): siRNA sense strand
gaaaggcuuccagggagaa

SEQ ID NO: 646578 - RNA, 19 nt, Homo sapiens
  misc_RNA (1)...(19): siRNA sense strand
gcagcugggcuuccugguu

SEQ ID NO: 646579 - RNA, 19 nt, Homo sapiens
  misc_RNA (1)...(19): siRNA sense strand
ggagagaugguggauuaca

SEQ ID NO: 646580 - RNA, 19 nt, Homo sapiens
  misc_RNA (1)...(19): siRNA sense strand
gaugcuggcaacuccauug

SEQ ID NO: 646581 - RNA, 19 nt, Homo sapiens
  misc_RNA (1)...(19): siRNA sense strand
gcguggagcagcuggagaa

SEQ ID NO: 646582 - RNA, 19 nt, Homo sapiens
  misc_RNA (1)...(19): siRNA sense strand
uggagcagcuggagaacag

SEQ ID NO: 646583 - RNA, 19 nt, Homo sapiens
  misc_RNA (1)...(19): siRNA sense strand
ggauuuccgggucccauug

SEQ ID NO: 646584 - RNA, 19 nt, Homo sapiens
  misc_RNA (1)...(19): siRNA sense strand
gagaugguggauuacaaug

SEQ ID NO: 646585 - RNA, 19 nt, Homo sapiens
  misc_RNA (1)...(19): siRNA sense strand
uagcggagcgcacccacaa

SEQ ID NO: 646586 - RNA, 19 nt, Homo sapiens
  misc_RNA (1)...(19): siRNA sense strand
gggagaaccagggaaagga

SEQ ID NO: 646587 - RNA, 19 nt, Homo sapiens
  misc_RNA (1)...(19): siRNA sense strand
gagccaggccagcauccaa

SEQ ID NO: 646588 - RNA, 19 nt, Homo sapiens
  misc_RNA (1)...(19): siRNA sense strand
gguacuccaggaccaauug

SEQ ID NO: 646589 - RNA, 19 nt, Homo sapiens
  misc_RNA (1)...(19): siRNA sense strand
aaaggagacccugggauga

SEQ ID NO: 646590 - RNA, 19 nt, Homo sapiens
  misc_RNA (1)...(19): siRNA sense strand
gagccagggaucccaggaa

SEQ ID NO: 646591 - RNA, 19 nt, Homo sapiens
  misc_RNA (1)...(19): siRNA sense strand
gaaccagggaaaggagaga

SEQ ID NO: 646592 - RNA, 19 nt, Homo sapiens
  misc_RNA (1)...(19): siRNA sense strand
gauuacaauggaaacauca

SEQ ID NO: 646593 - RNA, 19 nt, Homo sapiens
  misc_RNA (1)...(19): siRNA sense strand
ggucaaccaggaacuagag

SEQ ID NO: 646594 - RNA, 19 nt, Homo sapiens
  misc_RNA (1)...(19): siRNA sense strand
aaggagagaugguggauua

SEQ ID NO: 646595 - RNA, 19 nt, Homo sapiens
  misc_RNA (1)...(19): siRNA sense strand
cagcugggcuuccugguuu

SEQ ID NO: 646596 - RNA, 19 nt, Homo sapiens
  misc_RNA (1)...(19): siRNA sense strand
ccaaagacaucuccaggau

SEQ ID NO: 646597 - RNA, 19 nt, Homo sapiens
  misc_RNA (1)...(19): siRNA sense strand
gagagaugguggauuacaa

SEQ ID NO: 646598 - RNA, 19 nt, Homo sapiens
  misc_RNA (1)...(19): siRNA sense strand
aaagggaccucgcgguaaa

SEQ ID NO: 646599 - RNA, 19 nt, Homo sapiens
  misc_RNA (1)...(19): siRNA sense strand
gaugguggauuacaaugga

SEQ ID NO: 646600 - RNA, 19 nt, Homo sapiens
  misc_RNA (1)...(19): siRNA sense strand
ggauuacaauggaaacauc

SEQ ID NO: 646601 - RNA, 19 nt, Homo sapiens
  misc_RNA (1)...(19): siRNA sense strand
caagggagaaccagggaaa

SEQ ID NO: 646602 - RNA, 19 nt, Homo sapiens
  misc_RNA (1)...(19): siRNA sense strand
ggaagcaggacuagaugga

SEQ ID NO: 646603 - RNA, 19 nt, Homo sapiens
  misc_RNA (1)...(19): siRNA sense strand
caaggcugcuggaacaagu

SEQ ID NO: 646604 - RNA, 19 nt, Homo sapiens
  misc_RNA (1)...(19): siRNA sense strand
gggagaagcaggugucgau

SEQ ID NO: 646605 - RNA, 19 nt, Homo sapiens
  misc_RNA (1)...(19): siRNA sense strand
ggagaacagggaccagaug

SEQ ID NO: 646606 - RNA, 19 nt, Homo sapiens
  misc_RNA (1)...(19): siRNA sense strand
acaauggaaacaucaauga

SEQ ID NO: 646607 - RNA, 19 nt, Homo sapiens
  misc_RNA (1)...(19): siRNA sense strand
gaaaggagagaugguggau

SEQ ID NO: 646608 - RNA, 19 nt, Homo sapiens
  misc_RNA (1)...(19): siRNA sense strand
cuagagguuucccuggauu

SEQ ID NO: 646609 - RNA, 19 nt, Homo sapiens
  misc_RNA (1)...(19): siRNA sense strand
gcaaauggagacggcuauu

SEQ ID NO: 646610 - RNA, 19 nt, Homo sapiens
  misc_RNA (1)...(19): siRNA sense strand
gaaaggcuuccagggagaa

SEQ ID NO: 646611 - RNA, 19 nt, Homo sapiens
  misc_RNA (1)...(19): siRNA sense strand
gcagcugggcuuccugguu

SEQ ID NO: 646612 - RNA, 19 nt, Homo sapiens
  misc_RNA (1)...(19): siRNA sense strand
ggagagaugguggauuaca

SEQ ID NO: 646613 - RNA, 19 nt, Homo sapiens
  misc_RNA (1)...(19): siRNA sense strand
gaugcuggcaacuccauug

SEQ ID NO: 646614 - RNA, 19 nt, Homo sapiens
  misc_RNA (1)...(19): siRNA sense strand
gcguggagcagcuggagaa

SEQ ID NO: 646615 - RNA, 19 nt, Homo sapiens
  misc_RNA (1)...(19): siRNA sense strand
uggagcagcuggagaacag

SEQ ID NO: 646616 - RNA, 19 nt, Homo sapiens
  misc_RNA (1)...(19): siRNA sense strand
ggauuuccgggucccauug

SEQ ID NO: 646617 - RNA, 19 nt, Homo sapiens
  misc_RNA (1)...(19): siRNA sense strand
gagaugguggauuacaaug

SEQ ID NO: 646618 - RNA, 19 nt, Homo sapiens
  misc_RNA (1)...(19): siRNA sense strand
uagcggagcgcacccacaa

SEQ ID NO: 646619 - RNA, 19 nt, Homo sapiens
  misc_RNA (1)...(19): siRNA sense strand
gggagaaccagggaaagga

SEQ ID NO: 646620 - RNA, 19 nt, Homo sapiens
  misc_RNA (1)...(19): siRNA sense strand
gagccaggccagcauccaa

SEQ ID NO: 646621 - RNA, 19 nt, Homo sapiens
  misc_RNA (1)...(19): siRNA sense strand
gguacuccaggaccaauug

SEQ ID NO: 646622 - RNA, 19 nt, Homo sapiens
  misc_RNA (1)...(19): siRNA sense strand
aaaggagacccugggauga

SEQ ID NO: 646623 - RNA, 19 nt, Homo sapiens
  misc_RNA (1)...(19): siRNA sense strand
gagccagggaucccaggaa

SEQ ID NO: 646624 - RNA, 19 nt, Homo sapiens
  misc_RNA (1)...(19): siRNA sense strand
gaaccagggaaaggagaga

SEQ ID NO: 646625 - RNA, 19 nt, Homo sapiens
  misc_RNA (1)...(19): siRNA sense strand
gauuacaauggaaacauca

SEQ ID NO: 646626 - RNA, 19 nt, Homo sapiens
  misc_RNA (1)...(19): siRNA sense strand
ggucaaccaggaacuagag

SEQ ID NO: 646627 - RNA, 19 nt, Homo sapiens
  misc_RNA (1)...(19): siRNA sense strand
aaggagagaugguggauua

SEQ ID NO: 646628 - RNA, 19 nt, Homo sapiens
  misc_RNA (1)...(19): siRNA sense strand
cagcugggcuuccugguuu

SEQ ID NO: 646629 - RNA, 19 nt, Homo sapiens
  misc_RNA (1)...(19): siRNA sense strand
ccaaagacaucuccaggau

SEQ ID NO: 646630 - RNA, 19 nt, Homo sapiens
  misc_RNA (1)...(19): siRNA sense strand
gagagaugguggauuacaa

SEQ ID NO: 646631 - RNA, 19 nt, Homo sapiens
  misc_RNA (1)...(19): siRNA sense strand
aaagggaccucgcgguaaa

SEQ ID NO: 646632 - RNA, 19 nt, Homo sapiens
  misc_RNA (1)...(19): siRNA sense strand
gaugguggauuacaaugga

SEQ ID NO: 646633 - RNA, 19 nt, Homo sapiens
  misc_RNA (1)...(19): siRNA sense strand
ggauuacaauggaaacauc

SEQ ID NO: 646634 - RNA, 19 nt, Homo sapiens
  misc_RNA (1)...(19): siRNA sense strand
caagggagaaccagggaaa

SEQ ID NO: 646635 - RNA, 19 nt, Homo sapiens
  misc_RNA (1)...(19): siRNA sense strand
ggaagcaggacuagaugga

SEQ ID NO: 646636 - RNA, 19 nt, Homo sapiens
  misc_RNA (1)...(19): siRNA sense strand
caaggcugcuggaacaagu

SEQ ID NO: 646637 - RNA, 19 nt, Homo sapiens
  misc_RNA (1)...(19): siRNA sense strand
gggagaagcaggugucgau

SEQ ID NO: 646638 - RNA, 19 nt, Homo sapiens
  misc_RNA (1)...(19): siRNA sense strand
ggagaacagggaccagaug

SEQ ID NO: 646639 - RNA, 19 nt, Homo sapiens
  misc_RNA (1)...(19): siRNA sense strand
acaauggaaacaucaauga

SEQ ID NO: 646640 - RNA, 19 nt, Homo sapiens
  misc_RNA (1)...(19): siRNA sense strand
gaaaggagagaugguggau

SEQ ID NO: 646641 - RNA, 19 nt, Homo sapiens
  misc_RNA (1)...(19): siRNA sense strand
cuagagguuucccuggauu

SEQ ID NO: 646642 - RNA, 19 nt, Homo sapiens
  misc_RNA (1)...(19): siRNA sense strand
gcaaauggagacggcuauu

SEQ ID NO: 646643 - RNA, 19 nt, Homo sapiens
  misc_RNA (1)...(19): siRNA sense strand
gaaaggcuuccagggagaa

SEQ ID NO: 646644 - RNA, 19 nt, Homo sapiens
  misc_RNA (1)...(19): siRNA sense strand
gcagcugggcuuccugguu

SEQ ID NO: 646645 - RNA, 19 nt, Homo sapiens
  misc_RNA (1)...(19): siRNA sense strand
ggagagaugguggauuaca

SEQ ID NO: 646646 - RNA, 19 nt, Homo sapiens
  misc_RNA (1)...(19): siRNA sense strand
gaugcuggcaacuccauug

SEQ ID NO: 646647 - RNA, 19 nt, Homo sapiens
  misc_RNA (1)...(19): siRNA sense strand
gcguggagcagcuggagaa

SEQ ID NO: 646648 - RNA, 19 nt, Homo sapiens
  misc_RNA (1)...(19): siRNA sense strand
uggagcagcuggagaacag

SEQ ID NO: 646649 - RNA, 19 nt, Homo sapiens
  misc_RNA (1)...(19): siRNA sense strand
ggauuuccgggucccauug

SEQ ID NO: 646650 - RNA, 19 nt, Homo sapiens
  misc_RNA (1)...(19): siRNA sense strand
gagaugguggauuacaaug

SEQ ID NO: 646651 - RNA, 19 nt, Homo sapiens
  misc_RNA (1)...(19): siRNA sense strand
uagcggagcgcacccacaa

SEQ ID NO: 646652 - RNA, 19 nt, Homo sapiens
  misc_RNA (1)...(19): siRNA sense strand
gggagaaccagggaaagga

SEQ ID NO: 646653 - RNA, 19 nt, Homo sapiens
  misc_RNA (1)...(19): siRNA sense strand
gagccaggccagcauccaa

SEQ ID NO: 646654 - RNA, 19 nt, Homo sapiens
  misc_RNA (1)...(19): siRNA sense strand
gguacuccaggaccaauug

SEQ ID NO: 646655 - RNA, 19 nt, Homo sapiens
  misc_RNA (1)...(19): siRNA sense strand
aaaggagacccugggauga

SEQ ID NO: 646656 - RNA, 19 nt, Homo sapiens
  misc_RNA (1)...(19): siRNA sense strand
gagccagggaucccaggaa

SEQ ID NO: 646657 - RNA, 19 nt, Homo sapiens
  misc_RNA (1)...(19): siRNA sense strand
gaaccagggaaaggagaga

SEQ ID NO: 646658 - RNA, 19 nt, Homo sapiens
  misc_RNA (1)...(19): siRNA sense strand
gauuacaauggaaacauca

SEQ ID NO: 646659 - RNA, 19 nt, Homo sapiens
  misc_RNA (1)...(19): siRNA sense strand
ggucaaccaggaacuagag

SEQ ID NO: 646660 - RNA, 19 nt, Homo sapiens
  misc_RNA (1)...(19): siRNA sense strand
aaggagagaugguggauua

SEQ ID NO: 646661 - RNA, 19 nt, Homo sapiens
  misc_RNA (1)...(19): siRNA sense strand
cagcugggcuuccugguuu

SEQ ID NO: 646662 - RNA, 19 nt, Homo sapiens
  misc_RNA (1)...(19): siRNA sense strand
ccaaagacaucuccaggau

SEQ ID NO: 646663 - RNA, 19 nt, Homo sapiens
  misc_RNA (1)...(19): siRNA sense strand
gagagaugguggauuacaa

SEQ ID NO: 646664 - RNA, 19 nt, Homo sapiens
  misc_RNA (1)...(19): siRNA sense strand
aaagggaccucgcgguaaa

SEQ ID NO: 646665 - RNA, 19 nt, Homo sapiens
  misc_RNA (1)...(19): siRNA sense strand
gaugguggauuacaaugga

SEQ ID NO: 646666 - RNA, 19 nt, Homo sapiens
  misc_RNA (1)...(19): siRNA sense strand
ggauuacaauggaaacauc

SEQ ID NO: 646667 - RNA, 19 nt, Homo sapiens
  misc_RNA (1)...(19): siRNA sense strand
caagggagaaccagggaaa

SEQ ID NO: 646668 - RNA, 19 nt, Homo sapiens
  misc_RNA (1)...(19): siRNA sense strand
ggaagcaggacuagaugga

SEQ ID NO: 646669 - RNA, 19 nt, Homo sapiens
  misc_RNA (1)...(19): siRNA sense strand
caaggcugcuggaacaagu

SEQ ID NO: 646670 - RNA, 19 nt, Homo sapiens
  misc_RNA (1)...(19): siRNA sense strand
gggagaagcaggugucgau

SEQ ID NO: 646671 - RNA, 19 nt, Homo sapiens
  misc_RNA (1)...(19): siRNA sense strand
ggagaacagggaccagaug

SEQ ID NO: 646672 - RNA, 19 nt, Homo sapiens
  misc_RNA (1)...(19): siRNA sense strand
acaauggaaacaucaauga

SEQ ID NO: 646673 - RNA, 19 nt, Homo sapiens
  misc_RNA (1)...(19): siRNA sense strand
gaaaggagagaugguggau

SEQ ID NO: 646674 - RNA, 19 nt, Homo sapiens
  misc_RNA (1)...(19): siRNA sense strand
cuagagguuucccuggauu

SEQ ID NO: 646675 - RNA, 19 nt, Homo sapiens
  misc_RNA (1)...(19): siRNA sense strand
gcaaauggagacggcuauu

SEQ ID NO: 646676 - RNA, 19 nt, Homo sapiens
  misc_RNA (1)...(19): siRNA sense strand
gaaaggcuuccagggagaa

SEQ ID NO: 646677 - RNA, 19 nt, Homo sapiens
  misc_RNA (1)...(19): siRNA sense strand
gcagcugggcuuccugguu

SEQ ID NO: 646678 - RNA, 19 nt, Homo sapiens
  misc_RNA (1)...(19): siRNA sense strand
ggagagaugguggauuaca

SEQ ID NO: 646679 - RNA, 19 nt, Homo sapiens
  misc_RNA (1)...(19): siRNA sense strand
gaugcuggcaacuccauug

SEQ ID NO: 646680 - RNA, 19 nt, Homo sapiens
  misc_RNA (1)...(19): siRNA sense strand
gcguggagcagcuggagaa

SEQ ID NO: 646681 - RNA, 19 nt, Homo sapiens
  misc_RNA (1)...(19): siRNA sense strand
uggagcagcuggagaacag

SEQ ID NO: 646682 - RNA, 19 nt, Homo sapiens
  misc_RNA (1)...(19): siRNA sense strand
ggauuuccgggucccauug

SEQ ID NO: 646683 - RNA, 19 nt, Homo sapiens
  misc_RNA (1)...(19): siRNA sense strand
gagaugguggauuacaaug

SEQ ID NO: 646684 - RNA, 19 nt, Homo sapiens
  misc_RNA (1)...(19): siRNA sense strand
uagcggagcgcacccacaa

SEQ ID NO: 646685 - RNA, 19 nt, Homo sapiens
  misc_RNA (1)...(19): siRNA sense strand
gggagaaccagggaaagga

SEQ ID NO: 646686 - RNA, 19 nt, Homo sapiens
  misc_RNA (1)...(19): siRNA sense strand
gagccaggccagcauccaa

SEQ ID NO: 646687 - RNA, 19 nt, Homo sapiens
  misc_RNA (1)...(19): siRNA sense strand
gguacuccaggaccaauug

SEQ ID NO: 646688 - RNA, 19 nt, Homo sapiens
  misc_RNA (1)...(19): siRNA sense strand
aaaggagacccugggauga

SEQ ID NO: 646689 - RNA, 19 nt, Homo sapiens
  misc_RNA (1)...(19): siRNA sense strand
gagccagggaucccaggaa

SEQ ID NO: 646690 - RNA, 19 nt, Homo sapiens
  misc_RNA (1)...(19): siRNA sense strand
gaaccagggaaaggagaga

SEQ ID NO: 646691 - RNA, 19 nt, Homo sapiens
  misc_RNA (1)...(19): siRNA sense strand
gauuacaauggaaacauca

SEQ ID NO: 646692 - RNA, 19 nt, Homo sapiens
  misc_RNA (1)...(19): siRNA sense strand
ggucaaccaggaacuagag

SEQ ID NO: 646693 - RNA, 19 nt, Homo sapiens
  misc_RNA (1)...(19): siRNA sense strand
aaggagagaugguggauua

SEQ ID NO: 646694 - RNA, 19 nt, Homo sapiens
  misc_RNA (1)...(19): siRNA sense strand
cagcugggcuuccugguuu

SEQ ID NO: 646695 - RNA, 19 nt, Homo sapiens
  misc_RNA (1)...(19): siRNA sense strand
ccaaagacaucuccaggau

SEQ ID NO: 646696 - RNA, 19 nt, Homo sapiens
  misc_RNA (1)...(19): siRNA sense strand
gagagaugguggauuacaa

SEQ ID NO: 646697 - RNA, 19 nt, Homo sapiens
  misc_RNA (1)...(19): siRNA sense strand
aaagggaccucgcgguaaa

SEQ ID NO: 646698 - RNA, 19 nt, Homo sapiens
  misc_RNA (1)...(19): siRNA sense strand
gaugguggauuacaaugga

SEQ ID NO: 646699 - RNA, 19 nt, Homo sapiens
  misc_RNA (1)...(19): siRNA sense strand
ggauuacaauggaaacauc

SEQ ID NO: 646700 - RNA, 19 nt, Homo sapiens
  misc_RNA (1)...(19): siRNA sense strand
caagggagaaccagggaaa

SEQ ID NO: 646701 - RNA, 19 nt, Homo sapiens
  misc_RNA (1)...(19): siRNA sense strand
ggaagcaggacuagaugga

SEQ ID NO: 646702 - RNA, 19 nt, Homo sapiens
  misc_RNA (1)...(19): siRNA sense strand
caaggcugcuggaacaagu

SEQ ID NO: 646703 - RNA, 19 nt, Homo sapiens
  misc_RNA (1)...(19): siRNA sense strand
gggagaagcaggugucgau

SEQ ID NO: 646704 - RNA, 19 nt, Homo sapiens
  misc_RNA (1)...(19): siRNA sense strand
ggagaacagggaccagaug

SEQ ID NO: 646705 - RNA, 19 nt, Homo sapiens
  misc_RNA (1)...(19): siRNA sense strand
acaauggaaacaucaauga

SEQ ID NO: 646706 - RNA, 19 nt, Homo sapiens
  misc_RNA (1)...(19): siRNA sense strand
gaaaggagagaugguggau

SEQ ID NO: 646707 - RNA, 19 nt, Homo sapiens
  misc_RNA (1)...(19): siRNA sense strand
cuagagguuucccuggauu

SEQ ID NO: 646708 - RNA, 19 nt, Homo sapiens
  misc_RNA (1)...(19): siRNA sense strand
gcaaauggagacggcuauu

SEQ ID NO: 646709 - RNA, 19 nt, Homo sapiens
  misc_RNA (1)...(19): siRNA sense strand
gaaaggcuuccagggagaa

SEQ ID NO: 646710 - RNA, 19 nt, Homo sapiens
  misc_RNA (1)...(19): siRNA sense strand
gcagcugggcuuccugguu

SEQ ID NO: 646711 - RNA, 19 nt, Homo sapiens
  misc_RNA (1)...(19): siRNA sense strand
ggagagaugguggauuaca

SEQ ID NO: 646712 - RNA, 19 nt, Homo sapiens
  misc_RNA (1)...(19): siRNA sense strand
gaugcuggcaacuccauug

SEQ ID NO: 646713 - RNA, 19 nt, Homo sapiens
  misc_RNA (1)...(19): siRNA sense strand
gcguggagcagcuggagaa

SEQ ID NO: 646714 - RNA, 19 nt, Homo sapiens
  misc_RNA (1)...(19): siRNA sense strand
uggagcagcuggagaacag

SEQ ID NO: 646715 - RNA, 19 nt, Homo sapiens
  misc_RNA (1)...(19): siRNA sense strand
ggauuuccgggucccauug

SEQ ID NO: 646716 - RNA, 19 nt, Homo sapiens
  misc_RNA (1)...(19): siRNA sense strand
gagaugguggauuacaaug

SEQ ID NO: 646717 - RNA, 19 nt, Homo sapiens
  misc_RNA (1)...(19): siRNA sense strand
uagcggagcgcacccacaa

SEQ ID NO: 646718 - RNA, 19 nt, Homo sapiens
  misc_RNA (1)...(19): siRNA sense strand
gggagaaccagggaaagga

SEQ ID NO: 646719 - RNA, 19 nt, Homo sapiens
  misc_RNA (1)...(19): siRNA sense strand
gagccaggccagcauccaa

SEQ ID NO: 646720 - RNA, 19 nt, Homo sapiens
  misc_RNA (1)...(19): siRNA sense strand
gguacuccaggaccaauug

SEQ ID NO: 646721 - RNA, 19 nt, Homo sapiens
  misc_RNA (1)...(19): siRNA sense strand
aaaggagacccugggauga

SEQ ID NO: 646722 - RNA, 19 nt, Homo sapiens
  misc_RNA (1)...(19): siRNA sense strand
gagccagggaucccaggaa

SEQ ID NO: 646723 - RNA, 19 nt, Homo sapiens
  misc_RNA (1)...(19): siRNA sense strand
gaaccagggaaaggagaga

SEQ ID NO: 646724 - RNA, 19 nt, Homo sapiens
  misc_RNA (1)...(19): siRNA sense strand
gauuacaauggaaacauca

SEQ ID NO: 646725 - RNA, 19 nt, Homo sapiens
  misc_RNA (1)...(19): siRNA sense strand
ggucaaccaggaacuagag

SEQ ID NO: 646726 - RNA, 19 nt, Homo sapiens
  misc_RNA (1)...(19): siRNA sense strand
aaggagagaugguggauua

SEQ ID NO: 646727 - RNA, 19 nt, Homo sapiens
  misc_RNA (1)...(19): siRNA sense strand
cagcugggcuuccugguuu

SEQ ID NO: 646728 - RNA, 19 nt, Homo sapiens
  misc_RNA (1)...(19): siRNA sense strand
ccaaagacaucuccaggau

SEQ ID NO: 646729 - RNA, 19 nt, Homo sapiens
  misc_RNA (1)...(19): siRNA sense strand
gagagaugguggauuacaa

SEQ ID NO: 646730 - RNA, 19 nt, Homo sapiens
  misc_RNA (1)...(19): siRNA sense strand
aaagggaccucgcgguaaa

SEQ ID NO: 646731 - RNA, 19 nt, Homo sapiens
  misc_RNA (1)...(19): siRNA sense strand
gaugguggauuacaaugga

SEQ ID NO: 646732 - RNA, 19 nt, Homo sapiens
  misc_RNA (1)...(19): siRNA sense strand
ggauuacaauggaaacauc

SEQ ID NO: 646733 - RNA, 19 nt, Homo sapiens
  misc_RNA (1)...(19): siRNA sense strand
caagggagaaccagggaaa

SEQ ID NO: 646734 - RNA, 19 nt, Homo sapiens
  misc_RNA (1)...(19): siRNA sense strand
ggaagcaggacuagaugga

SEQ ID NO: 646735 - RNA, 19 nt, Homo sapiens
  misc_RNA (1)...(19): siRNA sense strand
caaggcugcuggaacaagu

SEQ ID NO: 646736 - RNA, 19 nt, Homo sapiens
  misc_RNA (1)...(19): siRNA sense strand
gggagaagcaggugucgau

SEQ ID NO: 646737 - RNA, 19 nt, Homo sapiens
  misc_RNA (1)...(19): siRNA sense strand
ggagaacagggaccagaug

SEQ ID NO: 646738 - RNA, 19 nt, Homo sapiens
  misc_RNA (1)...(19): siRNA sense strand
acaauggaaacaucaauga

SEQ ID NO: 646739 - RNA, 19 nt, Homo sapiens
  misc_RNA (1)...(19): siRNA sense strand
gaaaggagagaugguggau

SEQ ID NO: 646740 - RNA, 19 nt, Homo sapiens
  misc_RNA (1)...(19): siRNA sense strand
cuagagguuucccuggauu

SEQ ID NO: 646741 - RNA, 19 nt, Homo sapiens
  misc_RNA (1)...(19): siRNA sense strand
gcaaauggagacggcuauu

SEQ ID NO: 646742 - RNA, 19 nt, Homo sapiens
  misc_RNA (1)...(19): siRNA sense strand
gaaaggcuuccagggagaa

SEQ ID NO: 646743 - RNA, 19 nt, Homo sapiens
  misc_RNA (1)...(19): siRNA sense strand
gcagcugggcuuccugguu

SEQ ID NO: 646744 - RNA, 19 nt, Homo sapiens
  misc_RNA (1)...(19): siRNA sense strand
ggagagaugguggauuaca

SEQ ID NO: 646745 - RNA, 19 nt, Homo sapiens
  misc_RNA (1)...(19): siRNA sense strand
gaugcuggcaacuccauug

SEQ ID NO: 646746 - RNA, 19 nt, Homo sapiens
  misc_RNA (1)...(19): siRNA sense strand
gcguggagcagcuggagaa

SEQ ID NO: 646747 - RNA, 19 nt, Homo sapiens
  misc_RNA (1)...(19): siRNA sense strand
uggagcagcuggagaacag

SEQ ID NO: 646748 - RNA, 19 nt, Homo sapiens
  misc_RNA (1)...(19): siRNA sense strand
ggauuuccgggucccauug

SEQ ID NO: 646749 - RNA, 19 nt, Homo sapiens
  misc_RNA (1)...(19): siRNA sense strand
gagaugguggauuacaaug

SEQ ID NO: 646750 - RNA, 19 nt, Homo sapiens
  misc_RNA (1)...(19): siRNA sense strand
uagcggagcgcacccacaa

SEQ ID NO: 646751 - RNA, 19 nt, Homo sapiens
  misc_RNA (1)...(19): siRNA sense strand
gggagaaccagggaaagga

SEQ ID NO: 646752 - RNA, 19 nt, Homo sapiens
  misc_RNA (1)...(19): siRNA sense strand
gagccaggccagcauccaa

SEQ ID NO: 646753 - RNA, 19 nt, Homo sapiens
  misc_RNA (1)...(19): siRNA sense strand
gguacuccaggaccaauug

SEQ ID NO: 646754 - RNA, 19 nt, Homo sapiens
  misc_RNA (1)...(19): siRNA sense strand
aaaggagacccugggauga

SEQ ID NO: 646755 - RNA, 19 nt, Homo sapiens
  misc_RNA (1)...(19): siRNA sense strand
gagccagggaucccaggaa

SEQ ID NO: 646756 - RNA, 19 nt, Homo sapiens
  misc_RNA (1)...(19): siRNA sense strand
gaaccagggaaaggagaga

SEQ ID NO: 646757 - RNA, 19 nt, Homo sapiens
  misc_RNA (1)...(19): siRNA sense strand
gauuacaauggaaacauca

SEQ ID NO: 646758 - RNA, 19 nt, Homo sapiens
  misc_RNA (1)...(19): siRNA sense strand
ggucaaccaggaacuagag

SEQ ID NO: 646759 - RNA, 19 nt, Homo sapiens
  misc_RNA (1)...(19): siRNA sense strand
aaggagagaugguggauua

SEQ ID NO: 646760 - RNA, 19 nt, Homo sapiens
  misc_RNA (1)...(19): siRNA sense strand
cagcugggcuuccugguuu

SEQ ID NO: 646761 - RNA, 19 nt, Homo sapiens
  misc_RNA (1)...(19): siRNA sense strand
ccaaagacaucuccaggau

SEQ ID NO: 646762 - RNA, 19 nt, Homo sapiens
  misc_RNA (1)...(19): siRNA sense strand
gagagaugguggauuacaa

SEQ ID NO: 646763 - RNA, 19 nt, Homo sapiens
  misc_RNA (1)...(19): siRNA sense strand
aaagggaccucgcgguaaa

SEQ ID NO: 646764 - RNA, 19 nt, Homo sapiens
  misc_RNA (1)...(19): siRNA sense strand
gaugguggauuacaaugga

SEQ ID NO: 646765 - RNA, 19 nt, Homo sapiens
  misc_RNA (1)...(19): siRNA sense strand
ggauuacaauggaaacauc

SEQ ID NO: 646766 - RNA, 19 nt, Homo sapiens
  misc_RNA (1)...(19): siRNA sense strand
caagggagaaccagggaaa

SEQ ID NO: 646767 - RNA, 19 nt, Homo sapiens
  misc_RNA (1)...(19): siRNA sense strand
ggaagcaggacuagaugga

SEQ ID NO: 646768 - RNA, 19 nt, Homo sapiens
  misc_RNA (1)...(19): siRNA sense strand
caaggcugcuggaacaagu

SEQ ID NO: 646769 - RNA, 19 nt, Homo sapiens
  misc_RNA (1)...(19): siRNA sense strand
gggagaagcaggugucgau

SEQ ID NO: 646770 - RNA, 19 nt, Homo sapiens
  misc_RNA (1)...(19): siRNA sense strand
ggagaacagggaccagaug

SEQ ID NO: 646771 - RNA, 19 nt, Homo sapiens
  misc_RNA (1)...(19): siRNA sense strand
acaauggaaacaucaauga

SEQ ID NO: 646772 - RNA, 19 nt, Homo sapiens
  misc_RNA (1)...(19): siRNA sense strand
gaaaggagagaugguggau

SEQ ID NO: 646773 - RNA, 19 nt, Homo sapiens
  misc_RNA (1)...(19): siRNA sense strand
cuagagguuucccuggauu

SEQ ID NO: 646774 - RNA, 19 nt, Homo sapiens
  misc_RNA (1)...(19): siRNA sense strand
gcaaauggagacggcuauu

SEQ ID NO: 646775 - RNA, 19 nt, Homo sapiens
  misc_RNA (1)...(19): siRNA sense strand
gaaaggcuuccagggagaa

SEQ ID NO: 646776 - RNA, 19 nt, Homo sapiens
  misc_RNA (1)...(19): siRNA sense strand
gcagcugggcuuccugguu

SEQ ID NO: 646777 - RNA, 19 nt, Homo sapiens
  misc_RNA (1)...(19): siRNA sense strand
ggagagaugguggauuaca

SEQ ID NO: 646778 - RNA, 19 nt, Homo sapiens
  misc_RNA (1)...(19): siRNA sense strand
gaugcuggcaacuccauug

SEQ ID NO: 646779 - RNA, 19 nt, Homo sapiens
  misc_RNA (1)...(19): siRNA sense strand
gcguggagcagcuggagaa

SEQ ID NO: 646780 - RNA, 19 nt, Homo sapiens
  misc_RNA (1)...(19): siRNA sense strand
uggagcagcuggagaacag

SEQ ID NO: 646781 - RNA, 19 nt, Homo sapiens
  misc_RNA (1)...(19): siRNA sense strand
ggauuuccgggucccauug

SEQ ID NO: 646782 - RNA, 19 nt, Homo sapiens
  misc_RNA (1)...(19): siRNA sense strand
gagaugguggauuacaaug

SEQ ID NO: 646783 - RNA, 19 nt, Homo sapiens
  misc_RNA (1)...(19): siRNA sense strand
uagcggagcgcacccacaa

SEQ ID NO: 646784 - RNA, 19 nt, Homo sapiens
  misc_RNA (1)...(19): siRNA sense strand
gggagaaccagggaaagga

SEQ ID NO: 646785 - RNA, 19 nt, Homo sapiens
  misc_RNA (1)...(19): siRNA sense strand
gagccaggccagcauccaa

SEQ ID NO: 646786 - RNA, 19 nt, Homo sapiens
  misc_RNA (1)...(19): siRNA sense strand
gguacuccaggaccaauug

SEQ ID NO: 646787 - RNA, 19 nt, Homo sapiens
  misc_RNA (1)...(19): siRNA sense strand
aaaggagacccugggauga

SEQ ID NO: 646788 - RNA, 19 nt, Homo sapiens
  misc_RNA (1)...(19): siRNA sense strand
gagccagggaucccaggaa

SEQ ID NO: 646789 - RNA, 19 nt, Homo sapiens
  misc_RNA (1)...(19): siRNA sense strand
gaaccagggaaaggagaga

SEQ ID NO: 646790 - RNA, 19 nt, Homo sapiens
  misc_RNA (1)...(19): siRNA sense strand
gauuacaauggaaacauca

SEQ ID NO: 646791 - RNA, 19 nt, Homo sapiens
  misc_RNA (1)...(19): siRNA sense strand
ggucaaccaggaacuagag

SEQ ID NO: 646792 - RNA, 19 nt, Homo sapiens
  misc_RNA (1)...(19): siRNA sense strand
aaggagagaugguggauua

SEQ ID NO: 646793 - RNA, 19 nt, Homo sapiens
  misc_RNA (1)...(19): siRNA sense strand
cagcugggcuuccugguuu

SEQ ID NO: 646794 - RNA, 19 nt, Homo sapiens
  misc_RNA (1)...(19): siRNA sense strand
ccaaagacaucuccaggau

SEQ ID NO: 646795 - RNA, 19 nt, Homo sapiens
  misc_RNA (1)...(19): siRNA sense strand
gagagaugguggauuacaa

SEQ ID NO: 646796 - RNA, 19 nt, Homo sapiens
  misc_RNA (1)...(19): siRNA sense strand
aaagggaccucgcgguaaa

SEQ ID NO: 646797 - RNA, 19 nt, Homo sapiens
  misc_RNA (1)...(19): siRNA sense strand
gaugguggauuacaaugga

SEQ ID NO: 646798 - RNA, 19 nt, Homo sapiens
  misc_RNA (1)...(19): siRNA sense strand
ggauuacaauggaaacauc

SEQ ID NO: 646799 - RNA, 19 nt, Homo sapiens
  misc_RNA (1)...(19): siRNA sense strand
caagggagaaccagggaaa

SEQ ID NO: 646800 - RNA, 19 nt, Homo sapiens
  misc_RNA (1)...(19): siRNA sense strand
ggaagcaggacuagaugga

SEQ ID NO: 646801 - RNA, 19 nt, Homo sapiens
  misc_RNA (1)...(19): siRNA sense strand
caaggcugcuggaacaagu

SEQ ID NO: 646802 - RNA, 19 nt, Homo sapiens
  misc_RNA (1)...(19): siRNA sense strand
gggagaagcaggugucgau

SEQ ID NO: 646803 - RNA, 19 nt, Homo sapiens
  misc_RNA (1)...(19): siRNA sense strand
ggagaacagggaccagaug

SEQ ID NO: 646804 - RNA, 19 nt, Homo sapiens
  misc_RNA (1)...(19): siRNA sense strand
acaauggaaacaucaauga

SEQ ID NO: 646805 - RNA, 19 nt, Homo sapiens
  misc_RNA (1)...(19): siRNA sense strand
gaaaggagagaugguggau

SEQ ID NO: 646806 - RNA, 19 nt, Homo sapiens
  misc_RNA (1)...(19): siRNA sense strand
cuagagguuucccuggauu

SEQ ID NO: 646807 - RNA, 19 nt, Homo sapiens
  misc_RNA (1)...(19): siRNA sense strand
gcaaauggagacggcuauu

SEQ ID NO: 646808 - RNA, 19 nt, Homo sapiens
  misc_RNA (1)...(19): siRNA sense strand
gaaaggcuuccagggagaa

SEQ ID NO: 646809 - RNA, 19 nt, Homo sapiens
  misc_RNA (1)...(19): siRNA sense strand
gcagcugggcuuccugguu

SEQ ID NO: 646810 - RNA, 19 nt, Homo sapiens
  misc_RNA (1)...(19): siRNA sense strand
ggagagaugguggauuaca

SEQ ID NO: 646811 - RNA, 19 nt, Homo sapiens
  misc_RNA (1)...(19): siRNA sense strand
gaugcuggcaacuccauug

SEQ ID NO: 646812 - RNA, 19 nt, Homo sapiens
  misc_RNA (1)...(19): siRNA sense strand
gcguggagcagcuggagaa

SEQ ID NO: 646813 - RNA, 19 nt, Homo sapiens
  misc_RNA (1)...(19): siRNA sense strand
uggagcagcuggagaacag

SEQ ID NO: 646814 - RNA, 19 nt, Homo sapiens
  misc_RNA (1)...(19): siRNA sense strand
ggauuuccgggucccauug

SEQ ID NO: 646815 - RNA, 19 nt, Homo sapiens
  misc_RNA (1)...(19): siRNA sense strand
gagaugguggauuacaaug

SEQ ID NO: 646816 - RNA, 19 nt, Homo sapiens
  misc_RNA (1)...(19): siRNA sense strand
uagcggagcgcacccacaa

SEQ ID NO: 646817 - RNA, 19 nt, Homo sapiens
  misc_RNA (1)...(19): siRNA sense strand
gggagaaccagggaaagga

SEQ ID NO: 646818 - RNA, 19 nt, Homo sapiens
  misc_RNA (1)...(19): siRNA sense strand
gagccaggccagcauccaa

SEQ ID NO: 646819 - RNA, 19 nt, Homo sapiens
  misc_RNA (1)...(19): siRNA sense strand
gguacuccaggaccaauug

SEQ ID NO: 646820 - RNA, 19 nt, Homo sapiens
  misc_RNA (1)...(19): siRNA sense strand
aaaggagacccugggauga

SEQ ID NO: 646821 - RNA, 19 nt, Homo sapiens
  misc_RNA (1)...(19): siRNA sense strand
gagccagggaucccaggaa

SEQ ID NO: 646822 - RNA, 19 nt, Homo sapiens
  misc_RNA (1)...(19): siRNA sense strand
gaaccagggaaaggagaga

SEQ ID NO: 646823 - RNA, 19 nt, Homo sapiens
  misc_RNA (1)...(19): siRNA sense strand
gauuacaauggaaacauca

SEQ ID NO: 646824 - RNA, 19 nt, Homo sapiens
  misc_RNA (1)...(19): siRNA sense strand
ggucaaccaggaacuagag

SEQ ID NO: 646825 - RNA, 19 nt, Homo sapiens
  misc_RNA (1)...(19): siRNA sense strand
aaggagagaugguggauua

SEQ ID NO: 646826 - RNA, 19 nt, Homo sapiens
  misc_RNA (1)...(19): siRNA sense strand
cagcugggcuuccugguuu

SEQ ID NO: 646827 - RNA, 19 nt, Homo sapiens
  misc_RNA (1)...(19): siRNA sense strand
ccaaagacaucuccaggau

SEQ ID NO: 646828 - RNA, 19 nt, Homo sapiens
  misc_RNA (1)...(19): siRNA sense strand
gagagaugguggauuacaa

SEQ ID NO: 646829 - RNA, 19 nt, Homo sapiens
  misc_RNA (1)...(19): siRNA sense strand
aaagggaccucgcgguaaa

SEQ ID NO: 646830 - RNA, 19 nt, Homo sapiens
  misc_RNA (1)...(19): siRNA sense strand
gaugguggauuacaaugga

SEQ ID NO: 646831 - RNA, 19 nt, Homo sapiens
  misc_RNA (1)...(19): siRNA sense strand
ggauuacaauggaaacauc

SEQ ID NO: 646832 - RNA, 19 nt, Homo sapiens
  misc_RNA (1)...(19): siRNA sense strand
caagggagaaccagggaaa

SEQ ID NO: 646833 - RNA, 19 nt, Homo sapiens
  misc_RNA (1)...(19): siRNA sense strand
ggaagcaggacuagaugga

SEQ ID NO: 646834 - RNA, 19 nt, Homo sapiens
  misc_RNA (1)...(19): siRNA sense strand
caaggcugcuggaacaagu

SEQ ID NO: 646835 - RNA, 19 nt, Homo sapiens
  misc_RNA (1)...(19): siRNA sense strand
gggagaagcaggugucgau

SEQ ID NO: 646836 - RNA, 19 nt, Homo sapiens
  misc_RNA (1)...(19): siRNA sense strand
ggagaacagggaccagaug

SEQ ID NO: 646837 - RNA, 19 nt, Homo sapiens
  misc_RNA (1)...(19): siRNA sense strand
acaauggaaacaucaauga

SEQ ID NO: 646838 - RNA, 19 nt, Homo sapiens
  misc_RNA (1)...(19): siRNA sense strand
gaaaggagagaugguggau

SEQ ID NO: 646839 - RNA, 19 nt, Homo sapiens
  misc_RNA (1)...(19): siRNA sense strand
cuagagguuucccuggauu

SEQ ID NO: 646840 - RNA, 19 nt, Homo sapiens
  misc_RNA (1)...(19): siRNA sense strand
gcaaauggagacggcuauu

SEQ ID NO: 646841 - RNA, 19 nt, Homo sapiens
  misc_RNA (1)...(19): siRNA sense strand
gaaaggcuuccagggagaa

SEQ ID NO: 646842 - RNA, 19 nt, Homo sapiens
  misc_RNA (1)...(19): siRNA sense strand
gcagcugggcuuccugguu

SEQ ID NO: 646843 - RNA, 19 nt, Homo sapiens
  misc_RNA (1)...(19): siRNA sense strand
ggagagaugguggauuaca

SEQ ID NO: 646844 - RNA, 19 nt, Homo sapiens
  misc_RNA (1)...(19): siRNA sense strand
gaugcuggcaacuccauug

SEQ ID NO: 646845 - RNA, 19 nt, Homo sapiens
  misc_RNA (1)...(19): siRNA sense strand
gcguggagcagcuggagaa

SEQ ID NO: 646846 - RNA, 19 nt, Homo sapiens
  misc_RNA (1)...(19): siRNA sense strand
uggagcagcuggagaacag

SEQ ID NO: 646847 - RNA, 19 nt, Homo sapiens
  misc_RNA (1)...(19): siRNA sense strand
ggauuuccgggucccauug

SEQ ID NO: 646848 - RNA, 19 nt, Homo sapiens
  misc_RNA (1)...(19): siRNA sense strand
gagaugguggauuacaaug

SEQ ID NO: 646849 - RNA, 19 nt, Homo sapiens
  misc_RNA (1)...(19): siRNA sense strand
uagcggagcgcacccacaa

SEQ ID NO: 646850 - RNA, 19 nt, Homo sapiens
  misc_RNA (1)...(19): siRNA sense strand
gggagaaccagggaaagga

SEQ ID NO: 646851 - RNA, 19 nt, Homo sapiens
  misc_RNA (1)...(19): siRNA sense strand
gagccaggccagcauccaa

SEQ ID NO: 646852 - RNA, 19 nt, Homo sapiens
  misc_RNA (1)...(19): siRNA sense strand
gguacuccaggaccaauug

SEQ ID NO: 646853 - RNA, 19 nt, Homo sapiens
  misc_RNA (1)...(19): siRNA sense strand
aaaggagacccugggauga

SEQ ID NO: 646854 - RNA, 19 nt, Homo sapiens
  misc_RNA (1)...(19): siRNA sense strand
gagccagggaucccaggaa

SEQ ID NO: 646855 - RNA, 19 nt, Homo sapiens
  misc_RNA (1)...(19): siRNA sense strand
gaaccagggaaaggagaga

SEQ ID NO: 646856 - RNA, 19 nt, Homo sapiens
  misc_RNA (1)...(19): siRNA sense strand
gauuacaauggaaacauca

SEQ ID NO: 646857 - RNA, 19 nt, Homo sapiens
  misc_RNA (1)...(19): siRNA sense strand
ggucaaccaggaacuagag

SEQ ID NO: 646858 - RNA, 19 nt, Homo sapiens
  misc_RNA (1)...(19): siRNA sense strand
aaggagagaugguggauua

SEQ ID NO: 646859 - RNA, 19 nt, Homo sapiens
  misc_RNA (1)...(19): siRNA sense strand
cagcugggcuuccugguuu

SEQ ID NO: 646860 - RNA, 19 nt, Homo sapiens
  misc_RNA (1)...(19): siRNA sense strand
ccaaagacaucuccaggau

SEQ ID NO: 646861 - RNA, 19 nt, Homo sapiens
  misc_RNA (1)...(19): siRNA sense strand
gagagaugguggauuacaa

SEQ ID NO: 646862 - RNA, 19 nt, Homo sapiens
  misc_RNA (1)...(19): siRNA sense strand
aaagggaccucgcgguaaa

SEQ ID NO: 646863 - RNA, 19 nt, Homo sapiens
  misc_RNA (1)...(19): siRNA sense strand
gaugguggauuacaaugga

SEQ ID NO: 646864 - RNA, 19 nt, Homo sapiens
  misc_RNA (1)...(19): siRNA sense strand
ggauuacaauggaaacauc

SEQ ID NO: 646865 - RNA, 19 nt, Homo sapiens
  misc_RNA (1)...(19): siRNA sense strand
caagggagaaccagggaaa

SEQ ID NO: 646866 - RNA, 19 nt, Homo sapiens
  misc_RNA (1)...(19): siRNA sense strand
ggaagcaggacuagaugga

SEQ ID NO: 646867 - RNA, 19 nt, Homo sapiens
  misc_RNA (1)...(19): siRNA sense strand
caaggcugcuggaacaagu

SEQ ID NO: 646868 - RNA, 19 nt, Homo sapiens
  misc_RNA (1)...(19): siRNA sense strand
gggagaagcaggugucgau

SEQ ID NO: 646869 - RNA, 19 nt, Homo sapiens
  misc_RNA (1)...(19): siRNA sense strand
ggagaacagggaccagaug

SEQ ID NO: 646870 - RNA, 19 nt, Homo sapiens
  misc_RNA (1)...(19): siRNA sense strand
acaauggaaacaucaauga

SEQ ID NO: 646871 - RNA, 19 nt, Homo sapiens
  misc_RNA (1)...(19): siRNA sense strand
gaaaggagagaugguggau

SEQ ID NO: 646872 - RNA, 19 nt, Homo sapiens
  misc_RNA (1)...(19): siRNA sense strand
cuagagguuucccuggauu

SEQ ID NO: 646873 - RNA, 19 nt, Homo sapiens
  misc_RNA (1)...(19): siRNA sense strand
gcaaauggagacggcuauu

SEQ ID NO: 646874 - RNA, 19 nt, Homo sapiens
  misc_RNA (1)...(19): siRNA sense strand
gaaaggcuuccagggagaa

SEQ ID NO: 646875 - RNA, 19 nt, Homo sapiens
  misc_RNA (1)...(19): siRNA sense strand
gcagcugggcuuccugguu

SEQ ID NO: 646876 - RNA, 19 nt, Homo sapiens
  misc_RNA (1)...(19): siRNA sense strand
ggagagaugguggauuaca

SEQ ID NO: 646877 - RNA, 19 nt, Homo sapiens
  misc_RNA (1)...(19): siRNA sense strand
gaugcuggcaacuccauug

SEQ ID NO: 646878 - RNA, 19 nt, Homo sapiens
  misc_RNA (1)...(19): siRNA sense strand
gcguggagcagcuggagaa

SEQ ID NO: 646879 - RNA, 19 nt, Homo sapiens
  misc_RNA (1)...(19): siRNA sense strand
uggagcagcuggagaacag

SEQ ID NO: 646880 - RNA, 19 nt, Homo sapiens
  misc_RNA (1)...(19): siRNA sense strand
ggauuuccgggucccauug

SEQ ID NO: 646881 - RNA, 19 nt, Homo sapiens
  misc_RNA (1)...(19): siRNA sense strand
gagaugguggauuacaaug

SEQ ID NO: 646882 - RNA, 19 nt, Homo sapiens
  misc_RNA (1)...(19): siRNA sense strand
uagcggagcgcacccacaa

SEQ ID NO: 646883 - RNA, 19 nt, Homo sapiens
  misc_RNA (1)...(19): siRNA sense strand
gggagaaccagggaaagga

SEQ ID NO: 646884 - RNA, 19 nt, Homo sapiens
  misc_RNA (1)...(19): siRNA sense strand
gagccaggccagcauccaa

SEQ ID NO: 646885 - RNA, 19 nt, Homo sapiens
  misc_RNA (1)...(19): siRNA sense strand
gguacuccaggaccaauug

SEQ ID NO: 646886 - RNA, 19 nt, Homo sapiens
  misc_RNA (1)...(19): siRNA sense strand
aaaggagacccugggauga

SEQ ID NO: 646887 - RNA, 19 nt, Homo sapiens
  misc_RNA (1)...(19): siRNA sense strand
gagccagggaucccaggaa

SEQ ID NO: 646888 - RNA, 19 nt, Homo sapiens
  misc_RNA (1)...(19): siRNA sense strand
gaaccagggaaaggagaga

SEQ ID NO: 646889 - RNA, 19 nt, Homo sapiens
  misc_RNA (1)...(19): siRNA sense strand
gauuacaauggaaacauca

SEQ ID NO: 646890 - RNA, 19 nt, Homo sapiens
  misc_RNA (1)...(19): siRNA sense strand
ggucaaccaggaacuagag

SEQ ID NO: 646891 - RNA, 19 nt, Homo sapiens
  misc_RNA (1)...(19): siRNA sense strand
aaggagagaugguggauua

SEQ ID NO: 646892 - RNA, 19 nt, Homo sapiens
  misc_RNA (1)...(19): siRNA sense strand
cagcugggcuuccugguuu

SEQ ID NO: 646893 - RNA, 19 nt, Homo sapiens
  misc_RNA (1)...(19): siRNA sense strand
ccaaagacaucuccaggau

SEQ ID NO: 646894 - RNA, 19 nt, Homo sapiens
  misc_RNA (1)...(19): siRNA sense strand
gagagaugguggauuacaa

SEQ ID NO: 646895 - RNA, 19 nt, Homo sapiens
  misc_RNA (1)...(19): siRNA sense strand
aaagggaccucgcgguaaa

SEQ ID NO: 646896 - RNA, 19 nt, Homo sapiens
  misc_RNA (1)...(19): siRNA sense strand
gaugguggauuacaaugga

SEQ ID NO: 646897 - RNA, 19 nt, Homo sapiens
  misc_RNA (1)...(19): siRNA sense strand
ggauuacaauggaaacauc

SEQ ID NO: 646898 - RNA, 19 nt, Homo sapiens
  misc_RNA (1)...(19): siRNA sense strand
caagggagaaccagggaaa

SEQ ID NO: 646899 - RNA, 19 nt, Homo sapiens
  misc_RNA (1)...(19): siRNA sense strand
ggaagcaggacuagaugga

SEQ ID NO: 646900 - RNA, 19 nt, Homo sapiens
  misc_RNA (1)...(19): siRNA sense strand
caaggcugcuggaacaagu

SEQ ID NO: 646901 - RNA, 19 nt, Homo sapiens
  misc_RNA (1)...(19): siRNA sense strand
gggagaagcaggugucgau

SEQ ID NO: 646902 - RNA, 19 nt, Homo sapiens
  misc_RNA (1)...(19): siRNA sense strand
ggagaacagggaccagaug

SEQ ID NO: 646903 - RNA, 19 nt, Homo sapiens
  misc_RNA (1)...(19): siRNA sense strand
acaauggaaacaucaauga

SEQ ID NO: 646904 - RNA, 19 nt, Homo sapiens
  misc_RNA (1)...(19): siRNA sense strand
gaaaggagagaugguggau

SEQ ID NO: 646905 - RNA, 19 nt, Homo sapiens
  misc_RNA (1)...(19): siRNA sense strand
cuagagguuucccuggauu

SEQ ID NO: 646906 - RNA, 19 nt, Homo sapiens
  misc_RNA (1)...(19): siRNA sense strand
gcaaauggagacggcuauu

SEQ ID NO: 646907 - RNA, 19 nt, Homo sapiens
  misc_RNA (1)...(19): siRNA sense strand
gaaaggcuuccagggagaa

SEQ ID NO: 646908 - RNA, 19 nt, Homo sapiens
  misc_RNA (1)...(19): siRNA sense strand
gcagcugggcuuccugguu

SEQ ID NO: 646909 - RNA, 19 nt, Homo sapiens
  misc_RNA (1)...(19): siRNA sense strand
ggagagaugguggauuaca

SEQ ID NO: 646910 - RNA, 19 nt, Homo sapiens
  misc_RNA (1)...(19): siRNA sense strand
gaugcuggcaacuccauug

SEQ ID NO: 646911 - RNA, 19 nt, Homo sapiens
  misc_RNA (1)...(19): siRNA sense strand
gcguggagcagcuggagaa

SEQ ID NO: 646912 - RNA, 19 nt, Homo sapiens
  misc_RNA (1)...(19): siRNA sense strand
uggagcagcuggagaacag

SEQ ID NO: 646913 - RNA, 19 nt, Homo sapiens
  misc_RNA (1)...(19): siRNA sense strand
ggauuuccgggucccauug

SEQ ID NO: 646914 - RNA, 19 nt, Homo sapiens
  misc_RNA (1)...(19): siRNA sense strand
gagaugguggauuacaaug

SEQ ID NO: 646915 - RNA, 19 nt, Homo sapiens
  misc_RNA (1)...(19): siRNA sense strand
uagcggagcgcacccacaa

SEQ ID NO: 646916 - RNA, 19 nt, Homo sapiens
  misc_RNA (1)...(19): siRNA sense strand
gggagaaccagggaaagga

SEQ ID NO: 646917 - RNA, 19 nt, Homo sapiens
  misc_RNA (1)...(19): siRNA sense strand
gagccaggccagcauccaa

SEQ ID NO: 646918 - RNA, 19 nt, Homo sapiens
  misc_RNA (1)...(19): siRNA sense strand
gguacuccaggaccaauug

SEQ ID NO: 646919 - RNA, 19 nt, Homo sapiens
  misc_RNA (1)...(19): siRNA sense strand
aaaggagacccugggauga

SEQ ID NO: 646920 - RNA, 19 nt, Homo sapiens
  misc_RNA (1)...(19): siRNA sense strand
gagccagggaucccaggaa

SEQ ID NO: 646921 - RNA, 19 nt, Homo sapiens
  misc_RNA (1)...(19): siRNA sense strand
gaaccagggaaaggagaga

SEQ ID NO: 646922 - RNA, 19 nt, Homo sapiens
  misc_RNA (1)...(19): siRNA sense strand
gauuacaauggaaacauca

SEQ ID NO: 646923 - RNA, 19 nt, Homo sapiens
  misc_RNA (1)...(19): siRNA sense strand
ggucaaccaggaacuagag

SEQ ID NO: 646924 - RNA, 19 nt, Homo sapiens
  misc_RNA (1)...(19): siRNA sense strand
aaggagagaugguggauua

SEQ ID NO: 646925 - RNA, 19 nt, Homo sapiens
  misc_RNA (1)...(19): siRNA sense strand
cagcugggcuuccugguuu

SEQ ID NO: 646926 - RNA, 19 nt, Homo sapiens
  misc_RNA (1)...(19): siRNA sense strand
ccaaagacaucuccaggau

SEQ ID NO: 646927 - RNA, 19 nt, Homo sapiens
  misc_RNA (1)...(19): siRNA sense strand
gagagaugguggauuacaa

SEQ ID NO: 646928 - RNA, 19 nt, Homo sapiens
  misc_RNA (1)...(19): siRNA sense strand
aaagggaccucgcgguaaa

SEQ ID NO: 646929 - RNA, 19 nt, Homo sapiens
  misc_RNA (1)...(19): siRNA sense strand
gaugguggauuacaaugga

SEQ ID NO: 646930 - RNA, 19 nt, Homo sapiens
  misc_RNA (1)...(19): siRNA sense strand
ggauuacaauggaaacauc

SEQ ID NO: 646931 - RNA, 19 nt, Homo sapiens
  misc_RNA (1)...(19): siRNA sense strand
caagggagaaccagggaaa

SEQ ID NO: 646932 - RNA, 19 nt, Homo sapiens
  misc_RNA (1)...(19): siRNA sense strand
ggaagcaggacuagaugga

SEQ ID NO: 646933 - RNA, 19 nt, Homo sapiens
  misc_RNA (1)...(19): siRNA sense strand
caaggcugcuggaacaagu

SEQ ID NO: 646934 - RNA, 19 nt, Homo sapiens
  misc_RNA (1)...(19): siRNA sense strand
gggagaagcaggugucgau

SEQ ID NO: 646935 - RNA, 19 nt, Homo sapiens
  misc_RNA (1)...(19): siRNA sense strand
ggagaacagggaccagaug

SEQ ID NO: 646936 - RNA, 19 nt, Homo sapiens
  misc_RNA (1)...(19): siRNA sense strand
acaauggaaacaucaauga

SEQ ID NO: 646937 - RNA, 19 nt, Homo sapiens
  misc_RNA (1)...(19): siRNA sense strand
gaaaggagagaugguggau

SEQ ID NO: 646938 - RNA, 19 nt, Homo sapiens
  misc_RNA (1)...(19): siRNA sense strand
cuagagguuucccuggauu

SEQ ID NO: 646939 - RNA, 19 nt, Homo sapiens
  misc_RNA (1)...(19): siRNA sense strand
gcaaauggagacggcuauu

SEQ ID NO: 646940 - RNA, 19 nt, Homo sapiens
  misc_RNA (1)...(19): siRNA sense strand
gaaaggcuuccagggagaa

SEQ ID NO: 646941 - RNA, 19 nt, Homo sapiens
  misc_RNA (1)...(19): siRNA sense strand
gcagcugggcuuccugguu

SEQ ID NO: 646942 - RNA, 19 nt, Homo sapiens
  misc_RNA (1)...(19): siRNA sense strand
ggagagaugguggauuaca

SEQ ID NO: 646943 - RNA, 19 nt, Homo sapiens
  misc_RNA (1)...(19): siRNA sense strand
gaugcuggcaacuccauug

SEQ ID NO: 646944 - RNA, 19 nt, Homo sapiens
  misc_RNA (1)...(19): siRNA sense strand
gcguggagcagcuggagaa

SEQ ID NO: 646945 - RNA, 19 nt, Homo sapiens
  misc_RNA (1)...(19): siRNA sense strand
uggagcagcuggagaacag

SEQ ID NO: 646946 - RNA, 19 nt, Homo sapiens
  misc_RNA (1)...(19): siRNA sense strand
ggauuuccgggucccauug

SEQ ID NO: 646947 - RNA, 19 nt, Homo sapiens
  misc_RNA (1)...(19): siRNA sense strand
gagaugguggauuacaaug

SEQ ID NO: 646948 - RNA, 19 nt, Homo sapiens
  misc_RNA (1)...(19): siRNA sense strand
uagcggagcgcacccacaa

SEQ ID NO: 646949 - RNA, 19 nt, Homo sapiens
  misc_RNA (1)...(19): siRNA sense strand
gggagaaccagggaaagga

SEQ ID NO: 646950 - RNA, 19 nt, Homo sapiens
  misc_RNA (1)...(19): siRNA sense strand
gagccaggccagcauccaa

SEQ ID NO: 646951 - RNA, 19 nt, Homo sapiens
  misc_RNA (1)...(19): siRNA sense strand
gguacuccaggaccaauug

SEQ ID NO: 646952 - RNA, 19 nt, Homo sapiens
  misc_RNA (1)...(19): siRNA sense strand
aaaggagacccugggauga

SEQ ID NO: 646953 - RNA, 19 nt, Homo sapiens
  misc_RNA (1)...(19): siRNA sense strand
gagccagggaucccaggaa

SEQ ID NO: 646954 - RNA, 19 nt, Homo sapiens
  misc_RNA (1)...(19): siRNA sense strand
gaaccagggaaaggagaga

SEQ ID NO: 646955 - RNA, 19 nt, Homo sapiens
  misc_RNA (1)...(19): siRNA sense strand
gauuacaauggaaacauca

SEQ ID NO: 646956 - RNA, 19 nt, Homo sapiens
  misc_RNA (1)...(19): siRNA sense strand
ggucaaccaggaacuagag

SEQ ID NO: 646957 - RNA, 19 nt, Homo sapiens
  misc_RNA (1)...(19): siRNA sense strand
aaggagagaugguggauua

SEQ ID NO: 646958 - RNA, 19 nt, Homo sapiens
  misc_RNA (1)...(19): siRNA sense strand
cagcugggcuuccugguuu

SEQ ID NO: 646959 - RNA, 19 nt, Homo sapiens
  misc_RNA (1)...(19): siRNA sense strand
ccaaagacaucuccaggau

SEQ ID NO: 646960 - RNA, 19 nt, Homo sapiens
  misc_RNA (1)...(19): siRNA sense strand
gagagaugguggauuacaa

SEQ ID NO: 646961 - RNA, 19 nt, Homo sapiens
  misc_RNA (1)...(19): siRNA sense strand
aaagggaccucgcgguaaa

SEQ ID NO: 646962 - RNA, 19 nt, Homo sapiens
  misc_RNA (1)...(19): siRNA sense strand
gaugguggauuacaaugga

SEQ ID NO: 646963 - RNA, 19 nt, Homo sapiens
  misc_RNA (1)...(19): siRNA sense strand
ggauuacaauggaaacauc

SEQ ID NO: 646964 - RNA, 19 nt, Homo sapiens
  misc_RNA (1)...(19): siRNA sense strand
gggcgaagauggcuuacca

SEQ ID NO: 646965 - RNA, 19 nt, Homo sapiens
  misc_RNA (1)...(19): siRNA sense strand
caagggagaaccagggaaa

SEQ ID NO: 646966 - RNA, 19 nt, Homo sapiens
  misc_RNA (1)...(19): siRNA sense strand
ggaagcaggacuagaugga

SEQ ID NO: 646967 - RNA, 19 nt, Homo sapiens
  misc_RNA (1)...(19): siRNA sense strand
caaggcugcuggaacaagu

SEQ ID NO: 646968 - RNA, 19 nt, Homo sapiens
  misc_RNA (1)...(19): siRNA sense strand
gggagaagcaggugucgau

SEQ ID NO: 646969 - RNA, 19 nt, Homo sapiens
  misc_RNA (1)...(19): siRNA sense strand
ggagaacagggaccagaug

SEQ ID NO: 646970 - RNA, 19 nt, Homo sapiens
  misc_RNA (1)...(19): siRNA sense strand
acaauggaaacaucaauga

SEQ ID NO: 646971 - RNA, 19 nt, Homo sapiens
  misc_RNA (1)...(19): siRNA sense strand
gaaaggagagaugguggau

SEQ ID NO: 646972 - RNA, 19 nt, Homo sapiens
  misc_RNA (1)...(19): siRNA sense strand
cuagagguuucccuggauu

SEQ ID NO: 646973 - RNA, 19 nt, Homo sapiens
  misc_RNA (1)...(19): siRNA sense strand
gcaaauggagacggcuauu

SEQ ID NO: 646974 - RNA, 19 nt, Homo sapiens
  misc_RNA (1)...(19): siRNA sense strand
gaaaggcuuccagggagaa

SEQ ID NO: 646975 - RNA, 19 nt, Homo sapiens
  misc_RNA (1)...(19): siRNA sense strand
gcagcugggcuuccugguu

SEQ ID NO: 646976 - RNA, 19 nt, Homo sapiens
  misc_RNA (1)...(19): siRNA sense strand
ggagagaugguggauuaca

SEQ ID NO: 646977 - RNA, 19 nt, Homo sapiens
  misc_RNA (1)...(19): siRNA sense strand
gaugcuggcaacuccauug

SEQ ID NO: 646978 - RNA, 19 nt, Homo sapiens
  misc_RNA (1)...(19): siRNA sense strand
gcguggagcagcuggagaa

SEQ ID NO: 646979 - RNA, 19 nt, Homo sapiens
  misc_RNA (1)...(19): siRNA sense strand
uggagcagcuggagaacag

SEQ ID NO: 646980 - RNA, 19 nt, Homo sapiens
  misc_RNA (1)...(19): siRNA sense strand
ggauuuccgggucccauug

SEQ ID NO: 646981 - RNA, 19 nt, Homo sapiens
  misc_RNA (1)...(19): siRNA sense strand
gagaugguggauuacaaug

SEQ ID NO: 646982 - RNA, 19 nt, Homo sapiens
  misc_RNA (1)...(19): siRNA sense strand
uagcggagcgcacccacaa

SEQ ID NO: 646983 - RNA, 19 nt, Homo sapiens
  misc_RNA (1)...(19): siRNA sense strand
gggagaaccagggaaagga

SEQ ID NO: 646984 - RNA, 19 nt, Homo sapiens
  misc_RNA (1)...(19): siRNA sense strand
gagccaggccagcauccaa

SEQ ID NO: 646985 - RNA, 19 nt, Homo sapiens
  misc_RNA (1)...(19): siRNA sense strand
gguacuccaggaccaauug

SEQ ID NO: 646986 - RNA, 19 nt, Homo sapiens
  misc_RNA (1)...(19): siRNA sense strand
aaaggagacccugggauga

SEQ ID NO: 646987 - RNA, 19 nt, Homo sapiens
  misc_RNA (1)...(19): siRNA sense strand
gagccagggaucccaggaa

SEQ ID NO: 646988 - RNA, 19 nt, Homo sapiens
  misc_RNA (1)...(19): siRNA sense strand
gaaccagggaaaggagaga

SEQ ID NO: 646989 - RNA, 19 nt, Homo sapiens
  misc_RNA (1)...(19): siRNA sense strand
gauuacaauggaaacauca

SEQ ID NO: 646990 - RNA, 19 nt, Homo sapiens
  misc_RNA (1)...(19): siRNA sense strand
ggucaaccaggaacuagag

SEQ ID NO: 646991 - RNA, 19 nt, Homo sapiens
  misc_RNA (1)...(19): siRNA sense strand
aaggagagaugguggauua

SEQ ID NO: 646992 - RNA, 19 nt, Homo sapiens
  misc_RNA (1)...(19): siRNA sense strand
cagcugggcuuccugguuu

SEQ ID NO: 646993 - RNA, 19 nt, Homo sapiens
  misc_RNA (1)...(19): siRNA sense strand
ccaaagacaucuccaggau

SEQ ID NO: 646994 - RNA, 19 nt, Homo sapiens
  misc_RNA (1)...(19): siRNA sense strand
gagagaugguggauuacaa

SEQ ID NO: 646995 - RNA, 19 nt, Homo sapiens
  misc_RNA (1)...(19): siRNA sense strand
aaagggaccucgcgguaaa

SEQ ID NO: 646996 - RNA, 19 nt, Homo sapiens
  misc_RNA (1)...(19): siRNA sense strand
gaugguggauuacaaugga

SEQ ID NO: 646997 - RNA, 19 nt, Homo sapiens
  misc_RNA (1)...(19): siRNA sense strand
ggauuacaauggaaacauc

SEQ ID NO: 646998 - RNA, 19 nt, Homo sapiens
  misc_RNA (1)...(19): siRNA sense strand
caagggagaaccagggaaa

SEQ ID NO: 646999 - RNA, 19 nt, Homo sapiens
  misc_RNA (1)...(19): siRNA sense strand
ggaagcaggacuagaugga

SEQ ID NO: 647000 - RNA, 19 nt, Homo sapiens
  misc_RNA (1)...(19): siRNA sense strand
caaggcugcuggaacaagu

SEQ ID NO: 647001 - RNA, 19 nt, Homo sapiens
  misc_RNA (1)...(19): siRNA sense strand
gggagaagcaggugucgau

SEQ ID NO: 647002 - RNA, 19 nt, Homo sapiens
  misc_RNA (1)...(19): siRNA sense strand
ggagaacagggaccagaug

SEQ ID NO: 647003 - RNA, 19 nt, Homo sapiens
  misc_RNA (1)...(19): siRNA sense strand
acaauggaaacaucaauga

SEQ ID NO: 647004 - RNA, 19 nt, Homo sapiens
  misc_RNA (1)...(19): siRNA sense strand
gaaaggagagaugguggau

SEQ ID NO: 647005 - RNA, 19 nt, Homo sapiens
  misc_RNA (1)...(19): siRNA sense strand
cuagagguuucccuggauu

SEQ ID NO: 647006 - RNA, 19 nt, Homo sapiens
  misc_RNA (1)...(19): siRNA sense strand
gcaaauggagacggcuauu

SEQ ID NO: 647007 - RNA, 19 nt, Homo sapiens
  misc_RNA (1)...(19): siRNA sense strand
gaaaggcuuccagggagaa

SEQ ID NO: 647008 - RNA, 19 nt, Homo sapiens
  misc_RNA (1)...(19): siRNA sense strand
gcagcugggcuuccugguu

SEQ ID NO: 647009 - RNA, 19 nt, Homo sapiens
  misc_RNA (1)...(19): siRNA sense strand
ggagagaugguggauuaca

SEQ ID NO: 647010 - RNA, 19 nt, Homo sapiens
  misc_RNA (1)...(19): siRNA sense strand
gaugcuggcaacuccauug

SEQ ID NO: 647011 - RNA, 19 nt, Homo sapiens
  misc_RNA (1)...(19): siRNA sense strand
gcguggagcagcuggagaa

SEQ ID NO: 647012 - RNA, 19 nt, Homo sapiens
  misc_RNA (1)...(19): siRNA sense strand
uggagcagcuggagaacag

SEQ ID NO: 647013 - RNA, 19 nt, Homo sapiens
  misc_RNA (1)...(19): siRNA sense strand
ggauuuccgggucccauug

SEQ ID NO: 647014 - RNA, 19 nt, Homo sapiens
  misc_RNA (1)...(19): siRNA sense strand
gagaugguggauuacaaug

SEQ ID NO: 647015 - RNA, 19 nt, Homo sapiens
  misc_RNA (1)...(19): siRNA sense strand
uagcggagcgcacccacaa

SEQ ID NO: 647016 - RNA, 19 nt, Homo sapiens
  misc_RNA (1)...(19): siRNA sense strand
gggagaaccagggaaagga

SEQ ID NO: 647017 - RNA, 19 nt, Homo sapiens
  misc_RNA (1)...(19): siRNA sense strand
gagccaggccagcauccaa

SEQ ID NO: 647018 - RNA, 19 nt, Homo sapiens
  misc_RNA (1)...(19): siRNA sense strand
gguacuccaggaccaauug

SEQ ID NO: 647019 - RNA, 19 nt, Homo sapiens
  misc_RNA (1)...(19): siRNA sense strand
aaaggagacccugggauga

SEQ ID NO: 647020 - RNA, 19 nt, Homo sapiens
  misc_RNA (1)...(19): siRNA sense strand
gagccagggaucccaggaa

SEQ ID NO: 647021 - RNA, 19 nt, Homo sapiens
  misc_RNA (1)...(19): siRNA sense strand
gaaccagggaaaggagaga

SEQ ID NO: 647022 - RNA, 19 nt, Homo sapiens
  misc_RNA (1)...(19): siRNA sense strand
gauuacaauggaaacauca

SEQ ID NO: 647023 - RNA, 19 nt, Homo sapiens
  misc_RNA (1)...(19): siRNA sense strand
ggucaaccaggaacuagag

SEQ ID NO: 647024 - RNA, 19 nt, Homo sapiens
  misc_RNA (1)...(19): siRNA sense strand
aaggagagaugguggauua

SEQ ID NO: 647025 - RNA, 19 nt, Homo sapiens
  misc_RNA (1)...(19): siRNA sense strand
cagcugggcuuccugguuu

SEQ ID NO: 647026 - RNA, 19 nt, Homo sapiens
  misc_RNA (1)...(19): siRNA sense strand
ccaaagacaucuccaggau

SEQ ID NO: 647027 - RNA, 19 nt, Homo sapiens
  misc_RNA (1)...(19): siRNA sense strand
gagagaugguggauuacaa

SEQ ID NO: 647028 - RNA, 19 nt, Homo sapiens
  misc_RNA (1)...(19): siRNA sense strand
aaagggaccucgcgguaaa

SEQ ID NO: 647029 - RNA, 19 nt, Homo sapiens
  misc_RNA (1)...(19): siRNA sense strand
gaugguggauuacaaugga

SEQ ID NO: 647030 - RNA, 19 nt, Homo sapiens
  misc_RNA (1)...(19): siRNA sense strand
ggauuacaauggaaacauc

SEQ ID NO: 647031 - RNA, 19 nt, Homo sapiens
  misc_RNA (1)...(19): siRNA sense strand
caagggagaaccagggaaa

SEQ ID NO: 647032 - RNA, 19 nt, Homo sapiens
  misc_RNA (1)...(19): siRNA sense strand
ggaagcaggacuagaugga

SEQ ID NO: 647033 - RNA, 19 nt, Homo sapiens
  misc_RNA (1)...(19): siRNA sense strand
caaggcugcuggaacaagu

SEQ ID NO: 647034 - RNA, 19 nt, Homo sapiens
  misc_RNA (1)...(19): siRNA sense strand
gggagaagcaggugucgau

SEQ ID NO: 647035 - RNA, 19 nt, Homo sapiens
  misc_RNA (1)...(19): siRNA sense strand
ggagaacagggaccagaug

SEQ ID NO: 647036 - RNA, 19 nt, Homo sapiens
  misc_RNA (1)...(19): siRNA sense strand
acaauggaaacaucaauga

SEQ ID NO: 647037 - RNA, 19 nt, Homo sapiens
  misc_RNA (1)...(19): siRNA sense strand
gaaaggagagaugguggau

SEQ ID NO: 647038 - RNA, 19 nt, Homo sapiens
  misc_RNA (1)...(19): siRNA sense strand
cuagagguuucccuggauu

SEQ ID NO: 647039 - RNA, 19 nt, Homo sapiens
  misc_RNA (1)...(19): siRNA sense strand
gcaaauggagacggcuauu

SEQ ID NO: 647040 - RNA, 19 nt, Homo sapiens
  misc_RNA (1)...(19): siRNA sense strand
gaaaggcuuccagggagaa

SEQ ID NO: 647041 - RNA, 19 nt, Homo sapiens
  misc_RNA (1)...(19): siRNA sense strand
gcagcugggcuuccugguu

SEQ ID NO: 647042 - RNA, 19 nt, Homo sapiens
  misc_RNA (1)...(19): siRNA sense strand
ggagagaugguggauuaca

SEQ ID NO: 647043 - RNA, 19 nt, Homo sapiens
  misc_RNA (1)...(19): siRNA sense strand
gaugcuggcaacuccauug

SEQ ID NO: 647044 - RNA, 19 nt, Homo sapiens
  misc_RNA (1)...(19): siRNA sense strand
gcguggagcagcuggagaa

SEQ ID NO: 647045 - RNA, 19 nt, Homo sapiens
  misc_RNA (1)...(19): siRNA sense strand
uggagcagcuggagaacag

SEQ ID NO: 647046 - RNA, 19 nt, Homo sapiens
  misc_RNA (1)...(19): siRNA sense strand
ggauuuccgggucccauug

SEQ ID NO: 647047 - RNA, 19 nt, Homo sapiens
  misc_RNA (1)...(19): siRNA sense strand
gagaugguggauuacaaug

SEQ ID NO: 647048 - RNA, 19 nt, Homo sapiens
  misc_RNA (1)...(19): siRNA sense strand
uagcggagcgcacccacaa

SEQ ID NO: 647049 - RNA, 19 nt, Homo sapiens
  misc_RNA (1)...(19): siRNA sense strand
gggagaaccagggaaagga

SEQ ID NO: 647050 - RNA, 19 nt, Homo sapiens
  misc_RNA (1)...(19): siRNA sense strand
gagccaggccagcauccaa

SEQ ID NO: 647051 - RNA, 19 nt, Homo sapiens
  misc_RNA (1)...(19): siRNA sense strand
gguacuccaggaccaauug

SEQ ID NO: 647052 - RNA, 19 nt, Homo sapiens
  misc_RNA (1)...(19): siRNA sense strand
aaaggagacccugggauga

SEQ ID NO: 647053 - RNA, 19 nt, Homo sapiens
  misc_RNA (1)...(19): siRNA sense strand
gagccagggaucccaggaa

SEQ ID NO: 647054 - RNA, 19 nt, Homo sapiens
  misc_RNA (1)...(19): siRNA sense strand
gaaccagggaaaggagaga

SEQ ID NO: 647055 - RNA, 19 nt, Homo sapiens
  misc_RNA (1)...(19): siRNA sense strand
gauuacaauggaaacauca

SEQ ID NO: 647056 - RNA, 19 nt, Homo sapiens
  misc_RNA (1)...(19): siRNA sense strand
ggucaaccaggaacuagag

SEQ ID NO: 647057 - RNA, 19 nt, Homo sapiens
  misc_RNA (1)...(19): siRNA sense strand
aaggagagaugguggauua

SEQ ID NO: 647058 - RNA, 19 nt, Homo sapiens
  misc_RNA (1)...(19): siRNA sense strand
cagcugggcuuccugguuu

SEQ ID NO: 647059 - RNA, 19 nt, Homo sapiens
  misc_RNA (1)...(19): siRNA sense strand
ccaaagacaucuccaggau

SEQ ID NO: 647060 - RNA, 19 nt, Homo sapiens
  misc_RNA (1)...(19): siRNA sense strand
gagagaugguggauuacaa

SEQ ID NO: 647061 - RNA, 19 nt, Homo sapiens
  misc_RNA (1)...(19): siRNA sense strand
aaagggaccucgcgguaaa

SEQ ID NO: 647062 - RNA, 19 nt, Homo sapiens
  misc_RNA (1)...(19): siRNA sense strand
gaugguggauuacaaugga

SEQ ID NO: 647063 - RNA, 19 nt, Homo sapiens
  misc_RNA (1)...(19): siRNA sense strand
ggauuacaauggaaacauc

SEQ ID NO: 647064 - RNA, 19 nt, Homo sapiens
  misc_RNA (1)...(19): siRNA sense strand
caagggagaaccagggaaa

SEQ ID NO: 647065 - RNA, 19 nt, Homo sapiens
  misc_RNA (1)...(19): siRNA sense strand
ggaagcaggacuagaugga

SEQ ID NO: 647066 - RNA, 19 nt, Homo sapiens
  misc_RNA (1)...(19): siRNA sense strand
caaggcugcuggaacaagu

SEQ ID NO: 647067 - RNA, 19 nt, Homo sapiens
  misc_RNA (1)...(19): siRNA sense strand
gggagaagcaggugucgau

SEQ ID NO: 647068 - RNA, 19 nt, Homo sapiens
  misc_RNA (1)...(19): siRNA sense strand
ggagaacagggaccagaug

SEQ ID NO: 647069 - RNA, 19 nt, Homo sapiens
  misc_RNA (1)...(19): siRNA sense strand
acaauggaaacaucaauga

SEQ ID NO: 647070 - RNA, 19 nt, Homo sapiens
  misc_RNA (1)...(19): siRNA sense strand
gaaaggagagaugguggau

SEQ ID NO: 647071 - RNA, 19 nt, Homo sapiens
  misc_RNA (1)...(19): siRNA sense strand
cuagagguuucccuggauu

SEQ ID NO: 647072 - RNA, 19 nt, Homo sapiens
  misc_RNA (1)...(19): siRNA sense strand
gcaaauggagacggcuauu

SEQ ID NO: 647073 - RNA, 19 nt, Homo sapiens
  misc_RNA (1)...(19): siRNA sense strand
gaaaggcuuccagggagaa

SEQ ID NO: 647074 - RNA, 19 nt, Homo sapiens
  misc_RNA (1)...(19): siRNA sense strand
gcagcugggcuuccugguu

SEQ ID NO: 647075 - RNA, 19 nt, Homo sapiens
  misc_RNA (1)...(19): siRNA sense strand
ggagagaugguggauuaca

SEQ ID NO: 647076 - RNA, 19 nt, Homo sapiens
  misc_RNA (1)...(19): siRNA sense strand
gaugcuggcaacuccauug

SEQ ID NO: 647077 - RNA, 19 nt, Homo sapiens
  misc_RNA (1)...(19): siRNA sense strand
gcguggagcagcuggagaa

SEQ ID NO: 647078 - RNA, 19 nt, Homo sapiens
  misc_RNA (1)...(19): siRNA sense strand
uggagcagcuggagaacag

SEQ ID NO: 647079 - RNA, 19 nt, Homo sapiens
  misc_RNA (1)...(19): siRNA sense strand
ggauuuccgggucccauug

SEQ ID NO: 647080 - RNA, 19 nt, Homo sapiens
  misc_RNA (1)...(19): siRNA sense strand
gagaugguggauuacaaug

SEQ ID NO: 647081 - RNA, 19 nt, Homo sapiens
  misc_RNA (1)...(19): siRNA sense strand
uagcggagcgcacccacaa

SEQ ID NO: 647082 - RNA, 19 nt, Homo sapiens
  misc_RNA (1)...(19): siRNA sense strand
gggagaaccagggaaagga

SEQ ID NO: 647083 - RNA, 19 nt, Homo sapiens
  misc_RNA (1)...(19): siRNA sense strand
gagccaggccagcauccaa

SEQ ID NO: 647084 - RNA, 19 nt, Homo sapiens
  misc_RNA (1)...(19): siRNA sense strand
gguacuccaggaccaauug

SEQ ID NO: 647085 - RNA, 19 nt, Homo sapiens
  misc_RNA (1)...(19): siRNA sense strand
aaaggagacccugggauga

SEQ ID NO: 647086 - RNA, 19 nt, Homo sapiens
  misc_RNA (1)...(19): siRNA sense strand
gagccagggaucccaggaa

SEQ ID NO: 647087 - RNA, 19 nt, Homo sapiens
  misc_RNA (1)...(19): siRNA sense strand
gaaccagggaaaggagaga

SEQ ID NO: 647088 - RNA, 19 nt, Homo sapiens
  misc_RNA (1)...(19): siRNA sense strand
gauuacaauggaaacauca

SEQ ID NO: 647089 - RNA, 19 nt, Homo sapiens
  misc_RNA (1)...(19): siRNA sense strand
ggucaaccaggaacuagag

SEQ ID NO: 647090 - RNA, 19 nt, Homo sapiens
  misc_RNA (1)...(19): siRNA sense strand
aaggagagaugguggauua

SEQ ID NO: 647091 - RNA, 19 nt, Homo sapiens
  misc_RNA (1)...(19): siRNA sense strand
cagcugggcuuccugguuu

SEQ ID NO: 647092 - RNA, 19 nt, Homo sapiens
  misc_RNA (1)...(19): siRNA sense strand
ccaaagacaucuccaggau

SEQ ID NO: 647093 - RNA, 19 nt, Homo sapiens
  misc_RNA (1)...(19): siRNA sense strand
gagagaugguggauuacaa

SEQ ID NO: 647094 - RNA, 19 nt, Homo sapiens
  misc_RNA (1)...(19): siRNA sense strand
aaagggaccucgcgguaaa

SEQ ID NO: 647095 - RNA, 19 nt, Homo sapiens
  misc_RNA (1)...(19): siRNA sense strand
gaugguggauuacaaugga

SEQ ID NO: 647096 - RNA, 19 nt, Homo sapiens
  misc_RNA (1)...(19): siRNA sense strand
ggauuacaauggaaacauc

SEQ ID NO: 647097 - RNA, 19 nt, Homo sapiens
  misc_RNA (1)...(19): siRNA sense strand
caagggagaaccagggaaa

SEQ ID NO: 647098 - RNA, 19 nt, Homo sapiens
  misc_RNA (1)...(19): siRNA sense strand
ggaagcaggacuagaugga

SEQ ID NO: 647099 - RNA, 19 nt, Homo sapiens
  misc_RNA (1)...(19): siRNA sense strand
caaggcugcuggaacaagu

SEQ ID NO: 647100 - RNA, 19 nt, Homo sapiens
  misc_RNA (1)...(19): siRNA sense strand
gggagaagcaggugucgau

SEQ ID NO: 647101 - RNA, 19 nt, Homo sapiens
  misc_RNA (1)...(19): siRNA sense strand
ggagaacagggaccagaug

SEQ ID NO: 647102 - RNA, 19 nt, Homo sapiens
  misc_RNA (1)...(19): siRNA sense strand
acaauggaaacaucaauga

SEQ ID NO: 647103 - RNA, 19 nt, Homo sapiens
  misc_RNA (1)...(19): siRNA sense strand
gaaaggagagaugguggau

SEQ ID NO: 647104 - RNA, 19 nt, Homo sapiens
  misc_RNA (1)...(19): siRNA sense strand
cuagagguuucccuggauu

SEQ ID NO: 647105 - RNA, 19 nt, Homo sapiens
  misc_RNA (1)...(19): siRNA sense strand
gcaaauggagacggcuauu

SEQ ID NO: 647106 - RNA, 19 nt, Homo sapiens
  misc_RNA (1)...(19): siRNA sense strand
gaaaggcuuccagggagaa

SEQ ID NO: 647107 - RNA, 19 nt, Homo sapiens
  misc_RNA (1)...(19): siRNA sense strand
gcagcugggcuuccugguu

SEQ ID NO: 647108 - RNA, 19 nt, Homo sapiens
  misc_RNA (1)...(19): siRNA sense strand
ggagagaugguggauuaca

SEQ ID NO: 647109 - RNA, 19 nt, Homo sapiens
  misc_RNA (1)...(19): siRNA sense strand
gaugcuggcaacuccauug

SEQ ID NO: 647110 - RNA, 19 nt, Homo sapiens
  misc_RNA (1)...(19): siRNA sense strand
gcguggagcagcuggagaa

SEQ ID NO: 647111 - RNA, 19 nt, Homo sapiens
  misc_RNA (1)...(19): siRNA sense strand
uggagcagcuggagaacag

SEQ ID NO: 647112 - RNA, 19 nt, Homo sapiens
  misc_RNA (1)...(19): siRNA sense strand
ggauuuccgggucccauug

SEQ ID NO: 647113 - RNA, 19 nt, Homo sapiens
  misc_RNA (1)...(19): siRNA sense strand
gagaugguggauuacaaug

SEQ ID NO: 647114 - RNA, 19 nt, Homo sapiens
  misc_RNA (1)...(19): siRNA sense strand
uagcggagcgcacccacaa

SEQ ID NO: 647115 - RNA, 19 nt, Homo sapiens
  misc_RNA (1)...(19): siRNA sense strand
gggagaaccagggaaagga

SEQ ID NO: 647116 - RNA, 19 nt, Homo sapiens
  misc_RNA (1)...(19): siRNA sense strand
gagccaggccagcauccaa

SEQ ID NO: 647117 - RNA, 19 nt, Homo sapiens
  misc_RNA (1)...(19): siRNA sense strand
gguacuccaggaccaauug

SEQ ID NO: 647118 - RNA, 19 nt, Homo sapiens
  misc_RNA (1)...(19): siRNA sense strand
aaaggagacccugggauga

SEQ ID NO: 647119 - RNA, 19 nt, Homo sapiens
  misc_RNA (1)...(19): siRNA sense strand
gagccagggaucccaggaa

SEQ ID NO: 647120 - RNA, 19 nt, Homo sapiens
  misc_RNA (1)...(19): siRNA sense strand
gaaccagggaaaggagaga

SEQ ID NO: 647121 - RNA, 19 nt, Homo sapiens
  misc_RNA (1)...(19): siRNA sense strand
gauuacaauggaaacauca

SEQ ID NO: 647122 - RNA, 19 nt, Homo sapiens
  misc_RNA (1)...(19): siRNA sense strand
ggucaaccaggaacuagag

SEQ ID NO: 647123 - RNA, 19 nt, Homo sapiens
  misc_RNA (1)...(19): siRNA sense strand
aaggagagaugguggauua

SEQ ID NO: 647124 - RNA, 19 nt, Homo sapiens
  misc_RNA (1)...(19): siRNA sense strand
cagcugggcuuccugguuu

SEQ ID NO: 647125 - RNA, 19 nt, Homo sapiens
  misc_RNA (1)...(19): siRNA sense strand
ccaaagacaucuccaggau

SEQ ID NO: 647126 - RNA, 19 nt, Homo sapiens
  misc_RNA (1)...(19): siRNA sense strand
gagagaugguggauuacaa

SEQ ID NO: 647127 - RNA, 19 nt, Homo sapiens
  misc_RNA (1)...(19): siRNA sense strand
aaagggaccucgcgguaaa

SEQ ID NO: 647128 - RNA, 19 nt, Homo sapiens
  misc_RNA (1)...(19): siRNA sense strand
gaugguggauuacaaugga

SEQ ID NO: 647129 - RNA, 19 nt, Homo sapiens
  misc_RNA (1)...(19): siRNA sense strand
ggauuacaauggaaacauc

SEQ ID NO: 647130 - RNA, 19 nt, Homo sapiens
  misc_RNA (1)...(19): siRNA sense strand
caagggagaaccagggaaa

SEQ ID NO: 647131 - RNA, 19 nt, Homo sapiens
  misc_RNA (1)...(19): siRNA sense strand
ggaagcaggacuagaugga

SEQ ID NO: 647132 - RNA, 19 nt, Homo sapiens
  misc_RNA (1)...(19): siRNA sense strand
caaggcugcuggaacaagu

SEQ ID NO: 647133 - RNA, 19 nt, Homo sapiens
  misc_RNA (1)...(19): siRNA sense strand
gggagaagcaggugucgau

SEQ ID NO: 647134 - RNA, 19 nt, Homo sapiens
  misc_RNA (1)...(19): siRNA sense strand
ggagaacagggaccagaug

SEQ ID NO: 647135 - RNA, 19 nt, Homo sapiens
  misc_RNA (1)...(19): siRNA sense strand
acaauggaaacaucaauga

SEQ ID NO: 647136 - RNA, 19 nt, Homo sapiens
  misc_RNA (1)...(19): siRNA sense strand
gaaaggagagaugguggau

SEQ ID NO: 647137 - RNA, 19 nt, Homo sapiens
  misc_RNA (1)...(19): siRNA sense strand
cuagagguuucccuggauu

SEQ ID NO: 647138 - RNA, 19 nt, Homo sapiens
  misc_RNA (1)...(19): siRNA sense strand
gcaaauggagacggcuauu

SEQ ID NO: 647139 - RNA, 19 nt, Homo sapiens
  misc_RNA (1)...(19): siRNA sense strand
gaaaggcuuccagggagaa

SEQ ID NO: 647140 - RNA, 19 nt, Homo sapiens
  misc_RNA (1)...(19): siRNA sense strand
gcagcugggcuuccugguu

SEQ ID NO: 647141 - RNA, 19 nt, Homo sapiens
  misc_RNA (1)...(19): siRNA sense strand
ggagagaugguggauuaca

SEQ ID NO: 647142 - RNA, 19 nt, Homo sapiens
  misc_RNA (1)...(19): siRNA sense strand
gaugcuggcaacuccauug

SEQ ID NO: 647143 - RNA, 19 nt, Homo sapiens
  misc_RNA (1)...(19): siRNA sense strand
gcguggagcagcuggagaa

SEQ ID NO: 647144 - RNA, 19 nt, Homo sapiens
  misc_RNA (1)...(19): siRNA sense strand
uggagcagcuggagaacag

SEQ ID NO: 647145 - RNA, 19 nt, Homo sapiens
  misc_RNA (1)...(19): siRNA sense strand
ggauuuccgggucccauug

SEQ ID NO: 647146 - RNA, 19 nt, Homo sapiens
  misc_RNA (1)...(19): siRNA sense strand
gagaugguggauuacaaug

SEQ ID NO: 647147 - RNA, 19 nt, Homo sapiens
  misc_RNA (1)...(19): siRNA sense strand
uagcggagcgcacccacaa

SEQ ID NO: 647148 - RNA, 19 nt, Homo sapiens
  misc_RNA (1)...(19): siRNA sense strand
gggagaaccagggaaagga

SEQ ID NO: 647149 - RNA, 19 nt, Homo sapiens
  misc_RNA (1)...(19): siRNA sense strand
gagccaggccagcauccaa

SEQ ID NO: 647150 - RNA, 19 nt, Homo sapiens
  misc_RNA (1)...(19): siRNA sense strand
gguacuccaggaccaauug

SEQ ID NO: 647151 - RNA, 19 nt, Homo sapiens
  misc_RNA (1)...(19): siRNA sense strand
aaaggagacccugggauga

SEQ ID NO: 647152 - RNA, 19 nt, Homo sapiens
  misc_RNA (1)...(19): siRNA sense strand
gagccagggaucccaggaa

SEQ ID NO: 647153 - RNA, 19 nt, Homo sapiens
  misc_RNA (1)...(19): siRNA sense strand
gaaccagggaaaggagaga

SEQ ID NO: 647154 - RNA, 19 nt, Homo sapiens
  misc_RNA (1)...(19): siRNA sense strand
gauuacaauggaaacauca

SEQ ID NO: 647155 - RNA, 19 nt, Homo sapiens
  misc_RNA (1)...(19): siRNA sense strand
ggucaaccaggaacuagag

SEQ ID NO: 647156 - RNA, 19 nt, Homo sapiens
  misc_RNA (1)...(19): siRNA sense strand
aaggagagaugguggauua

SEQ ID NO: 647157 - RNA, 19 nt, Homo sapiens
  misc_RNA (1)...(19): siRNA sense strand
cagcugggcuuccugguuu

SEQ ID NO: 647158 - RNA, 19 nt, Homo sapiens
  misc_RNA (1)...(19): siRNA sense strand
ccaaagacaucuccaggau

SEQ ID NO: 647159 - RNA, 19 nt, Homo sapiens
  misc_RNA (1)...(19): siRNA sense strand
gagagaugguggauuacaa

SEQ ID NO: 647160 - RNA, 19 nt, Homo sapiens
  misc_RNA (1)...(19): siRNA sense strand
aaagggaccucgcgguaaa

SEQ ID NO: 647161 - RNA, 19 nt, Homo sapiens
  misc_RNA (1)...(19): siRNA sense strand
gaugguggauuacaaugga

SEQ ID NO: 647162 - RNA, 19 nt, Homo sapiens
  misc_RNA (1)...(19): siRNA sense strand
ggauuacaauggaaacauc

SEQ ID NO: 647163 - RNA, 19 nt, Homo sapiens
  misc_RNA (1)...(19): siRNA sense strand
caagggagaaccagggaaa

SEQ ID NO: 647164 - RNA, 19 nt, Homo sapiens
  misc_RNA (1)...(19): siRNA sense strand
ggaagcaggacuagaugga

SEQ ID NO: 647165 - RNA, 19 nt, Homo sapiens
  misc_RNA (1)...(19): siRNA sense strand
caaggcugcuggaacaagu

SEQ ID NO: 647166 - RNA, 19 nt, Homo sapiens
  misc_RNA (1)...(19): siRNA sense strand
gggagaagcaggugucgau

SEQ ID NO: 647167 - RNA, 19 nt, Homo sapiens
  misc_RNA (1)...(19): siRNA sense strand
ggagaacagggaccagaug

SEQ ID NO: 647168 - RNA, 19 nt, Homo sapiens
  misc_RNA (1)...(19): siRNA sense strand
acaauggaaacaucaauga

SEQ ID NO: 647169 - RNA, 19 nt, Homo sapiens
  misc_RNA (1)...(19): siRNA sense strand
gaaaggagagaugguggau

SEQ ID NO: 647170 - RNA, 19 nt, Homo sapiens
  misc_RNA (1)...(19): siRNA sense strand
cuagagguuucccuggauu

SEQ ID NO: 647171 - RNA, 19 nt, Homo sapiens
  misc_RNA (1)...(19): siRNA sense strand
gcaaauggagacggcuauu

SEQ ID NO: 647172 - RNA, 19 nt, Homo sapiens
  misc_RNA (1)...(19): siRNA sense strand
gaaaggcuuccagggagaa

SEQ ID NO: 647173 - RNA, 19 nt, Homo sapiens
  misc_RNA (1)...(19): siRNA sense strand
gcagcugggcuuccugguu

SEQ ID NO: 647174 - RNA, 19 nt, Homo sapiens
  misc_RNA (1)...(19): siRNA sense strand
ggagagaugguggauuaca

SEQ ID NO: 647175 - RNA, 19 nt, Homo sapiens
  misc_RNA (1)...(19): siRNA sense strand
gaugcuggcaacuccauug

SEQ ID NO: 647176 - RNA, 19 nt, Homo sapiens
  misc_RNA (1)...(19): siRNA sense strand
gcguggagcagcuggagaa

SEQ ID NO: 647177 - RNA, 19 nt, Homo sapiens
  misc_RNA (1)...(19): siRNA sense strand
uggagcagcuggagaacag

SEQ ID NO: 647178 - RNA, 19 nt, Homo sapiens
  misc_RNA (1)...(19): siRNA sense strand
ggauuuccgggucccauug

SEQ ID NO: 647179 - RNA, 19 nt, Homo sapiens
  misc_RNA (1)...(19): siRNA sense strand
gagaugguggauuacaaug

SEQ ID NO: 647180 - RNA, 19 nt, Homo sapiens
  misc_RNA (1)...(19): siRNA sense strand
uagcggagcgcacccacaa

SEQ ID NO: 647181 - RNA, 19 nt, Homo sapiens
  misc_RNA (1)...(19): siRNA sense strand
gggagaaccagggaaagga

SEQ ID NO: 647182 - RNA, 19 nt, Homo sapiens
  misc_RNA (1)...(19): siRNA sense strand
gagccaggccagcauccaa

SEQ ID NO: 647183 - RNA, 19 nt, Homo sapiens
  misc_RNA (1)...(19): siRNA sense strand
gguacuccaggaccaauug

SEQ ID NO: 647184 - RNA, 19 nt, Homo sapiens
  misc_RNA (1)...(19): siRNA sense strand
aaaggagacccugggauga

SEQ ID NO: 647185 - RNA, 19 nt, Homo sapiens
  misc_RNA (1)...(19): siRNA sense strand
gagccagggaucccaggaa

SEQ ID NO: 647186 - RNA, 19 nt, Homo sapiens
  misc_RNA (1)...(19): siRNA sense strand
gaaccagggaaaggagaga

SEQ ID NO: 647187 - RNA, 19 nt, Homo sapiens
  misc_RNA (1)...(19): siRNA sense strand
gauuacaauggaaacauca

SEQ ID NO: 647188 - RNA, 19 nt, Homo sapiens
  misc_RNA (1)...(19): siRNA sense strand
ggucaaccaggaacuagag

SEQ ID NO: 647189 - RNA, 19 nt, Homo sapiens
  misc_RNA (1)...(19): siRNA sense strand
aaggagagaugguggauua

SEQ ID NO: 647190 - RNA, 19 nt, Homo sapiens
  misc_RNA (1)...(19): siRNA sense strand
cagcugggcuuccugguuu

SEQ ID NO: 647191 - RNA, 19 nt, Homo sapiens
  misc_RNA (1)...(19): siRNA sense strand
ccaaagacaucuccaggau

SEQ ID NO: 647192 - RNA, 19 nt, Homo sapiens
  misc_RNA (1)...(19): siRNA sense strand
gagagaugguggauuacaa

SEQ ID NO: 647193 - RNA, 19 nt, Homo sapiens
  misc_RNA (1)...(19): siRNA sense strand
aaagggaccucgcgguaaa

SEQ ID NO: 647194 - RNA, 19 nt, Homo sapiens
  misc_RNA (1)...(19): siRNA sense strand
gaugguggauuacaaugga

SEQ ID NO: 647195 - RNA, 19 nt, Homo sapiens
  misc_RNA (1)...(19): siRNA sense strand
ggauuacaauggaaacauc

SEQ ID NO: 647196 - RNA, 19 nt, Homo sapiens
  misc_RNA (1)...(19): siRNA sense strand
caagggagaaccagggaaa

SEQ ID NO: 647197 - RNA, 19 nt, Homo sapiens
  misc_RNA (1)...(19): siRNA sense strand
ggaagcaggacuagaugga

SEQ ID NO: 647198 - RNA, 19 nt, Homo sapiens
  misc_RNA (1)...(19): siRNA sense strand
caaggcugcuggaacaagu

SEQ ID NO: 647199 - RNA, 19 nt, Homo sapiens
  misc_RNA (1)...(19): siRNA sense strand
gggagaagcaggugucgau

SEQ ID NO: 647200 - RNA, 19 nt, Homo sapiens
  misc_RNA (1)...(19): siRNA sense strand
ggagaacagggaccagaug

SEQ ID NO: 647201 - RNA, 19 nt, Homo sapiens
  misc_RNA (1)...(19): siRNA sense strand
acaauggaaacaucaauga

SEQ ID NO: 647202 - RNA, 19 nt, Homo sapiens
  misc_RNA (1)...(19): siRNA sense strand
gaaaggagagaugguggau

SEQ ID NO: 647203 - RNA, 19 nt, Homo sapiens
  misc_RNA (1)...(19): siRNA sense strand
cuagagguuucccuggauu

SEQ ID NO: 647204 - RNA, 19 nt, Homo sapiens
  misc_RNA (1)...(19): siRNA sense strand
gcaaauggagacggcuauu

SEQ ID NO: 647205 - RNA, 19 nt, Homo sapiens
  misc_RNA (1)...(19): siRNA sense strand
gaaaggcuuccagggagaa

SEQ ID NO: 647206 - RNA, 19 nt, Homo sapiens
  misc_RNA (1)...(19): siRNA sense strand
gcagcugggcuuccugguu

SEQ ID NO: 647207 - RNA, 19 nt, Homo sapiens
  misc_RNA (1)...(19): siRNA sense strand
ggagagaugguggauuaca

SEQ ID NO: 647208 - RNA, 19 nt, Homo sapiens
  misc_RNA (1)...(19): siRNA sense strand
gaugcuggcaacuccauug

SEQ ID NO: 647209 - RNA, 19 nt, Homo sapiens
  misc_RNA (1)...(19): siRNA sense strand
gcguggagcagcuggagaa

SEQ ID NO: 647210 - RNA, 19 nt, Homo sapiens
  misc_RNA (1)...(19): siRNA sense strand
uggagcagcuggagaacag

SEQ ID NO: 647211 - RNA, 19 nt, Homo sapiens
  misc_RNA (1)...(19): siRNA sense strand
ggauuuccgggucccauug

SEQ ID NO: 647212 - RNA, 19 nt, Homo sapiens
  misc_RNA (1)...(19): siRNA sense strand
gagaugguggauuacaaug

SEQ ID NO: 647213 - RNA, 19 nt, Homo sapiens
  misc_RNA (1)...(19): siRNA sense strand
uagcggagcgcacccacaa

SEQ ID NO: 647214 - RNA, 19 nt, Homo sapiens
  misc_RNA (1)...(19): siRNA sense strand
gggagaaccagggaaagga

SEQ ID NO: 647215 - RNA, 19 nt, Homo sapiens
  misc_RNA (1)...(19): siRNA sense strand
gagccaggccagcauccaa

SEQ ID NO: 647216 - RNA, 19 nt, Homo sapiens
  misc_RNA (1)...(19): siRNA sense strand
gguacuccaggaccaauug

SEQ ID NO: 647217 - RNA, 19 nt, Homo sapiens
  misc_RNA (1)...(19): siRNA sense strand
aaaggagacccugggauga

SEQ ID NO: 647218 - RNA, 19 nt, Homo sapiens
  misc_RNA (1)...(19): siRNA sense strand
gagccagggaucccaggaa

SEQ ID NO: 647219 - RNA, 19 nt, Homo sapiens
  misc_RNA (1)...(19): siRNA sense strand
gaaccagggaaaggagaga

SEQ ID NO: 647220 - RNA, 19 nt, Homo sapiens
  misc_RNA (1)...(19): siRNA sense strand
gauuacaauggaaacauca

SEQ ID NO: 647221 - RNA, 19 nt, Homo sapiens
  misc_RNA (1)...(19): siRNA sense strand
ggucaaccaggaacuagag

SEQ ID NO: 647222 - RNA, 19 nt, Homo sapiens
  misc_RNA (1)...(19): siRNA sense strand
aaggagagaugguggauua

SEQ ID NO: 647223 - RNA, 19 nt, Homo sapiens
  misc_RNA (1)...(19): siRNA sense strand
cagcugggcuuccugguuu

SEQ ID NO: 647224 - RNA, 19 nt, Homo sapiens
  misc_RNA (1)...(19): siRNA sense strand
ccaaagacaucuccaggau

SEQ ID NO: 647225 - RNA, 19 nt, Homo sapiens
  misc_RNA (1)...(19): siRNA sense strand
gagagaugguggauuacaa

SEQ ID NO: 647226 - RNA, 19 nt, Homo sapiens
  misc_RNA (1)...(19): siRNA sense strand
aaagggaccucgcgguaaa

SEQ ID NO: 647227 - RNA, 19 nt, Homo sapiens
  misc_RNA (1)...(19): siRNA sense strand
gaugguggauuacaaugga

SEQ ID NO: 647228 - RNA, 19 nt, Homo sapiens
  misc_RNA (1)...(19): siRNA sense strand
ggauuacaauggaaacauc

SEQ ID NO: 647229 - RNA, 19 nt, Homo sapiens
  misc_RNA (1)...(19): siRNA sense strand
caagggagaaccagggaaa

SEQ ID NO: 647230 - RNA, 19 nt, Homo sapiens
  misc_RNA (1)...(19): siRNA sense strand
ggaagcaggacuagaugga

SEQ ID NO: 647231 - RNA, 19 nt, Homo sapiens
  misc_RNA (1)...(19): siRNA sense strand
caaggcugcuggaacaagu

SEQ ID NO: 647232 - RNA, 19 nt, Homo sapiens
  misc_RNA (1)...(19): siRNA sense strand
gggagaagcaggugucgau

SEQ ID NO: 647233 - RNA, 19 nt, Homo sapiens
  misc_RNA (1)...(19): siRNA sense strand
ggagaacagggaccagaug

SEQ ID NO: 647234 - RNA, 19 nt, Homo sapiens
  misc_RNA (1)...(19): siRNA sense strand
acaauggaaacaucaauga

SEQ ID NO: 647235 - RNA, 19 nt, Homo sapiens
  misc_RNA (1)...(19): siRNA sense strand
gaaaggagagaugguggau

SEQ ID NO: 647236 - RNA, 19 nt, Homo sapiens
  misc_RNA (1)...(19): siRNA sense strand
cuagagguuucccuggauu

SEQ ID NO: 647237 - RNA, 19 nt, Homo sapiens
  misc_RNA (1)...(19): siRNA sense strand
gcaaauggagacggcuauu

SEQ ID NO: 647238 - RNA, 19 nt, Homo sapiens
  misc_RNA (1)...(19): siRNA sense strand
gaaaggcuuccagggagaa

SEQ ID NO: 647239 - RNA, 19 nt, Homo sapiens
  misc_RNA (1)...(19): siRNA sense strand
gcagcugggcuuccugguu

SEQ ID NO: 647240 - RNA, 19 nt, Homo sapiens
  misc_RNA (1)...(19): siRNA sense strand
ggagagaugguggauuaca

SEQ ID NO: 647241 - RNA, 19 nt, Homo sapiens
  misc_RNA (1)...(19): siRNA sense strand
gaugcuggcaacuccauug

SEQ ID NO: 647242 - RNA, 19 nt, Homo sapiens
  misc_RNA (1)...(19): siRNA sense strand
gcguggagcagcuggagaa

SEQ ID NO: 647243 - RNA, 19 nt, Homo sapiens
  misc_RNA (1)...(19): siRNA sense strand
uggagcagcuggagaacag

SEQ ID NO: 647244 - RNA, 19 nt, Homo sapiens
  misc_RNA (1)...(19): siRNA sense strand
ggauuuccgggucccauug

SEQ ID NO: 647245 - RNA, 19 nt, Homo sapiens
  misc_RNA (1)...(19): siRNA sense strand
gagaugguggauuacaaug

SEQ ID NO: 647246 - RNA, 19 nt, Homo sapiens
  misc_RNA (1)...(19): siRNA sense strand
uagcggagcgcacccacaa

SEQ ID NO: 647247 - RNA, 19 nt, Homo sapiens
  misc_RNA (1)...(19): siRNA sense strand
gggagaaccagggaaagga

SEQ ID NO: 647248 - RNA, 19 nt, Homo sapiens
  misc_RNA (1)...(19): siRNA sense strand
gagccaggccagcauccaa

SEQ ID NO: 647249 - RNA, 19 nt, Homo sapiens
  misc_RNA (1)...(19): siRNA sense strand
gguacuccaggaccaauug

SEQ ID NO: 647250 - RNA, 19 nt, Homo sapiens
  misc_RNA (1)...(19): siRNA sense strand
aaaggagacccugggauga

SEQ ID NO: 647251 - RNA, 19 nt, Homo sapiens
  misc_RNA (1)...(19): siRNA sense strand
gagccagggaucccaggaa

SEQ ID NO: 647252 - RNA, 19 nt, Homo sapiens
  misc_RNA (1)...(19): siRNA sense strand
gaaccagggaaaggagaga

SEQ ID NO: 647253 - RNA, 19 nt, Homo sapiens
  misc_RNA (1)...(19): siRNA sense strand
gauuacaauggaaacauca

SEQ ID NO: 647254 - RNA, 19 nt, Homo sapiens
  misc_RNA (1)...(19): siRNA sense strand
ggucaaccaggaacuagag

SEQ ID NO: 647255 - RNA, 19 nt, Homo sapiens
  misc_RNA (1)...(19): siRNA sense strand
aaggagagaugguggauua

SEQ ID NO: 647256 - RNA, 19 nt, Homo sapiens
  misc_RNA (1)...(19): siRNA sense strand
cagcugggcuuccugguuu

SEQ ID NO: 647257 - RNA, 19 nt, Homo sapiens
  misc_RNA (1)...(19): siRNA sense strand
ccaaagacaucuccaggau

SEQ ID NO: 647258 - RNA, 19 nt, Homo sapiens
  misc_RNA (1)...(19): siRNA sense strand
gagagaugguggauuacaa

SEQ ID NO: 647259 - RNA, 19 nt, Homo sapiens
  misc_RNA (1)...(19): siRNA sense strand
aaagggaccucgcgguaaa

SEQ ID NO: 647260 - RNA, 19 nt, Homo sapiens
  misc_RNA (1)...(19): siRNA sense strand
gaugguggauuacaaugga

SEQ ID NO: 647261 - RNA, 19 nt, Homo sapiens
  misc_RNA (1)...(19): siRNA sense strand
ggauuacaauggaaacauc

SEQ ID NO: 647262 - RNA, 19 nt, Homo sapiens
  misc_RNA (1)...(19): siRNA sense strand
caagggagaaccagggaaa

SEQ ID NO: 647263 - RNA, 19 nt, Homo sapiens
  misc_RNA (1)...(19): siRNA sense strand
ggaagcaggacuagaugga

SEQ ID NO: 647264 - RNA, 19 nt, Homo sapiens
  misc_RNA (1)...(19): siRNA sense strand
caaggcugcuggaacaagu

SEQ ID NO: 647265 - RNA, 19 nt, Homo sapiens
  misc_RNA (1)...(19): siRNA sense strand
gggagaagcaggugucgau

SEQ ID NO: 647266 - RNA, 19 nt, Homo sapiens
  misc_RNA (1)...(19): siRNA sense strand
ggagaacagggaccagaug

SEQ ID NO: 647267 - RNA, 19 nt, Homo sapiens
  misc_RNA (1)...(19): siRNA sense strand
acaauggaaacaucaauga

SEQ ID NO: 647268 - RNA, 19 nt, Homo sapiens
  misc_RNA (1)...(19): siRNA sense strand
gaaaggagagaugguggau

SEQ ID NO: 647269 - RNA, 19 nt, Homo sapiens
  misc_RNA (1)...(19): siRNA sense strand
cuagagguuucccuggauu

SEQ ID NO: 647270 - RNA, 19 nt, Homo sapiens
  misc_RNA (1)...(19): siRNA sense strand
gcaaauggagacggcuauu

SEQ ID NO: 647271 - RNA, 19 nt, Homo sapiens
  misc_RNA (1)...(19): siRNA sense strand
gaaaggcuuccagggagaa

SEQ ID NO: 647272 - RNA, 19 nt, Homo sapiens
  misc_RNA (1)...(19): siRNA sense strand
gcagcugggcuuccugguu

SEQ ID NO: 647273 - RNA, 19 nt, Homo sapiens
  misc_RNA (1)...(19): siRNA sense strand
ggagagaugguggauuaca

SEQ ID NO: 647274 - RNA, 19 nt, Homo sapiens
  misc_RNA (1)...(19): siRNA sense strand
gaugcuggcaacuccauug

SEQ ID NO: 647275 - RNA, 19 nt, Homo sapiens
  misc_RNA (1)...(19): siRNA sense strand
gcguggagcagcuggagaa

SEQ ID NO: 647276 - RNA, 19 nt, Homo sapiens
  misc_RNA (1)...(19): siRNA sense strand
uggagcagcuggagaacag

SEQ ID NO: 647277 - RNA, 19 nt, Homo sapiens
  misc_RNA (1)...(19): siRNA sense strand
ggauuuccgggucccauug

SEQ ID NO: 647278 - RNA, 19 nt, Homo sapiens
  misc_RNA (1)...(19): siRNA sense strand
gagaugguggauuacaaug

SEQ ID NO: 647279 - RNA, 19 nt, Homo sapiens
  misc_RNA (1)...(19): siRNA sense strand
uagcggagcgcacccacaa

SEQ ID NO: 647280 - RNA, 19 nt, Homo sapiens
  misc_RNA (1)...(19): siRNA sense strand
gggagaaccagggaaagga

SEQ ID NO: 647281 - RNA, 19 nt, Homo sapiens
  misc_RNA (1)...(19): siRNA sense strand
gagccaggccagcauccaa

SEQ ID NO: 647282 - RNA, 19 nt, Homo sapiens
  misc_RNA (1)...(19): siRNA sense strand
gguacuccaggaccaauug

SEQ ID NO: 647283 - RNA, 19 nt, Homo sapiens
  misc_RNA (1)...(19): siRNA sense strand
aaaggagacccugggauga

SEQ ID NO: 647284 - RNA, 19 nt, Homo sapiens
  misc_RNA (1)...(19): siRNA sense strand
gagccagggaucccaggaa

SEQ ID NO: 647285 - RNA, 19 nt, Homo sapiens
  misc_RNA (1)...(19): siRNA sense strand
gaaccagggaaaggagaga

SEQ ID NO: 647286 - RNA, 19 nt, Homo sapiens
  misc_RNA (1)...(19): siRNA sense strand
gauuacaauggaaacauca

SEQ ID NO: 647287 - RNA, 19 nt, Homo sapiens
  misc_RNA (1)...(19): siRNA sense strand
ggucaaccaggaacuagag

SEQ ID NO: 647288 - RNA, 19 nt, Homo sapiens
  misc_RNA (1)...(19): siRNA sense strand
aaggagagaugguggauua

SEQ ID NO: 647289 - RNA, 19 nt, Homo sapiens
  misc_RNA (1)...(19): siRNA sense strand
cagcugggcuuccugguuu

SEQ ID NO: 647290 - RNA, 19 nt, Homo sapiens
  misc_RNA (1)...(19): siRNA sense strand
ccaaagacaucuccaggau

SEQ ID NO: 647291 - RNA, 19 nt, Homo sapiens
  misc_RNA (1)...(19): siRNA sense strand
gagagaugguggauuacaa

SEQ ID NO: 647292 - RNA, 19 nt, Homo sapiens
  misc_RNA (1)...(19): siRNA sense strand
aaagggaccucgcgguaaa

SEQ ID NO: 647293 - RNA, 19 nt, Homo sapiens
  misc_RNA (1)...(19): siRNA sense strand
gaugguggauuacaaugga

SEQ ID NO: 647294 - RNA, 19 nt, Homo sapiens
  misc_RNA (1)...(19): siRNA sense strand
ggauuacaauggaaacauc

SEQ ID NO: 647295 - RNA, 19 nt, Homo sapiens
  misc_RNA (1)...(19): siRNA sense strand
caagggagaaccagggaaa

SEQ ID NO: 647296 - RNA, 19 nt, Homo sapiens
  misc_RNA (1)...(19): siRNA sense strand
ggaagcaggacuagaugga

SEQ ID NO: 647297 - RNA, 19 nt, Homo sapiens
  misc_RNA (1)...(19): siRNA sense strand
caaggcugcuggaacaagu

SEQ ID NO: 647298 - RNA, 19 nt, Homo sapiens
  misc_RNA (1)...(19): siRNA sense strand
gggagaagcaggugucgau

SEQ ID NO: 647299 - RNA, 19 nt, Homo sapiens
  misc_RNA (1)...(19): siRNA sense strand
ggagaacagggaccagaug

SEQ ID NO: 647300 - RNA, 19 nt, Homo sapiens
  misc_RNA (1)...(19): siRNA sense strand
acaauggaaacaucaauga

SEQ ID NO: 647301 - RNA, 19 nt, Homo sapiens
  misc_RNA (1)...(19): siRNA sense strand
gaaaggagagaugguggau

SEQ ID NO: 647302 - RNA, 19 nt, Homo sapiens
  misc_RNA (1)...(19): siRNA sense strand
cuagagguuucccuggauu

SEQ ID NO: 647303 - RNA, 19 nt, Homo sapiens
  misc_RNA (1)...(19): siRNA sense strand
gcaaauggagacggcuauu

SEQ ID NO: 647304 - RNA, 19 nt, Homo sapiens
  misc_RNA (1)...(19): siRNA sense strand
gaaaggcuuccagggagaa

SEQ ID NO: 647305 - RNA, 19 nt, Homo sapiens
  misc_RNA (1)...(19): siRNA sense strand
gcagcugggcuuccugguu

SEQ ID NO: 647306 - RNA, 19 nt, Homo sapiens
  misc_RNA (1)...(19): siRNA sense strand
ggagagaugguggauuaca

SEQ ID NO: 647307 - RNA, 19 nt, Homo sapiens
  misc_RNA (1)...(19): siRNA sense strand
gaugcuggcaacuccauug

SEQ ID NO: 647308 - RNA, 19 nt, Homo sapiens
  misc_RNA (1)...(19): siRNA sense strand
gcguggagcagcuggagaa

SEQ ID NO: 647309 - RNA, 19 nt, Homo sapiens
  misc_RNA (1)...(19): siRNA sense strand
uggagcagcuggagaacag

SEQ ID NO: 647310 - RNA, 19 nt, Homo sapiens
  misc_RNA (1)...(19): siRNA sense strand
ggauuuccgggucccauug

SEQ ID NO: 647311 - RNA, 19 nt, Homo sapiens
  misc_RNA (1)...(19): siRNA sense strand
gagaugguggauuacaaug

SEQ ID NO: 647312 - RNA, 19 nt, Homo sapiens
  misc_RNA (1)...(19): siRNA sense strand
uagcggagcgcacccacaa

SEQ ID NO: 647313 - RNA, 19 nt, Homo sapiens
  misc_RNA (1)...(19): siRNA sense strand
gggagaaccagggaaagga

SEQ ID NO: 647314 - RNA, 19 nt, Homo sapiens
  misc_RNA (1)...(19): siRNA sense strand
gagccaggccagcauccaa

SEQ ID NO: 647315 - RNA, 19 nt, Homo sapiens
  misc_RNA (1)...(19): siRNA sense strand
gguacuccaggaccaauug

SEQ ID NO: 647316 - RNA, 19 nt, Homo sapiens
  misc_RNA (1)...(19): siRNA sense strand
aaaggagacccugggauga

SEQ ID NO: 647317 - RNA, 19 nt, Homo sapiens
  misc_RNA (1)...(19): siRNA sense strand
gagccagggaucccaggaa

SEQ ID NO: 647318 - RNA, 19 nt, Homo sapiens
  misc_RNA (1)...(19): siRNA sense strand
gaaccagggaaaggagaga

SEQ ID NO: 647319 - RNA, 19 nt, Homo sapiens
  misc_RNA (1)...(19): siRNA sense strand
gauuacaauggaaacauca

SEQ ID NO: 647320 - RNA, 19 nt, Homo sapiens
  misc_RNA (1)...(19): siRNA sense strand
ggucaaccaggaacuagag

SEQ ID NO: 647321 - RNA, 19 nt, Homo sapiens
  misc_RNA (1)...(19): siRNA sense strand
aaggagagaugguggauua

SEQ ID NO: 647322 - RNA, 19 nt, Homo sapiens
  misc_RNA (1)...(19): siRNA sense strand
cagcugggcuuccugguuu

SEQ ID NO: 647323 - RNA, 19 nt, Homo sapiens
  misc_RNA (1)...(19): siRNA sense strand
ccaaagacaucuccaggau

SEQ ID NO: 647324 - RNA, 19 nt, Homo sapiens
  misc_RNA (1)...(19): siRNA sense strand
gagagaugguggauuacaa

SEQ ID NO: 647325 - RNA, 19 nt, Homo sapiens
  misc_RNA (1)...(19): siRNA sense strand
aaagggaccucgcgguaaa

SEQ ID NO: 647326 - RNA, 19 nt, Homo sapiens
  misc_RNA (1)...(19): siRNA sense strand
gaugguggauuacaaugga

SEQ ID NO: 647327 - RNA, 19 nt, Homo sapiens
  misc_RNA (1)...(19): siRNA sense strand
ggauuacaauggaaacauc

SEQ ID NO: 647328 - RNA, 19 nt, Homo sapiens
  misc_RNA (1)...(19): siRNA sense strand
caagggagaaccagggaaa

SEQ ID NO: 647329 - RNA, 19 nt, Homo sapiens
  misc_RNA (1)...(19): siRNA sense strand
ggaagcaggacuagaugga

SEQ ID NO: 647330 - RNA, 19 nt, Homo sapiens
  misc_RNA (1)...(19): siRNA sense strand
caaggcugcuggaacaagu

SEQ ID NO: 647331 - RNA, 19 nt, Homo sapiens
  misc_RNA (1)...(19): siRNA sense strand
gggagaagcaggugucgau

SEQ ID NO: 647332 - RNA, 19 nt, Homo sapiens
  misc_RNA (1)...(19): siRNA sense strand
ggagaacagggaccagaug

SEQ ID NO: 647333 - RNA, 19 nt, Homo sapiens
  misc_RNA (1)...(19): siRNA sense strand
acaauggaaacaucaauga

SEQ ID NO: 647334 - RNA, 19 nt, Homo sapiens
  misc_RNA (1)...(19): siRNA sense strand
gaaaggagagaugguggau

SEQ ID NO: 647335 - RNA, 19 nt, Homo sapiens
  misc_RNA (1)...(19): siRNA sense strand
cuagagguuucccuggauu

SEQ ID NO: 647336 - RNA, 19 nt, Homo sapiens
  misc_RNA (1)...(19): siRNA sense strand
gcaaauggagacggcuauu

SEQ ID NO: 647337 - RNA, 19 nt, Homo sapiens
  misc_RNA (1)...(19): siRNA sense strand
gaaaggcuuccagggagaa

SEQ ID NO: 647338 - RNA, 19 nt, Homo sapiens
  misc_RNA (1)...(19): siRNA sense strand
gcagcugggcuuccugguu

SEQ ID NO: 647339 - RNA, 19 nt, Homo sapiens
  misc_RNA (1)...(19): siRNA sense strand
ggagagaugguggauuaca

SEQ ID NO: 647340 - RNA, 19 nt, Homo sapiens
  misc_RNA (1)...(19): siRNA sense strand
gaugcuggcaacuccauug

SEQ ID NO: 647341 - RNA, 19 nt, Homo sapiens
  misc_RNA (1)...(19): siRNA sense strand
gcguggagcagcuggagaa

SEQ ID NO: 647342 - RNA, 19 nt, Homo sapiens
  misc_RNA (1)...(19): siRNA sense strand
uggagcagcuggagaacag

SEQ ID NO: 647343 - RNA, 19 nt, Homo sapiens
  misc_RNA (1)...(19): siRNA sense strand
ggauuuccgggucccauug

SEQ ID NO: 647344 - RNA, 19 nt, Homo sapiens
  misc_RNA (1)...(19): siRNA sense strand
gagaugguggauuacaaug

SEQ ID NO: 647345 - RNA, 19 nt, Homo sapiens
  misc_RNA (1)...(19): siRNA sense strand
uagcggagcgcacccacaa

SEQ ID NO: 647346 - RNA, 19 nt, Homo sapiens
  misc_RNA (1)...(19): siRNA sense strand
gggagaaccagggaaagga

SEQ ID NO: 647347 - RNA, 19 nt, Homo sapiens
  misc_RNA (1)...(19): siRNA sense strand
gagccaggccagcauccaa

SEQ ID NO: 647348 - RNA, 19 nt, Homo sapiens
  misc_RNA (1)...(19): siRNA sense strand
gguacuccaggaccaauug

SEQ ID NO: 647349 - RNA, 19 nt, Homo sapiens
  misc_RNA (1)...(19): siRNA sense strand
aaaggagacccugggauga

SEQ ID NO: 647350 - RNA, 19 nt, Homo sapiens
  misc_RNA (1)...(19): siRNA sense strand
gagccagggaucccaggaa

SEQ ID NO: 647351 - RNA, 19 nt, Homo sapiens
  misc_RNA (1)...(19): siRNA sense strand
gaaccagggaaaggagaga

SEQ ID NO: 647352 - RNA, 19 nt, Homo sapiens
  misc_RNA (1)...(19): siRNA sense strand
gauuacaauggaaacauca

SEQ ID NO: 647353 - RNA, 19 nt, Homo sapiens
  misc_RNA (1)...(19): siRNA sense strand
ggucaaccaggaacuagag

SEQ ID NO: 647354 - RNA, 19 nt, Homo sapiens
  misc_RNA (1)...(19): siRNA sense strand
aaggagagaugguggauua

SEQ ID NO: 647355 - RNA, 19 nt, Homo sapiens
  misc_RNA (1)...(19): siRNA sense strand
cagcugggcuuccugguuu

SEQ ID NO: 647356 - RNA, 19 nt, Homo sapiens
  misc_RNA (1)...(19): siRNA sense strand
ccaaagacaucuccaggau

SEQ ID NO: 647357 - RNA, 19 nt, Homo sapiens
  misc_RNA (1)...(19): siRNA sense strand
gagagaugguggauuacaa

SEQ ID NO: 647358 - RNA, 19 nt, Homo sapiens
  misc_RNA (1)...(19): siRNA sense strand
aaagggaccucgcgguaaa

SEQ ID NO: 647359 - RNA, 19 nt, Homo sapiens
  misc_RNA (1)...(19): siRNA sense strand
gaugguggauuacaaugga

SEQ ID NO: 647360 - RNA, 19 nt, Homo sapiens
  misc_RNA (1)...(19): siRNA sense strand
ggauuacaauggaaacauc

SEQ ID NO: 647361 - RNA, 19 nt, Homo sapiens
  misc_RNA (1)...(19): siRNA sense strand
caagggagaaccagggaaa

SEQ ID NO: 647362 - RNA, 19 nt, Homo sapiens
  misc_RNA (1)...(19): siRNA sense strand
ggaagcaggacuagaugga

SEQ ID NO: 647363 - RNA, 19 nt, Homo sapiens
  misc_RNA (1)...(19): siRNA sense strand
caaggcugcuggaacaagu

SEQ ID NO: 647364 - RNA, 19 nt, Homo sapiens
  misc_RNA (1)...(19): siRNA sense strand
gggagaagcaggugucgau

SEQ ID NO: 647365 - RNA, 19 nt, Homo sapiens
  misc_RNA (1)...(19): siRNA sense strand
ggagaacagggaccagaug

SEQ ID NO: 647366 - RNA, 19 nt, Homo sapiens
  misc_RNA (1)...(19): siRNA sense strand
acaauggaaacaucaauga

SEQ ID NO: 647367 - RNA, 19 nt, Homo sapiens
  misc_RNA (1)...(19): siRNA sense strand
gaaaggagagaugguggau

SEQ ID NO: 647368 - RNA, 19 nt, Homo sapiens
  misc_RNA (1)...(19): siRNA sense strand
cuagagguuucccuggauu

SEQ ID NO: 647369 - RNA, 19 nt, Homo sapiens
  misc_RNA (1)...(19): siRNA sense strand
gcaaauggagacggcuauu

SEQ ID NO: 647370 - RNA, 19 nt, Homo sapiens
  misc_RNA (1)...(19): siRNA sense strand
gaaaggcuuccagggagaa

SEQ ID NO: 647371 - RNA, 19 nt, Homo sapiens
  misc_RNA (1)...(19): siRNA sense strand
gcagcugggcuuccugguu

SEQ ID NO: 647372 - RNA, 19 nt, Homo sapiens
  misc_RNA (1)...(19): siRNA sense strand
ggagagaugguggauuaca

SEQ ID NO: 647373 - RNA, 19 nt, Homo sapiens
  misc_RNA (1)...(19): siRNA sense strand
gaugcuggcaacuccauug

SEQ ID NO: 647374 - RNA, 19 nt, Homo sapiens
  misc_RNA (1)...(19): siRNA sense strand
gcguggagcagcuggagaa

SEQ ID NO: 647375 - RNA, 19 nt, Homo sapiens
  misc_RNA (1)...(19): siRNA sense strand
uggagcagcuggagaacag

SEQ ID NO: 647376 - RNA, 19 nt, Homo sapiens
  misc_RNA (1)...(19): siRNA sense strand
ggauuuccgggucccauug

SEQ ID NO: 647377 - RNA, 19 nt, Homo sapiens
  misc_RNA (1)...(19): siRNA sense strand
gagaugguggauuacaaug

SEQ ID NO: 647378 - RNA, 19 nt, Homo sapiens
  misc_RNA (1)...(19): siRNA sense strand
uagcggagcgcacccacaa

SEQ ID NO: 647379 - RNA, 19 nt, Homo sapiens
  misc_RNA (1)...(19): siRNA sense strand
gggagaaccagggaaagga

SEQ ID NO: 647380 - RNA, 19 nt, Homo sapiens
  misc_RNA (1)...(19): siRNA sense strand
gagccaggccagcauccaa

SEQ ID NO: 647381 - RNA, 19 nt, Homo sapiens
  misc_RNA (1)...(19): siRNA sense strand
gguacuccaggaccaauug

SEQ ID NO: 647382 - RNA, 19 nt, Homo sapiens
  misc_RNA (1)...(19): siRNA sense strand
aaaggagacccugggauga

SEQ ID NO: 647383 - RNA, 19 nt, Homo sapiens
  misc_RNA (1)...(19): siRNA sense strand
gagccagggaucccaggaa

SEQ ID NO: 647384 - RNA, 19 nt, Homo sapiens
  misc_RNA (1)...(19): siRNA sense strand
gaaccagggaaaggagaga

SEQ ID NO: 647385 - RNA, 19 nt, Homo sapiens
  misc_RNA (1)...(19): siRNA sense strand
gauuacaauggaaacauca

SEQ ID NO: 647386 - RNA, 19 nt, Homo sapiens
  misc_RNA (1)...(19): siRNA sense strand
ggucaaccaggaacuagag

SEQ ID NO: 647387 - RNA, 19 nt, Homo sapiens
  misc_RNA (1)...(19): siRNA sense strand
aaggagagaugguggauua

SEQ ID NO: 647388 - RNA, 19 nt, Homo sapiens
  misc_RNA (1)...(19): siRNA sense strand
cagcugggcuuccugguuu

SEQ ID NO: 647389 - RNA, 19 nt, Homo sapiens
  misc_RNA (1)...(19): siRNA sense strand
ccaaagacaucuccaggau

SEQ ID NO: 647390 - RNA, 19 nt, Homo sapiens
  misc_RNA (1)...(19): siRNA sense strand
gagagaugguggauuacaa

SEQ ID NO: 647391 - RNA, 19 nt, Homo sapiens
  misc_RNA (1)...(19): siRNA sense strand
aaagggaccucgcgguaaa

SEQ ID NO: 647392 - RNA, 19 nt, Homo sapiens
  misc_RNA (1)...(19): siRNA sense strand
gaugguggauuacaaugga

SEQ ID NO: 647393 - RNA, 19 nt, Homo sapiens
  misc_RNA (1)...(19): siRNA sense strand
ggauuacaauggaaacauc

SEQ ID NO: 647394 - RNA, 19 nt, Homo sapiens
  misc_RNA (1)...(19): siRNA sense strand
caagggagaaccagggaaa

SEQ ID NO: 647395 - RNA, 19 nt, Homo sapiens
  misc_RNA (1)...(19): siRNA sense strand
ggaagcaggacuagaugga

SEQ ID NO: 647396 - RNA, 19 nt, Homo sapiens
  misc_RNA (1)...(19): siRNA sense strand
caaggcugcuggaacaagu

SEQ ID NO: 647397 - RNA, 19 nt, Homo sapiens
  misc_RNA (1)...(19): siRNA sense strand
gggagaagcaggugucgau

SEQ ID NO: 647398 - RNA, 19 nt, Homo sapiens
  misc_RNA (1)...(19): siRNA sense strand
ggagaacagggaccagaug

SEQ ID NO: 647399 - RNA, 19 nt, Homo sapiens
  misc_RNA (1)...(19): siRNA sense strand
acaauggaaacaucaauga

SEQ ID NO: 647400 - RNA, 19 nt, Homo sapiens
  misc_RNA (1)...(19): siRNA sense strand
gaaaggagagaugguggau

SEQ ID NO: 647401 - RNA, 19 nt, Homo sapiens
  misc_RNA (1)...(19): siRNA sense strand
cuagagguuucccuggauu

SEQ ID NO: 647402 - RNA, 19 nt, Homo sapiens
  misc_RNA (1)...(19): siRNA sense strand
gcaaauggagacggcuauu

SEQ ID NO: 647403 - RNA, 19 nt, Homo sapiens
  misc_RNA (1)...(19): siRNA sense strand
gaaaggcuuccagggagaa

SEQ ID NO: 647404 - RNA, 19 nt, Homo sapiens
  misc_RNA (1)...(19): siRNA sense strand
gcagcugggcuuccugguu

SEQ ID NO: 647405 - RNA, 19 nt, Homo sapiens
  misc_RNA (1)...(19): siRNA sense strand
ggagagaugguggauuaca

SEQ ID NO: 647406 - RNA, 19 nt, Homo sapiens
  misc_RNA (1)...(19): siRNA sense strand
gaugcuggcaacuccauug

SEQ ID NO: 647407 - RNA, 19 nt, Homo sapiens
  misc_RNA (1)...(19): siRNA sense strand
gcguggagcagcuggagaa

SEQ ID NO: 647408 - RNA, 19 nt, Homo sapiens
  misc_RNA (1)...(19): siRNA sense strand
uggagcagcuggagaacag

SEQ ID NO: 647409 - RNA, 19 nt, Homo sapiens
  misc_RNA (1)...(19): siRNA sense strand
ggauuuccgggucccauug

SEQ ID NO: 647410 - RNA, 19 nt, Homo sapiens
  misc_RNA (1)...(19): siRNA sense strand
gagaugguggauuacaaug

SEQ ID NO: 647411 - RNA, 19 nt, Homo sapiens
  misc_RNA (1)...(19): siRNA sense strand
uagcggagcgcacccacaa

SEQ ID NO: 647412 - RNA, 19 nt, Homo sapiens
  misc_RNA (1)...(19): siRNA sense strand
gggagaaccagggaaagga

SEQ ID NO: 647413 - RNA, 19 nt, Homo sapiens
  misc_RNA (1)...(19): siRNA sense strand
gagccaggccagcauccaa

SEQ ID NO: 647414 - RNA, 19 nt, Homo sapiens
  misc_RNA (1)...(19): siRNA sense strand
gguacuccaggaccaauug

SEQ ID NO: 647415 - RNA, 19 nt, Homo sapiens
  misc_RNA (1)...(19): siRNA sense strand
aaaggagacccugggauga

SEQ ID NO: 647416 - RNA, 19 nt, Homo sapiens
  misc_RNA (1)...(19): siRNA sense strand
gagccagggaucccaggaa

SEQ ID NO: 647417 - RNA, 19 nt, Homo sapiens
  misc_RNA (1)...(19): siRNA sense strand
gaaccagggaaaggagaga

SEQ ID NO: 647418 - RNA, 19 nt, Homo sapiens
  misc_RNA (1)...(19): siRNA sense strand
gauuacaauggaaacauca

SEQ ID NO: 647419 - RNA, 19 nt, Homo sapiens
  misc_RNA (1)...(19): siRNA sense strand
ggucaaccaggaacuagag

SEQ ID NO: 647420 - RNA, 19 nt, Homo sapiens
  misc_RNA (1)...(19): siRNA sense strand
aaggagagaugguggauua

SEQ ID NO: 647421 - RNA, 19 nt, Homo sapiens
  misc_RNA (1)...(19): siRNA sense strand
cagcugggcuuccugguuu

SEQ ID NO: 647422 - RNA, 19 nt, Homo sapiens
  misc_RNA (1)...(19): siRNA sense strand
ccaaagacaucuccaggau

SEQ ID NO: 647423 - RNA, 19 nt, Homo sapiens
  misc_RNA (1)...(19): siRNA sense strand
gagagaugguggauuacaa

SEQ ID NO: 647424 - RNA, 19 nt, Homo sapiens
  misc_RNA (1)...(19): siRNA sense strand
aaagggaccucgcgguaaa

SEQ ID NO: 647425 - RNA, 19 nt, Homo sapiens
  misc_RNA (1)...(19): siRNA sense strand
gaugguggauuacaaugga

SEQ ID NO: 647426 - RNA, 19 nt, Homo sapiens
  misc_RNA (1)...(19): siRNA sense strand
ggauuacaauggaaacauc

SEQ ID NO: 647427 - RNA, 19 nt, Homo sapiens
  misc_RNA (1)...(19): siRNA sense strand
caagggagaaccagggaaa

SEQ ID NO: 647428 - RNA, 19 nt, Homo sapiens
  misc_RNA (1)...(19): siRNA sense strand
ggaagcaggacuagaugga

SEQ ID NO: 647429 - RNA, 19 nt, Homo sapiens
  misc_RNA (1)...(19): siRNA sense strand
caaggcugcuggaacaagu

SEQ ID NO: 647430 - RNA, 19 nt, Homo sapiens
  misc_RNA (1)...(19): siRNA sense strand
gggagaagcaggugucgau

SEQ ID NO: 647431 - RNA, 19 nt, Homo sapiens
  misc_RNA (1)...(19): siRNA sense strand
ggagaacagggaccagaug

SEQ ID NO: 647432 - RNA, 19 nt, Homo sapiens
  misc_RNA (1)...(19): siRNA sense strand
acaauggaaacaucaauga

SEQ ID NO: 647433 - RNA, 19 nt, Homo sapiens
  misc_RNA (1)...(19): siRNA sense strand
gaaaggagagaugguggau

SEQ ID NO: 647434 - RNA, 19 nt, Homo sapiens
  misc_RNA (1)...(19): siRNA sense strand
cuagagguuucccuggauu

SEQ ID NO: 647435 - RNA, 19 nt, Homo sapiens
  misc_RNA (1)...(19): siRNA sense strand
gcaaauggagacggcuauu

SEQ ID NO: 647436 - RNA, 19 nt, Homo sapiens
  misc_RNA (1)...(19): siRNA sense strand
gaaaggcuuccagggagaa

SEQ ID NO: 647437 - RNA, 19 nt, Homo sapiens
  misc_RNA (1)...(19): siRNA sense strand
gcagcugggcuuccugguu

SEQ ID NO: 647438 - RNA, 19 nt, Homo sapiens
  misc_RNA (1)...(19): siRNA sense strand
ggagagaugguggauuaca

SEQ ID NO: 647439 - RNA, 19 nt, Homo sapiens
  misc_RNA (1)...(19): siRNA sense strand
gaugcuggcaacuccauug

SEQ ID NO: 647440 - RNA, 19 nt, Homo sapiens
  misc_RNA (1)...(19): siRNA sense strand
gcguggagcagcuggagaa

SEQ ID NO: 647441 - RNA, 19 nt, Homo sapiens
  misc_RNA (1)...(19): siRNA sense strand
uggagcagcuggagaacag

SEQ ID NO: 647442 - RNA, 19 nt, Homo sapiens
  misc_RNA (1)...(19): siRNA sense strand
ggauuuccgggucccauug

SEQ ID NO: 647443 - RNA, 19 nt, Homo sapiens
  misc_RNA (1)...(19): siRNA sense strand
gagaugguggauuacaaug

SEQ ID NO: 647444 - RNA, 19 nt, Homo sapiens
  misc_RNA (1)...(19): siRNA sense strand
uagcggagcgcacccacaa

SEQ ID NO: 647445 - RNA, 19 nt, Homo sapiens
  misc_RNA (1)...(19): siRNA sense strand
gggagaaccagggaaagga

SEQ ID NO: 647446 - RNA, 19 nt, Homo sapiens
  misc_RNA (1)...(19): siRNA sense strand
gagccaggccagcauccaa

SEQ ID NO: 647447 - RNA, 19 nt, Homo sapiens
  misc_RNA (1)...(19): siRNA sense strand
gguacuccaggaccaauug

SEQ ID NO: 647448 - RNA, 19 nt, Homo sapiens
  misc_RNA (1)...(19): siRNA sense strand
aaaggagacccugggauga

SEQ ID NO: 647449 - RNA, 19 nt, Homo sapiens
  misc_RNA (1)...(19): siRNA sense strand
gagccagggaucccaggaa

SEQ ID NO: 647450 - RNA, 19 nt, Homo sapiens
  misc_RNA (1)...(19): siRNA sense strand
gaaccagggaaaggagaga

SEQ ID NO: 647451 - RNA, 19 nt, Homo sapiens
  misc_RNA (1)...(19): siRNA sense strand
gauuacaauggaaacauca

SEQ ID NO: 647452 - RNA, 19 nt, Homo sapiens
  misc_RNA (1)...(19): siRNA sense strand
ggucaaccaggaacuagag

SEQ ID NO: 647453 - RNA, 19 nt, Homo sapiens
  misc_RNA (1)...(19): siRNA sense strand
aaggagagaugguggauua

SEQ ID NO: 647454 - RNA, 19 nt, Homo sapiens
  misc_RNA (1)...(19): siRNA sense strand
cagcugggcuuccugguuu

SEQ ID NO: 647455 - RNA, 19 nt, Homo sapiens
  misc_RNA (1)...(19): siRNA sense strand
ccaaagacaucuccaggau

SEQ ID NO: 647456 - RNA, 19 nt, Homo sapiens
  misc_RNA (1)...(19): siRNA sense strand
gagagaugguggauuacaa

SEQ ID NO: 647457 - RNA, 19 nt, Homo sapiens
  misc_RNA (1)...(19): siRNA sense strand
aaagggaccucgcgguaaa

SEQ ID NO: 647458 - RNA, 19 nt, Homo sapiens
  misc_RNA (1)...(19): siRNA sense strand
gaugguggauuacaaugga

SEQ ID NO: 647459 - RNA, 19 nt, Homo sapiens
  misc_RNA (1)...(19): siRNA sense strand
ggauuacaauggaaacauc

SEQ ID NO: 647460 - RNA, 19 nt, Homo sapiens
  misc_RNA (1)...(19): siRNA sense strand
caagggagaaccagggaaa

SEQ ID NO: 647461 - RNA, 19 nt, Homo sapiens
  misc_RNA (1)...(19): siRNA sense strand
ggaagcaggacuagaugga

SEQ ID NO: 647462 - RNA, 19 nt, Homo sapiens
  misc_RNA (1)...(19): siRNA sense strand
caaggcugcuggaacaagu

SEQ ID NO: 647463 - RNA, 19 nt, Homo sapiens
  misc_RNA (1)...(19): siRNA sense strand
gggagaagcaggugucgau

SEQ ID NO: 647464 - RNA, 19 nt, Homo sapiens
  misc_RNA (1)...(19): siRNA sense strand
ggagaacagggaccagaug

SEQ ID NO: 647465 - RNA, 19 nt, Homo sapiens
  misc_RNA (1)...(19): siRNA sense strand
acaauggaaacaucaauga

SEQ ID NO: 647466 - RNA, 19 nt, Homo sapiens
  misc_RNA (1)...(19): siRNA sense strand
gaaaggagagaugguggau

SEQ ID NO: 647467 - RNA, 19 nt, Homo sapiens
  misc_RNA (1)...(19): siRNA sense strand
cuagagguuucccuggauu

SEQ ID NO: 647468 - RNA, 19 nt, Homo sapiens
  misc_RNA (1)...(19): siRNA sense strand
gcaaauggagacggcuauu

SEQ ID NO: 647469 - RNA, 19 nt, Homo sapiens
  misc_RNA (1)...(19): siRNA sense strand
gaaaggcuuccagggagaa

SEQ ID NO: 647470 - RNA, 19 nt, Homo sapiens
  misc_RNA (1)...(19): siRNA sense strand
gcagcugggcuuccugguu

SEQ ID NO: 647471 - RNA, 19 nt, Homo sapiens
  misc_RNA (1)...(19): siRNA sense strand
ggagagaugguggauuaca

SEQ ID NO: 647472 - RNA, 19 nt, Homo sapiens
  misc_RNA (1)...(19): siRNA sense strand
gaugcuggcaacuccauug

SEQ ID NO: 647473 - RNA, 19 nt, Homo sapiens
  misc_RNA (1)...(19): siRNA sense strand
gcguggagcagcuggagaa

SEQ ID NO: 647474 - RNA, 19 nt, Homo sapiens
  misc_RNA (1)...(19): siRNA sense strand
uggagcagcuggagaacag

SEQ ID NO: 647475 - RNA, 19 nt, Homo sapiens
  misc_RNA (1)...(19): siRNA sense strand
ggauuuccgggucccauug

SEQ ID NO: 647476 - RNA, 19 nt, Homo sapiens
  misc_RNA (1)...(19): siRNA sense strand
gagaugguggauuacaaug

SEQ ID NO: 647477 - RNA, 19 nt, Homo sapiens
  misc_RNA (1)...(19): siRNA sense strand
uagcggagcgcacccacaa

SEQ ID NO: 647478 - RNA, 19 nt, Homo sapiens
  misc_RNA (1)...(19): siRNA sense strand
gggagaaccagggaaagga

SEQ ID NO: 647479 - RNA, 19 nt, Homo sapiens
  misc_RNA (1)...(19): siRNA sense strand
gagccaggccagcauccaa

SEQ ID NO: 647480 - RNA, 19 nt, Homo sapiens
  misc_RNA (1)...(19): siRNA sense strand
gguacuccaggaccaauug

SEQ ID NO: 647481 - RNA, 19 nt, Homo sapiens
  misc_RNA (1)...(19): siRNA sense strand
aaaggagacccugggauga

SEQ ID NO: 647482 - RNA, 19 nt, Homo sapiens
  misc_RNA (1)...(19): siRNA sense strand
gagccagggaucccaggaa

SEQ ID NO: 647483 - RNA, 19 nt, Homo sapiens
  misc_RNA (1)...(19): siRNA sense strand
gaaccagggaaaggagaga

SEQ ID NO: 647484 - RNA, 19 nt, Homo sapiens
  misc_RNA (1)...(19): siRNA sense strand
gauuacaauggaaacauca

SEQ ID NO: 647485 - RNA, 19 nt, Homo sapiens
  misc_RNA (1)...(19): siRNA sense strand
ggucaaccaggaacuagag

SEQ ID NO: 647486 - RNA, 19 nt, Homo sapiens
  misc_RNA (1)...(19): siRNA sense strand
aaggagagaugguggauua

SEQ ID NO: 647487 - RNA, 19 nt, Homo sapiens
  misc_RNA (1)...(19): siRNA sense strand
cagcugggcuuccugguuu

SEQ ID NO: 647488 - RNA, 19 nt, Homo sapiens
  misc_RNA (1)...(19): siRNA sense strand
ccaaagacaucuccaggau

SEQ ID NO: 647489 - RNA, 19 nt, Homo sapiens
  misc_RNA (1)...(19): siRNA sense strand
gagagaugguggauuacaa

SEQ ID NO: 647490 - RNA, 19 nt, Homo sapiens
  misc_RNA (1)...(19): siRNA sense strand
aaagggaccucgcgguaaa

SEQ ID NO: 647491 - RNA, 19 nt, Homo sapiens
  misc_RNA (1)...(19): siRNA sense strand
gaugguggauuacaaugga

SEQ ID NO: 647492 - RNA, 19 nt, Homo sapiens
  misc_RNA (1)...(19): siRNA sense strand
ggauuacaauggaaacauc

SEQ ID NO: 647493 - RNA, 19 nt, Homo sapiens
  misc_RNA (1)...(19): siRNA sense strand
caagggagaaccagggaaa

SEQ ID NO: 647494 - RNA, 19 nt, Homo sapiens
  misc_RNA (1)...(19): siRNA sense strand
ggaagcaggacuagaugga

SEQ ID NO: 647495 - RNA, 19 nt, Homo sapiens
  misc_RNA (1)...(19): siRNA sense strand
caaggcugcuggaacaagu

SEQ ID NO: 647496 - RNA, 19 nt, Homo sapiens
  misc_RNA (1)...(19): siRNA sense strand
gggagaagcaggugucgau

SEQ ID NO: 647497 - RNA, 19 nt, Homo sapiens
  misc_RNA (1)...(19): siRNA sense strand
ggagaacagggaccagaug

SEQ ID NO: 647498 - RNA, 19 nt, Homo sapiens
  misc_RNA (1)...(19): siRNA sense strand
acaauggaaacaucaauga

SEQ ID NO: 647499 - RNA, 19 nt, Homo sapiens
  misc_RNA (1)...(19): siRNA sense strand
gaaaggagagaugguggau

SEQ ID NO: 647500 - RNA, 19 nt, Homo sapiens
  misc_RNA (1)...(19): siRNA sense strand
cuagagguuucccuggauu

SEQ ID NO: 647501 - RNA, 19 nt, Homo sapiens
  misc_RNA (1)...(19): siRNA sense strand
gcaaauggagacggcuauu

SEQ ID NO: 647502 - RNA, 19 nt, Homo sapiens
  misc_RNA (1)...(19): siRNA sense strand
gaaaggcuuccagggagaa

SEQ ID NO: 647503 - RNA, 19 nt, Homo sapiens
  misc_RNA (1)...(19): siRNA sense strand
gcagcugggcuuccugguu

SEQ ID NO: 647504 - RNA, 19 nt, Homo sapiens
  misc_RNA (1)...(19): siRNA sense strand
ggagagaugguggauuaca

SEQ ID NO: 647505 - RNA, 19 nt, Homo sapiens
  misc_RNA (1)...(19): siRNA sense strand
gaugcuggcaacuccauug

SEQ ID NO: 647506 - RNA, 19 nt, Homo sapiens
  misc_RNA (1)...(19): siRNA sense strand
gcguggagcagcuggagaa

SEQ ID NO: 647507 - RNA, 19 nt, Homo sapiens
  misc_RNA (1)...(19): siRNA sense strand
uggagcagcuggagaacag

SEQ ID NO: 647508 - RNA, 19 nt, Homo sapiens
  misc_RNA (1)...(19): siRNA sense strand
ggauuuccgggucccauug

SEQ ID NO: 647509 - RNA, 19 nt, Homo sapiens
  misc_RNA (1)...(19): siRNA sense strand
gagaugguggauuacaaug

SEQ ID NO: 647510 - RNA, 19 nt, Homo sapiens
  misc_RNA (1)...(19): siRNA sense strand
uagcggagcgcacccacaa

SEQ ID NO: 647511 - RNA, 19 nt, Homo sapiens
  misc_RNA (1)...(19): siRNA sense strand
gggagaaccagggaaagga

SEQ ID NO: 647512 - RNA, 19 nt, Homo sapiens
  misc_RNA (1)...(19): siRNA sense strand
gagccaggccagcauccaa

SEQ ID NO: 647513 - RNA, 19 nt, Homo sapiens
  misc_RNA (1)...(19): siRNA sense strand
gguacuccaggaccaauug

SEQ ID NO: 647514 - RNA, 19 nt, Homo sapiens
  misc_RNA (1)...(19): siRNA sense strand
aaaggagacccugggauga

SEQ ID NO: 647515 - RNA, 19 nt, Homo sapiens
  misc_RNA (1)...(19): siRNA sense strand
gagccagggaucccaggaa

SEQ ID NO: 647516 - RNA, 19 nt, Homo sapiens
  misc_RNA (1)...(19): siRNA sense strand
gaaccagggaaaggagaga

SEQ ID NO: 647517 - RNA, 19 nt, Homo sapiens
  misc_RNA (1)...(19): siRNA sense strand
gauuacaauggaaacauca

SEQ ID NO: 647518 - RNA, 19 nt, Homo sapiens
  misc_RNA (1)...(19): siRNA sense strand
ggucaaccaggaacuagag

SEQ ID NO: 647519 - RNA, 19 nt, Homo sapiens
  misc_RNA (1)...(19): siRNA sense strand
aaggagagaugguggauua

SEQ ID NO: 647520 - RNA, 19 nt, Homo sapiens
  misc_RNA (1)...(19): siRNA sense strand
cagcugggcuuccugguuu

SEQ ID NO: 647521 - RNA, 19 nt, Homo sapiens
  misc_RNA (1)...(19): siRNA sense strand
ccaaagacaucuccaggau

SEQ ID NO: 647522 - RNA, 19 nt, Homo sapiens
  misc_RNA (1)...(19): siRNA sense strand
gagagaugguggauuacaa

SEQ ID NO: 647523 - RNA, 19 nt, Homo sapiens
  misc_RNA (1)...(19): siRNA sense strand
aaagggaccucgcgguaaa

SEQ ID NO: 647524 - RNA, 19 nt, Homo sapiens
  misc_RNA (1)...(19): siRNA sense strand
gaugguggauuacaaugga

SEQ ID NO: 647525 - RNA, 19 nt, Homo sapiens
  misc_RNA (1)...(19): siRNA sense strand
ggauuacaauggaaacauc

SEQ ID NO: 647526 - RNA, 19 nt, Homo sapiens
  misc_RNA (1)...(19): siRNA sense strand
caagggagaaccagggaaa

SEQ ID NO: 647527 - RNA, 19 nt, Homo sapiens
  misc_RNA (1)...(19): siRNA sense strand
ggaagcaggacuagaugga

SEQ ID NO: 647528 - RNA, 19 nt, Homo sapiens
  misc_RNA (1)...(19): siRNA sense strand
caaggcugcuggaacaagu

SEQ ID NO: 647529 - RNA, 19 nt, Homo sapiens
  misc_RNA (1)...(19): siRNA sense strand
gggagaagcaggugucgau

SEQ ID NO: 647530 - RNA, 19 nt, Homo sapiens
  misc_RNA (1)...(19): siRNA sense strand
ggagaacagggaccagaug

SEQ ID NO: 647531 - RNA, 19 nt, Homo sapiens
  misc_RNA (1)...(19): siRNA sense strand
acaauggaaacaucaauga

SEQ ID NO: 647532 - RNA, 19 nt, Homo sapiens
  misc_RNA (1)...(19): siRNA sense strand
gaaaggagagaugguggau

SEQ ID NO: 647533 - RNA, 19 nt, Homo sapiens
  misc_RNA (1)...(19): siRNA sense strand
cuagagguuucccuggauu

SEQ ID NO: 647534 - RNA, 19 nt, Homo sapiens
  misc_RNA (1)...(19): siRNA sense strand
gcaaauggagacggcuauu

SEQ ID NO: 647535 - RNA, 19 nt, Homo sapiens
  misc_RNA (1)...(19): siRNA sense strand
gaaaggcuuccagggagaa

SEQ ID NO: 647536 - RNA, 19 nt, Homo sapiens
  misc_RNA (1)...(19): siRNA sense strand
gcagcugggcuuccugguu

SEQ ID NO: 647537 - RNA, 19 nt, Homo sapiens
  misc_RNA (1)...(19): siRNA sense strand
ggagagaugguggauuaca

SEQ ID NO: 647538 - RNA, 19 nt, Homo sapiens
  misc_RNA (1)...(19): siRNA sense strand
gaugcuggcaacuccauug

SEQ ID NO: 647539 - RNA, 19 nt, Homo sapiens
  misc_RNA (1)...(19): siRNA sense strand
gcguggagcagcuggagaa

SEQ ID NO: 647540 - RNA, 19 nt, Homo sapiens
  misc_RNA (1)...(19): siRNA sense strand
uggagcagcuggagaacag

SEQ ID NO: 647541 - RNA, 19 nt, Homo sapiens
  misc_RNA (1)...(19): siRNA sense strand
ggauuuccgggucccauug

SEQ ID NO: 647542 - RNA, 19 nt, Homo sapiens
  misc_RNA (1)...(19): siRNA sense strand
gagaugguggauuacaaug

SEQ ID NO: 647543 - RNA, 19 nt, Homo sapiens
  misc_RNA (1)...(19): siRNA sense strand
uagcggagcgcacccacaa

SEQ ID NO: 647544 - RNA, 19 nt, Homo sapiens
  misc_RNA (1)...(19): siRNA sense strand
gggagaaccagggaaagga

SEQ ID NO: 647545 - RNA, 19 nt, Homo sapiens
  misc_RNA (1)...(19): siRNA sense strand
gagccaggccagcauccaa

SEQ ID NO: 647546 - RNA, 19 nt, Homo sapiens
  misc_RNA (1)...(19): siRNA sense strand
gguacuccaggaccaauug

SEQ ID NO: 647547 - RNA, 19 nt, Homo sapiens
  misc_RNA (1)...(19): siRNA sense strand
aaaggagacccugggauga

SEQ ID NO: 647548 - RNA, 19 nt, Homo sapiens
  misc_RNA (1)...(19): siRNA sense strand
gagccagggaucccaggaa

SEQ ID NO: 647549 - RNA, 19 nt, Homo sapiens
  misc_RNA (1)...(19): siRNA sense strand
gaaccagggaaaggagaga

SEQ ID NO: 647550 - RNA, 19 nt, Homo sapiens
  misc_RNA (1)...(19): siRNA sense strand
gauuacaauggaaacauca

SEQ ID NO: 647551 - RNA, 19 nt, Homo sapiens
  misc_RNA (1)...(19): siRNA sense strand
ggucaaccaggaacuagag

SEQ ID NO: 647552 - RNA, 19 nt, Homo sapiens
  misc_RNA (1)...(19): siRNA sense strand
aaggagagaugguggauua

SEQ ID NO: 647553 - RNA, 19 nt, Homo sapiens
  misc_RNA (1)...(19): siRNA sense strand
cagcugggcuuccugguuu

SEQ ID NO: 647554 - RNA, 19 nt, Homo sapiens
  misc_RNA (1)...(19): siRNA sense strand
ccaaagacaucuccaggau

SEQ ID NO: 647555 - RNA, 19 nt, Homo sapiens
  misc_RNA (1)...(19): siRNA sense strand
gagagaugguggauuacaa

SEQ ID NO: 647556 - RNA, 19 nt, Homo sapiens
  misc_RNA (1)...(19): siRNA sense strand
aaagggaccucgcgguaaa

SEQ ID NO: 647557 - RNA, 19 nt, Homo sapiens
  misc_RNA (1)...(19): siRNA sense strand
gaugguggauuacaaugga

SEQ ID NO: 647558 - RNA, 19 nt, Homo sapiens
  misc_RNA (1)...(19): siRNA sense strand
ggauuacaauggaaacauc

SEQ ID NO: 647559 - RNA, 19 nt, Homo sapiens
  misc_RNA (1)...(19): siRNA sense strand
caagggagaaccagggaaa

SEQ ID NO: 647560 - RNA, 19 nt, Homo sapiens
  misc_RNA (1)...(19): siRNA sense strand
ggaagcaggacuagaugga

SEQ ID NO: 647561 - RNA, 19 nt, Homo sapiens
  misc_RNA (1)...(19): siRNA sense strand
caaggcugcuggaacaagu

SEQ ID NO: 647562 - RNA, 19 nt, Homo sapiens
  misc_RNA (1)...(19): siRNA sense strand
gggagaagcaggugucgau

SEQ ID NO: 647563 - RNA, 19 nt, Homo sapiens
  misc_RNA (1)...(19): siRNA sense strand
ggagaacagggaccagaug

SEQ ID NO: 647564 - RNA, 19 nt, Homo sapiens
  misc_RNA (1)...(19): siRNA sense strand
acaauggaaacaucaauga

SEQ ID NO: 647565 - RNA, 19 nt, Homo sapiens
  misc_RNA (1)...(19): siRNA sense strand
gaaaggagagaugguggau

SEQ ID NO: 647566 - RNA, 19 nt, Homo sapiens
  misc_RNA (1)...(19): siRNA sense strand
cuagagguuucccuggauu

SEQ ID NO: 647567 - RNA, 19 nt, Homo sapiens
  misc_RNA (1)...(19): siRNA sense strand
gcaaauggagacggcuauu

SEQ ID NO: 647568 - RNA, 19 nt, Homo sapiens
  misc_RNA (1)...(19): siRNA sense strand
gaaaggcuuccagggagaa

SEQ ID NO: 647569 - RNA, 19 nt, Homo sapiens
  misc_RNA (1)...(19): siRNA sense strand
gcagcugggcuuccugguu

SEQ ID NO: 647570 - RNA, 19 nt, Homo sapiens
  misc_RNA (1)...(19): siRNA sense strand
ggagagaugguggauuaca

SEQ ID NO: 647571 - RNA, 19 nt, Homo sapiens
  misc_RNA (1)...(19): siRNA sense strand
gaugcuggcaacuccauug

SEQ ID NO: 647572 - RNA, 19 nt, Homo sapiens
  misc_RNA (1)...(19): siRNA sense strand
gcguggagcagcuggagaa

SEQ ID NO: 647573 - RNA, 19 nt, Homo sapiens
  misc_RNA (1)...(19): siRNA sense strand
uggagcagcuggagaacag

SEQ ID NO: 647574 - RNA, 19 nt, Homo sapiens
  misc_RNA (1)...(19): siRNA sense strand
ggauuuccgggucccauug

SEQ ID NO: 647575 - RNA, 19 nt, Homo sapiens
  misc_RNA (1)...(19): siRNA sense strand
gagaugguggauuacaaug

SEQ ID NO: 647576 - RNA, 19 nt, Homo sapiens
  misc_RNA (1)...(19): siRNA sense strand
uagcggagcgcacccacaa

SEQ ID NO: 647577 - RNA, 19 nt, Homo sapiens
  misc_RNA (1)...(19): siRNA sense strand
gggagaaccagggaaagga

SEQ ID NO: 647578 - RNA, 19 nt, Homo sapiens
  misc_RNA (1)...(19): siRNA sense strand
gagccaggccagcauccaa

SEQ ID NO: 647579 - RNA, 19 nt, Homo sapiens
  misc_RNA (1)...(19): siRNA sense strand
gguacuccaggaccaauug

SEQ ID NO: 647580 - RNA, 19 nt, Homo sapiens
  misc_RNA (1)...(19): siRNA sense strand
aaaggagacccugggauga

SEQ ID NO: 647581 - RNA, 19 nt, Homo sapiens
  misc_RNA (1)...(19): siRNA sense strand
gagccagggaucccaggaa

SEQ ID NO: 647582 - RNA, 19 nt, Homo sapiens
  misc_RNA (1)...(19): siRNA sense strand
gaaccagggaaaggagaga

SEQ ID NO: 647583 - RNA, 19 nt, Homo sapiens
  misc_RNA (1)...(19): siRNA sense strand
gauuacaauggaaacauca

SEQ ID NO: 647584 - RNA, 19 nt, Homo sapiens
  misc_RNA (1)...(19): siRNA sense strand
ggucaaccaggaacuagag

SEQ ID NO: 647585 - RNA, 19 nt, Homo sapiens
  misc_RNA (1)...(19): siRNA sense strand
aaggagagaugguggauua

SEQ ID NO: 647586 - RNA, 19 nt, Homo sapiens
  misc_RNA (1)...(19): siRNA sense strand
cagcugggcuuccugguuu

SEQ ID NO: 647587 - RNA, 19 nt, Homo sapiens
  misc_RNA (1)...(19): siRNA sense strand
ccaaagacaucuccaggau

SEQ ID NO: 647588 - RNA, 19 nt, Homo sapiens
  misc_RNA (1)...(19): siRNA sense strand
gagagaugguggauuacaa

SEQ ID NO: 647589 - RNA, 19 nt, Homo sapiens
  misc_RNA (1)...(19): siRNA sense strand
aaagggaccucgcgguaaa

SEQ ID NO: 647590 - RNA, 19 nt, Homo sapiens
  misc_RNA (1)...(19): siRNA sense strand
gaugguggauuacaaugga

SEQ ID NO: 647591 - RNA, 19 nt, Homo sapiens
  misc_RNA (1)...(19): siRNA sense strand
ggauuacaauggaaacauc

SEQ ID NO: 647592 - RNA, 19 nt, Homo sapiens
  misc_RNA (1)...(19): siRNA sense strand
gggcgaagauggcuuacca

SEQ ID NO: 647593 - RNA, 19 nt, Homo sapiens
  misc_RNA (1)...(19): siRNA sense strand
caagggagaaccagggaaa

SEQ ID NO: 647594 - RNA, 19 nt, Homo sapiens
  misc_RNA (1)...(19): siRNA sense strand
ggaagcaggacuagaugga

SEQ ID NO: 647595 - RNA, 19 nt, Homo sapiens
  misc_RNA (1)...(19): siRNA sense strand
caaggcugcuggaacaagu

SEQ ID NO: 647596 - RNA, 19 nt, Homo sapiens
  misc_RNA (1)...(19): siRNA sense strand
gggagaagcaggugucgau

SEQ ID NO: 647597 - RNA, 19 nt, Homo sapiens
  misc_RNA (1)...(19): siRNA sense strand
ggagaacagggaccagaug

SEQ ID NO: 647598 - RNA, 19 nt, Homo sapiens
  misc_RNA (1)...(19): siRNA sense strand
acaauggaaacaucaauga

SEQ ID NO: 647599 - RNA, 19 nt, Homo sapiens
  misc_RNA (1)...(19): siRNA sense strand
gaaaggagagaugguggau

SEQ ID NO: 647600 - RNA, 19 nt, Homo sapiens
  misc_RNA (1)...(19): siRNA sense strand
cuagagguuucccuggauu

SEQ ID NO: 647601 - RNA, 19 nt, Homo sapiens
  misc_RNA (1)...(19): siRNA sense strand
gcaaauggagacggcuauu

SEQ ID NO: 647602 - RNA, 19 nt, Homo sapiens
  misc_RNA (1)...(19): siRNA sense strand
gaaaggcuuccagggagaa

SEQ ID NO: 647603 - RNA, 19 nt, Homo sapiens
  misc_RNA (1)...(19): siRNA sense strand
gcagcugggcuuccugguu

SEQ ID NO: 647604 - RNA, 19 nt, Homo sapiens
  misc_RNA (1)...(19): siRNA sense strand
ggagagaugguggauuaca

SEQ ID NO: 647605 - RNA, 19 nt, Homo sapiens
  misc_RNA (1)...(19): siRNA sense strand
gaugcuggcaacuccauug

SEQ ID NO: 647606 - RNA, 19 nt, Homo sapiens
  misc_RNA (1)...(19): siRNA sense strand
gcguggagcagcuggagaa

SEQ ID NO: 647607 - RNA, 19 nt, Homo sapiens
  misc_RNA (1)...(19): siRNA sense strand
uggagcagcuggagaacag

SEQ ID NO: 647608 - RNA, 19 nt, Homo sapiens
  misc_RNA (1)...(19): siRNA sense strand
ggauuuccgggucccauug

SEQ ID NO: 647609 - RNA, 19 nt, Homo sapiens
  misc_RNA (1)...(19): siRNA sense strand
gagaugguggauuacaaug

SEQ ID NO: 647610 - RNA, 19 nt, Homo sapiens
  misc_RNA (1)...(19): siRNA sense strand
uagcggagcgcacccacaa

SEQ ID NO: 647611 - RNA, 19 nt, Homo sapiens
  misc_RNA (1)...(19): siRNA sense strand
gggagaaccagggaaagga

SEQ ID NO: 647612 - RNA, 19 nt, Homo sapiens
  misc_RNA (1)...(19): siRNA sense strand
gagccaggccagcauccaa

SEQ ID NO: 647613 - RNA, 19 nt, Homo sapiens
  misc_RNA (1)...(19): siRNA sense strand
gguacuccaggaccaauug

SEQ ID NO: 647614 - RNA, 19 nt, Homo sapiens
  misc_RNA (1)...(19): siRNA sense strand
aaaggagacccugggauga

SEQ ID NO: 647615 - RNA, 19 nt, Homo sapiens
  misc_RNA (1)...(19): siRNA sense strand
gagccagggaucccaggaa

SEQ ID NO: 647616 - RNA, 19 nt, Homo sapiens
  misc_RNA (1)...(19): siRNA sense strand
gaaccagggaaaggagaga

SEQ ID NO: 647617 - RNA, 19 nt, Homo sapiens
  misc_RNA (1)...(19): siRNA sense strand
gauuacaauggaaacauca

SEQ ID NO: 647618 - RNA, 19 nt, Homo sapiens
  misc_RNA (1)...(19): siRNA sense strand
ggucaaccaggaacuagag

SEQ ID NO: 647619 - RNA, 19 nt, Homo sapiens
  misc_RNA (1)...(19): siRNA sense strand
auacagaaaugcaagauga

SEQ ID NO: 647620 - RNA, 19 nt, Homo sapiens
  misc_RNA (1)...(19): siRNA sense strand
caccaaauguacuuaauga

SEQ ID NO: 647621 - RNA, 19 nt, Homo sapiens
  misc_RNA (1)...(19): siRNA sense strand
gaacaccaaauguacuuaa

SEQ ID NO: 647622 - RNA, 19 nt, Homo sapiens
  misc_RNA (1)...(19): siRNA sense strand
gaauucuagugcugugaua

SEQ ID NO: 647623 - RNA, 19 nt, Homo sapiens
  misc_RNA (1)...(19): siRNA sense strand
uaaugaagacguccaagaa

SEQ ID NO: 647624 - RNA, 19 nt, Homo sapiens
  misc_RNA (1)...(19): siRNA sense strand
ggaagcagaagagcaguaa

SEQ ID NO: 647625 - RNA, 19 nt, Homo sapiens
  misc_RNA (1)...(19): siRNA sense strand
gcuaaaaccugccaagaau

SEQ ID NO: 647626 - RNA, 19 nt, Homo sapiens
  misc_RNA (1)...(19): siRNA sense strand
ucacauacacugcuacuuc

SEQ ID NO: 647627 - RNA, 19 nt, Homo sapiens
  misc_RNA (1)...(19): siRNA sense strand
ggugaacacagaauuuauu

SEQ ID NO: 647628 - RNA, 19 nt, Homo sapiens
  misc_RNA (1)...(19): siRNA sense strand
gcuaauaccaacuuuguca

SEQ ID NO: 647629 - RNA, 19 nt, Homo sapiens
  misc_RNA (1)...(19): siRNA sense strand
caauauggaacaccaaaug

SEQ ID NO: 647630 - RNA, 19 nt, Homo sapiens
  misc_RNA (1)...(19): siRNA sense strand
caggugaacacagaauuua

SEQ ID NO: 647631 - RNA, 19 nt, Homo sapiens
  misc_RNA (1)...(19): siRNA sense strand
caccaucacuggagcuaga

SEQ ID NO: 647632 - RNA, 19 nt, Homo sapiens
  misc_RNA (1)...(19): siRNA sense strand
ccaaauguacuuaaugaag

SEQ ID NO: 647633 - RNA, 19 nt, Homo sapiens
  misc_RNA (1)...(19): siRNA sense strand
uaccaacuuugucaucauu

SEQ ID NO: 647634 - RNA, 19 nt, Homo sapiens
  misc_RNA (1)...(19): siRNA sense strand
ggagcuagaggaagcagaa

SEQ ID NO: 647635 - RNA, 19 nt, Homo sapiens
  misc_RNA (1)...(19): siRNA sense strand
cagaucacauacacugcua

SEQ ID NO: 647636 - RNA, 19 nt, Homo sapiens
  misc_RNA (1)...(19): siRNA sense strand
gugcugugauacaaagaaa

SEQ ID NO: 647637 - RNA, 19 nt, Homo sapiens
  misc_RNA (1)...(19): siRNA sense strand
ccaggugaacacagaauuu

SEQ ID NO: 647638 - RNA, 19 nt, Homo sapiens
  misc_RNA (1)...(19): siRNA sense strand
uugagacgcuguuuaaugg

SEQ ID NO: 647639 - RNA, 19 nt, Homo sapiens
  misc_RNA (1)...(19): siRNA sense strand
ggaacaccaaauguacuua

SEQ ID NO: 647640 - RNA, 19 nt, Homo sapiens
  misc_RNA (1)...(19): siRNA sense strand
ugaagacguccaagaaaug

SEQ ID NO: 647641 - RNA, 19 nt, Homo sapiens
  misc_RNA (1)...(19): siRNA sense strand
ggcuugagacgcuguuuaa

SEQ ID NO: 647642 - RNA, 19 nt, Homo sapiens
  misc_RNA (1)...(19): siRNA sense strand
ucacugcaauguggaugaa

SEQ ID NO: 647643 - RNA, 19 nt, Homo sapiens
  misc_RNA (1)...(19): siRNA sense strand
gugaacacagaauuuauug

SEQ ID NO: 647644 - RNA, 19 nt, Homo sapiens
  misc_RNA (1)...(19): siRNA sense strand
aaaacuaccugcaauaugg

SEQ ID NO: 647645 - RNA, 19 nt, Homo sapiens
  misc_RNA (1)...(19): siRNA sense strand
augaagacguccaagaaau

SEQ ID NO: 647646 - RNA, 19 nt, Homo sapiens
  misc_RNA (1)...(19): siRNA sense strand
agaauuuauuggcuugaga

SEQ ID NO: 647647 - RNA, 19 nt, Homo sapiens
  misc_RNA (1)...(19): siRNA sense strand
gcaauauggaacaccaaau

SEQ ID NO: 647648 - RNA, 19 nt, Homo sapiens
  misc_RNA (1)...(19): siRNA sense strand
caggacagaucacauacac

SEQ ID NO: 647649 - RNA, 19 nt, Homo sapiens
  misc_RNA (1)...(19): siRNA sense strand
cagcaccaccuccaccaaa

SEQ ID NO: 647650 - RNA, 19 nt, Homo sapiens
  misc_RNA (1)...(19): siRNA sense strand
cacauacacugcuacuucu

SEQ ID NO: 647651 - RNA, 19 nt, Homo sapiens
  misc_RNA (1)...(19): siRNA sense strand
gagauacagaaaugcaaga

SEQ ID NO: 647652 - RNA, 19 nt, Homo sapiens
  misc_RNA (1)...(19): siRNA sense strand
cuagugcugugauacaaag

SEQ ID NO: 647653 - RNA, 19 nt, Homo sapiens
  misc_RNA (1)...(19): siRNA sense strand
aaugaagacguccaagaaa

SEQ ID NO: 647654 - RNA, 19 nt, Homo sapiens
  misc_RNA (1)...(19): siRNA sense strand
gauacagaaaugcaagaug

SEQ ID NO: 647655 - RNA, 19 nt, Homo sapiens
  misc_RNA (1)...(19): siRNA sense strand
aauaccaacuuugucauca

SEQ ID NO: 647656 - RNA, 19 nt, Homo sapiens
  misc_RNA (1)...(19): siRNA sense strand
ccaaaugccaccccuauga

SEQ ID NO: 647657 - RNA, 19 nt, Homo sapiens
  misc_RNA (1)...(19): siRNA sense strand
uuaaugaagacguccaaga

SEQ ID NO: 647658 - RNA, 19 nt, Homo sapiens
  misc_RNA (1)...(19): siRNA sense strand
gccaccaucagcacuauga

SEQ ID NO: 647659 - RNA, 19 nt, Homo sapiens
  misc_RNA (1)...(19): siRNA sense strand
gaagacguccaagaaaugc

SEQ ID NO: 647660 - RNA, 19 nt, Homo sapiens
  misc_RNA (1)...(19): siRNA sense strand
cuugagacgcuguuuaaug

SEQ ID NO: 647661 - RNA, 19 nt, Homo sapiens
  misc_RNA (1)...(19): siRNA sense strand
aaagagauacagaaaugca

SEQ ID NO: 647662 - RNA, 19 nt, Homo sapiens
  misc_RNA (1)...(19): siRNA sense strand
auauggaacaccaaaugua

SEQ ID NO: 647663 - RNA, 19 nt, Homo sapiens
  misc_RNA (1)...(19): siRNA sense strand
acagaaaugcaagaugaaa

SEQ ID NO: 647664 - RNA, 19 nt, Homo sapiens
  misc_RNA (1)...(19): siRNA sense strand
aguaccaggugaacacaga

SEQ ID NO: 647665 - RNA, 19 nt, Homo sapiens
  misc_RNA (1)...(19): siRNA sense strand
gcaccaccuccaccaaaca

SEQ ID NO: 647666 - RNA, 19 nt, Homo sapiens
  misc_RNA (1)...(19): siRNA sense strand
gacgcuguuuaauggguuu

SEQ ID NO: 647667 - RNA, 19 nt, Homo sapiens
  misc_RNA (1)...(19): siRNA sense strand
ccagccucaugcuacagua

SEQ ID NO: 647668 - RNA, 19 nt, Homo sapiens
  misc_RNA (1)...(19): siRNA sense strand
ccaaaagugguuaaauuga

SEQ ID NO: 647669 - RNA, 19 nt, Homo sapiens
  misc_RNA (1)...(19): siRNA sense strand
aaaccugccaagaauucua

SEQ ID NO: 647670 - RNA, 19 nt, Homo sapiens
  misc_RNA (1)...(19): siRNA sense strand
acaccaaauguacuuaaug

SEQ ID NO: 647671 - RNA, 19 nt, Homo sapiens
  misc_RNA (1)...(19): siRNA sense strand
agacguccaagaaaugcua

SEQ ID NO: 647672 - RNA, 19 nt, Homo sapiens
  misc_RNA (1)...(19): siRNA sense strand
acacugcuacuucuaccaa

SEQ ID NO: 647673 - RNA, 19 nt, Homo sapiens
  misc_RNA (1)...(19): siRNA sense strand
gcuagaggaagcagaagag

SEQ ID NO: 647674 - RNA, 19 nt, Homo sapiens
  misc_RNA (1)...(19): siRNA sense strand
ccaaacauacugccaacac

SEQ ID NO: 647675 - RNA, 19 nt, Homo sapiens
  misc_RNA (1)...(19): siRNA sense strand
uaauaccaacuuugucauc

SEQ ID NO: 647676 - RNA, 19 nt, Homo sapiens
  misc_RNA (1)...(19): siRNA sense strand
uggcuugagacgcuguuua

SEQ ID NO: 647677 - RNA, 19 nt, Homo sapiens
  misc_RNA (1)...(19): siRNA sense strand
ggacauccauacacucauu

SEQ ID NO: 647678 - RNA, 19 nt, Homo sapiens
  misc_RNA (1)...(19): siRNA sense strand
acucggaucuccaauguua

SEQ ID NO: 647679 - RNA, 19 nt, Homo sapiens
  misc_RNA (1)...(19): siRNA sense strand
ucucagaaauugccaacua

SEQ ID NO: 647680 - RNA, 19 nt, Homo sapiens
  misc_RNA (1)...(19): siRNA sense strand
gaaucccaaugacaucuuu

SEQ ID NO: 647681 - RNA, 19 nt, Homo sapiens
  misc_RNA (1)...(19): siRNA sense strand
agaagugucuggcugugua

SEQ ID NO: 647682 - RNA, 19 nt, Homo sapiens
  misc_RNA (1)...(19): siRNA sense strand
caucuuugcugacuuggaa

SEQ ID NO: 647683 - RNA, 19 nt, Homo sapiens
  misc_RNA (1)...(19): siRNA sense strand
ugacaucuuugcugacuug

SEQ ID NO: 647684 - RNA, 19 nt, Homo sapiens
  misc_RNA (1)...(19): siRNA sense strand
ccacucggaucuccaaugu

SEQ ID NO: 647685 - RNA, 19 nt, Homo sapiens
  misc_RNA (1)...(19): siRNA sense strand
ggaguuugcauggacaaua

SEQ ID NO: 647686 - RNA, 19 nt, Homo sapiens
  misc_RNA (1)...(19): siRNA sense strand
cgccagguccuauggauua

SEQ ID NO: 647687 - RNA, 19 nt, Homo sapiens
  misc_RNA (1)...(19): siRNA sense strand
gaguuugcauggacaauag

SEQ ID NO: 647688 - RNA, 19 nt, Homo sapiens
  misc_RNA (1)...(19): siRNA sense strand
gaugugcgcucagcagcuu

SEQ ID NO: 647689 - RNA, 19 nt, Homo sapiens
  misc_RNA (1)...(19): siRNA sense strand
aaccugagcuguaggaauc

SEQ ID NO: 647690 - RNA, 19 nt, Homo sapiens
  misc_RNA (1)...(19): siRNA sense strand
gcuccuaucaacccaagua

SEQ ID NO: 647691 - RNA, 19 nt, Homo sapiens
  misc_RNA (1)...(19): siRNA sense strand
auuaaugccugcuucugua

SEQ ID NO: 647692 - RNA, 19 nt, Homo sapiens
  misc_RNA (1)...(19): siRNA sense strand
gauuaaugccugcuucugu

SEQ ID NO: 647693 - RNA, 19 nt, Homo sapiens
  misc_RNA (1)...(19): siRNA sense strand
guaggaaucccaaugacau

SEQ ID NO: 647694 - RNA, 19 nt, Homo sapiens
  misc_RNA (1)...(19): siRNA sense strand
gcuguaggaaucccaauga

SEQ ID NO: 647695 - RNA, 19 nt, Homo sapiens
  misc_RNA (1)...(19): siRNA sense strand
ugugagugcuguaagaugu

SEQ ID NO: 647696 - RNA, 19 nt, Homo sapiens
  misc_RNA (1)...(19): siRNA sense strand
ggaauccuacccugacuuc

SEQ ID NO: 647697 - RNA, 19 nt, Homo sapiens
  misc_RNA (1)...(19): siRNA sense strand
cgacguguccuuccagugu

SEQ ID NO: 647698 - RNA, 19 nt, Homo sapiens
  misc_RNA (1)...(19): siRNA sense strand
caaguacuguggaguuugc

SEQ ID NO: 647699 - RNA, 19 nt, Homo sapiens
  misc_RNA (1)...(19): siRNA sense strand
cagguccuauggauuaaug

SEQ ID NO: 647700 - RNA, 19 nt, Homo sapiens
  misc_RNA (1)...(19): siRNA sense strand
cacggaggcugccaucugu

SEQ ID NO: 647701 - RNA, 19 nt, Homo sapiens
  misc_RNA (1)...(19): siRNA sense strand
gaacugcauagccuacaca

SEQ ID NO: 647702 - RNA, 19 nt, Homo sapiens
  misc_RNA (1)...(19): siRNA sense strand
cccaaguacuguggaguuu

SEQ ID NO: 647703 - RNA, 19 nt, Homo sapiens
  misc_RNA (1)...(19): siRNA sense strand
ccagaggcauccaugaacu

SEQ ID NO: 647704 - RNA, 19 nt, Homo sapiens
  misc_RNA (1)...(19): siRNA sense strand
cuacgaccauggacuuuac

SEQ ID NO: 647705 - RNA, 19 nt, Homo sapiens
  misc_RNA (1)...(19): siRNA sense strand
gacauccauacacucauua

SEQ ID NO: 647706 - RNA, 19 nt, Homo sapiens
  misc_RNA (1)...(19): siRNA sense strand
caucagcacacgcuccuau

SEQ ID NO: 647707 - RNA, 19 nt, Homo sapiens
  misc_RNA (1)...(19): siRNA sense strand
gggucagccucaucacaga

SEQ ID NO: 647708 - RNA, 19 nt, Homo sapiens
  misc_RNA (1)...(19): siRNA sense strand
gccagguccuauggauuaa

SEQ ID NO: 647709 - RNA, 19 nt, Homo sapiens
  misc_RNA (1)...(19): siRNA sense strand
ggcugugagugcuguaaga

SEQ ID NO: 647710 - RNA, 19 nt, Homo sapiens
  misc_RNA (1)...(19): siRNA sense strand
ggaaucccaaugacaucuu

SEQ ID NO: 647711 - RNA, 19 nt, Homo sapiens
  misc_RNA (1)...(19): siRNA sense strand
uugcugacuuggaauccua

SEQ ID NO: 647712 - RNA, 19 nt, Homo sapiens
  misc_RNA (1)...(19): siRNA sense strand
ucuguaaccugagcuguag

SEQ ID NO: 647713 - RNA, 19 nt, Homo sapiens
  misc_RNA (1)...(19): siRNA sense strand
cagcacacgcuccuaucaa

SEQ ID NO: 647714 - RNA, 19 nt, Homo sapiens
  misc_RNA (1)...(19): siRNA sense strand
ggaacugcauagccuacac

SEQ ID NO: 647715 - RNA, 19 nt, Homo sapiens
  misc_RNA (1)...(19): siRNA sense strand
ccuacgaccauggacuuua

SEQ ID NO: 647716 - RNA, 19 nt, Homo sapiens
  misc_RNA (1)...(19): siRNA sense strand
ccuaucaacccaaguacug

SEQ ID NO: 647717 - RNA, 19 nt, Homo sapiens
  misc_RNA (1)...(19): siRNA sense strand
uuaaugccugcuucuguaa

SEQ ID NO: 647718 - RNA, 19 nt, Homo sapiens
  misc_RNA (1)...(19): siRNA sense strand
gagccgccucugcaacuug

SEQ ID NO: 647719 - RNA, 19 nt, Homo sapiens
  misc_RNA (1)...(19): siRNA sense strand
uaaccugagcuguaggaau

SEQ ID NO: 647720 - RNA, 19 nt, Homo sapiens
  misc_RNA (1)...(19): siRNA sense strand
guacgcaauaggagugugu

SEQ ID NO: 647721 - RNA, 19 nt, Homo sapiens
  misc_RNA (1)...(19): siRNA sense strand
ggacauccauacacucauu

SEQ ID NO: 647722 - RNA, 19 nt, Homo sapiens
  misc_RNA (1)...(19): siRNA sense strand
acucggaucuccaauguua

SEQ ID NO: 647723 - RNA, 19 nt, Homo sapiens
  misc_RNA (1)...(19): siRNA sense strand
ucucagaaauugccaacua

SEQ ID NO: 647724 - RNA, 19 nt, Homo sapiens
  misc_RNA (1)...(19): siRNA sense strand
gaaucccaaugacaucuuu

SEQ ID NO: 647725 - RNA, 19 nt, Homo sapiens
  misc_RNA (1)...(19): siRNA sense strand
agaagugucuggcugugua

SEQ ID NO: 647726 - RNA, 19 nt, Homo sapiens
  misc_RNA (1)...(19): siRNA sense strand
caucuuugcugacuuggaa

SEQ ID NO: 647727 - RNA, 19 nt, Homo sapiens
  misc_RNA (1)...(19): siRNA sense strand
ugacaucuuugcugacuug

SEQ ID NO: 647728 - RNA, 19 nt, Homo sapiens
  misc_RNA (1)...(19): siRNA sense strand
ccacucggaucuccaaugu

SEQ ID NO: 647729 - RNA, 19 nt, Homo sapiens
  misc_RNA (1)...(19): siRNA sense strand
ggaguuugcauggacaaua

SEQ ID NO: 647730 - RNA, 19 nt, Homo sapiens
  misc_RNA (1)...(19): siRNA sense strand
cgccagguccuauggauua

SEQ ID NO: 647731 - RNA, 19 nt, Homo sapiens
  misc_RNA (1)...(19): siRNA sense strand
gaguuugcauggacaauag

SEQ ID NO: 647732 - RNA, 19 nt, Homo sapiens
  misc_RNA (1)...(19): siRNA sense strand
gaugugcgcucagcagcuu

SEQ ID NO: 647733 - RNA, 19 nt, Homo sapiens
  misc_RNA (1)...(19): siRNA sense strand
aaccugagcuguaggaauc

SEQ ID NO: 647734 - RNA, 19 nt, Homo sapiens
  misc_RNA (1)...(19): siRNA sense strand
gcuccuaucaacccaagua

SEQ ID NO: 647735 - RNA, 19 nt, Homo sapiens
  misc_RNA (1)...(19): siRNA sense strand
auuaaugccugcuucugua

SEQ ID NO: 647736 - RNA, 19 nt, Homo sapiens
  misc_RNA (1)...(19): siRNA sense strand
gauuaaugccugcuucugu

SEQ ID NO: 647737 - RNA, 19 nt, Homo sapiens
  misc_RNA (1)...(19): siRNA sense strand
guaggaaucccaaugacau

SEQ ID NO: 647738 - RNA, 19 nt, Homo sapiens
  misc_RNA (1)...(19): siRNA sense strand
gcuguaggaaucccaauga

SEQ ID NO: 647739 - RNA, 19 nt, Homo sapiens
  misc_RNA (1)...(19): siRNA sense strand
ugugagugcuguaagaugu

SEQ ID NO: 647740 - RNA, 19 nt, Homo sapiens
  misc_RNA (1)...(19): siRNA sense strand
ggaauccuacccugacuuc

SEQ ID NO: 647741 - RNA, 19 nt, Homo sapiens
  misc_RNA (1)...(19): siRNA sense strand
cgacguguccuuccagugu

SEQ ID NO: 647742 - RNA, 19 nt, Homo sapiens
  misc_RNA (1)...(19): siRNA sense strand
caaguacuguggaguuugc

SEQ ID NO: 647743 - RNA, 19 nt, Homo sapiens
  misc_RNA (1)...(19): siRNA sense strand
cagguccuauggauuaaug

SEQ ID NO: 647744 - RNA, 19 nt, Homo sapiens
  misc_RNA (1)...(19): siRNA sense strand
cacggaggcugccaucugu

SEQ ID NO: 647745 - RNA, 19 nt, Homo sapiens
  misc_RNA (1)...(19): siRNA sense strand
gaacugcauagccuacaca

SEQ ID NO: 647746 - RNA, 19 nt, Homo sapiens
  misc_RNA (1)...(19): siRNA sense strand
cccaaguacuguggaguuu

SEQ ID NO: 647747 - RNA, 19 nt, Homo sapiens
  misc_RNA (1)...(19): siRNA sense strand
ccagaggcauccaugaacu

SEQ ID NO: 647748 - RNA, 19 nt, Homo sapiens
  misc_RNA (1)...(19): siRNA sense strand
cuacgaccauggacuuuac

SEQ ID NO: 647749 - RNA, 19 nt, Homo sapiens
  misc_RNA (1)...(19): siRNA sense strand
gacauccauacacucauua

SEQ ID NO: 647750 - RNA, 19 nt, Homo sapiens
  misc_RNA (1)...(19): siRNA sense strand
caucagcacacgcuccuau

SEQ ID NO: 647751 - RNA, 19 nt, Homo sapiens
  misc_RNA (1)...(19): siRNA sense strand
gggucagccucaucacaga

SEQ ID NO: 647752 - RNA, 19 nt, Homo sapiens
  misc_RNA (1)...(19): siRNA sense strand
gccagguccuauggauuaa

SEQ ID NO: 647753 - RNA, 19 nt, Homo sapiens
  misc_RNA (1)...(19): siRNA sense strand
ggcugugagugcuguaaga

SEQ ID NO: 647754 - RNA, 19 nt, Homo sapiens
  misc_RNA (1)...(19): siRNA sense strand
ggaaucccaaugacaucuu

SEQ ID NO: 647755 - RNA, 19 nt, Homo sapiens
  misc_RNA (1)...(19): siRNA sense strand
uugcugacuuggaauccua

SEQ ID NO: 647756 - RNA, 19 nt, Homo sapiens
  misc_RNA (1)...(19): siRNA sense strand
ucuguaaccugagcuguag

SEQ ID NO: 647757 - RNA, 19 nt, Homo sapiens
  misc_RNA (1)...(19): siRNA sense strand
cagcacacgcuccuaucaa

SEQ ID NO: 647758 - RNA, 19 nt, Homo sapiens
  misc_RNA (1)...(19): siRNA sense strand
ggaacugcauagccuacac

SEQ ID NO: 647759 - RNA, 19 nt, Homo sapiens
  misc_RNA (1)...(19): siRNA sense strand
ccuacgaccauggacuuua

SEQ ID NO: 647760 - RNA, 19 nt, Homo sapiens
  misc_RNA (1)...(19): siRNA sense strand
ccuaucaacccaaguacug

SEQ ID NO: 647761 - RNA, 19 nt, Homo sapiens
  misc_RNA (1)...(19): siRNA sense strand
uuaaugccugcuucuguaa

SEQ ID NO: 647762 - RNA, 19 nt, Homo sapiens
  misc_RNA (1)...(19): siRNA sense strand
gagccgccucugcaacuug

SEQ ID NO: 647763 - RNA, 19 nt, Homo sapiens
  misc_RNA (1)...(19): siRNA sense strand
uaaccugagcuguaggaau

SEQ ID NO: 647764 - RNA, 19 nt, Homo sapiens
  misc_RNA (1)...(19): siRNA sense strand
guacgcaauaggagugugu

SEQ ID NO: 647765 - RNA, 19 nt, Homo sapiens
  misc_RNA (1)...(19): siRNA sense strand
ggaauuagagaaagaguuu

SEQ ID NO: 647766 - RNA, 19 nt, Homo sapiens
  misc_RNA (1)...(19): siRNA sense strand
cuacaucgauccgaaauuu

SEQ ID NO: 647767 - RNA, 19 nt, Homo sapiens
  misc_RNA (1)...(19): siRNA sense strand
gaacacaguccggaauauu

SEQ ID NO: 647768 - RNA, 19 nt, Homo sapiens
  misc_RNA (1)...(19): siRNA sense strand
ggacauuaccagguuauaa

SEQ ID NO: 647769 - RNA, 19 nt, Homo sapiens
  misc_RNA (1)...(19): siRNA sense strand
gcaagcaacccauagucua

SEQ ID NO: 647770 - RNA, 19 nt, Homo sapiens
  misc_RNA (1)...(19): siRNA sense strand
gcagcaaguccuggaauua

SEQ ID NO: 647771 - RNA, 19 nt, Homo sapiens
  misc_RNA (1)...(19): siRNA sense strand
cagaggacauuaccagguu

SEQ ID NO: 647772 - RNA, 19 nt, Homo sapiens
  misc_RNA (1)...(19): siRNA sense strand
cguauuugauggacucuaa

SEQ ID NO: 647773 - RNA, 19 nt, Homo sapiens
  misc_RNA (1)...(19): siRNA sense strand
cuacaucccugaacacagu

SEQ ID NO: 647774 - RNA, 19 nt, Homo sapiens
  misc_RNA (1)...(19): siRNA sense strand
aucaugagcucguauuuga

SEQ ID NO: 647775 - RNA, 19 nt, Homo sapiens
  misc_RNA (1)...(19): siRNA sense strand
gauccgaaauuuccuccau

SEQ ID NO: 647776 - RNA, 19 nt, Homo sapiens
  misc_RNA (1)...(19): siRNA sense strand
ggcagcaaguccuggaauu

SEQ ID NO: 647777 - RNA, 19 nt, Homo sapiens
  misc_RNA (1)...(19): siRNA sense strand
gaucaugagcucguauuug

SEQ ID NO: 647778 - RNA, 19 nt, Homo sapiens
  misc_RNA (1)...(19): siRNA sense strand
aacacaguccggaauauua

SEQ ID NO: 647779 - RNA, 19 nt, Homo sapiens
  misc_RNA (1)...(19): siRNA sense strand
ccaaaaccgucgcaugaaa

SEQ ID NO: 647780 - RNA, 19 nt, Homo sapiens
  misc_RNA (1)...(19): siRNA sense strand
gcaacgggcagaggacauu

SEQ ID NO: 647781 - RNA, 19 nt, Homo sapiens
  misc_RNA (1)...(19): siRNA sense strand
ugaacacaguccggaauau

SEQ ID NO: 647782 - RNA, 19 nt, Homo sapiens
  misc_RNA (1)...(19): siRNA sense strand
agaggacauuaccagguua

SEQ ID NO: 647783 - RNA, 19 nt, Homo sapiens
  misc_RNA (1)...(19): siRNA sense strand
gcacggugaaccccaauua

SEQ ID NO: 647784 - RNA, 19 nt, Homo sapiens
  misc_RNA (1)...(19): siRNA sense strand
uaacuacaucgauccgaaa

SEQ ID NO: 647785 - RNA, 19 nt, Homo sapiens
  misc_RNA (1)...(19): siRNA sense strand
gaaggagaaggaucgagau

SEQ ID NO: 647786 - RNA, 19 nt, Homo sapiens
  misc_RNA (1)...(19): siRNA sense strand
caacgggcagaggacauua

SEQ ID NO: 647787 - RNA, 19 nt, Homo sapiens
  misc_RNA (1)...(19): siRNA sense strand
caugagcucguauuugaug

SEQ ID NO: 647788 - RNA, 19 nt, Homo sapiens
  misc_RNA (1)...(19): siRNA sense strand
gcaugaaauggaagaagga

SEQ ID NO: 647789 - RNA, 19 nt, Homo sapiens
  misc_RNA (1)...(19): siRNA sense strand
uaccugacccgaaggagaa

SEQ ID NO: 647790 - RNA, 19 nt, Homo sapiens
  misc_RNA (1)...(19): siRNA sense strand
caagcaacccauagucuac

SEQ ID NO: 647791 - RNA, 19 nt, Homo sapiens
  misc_RNA (1)...(19): siRNA sense strand
cagcaaguccuggaauuag

SEQ ID NO: 647792 - RNA, 19 nt, Homo sapiens
  misc_RNA (1)...(19): siRNA sense strand
cugaacacaguccggaaua

SEQ ID NO: 647793 - RNA, 19 nt, Homo sapiens
  misc_RNA (1)...(19): siRNA sense strand
gcaaguccuggaauuagag

SEQ ID NO: 647794 - RNA, 19 nt, Homo sapiens
  misc_RNA (1)...(19): siRNA sense strand
agcaaguccuggaauuaga

SEQ ID NO: 647795 - RNA, 19 nt, Homo sapiens
  misc_RNA (1)...(19): siRNA sense strand
gcucgaggacagccuauac

SEQ ID NO: 647796 - RNA, 19 nt, Homo sapiens
  misc_RNA (1)...(19): siRNA sense strand
gaggacauuaccagguuau

SEQ ID NO: 647797 - RNA, 19 nt, Homo sapiens
  misc_RNA (1)...(19): siRNA sense strand
ggacucuaacuacaucgau

SEQ ID NO: 647798 - RNA, 19 nt, Homo sapiens
  misc_RNA (1)...(19): siRNA sense strand
uugauggacucuaacuaca

SEQ ID NO: 647799 - RNA, 19 nt, Homo sapiens
  misc_RNA (1)...(19): siRNA sense strand
ggaauuagagaaagaguuu

SEQ ID NO: 647800 - RNA, 19 nt, Homo sapiens
  misc_RNA (1)...(19): siRNA sense strand
cuacaucgauccgaaauuu

SEQ ID NO: 647801 - RNA, 19 nt, Homo sapiens
  misc_RNA (1)...(19): siRNA sense strand
gaacacaguccggaauauu

SEQ ID NO: 647802 - RNA, 19 nt, Homo sapiens
  misc_RNA (1)...(19): siRNA sense strand
ggacauuaccagguuauaa

SEQ ID NO: 647803 - RNA, 19 nt, Homo sapiens
  misc_RNA (1)...(19): siRNA sense strand
gcaagcaacccauagucua

SEQ ID NO: 647804 - RNA, 19 nt, Homo sapiens
  misc_RNA (1)...(19): siRNA sense strand
gcagcaaguccuggaauua

SEQ ID NO: 647805 - RNA, 19 nt, Homo sapiens
  misc_RNA (1)...(19): siRNA sense strand
cagaggacauuaccagguu

SEQ ID NO: 647806 - RNA, 19 nt, Homo sapiens
  misc_RNA (1)...(19): siRNA sense strand
cguauuugauggacucuaa

SEQ ID NO: 647807 - RNA, 19 nt, Homo sapiens
  misc_RNA (1)...(19): siRNA sense strand
cuacaucccugaacacagu

SEQ ID NO: 647808 - RNA, 19 nt, Homo sapiens
  misc_RNA (1)...(19): siRNA sense strand
aucaugagcucguauuuga

SEQ ID NO: 647809 - RNA, 19 nt, Homo sapiens
  misc_RNA (1)...(19): siRNA sense strand
gauccgaaauuuccuccau

SEQ ID NO: 647810 - RNA, 19 nt, Homo sapiens
  misc_RNA (1)...(19): siRNA sense strand
ggcagcaaguccuggaauu

SEQ ID NO: 647811 - RNA, 19 nt, Homo sapiens
  misc_RNA (1)...(19): siRNA sense strand
gaucaugagcucguauuug

SEQ ID NO: 647812 - RNA, 19 nt, Homo sapiens
  misc_RNA (1)...(19): siRNA sense strand
aacacaguccggaauauua

SEQ ID NO: 647813 - RNA, 19 nt, Homo sapiens
  misc_RNA (1)...(19): siRNA sense strand
ccaaaaccgucgcaugaaa

SEQ ID NO: 647814 - RNA, 19 nt, Homo sapiens
  misc_RNA (1)...(19): siRNA sense strand
gcaacgggcagaggacauu

SEQ ID NO: 647815 - RNA, 19 nt, Homo sapiens
  misc_RNA (1)...(19): siRNA sense strand
ugaacacaguccggaauau

SEQ ID NO: 647816 - RNA, 19 nt, Homo sapiens
  misc_RNA (1)...(19): siRNA sense strand
agaggacauuaccagguua

SEQ ID NO: 647817 - RNA, 19 nt, Homo sapiens
  misc_RNA (1)...(19): siRNA sense strand
gcacggugaaccccaauua

SEQ ID NO: 647818 - RNA, 19 nt, Homo sapiens
  misc_RNA (1)...(19): siRNA sense strand
uaacuacaucgauccgaaa

SEQ ID NO: 647819 - RNA, 19 nt, Homo sapiens
  misc_RNA (1)...(19): siRNA sense strand
gaaggagaaggaucgagau

SEQ ID NO: 647820 - RNA, 19 nt, Homo sapiens
  misc_RNA (1)...(19): siRNA sense strand
caacgggcagaggacauua

SEQ ID NO: 647821 - RNA, 19 nt, Homo sapiens
  misc_RNA (1)...(19): siRNA sense strand
caugagcucguauuugaug

SEQ ID NO: 647822 - RNA, 19 nt, Homo sapiens
  misc_RNA (1)...(19): siRNA sense strand
gcaugaaauggaagaagga

SEQ ID NO: 647823 - RNA, 19 nt, Homo sapiens
  misc_RNA (1)...(19): siRNA sense strand
uaccugacccgaaggagaa

SEQ ID NO: 647824 - RNA, 19 nt, Homo sapiens
  misc_RNA (1)...(19): siRNA sense strand
caagcaacccauagucuac

SEQ ID NO: 647825 - RNA, 19 nt, Homo sapiens
  misc_RNA (1)...(19): siRNA sense strand
cagcaaguccuggaauuag

SEQ ID NO: 647826 - RNA, 19 nt, Homo sapiens
  misc_RNA (1)...(19): siRNA sense strand
cugaacacaguccggaaua

SEQ ID NO: 647827 - RNA, 19 nt, Homo sapiens
  misc_RNA (1)...(19): siRNA sense strand
gcaaguccuggaauuagag

SEQ ID NO: 647828 - RNA, 19 nt, Homo sapiens
  misc_RNA (1)...(19): siRNA sense strand
agcaaguccuggaauuaga

SEQ ID NO: 647829 - RNA, 19 nt, Homo sapiens
  misc_RNA (1)...(19): siRNA sense strand
gcucgaggacagccuauac

SEQ ID NO: 647830 - RNA, 19 nt, Homo sapiens
  misc_RNA (1)...(19): siRNA sense strand
gaggacauuaccagguuau

SEQ ID NO: 647831 - RNA, 19 nt, Homo sapiens
  misc_RNA (1)...(19): siRNA sense strand
ggacucuaacuacaucgau

SEQ ID NO: 647832 - RNA, 19 nt, Homo sapiens
  misc_RNA (1)...(19): siRNA sense strand
uugauggacucuaacuaca

SEQ ID NO: 647833 - RNA, 19 nt, Homo sapiens
  misc_RNA (1)...(19): siRNA sense strand
ugaaggagcugauccagaa

SEQ ID NO: 647834 - RNA, 19 nt, Homo sapiens
  misc_RNA (1)...(19): siRNA sense strand
gcaagaaggagcugaagga

SEQ ID NO: 647835 - RNA, 19 nt, Homo sapiens
  misc_RNA (1)...(19): siRNA sense strand
agaaggagcucaccauugg

SEQ ID NO: 647836 - RNA, 19 nt, Homo sapiens
  misc_RNA (1)...(19): siRNA sense strand
gcugcaggaugcugaaauu

SEQ ID NO: 647837 - RNA, 19 nt, Homo sapiens
  misc_RNA (1)...(19): siRNA sense strand
gcaggaugcugaaauugca

SEQ ID NO: 647838 - RNA, 19 nt, Homo sapiens
  misc_RNA (1)...(19): siRNA sense strand
uugcaaggcugauggaaga

SEQ ID NO: 647839 - RNA, 19 nt, Homo sapiens
  misc_RNA (1)...(19): siRNA sense strand
uggcuuugaucuacaauga

SEQ ID NO: 647840 - RNA, 19 nt, Homo sapiens
  misc_RNA (1)...(19): siRNA sense strand
gcuuugaucuacaaugaag

SEQ ID NO: 647841 - RNA, 19 nt, Homo sapiens
  misc_RNA (1)...(19): siRNA sense strand
cagaaggagcucaccauug

SEQ ID NO: 647842 - RNA, 19 nt, Homo sapiens
  misc_RNA (1)...(19): siRNA sense strand
caaggcugauggaagacuu

SEQ ID NO: 647843 - RNA, 19 nt, Homo sapiens
  misc_RNA (1)...(19): siRNA sense strand
ggccuuggcuuugaucuac

SEQ ID NO: 647844 - RNA, 19 nt, Homo sapiens
  misc_RNA (1)...(19): siRNA sense strand
ccagaaggagcucaccauu

SEQ ID NO: 647845 - RNA, 19 nt, Homo sapiens
  misc_RNA (1)...(19): siRNA sense strand
acaaggaccaggaggugaa

SEQ ID NO: 647846 - RNA, 19 nt, Homo sapiens
  misc_RNA (1)...(19): siRNA sense strand
gaagcugcaggaugcugaa

SEQ ID NO: 647847 - RNA, 19 nt, Homo sapiens
  misc_RNA (1)...(19): siRNA sense strand
gaacuuccaggaguauguc

SEQ ID NO: 647848 - RNA, 19 nt, Homo sapiens
  misc_RNA (1)...(19): siRNA sense strand
ggaccaggaggugaacuuc

SEQ ID NO: 647849 - RNA, 19 nt, Homo sapiens
  misc_RNA (1)...(19): siRNA sense strand
gggccuuggcuuugaucua

SEQ ID NO: 647850 - RNA, 19 nt, Homo sapiens
  misc_RNA (1)...(19): siRNA sense strand
gcucauggcugcccacauu

SEQ ID NO: 647851 - RNA, 19 nt, Homo sapiens
  misc_RNA (1)...(19): siRNA sense strand
gcaaggaugugaacaaggu

SEQ ID NO: 647852 - RNA, 19 nt, Homo sapiens
  misc_RNA (1)...(19): siRNA sense strand
gaagugcaguguucugaau

SEQ ID NO: 647853 - RNA, 19 nt, Homo sapiens
  misc_RNA (1)...(19): siRNA sense strand
ucaaaucgcgucaguguaa

SEQ ID NO: 647854 - RNA, 19 nt, Homo sapiens
  misc_RNA (1)...(19): siRNA sense strand
gaucugaaccucucucuca

SEQ ID NO: 647855 - RNA, 19 nt, Homo sapiens
  misc_RNA (1)...(19): siRNA sense strand
ggugguggcugacaagaug

SEQ ID NO: 647856 - RNA, 19 nt, Homo sapiens
  misc_RNA (1)...(19): siRNA sense strand
ucagagaagugcaguguuc

SEQ ID NO: 647857 - RNA, 19 nt, Homo sapiens
  misc_RNA (1)...(19): siRNA sense strand
gaggaagaguaccugauug

SEQ ID NO: 647858 - RNA, 19 nt, Homo sapiens
  misc_RNA (1)...(19): siRNA sense strand
gcuaugacaucugcaucua

SEQ ID NO: 647859 - RNA, 19 nt, Homo sapiens
  misc_RNA (1)...(19): siRNA sense strand
gaggacaagugccgagugu

SEQ ID NO: 647860 - RNA, 19 nt, Homo sapiens
  misc_RNA (1)...(19): siRNA sense strand
gaugagcaaugccgcuuuc

SEQ ID NO: 647861 - RNA, 19 nt, Homo sapiens
  misc_RNA (1)...(19): siRNA sense strand
ggacaagugccgagugugu

SEQ ID NO: 647862 - RNA, 19 nt, Homo sapiens
  misc_RNA (1)...(19): siRNA sense strand
ggagucaaaucgcgucagu

SEQ ID NO: 647863 - RNA, 19 nt, Homo sapiens
  misc_RNA (1)...(19): siRNA sense strand
gggcacacauucggcauga

SEQ ID NO: 647864 - RNA, 19 nt, Homo sapiens
  misc_RNA (1)...(19): siRNA sense strand
cagacacgguggacauuug

SEQ ID NO: 647865 - RNA, 19 nt, Homo sapiens
  misc_RNA (1)...(19): siRNA sense strand
ugaacaaggucgccuacug

SEQ ID NO: 647866 - RNA, 19 nt, Homo sapiens
  misc_RNA (1)...(19): siRNA sense strand
gccgggauguggagcagua

SEQ ID NO: 647867 - RNA, 19 nt, Homo sapiens
  misc_RNA (1)...(19): siRNA sense strand
cgaggaagaguaccugauu

SEQ ID NO: 647868 - RNA, 19 nt, Homo sapiens
  misc_RNA (1)...(19): siRNA sense strand
gaaauucuacaaguggaaa

SEQ ID NO: 647869 - RNA, 19 nt, Homo sapiens
  misc_RNA (1)...(19): siRNA sense strand
gcagaaauccaucgugaac

SEQ ID NO: 647870 - RNA, 19 nt, Homo sapiens
  misc_RNA (1)...(19): siRNA sense strand
ccucguaacucgccucauc

SEQ ID NO: 647871 - RNA, 19 nt, Homo sapiens
  misc_RNA (1)...(19): siRNA sense strand
gaagcugcagcgucaauga

SEQ ID NO: 647872 - RNA, 19 nt, Homo sapiens
  misc_RNA (1)...(19): siRNA sense strand
gagaugagaaaccguggaa

SEQ ID NO: 647873 - RNA, 19 nt, Homo sapiens
  misc_RNA (1)...(19): siRNA sense strand
gaagagugcaaggauguga

SEQ ID NO: 647874 - RNA, 19 nt, Homo sapiens
  misc_RNA (1)...(19): siRNA sense strand
caaaggcuccguccacauc

SEQ ID NO: 647875 - RNA, 19 nt, Homo sapiens
  misc_RNA (1)...(19): siRNA sense strand
caaaucgcgucaguguaaa

SEQ ID NO: 647876 - RNA, 19 nt, Homo sapiens
  misc_RNA (1)...(19): siRNA sense strand
gggaagcaccguuaacauc

SEQ ID NO: 647877 - RNA, 19 nt, Homo sapiens
  misc_RNA (1)...(19): siRNA sense strand
gaugagaaaccguggaaag

SEQ ID NO: 647878 - RNA, 19 nt, Homo sapiens
  misc_RNA (1)...(19): siRNA sense strand
gaagcccugggaccgauua

SEQ ID NO: 647879 - RNA, 19 nt, Homo sapiens
  misc_RNA (1)...(19): siRNA sense strand
gaggaugucgucuggauuc

SEQ ID NO: 647880 - RNA, 19 nt, Homo sapiens
  misc_RNA (1)...(19): siRNA sense strand
uaugacaucugcaucuaca

SEQ ID NO: 647881 - RNA, 19 nt, Homo sapiens
  misc_RNA (1)...(19): siRNA sense strand
gcaguguucugaauuugac

SEQ ID NO: 647882 - RNA, 19 nt, Homo sapiens
  misc_RNA (1)...(19): siRNA sense strand
ccagacaggacuuugugua

SEQ ID NO: 647883 - RNA, 19 nt, Homo sapiens
  misc_RNA (1)...(19): siRNA sense strand
cuacaucaccagcuuucua

SEQ ID NO: 647884 - RNA, 19 nt, Homo sapiens
  misc_RNA (1)...(19): siRNA sense strand
ccacagcguucaccauugc

SEQ ID NO: 647885 - RNA, 19 nt, Homo sapiens
  misc_RNA (1)...(19): siRNA sense strand
gcacccacuuccugcugaa

SEQ ID NO: 647886 - RNA, 19 nt, Homo sapiens
  misc_RNA (1)...(19): siRNA sense strand
agaaauccaucgugaacca

SEQ ID NO: 647887 - RNA, 19 nt, Homo sapiens
  misc_RNA (1)...(19): siRNA sense strand
guaaguggcagaaauccau

SEQ ID NO: 647888 - RNA, 19 nt, Homo sapiens
  misc_RNA (1)...(19): siRNA sense strand
gugggaaauucuacaagug

SEQ ID NO: 647889 - RNA, 19 nt, Homo sapiens
  misc_RNA (1)...(19): siRNA sense strand
ccaugaagaccaacccauu

SEQ ID NO: 647890 - RNA, 19 nt, Homo sapiens
  misc_RNA (1)...(19): siRNA sense strand
ggccacagcguucaccauu

SEQ ID NO: 647891 - RNA, 19 nt, Homo sapiens
  misc_RNA (1)...(19): siRNA sense strand
ggaaauucuacaaguggaa

SEQ ID NO: 647892 - RNA, 19 nt, Homo sapiens
  misc_RNA (1)...(19): siRNA sense strand
ccaccacgcagcaguguga

SEQ ID NO: 647893 - RNA, 19 nt, Homo sapiens
  misc_RNA (1)...(19): siRNA sense strand
ccacagcggccauggcaau

SEQ ID NO: 647894 - RNA, 19 nt, Homo sapiens
  misc_RNA (1)...(19): siRNA sense strand
gugcaaggaugugaacaag

SEQ ID NO: 647895 - RNA, 19 nt, Homo sapiens
  misc_RNA (1)...(19): siRNA sense strand
cagagaacgguguggcuaa

SEQ ID NO: 647896 - RNA, 19 nt, Homo sapiens
  misc_RNA (1)...(19): siRNA sense strand
gccacagcguucaccauug

SEQ ID NO: 647897 - RNA, 19 nt, Homo sapiens
  misc_RNA (1)...(19): siRNA sense strand
gagaagcugcagcgucaau

SEQ ID NO: 647898 - RNA, 19 nt, Homo sapiens
  misc_RNA (1)...(19): siRNA sense strand
gcccugggaccgauuaaug

SEQ ID NO: 647899 - RNA, 19 nt, Homo sapiens
  misc_RNA (1)...(19): siRNA sense strand
cgugggaaauucuacaagu

SEQ ID NO: 647900 - RNA, 19 nt, Homo sapiens
  misc_RNA (1)...(19): siRNA sense strand
gugcaguguucugaauuug

SEQ ID NO: 647901 - RNA, 19 nt, Homo sapiens
  misc_RNA (1)...(19): siRNA sense strand
cgagaucgggcacacauuc

SEQ ID NO: 647902 - RNA, 19 nt, Homo sapiens
  misc_RNA (1)...(19): siRNA sense strand
gaccaucgagggcgucuuc

SEQ ID NO: 647903 - RNA, 19 nt, Homo sapiens
  misc_RNA (1)...(19): siRNA sense strand
guucugaauuugacagcau

SEQ ID NO: 647904 - RNA, 19 nt, Homo sapiens
  misc_RNA (1)...(19): siRNA sense strand
agugcaguguucugaauuu

SEQ ID NO: 647905 - RNA, 19 nt, Homo sapiens
  misc_RNA (1)...(19): siRNA sense strand
gcacacauucggcaugaac

SEQ ID NO: 647906 - RNA, 19 nt, Homo sapiens
  misc_RNA (1)...(19): siRNA sense strand
gcuacaaacgggucugugu

SEQ ID NO: 647907 - RNA, 19 nt, Homo sapiens
  misc_RNA (1)...(19): siRNA sense strand
gggccaagccuacgaugca

SEQ ID NO: 647908 - RNA, 19 nt, Homo sapiens
  misc_RNA (1)...(19): siRNA sense strand
gauuaaugcaucucucauc

SEQ ID NO: 647909 - RNA, 19 nt, Homo sapiens
  misc_RNA (1)...(19): siRNA sense strand
uggcagacgaggaagagua

SEQ ID NO: 647910 - RNA, 19 nt, Homo sapiens
  misc_RNA (1)...(19): siRNA sense strand
gugcucaaauuucaguucu

SEQ ID NO: 647911 - RNA, 19 nt, Homo sapiens
  misc_RNA (1)...(19): siRNA sense strand
ggacccagccaagcucaug

SEQ ID NO: 647912 - RNA, 19 nt, Homo sapiens
  misc_RNA (1)...(19): siRNA sense strand
gaagcaccguuaacauccu

SEQ ID NO: 647913 - RNA, 19 nt, Homo sapiens
  misc_RNA (1)...(19): siRNA sense strand
caagugcucggcccagugu

SEQ ID NO: 647914 - RNA, 19 nt, Homo sapiens
  misc_RNA (1)...(19): siRNA sense strand
caugaagaccaacccauuc

SEQ ID NO: 647915 - RNA, 19 nt, Homo sapiens
  misc_RNA (1)...(19): siRNA sense strand
caugguggcugcggaccuu

SEQ ID NO: 647916 - RNA, 19 nt, Homo sapiens
  misc_RNA (1)...(19): siRNA sense strand
acaucugcaucuacaagaa

SEQ ID NO: 647917 - RNA, 19 nt, Homo sapiens
  misc_RNA (1)...(19): siRNA sense strand
caucacacgcuaugacauc

SEQ ID NO: 647918 - RNA, 19 nt, Homo sapiens
  misc_RNA (1)...(19): siRNA sense strand
caccaugcgcugcaacuug

SEQ ID NO: 647919 - RNA, 19 nt, Homo sapiens
  misc_RNA (1)...(19): siRNA sense strand
gacaucugcaucuacaaga

SEQ ID NO: 647920 - RNA, 19 nt, Homo sapiens
  misc_RNA (1)...(19): siRNA sense strand
gcccucgacuggucugagu

SEQ ID NO: 647921 - RNA, 19 nt, Homo sapiens
  misc_RNA (1)...(19): siRNA sense strand
ccagacacgguggacauuu

SEQ ID NO: 647922 - RNA, 19 nt, Homo sapiens
  misc_RNA (1)...(19): siRNA sense strand
acauuaccaugaagaccaa

SEQ ID NO: 647923 - RNA, 19 nt, Homo sapiens
  misc_RNA (1)...(19): siRNA sense strand
aggaagaguaccugauuga

SEQ ID NO: 647924 - RNA, 19 nt, Homo sapiens
  misc_RNA (1)...(19): siRNA sense strand
agucaaaucgcgucagugu

SEQ ID NO: 647925 - RNA, 19 nt, Homo sapiens
  misc_RNA (1)...(19): siRNA sense strand
uagcugggaccaccuuuca

SEQ ID NO: 647926 - RNA, 19 nt, Homo sapiens
  misc_RNA (1)...(19): siRNA sense strand
caaacccugcggcacacua

SEQ ID NO: 647927 - RNA, 19 nt, Homo sapiens
  misc_RNA (1)...(19): siRNA sense strand
gguggacauuugcgucagu

SEQ ID NO: 647928 - RNA, 19 nt, Homo sapiens
  misc_RNA (1)...(19): siRNA sense strand
gggauguggagcaguaugu

SEQ ID NO: 647929 - RNA, 19 nt, Homo sapiens
  misc_RNA (1)...(19): siRNA sense strand
gagccuacuuccgccagau

SEQ ID NO: 647930 - RNA, 19 nt, Homo sapiens
  misc_RNA (1)...(19): siRNA sense strand
cugcagccgugacuacauc

SEQ ID NO: 647931 - RNA, 19 nt, Homo sapiens
  misc_RNA (1)...(19): siRNA sense strand
agucugggaagcaccguua

SEQ ID NO: 647932 - RNA, 19 nt, Homo sapiens
  misc_RNA (1)...(19): siRNA sense strand
aagagcaaccggugcauca

SEQ ID NO: 647933 - RNA, 19 nt, Homo sapiens
  misc_RNA (1)...(19): siRNA sense strand
aaucgcgucaguguaaaua

SEQ ID NO: 647934 - RNA, 19 nt, Homo sapiens
  misc_RNA (1)...(19): siRNA sense strand
ugacuacaucaccagcuuu

SEQ ID NO: 647935 - RNA, 19 nt, Homo sapiens
  misc_RNA (1)...(19): siRNA sense strand
ccuguggagugagagauga

SEQ ID NO: 647936 - RNA, 19 nt, Homo sapiens
  misc_RNA (1)...(19): siRNA sense strand
ugacaucugcaucuacaag

SEQ ID NO: 647937 - RNA, 19 nt, Homo sapiens
  misc_RNA (1)...(19): siRNA sense strand
ggaagaguaccugauugag

SEQ ID NO: 647938 - RNA, 19 nt, Homo sapiens
  misc_RNA (1)...(19): siRNA sense strand
gaacgguguggcuaaccau

SEQ ID NO: 647939 - RNA, 19 nt, Homo sapiens
  misc_RNA (1)...(19): siRNA sense strand
cgccagaugugcugcaaaa

SEQ ID NO: 647940 - RNA, 19 nt, Homo sapiens
  misc_RNA (1)...(19): siRNA sense strand
cgaugcagaugagcaaugc

SEQ ID NO: 647941 - RNA, 19 nt, Homo sapiens
  misc_RNA (1)...(19): siRNA sense strand
ucucggagcccggaggaaa

SEQ ID NO: 647942 - RNA, 19 nt, Homo sapiens
  misc_RNA (1)...(19): siRNA sense strand
caccauugcccacgagauc

SEQ ID NO: 647943 - RNA, 19 nt, Homo sapiens
  misc_RNA (1)...(19): siRNA sense strand
caacuucucuugaccaauu

SEQ ID NO: 647944 - RNA, 19 nt, Homo sapiens
  misc_RNA (1)...(19): siRNA sense strand
ucacacaucucccuuaaau

SEQ ID NO: 647945 - RNA, 19 nt, Homo sapiens
  misc_RNA (1)...(19): siRNA sense strand
gaacuacgcuccgccugaa

SEQ ID NO: 647946 - RNA, 19 nt, Homo sapiens
  misc_RNA (1)...(19): siRNA sense strand
gugacacacuggauaauaa

SEQ ID NO: 647947 - RNA, 19 nt, Homo sapiens
  misc_RNA (1)...(19): siRNA sense strand
cagaaagucuugaaagugu

SEQ ID NO: 647948 - RNA, 19 nt, Homo sapiens
  misc_RNA (1)...(19): siRNA sense strand
gaaagucuugaaaguguua

SEQ ID NO: 647949 - RNA, 19 nt, Homo sapiens
  misc_RNA (1)...(19): siRNA sense strand
gggcagcagucaaggcuuu

SEQ ID NO: 647950 - RNA, 19 nt, Homo sapiens
  misc_RNA (1)...(19): siRNA sense strand
gaccaacaauccauuauac

SEQ ID NO: 647951 - RNA, 19 nt, Homo sapiens
  misc_RNA (1)...(19): siRNA sense strand
agaaaugccuggugaagau

SEQ ID NO: 647952 - RNA, 19 nt, Homo sapiens
  misc_RNA (1)...(19): siRNA sense strand
gaggauguuucaaauagga

SEQ ID NO: 647953 - RNA, 19 nt, Homo sapiens
  misc_RNA (1)...(19): siRNA sense strand
caacaauccauuauacuug

SEQ ID NO: 647954 - RNA, 19 nt, Homo sapiens
  misc_RNA (1)...(19): siRNA sense strand
aaauaggaaugucgucaaa

SEQ ID NO: 647955 - RNA, 19 nt, Homo sapiens
  misc_RNA (1)...(19): siRNA sense strand
gaugaugcuuuaagugaau

SEQ ID NO: 647956 - RNA, 19 nt, Homo sapiens
  misc_RNA (1)...(19): siRNA sense strand
gaaugucgucaaagaagua

SEQ ID NO: 647957 - RNA, 19 nt, Homo sapiens
  misc_RNA (1)...(19): siRNA sense strand
uggugaagaugaugcuuua

SEQ ID NO: 647958 - RNA, 19 nt, Homo sapiens
  misc_RNA (1)...(19): siRNA sense strand
caagaccaacaauccauua

SEQ ID NO: 647959 - RNA, 19 nt, Homo sapiens
  misc_RNA (1)...(19): siRNA sense strand
ccgaggauguuucaaauag

SEQ ID NO: 647960 - RNA, 19 nt, Homo sapiens
  misc_RNA (1)...(19): siRNA sense strand
ggaaugucgucaaagaagu

SEQ ID NO: 647961 - RNA, 19 nt, Homo sapiens
  misc_RNA (1)...(19): siRNA sense strand
ggaaacuucuaagacaaga

SEQ ID NO: 647962 - RNA, 19 nt, Homo sapiens
  misc_RNA (1)...(19): siRNA sense strand
ugaagaugaugcuuuaagu

SEQ ID NO: 647963 - RNA, 19 nt, Homo sapiens
  misc_RNA (1)...(19): siRNA sense strand
ccaauuaccaacagaaaug

SEQ ID NO: 647964 - RNA, 19 nt, Homo sapiens
  misc_RNA (1)...(19): siRNA sense strand
cgucaaagaaguagaauuc

SEQ ID NO: 647965 - RNA, 19 nt, Homo sapiens
  misc_RNA (1)...(19): siRNA sense strand
gaagaugaugcuuuaagug

SEQ ID NO: 647966 - RNA, 19 nt, Homo sapiens
  misc_RNA (1)...(19): siRNA sense strand
auaggaaugucgucaaaga

SEQ ID NO: 647967 - RNA, 19 nt, Homo sapiens
  misc_RNA (1)...(19): siRNA sense strand
ucugugagauacaaagauu

SEQ ID NO: 647968 - RNA, 19 nt, Homo sapiens
  misc_RNA (1)...(19): siRNA sense strand
gcagugaauugcagaugag

SEQ ID NO: 647969 - RNA, 19 nt, Homo sapiens
  misc_RNA (1)...(19): siRNA sense strand
ucccuuaaaucguuucaaa

SEQ ID NO: 647970 - RNA, 19 nt, Homo sapiens
  misc_RNA (1)...(19): siRNA sense strand
ccaacaauccauuauacuu

SEQ ID NO: 647971 - RNA, 19 nt, Homo sapiens
  misc_RNA (1)...(19): siRNA sense strand
gaagaaugccguggaccaa

SEQ ID NO: 647972 - RNA, 19 nt, Homo sapiens
  misc_RNA (1)...(19): siRNA sense strand
gaccauaggagucauuauc

SEQ ID NO: 647973 - RNA, 19 nt, Homo sapiens
  misc_RNA (1)...(19): siRNA sense strand
guggaaacuucuaagacaa

SEQ ID NO: 647974 - RNA, 19 nt, Homo sapiens
  misc_RNA (1)...(19): siRNA sense strand
uguggaaacuucuaagaca

SEQ ID NO: 647975 - RNA, 19 nt, Homo sapiens
  misc_RNA (1)...(19): siRNA sense strand
gauacaaagauucaacuuc

SEQ ID NO: 647976 - RNA, 19 nt, Homo sapiens
  misc_RNA (1)...(19): siRNA sense strand
gaccaauuaccaacagaaa

SEQ ID NO: 647977 - RNA, 19 nt, Homo sapiens
  misc_RNA (1)...(19): siRNA sense strand
aagaugaugcuuuaaguga

SEQ ID NO: 647978 - RNA, 19 nt, Homo sapiens
  misc_RNA (1)...(19): siRNA sense strand
agaccaacaauccauuaua

SEQ ID NO: 647979 - RNA, 19 nt, Homo sapiens
  misc_RNA (1)...(19): siRNA sense strand
ucuugaaaguguuagauug

SEQ ID NO: 647980 - RNA, 19 nt, Homo sapiens
  misc_RNA (1)...(19): siRNA sense strand
aguguuagauuggcaugua

SEQ ID NO: 647981 - RNA, 19 nt, Homo sapiens
  misc_RNA (1)...(19): siRNA sense strand
caaauaggaaugucgucaa

SEQ ID NO: 647982 - RNA, 19 nt, Homo sapiens
  misc_RNA (1)...(19): siRNA sense strand
gagaagaucaagccuacca

SEQ ID NO: 647983 - RNA, 19 nt, Homo sapiens
  misc_RNA (1)...(19): siRNA sense strand
agaugaugcuuuaagugaa

SEQ ID NO: 647984 - RNA, 19 nt, Homo sapiens
  misc_RNA (1)...(19): siRNA sense strand
auucacacaucucccuuaa

SEQ ID NO: 647985 - RNA, 19 nt, Homo sapiens
  misc_RNA (1)...(19): siRNA sense strand
gcgagaccgcggagaacua

SEQ ID NO: 647986 - RNA, 19 nt, Homo sapiens
  misc_RNA (1)...(19): siRNA sense strand
ggagucauuaucuguguau

SEQ ID NO: 647987 - RNA, 19 nt, Homo sapiens
  misc_RNA (1)...(19): siRNA sense strand
ccauaggagucauuaucug

SEQ ID NO: 647988 - RNA, 19 nt, Homo sapiens
  misc_RNA (1)...(19): siRNA sense strand
gaauugcagaugagaagau

SEQ ID NO: 647989 - RNA, 19 nt, Homo sapiens
  misc_RNA (1)...(19): siRNA sense strand
acacaucucccuuaaaucg

SEQ ID NO: 647990 - RNA, 19 nt, Homo sapiens
  misc_RNA (1)...(19): siRNA sense strand
aaccgaggauguuucaaau

SEQ ID NO: 647991 - RNA, 19 nt, Homo sapiens
  misc_RNA (1)...(19): siRNA sense strand
cacacuggauaauaaugaa

SEQ ID NO: 647992 - RNA, 19 nt, Homo sapiens
  misc_RNA (1)...(19): siRNA sense strand
ggguaaaccaauuucagaa

SEQ ID NO: 647993 - RNA, 19 nt, Homo sapiens
  misc_RNA (1)...(19): siRNA sense strand
acacacuggauaauaauga

SEQ ID NO: 647994 - RNA, 19 nt, Homo sapiens
  misc_RNA (1)...(19): siRNA sense strand
agaaugccguggaccaaca

SEQ ID NO: 647995 - RNA, 19 nt, Homo sapiens
  misc_RNA (1)...(19): siRNA sense strand
uaagugaauggaaugaaug

SEQ ID NO: 647996 - RNA, 19 nt, Homo sapiens
  misc_RNA (1)...(19): siRNA sense strand
gaaguacgcaaggaaaguc

SEQ ID NO: 647997 - RNA, 19 nt, Homo sapiens
  misc_RNA (1)...(19): siRNA sense strand
acaucucccuuaaaucguu

SEQ ID NO: 647998 - RNA, 19 nt, Homo sapiens
  misc_RNA (1)...(19): siRNA sense strand
agaaagucuugaaaguguu

SEQ ID NO: 647999 - RNA, 19 nt, Homo sapiens
  misc_RNA (1)...(19): siRNA sense strand
ucagaaagucuugaaagug

SEQ ID NO: 648000 - RNA, 19 nt, Homo sapiens
  misc_RNA (1)...(19): siRNA sense strand
gguguuagagaaguuauau

SEQ ID NO: 648001 - RNA, 19 nt, Homo sapiens
  misc_RNA (1)...(19): siRNA sense strand
uggaugcccugguggugaa

SEQ ID NO: 648002 - RNA, 19 nt, Homo sapiens
  misc_RNA (1)...(19): siRNA sense strand
cagaaaugccuggugaaga

SEQ ID NO: 648003 - RNA, 19 nt, Homo sapiens
  misc_RNA (1)...(19): siRNA sense strand
guacaauccgagcagaguu

SEQ ID NO: 648004 - RNA, 19 nt, Homo sapiens
  misc_RNA (1)...(19): siRNA sense strand
uaggagucauuaucugugu

SEQ ID NO: 648005 - RNA, 19 nt, Homo sapiens
  misc_RNA (1)...(19): siRNA sense strand
cauaggagucauuaucugu

SEQ ID NO: 648006 - RNA, 19 nt, Homo sapiens
  misc_RNA (1)...(19): siRNA sense strand
uucggaaugugcaccguua

SEQ ID NO: 648007 - RNA, 19 nt, Homo sapiens
  misc_RNA (1)...(19): siRNA sense strand
cuagaaguacgcaaggaaa

SEQ ID NO: 648008 - RNA, 19 nt, Homo sapiens
  misc_RNA (1)...(19): siRNA sense strand
caucucccuuaaaucguuu

SEQ ID NO: 648009 - RNA, 19 nt, Homo sapiens
  misc_RNA (1)...(19): siRNA sense strand
gaauccaaguguguuguac

SEQ ID NO: 648010 - RNA, 19 nt, Homo sapiens
  misc_RNA (1)...(19): siRNA sense strand
gaaaugccuggugaagaug

SEQ ID NO: 648011 - RNA, 19 nt, Homo sapiens
  misc_RNA (1)...(19): siRNA sense strand
ugaauccaaguguguugua

SEQ ID NO: 648012 - RNA, 19 nt, Homo sapiens
  misc_RNA (1)...(19): siRNA sense strand
gacaagaccaacaauccau

SEQ ID NO: 648013 - RNA, 19 nt, Homo sapiens
  misc_RNA (1)...(19): siRNA sense strand
uaagacaagaccaacaauc

SEQ ID NO: 648014 - RNA, 19 nt, Homo sapiens
  misc_RNA (1)...(19): siRNA sense strand
ucuaagacaagaccaacaa

SEQ ID NO: 648015 - RNA, 19 nt, Homo sapiens
  misc_RNA (1)...(19): siRNA sense strand
gugaagaugaugcuuuaag

SEQ ID NO: 648016 - RNA, 19 nt, Homo sapiens
  misc_RNA (1)...(19): siRNA sense strand
agaguucugugagauacaa

SEQ ID NO: 648017 - RNA, 19 nt, Homo sapiens
  misc_RNA (1)...(19): siRNA sense strand
uaaauugggcagcagucaa

SEQ ID NO: 648018 - RNA, 19 nt, Homo sapiens
  misc_RNA (1)...(19): siRNA sense strand
agcagugaauugcagauga

SEQ ID NO: 648019 - RNA, 19 nt, Homo sapiens
  misc_RNA (1)...(19): siRNA sense strand
ugacacacuggauaauaau

SEQ ID NO: 648020 - RNA, 19 nt, Homo sapiens
  misc_RNA (1)...(19): siRNA sense strand
ugguauugguguuagagaa

SEQ ID NO: 648021 - RNA, 19 nt, Homo sapiens
  misc_RNA (1)...(19): siRNA sense strand
guguuagauuggcauguau

SEQ ID NO: 648022 - RNA, 19 nt, Homo sapiens
  misc_RNA (1)...(19): siRNA sense strand
gagcagugaauugcagaug

SEQ ID NO: 648023 - RNA, 19 nt, Homo sapiens
  misc_RNA (1)...(19): siRNA sense strand
guauugguguuagagaagu

SEQ ID NO: 648024 - RNA, 19 nt, Homo sapiens
  misc_RNA (1)...(19): siRNA sense strand
agauuggcauguauucaca

SEQ ID NO: 648025 - RNA, 19 nt, Homo sapiens
  misc_RNA (1)...(19): siRNA sense strand
gagauacaaagauucaacu

SEQ ID NO: 648026 - RNA, 19 nt, Homo sapiens
  misc_RNA (1)...(19): siRNA sense strand
ccacugaugcagcccuaau

SEQ ID NO: 648027 - RNA, 19 nt, Homo sapiens
  misc_RNA (1)...(19): siRNA sense strand
gugaauugcagaugagaag

SEQ ID NO: 648028 - RNA, 19 nt, Homo sapiens
  misc_RNA (1)...(19): siRNA sense strand
uaaauucacagucuauacg

SEQ ID NO: 648029 - RNA, 19 nt, Homo sapiens
  misc_RNA (1)...(19): siRNA sense strand
cgaggauguuucaaauagg

SEQ ID NO: 648030 - RNA, 19 nt, Homo sapiens
  misc_RNA (1)...(19): siRNA sense strand
ggugaauccaaguguguug

SEQ ID NO: 648031 - RNA, 19 nt, Homo sapiens
  misc_RNA (1)...(19): siRNA sense strand
ccuagaaguacgcaaggaa

SEQ ID NO: 648032 - RNA, 19 nt, Homo sapiens
  misc_RNA (1)...(19): siRNA sense strand
uaggaaugucgucaaagaa

SEQ ID NO: 648033 - RNA, 19 nt, Homo sapiens
  misc_RNA (1)...(19): siRNA sense strand
acaagaccaacaauccauu

SEQ ID NO: 648034 - RNA, 19 nt, Homo sapiens
  misc_RNA (1)...(19): siRNA sense strand
acugaugcagcccuaauuu

SEQ ID NO: 648035 - RNA, 19 nt, Homo sapiens
  misc_RNA (1)...(19): siRNA sense strand
acaaagauucaacuucucu

SEQ ID NO: 648036 - RNA, 19 nt, Homo sapiens
  misc_RNA (1)...(19): siRNA sense strand
cgaagaagcugcccagaau

SEQ ID NO: 648037 - RNA, 19 nt, Homo sapiens
  misc_RNA (1)...(19): siRNA sense strand
ggagaagaauuuccugcua

SEQ ID NO: 648038 - RNA, 19 nt, Homo sapiens
  misc_RNA (1)...(19): siRNA sense strand
gagaagaauuuccugcuau

SEQ ID NO: 648039 - RNA, 19 nt, Homo sapiens
  misc_RNA (1)...(19): siRNA sense strand
gaccacaaaucccauaaug

SEQ ID NO: 648040 - RNA, 19 nt, Homo sapiens
  misc_RNA (1)...(19): siRNA sense strand
gaacaaacugcaagaggaa

SEQ ID NO: 648041 - RNA, 19 nt, Homo sapiens
  misc_RNA (1)...(19): siRNA sense strand
caaaggauccucacagaau

SEQ ID NO: 648042 - RNA, 19 nt, Homo sapiens
  misc_RNA (1)...(19): siRNA sense strand
gaagagacgcaaucagguu

SEQ ID NO: 648043 - RNA, 19 nt, Homo sapiens
  misc_RNA (1)...(19): siRNA sense strand
ccacaaaucccauaauguc

SEQ ID NO: 648044 - RNA, 19 nt, Homo sapiens
  misc_RNA (1)...(19): siRNA sense strand
uagaggaggagaagaauuu

SEQ ID NO: 648045 - RNA, 19 nt, Homo sapiens
  misc_RNA (1)...(19): siRNA sense strand
aagaagcugcccagaauua

SEQ ID NO: 648046 - RNA, 19 nt, Homo sapiens
  misc_RNA (1)...(19): siRNA sense strand
gaaggagacaguacaagug

SEQ ID NO: 648047 - RNA, 19 nt, Homo sapiens
  misc_RNA (1)...(19): siRNA sense strand
aaaggauccucacagaauu

SEQ ID NO: 648048 - RNA, 19 nt, Homo sapiens
  misc_RNA (1)...(19): siRNA sense strand
ucaaaugcaucacucagau

SEQ ID NO: 648049 - RNA, 19 nt, Homo sapiens
  misc_RNA (1)...(19): siRNA sense strand
gaacaugagaagcaaagga

SEQ ID NO: 648050 - RNA, 19 nt, Homo sapiens
  misc_RNA (1)...(19): siRNA sense strand
gcaaaggauccucacagaa

SEQ ID NO: 648051 - RNA, 19 nt, Homo sapiens
  misc_RNA (1)...(19): siRNA sense strand
ugagauuucuggucaagga

SEQ ID NO: 648052 - RNA, 19 nt, Homo sapiens
  misc_RNA (1)...(19): siRNA sense strand
gcacaauuucugccucaaa

SEQ ID NO: 648053 - RNA, 19 nt, Homo sapiens
  misc_RNA (1)...(19): siRNA sense strand
gaagaagcugcccagaauu

SEQ ID NO: 648054 - RNA, 19 nt, Homo sapiens
  misc_RNA (1)...(19): siRNA sense strand
gaagugaucugccccaucu

SEQ ID NO: 648055 - RNA, 19 nt, Homo sapiens
  misc_RNA (1)...(19): siRNA sense strand
gguagaacaugagaagcaa

SEQ ID NO: 648056 - RNA, 19 nt, Homo sapiens
  misc_RNA (1)...(19): siRNA sense strand
ugaacgaucucaagaagcu

SEQ ID NO: 648057 - RNA, 19 nt, Homo sapiens
  misc_RNA (1)...(19): siRNA sense strand
uaugucuccuggccucuua

SEQ ID NO: 648058 - RNA, 19 nt, Homo sapiens
  misc_RNA (1)...(19): siRNA sense strand
ggagaaggagacaguacaa

SEQ ID NO: 648059 - RNA, 19 nt, Homo sapiens
  misc_RNA (1)...(19): siRNA sense strand
gaagagcuggggcuuguua

SEQ ID NO: 648060 - RNA, 19 nt, Homo sapiens
  misc_RNA (1)...(19): siRNA sense strand
aauuugaacuccugcauca

SEQ ID NO: 648061 - RNA, 19 nt, Homo sapiens
  misc_RNA (1)...(19): siRNA sense strand
gaugagauuucuggucaag

SEQ ID NO: 648062 - RNA, 19 nt, Homo sapiens
  misc_RNA (1)...(19): siRNA sense strand
gauccucacagaauuugaa

SEQ ID NO: 648063 - RNA, 19 nt, Homo sapiens
  misc_RNA (1)...(19): siRNA sense strand
caaaugcaucacucagauu

SEQ ID NO: 648064 - RNA, 19 nt, Homo sapiens
  misc_RNA (1)...(19): siRNA sense strand
gcucguugauucccugaag

SEQ ID NO: 648065 - RNA, 19 nt, Homo sapiens
  misc_RNA (1)...(19): siRNA sense strand
caccaaaucaccacucuuc

SEQ ID NO: 648066 - RNA, 19 nt, Homo sapiens
  misc_RNA (1)...(19): siRNA sense strand
cugcaaaacuuccguaaga

SEQ ID NO: 648067 - RNA, 19 nt, Homo sapiens
  misc_RNA (1)...(19): siRNA sense strand
ggccucgucugcugggaaa

SEQ ID NO: 648068 - RNA, 19 nt, Homo sapiens
  misc_RNA (1)...(19): siRNA sense strand
gaagaauuuccugcuauca

SEQ ID NO: 648069 - RNA, 19 nt, Homo sapiens
  misc_RNA (1)...(19): siRNA sense strand
agaagaauuuccugcuauc

SEQ ID NO: 648070 - RNA, 19 nt, Homo sapiens
  misc_RNA (1)...(19): siRNA sense strand
guaagaagagacgcaauca

SEQ ID NO: 648071 - RNA, 19 nt, Homo sapiens
  misc_RNA (1)...(19): siRNA sense strand
gaaaauccaagcucuacaa

SEQ ID NO: 648072 - RNA, 19 nt, Homo sapiens
  misc_RNA (1)...(19): siRNA sense strand
gaagcugcccagaauuauc

SEQ ID NO: 648073 - RNA, 19 nt, Homo sapiens
  misc_RNA (1)...(19): siRNA sense strand
ggaaucugguggagaaaau

SEQ ID NO: 648074 - RNA, 19 nt, Homo sapiens
  misc_RNA (1)...(19): siRNA sense strand
agcaaaggauccucacaga

SEQ ID NO: 648075 - RNA, 19 nt, Homo sapiens
  misc_RNA (1)...(19): siRNA sense strand
ggagacaguacaagugaag

SEQ ID NO: 648076 - RNA, 19 nt, Homo sapiens
  misc_RNA (1)...(19): siRNA sense strand
ugcggaaucugguggagaa

SEQ ID NO: 648077 - RNA, 19 nt, Homo sapiens
  misc_RNA (1)...(19): siRNA sense strand
cggaccagguagaacauga

SEQ ID NO: 648078 - RNA, 19 nt, Homo sapiens
  misc_RNA (1)...(19): siRNA sense strand
ggaccacaaaucccauaau

SEQ ID NO: 648079 - RNA, 19 nt, Homo sapiens
  misc_RNA (1)...(19): siRNA sense strand
ccagugggcaguuugugaa

SEQ ID NO: 648080 - RNA, 19 nt, Homo sapiens
  misc_RNA (1)...(19): siRNA sense strand
ucacggaccagguagaaca

SEQ ID NO: 648081 - RNA, 19 nt, Homo sapiens
  misc_RNA (1)...(19): siRNA sense strand
gagacgcaaucagguucaa

SEQ ID NO: 648082 - RNA, 19 nt, Homo sapiens
  misc_RNA (1)...(19): siRNA sense strand
ggccucuuaugaugagauu

SEQ ID NO: 648083 - RNA, 19 nt, Homo sapiens
  misc_RNA (1)...(19): siRNA sense strand
acacagggucgaugucuuc

SEQ ID NO: 648084 - RNA, 19 nt, Homo sapiens
  misc_RNA (1)...(19): siRNA sense strand
aaaugcaucacucagauug

SEQ ID NO: 648085 - RNA, 19 nt, Homo sapiens
  misc_RNA (1)...(19): siRNA sense strand
ccagguagaacaugagaag

SEQ ID NO: 648086 - RNA, 19 nt, Homo sapiens
  misc_RNA (1)...(19): siRNA sense strand
aaaggaaagaggcuacaug

SEQ ID NO: 648087 - RNA, 19 nt, Homo sapiens
  misc_RNA (1)...(19): siRNA sense strand
gcaggcggcagaacuacau

SEQ ID NO: 648088 - RNA, 19 nt, Homo sapiens
  misc_RNA (1)...(19): siRNA sense strand
gaagaccaagcagaacaug

SEQ ID NO: 648089 - RNA, 19 nt, Homo sapiens
  misc_RNA (1)...(19): siRNA sense strand
uugauucccugaagaccaa

SEQ ID NO: 648090 - RNA, 19 nt, Homo sapiens
  misc_RNA (1)...(19): siRNA sense strand
ucgaagaagcugcccagaa

SEQ ID NO: 648091 - RNA, 19 nt, Homo sapiens
  misc_RNA (1)...(19): siRNA sense strand
cgaggaugaugggaaguuc

SEQ ID NO: 648092 - RNA, 19 nt, Homo sapiens
  misc_RNA (1)...(19): siRNA sense strand
aaggagacaguacaaguga

SEQ ID NO: 648093 - RNA, 19 nt, Homo sapiens
  misc_RNA (1)...(19): siRNA sense strand
caggauacgaagacauuug

SEQ ID NO: 648094 - RNA, 19 nt, Homo sapiens
  misc_RNA (1)...(19): siRNA sense strand
aaaacucagugaagcaaaa

SEQ ID NO: 648095 - RNA, 19 nt, Homo sapiens
  misc_RNA (1)...(19): siRNA sense strand
agaaggagacaguacaagu

SEQ ID NO: 648096 - RNA, 19 nt, Homo sapiens
  misc_RNA (1)...(19): siRNA sense strand
uuccugcuaucacggauuu

SEQ ID NO: 648097 - RNA, 19 nt, Homo sapiens
  misc_RNA (1)...(19): siRNA sense strand
gaagcaaaggauccucaca

SEQ ID NO: 648098 - RNA, 19 nt, Homo sapiens
  misc_RNA (1)...(19): siRNA sense strand
gccagugggcaguuuguga

SEQ ID NO: 648099 - RNA, 19 nt, Homo sapiens
  misc_RNA (1)...(19): siRNA sense strand
ccucuuaugaugagauuuc

SEQ ID NO: 648100 - RNA, 19 nt, Homo sapiens
  misc_RNA (1)...(19): siRNA sense strand
cuccuggccucuuaugaug

SEQ ID NO: 648101 - RNA, 19 nt, Homo sapiens
  misc_RNA (1)...(19): siRNA sense strand
cgaggcaccaggagauguu

SEQ ID NO: 648102 - RNA, 19 nt, Homo sapiens
  misc_RNA (1)...(19): siRNA sense strand
uuuacuggcugggucauga

SEQ ID NO: 648103 - RNA, 19 nt, Homo sapiens
  misc_RNA (1)...(19): siRNA sense strand
caagagcagauccaagucu

SEQ ID NO: 648104 - RNA, 19 nt, Homo sapiens
  misc_RNA (1)...(19): siRNA sense strand
aagcugcccagaauuauca

SEQ ID NO: 648105 - RNA, 19 nt, Homo sapiens
  misc_RNA (1)...(19): siRNA sense strand
gcgaggaugaugggaaguu

SEQ ID NO: 648106 - RNA, 19 nt, Homo sapiens
  misc_RNA (1)...(19): siRNA sense strand
ugucuucacggaccaggua

SEQ ID NO: 648107 - RNA, 19 nt, Homo sapiens
  misc_RNA (1)...(19): siRNA sense strand
ccaucugccuggacauucu

SEQ ID NO: 648108 - RNA, 19 nt, Homo sapiens
  misc_RNA (1)...(19): siRNA sense strand
gaccagguagaacaugaga

SEQ ID NO: 648109 - RNA, 19 nt, Homo sapiens
  misc_RNA (1)...(19): siRNA sense strand
ggagaaaauccaagcucua

SEQ ID NO: 648110 - RNA, 19 nt, Homo sapiens
  misc_RNA (1)...(19): siRNA sense strand
ugaauccaaggaccacaaa

SEQ ID NO: 648111 - RNA, 19 nt, Homo sapiens
  misc_RNA (1)...(19): siRNA sense strand
ccaaaucaccacucuucag

SEQ ID NO: 648112 - RNA, 19 nt, Homo sapiens
  misc_RNA (1)...(19): siRNA sense strand
ucaagacacgacuccauca

SEQ ID NO: 648113 - RNA, 19 nt, Homo sapiens
  misc_RNA (1)...(19): siRNA sense strand
gaggugcaguccaaaagga

SEQ ID NO: 648114 - RNA, 19 nt, Homo sapiens
  misc_RNA (1)...(19): siRNA sense strand
cguaagaagagacgcaauc

SEQ ID NO: 648115 - RNA, 19 nt, Homo sapiens
  misc_RNA (1)...(19): siRNA sense strand
guagaacaugagaagcaaa

SEQ ID NO: 648116 - RNA, 19 nt, Homo sapiens
  misc_RNA (1)...(19): siRNA sense strand
guacacagggucgaugucu

SEQ ID NO: 648117 - RNA, 19 nt, Homo sapiens
  misc_RNA (1)...(19): siRNA sense strand
agugaaggcacaaggugua

SEQ ID NO: 648118 - RNA, 19 nt, Homo sapiens
  misc_RNA (1)...(19): siRNA sense strand
aaggauccucacagaauuu

SEQ ID NO: 648119 - RNA, 19 nt, Homo sapiens
  misc_RNA (1)...(19): siRNA sense strand
gauccgggcuugguuuugu

SEQ ID NO: 648120 - RNA, 19 nt, Homo sapiens
  misc_RNA (1)...(19): siRNA sense strand
cgaagaagcugcccagaau

SEQ ID NO: 648121 - RNA, 19 nt, Homo sapiens
  misc_RNA (1)...(19): siRNA sense strand
ggagaagaauuuccugcua

SEQ ID NO: 648122 - RNA, 19 nt, Homo sapiens
  misc_RNA (1)...(19): siRNA sense strand
gagaagaauuuccugcuau

SEQ ID NO: 648123 - RNA, 19 nt, Homo sapiens
  misc_RNA (1)...(19): siRNA sense strand
gaccacaaaucccauaaug

SEQ ID NO: 648124 - RNA, 19 nt, Homo sapiens
  misc_RNA (1)...(19): siRNA sense strand
gaacaaacugcaagaggaa

SEQ ID NO: 648125 - RNA, 19 nt, Homo sapiens
  misc_RNA (1)...(19): siRNA sense strand
caaaggauccucacagaau

SEQ ID NO: 648126 - RNA, 19 nt, Homo sapiens
  misc_RNA (1)...(19): siRNA sense strand
gaagagacgcaaucagguu

SEQ ID NO: 648127 - RNA, 19 nt, Homo sapiens
  misc_RNA (1)...(19): siRNA sense strand
ccacaaaucccauaauguc

SEQ ID NO: 648128 - RNA, 19 nt, Homo sapiens
  misc_RNA (1)...(19): siRNA sense strand
uagaggaggagaagaauuu

SEQ ID NO: 648129 - RNA, 19 nt, Homo sapiens
  misc_RNA (1)...(19): siRNA sense strand
aagaagcugcccagaauua

SEQ ID NO: 648130 - RNA, 19 nt, Homo sapiens
  misc_RNA (1)...(19): siRNA sense strand
gaaggagacaguacaagug

SEQ ID NO: 648131 - RNA, 19 nt, Homo sapiens
  misc_RNA (1)...(19): siRNA sense strand
aaaggauccucacagaauu

SEQ ID NO: 648132 - RNA, 19 nt, Homo sapiens
  misc_RNA (1)...(19): siRNA sense strand
ucaaaugcaucacucagau

SEQ ID NO: 648133 - RNA, 19 nt, Homo sapiens
  misc_RNA (1)...(19): siRNA sense strand
gaacaugagaagcaaagga

SEQ ID NO: 648134 - RNA, 19 nt, Homo sapiens
  misc_RNA (1)...(19): siRNA sense strand
gcaaaggauccucacagaa

SEQ ID NO: 648135 - RNA, 19 nt, Homo sapiens
  misc_RNA (1)...(19): siRNA sense strand
gcacaauuucugccucaaa

SEQ ID NO: 648136 - RNA, 19 nt, Homo sapiens
  misc_RNA (1)...(19): siRNA sense strand
gaagaagcugcccagaauu

SEQ ID NO: 648137 - RNA, 19 nt, Homo sapiens
  misc_RNA (1)...(19): siRNA sense strand
gaagugaucugccccaucu

SEQ ID NO: 648138 - RNA, 19 nt, Homo sapiens
  misc_RNA (1)...(19): siRNA sense strand
gguagaacaugagaagcaa

SEQ ID NO: 648139 - RNA, 19 nt, Homo sapiens
  misc_RNA (1)...(19): siRNA sense strand
ugaacgaucucaagaagcu

SEQ ID NO: 648140 - RNA, 19 nt, Homo sapiens
  misc_RNA (1)...(19): siRNA sense strand
ggagaaggagacaguacaa

SEQ ID NO: 648141 - RNA, 19 nt, Homo sapiens
  misc_RNA (1)...(19): siRNA sense strand
aauuugaacuccugcauca

SEQ ID NO: 648142 - RNA, 19 nt, Homo sapiens
  misc_RNA (1)...(19): siRNA sense strand
gauccucacagaauuugaa

SEQ ID NO: 648143 - RNA, 19 nt, Homo sapiens
  misc_RNA (1)...(19): siRNA sense strand
caaaugcaucacucagauu

SEQ ID NO: 648144 - RNA, 19 nt, Homo sapiens
  misc_RNA (1)...(19): siRNA sense strand
gcucguugauucccugaag

SEQ ID NO: 648145 - RNA, 19 nt, Homo sapiens
  misc_RNA (1)...(19): siRNA sense strand
cugcaaaacuuccguaaga

SEQ ID NO: 648146 - RNA, 19 nt, Homo sapiens
  misc_RNA (1)...(19): siRNA sense strand
gaagaauuuccugcuauca

SEQ ID NO: 648147 - RNA, 19 nt, Homo sapiens
  misc_RNA (1)...(19): siRNA sense strand
agaagaauuuccugcuauc

SEQ ID NO: 648148 - RNA, 19 nt, Homo sapiens
  misc_RNA (1)...(19): siRNA sense strand
guaagaagagacgcaauca

SEQ ID NO: 648149 - RNA, 19 nt, Homo sapiens
  misc_RNA (1)...(19): siRNA sense strand
gaaaauccaagcucuacaa

SEQ ID NO: 648150 - RNA, 19 nt, Homo sapiens
  misc_RNA (1)...(19): siRNA sense strand
gaagcugcccagaauuauc

SEQ ID NO: 648151 - RNA, 19 nt, Homo sapiens
  misc_RNA (1)...(19): siRNA sense strand
ggaaucugguggagaaaau

SEQ ID NO: 648152 - RNA, 19 nt, Homo sapiens
  misc_RNA (1)...(19): siRNA sense strand
agcaaaggauccucacaga

SEQ ID NO: 648153 - RNA, 19 nt, Homo sapiens
  misc_RNA (1)...(19): siRNA sense strand
ggagacaguacaagugaag

SEQ ID NO: 648154 - RNA, 19 nt, Homo sapiens
  misc_RNA (1)...(19): siRNA sense strand
ugcggaaucugguggagaa

SEQ ID NO: 648155 - RNA, 19 nt, Homo sapiens
  misc_RNA (1)...(19): siRNA sense strand
cggaccagguagaacauga

SEQ ID NO: 648156 - RNA, 19 nt, Homo sapiens
  misc_RNA (1)...(19): siRNA sense strand
ggaccacaaaucccauaau

SEQ ID NO: 648157 - RNA, 19 nt, Homo sapiens
  misc_RNA (1)...(19): siRNA sense strand
ccagugggcaguuugugaa

SEQ ID NO: 648158 - RNA, 19 nt, Homo sapiens
  misc_RNA (1)...(19): siRNA sense strand
ucacggaccagguagaaca

SEQ ID NO: 648159 - RNA, 19 nt, Homo sapiens
  misc_RNA (1)...(19): siRNA sense strand
gagacgcaaucagguucaa

SEQ ID NO: 648160 - RNA, 19 nt, Homo sapiens
  misc_RNA (1)...(19): siRNA sense strand
aaaugcaucacucagauug

SEQ ID NO: 648161 - RNA, 19 nt, Homo sapiens
  misc_RNA (1)...(19): siRNA sense strand
ccagguagaacaugagaag

SEQ ID NO: 648162 - RNA, 19 nt, Homo sapiens
  misc_RNA (1)...(19): siRNA sense strand
acacagggucgaugucuuc

SEQ ID NO: 648163 - RNA, 19 nt, Homo sapiens
  misc_RNA (1)...(19): siRNA sense strand
aaaggaaagaggcuacaug

SEQ ID NO: 648164 - RNA, 19 nt, Homo sapiens
  misc_RNA (1)...(19): siRNA sense strand
gaagaccaagcagaacaug

SEQ ID NO: 648165 - RNA, 19 nt, Homo sapiens
  misc_RNA (1)...(19): siRNA sense strand
uugauucccugaagaccaa

SEQ ID NO: 648166 - RNA, 19 nt, Homo sapiens
  misc_RNA (1)...(19): siRNA sense strand
ucgaagaagcugcccagaa

SEQ ID NO: 648167 - RNA, 19 nt, Homo sapiens
  misc_RNA (1)...(19): siRNA sense strand
cgaggaugaugggaaguuc

SEQ ID NO: 648168 - RNA, 19 nt, Homo sapiens
  misc_RNA (1)...(19): siRNA sense strand
aaggagacaguacaaguga

SEQ ID NO: 648169 - RNA, 19 nt, Homo sapiens
  misc_RNA (1)...(19): siRNA sense strand
aaaacucagugaagcaaaa

SEQ ID NO: 648170 - RNA, 19 nt, Homo sapiens
  misc_RNA (1)...(19): siRNA sense strand
agaaggagacaguacaagu

SEQ ID NO: 648171 - RNA, 19 nt, Homo sapiens
  misc_RNA (1)...(19): siRNA sense strand
uuccugcuaucacggauuu

SEQ ID NO: 648172 - RNA, 19 nt, Homo sapiens
  misc_RNA (1)...(19): siRNA sense strand
gaagcaaaggauccucaca

SEQ ID NO: 648173 - RNA, 19 nt, Homo sapiens
  misc_RNA (1)...(19): siRNA sense strand
gccagugggcaguuuguga

SEQ ID NO: 648174 - RNA, 19 nt, Homo sapiens
  misc_RNA (1)...(19): siRNA sense strand
cgaggcaccaggagauguu

SEQ ID NO: 648175 - RNA, 19 nt, Homo sapiens
  misc_RNA (1)...(19): siRNA sense strand
uuuacuggcugggucauga

SEQ ID NO: 648176 - RNA, 19 nt, Homo sapiens
  misc_RNA (1)...(19): siRNA sense strand
caagagcagauccaagucu

SEQ ID NO: 648177 - RNA, 19 nt, Homo sapiens
  misc_RNA (1)...(19): siRNA sense strand
aagcugcccagaauuauca

SEQ ID NO: 648178 - RNA, 19 nt, Homo sapiens
  misc_RNA (1)...(19): siRNA sense strand
gcgaggaugaugggaaguu

SEQ ID NO: 648179 - RNA, 19 nt, Homo sapiens
  misc_RNA (1)...(19): siRNA sense strand
ggagaaaauccaagcucua

SEQ ID NO: 648180 - RNA, 19 nt, Homo sapiens
  misc_RNA (1)...(19): siRNA sense strand
ccaucugccuggacauucu

SEQ ID NO: 648181 - RNA, 19 nt, Homo sapiens
  misc_RNA (1)...(19): siRNA sense strand
gaccagguagaacaugaga

SEQ ID NO: 648182 - RNA, 19 nt, Homo sapiens
  misc_RNA (1)...(19): siRNA sense strand
ugucuucacggaccaggua

SEQ ID NO: 648183 - RNA, 19 nt, Homo sapiens
  misc_RNA (1)...(19): siRNA sense strand
ugaauccaaggaccacaaa

SEQ ID NO: 648184 - RNA, 19 nt, Homo sapiens
  misc_RNA (1)...(19): siRNA sense strand
ucaagacacgacuccauca

SEQ ID NO: 648185 - RNA, 19 nt, Homo sapiens
  misc_RNA (1)...(19): siRNA sense strand
gaggugcaguccaaaagga

SEQ ID NO: 648186 - RNA, 19 nt, Homo sapiens
  misc_RNA (1)...(19): siRNA sense strand
guagaacaugagaagcaaa

SEQ ID NO: 648187 - RNA, 19 nt, Homo sapiens
  misc_RNA (1)...(19): siRNA sense strand
guacacagggucgaugucu

SEQ ID NO: 648188 - RNA, 19 nt, Homo sapiens
  misc_RNA (1)...(19): siRNA sense strand
agugaaggcacaaggugua

SEQ ID NO: 648189 - RNA, 19 nt, Homo sapiens
  misc_RNA (1)...(19): siRNA sense strand
cguaagaagagacgcaauc

SEQ ID NO: 648190 - RNA, 19 nt, Homo sapiens
  misc_RNA (1)...(19): siRNA sense strand
aaggauccucacagaauuu

SEQ ID NO: 648191 - RNA, 19 nt, Homo sapiens
  misc_RNA (1)...(19): siRNA sense strand
gaugaaagcucucuaaaga

SEQ ID NO: 648192 - RNA, 19 nt, Homo sapiens
  misc_RNA (1)...(19): siRNA sense strand
ggaagaaugugacgaguug

SEQ ID NO: 648193 - RNA, 19 nt, Homo sapiens
  misc_RNA (1)...(19): siRNA sense strand
gaacaaaucccuaaugauc

SEQ ID NO: 648194 - RNA, 19 nt, Homo sapiens
  misc_RNA (1)...(19): siRNA sense strand
guagacagcuggaugauug

SEQ ID NO: 648195 - RNA, 19 nt, Homo sapiens
  misc_RNA (1)...(19): siRNA sense strand
caaaucagcuccaaagaau

SEQ ID NO: 648196 - RNA, 19 nt, Homo sapiens
  misc_RNA (1)...(19): siRNA sense strand
gagcauauccugaaagaaa

SEQ ID NO: 648197 - RNA, 19 nt, Homo sapiens
  misc_RNA (1)...(19): siRNA sense strand
ucaaauggccaaacuaaua

SEQ ID NO: 648198 - RNA, 19 nt, Homo sapiens
  misc_RNA (1)...(19): siRNA sense strand
gaugugaccuucauucuuc

SEQ ID NO: 648199 - RNA, 19 nt, Homo sapiens
  misc_RNA (1)...(19): siRNA sense strand
gaacauguacuguguaucu

SEQ ID NO: 648200 - RNA, 19 nt, Homo sapiens
  misc_RNA (1)...(19): siRNA sense strand
agacaaagguuaugaaacu

SEQ ID NO: 648201 - RNA, 19 nt, Homo sapiens
  misc_RNA (1)...(19): siRNA sense strand
acaacaauaugcugucuuu

SEQ ID NO: 648202 - RNA, 19 nt, Homo sapiens
  misc_RNA (1)...(19): siRNA sense strand
ugaaagcucucuaaagaag

SEQ ID NO: 648203 - RNA, 19 nt, Homo sapiens
  misc_RNA (1)...(19): siRNA sense strand
acaauaugcugucuuucua

SEQ ID NO: 648204 - RNA, 19 nt, Homo sapiens
  misc_RNA (1)...(19): siRNA sense strand
caaccaagcugagcauauc

SEQ ID NO: 648205 - RNA, 19 nt, Homo sapiens
  misc_RNA (1)...(19): siRNA sense strand
acaaacagccaacccuuua

SEQ ID NO: 648206 - RNA, 19 nt, Homo sapiens
  misc_RNA (1)...(19): siRNA sense strand
gcaaaugaucgcugucaaa

SEQ ID NO: 648207 - RNA, 19 nt, Homo sapiens
  misc_RNA (1)...(19): siRNA sense strand
gaucucggaugaugaguuc

SEQ ID NO: 648208 - RNA, 19 nt, Homo sapiens
  misc_RNA (1)...(19): siRNA sense strand
ggucauggguuccucaaca

SEQ ID NO: 648209 - RNA, 19 nt, Homo sapiens
  misc_RNA (1)...(19): siRNA sense strand
uggaacaaaucccuaauga

SEQ ID NO: 648210 - RNA, 19 nt, Homo sapiens
  misc_RNA (1)...(19): siRNA sense strand
gcaagaaugccuccucaug

SEQ ID NO: 648211 - RNA, 19 nt, Homo sapiens
  misc_RNA (1)...(19): siRNA sense strand
gagcuucaguacaccauau

SEQ ID NO: 648212 - RNA, 19 nt, Homo sapiens
  misc_RNA (1)...(19): siRNA sense strand
caacaguccucaucaacca

SEQ ID NO: 648213 - RNA, 19 nt, Homo sapiens
  misc_RNA (1)...(19): siRNA sense strand
caauugaucugugccuuau

SEQ ID NO: 648214 - RNA, 19 nt, Homo sapiens
  misc_RNA (1)...(19): siRNA sense strand
uugaagaucuccaaugaug

SEQ ID NO: 648215 - RNA, 19 nt, Homo sapiens
  misc_RNA (1)...(19): siRNA sense strand
gaucugugccuuaugcaaa

SEQ ID NO: 648216 - RNA, 19 nt, Homo sapiens
  misc_RNA (1)...(19): siRNA sense strand
cagccaacccuuuaaauug

SEQ ID NO: 648217 - RNA, 19 nt, Homo sapiens
  misc_RNA (1)...(19): siRNA sense strand
ggucaacaguccucaucaa

SEQ ID NO: 648218 - RNA, 19 nt, Homo sapiens
  misc_RNA (1)...(19): siRNA sense strand
caagcaaacucuggagaug

SEQ ID NO: 648219 - RNA, 19 nt, Homo sapiens
  misc_RNA (1)...(19): siRNA sense strand
gauugcagauggagaagga

SEQ ID NO: 648220 - RNA, 19 nt, Homo sapiens
  misc_RNA (1)...(19): siRNA sense strand
ucaccugccuggaccauga

SEQ ID NO: 648221 - RNA, 19 nt, Homo sapiens
  misc_RNA (1)...(19): siRNA sense strand
gcaggaaauauauucauug

SEQ ID NO: 648222 - RNA, 19 nt, Homo sapiens
  misc_RNA (1)...(19): siRNA sense strand
ucaaagagacaaagguuau

SEQ ID NO: 648223 - RNA, 19 nt, Homo sapiens
  misc_RNA (1)...(19): siRNA sense strand
gcaacugcaucuucucaag

SEQ ID NO: 648224 - RNA, 19 nt, Homo sapiens
  misc_RNA (1)...(19): siRNA sense strand
ggucuucucucgcugcaau

SEQ ID NO: 648225 - RNA, 19 nt, Homo sapiens
  misc_RNA (1)...(19): siRNA sense strand
ggaaugugacucugcagaa

SEQ ID NO: 648226 - RNA, 19 nt, Homo sapiens
  misc_RNA (1)...(19): siRNA sense strand
cgcuacaucuucaucguua

SEQ ID NO: 648227 - RNA, 19 nt, Homo sapiens
  misc_RNA (1)...(19): siRNA sense strand
gugaacauguacuguguau

SEQ ID NO: 648228 - RNA, 19 nt, Homo sapiens
  misc_RNA (1)...(19): siRNA sense strand
caaaaugacucacaagaag

SEQ ID NO: 648229 - RNA, 19 nt, Homo sapiens
  misc_RNA (1)...(19): siRNA sense strand
cagcagaggaagcaaauga

SEQ ID NO: 648230 - RNA, 19 nt, Homo sapiens
  misc_RNA (1)...(19): siRNA sense strand
ccaauugaucugugccuua

SEQ ID NO: 648231 - RNA, 19 nt, Homo sapiens
  misc_RNA (1)...(19): siRNA sense strand
gcucacagccucugcuuca

SEQ ID NO: 648232 - RNA, 19 nt, Homo sapiens
  misc_RNA (1)...(19): siRNA sense strand
cacaagaaguugaagaucu

SEQ ID NO: 648233 - RNA, 19 nt, Homo sapiens
  misc_RNA (1)...(19): siRNA sense strand
aaucaaauggccaaacuaa

SEQ ID NO: 648234 - RNA, 19 nt, Homo sapiens
  misc_RNA (1)...(19): siRNA sense strand
gccuagaguuguuugaaga

SEQ ID NO: 648235 - RNA, 19 nt, Homo sapiens
  misc_RNA (1)...(19): siRNA sense strand
gcgcaacagcgaacuagaa

SEQ ID NO: 648236 - RNA, 19 nt, Homo sapiens
  misc_RNA (1)...(19): siRNA sense strand
ccaguuuguccaacauuua

SEQ ID NO: 648237 - RNA, 19 nt, Homo sapiens
  misc_RNA (1)...(19): siRNA sense strand
aguugaagaucuccaauga

SEQ ID NO: 648238 - RNA, 19 nt, Homo sapiens
  misc_RNA (1)...(19): siRNA sense strand
acaaaucagcuccaaagaa

SEQ ID NO: 648239 - RNA, 19 nt, Homo sapiens
  misc_RNA (1)...(19): siRNA sense strand
gaccuucauucuuccaguu

SEQ ID NO: 648240 - RNA, 19 nt, Homo sapiens
  misc_RNA (1)...(19): siRNA sense strand
ugaauacugcuaugcauga

SEQ ID NO: 648241 - RNA, 19 nt, Homo sapiens
  misc_RNA (1)...(19): siRNA sense strand
ccuaugagcuucaguacac

SEQ ID NO: 648242 - RNA, 19 nt, Homo sapiens
  misc_RNA (1)...(19): siRNA sense strand
gccaagggaugcaguaaaa

SEQ ID NO: 648243 - RNA, 19 nt, Homo sapiens
  misc_RNA (1)...(19): siRNA sense strand
uggguguccuccuggauua

SEQ ID NO: 648244 - RNA, 19 nt, Homo sapiens
  misc_RNA (1)...(19): siRNA sense strand
aaucagcuccaaagaauga

SEQ ID NO: 648245 - RNA, 19 nt, Homo sapiens
  misc_RNA (1)...(19): siRNA sense strand
ggaugaaagcucucuaaag

SEQ ID NO: 648246 - RNA, 19 nt, Homo sapiens
  misc_RNA (1)...(19): siRNA sense strand
aaacagccaacccuuuaaa

SEQ ID NO: 648247 - RNA, 19 nt, Homo sapiens
  misc_RNA (1)...(19): siRNA sense strand
caaacagccaacccuuuaa

SEQ ID NO: 648248 - RNA, 19 nt, Homo sapiens
  misc_RNA (1)...(19): siRNA sense strand
ugaaugaucgauuugagaa

SEQ ID NO: 648249 - RNA, 19 nt, Homo sapiens
  misc_RNA (1)...(19): siRNA sense strand
augagaaagugaacaugua

SEQ ID NO: 648250 - RNA, 19 nt, Homo sapiens
  misc_RNA (1)...(19): siRNA sense strand
gggacucgcuacaucuuca

SEQ ID NO: 648251 - RNA, 19 nt, Homo sapiens
  misc_RNA (1)...(19): siRNA sense strand
ugaauggauuggcaagaau

SEQ ID NO: 648252 - RNA, 19 nt, Homo sapiens
  misc_RNA (1)...(19): siRNA sense strand
cuucaucguuaaagccaua

SEQ ID NO: 648253 - RNA, 19 nt, Homo sapiens
  misc_RNA (1)...(19): siRNA sense strand
gaaugugacucugcagaac

SEQ ID NO: 648254 - RNA, 19 nt, Homo sapiens
  misc_RNA (1)...(19): siRNA sense strand
caacugcaggccucaagaa

SEQ ID NO: 648255 - RNA, 19 nt, Homo sapiens
  misc_RNA (1)...(19): siRNA sense strand
caacauuuacaaucuggaa

SEQ ID NO: 648256 - RNA, 19 nt, Homo sapiens
  misc_RNA (1)...(19): siRNA sense strand
cuaacucucuccaucuuca

SEQ ID NO: 648257 - RNA, 19 nt, Homo sapiens
  misc_RNA (1)...(19): siRNA sense strand
ccaaagaaugaauggauug

SEQ ID NO: 648258 - RNA, 19 nt, Homo sapiens
  misc_RNA (1)...(19): siRNA sense strand
gccagcagguugaggugaa

SEQ ID NO: 648259 - RNA, 19 nt, Homo sapiens
  misc_RNA (1)...(19): siRNA sense strand
ccccagauuuuauugauua

SEQ ID NO: 648260 - RNA, 19 nt, Homo sapiens
  misc_RNA (1)...(19): siRNA sense strand
cagugaaccuacccgacua

SEQ ID NO: 648261 - RNA, 19 nt, Homo sapiens
  misc_RNA (1)...(19): siRNA sense strand
gaaagugaacauguacugu

SEQ ID NO: 648262 - RNA, 19 nt, Homo sapiens
  misc_RNA (1)...(19): siRNA sense strand
acacuggagucugaauuga

SEQ ID NO: 648263 - RNA, 19 nt, Homo sapiens
  misc_RNA (1)...(19): siRNA sense strand
cuacaaaucagcuccaaag

SEQ ID NO: 648264 - RNA, 19 nt, Homo sapiens
  misc_RNA (1)...(19): siRNA sense strand
caaucugccuagaguuguu

SEQ ID NO: 648265 - RNA, 19 nt, Homo sapiens
  misc_RNA (1)...(19): siRNA sense strand
caaauggccaaacuaauac

SEQ ID NO: 648266 - RNA, 19 nt, Homo sapiens
  misc_RNA (1)...(19): siRNA sense strand
ggugaauacugcuaugcau

SEQ ID NO: 648267 - RNA, 19 nt, Homo sapiens
  misc_RNA (1)...(19): siRNA sense strand
ggaacaaaucccuaaugau

SEQ ID NO: 648268 - RNA, 19 nt, Homo sapiens
  misc_RNA (1)...(19): siRNA sense strand
aggaaaugcugguggaugu

SEQ ID NO: 648269 - RNA, 19 nt, Homo sapiens
  misc_RNA (1)...(19): siRNA sense strand
gaauggauuggcaagaaug

SEQ ID NO: 648270 - RNA, 19 nt, Homo sapiens
  misc_RNA (1)...(19): siRNA sense strand
acaagaaguugaagaucuc

SEQ ID NO: 648271 - RNA, 19 nt, Homo sapiens
  misc_RNA (1)...(19): siRNA sense strand
gguauguuaucucgcugaa

SEQ ID NO: 648272 - RNA, 19 nt, Homo sapiens
  misc_RNA (1)...(19): siRNA sense strand
guuaugaaacugagaaagu

SEQ ID NO: 648273 - RNA, 19 nt, Homo sapiens
  misc_RNA (1)...(19): siRNA sense strand
uguaucugaugaccaauug

SEQ ID NO: 648274 - RNA, 19 nt, Homo sapiens
  misc_RNA (1)...(19): siRNA sense strand
caacaugguaugcaauugg

SEQ ID NO: 648275 - RNA, 19 nt, Homo sapiens
  misc_RNA (1)...(19): siRNA sense strand
cugagcauauccugaaaga

SEQ ID NO: 648276 - RNA, 19 nt, Homo sapiens
  misc_RNA (1)...(19): siRNA sense strand
gcagaggaagcaaaugauc

SEQ ID NO: 648277 - RNA, 19 nt, Homo sapiens
  misc_RNA (1)...(19): siRNA sense strand
agcaaacucuggagaugaa

SEQ ID NO: 648278 - RNA, 19 nt, Homo sapiens
  misc_RNA (1)...(19): siRNA sense strand
gaaugaucgauuugagaaa

SEQ ID NO: 648279 - RNA, 19 nt, Homo sapiens
  misc_RNA (1)...(19): siRNA sense strand
ccugugaggucuccuacug

SEQ ID NO: 648280 - RNA, 19 nt, Homo sapiens
  misc_RNA (1)...(19): siRNA sense strand
gaaagcucucuaaagaaga

SEQ ID NO: 648281 - RNA, 19 nt, Homo sapiens
  misc_RNA (1)...(19): siRNA sense strand
ugaauccauugaacccauu

SEQ ID NO: 648282 - RNA, 19 nt, Homo sapiens
  misc_RNA (1)...(19): siRNA sense strand
gcuacaucuucaucguuaa

SEQ ID NO: 648283 - RNA, 19 nt, Homo sapiens
  misc_RNA (1)...(19): siRNA sense strand
gaauccauugaacccauua

SEQ ID NO: 648284 - RNA, 19 nt, Homo sapiens
  misc_RNA (1)...(19): siRNA sense strand
aauaugcugucuuucuaug

SEQ ID NO: 648285 - RNA, 19 nt, Homo sapiens
  misc_RNA (1)...(19): siRNA sense strand
acagccaacccuuuaaauu

SEQ ID NO: 648286 - RNA, 19 nt, Homo sapiens
  misc_RNA (1)...(19): siRNA sense strand
gacaaagguuaugaaacug

SEQ ID NO: 648287 - RNA, 19 nt, Homo sapiens
  misc_RNA (1)...(19): siRNA sense strand
uguccaacauuuacaaucu

SEQ ID NO: 648288 - RNA, 19 nt, Homo sapiens
  misc_RNA (1)...(19): siRNA sense strand
cagcucuggugaauccauu

SEQ ID NO: 648289 - RNA, 19 nt, Homo sapiens
  misc_RNA (1)...(19): siRNA sense strand
caagaauccccuuauguuu

SEQ ID NO: 648290 - RNA, 19 nt, Homo sapiens
  misc_RNA (1)...(19): siRNA sense strand
gggcagcaggaaauauauu

SEQ ID NO: 648291 - RNA, 19 nt, Homo sapiens
  misc_RNA (1)...(19): siRNA sense strand
gaugaaagcucucuaaaga

SEQ ID NO: 648292 - RNA, 19 nt, Homo sapiens
  misc_RNA (1)...(19): siRNA sense strand
ggaagaaugugacgaguug

SEQ ID NO: 648293 - RNA, 19 nt, Homo sapiens
  misc_RNA (1)...(19): siRNA sense strand
gaacaaaucccuaaugauc

SEQ ID NO: 648294 - RNA, 19 nt, Homo sapiens
  misc_RNA (1)...(19): siRNA sense strand
guagacagcuggaugauug

SEQ ID NO: 648295 - RNA, 19 nt, Homo sapiens
  misc_RNA (1)...(19): siRNA sense strand
caaaucagcuccaaagaau

SEQ ID NO: 648296 - RNA, 19 nt, Homo sapiens
  misc_RNA (1)...(19): siRNA sense strand
gagcauauccugaaagaaa

SEQ ID NO: 648297 - RNA, 19 nt, Homo sapiens
  misc_RNA (1)...(19): siRNA sense strand
ucaaauggccaaacuaaua

SEQ ID NO: 648298 - RNA, 19 nt, Homo sapiens
  misc_RNA (1)...(19): siRNA sense strand
gaugugaccuucauucuuc

SEQ ID NO: 648299 - RNA, 19 nt, Homo sapiens
  misc_RNA (1)...(19): siRNA sense strand
gaacauguacuguguaucu

SEQ ID NO: 648300 - RNA, 19 nt, Homo sapiens
  misc_RNA (1)...(19): siRNA sense strand
agacaaagguuaugaaacu

SEQ ID NO: 648301 - RNA, 19 nt, Homo sapiens
  misc_RNA (1)...(19): siRNA sense strand
acaacaauaugcugucuuu

SEQ ID NO: 648302 - RNA, 19 nt, Homo sapiens
  misc_RNA (1)...(19): siRNA sense strand
ugaaagcucucuaaagaag

SEQ ID NO: 648303 - RNA, 19 nt, Homo sapiens
  misc_RNA (1)...(19): siRNA sense strand
acaauaugcugucuuucua

SEQ ID NO: 648304 - RNA, 19 nt, Homo sapiens
  misc_RNA (1)...(19): siRNA sense strand
caaccaagcugagcauauc

SEQ ID NO: 648305 - RNA, 19 nt, Homo sapiens
  misc_RNA (1)...(19): siRNA sense strand
acaaacagccaacccuuua

SEQ ID NO: 648306 - RNA, 19 nt, Homo sapiens
  misc_RNA (1)...(19): siRNA sense strand
gcaaaugaucgcugucaaa

SEQ ID NO: 648307 - RNA, 19 nt, Homo sapiens
  misc_RNA (1)...(19): siRNA sense strand
gaucucggaugaugaguuc

SEQ ID NO: 648308 - RNA, 19 nt, Homo sapiens
  misc_RNA (1)...(19): siRNA sense strand
ggucauggguuccucaaca

SEQ ID NO: 648309 - RNA, 19 nt, Homo sapiens
  misc_RNA (1)...(19): siRNA sense strand
uggaacaaaucccuaauga

SEQ ID NO: 648310 - RNA, 19 nt, Homo sapiens
  misc_RNA (1)...(19): siRNA sense strand
gcaagaaugccuccucaug

SEQ ID NO: 648311 - RNA, 19 nt, Homo sapiens
  misc_RNA (1)...(19): siRNA sense strand
gagcuucaguacaccauau

SEQ ID NO: 648312 - RNA, 19 nt, Homo sapiens
  misc_RNA (1)...(19): siRNA sense strand
caacaguccucaucaacca

SEQ ID NO: 648313 - RNA, 19 nt, Homo sapiens
  misc_RNA (1)...(19): siRNA sense strand
caauugaucugugccuuau

SEQ ID NO: 648314 - RNA, 19 nt, Homo sapiens
  misc_RNA (1)...(19): siRNA sense strand
uugaagaucuccaaugaug

SEQ ID NO: 648315 - RNA, 19 nt, Homo sapiens
  misc_RNA (1)...(19): siRNA sense strand
gaucugugccuuaugcaaa

SEQ ID NO: 648316 - RNA, 19 nt, Homo sapiens
  misc_RNA (1)...(19): siRNA sense strand
cagccaacccuuuaaauug

SEQ ID NO: 648317 - RNA, 19 nt, Homo sapiens
  misc_RNA (1)...(19): siRNA sense strand
ggucaacaguccucaucaa

SEQ ID NO: 648318 - RNA, 19 nt, Homo sapiens
  misc_RNA (1)...(19): siRNA sense strand
caagcaaacucuggagaug

SEQ ID NO: 648319 - RNA, 19 nt, Homo sapiens
  misc_RNA (1)...(19): siRNA sense strand
gauugcagauggagaagga

SEQ ID NO: 648320 - RNA, 19 nt, Homo sapiens
  misc_RNA (1)...(19): siRNA sense strand
ucaccugccuggaccauga

SEQ ID NO: 648321 - RNA, 19 nt, Homo sapiens
  misc_RNA (1)...(19): siRNA sense strand
gcaggaaauauauucauug

SEQ ID NO: 648322 - RNA, 19 nt, Homo sapiens
  misc_RNA (1)...(19): siRNA sense strand
ucaaagagacaaagguuau

SEQ ID NO: 648323 - RNA, 19 nt, Homo sapiens
  misc_RNA (1)...(19): siRNA sense strand
gcaacugcaucuucucaag

SEQ ID NO: 648324 - RNA, 19 nt, Homo sapiens
  misc_RNA (1)...(19): siRNA sense strand
ggucuucucucgcugcaau

SEQ ID NO: 648325 - RNA, 19 nt, Homo sapiens
  misc_RNA (1)...(19): siRNA sense strand
ggaaugugacucugcagaa

SEQ ID NO: 648326 - RNA, 19 nt, Homo sapiens
  misc_RNA (1)...(19): siRNA sense strand
cgcuacaucuucaucguua

SEQ ID NO: 648327 - RNA, 19 nt, Homo sapiens
  misc_RNA (1)...(19): siRNA sense strand
gugaacauguacuguguau

SEQ ID NO: 648328 - RNA, 19 nt, Homo sapiens
  misc_RNA (1)...(19): siRNA sense strand
caaaaugacucacaagaag

SEQ ID NO: 648329 - RNA, 19 nt, Homo sapiens
  misc_RNA (1)...(19): siRNA sense strand
cagcagaggaagcaaauga

SEQ ID NO: 648330 - RNA, 19 nt, Homo sapiens
  misc_RNA (1)...(19): siRNA sense strand
ccaauugaucugugccuua

SEQ ID NO: 648331 - RNA, 19 nt, Homo sapiens
  misc_RNA (1)...(19): siRNA sense strand
gcucacagccucugcuuca

SEQ ID NO: 648332 - RNA, 19 nt, Homo sapiens
  misc_RNA (1)...(19): siRNA sense strand
cacaagaaguugaagaucu

SEQ ID NO: 648333 - RNA, 19 nt, Homo sapiens
  misc_RNA (1)...(19): siRNA sense strand
aaucaaauggccaaacuaa

SEQ ID NO: 648334 - RNA, 19 nt, Homo sapiens
  misc_RNA (1)...(19): siRNA sense strand
gccuagaguuguuugaaga

SEQ ID NO: 648335 - RNA, 19 nt, Homo sapiens
  misc_RNA (1)...(19): siRNA sense strand
gcgcaacagcgaacuagaa

SEQ ID NO: 648336 - RNA, 19 nt, Homo sapiens
  misc_RNA (1)...(19): siRNA sense strand
ccaguuuguccaacauuua

SEQ ID NO: 648337 - RNA, 19 nt, Homo sapiens
  misc_RNA (1)...(19): siRNA sense strand
aguugaagaucuccaauga

SEQ ID NO: 648338 - RNA, 19 nt, Homo sapiens
  misc_RNA (1)...(19): siRNA sense strand
acaaaucagcuccaaagaa

SEQ ID NO: 648339 - RNA, 19 nt, Homo sapiens
  misc_RNA (1)...(19): siRNA sense strand
gaccuucauucuuccaguu

SEQ ID NO: 648340 - RNA, 19 nt, Homo sapiens
  misc_RNA (1)...(19): siRNA sense strand
ugaauacugcuaugcauga

SEQ ID NO: 648341 - RNA, 19 nt, Homo sapiens
  misc_RNA (1)...(19): siRNA sense strand
ccuaugagcuucaguacac

SEQ ID NO: 648342 - RNA, 19 nt, Homo sapiens
  misc_RNA (1)...(19): siRNA sense strand
gccaagggaugcaguaaaa

SEQ ID NO: 648343 - RNA, 19 nt, Homo sapiens
  misc_RNA (1)...(19): siRNA sense strand
uggguguccuccuggauua

SEQ ID NO: 648344 - RNA, 19 nt, Homo sapiens
  misc_RNA (1)...(19): siRNA sense strand
aaucagcuccaaagaauga

SEQ ID NO: 648345 - RNA, 19 nt, Homo sapiens
  misc_RNA (1)...(19): siRNA sense strand
ggaugaaagcucucuaaag

SEQ ID NO: 648346 - RNA, 19 nt, Homo sapiens
  misc_RNA (1)...(19): siRNA sense strand
aaacagccaacccuuuaaa

SEQ ID NO: 648347 - RNA, 19 nt, Homo sapiens
  misc_RNA (1)...(19): siRNA sense strand
caaacagccaacccuuuaa

SEQ ID NO: 648348 - RNA, 19 nt, Homo sapiens
  misc_RNA (1)...(19): siRNA sense strand
ugaaugaucgauuugagaa

SEQ ID NO: 648349 - RNA, 19 nt, Homo sapiens
  misc_RNA (1)...(19): siRNA sense strand
augagaaagugaacaugua

SEQ ID NO: 648350 - RNA, 19 nt, Homo sapiens
  misc_RNA (1)...(19): siRNA sense strand
gggacucgcuacaucuuca

SEQ ID NO: 648351 - RNA, 19 nt, Homo sapiens
  misc_RNA (1)...(19): siRNA sense strand
ugaauggauuggcaagaau

SEQ ID NO: 648352 - RNA, 19 nt, Homo sapiens
  misc_RNA (1)...(19): siRNA sense strand
cuucaucguuaaagccaua

SEQ ID NO: 648353 - RNA, 19 nt, Homo sapiens
  misc_RNA (1)...(19): siRNA sense strand
gaaugugacucugcagaac

SEQ ID NO: 648354 - RNA, 19 nt, Homo sapiens
  misc_RNA (1)...(19): siRNA sense strand
caacugcaggccucaagaa

SEQ ID NO: 648355 - RNA, 19 nt, Homo sapiens
  misc_RNA (1)...(19): siRNA sense strand
caacauuuacaaucuggaa

SEQ ID NO: 648356 - RNA, 19 nt, Homo sapiens
  misc_RNA (1)...(19): siRNA sense strand
cuaacucucuccaucuuca

SEQ ID NO: 648357 - RNA, 19 nt, Homo sapiens
  misc_RNA (1)...(19): siRNA sense strand
ccaaagaaugaauggauug

SEQ ID NO: 648358 - RNA, 19 nt, Homo sapiens
  misc_RNA (1)...(19): siRNA sense strand
gccagcagguugaggugaa

SEQ ID NO: 648359 - RNA, 19 nt, Homo sapiens
  misc_RNA (1)...(19): siRNA sense strand
ccccagauuuuauugauua

SEQ ID NO: 648360 - RNA, 19 nt, Homo sapiens
  misc_RNA (1)...(19): siRNA sense strand
cagugaaccuacccgacua

SEQ ID NO: 648361 - RNA, 19 nt, Homo sapiens
  misc_RNA (1)...(19): siRNA sense strand
gaaagugaacauguacugu

SEQ ID NO: 648362 - RNA, 19 nt, Homo sapiens
  misc_RNA (1)...(19): siRNA sense strand
acacuggagucugaauuga

SEQ ID NO: 648363 - RNA, 19 nt, Homo sapiens
  misc_RNA (1)...(19): siRNA sense strand
cuacaaaucagcuccaaag

SEQ ID NO: 648364 - RNA, 19 nt, Homo sapiens
  misc_RNA (1)...(19): siRNA sense strand
caaucugccuagaguuguu

SEQ ID NO: 648365 - RNA, 19 nt, Homo sapiens
  misc_RNA (1)...(19): siRNA sense strand
caaauggccaaacuaauac

SEQ ID NO: 648366 - RNA, 19 nt, Homo sapiens
  misc_RNA (1)...(19): siRNA sense strand
ggugaauacugcuaugcau

SEQ ID NO: 648367 - RNA, 19 nt, Homo sapiens
  misc_RNA (1)...(19): siRNA sense strand
ggaacaaaucccuaaugau

SEQ ID NO: 648368 - RNA, 19 nt, Homo sapiens
  misc_RNA (1)...(19): siRNA sense strand
aggaaaugcugguggaugu

SEQ ID NO: 648369 - RNA, 19 nt, Homo sapiens
  misc_RNA (1)...(19): siRNA sense strand
gaauggauuggcaagaaug

SEQ ID NO: 648370 - RNA, 19 nt, Homo sapiens
  misc_RNA (1)...(19): siRNA sense strand
acaagaaguugaagaucuc

SEQ ID NO: 648371 - RNA, 19 nt, Homo sapiens
  misc_RNA (1)...(19): siRNA sense strand
gguauguuaucucgcugaa

SEQ ID NO: 648372 - RNA, 19 nt, Homo sapiens
  misc_RNA (1)...(19): siRNA sense strand
guuaugaaacugagaaagu

SEQ ID NO: 648373 - RNA, 19 nt, Homo sapiens
  misc_RNA (1)...(19): siRNA sense strand
uguaucugaugaccaauug

SEQ ID NO: 648374 - RNA, 19 nt, Homo sapiens
  misc_RNA (1)...(19): siRNA sense strand
caacaugguaugcaauugg

SEQ ID NO: 648375 - RNA, 19 nt, Homo sapiens
  misc_RNA (1)...(19): siRNA sense strand
cugagcauauccugaaaga

SEQ ID NO: 648376 - RNA, 19 nt, Homo sapiens
  misc_RNA (1)...(19): siRNA sense strand
gcagaggaagcaaaugauc

SEQ ID NO: 648377 - RNA, 19 nt, Homo sapiens
  misc_RNA (1)...(19): siRNA sense strand
agcaaacucuggagaugaa

SEQ ID NO: 648378 - RNA, 19 nt, Homo sapiens
  misc_RNA (1)...(19): siRNA sense strand
gaaugaucgauuugagaaa

SEQ ID NO: 648379 - RNA, 19 nt, Homo sapiens
  misc_RNA (1)...(19): siRNA sense strand
ccugugaggucuccuacug

SEQ ID NO: 648380 - RNA, 19 nt, Homo sapiens
  misc_RNA (1)...(19): siRNA sense strand
gaaagcucucuaaagaaga

SEQ ID NO: 648381 - RNA, 19 nt, Homo sapiens
  misc_RNA (1)...(19): siRNA sense strand
ugaauccauugaacccauu

SEQ ID NO: 648382 - RNA, 19 nt, Homo sapiens
  misc_RNA (1)...(19): siRNA sense strand
gcuacaucuucaucguuaa

SEQ ID NO: 648383 - RNA, 19 nt, Homo sapiens
  misc_RNA (1)...(19): siRNA sense strand
gaauccauugaacccauua

SEQ ID NO: 648384 - RNA, 19 nt, Homo sapiens
  misc_RNA (1)...(19): siRNA sense strand
aauaugcugucuuucuaug

SEQ ID NO: 648385 - RNA, 19 nt, Homo sapiens
  misc_RNA (1)...(19): siRNA sense strand
acagccaacccuuuaaauu

SEQ ID NO: 648386 - RNA, 19 nt, Homo sapiens
  misc_RNA (1)...(19): siRNA sense strand
gacaaagguuaugaaacug

SEQ ID NO: 648387 - RNA, 19 nt, Homo sapiens
  misc_RNA (1)...(19): siRNA sense strand
uguccaacauuuacaaucu

SEQ ID NO: 648388 - RNA, 19 nt, Homo sapiens
  misc_RNA (1)...(19): siRNA sense strand
cagcucuggugaauccauu

SEQ ID NO: 648389 - RNA, 19 nt, Homo sapiens
  misc_RNA (1)...(19): siRNA sense strand
caagaauccccuuauguuu

SEQ ID NO: 648390 - RNA, 19 nt, Homo sapiens
  misc_RNA (1)...(19): siRNA sense strand
gggcagcaggaaauauauu

SEQ ID NO: 648391 - RNA, 19 nt, Homo sapiens
  misc_RNA (1)...(19): siRNA sense strand
aaacugcgcucgcugacuu

SEQ ID NO: 648392 - RNA, 19 nt, Homo sapiens
  misc_RNA (1)...(19): siRNA sense strand
gaaggaggagaaugagaaa

SEQ ID NO: 648393 - RNA, 19 nt, Homo sapiens
  misc_RNA (1)...(19): siRNA sense strand
gagcaguacugggaagaga

SEQ ID NO: 648394 - RNA, 19 nt, Homo sapiens
  misc_RNA (1)...(19): siRNA sense strand
gcacccagauugugauggu

SEQ ID NO: 648395 - RNA, 19 nt, Homo sapiens
  misc_RNA (1)...(19): siRNA sense strand
gcagcgagccaacaugguu

SEQ ID NO: 648396 - RNA, 19 nt, Homo sapiens
  misc_RNA (1)...(19): siRNA sense strand
acccacaccuggauuauga

SEQ ID NO: 648397 - RNA, 19 nt, Homo sapiens
  misc_RNA (1)...(19): siRNA sense strand
gaaccucacgggcaucuuc

SEQ ID NO: 648398 - RNA, 19 nt, Homo sapiens
  misc_RNA (1)...(19): siRNA sense strand
ugaaggaggagaaugagaa

SEQ ID NO: 648399 - RNA, 19 nt, Homo sapiens
  misc_RNA (1)...(19): siRNA sense strand
ccugugagcuggaauugca

SEQ ID NO: 648400 - RNA, 19 nt, Homo sapiens
  misc_RNA (1)...(19): siRNA sense strand
ggaggagaaugagaaacug

SEQ ID NO: 648401 - RNA, 19 nt, Homo sapiens
  misc_RNA (1)...(19): siRNA sense strand
ugugcgagcugcagaagga

SEQ ID NO: 648402 - RNA, 19 nt, Homo sapiens
  misc_RNA (1)...(19): siRNA sense strand
gcgacccacaccuggauua

SEQ ID NO: 648403 - RNA, 19 nt, Homo sapiens
  misc_RNA (1)...(19): siRNA sense strand
guacugggaagagaaggaa

SEQ ID NO: 648404 - RNA, 19 nt, Homo sapiens
  misc_RNA (1)...(19): siRNA sense strand
gccugaaggaggagaauga

SEQ ID NO: 648405 - RNA, 19 nt, Homo sapiens
  misc_RNA (1)...(19): siRNA sense strand
gauuaugagcuccuagaca

SEQ ID NO: 648406 - RNA, 19 nt, Homo sapiens
  misc_RNA (1)...(19): siRNA sense strand
ccagccagcagucccugua

SEQ ID NO: 648407 - RNA, 19 nt, Homo sapiens
  misc_RNA (1)...(19): siRNA sense strand
ucacgggcaucuucaucca

SEQ ID NO: 648408 - RNA, 19 nt, Homo sapiens
  misc_RNA (1)...(19): siRNA sense strand
agaggcagcgagagcagua

SEQ ID NO: 648409 - RNA, 19 nt, Homo sapiens
  misc_RNA (1)...(19): siRNA sense strand
cagcgagccaacaugguuu

SEQ ID NO: 648410 - RNA, 19 nt, Homo sapiens
  misc_RNA (1)...(19): siRNA sense strand
gcaguacugggaagagaag

SEQ ID NO: 648411 - RNA, 19 nt, Homo sapiens
  misc_RNA (1)...(19): siRNA sense strand
gcucuugucggaccugagu

SEQ ID NO: 648412 - RNA, 19 nt, Homo sapiens
  misc_RNA (1)...(19): siRNA sense strand
gugcucagagggagauuuc

SEQ ID NO: 648413 - RNA, 19 nt, Homo sapiens
  misc_RNA (1)...(19): siRNA sense strand
aaacugcgcucgcugacuu

SEQ ID NO: 648414 - RNA, 19 nt, Homo sapiens
  misc_RNA (1)...(19): siRNA sense strand
gaaggaggagaaugagaaa

SEQ ID NO: 648415 - RNA, 19 nt, Homo sapiens
  misc_RNA (1)...(19): siRNA sense strand
gagcaguacugggaagaga

SEQ ID NO: 648416 - RNA, 19 nt, Homo sapiens
  misc_RNA (1)...(19): siRNA sense strand
gcacccagauugugauggu

SEQ ID NO: 648417 - RNA, 19 nt, Homo sapiens
  misc_RNA (1)...(19): siRNA sense strand
acccacaccuggauuauga

SEQ ID NO: 648418 - RNA, 19 nt, Homo sapiens
  misc_RNA (1)...(19): siRNA sense strand
gaaccucacgggcaucuuc

SEQ ID NO: 648419 - RNA, 19 nt, Homo sapiens
  misc_RNA (1)...(19): siRNA sense strand
ugaaggaggagaaugagaa

SEQ ID NO: 648420 - RNA, 19 nt, Homo sapiens
  misc_RNA (1)...(19): siRNA sense strand
ggaggagaaugagaaacug

SEQ ID NO: 648421 - RNA, 19 nt, Homo sapiens
  misc_RNA (1)...(19): siRNA sense strand
ccugugagcuggaauugca

SEQ ID NO: 648422 - RNA, 19 nt, Homo sapiens
  misc_RNA (1)...(19): siRNA sense strand
ugugcgagcugcagaagga

SEQ ID NO: 648423 - RNA, 19 nt, Homo sapiens
  misc_RNA (1)...(19): siRNA sense strand
gcgacccacaccuggauua

SEQ ID NO: 648424 - RNA, 19 nt, Homo sapiens
  misc_RNA (1)...(19): siRNA sense strand
guacugggaagagaaggaa

SEQ ID NO: 648425 - RNA, 19 nt, Homo sapiens
  misc_RNA (1)...(19): siRNA sense strand
gccugaaggaggagaauga

SEQ ID NO: 648426 - RNA, 19 nt, Homo sapiens
  misc_RNA (1)...(19): siRNA sense strand
gauuaugagcuccuagaca

SEQ ID NO: 648427 - RNA, 19 nt, Homo sapiens
  misc_RNA (1)...(19): siRNA sense strand
ccagccagcagucccugua

SEQ ID NO: 648428 - RNA, 19 nt, Homo sapiens
  misc_RNA (1)...(19): siRNA sense strand
ucacgggcaucuucaucca

SEQ ID NO: 648429 - RNA, 19 nt, Homo sapiens
  misc_RNA (1)...(19): siRNA sense strand
agaggcagcgagagcagua

SEQ ID NO: 648430 - RNA, 19 nt, Homo sapiens
  misc_RNA (1)...(19): siRNA sense strand
gcaguacugggaagagaag

SEQ ID NO: 648431 - RNA, 19 nt, Homo sapiens
  misc_RNA (1)...(19): siRNA sense strand
gcucuugucggaccugagu

SEQ ID NO: 648432 - RNA, 19 nt, Homo sapiens
  misc_RNA (1)...(19): siRNA sense strand
gugcucagagggagauuuc

SEQ ID NO: 648433 - RNA, 19 nt, Homo sapiens
  misc_RNA (1)...(19): siRNA sense strand
gaagaugccacaauuaaga

SEQ ID NO: 648434 - RNA, 19 nt, Homo sapiens
  misc_RNA (1)...(19): siRNA sense strand
caaguuccgucaugucuuu

SEQ ID NO: 648435 - RNA, 19 nt, Homo sapiens
  misc_RNA (1)...(19): siRNA sense strand
gagcccaucuccaugauug

SEQ ID NO: 648436 - RNA, 19 nt, Homo sapiens
  misc_RNA (1)...(19): siRNA sense strand
ugagcuaccugacugagua

SEQ ID NO: 648437 - RNA, 19 nt, Homo sapiens
  misc_RNA (1)...(19): siRNA sense strand
gcagagagaccuaucuuca

SEQ ID NO: 648438 - RNA, 19 nt, Homo sapiens
  misc_RNA (1)...(19): siRNA sense strand
ggacauauacccuccaaca

SEQ ID NO: 648439 - RNA, 19 nt, Homo sapiens
  misc_RNA (1)...(19): siRNA sense strand
aaaccuggcugacaaaugg

SEQ ID NO: 648440 - RNA, 19 nt, Homo sapiens
  misc_RNA (1)...(19): siRNA sense strand
agagagaccuaucuucaau

SEQ ID NO: 648441 - RNA, 19 nt, Homo sapiens
  misc_RNA (1)...(19): siRNA sense strand
ucuggaaccuggauacaaa

SEQ ID NO: 648442 - RNA, 19 nt, Homo sapiens
  misc_RNA (1)...(19): siRNA sense strand
gcaagauucggguuauuga

SEQ ID NO: 648443 - RNA, 19 nt, Homo sapiens
  misc_RNA (1)...(19): siRNA sense strand
gaugugauccucuccaugu

SEQ ID NO: 648444 - RNA, 19 nt, Homo sapiens
  misc_RNA (1)...(19): siRNA sense strand
gcaaagaccgcaagauucg

SEQ ID NO: 648445 - RNA, 19 nt, Homo sapiens
  misc_RNA (1)...(19): siRNA sense strand
caccaaagacagagaauga

SEQ ID NO: 648446 - RNA, 19 nt, Homo sapiens
  misc_RNA (1)...(19): siRNA sense strand
gauuagcugucaccaagau

SEQ ID NO: 648447 - RNA, 19 nt, Homo sapiens
  misc_RNA (1)...(19): siRNA sense strand
aaaggagucugucaucaca

SEQ ID NO: 648448 - RNA, 19 nt, Homo sapiens
  misc_RNA (1)...(19): siRNA sense strand
aaagcuggcugcagaagau

SEQ ID NO: 648449 - RNA, 19 nt, Homo sapiens
  misc_RNA (1)...(19): siRNA sense strand
agaaugaguugcugcagau

SEQ ID NO: 648450 - RNA, 19 nt, Homo sapiens
  misc_RNA (1)...(19): siRNA sense strand
cugaagaugccacaauuaa

SEQ ID NO: 648451 - RNA, 19 nt, Homo sapiens
  misc_RNA (1)...(19): siRNA sense strand
agagaccuaucuucaauuc

SEQ ID NO: 648452 - RNA, 19 nt, Homo sapiens
  misc_RNA (1)...(19): siRNA sense strand
ggaccaggauaaccucucu

SEQ ID NO: 648453 - RNA, 19 nt, Homo sapiens
  misc_RNA (1)...(19): siRNA sense strand
gggcacagaggcaacguuu

SEQ ID NO: 648454 - RNA, 19 nt, Homo sapiens
  misc_RNA (1)...(19): siRNA sense strand
acaaggugaugaucuggaa

SEQ ID NO: 648455 - RNA, 19 nt, Homo sapiens
  misc_RNA (1)...(19): siRNA sense strand
gcucuugaaucagacagaa

SEQ ID NO: 648456 - RNA, 19 nt, Homo sapiens
  misc_RNA (1)...(19): siRNA sense strand
gcacagaggcaacguuuug

SEQ ID NO: 648457 - RNA, 19 nt, Homo sapiens
  misc_RNA (1)...(19): siRNA sense strand
caaagacagagaaugaguu

SEQ ID NO: 648458 - RNA, 19 nt, Homo sapiens
  misc_RNA (1)...(19): siRNA sense strand
gagaucgccuccuguucug

SEQ ID NO: 648459 - RNA, 19 nt, Homo sapiens
  misc_RNA (1)...(19): siRNA sense strand
cugcaaagaccgcaagauu

SEQ ID NO: 648460 - RNA, 19 nt, Homo sapiens
  misc_RNA (1)...(19): siRNA sense strand
ggaucggugucaugccaaa

SEQ ID NO: 648461 - RNA, 19 nt, Homo sapiens
  misc_RNA (1)...(19): siRNA sense strand
cugaguaccgcuccuauaa

SEQ ID NO: 648462 - RNA, 19 nt, Homo sapiens
  misc_RNA (1)...(19): siRNA sense strand
ccacuucauugcaguugug

SEQ ID NO: 648463 - RNA, 19 nt, Homo sapiens
  misc_RNA (1)...(19): siRNA sense strand
ccaggaggccagcuacaaa

SEQ ID NO: 648464 - RNA, 19 nt, Homo sapiens
  misc_RNA (1)...(19): siRNA sense strand
caauuaagaucuggagcau

SEQ ID NO: 648465 - RNA, 19 nt, Homo sapiens
  misc_RNA (1)...(19): siRNA sense strand
acaaaggagucugucauca

SEQ ID NO: 648466 - RNA, 19 nt, Homo sapiens
  misc_RNA (1)...(19): siRNA sense strand
gcaaggagaacugcuacga

SEQ ID NO: 648467 - RNA, 19 nt, Homo sapiens
  misc_RNA (1)...(19): siRNA sense strand
ugaguacgauuagcuguca

SEQ ID NO: 648468 - RNA, 19 nt, Homo sapiens
  misc_RNA (1)...(19): siRNA sense strand
agaccuaucuucaauucca

SEQ ID NO: 648469 - RNA, 19 nt, Homo sapiens
  misc_RNA (1)...(19): siRNA sense strand
gaccgcaagauucggguua

SEQ ID NO: 648470 - RNA, 19 nt, Homo sapiens
  misc_RNA (1)...(19): siRNA sense strand
ucuacaagcugaucacaac

SEQ ID NO: 648471 - RNA, 19 nt, Homo sapiens
  misc_RNA (1)...(19): siRNA sense strand
gagagaccuaucuucaauu

SEQ ID NO: 648472 - RNA, 19 nt, Homo sapiens
  misc_RNA (1)...(19): siRNA sense strand
aaagacagagaaugaguug

SEQ ID NO: 648473 - RNA, 19 nt, Homo sapiens
  misc_RNA (1)...(19): siRNA sense strand
gguccaggccaaacaguug

SEQ ID NO: 648474 - RNA, 19 nt, Homo sapiens
  misc_RNA (1)...(19): siRNA sense strand
gaucgccuccuguucugaa

SEQ ID NO: 648475 - RNA, 19 nt, Homo sapiens
  misc_RNA (1)...(19): siRNA sense strand
cagagagaccuaucuucaa

SEQ ID NO: 648476 - RNA, 19 nt, Homo sapiens
  misc_RNA (1)...(19): siRNA sense strand
ccaauccuggugucccuua

SEQ ID NO: 648477 - RNA, 19 nt, Homo sapiens
  misc_RNA (1)...(19): siRNA sense strand
ccacuucugugccgugaac

SEQ ID NO: 648478 - RNA, 19 nt, Homo sapiens
  misc_RNA (1)...(19): siRNA sense strand
gcuccaaguuccgucaugu

SEQ ID NO: 648479 - RNA, 19 nt, Homo sapiens
  misc_RNA (1)...(19): siRNA sense strand
ccucuucagugcuggcuau

SEQ ID NO: 648480 - RNA, 19 nt, Homo sapiens
  misc_RNA (1)...(19): siRNA sense strand
gaucuuccgcuucuacaag

SEQ ID NO: 648481 - RNA, 19 nt, Homo sapiens
  misc_RNA (1)...(19): siRNA sense strand
gaguaccgcuccuauaacc

SEQ ID NO: 648482 - RNA, 19 nt, Homo sapiens
  misc_RNA (1)...(19): siRNA sense strand
ggaacccuuuugaugauuu

SEQ ID NO: 648483 - RNA, 19 nt, Homo sapiens
  misc_RNA (1)...(19): siRNA sense strand
aacacaggcuggaggagaa

SEQ ID NO: 648484 - RNA, 19 nt, Homo sapiens
  misc_RNA (1)...(19): siRNA sense strand
gcaaaccagccagcaagga

SEQ ID NO: 648485 - RNA, 19 nt, Homo sapiens
  misc_RNA (1)...(19): siRNA sense strand
ucugaagaugccacaauua

SEQ ID NO: 648486 - RNA, 19 nt, Homo sapiens
  misc_RNA (1)...(19): siRNA sense strand
gcaccagacagggaaguug

SEQ ID NO: 648487 - RNA, 19 nt, Homo sapiens
  misc_RNA (1)...(19): siRNA sense strand
gaggagaagaugccaaggu

SEQ ID NO: 648488 - RNA, 19 nt, Homo sapiens
  misc_RNA (1)...(19): siRNA sense strand
ccaaagacagagaaugagu

SEQ ID NO: 648489 - RNA, 19 nt, Homo sapiens
  misc_RNA (1)...(19): siRNA sense strand
gaacccuuuugaugauuuu

SEQ ID NO: 648490 - RNA, 19 nt, Homo sapiens
  misc_RNA (1)...(19): siRNA sense strand
aagaaaaccuggcugacaa

SEQ ID NO: 648491 - RNA, 19 nt, Homo sapiens
  misc_RNA (1)...(19): siRNA sense strand
gaagaaaaccuggcugaca

SEQ ID NO: 648492 - RNA, 19 nt, Homo sapiens
  misc_RNA (1)...(19): siRNA sense strand
ugagaucgccuccuguucu

SEQ ID NO: 648493 - RNA, 19 nt, Homo sapiens
  misc_RNA (1)...(19): siRNA sense strand
ccgcaagauucggguuauu

SEQ ID NO: 648494 - RNA, 19 nt, Homo sapiens
  misc_RNA (1)...(19): siRNA sense strand
ucacgacaaccacuucugu

SEQ ID NO: 648495 - RNA, 19 nt, Homo sapiens
  misc_RNA (1)...(19): siRNA sense strand
ggaugaaucgagacccaau

SEQ ID NO: 648496 - RNA, 19 nt, Homo sapiens
  misc_RNA (1)...(19): siRNA sense strand
acaagcugaucacaaccaa

SEQ ID NO: 648497 - RNA, 19 nt, Homo sapiens
  misc_RNA (1)...(19): siRNA sense strand
gauacaaaggagucuguca

SEQ ID NO: 648498 - RNA, 19 nt, Homo sapiens
  misc_RNA (1)...(19): siRNA sense strand
cuaccaagaggacauauac

SEQ ID NO: 648499 - RNA, 19 nt, Homo sapiens
  misc_RNA (1)...(19): siRNA sense strand
gcuccuauaacccacagaa

SEQ ID NO: 648500 - RNA, 19 nt, Homo sapiens
  misc_RNA (1)...(19): siRNA sense strand
guaccggagcuccaaguuc

SEQ ID NO: 648501 - RNA, 19 nt, Homo sapiens
  misc_RNA (1)...(19): siRNA sense strand
caaaggagucugucaucac

SEQ ID NO: 648502 - RNA, 19 nt, Homo sapiens
  misc_RNA (1)...(19): siRNA sense strand
gagagguccaggccaaaca

SEQ ID NO: 648503 - RNA, 19 nt, Homo sapiens
  misc_RNA (1)...(19): siRNA sense strand
augaguugcugcagauguu

SEQ ID NO: 648504 - RNA, 19 nt, Homo sapiens
  misc_RNA (1)...(19): siRNA sense strand
gucagaauccuaccaagag

SEQ ID NO: 648505 - RNA, 19 nt, Homo sapiens
  misc_RNA (1)...(19): siRNA sense strand
gcaacauccgcuacuacga

SEQ ID NO: 648506 - RNA, 19 nt, Homo sapiens
  misc_RNA (1)...(19): siRNA sense strand
guucugaagaugccacaau

SEQ ID NO: 648507 - RNA, 19 nt, Homo sapiens
  misc_RNA (1)...(19): siRNA sense strand
ccauguccuucaacaccaa

SEQ ID NO: 648508 - RNA, 19 nt, Homo sapiens
  misc_RNA (1)...(19): siRNA sense strand
acuacaaggugaugaucug

SEQ ID NO: 648509 - RNA, 19 nt, Homo sapiens
  misc_RNA (1)...(19): siRNA sense strand
ugaagaugccacaauuaag

SEQ ID NO: 648510 - RNA, 19 nt, Homo sapiens
  misc_RNA (1)...(19): siRNA sense strand
uucugaagaugccacaauu

SEQ ID NO: 648511 - RNA, 19 nt, Homo sapiens
  misc_RNA (1)...(19): siRNA sense strand
caaggugggcagcagaaca

SEQ ID NO: 648512 - RNA, 19 nt, Homo sapiens
  misc_RNA (1)...(19): siRNA sense strand
ggaaccuggauacaaagga

SEQ ID NO: 648513 - RNA, 19 nt, Homo sapiens
  misc_RNA (1)...(19): siRNA sense strand
ugcaaagaccgcaagauuc

SEQ ID NO: 648514 - RNA, 19 nt, Homo sapiens
  misc_RNA (1)...(19): siRNA sense strand
ccgcagcguucacgacaac

SEQ ID NO: 648515 - RNA, 19 nt, Homo sapiens
  misc_RNA (1)...(19): siRNA sense strand
gaggcaacguuuuggaugu

SEQ ID NO: 648516 - RNA, 19 nt, Homo sapiens
  misc_RNA (1)...(19): siRNA sense strand
ugcgagaucuuccgcuucu

SEQ ID NO: 648517 - RNA, 19 nt, Homo sapiens
  misc_RNA (1)...(19): siRNA sense strand
gaagaugccacaauuaaga

SEQ ID NO: 648518 - RNA, 19 nt, Homo sapiens
  misc_RNA (1)...(19): siRNA sense strand
caaguuccgucaugucuuu

SEQ ID NO: 648519 - RNA, 19 nt, Homo sapiens
  misc_RNA (1)...(19): siRNA sense strand
gagcccaucuccaugauug

SEQ ID NO: 648520 - RNA, 19 nt, Homo sapiens
  misc_RNA (1)...(19): siRNA sense strand
ugagcuaccugacugagua

SEQ ID NO: 648521 - RNA, 19 nt, Homo sapiens
  misc_RNA (1)...(19): siRNA sense strand
gcagagagaccuaucuuca

SEQ ID NO: 648522 - RNA, 19 nt, Homo sapiens
  misc_RNA (1)...(19): siRNA sense strand
ggacauauacccuccaaca

SEQ ID NO: 648523 - RNA, 19 nt, Homo sapiens
  misc_RNA (1)...(19): siRNA sense strand
aaaccuggcugacaaaugg

SEQ ID NO: 648524 - RNA, 19 nt, Homo sapiens
  misc_RNA (1)...(19): siRNA sense strand
agagagaccuaucuucaau

SEQ ID NO: 648525 - RNA, 19 nt, Homo sapiens
  misc_RNA (1)...(19): siRNA sense strand
ucuggaaccuggauacaaa

SEQ ID NO: 648526 - RNA, 19 nt, Homo sapiens
  misc_RNA (1)...(19): siRNA sense strand
gcaagauucggguuauuga

SEQ ID NO: 648527 - RNA, 19 nt, Homo sapiens
  misc_RNA (1)...(19): siRNA sense strand
gaugugauccucuccaugu

SEQ ID NO: 648528 - RNA, 19 nt, Homo sapiens
  misc_RNA (1)...(19): siRNA sense strand
gcaaagaccgcaagauucg

SEQ ID NO: 648529 - RNA, 19 nt, Homo sapiens
  misc_RNA (1)...(19): siRNA sense strand
caccaaagacagagaauga

SEQ ID NO: 648530 - RNA, 19 nt, Homo sapiens
  misc_RNA (1)...(19): siRNA sense strand
gauuagcugucaccaagau

SEQ ID NO: 648531 - RNA, 19 nt, Homo sapiens
  misc_RNA (1)...(19): siRNA sense strand
aaaggagucugucaucaca

SEQ ID NO: 648532 - RNA, 19 nt, Homo sapiens
  misc_RNA (1)...(19): siRNA sense strand
aaagcuggcugcagaagau

SEQ ID NO: 648533 - RNA, 19 nt, Homo sapiens
  misc_RNA (1)...(19): siRNA sense strand
agaaugaguugcugcagau

SEQ ID NO: 648534 - RNA, 19 nt, Homo sapiens
  misc_RNA (1)...(19): siRNA sense strand
cugaagaugccacaauuaa

SEQ ID NO: 648535 - RNA, 19 nt, Homo sapiens
  misc_RNA (1)...(19): siRNA sense strand
agagaccuaucuucaauuc

SEQ ID NO: 648536 - RNA, 19 nt, Homo sapiens
  misc_RNA (1)...(19): siRNA sense strand
ggaccaggauaaccucucu

SEQ ID NO: 648537 - RNA, 19 nt, Homo sapiens
  misc_RNA (1)...(19): siRNA sense strand
gggcacagaggcaacguuu

SEQ ID NO: 648538 - RNA, 19 nt, Homo sapiens
  misc_RNA (1)...(19): siRNA sense strand
acaaggugaugaucuggaa

SEQ ID NO: 648539 - RNA, 19 nt, Homo sapiens
  misc_RNA (1)...(19): siRNA sense strand
gcucuugaaucagacagaa

SEQ ID NO: 648540 - RNA, 19 nt, Homo sapiens
  misc_RNA (1)...(19): siRNA sense strand
gcacagaggcaacguuuug

SEQ ID NO: 648541 - RNA, 19 nt, Homo sapiens
  misc_RNA (1)...(19): siRNA sense strand
caaagacagagaaugaguu

SEQ ID NO: 648542 - RNA, 19 nt, Homo sapiens
  misc_RNA (1)...(19): siRNA sense strand
gagaucgccuccuguucug

SEQ ID NO: 648543 - RNA, 19 nt, Homo sapiens
  misc_RNA (1)...(19): siRNA sense strand
cugcaaagaccgcaagauu

SEQ ID NO: 648544 - RNA, 19 nt, Homo sapiens
  misc_RNA (1)...(19): siRNA sense strand
ggaucggugucaugccaaa

SEQ ID NO: 648545 - RNA, 19 nt, Homo sapiens
  misc_RNA (1)...(19): siRNA sense strand
cugaguaccgcuccuauaa

SEQ ID NO: 648546 - RNA, 19 nt, Homo sapiens
  misc_RNA (1)...(19): siRNA sense strand
ccacuucauugcaguugug

SEQ ID NO: 648547 - RNA, 19 nt, Homo sapiens
  misc_RNA (1)...(19): siRNA sense strand
ccaggaggccagcuacaaa

SEQ ID NO: 648548 - RNA, 19 nt, Homo sapiens
  misc_RNA (1)...(19): siRNA sense strand
caauuaagaucuggagcau

SEQ ID NO: 648549 - RNA, 19 nt, Homo sapiens
  misc_RNA (1)...(19): siRNA sense strand
acaaaggagucugucauca

SEQ ID NO: 648550 - RNA, 19 nt, Homo sapiens
  misc_RNA (1)...(19): siRNA sense strand
gcaaggagaacugcuacga

SEQ ID NO: 648551 - RNA, 19 nt, Homo sapiens
  misc_RNA (1)...(19): siRNA sense strand
ugaguacgauuagcuguca

SEQ ID NO: 648552 - RNA, 19 nt, Homo sapiens
  misc_RNA (1)...(19): siRNA sense strand
agaccuaucuucaauucca

SEQ ID NO: 648553 - RNA, 19 nt, Homo sapiens
  misc_RNA (1)...(19): siRNA sense strand
gaccgcaagauucggguua

SEQ ID NO: 648554 - RNA, 19 nt, Homo sapiens
  misc_RNA (1)...(19): siRNA sense strand
ucuacaagcugaucacaac

SEQ ID NO: 648555 - RNA, 19 nt, Homo sapiens
  misc_RNA (1)...(19): siRNA sense strand
gagagaccuaucuucaauu

SEQ ID NO: 648556 - RNA, 19 nt, Homo sapiens
  misc_RNA (1)...(19): siRNA sense strand
aaagacagagaaugaguug

SEQ ID NO: 648557 - RNA, 19 nt, Homo sapiens
  misc_RNA (1)...(19): siRNA sense strand
gguccaggccaaacaguug

SEQ ID NO: 648558 - RNA, 19 nt, Homo sapiens
  misc_RNA (1)...(19): siRNA sense strand
gaucgccuccuguucugaa

SEQ ID NO: 648559 - RNA, 19 nt, Homo sapiens
  misc_RNA (1)...(19): siRNA sense strand
cagagagaccuaucuucaa

SEQ ID NO: 648560 - RNA, 19 nt, Homo sapiens
  misc_RNA (1)...(19): siRNA sense strand
ccaauccuggugucccuua

SEQ ID NO: 648561 - RNA, 19 nt, Homo sapiens
  misc_RNA (1)...(19): siRNA sense strand
ccacuucugugccgugaac

SEQ ID NO: 648562 - RNA, 19 nt, Homo sapiens
  misc_RNA (1)...(19): siRNA sense strand
gcuccaaguuccgucaugu

SEQ ID NO: 648563 - RNA, 19 nt, Homo sapiens
  misc_RNA (1)...(19): siRNA sense strand
ccucuucagugcuggcuau

SEQ ID NO: 648564 - RNA, 19 nt, Homo sapiens
  misc_RNA (1)...(19): siRNA sense strand
gaucuuccgcuucuacaag

SEQ ID NO: 648565 - RNA, 19 nt, Homo sapiens
  misc_RNA (1)...(19): siRNA sense strand
gaguaccgcuccuauaacc

SEQ ID NO: 648566 - RNA, 19 nt, Homo sapiens
  misc_RNA (1)...(19): siRNA sense strand
ggaacccuuuugaugauuu

SEQ ID NO: 648567 - RNA, 19 nt, Homo sapiens
  misc_RNA (1)...(19): siRNA sense strand
aacacaggcuggaggagaa

SEQ ID NO: 648568 - RNA, 19 nt, Homo sapiens
  misc_RNA (1)...(19): siRNA sense strand
gcaaaccagccagcaagga

SEQ ID NO: 648569 - RNA, 19 nt, Homo sapiens
  misc_RNA (1)...(19): siRNA sense strand
ucugaagaugccacaauua

SEQ ID NO: 648570 - RNA, 19 nt, Homo sapiens
  misc_RNA (1)...(19): siRNA sense strand
gcaccagacagggaaguug

SEQ ID NO: 648571 - RNA, 19 nt, Homo sapiens
  misc_RNA (1)...(19): siRNA sense strand
gaggagaagaugccaaggu

SEQ ID NO: 648572 - RNA, 19 nt, Homo sapiens
  misc_RNA (1)...(19): siRNA sense strand
ccaaagacagagaaugagu

SEQ ID NO: 648573 - RNA, 19 nt, Homo sapiens
  misc_RNA (1)...(19): siRNA sense strand
gaacccuuuugaugauuuu

SEQ ID NO: 648574 - RNA, 19 nt, Homo sapiens
  misc_RNA (1)...(19): siRNA sense strand
aagaaaaccuggcugacaa

SEQ ID NO: 648575 - RNA, 19 nt, Homo sapiens
  misc_RNA (1)...(19): siRNA sense strand
gaagaaaaccuggcugaca

SEQ ID NO: 648576 - RNA, 19 nt, Homo sapiens
  misc_RNA (1)...(19): siRNA sense strand
ugagaucgccuccuguucu

SEQ ID NO: 648577 - RNA, 19 nt, Homo sapiens
  misc_RNA (1)...(19): siRNA sense strand
ccgcaagauucggguuauu

SEQ ID NO: 648578 - RNA, 19 nt, Homo sapiens
  misc_RNA (1)...(19): siRNA sense strand
ucacgacaaccacuucugu

SEQ ID NO: 648579 - RNA, 19 nt, Homo sapiens
  misc_RNA (1)...(19): siRNA sense strand
ggaugaaucgagacccaau

SEQ ID NO: 648580 - RNA, 19 nt, Homo sapiens
  misc_RNA (1)...(19): siRNA sense strand
acaagcugaucacaaccaa

SEQ ID NO: 648581 - RNA, 19 nt, Homo sapiens
  misc_RNA (1)...(19): siRNA sense strand
gauacaaaggagucuguca

SEQ ID NO: 648582 - RNA, 19 nt, Homo sapiens
  misc_RNA (1)...(19): siRNA sense strand
cuaccaagaggacauauac

SEQ ID NO: 648583 - RNA, 19 nt, Homo sapiens
  misc_RNA (1)...(19): siRNA sense strand
gcuccuauaacccacagaa

SEQ ID NO: 648584 - RNA, 19 nt, Homo sapiens
  misc_RNA (1)...(19): siRNA sense strand
guaccggagcuccaaguuc

SEQ ID NO: 648585 - RNA, 19 nt, Homo sapiens
  misc_RNA (1)...(19): siRNA sense strand
caaaggagucugucaucac

SEQ ID NO: 648586 - RNA, 19 nt, Homo sapiens
  misc_RNA (1)...(19): siRNA sense strand
gagagguccaggccaaaca

SEQ ID NO: 648587 - RNA, 19 nt, Homo sapiens
  misc_RNA (1)...(19): siRNA sense strand
augaguugcugcagauguu

SEQ ID NO: 648588 - RNA, 19 nt, Homo sapiens
  misc_RNA (1)...(19): siRNA sense strand
gucagaauccuaccaagag

SEQ ID NO: 648589 - RNA, 19 nt, Homo sapiens
  misc_RNA (1)...(19): siRNA sense strand
gcaacauccgcuacuacga

SEQ ID NO: 648590 - RNA, 19 nt, Homo sapiens
  misc_RNA (1)...(19): siRNA sense strand
guucugaagaugccacaau

SEQ ID NO: 648591 - RNA, 19 nt, Homo sapiens
  misc_RNA (1)...(19): siRNA sense strand
ccauguccuucaacaccaa

SEQ ID NO: 648592 - RNA, 19 nt, Homo sapiens
  misc_RNA (1)...(19): siRNA sense strand
acuacaaggugaugaucug

SEQ ID NO: 648593 - RNA, 19 nt, Homo sapiens
  misc_RNA (1)...(19): siRNA sense strand
ugaagaugccacaauuaag

SEQ ID NO: 648594 - RNA, 19 nt, Homo sapiens
  misc_RNA (1)...(19): siRNA sense strand
uucugaagaugccacaauu

SEQ ID NO: 648595 - RNA, 19 nt, Homo sapiens
  misc_RNA (1)...(19): siRNA sense strand
caaggugggcagcagaaca

SEQ ID NO: 648596 - RNA, 19 nt, Homo sapiens
  misc_RNA (1)...(19): siRNA sense strand
ggaaccuggauacaaagga

SEQ ID NO: 648597 - RNA, 19 nt, Homo sapiens
  misc_RNA (1)...(19): siRNA sense strand
ugcaaagaccgcaagauuc

SEQ ID NO: 648598 - RNA, 19 nt, Homo sapiens
  misc_RNA (1)...(19): siRNA sense strand
ccgcagcguucacgacaac

SEQ ID NO: 648599 - RNA, 19 nt, Homo sapiens
  misc_RNA (1)...(19): siRNA sense strand
gaggcaacguuuuggaugu

SEQ ID NO: 648600 - RNA, 19 nt, Homo sapiens
  misc_RNA (1)...(19): siRNA sense strand
ugcgagaucuuccgcuucu

SEQ ID NO: 648601 - RNA, 19 nt, Homo sapiens
  misc_RNA (1)...(19): siRNA sense strand
ggaagugccugaagacgua

SEQ ID NO: 648602 - RNA, 19 nt, Homo sapiens
  misc_RNA (1)...(19): siRNA sense strand
cgaaagagauuguacagaa

SEQ ID NO: 648603 - RNA, 19 nt, Homo sapiens
  misc_RNA (1)...(19): siRNA sense strand
gaaagagauuguacagaaa

SEQ ID NO: 648604 - RNA, 19 nt, Homo sapiens
  misc_RNA (1)...(19): siRNA sense strand
gagaguggcuggcaaguuc

SEQ ID NO: 648605 - RNA, 19 nt, Homo sapiens
  misc_RNA (1)...(19): siRNA sense strand
gauggauccuugauaguuu

SEQ ID NO: 648606 - RNA, 19 nt, Homo sapiens
  misc_RNA (1)...(19): siRNA sense strand
gcaaguucaucugcugaua

SEQ ID NO: 648607 - RNA, 19 nt, Homo sapiens
  misc_RNA (1)...(19): siRNA sense strand
ccacacagaugucgugauc

SEQ ID NO: 648608 - RNA, 19 nt, Homo sapiens
  misc_RNA (1)...(19): siRNA sense strand
gacaaaaccuugaagauau

SEQ ID NO: 648609 - RNA, 19 nt, Homo sapiens
  misc_RNA (1)...(19): siRNA sense strand
gaagggacacaguaauuau

SEQ ID NO: 648610 - RNA, 19 nt, Homo sapiens
  misc_RNA (1)...(19): siRNA sense strand
gauucuaaccuucuuguuu

SEQ ID NO: 648611 - RNA, 19 nt, Homo sapiens
  misc_RNA (1)...(19): siRNA sense strand
gacgaaagcgugaggauau

SEQ ID NO: 648612 - RNA, 19 nt, Homo sapiens
  misc_RNA (1)...(19): siRNA sense strand
ugaagggacacaguaauua

SEQ ID NO: 648613 - RNA, 19 nt, Homo sapiens
  misc_RNA (1)...(19): siRNA sense strand
gaggauaugggaugugaaa

SEQ ID NO: 648614 - RNA, 19 nt, Homo sapiens
  misc_RNA (1)...(19): siRNA sense strand
gccacaagaaugagaaaua

SEQ ID NO: 648615 - RNA, 19 nt, Homo sapiens
  misc_RNA (1)...(19): siRNA sense strand
gaaugagaaauacugcaua

SEQ ID NO: 648616 - RNA, 19 nt, Homo sapiens
  misc_RNA (1)...(19): siRNA sense strand
ccacaagaaugagaaauac

SEQ ID NO: 648617 - RNA, 19 nt, Homo sapiens
  misc_RNA (1)...(19): siRNA sense strand
cagaggauaaccuuguuua

SEQ ID NO: 648618 - RNA, 19 nt, Homo sapiens
  misc_RNA (1)...(19): siRNA sense strand
ggauaaccuuguuuacauc

SEQ ID NO: 648619 - RNA, 19 nt, Homo sapiens
  misc_RNA (1)...(19): siRNA sense strand
gccaaacuaugcucuaaag

SEQ ID NO: 648620 - RNA, 19 nt, Homo sapiens
  misc_RNA (1)...(19): siRNA sense strand
guggaagagugacugcuaa

SEQ ID NO: 648621 - RNA, 19 nt, Homo sapiens
  misc_RNA (1)...(19): siRNA sense strand
ggugggaaguggauugugu

SEQ ID NO: 648622 - RNA, 19 nt, Homo sapiens
  misc_RNA (1)...(19): siRNA sense strand
caauuaaacuguggaagag

SEQ ID NO: 648623 - RNA, 19 nt, Homo sapiens
  misc_RNA (1)...(19): siRNA sense strand
caaguucaucugcugauaa

SEQ ID NO: 648624 - RNA, 19 nt, Homo sapiens
  misc_RNA (1)...(19): siRNA sense strand
gugaggauaugggauguga

SEQ ID NO: 648625 - RNA, 19 nt, Homo sapiens
  misc_RNA (1)...(19): siRNA sense strand
gaggauaaccuuguuuaca

SEQ ID NO: 648626 - RNA, 19 nt, Homo sapiens
  misc_RNA (1)...(19): siRNA sense strand
cuacaccugugaagccaaa

SEQ ID NO: 648627 - RNA, 19 nt, Homo sapiens
  misc_RNA (1)...(19): siRNA sense strand
acaauuaaacuguggaaga

SEQ ID NO: 648628 - RNA, 19 nt, Homo sapiens
  misc_RNA (1)...(19): siRNA sense strand
aggauaaccuuguuuacau

SEQ ID NO: 648629 - RNA, 19 nt, Homo sapiens
  misc_RNA (1)...(19): siRNA sense strand
cgugauggauccuugauag

SEQ ID NO: 648630 - RNA, 19 nt, Homo sapiens
  misc_RNA (1)...(19): siRNA sense strand
acagggaagugccucaaga

SEQ ID NO: 648631 - RNA, 19 nt, Homo sapiens
  misc_RNA (1)...(19): siRNA sense strand
gaaacuacaaggccacaca

SEQ ID NO: 648632 - RNA, 19 nt, Homo sapiens
  misc_RNA (1)...(19): siRNA sense strand
gcucagaggauaaccuugu

SEQ ID NO: 648633 - RNA, 19 nt, Homo sapiens
  misc_RNA (1)...(19): siRNA sense strand
gaagccaaacuaugcucua

SEQ ID NO: 648634 - RNA, 19 nt, Homo sapiens
  misc_RNA (1)...(19): siRNA sense strand
aaguucaucugcugauaaa

SEQ ID NO: 648635 - RNA, 19 nt, Homo sapiens
  misc_RNA (1)...(19): siRNA sense strand
cuacaaggccacacagaug

SEQ ID NO: 648636 - RNA, 19 nt, Homo sapiens
  misc_RNA (1)...(19): siRNA sense strand
gcaguguccuccgugaaau

SEQ ID NO: 648637 - RNA, 19 nt, Homo sapiens
  misc_RNA (1)...(19): siRNA sense strand
cugcauauuugccaauuuc

SEQ ID NO: 648638 - RNA, 19 nt, Homo sapiens
  misc_RNA (1)...(19): siRNA sense strand
ugacaaaaccuugaagaua

SEQ ID NO: 648639 - RNA, 19 nt, Homo sapiens
  misc_RNA (1)...(19): siRNA sense strand
acacuggccacaagaauga

SEQ ID NO: 648640 - RNA, 19 nt, Homo sapiens
  misc_RNA (1)...(19): siRNA sense strand
gcuagaaaaugacaaaaca

SEQ ID NO: 648641 - RNA, 19 nt, Homo sapiens
  misc_RNA (1)...(19): siRNA sense strand
aagccaaacuaugcucuaa

SEQ ID NO: 648642 - RNA, 19 nt, Homo sapiens
  misc_RNA (1)...(19): siRNA sense strand
gacguacacuggccacaag

SEQ ID NO: 648643 - RNA, 19 nt, Homo sapiens
  misc_RNA (1)...(19): siRNA sense strand
gucgugaucucaacagcuu

SEQ ID NO: 648644 - RNA, 19 nt, Homo sapiens
  misc_RNA (1)...(19): siRNA sense strand
ggucacaagcugggaauau

SEQ ID NO: 648645 - RNA, 19 nt, Homo sapiens
  misc_RNA (1)...(19): siRNA sense strand
ugacgaaagcgugaggaua

SEQ ID NO: 648646 - RNA, 19 nt, Homo sapiens
  misc_RNA (1)...(19): siRNA sense strand
auucuaaccuucuuguuuc

SEQ ID NO: 648647 - RNA, 19 nt, Homo sapiens
  misc_RNA (1)...(19): siRNA sense strand
uagcuaugauggucucugu

SEQ ID NO: 648648 - RNA, 19 nt, Homo sapiens
  misc_RNA (1)...(19): siRNA sense strand
gaugggaaauuugagaaaa

SEQ ID NO: 648649 - RNA, 19 nt, Homo sapiens
  misc_RNA (1)...(19): siRNA sense strand
ggagaguggcuggcaaguu

SEQ ID NO: 648650 - RNA, 19 nt, Homo sapiens
  misc_RNA (1)...(19): siRNA sense strand
cguaugaugggaaauuuga

SEQ ID NO: 648651 - RNA, 19 nt, Homo sapiens
  misc_RNA (1)...(19): siRNA sense strand
gcuugucacccaacagaaa

SEQ ID NO: 648652 - RNA, 19 nt, Homo sapiens
  misc_RNA (1)...(19): siRNA sense strand
gcgcguaugaugggaaauu

SEQ ID NO: 648653 - RNA, 19 nt, Homo sapiens
  misc_RNA (1)...(19): siRNA sense strand
guagccuggucgucagauu

SEQ ID NO: 648654 - RNA, 19 nt, Homo sapiens
  misc_RNA (1)...(19): siRNA sense strand
gccaauuucucuguuacug

SEQ ID NO: 648655 - RNA, 19 nt, Homo sapiens
  misc_RNA (1)...(19): siRNA sense strand
guacacuggccacaagaau

SEQ ID NO: 648656 - RNA, 19 nt, Homo sapiens
  misc_RNA (1)...(19): siRNA sense strand
ugauggauccuugauaguu

SEQ ID NO: 648657 - RNA, 19 nt, Homo sapiens
  misc_RNA (1)...(19): siRNA sense strand
gucacaagcugggaauauc

SEQ ID NO: 648658 - RNA, 19 nt, Homo sapiens
  misc_RNA (1)...(19): siRNA sense strand
gauaugggaugugaaaaca

SEQ ID NO: 648659 - RNA, 19 nt, Homo sapiens
  misc_RNA (1)...(19): siRNA sense strand
ucaggauccuuugacgaaa

SEQ ID NO: 648660 - RNA, 19 nt, Homo sapiens
  misc_RNA (1)...(19): siRNA sense strand
cugaagggacacaguaauu

SEQ ID NO: 648661 - RNA, 19 nt, Homo sapiens
  misc_RNA (1)...(19): siRNA sense strand
gucgucagauucuaaccuu

SEQ ID NO: 648662 - RNA, 19 nt, Homo sapiens
  misc_RNA (1)...(19): siRNA sense strand
ggaaccuucagacgaaaga

SEQ ID NO: 648663 - RNA, 19 nt, Homo sapiens
  misc_RNA (1)...(19): siRNA sense strand
gcugggaauauccgaugua

SEQ ID NO: 648664 - RNA, 19 nt, Homo sapiens
  misc_RNA (1)...(19): siRNA sense strand
gagauuguacagaaacuac

SEQ ID NO: 648665 - RNA, 19 nt, Homo sapiens
  misc_RNA (1)...(19): siRNA sense strand
acaagaaugagaaauacug

SEQ ID NO: 648666 - RNA, 19 nt, Homo sapiens
  misc_RNA (1)...(19): siRNA sense strand
cagcuugucacccaacaga

SEQ ID NO: 648667 - RNA, 19 nt, Homo sapiens
  misc_RNA (1)...(19): siRNA sense strand
uuugccaauuucucuguua

SEQ ID NO: 648668 - RNA, 19 nt, Homo sapiens
  misc_RNA (1)...(19): siRNA sense strand
cgcguaugaugggaaauuu

SEQ ID NO: 648669 - RNA, 19 nt, Homo sapiens
  misc_RNA (1)...(19): siRNA sense strand
guucaucugcugauaaacu

SEQ ID NO: 648670 - RNA, 19 nt, Homo sapiens
  misc_RNA (1)...(19): siRNA sense strand
gcaagccuacaccugugaa

SEQ ID NO: 648671 - RNA, 19 nt, Homo sapiens
  misc_RNA (1)...(19): siRNA sense strand
guccaaccuuauugucuca

SEQ ID NO: 648672 - RNA, 19 nt, Homo sapiens
  misc_RNA (1)...(19): siRNA sense strand
cauauuugccaauuucucu

SEQ ID NO: 648673 - RNA, 19 nt, Homo sapiens
  misc_RNA (1)...(19): siRNA sense strand
ucagaggauaaccuuguuu

SEQ ID NO: 648674 - RNA, 19 nt, Homo sapiens
  misc_RNA (1)...(19): siRNA sense strand
cugcugcgcuagaaaauga

SEQ ID NO: 648675 - RNA, 19 nt, Homo sapiens
  misc_RNA (1)...(19): siRNA sense strand
acaaaaccuugaagauaug

SEQ ID NO: 648676 - RNA, 19 nt, Homo sapiens
  misc_RNA (1)...(19): siRNA sense strand
uaugaugggaaauuugaga

SEQ ID NO: 648677 - RNA, 19 nt, Homo sapiens
  misc_RNA (1)...(19): siRNA sense strand
gauaaccuuguuuacaucu

SEQ ID NO: 648678 - RNA, 19 nt, Homo sapiens
  misc_RNA (1)...(19): siRNA sense strand
cucaggauccuuugacgaa

SEQ ID NO: 648679 - RNA, 19 nt, Homo sapiens
  misc_RNA (1)...(19): siRNA sense strand
ggaagugccugaagacgua

SEQ ID NO: 648680 - RNA, 19 nt, Homo sapiens
  misc_RNA (1)...(19): siRNA sense strand
cgaaagagauuguacagaa

SEQ ID NO: 648681 - RNA, 19 nt, Homo sapiens
  misc_RNA (1)...(19): siRNA sense strand
gaaagagauuguacagaaa

SEQ ID NO: 648682 - RNA, 19 nt, Homo sapiens
  misc_RNA (1)...(19): siRNA sense strand
gagaguggcuggcaaguuc

SEQ ID NO: 648683 - RNA, 19 nt, Homo sapiens
  misc_RNA (1)...(19): siRNA sense strand
gauggauccuugauaguuu

SEQ ID NO: 648684 - RNA, 19 nt, Homo sapiens
  misc_RNA (1)...(19): siRNA sense strand
gcaaguucaucugcugaua

SEQ ID NO: 648685 - RNA, 19 nt, Homo sapiens
  misc_RNA (1)...(19): siRNA sense strand
ccacacagaugucgugauc

SEQ ID NO: 648686 - RNA, 19 nt, Homo sapiens
  misc_RNA (1)...(19): siRNA sense strand
gacaaaaccuugaagauau

SEQ ID NO: 648687 - RNA, 19 nt, Homo sapiens
  misc_RNA (1)...(19): siRNA sense strand
gaagggacacaguaauuau

SEQ ID NO: 648688 - RNA, 19 nt, Homo sapiens
  misc_RNA (1)...(19): siRNA sense strand
gauucuaaccuucuuguuu

SEQ ID NO: 648689 - RNA, 19 nt, Homo sapiens
  misc_RNA (1)...(19): siRNA sense strand
gacgaaagcgugaggauau

SEQ ID NO: 648690 - RNA, 19 nt, Homo sapiens
  misc_RNA (1)...(19): siRNA sense strand
ugaagggacacaguaauua

SEQ ID NO: 648691 - RNA, 19 nt, Homo sapiens
  misc_RNA (1)...(19): siRNA sense strand
gaggauaugggaugugaaa

SEQ ID NO: 648692 - RNA, 19 nt, Homo sapiens
  misc_RNA (1)...(19): siRNA sense strand
gccacaagaaugagaaaua

SEQ ID NO: 648693 - RNA, 19 nt, Homo sapiens
  misc_RNA (1)...(19): siRNA sense strand
gaaugagaaauacugcaua

SEQ ID NO: 648694 - RNA, 19 nt, Homo sapiens
  misc_RNA (1)...(19): siRNA sense strand
ccacaagaaugagaaauac

SEQ ID NO: 648695 - RNA, 19 nt, Homo sapiens
  misc_RNA (1)...(19): siRNA sense strand
cagaggauaaccuuguuua

SEQ ID NO: 648696 - RNA, 19 nt, Homo sapiens
  misc_RNA (1)...(19): siRNA sense strand
ggauaaccuuguuuacauc

SEQ ID NO: 648697 - RNA, 19 nt, Homo sapiens
  misc_RNA (1)...(19): siRNA sense strand
gccaaacuaugcucuaaag

SEQ ID NO: 648698 - RNA, 19 nt, Homo sapiens
  misc_RNA (1)...(19): siRNA sense strand
guggaagagugacugcuaa

SEQ ID NO: 648699 - RNA, 19 nt, Homo sapiens
  misc_RNA (1)...(19): siRNA sense strand
ggugggaaguggauugugu

SEQ ID NO: 648700 - RNA, 19 nt, Homo sapiens
  misc_RNA (1)...(19): siRNA sense strand
caauuaaacuguggaagag

SEQ ID NO: 648701 - RNA, 19 nt, Homo sapiens
  misc_RNA (1)...(19): siRNA sense strand
caaguucaucugcugauaa

SEQ ID NO: 648702 - RNA, 19 nt, Homo sapiens
  misc_RNA (1)...(19): siRNA sense strand
gugaggauaugggauguga

SEQ ID NO: 648703 - RNA, 19 nt, Homo sapiens
  misc_RNA (1)...(19): siRNA sense strand
gaggauaaccuuguuuaca

SEQ ID NO: 648704 - RNA, 19 nt, Homo sapiens
  misc_RNA (1)...(19): siRNA sense strand
cuacaccugugaagccaaa

SEQ ID NO: 648705 - RNA, 19 nt, Homo sapiens
  misc_RNA (1)...(19): siRNA sense strand
acaauuaaacuguggaaga

SEQ ID NO: 648706 - RNA, 19 nt, Homo sapiens
  misc_RNA (1)...(19): siRNA sense strand
aggauaaccuuguuuacau

SEQ ID NO: 648707 - RNA, 19 nt, Homo sapiens
  misc_RNA (1)...(19): siRNA sense strand
cgugauggauccuugauag

SEQ ID NO: 648708 - RNA, 19 nt, Homo sapiens
  misc_RNA (1)...(19): siRNA sense strand
acagggaagugccucaaga

SEQ ID NO: 648709 - RNA, 19 nt, Homo sapiens
  misc_RNA (1)...(19): siRNA sense strand
gaaacuacaaggccacaca

SEQ ID NO: 648710 - RNA, 19 nt, Homo sapiens
  misc_RNA (1)...(19): siRNA sense strand
gcucagaggauaaccuugu

SEQ ID NO: 648711 - RNA, 19 nt, Homo sapiens
  misc_RNA (1)...(19): siRNA sense strand
gaagccaaacuaugcucua

SEQ ID NO: 648712 - RNA, 19 nt, Homo sapiens
  misc_RNA (1)...(19): siRNA sense strand
aaguucaucugcugauaaa

SEQ ID NO: 648713 - RNA, 19 nt, Homo sapiens
  misc_RNA (1)...(19): siRNA sense strand
cuacaaggccacacagaug

SEQ ID NO: 648714 - RNA, 19 nt, Homo sapiens
  misc_RNA (1)...(19): siRNA sense strand
gcaguguccuccgugaaau

SEQ ID NO: 648715 - RNA, 19 nt, Homo sapiens
  misc_RNA (1)...(19): siRNA sense strand
cugcauauuugccaauuuc

SEQ ID NO: 648716 - RNA, 19 nt, Homo sapiens
  misc_RNA (1)...(19): siRNA sense strand
ugacaaaaccuugaagaua

SEQ ID NO: 648717 - RNA, 19 nt, Homo sapiens
  misc_RNA (1)...(19): siRNA sense strand
acacuggccacaagaauga

SEQ ID NO: 648718 - RNA, 19 nt, Homo sapiens
  misc_RNA (1)...(19): siRNA sense strand
gcuagaaaaugacaaaaca

SEQ ID NO: 648719 - RNA, 19 nt, Homo sapiens
  misc_RNA (1)...(19): siRNA sense strand
aagccaaacuaugcucuaa

SEQ ID NO: 648720 - RNA, 19 nt, Homo sapiens
  misc_RNA (1)...(19): siRNA sense strand
gacguacacuggccacaag

SEQ ID NO: 648721 - RNA, 19 nt, Homo sapiens
  misc_RNA (1)...(19): siRNA sense strand
gucgugaucucaacagcuu

SEQ ID NO: 648722 - RNA, 19 nt, Homo sapiens
  misc_RNA (1)...(19): siRNA sense strand
ggucacaagcugggaauau

SEQ ID NO: 648723 - RNA, 19 nt, Homo sapiens
  misc_RNA (1)...(19): siRNA sense strand
ugacgaaagcgugaggaua

SEQ ID NO: 648724 - RNA, 19 nt, Homo sapiens
  misc_RNA (1)...(19): siRNA sense strand
auucuaaccuucuuguuuc

SEQ ID NO: 648725 - RNA, 19 nt, Homo sapiens
  misc_RNA (1)...(19): siRNA sense strand
uagcuaugauggucucugu

SEQ ID NO: 648726 - RNA, 19 nt, Homo sapiens
  misc_RNA (1)...(19): siRNA sense strand
gaugggaaauuugagaaaa

SEQ ID NO: 648727 - RNA, 19 nt, Homo sapiens
  misc_RNA (1)...(19): siRNA sense strand
ggagaguggcuggcaaguu

SEQ ID NO: 648728 - RNA, 19 nt, Homo sapiens
  misc_RNA (1)...(19): siRNA sense strand
cguaugaugggaaauuuga

SEQ ID NO: 648729 - RNA, 19 nt, Homo sapiens
  misc_RNA (1)...(19): siRNA sense strand
gcuugucacccaacagaaa

SEQ ID NO: 648730 - RNA, 19 nt, Homo sapiens
  misc_RNA (1)...(19): siRNA sense strand
gcgcguaugaugggaaauu

SEQ ID NO: 648731 - RNA, 19 nt, Homo sapiens
  misc_RNA (1)...(19): siRNA sense strand
guagccuggucgucagauu

SEQ ID NO: 648732 - RNA, 19 nt, Homo sapiens
  misc_RNA (1)...(19): siRNA sense strand
gccaauuucucuguuacug

SEQ ID NO: 648733 - RNA, 19 nt, Homo sapiens
  misc_RNA (1)...(19): siRNA sense strand
guacacuggccacaagaau

SEQ ID NO: 648734 - RNA, 19 nt, Homo sapiens
  misc_RNA (1)...(19): siRNA sense strand
ugauggauccuugauaguu

SEQ ID NO: 648735 - RNA, 19 nt, Homo sapiens
  misc_RNA (1)...(19): siRNA sense strand
gucacaagcugggaauauc

SEQ ID NO: 648736 - RNA, 19 nt, Homo sapiens
  misc_RNA (1)...(19): siRNA sense strand
gauaugggaugugaaaaca

SEQ ID NO: 648737 - RNA, 19 nt, Homo sapiens
  misc_RNA (1)...(19): siRNA sense strand
ucaggauccuuugacgaaa

SEQ ID NO: 648738 - RNA, 19 nt, Homo sapiens
  misc_RNA (1)...(19): siRNA sense strand
cugaagggacacaguaauu

SEQ ID NO: 648739 - RNA, 19 nt, Homo sapiens
  misc_RNA (1)...(19): siRNA sense strand
gucgucagauucuaaccuu

SEQ ID NO: 648740 - RNA, 19 nt, Homo sapiens
  misc_RNA (1)...(19): siRNA sense strand
ggaaccuucagacgaaaga

SEQ ID NO: 648741 - RNA, 19 nt, Homo sapiens
  misc_RNA (1)...(19): siRNA sense strand
gcugggaauauccgaugua

SEQ ID NO: 648742 - RNA, 19 nt, Homo sapiens
  misc_RNA (1)...(19): siRNA sense strand
gagauuguacagaaacuac

SEQ ID NO: 648743 - RNA, 19 nt, Homo sapiens
  misc_RNA (1)...(19): siRNA sense strand
acaagaaugagaaauacug

SEQ ID NO: 648744 - RNA, 19 nt, Homo sapiens
  misc_RNA (1)...(19): siRNA sense strand
cagcuugucacccaacaga

SEQ ID NO: 648745 - RNA, 19 nt, Homo sapiens
  misc_RNA (1)...(19): siRNA sense strand
uuugccaauuucucuguua

SEQ ID NO: 648746 - RNA, 19 nt, Homo sapiens
  misc_RNA (1)...(19): siRNA sense strand
cgcguaugaugggaaauuu

SEQ ID NO: 648747 - RNA, 19 nt, Homo sapiens
  misc_RNA (1)...(19): siRNA sense strand
guucaucugcugauaaacu

SEQ ID NO: 648748 - RNA, 19 nt, Homo sapiens
  misc_RNA (1)...(19): siRNA sense strand
gcaagccuacaccugugaa

SEQ ID NO: 648749 - RNA, 19 nt, Homo sapiens
  misc_RNA (1)...(19): siRNA sense strand
guccaaccuuauugucuca

SEQ ID NO: 648750 - RNA, 19 nt, Homo sapiens
  misc_RNA (1)...(19): siRNA sense strand
cauauuugccaauuucucu

SEQ ID NO: 648751 - RNA, 19 nt, Homo sapiens
  misc_RNA (1)...(19): siRNA sense strand
ucagaggauaaccuuguuu

SEQ ID NO: 648752 - RNA, 19 nt, Homo sapiens
  misc_RNA (1)...(19): siRNA sense strand
cugcugcgcuagaaaauga

SEQ ID NO: 648753 - RNA, 19 nt, Homo sapiens
  misc_RNA (1)...(19): siRNA sense strand
acaaaaccuugaagauaug

SEQ ID NO: 648754 - RNA, 19 nt, Homo sapiens
  misc_RNA (1)...(19): siRNA sense strand
uaugaugggaaauuugaga

SEQ ID NO: 648755 - RNA, 19 nt, Homo sapiens
  misc_RNA (1)...(19): siRNA sense strand
gauaaccuuguuuacaucu

SEQ ID NO: 648756 - RNA, 19 nt, Homo sapiens
  misc_RNA (1)...(19): siRNA sense strand
cucaggauccuuugacgaa

SEQ ID NO: 648757 - RNA, 19 nt, Homo sapiens
  misc_RNA (1)...(19): siRNA sense strand
gcagucaucucacuaguua

SEQ ID NO: 648758 - RNA, 19 nt, Homo sapiens
  misc_RNA (1)...(19): siRNA sense strand
caccaggacuugaugaaua

SEQ ID NO: 648759 - RNA, 19 nt, Homo sapiens
  misc_RNA (1)...(19): siRNA sense strand
caacaggugugauguccaa

SEQ ID NO: 648760 - RNA, 19 nt, Homo sapiens
  misc_RNA (1)...(19): siRNA sense strand
ucaguuugcuguacaugua

SEQ ID NO: 648761 - RNA, 19 nt, Homo sapiens
  misc_RNA (1)...(19): siRNA sense strand
uuacacaagugacaagaaa

SEQ ID NO: 648762 - RNA, 19 nt, Homo sapiens
  misc_RNA (1)...(19): siRNA sense strand
aagaaaagccgcagaauua

SEQ ID NO: 648763 - RNA, 19 nt, Homo sapiens
  misc_RNA (1)...(19): siRNA sense strand
acuccaagcugcaggauuu

SEQ ID NO: 648764 - RNA, 19 nt, Homo sapiens
  misc_RNA (1)...(19): siRNA sense strand
ugucggaccuuguuucuau

SEQ ID NO: 648765 - RNA, 19 nt, Homo sapiens
  misc_RNA (1)...(19): siRNA sense strand
cagaggaacauccagcuua

SEQ ID NO: 648766 - RNA, 19 nt, Homo sapiens
  misc_RNA (1)...(19): siRNA sense strand
auacacagauugcaaagga

SEQ ID NO: 648767 - RNA, 19 nt, Homo sapiens
  misc_RNA (1)...(19): siRNA sense strand
gggcauuggugguuggauu

SEQ ID NO: 648768 - RNA, 19 nt, Homo sapiens
  misc_RNA (1)...(19): siRNA sense strand
ggcccaagcugaacuucuu

SEQ ID NO: 648769 - RNA, 19 nt, Homo sapiens
  misc_RNA (1)...(19): siRNA sense strand
caaaagacaguaaagcuua

SEQ ID NO: 648770 - RNA, 19 nt, Homo sapiens
  misc_RNA (1)...(19): siRNA sense strand
ucaaggguaaccagauuua

SEQ ID NO: 648771 - RNA, 19 nt, Homo sapiens
  misc_RNA (1)...(19): siRNA sense strand
gugugaagaugccuaaugu

SEQ ID NO: 648772 - RNA, 19 nt, Homo sapiens
  misc_RNA (1)...(19): siRNA sense strand
gagugacaguucauuuaga

SEQ ID NO: 648773 - RNA, 19 nt, Homo sapiens
  misc_RNA (1)...(19): siRNA sense strand
caauacacaaccagcaaua

SEQ ID NO: 648774 - RNA, 19 nt, Homo sapiens
  misc_RNA (1)...(19): siRNA sense strand
agaaugcuuucaaggguaa

SEQ ID NO: 648775 - RNA, 19 nt, Homo sapiens
  misc_RNA (1)...(19): siRNA sense strand
cuucaaggauccaucaguu

SEQ ID NO: 648776 - RNA, 19 nt, Homo sapiens
  misc_RNA (1)...(19): siRNA sense strand
gcaaaugcagcuucaacug

SEQ ID NO: 648777 - RNA, 19 nt, Homo sapiens
  misc_RNA (1)...(19): siRNA sense strand
caagugacaagaaauguuc

SEQ ID NO: 648778 - RNA, 19 nt, Homo sapiens
  misc_RNA (1)...(19): siRNA sense strand
agaggaacauccagcuuau

SEQ ID NO: 648779 - RNA, 19 nt, Homo sapiens
  misc_RNA (1)...(19): siRNA sense strand
acacaaccagcaauaauga

SEQ ID NO: 648780 - RNA, 19 nt, Homo sapiens
  misc_RNA (1)...(19): siRNA sense strand
caacaggaguuugcaacag

SEQ ID NO: 648781 - RNA, 19 nt, Homo sapiens
  misc_RNA (1)...(19): siRNA sense strand
ggccaccucuuccuagcaa

SEQ ID NO: 648782 - RNA, 19 nt, Homo sapiens
  misc_RNA (1)...(19): siRNA sense strand
gugcagcucagaaugcuuu

SEQ ID NO: 648783 - RNA, 19 nt, Homo sapiens
  misc_RNA (1)...(19): siRNA sense strand
gaacauccagcuuauacac

SEQ ID NO: 648784 - RNA, 19 nt, Homo sapiens
  misc_RNA (1)...(19): siRNA sense strand
uuucaaggguaaccagauu

SEQ ID NO: 648785 - RNA, 19 nt, Homo sapiens
  misc_RNA (1)...(19): siRNA sense strand
caagcugcaggauuucaua

SEQ ID NO: 648786 - RNA, 19 nt, Homo sapiens
  misc_RNA (1)...(19): siRNA sense strand
cgucuauauuugucaguuu

SEQ ID NO: 648787 - RNA, 19 nt, Homo sapiens
  misc_RNA (1)...(19): siRNA sense strand
gaggaacauccagcuuaua

SEQ ID NO: 648788 - RNA, 19 nt, Homo sapiens
  misc_RNA (1)...(19): siRNA sense strand
cgacccggaucucaacaau

SEQ ID NO: 648789 - RNA, 19 nt, Homo sapiens
  misc_RNA (1)...(19): siRNA sense strand
ugacaguucauuuagauuc

SEQ ID NO: 648790 - RNA, 19 nt, Homo sapiens
  misc_RNA (1)...(19): siRNA sense strand
guauucuucuucgucuaua

SEQ ID NO: 648791 - RNA, 19 nt, Homo sapiens
  misc_RNA (1)...(19): siRNA sense strand
uguagacauuccuguagaa

SEQ ID NO: 648792 - RNA, 19 nt, Homo sapiens
  misc_RNA (1)...(19): siRNA sense strand
ggugugauguccaacaaaa

SEQ ID NO: 648793 - RNA, 19 nt, Homo sapiens
  misc_RNA (1)...(19): siRNA sense strand
acacaagugacaagaaaug

SEQ ID NO: 648794 - RNA, 19 nt, Homo sapiens
  misc_RNA (1)...(19): siRNA sense strand
caggugugauguccaacaa

SEQ ID NO: 648795 - RNA, 19 nt, Homo sapiens
  misc_RNA (1)...(19): siRNA sense strand
caucagcagucaucucacu

SEQ ID NO: 648796 - RNA, 19 nt, Homo sapiens
  misc_RNA (1)...(19): siRNA sense strand
gacaguucauuuagauucu

SEQ ID NO: 648797 - RNA, 19 nt, Homo sapiens
  misc_RNA (1)...(19): siRNA sense strand
gugaagaugccuaauguac

SEQ ID NO: 648798 - RNA, 19 nt, Homo sapiens
  misc_RNA (1)...(19): siRNA sense strand
gcugcaggauuucauaacu

SEQ ID NO: 648799 - RNA, 19 nt, Homo sapiens
  misc_RNA (1)...(19): siRNA sense strand
ggacuugaugaauauaauc

SEQ ID NO: 648800 - RNA, 19 nt, Homo sapiens
  misc_RNA (1)...(19): siRNA sense strand
ggugugaagaugccuaaug

SEQ ID NO: 648801 - RNA, 19 nt, Homo sapiens
  misc_RNA (1)...(19): siRNA sense strand
ucucaacaaucccuucaag

SEQ ID NO: 648802 - RNA, 19 nt, Homo sapiens
  misc_RNA (1)...(19): siRNA sense strand
cacaacaggugcuaguuuu

SEQ ID NO: 648803 - RNA, 19 nt, Homo sapiens
  misc_RNA (1)...(19): siRNA sense strand
gucuauauuugucaguuug

SEQ ID NO: 648804 - RNA, 19 nt, Homo sapiens
  misc_RNA (1)...(19): siRNA sense strand
aagcuuauguacuacuugu

SEQ ID NO: 648805 - RNA, 19 nt, Homo sapiens
  misc_RNA (1)...(19): siRNA sense strand
gcaauaaugaaaccaacag

SEQ ID NO: 648806 - RNA, 19 nt, Homo sapiens
  misc_RNA (1)...(19): siRNA sense strand
accaggacuugaugaauau

SEQ ID NO: 648807 - RNA, 19 nt, Homo sapiens
  misc_RNA (1)...(19): siRNA sense strand
gauaaucauagcagcacuu

SEQ ID NO: 648808 - RNA, 19 nt, Homo sapiens
  misc_RNA (1)...(19): siRNA sense strand
gaaaagccgcagaauuaga

SEQ ID NO: 648809 - RNA, 19 nt, Homo sapiens
  misc_RNA (1)...(19): siRNA sense strand
acaaccagcaauaaugaaa

SEQ ID NO: 648810 - RNA, 19 nt, Homo sapiens
  misc_RNA (1)...(19): siRNA sense strand
gaaaccaacagaggaacau

SEQ ID NO: 648811 - RNA, 19 nt, Homo sapiens
  misc_RNA (1)...(19): siRNA sense strand
caaggguaaccagauuuaa

SEQ ID NO: 648812 - RNA, 19 nt, Homo sapiens
  misc_RNA (1)...(19): siRNA sense strand
ucaucucacuaguuauguu

SEQ ID NO: 648813 - RNA, 19 nt, Homo sapiens
  misc_RNA (1)...(19): siRNA sense strand
agugacaguucauuuagau

SEQ ID NO: 648814 - RNA, 19 nt, Homo sapiens
  misc_RNA (1)...(19): siRNA sense strand
gacaguaaagcuuauguac

SEQ ID NO: 648815 - RNA, 19 nt, Homo sapiens
  misc_RNA (1)...(19): siRNA sense strand
agacaguaaagcuuaugua

SEQ ID NO: 648816 - RNA, 19 nt, Homo sapiens
  misc_RNA (1)...(19): siRNA sense strand
gcccaagcugaacuucuua

SEQ ID NO: 648817 - RNA, 19 nt, Homo sapiens
  misc_RNA (1)...(19): siRNA sense strand
gaucucaacaaucccuuca

SEQ ID NO: 648818 - RNA, 19 nt, Homo sapiens
  misc_RNA (1)...(19): siRNA sense strand
gaaggcccaacaggaguuu

SEQ ID NO: 648819 - RNA, 19 nt, Homo sapiens
  misc_RNA (1)...(19): siRNA sense strand
ggcauuggugguuggauuu

SEQ ID NO: 648820 - RNA, 19 nt, Homo sapiens
  misc_RNA (1)...(19): siRNA sense strand
ccagaccgcagcugcaaau

SEQ ID NO: 648821 - RNA, 19 nt, Homo sapiens
  misc_RNA (1)...(19): siRNA sense strand
ucaaggauccaucaguuac

SEQ ID NO: 648822 - RNA, 19 nt, Homo sapiens
  misc_RNA (1)...(19): siRNA sense strand
aaaccucagucaacauggu

SEQ ID NO: 648823 - RNA, 19 nt, Homo sapiens
  misc_RNA (1)...(19): siRNA sense strand
ggaacauccagcuuauaca

SEQ ID NO: 648824 - RNA, 19 nt, Homo sapiens
  misc_RNA (1)...(19): siRNA sense strand
uggacuauaucgcacaaca

SEQ ID NO: 648825 - RNA, 19 nt, Homo sapiens
  misc_RNA (1)...(19): siRNA sense strand
caaccaaaauauuccuguu

SEQ ID NO: 648826 - RNA, 19 nt, Homo sapiens
  misc_RNA (1)...(19): siRNA sense strand
gcaaaggaacaugcauugg

SEQ ID NO: 648827 - RNA, 19 nt, Homo sapiens
  misc_RNA (1)...(19): siRNA sense strand
auacacaaccagcaauaau

SEQ ID NO: 648828 - RNA, 19 nt, Homo sapiens
  misc_RNA (1)...(19): siRNA sense strand
caggacuugaugaauauaa

SEQ ID NO: 648829 - RNA, 19 nt, Homo sapiens
  misc_RNA (1)...(19): siRNA sense strand
cauggacuauaucgcacaa

SEQ ID NO: 648830 - RNA, 19 nt, Homo sapiens
  misc_RNA (1)...(19): siRNA sense strand
cagcagucaucucacuagu

SEQ ID NO: 648831 - RNA, 19 nt, Homo sapiens
  misc_RNA (1)...(19): siRNA sense strand
gcuuauacacagauugcaa

SEQ ID NO: 648832 - RNA, 19 nt, Homo sapiens
  misc_RNA (1)...(19): siRNA sense strand
acaagugacaagaaauguu

SEQ ID NO: 648833 - RNA, 19 nt, Homo sapiens
  misc_RNA (1)...(19): siRNA sense strand
cuguagacauuccuguaga

SEQ ID NO: 648834 - RNA, 19 nt, Homo sapiens
  misc_RNA (1)...(19): siRNA sense strand
ccaccucuuccuagcaauu

SEQ ID NO: 648835 - RNA, 19 nt, Homo sapiens
  misc_RNA (1)...(19): siRNA sense strand
aaagaaaagccgcagaauu

SEQ ID NO: 648836 - RNA, 19 nt, Homo sapiens
  misc_RNA (1)...(19): siRNA sense strand
uacacaaccagcaauaaug

SEQ ID NO: 648837 - RNA, 19 nt, Homo sapiens
  misc_RNA (1)...(19): siRNA sense strand
caauaaugaaaccaacaga

SEQ ID NO: 648838 - RNA, 19 nt, Homo sapiens
  misc_RNA (1)...(19): siRNA sense strand
cagcucagaaugcuuucaa

SEQ ID NO: 648839 - RNA, 19 nt, Homo sapiens
  misc_RNA (1)...(19): siRNA sense strand
aaugaaaccaacagaggaa

SEQ ID NO: 648840 - RNA, 19 nt, Homo sapiens
  misc_RNA (1)...(19): siRNA sense strand
ggauccaucaguuacacaa

SEQ ID NO: 648841 - RNA, 19 nt, Homo sapiens
  misc_RNA (1)...(19): siRNA sense strand
ucagucaacaugguagaaa

SEQ ID NO: 648842 - RNA, 19 nt, Homo sapiens
  misc_RNA (1)...(19): siRNA sense strand
cugcaggauuucauaacug

SEQ ID NO: 648843 - RNA, 19 nt, Homo sapiens
  misc_RNA (1)...(19): siRNA sense strand
ccaauacacaaccagcaau

SEQ ID NO: 648844 - RNA, 19 nt, Homo sapiens
  misc_RNA (1)...(19): siRNA sense strand
cauccagcuuauacacaga

SEQ ID NO: 648845 - RNA, 19 nt, Homo sapiens
  misc_RNA (1)...(19): siRNA sense strand
caaggauccaucaguuaca

SEQ ID NO: 648846 - RNA, 19 nt, Homo sapiens
  misc_RNA (1)...(19): siRNA sense strand
agucaucucacuaguuaug

SEQ ID NO: 648847 - RNA, 19 nt, Homo sapiens
  misc_RNA (1)...(19): siRNA sense strand
cuuauacacagauugcaaa

SEQ ID NO: 648848 - RNA, 19 nt, Homo sapiens
  misc_RNA (1)...(19): siRNA sense strand
uucaaggauccaucaguua

SEQ ID NO: 648849 - RNA, 19 nt, Homo sapiens
  misc_RNA (1)...(19): siRNA sense strand
ugccuaauguacccaauac

SEQ ID NO: 648850 - RNA, 19 nt, Homo sapiens
  misc_RNA (1)...(19): siRNA sense strand
ccaacaggaguuugcaaca

SEQ ID NO: 648851 - RNA, 19 nt, Homo sapiens
  misc_RNA (1)...(19): siRNA sense strand
ccagcaauaaugaaaccaa

SEQ ID NO: 648852 - RNA, 19 nt, Homo sapiens
  misc_RNA (1)...(19): siRNA sense strand
uuucgacaguaacccguuu

SEQ ID NO: 648853 - RNA, 19 nt, Homo sapiens
  misc_RNA (1)...(19): siRNA sense strand
caccaggacuugaugaaua

SEQ ID NO: 648854 - RNA, 19 nt, Homo sapiens
  misc_RNA (1)...(19): siRNA sense strand
uuacacaagugacaagaaa

SEQ ID NO: 648855 - RNA, 19 nt, Homo sapiens
  misc_RNA (1)...(19): siRNA sense strand
aagaaaagccgcagaauua

SEQ ID NO: 648856 - RNA, 19 nt, Homo sapiens
  misc_RNA (1)...(19): siRNA sense strand
ugucggaccuuguuucuau

SEQ ID NO: 648857 - RNA, 19 nt, Homo sapiens
  misc_RNA (1)...(19): siRNA sense strand
cagaggaacauccagcuua

SEQ ID NO: 648858 - RNA, 19 nt, Homo sapiens
  misc_RNA (1)...(19): siRNA sense strand
auacacagauugcaaagga

SEQ ID NO: 648859 - RNA, 19 nt, Homo sapiens
  misc_RNA (1)...(19): siRNA sense strand
ggcccaagcugaacuucuu

SEQ ID NO: 648860 - RNA, 19 nt, Homo sapiens
  misc_RNA (1)...(19): siRNA sense strand
caaaagacaguaaagcuua

SEQ ID NO: 648861 - RNA, 19 nt, Homo sapiens
  misc_RNA (1)...(19): siRNA sense strand
gugugaagaugccuaaugu

SEQ ID NO: 648862 - RNA, 19 nt, Homo sapiens
  misc_RNA (1)...(19): siRNA sense strand
caauacacaaccagcaaua

SEQ ID NO: 648863 - RNA, 19 nt, Homo sapiens
  misc_RNA (1)...(19): siRNA sense strand
cuucaaggauccaucaguu

SEQ ID NO: 648864 - RNA, 19 nt, Homo sapiens
  misc_RNA (1)...(19): siRNA sense strand
caagugacaagaaauguuc

SEQ ID NO: 648865 - RNA, 19 nt, Homo sapiens
  misc_RNA (1)...(19): siRNA sense strand
agaggaacauccagcuuau

SEQ ID NO: 648866 - RNA, 19 nt, Homo sapiens
  misc_RNA (1)...(19): siRNA sense strand
acacaaccagcaauaauga

SEQ ID NO: 648867 - RNA, 19 nt, Homo sapiens
  misc_RNA (1)...(19): siRNA sense strand
ggccaccucuuccuagcaa

SEQ ID NO: 648868 - RNA, 19 nt, Homo sapiens
  misc_RNA (1)...(19): siRNA sense strand
gaacauccagcuuauacac

SEQ ID NO: 648869 - RNA, 19 nt, Homo sapiens
  misc_RNA (1)...(19): siRNA sense strand
cgacccggaucucaacaau

SEQ ID NO: 648870 - RNA, 19 nt, Homo sapiens
  misc_RNA (1)...(19): siRNA sense strand
gaggaacauccagcuuaua

SEQ ID NO: 648871 - RNA, 19 nt, Homo sapiens
  misc_RNA (1)...(19): siRNA sense strand
acacaagugacaagaaaug

SEQ ID NO: 648872 - RNA, 19 nt, Homo sapiens
  misc_RNA (1)...(19): siRNA sense strand
uguagacauuccuguagaa

SEQ ID NO: 648873 - RNA, 19 nt, Homo sapiens
  misc_RNA (1)...(19): siRNA sense strand
gugaagaugccuaauguac

SEQ ID NO: 648874 - RNA, 19 nt, Homo sapiens
  misc_RNA (1)...(19): siRNA sense strand
ggacuugaugaauauaauc

SEQ ID NO: 648875 - RNA, 19 nt, Homo sapiens
  misc_RNA (1)...(19): siRNA sense strand
ggugugaagaugccuaaug

SEQ ID NO: 648876 - RNA, 19 nt, Homo sapiens
  misc_RNA (1)...(19): siRNA sense strand
gcaauaaugaaaccaacag

SEQ ID NO: 648877 - RNA, 19 nt, Homo sapiens
  misc_RNA (1)...(19): siRNA sense strand
aagcuuauguacuacuugu

SEQ ID NO: 648878 - RNA, 19 nt, Homo sapiens
  misc_RNA (1)...(19): siRNA sense strand
ucucaacaaucccuucaag

SEQ ID NO: 648879 - RNA, 19 nt, Homo sapiens
  misc_RNA (1)...(19): siRNA sense strand
accaggacuugaugaauau

SEQ ID NO: 648880 - RNA, 19 nt, Homo sapiens
  misc_RNA (1)...(19): siRNA sense strand
gaaaagccgcagaauuaga

SEQ ID NO: 648881 - RNA, 19 nt, Homo sapiens
  misc_RNA (1)...(19): siRNA sense strand
acaaccagcaauaaugaaa

SEQ ID NO: 648882 - RNA, 19 nt, Homo sapiens
  misc_RNA (1)...(19): siRNA sense strand
gaaaccaacagaggaacau

SEQ ID NO: 648883 - RNA, 19 nt, Homo sapiens
  misc_RNA (1)...(19): siRNA sense strand
gacaguaaagcuuauguac

SEQ ID NO: 648884 - RNA, 19 nt, Homo sapiens
  misc_RNA (1)...(19): siRNA sense strand
agacaguaaagcuuaugua

SEQ ID NO: 648885 - RNA, 19 nt, Homo sapiens
  misc_RNA (1)...(19): siRNA sense strand
gaucucaacaaucccuuca

SEQ ID NO: 648886 - RNA, 19 nt, Homo sapiens
  misc_RNA (1)...(19): siRNA sense strand
gcccaagcugaacuucuua

SEQ ID NO: 648887 - RNA, 19 nt, Homo sapiens
  misc_RNA (1)...(19): siRNA sense strand
aaaccucagucaacauggu

SEQ ID NO: 648888 - RNA, 19 nt, Homo sapiens
  misc_RNA (1)...(19): siRNA sense strand
ucaaggauccaucaguuac

SEQ ID NO: 648889 - RNA, 19 nt, Homo sapiens
  misc_RNA (1)...(19): siRNA sense strand
auacacaaccagcaauaau

SEQ ID NO: 648890 - RNA, 19 nt, Homo sapiens
  misc_RNA (1)...(19): siRNA sense strand
gcaaaggaacaugcauugg

SEQ ID NO: 648891 - RNA, 19 nt, Homo sapiens
  misc_RNA (1)...(19): siRNA sense strand
ggaacauccagcuuauaca

SEQ ID NO: 648892 - RNA, 19 nt, Homo sapiens
  misc_RNA (1)...(19): siRNA sense strand
caggacuugaugaauauaa

SEQ ID NO: 648893 - RNA, 19 nt, Homo sapiens
  misc_RNA (1)...(19): siRNA sense strand
uacacaaccagcaauaaug

SEQ ID NO: 648894 - RNA, 19 nt, Homo sapiens
  misc_RNA (1)...(19): siRNA sense strand
cuguagacauuccuguaga

SEQ ID NO: 648895 - RNA, 19 nt, Homo sapiens
  misc_RNA (1)...(19): siRNA sense strand
ccaccucuuccuagcaauu

SEQ ID NO: 648896 - RNA, 19 nt, Homo sapiens
  misc_RNA (1)...(19): siRNA sense strand
aaagaaaagccgcagaauu

SEQ ID NO: 648897 - RNA, 19 nt, Homo sapiens
  misc_RNA (1)...(19): siRNA sense strand
acaagugacaagaaauguu

SEQ ID NO: 648898 - RNA, 19 nt, Homo sapiens
  misc_RNA (1)...(19): siRNA sense strand
gcuuauacacagauugcaa

SEQ ID NO: 648899 - RNA, 19 nt, Homo sapiens
  misc_RNA (1)...(19): siRNA sense strand
ggauccaucaguuacacaa

SEQ ID NO: 648900 - RNA, 19 nt, Homo sapiens
  misc_RNA (1)...(19): siRNA sense strand
ucagucaacaugguagaaa

SEQ ID NO: 648901 - RNA, 19 nt, Homo sapiens
  misc_RNA (1)...(19): siRNA sense strand
aaugaaaccaacagaggaa

SEQ ID NO: 648902 - RNA, 19 nt, Homo sapiens
  misc_RNA (1)...(19): siRNA sense strand
caauaaugaaaccaacaga

SEQ ID NO: 648903 - RNA, 19 nt, Homo sapiens
  misc_RNA (1)...(19): siRNA sense strand
ccaauacacaaccagcaau

SEQ ID NO: 648904 - RNA, 19 nt, Homo sapiens
  misc_RNA (1)...(19): siRNA sense strand
cauccagcuuauacacaga

SEQ ID NO: 648905 - RNA, 19 nt, Homo sapiens
  misc_RNA (1)...(19): siRNA sense strand
caaggauccaucaguuaca

SEQ ID NO: 648906 - RNA, 19 nt, Homo sapiens
  misc_RNA (1)...(19): siRNA sense strand
ugccuaauguacccaauac

SEQ ID NO: 648907 - RNA, 19 nt, Homo sapiens
  misc_RNA (1)...(19): siRNA sense strand
uuucgacaguaacccguuu

SEQ ID NO: 648908 - RNA, 19 nt, Homo sapiens
  misc_RNA (1)...(19): siRNA sense strand
cuuauacacagauugcaaa

SEQ ID NO: 648909 - RNA, 19 nt, Homo sapiens
  misc_RNA (1)...(19): siRNA sense strand
uucaaggauccaucaguua

SEQ ID NO: 648910 - RNA, 19 nt, Homo sapiens
  misc_RNA (1)...(19): siRNA sense strand
ccagcaauaaugaaaccaa

SEQ ID NO: 648911 - RNA, 19 nt, Homo sapiens
  misc_RNA (1)...(19): siRNA sense strand
gaacaugucugacuggauu

SEQ ID NO: 648912 - RNA, 19 nt, Homo sapiens
  misc_RNA (1)...(19): siRNA sense strand
ggaaggagcugaccauagu

SEQ ID NO: 648913 - RNA, 19 nt, Homo sapiens
  misc_RNA (1)...(19): siRNA sense strand
gaaccugcuuggccacuau

SEQ ID NO: 648914 - RNA, 19 nt, Homo sapiens
  misc_RNA (1)...(19): siRNA sense strand
gcuauaugacccuguagua

SEQ ID NO: 648915 - RNA, 19 nt, Homo sapiens
  misc_RNA (1)...(19): siRNA sense strand
uaauggagaccuugacuug

SEQ ID NO: 648916 - RNA, 19 nt, Homo sapiens
  misc_RNA (1)...(19): siRNA sense strand
ggugcuauaugacccugua

SEQ ID NO: 648917 - RNA, 19 nt, Homo sapiens
  misc_RNA (1)...(19): siRNA sense strand
acucaguggugcuauauga

SEQ ID NO: 648918 - RNA, 19 nt, Homo sapiens
  misc_RNA (1)...(19): siRNA sense strand
acaacucaguggugcuaua

SEQ ID NO: 648919 - RNA, 19 nt, Homo sapiens
  misc_RNA (1)...(19): siRNA sense strand
cugcuuggccacuaucuua

SEQ ID NO: 648920 - RNA, 19 nt, Homo sapiens
  misc_RNA (1)...(19): siRNA sense strand
guguacagcuuggacuuug

SEQ ID NO: 648921 - RNA, 19 nt, Homo sapiens
  misc_RNA (1)...(19): siRNA sense strand
ugauaaagcgagugcagaa

SEQ ID NO: 648922 - RNA, 19 nt, Homo sapiens
  misc_RNA (1)...(19): siRNA sense strand
cgggcaaccucggagcuua

SEQ ID NO: 648923 - RNA, 19 nt, Homo sapiens
  misc_RNA (1)...(19): siRNA sense strand
caugguggcuguguuugga

SEQ ID NO: 648924 - RNA, 19 nt, Homo sapiens
  misc_RNA (1)...(19): siRNA sense strand
caacucaguggugcuauau

SEQ ID NO: 648925 - RNA, 19 nt, Homo sapiens
  misc_RNA (1)...(19): siRNA sense strand
ggacuuuggugggcaucug

SEQ ID NO: 648926 - RNA, 19 nt, Homo sapiens
  misc_RNA (1)...(19): siRNA sense strand
gcucuggccuguggaacau

SEQ ID NO: 648927 - RNA, 19 nt, Homo sapiens
  misc_RNA (1)...(19): siRNA sense strand
cacgcuggcuugagggaaa

SEQ ID NO: 648928 - RNA, 19 nt, Homo sapiens
  misc_RNA (1)...(19): siRNA sense strand
gucccgauguccuggugua

SEQ ID NO: 648929 - RNA, 19 nt, Homo sapiens
  misc_RNA (1)...(19): siRNA sense strand
auggagaccuugacuugga

SEQ ID NO: 648930 - RNA, 19 nt, Homo sapiens
  misc_RNA (1)...(19): siRNA sense strand
cauaguggcaggugcuguu

SEQ ID NO: 648931 - RNA, 19 nt, Homo sapiens
  misc_RNA (1)...(19): siRNA sense strand
ggccacuucugggagcuuu

SEQ ID NO: 648932 - RNA, 19 nt, Homo sapiens
  misc_RNA (1)...(19): siRNA sense strand
cuuauacuccucccaguga

SEQ ID NO: 648933 - RNA, 19 nt, Homo sapiens
  misc_RNA (1)...(19): siRNA sense strand
gguguacagcuuggacuuu

SEQ ID NO: 648934 - RNA, 19 nt, Homo sapiens
  misc_RNA (1)...(19): siRNA sense strand
ggcaaccucggagcuuaua

SEQ ID NO: 648935 - RNA, 19 nt, Homo sapiens
  misc_RNA (1)...(19): siRNA sense strand
ggguacggccagagccuaa

SEQ ID NO: 648936 - RNA, 19 nt, Homo sapiens
  misc_RNA (1)...(19): siRNA sense strand
gggcaaccucggagcuuau

SEQ ID NO: 648937 - RNA, 19 nt, Homo sapiens
  misc_RNA (1)...(19): siRNA sense strand
guacggccagagccuaaug

SEQ ID NO: 648938 - RNA, 19 nt, Homo sapiens
  misc_RNA (1)...(19): siRNA sense strand
gaaggagcugaccauagug

SEQ ID NO: 648939 - RNA, 19 nt, Homo sapiens
  misc_RNA (1)...(19): siRNA sense strand
uaaagcgagugcagaaccu

SEQ ID NO: 648940 - RNA, 19 nt, Homo sapiens
  misc_RNA (1)...(19): siRNA sense strand
ggaacaugucugacuggau

SEQ ID NO: 648941 - RNA, 19 nt, Homo sapiens
  misc_RNA (1)...(19): siRNA sense strand
caggugcuguuuccaacca

SEQ ID NO: 648942 - RNA, 19 nt, Homo sapiens
  misc_RNA (1)...(19): siRNA sense strand
gaacaugucugacuggauu

SEQ ID NO: 648943 - RNA, 19 nt, Homo sapiens
  misc_RNA (1)...(19): siRNA sense strand
ggaaggagcugaccauagu

SEQ ID NO: 648944 - RNA, 19 nt, Homo sapiens
  misc_RNA (1)...(19): siRNA sense strand
gaaccugcuuggccacuau

SEQ ID NO: 648945 - RNA, 19 nt, Homo sapiens
  misc_RNA (1)...(19): siRNA sense strand
gcuauaugacccuguagua

SEQ ID NO: 648946 - RNA, 19 nt, Homo sapiens
  misc_RNA (1)...(19): siRNA sense strand
uaauggagaccuugacuug

SEQ ID NO: 648947 - RNA, 19 nt, Homo sapiens
  misc_RNA (1)...(19): siRNA sense strand
ggugcuauaugacccugua

SEQ ID NO: 648948 - RNA, 19 nt, Homo sapiens
  misc_RNA (1)...(19): siRNA sense strand
acucaguggugcuauauga

SEQ ID NO: 648949 - RNA, 19 nt, Homo sapiens
  misc_RNA (1)...(19): siRNA sense strand
acaacucaguggugcuaua

SEQ ID NO: 648950 - RNA, 19 nt, Homo sapiens
  misc_RNA (1)...(19): siRNA sense strand
cugcuuggccacuaucuua

SEQ ID NO: 648951 - RNA, 19 nt, Homo sapiens
  misc_RNA (1)...(19): siRNA sense strand
guguacagcuuggacuuug

SEQ ID NO: 648952 - RNA, 19 nt, Homo sapiens
  misc_RNA (1)...(19): siRNA sense strand
ugauaaagcgagugcagaa

SEQ ID NO: 648953 - RNA, 19 nt, Homo sapiens
  misc_RNA (1)...(19): siRNA sense strand
cgggcaaccucggagcuua

SEQ ID NO: 648954 - RNA, 19 nt, Homo sapiens
  misc_RNA (1)...(19): siRNA sense strand
caugguggcuguguuugga

SEQ ID NO: 648955 - RNA, 19 nt, Homo sapiens
  misc_RNA (1)...(19): siRNA sense strand
caacucaguggugcuauau

SEQ ID NO: 648956 - RNA, 19 nt, Homo sapiens
  misc_RNA (1)...(19): siRNA sense strand
ggacuuuggugggcaucug

SEQ ID NO: 648957 - RNA, 19 nt, Homo sapiens
  misc_RNA (1)...(19): siRNA sense strand
gcucuggccuguggaacau

SEQ ID NO: 648958 - RNA, 19 nt, Homo sapiens
  misc_RNA (1)...(19): siRNA sense strand
cacgcuggcuugagggaaa

SEQ ID NO: 648959 - RNA, 19 nt, Homo sapiens
  misc_RNA (1)...(19): siRNA sense strand
gucccgauguccuggugua

SEQ ID NO: 648960 - RNA, 19 nt, Homo sapiens
  misc_RNA (1)...(19): siRNA sense strand
auggagaccuugacuugga

SEQ ID NO: 648961 - RNA, 19 nt, Homo sapiens
  misc_RNA (1)...(19): siRNA sense strand
cauaguggcaggugcuguu

SEQ ID NO: 648962 - RNA, 19 nt, Homo sapiens
  misc_RNA (1)...(19): siRNA sense strand
ggccacuucugggagcuuu

SEQ ID NO: 648963 - RNA, 19 nt, Homo sapiens
  misc_RNA (1)...(19): siRNA sense strand
ggauguguacccgguugua

SEQ ID NO: 648964 - RNA, 19 nt, Homo sapiens
  misc_RNA (1)...(19): siRNA sense strand
cuuauacuccucccaguga

SEQ ID NO: 648965 - RNA, 19 nt, Homo sapiens
  misc_RNA (1)...(19): siRNA sense strand
gguguacagcuuggacuuu

SEQ ID NO: 648966 - RNA, 19 nt, Homo sapiens
  misc_RNA (1)...(19): siRNA sense strand
ggcaaccucggagcuuaua

SEQ ID NO: 648967 - RNA, 19 nt, Homo sapiens
  misc_RNA (1)...(19): siRNA sense strand
ggguacggccagagccuaa

SEQ ID NO: 648968 - RNA, 19 nt, Homo sapiens
  misc_RNA (1)...(19): siRNA sense strand
gggcaaccucggagcuuau

SEQ ID NO: 648969 - RNA, 19 nt, Homo sapiens
  misc_RNA (1)...(19): siRNA sense strand
guacggccagagccuaaug

SEQ ID NO: 648970 - RNA, 19 nt, Homo sapiens
  misc_RNA (1)...(19): siRNA sense strand
gaaggagcugaccauagug

SEQ ID NO: 648971 - RNA, 19 nt, Homo sapiens
  misc_RNA (1)...(19): siRNA sense strand
uaaagcgagugcagaaccu

SEQ ID NO: 648972 - RNA, 19 nt, Homo sapiens
  misc_RNA (1)...(19): siRNA sense strand
gcacgucccaccccguuuu

SEQ ID NO: 648973 - RNA, 19 nt, Homo sapiens
  misc_RNA (1)...(19): siRNA sense strand
ggaacaugucugacuggau

SEQ ID NO: 648974 - RNA, 19 nt, Homo sapiens
  misc_RNA (1)...(19): siRNA sense strand
caggugcuguuuccaacca

SEQ ID NO: 648975 - RNA, 19 nt, Homo sapiens
  misc_RNA (1)...(19): siRNA sense strand
gaacaugucugacuggauu

SEQ ID NO: 648976 - RNA, 19 nt, Homo sapiens
  misc_RNA (1)...(19): siRNA sense strand
ggaaggagcugaccauagu

SEQ ID NO: 648977 - RNA, 19 nt, Homo sapiens
  misc_RNA (1)...(19): siRNA sense strand
gaaccugcuuggccacuau

SEQ ID NO: 648978 - RNA, 19 nt, Homo sapiens
  misc_RNA (1)...(19): siRNA sense strand
gcuauaugacccuguagua

SEQ ID NO: 648979 - RNA, 19 nt, Homo sapiens
  misc_RNA (1)...(19): siRNA sense strand
uaauggagaccuugacuug

SEQ ID NO: 648980 - RNA, 19 nt, Homo sapiens
  misc_RNA (1)...(19): siRNA sense strand
ggugcuauaugacccugua

SEQ ID NO: 648981 - RNA, 19 nt, Homo sapiens
  misc_RNA (1)...(19): siRNA sense strand
acucaguggugcuauauga

SEQ ID NO: 648982 - RNA, 19 nt, Homo sapiens
  misc_RNA (1)...(19): siRNA sense strand
acaacucaguggugcuaua

SEQ ID NO: 648983 - RNA, 19 nt, Homo sapiens
  misc_RNA (1)...(19): siRNA sense strand
cugcuuggccacuaucuua

SEQ ID NO: 648984 - RNA, 19 nt, Homo sapiens
  misc_RNA (1)...(19): siRNA sense strand
guguacagcuuggacuuug

SEQ ID NO: 648985 - RNA, 19 nt, Homo sapiens
  misc_RNA (1)...(19): siRNA sense strand
ugauaaagcgagugcagaa

SEQ ID NO: 648986 - RNA, 19 nt, Homo sapiens
  misc_RNA (1)...(19): siRNA sense strand
cgggcaaccucggagcuua

SEQ ID NO: 648987 - RNA, 19 nt, Homo sapiens
  misc_RNA (1)...(19): siRNA sense strand
caugguggcuguguuugga

SEQ ID NO: 648988 - RNA, 19 nt, Homo sapiens
  misc_RNA (1)...(19): siRNA sense strand
caacucaguggugcuauau

SEQ ID NO: 648989 - RNA, 19 nt, Homo sapiens
  misc_RNA (1)...(19): siRNA sense strand
ggacuuuggugggcaucug

SEQ ID NO: 648990 - RNA, 19 nt, Homo sapiens
  misc_RNA (1)...(19): siRNA sense strand
gcucuggccuguggaacau

SEQ ID NO: 648991 - RNA, 19 nt, Homo sapiens
  misc_RNA (1)...(19): siRNA sense strand
cacgcuggcuugagggaaa

SEQ ID NO: 648992 - RNA, 19 nt, Homo sapiens
  misc_RNA (1)...(19): siRNA sense strand
gucccgauguccuggugua

SEQ ID NO: 648993 - RNA, 19 nt, Homo sapiens
  misc_RNA (1)...(19): siRNA sense strand
auggagaccuugacuugga

SEQ ID NO: 648994 - RNA, 19 nt, Homo sapiens
  misc_RNA (1)...(19): siRNA sense strand
cauaguggcaggugcuguu

SEQ ID NO: 648995 - RNA, 19 nt, Homo sapiens
  misc_RNA (1)...(19): siRNA sense strand
ggccacuucugggagcuuu

SEQ ID NO: 648996 - RNA, 19 nt, Homo sapiens
  misc_RNA (1)...(19): siRNA sense strand
cuuauacuccucccaguga

SEQ ID NO: 648997 - RNA, 19 nt, Homo sapiens
  misc_RNA (1)...(19): siRNA sense strand
gguguacagcuuggacuuu

SEQ ID NO: 648998 - RNA, 19 nt, Homo sapiens
  misc_RNA (1)...(19): siRNA sense strand
ggcaaccucggagcuuaua

SEQ ID NO: 648999 - RNA, 19 nt, Homo sapiens
  misc_RNA (1)...(19): siRNA sense strand
ggguacggccagagccuaa

SEQ ID NO: 649000 - RNA, 19 nt, Homo sapiens
  misc_RNA (1)...(19): siRNA sense strand
gggcaaccucggagcuuau

SEQ ID NO: 649001 - RNA, 19 nt, Homo sapiens
  misc_RNA (1)...(19): siRNA sense strand
guacggccagagccuaaug

SEQ ID NO: 649002 - RNA, 19 nt, Homo sapiens
  misc_RNA (1)...(19): siRNA sense strand
gaaggagcugaccauagug

SEQ ID NO: 649003 - RNA, 19 nt, Homo sapiens
  misc_RNA (1)...(19): siRNA sense strand
uaaagcgagugcagaaccu

SEQ ID NO: 649004 - RNA, 19 nt, Homo sapiens
  misc_RNA (1)...(19): siRNA sense strand
ggaacaugucugacuggau

SEQ ID NO: 649005 - RNA, 19 nt, Homo sapiens
  misc_RNA (1)...(19): siRNA sense strand
caggugcuguuuccaacca

SEQ ID NO: 649006 - RNA, 19 nt, Homo sapiens
  misc_RNA (1)...(19): siRNA sense strand
gaacaugucugacuggauu

SEQ ID NO: 649007 - RNA, 19 nt, Homo sapiens
  misc_RNA (1)...(19): siRNA sense strand
ggaaggagcugaccauagu

SEQ ID NO: 649008 - RNA, 19 nt, Homo sapiens
  misc_RNA (1)...(19): siRNA sense strand
gaaccugcuuggccacuau

SEQ ID NO: 649009 - RNA, 19 nt, Homo sapiens
  misc_RNA (1)...(19): siRNA sense strand
gcuauaugacccuguagua

SEQ ID NO: 649010 - RNA, 19 nt, Homo sapiens
  misc_RNA (1)...(19): siRNA sense strand
uaauggagaccuugacuug

SEQ ID NO: 649011 - RNA, 19 nt, Homo sapiens
  misc_RNA (1)...(19): siRNA sense strand
ggugcuauaugacccugua

SEQ ID NO: 649012 - RNA, 19 nt, Homo sapiens
  misc_RNA (1)...(19): siRNA sense strand
acucaguggugcuauauga

SEQ ID NO: 649013 - RNA, 19 nt, Homo sapiens
  misc_RNA (1)...(19): siRNA sense strand
acaacucaguggugcuaua

SEQ ID NO: 649014 - RNA, 19 nt, Homo sapiens
  misc_RNA (1)...(19): siRNA sense strand
cugcuuggccacuaucuua

SEQ ID NO: 649015 - RNA, 19 nt, Homo sapiens
  misc_RNA (1)...(19): siRNA sense strand
guguacagcuuggacuuug

SEQ ID NO: 649016 - RNA, 19 nt, Homo sapiens
  misc_RNA (1)...(19): siRNA sense strand
ugauaaagcgagugcagaa

SEQ ID NO: 649017 - RNA, 19 nt, Homo sapiens
  misc_RNA (1)...(19): siRNA sense strand
cgggcaaccucggagcuua

SEQ ID NO: 649018 - RNA, 19 nt, Homo sapiens
  misc_RNA (1)...(19): siRNA sense strand
caugguggcuguguuugga

SEQ ID NO: 649019 - RNA, 19 nt, Homo sapiens
  misc_RNA (1)...(19): siRNA sense strand
caacucaguggugcuauau

SEQ ID NO: 649020 - RNA, 19 nt, Homo sapiens
  misc_RNA (1)...(19): siRNA sense strand
ggacuuuggugggcaucug

SEQ ID NO: 649021 - RNA, 19 nt, Homo sapiens
  misc_RNA (1)...(19): siRNA sense strand
gcucuggccuguggaacau

SEQ ID NO: 649022 - RNA, 19 nt, Homo sapiens
  misc_RNA (1)...(19): siRNA sense strand
cacgcuggcuugagggaaa

SEQ ID NO: 649023 - RNA, 19 nt, Homo sapiens
  misc_RNA (1)...(19): siRNA sense strand
gucccgauguccuggugua

SEQ ID NO: 649024 - RNA, 19 nt, Homo sapiens
  misc_RNA (1)...(19): siRNA sense strand
auggagaccuugacuugga

SEQ ID NO: 649025 - RNA, 19 nt, Homo sapiens
  misc_RNA (1)...(19): siRNA sense strand
cauaguggcaggugcuguu

SEQ ID NO: 649026 - RNA, 19 nt, Homo sapiens
  misc_RNA (1)...(19): siRNA sense strand
ggccacuucugggagcuuu

SEQ ID NO: 649027 - RNA, 19 nt, Homo sapiens
  misc_RNA (1)...(19): siRNA sense strand
ggauguguacccgguugua

SEQ ID NO: 649028 - RNA, 19 nt, Homo sapiens
  misc_RNA (1)...(19): siRNA sense strand
cuuauacuccucccaguga

SEQ ID NO: 649029 - RNA, 19 nt, Homo sapiens
  misc_RNA (1)...(19): siRNA sense strand
gguguacagcuuggacuuu

SEQ ID NO: 649030 - RNA, 19 nt, Homo sapiens
  misc_RNA (1)...(19): siRNA sense strand
ggcaaccucggagcuuaua

SEQ ID NO: 649031 - RNA, 19 nt, Homo sapiens
  misc_RNA (1)...(19): siRNA sense strand
ggguacggccagagccuaa

SEQ ID NO: 649032 - RNA, 19 nt, Homo sapiens
  misc_RNA (1)...(19): siRNA sense strand
gggcaaccucggagcuuau

SEQ ID NO: 649033 - RNA, 19 nt, Homo sapiens
  misc_RNA (1)...(19): siRNA sense strand
guacggccagagccuaaug

SEQ ID NO: 649034 - RNA, 19 nt, Homo sapiens
  misc_RNA (1)...(19): siRNA sense strand
gaaggagcugaccauagug

SEQ ID NO: 649035 - RNA, 19 nt, Homo sapiens
  misc_RNA (1)...(19): siRNA sense strand
uaaagcgagugcagaaccu

SEQ ID NO: 649036 - RNA, 19 nt, Homo sapiens
  misc_RNA (1)...(19): siRNA sense strand
gcacgucccaccccguuuu

SEQ ID NO: 649037 - RNA, 19 nt, Homo sapiens
  misc_RNA (1)...(19): siRNA sense strand
ggaacaugucugacuggau

SEQ ID NO: 649038 - RNA, 19 nt, Homo sapiens
  misc_RNA (1)...(19): siRNA sense strand
caggugcuguuuccaacca

SEQ ID NO: 649039 - RNA, 19 nt, Homo sapiens
  misc_RNA (1)...(19): siRNA sense strand
caacaugucuccaaggaau

SEQ ID NO: 649040 - RNA, 19 nt, Homo sapiens
  misc_RNA (1)...(19): siRNA sense strand
gaauuugauuggcucauuu

SEQ ID NO: 649041 - RNA, 19 nt, Homo sapiens
  misc_RNA (1)...(19): siRNA sense strand
gauaaucuuuccucaguau

SEQ ID NO: 649042 - RNA, 19 nt, Homo sapiens
  misc_RNA (1)...(19): siRNA sense strand
ggaaagacaccgucaagga

SEQ ID NO: 649043 - RNA, 19 nt, Homo sapiens
  misc_RNA (1)...(19): siRNA sense strand
gauaucaacuggagcaauc

SEQ ID NO: 649044 - RNA, 19 nt, Homo sapiens
  misc_RNA (1)...(19): siRNA sense strand
ggaauuugauuggcucauu

SEQ ID NO: 649045 - RNA, 19 nt, Homo sapiens
  misc_RNA (1)...(19): siRNA sense strand
auaaggaccuggagaauuc

SEQ ID NO: 649046 - RNA, 19 nt, Homo sapiens
  misc_RNA (1)...(19): siRNA sense strand
gaaagacaccgucaaggau

SEQ ID NO: 649047 - RNA, 19 nt, Homo sapiens
  misc_RNA (1)...(19): siRNA sense strand
ggagaauucagaugaguuu

SEQ ID NO: 649048 - RNA, 19 nt, Homo sapiens
  misc_RNA (1)...(19): siRNA sense strand
ggagcuaccuauccuuugu

SEQ ID NO: 649049 - RNA, 19 nt, Homo sapiens
  misc_RNA (1)...(19): siRNA sense strand
acacggagauccucaaaca

SEQ ID NO: 649050 - RNA, 19 nt, Homo sapiens
  misc_RNA (1)...(19): siRNA sense strand
ggauuuacaaccagauaua

SEQ ID NO: 649051 - RNA, 19 nt, Homo sapiens
  misc_RNA (1)...(19): siRNA sense strand
aaacaccgccugaaacuga

SEQ ID NO: 649052 - RNA, 19 nt, Homo sapiens
  misc_RNA (1)...(19): siRNA sense strand
gggaguaccugugccagaa

SEQ ID NO: 649053 - RNA, 19 nt, Homo sapiens
  misc_RNA (1)...(19): siRNA sense strand
guccacaucuaccuacgua

SEQ ID NO: 649054 - RNA, 19 nt, Homo sapiens
  misc_RNA (1)...(19): siRNA sense strand
ugaggaggcuucaugagau

SEQ ID NO: 649055 - RNA, 19 nt, Homo sapiens
  misc_RNA (1)...(19): siRNA sense strand
gcucgcaucauccuacuuu

SEQ ID NO: 649056 - RNA, 19 nt, Homo sapiens
  misc_RNA (1)...(19): siRNA sense strand
ucacuccucuacuguaaug

SEQ ID NO: 649057 - RNA, 19 nt, Homo sapiens
  misc_RNA (1)...(19): siRNA sense strand
gcaggagaccuaccacuca

SEQ ID NO: 649058 - RNA, 19 nt, Homo sapiens
  misc_RNA (1)...(19): siRNA sense strand
gcugaaacaccgccugaaa

SEQ ID NO: 649059 - RNA, 19 nt, Homo sapiens
  misc_RNA (1)...(19): siRNA sense strand
gcaugucccucacucucaa

SEQ ID NO: 649060 - RNA, 19 nt, Homo sapiens
  misc_RNA (1)...(19): siRNA sense strand
gcucaucucagccacauug

SEQ ID NO: 649061 - RNA, 19 nt, Homo sapiens
  misc_RNA (1)...(19): siRNA sense strand
uugauuggcucauuucaga

SEQ ID NO: 649062 - RNA, 19 nt, Homo sapiens
  misc_RNA (1)...(19): siRNA sense strand
gcaaagcacggagagcaaa

SEQ ID NO: 649063 - RNA, 19 nt, Homo sapiens
  misc_RNA (1)...(19): siRNA sense strand
acucagcaguucaucgaua

SEQ ID NO: 649064 - RNA, 19 nt, Homo sapiens
  misc_RNA (1)...(19): siRNA sense strand
gaggaggcuuugaccaugu

SEQ ID NO: 649065 - RNA, 19 nt, Homo sapiens
  misc_RNA (1)...(19): siRNA sense strand
gugcagguguuuggguaua

SEQ ID NO: 649066 - RNA, 19 nt, Homo sapiens
  misc_RNA (1)...(19): siRNA sense strand
guucaucgauaccaucauc

SEQ ID NO: 649067 - RNA, 19 nt, Homo sapiens
  misc_RNA (1)...(19): siRNA sense strand
gccuugagcuauaucaugu

SEQ ID NO: 649068 - RNA, 19 nt, Homo sapiens
  misc_RNA (1)...(19): siRNA sense strand
gcaaucaaggucacagaga

SEQ ID NO: 649069 - RNA, 19 nt, Homo sapiens
  misc_RNA (1)...(19): siRNA sense strand
gacaggaagucagggaaug

SEQ ID NO: 649070 - RNA, 19 nt, Homo sapiens
  misc_RNA (1)...(19): siRNA sense strand
cgucaaggauuuacaacca

SEQ ID NO: 649071 - RNA, 19 nt, Homo sapiens
  misc_RNA (1)...(19): siRNA sense strand
gguauagccugagguucaa

SEQ ID NO: 649072 - RNA, 19 nt, Homo sapiens
  misc_RNA (1)...(19): siRNA sense strand
ggguauagccugagguuca

SEQ ID NO: 649073 - RNA, 19 nt, Homo sapiens
  misc_RNA (1)...(19): siRNA sense strand
gcgagcaguucaucagcuu

SEQ ID NO: 649074 - RNA, 19 nt, Homo sapiens
  misc_RNA (1)...(19): siRNA sense strand
gcacccaccugcucaucuc

SEQ ID NO: 649075 - RNA, 19 nt, Homo sapiens
  misc_RNA (1)...(19): siRNA sense strand
cucaguaucugcaagagaa

SEQ ID NO: 649076 - RNA, 19 nt, Homo sapiens
  misc_RNA (1)...(19): siRNA sense strand
gaggaggcuucaugagauc

SEQ ID NO: 649077 - RNA, 19 nt, Homo sapiens
  misc_RNA (1)...(19): siRNA sense strand
gcaucauccuacuuuguug

SEQ ID NO: 649078 - RNA, 19 nt, Homo sapiens
  misc_RNA (1)...(19): siRNA sense strand
ugagcuauaucaugugcaa

SEQ ID NO: 649079 - RNA, 19 nt, Homo sapiens
  misc_RNA (1)...(19): siRNA sense strand
caacacggagauccucaaa

SEQ ID NO: 649080 - RNA, 19 nt, Homo sapiens
  misc_RNA (1)...(19): siRNA sense strand
ucacggacauccagaucau

SEQ ID NO: 649081 - RNA, 19 nt, Homo sapiens
  misc_RNA (1)...(19): siRNA sense strand
ccaaugugccgaggaguuu

SEQ ID NO: 649082 - RNA, 19 nt, Homo sapiens
  misc_RNA (1)...(19): siRNA sense strand
cuaccuauccuuuguggaa

SEQ ID NO: 649083 - RNA, 19 nt, Homo sapiens
  misc_RNA (1)...(19): siRNA sense strand
gagcaguucaucagcuuug

SEQ ID NO: 649084 - RNA, 19 nt, Homo sapiens
  misc_RNA (1)...(19): siRNA sense strand
ucgagacgguccacaucua

SEQ ID NO: 649085 - RNA, 19 nt, Homo sapiens
  misc_RNA (1)...(19): siRNA sense strand
aagacaccgucaaggauuu

SEQ ID NO: 649086 - RNA, 19 nt, Homo sapiens
  misc_RNA (1)...(19): siRNA sense strand
ucucagacgugcagguguu

SEQ ID NO: 649087 - RNA, 19 nt, Homo sapiens
  misc_RNA (1)...(19): siRNA sense strand
agucacuccucuacuguaa

SEQ ID NO: 649088 - RNA, 19 nt, Homo sapiens
  misc_RNA (1)...(19): siRNA sense strand
agagcaaacugcaccuuca

SEQ ID NO: 649089 - RNA, 19 nt, Homo sapiens
  misc_RNA (1)...(19): siRNA sense strand
ugcuacaacuggacucuuu

SEQ ID NO: 649090 - RNA, 19 nt, Homo sapiens
  misc_RNA (1)...(19): siRNA sense strand
gaagauccgucuccaaaac

SEQ ID NO: 649091 - RNA, 19 nt, Homo sapiens
  misc_RNA (1)...(19): siRNA sense strand
aaagacaccgucaaggauu

SEQ ID NO: 649092 - RNA, 19 nt, Homo sapiens
  misc_RNA (1)...(19): siRNA sense strand
cuagagagaggacaauuca

SEQ ID NO: 649093 - RNA, 19 nt, Homo sapiens
  misc_RNA (1)...(19): siRNA sense strand
caugagauccagauaucaa

SEQ ID NO: 649094 - RNA, 19 nt, Homo sapiens
  misc_RNA (1)...(19): siRNA sense strand
gcuccucuacuuccuguuu

SEQ ID NO: 649095 - RNA, 19 nt, Homo sapiens
  misc_RNA (1)...(19): siRNA sense strand
ccaagaggcaguucuacau

SEQ ID NO: 649096 - RNA, 19 nt, Homo sapiens
  misc_RNA (1)...(19): siRNA sense strand
gagcggagcgagcaguuca

SEQ ID NO: 649097 - RNA, 19 nt, Homo sapiens
  misc_RNA (1)...(19): siRNA sense strand
uauaaggaccuggagaauu

SEQ ID NO: 649098 - RNA, 19 nt, Homo sapiens
  misc_RNA (1)...(19): siRNA sense strand
gagcaaacugcaccuucaa

SEQ ID NO: 649099 - RNA, 19 nt, Homo sapiens
  misc_RNA (1)...(19): siRNA sense strand
ggacuuguucuccuguaug

SEQ ID NO: 649100 - RNA, 19 nt, Homo sapiens
  misc_RNA (1)...(19): siRNA sense strand
cagucggccuugagcuaua

SEQ ID NO: 649101 - RNA, 19 nt, Homo sapiens
  misc_RNA (1)...(19): siRNA sense strand
cuucaaggucuucagauaa

SEQ ID NO: 649102 - RNA, 19 nt, Homo sapiens
  misc_RNA (1)...(19): siRNA sense strand
gaacuggagguuuguugag

SEQ ID NO: 649103 - RNA, 19 nt, Homo sapiens
  misc_RNA (1)...(19): siRNA sense strand
caaacagucggaccagaug

SEQ ID NO: 649104 - RNA, 19 nt, Homo sapiens
  misc_RNA (1)...(19): siRNA sense strand
aagaggcaguucuacauca

SEQ ID NO: 649105 - RNA, 19 nt, Homo sapiens
  misc_RNA (1)...(19): siRNA sense strand
cagugucgcugccaaugug

SEQ ID NO: 649106 - RNA, 19 nt, Homo sapiens
  misc_RNA (1)...(19): siRNA sense strand
uuguugagcuccucuacuu

SEQ ID NO: 649107 - RNA, 19 nt, Homo sapiens
  misc_RNA (1)...(19): siRNA sense strand
uucaaggucuucagauaau

SEQ ID NO: 649108 - RNA, 19 nt, Homo sapiens
  misc_RNA (1)...(19): siRNA sense strand
ccacucagcaguucaucga

SEQ ID NO: 649109 - RNA, 19 nt, Homo sapiens
  misc_RNA (1)...(19): siRNA sense strand
gcaaccacuuccugaccau

SEQ ID NO: 649110 - RNA, 19 nt, Homo sapiens
  misc_RNA (1)...(19): siRNA sense strand
gagaauucagaugaguuua

SEQ ID NO: 649111 - RNA, 19 nt, Homo sapiens
  misc_RNA (1)...(19): siRNA sense strand
gggccgaagcuuauaagga

SEQ ID NO: 649112 - RNA, 19 nt, Homo sapiens
  misc_RNA (1)...(19): siRNA sense strand
gcaacaagggcuacaagcu

SEQ ID NO: 649113 - RNA, 19 nt, Homo sapiens
  misc_RNA (1)...(19): siRNA sense strand
agaggcaguucuacaucaa

SEQ ID NO: 649114 - RNA, 19 nt, Homo sapiens
  misc_RNA (1)...(19): siRNA sense strand
uaccuacccuacugcgaaa

SEQ ID NO: 649115 - RNA, 19 nt, Homo sapiens
  misc_RNA (1)...(19): siRNA sense strand
gggaggaggcuuugaccau

SEQ ID NO: 649116 - RNA, 19 nt, Homo sapiens
  misc_RNA (1)...(19): siRNA sense strand
gcaguucuacaucaagauc

SEQ ID NO: 649117 - RNA, 19 nt, Homo sapiens
  misc_RNA (1)...(19): siRNA sense strand
caagaggcaguucuacauc

SEQ ID NO: 649118 - RNA, 19 nt, Homo sapiens
  misc_RNA (1)...(19): siRNA sense strand
acaagaaccgcauggacuu

SEQ ID NO: 649119 - RNA, 19 nt, Homo sapiens
  misc_RNA (1)...(19): siRNA sense strand
ccucuacuguaaugagaau

SEQ ID NO: 649120 - RNA, 19 nt, Homo sapiens
  misc_RNA (1)...(19): siRNA sense strand
agucuugggccgaagcuua

SEQ ID NO: 649121 - RNA, 19 nt, Homo sapiens
  misc_RNA (1)...(19): siRNA sense strand
gaguaccugugccagaaca

SEQ ID NO: 649122 - RNA, 19 nt, Homo sapiens
  misc_RNA (1)...(19): siRNA sense strand
gacaaucuggacucuguga

SEQ ID NO: 649123 - RNA, 19 nt, Homo sapiens
  misc_RNA (1)...(19): siRNA sense strand
gagcaaucaaggucacaga

SEQ ID NO: 649124 - RNA, 19 nt, Homo sapiens
  misc_RNA (1)...(19): siRNA sense strand
gaccuaccacucagcaguu

SEQ ID NO: 649125 - RNA, 19 nt, Homo sapiens
  misc_RNA (1)...(19): siRNA sense strand
augcuccucuuguuggaua

SEQ ID NO: 649126 - RNA, 19 nt, Homo sapiens
  misc_RNA (1)...(19): siRNA sense strand
gcaacaagaaccgcaugga

SEQ ID NO: 649127 - RNA, 19 nt, Homo sapiens
  misc_RNA (1)...(19): siRNA sense strand
ccacggaggcacagagaca

SEQ ID NO: 649128 - RNA, 19 nt, Homo sapiens
  misc_RNA (1)...(19): siRNA sense strand
caucgauaccaucaucaaa

SEQ ID NO: 649129 - RNA, 19 nt, Homo sapiens
  misc_RNA (1)...(19): siRNA sense strand
ucuacuuccuguuuauaug

SEQ ID NO: 649130 - RNA, 19 nt, Homo sapiens
  misc_RNA (1)...(19): siRNA sense strand
ucaaacagucggaccagau

SEQ ID NO: 649131 - RNA, 19 nt, Homo sapiens
  misc_RNA (1)...(19): siRNA sense strand
ugaaacaccgccugaaacu

SEQ ID NO: 649132 - RNA, 19 nt, Homo sapiens
  misc_RNA (1)...(19): siRNA sense strand
uucaugagauccagauauc

SEQ ID NO: 649133 - RNA, 19 nt, Homo sapiens
  misc_RNA (1)...(19): siRNA sense strand
gcuauaucaugugcaaugg

SEQ ID NO: 649134 - RNA, 19 nt, Homo sapiens
  misc_RNA (1)...(19): siRNA sense strand
aggcaguucuacaucaaga

SEQ ID NO: 649135 - RNA, 19 nt, Homo sapiens
  misc_RNA (1)...(19): siRNA sense strand
cuccucuacuuccuguuua

SEQ ID NO: 649136 - RNA, 19 nt, Homo sapiens
  misc_RNA (1)...(19): siRNA sense strand
gccugaaacugaccaacag

SEQ ID NO: 649137 - RNA, 19 nt, Homo sapiens
  misc_RNA (1)...(19): siRNA sense strand
gaaacaccgccugaaacug

SEQ ID NO: 649138 - RNA, 19 nt, Homo sapiens
  misc_RNA (1)...(19): siRNA sense strand
ggccaguucuauuccucuu

SEQ ID NO: 649139 - RNA, 19 nt, Homo sapiens
  misc_RNA (1)...(19): siRNA sense strand
gggagaaggugauugauuu

SEQ ID NO: 649140 - RNA, 19 nt, Homo sapiens
  misc_RNA (1)...(19): siRNA sense strand
gaauauugguggaaucuuu

SEQ ID NO: 649141 - RNA, 19 nt, Homo sapiens
  misc_RNA (1)...(19): siRNA sense strand
gaggaucgcugcuaucuug

SEQ ID NO: 649142 - RNA, 19 nt, Homo sapiens
  misc_RNA (1)...(19): siRNA sense strand
acacauacaucuucacuaa

SEQ ID NO: 649143 - RNA, 19 nt, Homo sapiens
  misc_RNA (1)...(19): siRNA sense strand
gcaccagccucaugaacua

SEQ ID NO: 649144 - RNA, 19 nt, Homo sapiens
  misc_RNA (1)...(19): siRNA sense strand
gcagagauccuccgauuca

SEQ ID NO: 649145 - RNA, 19 nt, Homo sapiens
  misc_RNA (1)...(19): siRNA sense strand
ucaaggagcuggcagagau

SEQ ID NO: 649146 - RNA, 19 nt, Homo sapiens
  misc_RNA (1)...(19): siRNA sense strand
gcagaaaccaugugucaga

SEQ ID NO: 649147 - RNA, 19 nt, Homo sapiens
  misc_RNA (1)...(19): siRNA sense strand
caacaucuguggagagaag

SEQ ID NO: 649148 - RNA, 19 nt, Homo sapiens
  misc_RNA (1)...(19): siRNA sense strand
cagaggaguucgucaaguu

SEQ ID NO: 649149 - RNA, 19 nt, Homo sapiens
  misc_RNA (1)...(19): siRNA sense strand
ggagaacugugaccaugug

SEQ ID NO: 649150 - RNA, 19 nt, Homo sapiens
  misc_RNA (1)...(19): siRNA sense strand
caacgcauguggaauuaca

SEQ ID NO: 649151 - RNA, 19 nt, Homo sapiens
  misc_RNA (1)...(19): siRNA sense strand
gaaggugauugauuucucu

SEQ ID NO: 649152 - RNA, 19 nt, Homo sapiens
  misc_RNA (1)...(19): siRNA sense strand
uggcagagauccuccgauu

SEQ ID NO: 649153 - RNA, 19 nt, Homo sapiens
  misc_RNA (1)...(19): siRNA sense strand
acauacaucuucacuaauc

SEQ ID NO: 649154 - RNA, 19 nt, Homo sapiens
  misc_RNA (1)...(19): siRNA sense strand
ucacuaaucuggaguucuc

SEQ ID NO: 649155 - RNA, 19 nt, Homo sapiens
  misc_RNA (1)...(19): siRNA sense strand
ggucgaaguggacaucuuu

SEQ ID NO: 649156 - RNA, 19 nt, Homo sapiens
  misc_RNA (1)...(19): siRNA sense strand
caaccaaucccaugcuuuc

SEQ ID NO: 649157 - RNA, 19 nt, Homo sapiens
  misc_RNA (1)...(19): siRNA sense strand
gcuguuugaugcugucuau

SEQ ID NO: 649158 - RNA, 19 nt, Homo sapiens
  misc_RNA (1)...(19): siRNA sense strand
uagcugggauccugaacuu

SEQ ID NO: 649159 - RNA, 19 nt, Homo sapiens
  misc_RNA (1)...(19): siRNA sense strand
gaagaucacagagcuaaag

SEQ ID NO: 649160 - RNA, 19 nt, Homo sapiens
  misc_RNA (1)...(19): siRNA sense strand
ggaaaacccauauuuaaug

SEQ ID NO: 649161 - RNA, 19 nt, Homo sapiens
  misc_RNA (1)...(19): siRNA sense strand
ccucggcccugcuguuuga

SEQ ID NO: 649162 - RNA, 19 nt, Homo sapiens
  misc_RNA (1)...(19): siRNA sense strand
ggcaauuccuuaucuccaa

SEQ ID NO: 649163 - RNA, 19 nt, Homo sapiens
  misc_RNA (1)...(19): siRNA sense strand
gacaagaccgccaccauca

SEQ ID NO: 649164 - RNA, 19 nt, Homo sapiens
  misc_RNA (1)...(19): siRNA sense strand
ggagaauauugguggaauc

SEQ ID NO: 649165 - RNA, 19 nt, Homo sapiens
  misc_RNA (1)...(19): siRNA sense strand
ccagaccgccauugaauau

SEQ ID NO: 649166 - RNA, 19 nt, Homo sapiens
  misc_RNA (1)...(19): siRNA sense strand
gaccagaccgccauugaau

SEQ ID NO: 649167 - RNA, 19 nt, Homo sapiens
  misc_RNA (1)...(19): siRNA sense strand
ccaaucccaugcuuucuuc

SEQ ID NO: 649168 - RNA, 19 nt, Homo sapiens
  misc_RNA (1)...(19): siRNA sense strand
caacuacgcuuugaaaauc

SEQ ID NO: 649169 - RNA, 19 nt, Homo sapiens
  misc_RNA (1)...(19): siRNA sense strand
guucuuauuuguggcuuaa

SEQ ID NO: 649170 - RNA, 19 nt, Homo sapiens
  misc_RNA (1)...(19): siRNA sense strand
gccaagagaucggcgugaa

SEQ ID NO: 649171 - RNA, 19 nt, Homo sapiens
  misc_RNA (1)...(19): siRNA sense strand
gaaucuuugugguucuuau

SEQ ID NO: 649172 - RNA, 19 nt, Homo sapiens
  misc_RNA (1)...(19): siRNA sense strand
ggugcaaccuccuggugaa

SEQ ID NO: 649173 - RNA, 19 nt, Homo sapiens
  misc_RNA (1)...(19): siRNA sense strand
guggcaggccucaccauua

SEQ ID NO: 649174 - RNA, 19 nt, Homo sapiens
  misc_RNA (1)...(19): siRNA sense strand
gggcaacagccucugguuu

SEQ ID NO: 649175 - RNA, 19 nt, Homo sapiens
  misc_RNA (1)...(19): siRNA sense strand
guacgagacugcagaaacc

SEQ ID NO: 649176 - RNA, 19 nt, Homo sapiens
  misc_RNA (1)...(19): siRNA sense strand
guacagcccacacccaugu

SEQ ID NO: 649177 - RNA, 19 nt, Homo sapiens
  misc_RNA (1)...(19): siRNA sense strand
gagcugaucgcuaggaaag

SEQ ID NO: 649178 - RNA, 19 nt, Homo sapiens
  misc_RNA (1)...(19): siRNA sense strand
ggacagccuuguggaugau

SEQ ID NO: 649179 - RNA, 19 nt, Homo sapiens
  misc_RNA (1)...(19): siRNA sense strand
ggauggugucagccuauua

SEQ ID NO: 649180 - RNA, 19 nt, Homo sapiens
  misc_RNA (1)...(19): siRNA sense strand
gaacaaccgccuggagauc

SEQ ID NO: 649181 - RNA, 19 nt, Homo sapiens
  misc_RNA (1)...(19): siRNA sense strand
cuaaaggccugggaaugga

SEQ ID NO: 649182 - RNA, 19 nt, Homo sapiens
  misc_RNA (1)...(19): siRNA sense strand
ccaucacccuggccaagaa

SEQ ID NO: 649183 - RNA, 19 nt, Homo sapiens
  misc_RNA (1)...(19): siRNA sense strand
gcagcauuauccuguguca

SEQ ID NO: 649184 - RNA, 19 nt, Homo sapiens
  misc_RNA (1)...(19): siRNA sense strand
gaaacugcaaccucacuca

SEQ ID NO: 649185 - RNA, 19 nt, Homo sapiens
  misc_RNA (1)...(19): siRNA sense strand
agcaugaccuucuuccaaa

SEQ ID NO: 649186 - RNA, 19 nt, Homo sapiens
  misc_RNA (1)...(19): siRNA sense strand
cagcaugaccuucuuccaa

SEQ ID NO: 649187 - RNA, 19 nt, Homo sapiens
  misc_RNA (1)...(19): siRNA sense strand
cgucagcuguguccucuuc

SEQ ID NO: 649188 - RNA, 19 nt, Homo sapiens
  misc_RNA (1)...(19): siRNA sense strand
gagaauggacagccuugug

SEQ ID NO: 649189 - RNA, 19 nt, Homo sapiens
  misc_RNA (1)...(19): siRNA sense strand
gcuaaaggccugggaaugg

SEQ ID NO: 649190 - RNA, 19 nt, Homo sapiens
  misc_RNA (1)...(19): siRNA sense strand
ggcaacagccucugguuuc

SEQ ID NO: 649191 - RNA, 19 nt, Homo sapiens
  misc_RNA (1)...(19): siRNA sense strand
ggugauugauuucucuaag

SEQ ID NO: 649192 - RNA, 19 nt, Homo sapiens
  misc_RNA (1)...(19): siRNA sense strand
gcugaucgcuaggaaagca

SEQ ID NO: 649193 - RNA, 19 nt, Homo sapiens
  misc_RNA (1)...(19): siRNA sense strand
caaggaggaagaucacaga

SEQ ID NO: 649194 - RNA, 19 nt, Homo sapiens
  misc_RNA (1)...(19): siRNA sense strand
uaccaacgcauguggaauu

SEQ ID NO: 649195 - RNA, 19 nt, Homo sapiens
  misc_RNA (1)...(19): siRNA sense strand
uggacagccuuguggauga

SEQ ID NO: 649196 - RNA, 19 nt, Homo sapiens
  misc_RNA (1)...(19): siRNA sense strand
gacgcaaacccggcuauuu

SEQ ID NO: 649197 - RNA, 19 nt, Homo sapiens
  misc_RNA (1)...(19): siRNA sense strand
gaaccggagccaagagauc

SEQ ID NO: 649198 - RNA, 19 nt, Homo sapiens
  misc_RNA (1)...(19): siRNA sense strand
gcaaaggccagagguccaa

SEQ ID NO: 649199 - RNA, 19 nt, Homo sapiens
  misc_RNA (1)...(19): siRNA sense strand
gcgcagcauuauccugugu

SEQ ID NO: 649200 - RNA, 19 nt, Homo sapiens
  misc_RNA (1)...(19): siRNA sense strand
gggaaucgccaggguguug

SEQ ID NO: 649201 - RNA, 19 nt, Homo sapiens
  misc_RNA (1)...(19): siRNA sense strand
ggagaaggugauugauuuc

SEQ ID NO: 649202 - RNA, 19 nt, Homo sapiens
  misc_RNA (1)...(19): siRNA sense strand
gaaaacccauauuuaaugc

SEQ ID NO: 649203 - RNA, 19 nt, Homo sapiens
  misc_RNA (1)...(19): siRNA sense strand
ccucaucugugccaaagca

SEQ ID NO: 649204 - RNA, 19 nt, Homo sapiens
  misc_RNA (1)...(19): siRNA sense strand
gggagcugaucgcuaggaa

SEQ ID NO: 649205 - RNA, 19 nt, Homo sapiens
  misc_RNA (1)...(19): siRNA sense strand
ggacaucuuugagcuucuc

SEQ ID NO: 649206 - RNA, 19 nt, Homo sapiens
  misc_RNA (1)...(19): siRNA sense strand
gggauggugucagccuauu

SEQ ID NO: 649207 - RNA, 19 nt, Homo sapiens
  misc_RNA (1)...(19): siRNA sense strand
gagaagcugcuccggcaau

SEQ ID NO: 649208 - RNA, 19 nt, Homo sapiens
  misc_RNA (1)...(19): siRNA sense strand
gccugggaauggagaauau

SEQ ID NO: 649209 - RNA, 19 nt, Homo sapiens
  misc_RNA (1)...(19): siRNA sense strand
gcgcaugguagaauuggaa

SEQ ID NO: 649210 - RNA, 19 nt, Homo sapiens
  misc_RNA (1)...(19): siRNA sense strand
gggcuucuguguggacaug

SEQ ID NO: 649211 - RNA, 19 nt, Homo sapiens
  misc_RNA (1)...(19): siRNA sense strand
ggaagaucacagagcuaaa

SEQ ID NO: 649212 - RNA, 19 nt, Homo sapiens
  misc_RNA (1)...(19): siRNA sense strand
ucgccaggguguugaauuc

SEQ ID NO: 649213 - RNA, 19 nt, Homo sapiens
  misc_RNA (1)...(19): siRNA sense strand
cagaaaccaugugucagau

SEQ ID NO: 649214 - RNA, 19 nt, Homo sapiens
  misc_RNA (1)...(19): siRNA sense strand
uggcaggccucaccauuac

SEQ ID NO: 649215 - RNA, 19 nt, Homo sapiens
  misc_RNA (1)...(19): siRNA sense strand
caagaccgccaccaucauc

SEQ ID NO: 649216 - RNA, 19 nt, Homo sapiens
  misc_RNA (1)...(19): siRNA sense strand
accaacgcauguggaauua

SEQ ID NO: 649217 - RNA, 19 nt, Homo sapiens
  misc_RNA (1)...(19): siRNA sense strand
gcuccagcaugaccuucuu

SEQ ID NO: 649218 - RNA, 19 nt, Homo sapiens
  misc_RNA (1)...(19): siRNA sense strand
guguggacaugcucaagga

SEQ ID NO: 649219 - RNA, 19 nt, Homo sapiens
  misc_RNA (1)...(19): siRNA sense strand
ggaaccaccaggagaugga

SEQ ID NO: 649220 - RNA, 19 nt, Homo sapiens
  misc_RNA (1)...(19): siRNA sense strand
guccaacuacgcuuugaaa

SEQ ID NO: 649221 - RNA, 19 nt, Homo sapiens
  misc_RNA (1)...(19): siRNA sense strand
gagcuaaaggccugggaau

SEQ ID NO: 649222 - RNA, 19 nt, Homo sapiens
  misc_RNA (1)...(19): siRNA sense strand
cgaguuugaucuggccauu

SEQ ID NO: 649223 - RNA, 19 nt, Homo sapiens
  misc_RNA (1)...(19): siRNA sense strand
caccaagggcuaugggauu

SEQ ID NO: 649224 - RNA, 19 nt, Homo sapiens
  misc_RNA (1)...(19): siRNA sense strand
ggaugugcccauugaguca

SEQ ID NO: 649225 - RNA, 19 nt, Homo sapiens
  misc_RNA (1)...(19): siRNA sense strand
acgcaaacccggcuauuuc

SEQ ID NO: 649226 - RNA, 19 nt, Homo sapiens
  misc_RNA (1)...(19): siRNA sense strand
ggacgcaaacccggcuauu

SEQ ID NO: 649227 - RNA, 19 nt, Homo sapiens
  misc_RNA (1)...(19): siRNA sense strand
gaacgggagaaggugauug

SEQ ID NO: 649228 - RNA, 19 nt, Homo sapiens
  misc_RNA (1)...(19): siRNA sense strand
agaagcugcuccggcaauu

SEQ ID NO: 649229 - RNA, 19 nt, Homo sapiens
  misc_RNA (1)...(19): siRNA sense strand
ccaggguguugaauuccaa

SEQ ID NO: 649230 - RNA, 19 nt, Homo sapiens
  misc_RNA (1)...(19): siRNA sense strand
caaguuccaguuccagaga

SEQ ID NO: 649231 - RNA, 19 nt, Homo sapiens
  misc_RNA (1)...(19): siRNA sense strand
gggcaaggccaaggucgaa

SEQ ID NO: 649232 - RNA, 19 nt, Homo sapiens
  misc_RNA (1)...(19): siRNA sense strand
ccagcuccaucaucagcaa

SEQ ID NO: 649233 - RNA, 19 nt, Homo sapiens
  misc_RNA (1)...(19): siRNA sense strand
ggaaucuuugugguucuua

SEQ ID NO: 649234 - RNA, 19 nt, Homo sapiens
  misc_RNA (1)...(19): siRNA sense strand
gagaauauugguggaaucu

SEQ ID NO: 649235 - RNA, 19 nt, Homo sapiens
  misc_RNA (1)...(19): siRNA sense strand
ccagaggaguucgucaagu

SEQ ID NO: 649236 - RNA, 19 nt, Homo sapiens
  misc_RNA (1)...(19): siRNA sense strand
ugaccagaccgccauugaa

SEQ ID NO: 649237 - RNA, 19 nt, Homo sapiens
  misc_RNA (1)...(19): siRNA sense strand
gguucuuauuuguggcuua

SEQ ID NO: 649238 - RNA, 19 nt, Homo sapiens
  misc_RNA (1)...(19): siRNA sense strand
gccuccagcuccaucauca

SEQ ID NO: 649239 - RNA, 19 nt, Homo sapiens
  misc_RNA (1)...(19): siRNA sense strand
ggaacuggcuguggcauug

SEQ ID NO: 649240 - RNA, 19 nt, Homo sapiens
  misc_RNA (1)...(19): siRNA sense strand
uuuccuagcuucucaacua

SEQ ID NO: 649241 - RNA, 19 nt, Homo sapiens
  misc_RNA (1)...(19): siRNA sense strand
gcugugagcacccguauca

SEQ ID NO: 649242 - RNA, 19 nt, Homo sapiens
  misc_RNA (1)...(19): siRNA sense strand
gaccagcuucugcggauuu

SEQ ID NO: 649243 - RNA, 19 nt, Homo sapiens
  misc_RNA (1)...(19): siRNA sense strand
ccugugagcccaccugcua

SEQ ID NO: 649244 - RNA, 19 nt, Homo sapiens
  misc_RNA (1)...(19): siRNA sense strand
gaccagcuucuguggauau

SEQ ID NO: 649245 - RNA, 19 nt, Homo sapiens
  misc_RNA (1)...(19): siRNA sense strand
uggcauuggugguggcauu

SEQ ID NO: 649246 - RNA, 19 nt, Homo sapiens
  misc_RNA (1)...(19): siRNA sense strand
ggaccugcagcuccaguug

SEQ ID NO: 649247 - RNA, 19 nt, Homo sapiens
  misc_RNA (1)...(19): siRNA sense strand
cggauuuccuagcuucuca

SEQ ID NO: 649248 - RNA, 19 nt, Homo sapiens
  misc_RNA (1)...(19): siRNA sense strand
gaccagcuccugcggaacu

SEQ ID NO: 649249 - RNA, 19 nt, Homo sapiens
  misc_RNA (1)...(19): siRNA sense strand
gagcugugagcacccguau

SEQ ID NO: 649250 - RNA, 19 nt, Homo sapiens
  misc_RNA (1)...(19): siRNA sense strand
agaccagcuucuguggaua

SEQ ID NO: 649251 - RNA, 19 nt, Homo sapiens
  misc_RNA (1)...(19): siRNA sense strand
ggacaugucuccacuauca

SEQ ID NO: 649252 - RNA, 19 nt, Homo sapiens
  misc_RNA (1)...(19): siRNA sense strand
gcacaagcauuggaaauaa

SEQ ID NO: 649253 - RNA, 19 nt, Homo sapiens
  misc_RNA (1)...(19): siRNA sense strand
ggaaucacccaccaaauua

SEQ ID NO: 649254 - RNA, 19 nt, Homo sapiens
  misc_RNA (1)...(19): siRNA sense strand
caacaccaguuccaauuaa

SEQ ID NO: 649255 - RNA, 19 nt, Homo sapiens
  misc_RNA (1)...(19): siRNA sense strand
cgaggaggauucuguguua

SEQ ID NO: 649256 - RNA, 19 nt, Homo sapiens
  misc_RNA (1)...(19): siRNA sense strand
gcaccuacuuucaugauuu

SEQ ID NO: 649257 - RNA, 19 nt, Homo sapiens
  misc_RNA (1)...(19): siRNA sense strand
ucaagaagaugacugcaaa

SEQ ID NO: 649258 - RNA, 19 nt, Homo sapiens
  misc_RNA (1)...(19): siRNA sense strand
gaagaaaccgugcucagaa

SEQ ID NO: 649259 - RNA, 19 nt, Homo sapiens
  misc_RNA (1)...(19): siRNA sense strand
caacugaauuccuugaaga

SEQ ID NO: 649260 - RNA, 19 nt, Homo sapiens
  misc_RNA (1)...(19): siRNA sense strand
gcaaagacuucaacaucga

SEQ ID NO: 649261 - RNA, 19 nt, Homo sapiens
  misc_RNA (1)...(19): siRNA sense strand
gcugauacuucaauauuug

SEQ ID NO: 649262 - RNA, 19 nt, Homo sapiens
  misc_RNA (1)...(19): siRNA sense strand
gaaauggcaucagaagaga

SEQ ID NO: 649263 - RNA, 19 nt, Homo sapiens
  misc_RNA (1)...(19): siRNA sense strand
gccagaagauaccaacuuu

SEQ ID NO: 649264 - RNA, 19 nt, Homo sapiens
  misc_RNA (1)...(19): siRNA sense strand
gaaauauccucugcugaga

SEQ ID NO: 649265 - RNA, 19 nt, Homo sapiens
  misc_RNA (1)...(19): siRNA sense strand
gcaacaccaguuccaauua

SEQ ID NO: 649266 - RNA, 19 nt, Homo sapiens
  misc_RNA (1)...(19): siRNA sense strand
ggacuucauugccacacua

SEQ ID NO: 649267 - RNA, 19 nt, Homo sapiens
  misc_RNA (1)...(19): siRNA sense strand
gaaauugcacaaacacaaa

SEQ ID NO: 649268 - RNA, 19 nt, Homo sapiens
  misc_RNA (1)...(19): siRNA sense strand
gcagaggccuuugaugaug

SEQ ID NO: 649269 - RNA, 19 nt, Homo sapiens
  misc_RNA (1)...(19): siRNA sense strand
gaaaggaaaccaugcaaca

SEQ ID NO: 649270 - RNA, 19 nt, Homo sapiens
  misc_RNA (1)...(19): siRNA sense strand
gaccaaggauaaagcacua

SEQ ID NO: 649271 - RNA, 19 nt, Homo sapiens
  misc_RNA (1)...(19): siRNA sense strand
ccacugccauuaagacuga

SEQ ID NO: 649272 - RNA, 19 nt, Homo sapiens
  misc_RNA (1)...(19): siRNA sense strand
gaaacuagccagauugaag

SEQ ID NO: 649273 - RNA, 19 nt, Homo sapiens
  misc_RNA (1)...(19): siRNA sense strand
gcacucagacuguugcaaa

SEQ ID NO: 649274 - RNA, 19 nt, Homo sapiens
  misc_RNA (1)...(19): siRNA sense strand
gaaauaaugaugggacuga

SEQ ID NO: 649275 - RNA, 19 nt, Homo sapiens
  misc_RNA (1)...(19): siRNA sense strand
ugccaggccuuccaucuua

SEQ ID NO: 649276 - RNA, 19 nt, Homo sapiens
  misc_RNA (1)...(19): siRNA sense strand
gaaaauggccuaccaggaa

SEQ ID NO: 649277 - RNA, 19 nt, Homo sapiens
  misc_RNA (1)...(19): siRNA sense strand
uggaggagaugucaagauu

SEQ ID NO: 649278 - RNA, 19 nt, Homo sapiens
  misc_RNA (1)...(19): siRNA sense strand
ccacaacuccuuucauaga

SEQ ID NO: 649279 - RNA, 19 nt, Homo sapiens
  misc_RNA (1)...(19): siRNA sense strand
ucagagaccucaggaauag

SEQ ID NO: 649280 - RNA, 19 nt, Homo sapiens
  misc_RNA (1)...(19): siRNA sense strand
uaagugaggauucccauuu

SEQ ID NO: 649281 - RNA, 19 nt, Homo sapiens
  misc_RNA (1)...(19): siRNA sense strand
ggaaauugcacaaacacaa

SEQ ID NO: 649282 - RNA, 19 nt, Homo sapiens
  misc_RNA (1)...(19): siRNA sense strand
ccaaggaugugacacuguu

SEQ ID NO: 649283 - RNA, 19 nt, Homo sapiens
  misc_RNA (1)...(19): siRNA sense strand
caaugugacuccagccaaa

SEQ ID NO: 649284 - RNA, 19 nt, Homo sapiens
  misc_RNA (1)...(19): siRNA sense strand
gaggugcugugaagacuga

SEQ ID NO: 649285 - RNA, 19 nt, Homo sapiens
  misc_RNA (1)...(19): siRNA sense strand
uagaaucucugcaggaugu

SEQ ID NO: 649286 - RNA, 19 nt, Homo sapiens
  misc_RNA (1)...(19): siRNA sense strand
gcagaugcauuaacagaac

SEQ ID NO: 649287 - RNA, 19 nt, Homo sapiens
  misc_RNA (1)...(19): siRNA sense strand
gaaaccaacgugaucuuga

SEQ ID NO: 649288 - RNA, 19 nt, Homo sapiens
  misc_RNA (1)...(19): siRNA sense strand
ugaauuccuugaagagaaa

SEQ ID NO: 649289 - RNA, 19 nt, Homo sapiens
  misc_RNA (1)...(19): siRNA sense strand
cuccacaacuccuuucaua

SEQ ID NO: 649290 - RNA, 19 nt, Homo sapiens
  misc_RNA (1)...(19): siRNA sense strand
caaaagacgugaagccaaa

SEQ ID NO: 649291 - RNA, 19 nt, Homo sapiens
  misc_RNA (1)...(19): siRNA sense strand
ccacuucucucccuaagca

SEQ ID NO: 649292 - RNA, 19 nt, Homo sapiens
  misc_RNA (1)...(19): siRNA sense strand
uaccaggaauacccaaaua

SEQ ID NO: 649293 - RNA, 19 nt, Homo sapiens
  misc_RNA (1)...(19): siRNA sense strand
ggcauuggcuaaagauaug

SEQ ID NO: 649294 - RNA, 19 nt, Homo sapiens
  misc_RNA (1)...(19): siRNA sense strand
gcagaagucaagaagauga

SEQ ID NO: 649295 - RNA, 19 nt, Homo sapiens
  misc_RNA (1)...(19): siRNA sense strand
gggagaaacuguuggaaaa

SEQ ID NO: 649296 - RNA, 19 nt, Homo sapiens
  misc_RNA (1)...(19): siRNA sense strand
caagagcacucagacuguu

SEQ ID NO: 649297 - RNA, 19 nt, Homo sapiens
  misc_RNA (1)...(19): siRNA sense strand
caaugguggucauggagua

SEQ ID NO: 649298 - RNA, 19 nt, Homo sapiens
  misc_RNA (1)...(19): siRNA sense strand
ccuuuaagauguaccauga

SEQ ID NO: 649299 - RNA, 19 nt, Homo sapiens
  misc_RNA (1)...(19): siRNA sense strand
agaaccaucuccagacauu

SEQ ID NO: 649300 - RNA, 19 nt, Homo sapiens
  misc_RNA (1)...(19): siRNA sense strand
aagugaggauucccauuua

SEQ ID NO: 649301 - RNA, 19 nt, Homo sapiens
  misc_RNA (1)...(19): siRNA sense strand
ggacauggcacuagcuaca

SEQ ID NO: 649302 - RNA, 19 nt, Homo sapiens
  misc_RNA (1)...(19): siRNA sense strand
gauugaaagucagaaguug

SEQ ID NO: 649303 - RNA, 19 nt, Homo sapiens
  misc_RNA (1)...(19): siRNA sense strand
aagaaaccgugcucagaaa

SEQ ID NO: 649304 - RNA, 19 nt, Homo sapiens
  misc_RNA (1)...(19): siRNA sense strand
gauaaagcgggacuucauu

SEQ ID NO: 649305 - RNA, 19 nt, Homo sapiens
  misc_RNA (1)...(19): siRNA sense strand
cagcugauacuucaauauu

SEQ ID NO: 649306 - RNA, 19 nt, Homo sapiens
  misc_RNA (1)...(19): siRNA sense strand
gacagcugauacuucaaua

SEQ ID NO: 649307 - RNA, 19 nt, Homo sapiens
  misc_RNA (1)...(19): siRNA sense strand
augaugaccuggcagauuu

SEQ ID NO: 649308 - RNA, 19 nt, Homo sapiens
  misc_RNA (1)...(19): siRNA sense strand
uauccagacugaucccuuu

SEQ ID NO: 649309 - RNA, 19 nt, Homo sapiens
  misc_RNA (1)...(19): siRNA sense strand
gaaguaguucucaucaaga

SEQ ID NO: 649310 - RNA, 19 nt, Homo sapiens
  misc_RNA (1)...(19): siRNA sense strand
gagggcaucuccuauaaaa

SEQ ID NO: 649311 - RNA, 19 nt, Homo sapiens
  misc_RNA (1)...(19): siRNA sense strand
gagggcaucuccuauaaaa

SEQ ID NO: 649312 - RNA, 19 nt, Homo sapiens
  misc_RNA (1)...(19): siRNA sense strand
agauagaaauggcaucaga

SEQ ID NO: 649313 - RNA, 19 nt, Homo sapiens
  misc_RNA (1)...(19): siRNA sense strand
ggucuaaggcuaacaucaa

SEQ ID NO: 649314 - RNA, 19 nt, Homo sapiens
  misc_RNA (1)...(19): siRNA sense strand
aaaccgugcucagaaacua

SEQ ID NO: 649315 - RNA, 19 nt, Homo sapiens
  misc_RNA (1)...(19): siRNA sense strand
gaagcccacugccauuaag

SEQ ID NO: 649316 - RNA, 19 nt, Homo sapiens
  misc_RNA (1)...(19): siRNA sense strand
aaacacagcccacuucucu

SEQ ID NO: 649317 - RNA, 19 nt, Homo sapiens
  misc_RNA (1)...(19): siRNA sense strand
uuaaagacauggaaauugc

SEQ ID NO: 649318 - RNA, 19 nt, Homo sapiens
  misc_RNA (1)...(19): siRNA sense strand
agacugaucccuuuaagau

SEQ ID NO: 649319 - RNA, 19 nt, Homo sapiens
  misc_RNA (1)...(19): siRNA sense strand
gauacuccaucuucuaaac

SEQ ID NO: 649320 - RNA, 19 nt, Homo sapiens
  misc_RNA (1)...(19): siRNA sense strand
uggaaucacccaccaaauu

SEQ ID NO: 649321 - RNA, 19 nt, Homo sapiens
  misc_RNA (1)...(19): siRNA sense strand
caacacuccuagccaaugg

SEQ ID NO: 649322 - RNA, 19 nt, Homo sapiens
  misc_RNA (1)...(19): siRNA sense strand
ugggaucccucgauaaugu

SEQ ID NO: 649323 - RNA, 19 nt, Homo sapiens
  misc_RNA (1)...(19): siRNA sense strand
gaaaguggacaucucuaag

SEQ ID NO: 649324 - RNA, 19 nt, Homo sapiens
  misc_RNA (1)...(19): siRNA sense strand
caacuccuuucauagacaa

SEQ ID NO: 649325 - RNA, 19 nt, Homo sapiens
  misc_RNA (1)...(19): siRNA sense strand
gugacacuguugaaagaaa

SEQ ID NO: 649326 - RNA, 19 nt, Homo sapiens
  misc_RNA (1)...(19): siRNA sense strand
ggacugaagacuacugaca

SEQ ID NO: 649327 - RNA, 19 nt, Homo sapiens
  misc_RNA (1)...(19): siRNA sense strand
gaugaugaccuggcagauu

SEQ ID NO: 649328 - RNA, 19 nt, Homo sapiens
  misc_RNA (1)...(19): siRNA sense strand
ggaguagaagggagcgaua

SEQ ID NO: 649329 - RNA, 19 nt, Homo sapiens
  misc_RNA (1)...(19): siRNA sense strand
ucucuaaggucuccuccaa

SEQ ID NO: 649330 - RNA, 19 nt, Homo sapiens
  misc_RNA (1)...(19): siRNA sense strand
cuccugaucugaagaaugu

SEQ ID NO: 649331 - RNA, 19 nt, Homo sapiens
  misc_RNA (1)...(19): siRNA sense strand
cugcagaagucaagaagau

SEQ ID NO: 649332 - RNA, 19 nt, Homo sapiens
  misc_RNA (1)...(19): siRNA sense strand
gaagggagcgauacuacag

SEQ ID NO: 649333 - RNA, 19 nt, Homo sapiens
  misc_RNA (1)...(19): siRNA sense strand
ggaaaccaacgugaucuug

SEQ ID NO: 649334 - RNA, 19 nt, Homo sapiens
  misc_RNA (1)...(19): siRNA sense strand
aagguuggcuccacggaaa

SEQ ID NO: 649335 - RNA, 19 nt, Homo sapiens
  misc_RNA (1)...(19): siRNA sense strand
caagaagcccacugccauu

SEQ ID NO: 649336 - RNA, 19 nt, Homo sapiens
  misc_RNA (1)...(19): siRNA sense strand
ccacgcuccugcccaagaa

SEQ ID NO: 649337 - RNA, 19 nt, Homo sapiens
  misc_RNA (1)...(19): siRNA sense strand
cauggaaauugcacaaaca

SEQ ID NO: 649338 - RNA, 19 nt, Homo sapiens
  misc_RNA (1)...(19): siRNA sense strand
aaugaucccuugaaagaca

SEQ ID NO: 649339 - RNA, 19 nt, Homo sapiens
  misc_RNA (1)...(19): siRNA sense strand
aaggugggaucccucgaua

SEQ ID NO: 649340 - RNA, 19 nt, Homo sapiens
  misc_RNA (1)...(19): siRNA sense strand
gggaaaaccugcagaaguc

SEQ ID NO: 649341 - RNA, 19 nt, Homo sapiens
  misc_RNA (1)...(19): siRNA sense strand
ccauuaagacugagggaaa

SEQ ID NO: 649342 - RNA, 19 nt, Homo sapiens
  misc_RNA (1)...(19): siRNA sense strand
gcaacagucaaccuucuga

SEQ ID NO: 649343 - RNA, 19 nt, Homo sapiens
  misc_RNA (1)...(19): siRNA sense strand
aaagaaguggcccugguua

SEQ ID NO: 649344 - RNA, 19 nt, Homo sapiens
  misc_RNA (1)...(19): siRNA sense strand
gauagaaauggcaucagaa

SEQ ID NO: 649345 - RNA, 19 nt, Homo sapiens
  misc_RNA (1)...(19): siRNA sense strand
cugaauuccuugaagagaa

SEQ ID NO: 649346 - RNA, 19 nt, Homo sapiens
  misc_RNA (1)...(19): siRNA sense strand
gaacaagaaaguggacauc

SEQ ID NO: 649347 - RNA, 19 nt, Homo sapiens
  misc_RNA (1)...(19): siRNA sense strand
aagagcaccuccaccaguu

SEQ ID NO: 649348 - RNA, 19 nt, Homo sapiens
  misc_RNA (1)...(19): siRNA sense strand
agacauugagggagagaua

SEQ ID NO: 649349 - RNA, 19 nt, Homo sapiens
  misc_RNA (1)...(19): siRNA sense strand
aaacuagccagauugaaga

SEQ ID NO: 649350 - RNA, 19 nt, Homo sapiens
  misc_RNA (1)...(19): siRNA sense strand
ucuaaggucuccuccaagu

SEQ ID NO: 649351 - RNA, 19 nt, Homo sapiens
  misc_RNA (1)...(19): siRNA sense strand
ggacaugucuccacuauca

SEQ ID NO: 649352 - RNA, 19 nt, Homo sapiens
  misc_RNA (1)...(19): siRNA sense strand
gcacaagcauuggaaauaa

SEQ ID NO: 649353 - RNA, 19 nt, Homo sapiens
  misc_RNA (1)...(19): siRNA sense strand
ggaaucacccaccaaauua

SEQ ID NO: 649354 - RNA, 19 nt, Homo sapiens
  misc_RNA (1)...(19): siRNA sense strand
caacaccaguuccaauuaa

SEQ ID NO: 649355 - RNA, 19 nt, Homo sapiens
  misc_RNA (1)...(19): siRNA sense strand
cgaggaggauucuguguua

SEQ ID NO: 649356 - RNA, 19 nt, Homo sapiens
  misc_RNA (1)...(19): siRNA sense strand
gcaccuacuuucaugauuu

SEQ ID NO: 649357 - RNA, 19 nt, Homo sapiens
  misc_RNA (1)...(19): siRNA sense strand
ucaagaagaugacugcaaa

SEQ ID NO: 649358 - RNA, 19 nt, Homo sapiens
  misc_RNA (1)...(19): siRNA sense strand
gaagaaaccgugcucagaa

SEQ ID NO: 649359 - RNA, 19 nt, Homo sapiens
  misc_RNA (1)...(19): siRNA sense strand
caacugaauuccuugaaga

SEQ ID NO: 649360 - RNA, 19 nt, Homo sapiens
  misc_RNA (1)...(19): siRNA sense strand
gcaaagacuucaacaucga

SEQ ID NO: 649361 - RNA, 19 nt, Homo sapiens
  misc_RNA (1)...(19): siRNA sense strand
gcugauacuucaauauuug

SEQ ID NO: 649362 - RNA, 19 nt, Homo sapiens
  misc_RNA (1)...(19): siRNA sense strand
gaaauggcaucagaagaga

SEQ ID NO: 649363 - RNA, 19 nt, Homo sapiens
  misc_RNA (1)...(19): siRNA sense strand
gccagaagauaccaacuuu

SEQ ID NO: 649364 - RNA, 19 nt, Homo sapiens
  misc_RNA (1)...(19): siRNA sense strand
gaaauauccucugcugaga

SEQ ID NO: 649365 - RNA, 19 nt, Homo sapiens
  misc_RNA (1)...(19): siRNA sense strand
gcaacaccaguuccaauua

SEQ ID NO: 649366 - RNA, 19 nt, Homo sapiens
  misc_RNA (1)...(19): siRNA sense strand
ggacuucauugccacacua

SEQ ID NO: 649367 - RNA, 19 nt, Homo sapiens
  misc_RNA (1)...(19): siRNA sense strand
gaaauugcacaaacacaaa

SEQ ID NO: 649368 - RNA, 19 nt, Homo sapiens
  misc_RNA (1)...(19): siRNA sense strand
gcagaggccuuugaugaug

SEQ ID NO: 649369 - RNA, 19 nt, Homo sapiens
  misc_RNA (1)...(19): siRNA sense strand
gaaaggaaaccaugcaaca

SEQ ID NO: 649370 - RNA, 19 nt, Homo sapiens
  misc_RNA (1)...(19): siRNA sense strand
gaccaaggauaaagcacua

SEQ ID NO: 649371 - RNA, 19 nt, Homo sapiens
  misc_RNA (1)...(19): siRNA sense strand
ccacugccauuaagacuga

SEQ ID NO: 649372 - RNA, 19 nt, Homo sapiens
  misc_RNA (1)...(19): siRNA sense strand
gaaacuagccagauugaag

SEQ ID NO: 649373 - RNA, 19 nt, Homo sapiens
  misc_RNA (1)...(19): siRNA sense strand
gcacucagacuguugcaaa

SEQ ID NO: 649374 - RNA, 19 nt, Homo sapiens
  misc_RNA (1)...(19): siRNA sense strand
gaaauaaugaugggacuga

SEQ ID NO: 649375 - RNA, 19 nt, Homo sapiens
  misc_RNA (1)...(19): siRNA sense strand
ugccaggccuuccaucuua

SEQ ID NO: 649376 - RNA, 19 nt, Homo sapiens
  misc_RNA (1)...(19): siRNA sense strand
gaaaauggccuaccaggaa

SEQ ID NO: 649377 - RNA, 19 nt, Homo sapiens
  misc_RNA (1)...(19): siRNA sense strand
uggaggagaugucaagauu

SEQ ID NO: 649378 - RNA, 19 nt, Homo sapiens
  misc_RNA (1)...(19): siRNA sense strand
ccacaacuccuuucauaga

SEQ ID NO: 649379 - RNA, 19 nt, Homo sapiens
  misc_RNA (1)...(19): siRNA sense strand
ucagagaccucaggaauag

SEQ ID NO: 649380 - RNA, 19 nt, Homo sapiens
  misc_RNA (1)...(19): siRNA sense strand
uaagugaggauucccauuu

SEQ ID NO: 649381 - RNA, 19 nt, Homo sapiens
  misc_RNA (1)...(19): siRNA sense strand
ggaaauugcacaaacacaa

SEQ ID NO: 649382 - RNA, 19 nt, Homo sapiens
  misc_RNA (1)...(19): siRNA sense strand
ccaaggaugugacacuguu

SEQ ID NO: 649383 - RNA, 19 nt, Homo sapiens
  misc_RNA (1)...(19): siRNA sense strand
caaugugacuccagccaaa

SEQ ID NO: 649384 - RNA, 19 nt, Homo sapiens
  misc_RNA (1)...(19): siRNA sense strand
gaggugcugugaagacuga

SEQ ID NO: 649385 - RNA, 19 nt, Homo sapiens
  misc_RNA (1)...(19): siRNA sense strand
uagaaucucugcaggaugu

SEQ ID NO: 649386 - RNA, 19 nt, Homo sapiens
  misc_RNA (1)...(19): siRNA sense strand
gcagaugcauuaacagaac

SEQ ID NO: 649387 - RNA, 19 nt, Homo sapiens
  misc_RNA (1)...(19): siRNA sense strand
gaaaccaacgugaucuuga

SEQ ID NO: 649388 - RNA, 19 nt, Homo sapiens
  misc_RNA (1)...(19): siRNA sense strand
ugaauuccuugaagagaaa

SEQ ID NO: 649389 - RNA, 19 nt, Homo sapiens
  misc_RNA (1)...(19): siRNA sense strand
cuccacaacuccuuucaua

SEQ ID NO: 649390 - RNA, 19 nt, Homo sapiens
  misc_RNA (1)...(19): siRNA sense strand
caaaagacgugaagccaaa

SEQ ID NO: 649391 - RNA, 19 nt, Homo sapiens
  misc_RNA (1)...(19): siRNA sense strand
ccacuucucucccuaagca

SEQ ID NO: 649392 - RNA, 19 nt, Homo sapiens
  misc_RNA (1)...(19): siRNA sense strand
uaccaggaauacccaaaua

SEQ ID NO: 649393 - RNA, 19 nt, Homo sapiens
  misc_RNA (1)...(19): siRNA sense strand
ggcauuggcuaaagauaug

SEQ ID NO: 649394 - RNA, 19 nt, Homo sapiens
  misc_RNA (1)...(19): siRNA sense strand
gcagaagucaagaagauga

SEQ ID NO: 649395 - RNA, 19 nt, Homo sapiens
  misc_RNA (1)...(19): siRNA sense strand
gggagaaacuguuggaaaa

SEQ ID NO: 649396 - RNA, 19 nt, Homo sapiens
  misc_RNA (1)...(19): siRNA sense strand
caagagcacucagacuguu

SEQ ID NO: 649397 - RNA, 19 nt, Homo sapiens
  misc_RNA (1)...(19): siRNA sense strand
caaugguggucauggagua

SEQ ID NO: 649398 - RNA, 19 nt, Homo sapiens
  misc_RNA (1)...(19): siRNA sense strand
ccuuuaagauguaccauga

SEQ ID NO: 649399 - RNA, 19 nt, Homo sapiens
  misc_RNA (1)...(19): siRNA sense strand
agaaccaucuccagacauu

SEQ ID NO: 649400 - RNA, 19 nt, Homo sapiens
  misc_RNA (1)...(19): siRNA sense strand
aagugaggauucccauuua

SEQ ID NO: 649401 - RNA, 19 nt, Homo sapiens
  misc_RNA (1)...(19): siRNA sense strand
ggacauggcacuagcuaca

SEQ ID NO: 649402 - RNA, 19 nt, Homo sapiens
  misc_RNA (1)...(19): siRNA sense strand
gauugaaagucagaaguug

SEQ ID NO: 649403 - RNA, 19 nt, Homo sapiens
  misc_RNA (1)...(19): siRNA sense strand
aagaaaccgugcucagaaa

SEQ ID NO: 649404 - RNA, 19 nt, Homo sapiens
  misc_RNA (1)...(19): siRNA sense strand
gauaaagcgggacuucauu

SEQ ID NO: 649405 - RNA, 19 nt, Homo sapiens
  misc_RNA (1)...(19): siRNA sense strand
cagcugauacuucaauauu

SEQ ID NO: 649406 - RNA, 19 nt, Homo sapiens
  misc_RNA (1)...(19): siRNA sense strand
gacagcugauacuucaaua

SEQ ID NO: 649407 - RNA, 19 nt, Homo sapiens
  misc_RNA (1)...(19): siRNA sense strand
augaugaccuggcagauuu

SEQ ID NO: 649408 - RNA, 19 nt, Homo sapiens
  misc_RNA (1)...(19): siRNA sense strand
uauccagacugaucccuuu

SEQ ID NO: 649409 - RNA, 19 nt, Homo sapiens
  misc_RNA (1)...(19): siRNA sense strand
gaaguaguucucaucaaga

SEQ ID NO: 649410 - RNA, 19 nt, Homo sapiens
  misc_RNA (1)...(19): siRNA sense strand
gagggcaucuccuauaaaa

SEQ ID NO: 649411 - RNA, 19 nt, Homo sapiens
  misc_RNA (1)...(19): siRNA sense strand
gagggcaucuccuauaaaa

SEQ ID NO: 649412 - RNA, 19 nt, Homo sapiens
  misc_RNA (1)...(19): siRNA sense strand
agauagaaauggcaucaga

SEQ ID NO: 649413 - RNA, 19 nt, Homo sapiens
  misc_RNA (1)...(19): siRNA sense strand
ggucuaaggcuaacaucaa

SEQ ID NO: 649414 - RNA, 19 nt, Homo sapiens
  misc_RNA (1)...(19): siRNA sense strand
aaaccgugcucagaaacua

SEQ ID NO: 649415 - RNA, 19 nt, Homo sapiens
  misc_RNA (1)...(19): siRNA sense strand
gaagcccacugccauuaag

SEQ ID NO: 649416 - RNA, 19 nt, Homo sapiens
  misc_RNA (1)...(19): siRNA sense strand
aaacacagcccacuucucu

SEQ ID NO: 649417 - RNA, 19 nt, Homo sapiens
  misc_RNA (1)...(19): siRNA sense strand
uuaaagacauggaaauugc

SEQ ID NO: 649418 - RNA, 19 nt, Homo sapiens
  misc_RNA (1)...(19): siRNA sense strand
agacugaucccuuuaagau

SEQ ID NO: 649419 - RNA, 19 nt, Homo sapiens
  misc_RNA (1)...(19): siRNA sense strand
gauacuccaucuucuaaac

SEQ ID NO: 649420 - RNA, 19 nt, Homo sapiens
  misc_RNA (1)...(19): siRNA sense strand
uggaaucacccaccaaauu

SEQ ID NO: 649421 - RNA, 19 nt, Homo sapiens
  misc_RNA (1)...(19): siRNA sense strand
caacacuccuagccaaugg

SEQ ID NO: 649422 - RNA, 19 nt, Homo sapiens
  misc_RNA (1)...(19): siRNA sense strand
ugggaucccucgauaaugu

SEQ ID NO: 649423 - RNA, 19 nt, Homo sapiens
  misc_RNA (1)...(19): siRNA sense strand
gaaaguggacaucucuaag

SEQ ID NO: 649424 - RNA, 19 nt, Homo sapiens
  misc_RNA (1)...(19): siRNA sense strand
caacuccuuucauagacaa

SEQ ID NO: 649425 - RNA, 19 nt, Homo sapiens
  misc_RNA (1)...(19): siRNA sense strand
gugacacuguugaaagaaa

SEQ ID NO: 649426 - RNA, 19 nt, Homo sapiens
  misc_RNA (1)...(19): siRNA sense strand
ggacugaagacuacugaca

SEQ ID NO: 649427 - RNA, 19 nt, Homo sapiens
  misc_RNA (1)...(19): siRNA sense strand
gaugaugaccuggcagauu

SEQ ID NO: 649428 - RNA, 19 nt, Homo sapiens
  misc_RNA (1)...(19): siRNA sense strand
ggaguagaagggagcgaua

SEQ ID NO: 649429 - RNA, 19 nt, Homo sapiens
  misc_RNA (1)...(19): siRNA sense strand
ucucuaaggucuccuccaa

SEQ ID NO: 649430 - RNA, 19 nt, Homo sapiens
  misc_RNA (1)...(19): siRNA sense strand
cuccugaucugaagaaugu

SEQ ID NO: 649431 - RNA, 19 nt, Homo sapiens
  misc_RNA (1)...(19): siRNA sense strand
cugcagaagucaagaagau

SEQ ID NO: 649432 - RNA, 19 nt, Homo sapiens
  misc_RNA (1)...(19): siRNA sense strand
gaagggagcgauacuacag

SEQ ID NO: 649433 - RNA, 19 nt, Homo sapiens
  misc_RNA (1)...(19): siRNA sense strand
ggaaaccaacgugaucuug

SEQ ID NO: 649434 - RNA, 19 nt, Homo sapiens
  misc_RNA (1)...(19): siRNA sense strand
aagguuggcuccacggaaa

SEQ ID NO: 649435 - RNA, 19 nt, Homo sapiens
  misc_RNA (1)...(19): siRNA sense strand
caagaagcccacugccauu

SEQ ID NO: 649436 - RNA, 19 nt, Homo sapiens
  misc_RNA (1)...(19): siRNA sense strand
ccacgcuccugcccaagaa

SEQ ID NO: 649437 - RNA, 19 nt, Homo sapiens
  misc_RNA (1)...(19): siRNA sense strand
cauggaaauugcacaaaca

SEQ ID NO: 649438 - RNA, 19 nt, Homo sapiens
  misc_RNA (1)...(19): siRNA sense strand
aaugaucccuugaaagaca

SEQ ID NO: 649439 - RNA, 19 nt, Homo sapiens
  misc_RNA (1)...(19): siRNA sense strand
aaggugggaucccucgaua

SEQ ID NO: 649440 - RNA, 19 nt, Homo sapiens
  misc_RNA (1)...(19): siRNA sense strand
gggaaaaccugcagaaguc

SEQ ID NO: 649441 - RNA, 19 nt, Homo sapiens
  misc_RNA (1)...(19): siRNA sense strand
ccauuaagacugagggaaa

SEQ ID NO: 649442 - RNA, 19 nt, Homo sapiens
  misc_RNA (1)...(19): siRNA sense strand
gcaacagucaaccuucuga

SEQ ID NO: 649443 - RNA, 19 nt, Homo sapiens
  misc_RNA (1)...(19): siRNA sense strand
aaagaaguggcccugguua

SEQ ID NO: 649444 - RNA, 19 nt, Homo sapiens
  misc_RNA (1)...(19): siRNA sense strand
gauagaaauggcaucagaa

SEQ ID NO: 649445 - RNA, 19 nt, Homo sapiens
  misc_RNA (1)...(19): siRNA sense strand
cugaauuccuugaagagaa

SEQ ID NO: 649446 - RNA, 19 nt, Homo sapiens
  misc_RNA (1)...(19): siRNA sense strand
gaacaagaaaguggacauc

SEQ ID NO: 649447 - RNA, 19 nt, Homo sapiens
  misc_RNA (1)...(19): siRNA sense strand
aagagcaccuccaccaguu

SEQ ID NO: 649448 - RNA, 19 nt, Homo sapiens
  misc_RNA (1)...(19): siRNA sense strand
agacauugagggagagaua

SEQ ID NO: 649449 - RNA, 19 nt, Homo sapiens
  misc_RNA (1)...(19): siRNA sense strand
aaacuagccagauugaaga

SEQ ID NO: 649450 - RNA, 19 nt, Homo sapiens
  misc_RNA (1)...(19): siRNA sense strand
ucuaaggucuccuccaagu

SEQ ID NO: 649451 - RNA, 19 nt, Homo sapiens
  misc_RNA (1)...(19): siRNA sense strand
ggacaugucuccacuauca

SEQ ID NO: 649452 - RNA, 19 nt, Homo sapiens
  misc_RNA (1)...(19): siRNA sense strand
gcacaagcauuggaaauaa

SEQ ID NO: 649453 - RNA, 19 nt, Homo sapiens
  misc_RNA (1)...(19): siRNA sense strand
ggaaucacccaccaaauua

SEQ ID NO: 649454 - RNA, 19 nt, Homo sapiens
  misc_RNA (1)...(19): siRNA sense strand
caacaccaguuccaauuaa

SEQ ID NO: 649455 - RNA, 19 nt, Homo sapiens
  misc_RNA (1)...(19): siRNA sense strand
cgaggaggauucuguguua

SEQ ID NO: 649456 - RNA, 19 nt, Homo sapiens
  misc_RNA (1)...(19): siRNA sense strand
gcaccuacuuucaugauuu

SEQ ID NO: 649457 - RNA, 19 nt, Homo sapiens
  misc_RNA (1)...(19): siRNA sense strand
ucaagaagaugacugcaaa

SEQ ID NO: 649458 - RNA, 19 nt, Homo sapiens
  misc_RNA (1)...(19): siRNA sense strand
gaagaaaccgugcucagaa

SEQ ID NO: 649459 - RNA, 19 nt, Homo sapiens
  misc_RNA (1)...(19): siRNA sense strand
caacugaauuccuugaaga

SEQ ID NO: 649460 - RNA, 19 nt, Homo sapiens
  misc_RNA (1)...(19): siRNA sense strand
gcaaagacuucaacaucga

SEQ ID NO: 649461 - RNA, 19 nt, Homo sapiens
  misc_RNA (1)...(19): siRNA sense strand
gcugauacuucaauauuug

SEQ ID NO: 649462 - RNA, 19 nt, Homo sapiens
  misc_RNA (1)...(19): siRNA sense strand
gaaauggcaucagaagaga

SEQ ID NO: 649463 - RNA, 19 nt, Homo sapiens
  misc_RNA (1)...(19): siRNA sense strand
gccagaagauaccaacuuu

SEQ ID NO: 649464 - RNA, 19 nt, Homo sapiens
  misc_RNA (1)...(19): siRNA sense strand
gaaauauccucugcugaga

SEQ ID NO: 649465 - RNA, 19 nt, Homo sapiens
  misc_RNA (1)...(19): siRNA sense strand
gcaacaccaguuccaauua

SEQ ID NO: 649466 - RNA, 19 nt, Homo sapiens
  misc_RNA (1)...(19): siRNA sense strand
ggacuucauugccacacua

SEQ ID NO: 649467 - RNA, 19 nt, Homo sapiens
  misc_RNA (1)...(19): siRNA sense strand
gaaauugcacaaacacaaa

SEQ ID NO: 649468 - RNA, 19 nt, Homo sapiens
  misc_RNA (1)...(19): siRNA sense strand
gcagaggccuuugaugaug

SEQ ID NO: 649469 - RNA, 19 nt, Homo sapiens
  misc_RNA (1)...(19): siRNA sense strand
gaaaggaaaccaugcaaca

SEQ ID NO: 649470 - RNA, 19 nt, Homo sapiens
  misc_RNA (1)...(19): siRNA sense strand
gaccaaggauaaagcacua

SEQ ID NO: 649471 - RNA, 19 nt, Homo sapiens
  misc_RNA (1)...(19): siRNA sense strand
ccacugccauuaagacuga

SEQ ID NO: 649472 - RNA, 19 nt, Homo sapiens
  misc_RNA (1)...(19): siRNA sense strand
gaaacuagccagauugaag

SEQ ID NO: 649473 - RNA, 19 nt, Homo sapiens
  misc_RNA (1)...(19): siRNA sense strand
gcacucagacuguugcaaa

SEQ ID NO: 649474 - RNA, 19 nt, Homo sapiens
  misc_RNA (1)...(19): siRNA sense strand
gaaauaaugaugggacuga

SEQ ID NO: 649475 - RNA, 19 nt, Homo sapiens
  misc_RNA (1)...(19): siRNA sense strand
ugccaggccuuccaucuua

SEQ ID NO: 649476 - RNA, 19 nt, Homo sapiens
  misc_RNA (1)...(19): siRNA sense strand
gaaaauggccuaccaggaa

SEQ ID NO: 649477 - RNA, 19 nt, Homo sapiens
  misc_RNA (1)...(19): siRNA sense strand
uggaggagaugucaagauu

SEQ ID NO: 649478 - RNA, 19 nt, Homo sapiens
  misc_RNA (1)...(19): siRNA sense strand
ccacaacuccuuucauaga

SEQ ID NO: 649479 - RNA, 19 nt, Homo sapiens
  misc_RNA (1)...(19): siRNA sense strand
ucagagaccucaggaauag

SEQ ID NO: 649480 - RNA, 19 nt, Homo sapiens
  misc_RNA (1)...(19): siRNA sense strand
uaagugaggauucccauuu

SEQ ID NO: 649481 - RNA, 19 nt, Homo sapiens
  misc_RNA (1)...(19): siRNA sense strand
ggaaauugcacaaacacaa

SEQ ID NO: 649482 - RNA, 19 nt, Homo sapiens
  misc_RNA (1)...(19): siRNA sense strand
ccaaggaugugacacuguu

SEQ ID NO: 649483 - RNA, 19 nt, Homo sapiens
  misc_RNA (1)...(19): siRNA sense strand
caaugugacuccagccaaa

SEQ ID NO: 649484 - RNA, 19 nt, Homo sapiens
  misc_RNA (1)...(19): siRNA sense strand
gaggugcugugaagacuga

SEQ ID NO: 649485 - RNA, 19 nt, Homo sapiens
  misc_RNA (1)...(19): siRNA sense strand
uagaaucucugcaggaugu

SEQ ID NO: 649486 - RNA, 19 nt, Homo sapiens
  misc_RNA (1)...(19): siRNA sense strand
gcagaugcauuaacagaac

SEQ ID NO: 649487 - RNA, 19 nt, Homo sapiens
  misc_RNA (1)...(19): siRNA sense strand
gaaaccaacgugaucuuga

SEQ ID NO: 649488 - RNA, 19 nt, Homo sapiens
  misc_RNA (1)...(19): siRNA sense strand
ugaauuccuugaagagaaa

SEQ ID NO: 649489 - RNA, 19 nt, Homo sapiens
  misc_RNA (1)...(19): siRNA sense strand
cuccacaacuccuuucaua

SEQ ID NO: 649490 - RNA, 19 nt, Homo sapiens
  misc_RNA (1)...(19): siRNA sense strand
caaaagacgugaagccaaa

SEQ ID NO: 649491 - RNA, 19 nt, Homo sapiens
  misc_RNA (1)...(19): siRNA sense strand
ccacuucucucccuaagca

SEQ ID NO: 649492 - RNA, 19 nt, Homo sapiens
  misc_RNA (1)...(19): siRNA sense strand
uaccaggaauacccaaaua

SEQ ID NO: 649493 - RNA, 19 nt, Homo sapiens
  misc_RNA (1)...(19): siRNA sense strand
ggcauuggcuaaagauaug

SEQ ID NO: 649494 - RNA, 19 nt, Homo sapiens
  misc_RNA (1)...(19): siRNA sense strand
gcagaagucaagaagauga

SEQ ID NO: 649495 - RNA, 19 nt, Homo sapiens
  misc_RNA (1)...(19): siRNA sense strand
gggagaaacuguuggaaaa

SEQ ID NO: 649496 - RNA, 19 nt, Homo sapiens
  misc_RNA (1)...(19): siRNA sense strand
caagagcacucagacuguu

SEQ ID NO: 649497 - RNA, 19 nt, Homo sapiens
  misc_RNA (1)...(19): siRNA sense strand
caaugguggucauggagua

SEQ ID NO: 649498 - RNA, 19 nt, Homo sapiens
  misc_RNA (1)...(19): siRNA sense strand
ccuuuaagauguaccauga

SEQ ID NO: 649499 - RNA, 19 nt, Homo sapiens
  misc_RNA (1)...(19): siRNA sense strand
agaaccaucuccagacauu

SEQ ID NO: 649500 - RNA, 19 nt, Homo sapiens
  misc_RNA (1)...(19): siRNA sense strand
aagugaggauucccauuua

SEQ ID NO: 649501 - RNA, 19 nt, Homo sapiens
  misc_RNA (1)...(19): siRNA sense strand
ggacauggcacuagcuaca

SEQ ID NO: 649502 - RNA, 19 nt, Homo sapiens
  misc_RNA (1)...(19): siRNA sense strand
gauugaaagucagaaguug

SEQ ID NO: 649503 - RNA, 19 nt, Homo sapiens
  misc_RNA (1)...(19): siRNA sense strand
aagaaaccgugcucagaaa

SEQ ID NO: 649504 - RNA, 19 nt, Homo sapiens
  misc_RNA (1)...(19): siRNA sense strand
gauaaagcgggacuucauu

SEQ ID NO: 649505 - RNA, 19 nt, Homo sapiens
  misc_RNA (1)...(19): siRNA sense strand
cagcugauacuucaauauu

SEQ ID NO: 649506 - RNA, 19 nt, Homo sapiens
  misc_RNA (1)...(19): siRNA sense strand
gacagcugauacuucaaua

SEQ ID NO: 649507 - RNA, 19 nt, Homo sapiens
  misc_RNA (1)...(19): siRNA sense strand
augaugaccuggcagauuu

SEQ ID NO: 649508 - RNA, 19 nt, Homo sapiens
  misc_RNA (1)...(19): siRNA sense strand
uauccagacugaucccuuu

SEQ ID NO: 649509 - RNA, 19 nt, Homo sapiens
  misc_RNA (1)...(19): siRNA sense strand
gaaguaguucucaucaaga

SEQ ID NO: 649510 - RNA, 19 nt, Homo sapiens
  misc_RNA (1)...(19): siRNA sense strand
gagggcaucuccuauaaaa

SEQ ID NO: 649511 - RNA, 19 nt, Homo sapiens
  misc_RNA (1)...(19): siRNA sense strand
gagggcaucuccuauaaaa

SEQ ID NO: 649512 - RNA, 19 nt, Homo sapiens
  misc_RNA (1)...(19): siRNA sense strand
agauagaaauggcaucaga

SEQ ID NO: 649513 - RNA, 19 nt, Homo sapiens
  misc_RNA (1)...(19): siRNA sense strand
ggucuaaggcuaacaucaa

SEQ ID NO: 649514 - RNA, 19 nt, Homo sapiens
  misc_RNA (1)...(19): siRNA sense strand
aaaccgugcucagaaacua

SEQ ID NO: 649515 - RNA, 19 nt, Homo sapiens
  misc_RNA (1)...(19): siRNA sense strand
gaagcccacugccauuaag

SEQ ID NO: 649516 - RNA, 19 nt, Homo sapiens
  misc_RNA (1)...(19): siRNA sense strand
aaacacagcccacuucucu

SEQ ID NO: 649517 - RNA, 19 nt, Homo sapiens
  misc_RNA (1)...(19): siRNA sense strand
uuaaagacauggaaauugc

SEQ ID NO: 649518 - RNA, 19 nt, Homo sapiens
  misc_RNA (1)...(19): siRNA sense strand
agacugaucccuuuaagau

SEQ ID NO: 649519 - RNA, 19 nt, Homo sapiens
  misc_RNA (1)...(19): siRNA sense strand
gauacuccaucuucuaaac

SEQ ID NO: 649520 - RNA, 19 nt, Homo sapiens
  misc_RNA (1)...(19): siRNA sense strand
uggaaucacccaccaaauu

SEQ ID NO: 649521 - RNA, 19 nt, Homo sapiens
  misc_RNA (1)...(19): siRNA sense strand
caacacuccuagccaaugg

SEQ ID NO: 649522 - RNA, 19 nt, Homo sapiens
  misc_RNA (1)...(19): siRNA sense strand
ugggaucccucgauaaugu

SEQ ID NO: 649523 - RNA, 19 nt, Homo sapiens
  misc_RNA (1)...(19): siRNA sense strand
gaaaguggacaucucuaag

SEQ ID NO: 649524 - RNA, 19 nt, Homo sapiens
  misc_RNA (1)...(19): siRNA sense strand
caacuccuuucauagacaa

SEQ ID NO: 649525 - RNA, 19 nt, Homo sapiens
  misc_RNA (1)...(19): siRNA sense strand
gugacacuguugaaagaaa

SEQ ID NO: 649526 - RNA, 19 nt, Homo sapiens
  misc_RNA (1)...(19): siRNA sense strand
ggacugaagacuacugaca

SEQ ID NO: 649527 - RNA, 19 nt, Homo sapiens
  misc_RNA (1)...(19): siRNA sense strand
gaugaugaccuggcagauu

SEQ ID NO: 649528 - RNA, 19 nt, Homo sapiens
  misc_RNA (1)...(19): siRNA sense strand
ggaguagaagggagcgaua

SEQ ID NO: 649529 - RNA, 19 nt, Homo sapiens
  misc_RNA (1)...(19): siRNA sense strand
ucucuaaggucuccuccaa

SEQ ID NO: 649530 - RNA, 19 nt, Homo sapiens
  misc_RNA (1)...(19): siRNA sense strand
cuccugaucugaagaaugu

SEQ ID NO: 649531 - RNA, 19 nt, Homo sapiens
  misc_RNA (1)...(19): siRNA sense strand
cugcagaagucaagaagau

SEQ ID NO: 649532 - RNA, 19 nt, Homo sapiens
  misc_RNA (1)...(19): siRNA sense strand
gaagggagcgauacuacag

SEQ ID NO: 649533 - RNA, 19 nt, Homo sapiens
  misc_RNA (1)...(19): siRNA sense strand
ggaaaccaacgugaucuug

SEQ ID NO: 649534 - RNA, 19 nt, Homo sapiens
  misc_RNA (1)...(19): siRNA sense strand
aagguuggcuccacggaaa

SEQ ID NO: 649535 - RNA, 19 nt, Homo sapiens
  misc_RNA (1)...(19): siRNA sense strand
caagaagcccacugccauu

SEQ ID NO: 649536 - RNA, 19 nt, Homo sapiens
  misc_RNA (1)...(19): siRNA sense strand
ccacgcuccugcccaagaa

SEQ ID NO: 649537 - RNA, 19 nt, Homo sapiens
  misc_RNA (1)...(19): siRNA sense strand
cauggaaauugcacaaaca

SEQ ID NO: 649538 - RNA, 19 nt, Homo sapiens
  misc_RNA (1)...(19): siRNA sense strand
aaugaucccuugaaagaca

SEQ ID NO: 649539 - RNA, 19 nt, Homo sapiens
  misc_RNA (1)...(19): siRNA sense strand
aaggugggaucccucgaua

SEQ ID NO: 649540 - RNA, 19 nt, Homo sapiens
  misc_RNA (1)...(19): siRNA sense strand
gggaaaaccugcagaaguc

SEQ ID NO: 649541 - RNA, 19 nt, Homo sapiens
  misc_RNA (1)...(19): siRNA sense strand
ccauuaagacugagggaaa

SEQ ID NO: 649542 - RNA, 19 nt, Homo sapiens
  misc_RNA (1)...(19): siRNA sense strand
gcaacagucaaccuucuga

SEQ ID NO: 649543 - RNA, 19 nt, Homo sapiens
  misc_RNA (1)...(19): siRNA sense strand
aaagaaguggcccugguua

SEQ ID NO: 649544 - RNA, 19 nt, Homo sapiens
  misc_RNA (1)...(19): siRNA sense strand
gauagaaauggcaucagaa

SEQ ID NO: 649545 - RNA, 19 nt, Homo sapiens
  misc_RNA (1)...(19): siRNA sense strand
cugaauuccuugaagagaa

SEQ ID NO: 649546 - RNA, 19 nt, Homo sapiens
  misc_RNA (1)...(19): siRNA sense strand
gaacaagaaaguggacauc

SEQ ID NO: 649547 - RNA, 19 nt, Homo sapiens
  misc_RNA (1)...(19): siRNA sense strand
aagagcaccuccaccaguu

SEQ ID NO: 649548 - RNA, 19 nt, Homo sapiens
  misc_RNA (1)...(19): siRNA sense strand
agacauugagggagagaua

SEQ ID NO: 649549 - RNA, 19 nt, Homo sapiens
  misc_RNA (1)...(19): siRNA sense strand
aaacuagccagauugaaga

SEQ ID NO: 649550 - RNA, 19 nt, Homo sapiens
  misc_RNA (1)...(19): siRNA sense strand
ucuaaggucuccuccaagu

SEQ ID NO: 649551 - RNA, 19 nt, Homo sapiens
  misc_RNA (1)...(19): siRNA sense strand
ggacaugucuccacuauca

SEQ ID NO: 649552 - RNA, 19 nt, Homo sapiens
  misc_RNA (1)...(19): siRNA sense strand
gcacaagcauuggaaauaa

SEQ ID NO: 649553 - RNA, 19 nt, Homo sapiens
  misc_RNA (1)...(19): siRNA sense strand
ggaaucacccaccaaauua

SEQ ID NO: 649554 - RNA, 19 nt, Homo sapiens
  misc_RNA (1)...(19): siRNA sense strand
caacaccaguuccaauuaa

SEQ ID NO: 649555 - RNA, 19 nt, Homo sapiens
  misc_RNA (1)...(19): siRNA sense strand
cgaggaggauucuguguua

SEQ ID NO: 649556 - RNA, 19 nt, Homo sapiens
  misc_RNA (1)...(19): siRNA sense strand
gcaccuacuuucaugauuu

SEQ ID NO: 649557 - RNA, 19 nt, Homo sapiens
  misc_RNA (1)...(19): siRNA sense strand
ucaagaagaugacugcaaa

SEQ ID NO: 649558 - RNA, 19 nt, Homo sapiens
  misc_RNA (1)...(19): siRNA sense strand
gaagaaaccgugcucagaa

SEQ ID NO: 649559 - RNA, 19 nt, Homo sapiens
  misc_RNA (1)...(19): siRNA sense strand
caacugaauuccuugaaga

SEQ ID NO: 649560 - RNA, 19 nt, Homo sapiens
  misc_RNA (1)...(19): siRNA sense strand
gcaaagacuucaacaucga

SEQ ID NO: 649561 - RNA, 19 nt, Homo sapiens
  misc_RNA (1)...(19): siRNA sense strand
gcugauacuucaauauuug

SEQ ID NO: 649562 - RNA, 19 nt, Homo sapiens
  misc_RNA (1)...(19): siRNA sense strand
gaaauggcaucagaagaga

SEQ ID NO: 649563 - RNA, 19 nt, Homo sapiens
  misc_RNA (1)...(19): siRNA sense strand
gccagaagauaccaacuuu

SEQ ID NO: 649564 - RNA, 19 nt, Homo sapiens
  misc_RNA (1)...(19): siRNA sense strand
gaaauauccucugcugaga

SEQ ID NO: 649565 - RNA, 19 nt, Homo sapiens
  misc_RNA (1)...(19): siRNA sense strand
gcaacaccaguuccaauua

SEQ ID NO: 649566 - RNA, 19 nt, Homo sapiens
  misc_RNA (1)...(19): siRNA sense strand
ggacuucauugccacacua

SEQ ID NO: 649567 - RNA, 19 nt, Homo sapiens
  misc_RNA (1)...(19): siRNA sense strand
gaaauugcacaaacacaaa

SEQ ID NO: 649568 - RNA, 19 nt, Homo sapiens
  misc_RNA (1)...(19): siRNA sense strand
gcagaggccuuugaugaug

SEQ ID NO: 649569 - RNA, 19 nt, Homo sapiens
  misc_RNA (1)...(19): siRNA sense strand
gaaaggaaaccaugcaaca

SEQ ID NO: 649570 - RNA, 19 nt, Homo sapiens
  misc_RNA (1)...(19): siRNA sense strand
gaccaaggauaaagcacua

SEQ ID NO: 649571 - RNA, 19 nt, Homo sapiens
  misc_RNA (1)...(19): siRNA sense strand
ccacugccauuaagacuga

SEQ ID NO: 649572 - RNA, 19 nt, Homo sapiens
  misc_RNA (1)...(19): siRNA sense strand
gaaacuagccagauugaag

SEQ ID NO: 649573 - RNA, 19 nt, Homo sapiens
  misc_RNA (1)...(19): siRNA sense strand
gcacucagacuguugcaaa

SEQ ID NO: 649574 - RNA, 19 nt, Homo sapiens
  misc_RNA (1)...(19): siRNA sense strand
gaaauaaugaugggacuga

SEQ ID NO: 649575 - RNA, 19 nt, Homo sapiens
  misc_RNA (1)...(19): siRNA sense strand
ugccaggccuuccaucuua

SEQ ID NO: 649576 - RNA, 19 nt, Homo sapiens
  misc_RNA (1)...(19): siRNA sense strand
gaaaauggccuaccaggaa

SEQ ID NO: 649577 - RNA, 19 nt, Homo sapiens
  misc_RNA (1)...(19): siRNA sense strand
uggaggagaugucaagauu

SEQ ID NO: 649578 - RNA, 19 nt, Homo sapiens
  misc_RNA (1)...(19): siRNA sense strand
ccacaacuccuuucauaga

SEQ ID NO: 649579 - RNA, 19 nt, Homo sapiens
  misc_RNA (1)...(19): siRNA sense strand
ucagagaccucaggaauag

SEQ ID NO: 649580 - RNA, 19 nt, Homo sapiens
  misc_RNA (1)...(19): siRNA sense strand
uaagugaggauucccauuu

SEQ ID NO: 649581 - RNA, 19 nt, Homo sapiens
  misc_RNA (1)...(19): siRNA sense strand
ggaaauugcacaaacacaa

SEQ ID NO: 649582 - RNA, 19 nt, Homo sapiens
  misc_RNA (1)...(19): siRNA sense strand
ccaaggaugugacacuguu

SEQ ID NO: 649583 - RNA, 19 nt, Homo sapiens
  misc_RNA (1)...(19): siRNA sense strand
caaugugacuccagccaaa

SEQ ID NO: 649584 - RNA, 19 nt, Homo sapiens
  misc_RNA (1)...(19): siRNA sense strand
gaggugcugugaagacuga

SEQ ID NO: 649585 - RNA, 19 nt, Homo sapiens
  misc_RNA (1)...(19): siRNA sense strand
uagaaucucugcaggaugu

SEQ ID NO: 649586 - RNA, 19 nt, Homo sapiens
  misc_RNA (1)...(19): siRNA sense strand
gcagaugcauuaacagaac

SEQ ID NO: 649587 - RNA, 19 nt, Homo sapiens
  misc_RNA (1)...(19): siRNA sense strand
gaaaccaacgugaucuuga

SEQ ID NO: 649588 - RNA, 19 nt, Homo sapiens
  misc_RNA (1)...(19): siRNA sense strand
ugaauuccuugaagagaaa

SEQ ID NO: 649589 - RNA, 19 nt, Homo sapiens
  misc_RNA (1)...(19): siRNA sense strand
cuccacaacuccuuucaua

SEQ ID NO: 649590 - RNA, 19 nt, Homo sapiens
  misc_RNA (1)...(19): siRNA sense strand
caaaagacgugaagccaaa

SEQ ID NO: 649591 - RNA, 19 nt, Homo sapiens
  misc_RNA (1)...(19): siRNA sense strand
ccacuucucucccuaagca

SEQ ID NO: 649592 - RNA, 19 nt, Homo sapiens
  misc_RNA (1)...(19): siRNA sense strand
uaccaggaauacccaaaua

SEQ ID NO: 649593 - RNA, 19 nt, Homo sapiens
  misc_RNA (1)...(19): siRNA sense strand
ggcauuggcuaaagauaug

SEQ ID NO: 649594 - RNA, 19 nt, Homo sapiens
  misc_RNA (1)...(19): siRNA sense strand
gcagaagucaagaagauga

SEQ ID NO: 649595 - RNA, 19 nt, Homo sapiens
  misc_RNA (1)...(19): siRNA sense strand
gggagaaacuguuggaaaa

SEQ ID NO: 649596 - RNA, 19 nt, Homo sapiens
  misc_RNA (1)...(19): siRNA sense strand
caagagcacucagacuguu

SEQ ID NO: 649597 - RNA, 19 nt, Homo sapiens
  misc_RNA (1)...(19): siRNA sense strand
caaugguggucauggagua

SEQ ID NO: 649598 - RNA, 19 nt, Homo sapiens
  misc_RNA (1)...(19): siRNA sense strand
ccuuuaagauguaccauga

SEQ ID NO: 649599 - RNA, 19 nt, Homo sapiens
  misc_RNA (1)...(19): siRNA sense strand
agaaccaucuccagacauu

SEQ ID NO: 649600 - RNA, 19 nt, Homo sapiens
  misc_RNA (1)...(19): siRNA sense strand
aagugaggauucccauuua

SEQ ID NO: 649601 - RNA, 19 nt, Homo sapiens
  misc_RNA (1)...(19): siRNA sense strand
ggacauggcacuagcuaca

SEQ ID NO: 649602 - RNA, 19 nt, Homo sapiens
  misc_RNA (1)...(19): siRNA sense strand
gauugaaagucagaaguug

SEQ ID NO: 649603 - RNA, 19 nt, Homo sapiens
  misc_RNA (1)...(19): siRNA sense strand
aagaaaccgugcucagaaa

SEQ ID NO: 649604 - RNA, 19 nt, Homo sapiens
  misc_RNA (1)...(19): siRNA sense strand
gauaaagcgggacuucauu

SEQ ID NO: 649605 - RNA, 19 nt, Homo sapiens
  misc_RNA (1)...(19): siRNA sense strand
cagcugauacuucaauauu

SEQ ID NO: 649606 - RNA, 19 nt, Homo sapiens
  misc_RNA (1)...(19): siRNA sense strand
gacagcugauacuucaaua

SEQ ID NO: 649607 - RNA, 19 nt, Homo sapiens
  misc_RNA (1)...(19): siRNA sense strand
augaugaccuggcagauuu

SEQ ID NO: 649608 - RNA, 19 nt, Homo sapiens
  misc_RNA (1)...(19): siRNA sense strand
uauccagacugaucccuuu

SEQ ID NO: 649609 - RNA, 19 nt, Homo sapiens
  misc_RNA (1)...(19): siRNA sense strand
gaaguaguucucaucaaga

SEQ ID NO: 649610 - RNA, 19 nt, Homo sapiens
  misc_RNA (1)...(19): siRNA sense strand
gagggcaucuccuauaaaa

SEQ ID NO: 649611 - RNA, 19 nt, Homo sapiens
  misc_RNA (1)...(19): siRNA sense strand
gagggcaucuccuauaaaa

SEQ ID NO: 649612 - RNA, 19 nt, Homo sapiens
  misc_RNA (1)...(19): siRNA sense strand
agauagaaauggcaucaga

SEQ ID NO: 649613 - RNA, 19 nt, Homo sapiens
  misc_RNA (1)...(19): siRNA sense strand
ggucuaaggcuaacaucaa

SEQ ID NO: 649614 - RNA, 19 nt, Homo sapiens
  misc_RNA (1)...(19): siRNA sense strand
aaaccgugcucagaaacua

SEQ ID NO: 649615 - RNA, 19 nt, Homo sapiens
  misc_RNA (1)...(19): siRNA sense strand
gaagcccacugccauuaag

SEQ ID NO: 649616 - RNA, 19 nt, Homo sapiens
  misc_RNA (1)...(19): siRNA sense strand
aaacacagcccacuucucu

SEQ ID NO: 649617 - RNA, 19 nt, Homo sapiens
  misc_RNA (1)...(19): siRNA sense strand
uuaaagacauggaaauugc

SEQ ID NO: 649618 - RNA, 19 nt, Homo sapiens
  misc_RNA (1)...(19): siRNA sense strand
agacugaucccuuuaagau

SEQ ID NO: 649619 - RNA, 19 nt, Homo sapiens
  misc_RNA (1)...(19): siRNA sense strand
gauacuccaucuucuaaac

SEQ ID NO: 649620 - RNA, 19 nt, Homo sapiens
  misc_RNA (1)...(19): siRNA sense strand
uggaaucacccaccaaauu

SEQ ID NO: 649621 - RNA, 19 nt, Homo sapiens
  misc_RNA (1)...(19): siRNA sense strand
caacacuccuagccaaugg

SEQ ID NO: 649622 - RNA, 19 nt, Homo sapiens
  misc_RNA (1)...(19): siRNA sense strand
ugggaucccucgauaaugu

SEQ ID NO: 649623 - RNA, 19 nt, Homo sapiens
  misc_RNA (1)...(19): siRNA sense strand
gaaaguggacaucucuaag

SEQ ID NO: 649624 - RNA, 19 nt, Homo sapiens
  misc_RNA (1)...(19): siRNA sense strand
caacuccuuucauagacaa

SEQ ID NO: 649625 - RNA, 19 nt, Homo sapiens
  misc_RNA (1)...(19): siRNA sense strand
gugacacuguugaaagaaa

SEQ ID NO: 649626 - RNA, 19 nt, Homo sapiens
  misc_RNA (1)...(19): siRNA sense strand
ggacugaagacuacugaca

SEQ ID NO: 649627 - RNA, 19 nt, Homo sapiens
  misc_RNA (1)...(19): siRNA sense strand
gaugaugaccuggcagauu

SEQ ID NO: 649628 - RNA, 19 nt, Homo sapiens
  misc_RNA (1)...(19): siRNA sense strand
ggaguagaagggagcgaua

SEQ ID NO: 649629 - RNA, 19 nt, Homo sapiens
  misc_RNA (1)...(19): siRNA sense strand
ucucuaaggucuccuccaa

SEQ ID NO: 649630 - RNA, 19 nt, Homo sapiens
  misc_RNA (1)...(19): siRNA sense strand
cuccugaucugaagaaugu

SEQ ID NO: 649631 - RNA, 19 nt, Homo sapiens
  misc_RNA (1)...(19): siRNA sense strand
cugcagaagucaagaagau

SEQ ID NO: 649632 - RNA, 19 nt, Homo sapiens
  misc_RNA (1)...(19): siRNA sense strand
gaagggagcgauacuacag

SEQ ID NO: 649633 - RNA, 19 nt, Homo sapiens
  misc_RNA (1)...(19): siRNA sense strand
ggaaaccaacgugaucuug

SEQ ID NO: 649634 - RNA, 19 nt, Homo sapiens
  misc_RNA (1)...(19): siRNA sense strand
aagguuggcuccacggaaa

SEQ ID NO: 649635 - RNA, 19 nt, Homo sapiens
  misc_RNA (1)...(19): siRNA sense strand
caagaagcccacugccauu

SEQ ID NO: 649636 - RNA, 19 nt, Homo sapiens
  misc_RNA (1)...(19): siRNA sense strand
ccacgcuccugcccaagaa

SEQ ID NO: 649637 - RNA, 19 nt, Homo sapiens
  misc_RNA (1)...(19): siRNA sense strand
cauggaaauugcacaaaca

SEQ ID NO: 649638 - RNA, 19 nt, Homo sapiens
  misc_RNA (1)...(19): siRNA sense strand
aaugaucccuugaaagaca

SEQ ID NO: 649639 - RNA, 19 nt, Homo sapiens
  misc_RNA (1)...(19): siRNA sense strand
aaggugggaucccucgaua

SEQ ID NO: 649640 - RNA, 19 nt, Homo sapiens
  misc_RNA (1)...(19): siRNA sense strand
gggaaaaccugcagaaguc

SEQ ID NO: 649641 - RNA, 19 nt, Homo sapiens
  misc_RNA (1)...(19): siRNA sense strand
ccauuaagacugagggaaa

SEQ ID NO: 649642 - RNA, 19 nt, Homo sapiens
  misc_RNA (1)...(19): siRNA sense strand
gcaacagucaaccuucuga

SEQ ID NO: 649643 - RNA, 19 nt, Homo sapiens
  misc_RNA (1)...(19): siRNA sense strand
aaagaaguggcccugguua

SEQ ID NO: 649644 - RNA, 19 nt, Homo sapiens
  misc_RNA (1)...(19): siRNA sense strand
gauagaaauggcaucagaa

SEQ ID NO: 649645 - RNA, 19 nt, Homo sapiens
  misc_RNA (1)...(19): siRNA sense strand
cugaauuccuugaagagaa

SEQ ID NO: 649646 - RNA, 19 nt, Homo sapiens
  misc_RNA (1)...(19): siRNA sense strand
gaacaagaaaguggacauc

SEQ ID NO: 649647 - RNA, 19 nt, Homo sapiens
  misc_RNA (1)...(19): siRNA sense strand
aagagcaccuccaccaguu

SEQ ID NO: 649648 - RNA, 19 nt, Homo sapiens
  misc_RNA (1)...(19): siRNA sense strand
agacauugagggagagaua

SEQ ID NO: 649649 - RNA, 19 nt, Homo sapiens
  misc_RNA (1)...(19): siRNA sense strand
aaacuagccagauugaaga

SEQ ID NO: 649650 - RNA, 19 nt, Homo sapiens
  misc_RNA (1)...(19): siRNA sense strand
ucuaaggucuccuccaagu

SEQ ID NO: 649651 - RNA, 19 nt, Homo sapiens
  misc_RNA (1)...(19): siRNA sense strand
ucaugaagcugcagaagaa

SEQ ID NO: 649652 - RNA, 19 nt, Homo sapiens
  misc_RNA (1)...(19): siRNA sense strand
guaaggacuccaagaugua

SEQ ID NO: 649653 - RNA, 19 nt, Homo sapiens
  misc_RNA (1)...(19): siRNA sense strand
cugcugagcuccaaagaug

SEQ ID NO: 649654 - RNA, 19 nt, Homo sapiens
  misc_RNA (1)...(19): siRNA sense strand
cguaaggacuccaagaugu

SEQ ID NO: 649655 - RNA, 19 nt, Homo sapiens
  misc_RNA (1)...(19): siRNA sense strand
ucaaggagcugcgggugaa

SEQ ID NO: 649656 - RNA, 19 nt, Homo sapiens
  misc_RNA (1)...(19): siRNA sense strand
gcaaggaggagaacuacga

SEQ ID NO: 649657 - RNA, 19 nt, Homo sapiens
  misc_RNA (1)...(19): siRNA sense strand
ccucacgcaucacaccuua

SEQ ID NO: 649658 - RNA, 19 nt, Homo sapiens
  misc_RNA (1)...(19): siRNA sense strand
uggaggaggucgccauuga

SEQ ID NO: 649659 - RNA, 19 nt, Homo sapiens
  misc_RNA (1)...(19): siRNA sense strand
acccgcagcuguacaagaa

SEQ ID NO: 649660 - RNA, 19 nt, Homo sapiens
  misc_RNA (1)...(19): siRNA sense strand
acuccaagauguacaagga

SEQ ID NO: 649661 - RNA, 19 nt, Homo sapiens
  misc_RNA (1)...(19): siRNA sense strand
gcugcaaggaggagaacua

SEQ ID NO: 649662 - RNA, 19 nt, Homo sapiens
  misc_RNA (1)...(19): siRNA sense strand
gcaccagagugaggagaag

SEQ ID NO: 649663 - RNA, 19 nt, Homo sapiens
  misc_RNA (1)...(19): siRNA sense strand
gcauggaggagaaggagau

SEQ ID NO: 649664 - RNA, 19 nt, Homo sapiens
  misc_RNA (1)...(19): siRNA sense strand
gcaagcacacgcugaagcu

SEQ ID NO: 649665 - RNA, 19 nt, Homo sapiens
  misc_RNA (1)...(19): siRNA sense strand
gcucaagcacagccucaug

SEQ ID NO: 649666 - RNA, 19 nt, Homo sapiens
  misc_RNA (1)...(19): siRNA sense strand
ucuacuacccgcagcugua

SEQ ID NO: 649667 - RNA, 19 nt, Homo sapiens
  misc_RNA (1)...(19): siRNA sense strand
gagcaggccaacaccaucu

SEQ ID NO: 649668 - RNA, 19 nt, Homo sapiens
  misc_RNA (1)...(19): siRNA sense strand
gucaugaagcugcagaaga

SEQ ID NO: 649669 - RNA, 19 nt, Homo sapiens
  misc_RNA (1)...(19): siRNA sense strand
caaccuggucauccgcaaa

SEQ ID NO: 649670 - RNA, 19 nt, Homo sapiens
  misc_RNA (1)...(19): siRNA sense strand
gagcuccaaagaugacuuc

SEQ ID NO: 649671 - RNA, 19 nt, Homo sapiens
  misc_RNA (1)...(19): siRNA sense strand
ucaagcacagccucaugaa

SEQ ID NO: 649672 - RNA, 19 nt, Homo sapiens
  misc_RNA (1)...(19): siRNA sense strand
accugcagcuggagauuga

SEQ ID NO: 649673 - RNA, 19 nt, Homo sapiens
  misc_RNA (1)...(19): siRNA sense strand
uggaggagaaggagauguu

SEQ ID NO: 649674 - RNA, 19 nt, Homo sapiens
  misc_RNA (1)...(19): siRNA sense strand
ucaugaagcugcagaagaa

SEQ ID NO: 649675 - RNA, 19 nt, Homo sapiens
  misc_RNA (1)...(19): siRNA sense strand
guaaggacuccaagaugua

SEQ ID NO: 649676 - RNA, 19 nt, Homo sapiens
  misc_RNA (1)...(19): siRNA sense strand
cugcugagcuccaaagaug

SEQ ID NO: 649677 - RNA, 19 nt, Homo sapiens
  misc_RNA (1)...(19): siRNA sense strand
cguaaggacuccaagaugu

SEQ ID NO: 649678 - RNA, 19 nt, Homo sapiens
  misc_RNA (1)...(19): siRNA sense strand
ucaaggagcugcgggugaa

SEQ ID NO: 649679 - RNA, 19 nt, Homo sapiens
  misc_RNA (1)...(19): siRNA sense strand
gcaaggaggagaacuacga

SEQ ID NO: 649680 - RNA, 19 nt, Homo sapiens
  misc_RNA (1)...(19): siRNA sense strand
ccucacgcaucacaccuua

SEQ ID NO: 649681 - RNA, 19 nt, Homo sapiens
  misc_RNA (1)...(19): siRNA sense strand
uggaggaggucgccauuga

SEQ ID NO: 649682 - RNA, 19 nt, Homo sapiens
  misc_RNA (1)...(19): siRNA sense strand
acacccagcucucagacaa

SEQ ID NO: 649683 - RNA, 19 nt, Homo sapiens
  misc_RNA (1)...(19): siRNA sense strand
acccgcagcuguacaagaa

SEQ ID NO: 649684 - RNA, 19 nt, Homo sapiens
  misc_RNA (1)...(19): siRNA sense strand
acuccaagauguacaagga

SEQ ID NO: 649685 - RNA, 19 nt, Homo sapiens
  misc_RNA (1)...(19): siRNA sense strand
gcugcaaggaggagaacua

SEQ ID NO: 649686 - RNA, 19 nt, Homo sapiens
  misc_RNA (1)...(19): siRNA sense strand
gcaccagagugaggagaag

SEQ ID NO: 649687 - RNA, 19 nt, Homo sapiens
  misc_RNA (1)...(19): siRNA sense strand
ggaggacacccagcucuca

SEQ ID NO: 649688 - RNA, 19 nt, Homo sapiens
  misc_RNA (1)...(19): siRNA sense strand
gcauggaggagaaggagau

SEQ ID NO: 649689 - RNA, 19 nt, Homo sapiens
  misc_RNA (1)...(19): siRNA sense strand
gcaagcacacgcugaagcu

SEQ ID NO: 649690 - RNA, 19 nt, Homo sapiens
  misc_RNA (1)...(19): siRNA sense strand
gcucaagcacagccucaug

SEQ ID NO: 649691 - RNA, 19 nt, Homo sapiens
  misc_RNA (1)...(19): siRNA sense strand
ucuacuacccgcagcugua

SEQ ID NO: 649692 - RNA, 19 nt, Homo sapiens
  misc_RNA (1)...(19): siRNA sense strand
gagcaggccaacaccaucu

SEQ ID NO: 649693 - RNA, 19 nt, Homo sapiens
  misc_RNA (1)...(19): siRNA sense strand
gucaugaagcugcagaaga

SEQ ID NO: 649694 - RNA, 19 nt, Homo sapiens
  misc_RNA (1)...(19): siRNA sense strand
gagcuccaaagaugacuuc

SEQ ID NO: 649695 - RNA, 19 nt, Homo sapiens
  misc_RNA (1)...(19): siRNA sense strand
caaccuggucauccgcaaa

SEQ ID NO: 649696 - RNA, 19 nt, Homo sapiens
  misc_RNA (1)...(19): siRNA sense strand
ucaagcacagccucaugaa

SEQ ID NO: 649697 - RNA, 19 nt, Homo sapiens
  misc_RNA (1)...(19): siRNA sense strand
ccugagcuccgaccuggaa

SEQ ID NO: 649698 - RNA, 19 nt, Homo sapiens
  misc_RNA (1)...(19): siRNA sense strand
accugcagcuggagauuga

SEQ ID NO: 649699 - RNA, 19 nt, Homo sapiens
  misc_RNA (1)...(19): siRNA sense strand
uggaggagaaggagauguu

SEQ ID NO: 649700 - RNA, 19 nt, Homo sapiens
  misc_RNA (1)...(19): siRNA sense strand
ucaugaagcugcagaagaa

SEQ ID NO: 649701 - RNA, 19 nt, Homo sapiens
  misc_RNA (1)...(19): siRNA sense strand
guaaggacuccaagaugua

SEQ ID NO: 649702 - RNA, 19 nt, Homo sapiens
  misc_RNA (1)...(19): siRNA sense strand
cugcugagcuccaaagaug

SEQ ID NO: 649703 - RNA, 19 nt, Homo sapiens
  misc_RNA (1)...(19): siRNA sense strand
cguaaggacuccaagaugu

SEQ ID NO: 649704 - RNA, 19 nt, Homo sapiens
  misc_RNA (1)...(19): siRNA sense strand
ucaaggagcugcgggugaa

SEQ ID NO: 649705 - RNA, 19 nt, Homo sapiens
  misc_RNA (1)...(19): siRNA sense strand
gcaaggaggagaacuacga

SEQ ID NO: 649706 - RNA, 19 nt, Homo sapiens
  misc_RNA (1)...(19): siRNA sense strand
ccucacgcaucacaccuua

SEQ ID NO: 649707 - RNA, 19 nt, Homo sapiens
  misc_RNA (1)...(19): siRNA sense strand
uggaggaggucgccauuga

SEQ ID NO: 649708 - RNA, 19 nt, Homo sapiens
  misc_RNA (1)...(19): siRNA sense strand
acacccagcucucagacaa

SEQ ID NO: 649709 - RNA, 19 nt, Homo sapiens
  misc_RNA (1)...(19): siRNA sense strand
acccgcagcuguacaagaa

SEQ ID NO: 649710 - RNA, 19 nt, Homo sapiens
  misc_RNA (1)...(19): siRNA sense strand
acuccaagauguacaagga

SEQ ID NO: 649711 - RNA, 19 nt, Homo sapiens
  misc_RNA (1)...(19): siRNA sense strand
gcugcaaggaggagaacua

SEQ ID NO: 649712 - RNA, 19 nt, Homo sapiens
  misc_RNA (1)...(19): siRNA sense strand
gcaccagagugaggagaag

SEQ ID NO: 649713 - RNA, 19 nt, Homo sapiens
  misc_RNA (1)...(19): siRNA sense strand
ggaggacacccagcucuca

SEQ ID NO: 649714 - RNA, 19 nt, Homo sapiens
  misc_RNA (1)...(19): siRNA sense strand
gcauggaggagaaggagau

SEQ ID NO: 649715 - RNA, 19 nt, Homo sapiens
  misc_RNA (1)...(19): siRNA sense strand
gcaagcacacgcugaagcu

SEQ ID NO: 649716 - RNA, 19 nt, Homo sapiens
  misc_RNA (1)...(19): siRNA sense strand
gcucaagcacagccucaug

SEQ ID NO: 649717 - RNA, 19 nt, Homo sapiens
  misc_RNA (1)...(19): siRNA sense strand
ucuacuacccgcagcugua

SEQ ID NO: 649718 - RNA, 19 nt, Homo sapiens
  misc_RNA (1)...(19): siRNA sense strand
gagcaggccaacaccaucu

SEQ ID NO: 649719 - RNA, 19 nt, Homo sapiens
  misc_RNA (1)...(19): siRNA sense strand
gucaugaagcugcagaaga

SEQ ID NO: 649720 - RNA, 19 nt, Homo sapiens
  misc_RNA (1)...(19): siRNA sense strand
gagcuccaaagaugacuuc

SEQ ID NO: 649721 - RNA, 19 nt, Homo sapiens
  misc_RNA (1)...(19): siRNA sense strand
caaccuggucauccgcaaa

SEQ ID NO: 649722 - RNA, 19 nt, Homo sapiens
  misc_RNA (1)...(19): siRNA sense strand
ucaagcacagccucaugaa

SEQ ID NO: 649723 - RNA, 19 nt, Homo sapiens
  misc_RNA (1)...(19): siRNA sense strand
ccugagcuccgaccuggaa

SEQ ID NO: 649724 - RNA, 19 nt, Homo sapiens
  misc_RNA (1)...(19): siRNA sense strand
accugcagcuggagauuga

SEQ ID NO: 649725 - RNA, 19 nt, Homo sapiens
  misc_RNA (1)...(19): siRNA sense strand
uggaggagaaggagauguu

SEQ ID NO: 649726 - RNA, 19 nt, Homo sapiens
  misc_RNA (1)...(19): siRNA sense strand
ucaugaagcugcagaagaa

SEQ ID NO: 649727 - RNA, 19 nt, Homo sapiens
  misc_RNA (1)...(19): siRNA sense strand
guaaggacuccaagaugua

SEQ ID NO: 649728 - RNA, 19 nt, Homo sapiens
  misc_RNA (1)...(19): siRNA sense strand
cugcugagcuccaaagaug

SEQ ID NO: 649729 - RNA, 19 nt, Homo sapiens
  misc_RNA (1)...(19): siRNA sense strand
cguaaggacuccaagaugu

SEQ ID NO: 649730 - RNA, 19 nt, Homo sapiens
  misc_RNA (1)...(19): siRNA sense strand
ucaaggagcugcgggugaa

SEQ ID NO: 649731 - RNA, 19 nt, Homo sapiens
  misc_RNA (1)...(19): siRNA sense strand
gcaaggaggagaacuacga

SEQ ID NO: 649732 - RNA, 19 nt, Homo sapiens
  misc_RNA (1)...(19): siRNA sense strand
ccucacgcaucacaccuua

SEQ ID NO: 649733 - RNA, 19 nt, Homo sapiens
  misc_RNA (1)...(19): siRNA sense strand
uggaggaggucgccauuga

SEQ ID NO: 649734 - RNA, 19 nt, Homo sapiens
  misc_RNA (1)...(19): siRNA sense strand
acccgcagcuguacaagaa

SEQ ID NO: 649735 - RNA, 19 nt, Homo sapiens
  misc_RNA (1)...(19): siRNA sense strand
acuccaagauguacaagga

SEQ ID NO: 649736 - RNA, 19 nt, Homo sapiens
  misc_RNA (1)...(19): siRNA sense strand
gcugcaaggaggagaacua

SEQ ID NO: 649737 - RNA, 19 nt, Homo sapiens
  misc_RNA (1)...(19): siRNA sense strand
gcaccagagugaggagaag

SEQ ID NO: 649738 - RNA, 19 nt, Homo sapiens
  misc_RNA (1)...(19): siRNA sense strand
gcauggaggagaaggagau

SEQ ID NO: 649739 - RNA, 19 nt, Homo sapiens
  misc_RNA (1)...(19): siRNA sense strand
gcaagcacacgcugaagcu

SEQ ID NO: 649740 - RNA, 19 nt, Homo sapiens
  misc_RNA (1)...(19): siRNA sense strand
gcucaagcacagccucaug

SEQ ID NO: 649741 - RNA, 19 nt, Homo sapiens
  misc_RNA (1)...(19): siRNA sense strand
ucuacuacccgcagcugua

SEQ ID NO: 649742 - RNA, 19 nt, Homo sapiens
  misc_RNA (1)...(19): siRNA sense strand
gagcaggccaacaccaucu

SEQ ID NO: 649743 - RNA, 19 nt, Homo sapiens
  misc_RNA (1)...(19): siRNA sense strand
gucaugaagcugcagaaga

SEQ ID NO: 649744 - RNA, 19 nt, Homo sapiens
  misc_RNA (1)...(19): siRNA sense strand
caaccuggucauccgcaaa

SEQ ID NO: 649745 - RNA, 19 nt, Homo sapiens
  misc_RNA (1)...(19): siRNA sense strand
gagcuccaaagaugacuuc

SEQ ID NO: 649746 - RNA, 19 nt, Homo sapiens
  misc_RNA (1)...(19): siRNA sense strand
ucaagcacagccucaugaa

SEQ ID NO: 649747 - RNA, 19 nt, Homo sapiens
  misc_RNA (1)...(19): siRNA sense strand
accugcagcuggagauuga

SEQ ID NO: 649748 - RNA, 19 nt, Homo sapiens
  misc_RNA (1)...(19): siRNA sense strand
uggaggagaaggagauguu

SEQ ID NO: 649749 - RNA, 19 nt, Homo sapiens
  misc_RNA (1)...(19): siRNA sense strand
ucaugaagcugcagaagaa

SEQ ID NO: 649750 - RNA, 19 nt, Homo sapiens
  misc_RNA (1)...(19): siRNA sense strand
guaaggacuccaagaugua

SEQ ID NO: 649751 - RNA, 19 nt, Homo sapiens
  misc_RNA (1)...(19): siRNA sense strand
cugcugagcuccaaagaug

SEQ ID NO: 649752 - RNA, 19 nt, Homo sapiens
  misc_RNA (1)...(19): siRNA sense strand
cguaaggacuccaagaugu

SEQ ID NO: 649753 - RNA, 19 nt, Homo sapiens
  misc_RNA (1)...(19): siRNA sense strand
ucaaggagcugcgggugaa

SEQ ID NO: 649754 - RNA, 19 nt, Homo sapiens
  misc_RNA (1)...(19): siRNA sense strand
gcaaggaggagaacuacga

SEQ ID NO: 649755 - RNA, 19 nt, Homo sapiens
  misc_RNA (1)...(19): siRNA sense strand
ccucacgcaucacaccuua

SEQ ID NO: 649756 - RNA, 19 nt, Homo sapiens
  misc_RNA (1)...(19): siRNA sense strand
uggaggaggucgccauuga

SEQ ID NO: 649757 - RNA, 19 nt, Homo sapiens
  misc_RNA (1)...(19): siRNA sense strand
acacccagcucucagacaa

SEQ ID NO: 649758 - RNA, 19 nt, Homo sapiens
  misc_RNA (1)...(19): siRNA sense strand
acccgcagcuguacaagaa

SEQ ID NO: 649759 - RNA, 19 nt, Homo sapiens
  misc_RNA (1)...(19): siRNA sense strand
acuccaagauguacaagga

SEQ ID NO: 649760 - RNA, 19 nt, Homo sapiens
  misc_RNA (1)...(19): siRNA sense strand
gcugcaaggaggagaacua

SEQ ID NO: 649761 - RNA, 19 nt, Homo sapiens
  misc_RNA (1)...(19): siRNA sense strand
gcaccagagugaggagaag

SEQ ID NO: 649762 - RNA, 19 nt, Homo sapiens
  misc_RNA (1)...(19): siRNA sense strand
ggaggacacccagcucuca

SEQ ID NO: 649763 - RNA, 19 nt, Homo sapiens
  misc_RNA (1)...(19): siRNA sense strand
gcauggaggagaaggagau

SEQ ID NO: 649764 - RNA, 19 nt, Homo sapiens
  misc_RNA (1)...(19): siRNA sense strand
gcaagcacacgcugaagcu

SEQ ID NO: 649765 - RNA, 19 nt, Homo sapiens
  misc_RNA (1)...(19): siRNA sense strand
gcucaagcacagccucaug

SEQ ID NO: 649766 - RNA, 19 nt, Homo sapiens
  misc_RNA (1)...(19): siRNA sense strand
ucuacuacccgcagcugua

SEQ ID NO: 649767 - RNA, 19 nt, Homo sapiens
  misc_RNA (1)...(19): siRNA sense strand
gagcaggccaacaccaucu

SEQ ID NO: 649768 - RNA, 19 nt, Homo sapiens
  misc_RNA (1)...(19): siRNA sense strand
gucaugaagcugcagaaga

SEQ ID NO: 649769 - RNA, 19 nt, Homo sapiens
  misc_RNA (1)...(19): siRNA sense strand
gagcuccaaagaugacuuc

SEQ ID NO: 649770 - RNA, 19 nt, Homo sapiens
  misc_RNA (1)...(19): siRNA sense strand
caaccuggucauccgcaaa

SEQ ID NO: 649771 - RNA, 19 nt, Homo sapiens
  misc_RNA (1)...(19): siRNA sense strand
ucaagcacagccucaugaa

SEQ ID NO: 649772 - RNA, 19 nt, Homo sapiens
  misc_RNA (1)...(19): siRNA sense strand
ccugagcuccgaccuggaa

SEQ ID NO: 649773 - RNA, 19 nt, Homo sapiens
  misc_RNA (1)...(19): siRNA sense strand
accugcagcuggagauuga

SEQ ID NO: 649774 - RNA, 19 nt, Homo sapiens
  misc_RNA (1)...(19): siRNA sense strand
uggaggagaaggagauguu

SEQ ID NO: 649775 - RNA, 19 nt, Homo sapiens
  misc_RNA (1)...(19): siRNA sense strand
ucaugaagcugcagaagaa

SEQ ID NO: 649776 - RNA, 19 nt, Homo sapiens
  misc_RNA (1)...(19): siRNA sense strand
guaaggacuccaagaugua

SEQ ID NO: 649777 - RNA, 19 nt, Homo sapiens
  misc_RNA (1)...(19): siRNA sense strand
cugcugagcuccaaagaug

SEQ ID NO: 649778 - RNA, 19 nt, Homo sapiens
  misc_RNA (1)...(19): siRNA sense strand
cguaaggacuccaagaugu

SEQ ID NO: 649779 - RNA, 19 nt, Homo sapiens
  misc_RNA (1)...(19): siRNA sense strand
ucaaggagcugcgggugaa

SEQ ID NO: 649780 - RNA, 19 nt, Homo sapiens
  misc_RNA (1)...(19): siRNA sense strand
gcaaggaggagaacuacga

SEQ ID NO: 649781 - RNA, 19 nt, Homo sapiens
  misc_RNA (1)...(19): siRNA sense strand
ccucacgcaucacaccuua

SEQ ID NO: 649782 - RNA, 19 nt, Homo sapiens
  misc_RNA (1)...(19): siRNA sense strand
uggaggaggucgccauuga

SEQ ID NO: 649783 - RNA, 19 nt, Homo sapiens
  misc_RNA (1)...(19): siRNA sense strand
acacccagcucucagacaa

SEQ ID NO: 649784 - RNA, 19 nt, Homo sapiens
  misc_RNA (1)...(19): siRNA sense strand
acccgcagcuguacaagaa

SEQ ID NO: 649785 - RNA, 19 nt, Homo sapiens
  misc_RNA (1)...(19): siRNA sense strand
acuccaagauguacaagga

SEQ ID NO: 649786 - RNA, 19 nt, Homo sapiens
  misc_RNA (1)...(19): siRNA sense strand
gcugcaaggaggagaacua

SEQ ID NO: 649787 - RNA, 19 nt, Homo sapiens
  misc_RNA (1)...(19): siRNA sense strand
gcaccagagugaggagaag

SEQ ID NO: 649788 - RNA, 19 nt, Homo sapiens
  misc_RNA (1)...(19): siRNA sense strand
ggaggacacccagcucuca

SEQ ID NO: 649789 - RNA, 19 nt, Homo sapiens
  misc_RNA (1)...(19): siRNA sense strand
gcauggaggagaaggagau

SEQ ID NO: 649790 - RNA, 19 nt, Homo sapiens
  misc_RNA (1)...(19): siRNA sense strand
gcaagcacacgcugaagcu

SEQ ID NO: 649791 - RNA, 19 nt, Homo sapiens
  misc_RNA (1)...(19): siRNA sense strand
gcucaagcacagccucaug

SEQ ID NO: 649792 - RNA, 19 nt, Homo sapiens
  misc_RNA (1)...(19): siRNA sense strand
ucuacuacccgcagcugua

SEQ ID NO: 649793 - RNA, 19 nt, Homo sapiens
  misc_RNA (1)...(19): siRNA sense strand
gagcaggccaacaccaucu

SEQ ID NO: 649794 - RNA, 19 nt, Homo sapiens
  misc_RNA (1)...(19): siRNA sense strand
gucaugaagcugcagaaga

SEQ ID NO: 649795 - RNA, 19 nt, Homo sapiens
  misc_RNA (1)...(19): siRNA sense strand
gagcuccaaagaugacuuc

SEQ ID NO: 649796 - RNA, 19 nt, Homo sapiens
  misc_RNA (1)...(19): siRNA sense strand
caaccuggucauccgcaaa

SEQ ID NO: 649797 - RNA, 19 nt, Homo sapiens
  misc_RNA (1)...(19): siRNA sense strand
ucaagcacagccucaugaa

SEQ ID NO: 649798 - RNA, 19 nt, Homo sapiens
  misc_RNA (1)...(19): siRNA sense strand
ccugagcuccgaccuggaa

SEQ ID NO: 649799 - RNA, 19 nt, Homo sapiens
  misc_RNA (1)...(19): siRNA sense strand
accugcagcuggagauuga

SEQ ID NO: 649800 - RNA, 19 nt, Homo sapiens
  misc_RNA (1)...(19): siRNA sense strand
uggaggagaaggagauguu

SEQ ID NO: 649801 - RNA, 19 nt, Homo sapiens
  misc_RNA (1)...(19): siRNA sense strand
gcacuuuccuccagcaaca

SEQ ID NO: 649802 - RNA, 19 nt, Homo sapiens
  misc_RNA (1)...(19): siRNA sense strand
guccugagaucuucaccuu

SEQ ID NO: 649803 - RNA, 19 nt, Homo sapiens
  misc_RNA (1)...(19): siRNA sense strand
cucgagcccuuuaaucuga

SEQ ID NO: 649804 - RNA, 19 nt, Homo sapiens
  misc_RNA (1)...(19): siRNA sense strand
cuucggagcccucggacua

SEQ ID NO: 649805 - RNA, 19 nt, Homo sapiens
  misc_RNA (1)...(19): siRNA sense strand
gcucuggaccucagcacuu

SEQ ID NO: 649806 - RNA, 19 nt, Homo sapiens
  misc_RNA (1)...(19): siRNA sense strand
gaaccgaacccagccaaaa

SEQ ID NO: 649807 - RNA, 19 nt, Homo sapiens
  misc_RNA (1)...(19): siRNA sense strand
ggaaccgaacccagccaaa

SEQ ID NO: 649808 - RNA, 19 nt, Homo sapiens
  misc_RNA (1)...(19): siRNA sense strand
gcuccgguccugagaucuu

SEQ ID NO: 649809 - RNA, 19 nt, Homo sapiens
  misc_RNA (1)...(19): siRNA sense strand
gcacuuuccuccagcaaca

SEQ ID NO: 649810 - RNA, 19 nt, Homo sapiens
  misc_RNA (1)...(19): siRNA sense strand
guccugagaucuucaccuu

SEQ ID NO: 649811 - RNA, 19 nt, Homo sapiens
  misc_RNA (1)...(19): siRNA sense strand
cucgagcccuuuaaucuga

SEQ ID NO: 649812 - RNA, 19 nt, Homo sapiens
  misc_RNA (1)...(19): siRNA sense strand
cuucggagcccucggacua

SEQ ID NO: 649813 - RNA, 19 nt, Homo sapiens
  misc_RNA (1)...(19): siRNA sense strand
gcucuggaccucagcacuu

SEQ ID NO: 649814 - RNA, 19 nt, Homo sapiens
  misc_RNA (1)...(19): siRNA sense strand
gaaccgaacccagccaaaa

SEQ ID NO: 649815 - RNA, 19 nt, Homo sapiens
  misc_RNA (1)...(19): siRNA sense strand
ggaaccgaacccagccaaa

SEQ ID NO: 649816 - RNA, 19 nt, Homo sapiens
  misc_RNA (1)...(19): siRNA sense strand
gcuccgguccugagaucuu

SEQ ID NO: 649817 - RNA, 19 nt, Homo sapiens
  misc_RNA (1)...(19): siRNA sense strand
gcaucaagcugcauaagaa

SEQ ID NO: 649818 - RNA, 19 nt, Homo sapiens
  misc_RNA (1)...(19): siRNA sense strand
gaacguggcuaaccucauc

SEQ ID NO: 649819 - RNA, 19 nt, Homo sapiens
  misc_RNA (1)...(19): siRNA sense strand
caucuucgguuccaguuuc

SEQ ID NO: 649820 - RNA, 19 nt, Homo sapiens
  misc_RNA (1)...(19): siRNA sense strand
uggcuaaccucaucagcau

SEQ ID NO: 649821 - RNA, 19 nt, Homo sapiens
  misc_RNA (1)...(19): siRNA sense strand
ggcaucaagcugcauaaga

SEQ ID NO: 649822 - RNA, 19 nt, Homo sapiens
  misc_RNA (1)...(19): siRNA sense strand
auaagccggugcugagaga

SEQ ID NO: 649823 - RNA, 19 nt, Homo sapiens
  misc_RNA (1)...(19): siRNA sense strand
gcuaaccucaucagcaucu

SEQ ID NO: 649824 - RNA, 19 nt, Homo sapiens
  misc_RNA (1)...(19): siRNA sense strand
gggagccacuuauauguau

SEQ ID NO: 649825 - RNA, 19 nt, Homo sapiens
  misc_RNA (1)...(19): siRNA sense strand
gcacugaggccccagauua

SEQ ID NO: 649826 - RNA, 19 nt, Homo sapiens
  misc_RNA (1)...(19): siRNA sense strand
gggaagcgccucuacauca

SEQ ID NO: 649827 - RNA, 19 nt, Homo sapiens
  misc_RNA (1)...(19): siRNA sense strand
gcucugacaucuggauuug

SEQ ID NO: 649828 - RNA, 19 nt, Homo sapiens
  misc_RNA (1)...(19): siRNA sense strand
guaccagccucgacacaau

SEQ ID NO: 649829 - RNA, 19 nt, Homo sapiens
  misc_RNA (1)...(19): siRNA sense strand
aaggagggcugaaguugaa

SEQ ID NO: 649830 - RNA, 19 nt, Homo sapiens
  misc_RNA (1)...(19): siRNA sense strand
gcagguugauguagacaca

SEQ ID NO: 649831 - RNA, 19 nt, Homo sapiens
  misc_RNA (1)...(19): siRNA sense strand
gggaagagaucgucuaccu

SEQ ID NO: 649832 - RNA, 19 nt, Homo sapiens
  misc_RNA (1)...(19): siRNA sense strand
caucuccucucgcaucuau

SEQ ID NO: 649833 - RNA, 19 nt, Homo sapiens
  misc_RNA (1)...(19): siRNA sense strand
gauuguagcucugacaucu

SEQ ID NO: 649834 - RNA, 19 nt, Homo sapiens
  misc_RNA (1)...(19): siRNA sense strand
guacgggagccacuuauau

SEQ ID NO: 649835 - RNA, 19 nt, Homo sapiens
  misc_RNA (1)...(19): siRNA sense strand
gcuacgaaaugugggaauu

SEQ ID NO: 649836 - RNA, 19 nt, Homo sapiens
  misc_RNA (1)...(19): siRNA sense strand
gaaaugccaggccugauca

SEQ ID NO: 649837 - RNA, 19 nt, Homo sapiens
  misc_RNA (1)...(19): siRNA sense strand
cccaaugucuuacgagaug

SEQ ID NO: 649838 - RNA, 19 nt, Homo sapiens
  misc_RNA (1)...(19): siRNA sense strand
gaaaggacccagggaagag

SEQ ID NO: 649839 - RNA, 19 nt, Homo sapiens
  misc_RNA (1)...(19): siRNA sense strand
gggagacguucgaggugaa

SEQ ID NO: 649840 - RNA, 19 nt, Homo sapiens
  misc_RNA (1)...(19): siRNA sense strand
guacauggucaguggagaa

SEQ ID NO: 649841 - RNA, 19 nt, Homo sapiens
  misc_RNA (1)...(19): siRNA sense strand
ggaggacgaggaacuaaag

SEQ ID NO: 649842 - RNA, 19 nt, Homo sapiens
  misc_RNA (1)...(19): siRNA sense strand
ggaagcgccucuacaucac

SEQ ID NO: 649843 - RNA, 19 nt, Homo sapiens
  misc_RNA (1)...(19): siRNA sense strand
ccaacuuccugguggacuu

SEQ ID NO: 649844 - RNA, 19 nt, Homo sapiens
  misc_RNA (1)...(19): siRNA sense strand
cgaaaugccaggccugauc

SEQ ID NO: 649845 - RNA, 19 nt, Homo sapiens
  misc_RNA (1)...(19): siRNA sense strand
aaaggagggcugaaguuga

SEQ ID NO: 649846 - RNA, 19 nt, Homo sapiens
  misc_RNA (1)...(19): siRNA sense strand
gggcagcucccaaugucuu

SEQ ID NO: 649847 - RNA, 19 nt, Homo sapiens
  misc_RNA (1)...(19): siRNA sense strand
ggcaguaugacaucucuga

SEQ ID NO: 649848 - RNA, 19 nt, Homo sapiens
  misc_RNA (1)...(19): siRNA sense strand
ggacgaccgcuuccucuac

SEQ ID NO: 649849 - RNA, 19 nt, Homo sapiens
  misc_RNA (1)...(19): siRNA sense strand
auccagcgcuucuacaaga

SEQ ID NO: 649850 - RNA, 19 nt, Homo sapiens
  misc_RNA (1)...(19): siRNA sense strand
ugaaaggacccagggaaga

SEQ ID NO: 649851 - RNA, 19 nt, Homo sapiens
  misc_RNA (1)...(19): siRNA sense strand
gaggcaguaugacaucucu

SEQ ID NO: 649852 - RNA, 19 nt, Homo sapiens
  misc_RNA (1)...(19): siRNA sense strand
ggagccacuuauauguaug

SEQ ID NO: 649853 - RNA, 19 nt, Homo sapiens
  misc_RNA (1)...(19): siRNA sense strand
gaccugaggcaguaugaca

SEQ ID NO: 649854 - RNA, 19 nt, Homo sapiens
  misc_RNA (1)...(19): siRNA sense strand
gcuggcugcugcccgaaau

SEQ ID NO: 649855 - RNA, 19 nt, Homo sapiens
  misc_RNA (1)...(19): siRNA sense strand
cgggagccacuuauaugua

SEQ ID NO: 649856 - RNA, 19 nt, Homo sapiens
  misc_RNA (1)...(19): siRNA sense strand
gacgaccgcuuccucuacu

SEQ ID NO: 649857 - RNA, 19 nt, Homo sapiens
  misc_RNA (1)...(19): siRNA sense strand
ccaagucuccccaguauug

SEQ ID NO: 649858 - RNA, 19 nt, Homo sapiens
  misc_RNA (1)...(19): siRNA sense strand
ggaggcagcauuguuaagg

SEQ ID NO: 649859 - RNA, 19 nt, Homo sapiens
  misc_RNA (1)...(19): siRNA sense strand
caagaacgagggagguaca

SEQ ID NO: 649860 - RNA, 19 nt, Homo sapiens
  misc_RNA (1)...(19): siRNA sense strand
ucuaaaagaugggcuuauu

SEQ ID NO: 649861 - RNA, 19 nt, Homo sapiens
  misc_RNA (1)...(19): siRNA sense strand
ggacgagcugcaucacuca

SEQ ID NO: 649862 - RNA, 19 nt, Homo sapiens
  misc_RNA (1)...(19): siRNA sense strand
ugaaggacgagcugcauca

SEQ ID NO: 649863 - RNA, 19 nt, Homo sapiens
  misc_RNA (1)...(19): siRNA sense strand
guacagugccugggacaag

SEQ ID NO: 649864 - RNA, 19 nt, Homo sapiens
  misc_RNA (1)...(19): siRNA sense strand
uacgaaaugugggaauugu

SEQ ID NO: 649865 - RNA, 19 nt, Homo sapiens
  misc_RNA (1)...(19): siRNA sense strand
uguggaggcuggacuguac

SEQ ID NO: 649866 - RNA, 19 nt, Homo sapiens
  misc_RNA (1)...(19): siRNA sense strand
gcagcgccaugagauugug

SEQ ID NO: 649867 - RNA, 19 nt, Homo sapiens
  misc_RNA (1)...(19): siRNA sense strand
ucauugagcccaaggacau

SEQ ID NO: 649868 - RNA, 19 nt, Homo sapiens
  misc_RNA (1)...(19): siRNA sense strand
guugauguagacacaguaa

SEQ ID NO: 649869 - RNA, 19 nt, Homo sapiens
  misc_RNA (1)...(19): siRNA sense strand
gcuggaggacgaggaacua

SEQ ID NO: 649870 - RNA, 19 nt, Homo sapiens
  misc_RNA (1)...(19): siRNA sense strand
cauggucaguggagaaggu

SEQ ID NO: 649871 - RNA, 19 nt, Homo sapiens
  misc_RNA (1)...(19): siRNA sense strand
gcuaugacuucugguacca

SEQ ID NO: 649872 - RNA, 19 nt, Homo sapiens
  misc_RNA (1)...(19): siRNA sense strand
ccagggaagagaucgucua

SEQ ID NO: 649873 - RNA, 19 nt, Homo sapiens
  misc_RNA (1)...(19): siRNA sense strand
ggcagcucccaaugucuua

SEQ ID NO: 649874 - RNA, 19 nt, Homo sapiens
  misc_RNA (1)...(19): siRNA sense strand
cgucaagggcaauggcaaa

SEQ ID NO: 649875 - RNA, 19 nt, Homo sapiens
  misc_RNA (1)...(19): siRNA sense strand
gcaccaagucgcgcaccaa

SEQ ID NO: 649876 - RNA, 19 nt, Homo sapiens
  misc_RNA (1)...(19): siRNA sense strand
gaugggaagcgccucuaca

SEQ ID NO: 649877 - RNA, 19 nt, Homo sapiens
  misc_RNA (1)...(19): siRNA sense strand
cucggaggcagcauuguua

SEQ ID NO: 649878 - RNA, 19 nt, Homo sapiens
  misc_RNA (1)...(19): siRNA sense strand
ccaagucgcgcaccaagcu

SEQ ID NO: 649879 - RNA, 19 nt, Homo sapiens
  misc_RNA (1)...(19): siRNA sense strand
cuacgaaaugugggaauug

SEQ ID NO: 649880 - RNA, 19 nt, Homo sapiens
  misc_RNA (1)...(19): siRNA sense strand
gacccugucucuaaaagau

SEQ ID NO: 649881 - RNA, 19 nt, Homo sapiens
  misc_RNA (1)...(19): siRNA sense strand
uacgggagccacuuauaug

SEQ ID NO: 649882 - RNA, 19 nt, Homo sapiens
  misc_RNA (1)...(19): siRNA sense strand
gcagcugcuucggugauag

SEQ ID NO: 649883 - RNA, 19 nt, Homo sapiens
  misc_RNA (1)...(19): siRNA sense strand
ccccaaagcugcacaaggu

SEQ ID NO: 649884 - RNA, 19 nt, Homo sapiens
  misc_RNA (1)...(19): siRNA sense strand
cgaagaagcugcccagaau

SEQ ID NO: 649885 - RNA, 19 nt, Homo sapiens
  misc_RNA (1)...(19): siRNA sense strand
ggagaagaauuuccugcua

SEQ ID NO: 649886 - RNA, 19 nt, Homo sapiens
  misc_RNA (1)...(19): siRNA sense strand
gagaagaauuuccugcuau

SEQ ID NO: 649887 - RNA, 19 nt, Homo sapiens
  misc_RNA (1)...(19): siRNA sense strand
gaccacaaaucccauaaug

SEQ ID NO: 649888 - RNA, 19 nt, Homo sapiens
  misc_RNA (1)...(19): siRNA sense strand
gaacaaacugcaagaggaa

SEQ ID NO: 649889 - RNA, 19 nt, Homo sapiens
  misc_RNA (1)...(19): siRNA sense strand
caaaggauccucacagaau

SEQ ID NO: 649890 - RNA, 19 nt, Homo sapiens
  misc_RNA (1)...(19): siRNA sense strand
gaagagacgcaaucagguu

SEQ ID NO: 649891 - RNA, 19 nt, Homo sapiens
  misc_RNA (1)...(19): siRNA sense strand
ccacaaaucccauaauguc

SEQ ID NO: 649892 - RNA, 19 nt, Homo sapiens
  misc_RNA (1)...(19): siRNA sense strand
uagaggaggagaagaauuu

SEQ ID NO: 649893 - RNA, 19 nt, Homo sapiens
  misc_RNA (1)...(19): siRNA sense strand
aagaagcugcccagaauua

SEQ ID NO: 649894 - RNA, 19 nt, Homo sapiens
  misc_RNA (1)...(19): siRNA sense strand
gaaggagacaguacaagug

SEQ ID NO: 649895 - RNA, 19 nt, Homo sapiens
  misc_RNA (1)...(19): siRNA sense strand
aaaggauccucacagaauu

SEQ ID NO: 649896 - RNA, 19 nt, Homo sapiens
  misc_RNA (1)...(19): siRNA sense strand
ucaaaugcaucacucagau

SEQ ID NO: 649897 - RNA, 19 nt, Homo sapiens
  misc_RNA (1)...(19): siRNA sense strand
gaacaugagaagcaaagga

SEQ ID NO: 649898 - RNA, 19 nt, Homo sapiens
  misc_RNA (1)...(19): siRNA sense strand
gcaaaggauccucacagaa

SEQ ID NO: 649899 - RNA, 19 nt, Homo sapiens
  misc_RNA (1)...(19): siRNA sense strand
ugagauuucuggucaagga

SEQ ID NO: 649900 - RNA, 19 nt, Homo sapiens
  misc_RNA (1)...(19): siRNA sense strand
gcacaauuucugccucaaa

SEQ ID NO: 649901 - RNA, 19 nt, Homo sapiens
  misc_RNA (1)...(19): siRNA sense strand
gaagaagcugcccagaauu

SEQ ID NO: 649902 - RNA, 19 nt, Homo sapiens
  misc_RNA (1)...(19): siRNA sense strand
gaagugaucugccccaucu

SEQ ID NO: 649903 - RNA, 19 nt, Homo sapiens
  misc_RNA (1)...(19): siRNA sense strand
gguagaacaugagaagcaa

SEQ ID NO: 649904 - RNA, 19 nt, Homo sapiens
  misc_RNA (1)...(19): siRNA sense strand
ugaacgaucucaagaagcu

SEQ ID NO: 649905 - RNA, 19 nt, Homo sapiens
  misc_RNA (1)...(19): siRNA sense strand
uaugucuccuggccucuua

SEQ ID NO: 649906 - RNA, 19 nt, Homo sapiens
  misc_RNA (1)...(19): siRNA sense strand
ggagaaggagacaguacaa

SEQ ID NO: 649907 - RNA, 19 nt, Homo sapiens
  misc_RNA (1)...(19): siRNA sense strand
gaagagcuggggcuuguua

SEQ ID NO: 649908 - RNA, 19 nt, Homo sapiens
  misc_RNA (1)...(19): siRNA sense strand
aauuugaacuccugcauca

SEQ ID NO: 649909 - RNA, 19 nt, Homo sapiens
  misc_RNA (1)...(19): siRNA sense strand
gaugagauuucuggucaag

SEQ ID NO: 649910 - RNA, 19 nt, Homo sapiens
  misc_RNA (1)...(19): siRNA sense strand
gauccucacagaauuugaa

SEQ ID NO: 649911 - RNA, 19 nt, Homo sapiens
  misc_RNA (1)...(19): siRNA sense strand
caaaugcaucacucagauu

SEQ ID NO: 649912 - RNA, 19 nt, Homo sapiens
  misc_RNA (1)...(19): siRNA sense strand
gcucguugauucccugaag

SEQ ID NO: 649913 - RNA, 19 nt, Homo sapiens
  misc_RNA (1)...(19): siRNA sense strand
caccaaaucaccacucuuc

SEQ ID NO: 649914 - RNA, 19 nt, Homo sapiens
  misc_RNA (1)...(19): siRNA sense strand
cugcaaaacuuccguaaga

SEQ ID NO: 649915 - RNA, 19 nt, Homo sapiens
  misc_RNA (1)...(19): siRNA sense strand
ggccucgucugcugggaaa

SEQ ID NO: 649916 - RNA, 19 nt, Homo sapiens
  misc_RNA (1)...(19): siRNA sense strand
gaagaauuuccugcuauca

SEQ ID NO: 649917 - RNA, 19 nt, Homo sapiens
  misc_RNA (1)...(19): siRNA sense strand
agaagaauuuccugcuauc

SEQ ID NO: 649918 - RNA, 19 nt, Homo sapiens
  misc_RNA (1)...(19): siRNA sense strand
guaagaagagacgcaauca

SEQ ID NO: 649919 - RNA, 19 nt, Homo sapiens
  misc_RNA (1)...(19): siRNA sense strand
gaaaauccaagcucuacaa

SEQ ID NO: 649920 - RNA, 19 nt, Homo sapiens
  misc_RNA (1)...(19): siRNA sense strand
gaagcugcccagaauuauc

SEQ ID NO: 649921 - RNA, 19 nt, Homo sapiens
  misc_RNA (1)...(19): siRNA sense strand
ggaaucugguggagaaaau

SEQ ID NO: 649922 - RNA, 19 nt, Homo sapiens
  misc_RNA (1)...(19): siRNA sense strand
agcaaaggauccucacaga

SEQ ID NO: 649923 - RNA, 19 nt, Homo sapiens
  misc_RNA (1)...(19): siRNA sense strand
ggagacaguacaagugaag

SEQ ID NO: 649924 - RNA, 19 nt, Homo sapiens
  misc_RNA (1)...(19): siRNA sense strand
ugcggaaucugguggagaa

SEQ ID NO: 649925 - RNA, 19 nt, Homo sapiens
  misc_RNA (1)...(19): siRNA sense strand
cggaccagguagaacauga

SEQ ID NO: 649926 - RNA, 19 nt, Homo sapiens
  misc_RNA (1)...(19): siRNA sense strand
ggaccacaaaucccauaau

SEQ ID NO: 649927 - RNA, 19 nt, Homo sapiens
  misc_RNA (1)...(19): siRNA sense strand
ccagugggcaguuugugaa

SEQ ID NO: 649928 - RNA, 19 nt, Homo sapiens
  misc_RNA (1)...(19): siRNA sense strand
ucacggaccagguagaaca

SEQ ID NO: 649929 - RNA, 19 nt, Homo sapiens
  misc_RNA (1)...(19): siRNA sense strand
gagacgcaaucagguucaa

SEQ ID NO: 649930 - RNA, 19 nt, Homo sapiens
  misc_RNA (1)...(19): siRNA sense strand
ggccucuuaugaugagauu

SEQ ID NO: 649931 - RNA, 19 nt, Homo sapiens
  misc_RNA (1)...(19): siRNA sense strand
acacagggucgaugucuuc

SEQ ID NO: 649932 - RNA, 19 nt, Homo sapiens
  misc_RNA (1)...(19): siRNA sense strand
aaaugcaucacucagauug

SEQ ID NO: 649933 - RNA, 19 nt, Homo sapiens
  misc_RNA (1)...(19): siRNA sense strand
ccagguagaacaugagaag

SEQ ID NO: 649934 - RNA, 19 nt, Homo sapiens
  misc_RNA (1)...(19): siRNA sense strand
aaaggaaagaggcuacaug

SEQ ID NO: 649935 - RNA, 19 nt, Homo sapiens
  misc_RNA (1)...(19): siRNA sense strand
gcaggcggcagaacuacau

SEQ ID NO: 649936 - RNA, 19 nt, Homo sapiens
  misc_RNA (1)...(19): siRNA sense strand
gaagaccaagcagaacaug

SEQ ID NO: 649937 - RNA, 19 nt, Homo sapiens
  misc_RNA (1)...(19): siRNA sense strand
uugauucccugaagaccaa

SEQ ID NO: 649938 - RNA, 19 nt, Homo sapiens
  misc_RNA (1)...(19): siRNA sense strand
ucgaagaagcugcccagaa

SEQ ID NO: 649939 - RNA, 19 nt, Homo sapiens
  misc_RNA (1)...(19): siRNA sense strand
cgaggaugaugggaaguuc

SEQ ID NO: 649940 - RNA, 19 nt, Homo sapiens
  misc_RNA (1)...(19): siRNA sense strand
aaggagacaguacaaguga

SEQ ID NO: 649941 - RNA, 19 nt, Homo sapiens
  misc_RNA (1)...(19): siRNA sense strand
caggauacgaagacauuug

SEQ ID NO: 649942 - RNA, 19 nt, Homo sapiens
  misc_RNA (1)...(19): siRNA sense strand
aaaacucagugaagcaaaa

SEQ ID NO: 649943 - RNA, 19 nt, Homo sapiens
  misc_RNA (1)...(19): siRNA sense strand
agaaggagacaguacaagu

SEQ ID NO: 649944 - RNA, 19 nt, Homo sapiens
  misc_RNA (1)...(19): siRNA sense strand
uuccugcuaucacggauuu

SEQ ID NO: 649945 - RNA, 19 nt, Homo sapiens
  misc_RNA (1)...(19): siRNA sense strand
gaagcaaaggauccucaca

SEQ ID NO: 649946 - RNA, 19 nt, Homo sapiens
  misc_RNA (1)...(19): siRNA sense strand
gccagugggcaguuuguga

SEQ ID NO: 649947 - RNA, 19 nt, Homo sapiens
  misc_RNA (1)...(19): siRNA sense strand
ccucuuaugaugagauuuc

SEQ ID NO: 649948 - RNA, 19 nt, Homo sapiens
  misc_RNA (1)...(19): siRNA sense strand
cuccuggccucuuaugaug

SEQ ID NO: 649949 - RNA, 19 nt, Homo sapiens
  misc_RNA (1)...(19): siRNA sense strand
cgaggcaccaggagauguu

SEQ ID NO: 649950 - RNA, 19 nt, Homo sapiens
  misc_RNA (1)...(19): siRNA sense strand
uuuacuggcugggucauga

SEQ ID NO: 649951 - RNA, 19 nt, Homo sapiens
  misc_RNA (1)...(19): siRNA sense strand
caagagcagauccaagucu

SEQ ID NO: 649952 - RNA, 19 nt, Homo sapiens
  misc_RNA (1)...(19): siRNA sense strand
aagcugcccagaauuauca

SEQ ID NO: 649953 - RNA, 19 nt, Homo sapiens
  misc_RNA (1)...(19): siRNA sense strand
gcgaggaugaugggaaguu

SEQ ID NO: 649954 - RNA, 19 nt, Homo sapiens
  misc_RNA (1)...(19): siRNA sense strand
ugucuucacggaccaggua

SEQ ID NO: 649955 - RNA, 19 nt, Homo sapiens
  misc_RNA (1)...(19): siRNA sense strand
ccaucugccuggacauucu

SEQ ID NO: 649956 - RNA, 19 nt, Homo sapiens
  misc_RNA (1)...(19): siRNA sense strand
gaccagguagaacaugaga

SEQ ID NO: 649957 - RNA, 19 nt, Homo sapiens
  misc_RNA (1)...(19): siRNA sense strand
ggagaaaauccaagcucua

SEQ ID NO: 649958 - RNA, 19 nt, Homo sapiens
  misc_RNA (1)...(19): siRNA sense strand
ugaauccaaggaccacaaa

SEQ ID NO: 649959 - RNA, 19 nt, Homo sapiens
  misc_RNA (1)...(19): siRNA sense strand
ccaaaucaccacucuucag

SEQ ID NO: 649960 - RNA, 19 nt, Homo sapiens
  misc_RNA (1)...(19): siRNA sense strand
ucaagacacgacuccauca

SEQ ID NO: 649961 - RNA, 19 nt, Homo sapiens
  misc_RNA (1)...(19): siRNA sense strand
gaggugcaguccaaaagga

SEQ ID NO: 649962 - RNA, 19 nt, Homo sapiens
  misc_RNA (1)...(19): siRNA sense strand
cguaagaagagacgcaauc

SEQ ID NO: 649963 - RNA, 19 nt, Homo sapiens
  misc_RNA (1)...(19): siRNA sense strand
guagaacaugagaagcaaa

SEQ ID NO: 649964 - RNA, 19 nt, Homo sapiens
  misc_RNA (1)...(19): siRNA sense strand
guacacagggucgaugucu

SEQ ID NO: 649965 - RNA, 19 nt, Homo sapiens
  misc_RNA (1)...(19): siRNA sense strand
agugaaggcacaaggugua

SEQ ID NO: 649966 - RNA, 19 nt, Homo sapiens
  misc_RNA (1)...(19): siRNA sense strand
aaggauccucacagaauuu

SEQ ID NO: 649967 - RNA, 19 nt, Homo sapiens
  misc_RNA (1)...(19): siRNA sense strand
gauccgggcuugguuuugu

SEQ ID NO: 649968 - RNA, 19 nt, Homo sapiens
  misc_RNA (1)...(19): siRNA sense strand
cgaagaagcugcccagaau

SEQ ID NO: 649969 - RNA, 19 nt, Homo sapiens
  misc_RNA (1)...(19): siRNA sense strand
ggagaagaauuuccugcua

SEQ ID NO: 649970 - RNA, 19 nt, Homo sapiens
  misc_RNA (1)...(19): siRNA sense strand
gagaagaauuuccugcuau

SEQ ID NO: 649971 - RNA, 19 nt, Homo sapiens
  misc_RNA (1)...(19): siRNA sense strand
gaccacaaaucccauaaug

SEQ ID NO: 649972 - RNA, 19 nt, Homo sapiens
  misc_RNA (1)...(19): siRNA sense strand
gaacaaacugcaagaggaa

SEQ ID NO: 649973 - RNA, 19 nt, Homo sapiens
  misc_RNA (1)...(19): siRNA sense strand
caaaggauccucacagaau

SEQ ID NO: 649974 - RNA, 19 nt, Homo sapiens
  misc_RNA (1)...(19): siRNA sense strand
gaagagacgcaaucagguu

SEQ ID NO: 649975 - RNA, 19 nt, Homo sapiens
  misc_RNA (1)...(19): siRNA sense strand
ccacaaaucccauaauguc

SEQ ID NO: 649976 - RNA, 19 nt, Homo sapiens
  misc_RNA (1)...(19): siRNA sense strand
uagaggaggagaagaauuu

SEQ ID NO: 649977 - RNA, 19 nt, Homo sapiens
  misc_RNA (1)...(19): siRNA sense strand
aagaagcugcccagaauua

SEQ ID NO: 649978 - RNA, 19 nt, Homo sapiens
  misc_RNA (1)...(19): siRNA sense strand
gaaggagacaguacaagug

SEQ ID NO: 649979 - RNA, 19 nt, Homo sapiens
  misc_RNA (1)...(19): siRNA sense strand
aaaggauccucacagaauu

SEQ ID NO: 649980 - RNA, 19 nt, Homo sapiens
  misc_RNA (1)...(19): siRNA sense strand
ucaaaugcaucacucagau

SEQ ID NO: 649981 - RNA, 19 nt, Homo sapiens
  misc_RNA (1)...(19): siRNA sense strand
gaacaugagaagcaaagga

SEQ ID NO: 649982 - RNA, 19 nt, Homo sapiens
  misc_RNA (1)...(19): siRNA sense strand
gcaaaggauccucacagaa

SEQ ID NO: 649983 - RNA, 19 nt, Homo sapiens
  misc_RNA (1)...(19): siRNA sense strand
gcacaauuucugccucaaa

SEQ ID NO: 649984 - RNA, 19 nt, Homo sapiens
  misc_RNA (1)...(19): siRNA sense strand
gaagaagcugcccagaauu

SEQ ID NO: 649985 - RNA, 19 nt, Homo sapiens
  misc_RNA (1)...(19): siRNA sense strand
gaagugaucugccccaucu

SEQ ID NO: 649986 - RNA, 19 nt, Homo sapiens
  misc_RNA (1)...(19): siRNA sense strand
gguagaacaugagaagcaa

SEQ ID NO: 649987 - RNA, 19 nt, Homo sapiens
  misc_RNA (1)...(19): siRNA sense strand
ugaacgaucucaagaagcu

SEQ ID NO: 649988 - RNA, 19 nt, Homo sapiens
  misc_RNA (1)...(19): siRNA sense strand
ggagaaggagacaguacaa

SEQ ID NO: 649989 - RNA, 19 nt, Homo sapiens
  misc_RNA (1)...(19): siRNA sense strand
aauuugaacuccugcauca

SEQ ID NO: 649990 - RNA, 19 nt, Homo sapiens
  misc_RNA (1)...(19): siRNA sense strand
gauccucacagaauuugaa

SEQ ID NO: 649991 - RNA, 19 nt, Homo sapiens
  misc_RNA (1)...(19): siRNA sense strand
caaaugcaucacucagauu

SEQ ID NO: 649992 - RNA, 19 nt, Homo sapiens
  misc_RNA (1)...(19): siRNA sense strand
gcucguugauucccugaag

SEQ ID NO: 649993 - RNA, 19 nt, Homo sapiens
  misc_RNA (1)...(19): siRNA sense strand
cugcaaaacuuccguaaga

SEQ ID NO: 649994 - RNA, 19 nt, Homo sapiens
  misc_RNA (1)...(19): siRNA sense strand
gaagaauuuccugcuauca

SEQ ID NO: 649995 - RNA, 19 nt, Homo sapiens
  misc_RNA (1)...(19): siRNA sense strand
agaagaauuuccugcuauc

SEQ ID NO: 649996 - RNA, 19 nt, Homo sapiens
  misc_RNA (1)...(19): siRNA sense strand
guaagaagagacgcaauca

SEQ ID NO: 649997 - RNA, 19 nt, Homo sapiens
  misc_RNA (1)...(19): siRNA sense strand
gaaaauccaagcucuacaa

SEQ ID NO: 649998 - RNA, 19 nt, Homo sapiens
  misc_RNA (1)...(19): siRNA sense strand
gaagcugcccagaauuauc

SEQ ID NO: 649999 - RNA, 19 nt, Homo sapiens
  misc_RNA (1)...(19): siRNA sense strand
ggaaucugguggagaaaau

SEQ ID NO: 650000 - RNA, 19 nt, Homo sapiens
  misc_RNA (1)...(19): siRNA sense strand
agcaaaggauccucacaga

SEQ ID NO: 650001 - RNA, 19 nt, Homo sapiens
  misc_RNA (1)...(19): siRNA sense strand
ggagacaguacaagugaag

SEQ ID NO: 650002 - RNA, 19 nt, Homo sapiens
  misc_RNA (1)...(19): siRNA sense strand
ugcggaaucugguggagaa

SEQ ID NO: 650003 - RNA, 19 nt, Homo sapiens
  misc_RNA (1)...(19): siRNA sense strand
cggaccagguagaacauga

SEQ ID NO: 650004 - RNA, 19 nt, Homo sapiens
  misc_RNA (1)...(19): siRNA sense strand
ggaccacaaaucccauaau

SEQ ID NO: 650005 - RNA, 19 nt, Homo sapiens
  misc_RNA (1)...(19): siRNA sense strand
ccagugggcaguuugugaa

SEQ ID NO: 650006 - RNA, 19 nt, Homo sapiens
  misc_RNA (1)...(19): siRNA sense strand
ucacggaccagguagaaca

SEQ ID NO: 650007 - RNA, 19 nt, Homo sapiens
  misc_RNA (1)...(19): siRNA sense strand
gagacgcaaucagguucaa

SEQ ID NO: 650008 - RNA, 19 nt, Homo sapiens
  misc_RNA (1)...(19): siRNA sense strand
aaaugcaucacucagauug

SEQ ID NO: 650009 - RNA, 19 nt, Homo sapiens
  misc_RNA (1)...(19): siRNA sense strand
ccagguagaacaugagaag

SEQ ID NO: 650010 - RNA, 19 nt, Homo sapiens
  misc_RNA (1)...(19): siRNA sense strand
acacagggucgaugucuuc

SEQ ID NO: 650011 - RNA, 19 nt, Homo sapiens
  misc_RNA (1)...(19): siRNA sense strand
aaaggaaagaggcuacaug

SEQ ID NO: 650012 - RNA, 19 nt, Homo sapiens
  misc_RNA (1)...(19): siRNA sense strand
gaagaccaagcagaacaug

SEQ ID NO: 650013 - RNA, 19 nt, Homo sapiens
  misc_RNA (1)...(19): siRNA sense strand
uugauucccugaagaccaa

SEQ ID NO: 650014 - RNA, 19 nt, Homo sapiens
  misc_RNA (1)...(19): siRNA sense strand
ucgaagaagcugcccagaa

SEQ ID NO: 650015 - RNA, 19 nt, Homo sapiens
  misc_RNA (1)...(19): siRNA sense strand
cgaggaugaugggaaguuc

SEQ ID NO: 650016 - RNA, 19 nt, Homo sapiens
  misc_RNA (1)...(19): siRNA sense strand
aaggagacaguacaaguga

SEQ ID NO: 650017 - RNA, 19 nt, Homo sapiens
  misc_RNA (1)...(19): siRNA sense strand
aaaacucagugaagcaaaa

SEQ ID NO: 650018 - RNA, 19 nt, Homo sapiens
  misc_RNA (1)...(19): siRNA sense strand
agaaggagacaguacaagu

SEQ ID NO: 650019 - RNA, 19 nt, Homo sapiens
  misc_RNA (1)...(19): siRNA sense strand
uuccugcuaucacggauuu

SEQ ID NO: 650020 - RNA, 19 nt, Homo sapiens
  misc_RNA (1)...(19): siRNA sense strand
gaagcaaaggauccucaca

SEQ ID NO: 650021 - RNA, 19 nt, Homo sapiens
  misc_RNA (1)...(19): siRNA sense strand
gccagugggcaguuuguga

SEQ ID NO: 650022 - RNA, 19 nt, Homo sapiens
  misc_RNA (1)...(19): siRNA sense strand
cgaggcaccaggagauguu

SEQ ID NO: 650023 - RNA, 19 nt, Homo sapiens
  misc_RNA (1)...(19): siRNA sense strand
uuuacuggcugggucauga

SEQ ID NO: 650024 - RNA, 19 nt, Homo sapiens
  misc_RNA (1)...(19): siRNA sense strand
caagagcagauccaagucu

SEQ ID NO: 650025 - RNA, 19 nt, Homo sapiens
  misc_RNA (1)...(19): siRNA sense strand
aagcugcccagaauuauca

SEQ ID NO: 650026 - RNA, 19 nt, Homo sapiens
  misc_RNA (1)...(19): siRNA sense strand
gcgaggaugaugggaaguu

SEQ ID NO: 650027 - RNA, 19 nt, Homo sapiens
  misc_RNA (1)...(19): siRNA sense strand
ggagaaaauccaagcucua

SEQ ID NO: 650028 - RNA, 19 nt, Homo sapiens
  misc_RNA (1)...(19): siRNA sense strand
ccaucugccuggacauucu

SEQ ID NO: 650029 - RNA, 19 nt, Homo sapiens
  misc_RNA (1)...(19): siRNA sense strand
gaccagguagaacaugaga

SEQ ID NO: 650030 - RNA, 19 nt, Homo sapiens
  misc_RNA (1)...(19): siRNA sense strand
ugucuucacggaccaggua

SEQ ID NO: 650031 - RNA, 19 nt, Homo sapiens
  misc_RNA (1)...(19): siRNA sense strand
ugaauccaaggaccacaaa

SEQ ID NO: 650032 - RNA, 19 nt, Homo sapiens
  misc_RNA (1)...(19): siRNA sense strand
ucaagacacgacuccauca

SEQ ID NO: 650033 - RNA, 19 nt, Homo sapiens
  misc_RNA (1)...(19): siRNA sense strand
gaggugcaguccaaaagga

SEQ ID NO: 650034 - RNA, 19 nt, Homo sapiens
  misc_RNA (1)...(19): siRNA sense strand
guagaacaugagaagcaaa

SEQ ID NO: 650035 - RNA, 19 nt, Homo sapiens
  misc_RNA (1)...(19): siRNA sense strand
guacacagggucgaugucu

SEQ ID NO: 650036 - RNA, 19 nt, Homo sapiens
  misc_RNA (1)...(19): siRNA sense strand
agugaaggcacaaggugua

SEQ ID NO: 650037 - RNA, 19 nt, Homo sapiens
  misc_RNA (1)...(19): siRNA sense strand
cguaagaagagacgcaauc

SEQ ID NO: 650038 - RNA, 19 nt, Homo sapiens
  misc_RNA (1)...(19): siRNA sense strand
aaggauccucacagaauuu

SEQ ID NO: 650039 - RNA, 19 nt, Homo sapiens
  misc_RNA (1)...(19): siRNA sense strand
ggaccuaacugacgaauga

SEQ ID NO: 650040 - RNA, 19 nt, Homo sapiens
  misc_RNA (1)...(19): siRNA sense strand
gaacauagaggcugcugua

SEQ ID NO: 650041 - RNA, 19 nt, Homo sapiens
  misc_RNA (1)...(19): siRNA sense strand
cagcauaacuggaacauag

SEQ ID NO: 650042 - RNA, 19 nt, Homo sapiens
  misc_RNA (1)...(19): siRNA sense strand
ggacauuguuucauuuaug

SEQ ID NO: 650043 - RNA, 19 nt, Homo sapiens
  misc_RNA (1)...(19): siRNA sense strand
caaacaaaccugagggaua

SEQ ID NO: 650044 - RNA, 19 nt, Homo sapiens
  misc_RNA (1)...(19): siRNA sense strand
ggagaaagaaagaaagaaa

SEQ ID NO: 650045 - RNA, 19 nt, Homo sapiens
  misc_RNA (1)...(19): siRNA sense strand
agacuuaccuggugucaga

SEQ ID NO: 650046 - RNA, 19 nt, Homo sapiens
  misc_RNA (1)...(19): siRNA sense strand
aaacaaaccugagggauac

SEQ ID NO: 650047 - RNA, 19 nt, Homo sapiens
  misc_RNA (1)...(19): siRNA sense strand
gagcugaccaggagaaaga

SEQ ID NO: 650048 - RNA, 19 nt, Homo sapiens
  misc_RNA (1)...(19): siRNA sense strand
ucacuggcaucgaaucuau

SEQ ID NO: 650049 - RNA, 19 nt, Homo sapiens
  misc_RNA (1)...(19): siRNA sense strand
gagagaacaccuauccauu

SEQ ID NO: 650050 - RNA, 19 nt, Homo sapiens
  misc_RNA (1)...(19): siRNA sense strand
cuacagcuauguugucuca

SEQ ID NO: 650051 - RNA, 19 nt, Homo sapiens
  misc_RNA (1)...(19): siRNA sense strand
guacaggacagauugaaug

SEQ ID NO: 650052 - RNA, 19 nt, Homo sapiens
  misc_RNA (1)...(19): siRNA sense strand
ggcaugcucuacaaacaaa

SEQ ID NO: 650053 - RNA, 19 nt, Homo sapiens
  misc_RNA (1)...(19): siRNA sense strand
ggaucucacuggcaucgaa

SEQ ID NO: 650054 - RNA, 19 nt, Homo sapiens
  misc_RNA (1)...(19): siRNA sense strand
uaacaguaauccacgacuu

SEQ ID NO: 650055 - RNA, 19 nt, Homo sapiens
  misc_RNA (1)...(19): siRNA sense strand
caagagggcguaccuagug

SEQ ID NO: 650056 - RNA, 19 nt, Homo sapiens
  misc_RNA (1)...(19): siRNA sense strand
gggcacacccugucuucua

SEQ ID NO: 650057 - RNA, 19 nt, Homo sapiens
  misc_RNA (1)...(19): siRNA sense strand
ucacaggcuuuacgagaga

SEQ ID NO: 650058 - RNA, 19 nt, Homo sapiens
  misc_RNA (1)...(19): siRNA sense strand
gagagacgauuccacuuuu

SEQ ID NO: 650059 - RNA, 19 nt, Homo sapiens
  misc_RNA (1)...(19): siRNA sense strand
ggaaagcccagaaaaguuu

SEQ ID NO: 650060 - RNA, 19 nt, Homo sapiens
  misc_RNA (1)...(19): siRNA sense strand
cauagaggcugcuguacag

SEQ ID NO: 650061 - RNA, 19 nt, Homo sapiens
  misc_RNA (1)...(19): siRNA sense strand
ggacucagccacacagaag

SEQ ID NO: 650062 - RNA, 19 nt, Homo sapiens
  misc_RNA (1)...(19): siRNA sense strand
gcuagaaggccucauucaa

SEQ ID NO: 650063 - RNA, 19 nt, Homo sapiens
  misc_RNA (1)...(19): siRNA sense strand
cauuccgguuuaccuauua

SEQ ID NO: 650064 - RNA, 19 nt, Homo sapiens
  misc_RNA (1)...(19): siRNA sense strand
aguaauccacgacuucuua

SEQ ID NO: 650065 - RNA, 19 nt, Homo sapiens
  misc_RNA (1)...(19): siRNA sense strand
gagaacaccuauccauucc

SEQ ID NO: 650066 - RNA, 19 nt, Homo sapiens
  misc_RNA (1)...(19): siRNA sense strand
guuuaccuauuacacgaua

SEQ ID NO: 650067 - RNA, 19 nt, Homo sapiens
  misc_RNA (1)...(19): siRNA sense strand
gggacauuguuucauuuau

SEQ ID NO: 650068 - RNA, 19 nt, Homo sapiens
  misc_RNA (1)...(19): siRNA sense strand
gacauuguuucauuuaugc

SEQ ID NO: 650069 - RNA, 19 nt, Homo sapiens
  misc_RNA (1)...(19): siRNA sense strand
agagagacgauuccacuuu

SEQ ID NO: 650070 - RNA, 19 nt, Homo sapiens
  misc_RNA (1)...(19): siRNA sense strand
gagcuucgcuuucuuuugg

SEQ ID NO: 650071 - RNA, 19 nt, Homo sapiens
  misc_RNA (1)...(19): siRNA sense strand
ggacagauugaaugagcaa

SEQ ID NO: 650072 - RNA, 19 nt, Homo sapiens
  misc_RNA (1)...(19): siRNA sense strand
ugagacaacagcaggauga

SEQ ID NO: 650073 - RNA, 19 nt, Homo sapiens
  misc_RNA (1)...(19): siRNA sense strand
cacaggaucuacagcuaug

SEQ ID NO: 650074 - RNA, 19 nt, Homo sapiens
  misc_RNA (1)...(19): siRNA sense strand
ccauuccgguuuaccuauu

SEQ ID NO: 650075 - RNA, 19 nt, Homo sapiens
  misc_RNA (1)...(19): siRNA sense strand
gcaagagggcguaccuagu

SEQ ID NO: 650076 - RNA, 19 nt, Homo sapiens
  misc_RNA (1)...(19): siRNA sense strand
agagaacaccuauccauuc

SEQ ID NO: 650077 - RNA, 19 nt, Homo sapiens
  misc_RNA (1)...(19): siRNA sense strand
acacuaggaugcucuucug

SEQ ID NO: 650078 - RNA, 19 nt, Homo sapiens
  misc_RNA (1)...(19): siRNA sense strand
cagcuauguugucucaaga

SEQ ID NO: 650079 - RNA, 19 nt, Homo sapiens
  misc_RNA (1)...(19): siRNA sense strand
aaagaaaccagacccaagu

SEQ ID NO: 650080 - RNA, 19 nt, Homo sapiens
  misc_RNA (1)...(19): siRNA sense strand
ucacagucucuaacaguaa

SEQ ID NO: 650081 - RNA, 19 nt, Homo sapiens
  misc_RNA (1)...(19): siRNA sense strand
ccuaaugauucucgaguag

SEQ ID NO: 650082 - RNA, 19 nt, Homo sapiens
  misc_RNA (1)...(19): siRNA sense strand
ccuauuacacgauacuuga

SEQ ID NO: 650083 - RNA, 19 nt, Homo sapiens
  misc_RNA (1)...(19): siRNA sense strand
ucagaggaguggcccaauc

SEQ ID NO: 650084 - RNA, 19 nt, Homo sapiens
  misc_RNA (1)...(19): siRNA sense strand
gaacagcauaacuggaaca

SEQ ID NO: 650085 - RNA, 19 nt, Homo sapiens
  misc_RNA (1)...(19): siRNA sense strand
uggaacagcauaacuggaa

SEQ ID NO: 650086 - RNA, 19 nt, Homo sapiens
  misc_RNA (1)...(19): siRNA sense strand
ccaacugacauuuaucaug

SEQ ID NO: 650087 - RNA, 19 nt, Homo sapiens
  misc_RNA (1)...(19): siRNA sense strand
gagggcguaccuaguguuu

SEQ ID NO: 650088 - RNA, 19 nt, Homo sapiens
  misc_RNA (1)...(19): siRNA sense strand
uaaugauucucgaguagag

SEQ ID NO: 650089 - RNA, 19 nt, Homo sapiens
  misc_RNA (1)...(19): siRNA sense strand
uagaaagggaagaaagaaa

SEQ ID NO: 650090 - RNA, 19 nt, Homo sapiens
  misc_RNA (1)...(19): siRNA sense strand
augcuuccauuccgguuua

SEQ ID NO: 650091 - RNA, 19 nt, Homo sapiens
  misc_RNA (1)...(19): siRNA sense strand
ccacaggaucuacagcuau

SEQ ID NO: 650092 - RNA, 19 nt, Homo sapiens
  misc_RNA (1)...(19): siRNA sense strand
gagaaagaaagaaagaaac

SEQ ID NO: 650093 - RNA, 19 nt, Homo sapiens
  misc_RNA (1)...(19): siRNA sense strand
cauuuaucauggaugcuaa

SEQ ID NO: 650094 - RNA, 19 nt, Homo sapiens
  misc_RNA (1)...(19): siRNA sense strand
gggcaugcucuacaaacaa

SEQ ID NO: 650095 - RNA, 19 nt, Homo sapiens
  misc_RNA (1)...(19): siRNA sense strand
cgagagaacaccuauccau

SEQ ID NO: 650096 - RNA, 19 nt, Homo sapiens
  misc_RNA (1)...(19): siRNA sense strand
cacagucucuaacaguaau

SEQ ID NO: 650097 - RNA, 19 nt, Homo sapiens
  misc_RNA (1)...(19): siRNA sense strand
caggagaaagaaagaaaga

SEQ ID NO: 650098 - RNA, 19 nt, Homo sapiens
  misc_RNA (1)...(19): siRNA sense strand
gaucuacagcuauguuguc

SEQ ID NO: 650099 - RNA, 19 nt, Homo sapiens
  misc_RNA (1)...(19): siRNA sense strand
cuaccuggccucucucaga

SEQ ID NO: 650100 - RNA, 19 nt, Homo sapiens
  misc_RNA (1)...(19): siRNA sense strand
ccuagaaagggaagaaaga

SEQ ID NO: 650101 - RNA, 19 nt, Homo sapiens
  misc_RNA (1)...(19): siRNA sense strand
ucacuaauaaacacuagga

SEQ ID NO: 650102 - RNA, 19 nt, Homo sapiens
  misc_RNA (1)...(19): siRNA sense strand
gggcguaccuaguguuuuc

SEQ ID NO: 650103 - RNA, 19 nt, Homo sapiens
  misc_RNA (1)...(19): siRNA sense strand
gaggaggugcaacagcaaa

SEQ ID NO: 650104 - RNA, 19 nt, Homo sapiens
  misc_RNA (1)...(19): siRNA sense strand
ggugucagaacgccuagaa

SEQ ID NO: 650105 - RNA, 19 nt, Homo sapiens
  misc_RNA (1)...(19): siRNA sense strand
uggaugcuaaccagacuua

SEQ ID NO: 650106 - RNA, 19 nt, Homo sapiens
  misc_RNA (1)...(19): siRNA sense strand
ccaugauuaugcugaagga

SEQ ID NO: 650107 - RNA, 19 nt, Homo sapiens
  misc_RNA (1)...(19): siRNA sense strand
cuagaaggccucauucaac

SEQ ID NO: 650108 - RNA, 19 nt, Homo sapiens
  misc_RNA (1)...(19): siRNA sense strand
ucauuaaccaacugacauu

SEQ ID NO: 650109 - RNA, 19 nt, Homo sapiens
  misc_RNA (1)...(19): siRNA sense strand
acagcuauguugucucaag

SEQ ID NO: 650110 - RNA, 19 nt, Homo sapiens
  misc_RNA (1)...(19): siRNA sense strand
gaaggaaagcccagaaaag

SEQ ID NO: 650111 - RNA, 19 nt, Homo sapiens
  misc_RNA (1)...(19): siRNA sense strand
uucacagucucuaacagua

SEQ ID NO: 650112 - RNA, 19 nt, Homo sapiens
  misc_RNA (1)...(19): siRNA sense strand
ggaaaggaaguuggaaugc

SEQ ID NO: 650113 - RNA, 19 nt, Homo sapiens
  misc_RNA (1)...(19): siRNA sense strand
cugugcaccugaaguuauu

SEQ ID NO: 650114 - RNA, 19 nt, Homo sapiens
  misc_RNA (1)...(19): siRNA sense strand
ggcacacccugucuucuac

SEQ ID NO: 650115 - RNA, 19 nt, Homo sapiens
  misc_RNA (1)...(19): siRNA sense strand
auauuuagguuugcucuuc

SEQ ID NO: 650116 - RNA, 19 nt, Homo sapiens
  misc_RNA (1)...(19): siRNA sense strand
gcaucgaaucuauggauca

SEQ ID NO: 650117 - RNA, 19 nt, Homo sapiens
  misc_RNA (1)...(19): siRNA sense strand
gaaggaggaggaggugcaa

SEQ ID NO: 650118 - RNA, 19 nt, Homo sapiens
  misc_RNA (1)...(19): siRNA sense strand
gagcaagagggcguaccua

SEQ ID NO: 650119 - RNA, 19 nt, Homo sapiens
  misc_RNA (1)...(19): siRNA sense strand
guaauccacgacuucuuau

SEQ ID NO: 650120 - RNA, 19 nt, Homo sapiens
  misc_RNA (1)...(19): siRNA sense strand
cugaugacccugaaagugu

SEQ ID NO: 650121 - RNA, 19 nt, Homo sapiens
  misc_RNA (1)...(19): siRNA sense strand
uaacccaggagcagacaga

SEQ ID NO: 650122 - RNA, 19 nt, Homo sapiens
  misc_RNA (1)...(19): siRNA sense strand
cuagaaagggaagaaagaa

SEQ ID NO: 650123 - RNA, 19 nt, Homo sapiens
  misc_RNA (1)...(19): siRNA sense strand
cccaggagcagacagagaa

SEQ ID NO: 650124 - RNA, 19 nt, Homo sapiens
  misc_RNA (1)...(19): siRNA sense strand
aauccacgacuucuuauuc

SEQ ID NO: 650125 - RNA, 19 nt, Homo sapiens
  misc_RNA (1)...(19): siRNA sense strand
cagauugaaugagcaagag

SEQ ID NO: 650126 - RNA, 19 nt, Homo sapiens
  misc_RNA (1)...(19): siRNA sense strand
ccauuccuggccaugauua

SEQ ID NO: 650127 - RNA, 19 nt, Homo sapiens
  misc_RNA (1)...(19): siRNA sense strand
cagcugaccacaggaucua

SEQ ID NO: 650128 - RNA, 19 nt, Homo sapiens
  misc_RNA (1)...(19): siRNA sense strand
ggaggaggugcaacagcaa

SEQ ID NO: 650129 - RNA, 19 nt, Homo sapiens
  misc_RNA (1)...(19): siRNA sense strand
ugucagaacgccuagaaag

SEQ ID NO: 650130 - RNA, 19 nt, Homo sapiens
  misc_RNA (1)...(19): siRNA sense strand
cugaaagugucaagaucau

SEQ ID NO: 650131 - RNA, 19 nt, Homo sapiens
  misc_RNA (1)...(19): siRNA sense strand
ccugaaagugucaagauca

SEQ ID NO: 650132 - RNA, 19 nt, Homo sapiens
  misc_RNA (1)...(19): siRNA sense strand
ucacgaccccugcagguua

SEQ ID NO: 650133 - RNA, 19 nt, Homo sapiens
  misc_RNA (1)...(19): siRNA sense strand
caucgaaucuauggaucag

SEQ ID NO: 650134 - RNA, 19 nt, Homo sapiens
  misc_RNA (1)...(19): siRNA sense strand
uacaggacagauugaauga

SEQ ID NO: 650135 - RNA, 19 nt, Homo sapiens
  misc_RNA (1)...(19): siRNA sense strand
aaaguuggcagaggagaga

SEQ ID NO: 650136 - RNA, 19 nt, Homo sapiens
  misc_RNA (1)...(19): siRNA sense strand
agacccaagugcugagaca

SEQ ID NO: 650137 - RNA, 19 nt, Homo sapiens
  misc_RNA (1)...(19): siRNA sense strand
agaaagggaagaaagaaac

SEQ ID NO: 650138 - RNA, 19 nt, Homo sapiens
  misc_RNA (1)...(19): siRNA sense strand
ugaccaggagaaagaaaga

SEQ ID NO: 650139 - RNA, 19 nt, Homo sapiens
  misc_RNA (1)...(19): siRNA sense strand
ugucugagcucacugauga

SEQ ID NO: 650140 - RNA, 19 nt, Homo sapiens
  misc_RNA (1)...(19): siRNA sense strand
ucuaugagcgucccaauua

SEQ ID NO: 650141 - RNA, 19 nt, Homo sapiens
  misc_RNA (1)...(19): siRNA sense strand
ggucaccgauuuguacuaa

SEQ ID NO: 650142 - RNA, 19 nt, Homo sapiens
  misc_RNA (1)...(19): siRNA sense strand
cagggucgcugcuacaauu

SEQ ID NO: 650143 - RNA, 19 nt, Homo sapiens
  misc_RNA (1)...(19): siRNA sense strand
guccaauccugccguauaa

SEQ ID NO: 650144 - RNA, 19 nt, Homo sapiens
  misc_RNA (1)...(19): siRNA sense strand
ugagacgggucaccgauuu

SEQ ID NO: 650145 - RNA, 19 nt, Homo sapiens
  misc_RNA (1)...(19): siRNA sense strand
ucuaugaaaugcccaacua

SEQ ID NO: 650146 - RNA, 19 nt, Homo sapiens
  misc_RNA (1)...(19): siRNA sense strand
gcugcuggaugcucuauga

SEQ ID NO: 650147 - RNA, 19 nt, Homo sapiens
  misc_RNA (1)...(19): siRNA sense strand
gguccaauccugccguaua

SEQ ID NO: 650148 - RNA, 19 nt, Homo sapiens
  misc_RNA (1)...(19): siRNA sense strand
gcugcuggguccucuauga

SEQ ID NO: 650149 - RNA, 19 nt, Homo sapiens
  misc_RNA (1)...(19): siRNA sense strand
gaucuauucccuccacgua

SEQ ID NO: 650150 - RNA, 19 nt, Homo sapiens
  misc_RNA (1)...(19): siRNA sense strand
gcaaguaccccgacuauca

SEQ ID NO: 650151 - RNA, 19 nt, Homo sapiens
  misc_RNA (1)...(19): siRNA sense strand
cuacgaggaccgagacuuu

SEQ ID NO: 650152 - RNA, 19 nt, Homo sapiens
  misc_RNA (1)...(19): siRNA sense strand
uaccagcucgcacaaguua

SEQ ID NO: 650153 - RNA, 19 nt, Homo sapiens
  misc_RNA (1)...(19): siRNA sense strand
cauaccagcucgcacaagu

SEQ ID NO: 650154 - RNA, 19 nt, Homo sapiens
  misc_RNA (1)...(19): siRNA sense strand
ccaauccugccguauaauu

SEQ ID NO: 650155 - RNA, 19 nt, Homo sapiens
  misc_RNA (1)...(19): siRNA sense strand
gcuggguccucuaugaaau

SEQ ID NO: 650156 - RNA, 19 nt, Homo sapiens
  misc_RNA (1)...(19): siRNA sense strand
gaugacuaccgaggccuua

SEQ ID NO: 650157 - RNA, 19 nt, Homo sapiens
  misc_RNA (1)...(19): siRNA sense strand
accgaggccuuaugucuga

SEQ ID NO: 650158 - RNA, 19 nt, Homo sapiens
  misc_RNA (1)...(19): siRNA sense strand
gggugcagaugccaaaguc

SEQ ID NO: 650159 - RNA, 19 nt, Homo sapiens
  misc_RNA (1)...(19): siRNA sense strand
gcuacaauugcaucaguga

SEQ ID NO: 650160 - RNA, 19 nt, Homo sapiens
  misc_RNA (1)...(19): siRNA sense strand
ugccguauaauuccucaua

SEQ ID NO: 650161 - RNA, 19 nt, Homo sapiens
  misc_RNA (1)...(19): siRNA sense strand
gaugacugcgccuguguuc

SEQ ID NO: 650162 - RNA, 19 nt, Homo sapiens
  misc_RNA (1)...(19): siRNA sense strand
caauccugccguauaauuc

SEQ ID NO: 650163 - RNA, 19 nt, Homo sapiens
  misc_RNA (1)...(19): siRNA sense strand
ggucgcugcuacaauugca

SEQ ID NO: 650164 - RNA, 19 nt, Homo sapiens
  misc_RNA (1)...(19): siRNA sense strand
guacgagagagaugacuac

SEQ ID NO: 650165 - RNA, 19 nt, Homo sapiens
  misc_RNA (1)...(19): siRNA sense strand
gagacgggucaccgauuug

SEQ ID NO: 650166 - RNA, 19 nt, Homo sapiens
  misc_RNA (1)...(19): siRNA sense strand
ugacugcgccuguguucca

SEQ ID NO: 650167 - RNA, 19 nt, Homo sapiens
  misc_RNA (1)...(19): siRNA sense strand
caaccugcgggucuacuuc

SEQ ID NO: 650168 - RNA, 19 nt, Homo sapiens
  misc_RNA (1)...(19): siRNA sense strand
cugcuacaauugcaucagu

SEQ ID NO: 650169 - RNA, 19 nt, Homo sapiens
  misc_RNA (1)...(19): siRNA sense strand
gggcugcuggguccucuau

SEQ ID NO: 650170 - RNA, 19 nt, Homo sapiens
  misc_RNA (1)...(19): siRNA sense strand
cuaccgaggccuuaugucu

SEQ ID NO: 650171 - RNA, 19 nt, Homo sapiens
  misc_RNA (1)...(19): siRNA sense strand
cgucggauguuuauuguua

SEQ ID NO: 650172 - RNA, 19 nt, Homo sapiens
  misc_RNA (1)...(19): siRNA sense strand
gaaccgagacgaacugaau

SEQ ID NO: 650173 - RNA, 19 nt, Homo sapiens
  misc_RNA (1)...(19): siRNA sense strand
gaaaugguacuccacauca

SEQ ID NO: 650174 - RNA, 19 nt, Homo sapiens
  misc_RNA (1)...(19): siRNA sense strand
gcaauuacaccacagaugu

SEQ ID NO: 650175 - RNA, 19 nt, Homo sapiens
  misc_RNA (1)...(19): siRNA sense strand
gcaagcguuucuucgaauu

SEQ ID NO: 650176 - RNA, 19 nt, Homo sapiens
  misc_RNA (1)...(19): siRNA sense strand
guugagaacuucaguaacu

SEQ ID NO: 650177 - RNA, 19 nt, Homo sapiens
  misc_RNA (1)...(19): siRNA sense strand
ggauguacccgccagcuuu

SEQ ID NO: 650178 - RNA, 19 nt, Homo sapiens
  misc_RNA (1)...(19): siRNA sense strand
gagaacuucaguaacuuua

SEQ ID NO: 650179 - RNA, 19 nt, Homo sapiens
  misc_RNA (1)...(19): siRNA sense strand
gaaguuaggccucagacau

SEQ ID NO: 650180 - RNA, 19 nt, Homo sapiens
  misc_RNA (1)...(19): siRNA sense strand
gaagagaggcggagagacu

SEQ ID NO: 650181 - RNA, 19 nt, Homo sapiens
  misc_RNA (1)...(19): siRNA sense strand
cagaggugcuacugcaauu

SEQ ID NO: 650182 - RNA, 19 nt, Homo sapiens
  misc_RNA (1)...(19): siRNA sense strand
ggucgucggauguuuauug

SEQ ID NO: 650183 - RNA, 19 nt, Homo sapiens
  misc_RNA (1)...(19): siRNA sense strand
caagccuucuccuuucauu

SEQ ID NO: 650184 - RNA, 19 nt, Homo sapiens
  misc_RNA (1)...(19): siRNA sense strand
gaggaucccuuugugaaac

SEQ ID NO: 650185 - RNA, 19 nt, Homo sapiens
  misc_RNA (1)...(19): siRNA sense strand
gcagcuagaauccaaaucu

SEQ ID NO: 650186 - RNA, 19 nt, Homo sapiens
  misc_RNA (1)...(19): siRNA sense strand
caauaagaaccgagacgaa

SEQ ID NO: 650187 - RNA, 19 nt, Homo sapiens
  misc_RNA (1)...(19): siRNA sense strand
ucaccaacacacuuucuuu

SEQ ID NO: 650188 - RNA, 19 nt, Homo sapiens
  misc_RNA (1)...(19): siRNA sense strand
gagagacuuccuccaaaug

SEQ ID NO: 650189 - RNA, 19 nt, Homo sapiens
  misc_RNA (1)...(19): siRNA sense strand
cuuaucauuuccauccaua

SEQ ID NO: 650190 - RNA, 19 nt, Homo sapiens
  misc_RNA (1)...(19): siRNA sense strand
ugagagagguagacguuuu

SEQ ID NO: 650191 - RNA, 19 nt, Homo sapiens
  misc_RNA (1)...(19): siRNA sense strand
ccaaauggagcucagaaag

SEQ ID NO: 650192 - RNA, 19 nt, Homo sapiens
  misc_RNA (1)...(19): siRNA sense strand
aauggugucuauaucaaga

SEQ ID NO: 650193 - RNA, 19 nt, Homo sapiens
  misc_RNA (1)...(19): siRNA sense strand
cugcaagcguuucuucgaa

SEQ ID NO: 650194 - RNA, 19 nt, Homo sapiens
  misc_RNA (1)...(19): siRNA sense strand
ucucuuggcccuccugaaa

SEQ ID NO: 650195 - RNA, 19 nt, Homo sapiens
  misc_RNA (1)...(19): siRNA sense strand
uaacuuuaccaacagaaug

SEQ ID NO: 650196 - RNA, 19 nt, Homo sapiens
  misc_RNA (1)...(19): siRNA sense strand
cagcuagaauccaaaucug

SEQ ID NO: 650197 - RNA, 19 nt, Homo sapiens
  misc_RNA (1)...(19): siRNA sense strand
gcccugaugucugcuuuca

SEQ ID NO: 650198 - RNA, 19 nt, Homo sapiens
  misc_RNA (1)...(19): siRNA sense strand
guacuccacaucagcauuc

SEQ ID NO: 650199 - RNA, 19 nt, Homo sapiens
  misc_RNA (1)...(19): siRNA sense strand
gagacuuccuccaaauggu

SEQ ID NO: 650200 - RNA, 19 nt, Homo sapiens
  misc_RNA (1)...(19): siRNA sense strand
ugagaacuucaguaacuuu

SEQ ID NO: 650201 - RNA, 19 nt, Homo sapiens
  misc_RNA (1)...(19): siRNA sense strand
cacaucagcauucucaaga

SEQ ID NO: 650202 - RNA, 19 nt, Homo sapiens
  misc_RNA (1)...(19): siRNA sense strand
uauccugguuuuacucuua

SEQ ID NO: 650203 - RNA, 19 nt, Homo sapiens
  misc_RNA (1)...(19): siRNA sense strand
ggagaaguuaggccucaga

SEQ ID NO: 650204 - RNA, 19 nt, Homo sapiens
  misc_RNA (1)...(19): siRNA sense strand
gguguugguugagaacuuc

SEQ ID NO: 650205 - RNA, 19 nt, Homo sapiens
  misc_RNA (1)...(19): siRNA sense strand
ugaggaucccuuugugaaa

SEQ ID NO: 650206 - RNA, 19 nt, Homo sapiens
  misc_RNA (1)...(19): siRNA sense strand
cagccaagccugcgaccuu

SEQ ID NO: 650207 - RNA, 19 nt, Homo sapiens
  misc_RNA (1)...(19): siRNA sense strand
ucccaagccuucuccuuuc

SEQ ID NO: 650208 - RNA, 19 nt, Homo sapiens
  misc_RNA (1)...(19): siRNA sense strand
caucagcauucucaagacu

SEQ ID NO: 650209 - RNA, 19 nt, Homo sapiens
  misc_RNA (1)...(19): siRNA sense strand
caaauggagcucagaaagc

SEQ ID NO: 650210 - RNA, 19 nt, Homo sapiens
  misc_RNA (1)...(19): siRNA sense strand
gcccggauuuugcccaaua

SEQ ID NO: 650211 - RNA, 19 nt, Homo sapiens
  misc_RNA (1)...(19): siRNA sense strand
cugaaaagcugaacgagau

SEQ ID NO: 650212 - RNA, 19 nt, Homo sapiens
  misc_RNA (1)...(19): siRNA sense strand
aagcagguguugguugaga

SEQ ID NO: 650213 - RNA, 19 nt, Homo sapiens
  misc_RNA (1)...(19): siRNA sense strand
gaucaagcagguguugguu

SEQ ID NO: 650214 - RNA, 19 nt, Homo sapiens
  misc_RNA (1)...(19): siRNA sense strand
cauuggaaacuugacauuu

SEQ ID NO: 650215 - RNA, 19 nt, Homo sapiens
  misc_RNA (1)...(19): siRNA sense strand
cagaauggcgucggguuug

SEQ ID NO: 650216 - RNA, 19 nt, Homo sapiens
  misc_RNA (1)...(19): siRNA sense strand
ucuuggcccuccugaaaug

SEQ ID NO: 650217 - RNA, 19 nt, Homo sapiens
  misc_RNA (1)...(19): siRNA sense strand
gccaaauggagcucagaaa

SEQ ID NO: 650218 - RNA, 19 nt, Homo sapiens
  misc_RNA (1)...(19): siRNA sense strand
gguccuggaugcccgacau

SEQ ID NO: 650219 - RNA, 19 nt, Homo sapiens
  misc_RNA (1)...(19): siRNA sense strand
ggccuuugacuguggauga

SEQ ID NO: 650220 - RNA, 19 nt, Homo sapiens
  misc_RNA (1)...(19): siRNA sense strand
agccagacaugaucaagca

SEQ ID NO: 650221 - RNA, 19 nt, Homo sapiens
  misc_RNA (1)...(19): siRNA sense strand
ccaugggcgugcaagacuu

SEQ ID NO: 650222 - RNA, 19 nt, Homo sapiens
  misc_RNA (1)...(19): siRNA sense strand
ggauuuugcccaauaagaa

SEQ ID NO: 650223 - RNA, 19 nt, Homo sapiens
  misc_RNA (1)...(19): siRNA sense strand
ugaaaugguacuccacauc

SEQ ID NO: 650224 - RNA, 19 nt, Homo sapiens
  misc_RNA (1)...(19): siRNA sense strand
acagaauggcgucggguuu

SEQ ID NO: 650225 - RNA, 19 nt, Homo sapiens
  misc_RNA (1)...(19): siRNA sense strand
ccacaucagcauucucaag

SEQ ID NO: 650226 - RNA, 19 nt, Homo sapiens
  misc_RNA (1)...(19): siRNA sense strand
gcucagaaagcuguaugga

SEQ ID NO: 650227 - RNA, 19 nt, Homo sapiens
  misc_RNA (1)...(19): siRNA sense strand
cccgccagcuuucagauuc

SEQ ID NO: 650228 - RNA, 19 nt, Homo sapiens
  misc_RNA (1)...(19): siRNA sense strand
gauguacccgccagcuuuc

SEQ ID NO: 650229 - RNA, 19 nt, Homo sapiens
  misc_RNA (1)...(19): siRNA sense strand
ccagaggugcuacugcaau

SEQ ID NO: 650230 - RNA, 19 nt, Homo sapiens
  misc_RNA (1)...(19): siRNA sense strand
ugguugagaacuucaguaa

SEQ ID NO: 650231 - RNA, 19 nt, Homo sapiens
  misc_RNA (1)...(19): siRNA sense strand
gauggaagccuugggguuu

SEQ ID NO: 650232 - RNA, 19 nt, Homo sapiens
  misc_RNA (1)...(19): siRNA sense strand
gugcccugaugucugcuuu

SEQ ID NO: 650233 - RNA, 19 nt, Homo sapiens
  misc_RNA (1)...(19): siRNA sense strand
auccaaaucugcccuaggu

SEQ ID NO: 650234 - RNA, 19 nt, Homo sapiens
  misc_RNA (1)...(19): siRNA sense strand
ucugagagagguagacguu

SEQ ID NO: 650235 - RNA, 19 nt, Homo sapiens
  misc_RNA (1)...(19): siRNA sense strand
cugaggaucccuuugugaa

SEQ ID NO: 650236 - RNA, 19 nt, Homo sapiens
  misc_RNA (1)...(19): siRNA sense strand
gaggugcuacugcaauuac

SEQ ID NO: 650237 - RNA, 19 nt, Homo sapiens
  misc_RNA (1)...(19): siRNA sense strand
gucgucggauguuuauugu

SEQ ID NO: 650238 - RNA, 19 nt, Homo sapiens
  misc_RNA (1)...(19): siRNA sense strand
cccaagccuucuccuuuca

SEQ ID NO: 650239 - RNA, 19 nt, Homo sapiens
  misc_RNA (1)...(19): siRNA sense strand
aacccugacugccaagaga

SEQ ID NO: 650240 - RNA, 19 nt, Homo sapiens
  misc_RNA (1)...(19): siRNA sense strand
aaucaucaccaacacacuu

SEQ ID NO: 650241 - RNA, 19 nt, Homo sapiens
  misc_RNA (1)...(19): siRNA sense strand
uaagaaccgagacgaacug

SEQ ID NO: 650242 - RNA, 19 nt, Homo sapiens
  misc_RNA (1)...(19): siRNA sense strand
ugcaagcguuucuucgaau

SEQ ID NO: 650243 - RNA, 19 nt, Homo sapiens
  misc_RNA (1)...(19): siRNA sense strand
caugggcgugcaagacuuu

SEQ ID NO: 650244 - RNA, 19 nt, Homo sapiens
  misc_RNA (1)...(19): siRNA sense strand
aaucugcccuagguccaaa

SEQ ID NO: 650245 - RNA, 19 nt, Homo sapiens
  misc_RNA (1)...(19): siRNA sense strand
cgucggauguuuauuguua

SEQ ID NO: 650246 - RNA, 19 nt, Homo sapiens
  misc_RNA (1)...(19): siRNA sense strand
gaaccgagacgaacugaau

SEQ ID NO: 650247 - RNA, 19 nt, Homo sapiens
  misc_RNA (1)...(19): siRNA sense strand
gaaaugguacuccacauca

SEQ ID NO: 650248 - RNA, 19 nt, Homo sapiens
  misc_RNA (1)...(19): siRNA sense strand
gcaauuacaccacagaugu

SEQ ID NO: 650249 - RNA, 19 nt, Homo sapiens
  misc_RNA (1)...(19): siRNA sense strand
gcaagcguuucuucgaauu

SEQ ID NO: 650250 - RNA, 19 nt, Homo sapiens
  misc_RNA (1)...(19): siRNA sense strand
guugagaacuucaguaacu

SEQ ID NO: 650251 - RNA, 19 nt, Homo sapiens
  misc_RNA (1)...(19): siRNA sense strand
ggauguacccgccagcuuu

SEQ ID NO: 650252 - RNA, 19 nt, Homo sapiens
  misc_RNA (1)...(19): siRNA sense strand
gagaacuucaguaacuuua

SEQ ID NO: 650253 - RNA, 19 nt, Homo sapiens
  misc_RNA (1)...(19): siRNA sense strand
gaaguuaggccucagacau

SEQ ID NO: 650254 - RNA, 19 nt, Homo sapiens
  misc_RNA (1)...(19): siRNA sense strand
gaagagaggcggagagacu

SEQ ID NO: 650255 - RNA, 19 nt, Homo sapiens
  misc_RNA (1)...(19): siRNA sense strand
cagaggugcuacugcaauu

SEQ ID NO: 650256 - RNA, 19 nt, Homo sapiens
  misc_RNA (1)...(19): siRNA sense strand
ggucgucggauguuuauug

SEQ ID NO: 650257 - RNA, 19 nt, Homo sapiens
  misc_RNA (1)...(19): siRNA sense strand
caagccuucuccuuucauu

SEQ ID NO: 650258 - RNA, 19 nt, Homo sapiens
  misc_RNA (1)...(19): siRNA sense strand
gaggaucccuuugugaaac

SEQ ID NO: 650259 - RNA, 19 nt, Homo sapiens
  misc_RNA (1)...(19): siRNA sense strand
caauaagaaccgagacgaa

SEQ ID NO: 650260 - RNA, 19 nt, Homo sapiens
  misc_RNA (1)...(19): siRNA sense strand
ucaccaacacacuuucuuu

SEQ ID NO: 650261 - RNA, 19 nt, Homo sapiens
  misc_RNA (1)...(19): siRNA sense strand
gagagacuuccuccaaaug

SEQ ID NO: 650262 - RNA, 19 nt, Homo sapiens
  misc_RNA (1)...(19): siRNA sense strand
cuuaucauuuccauccaua

SEQ ID NO: 650263 - RNA, 19 nt, Homo sapiens
  misc_RNA (1)...(19): siRNA sense strand
ugagagagguagacguuuu

SEQ ID NO: 650264 - RNA, 19 nt, Homo sapiens
  misc_RNA (1)...(19): siRNA sense strand
ucucuuggcccuccugaaa

SEQ ID NO: 650265 - RNA, 19 nt, Homo sapiens
  misc_RNA (1)...(19): siRNA sense strand
cugcaagcguuucuucgaa

SEQ ID NO: 650266 - RNA, 19 nt, Homo sapiens
  misc_RNA (1)...(19): siRNA sense strand
uaacuuuaccaacagaaug

SEQ ID NO: 650267 - RNA, 19 nt, Homo sapiens
  misc_RNA (1)...(19): siRNA sense strand
ccaaauggagcucagaaag

SEQ ID NO: 650268 - RNA, 19 nt, Homo sapiens
  misc_RNA (1)...(19): siRNA sense strand
gcccugaugucugcuuuca

SEQ ID NO: 650269 - RNA, 19 nt, Homo sapiens
  misc_RNA (1)...(19): siRNA sense strand
guacuccacaucagcauuc

SEQ ID NO: 650270 - RNA, 19 nt, Homo sapiens
  misc_RNA (1)...(19): siRNA sense strand
gagacuuccuccaaauggu

SEQ ID NO: 650271 - RNA, 19 nt, Homo sapiens
  misc_RNA (1)...(19): siRNA sense strand
ugagaacuucaguaacuuu

SEQ ID NO: 650272 - RNA, 19 nt, Homo sapiens
  misc_RNA (1)...(19): siRNA sense strand
cacaucagcauucucaaga

SEQ ID NO: 650273 - RNA, 19 nt, Homo sapiens
  misc_RNA (1)...(19): siRNA sense strand
uauccugguuuuacucuua

SEQ ID NO: 650274 - RNA, 19 nt, Homo sapiens
  misc_RNA (1)...(19): siRNA sense strand
ggagaaguuaggccucaga

SEQ ID NO: 650275 - RNA, 19 nt, Homo sapiens
  misc_RNA (1)...(19): siRNA sense strand
gguguugguugagaacuuc

SEQ ID NO: 650276 - RNA, 19 nt, Homo sapiens
  misc_RNA (1)...(19): siRNA sense strand
ugaggaucccuuugugaaa

SEQ ID NO: 650277 - RNA, 19 nt, Homo sapiens
  misc_RNA (1)...(19): siRNA sense strand
cagccaagccugcgaccuu

SEQ ID NO: 650278 - RNA, 19 nt, Homo sapiens
  misc_RNA (1)...(19): siRNA sense strand
ucccaagccuucuccuuuc

SEQ ID NO: 650279 - RNA, 19 nt, Homo sapiens
  misc_RNA (1)...(19): siRNA sense strand
caucagcauucucaagacu

SEQ ID NO: 650280 - RNA, 19 nt, Homo sapiens
  misc_RNA (1)...(19): siRNA sense strand
caaauggagcucagaaagc

SEQ ID NO: 650281 - RNA, 19 nt, Homo sapiens
  misc_RNA (1)...(19): siRNA sense strand
gcccggauuuugcccaaua

SEQ ID NO: 650282 - RNA, 19 nt, Homo sapiens
  misc_RNA (1)...(19): siRNA sense strand
cugaaaagcugaacgagau

SEQ ID NO: 650283 - RNA, 19 nt, Homo sapiens
  misc_RNA (1)...(19): siRNA sense strand
aagcagguguugguugaga

SEQ ID NO: 650284 - RNA, 19 nt, Homo sapiens
  misc_RNA (1)...(19): siRNA sense strand
gaucaagcagguguugguu

SEQ ID NO: 650285 - RNA, 19 nt, Homo sapiens
  misc_RNA (1)...(19): siRNA sense strand
cauuggaaacuugacauuu

SEQ ID NO: 650286 - RNA, 19 nt, Homo sapiens
  misc_RNA (1)...(19): siRNA sense strand
ucuuggcccuccugaaaug

SEQ ID NO: 650287 - RNA, 19 nt, Homo sapiens
  misc_RNA (1)...(19): siRNA sense strand
cagaauggcgucggguuug

SEQ ID NO: 650288 - RNA, 19 nt, Homo sapiens
  misc_RNA (1)...(19): siRNA sense strand
gccaaauggagcucagaaa

SEQ ID NO: 650289 - RNA, 19 nt, Homo sapiens
  misc_RNA (1)...(19): siRNA sense strand
gguccuggaugcccgacau

SEQ ID NO: 650290 - RNA, 19 nt, Homo sapiens
  misc_RNA (1)...(19): siRNA sense strand
ggccuuugacuguggauga

SEQ ID NO: 650291 - RNA, 19 nt, Homo sapiens
  misc_RNA (1)...(19): siRNA sense strand
agccagacaugaucaagca

SEQ ID NO: 650292 - RNA, 19 nt, Homo sapiens
  misc_RNA (1)...(19): siRNA sense strand
ccaugggcgugcaagacuu

SEQ ID NO: 650293 - RNA, 19 nt, Homo sapiens
  misc_RNA (1)...(19): siRNA sense strand
ggauuuugcccaauaagaa

SEQ ID NO: 650294 - RNA, 19 nt, Homo sapiens
  misc_RNA (1)...(19): siRNA sense strand
ugaaaugguacuccacauc

SEQ ID NO: 650295 - RNA, 19 nt, Homo sapiens
  misc_RNA (1)...(19): siRNA sense strand
ccacaucagcauucucaag

SEQ ID NO: 650296 - RNA, 19 nt, Homo sapiens
  misc_RNA (1)...(19): siRNA sense strand
acagaauggcgucggguuu

SEQ ID NO: 650297 - RNA, 19 nt, Homo sapiens
  misc_RNA (1)...(19): siRNA sense strand
gcucagaaagcuguaugga

SEQ ID NO: 650298 - RNA, 19 nt, Homo sapiens
  misc_RNA (1)...(19): siRNA sense strand
cccgccagcuuucagauuc

SEQ ID NO: 650299 - RNA, 19 nt, Homo sapiens
  misc_RNA (1)...(19): siRNA sense strand
gauguacccgccagcuuuc

SEQ ID NO: 650300 - RNA, 19 nt, Homo sapiens
  misc_RNA (1)...(19): siRNA sense strand
ccagaggugcuacugcaau

SEQ ID NO: 650301 - RNA, 19 nt, Homo sapiens
  misc_RNA (1)...(19): siRNA sense strand
ugguugagaacuucaguaa

SEQ ID NO: 650302 - RNA, 19 nt, Homo sapiens
  misc_RNA (1)...(19): siRNA sense strand
gauggaagccuugggguuu

SEQ ID NO: 650303 - RNA, 19 nt, Homo sapiens
  misc_RNA (1)...(19): siRNA sense strand
gugcccugaugucugcuuu

SEQ ID NO: 650304 - RNA, 19 nt, Homo sapiens
  misc_RNA (1)...(19): siRNA sense strand
ucugagagagguagacguu

SEQ ID NO: 650305 - RNA, 19 nt, Homo sapiens
  misc_RNA (1)...(19): siRNA sense strand
cugaggaucccuuugugaa

SEQ ID NO: 650306 - RNA, 19 nt, Homo sapiens
  misc_RNA (1)...(19): siRNA sense strand
gaggugcuacugcaauuac

SEQ ID NO: 650307 - RNA, 19 nt, Homo sapiens
  misc_RNA (1)...(19): siRNA sense strand
gucgucggauguuuauugu

SEQ ID NO: 650308 - RNA, 19 nt, Homo sapiens
  misc_RNA (1)...(19): siRNA sense strand
aacccugacugccaagaga

SEQ ID NO: 650309 - RNA, 19 nt, Homo sapiens
  misc_RNA (1)...(19): siRNA sense strand
aaucaucaccaacacacuu

SEQ ID NO: 650310 - RNA, 19 nt, Homo sapiens
  misc_RNA (1)...(19): siRNA sense strand
uaagaaccgagacgaacug

SEQ ID NO: 650311 - RNA, 19 nt, Homo sapiens
  misc_RNA (1)...(19): siRNA sense strand
ugcaagcguuucuucgaau

SEQ ID NO: 650312 - RNA, 19 nt, Homo sapiens
  misc_RNA (1)...(19): siRNA sense strand
cccaagccuucuccuuuca

SEQ ID NO: 650313 - RNA, 19 nt, Homo sapiens
  misc_RNA (1)...(19): siRNA sense strand
caugggcgugcaagacuuu

SEQ ID NO: 650314 - RNA, 19 nt, Homo sapiens
  misc_RNA (1)...(19): siRNA sense strand
gaagacagaugaagaagag

SEQ ID NO: 650315 - RNA, 19 nt, Homo sapiens
  misc_RNA (1)...(19): siRNA sense strand
gccaugaucuucugccaua

SEQ ID NO: 650316 - RNA, 19 nt, Homo sapiens
  misc_RNA (1)...(19): siRNA sense strand
gaagaucagugagcagauu

SEQ ID NO: 650317 - RNA, 19 nt, Homo sapiens
  misc_RNA (1)...(19): siRNA sense strand
caacuugcaucuuaaggaa

SEQ ID NO: 650318 - RNA, 19 nt, Homo sapiens
  misc_RNA (1)...(19): siRNA sense strand
gaaagaggccagaagauca

SEQ ID NO: 650319 - RNA, 19 nt, Homo sapiens
  misc_RNA (1)...(19): siRNA sense strand
gagaacgcauugccacuga

SEQ ID NO: 650320 - RNA, 19 nt, Homo sapiens
  misc_RNA (1)...(19): siRNA sense strand
ggacgggaauccugacaau

SEQ ID NO: 650321 - RNA, 19 nt, Homo sapiens
  misc_RNA (1)...(19): siRNA sense strand
ucaacaagcugaucagaag

SEQ ID NO: 650322 - RNA, 19 nt, Homo sapiens
  misc_RNA (1)...(19): siRNA sense strand
cagcagagcucucaaaaga

SEQ ID NO: 650323 - RNA, 19 nt, Homo sapiens
  misc_RNA (1)...(19): siRNA sense strand
guucauugaucccaagaaa

SEQ ID NO: 650324 - RNA, 19 nt, Homo sapiens
  misc_RNA (1)...(19): siRNA sense strand
aguagaaccugcaaacaaa

SEQ ID NO: 650325 - RNA, 19 nt, Homo sapiens
  misc_RNA (1)...(19): siRNA sense strand
ggaaagaggccagaagauc

SEQ ID NO: 650326 - RNA, 19 nt, Homo sapiens
  misc_RNA (1)...(19): siRNA sense strand
gcuccaagcucaaguucau

SEQ ID NO: 650327 - RNA, 19 nt, Homo sapiens
  misc_RNA (1)...(19): siRNA sense strand
uaacacaaaccaaguggaa

SEQ ID NO: 650328 - RNA, 19 nt, Homo sapiens
  misc_RNA (1)...(19): siRNA sense strand
gaucagaagcaaccuuguu

SEQ ID NO: 650329 - RNA, 19 nt, Homo sapiens
  misc_RNA (1)...(19): siRNA sense strand
cauccaagauacaagagaa

SEQ ID NO: 650330 - RNA, 19 nt, Homo sapiens
  misc_RNA (1)...(19): siRNA sense strand
gagaaaaucaaaccagaua

SEQ ID NO: 650331 - RNA, 19 nt, Homo sapiens
  misc_RNA (1)...(19): siRNA sense strand
ugaggcugaugucaugaua

SEQ ID NO: 650332 - RNA, 19 nt, Homo sapiens
  misc_RNA (1)...(19): siRNA sense strand
acaagugucugucgucauc

SEQ ID NO: 650333 - RNA, 19 nt, Homo sapiens
  misc_RNA (1)...(19): siRNA sense strand
ggacgagauugagaaaaua

SEQ ID NO: 650334 - RNA, 19 nt, Homo sapiens
  misc_RNA (1)...(19): siRNA sense strand
ggccaugcuuagccaagua

SEQ ID NO: 650335 - RNA, 19 nt, Homo sapiens
  misc_RNA (1)...(19): siRNA sense strand
gcaugaacauccugaacag

SEQ ID NO: 650336 - RNA, 19 nt, Homo sapiens
  misc_RNA (1)...(19): siRNA sense strand
gaaguuugcccagaaagug

SEQ ID NO: 650337 - RNA, 19 nt, Homo sapiens
  misc_RNA (1)...(19): siRNA sense strand
uagaaagauuggacacaga

SEQ ID NO: 650338 - RNA, 19 nt, Homo sapiens
  misc_RNA (1)...(19): siRNA sense strand
caauggugcuguugucaag

SEQ ID NO: 650339 - RNA, 19 nt, Homo sapiens
  misc_RNA (1)...(19): siRNA sense strand
gauacaagagaacgcauug

SEQ ID NO: 650340 - RNA, 19 nt, Homo sapiens
  misc_RNA (1)...(19): siRNA sense strand
gauuggacacagaugauuu

SEQ ID NO: 650341 - RNA, 19 nt, Homo sapiens
  misc_RNA (1)...(19): siRNA sense strand
gcagagcucucaaaagaag

SEQ ID NO: 650342 - RNA, 19 nt, Homo sapiens
  misc_RNA (1)...(19): siRNA sense strand
gugagcagauugucauugg

SEQ ID NO: 650343 - RNA, 19 nt, Homo sapiens
  misc_RNA (1)...(19): siRNA sense strand
cagagaagacagaugaaga

SEQ ID NO: 650344 - RNA, 19 nt, Homo sapiens
  misc_RNA (1)...(19): siRNA sense strand
cagaugauuuggacgagau

SEQ ID NO: 650345 - RNA, 19 nt, Homo sapiens
  misc_RNA (1)...(19): siRNA sense strand
ugaacauccugaacagaau

SEQ ID NO: 650346 - RNA, 19 nt, Homo sapiens
  misc_RNA (1)...(19): siRNA sense strand
guggaaguuugcccagaaa

SEQ ID NO: 650347 - RNA, 19 nt, Homo sapiens
  misc_RNA (1)...(19): siRNA sense strand
caagguguuuguucuggau

SEQ ID NO: 650348 - RNA, 19 nt, Homo sapiens
  misc_RNA (1)...(19): siRNA sense strand
uagaaccugcaaacaaaua

SEQ ID NO: 650349 - RNA, 19 nt, Homo sapiens
  misc_RNA (1)...(19): siRNA sense strand
gaacgcauugccacugaug

SEQ ID NO: 650350 - RNA, 19 nt, Homo sapiens
  misc_RNA (1)...(19): siRNA sense strand
agagaagacagaugaagaa

SEQ ID NO: 650351 - RNA, 19 nt, Homo sapiens
  misc_RNA (1)...(19): siRNA sense strand
caagaccaaugccaaugca

SEQ ID NO: 650352 - RNA, 19 nt, Homo sapiens
  misc_RNA (1)...(19): siRNA sense strand
gcccaguccuuacucaaca

SEQ ID NO: 650353 - RNA, 19 nt, Homo sapiens
  misc_RNA (1)...(19): siRNA sense strand
agaggaugcugcccaggaa

SEQ ID NO: 650354 - RNA, 19 nt, Homo sapiens
  misc_RNA (1)...(19): siRNA sense strand
gaacagaauccaggagcau

SEQ ID NO: 650355 - RNA, 19 nt, Homo sapiens
  misc_RNA (1)...(19): siRNA sense strand
gaaguuccaggccuugugu

SEQ ID NO: 650356 - RNA, 19 nt, Homo sapiens
  misc_RNA (1)...(19): siRNA sense strand
cagcagagacgagaaguuc

SEQ ID NO: 650357 - RNA, 19 nt, Homo sapiens
  misc_RNA (1)...(19): siRNA sense strand
gaacauccugaacagaauc

SEQ ID NO: 650358 - RNA, 19 nt, Homo sapiens
  misc_RNA (1)...(19): siRNA sense strand
gauccaaacuccccucugu

SEQ ID NO: 650359 - RNA, 19 nt, Homo sapiens
  misc_RNA (1)...(19): siRNA sense strand
ccaucaagcaguacuaugu

SEQ ID NO: 650360 - RNA, 19 nt, Homo sapiens
  misc_RNA (1)...(19): siRNA sense strand
ggaaguuugcccagaaagu

SEQ ID NO: 650361 - RNA, 19 nt, Homo sapiens
  misc_RNA (1)...(19): siRNA sense strand
uugaacaaaugggcaaauu

SEQ ID NO: 650362 - RNA, 19 nt, Homo sapiens
  misc_RNA (1)...(19): siRNA sense strand
ccagguggcucugcugagu

SEQ ID NO: 650363 - RNA, 19 nt, Homo sapiens
  misc_RNA (1)...(19): siRNA sense strand
ccaagaaaaucaagguguu

SEQ ID NO: 650364 - RNA, 19 nt, Homo sapiens
  misc_RNA (1)...(19): siRNA sense strand
uguggaaguuugcccagaa

SEQ ID NO: 650365 - RNA, 19 nt, Homo sapiens
  misc_RNA (1)...(19): siRNA sense strand
aaagauuggacacagauga

SEQ ID NO: 650366 - RNA, 19 nt, Homo sapiens
  misc_RNA (1)...(19): siRNA sense strand
aaucaaaccagauaccaau

SEQ ID NO: 650367 - RNA, 19 nt, Homo sapiens
  misc_RNA (1)...(19): siRNA sense strand
gaaagauuggacacagaug

SEQ ID NO: 650368 - RNA, 19 nt, Homo sapiens
  misc_RNA (1)...(19): siRNA sense strand
gcaagcacagcaugaacau

SEQ ID NO: 650369 - RNA, 19 nt, Homo sapiens
  misc_RNA (1)...(19): siRNA sense strand
acgggaauccugacaauga

SEQ ID NO: 650370 - RNA, 19 nt, Homo sapiens
  misc_RNA (1)...(19): siRNA sense strand
gacagaugaagaagagaaa

SEQ ID NO: 650371 - RNA, 19 nt, Homo sapiens
  misc_RNA (1)...(19): siRNA sense strand
gcuguucgaggcaauaaau

SEQ ID NO: 650372 - RNA, 19 nt, Homo sapiens
  misc_RNA (1)...(19): siRNA sense strand
aaaucaagguguuuguucu

SEQ ID NO: 650373 - RNA, 19 nt, Homo sapiens
  misc_RNA (1)...(19): siRNA sense strand
gagucuaugccauggguuu

SEQ ID NO: 650374 - RNA, 19 nt, Homo sapiens
  misc_RNA (1)...(19): siRNA sense strand
cagaugaagaagagaaaga

SEQ ID NO: 650375 - RNA, 19 nt, Homo sapiens
  misc_RNA (1)...(19): siRNA sense strand
aaguagaaccugcaaacaa

SEQ ID NO: 650376 - RNA, 19 nt, Homo sapiens
  misc_RNA (1)...(19): siRNA sense strand
ccaaguagaaccugcaaac

SEQ ID NO: 650377 - RNA, 19 nt, Homo sapiens
  misc_RNA (1)...(19): siRNA sense strand
agacagaugaagaagagaa

SEQ ID NO: 650378 - RNA, 19 nt, Homo sapiens
  misc_RNA (1)...(19): siRNA sense strand
acagaauccaggagcauuu

SEQ ID NO: 650379 - RNA, 19 nt, Homo sapiens
  misc_RNA (1)...(19): siRNA sense strand
ugaacaugguggacagcaa

SEQ ID NO: 650380 - RNA, 19 nt, Homo sapiens
  misc_RNA (1)...(19): siRNA sense strand
ccacucagggccaccaaga

SEQ ID NO: 650381 - RNA, 19 nt, Homo sapiens
  misc_RNA (1)...(19): siRNA sense strand
ccaaugccaaugcagagaa

SEQ ID NO: 650382 - RNA, 19 nt, Homo sapiens
  misc_RNA (1)...(19): siRNA sense strand
gcagagaagacagaugaag

SEQ ID NO: 650383 - RNA, 19 nt, Homo sapiens
  misc_RNA (1)...(19): siRNA sense strand
ccaaugcagagaagacaga

SEQ ID NO: 650384 - RNA, 19 nt, Homo sapiens
  misc_RNA (1)...(19): siRNA sense strand
gaggccagaagaucaguga

SEQ ID NO: 650385 - RNA, 19 nt, Homo sapiens
  misc_RNA (1)...(19): siRNA sense strand
caaacugaagcgugaggaa

SEQ ID NO: 650386 - RNA, 19 nt, Homo sapiens
  misc_RNA (1)...(19): siRNA sense strand
gcagagacgagaaguucca

SEQ ID NO: 650387 - RNA, 19 nt, Homo sapiens
  misc_RNA (1)...(19): siRNA sense strand
gcagcagagacgagaaguu

SEQ ID NO: 650388 - RNA, 19 nt, Homo sapiens
  misc_RNA (1)...(19): siRNA sense strand
acacaaaccaaguggaagu

SEQ ID NO: 650389 - RNA, 19 nt, Homo sapiens
  misc_RNA (1)...(19): siRNA sense strand
gauagaaagauuggacaca

SEQ ID NO: 650390 - RNA, 19 nt, Homo sapiens
  misc_RNA (1)...(19): siRNA sense strand
gacagcaagcacagcauga

SEQ ID NO: 650391 - RNA, 19 nt, Homo sapiens
  misc_RNA (1)...(19): siRNA sense strand
caaucguccauccaagaua

SEQ ID NO: 650392 - RNA, 19 nt, Homo sapiens
  misc_RNA (1)...(19): siRNA sense strand
aaucguccauccaagauac

SEQ ID NO: 650393 - RNA, 19 nt, Homo sapiens
  misc_RNA (1)...(19): siRNA sense strand
guagaaccugcaaacaaau

SEQ ID NO: 650394 - RNA, 19 nt, Homo sapiens
  misc_RNA (1)...(19): siRNA sense strand
caaugccaaugcagagaag

SEQ ID NO: 650395 - RNA, 19 nt, Homo sapiens
  misc_RNA (1)...(19): siRNA sense strand
gcucaagccaugaucuucu

SEQ ID NO: 650396 - RNA, 19 nt, Homo sapiens
  misc_RNA (1)...(19): siRNA sense strand
caaguagaaccugcaaaca

SEQ ID NO: 650397 - RNA, 19 nt, Homo sapiens
  misc_RNA (1)...(19): siRNA sense strand
ccaauggugcuguugucaa

SEQ ID NO: 650398 - RNA, 19 nt, Homo sapiens
  misc_RNA (1)...(19): siRNA sense strand
gugcuguugucaagaccaa

SEQ ID NO: 650399 - RNA, 19 nt, Homo sapiens
  misc_RNA (1)...(19): siRNA sense strand
augcagagaagacagauga

SEQ ID NO: 650400 - RNA, 19 nt, Homo sapiens
  misc_RNA (1)...(19): siRNA sense strand
gaaaaucaagguguuuguu

SEQ ID NO: 650401 - RNA, 19 nt, Homo sapiens
  misc_RNA (1)...(19): siRNA sense strand
caggaaaagugauugaaca

SEQ ID NO: 650402 - RNA, 19 nt, Homo sapiens
  misc_RNA (1)...(19): siRNA sense strand
ugagcucgcccuccaaaca

SEQ ID NO: 650403 - RNA, 19 nt, Homo sapiens
  misc_RNA (1)...(19): siRNA sense strand
ggaaaagugauugaacaaa

SEQ ID NO: 650404 - RNA, 19 nt, Homo sapiens
  misc_RNA (1)...(19): siRNA sense strand
caggagcauuuuaauaaga

SEQ ID NO: 650405 - RNA, 19 nt, Homo sapiens
  misc_RNA (1)...(19): siRNA sense strand
gagggcaaagagaagguuu

SEQ ID NO: 650406 - RNA, 19 nt, Homo sapiens
  misc_RNA (1)...(19): siRNA sense strand
gacucuguguggaaguuug

SEQ ID NO: 650407 - RNA, 19 nt, Homo sapiens
  misc_RNA (1)...(19): siRNA sense strand
gcccaggaacugccagaug

SEQ ID NO: 650408 - RNA, 19 nt, Homo sapiens
  misc_RNA (1)...(19): siRNA sense strand
cagagcugcccaguccuua

SEQ ID NO: 650409 - RNA, 19 nt, Homo sapiens
  misc_RNA (1)...(19): siRNA sense strand
ucagugagcagauugucau

SEQ ID NO: 650410 - RNA, 19 nt, Homo sapiens
  misc_RNA (1)...(19): siRNA sense strand
uccaggagcauuuuaauaa

SEQ ID NO: 650411 - RNA, 19 nt, Homo sapiens
  misc_RNA (1)...(19): siRNA sense strand
agaagacagaugaagaaga

SEQ ID NO: 650412 - RNA, 19 nt, Homo sapiens
  misc_RNA (1)...(19): siRNA sense strand
agaaagauuggacacagau

SEQ ID NO: 650413 - RNA, 19 nt, Homo sapiens
  misc_RNA (1)...(19): siRNA sense strand
gauuuggacgagauugaga

SEQ ID NO: 650414 - RNA, 19 nt, Homo sapiens
  misc_RNA (1)...(19): siRNA sense strand
cgacaacuguauccagaaa

SEQ ID NO: 650415 - RNA, 19 nt, Homo sapiens
  misc_RNA (1)...(19): siRNA sense strand
gagcaggcauggugugugu

SEQ ID NO: 650416 - RNA, 19 nt, Homo sapiens
  misc_RNA (1)...(19): siRNA sense strand
ggagggagcaggguuauga

SEQ ID NO: 650417 - RNA, 19 nt, Homo sapiens
  misc_RNA (1)...(19): siRNA sense strand
gucuacagcuucauauuga

SEQ ID NO: 650418 - RNA, 19 nt, Homo sapiens
  misc_RNA (1)...(19): siRNA sense strand
uaaagauggucuacagcuu

SEQ ID NO: 650419 - RNA, 19 nt, Homo sapiens
  misc_RNA (1)...(19): siRNA sense strand
cuucagagccaucaacuaa

SEQ ID NO: 650420 - RNA, 19 nt, Homo sapiens
  misc_RNA (1)...(19): siRNA sense strand
ggucuacagcuucauauug

SEQ ID NO: 650421 - RNA, 19 nt, Homo sapiens
  misc_RNA (1)...(19): siRNA sense strand
ggacauuggugcgcguguu

SEQ ID NO: 650422 - RNA, 19 nt, Homo sapiens
  misc_RNA (1)...(19): siRNA sense strand
ccacgugcccuuuggcuuu

SEQ ID NO: 650423 - RNA, 19 nt, Homo sapiens
  misc_RNA (1)...(19): siRNA sense strand
gcggaacugucgccagaug

SEQ ID NO: 650424 - RNA, 19 nt, Homo sapiens
  misc_RNA (1)...(19): siRNA sense strand
gauggucuacagcuucaua

SEQ ID NO: 650425 - RNA, 19 nt, Homo sapiens
  misc_RNA (1)...(19): siRNA sense strand
guguuucccuugcugauga

SEQ ID NO: 650426 - RNA, 19 nt, Homo sapiens
  misc_RNA (1)...(19): siRNA sense strand
caacaucgugggcacaaau

SEQ ID NO: 650427 - RNA, 19 nt, Homo sapiens
  misc_RNA (1)...(19): siRNA sense strand
acauaaagauggucuacag

SEQ ID NO: 650428 - RNA, 19 nt, Homo sapiens
  misc_RNA (1)...(19): siRNA sense strand
caucuuccacuacaccaua

SEQ ID NO: 650429 - RNA, 19 nt, Homo sapiens
  misc_RNA (1)...(19): siRNA sense strand
ccaacgcugugcagagguu

SEQ ID NO: 650430 - RNA, 19 nt, Homo sapiens
  misc_RNA (1)...(19): siRNA sense strand
gcaggcaugguguguguga

SEQ ID NO: 650431 - RNA, 19 nt, Homo sapiens
  misc_RNA (1)...(19): siRNA sense strand
caucaaggccaacucuaug

SEQ ID NO: 650432 - RNA, 19 nt, Homo sapiens
  misc_RNA (1)...(19): siRNA sense strand
caaauguggcguguucuug

SEQ ID NO: 650433 - RNA, 19 nt, Homo sapiens
  misc_RNA (1)...(19): siRNA sense strand
gaggucauguucaaaucca

SEQ ID NO: 650434 - RNA, 19 nt, Homo sapiens
  misc_RNA (1)...(19): siRNA sense strand
ccaucaaggccaacucuau

SEQ ID NO: 650435 - RNA, 19 nt, Homo sapiens
  misc_RNA (1)...(19): siRNA sense strand
ggacauaaagauggucuac

SEQ ID NO: 650436 - RNA, 19 nt, Homo sapiens
  misc_RNA (1)...(19): siRNA sense strand
gcggcugaauccagaagug

SEQ ID NO: 650437 - RNA, 19 nt, Homo sapiens
  misc_RNA (1)...(19): siRNA sense strand
aagauggucuacagcuuca

SEQ ID NO: 650438 - RNA, 19 nt, Homo sapiens
  misc_RNA (1)...(19): siRNA sense strand
caaggccaacucuauggaa

SEQ ID NO: 650439 - RNA, 19 nt, Homo sapiens
  misc_RNA (1)...(19): siRNA sense strand
ggccugggacugcaucuuc

SEQ ID NO: 650440 - RNA, 19 nt, Homo sapiens
  misc_RNA (1)...(19): siRNA sense strand
guacggcgacaacuguauc

SEQ ID NO: 650441 - RNA, 19 nt, Homo sapiens
  misc_RNA (1)...(19): siRNA sense strand
ccauagaagccagcaacuu

SEQ ID NO: 650442 - RNA, 19 nt, Homo sapiens
  misc_RNA (1)...(19): siRNA sense strand
aagaggacauaaagauggu

SEQ ID NO: 650443 - RNA, 19 nt, Homo sapiens
  misc_RNA (1)...(19): siRNA sense strand
cccagcaucuuccacuaca

SEQ ID NO: 650444 - RNA, 19 nt, Homo sapiens
  misc_RNA (1)...(19): siRNA sense strand
ggccaacucuauggaacuc

SEQ ID NO: 650445 - RNA, 19 nt, Homo sapiens
  misc_RNA (1)...(19): siRNA sense strand
uggaggucauguucaaauc

SEQ ID NO: 650446 - RNA, 19 nt, Homo sapiens
  misc_RNA (1)...(19): siRNA sense strand
gacaacaucgugggcacaa

SEQ ID NO: 650447 - RNA, 19 nt, Homo sapiens
  misc_RNA (1)...(19): siRNA sense strand
gguauugacucuucagauu

SEQ ID NO: 650448 - RNA, 19 nt, Homo sapiens
  misc_RNA (1)...(19): siRNA sense strand
aaagaaggcucgaaugagu

SEQ ID NO: 650449 - RNA, 19 nt, Homo sapiens
  misc_RNA (1)...(19): siRNA sense strand
cgaaagaaggcucgaauga

SEQ ID NO: 650450 - RNA, 19 nt, Homo sapiens
  misc_RNA (1)...(19): siRNA sense strand
ggaagccauuaaugaacua

SEQ ID NO: 650451 - RNA, 19 nt, Homo sapiens
  misc_RNA (1)...(19): siRNA sense strand
gcaagugguagauuuagaa

SEQ ID NO: 650452 - RNA, 19 nt, Homo sapiens
  misc_RNA (1)...(19): siRNA sense strand
gaacagcaagugguagauu

SEQ ID NO: 650453 - RNA, 19 nt, Homo sapiens
  misc_RNA (1)...(19): siRNA sense strand
agugguagauuuagaagaa

SEQ ID NO: 650454 - RNA, 19 nt, Homo sapiens
  misc_RNA (1)...(19): siRNA sense strand
caacuuggacccagucaug

SEQ ID NO: 650455 - RNA, 19 nt, Homo sapiens
  misc_RNA (1)...(19): siRNA sense strand
ccagucauguucuucaaau

SEQ ID NO: 650456 - RNA, 19 nt, Homo sapiens
  misc_RNA (1)...(19): siRNA sense strand
gaacaucuccccauggauu

SEQ ID NO: 650457 - RNA, 19 nt, Homo sapiens
  misc_RNA (1)...(19): siRNA sense strand
gcuggaagccauuaaugaa

SEQ ID NO: 650458 - RNA, 19 nt, Homo sapiens
  misc_RNA (1)...(19): siRNA sense strand
gaaagaaggcucgaaugag

SEQ ID NO: 650459 - RNA, 19 nt, Homo sapiens
  misc_RNA (1)...(19): siRNA sense strand
gaaaacucauggccuugua

SEQ ID NO: 650460 - RNA, 19 nt, Homo sapiens
  misc_RNA (1)...(19): siRNA sense strand
gcgcugaggaggaaacuga

SEQ ID NO: 650461 - RNA, 19 nt, Homo sapiens
  misc_RNA (1)...(19): siRNA sense strand
agaaggcgcugaggaggaa

SEQ ID NO: 650462 - RNA, 19 nt, Homo sapiens
  misc_RNA (1)...(19): siRNA sense strand
aacagcaagugguagauuu

SEQ ID NO: 650463 - RNA, 19 nt, Homo sapiens
  misc_RNA (1)...(19): siRNA sense strand
ccagaggucuacccagaag

SEQ ID NO: 650464 - RNA, 19 nt, Homo sapiens
  misc_RNA (1)...(19): siRNA sense strand
uauugacucuucagauuca

SEQ ID NO: 650465 - RNA, 19 nt, Homo sapiens
  misc_RNA (1)...(19): siRNA sense strand
ugccagagaucgaaagaag

SEQ ID NO: 650466 - RNA, 19 nt, Homo sapiens
  misc_RNA (1)...(19): siRNA sense strand
acagcaagugguagauuua

SEQ ID NO: 650467 - RNA, 19 nt, Homo sapiens
  misc_RNA (1)...(19): siRNA sense strand
gauauccuguugggcauuc

SEQ ID NO: 650468 - RNA, 19 nt, Homo sapiens
  misc_RNA (1)...(19): siRNA sense strand
cauggauucuggcgguauu

SEQ ID NO: 650469 - RNA, 19 nt, Homo sapiens
  misc_RNA (1)...(19): siRNA sense strand
cagcucagacugccagaga

SEQ ID NO: 650470 - RNA, 19 nt, Homo sapiens
  misc_RNA (1)...(19): siRNA sense strand
guugagaaccaggaguuaa

SEQ ID NO: 650471 - RNA, 19 nt, Homo sapiens
  misc_RNA (1)...(19): siRNA sense strand
guauugacucuucagauuc

SEQ ID NO: 650472 - RNA, 19 nt, Homo sapiens
  misc_RNA (1)...(19): siRNA sense strand
cucauggccuuguaguuga

SEQ ID NO: 650473 - RNA, 19 nt, Homo sapiens
  misc_RNA (1)...(19): siRNA sense strand
acucauggccuuguaguug

SEQ ID NO: 650474 - RNA, 19 nt, Homo sapiens
  misc_RNA (1)...(19): siRNA sense strand
ucgaaugagugagcuggaa

SEQ ID NO: 650475 - RNA, 19 nt, Homo sapiens
  misc_RNA (1)...(19): siRNA sense strand
uggaagccauuaaugaacu

SEQ ID NO: 650476 - RNA, 19 nt, Homo sapiens
  misc_RNA (1)...(19): siRNA sense strand
cagaacaucuccccaugga

SEQ ID NO: 650477 - RNA, 19 nt, Homo sapiens
  misc_RNA (1)...(19): siRNA sense strand
cagaguagcagcucagacu

SEQ ID NO: 650478 - RNA, 19 nt, Homo sapiens
  misc_RNA (1)...(19): siRNA sense strand
agaaggcucgaaugaguga

SEQ ID NO: 650479 - RNA, 19 nt, Homo sapiens
  misc_RNA (1)...(19): siRNA sense strand
caagcuggaagccauuaau

SEQ ID NO: 650480 - RNA, 19 nt, Homo sapiens
  misc_RNA (1)...(19): siRNA sense strand
gaaugagugagcuggaaca

SEQ ID NO: 650481 - RNA, 19 nt, Homo sapiens
  misc_RNA (1)...(19): siRNA sense strand
ggggauggaugcccugguu

SEQ ID NO: 650482 - RNA, 19 nt, Homo sapiens
  misc_RNA (1)...(19): siRNA sense strand
gaagccauuaaugaacuaa

SEQ ID NO: 650483 - RNA, 19 nt, Homo sapiens
  misc_RNA (1)...(19): siRNA sense strand
gcugaggaggaaacugaaa

SEQ ID NO: 650484 - RNA, 19 nt, Homo sapiens
  misc_RNA (1)...(19): siRNA sense strand
ugguagauuuagaagaaga

SEQ ID NO: 650485 - RNA, 19 nt, Homo sapiens
  misc_RNA (1)...(19): siRNA sense strand
agagucugauauccuguug

SEQ ID NO: 650486 - RNA, 19 nt, Homo sapiens
  misc_RNA (1)...(19): siRNA sense strand
gcucagacugccagagauc

SEQ ID NO: 650487 - RNA, 19 nt, Homo sapiens
  misc_RNA (1)...(19): siRNA sense strand
guccgcagcacucagacua

SEQ ID NO: 650488 - RNA, 19 nt, Homo sapiens
  misc_RNA (1)...(19): siRNA sense strand
gccaagcuggaagccauua

SEQ ID NO: 650489 - RNA, 19 nt, Homo sapiens
  misc_RNA (1)...(19): siRNA sense strand
gaacaucaccuaagagauu

SEQ ID NO: 650490 - RNA, 19 nt, Homo sapiens
  misc_RNA (1)...(19): siRNA sense strand
gguggaagcuacaaugauu

SEQ ID NO: 650491 - RNA, 19 nt, Homo sapiens
  misc_RNA (1)...(19): siRNA sense strand
ugaagaacaucaccuaaga

SEQ ID NO: 650492 - RNA, 19 nt, Homo sapiens
  misc_RNA (1)...(19): siRNA sense strand
gaccaugacuccguggaua

SEQ ID NO: 650493 - RNA, 19 nt, Homo sapiens
  misc_RNA (1)...(19): siRNA sense strand
uaaagaagacacugaagaa

SEQ ID NO: 650494 - RNA, 19 nt, Homo sapiens
  misc_RNA (1)...(19): siRNA sense strand
ggauggcuauaauggauuu

SEQ ID NO: 650495 - RNA, 19 nt, Homo sapiens
  misc_RNA (1)...(19): siRNA sense strand
gaaaagcccugucaaagca

SEQ ID NO: 650496 - RNA, 19 nt, Homo sapiens
  misc_RNA (1)...(19): siRNA sense strand
ggagguggaugcagcuaug

SEQ ID NO: 650497 - RNA, 19 nt, Homo sapiens
  misc_RNA (1)...(19): siRNA sense strand
gauauuuguugguggcauu

SEQ ID NO: 650498 - RNA, 19 nt, Homo sapiens
  misc_RNA (1)...(19): siRNA sense strand
ggguugagcuuugaaacaa

SEQ ID NO: 650499 - RNA, 19 nt, Homo sapiens
  misc_RNA (1)...(19): siRNA sense strand
uauaauggauuuggcaaug

SEQ ID NO: 650500 - RNA, 19 nt, Homo sapiens
  misc_RNA (1)...(19): siRNA sense strand
agaagacacugaagaacau

SEQ ID NO: 650501 - RNA, 19 nt, Homo sapiens
  misc_RNA (1)...(19): siRNA sense strand
gcucacggacuguguggua

SEQ ID NO: 650502 - RNA, 19 nt, Homo sapiens
  misc_RNA (1)...(19): siRNA sense strand
guaaugagagauccaaaca

SEQ ID NO: 650503 - RNA, 19 nt, Homo sapiens
  misc_RNA (1)...(19): siRNA sense strand
agagauggcuagugcuuca

SEQ ID NO: 650504 - RNA, 19 nt, Homo sapiens
  misc_RNA (1)...(19): siRNA sense strand
aacaucaccuaagagauua

SEQ ID NO: 650505 - RNA, 19 nt, Homo sapiens
  misc_RNA (1)...(19): siRNA sense strand
caagagauggcuagugcuu

SEQ ID NO: 650506 - RNA, 19 nt, Homo sapiens
  misc_RNA (1)...(19): siRNA sense strand
gcauuaaagaagacacuga

SEQ ID NO: 650507 - RNA, 19 nt, Homo sapiens
  misc_RNA (1)...(19): siRNA sense strand
ccgaggcaguggcaagaaa

SEQ ID NO: 650508 - RNA, 19 nt, Homo sapiens
  misc_RNA (1)...(19): siRNA sense strand
ugagagauccaaacaccaa

SEQ ID NO: 650509 - RNA, 19 nt, Homo sapiens
  misc_RNA (1)...(19): siRNA sense strand
uaauggauuuggcaaugau

SEQ ID NO: 650510 - RNA, 19 nt, Homo sapiens
  misc_RNA (1)...(19): siRNA sense strand
uuaaagaagacacugaaga

SEQ ID NO: 650511 - RNA, 19 nt, Homo sapiens
  misc_RNA (1)...(19): siRNA sense strand
uaagucagagucuccuaaa

SEQ ID NO: 650512 - RNA, 19 nt, Homo sapiens
  misc_RNA (1)...(19): siRNA sense strand
agucagagucuccuaaaga

SEQ ID NO: 650513 - RNA, 19 nt, Homo sapiens
  misc_RNA (1)...(19): siRNA sense strand
gaagaacaucaccuaagag

SEQ ID NO: 650514 - RNA, 19 nt, Homo sapiens
  misc_RNA (1)...(19): siRNA sense strand
ggacugugugguaaugaga

SEQ ID NO: 650515 - RNA, 19 nt, Homo sapiens
  misc_RNA (1)...(19): siRNA sense strand
gguggaggccaauacuuug

SEQ ID NO: 650516 - RNA, 19 nt, Homo sapiens
  misc_RNA (1)...(19): siRNA sense strand
uuacaacaaucagucuuca

SEQ ID NO: 650517 - RNA, 19 nt, Homo sapiens
  misc_RNA (1)...(19): siRNA sense strand
gucagagucuccuaaagag

SEQ ID NO: 650518 - RNA, 19 nt, Homo sapiens
  misc_RNA (1)...(19): siRNA sense strand
auaauggauuuggcaauga

SEQ ID NO: 650519 - RNA, 19 nt, Homo sapiens
  misc_RNA (1)...(19): siRNA sense strand
aagaacaucaccuaagaga

SEQ ID NO: 650520 - RNA, 19 nt, Homo sapiens
  misc_RNA (1)...(19): siRNA sense strand
cauuaaagaagacacugaa

SEQ ID NO: 650521 - RNA, 19 nt, Homo sapiens
  misc_RNA (1)...(19): siRNA sense strand
ggaggguugagcuuugaaa

SEQ ID NO: 650522 - RNA, 19 nt, Homo sapiens
  misc_RNA (1)...(19): siRNA sense strand
aagaagacacugaagaaca

SEQ ID NO: 650523 - RNA, 19 nt, Homo sapiens
  misc_RNA (1)...(19): siRNA sense strand
gcuuugaaacaacugauga

SEQ ID NO: 650524 - RNA, 19 nt, Homo sapiens
  misc_RNA (1)...(19): siRNA sense strand
gaacgcucacggacugugu

SEQ ID NO: 650525 - RNA, 19 nt, Homo sapiens
  misc_RNA (1)...(19): siRNA sense strand
cuaagucagagucuccuaa

SEQ ID NO: 650526 - RNA, 19 nt, Homo sapiens
  misc_RNA (1)...(19): siRNA sense strand
acacaagguggauggaaga

SEQ ID NO: 650527 - RNA, 19 nt, Homo sapiens
  misc_RNA (1)...(19): siRNA sense strand
cuauggcaguggcagaaga

SEQ ID NO: 650528 - RNA, 19 nt, Homo sapiens
  misc_RNA (1)...(19): siRNA sense strand
gaggagccauuuugagcaa

SEQ ID NO: 650529 - RNA, 19 nt, Homo sapiens
  misc_RNA (1)...(19): siRNA sense strand
gaaccaaagagagcugucu

SEQ ID NO: 650530 - RNA, 19 nt, Homo sapiens
  misc_RNA (1)...(19): siRNA sense strand
ggucguggaggaaacuuca

SEQ ID NO: 650531 - RNA, 19 nt, Homo sapiens
  misc_RNA (1)...(19): siRNA sense strand
guggaagcuacaaugauuu

SEQ ID NO: 650532 - RNA, 19 nt, Homo sapiens
  misc_RNA (1)...(19): siRNA sense strand
ggggauggcuauaauggau

SEQ ID NO: 650533 - RNA, 19 nt, Homo sapiens
  misc_RNA (1)...(19): siRNA sense strand
ggugguggaagcuacaaug

SEQ ID NO: 650534 - RNA, 19 nt, Homo sapiens
  misc_RNA (1)...(19): siRNA sense strand
gcuuugccuuuguaaccuu

SEQ ID NO: 650535 - RNA, 19 nt, Homo sapiens
  misc_RNA (1)...(19): siRNA sense strand
gaaaccaagguggcuaugg

SEQ ID NO: 650536 - RNA, 19 nt, Homo sapiens
  misc_RNA (1)...(19): siRNA sense strand
gaccgaggcaguggcaaga

SEQ ID NO: 650537 - RNA, 19 nt, Homo sapiens
  misc_RNA (1)...(19): siRNA sense strand
gugguggaagcuacaauga

SEQ ID NO: 650538 - RNA, 19 nt, Homo sapiens
  misc_RNA (1)...(19): siRNA sense strand
uggcaguggcagaagauuu

SEQ ID NO: 650539 - RNA, 19 nt, Homo sapiens
  misc_RNA (1)...(19): siRNA sense strand
gaacaucaccuaagagauu

SEQ ID NO: 650540 - RNA, 19 nt, Homo sapiens
  misc_RNA (1)...(19): siRNA sense strand
gguggaagcuacaaugauu

SEQ ID NO: 650541 - RNA, 19 nt, Homo sapiens
  misc_RNA (1)...(19): siRNA sense strand
ugaagaacaucaccuaaga

SEQ ID NO: 650542 - RNA, 19 nt, Homo sapiens
  misc_RNA (1)...(19): siRNA sense strand
gaccaugacuccguggaua

SEQ ID NO: 650543 - RNA, 19 nt, Homo sapiens
  misc_RNA (1)...(19): siRNA sense strand
uaaagaagacacugaagaa

SEQ ID NO: 650544 - RNA, 19 nt, Homo sapiens
  misc_RNA (1)...(19): siRNA sense strand
ggauggcuauaauggauuu

SEQ ID NO: 650545 - RNA, 19 nt, Homo sapiens
  misc_RNA (1)...(19): siRNA sense strand
gaaaagcccugucaaagca

SEQ ID NO: 650546 - RNA, 19 nt, Homo sapiens
  misc_RNA (1)...(19): siRNA sense strand
ggagguggaugcagcuaug

SEQ ID NO: 650547 - RNA, 19 nt, Homo sapiens
  misc_RNA (1)...(19): siRNA sense strand
gauauuuguugguggcauu

SEQ ID NO: 650548 - RNA, 19 nt, Homo sapiens
  misc_RNA (1)...(19): siRNA sense strand
ggguugagcuuugaaacaa

SEQ ID NO: 650549 - RNA, 19 nt, Homo sapiens
  misc_RNA (1)...(19): siRNA sense strand
uauaauggauuuggcaaug

SEQ ID NO: 650550 - RNA, 19 nt, Homo sapiens
  misc_RNA (1)...(19): siRNA sense strand
agaagacacugaagaacau

SEQ ID NO: 650551 - RNA, 19 nt, Homo sapiens
  misc_RNA (1)...(19): siRNA sense strand
gcucacggacuguguggua

SEQ ID NO: 650552 - RNA, 19 nt, Homo sapiens
  misc_RNA (1)...(19): siRNA sense strand
guaaugagagauccaaaca

SEQ ID NO: 650553 - RNA, 19 nt, Homo sapiens
  misc_RNA (1)...(19): siRNA sense strand
agagauggcuagugcuuca

SEQ ID NO: 650554 - RNA, 19 nt, Homo sapiens
  misc_RNA (1)...(19): siRNA sense strand
aacaucaccuaagagauua

SEQ ID NO: 650555 - RNA, 19 nt, Homo sapiens
  misc_RNA (1)...(19): siRNA sense strand
caagagauggcuagugcuu

SEQ ID NO: 650556 - RNA, 19 nt, Homo sapiens
  misc_RNA (1)...(19): siRNA sense strand
gcauuaaagaagacacuga

SEQ ID NO: 650557 - RNA, 19 nt, Homo sapiens
  misc_RNA (1)...(19): siRNA sense strand
ccgaggcaguggcaagaaa

SEQ ID NO: 650558 - RNA, 19 nt, Homo sapiens
  misc_RNA (1)...(19): siRNA sense strand
ugagagauccaaacaccaa

SEQ ID NO: 650559 - RNA, 19 nt, Homo sapiens
  misc_RNA (1)...(19): siRNA sense strand
uaauggauuuggcaaugau

SEQ ID NO: 650560 - RNA, 19 nt, Homo sapiens
  misc_RNA (1)...(19): siRNA sense strand
uuaaagaagacacugaaga

SEQ ID NO: 650561 - RNA, 19 nt, Homo sapiens
  misc_RNA (1)...(19): siRNA sense strand
uaagucagagucuccuaaa

SEQ ID NO: 650562 - RNA, 19 nt, Homo sapiens
  misc_RNA (1)...(19): siRNA sense strand
agucagagucuccuaaaga

SEQ ID NO: 650563 - RNA, 19 nt, Homo sapiens
  misc_RNA (1)...(19): siRNA sense strand
gaagaacaucaccuaagag

SEQ ID NO: 650564 - RNA, 19 nt, Homo sapiens
  misc_RNA (1)...(19): siRNA sense strand
ggacugugugguaaugaga

SEQ ID NO: 650565 - RNA, 19 nt, Homo sapiens
  misc_RNA (1)...(19): siRNA sense strand
gguggaggccaauacuuug

SEQ ID NO: 650566 - RNA, 19 nt, Homo sapiens
  misc_RNA (1)...(19): siRNA sense strand
uuacaacaaucagucuuca

SEQ ID NO: 650567 - RNA, 19 nt, Homo sapiens
  misc_RNA (1)...(19): siRNA sense strand
gucagagucuccuaaagag

SEQ ID NO: 650568 - RNA, 19 nt, Homo sapiens
  misc_RNA (1)...(19): siRNA sense strand
auaauggauuuggcaauga

SEQ ID NO: 650569 - RNA, 19 nt, Homo sapiens
  misc_RNA (1)...(19): siRNA sense strand
aagaacaucaccuaagaga

SEQ ID NO: 650570 - RNA, 19 nt, Homo sapiens
  misc_RNA (1)...(19): siRNA sense strand
cauuaaagaagacacugaa

SEQ ID NO: 650571 - RNA, 19 nt, Homo sapiens
  misc_RNA (1)...(19): siRNA sense strand
ggaggguugagcuuugaaa

SEQ ID NO: 650572 - RNA, 19 nt, Homo sapiens
  misc_RNA (1)...(19): siRNA sense strand
aagaagacacugaagaaca

SEQ ID NO: 650573 - RNA, 19 nt, Homo sapiens
  misc_RNA (1)...(19): siRNA sense strand
gcuuugaaacaacugauga

SEQ ID NO: 650574 - RNA, 19 nt, Homo sapiens
  misc_RNA (1)...(19): siRNA sense strand
gaacgcucacggacugugu

SEQ ID NO: 650575 - RNA, 19 nt, Homo sapiens
  misc_RNA (1)...(19): siRNA sense strand
gaauuacaacaaucagucu

SEQ ID NO: 650576 - RNA, 19 nt, Homo sapiens
  misc_RNA (1)...(19): siRNA sense strand
cuaagucagagucuccuaa

SEQ ID NO: 650577 - RNA, 19 nt, Homo sapiens
  misc_RNA (1)...(19): siRNA sense strand
acacaagguggauggaaga

SEQ ID NO: 650578 - RNA, 19 nt, Homo sapiens
  misc_RNA (1)...(19): siRNA sense strand
cuauggcaguggcagaaga

SEQ ID NO: 650579 - RNA, 19 nt, Homo sapiens
  misc_RNA (1)...(19): siRNA sense strand
gaggagccauuuugagcaa

SEQ ID NO: 650580 - RNA, 19 nt, Homo sapiens
  misc_RNA (1)...(19): siRNA sense strand
gaaccaaagagagcugucu

SEQ ID NO: 650581 - RNA, 19 nt, Homo sapiens
  misc_RNA (1)...(19): siRNA sense strand
ggucguggaggaaacuuca

SEQ ID NO: 650582 - RNA, 19 nt, Homo sapiens
  misc_RNA (1)...(19): siRNA sense strand
guggaagcuacaaugauuu

SEQ ID NO: 650583 - RNA, 19 nt, Homo sapiens
  misc_RNA (1)...(19): siRNA sense strand
ggggauggcuauaauggau

SEQ ID NO: 650584 - RNA, 19 nt, Homo sapiens
  misc_RNA (1)...(19): siRNA sense strand
ggugguggaagcuacaaug

SEQ ID NO: 650585 - RNA, 19 nt, Homo sapiens
  misc_RNA (1)...(19): siRNA sense strand
gcuuugccuuuguaaccuu

SEQ ID NO: 650586 - RNA, 19 nt, Homo sapiens
  misc_RNA (1)...(19): siRNA sense strand
gaaaccaagguggcuaugg

SEQ ID NO: 650587 - RNA, 19 nt, Homo sapiens
  misc_RNA (1)...(19): siRNA sense strand
gaccgaggcaguggcaaga

SEQ ID NO: 650588 - RNA, 19 nt, Homo sapiens
  misc_RNA (1)...(19): siRNA sense strand
gugguggaagcuacaauga

SEQ ID NO: 650589 - RNA, 19 nt, Homo sapiens
  misc_RNA (1)...(19): siRNA sense strand
uggcaguggcagaagauuu

SEQ ID NO: 650590 - RNA, 19 nt, Homo sapiens
  misc_RNA (1)...(19): siRNA sense strand
ugacaacuguauccagaaa

SEQ ID NO: 650591 - RNA, 19 nt, Homo sapiens
  misc_RNA (1)...(19): siRNA sense strand
ggagggagcaggguuauga

SEQ ID NO: 650592 - RNA, 19 nt, Homo sapiens
  misc_RNA (1)...(19): siRNA sense strand
gcguuucccuugcugauga

SEQ ID NO: 650593 - RNA, 19 nt, Homo sapiens
  misc_RNA (1)...(19): siRNA sense strand
ccacgugcccuuuggcuuu

SEQ ID NO: 650594 - RNA, 19 nt, Homo sapiens
  misc_RNA (1)...(19): siRNA sense strand
ccaaggccgugcagagguu

SEQ ID NO: 650595 - RNA, 19 nt, Homo sapiens
  misc_RNA (1)...(19): siRNA sense strand
uaacucaagaggacauaaa

SEQ ID NO: 650596 - RNA, 19 nt, Homo sapiens
  misc_RNA (1)...(19): siRNA sense strand
caacaucgugggcacaaau

SEQ ID NO: 650597 - RNA, 19 nt, Homo sapiens
  misc_RNA (1)...(19): siRNA sense strand
acauaaagauggucuacag

SEQ ID NO: 650598 - RNA, 19 nt, Homo sapiens
  misc_RNA (1)...(19): siRNA sense strand
gacccaagguguggaagga

SEQ ID NO: 650599 - RNA, 19 nt, Homo sapiens
  misc_RNA (1)...(19): siRNA sense strand
caucuuccacuacaccaua

SEQ ID NO: 650600 - RNA, 19 nt, Homo sapiens
  misc_RNA (1)...(19): siRNA sense strand
caucaaggccaacucuaug

SEQ ID NO: 650601 - RNA, 19 nt, Homo sapiens
  misc_RNA (1)...(19): siRNA sense strand
uggagacacuaacucaaga

SEQ ID NO: 650602 - RNA, 19 nt, Homo sapiens
  misc_RNA (1)...(19): siRNA sense strand
caaauguggcguguucuug

SEQ ID NO: 650603 - RNA, 19 nt, Homo sapiens
  misc_RNA (1)...(19): siRNA sense strand
ucaagaggacauaaagaug

SEQ ID NO: 650604 - RNA, 19 nt, Homo sapiens
  misc_RNA (1)...(19): siRNA sense strand
ggcguguucuuguugaaug

SEQ ID NO: 650605 - RNA, 19 nt, Homo sapiens
  misc_RNA (1)...(19): siRNA sense strand
gaggucauguucaaaucca

SEQ ID NO: 650606 - RNA, 19 nt, Homo sapiens
  misc_RNA (1)...(19): siRNA sense strand
cgacagcguuucccuugcu

SEQ ID NO: 650607 - RNA, 19 nt, Homo sapiens
  misc_RNA (1)...(19): siRNA sense strand
ccacgcaugguguguguga

SEQ ID NO: 650608 - RNA, 19 nt, Homo sapiens
  misc_RNA (1)...(19): siRNA sense strand
ggacauaaagauggucuac

SEQ ID NO: 650609 - RNA, 19 nt, Homo sapiens
  misc_RNA (1)...(19): siRNA sense strand
ccaucaaggccaacucuau

SEQ ID NO: 650610 - RNA, 19 nt, Homo sapiens
  misc_RNA (1)...(19): siRNA sense strand
caaggccaacucuauggaa

SEQ ID NO: 650611 - RNA, 19 nt, Homo sapiens
  misc_RNA (1)...(19): siRNA sense strand
aauguggcguguucuuguu

SEQ ID NO: 650612 - RNA, 19 nt, Homo sapiens
  misc_RNA (1)...(19): siRNA sense strand
ggccugggacugcaucuuc

SEQ ID NO: 650613 - RNA, 19 nt, Homo sapiens
  misc_RNA (1)...(19): siRNA sense strand
uuucagagcgauuaacuag

SEQ ID NO: 650614 - RNA, 19 nt, Homo sapiens
  misc_RNA (1)...(19): siRNA sense strand
cggaggauguggagaagcu

SEQ ID NO: 650615 - RNA, 19 nt, Homo sapiens
  misc_RNA (1)...(19): siRNA sense strand
guggagacacuaacucaag

SEQ ID NO: 650616 - RNA, 19 nt, Homo sapiens
  misc_RNA (1)...(19): siRNA sense strand
ccauagaagccagcaacuu

SEQ ID NO: 650617 - RNA, 19 nt, Homo sapiens
  misc_RNA (1)...(19): siRNA sense strand
aagaggacauaaagauggu

SEQ ID NO: 650618 - RNA, 19 nt, Homo sapiens
  misc_RNA (1)...(19): siRNA sense strand
ucgcaaugccgccuuguuc

SEQ ID NO: 650619 - RNA, 19 nt, Homo sapiens
  misc_RNA (1)...(19): siRNA sense strand
gcagccagcaucagugaac

SEQ ID NO: 650620 - RNA, 19 nt, Homo sapiens
  misc_RNA (1)...(19): siRNA sense strand
cccagcaucuuccacuaca

SEQ ID NO: 650621 - RNA, 19 nt, Homo sapiens
  misc_RNA (1)...(19): siRNA sense strand
ggccugagcgguauaaucc

SEQ ID NO: 650622 - RNA, 19 nt, Homo sapiens
  misc_RNA (1)...(19): siRNA sense strand
ggccaacucuauggaacuc

SEQ ID NO: 650623 - RNA, 19 nt, Homo sapiens
  misc_RNA (1)...(19): siRNA sense strand
uggaggucauguucaaauc

SEQ ID NO: 650624 - RNA, 19 nt, Homo sapiens
  misc_RNA (1)...(19): siRNA sense strand
gacaacaucgugggcacaa

SEQ ID NO: 650625 - RNA, 19 nt, Homo sapiens
  misc_RNA (1)...(19): siRNA sense strand
agaaauugcuguacagaua

SEQ ID NO: 650626 - RNA, 19 nt, Homo sapiens
  misc_RNA (1)...(19): siRNA sense strand
caaguuggauggcagcuua

SEQ ID NO: 650627 - RNA, 19 nt, Homo sapiens
  misc_RNA (1)...(19): siRNA sense strand
gcaaaggaaauaagucaua

SEQ ID NO: 650628 - RNA, 19 nt, Homo sapiens
  misc_RNA (1)...(19): siRNA sense strand
gaagcaguauuacaaaguu

SEQ ID NO: 650629 - RNA, 19 nt, Homo sapiens
  misc_RNA (1)...(19): siRNA sense strand
gggcauggcaagaauauua

SEQ ID NO: 650630 - RNA, 19 nt, Homo sapiens
  misc_RNA (1)...(19): siRNA sense strand
gcacaacauuuggcugaua

SEQ ID NO: 650631 - RNA, 19 nt, Homo sapiens
  misc_RNA (1)...(19): siRNA sense strand
ggaaaagacucagcauuua

SEQ ID NO: 650632 - RNA, 19 nt, Homo sapiens
  misc_RNA (1)...(19): siRNA sense strand
ccacauggcuuccucuaga

SEQ ID NO: 650633 - RNA, 19 nt, Homo sapiens
  misc_RNA (1)...(19): siRNA sense strand
gauggcagcuuaucacaug

SEQ ID NO: 650634 - RNA, 19 nt, Homo sapiens
  misc_RNA (1)...(19): siRNA sense strand
gaugagaauugcccagaaa

SEQ ID NO: 650635 - RNA, 19 nt, Homo sapiens
  misc_RNA (1)...(19): siRNA sense strand
caagaaaugaugcauagua

SEQ ID NO: 650636 - RNA, 19 nt, Homo sapiens
  misc_RNA (1)...(19): siRNA sense strand
gaacaaccaccaaauggaa

SEQ ID NO: 650637 - RNA, 19 nt, Homo sapiens
  misc_RNA (1)...(19): siRNA sense strand
gagagaacccuucaaauuc

SEQ ID NO: 650638 - RNA, 19 nt, Homo sapiens
  misc_RNA (1)...(19): siRNA sense strand
gcccagaaauguaauauca

SEQ ID NO: 650639 - RNA, 19 nt, Homo sapiens
  misc_RNA (1)...(19): siRNA sense strand
gaaggugaaucugguugua

SEQ ID NO: 650640 - RNA, 19 nt, Homo sapiens
  misc_RNA (1)...(19): siRNA sense strand
ucauagaacuugacuacuu

SEQ ID NO: 650641 - RNA, 19 nt, Homo sapiens
  misc_RNA (1)...(19): siRNA sense strand
ccaggaagaugauugguau

SEQ ID NO: 650642 - RNA, 19 nt, Homo sapiens
  misc_RNA (1)...(19): siRNA sense strand
aaacuuaaguacccagauu

SEQ ID NO: 650643 - RNA, 19 nt, Homo sapiens
  misc_RNA (1)...(19): siRNA sense strand
gaagagcaaaugaagaauu

SEQ ID NO: 650644 - RNA, 19 nt, Homo sapiens
  misc_RNA (1)...(19): siRNA sense strand
caagagaaauugcuguaca

SEQ ID NO: 650645 - RNA, 19 nt, Homo sapiens
  misc_RNA (1)...(19): siRNA sense strand
gcugauauccuuucuucua

SEQ ID NO: 650646 - RNA, 19 nt, Homo sapiens
  misc_RNA (1)...(19): siRNA sense strand
gaauugcccagaaauguaa

SEQ ID NO: 650647 - RNA, 19 nt, Homo sapiens
  misc_RNA (1)...(19): siRNA sense strand
agagagaacccuucaaauu

SEQ ID NO: 650648 - RNA, 19 nt, Homo sapiens
  misc_RNA (1)...(19): siRNA sense strand
gaauuaagcaacucauaga

SEQ ID NO: 650649 - RNA, 19 nt, Homo sapiens
  misc_RNA (1)...(19): siRNA sense strand
cagcagagcacaacauuug

SEQ ID NO: 650650 - RNA, 19 nt, Homo sapiens
  misc_RNA (1)...(19): siRNA sense strand
uaucaaccuucucccuuua

SEQ ID NO: 650651 - RNA, 19 nt, Homo sapiens
  misc_RNA (1)...(19): siRNA sense strand
ccagagaaauaucaagaau

SEQ ID NO: 650652 - RNA, 19 nt, Homo sapiens
  misc_RNA (1)...(19): siRNA sense strand
cauagaacuugacuacuug

SEQ ID NO: 650653 - RNA, 19 nt, Homo sapiens
  misc_RNA (1)...(19): siRNA sense strand
cagcagaauuccauuuaau

SEQ ID NO: 650654 - RNA, 19 nt, Homo sapiens
  misc_RNA (1)...(19): siRNA sense strand
agagaacccuucaaauuca

SEQ ID NO: 650655 - RNA, 19 nt, Homo sapiens
  misc_RNA (1)...(19): siRNA sense strand
cagaugaagacaagacuua

SEQ ID NO: 650656 - RNA, 19 nt, Homo sapiens
  misc_RNA (1)...(19): siRNA sense strand
gaauguggaaucauagaaa

SEQ ID NO: 650657 - RNA, 19 nt, Homo sapiens
  misc_RNA (1)...(19): siRNA sense strand
ggaagaauguguggauugg

SEQ ID NO: 650658 - RNA, 19 nt, Homo sapiens
  misc_RNA (1)...(19): siRNA sense strand
gcucagagacauccaaguu

SEQ ID NO: 650659 - RNA, 19 nt, Homo sapiens
  misc_RNA (1)...(19): siRNA sense strand
ccgcuucucauucauauua

SEQ ID NO: 650660 - RNA, 19 nt, Homo sapiens
  misc_RNA (1)...(19): siRNA sense strand
gaagaugauugguaugacu

SEQ ID NO: 650661 - RNA, 19 nt, Homo sapiens
  misc_RNA (1)...(19): siRNA sense strand
gguagaggauuaugaacau

SEQ ID NO: 650662 - RNA, 19 nt, Homo sapiens
  misc_RNA (1)...(19): siRNA sense strand
caaaagaacugggcuguga

SEQ ID NO: 650663 - RNA, 19 nt, Homo sapiens
  misc_RNA (1)...(19): siRNA sense strand
cagauaagcuuuuagaaga

SEQ ID NO: 650664 - RNA, 19 nt, Homo sapiens
  misc_RNA (1)...(19): siRNA sense strand
gcagaauuccauuuaauca

SEQ ID NO: 650665 - RNA, 19 nt, Homo sapiens
  misc_RNA (1)...(19): siRNA sense strand
gagcaaaggaaauaaguca

SEQ ID NO: 650666 - RNA, 19 nt, Homo sapiens
  misc_RNA (1)...(19): siRNA sense strand
gcaauaugaaucagaauca

SEQ ID NO: 650667 - RNA, 19 nt, Homo sapiens
  misc_RNA (1)...(19): siRNA sense strand
uaucaagaaucaccuggaa

SEQ ID NO: 650668 - RNA, 19 nt, Homo sapiens
  misc_RNA (1)...(19): siRNA sense strand
ggauugggauguggaaguu

SEQ ID NO: 650669 - RNA, 19 nt, Homo sapiens
  misc_RNA (1)...(19): siRNA sense strand
ucagcagaauuccauuuaa

SEQ ID NO: 650670 - RNA, 19 nt, Homo sapiens
  misc_RNA (1)...(19): siRNA sense strand
uacaagaaaugaugcauag

SEQ ID NO: 650671 - RNA, 19 nt, Homo sapiens
  misc_RNA (1)...(19): siRNA sense strand
gaauccagaugaagacaag

SEQ ID NO: 650672 - RNA, 19 nt, Homo sapiens
  misc_RNA (1)...(19): siRNA sense strand
aagcugcugugcauacaua

SEQ ID NO: 650673 - RNA, 19 nt, Homo sapiens
  misc_RNA (1)...(19): siRNA sense strand
guaccuaaccaacccuuaa

SEQ ID NO: 650674 - RNA, 19 nt, Homo sapiens
  misc_RNA (1)...(19): siRNA sense strand
agagaaaccuguggaaauc

SEQ ID NO: 650675 - RNA, 19 nt, Homo sapiens
  misc_RNA (1)...(19): siRNA sense strand
ggcaguauacgccucuuua

SEQ ID NO: 650676 - RNA, 19 nt, Homo sapiens
  misc_RNA (1)...(19): siRNA sense strand
gagaauugcccagaaaugu

SEQ ID NO: 650677 - RNA, 19 nt, Homo sapiens
  misc_RNA (1)...(19): siRNA sense strand
gaggaguacuggagagcuu

SEQ ID NO: 650678 - RNA, 19 nt, Homo sapiens
  misc_RNA (1)...(19): siRNA sense strand
gcugaaagacucugaaucu

SEQ ID NO: 650679 - RNA, 19 nt, Homo sapiens
  misc_RNA (1)...(19): siRNA sense strand
gaaaucaucaggcacuaca

SEQ ID NO: 650680 - RNA, 19 nt, Homo sapiens
  misc_RNA (1)...(19): siRNA sense strand
cucagaauguggaaucaua

SEQ ID NO: 650681 - RNA, 19 nt, Homo sapiens
  misc_RNA (1)...(19): siRNA sense strand
cugauauccuuucuucuaa

SEQ ID NO: 650682 - RNA, 19 nt, Homo sapiens
  misc_RNA (1)...(19): siRNA sense strand
gcgcugcgggcucgauuua

SEQ ID NO: 650683 - RNA, 19 nt, Homo sapiens
  misc_RNA (1)...(19): siRNA sense strand
gaugaagacaagacuuaaa

SEQ ID NO: 650684 - RNA, 19 nt, Homo sapiens
  misc_RNA (1)...(19): siRNA sense strand
caaaggaaauaagucauac

SEQ ID NO: 650685 - RNA, 19 nt, Homo sapiens
  misc_RNA (1)...(19): siRNA sense strand
uggcuaaacugaagcacuu

SEQ ID NO: 650686 - RNA, 19 nt, Homo sapiens
  misc_RNA (1)...(19): siRNA sense strand
ggaacaaccaccaaaugga

SEQ ID NO: 650687 - RNA, 19 nt, Homo sapiens
  misc_RNA (1)...(19): siRNA sense strand
agagugacagugauucuua

SEQ ID NO: 650688 - RNA, 19 nt, Homo sapiens
  misc_RNA (1)...(19): siRNA sense strand
aagagcaaaugaagaauuc

SEQ ID NO: 650689 - RNA, 19 nt, Homo sapiens
  misc_RNA (1)...(19): siRNA sense strand
ccgaagagcaaaugaagaa

SEQ ID NO: 650690 - RNA, 19 nt, Homo sapiens
  misc_RNA (1)...(19): siRNA sense strand
caccauagcuuuggacucu

SEQ ID NO: 650691 - RNA, 19 nt, Homo sapiens
  misc_RNA (1)...(19): siRNA sense strand
ccagaaauguaauaucaac

SEQ ID NO: 650692 - RNA, 19 nt, Homo sapiens
  misc_RNA (1)...(19): siRNA sense strand
uuacagccauuggaauaaa

SEQ ID NO: 650693 - RNA, 19 nt, Homo sapiens
  misc_RNA (1)...(19): siRNA sense strand
gaagacaagacuuaaagag

SEQ ID NO: 650694 - RNA, 19 nt, Homo sapiens
  misc_RNA (1)...(19): siRNA sense strand
gcugcgggcucgauuuaau

SEQ ID NO: 650695 - RNA, 19 nt, Homo sapiens
  misc_RNA (1)...(19): siRNA sense strand
gguuguaaaucuggaugua

SEQ ID NO: 650696 - RNA, 19 nt, Homo sapiens
  misc_RNA (1)...(19): siRNA sense strand
ucauagguuugaagcagua

SEQ ID NO: 650697 - RNA, 19 nt, Homo sapiens
  misc_RNA (1)...(19): siRNA sense strand
cuuagagugucaugucuuu

SEQ ID NO: 650698 - RNA, 19 nt, Homo sapiens
  misc_RNA (1)...(19): siRNA sense strand
gcuuuggacucucuuguuc

SEQ ID NO: 650699 - RNA, 19 nt, Homo sapiens
  misc_RNA (1)...(19): siRNA sense strand
ugacaaaguacaugagaga

SEQ ID NO: 650700 - RNA, 19 nt, Homo sapiens
  misc_RNA (1)...(19): siRNA sense strand
auacgccucuuuauucuug

SEQ ID NO: 650701 - RNA, 19 nt, Homo sapiens
  misc_RNA (1)...(19): siRNA sense strand
gauccaagucucauagguu

SEQ ID NO: 650702 - RNA, 19 nt, Homo sapiens
  misc_RNA (1)...(19): siRNA sense strand
cuacaagaaaugaugcaua

SEQ ID NO: 650703 - RNA, 19 nt, Homo sapiens
  misc_RNA (1)...(19): siRNA sense strand
caucagccauacacguuga

SEQ ID NO: 650704 - RNA, 19 nt, Homo sapiens
  misc_RNA (1)...(19): siRNA sense strand
caaaugaagaauucuguuc

SEQ ID NO: 650705 - RNA, 19 nt, Homo sapiens
  misc_RNA (1)...(19): siRNA sense strand
aaaucuggauguaccauug

SEQ ID NO: 650706 - RNA, 19 nt, Homo sapiens
  misc_RNA (1)...(19): siRNA sense strand
caggcaauaugaaucagaa

SEQ ID NO: 650707 - RNA, 19 nt, Homo sapiens
  misc_RNA (1)...(19): siRNA sense strand
gacaaaaccagacuuaaaa

SEQ ID NO: 650708 - RNA, 19 nt, Homo sapiens
  misc_RNA (1)...(19): siRNA sense strand
gcaaaugaagaauucuguu

SEQ ID NO: 650709 - RNA, 19 nt, Homo sapiens
  misc_RNA (1)...(19): siRNA sense strand
gaaaagccacucagaaugu

SEQ ID NO: 650710 - RNA, 19 nt, Homo sapiens
  misc_RNA (1)...(19): siRNA sense strand
uggcugauauccuuucuuc

SEQ ID NO: 650711 - RNA, 19 nt, Homo sapiens
  misc_RNA (1)...(19): siRNA sense strand
acauuuggcugauauccuu

SEQ ID NO: 650712 - RNA, 19 nt, Homo sapiens
  misc_RNA (1)...(19): siRNA sense strand
cacaacauuuggcugauau

SEQ ID NO: 650713 - RNA, 19 nt, Homo sapiens
  misc_RNA (1)...(19): siRNA sense strand
gaauuccagugauccaagu

SEQ ID NO: 650714 - RNA, 19 nt, Homo sapiens
  misc_RNA (1)...(19): siRNA sense strand
caugagagaucccacuuuu

SEQ ID NO: 650715 - RNA, 19 nt, Homo sapiens
  misc_RNA (1)...(19): siRNA sense strand
guauacgccucuuuauucu

SEQ ID NO: 650716 - RNA, 19 nt, Homo sapiens
  misc_RNA (1)...(19): siRNA sense strand
gaaucugguuguaaaucug

SEQ ID NO: 650717 - RNA, 19 nt, Homo sapiens
  misc_RNA (1)...(19): siRNA sense strand
ggacucucuuguucuugaa

SEQ ID NO: 650718 - RNA, 19 nt, Homo sapiens
  misc_RNA (1)...(19): siRNA sense strand
uagagaaaccuguggaaau

SEQ ID NO: 650719 - RNA, 19 nt, Homo sapiens
  misc_RNA (1)...(19): siRNA sense strand
aaacagaugcuggcaguau

SEQ ID NO: 650720 - RNA, 19 nt, Homo sapiens
  misc_RNA (1)...(19): siRNA sense strand
aaucuacgccuguggauga

SEQ ID NO: 650721 - RNA, 19 nt, Homo sapiens
  misc_RNA (1)...(19): siRNA sense strand
guagaggauuaugaacauu

SEQ ID NO: 650722 - RNA, 19 nt, Homo sapiens
  misc_RNA (1)...(19): siRNA sense strand
agaauugcccagaaaugua

SEQ ID NO: 650723 - RNA, 19 nt, Homo sapiens
  misc_RNA (1)...(19): siRNA sense strand
cagcuuaucacaugaauac

SEQ ID NO: 650724 - RNA, 19 nt, Homo sapiens
  misc_RNA (1)...(19): siRNA sense strand
cugaaagacucugaaucua

SEQ ID NO: 650725 - RNA, 19 nt, Homo sapiens
  misc_RNA (1)...(19): siRNA sense strand
ggucauggcuugcugcuau

SEQ ID NO: 650726 - RNA, 19 nt, Homo sapiens
  misc_RNA (1)...(19): siRNA sense strand
gaugagagcaccaaacuga

SEQ ID NO: 650727 - RNA, 19 nt, Homo sapiens
  misc_RNA (1)...(19): siRNA sense strand
caacuucacugacuucuac

SEQ ID NO: 650728 - RNA, 19 nt, Homo sapiens
  misc_RNA (1)...(19): siRNA sense strand
gcacaagagugaagaccau

SEQ ID NO: 650729 - RNA, 19 nt, Homo sapiens
  misc_RNA (1)...(19): siRNA sense strand
gcacaaagcccuaaaagug

SEQ ID NO: 650730 - RNA, 19 nt, Homo sapiens
  misc_RNA (1)...(19): siRNA sense strand
gaaaucuuauacagccaaa

SEQ ID NO: 650731 - RNA, 19 nt, Homo sapiens
  misc_RNA (1)...(19): siRNA sense strand
gcuauaccaucaucauuca

SEQ ID NO: 650732 - RNA, 19 nt, Homo sapiens
  misc_RNA (1)...(19): siRNA sense strand
uguacaagaugaacuucua

SEQ ID NO: 650733 - RNA, 19 nt, Homo sapiens
  misc_RNA (1)...(19): siRNA sense strand
gaagcugucgucuauguug

SEQ ID NO: 650734 - RNA, 19 nt, Homo sapiens
  misc_RNA (1)...(19): siRNA sense strand
gaccuccucuuucuuguca

SEQ ID NO: 650735 - RNA, 19 nt, Homo sapiens
  misc_RNA (1)...(19): siRNA sense strand
ggacagguacauugccauu

SEQ ID NO: 650736 - RNA, 19 nt, Homo sapiens
  misc_RNA (1)...(19): siRNA sense strand
gcaagguggucaacagcau

SEQ ID NO: 650737 - RNA, 19 nt, Homo sapiens
  misc_RNA (1)...(19): siRNA sense strand
gcaucagcguggacaggua

SEQ ID NO: 650738 - RNA, 19 nt, Homo sapiens
  misc_RNA (1)...(19): siRNA sense strand
gcagaccauugacgccuau

SEQ ID NO: 650739 - RNA, 19 nt, Homo sapiens
  misc_RNA (1)...(19): siRNA sense strand
cugcaucccagaaaucuua

SEQ ID NO: 650740 - RNA, 19 nt, Homo sapiens
  misc_RNA (1)...(19): siRNA sense strand
uacguuaacuucaacuuca

SEQ ID NO: 650741 - RNA, 19 nt, Homo sapiens
  misc_RNA (1)...(19): siRNA sense strand
ugaaaacccugaagaacuu

SEQ ID NO: 650742 - RNA, 19 nt, Homo sapiens
  misc_RNA (1)...(19): siRNA sense strand
ccaccaacauugacaucug

SEQ ID NO: 650743 - RNA, 19 nt, Homo sapiens
  misc_RNA (1)...(19): siRNA sense strand
ccaguggguuucauuuaca

SEQ ID NO: 650744 - RNA, 19 nt, Homo sapiens
  misc_RNA (1)...(19): siRNA sense strand
ucaacagcauguacaagau

SEQ ID NO: 650745 - RNA, 19 nt, Homo sapiens
  misc_RNA (1)...(19): siRNA sense strand
gcauguacaagaugaacuu

SEQ ID NO: 650746 - RNA, 19 nt, Homo sapiens
  misc_RNA (1)...(19): siRNA sense strand
gcugaccuccucuuucuug

SEQ ID NO: 650747 - RNA, 19 nt, Homo sapiens
  misc_RNA (1)...(19): siRNA sense strand
caacagcauguacaagaug

SEQ ID NO: 650748 - RNA, 19 nt, Homo sapiens
  misc_RNA (1)...(19): siRNA sense strand
gucaacagcauguacaaga

SEQ ID NO: 650749 - RNA, 19 nt, Homo sapiens
  misc_RNA (1)...(19): siRNA sense strand
ggagagagggaagcuugaa

SEQ ID NO: 650750 - RNA, 19 nt, Homo sapiens
  misc_RNA (1)...(19): siRNA sense strand
ugacgccuaugccauguuc

SEQ ID NO: 650751 - RNA, 19 nt, Homo sapiens
  misc_RNA (1)...(19): siRNA sense strand
gcucugaauccacaucuuc

SEQ ID NO: 650752 - RNA, 19 nt, Homo sapiens
  misc_RNA (1)...(19): siRNA sense strand
aagacuacguuaacuucaa

SEQ ID NO: 650753 - RNA, 19 nt, Homo sapiens
  misc_RNA (1)...(19): siRNA sense strand
gccaugagagcacauacuu

SEQ ID NO: 650754 - RNA, 19 nt, Homo sapiens
  misc_RNA (1)...(19): siRNA sense strand
uugaagcugucgucuaugu

SEQ ID NO: 650755 - RNA, 19 nt, Homo sapiens
  misc_RNA (1)...(19): siRNA sense strand
ugucucaguuucccuacaa

SEQ ID NO: 650756 - RNA, 19 nt, Homo sapiens
  misc_RNA (1)...(19): siRNA sense strand
gaggaauccggcauugcua

SEQ ID NO: 650757 - RNA, 19 nt, Homo sapiens
  misc_RNA (1)...(19): siRNA sense strand
caaggaggaauccggcauu

SEQ ID NO: 650758 - RNA, 19 nt, Homo sapiens
  misc_RNA (1)...(19): siRNA sense strand
ggaggaauccggcauugcu

SEQ ID NO: 650759 - RNA, 19 nt, Homo sapiens
  misc_RNA (1)...(19): siRNA sense strand
gucauggcuugcugcuaua

SEQ ID NO: 650760 - RNA, 19 nt, Homo sapiens
  misc_RNA (1)...(19): siRNA sense strand
ugaagaccaugaccgacau

SEQ ID NO: 650761 - RNA, 19 nt, Homo sapiens
  misc_RNA (1)...(19): siRNA sense strand
ucacuguccugaccgucuu

SEQ ID NO: 650762 - RNA, 19 nt, Homo sapiens
  misc_RNA (1)...(19): siRNA sense strand
gcaguuugcgagccauuuc

SEQ ID NO: 650763 - RNA, 19 nt, Homo sapiens
  misc_RNA (1)...(19): siRNA sense strand
gaccgucuuugucuugucu

SEQ ID NO: 650764 - RNA, 19 nt, Homo sapiens
  misc_RNA (1)...(19): siRNA sense strand
gcuaucugcaccaugguuu

SEQ ID NO: 650765 - RNA, 19 nt, Homo sapiens
  misc_RNA (1)...(19): siRNA sense strand
ccauggaagacuacguuaa

SEQ ID NO: 650766 - RNA, 19 nt, Homo sapiens
  misc_RNA (1)...(19): siRNA sense strand
gcgaugagagcaccaaacu

SEQ ID NO: 650767 - RNA, 19 nt, Homo sapiens
  misc_RNA (1)...(19): siRNA sense strand
gauacaagccaagaagucu

SEQ ID NO: 650768 - RNA, 19 nt, Homo sapiens
  misc_RNA (1)...(19): siRNA sense strand
ugaccgacauguuccuuuu

SEQ ID NO: 650769 - RNA, 19 nt, Homo sapiens
  misc_RNA (1)...(19): siRNA sense strand
ugaugacuauggcucugaa

SEQ ID NO: 650770 - RNA, 19 nt, Homo sapiens
  misc_RNA (1)...(19): siRNA sense strand
ucccagaaaucuuauacag

SEQ ID NO: 650771 - RNA, 19 nt, Homo sapiens
  misc_RNA (1)...(19): siRNA sense strand
acagguacauugccauugc

SEQ ID NO: 650772 - RNA, 19 nt, Homo sapiens
  misc_RNA (1)...(19): siRNA sense strand
uugcugaccuccucuuucu

SEQ ID NO: 650773 - RNA, 19 nt, Homo sapiens
  misc_RNA (1)...(19): siRNA sense strand
cuacugguacugcacaaga

SEQ ID NO: 650774 - RNA, 19 nt, Homo sapiens
  misc_RNA (1)...(19): siRNA sense strand
cugaagaacuuggguugca

SEQ ID NO: 650775 - RNA, 19 nt, Homo sapiens
  misc_RNA (1)...(19): siRNA sense strand
aacagcauguacaagauga

SEQ ID NO: 650776 - RNA, 19 nt, Homo sapiens
  misc_RNA (1)...(19): siRNA sense strand
guguguugcugaucaugug

SEQ ID NO: 650777 - RNA, 19 nt, Homo sapiens
  misc_RNA (1)...(19): siRNA sense strand
caguggguuucauuuacaa

SEQ ID NO: 650778 - RNA, 19 nt, Homo sapiens
  misc_RNA (1)...(19): siRNA sense strand
gacuauggcucugaaucca

SEQ ID NO: 650779 - RNA, 19 nt, Homo sapiens
  misc_RNA (1)...(19): siRNA sense strand
ggaauccggcauugcuauc

SEQ ID NO: 650780 - RNA, 19 nt, Homo sapiens
  misc_RNA (1)...(19): siRNA sense strand
gagagcaccaaacugaagu

SEQ ID NO: 650781 - RNA, 19 nt, Homo sapiens
  misc_RNA (1)...(19): siRNA sense strand
guacugcacaagagugaag

SEQ ID NO: 650782 - RNA, 19 nt, Homo sapiens
  misc_RNA (1)...(19): siRNA sense strand
cauggaagacuacguuaac

SEQ ID NO: 650783 - RNA, 19 nt, Homo sapiens
  misc_RNA (1)...(19): siRNA sense strand
aaggaggaauccggcauug

SEQ ID NO: 650784 - RNA, 19 nt, Homo sapiens
  misc_RNA (1)...(19): siRNA sense strand
uguacuggcucguguucau

SEQ ID NO: 650785 - RNA, 19 nt, Homo sapiens
  misc_RNA (1)...(19): siRNA sense strand
agacuacguuaacuucaac

SEQ ID NO: 650786 - RNA, 19 nt, Homo sapiens
  misc_RNA (1)...(19): siRNA sense strand
ugaagaacuuggguugcau

SEQ ID NO: 650787 - RNA, 19 nt, Homo sapiens
  misc_RNA (1)...(19): siRNA sense strand
gcuugcugcuauaccauca

SEQ ID NO: 650788 - RNA, 19 nt, Homo sapiens
  misc_RNA (1)...(19): siRNA sense strand
gcauugcuaucugcaccau

SEQ ID NO: 650789 - RNA, 19 nt, Homo sapiens
  misc_RNA (1)...(19): siRNA sense strand
aaucuuauacagccaaauc

SEQ ID NO: 650790 - RNA, 19 nt, Homo sapiens
  misc_RNA (1)...(19): siRNA sense strand
ugagagcaccaaacugaag

SEQ ID NO: 650791 - RNA, 19 nt, Homo sapiens
  misc_RNA (1)...(19): siRNA sense strand
cuacguuaacuucaacuuc

SEQ ID NO: 650792 - RNA, 19 nt, Homo sapiens
  misc_RNA (1)...(19): siRNA sense strand
uaacauggcugaugacuau

SEQ ID NO: 650793 - RNA, 19 nt, Homo sapiens
  misc_RNA (1)...(19): siRNA sense strand
ggucauggcuugcugcuau

SEQ ID NO: 650794 - RNA, 19 nt, Homo sapiens
  misc_RNA (1)...(19): siRNA sense strand
gaugagagcaccaaacuga

SEQ ID NO: 650795 - RNA, 19 nt, Homo sapiens
  misc_RNA (1)...(19): siRNA sense strand
caacuucacugacuucuac

SEQ ID NO: 650796 - RNA, 19 nt, Homo sapiens
  misc_RNA (1)...(19): siRNA sense strand
gcacaagagugaagaccau

SEQ ID NO: 650797 - RNA, 19 nt, Homo sapiens
  misc_RNA (1)...(19): siRNA sense strand
gcacaaagcccuaaaagug

SEQ ID NO: 650798 - RNA, 19 nt, Homo sapiens
  misc_RNA (1)...(19): siRNA sense strand
gaaaucuuauacagccaaa

SEQ ID NO: 650799 - RNA, 19 nt, Homo sapiens
  misc_RNA (1)...(19): siRNA sense strand
gcuauaccaucaucauuca

SEQ ID NO: 650800 - RNA, 19 nt, Homo sapiens
  misc_RNA (1)...(19): siRNA sense strand
uguacaagaugaacuucua

SEQ ID NO: 650801 - RNA, 19 nt, Homo sapiens
  misc_RNA (1)...(19): siRNA sense strand
gaagcugucgucuauguug

SEQ ID NO: 650802 - RNA, 19 nt, Homo sapiens
  misc_RNA (1)...(19): siRNA sense strand
gaccuccucuuucuuguca

SEQ ID NO: 650803 - RNA, 19 nt, Homo sapiens
  misc_RNA (1)...(19): siRNA sense strand
ggacagguacauugccauu

SEQ ID NO: 650804 - RNA, 19 nt, Homo sapiens
  misc_RNA (1)...(19): siRNA sense strand
gcaagguggucaacagcau

SEQ ID NO: 650805 - RNA, 19 nt, Homo sapiens
  misc_RNA (1)...(19): siRNA sense strand
gcaucagcguggacaggua

SEQ ID NO: 650806 - RNA, 19 nt, Homo sapiens
  misc_RNA (1)...(19): siRNA sense strand
gcagaccauugacgccuau

SEQ ID NO: 650807 - RNA, 19 nt, Homo sapiens
  misc_RNA (1)...(19): siRNA sense strand
cugcaucccagaaaucuua

SEQ ID NO: 650808 - RNA, 19 nt, Homo sapiens
  misc_RNA (1)...(19): siRNA sense strand
uacguuaacuucaacuuca

SEQ ID NO: 650809 - RNA, 19 nt, Homo sapiens
  misc_RNA (1)...(19): siRNA sense strand
ugaaaacccugaagaacuu

SEQ ID NO: 650810 - RNA, 19 nt, Homo sapiens
  misc_RNA (1)...(19): siRNA sense strand
ccaccaacauugacaucug

SEQ ID NO: 650811 - RNA, 19 nt, Homo sapiens
  misc_RNA (1)...(19): siRNA sense strand
ccaguggguuucauuuaca

SEQ ID NO: 650812 - RNA, 19 nt, Homo sapiens
  misc_RNA (1)...(19): siRNA sense strand
ucaacagcauguacaagau

SEQ ID NO: 650813 - RNA, 19 nt, Homo sapiens
  misc_RNA (1)...(19): siRNA sense strand
gcauguacaagaugaacuu

SEQ ID NO: 650814 - RNA, 19 nt, Homo sapiens
  misc_RNA (1)...(19): siRNA sense strand
gcugaccuccucuuucuug

SEQ ID NO: 650815 - RNA, 19 nt, Homo sapiens
  misc_RNA (1)...(19): siRNA sense strand
caacagcauguacaagaug

SEQ ID NO: 650816 - RNA, 19 nt, Homo sapiens
  misc_RNA (1)...(19): siRNA sense strand
gucaacagcauguacaaga

SEQ ID NO: 650817 - RNA, 19 nt, Homo sapiens
  misc_RNA (1)...(19): siRNA sense strand
ggagagagggaagcuugaa

SEQ ID NO: 650818 - RNA, 19 nt, Homo sapiens
  misc_RNA (1)...(19): siRNA sense strand
ugacgccuaugccauguuc

SEQ ID NO: 650819 - RNA, 19 nt, Homo sapiens
  misc_RNA (1)...(19): siRNA sense strand
aagacuacguuaacuucaa

SEQ ID NO: 650820 - RNA, 19 nt, Homo sapiens
  misc_RNA (1)...(19): siRNA sense strand
gcucugaauccacaucuuc

SEQ ID NO: 650821 - RNA, 19 nt, Homo sapiens
  misc_RNA (1)...(19): siRNA sense strand
gccaugagagcacauacuu

SEQ ID NO: 650822 - RNA, 19 nt, Homo sapiens
  misc_RNA (1)...(19): siRNA sense strand
uugaagcugucgucuaugu

SEQ ID NO: 650823 - RNA, 19 nt, Homo sapiens
  misc_RNA (1)...(19): siRNA sense strand
ugucucaguuucccuacaa

SEQ ID NO: 650824 - RNA, 19 nt, Homo sapiens
  misc_RNA (1)...(19): siRNA sense strand
gaggaauccggcauugcua

SEQ ID NO: 650825 - RNA, 19 nt, Homo sapiens
  misc_RNA (1)...(19): siRNA sense strand
caaggaggaauccggcauu

SEQ ID NO: 650826 - RNA, 19 nt, Homo sapiens
  misc_RNA (1)...(19): siRNA sense strand
ggaggaauccggcauugcu

SEQ ID NO: 650827 - RNA, 19 nt, Homo sapiens
  misc_RNA (1)...(19): siRNA sense strand
gucauggcuugcugcuaua

SEQ ID NO: 650828 - RNA, 19 nt, Homo sapiens
  misc_RNA (1)...(19): siRNA sense strand
ugaagaccaugaccgacau

SEQ ID NO: 650829 - RNA, 19 nt, Homo sapiens
  misc_RNA (1)...(19): siRNA sense strand
uuccuaacauggcugauga

SEQ ID NO: 650830 - RNA, 19 nt, Homo sapiens
  misc_RNA (1)...(19): siRNA sense strand
ucacuguccugaccgucuu

SEQ ID NO: 650831 - RNA, 19 nt, Homo sapiens
  misc_RNA (1)...(19): siRNA sense strand
gcaguuugcgagccauuuc

SEQ ID NO: 650832 - RNA, 19 nt, Homo sapiens
  misc_RNA (1)...(19): siRNA sense strand
gaccgucuuugucuugucu

SEQ ID NO: 650833 - RNA, 19 nt, Homo sapiens
  misc_RNA (1)...(19): siRNA sense strand
gcuaucugcaccaugguuu

SEQ ID NO: 650834 - RNA, 19 nt, Homo sapiens
  misc_RNA (1)...(19): siRNA sense strand
ccauggaagacuacguuaa

SEQ ID NO: 650835 - RNA, 19 nt, Homo sapiens
  misc_RNA (1)...(19): siRNA sense strand
gcgaugagagcaccaaacu

SEQ ID NO: 650836 - RNA, 19 nt, Homo sapiens
  misc_RNA (1)...(19): siRNA sense strand
gauacaagccaagaagucu

SEQ ID NO: 650837 - RNA, 19 nt, Homo sapiens
  misc_RNA (1)...(19): siRNA sense strand
ugaccgacauguuccuuuu

SEQ ID NO: 650838 - RNA, 19 nt, Homo sapiens
  misc_RNA (1)...(19): siRNA sense strand
ugaugacuauggcucugaa

SEQ ID NO: 650839 - RNA, 19 nt, Homo sapiens
  misc_RNA (1)...(19): siRNA sense strand
caagcccuauuccuaacau

SEQ ID NO: 650840 - RNA, 19 nt, Homo sapiens
  misc_RNA (1)...(19): siRNA sense strand
ucccagaaaucuuauacag

SEQ ID NO: 650841 - RNA, 19 nt, Homo sapiens
  misc_RNA (1)...(19): siRNA sense strand
acagguacauugccauugc

SEQ ID NO: 650842 - RNA, 19 nt, Homo sapiens
  misc_RNA (1)...(19): siRNA sense strand
uugcugaccuccucuuucu

SEQ ID NO: 650843 - RNA, 19 nt, Homo sapiens
  misc_RNA (1)...(19): siRNA sense strand
cuacugguacugcacaaga

SEQ ID NO: 650844 - RNA, 19 nt, Homo sapiens
  misc_RNA (1)...(19): siRNA sense strand
cugaagaacuuggguugca

SEQ ID NO: 650845 - RNA, 19 nt, Homo sapiens
  misc_RNA (1)...(19): siRNA sense strand
aacagcauguacaagauga

SEQ ID NO: 650846 - RNA, 19 nt, Homo sapiens
  misc_RNA (1)...(19): siRNA sense strand
guguguugcugaucaugug

SEQ ID NO: 650847 - RNA, 19 nt, Homo sapiens
  misc_RNA (1)...(19): siRNA sense strand
caguggguuucauuuacaa

SEQ ID NO: 650848 - RNA, 19 nt, Homo sapiens
  misc_RNA (1)...(19): siRNA sense strand
gacuauggcucugaaucca

SEQ ID NO: 650849 - RNA, 19 nt, Homo sapiens
  misc_RNA (1)...(19): siRNA sense strand
ggaauccggcauugcuauc

SEQ ID NO: 650850 - RNA, 19 nt, Homo sapiens
  misc_RNA (1)...(19): siRNA sense strand
gagagcaccaaacugaagu

SEQ ID NO: 650851 - RNA, 19 nt, Homo sapiens
  misc_RNA (1)...(19): siRNA sense strand
uguacuggcucguguucau

SEQ ID NO: 650852 - RNA, 19 nt, Homo sapiens
  misc_RNA (1)...(19): siRNA sense strand
cauggaagacuacguuaac

SEQ ID NO: 650853 - RNA, 19 nt, Homo sapiens
  misc_RNA (1)...(19): siRNA sense strand
aaggaggaauccggcauug

SEQ ID NO: 650854 - RNA, 19 nt, Homo sapiens
  misc_RNA (1)...(19): siRNA sense strand
guacugcacaagagugaag

SEQ ID NO: 650855 - RNA, 19 nt, Homo sapiens
  misc_RNA (1)...(19): siRNA sense strand
aaucuuauacagccaaauc

SEQ ID NO: 650856 - RNA, 19 nt, Homo sapiens
  misc_RNA (1)...(19): siRNA sense strand
ugaagaacuuggguugcau

SEQ ID NO: 650857 - RNA, 19 nt, Homo sapiens
  misc_RNA (1)...(19): siRNA sense strand
gcuugcugcuauaccauca

SEQ ID NO: 650858 - RNA, 19 nt, Homo sapiens
  misc_RNA (1)...(19): siRNA sense strand
gcauugcuaucugcaccau

SEQ ID NO: 650859 - RNA, 19 nt, Homo sapiens
  misc_RNA (1)...(19): siRNA sense strand
agacuacguuaacuucaac

SEQ ID NO: 650860 - RNA, 19 nt, Homo sapiens
  misc_RNA (1)...(19): siRNA sense strand
cacaagcccuauuccuaac

SEQ ID NO: 650861 - RNA, 19 nt, Homo sapiens
  misc_RNA (1)...(19): siRNA sense strand
ugagagcaccaaacugaag

SEQ ID NO: 650862 - RNA, 19 nt, Homo sapiens
  misc_RNA (1)...(19): siRNA sense strand
cuaacauggcugaugacua

SEQ ID NO: 650863 - RNA, 19 nt, Homo sapiens
  misc_RNA (1)...(19): siRNA sense strand
cuacguuaacuucaacuuc

SEQ ID NO: 650864 - RNA, 19 nt, Homo sapiens
  misc_RNA (1)...(19): siRNA sense strand
gaaggugcaggacgacuuu

SEQ ID NO: 650865 - RNA, 19 nt, Homo sapiens
  misc_RNA (1)...(19): siRNA sense strand
ggacgaccacggcuacauu

SEQ ID NO: 650866 - RNA, 19 nt, Homo sapiens
  misc_RNA (1)...(19): siRNA sense strand
ggacaaguucgucaucuuc

SEQ ID NO: 650867 - RNA, 19 nt, Homo sapiens
  misc_RNA (1)...(19): siRNA sense strand
gauccgaccgggacaaguu

SEQ ID NO: 650868 - RNA, 19 nt, Homo sapiens
  misc_RNA (1)...(19): siRNA sense strand
gggacaaguucgucaucuu

SEQ ID NO: 650869 - RNA, 19 nt, Homo sapiens
  misc_RNA (1)...(19): siRNA sense strand
ggacgacuuuguggagauc

SEQ ID NO: 650870 - RNA, 19 nt, Homo sapiens
  misc_RNA (1)...(19): siRNA sense strand
gacgaccacggcuacauuu

SEQ ID NO: 650871 - RNA, 19 nt, Homo sapiens
  misc_RNA (1)...(19): siRNA sense strand
cuacauuucccgugaguuc

SEQ ID NO: 650872 - RNA, 19 nt, Homo sapiens
  misc_RNA (1)...(19): siRNA sense strand
ccgauggcaugcugaccuu

SEQ ID NO: 650873 - RNA, 19 nt, Homo sapiens
  misc_RNA (1)...(19): siRNA sense strand
cggcaucucugagguucga

SEQ ID NO: 650874 - RNA, 19 nt, Homo sapiens
  misc_RNA (1)...(19): siRNA sense strand
ggucauggcuugcugcuau

SEQ ID NO: 650875 - RNA, 19 nt, Homo sapiens
  misc_RNA (1)...(19): siRNA sense strand
gaugagagcaccaaacuga

SEQ ID NO: 650876 - RNA, 19 nt, Homo sapiens
  misc_RNA (1)...(19): siRNA sense strand
caacuucacugacuucuac

SEQ ID NO: 650877 - RNA, 19 nt, Homo sapiens
  misc_RNA (1)...(19): siRNA sense strand
gcacaagagugaagaccau

SEQ ID NO: 650878 - RNA, 19 nt, Homo sapiens
  misc_RNA (1)...(19): siRNA sense strand
gcacaaagcccuaaaagug

SEQ ID NO: 650879 - RNA, 19 nt, Homo sapiens
  misc_RNA (1)...(19): siRNA sense strand
gaaaucuuauacagccaaa

SEQ ID NO: 650880 - RNA, 19 nt, Homo sapiens
  misc_RNA (1)...(19): siRNA sense strand
gcuauaccaucaucauuca

SEQ ID NO: 650881 - RNA, 19 nt, Homo sapiens
  misc_RNA (1)...(19): siRNA sense strand
uguacaagaugaacuucua

SEQ ID NO: 650882 - RNA, 19 nt, Homo sapiens
  misc_RNA (1)...(19): siRNA sense strand
gaagcugucgucuauguug

SEQ ID NO: 650883 - RNA, 19 nt, Homo sapiens
  misc_RNA (1)...(19): siRNA sense strand
gaccuccucuuucuuguca

SEQ ID NO: 650884 - RNA, 19 nt, Homo sapiens
  misc_RNA (1)...(19): siRNA sense strand
ggacagguacauugccauu

SEQ ID NO: 650885 - RNA, 19 nt, Homo sapiens
  misc_RNA (1)...(19): siRNA sense strand
gcaagguggucaacagcau

SEQ ID NO: 650886 - RNA, 19 nt, Homo sapiens
  misc_RNA (1)...(19): siRNA sense strand
gcaucagcguggacaggua

SEQ ID NO: 650887 - RNA, 19 nt, Homo sapiens
  misc_RNA (1)...(19): siRNA sense strand
gcagaccauugacgccuau

SEQ ID NO: 650888 - RNA, 19 nt, Homo sapiens
  misc_RNA (1)...(19): siRNA sense strand
cugcaucccagaaaucuua

SEQ ID NO: 650889 - RNA, 19 nt, Homo sapiens
  misc_RNA (1)...(19): siRNA sense strand
uacguuaacuucaacuuca

SEQ ID NO: 650890 - RNA, 19 nt, Homo sapiens
  misc_RNA (1)...(19): siRNA sense strand
ugaaaacccugaagaacuu

SEQ ID NO: 650891 - RNA, 19 nt, Homo sapiens
  misc_RNA (1)...(19): siRNA sense strand
ccaccaacauugacaucug

SEQ ID NO: 650892 - RNA, 19 nt, Homo sapiens
  misc_RNA (1)...(19): siRNA sense strand
ccaguggguuucauuuaca

SEQ ID NO: 650893 - RNA, 19 nt, Homo sapiens
  misc_RNA (1)...(19): siRNA sense strand
ucaacagcauguacaagau

SEQ ID NO: 650894 - RNA, 19 nt, Homo sapiens
  misc_RNA (1)...(19): siRNA sense strand
gcauguacaagaugaacuu

SEQ ID NO: 650895 - RNA, 19 nt, Homo sapiens
  misc_RNA (1)...(19): siRNA sense strand
gcugaccuccucuuucuug

SEQ ID NO: 650896 - RNA, 19 nt, Homo sapiens
  misc_RNA (1)...(19): siRNA sense strand
caacagcauguacaagaug

SEQ ID NO: 650897 - RNA, 19 nt, Homo sapiens
  misc_RNA (1)...(19): siRNA sense strand
gucaacagcauguacaaga

SEQ ID NO: 650898 - RNA, 19 nt, Homo sapiens
  misc_RNA (1)...(19): siRNA sense strand
ggagagagggaagcuugaa

SEQ ID NO: 650899 - RNA, 19 nt, Homo sapiens
  misc_RNA (1)...(19): siRNA sense strand
ugacgccuaugccauguuc

SEQ ID NO: 650900 - RNA, 19 nt, Homo sapiens
  misc_RNA (1)...(19): siRNA sense strand
gcucugaauccacaucuuc

SEQ ID NO: 650901 - RNA, 19 nt, Homo sapiens
  misc_RNA (1)...(19): siRNA sense strand
aagacuacguuaacuucaa

SEQ ID NO: 650902 - RNA, 19 nt, Homo sapiens
  misc_RNA (1)...(19): siRNA sense strand
gccaugagagcacauacuu

SEQ ID NO: 650903 - RNA, 19 nt, Homo sapiens
  misc_RNA (1)...(19): siRNA sense strand
uugaagcugucgucuaugu

SEQ ID NO: 650904 - RNA, 19 nt, Homo sapiens
  misc_RNA (1)...(19): siRNA sense strand
ugucucaguuucccuacaa

SEQ ID NO: 650905 - RNA, 19 nt, Homo sapiens
  misc_RNA (1)...(19): siRNA sense strand
gaggaauccggcauugcua

SEQ ID NO: 650906 - RNA, 19 nt, Homo sapiens
  misc_RNA (1)...(19): siRNA sense strand
caaggaggaauccggcauu

SEQ ID NO: 650907 - RNA, 19 nt, Homo sapiens
  misc_RNA (1)...(19): siRNA sense strand
ggaggaauccggcauugcu

SEQ ID NO: 650908 - RNA, 19 nt, Homo sapiens
  misc_RNA (1)...(19): siRNA sense strand
gucauggcuugcugcuaua

SEQ ID NO: 650909 - RNA, 19 nt, Homo sapiens
  misc_RNA (1)...(19): siRNA sense strand
ugaagaccaugaccgacau

SEQ ID NO: 650910 - RNA, 19 nt, Homo sapiens
  misc_RNA (1)...(19): siRNA sense strand
ucacuguccugaccgucuu

SEQ ID NO: 650911 - RNA, 19 nt, Homo sapiens
  misc_RNA (1)...(19): siRNA sense strand
gcaguuugcgagccauuuc

SEQ ID NO: 650912 - RNA, 19 nt, Homo sapiens
  misc_RNA (1)...(19): siRNA sense strand
gaccgucuuugucuugucu

SEQ ID NO: 650913 - RNA, 19 nt, Homo sapiens
  misc_RNA (1)...(19): siRNA sense strand
gcuaucugcaccaugguuu

SEQ ID NO: 650914 - RNA, 19 nt, Homo sapiens
  misc_RNA (1)...(19): siRNA sense strand
ccauggaagacuacguuaa

SEQ ID NO: 650915 - RNA, 19 nt, Homo sapiens
  misc_RNA (1)...(19): siRNA sense strand
gcgaugagagcaccaaacu

SEQ ID NO: 650916 - RNA, 19 nt, Homo sapiens
  misc_RNA (1)...(19): siRNA sense strand
gauacaagccaagaagucu

SEQ ID NO: 650917 - RNA, 19 nt, Homo sapiens
  misc_RNA (1)...(19): siRNA sense strand
ugaccgacauguuccuuuu

SEQ ID NO: 650918 - RNA, 19 nt, Homo sapiens
  misc_RNA (1)...(19): siRNA sense strand
ugaugacuauggcucugaa

SEQ ID NO: 650919 - RNA, 19 nt, Homo sapiens
  misc_RNA (1)...(19): siRNA sense strand
ucccagaaaucuuauacag

SEQ ID NO: 650920 - RNA, 19 nt, Homo sapiens
  misc_RNA (1)...(19): siRNA sense strand
acagguacauugccauugc

SEQ ID NO: 650921 - RNA, 19 nt, Homo sapiens
  misc_RNA (1)...(19): siRNA sense strand
uugcugaccuccucuuucu

SEQ ID NO: 650922 - RNA, 19 nt, Homo sapiens
  misc_RNA (1)...(19): siRNA sense strand
cuacugguacugcacaaga

SEQ ID NO: 650923 - RNA, 19 nt, Homo sapiens
  misc_RNA (1)...(19): siRNA sense strand
cugaagaacuuggguugca

SEQ ID NO: 650924 - RNA, 19 nt, Homo sapiens
  misc_RNA (1)...(19): siRNA sense strand
aacagcauguacaagauga

SEQ ID NO: 650925 - RNA, 19 nt, Homo sapiens
  misc_RNA (1)...(19): siRNA sense strand
guguguugcugaucaugug

SEQ ID NO: 650926 - RNA, 19 nt, Homo sapiens
  misc_RNA (1)...(19): siRNA sense strand
caguggguuucauuuacaa

SEQ ID NO: 650927 - RNA, 19 nt, Homo sapiens
  misc_RNA (1)...(19): siRNA sense strand
gacuauggcucugaaucca

SEQ ID NO: 650928 - RNA, 19 nt, Homo sapiens
  misc_RNA (1)...(19): siRNA sense strand
ggaauccggcauugcuauc

SEQ ID NO: 650929 - RNA, 19 nt, Homo sapiens
  misc_RNA (1)...(19): siRNA sense strand
gagagcaccaaacugaagu

SEQ ID NO: 650930 - RNA, 19 nt, Homo sapiens
  misc_RNA (1)...(19): siRNA sense strand
guacugcacaagagugaag

SEQ ID NO: 650931 - RNA, 19 nt, Homo sapiens
  misc_RNA (1)...(19): siRNA sense strand
cauggaagacuacguuaac

SEQ ID NO: 650932 - RNA, 19 nt, Homo sapiens
  misc_RNA (1)...(19): siRNA sense strand
aaggaggaauccggcauug

SEQ ID NO: 650933 - RNA, 19 nt, Homo sapiens
  misc_RNA (1)...(19): siRNA sense strand
uguacuggcucguguucau

SEQ ID NO: 650934 - RNA, 19 nt, Homo sapiens
  misc_RNA (1)...(19): siRNA sense strand
agacuacguuaacuucaac

SEQ ID NO: 650935 - RNA, 19 nt, Homo sapiens
  misc_RNA (1)...(19): siRNA sense strand
ugaagaacuuggguugcau

SEQ ID NO: 650936 - RNA, 19 nt, Homo sapiens
  misc_RNA (1)...(19): siRNA sense strand
gcuugcugcuauaccauca

SEQ ID NO: 650937 - RNA, 19 nt, Homo sapiens
  misc_RNA (1)...(19): siRNA sense strand
gcauugcuaucugcaccau

SEQ ID NO: 650938 - RNA, 19 nt, Homo sapiens
  misc_RNA (1)...(19): siRNA sense strand
aaucuuauacagccaaauc

SEQ ID NO: 650939 - RNA, 19 nt, Homo sapiens
  misc_RNA (1)...(19): siRNA sense strand
ugagagcaccaaacugaag

SEQ ID NO: 650940 - RNA, 19 nt, Homo sapiens
  misc_RNA (1)...(19): siRNA sense strand
cuacguuaacuucaacuuc

SEQ ID NO: 650941 - RNA, 19 nt, Homo sapiens
  misc_RNA (1)...(19): siRNA sense strand
uaacauggcugaugacuau

SEQ ID NO: 650942 - RNA, 19 nt, Homo sapiens
  misc_RNA (1)...(19): siRNA sense strand
ggucauggcuugcugcuau

SEQ ID NO: 650943 - RNA, 19 nt, Homo sapiens
  misc_RNA (1)...(19): siRNA sense strand
gaugagagcaccaaacuga

SEQ ID NO: 650944 - RNA, 19 nt, Homo sapiens
  misc_RNA (1)...(19): siRNA sense strand
caacuucacugacuucuac

SEQ ID NO: 650945 - RNA, 19 nt, Homo sapiens
  misc_RNA (1)...(19): siRNA sense strand
gcacaagagugaagaccau

SEQ ID NO: 650946 - RNA, 19 nt, Homo sapiens
  misc_RNA (1)...(19): siRNA sense strand
gcacaaagcccuaaaagug

SEQ ID NO: 650947 - RNA, 19 nt, Homo sapiens
  misc_RNA (1)...(19): siRNA sense strand
gaaaucuuauacagccaaa

SEQ ID NO: 650948 - RNA, 19 nt, Homo sapiens
  misc_RNA (1)...(19): siRNA sense strand
gcuauaccaucaucauuca

SEQ ID NO: 650949 - RNA, 19 nt, Homo sapiens
  misc_RNA (1)...(19): siRNA sense strand
uguacaagaugaacuucua

SEQ ID NO: 650950 - RNA, 19 nt, Homo sapiens
  misc_RNA (1)...(19): siRNA sense strand
gaagcugucgucuauguug

SEQ ID NO: 650951 - RNA, 19 nt, Homo sapiens
  misc_RNA (1)...(19): siRNA sense strand
gaccuccucuuucuuguca

SEQ ID NO: 650952 - RNA, 19 nt, Homo sapiens
  misc_RNA (1)...(19): siRNA sense strand
ggacagguacauugccauu

SEQ ID NO: 650953 - RNA, 19 nt, Homo sapiens
  misc_RNA (1)...(19): siRNA sense strand
gcaagguggucaacagcau

SEQ ID NO: 650954 - RNA, 19 nt, Homo sapiens
  misc_RNA (1)...(19): siRNA sense strand
gcaucagcguggacaggua

SEQ ID NO: 650955 - RNA, 19 nt, Homo sapiens
  misc_RNA (1)...(19): siRNA sense strand
gcagaccauugacgccuau

SEQ ID NO: 650956 - RNA, 19 nt, Homo sapiens
  misc_RNA (1)...(19): siRNA sense strand
cugcaucccagaaaucuua

SEQ ID NO: 650957 - RNA, 19 nt, Homo sapiens
  misc_RNA (1)...(19): siRNA sense strand
uacguuaacuucaacuuca

SEQ ID NO: 650958 - RNA, 19 nt, Homo sapiens
  misc_RNA (1)...(19): siRNA sense strand
ugaaaacccugaagaacuu

SEQ ID NO: 650959 - RNA, 19 nt, Homo sapiens
  misc_RNA (1)...(19): siRNA sense strand
ccaccaacauugacaucug

SEQ ID NO: 650960 - RNA, 19 nt, Homo sapiens
  misc_RNA (1)...(19): siRNA sense strand
ccaguggguuucauuuaca

SEQ ID NO: 650961 - RNA, 19 nt, Homo sapiens
  misc_RNA (1)...(19): siRNA sense strand
ucaacagcauguacaagau

SEQ ID NO: 650962 - RNA, 19 nt, Homo sapiens
  misc_RNA (1)...(19): siRNA sense strand
gcauguacaagaugaacuu

SEQ ID NO: 650963 - RNA, 19 nt, Homo sapiens
  misc_RNA (1)...(19): siRNA sense strand
gcugaccuccucuuucuug

SEQ ID NO: 650964 - RNA, 19 nt, Homo sapiens
  misc_RNA (1)...(19): siRNA sense strand
caacagcauguacaagaug

SEQ ID NO: 650965 - RNA, 19 nt, Homo sapiens
  misc_RNA (1)...(19): siRNA sense strand
gucaacagcauguacaaga

SEQ ID NO: 650966 - RNA, 19 nt, Homo sapiens
  misc_RNA (1)...(19): siRNA sense strand
ggagagagggaagcuugaa

SEQ ID NO: 650967 - RNA, 19 nt, Homo sapiens
  misc_RNA (1)...(19): siRNA sense strand
ugacgccuaugccauguuc

SEQ ID NO: 650968 - RNA, 19 nt, Homo sapiens
  misc_RNA (1)...(19): siRNA sense strand
aagacuacguuaacuucaa

SEQ ID NO: 650969 - RNA, 19 nt, Homo sapiens
  misc_RNA (1)...(19): siRNA sense strand
gcucugaauccacaucuuc

SEQ ID NO: 650970 - RNA, 19 nt, Homo sapiens
  misc_RNA (1)...(19): siRNA sense strand
gccaugagagcacauacuu

SEQ ID NO: 650971 - RNA, 19 nt, Homo sapiens
  misc_RNA (1)...(19): siRNA sense strand
uugaagcugucgucuaugu

SEQ ID NO: 650972 - RNA, 19 nt, Homo sapiens
  misc_RNA (1)...(19): siRNA sense strand
ugucucaguuucccuacaa

SEQ ID NO: 650973 - RNA, 19 nt, Homo sapiens
  misc_RNA (1)...(19): siRNA sense strand
gaggaauccggcauugcua

SEQ ID NO: 650974 - RNA, 19 nt, Homo sapiens
  misc_RNA (1)...(19): siRNA sense strand
caaggaggaauccggcauu

SEQ ID NO: 650975 - RNA, 19 nt, Homo sapiens
  misc_RNA (1)...(19): siRNA sense strand
ggaggaauccggcauugcu

SEQ ID NO: 650976 - RNA, 19 nt, Homo sapiens
  misc_RNA (1)...(19): siRNA sense strand
gucauggcuugcugcuaua

SEQ ID NO: 650977 - RNA, 19 nt, Homo sapiens
  misc_RNA (1)...(19): siRNA sense strand
ugaagaccaugaccgacau

SEQ ID NO: 650978 - RNA, 19 nt, Homo sapiens
  misc_RNA (1)...(19): siRNA sense strand
uuccuaacauggcugauga

SEQ ID NO: 650979 - RNA, 19 nt, Homo sapiens
  misc_RNA (1)...(19): siRNA sense strand
ucacuguccugaccgucuu

SEQ ID NO: 650980 - RNA, 19 nt, Homo sapiens
  misc_RNA (1)...(19): siRNA sense strand
gcaguuugcgagccauuuc

SEQ ID NO: 650981 - RNA, 19 nt, Homo sapiens
  misc_RNA (1)...(19): siRNA sense strand
gaccgucuuugucuugucu

SEQ ID NO: 650982 - RNA, 19 nt, Homo sapiens
  misc_RNA (1)...(19): siRNA sense strand
gcuaucugcaccaugguuu

SEQ ID NO: 650983 - RNA, 19 nt, Homo sapiens
  misc_RNA (1)...(19): siRNA sense strand
ccauggaagacuacguuaa

SEQ ID NO: 650984 - RNA, 19 nt, Homo sapiens
  misc_RNA (1)...(19): siRNA sense strand
gcgaugagagcaccaaacu

SEQ ID NO: 650985 - RNA, 19 nt, Homo sapiens
  misc_RNA (1)...(19): siRNA sense strand
gauacaagccaagaagucu

SEQ ID NO: 650986 - RNA, 19 nt, Homo sapiens
  misc_RNA (1)...(19): siRNA sense strand
ugaccgacauguuccuuuu

SEQ ID NO: 650987 - RNA, 19 nt, Homo sapiens
  misc_RNA (1)...(19): siRNA sense strand
ugaugacuauggcucugaa

SEQ ID NO: 650988 - RNA, 19 nt, Homo sapiens
  misc_RNA (1)...(19): siRNA sense strand
caagcccuauuccuaacau

SEQ ID NO: 650989 - RNA, 19 nt, Homo sapiens
  misc_RNA (1)...(19): siRNA sense strand
ucccagaaaucuuauacag

SEQ ID NO: 650990 - RNA, 19 nt, Homo sapiens
  misc_RNA (1)...(19): siRNA sense strand
acagguacauugccauugc

SEQ ID NO: 650991 - RNA, 19 nt, Homo sapiens
  misc_RNA (1)...(19): siRNA sense strand
uugcugaccuccucuuucu

SEQ ID NO: 650992 - RNA, 19 nt, Homo sapiens
  misc_RNA (1)...(19): siRNA sense strand
cuacugguacugcacaaga

SEQ ID NO: 650993 - RNA, 19 nt, Homo sapiens
  misc_RNA (1)...(19): siRNA sense strand
cugaagaacuuggguugca

SEQ ID NO: 650994 - RNA, 19 nt, Homo sapiens
  misc_RNA (1)...(19): siRNA sense strand
aacagcauguacaagauga

SEQ ID NO: 650995 - RNA, 19 nt, Homo sapiens
  misc_RNA (1)...(19): siRNA sense strand
guguguugcugaucaugug

SEQ ID NO: 650996 - RNA, 19 nt, Homo sapiens
  misc_RNA (1)...(19): siRNA sense strand
caguggguuucauuuacaa

SEQ ID NO: 650997 - RNA, 19 nt, Homo sapiens
  misc_RNA (1)...(19): siRNA sense strand
gacuauggcucugaaucca

SEQ ID NO: 650998 - RNA, 19 nt, Homo sapiens
  misc_RNA (1)...(19): siRNA sense strand
ggaauccggcauugcuauc

SEQ ID NO: 650999 - RNA, 19 nt, Homo sapiens
  misc_RNA (1)...(19): siRNA sense strand
gagagcaccaaacugaagu

SEQ ID NO: 651000 - RNA, 19 nt, Homo sapiens
  misc_RNA (1)...(19): siRNA sense strand
uguacuggcucguguucau

SEQ ID NO: 651001 - RNA, 19 nt, Homo sapiens
  misc_RNA (1)...(19): siRNA sense strand
cauggaagacuacguuaac

SEQ ID NO: 651002 - RNA, 19 nt, Homo sapiens
  misc_RNA (1)...(19): siRNA sense strand
aaggaggaauccggcauug

SEQ ID NO: 651003 - RNA, 19 nt, Homo sapiens
  misc_RNA (1)...(19): siRNA sense strand
guacugcacaagagugaag

SEQ ID NO: 651004 - RNA, 19 nt, Homo sapiens
  misc_RNA (1)...(19): siRNA sense strand
aaucuuauacagccaaauc

SEQ ID NO: 651005 - RNA, 19 nt, Homo sapiens
  misc_RNA (1)...(19): siRNA sense strand
ugaagaacuuggguugcau

SEQ ID NO: 651006 - RNA, 19 nt, Homo sapiens
  misc_RNA (1)...(19): siRNA sense strand
gcuugcugcuauaccauca

SEQ ID NO: 651007 - RNA, 19 nt, Homo sapiens
  misc_RNA (1)...(19): siRNA sense strand
gcauugcuaucugcaccau

SEQ ID NO: 651008 - RNA, 19 nt, Homo sapiens
  misc_RNA (1)...(19): siRNA sense strand
agacuacguuaacuucaac

SEQ ID NO: 651009 - RNA, 19 nt, Homo sapiens
  misc_RNA (1)...(19): siRNA sense strand
cacaagcccuauuccuaac

SEQ ID NO: 651010 - RNA, 19 nt, Homo sapiens
  misc_RNA (1)...(19): siRNA sense strand
ugagagcaccaaacugaag

SEQ ID NO: 651011 - RNA, 19 nt, Homo sapiens
  misc_RNA (1)...(19): siRNA sense strand
cuaacauggcugaugacua

SEQ ID NO: 651012 - RNA, 19 nt, Homo sapiens
  misc_RNA (1)...(19): siRNA sense strand
cuacguuaacuucaacuuc

SEQ ID NO: 651013 - RNA, 19 nt, Homo sapiens
  misc_RNA (1)...(19): siRNA sense strand
ggaagaaacugaaggaagu

SEQ ID NO: 651014 - RNA, 19 nt, Homo sapiens
  misc_RNA (1)...(19): siRNA sense strand
gaggagagaucauugcaaa

SEQ ID NO: 651015 - RNA, 19 nt, Homo sapiens
  misc_RNA (1)...(19): siRNA sense strand
ggaggaagcuucgcagguu

SEQ ID NO: 651016 - RNA, 19 nt, Homo sapiens
  misc_RNA (1)...(19): siRNA sense strand
gagagagccugccggauga

SEQ ID NO: 651017 - RNA, 19 nt, Homo sapiens
  misc_RNA (1)...(19): siRNA sense strand
gaaacugaaggaaguauuu

SEQ ID NO: 651018 - RNA, 19 nt, Homo sapiens
  misc_RNA (1)...(19): siRNA sense strand
caaagaagauccugauggu

SEQ ID NO: 651019 - RNA, 19 nt, Homo sapiens
  misc_RNA (1)...(19): siRNA sense strand
gaauaggcacuguuacuuu

SEQ ID NO: 651020 - RNA, 19 nt, Homo sapiens
  misc_RNA (1)...(19): siRNA sense strand
ggaagaugcuaaaggacaa

SEQ ID NO: 651021 - RNA, 19 nt, Homo sapiens
  misc_RNA (1)...(19): siRNA sense strand
gaugugcuguuguugaauu

SEQ ID NO: 651022 - RNA, 19 nt, Homo sapiens
  misc_RNA (1)...(19): siRNA sense strand
gaagagaggagagaucauu

SEQ ID NO: 651023 - RNA, 19 nt, Homo sapiens
  misc_RNA (1)...(19): siRNA sense strand
aaacaugggucgauuugga

SEQ ID NO: 651024 - RNA, 19 nt, Homo sapiens
  misc_RNA (1)...(19): siRNA sense strand
gaaauggcagucacuuaaa

SEQ ID NO: 651025 - RNA, 19 nt, Homo sapiens
  misc_RNA (1)...(19): siRNA sense strand
ggcauaggauuuggaauaa

SEQ ID NO: 651026 - RNA, 19 nt, Homo sapiens
  misc_RNA (1)...(19): siRNA sense strand
uaacauacguggagcucuu

SEQ ID NO: 651027 - RNA, 19 nt, Homo sapiens
  misc_RNA (1)...(19): siRNA sense strand
gcaaucgcuuugagccaua

SEQ ID NO: 651028 - RNA, 19 nt, Homo sapiens
  misc_RNA (1)...(19): siRNA sense strand
ugaaauggcagucacuuaa

SEQ ID NO: 651029 - RNA, 19 nt, Homo sapiens
  misc_RNA (1)...(19): siRNA sense strand
gaauaaaggcaucggaaug

SEQ ID NO: 651030 - RNA, 19 nt, Homo sapiens
  misc_RNA (1)...(19): siRNA sense strand
gggaugugcuguuguugaa

SEQ ID NO: 651031 - RNA, 19 nt, Homo sapiens
  misc_RNA (1)...(19): siRNA sense strand
gaauugauagaaacgcuua

SEQ ID NO: 651032 - RNA, 19 nt, Homo sapiens
  misc_RNA (1)...(19): siRNA sense strand
gagauugacguucgaauug

SEQ ID NO: 651033 - RNA, 19 nt, Homo sapiens
  misc_RNA (1)...(19): siRNA sense strand
cauggaagaugcuaaagga

SEQ ID NO: 651034 - RNA, 19 nt, Homo sapiens
  misc_RNA (1)...(19): siRNA sense strand
ccaaucaccugaauaaagg

SEQ ID NO: 651035 - RNA, 19 nt, Homo sapiens
  misc_RNA (1)...(19): siRNA sense strand
ugagaaaucugccauucga

SEQ ID NO: 651036 - RNA, 19 nt, Homo sapiens
  misc_RNA (1)...(19): siRNA sense strand
ccacauggccuccagcauu

SEQ ID NO: 651037 - RNA, 19 nt, Homo sapiens
  misc_RNA (1)...(19): siRNA sense strand
gaacaugggcaggauaaau

SEQ ID NO: 651038 - RNA, 19 nt, Homo sapiens
  misc_RNA (1)...(19): siRNA sense strand
caagcuauaucuauguuca

SEQ ID NO: 651039 - RNA, 19 nt, Homo sapiens
  misc_RNA (1)...(19): siRNA sense strand
gaaggaaguauuuaguaug

SEQ ID NO: 651040 - RNA, 19 nt, Homo sapiens
  misc_RNA (1)...(19): siRNA sense strand
gaugaugaauggcaugaag

SEQ ID NO: 651041 - RNA, 19 nt, Homo sapiens
  misc_RNA (1)...(19): siRNA sense strand
gcauaggauuuggaauaaa

SEQ ID NO: 651042 - RNA, 19 nt, Homo sapiens
  misc_RNA (1)...(19): siRNA sense strand
gaagaaacugaaggaagua

SEQ ID NO: 651043 - RNA, 19 nt, Homo sapiens
  misc_RNA (1)...(19): siRNA sense strand
ggaauaggcacuguuacuu

SEQ ID NO: 651044 - RNA, 19 nt, Homo sapiens
  misc_RNA (1)...(19): siRNA sense strand
agaacgaccugcucagaau

SEQ ID NO: 651045 - RNA, 19 nt, Homo sapiens
  misc_RNA (1)...(19): siRNA sense strand
gagaacgaccugcucagaa

SEQ ID NO: 651046 - RNA, 19 nt, Homo sapiens
  misc_RNA (1)...(19): siRNA sense strand
ggccagcugcuauuugaua

SEQ ID NO: 651047 - RNA, 19 nt, Homo sapiens
  misc_RNA (1)...(19): siRNA sense strand
aaaguuggcuggaagaaac

SEQ ID NO: 651048 - RNA, 19 nt, Homo sapiens
  misc_RNA (1)...(19): siRNA sense strand
auacagagccuucauuaca

SEQ ID NO: 651049 - RNA, 19 nt, Homo sapiens
  misc_RNA (1)...(19): siRNA sense strand
cacauggccuccagcauug

SEQ ID NO: 651050 - RNA, 19 nt, Homo sapiens
  misc_RNA (1)...(19): siRNA sense strand
gaaggcauaggauuuggaa

SEQ ID NO: 651051 - RNA, 19 nt, Homo sapiens
  misc_RNA (1)...(19): siRNA sense strand
acagagccuucauuacaaa

SEQ ID NO: 651052 - RNA, 19 nt, Homo sapiens
  misc_RNA (1)...(19): siRNA sense strand
gaaggccugccagauauuu

SEQ ID NO: 651053 - RNA, 19 nt, Homo sapiens
  misc_RNA (1)...(19): siRNA sense strand
gauggagcguggcaacuuc

SEQ ID NO: 651054 - RNA, 19 nt, Homo sapiens
  misc_RNA (1)...(19): siRNA sense strand
aggcauaggauuuggaaua

SEQ ID NO: 651055 - RNA, 19 nt, Homo sapiens
  misc_RNA (1)...(19): siRNA sense strand
gaauggaaggcauaggauu

SEQ ID NO: 651056 - RNA, 19 nt, Homo sapiens
  misc_RNA (1)...(19): siRNA sense strand
uacagagccuucauuacaa

SEQ ID NO: 651057 - RNA, 19 nt, Homo sapiens
  misc_RNA (1)...(19): siRNA sense strand
ucacuuaaagaccugguua

SEQ ID NO: 651058 - RNA, 19 nt, Homo sapiens
  misc_RNA (1)...(19): siRNA sense strand
agauacagagccuucauua

SEQ ID NO: 651059 - RNA, 19 nt, Homo sapiens
  misc_RNA (1)...(19): siRNA sense strand
gauggaagagagcaugaaa

SEQ ID NO: 651060 - RNA, 19 nt, Homo sapiens
  misc_RNA (1)...(19): siRNA sense strand
ggaagcacaguauuuguag

SEQ ID NO: 651061 - RNA, 19 nt, Homo sapiens
  misc_RNA (1)...(19): siRNA sense strand
ucacauggaagaugcuaaa

SEQ ID NO: 651062 - RNA, 19 nt, Homo sapiens
  misc_RNA (1)...(19): siRNA sense strand
aggaaggccugccagauau

SEQ ID NO: 651063 - RNA, 19 nt, Homo sapiens
  misc_RNA (1)...(19): siRNA sense strand
gagagaucauugcaaagca

SEQ ID NO: 651064 - RNA, 19 nt, Homo sapiens
  misc_RNA (1)...(19): siRNA sense strand
gaugagagggccuuaccaa

SEQ ID NO: 651065 - RNA, 19 nt, Homo sapiens
  misc_RNA (1)...(19): siRNA sense strand
gccaaucaccugaauaaag

SEQ ID NO: 651066 - RNA, 19 nt, Homo sapiens
  misc_RNA (1)...(19): siRNA sense strand
ggagaacgaccugcucaga

SEQ ID NO: 651067 - RNA, 19 nt, Homo sapiens
  misc_RNA (1)...(19): siRNA sense strand
cuauaucuauguucaaugg

SEQ ID NO: 651068 - RNA, 19 nt, Homo sapiens
  misc_RNA (1)...(19): siRNA sense strand
cgauuuggaucugggauga

SEQ ID NO: 651069 - RNA, 19 nt, Homo sapiens
  misc_RNA (1)...(19): siRNA sense strand
gaaguccuaaacaagcaua

SEQ ID NO: 651070 - RNA, 19 nt, Homo sapiens
  misc_RNA (1)...(19): siRNA sense strand
gaacgaccugcucagaaug

SEQ ID NO: 651071 - RNA, 19 nt, Homo sapiens
  misc_RNA (1)...(19): siRNA sense strand
gggaauggaaggcauagga

SEQ ID NO: 651072 - RNA, 19 nt, Homo sapiens
  misc_RNA (1)...(19): siRNA sense strand
caucggaaugggaaacaua

SEQ ID NO: 651073 - RNA, 19 nt, Homo sapiens
  misc_RNA (1)...(19): siRNA sense strand
caaugcacgucaagaugga

SEQ ID NO: 651074 - RNA, 19 nt, Homo sapiens
  misc_RNA (1)...(19): siRNA sense strand
agaagauccugauggugaa

SEQ ID NO: 651075 - RNA, 19 nt, Homo sapiens
  misc_RNA (1)...(19): siRNA sense strand
gaaaacaugggucgauuug

SEQ ID NO: 651076 - RNA, 19 nt, Homo sapiens
  misc_RNA (1)...(19): siRNA sense strand
aaggaaguauuuaguaugg

SEQ ID NO: 651077 - RNA, 19 nt, Homo sapiens
  misc_RNA (1)...(19): siRNA sense strand
cgacggagaucaaaaugga

SEQ ID NO: 651078 - RNA, 19 nt, Homo sapiens
  misc_RNA (1)...(19): siRNA sense strand
cuaaacaagcauagucuga

SEQ ID NO: 651079 - RNA, 19 nt, Homo sapiens
  misc_RNA (1)...(19): siRNA sense strand
gauugacguucgaauugau

SEQ ID NO: 651080 - RNA, 19 nt, Homo sapiens
  misc_RNA (1)...(19): siRNA sense strand
gaugcuaaaggacaaauuc

SEQ ID NO: 651081 - RNA, 19 nt, Homo sapiens
  misc_RNA (1)...(19): siRNA sense strand
cauaugccaauccaacuaa

SEQ ID NO: 651082 - RNA, 19 nt, Homo sapiens
  misc_RNA (1)...(19): siRNA sense strand
ggagggcaacccauugaug

SEQ ID NO: 651083 - RNA, 19 nt, Homo sapiens
  misc_RNA (1)...(19): siRNA sense strand
uggaagcacaguauuugua

SEQ ID NO: 651084 - RNA, 19 nt, Homo sapiens
  misc_RNA (1)...(19): siRNA sense strand
cugcggaaguccuaaacaa

SEQ ID NO: 651085 - RNA, 19 nt, Homo sapiens
  misc_RNA (1)...(19): siRNA sense strand
ggaaggccugccagauauu

SEQ ID NO: 651086 - RNA, 19 nt, Homo sapiens
  misc_RNA (1)...(19): siRNA sense strand
uaaagaccugguuaaagaa

SEQ ID NO: 651087 - RNA, 19 nt, Homo sapiens
  misc_RNA (1)...(19): siRNA sense strand
gcacugaagagaggagaga

SEQ ID NO: 651088 - RNA, 19 nt, Homo sapiens
  misc_RNA (1)...(19): siRNA sense strand
cguggaauaggcacuguua

SEQ ID NO: 651089 - RNA, 19 nt, Homo sapiens
  misc_RNA (1)...(19): siRNA sense strand
ggaugaacaugggcaggau

SEQ ID NO: 651090 - RNA, 19 nt, Homo sapiens
  misc_RNA (1)...(19): siRNA sense strand
gaugaacaugggcaggaua

SEQ ID NO: 651091 - RNA, 19 nt, Homo sapiens
  misc_RNA (1)...(19): siRNA sense strand
aauggacgcugaaggaaag

SEQ ID NO: 651092 - RNA, 19 nt, Homo sapiens
  misc_RNA (1)...(19): siRNA sense strand
aaauggcagucacuuaaag

SEQ ID NO: 651093 - RNA, 19 nt, Homo sapiens
  misc_RNA (1)...(19): siRNA sense strand
gccagauauuugugagaaa

SEQ ID NO: 651094 - RNA, 19 nt, Homo sapiens
  misc_RNA (1)...(19): siRNA sense strand
gagagggccuuaccaaaag

SEQ ID NO: 651095 - RNA, 19 nt, Homo sapiens
  misc_RNA (1)...(19): siRNA sense strand
gaccaaugcacgucaagau

SEQ ID NO: 651096 - RNA, 19 nt, Homo sapiens
  misc_RNA (1)...(19): siRNA sense strand
uaauggacgcugaaggaaa

SEQ ID NO: 651097 - RNA, 19 nt, Homo sapiens
  misc_RNA (1)...(19): siRNA sense strand
agauugacguucgaauuga

SEQ ID NO: 651098 - RNA, 19 nt, Homo sapiens
  misc_RNA (1)...(19): siRNA sense strand
aauggaaggcauaggauuu

SEQ ID NO: 651099 - RNA, 19 nt, Homo sapiens
  misc_RNA (1)...(19): siRNA sense strand
ggaauggaaggcauaggau

SEQ ID NO: 651100 - RNA, 19 nt, Homo sapiens
  misc_RNA (1)...(19): siRNA sense strand
gagccuucauuacaaacau

SEQ ID NO: 651101 - RNA, 19 nt, Homo sapiens
  misc_RNA (1)...(19): siRNA sense strand
gguccgagcagacauucuu

SEQ ID NO: 651102 - RNA, 19 nt, Homo sapiens
  misc_RNA (1)...(19): siRNA sense strand
cugaaggaaguauuuagua

SEQ ID NO: 651103 - RNA, 19 nt, Homo sapiens
  misc_RNA (1)...(19): siRNA sense strand
uaaaguuggcuggaagaaa

SEQ ID NO: 651104 - RNA, 19 nt, Homo sapiens
  misc_RNA (1)...(19): siRNA sense strand
gccaggagagcaaugcaaa

SEQ ID NO: 651105 - RNA, 19 nt, Homo sapiens
  misc_RNA (1)...(19): siRNA sense strand
agagauugacguucgaauu

SEQ ID NO: 651106 - RNA, 19 nt, Homo sapiens
  misc_RNA (1)...(19): siRNA sense strand
ggagagaucauugcaaagc

SEQ ID NO: 651107 - RNA, 19 nt, Homo sapiens
  misc_RNA (1)...(19): siRNA sense strand
ugugcaagcuauaucuaug

SEQ ID NO: 651108 - RNA, 19 nt, Homo sapiens
  misc_RNA (1)...(19): siRNA sense strand
uaaaggacaaauucaacga

SEQ ID NO: 651109 - RNA, 19 nt, Homo sapiens
  misc_RNA (1)...(19): siRNA sense strand
ugccagauauuugugagaa

SEQ ID NO: 651110 - RNA, 19 nt, Homo sapiens
  misc_RNA (1)...(19): siRNA sense strand
aagcuucgcagguuccuuu

SEQ ID NO: 651111 - RNA, 19 nt, Homo sapiens
  misc_RNA (1)...(19): siRNA sense strand
ggauggguccuggcauuga

SEQ ID NO: 651112 - RNA, 19 nt, Homo sapiens
  misc_RNA (1)...(19): siRNA sense strand
ccauaugccaauccaacua

SEQ ID NO: 651113 - RNA, 19 nt, Homo sapiens
  misc_RNA (1)...(19): siRNA sense strand
ggaagaaacugaaggaagu

SEQ ID NO: 651114 - RNA, 19 nt, Homo sapiens
  misc_RNA (1)...(19): siRNA sense strand
gaggagagaucauugcaaa

SEQ ID NO: 651115 - RNA, 19 nt, Homo sapiens
  misc_RNA (1)...(19): siRNA sense strand
ggaggaagcuucgcagguu

SEQ ID NO: 651116 - RNA, 19 nt, Homo sapiens
  misc_RNA (1)...(19): siRNA sense strand
gagagagccugccggauga

SEQ ID NO: 651117 - RNA, 19 nt, Homo sapiens
  misc_RNA (1)...(19): siRNA sense strand
gaaacugaaggaaguauuu

SEQ ID NO: 651118 - RNA, 19 nt, Homo sapiens
  misc_RNA (1)...(19): siRNA sense strand
caaagaagauccugauggu

SEQ ID NO: 651119 - RNA, 19 nt, Homo sapiens
  misc_RNA (1)...(19): siRNA sense strand
gaauaggcacuguuacuuu

SEQ ID NO: 651120 - RNA, 19 nt, Homo sapiens
  misc_RNA (1)...(19): siRNA sense strand
ggaagaugcuaaaggacaa

SEQ ID NO: 651121 - RNA, 19 nt, Homo sapiens
  misc_RNA (1)...(19): siRNA sense strand
gaugugcuguuguugaauu

SEQ ID NO: 651122 - RNA, 19 nt, Homo sapiens
  misc_RNA (1)...(19): siRNA sense strand
gaagagaggagagaucauu

SEQ ID NO: 651123 - RNA, 19 nt, Homo sapiens
  misc_RNA (1)...(19): siRNA sense strand
aaacaugggucgauuugga

SEQ ID NO: 651124 - RNA, 19 nt, Homo sapiens
  misc_RNA (1)...(19): siRNA sense strand
gaaauggcagucacuuaaa

SEQ ID NO: 651125 - RNA, 19 nt, Homo sapiens
  misc_RNA (1)...(19): siRNA sense strand
ggcauaggauuuggaauaa

SEQ ID NO: 651126 - RNA, 19 nt, Homo sapiens
  misc_RNA (1)...(19): siRNA sense strand
uaacauacguggagcucuu

SEQ ID NO: 651127 - RNA, 19 nt, Homo sapiens
  misc_RNA (1)...(19): siRNA sense strand
gcaaucgcuuugagccaua

SEQ ID NO: 651128 - RNA, 19 nt, Homo sapiens
  misc_RNA (1)...(19): siRNA sense strand
ugaaauggcagucacuuaa

SEQ ID NO: 651129 - RNA, 19 nt, Homo sapiens
  misc_RNA (1)...(19): siRNA sense strand
gaauaaaggcaucggaaug

SEQ ID NO: 651130 - RNA, 19 nt, Homo sapiens
  misc_RNA (1)...(19): siRNA sense strand
gggaugugcuguuguugaa

SEQ ID NO: 651131 - RNA, 19 nt, Homo sapiens
  misc_RNA (1)...(19): siRNA sense strand
gaauugauagaaacgcuua

SEQ ID NO: 651132 - RNA, 19 nt, Homo sapiens
  misc_RNA (1)...(19): siRNA sense strand
gagauugacguucgaauug

SEQ ID NO: 651133 - RNA, 19 nt, Homo sapiens
  misc_RNA (1)...(19): siRNA sense strand
cauggaagaugcuaaagga

SEQ ID NO: 651134 - RNA, 19 nt, Homo sapiens
  misc_RNA (1)...(19): siRNA sense strand
ccaaucaccugaauaaagg

SEQ ID NO: 651135 - RNA, 19 nt, Homo sapiens
  misc_RNA (1)...(19): siRNA sense strand
ugagaaaucugccauucga

SEQ ID NO: 651136 - RNA, 19 nt, Homo sapiens
  misc_RNA (1)...(19): siRNA sense strand
ccacauggccuccagcauu

SEQ ID NO: 651137 - RNA, 19 nt, Homo sapiens
  misc_RNA (1)...(19): siRNA sense strand
gaacaugggcaggauaaau

SEQ ID NO: 651138 - RNA, 19 nt, Homo sapiens
  misc_RNA (1)...(19): siRNA sense strand
caagcuauaucuauguuca

SEQ ID NO: 651139 - RNA, 19 nt, Homo sapiens
  misc_RNA (1)...(19): siRNA sense strand
gaaggaaguauuuaguaug

SEQ ID NO: 651140 - RNA, 19 nt, Homo sapiens
  misc_RNA (1)...(19): siRNA sense strand
gaugaugaauggcaugaag

SEQ ID NO: 651141 - RNA, 19 nt, Homo sapiens
  misc_RNA (1)...(19): siRNA sense strand
gcauaggauuuggaauaaa

SEQ ID NO: 651142 - RNA, 19 nt, Homo sapiens
  misc_RNA (1)...(19): siRNA sense strand
gaagaaacugaaggaagua

SEQ ID NO: 651143 - RNA, 19 nt, Homo sapiens
  misc_RNA (1)...(19): siRNA sense strand
ggaauaggcacuguuacuu

SEQ ID NO: 651144 - RNA, 19 nt, Homo sapiens
  misc_RNA (1)...(19): siRNA sense strand
agaacgaccugcucagaau

SEQ ID NO: 651145 - RNA, 19 nt, Homo sapiens
  misc_RNA (1)...(19): siRNA sense strand
gagaacgaccugcucagaa

SEQ ID NO: 651146 - RNA, 19 nt, Homo sapiens
  misc_RNA (1)...(19): siRNA sense strand
ggccagcugcuauuugaua

SEQ ID NO: 651147 - RNA, 19 nt, Homo sapiens
  misc_RNA (1)...(19): siRNA sense strand
aaaguuggcuggaagaaac

SEQ ID NO: 651148 - RNA, 19 nt, Homo sapiens
  misc_RNA (1)...(19): siRNA sense strand
auacagagccuucauuaca

SEQ ID NO: 651149 - RNA, 19 nt, Homo sapiens
  misc_RNA (1)...(19): siRNA sense strand
cacauggccuccagcauug

SEQ ID NO: 651150 - RNA, 19 nt, Homo sapiens
  misc_RNA (1)...(19): siRNA sense strand
gaaggcauaggauuuggaa

SEQ ID NO: 651151 - RNA, 19 nt, Homo sapiens
  misc_RNA (1)...(19): siRNA sense strand
acagagccuucauuacaaa

SEQ ID NO: 651152 - RNA, 19 nt, Homo sapiens
  misc_RNA (1)...(19): siRNA sense strand
gaaggccugccagauauuu

SEQ ID NO: 651153 - RNA, 19 nt, Homo sapiens
  misc_RNA (1)...(19): siRNA sense strand
gauggagcguggcaacuuc

SEQ ID NO: 651154 - RNA, 19 nt, Homo sapiens
  misc_RNA (1)...(19): siRNA sense strand
aggcauaggauuuggaaua

SEQ ID NO: 651155 - RNA, 19 nt, Homo sapiens
  misc_RNA (1)...(19): siRNA sense strand
gaauggaaggcauaggauu

SEQ ID NO: 651156 - RNA, 19 nt, Homo sapiens
  misc_RNA (1)...(19): siRNA sense strand
uacagagccuucauuacaa

SEQ ID NO: 651157 - RNA, 19 nt, Homo sapiens
  misc_RNA (1)...(19): siRNA sense strand
ucacuuaaagaccugguua

SEQ ID NO: 651158 - RNA, 19 nt, Homo sapiens
  misc_RNA (1)...(19): siRNA sense strand
agauacagagccuucauua

SEQ ID NO: 651159 - RNA, 19 nt, Homo sapiens
  misc_RNA (1)...(19): siRNA sense strand
gauggaagagagcaugaaa

SEQ ID NO: 651160 - RNA, 19 nt, Homo sapiens
  misc_RNA (1)...(19): siRNA sense strand
ggaagcacaguauuuguag

SEQ ID NO: 651161 - RNA, 19 nt, Homo sapiens
  misc_RNA (1)...(19): siRNA sense strand
ucacauggaagaugcuaaa

SEQ ID NO: 651162 - RNA, 19 nt, Homo sapiens
  misc_RNA (1)...(19): siRNA sense strand
aggaaggccugccagauau

SEQ ID NO: 651163 - RNA, 19 nt, Homo sapiens
  misc_RNA (1)...(19): siRNA sense strand
gagagaucauugcaaagca

SEQ ID NO: 651164 - RNA, 19 nt, Homo sapiens
  misc_RNA (1)...(19): siRNA sense strand
gaugagagggccuuaccaa

SEQ ID NO: 651165 - RNA, 19 nt, Homo sapiens
  misc_RNA (1)...(19): siRNA sense strand
gccaaucaccugaauaaag

SEQ ID NO: 651166 - RNA, 19 nt, Homo sapiens
  misc_RNA (1)...(19): siRNA sense strand
ggagaacgaccugcucaga

SEQ ID NO: 651167 - RNA, 19 nt, Homo sapiens
  misc_RNA (1)...(19): siRNA sense strand
cuauaucuauguucaaugg

SEQ ID NO: 651168 - RNA, 19 nt, Homo sapiens
  misc_RNA (1)...(19): siRNA sense strand
cgauuuggaucugggauga

SEQ ID NO: 651169 - RNA, 19 nt, Homo sapiens
  misc_RNA (1)...(19): siRNA sense strand
gaaguccuaaacaagcaua

SEQ ID NO: 651170 - RNA, 19 nt, Homo sapiens
  misc_RNA (1)...(19): siRNA sense strand
gaacgaccugcucagaaug

SEQ ID NO: 651171 - RNA, 19 nt, Homo sapiens
  misc_RNA (1)...(19): siRNA sense strand
gggaauggaaggcauagga

SEQ ID NO: 651172 - RNA, 19 nt, Homo sapiens
  misc_RNA (1)...(19): siRNA sense strand
caucggaaugggaaacaua

SEQ ID NO: 651173 - RNA, 19 nt, Homo sapiens
  misc_RNA (1)...(19): siRNA sense strand
caaugcacgucaagaugga

SEQ ID NO: 651174 - RNA, 19 nt, Homo sapiens
  misc_RNA (1)...(19): siRNA sense strand
agaagauccugauggugaa

SEQ ID NO: 651175 - RNA, 19 nt, Homo sapiens
  misc_RNA (1)...(19): siRNA sense strand
gaaaacaugggucgauuug

SEQ ID NO: 651176 - RNA, 19 nt, Homo sapiens
  misc_RNA (1)...(19): siRNA sense strand
aaggaaguauuuaguaugg

SEQ ID NO: 651177 - RNA, 19 nt, Homo sapiens
  misc_RNA (1)...(19): siRNA sense strand
cgacggagaucaaaaugga

SEQ ID NO: 651178 - RNA, 19 nt, Homo sapiens
  misc_RNA (1)...(19): siRNA sense strand
cuaaacaagcauagucuga

SEQ ID NO: 651179 - RNA, 19 nt, Homo sapiens
  misc_RNA (1)...(19): siRNA sense strand
gauugacguucgaauugau

SEQ ID NO: 651180 - RNA, 19 nt, Homo sapiens
  misc_RNA (1)...(19): siRNA sense strand
gaugcuaaaggacaaauuc

SEQ ID NO: 651181 - RNA, 19 nt, Homo sapiens
  misc_RNA (1)...(19): siRNA sense strand
cauaugccaauccaacuaa

SEQ ID NO: 651182 - RNA, 19 nt, Homo sapiens
  misc_RNA (1)...(19): siRNA sense strand
ggagggcaacccauugaug

SEQ ID NO: 651183 - RNA, 19 nt, Homo sapiens
  misc_RNA (1)...(19): siRNA sense strand
uggaagcacaguauuugua

SEQ ID NO: 651184 - RNA, 19 nt, Homo sapiens
  misc_RNA (1)...(19): siRNA sense strand
cugcggaaguccuaaacaa

SEQ ID NO: 651185 - RNA, 19 nt, Homo sapiens
  misc_RNA (1)...(19): siRNA sense strand
ggaaggccugccagauauu

SEQ ID NO: 651186 - RNA, 19 nt, Homo sapiens
  misc_RNA (1)...(19): siRNA sense strand
uaaagaccugguuaaagaa

SEQ ID NO: 651187 - RNA, 19 nt, Homo sapiens
  misc_RNA (1)...(19): siRNA sense strand
gcacugaagagaggagaga

SEQ ID NO: 651188 - RNA, 19 nt, Homo sapiens
  misc_RNA (1)...(19): siRNA sense strand
cguggaauaggcacuguua

SEQ ID NO: 651189 - RNA, 19 nt, Homo sapiens
  misc_RNA (1)...(19): siRNA sense strand
ggaugaacaugggcaggau

SEQ ID NO: 651190 - RNA, 19 nt, Homo sapiens
  misc_RNA (1)...(19): siRNA sense strand
gaugaacaugggcaggaua

SEQ ID NO: 651191 - RNA, 19 nt, Homo sapiens
  misc_RNA (1)...(19): siRNA sense strand
aauggacgcugaaggaaag

SEQ ID NO: 651192 - RNA, 19 nt, Homo sapiens
  misc_RNA (1)...(19): siRNA sense strand
aaauggcagucacuuaaag

SEQ ID NO: 651193 - RNA, 19 nt, Homo sapiens
  misc_RNA (1)...(19): siRNA sense strand
gccagauauuugugagaaa

SEQ ID NO: 651194 - RNA, 19 nt, Homo sapiens
  misc_RNA (1)...(19): siRNA sense strand
gagagggccuuaccaaaag

SEQ ID NO: 651195 - RNA, 19 nt, Homo sapiens
  misc_RNA (1)...(19): siRNA sense strand
gaccaaugcacgucaagau

SEQ ID NO: 651196 - RNA, 19 nt, Homo sapiens
  misc_RNA (1)...(19): siRNA sense strand
uaauggacgcugaaggaaa

SEQ ID NO: 651197 - RNA, 19 nt, Homo sapiens
  misc_RNA (1)...(19): siRNA sense strand
agauugacguucgaauuga

SEQ ID NO: 651198 - RNA, 19 nt, Homo sapiens
  misc_RNA (1)...(19): siRNA sense strand
aauggaaggcauaggauuu

SEQ ID NO: 651199 - RNA, 19 nt, Homo sapiens
  misc_RNA (1)...(19): siRNA sense strand
ggaauggaaggcauaggau

SEQ ID NO: 651200 - RNA, 19 nt, Homo sapiens
  misc_RNA (1)...(19): siRNA sense strand
gagccuucauuacaaacau

SEQ ID NO: 651201 - RNA, 19 nt, Homo sapiens
  misc_RNA (1)...(19): siRNA sense strand
gguccgagcagacauucuu

SEQ ID NO: 651202 - RNA, 19 nt, Homo sapiens
  misc_RNA (1)...(19): siRNA sense strand
cugaaggaaguauuuagua

SEQ ID NO: 651203 - RNA, 19 nt, Homo sapiens
  misc_RNA (1)...(19): siRNA sense strand
uaaaguuggcuggaagaaa

SEQ ID NO: 651204 - RNA, 19 nt, Homo sapiens
  misc_RNA (1)...(19): siRNA sense strand
gccaggagagcaaugcaaa

SEQ ID NO: 651205 - RNA, 19 nt, Homo sapiens
  misc_RNA (1)...(19): siRNA sense strand
agagauugacguucgaauu

SEQ ID NO: 651206 - RNA, 19 nt, Homo sapiens
  misc_RNA (1)...(19): siRNA sense strand
ggagagaucauugcaaagc

SEQ ID NO: 651207 - RNA, 19 nt, Homo sapiens
  misc_RNA (1)...(19): siRNA sense strand
ugugcaagcuauaucuaug

SEQ ID NO: 651208 - RNA, 19 nt, Homo sapiens
  misc_RNA (1)...(19): siRNA sense strand
uaaaggacaaauucaacga

SEQ ID NO: 651209 - RNA, 19 nt, Homo sapiens
  misc_RNA (1)...(19): siRNA sense strand
ugccagauauuugugagaa

SEQ ID NO: 651210 - RNA, 19 nt, Homo sapiens
  misc_RNA (1)...(19): siRNA sense strand
aagcuucgcagguuccuuu

SEQ ID NO: 651211 - RNA, 19 nt, Homo sapiens
  misc_RNA (1)...(19): siRNA sense strand
ggauggguccuggcauuga

SEQ ID NO: 651212 - RNA, 19 nt, Homo sapiens
  misc_RNA (1)...(19): siRNA sense strand
ccauaugccaauccaacua

SEQ ID NO: 651213 - RNA, 19 nt, Homo sapiens
  misc_RNA (1)...(19): siRNA sense strand
gcaaaucaguggcggaaag

SEQ ID NO: 651214 - RNA, 19 nt, Homo sapiens
  misc_RNA (1)...(19): siRNA sense strand
gaagaguuugugcgaauga

SEQ ID NO: 651215 - RNA, 19 nt, Homo sapiens
  misc_RNA (1)...(19): siRNA sense strand
gcagagacggcagacauga

SEQ ID NO: 651216 - RNA, 19 nt, Homo sapiens
  misc_RNA (1)...(19): siRNA sense strand
ucgaagaguuugugcgaau

SEQ ID NO: 651217 - RNA, 19 nt, Homo sapiens
  misc_RNA (1)...(19): siRNA sense strand
gggacggucuggucgacuu

SEQ ID NO: 651218 - RNA, 19 nt, Homo sapiens
  misc_RNA (1)...(19): siRNA sense strand
ccaccgagauggagcucau

SEQ ID NO: 651219 - RNA, 19 nt, Homo sapiens
  misc_RNA (1)...(19): siRNA sense strand
cgaagaguuugugcgaaug

SEQ ID NO: 651220 - RNA, 19 nt, Homo sapiens
  misc_RNA (1)...(19): siRNA sense strand
cuacaugcccaccgagaug

SEQ ID NO: 651221 - RNA, 19 nt, Homo sapiens
  misc_RNA (1)...(19): siRNA sense strand
aucgagaucucacagcaaa

SEQ ID NO: 651222 - RNA, 19 nt, Homo sapiens
  misc_RNA (1)...(19): siRNA sense strand
gaucucacagcaaaucagu

SEQ ID NO: 651223 - RNA, 19 nt, Homo sapiens
  misc_RNA (1)...(19): siRNA sense strand
cgagaucucacagcaaauc

SEQ ID NO: 651224 - RNA, 19 nt, Homo sapiens
  misc_RNA (1)...(19): siRNA sense strand
gaguuugugcgaaugaugu

SEQ ID NO: 651225 - RNA, 19 nt, Homo sapiens
  misc_RNA (1)...(19): siRNA sense strand
gcaaaucaguggcggaaag

SEQ ID NO: 651226 - RNA, 19 nt, Homo sapiens
  misc_RNA (1)...(19): siRNA sense strand
gaagaguuugugcgaauga

SEQ ID NO: 651227 - RNA, 19 nt, Homo sapiens
  misc_RNA (1)...(19): siRNA sense strand
gcagagacggcagacauga

SEQ ID NO: 651228 - RNA, 19 nt, Homo sapiens
  misc_RNA (1)...(19): siRNA sense strand
ucgaagaguuugugcgaau

SEQ ID NO: 651229 - RNA, 19 nt, Homo sapiens
  misc_RNA (1)...(19): siRNA sense strand
gggacggucuggucgacuu

SEQ ID NO: 651230 - RNA, 19 nt, Homo sapiens
  misc_RNA (1)...(19): siRNA sense strand
ccaccgagauggagcucau

SEQ ID NO: 651231 - RNA, 19 nt, Homo sapiens
  misc_RNA (1)...(19): siRNA sense strand
cgaagaguuugugcgaaug

SEQ ID NO: 651232 - RNA, 19 nt, Homo sapiens
  misc_RNA (1)...(19): siRNA sense strand
cuacaugcccaccgagaug

SEQ ID NO: 651233 - RNA, 19 nt, Homo sapiens
  misc_RNA (1)...(19): siRNA sense strand
aucgagaucucacagcaaa

SEQ ID NO: 651234 - RNA, 19 nt, Homo sapiens
  misc_RNA (1)...(19): siRNA sense strand
gaucucacagcaaaucagu

SEQ ID NO: 651235 - RNA, 19 nt, Homo sapiens
  misc_RNA (1)...(19): siRNA sense strand
cgagaucucacagcaaauc

SEQ ID NO: 651236 - RNA, 19 nt, Homo sapiens
  misc_RNA (1)...(19): siRNA sense strand
gaguuugugcgaaugaugu

SEQ ID NO: 651237 - RNA, 19 nt, Homo sapiens
  misc_RNA (1)...(19): siRNA sense strand
gaaccuggguggccaugua

SEQ ID NO: 651238 - RNA, 19 nt, Homo sapiens
  misc_RNA (1)...(19): siRNA sense strand
gggcaacugugucaaguau

SEQ ID NO: 651239 - RNA, 19 nt, Homo sapiens
  misc_RNA (1)...(19): siRNA sense strand
cgagaggccuucagagaau

SEQ ID NO: 651240 - RNA, 19 nt, Homo sapiens
  misc_RNA (1)...(19): siRNA sense strand
gcagauaugauugguguaa

SEQ ID NO: 651241 - RNA, 19 nt, Homo sapiens
  misc_RNA (1)...(19): siRNA sense strand
ucaaguauccacugagaaa

SEQ ID NO: 651242 - RNA, 19 nt, Homo sapiens
  misc_RNA (1)...(19): siRNA sense strand
gcagagacagcagauauga

SEQ ID NO: 651243 - RNA, 19 nt, Homo sapiens
  misc_RNA (1)...(19): siRNA sense strand
ucagagaauucgacaagga

SEQ ID NO: 651244 - RNA, 19 nt, Homo sapiens
  misc_RNA (1)...(19): siRNA sense strand
guaaaggaacugcgagaug

SEQ ID NO: 651245 - RNA, 19 nt, Homo sapiens
  misc_RNA (1)...(19): siRNA sense strand
agagacagcagauaugauu

SEQ ID NO: 651246 - RNA, 19 nt, Homo sapiens
  misc_RNA (1)...(19): siRNA sense strand
gaguggacuuugaagaguu

SEQ ID NO: 651247 - RNA, 19 nt, Homo sapiens
  misc_RNA (1)...(19): siRNA sense strand
uaugauugguguaaaggaa

SEQ ID NO: 651248 - RNA, 19 nt, Homo sapiens
  misc_RNA (1)...(19): siRNA sense strand
gaacugucccagcagauca

SEQ ID NO: 651249 - RNA, 19 nt, Homo sapiens
  misc_RNA (1)...(19): siRNA sense strand
gaccagaggaaauugaaga

SEQ ID NO: 651250 - RNA, 19 nt, Homo sapiens
  misc_RNA (1)...(19): siRNA sense strand
agacauagaggaaauuauc

SEQ ID NO: 651251 - RNA, 19 nt, Homo sapiens
  misc_RNA (1)...(19): siRNA sense strand
gagaggccuucagagaauu

SEQ ID NO: 651252 - RNA, 19 nt, Homo sapiens
  misc_RNA (1)...(19): siRNA sense strand
ugucaaguauccacugaga

SEQ ID NO: 651253 - RNA, 19 nt, Homo sapiens
  misc_RNA (1)...(19): siRNA sense strand
gcaacugugucaaguaucc

SEQ ID NO: 651254 - RNA, 19 nt, Homo sapiens
  misc_RNA (1)...(19): siRNA sense strand
cgagacauagaggaaauua

SEQ ID NO: 651255 - RNA, 19 nt, Homo sapiens
  misc_RNA (1)...(19): siRNA sense strand
ggaagcuccugggucauca

SEQ ID NO: 651256 - RNA, 19 nt, Homo sapiens
  misc_RNA (1)...(19): siRNA sense strand
gaagaguuuguccggauga

SEQ ID NO: 651257 - RNA, 19 nt, Homo sapiens
  misc_RNA (1)...(19): siRNA sense strand
cagauaugauugguguaaa

SEQ ID NO: 651258 - RNA, 19 nt, Homo sapiens
  misc_RNA (1)...(19): siRNA sense strand
gagaugcuuuccgagaguu

SEQ ID NO: 651259 - RNA, 19 nt, Homo sapiens
  misc_RNA (1)...(19): siRNA sense strand
cccagcagaucaacaugaa

SEQ ID NO: 651260 - RNA, 19 nt, Homo sapiens
  misc_RNA (1)...(19): siRNA sense strand
gaggaaauuauccgagaug

SEQ ID NO: 651261 - RNA, 19 nt, Homo sapiens
  misc_RNA (1)...(19): siRNA sense strand
ccaccgagauggagcucau

SEQ ID NO: 651262 - RNA, 19 nt, Homo sapiens
  misc_RNA (1)...(19): siRNA sense strand
cgaguggacuuugaagagu

SEQ ID NO: 651263 - RNA, 19 nt, Homo sapiens
  misc_RNA (1)...(19): siRNA sense strand
ggaaauuauccgagaugug

SEQ ID NO: 651264 - RNA, 19 nt, Homo sapiens
  misc_RNA (1)...(19): siRNA sense strand
cgagaugcuuuccgagagu

SEQ ID NO: 651265 - RNA, 19 nt, Homo sapiens
  misc_RNA (1)...(19): siRNA sense strand
ccgagaggccuucagagaa

SEQ ID NO: 651266 - RNA, 19 nt, Homo sapiens
  misc_RNA (1)...(19): siRNA sense strand
uggcagagacagcagauau

SEQ ID NO: 651267 - RNA, 19 nt, Homo sapiens
  misc_RNA (1)...(19): siRNA sense strand
gaguuuguccggaugaugu

SEQ ID NO: 651268 - RNA, 19 nt, Homo sapiens
  misc_RNA (1)...(19): siRNA sense strand
ggauggacgaguggacuuu

SEQ ID NO: 651269 - RNA, 19 nt, Homo sapiens
  misc_RNA (1)...(19): siRNA sense strand
gggaaauaagcaccaguga

SEQ ID NO: 651270 - RNA, 19 nt, Homo sapiens
  misc_RNA (1)...(19): siRNA sense strand
cuacaugcccaccgagaug

SEQ ID NO: 651271 - RNA, 19 nt, Homo sapiens
  misc_RNA (1)...(19): siRNA sense strand
agauaugauugguguaaag

SEQ ID NO: 651272 - RNA, 19 nt, Homo sapiens
  misc_RNA (1)...(19): siRNA sense strand
gcuccgagaggccuucaga

SEQ ID NO: 651273 - RNA, 19 nt, Homo sapiens
  misc_RNA (1)...(19): siRNA sense strand
aguggacuuugaagaguuu

SEQ ID NO: 651274 - RNA, 19 nt, Homo sapiens
  misc_RNA (1)...(19): siRNA sense strand
gagcugcgagaggcuauga

SEQ ID NO: 651275 - RNA, 19 nt, Homo sapiens
  misc_RNA (1)...(19): siRNA sense strand
gagaauucgacaaggacaa

SEQ ID NO: 651276 - RNA, 19 nt, Homo sapiens
  misc_RNA (1)...(19): siRNA sense strand
uccgagaguuugacaccaa

SEQ ID NO: 651277 - RNA, 19 nt, Homo sapiens
  misc_RNA (1)...(19): siRNA sense strand
gcgaccagaggaaauugaa

SEQ ID NO: 651278 - RNA, 19 nt, Homo sapiens
  misc_RNA (1)...(19): siRNA sense strand
gagaggcuaugaggaagcu

SEQ ID NO: 651279 - RNA, 19 nt, Homo sapiens
  misc_RNA (1)...(19): siRNA sense strand
caauggugauggggaaaua

SEQ ID NO: 651280 - RNA, 19 nt, Homo sapiens
  misc_RNA (1)...(19): siRNA sense strand
ugugucaaguauccacuga

SEQ ID NO: 651281 - RNA, 19 nt, Homo sapiens
  misc_RNA (1)...(19): siRNA sense strand
gagauguggaccucaaugg

SEQ ID NO: 651282 - RNA, 19 nt, Homo sapiens
  misc_RNA (1)...(19): siRNA sense strand
gcaacugcaugcgcaccau

SEQ ID NO: 651283 - RNA, 19 nt, Homo sapiens
  misc_RNA (1)...(19): siRNA sense strand
acaccgagacauagaggaa

SEQ ID NO: 651284 - RNA, 19 nt, Homo sapiens
  misc_RNA (1)...(19): siRNA sense strand
gagacagcagauaugauug

SEQ ID NO: 651285 - RNA, 19 nt, Homo sapiens
  misc_RNA (1)...(19): siRNA sense strand
ggaacugcgagaugcuuuc

SEQ ID NO: 651286 - RNA, 19 nt, Homo sapiens
  misc_RNA (1)...(19): siRNA sense strand
ucacugcgaccagaggaaa

SEQ ID NO: 651287 - RNA, 19 nt, Homo sapiens
  misc_RNA (1)...(19): siRNA sense strand
ccuaaacuccuggcagaga

SEQ ID NO: 651288 - RNA, 19 nt, Homo sapiens
  misc_RNA (1)...(19): siRNA sense strand
agaggaaauuauccgagau

SEQ ID NO: 651289 - RNA, 19 nt, Homo sapiens
  misc_RNA (1)...(19): siRNA sense strand
gagacauagaggaaauuau

SEQ ID NO: 651290 - RNA, 19 nt, Homo sapiens
  misc_RNA (1)...(19): siRNA sense strand
gacagcagauaugauuggu

SEQ ID NO: 651291 - RNA, 19 nt, Homo sapiens
  misc_RNA (1)...(19): siRNA sense strand
ggcagagacagcagauaug

SEQ ID NO: 651292 - RNA, 19 nt, Homo sapiens
  misc_RNA (1)...(19): siRNA sense strand
ggacgaguggacuuugaag

SEQ ID NO: 651293 - RNA, 19 nt, Homo sapiens
  misc_RNA (1)...(19): siRNA sense strand
gacgaguggacuuugaaga

SEQ ID NO: 651294 - RNA, 19 nt, Homo sapiens
  misc_RNA (1)...(19): siRNA sense strand
gaaccuggguggccaugua

SEQ ID NO: 651295 - RNA, 19 nt, Homo sapiens
  misc_RNA (1)...(19): siRNA sense strand
gggcaacugugucaaguau

SEQ ID NO: 651296 - RNA, 19 nt, Homo sapiens
  misc_RNA (1)...(19): siRNA sense strand
cgagaggccuucagagaau

SEQ ID NO: 651297 - RNA, 19 nt, Homo sapiens
  misc_RNA (1)...(19): siRNA sense strand
gcagauaugauugguguaa

SEQ ID NO: 651298 - RNA, 19 nt, Homo sapiens
  misc_RNA (1)...(19): siRNA sense strand
ucaaguauccacugagaaa

SEQ ID NO: 651299 - RNA, 19 nt, Homo sapiens
  misc_RNA (1)...(19): siRNA sense strand
gcagagacagcagauauga

SEQ ID NO: 651300 - RNA, 19 nt, Homo sapiens
  misc_RNA (1)...(19): siRNA sense strand
ucagagaauucgacaagga

SEQ ID NO: 651301 - RNA, 19 nt, Homo sapiens
  misc_RNA (1)...(19): siRNA sense strand
guaaaggaacugcgagaug

SEQ ID NO: 651302 - RNA, 19 nt, Homo sapiens
  misc_RNA (1)...(19): siRNA sense strand
agagacagcagauaugauu

SEQ ID NO: 651303 - RNA, 19 nt, Homo sapiens
  misc_RNA (1)...(19): siRNA sense strand
gaguggacuuugaagaguu

SEQ ID NO: 651304 - RNA, 19 nt, Homo sapiens
  misc_RNA (1)...(19): siRNA sense strand
uaugauugguguaaaggaa

SEQ ID NO: 651305 - RNA, 19 nt, Homo sapiens
  misc_RNA (1)...(19): siRNA sense strand
gaacugucccagcagauca

SEQ ID NO: 651306 - RNA, 19 nt, Homo sapiens
  misc_RNA (1)...(19): siRNA sense strand
gaccagaggaaauugaaga

SEQ ID NO: 651307 - RNA, 19 nt, Homo sapiens
  misc_RNA (1)...(19): siRNA sense strand
agacauagaggaaauuauc

SEQ ID NO: 651308 - RNA, 19 nt, Homo sapiens
  misc_RNA (1)...(19): siRNA sense strand
gagaggccuucagagaauu

SEQ ID NO: 651309 - RNA, 19 nt, Homo sapiens
  misc_RNA (1)...(19): siRNA sense strand
ugucaaguauccacugaga

SEQ ID NO: 651310 - RNA, 19 nt, Homo sapiens
  misc_RNA (1)...(19): siRNA sense strand
gcaacugugucaaguaucc

SEQ ID NO: 651311 - RNA, 19 nt, Homo sapiens
  misc_RNA (1)...(19): siRNA sense strand
cgagacauagaggaaauua

SEQ ID NO: 651312 - RNA, 19 nt, Homo sapiens
  misc_RNA (1)...(19): siRNA sense strand
ggaagcuccugggucauca

SEQ ID NO: 651313 - RNA, 19 nt, Homo sapiens
  misc_RNA (1)...(19): siRNA sense strand
gaagaguuuguccggauga

SEQ ID NO: 651314 - RNA, 19 nt, Homo sapiens
  misc_RNA (1)...(19): siRNA sense strand
cagauaugauugguguaaa

SEQ ID NO: 651315 - RNA, 19 nt, Homo sapiens
  misc_RNA (1)...(19): siRNA sense strand
gagaugcuuuccgagaguu

SEQ ID NO: 651316 - RNA, 19 nt, Homo sapiens
  misc_RNA (1)...(19): siRNA sense strand
cccagcagaucaacaugaa

SEQ ID NO: 651317 - RNA, 19 nt, Homo sapiens
  misc_RNA (1)...(19): siRNA sense strand
gaggaaauuauccgagaug

SEQ ID NO: 651318 - RNA, 19 nt, Homo sapiens
  misc_RNA (1)...(19): siRNA sense strand
ccaccgagauggagcucau

SEQ ID NO: 651319 - RNA, 19 nt, Homo sapiens
  misc_RNA (1)...(19): siRNA sense strand
cgaguggacuuugaagagu

SEQ ID NO: 651320 - RNA, 19 nt, Homo sapiens
  misc_RNA (1)...(19): siRNA sense strand
ggaaauuauccgagaugug

SEQ ID NO: 651321 - RNA, 19 nt, Homo sapiens
  misc_RNA (1)...(19): siRNA sense strand
cgagaugcuuuccgagagu

SEQ ID NO: 651322 - RNA, 19 nt, Homo sapiens
  misc_RNA (1)...(19): siRNA sense strand
ccgagaggccuucagagaa

SEQ ID NO: 651323 - RNA, 19 nt, Homo sapiens
  misc_RNA (1)...(19): siRNA sense strand
uggcagagacagcagauau

SEQ ID NO: 651324 - RNA, 19 nt, Homo sapiens
  misc_RNA (1)...(19): siRNA sense strand
gaguuuguccggaugaugu

SEQ ID NO: 651325 - RNA, 19 nt, Homo sapiens
  misc_RNA (1)...(19): siRNA sense strand
ggauggacgaguggacuuu

SEQ ID NO: 651326 - RNA, 19 nt, Homo sapiens
  misc_RNA (1)...(19): siRNA sense strand
gggaaauaagcaccaguga

SEQ ID NO: 651327 - RNA, 19 nt, Homo sapiens
  misc_RNA (1)...(19): siRNA sense strand
cuacaugcccaccgagaug

SEQ ID NO: 651328 - RNA, 19 nt, Homo sapiens
  misc_RNA (1)...(19): siRNA sense strand
agauaugauugguguaaag

SEQ ID NO: 651329 - RNA, 19 nt, Homo sapiens
  misc_RNA (1)...(19): siRNA sense strand
gcuccgagaggccuucaga

SEQ ID NO: 651330 - RNA, 19 nt, Homo sapiens
  misc_RNA (1)...(19): siRNA sense strand
aguggacuuugaagaguuu

SEQ ID NO: 651331 - RNA, 19 nt, Homo sapiens
  misc_RNA (1)...(19): siRNA sense strand
gagcugcgagaggcuauga

SEQ ID NO: 651332 - RNA, 19 nt, Homo sapiens
  misc_RNA (1)...(19): siRNA sense strand
gagaauucgacaaggacaa

SEQ ID NO: 651333 - RNA, 19 nt, Homo sapiens
  misc_RNA (1)...(19): siRNA sense strand
uccgagaguuugacaccaa

SEQ ID NO: 651334 - RNA, 19 nt, Homo sapiens
  misc_RNA (1)...(19): siRNA sense strand
gcgaccagaggaaauugaa

SEQ ID NO: 651335 - RNA, 19 nt, Homo sapiens
  misc_RNA (1)...(19): siRNA sense strand
gagaggcuaugaggaagcu

SEQ ID NO: 651336 - RNA, 19 nt, Homo sapiens
  misc_RNA (1)...(19): siRNA sense strand
caauggugauggggaaaua

SEQ ID NO: 651337 - RNA, 19 nt, Homo sapiens
  misc_RNA (1)...(19): siRNA sense strand
ugugucaaguauccacuga

SEQ ID NO: 651338 - RNA, 19 nt, Homo sapiens
  misc_RNA (1)...(19): siRNA sense strand
gagauguggaccucaaugg

SEQ ID NO: 651339 - RNA, 19 nt, Homo sapiens
  misc_RNA (1)...(19): siRNA sense strand
gcaacugcaugcgcaccau

SEQ ID NO: 651340 - RNA, 19 nt, Homo sapiens
  misc_RNA (1)...(19): siRNA sense strand
acaccgagacauagaggaa

SEQ ID NO: 651341 - RNA, 19 nt, Homo sapiens
  misc_RNA (1)...(19): siRNA sense strand
gagacagcagauaugauug

SEQ ID NO: 651342 - RNA, 19 nt, Homo sapiens
  misc_RNA (1)...(19): siRNA sense strand
ggaacugcgagaugcuuuc

SEQ ID NO: 651343 - RNA, 19 nt, Homo sapiens
  misc_RNA (1)...(19): siRNA sense strand
ucacugcgaccagaggaaa

SEQ ID NO: 651344 - RNA, 19 nt, Homo sapiens
  misc_RNA (1)...(19): siRNA sense strand
ccuaaacuccuggcagaga

SEQ ID NO: 651345 - RNA, 19 nt, Homo sapiens
  misc_RNA (1)...(19): siRNA sense strand
agaggaaauuauccgagau

SEQ ID NO: 651346 - RNA, 19 nt, Homo sapiens
  misc_RNA (1)...(19): siRNA sense strand
gagacauagaggaaauuau

SEQ ID NO: 651347 - RNA, 19 nt, Homo sapiens
  misc_RNA (1)...(19): siRNA sense strand
gacagcagauaugauuggu

SEQ ID NO: 651348 - RNA, 19 nt, Homo sapiens
  misc_RNA (1)...(19): siRNA sense strand
ggcagagacagcagauaug

SEQ ID NO: 651349 - RNA, 19 nt, Homo sapiens
  misc_RNA (1)...(19): siRNA sense strand
ggacgaguggacuuugaag

SEQ ID NO: 651350 - RNA, 19 nt, Homo sapiens
  misc_RNA (1)...(19): siRNA sense strand
gacgaguggacuuugaaga

SEQ ID NO: 651351 - RNA, 19 nt, Homo sapiens
  misc_RNA (1)...(19): siRNA sense strand
gaaccuggguggccaugua

SEQ ID NO: 651352 - RNA, 19 nt, Homo sapiens
  misc_RNA (1)...(19): siRNA sense strand
gggcaacugugucaaguau

SEQ ID NO: 651353 - RNA, 19 nt, Homo sapiens
  misc_RNA (1)...(19): siRNA sense strand
cgagaggccuucagagaau

SEQ ID NO: 651354 - RNA, 19 nt, Homo sapiens
  misc_RNA (1)...(19): siRNA sense strand
gcagauaugauugguguaa

SEQ ID NO: 651355 - RNA, 19 nt, Homo sapiens
  misc_RNA (1)...(19): siRNA sense strand
ucaaguauccacugagaaa

SEQ ID NO: 651356 - RNA, 19 nt, Homo sapiens
  misc_RNA (1)...(19): siRNA sense strand
gcagagacagcagauauga

SEQ ID NO: 651357 - RNA, 19 nt, Homo sapiens
  misc_RNA (1)...(19): siRNA sense strand
ucagagaauucgacaagga

SEQ ID NO: 651358 - RNA, 19 nt, Homo sapiens
  misc_RNA (1)...(19): siRNA sense strand
guaaaggaacugcgagaug

SEQ ID NO: 651359 - RNA, 19 nt, Homo sapiens
  misc_RNA (1)...(19): siRNA sense strand
agagacagcagauaugauu

SEQ ID NO: 651360 - RNA, 19 nt, Homo sapiens
  misc_RNA (1)...(19): siRNA sense strand
gaguggacuuugaagaguu

SEQ ID NO: 651361 - RNA, 19 nt, Homo sapiens
  misc_RNA (1)...(19): siRNA sense strand
uaugauugguguaaaggaa

SEQ ID NO: 651362 - RNA, 19 nt, Homo sapiens
  misc_RNA (1)...(19): siRNA sense strand
gaacugucccagcagauca

SEQ ID NO: 651363 - RNA, 19 nt, Homo sapiens
  misc_RNA (1)...(19): siRNA sense strand
gaccagaggaaauugaaga

SEQ ID NO: 651364 - RNA, 19 nt, Homo sapiens
  misc_RNA (1)...(19): siRNA sense strand
agacauagaggaaauuauc

SEQ ID NO: 651365 - RNA, 19 nt, Homo sapiens
  misc_RNA (1)...(19): siRNA sense strand
gagaggccuucagagaauu

SEQ ID NO: 651366 - RNA, 19 nt, Homo sapiens
  misc_RNA (1)...(19): siRNA sense strand
ugucaaguauccacugaga

SEQ ID NO: 651367 - RNA, 19 nt, Homo sapiens
  misc_RNA (1)...(19): siRNA sense strand
gcaacugugucaaguaucc

SEQ ID NO: 651368 - RNA, 19 nt, Homo sapiens
  misc_RNA (1)...(19): siRNA sense strand
cgagacauagaggaaauua

SEQ ID NO: 651369 - RNA, 19 nt, Homo sapiens
  misc_RNA (1)...(19): siRNA sense strand
ggaagcuccugggucauca

SEQ ID NO: 651370 - RNA, 19 nt, Homo sapiens
  misc_RNA (1)...(19): siRNA sense strand
gaagaguuuguccggauga

SEQ ID NO: 651371 - RNA, 19 nt, Homo sapiens
  misc_RNA (1)...(19): siRNA sense strand
cagauaugauugguguaaa

SEQ ID NO: 651372 - RNA, 19 nt, Homo sapiens
  misc_RNA (1)...(19): siRNA sense strand
gagaugcuuuccgagaguu

SEQ ID NO: 651373 - RNA, 19 nt, Homo sapiens
  misc_RNA (1)...(19): siRNA sense strand
cccagcagaucaacaugaa

SEQ ID NO: 651374 - RNA, 19 nt, Homo sapiens
  misc_RNA (1)...(19): siRNA sense strand
gaggaaauuauccgagaug

SEQ ID NO: 651375 - RNA, 19 nt, Homo sapiens
  misc_RNA (1)...(19): siRNA sense strand
ccaccgagauggagcucau

SEQ ID NO: 651376 - RNA, 19 nt, Homo sapiens
  misc_RNA (1)...(19): siRNA sense strand
cgaguggacuuugaagagu

SEQ ID NO: 651377 - RNA, 19 nt, Homo sapiens
  misc_RNA (1)...(19): siRNA sense strand
ggaaauuauccgagaugug

SEQ ID NO: 651378 - RNA, 19 nt, Homo sapiens
  misc_RNA (1)...(19): siRNA sense strand
cgagaugcuuuccgagagu

SEQ ID NO: 651379 - RNA, 19 nt, Homo sapiens
  misc_RNA (1)...(19): siRNA sense strand
ccgagaggccuucagagaa

SEQ ID NO: 651380 - RNA, 19 nt, Homo sapiens
  misc_RNA (1)...(19): siRNA sense strand
uggcagagacagcagauau

SEQ ID NO: 651381 - RNA, 19 nt, Homo sapiens
  misc_RNA (1)...(19): siRNA sense strand
gaguuuguccggaugaugu

SEQ ID NO: 651382 - RNA, 19 nt, Homo sapiens
  misc_RNA (1)...(19): siRNA sense strand
ggauggacgaguggacuuu

SEQ ID NO: 651383 - RNA, 19 nt, Homo sapiens
  misc_RNA (1)...(19): siRNA sense strand
gggaaauaagcaccaguga

SEQ ID NO: 651384 - RNA, 19 nt, Homo sapiens
  misc_RNA (1)...(19): siRNA sense strand
cuacaugcccaccgagaug

SEQ ID NO: 651385 - RNA, 19 nt, Homo sapiens
  misc_RNA (1)...(19): siRNA sense strand
agauaugauugguguaaag

SEQ ID NO: 651386 - RNA, 19 nt, Homo sapiens
  misc_RNA (1)...(19): siRNA sense strand
gcuccgagaggccuucaga

SEQ ID NO: 651387 - RNA, 19 nt, Homo sapiens
  misc_RNA (1)...(19): siRNA sense strand
aguggacuuugaagaguuu

SEQ ID NO: 651388 - RNA, 19 nt, Homo sapiens
  misc_RNA (1)...(19): siRNA sense strand
gagcugcgagaggcuauga

SEQ ID NO: 651389 - RNA, 19 nt, Homo sapiens
  misc_RNA (1)...(19): siRNA sense strand
gagaauucgacaaggacaa

SEQ ID NO: 651390 - RNA, 19 nt, Homo sapiens
  misc_RNA (1)...(19): siRNA sense strand
uccgagaguuugacaccaa

SEQ ID NO: 651391 - RNA, 19 nt, Homo sapiens
  misc_RNA (1)...(19): siRNA sense strand
gcgaccagaggaaauugaa

SEQ ID NO: 651392 - RNA, 19 nt, Homo sapiens
  misc_RNA (1)...(19): siRNA sense strand
gagaggcuaugaggaagcu

SEQ ID NO: 651393 - RNA, 19 nt, Homo sapiens
  misc_RNA (1)...(19): siRNA sense strand
caauggugauggggaaaua

SEQ ID NO: 651394 - RNA, 19 nt, Homo sapiens
  misc_RNA (1)...(19): siRNA sense strand
ugugucaaguauccacuga

SEQ ID NO: 651395 - RNA, 19 nt, Homo sapiens
  misc_RNA (1)...(19): siRNA sense strand
gagauguggaccucaaugg

SEQ ID NO: 651396 - RNA, 19 nt, Homo sapiens
  misc_RNA (1)...(19): siRNA sense strand
gcaacugcaugcgcaccau

SEQ ID NO: 651397 - RNA, 19 nt, Homo sapiens
  misc_RNA (1)...(19): siRNA sense strand
acaccgagacauagaggaa

SEQ ID NO: 651398 - RNA, 19 nt, Homo sapiens
  misc_RNA (1)...(19): siRNA sense strand
gagacagcagauaugauug

SEQ ID NO: 651399 - RNA, 19 nt, Homo sapiens
  misc_RNA (1)...(19): siRNA sense strand
ggaacugcgagaugcuuuc

SEQ ID NO: 651400 - RNA, 19 nt, Homo sapiens
  misc_RNA (1)...(19): siRNA sense strand
ucacugcgaccagaggaaa

SEQ ID NO: 651401 - RNA, 19 nt, Homo sapiens
  misc_RNA (1)...(19): siRNA sense strand
ccuaaacuccuggcagaga

SEQ ID NO: 651402 - RNA, 19 nt, Homo sapiens
  misc_RNA (1)...(19): siRNA sense strand
agaggaaauuauccgagau

SEQ ID NO: 651403 - RNA, 19 nt, Homo sapiens
  misc_RNA (1)...(19): siRNA sense strand
gagacauagaggaaauuau

SEQ ID NO: 651404 - RNA, 19 nt, Homo sapiens
  misc_RNA (1)...(19): siRNA sense strand
gacagcagauaugauuggu

SEQ ID NO: 651405 - RNA, 19 nt, Homo sapiens
  misc_RNA (1)...(19): siRNA sense strand
ggcagagacagcagauaug

SEQ ID NO: 651406 - RNA, 19 nt, Homo sapiens
  misc_RNA (1)...(19): siRNA sense strand
ggacgaguggacuuugaag

SEQ ID NO: 651407 - RNA, 19 nt, Homo sapiens
  misc_RNA (1)...(19): siRNA sense strand
gacgaguggacuuugaaga

SEQ ID NO: 651408 - RNA, 19 nt, Homo sapiens
  misc_RNA (1)...(19): siRNA sense strand
gaaccuggguggccaugua

SEQ ID NO: 651409 - RNA, 19 nt, Homo sapiens
  misc_RNA (1)...(19): siRNA sense strand
gggcaacugugucaaguau

SEQ ID NO: 651410 - RNA, 19 nt, Homo sapiens
  misc_RNA (1)...(19): siRNA sense strand
cgagaggccuucagagaau

SEQ ID NO: 651411 - RNA, 19 nt, Homo sapiens
  misc_RNA (1)...(19): siRNA sense strand
gcagauaugauugguguaa

SEQ ID NO: 651412 - RNA, 19 nt, Homo sapiens
  misc_RNA (1)...(19): siRNA sense strand
ucaaguauccacugagaaa

SEQ ID NO: 651413 - RNA, 19 nt, Homo sapiens
  misc_RNA (1)...(19): siRNA sense strand
gcagagacagcagauauga

SEQ ID NO: 651414 - RNA, 19 nt, Homo sapiens
  misc_RNA (1)...(19): siRNA sense strand
ucagagaauucgacaagga

SEQ ID NO: 651415 - RNA, 19 nt, Homo sapiens
  misc_RNA (1)...(19): siRNA sense strand
guaaaggaacugcgagaug

SEQ ID NO: 651416 - RNA, 19 nt, Homo sapiens
  misc_RNA (1)...(19): siRNA sense strand
agagacagcagauaugauu

SEQ ID NO: 651417 - RNA, 19 nt, Homo sapiens
  misc_RNA (1)...(19): siRNA sense strand
gaguggacuuugaagaguu

SEQ ID NO: 651418 - RNA, 19 nt, Homo sapiens
  misc_RNA (1)...(19): siRNA sense strand
uaugauugguguaaaggaa

SEQ ID NO: 651419 - RNA, 19 nt, Homo sapiens
  misc_RNA (1)...(19): siRNA sense strand
gaacugucccagcagauca

SEQ ID NO: 651420 - RNA, 19 nt, Homo sapiens
  misc_RNA (1)...(19): siRNA sense strand
gaccagaggaaauugaaga

SEQ ID NO: 651421 - RNA, 19 nt, Homo sapiens
  misc_RNA (1)...(19): siRNA sense strand
agacauagaggaaauuauc

SEQ ID NO: 651422 - RNA, 19 nt, Homo sapiens
  misc_RNA (1)...(19): siRNA sense strand
gagaggccuucagagaauu

SEQ ID NO: 651423 - RNA, 19 nt, Homo sapiens
  misc_RNA (1)...(19): siRNA sense strand
ugucaaguauccacugaga

SEQ ID NO: 651424 - RNA, 19 nt, Homo sapiens
  misc_RNA (1)...(19): siRNA sense strand
gcaacugugucaaguaucc

SEQ ID NO: 651425 - RNA, 19 nt, Homo sapiens
  misc_RNA (1)...(19): siRNA sense strand
cgagacauagaggaaauua

SEQ ID NO: 651426 - RNA, 19 nt, Homo sapiens
  misc_RNA (1)...(19): siRNA sense strand
ggaagcuccugggucauca

SEQ ID NO: 651427 - RNA, 19 nt, Homo sapiens
  misc_RNA (1)...(19): siRNA sense strand
gaagaguuuguccggauga

SEQ ID NO: 651428 - RNA, 19 nt, Homo sapiens
  misc_RNA (1)...(19): siRNA sense strand
cagauaugauugguguaaa

SEQ ID NO: 651429 - RNA, 19 nt, Homo sapiens
  misc_RNA (1)...(19): siRNA sense strand
gagaugcuuuccgagaguu

SEQ ID NO: 651430 - RNA, 19 nt, Homo sapiens
  misc_RNA (1)...(19): siRNA sense strand
cccagcagaucaacaugaa

SEQ ID NO: 651431 - RNA, 19 nt, Homo sapiens
  misc_RNA (1)...(19): siRNA sense strand
gaggaaauuauccgagaug

SEQ ID NO: 651432 - RNA, 19 nt, Homo sapiens
  misc_RNA (1)...(19): siRNA sense strand
ccaccgagauggagcucau

SEQ ID NO: 651433 - RNA, 19 nt, Homo sapiens
  misc_RNA (1)...(19): siRNA sense strand
cgaguggacuuugaagagu

SEQ ID NO: 651434 - RNA, 19 nt, Homo sapiens
  misc_RNA (1)...(19): siRNA sense strand
ggaaauuauccgagaugug

SEQ ID NO: 651435 - RNA, 19 nt, Homo sapiens
  misc_RNA (1)...(19): siRNA sense strand
cgagaugcuuuccgagagu

SEQ ID NO: 651436 - RNA, 19 nt, Homo sapiens
  misc_RNA (1)...(19): siRNA sense strand
ccgagaggccuucagagaa

SEQ ID NO: 651437 - RNA, 19 nt, Homo sapiens
  misc_RNA (1)...(19): siRNA sense strand
uggcagagacagcagauau

SEQ ID NO: 651438 - RNA, 19 nt, Homo sapiens
  misc_RNA (1)...(19): siRNA sense strand
gaguuuguccggaugaugu

SEQ ID NO: 651439 - RNA, 19 nt, Homo sapiens
  misc_RNA (1)...(19): siRNA sense strand
ggauggacgaguggacuuu

SEQ ID NO: 651440 - RNA, 19 nt, Homo sapiens
  misc_RNA (1)...(19): siRNA sense strand
gggaaauaagcaccaguga

SEQ ID NO: 651441 - RNA, 19 nt, Homo sapiens
  misc_RNA (1)...(19): siRNA sense strand
cuacaugcccaccgagaug

SEQ ID NO: 651442 - RNA, 19 nt, Homo sapiens
  misc_RNA (1)...(19): siRNA sense strand
agauaugauugguguaaag

SEQ ID NO: 651443 - RNA, 19 nt, Homo sapiens
  misc_RNA (1)...(19): siRNA sense strand
gcuccgagaggccuucaga

SEQ ID NO: 651444 - RNA, 19 nt, Homo sapiens
  misc_RNA (1)...(19): siRNA sense strand
aguggacuuugaagaguuu

SEQ ID NO: 651445 - RNA, 19 nt, Homo sapiens
  misc_RNA (1)...(19): siRNA sense strand
gagcugcgagaggcuauga

SEQ ID NO: 651446 - RNA, 19 nt, Homo sapiens
  misc_RNA (1)...(19): siRNA sense strand
gagaauucgacaaggacaa

SEQ ID NO: 651447 - RNA, 19 nt, Homo sapiens
  misc_RNA (1)...(19): siRNA sense strand
uccgagaguuugacaccaa

SEQ ID NO: 651448 - RNA, 19 nt, Homo sapiens
  misc_RNA (1)...(19): siRNA sense strand
gcgaccagaggaaauugaa

SEQ ID NO: 651449 - RNA, 19 nt, Homo sapiens
  misc_RNA (1)...(19): siRNA sense strand
gagaggcuaugaggaagcu

SEQ ID NO: 651450 - RNA, 19 nt, Homo sapiens
  misc_RNA (1)...(19): siRNA sense strand
caauggugauggggaaaua

SEQ ID NO: 651451 - RNA, 19 nt, Homo sapiens
  misc_RNA (1)...(19): siRNA sense strand
ugugucaaguauccacuga

SEQ ID NO: 651452 - RNA, 19 nt, Homo sapiens
  misc_RNA (1)...(19): siRNA sense strand
gagauguggaccucaaugg

SEQ ID NO: 651453 - RNA, 19 nt, Homo sapiens
  misc_RNA (1)...(19): siRNA sense strand
gcaacugcaugcgcaccau

SEQ ID NO: 651454 - RNA, 19 nt, Homo sapiens
  misc_RNA (1)...(19): siRNA sense strand
acaccgagacauagaggaa

SEQ ID NO: 651455 - RNA, 19 nt, Homo sapiens
  misc_RNA (1)...(19): siRNA sense strand
gagacagcagauaugauug

SEQ ID NO: 651456 - RNA, 19 nt, Homo sapiens
  misc_RNA (1)...(19): siRNA sense strand
ggaacugcgagaugcuuuc

SEQ ID NO: 651457 - RNA, 19 nt, Homo sapiens
  misc_RNA (1)...(19): siRNA sense strand
ucacugcgaccagaggaaa

SEQ ID NO: 651458 - RNA, 19 nt, Homo sapiens
  misc_RNA (1)...(19): siRNA sense strand
ccuaaacuccuggcagaga

SEQ ID NO: 651459 - RNA, 19 nt, Homo sapiens
  misc_RNA (1)...(19): siRNA sense strand
agaggaaauuauccgagau

SEQ ID NO: 651460 - RNA, 19 nt, Homo sapiens
  misc_RNA (1)...(19): siRNA sense strand
gagacauagaggaaauuau

SEQ ID NO: 651461 - RNA, 19 nt, Homo sapiens
  misc_RNA (1)...(19): siRNA sense strand
gacagcagauaugauuggu

SEQ ID NO: 651462 - RNA, 19 nt, Homo sapiens
  misc_RNA (1)...(19): siRNA sense strand
ggcagagacagcagauaug

SEQ ID NO: 651463 - RNA, 19 nt, Homo sapiens
  misc_RNA (1)...(19): siRNA sense strand
ggacgaguggacuuugaag

SEQ ID NO: 651464 - RNA, 19 nt, Homo sapiens
  misc_RNA (1)...(19): siRNA sense strand
gacgaguggacuuugaaga

SEQ ID NO: 651465 - RNA, 19 nt, Homo sapiens
  misc_RNA (1)...(19): siRNA sense strand
ccaaugagacagagaagaa

SEQ ID NO: 651466 - RNA, 19 nt, Homo sapiens
  misc_RNA (1)...(19): siRNA sense strand
gcacugccaaugagacaga

SEQ ID NO: 651467 - RNA, 19 nt, Homo sapiens
  misc_RNA (1)...(19): siRNA sense strand
agacagagaagaaaucauc

SEQ ID NO: 651468 - RNA, 19 nt, Homo sapiens
  misc_RNA (1)...(19): siRNA sense strand
aggagcacaucuucacuga

SEQ ID NO: 651469 - RNA, 19 nt, Homo sapiens
  misc_RNA (1)...(19): siRNA sense strand
gaaguggaagcgugugaag

SEQ ID NO: 651470 - RNA, 19 nt, Homo sapiens
  misc_RNA (1)...(19): siRNA sense strand
ccacagccucuccaaguuc

SEQ ID NO: 651471 - RNA, 19 nt, Homo sapiens
  misc_RNA (1)...(19): siRNA sense strand
caaugagacagagaagaaa

SEQ ID NO: 651472 - RNA, 19 nt, Homo sapiens
  misc_RNA (1)...(19): siRNA sense strand
uuccagaaccgaaggauga

SEQ ID NO: 651473 - RNA, 19 nt, Homo sapiens
  misc_RNA (1)...(19): siRNA sense strand
gagcacugccaaugagaca

SEQ ID NO: 651474 - RNA, 19 nt, Homo sapiens
  misc_RNA (1)...(19): siRNA sense strand
cacagccucuccaaguuca

SEQ ID NO: 651475 - RNA, 19 nt, Homo sapiens
  misc_RNA (1)...(19): siRNA sense strand
accgaaggaugaaguggaa

SEQ ID NO: 651476 - RNA, 19 nt, Homo sapiens
  misc_RNA (1)...(19): siRNA sense strand
uccacagccucuccaaguu

SEQ ID NO: 651477 - RNA, 19 nt, Homo sapiens
  misc_RNA (1)...(19): siRNA sense strand
ccaggaggagcacaucuuc

SEQ ID NO: 651478 - RNA, 19 nt, Homo sapiens
  misc_RNA (1)...(19): siRNA sense strand
ucaaagugugguuccagaa

SEQ ID NO: 651479 - RNA, 19 nt, Homo sapiens
  misc_RNA (1)...(19): siRNA sense strand
cagcguacccugacuucuc

SEQ ID NO: 651480 - RNA, 19 nt, Homo sapiens
  misc_RNA (1)...(19): siRNA sense strand
ccucagggcuaccccacua

SEQ ID NO: 651481 - RNA, 19 nt, Homo sapiens
  misc_RNA (1)...(19): siRNA sense strand
ccaaugagacagagaagaa

SEQ ID NO: 651482 - RNA, 19 nt, Homo sapiens
  misc_RNA (1)...(19): siRNA sense strand
gcacugccaaugagacaga

SEQ ID NO: 651483 - RNA, 19 nt, Homo sapiens
  misc_RNA (1)...(19): siRNA sense strand
agacagagaagaaaucauc

SEQ ID NO: 651484 - RNA, 19 nt, Homo sapiens
  misc_RNA (1)...(19): siRNA sense strand
aggagcacaucuucacuga

SEQ ID NO: 651485 - RNA, 19 nt, Homo sapiens
  misc_RNA (1)...(19): siRNA sense strand
gaaguggaagcgugugaag

SEQ ID NO: 651486 - RNA, 19 nt, Homo sapiens
  misc_RNA (1)...(19): siRNA sense strand
caaugagacagagaagaaa

SEQ ID NO: 651487 - RNA, 19 nt, Homo sapiens
  misc_RNA (1)...(19): siRNA sense strand
uuccagaaccgaaggauga

SEQ ID NO: 651488 - RNA, 19 nt, Homo sapiens
  misc_RNA (1)...(19): siRNA sense strand
gagcacugccaaugagaca

SEQ ID NO: 651489 - RNA, 19 nt, Homo sapiens
  misc_RNA (1)...(19): siRNA sense strand
accgaaggaugaaguggaa

SEQ ID NO: 651490 - RNA, 19 nt, Homo sapiens
  misc_RNA (1)...(19): siRNA sense strand
ccaggaggagcacaucuuc

SEQ ID NO: 651491 - RNA, 19 nt, Homo sapiens
  misc_RNA (1)...(19): siRNA sense strand
ucaaagugugguuccagaa

SEQ ID NO: 651492 - RNA, 19 nt, Homo sapiens
  misc_RNA (1)...(19): siRNA sense strand
cagcguacccugacuucuc

SEQ ID NO: 651493 - RNA, 19 nt, Homo sapiens
  misc_RNA (1)...(19): siRNA sense strand
ccucagggcuaccccacua

SEQ ID NO: 651494 - RNA, 19 nt, Homo sapiens
  misc_RNA (1)...(19): siRNA sense strand
gcagaaagcucagcaggua

SEQ ID NO: 651495 - RNA, 19 nt, Homo sapiens
  misc_RNA (1)...(19): siRNA sense strand
ggaaauaucugcucugacu

SEQ ID NO: 651496 - RNA, 19 nt, Homo sapiens
  misc_RNA (1)...(19): siRNA sense strand
ugagauaauucguguguua

SEQ ID NO: 651497 - RNA, 19 nt, Homo sapiens
  misc_RNA (1)...(19): siRNA sense strand
gcagaugacugaucaagug

SEQ ID NO: 651498 - RNA, 19 nt, Homo sapiens
  misc_RNA (1)...(19): siRNA sense strand
gggaagagguauuugauga

SEQ ID NO: 651499 - RNA, 19 nt, Homo sapiens
  misc_RNA (1)...(19): siRNA sense strand
ccagacagcuccaugauga

SEQ ID NO: 651500 - RNA, 19 nt, Homo sapiens
  misc_RNA (1)...(19): siRNA sense strand
gcucguaucuuacuuagga

SEQ ID NO: 651501 - RNA, 19 nt, Homo sapiens
  misc_RNA (1)...(19): siRNA sense strand
caaagcagcuguacaccuu

SEQ ID NO: 651502 - RNA, 19 nt, Homo sapiens
  misc_RNA (1)...(19): siRNA sense strand
gagcgaaucccaaccauaa

SEQ ID NO: 651503 - RNA, 19 nt, Homo sapiens
  misc_RNA (1)...(19): siRNA sense strand
gauuagaaccaaccucuua

SEQ ID NO: 651504 - RNA, 19 nt, Homo sapiens
  misc_RNA (1)...(19): siRNA sense strand
gaagagguauuugaugaga

SEQ ID NO: 651505 - RNA, 19 nt, Homo sapiens
  misc_RNA (1)...(19): siRNA sense strand
ccacagagaugcugguuca

SEQ ID NO: 651506 - RNA, 19 nt, Homo sapiens
  misc_RNA (1)...(19): siRNA sense strand
uggaagauuuggucacuua

SEQ ID NO: 651507 - RNA, 19 nt, Homo sapiens
  misc_RNA (1)...(19): siRNA sense strand
uaucugcucugacuucuaa

SEQ ID NO: 651508 - RNA, 19 nt, Homo sapiens
  misc_RNA (1)...(19): siRNA sense strand
ugacuaagauggccaagau

SEQ ID NO: 651509 - RNA, 19 nt, Homo sapiens
  misc_RNA (1)...(19): siRNA sense strand
gccaagcagugcacagaua

SEQ ID NO: 651510 - RNA, 19 nt, Homo sapiens
  misc_RNA (1)...(19): siRNA sense strand
ucgaacagaugcuggauuu

SEQ ID NO: 651511 - RNA, 19 nt, Homo sapiens
  misc_RNA (1)...(19): siRNA sense strand
gagggcagcuaacuuugaa

SEQ ID NO: 651512 - RNA, 19 nt, Homo sapiens
  misc_RNA (1)...(19): siRNA sense strand
uaaauuagcagaucuacga

SEQ ID NO: 651513 - RNA, 19 nt, Homo sapiens
  misc_RNA (1)...(19): siRNA sense strand
gaacaacuccgacuaacag

SEQ ID NO: 651514 - RNA, 19 nt, Homo sapiens
  misc_RNA (1)...(19): siRNA sense strand
ggaaaaggaugaagaguuc

SEQ ID NO: 651515 - RNA, 19 nt, Homo sapiens
  misc_RNA (1)...(19): siRNA sense strand
ccaaggagguugccaagca

SEQ ID NO: 651516 - RNA, 19 nt, Homo sapiens
  misc_RNA (1)...(19): siRNA sense strand
caagaugauugacgagaga

SEQ ID NO: 651517 - RNA, 19 nt, Homo sapiens
  misc_RNA (1)...(19): siRNA sense strand
gaaagcugccucugaugaa

SEQ ID NO: 651518 - RNA, 19 nt, Homo sapiens
  misc_RNA (1)...(19): siRNA sense strand
gcgcauggcucugcugaug

SEQ ID NO: 651519 - RNA, 19 nt, Homo sapiens
  misc_RNA (1)...(19): siRNA sense strand
ugaugaagcucgcaaaugg

SEQ ID NO: 651520 - RNA, 19 nt, Homo sapiens
  misc_RNA (1)...(19): siRNA sense strand
uaacagggaagagguauuu

SEQ ID NO: 651521 - RNA, 19 nt, Homo sapiens
  misc_RNA (1)...(19): siRNA sense strand
agagggagguggagaauuc

SEQ ID NO: 651522 - RNA, 19 nt, Homo sapiens
  misc_RNA (1)...(19): siRNA sense strand
gaacagaugcuggauuuac

SEQ ID NO: 651523 - RNA, 19 nt, Homo sapiens
  misc_RNA (1)...(19): siRNA sense strand
caucagaccugcuccuuac

SEQ ID NO: 651524 - RNA, 19 nt, Homo sapiens
  misc_RNA (1)...(19): siRNA sense strand
gcauagaggaagcuuuaaa

SEQ ID NO: 651525 - RNA, 19 nt, Homo sapiens
  misc_RNA (1)...(19): siRNA sense strand
ugagagggcagcuaacuuu

SEQ ID NO: 651526 - RNA, 19 nt, Homo sapiens
  misc_RNA (1)...(19): siRNA sense strand
ggaaggagaagagcagauu

SEQ ID NO: 651527 - RNA, 19 nt, Homo sapiens
  misc_RNA (1)...(19): siRNA sense strand
acacugcgcuggguuagaa

SEQ ID NO: 651528 - RNA, 19 nt, Homo sapiens
  misc_RNA (1)...(19): siRNA sense strand
cagcauuuauuaagguuga

SEQ ID NO: 651529 - RNA, 19 nt, Homo sapiens
  misc_RNA (1)...(19): siRNA sense strand
uuagaaagacucccuggua

SEQ ID NO: 651530 - RNA, 19 nt, Homo sapiens
  misc_RNA (1)...(19): siRNA sense strand
gugcacagauaaacggauu

SEQ ID NO: 651531 - RNA, 19 nt, Homo sapiens
  misc_RNA (1)...(19): siRNA sense strand
gcagagcauugcaaagaag

SEQ ID NO: 651532 - RNA, 19 nt, Homo sapiens
  misc_RNA (1)...(19): siRNA sense strand
gauaauucguguguuacaa

SEQ ID NO: 651533 - RNA, 19 nt, Homo sapiens
  misc_RNA (1)...(19): siRNA sense strand
gugcugaaauuaaugagau

SEQ ID NO: 651534 - RNA, 19 nt, Homo sapiens
  misc_RNA (1)...(19): siRNA sense strand
gugauuaaccagccaauga

SEQ ID NO: 651535 - RNA, 19 nt, Homo sapiens
  misc_RNA (1)...(19): siRNA sense strand
uggagacuauggaagauuu

SEQ ID NO: 651536 - RNA, 19 nt, Homo sapiens
  misc_RNA (1)...(19): siRNA sense strand
acagauaaacggauuagaa

SEQ ID NO: 651537 - RNA, 19 nt, Homo sapiens
  misc_RNA (1)...(19): siRNA sense strand
caaagcagagcauugcaaa

SEQ ID NO: 651538 - RNA, 19 nt, Homo sapiens
  misc_RNA (1)...(19): siRNA sense strand
uauuagaguuugcaaagga

SEQ ID NO: 651539 - RNA, 19 nt, Homo sapiens
  misc_RNA (1)...(19): siRNA sense strand
gaucgaugcugcucagaac

SEQ ID NO: 651540 - RNA, 19 nt, Homo sapiens
  misc_RNA (1)...(19): siRNA sense strand
gcugagguccguaaaauua

SEQ ID NO: 651541 - RNA, 19 nt, Homo sapiens
  misc_RNA (1)...(19): siRNA sense strand
cagagaugcugguucacaa

SEQ ID NO: 651542 - RNA, 19 nt, Homo sapiens
  misc_RNA (1)...(19): siRNA sense strand
caggaagugucagauguuu

SEQ ID NO: 651543 - RNA, 19 nt, Homo sapiens
  misc_RNA (1)...(19): siRNA sense strand
ggccaggaaugacuaagau

SEQ ID NO: 651544 - RNA, 19 nt, Homo sapiens
  misc_RNA (1)...(19): siRNA sense strand
guggaucgauaauguugaa

SEQ ID NO: 651545 - RNA, 19 nt, Homo sapiens
  misc_RNA (1)...(19): siRNA sense strand
caacucccaucaagcuguu

SEQ ID NO: 651546 - RNA, 19 nt, Homo sapiens
  misc_RNA (1)...(19): siRNA sense strand
gagcaggccaucagacaga

SEQ ID NO: 651547 - RNA, 19 nt, Homo sapiens
  misc_RNA (1)...(19): siRNA sense strand
gaacaccgugaaagaguug

SEQ ID NO: 651548 - RNA, 19 nt, Homo sapiens
  misc_RNA (1)...(19): siRNA sense strand
cauccucucuggaacauca

SEQ ID NO: 651549 - RNA, 19 nt, Homo sapiens
  misc_RNA (1)...(19): siRNA sense strand
gaaaagagacuguucaaac

SEQ ID NO: 651550 - RNA, 19 nt, Homo sapiens
  misc_RNA (1)...(19): siRNA sense strand
caccagaccuugaacaacu

SEQ ID NO: 651551 - RNA, 19 nt, Homo sapiens
  misc_RNA (1)...(19): siRNA sense strand
ugaaagcugccucugauga

SEQ ID NO: 651552 - RNA, 19 nt, Homo sapiens
  misc_RNA (1)...(19): siRNA sense strand
uaggaacccuggaaaucaa

SEQ ID NO: 651553 - RNA, 19 nt, Homo sapiens
  misc_RNA (1)...(19): siRNA sense strand
gguugguacugcuaauaaa

SEQ ID NO: 651554 - RNA, 19 nt, Homo sapiens
  misc_RNA (1)...(19): siRNA sense strand
caucgucuggcuaauguua

SEQ ID NO: 651555 - RNA, 19 nt, Homo sapiens
  misc_RNA (1)...(19): siRNA sense strand
gcaaagaacgcagggagau

SEQ ID NO: 651556 - RNA, 19 nt, Homo sapiens
  misc_RNA (1)...(19): siRNA sense strand
uaagauggccaagaugauu

SEQ ID NO: 651557 - RNA, 19 nt, Homo sapiens
  misc_RNA (1)...(19): siRNA sense strand
aggcauagaggaagcuuua

SEQ ID NO: 651558 - RNA, 19 nt, Homo sapiens
  misc_RNA (1)...(19): siRNA sense strand
aagaaccaguggaucgaua

SEQ ID NO: 651559 - RNA, 19 nt, Homo sapiens
  misc_RNA (1)...(19): siRNA sense strand
gaacuggcuugcagaucca

SEQ ID NO: 651560 - RNA, 19 nt, Homo sapiens
  misc_RNA (1)...(19): siRNA sense strand
gagcauuggccuccauaga

SEQ ID NO: 651561 - RNA, 19 nt, Homo sapiens
  misc_RNA (1)...(19): siRNA sense strand
gcugauggcugagaugucu

SEQ ID NO: 651562 - RNA, 19 nt, Homo sapiens
  misc_RNA (1)...(19): siRNA sense strand
caacuccgacuaacagaug

SEQ ID NO: 651563 - RNA, 19 nt, Homo sapiens
  misc_RNA (1)...(19): siRNA sense strand
ugugaaagcugccucugau

SEQ ID NO: 651564 - RNA, 19 nt, Homo sapiens
  misc_RNA (1)...(19): siRNA sense strand
ggcaucgucuggcuaaugu

SEQ ID NO: 651565 - RNA, 19 nt, Homo sapiens
  misc_RNA (1)...(19): siRNA sense strand
gcagaauuaugugaugauc

SEQ ID NO: 651566 - RNA, 19 nt, Homo sapiens
  misc_RNA (1)...(19): siRNA sense strand
cagaggugguggagacuau

SEQ ID NO: 651567 - RNA, 19 nt, Homo sapiens
  misc_RNA (1)...(19): siRNA sense strand
ccaagcagugcacagauaa

SEQ ID NO: 651568 - RNA, 19 nt, Homo sapiens
  misc_RNA (1)...(19): siRNA sense strand
caaaagcuguggcuggaaa

SEQ ID NO: 651569 - RNA, 19 nt, Homo sapiens
  misc_RNA (1)...(19): siRNA sense strand
ggauccugcugguggcuaa

SEQ ID NO: 651570 - RNA, 19 nt, Homo sapiens
  misc_RNA (1)...(19): siRNA sense strand
cacgagcacuugcaucuca

SEQ ID NO: 651571 - RNA, 19 nt, Homo sapiens
  misc_RNA (1)...(19): siRNA sense strand
ugcucugacuucuaaauua

SEQ ID NO: 651572 - RNA, 19 nt, Homo sapiens
  misc_RNA (1)...(19): siRNA sense strand
uccauagacuccaaacuga

SEQ ID NO: 651573 - RNA, 19 nt, Homo sapiens
  misc_RNA (1)...(19): siRNA sense strand
ugaacaccgugaaagaguu

SEQ ID NO: 651574 - RNA, 19 nt, Homo sapiens
  misc_RNA (1)...(19): siRNA sense strand
caaaccaccucugccugaa

SEQ ID NO: 651575 - RNA, 19 nt, Homo sapiens
  misc_RNA (1)...(19): siRNA sense strand
ggccaugacucaggaagug

SEQ ID NO: 651576 - RNA, 19 nt, Homo sapiens
  misc_RNA (1)...(19): siRNA sense strand
gggagauucugggaacuug

SEQ ID NO: 651577 - RNA, 19 nt, Homo sapiens
  misc_RNA (1)...(19): siRNA sense strand
gcauuggccuccauagacu

SEQ ID NO: 651578 - RNA, 19 nt, Homo sapiens
  misc_RNA (1)...(19): siRNA sense strand
uguuacaacucaccucuug

SEQ ID NO: 651579 - RNA, 19 nt, Homo sapiens
  misc_RNA (1)...(19): siRNA sense strand
uagcagaauuaugugauga

SEQ ID NO: 651580 - RNA, 19 nt, Homo sapiens
  misc_RNA (1)...(19): siRNA sense strand
gauaaacggauuagaacca

SEQ ID NO: 651581 - RNA, 19 nt, Homo sapiens
  misc_RNA (1)...(19): siRNA sense strand
ccaggcagcucagaugcuu

SEQ ID NO: 651582 - RNA, 19 nt, Homo sapiens
  misc_RNA (1)...(19): siRNA sense strand
cgaagccauugauaccaaa

SEQ ID NO: 651583 - RNA, 19 nt, Homo sapiens
  misc_RNA (1)...(19): siRNA sense strand
ugaacucugugcaggcaaa

SEQ ID NO: 651584 - RNA, 19 nt, Homo sapiens
  misc_RNA (1)...(19): siRNA sense strand
ggucucggcugcucguauc

SEQ ID NO: 651585 - RNA, 19 nt, Homo sapiens
  misc_RNA (1)...(19): siRNA sense strand
gugaugauccuaaagaaag

SEQ ID NO: 651586 - RNA, 19 nt, Homo sapiens
  misc_RNA (1)...(19): siRNA sense strand
uagggcagaugacugauca

SEQ ID NO: 651587 - RNA, 19 nt, Homo sapiens
  misc_RNA (1)...(19): siRNA sense strand
gaaagacucccugguacca

SEQ ID NO: 651588 - RNA, 19 nt, Homo sapiens
  misc_RNA (1)...(19): siRNA sense strand
cauaagcacccagcucaaa

SEQ ID NO: 651589 - RNA, 19 nt, Homo sapiens
  misc_RNA (1)...(19): siRNA sense strand
ccaccagcauuuauuaagg

SEQ ID NO: 651590 - RNA, 19 nt, Homo sapiens
  misc_RNA (1)...(19): siRNA sense strand
gcuccaagacuccuuaaag

SEQ ID NO: 651591 - RNA, 19 nt, Homo sapiens
  misc_RNA (1)...(19): siRNA sense strand
uagcagaucuacgaagaca

SEQ ID NO: 651592 - RNA, 19 nt, Homo sapiens
  misc_RNA (1)...(19): siRNA sense strand
aagcagagcauugcaaaga

SEQ ID NO: 651593 - RNA, 19 nt, Homo sapiens
  misc_RNA (1)...(19): siRNA sense strand
uaccacaacucccaucaag

SEQ ID NO: 651594 - RNA, 19 nt, Homo sapiens
  misc_RNA (1)...(19): siRNA sense strand
gcagaaagcucagcaggua

SEQ ID NO: 651595 - RNA, 19 nt, Homo sapiens
  misc_RNA (1)...(19): siRNA sense strand
ggaaauaucugcucugacu

SEQ ID NO: 651596 - RNA, 19 nt, Homo sapiens
  misc_RNA (1)...(19): siRNA sense strand
ugagauaauucguguguua

SEQ ID NO: 651597 - RNA, 19 nt, Homo sapiens
  misc_RNA (1)...(19): siRNA sense strand
gcagaugacugaucaagug

SEQ ID NO: 651598 - RNA, 19 nt, Homo sapiens
  misc_RNA (1)...(19): siRNA sense strand
gggaagagguauuugauga

SEQ ID NO: 651599 - RNA, 19 nt, Homo sapiens
  misc_RNA (1)...(19): siRNA sense strand
ccagacagcuccaugauga

SEQ ID NO: 651600 - RNA, 19 nt, Homo sapiens
  misc_RNA (1)...(19): siRNA sense strand
gcucguaucuuacuuagga

SEQ ID NO: 651601 - RNA, 19 nt, Homo sapiens
  misc_RNA (1)...(19): siRNA sense strand
caaagcagcuguacaccuu

SEQ ID NO: 651602 - RNA, 19 nt, Homo sapiens
  misc_RNA (1)...(19): siRNA sense strand
gagcgaaucccaaccauaa

SEQ ID NO: 651603 - RNA, 19 nt, Homo sapiens
  misc_RNA (1)...(19): siRNA sense strand
gauuagaaccaaccucuua

SEQ ID NO: 651604 - RNA, 19 nt, Homo sapiens
  misc_RNA (1)...(19): siRNA sense strand
gaagagguauuugaugaga

SEQ ID NO: 651605 - RNA, 19 nt, Homo sapiens
  misc_RNA (1)...(19): siRNA sense strand
ccacagagaugcugguuca

SEQ ID NO: 651606 - RNA, 19 nt, Homo sapiens
  misc_RNA (1)...(19): siRNA sense strand
uggaagauuuggucacuua

SEQ ID NO: 651607 - RNA, 19 nt, Homo sapiens
  misc_RNA (1)...(19): siRNA sense strand
uaucugcucugacuucuaa

SEQ ID NO: 651608 - RNA, 19 nt, Homo sapiens
  misc_RNA (1)...(19): siRNA sense strand
ugacuaagauggccaagau

SEQ ID NO: 651609 - RNA, 19 nt, Homo sapiens
  misc_RNA (1)...(19): siRNA sense strand
gccaagcagugcacagaua

SEQ ID NO: 651610 - RNA, 19 nt, Homo sapiens
  misc_RNA (1)...(19): siRNA sense strand
ucgaacagaugcuggauuu

SEQ ID NO: 651611 - RNA, 19 nt, Homo sapiens
  misc_RNA (1)...(19): siRNA sense strand
gagggcagcuaacuuugaa

SEQ ID NO: 651612 - RNA, 19 nt, Homo sapiens
  misc_RNA (1)...(19): siRNA sense strand
uaaauuagcagaucuacga

SEQ ID NO: 651613 - RNA, 19 nt, Homo sapiens
  misc_RNA (1)...(19): siRNA sense strand
gaacaacuccgacuaacag

SEQ ID NO: 651614 - RNA, 19 nt, Homo sapiens
  misc_RNA (1)...(19): siRNA sense strand
ggaaaaggaugaagaguuc

SEQ ID NO: 651615 - RNA, 19 nt, Homo sapiens
  misc_RNA (1)...(19): siRNA sense strand
ccaaggagguugccaagca

SEQ ID NO: 651616 - RNA, 19 nt, Homo sapiens
  misc_RNA (1)...(19): siRNA sense strand
caagaugauugacgagaga

SEQ ID NO: 651617 - RNA, 19 nt, Homo sapiens
  misc_RNA (1)...(19): siRNA sense strand
gaaagcugccucugaugaa

SEQ ID NO: 651618 - RNA, 19 nt, Homo sapiens
  misc_RNA (1)...(19): siRNA sense strand
gcgcauggcucugcugaug

SEQ ID NO: 651619 - RNA, 19 nt, Homo sapiens
  misc_RNA (1)...(19): siRNA sense strand
ugaugaagcucgcaaaugg

SEQ ID NO: 651620 - RNA, 19 nt, Homo sapiens
  misc_RNA (1)...(19): siRNA sense strand
uaacagggaagagguauuu

SEQ ID NO: 651621 - RNA, 19 nt, Homo sapiens
  misc_RNA (1)...(19): siRNA sense strand
agagggagguggagaauuc

SEQ ID NO: 651622 - RNA, 19 nt, Homo sapiens
  misc_RNA (1)...(19): siRNA sense strand
gaacagaugcuggauuuac

SEQ ID NO: 651623 - RNA, 19 nt, Homo sapiens
  misc_RNA (1)...(19): siRNA sense strand
caucagaccugcuccuuac

SEQ ID NO: 651624 - RNA, 19 nt, Homo sapiens
  misc_RNA (1)...(19): siRNA sense strand
gcauagaggaagcuuuaaa

SEQ ID NO: 651625 - RNA, 19 nt, Homo sapiens
  misc_RNA (1)...(19): siRNA sense strand
ugagagggcagcuaacuuu

SEQ ID NO: 651626 - RNA, 19 nt, Homo sapiens
  misc_RNA (1)...(19): siRNA sense strand
ggaaggagaagagcagauu

SEQ ID NO: 651627 - RNA, 19 nt, Homo sapiens
  misc_RNA (1)...(19): siRNA sense strand
acacugcgcuggguuagaa

SEQ ID NO: 651628 - RNA, 19 nt, Homo sapiens
  misc_RNA (1)...(19): siRNA sense strand
cagcauuuauuaagguuga

SEQ ID NO: 651629 - RNA, 19 nt, Homo sapiens
  misc_RNA (1)...(19): siRNA sense strand
uuagaaagacucccuggua

SEQ ID NO: 651630 - RNA, 19 nt, Homo sapiens
  misc_RNA (1)...(19): siRNA sense strand
gugcacagauaaacggauu

SEQ ID NO: 651631 - RNA, 19 nt, Homo sapiens
  misc_RNA (1)...(19): siRNA sense strand
gcagagcauugcaaagaag

SEQ ID NO: 651632 - RNA, 19 nt, Homo sapiens
  misc_RNA (1)...(19): siRNA sense strand
gauaauucguguguuacaa

SEQ ID NO: 651633 - RNA, 19 nt, Homo sapiens
  misc_RNA (1)...(19): siRNA sense strand
gugcugaaauuaaugagau

SEQ ID NO: 651634 - RNA, 19 nt, Homo sapiens
  misc_RNA (1)...(19): siRNA sense strand
gugauuaaccagccaauga

SEQ ID NO: 651635 - RNA, 19 nt, Homo sapiens
  misc_RNA (1)...(19): siRNA sense strand
uggagacuauggaagauuu

SEQ ID NO: 651636 - RNA, 19 nt, Homo sapiens
  misc_RNA (1)...(19): siRNA sense strand
acagauaaacggauuagaa

SEQ ID NO: 651637 - RNA, 19 nt, Homo sapiens
  misc_RNA (1)...(19): siRNA sense strand
caaagcagagcauugcaaa

SEQ ID NO: 651638 - RNA, 19 nt, Homo sapiens
  misc_RNA (1)...(19): siRNA sense strand
uauuagaguuugcaaagga

SEQ ID NO: 651639 - RNA, 19 nt, Homo sapiens
  misc_RNA (1)...(19): siRNA sense strand
gaucgaugcugcucagaac

SEQ ID NO: 651640 - RNA, 19 nt, Homo sapiens
  misc_RNA (1)...(19): siRNA sense strand
gcugagguccguaaaauua

SEQ ID NO: 651641 - RNA, 19 nt, Homo sapiens
  misc_RNA (1)...(19): siRNA sense strand
cagagaugcugguucacaa

SEQ ID NO: 651642 - RNA, 19 nt, Homo sapiens
  misc_RNA (1)...(19): siRNA sense strand
caggaagugucagauguuu

SEQ ID NO: 651643 - RNA, 19 nt, Homo sapiens
  misc_RNA (1)...(19): siRNA sense strand
ggccaggaaugacuaagau

SEQ ID NO: 651644 - RNA, 19 nt, Homo sapiens
  misc_RNA (1)...(19): siRNA sense strand
guggaucgauaauguugaa

SEQ ID NO: 651645 - RNA, 19 nt, Homo sapiens
  misc_RNA (1)...(19): siRNA sense strand
caacucccaucaagcuguu

SEQ ID NO: 651646 - RNA, 19 nt, Homo sapiens
  misc_RNA (1)...(19): siRNA sense strand
gagcaggccaucagacaga

SEQ ID NO: 651647 - RNA, 19 nt, Homo sapiens
  misc_RNA (1)...(19): siRNA sense strand
gaacaccgugaaagaguug

SEQ ID NO: 651648 - RNA, 19 nt, Homo sapiens
  misc_RNA (1)...(19): siRNA sense strand
cauccucucuggaacauca

SEQ ID NO: 651649 - RNA, 19 nt, Homo sapiens
  misc_RNA (1)...(19): siRNA sense strand
gaaaagagacuguucaaac

SEQ ID NO: 651650 - RNA, 19 nt, Homo sapiens
  misc_RNA (1)...(19): siRNA sense strand
caccagaccuugaacaacu

SEQ ID NO: 651651 - RNA, 19 nt, Homo sapiens
  misc_RNA (1)...(19): siRNA sense strand
ugaaagcugccucugauga

SEQ ID NO: 651652 - RNA, 19 nt, Homo sapiens
  misc_RNA (1)...(19): siRNA sense strand
uaggaacccuggaaaucaa

SEQ ID NO: 651653 - RNA, 19 nt, Homo sapiens
  misc_RNA (1)...(19): siRNA sense strand
gguugguacugcuaauaaa

SEQ ID NO: 651654 - RNA, 19 nt, Homo sapiens
  misc_RNA (1)...(19): siRNA sense strand
caucgucuggcuaauguua

SEQ ID NO: 651655 - RNA, 19 nt, Homo sapiens
  misc_RNA (1)...(19): siRNA sense strand
gcaaagaacgcagggagau

SEQ ID NO: 651656 - RNA, 19 nt, Homo sapiens
  misc_RNA (1)...(19): siRNA sense strand
uaagauggccaagaugauu

SEQ ID NO: 651657 - RNA, 19 nt, Homo sapiens
  misc_RNA (1)...(19): siRNA sense strand
aggcauagaggaagcuuua

SEQ ID NO: 651658 - RNA, 19 nt, Homo sapiens
  misc_RNA (1)...(19): siRNA sense strand
aagaaccaguggaucgaua

SEQ ID NO: 651659 - RNA, 19 nt, Homo sapiens
  misc_RNA (1)...(19): siRNA sense strand
gaacuggcuugcagaucca

SEQ ID NO: 651660 - RNA, 19 nt, Homo sapiens
  misc_RNA (1)...(19): siRNA sense strand
gagcauuggccuccauaga

SEQ ID NO: 651661 - RNA, 19 nt, Homo sapiens
  misc_RNA (1)...(19): siRNA sense strand
gcugauggcugagaugucu

SEQ ID NO: 651662 - RNA, 19 nt, Homo sapiens
  misc_RNA (1)...(19): siRNA sense strand
caacuccgacuaacagaug

SEQ ID NO: 651663 - RNA, 19 nt, Homo sapiens
  misc_RNA (1)...(19): siRNA sense strand
ugugaaagcugccucugau

SEQ ID NO: 651664 - RNA, 19 nt, Homo sapiens
  misc_RNA (1)...(19): siRNA sense strand
ggcaucgucuggcuaaugu

SEQ ID NO: 651665 - RNA, 19 nt, Homo sapiens
  misc_RNA (1)...(19): siRNA sense strand
gcagaauuaugugaugauc

SEQ ID NO: 651666 - RNA, 19 nt, Homo sapiens
  misc_RNA (1)...(19): siRNA sense strand
cagaggugguggagacuau

SEQ ID NO: 651667 - RNA, 19 nt, Homo sapiens
  misc_RNA (1)...(19): siRNA sense strand
ccaagcagugcacagauaa

SEQ ID NO: 651668 - RNA, 19 nt, Homo sapiens
  misc_RNA (1)...(19): siRNA sense strand
caaaagcuguggcuggaaa

SEQ ID NO: 651669 - RNA, 19 nt, Homo sapiens
  misc_RNA (1)...(19): siRNA sense strand
ggauccugcugguggcuaa

SEQ ID NO: 651670 - RNA, 19 nt, Homo sapiens
  misc_RNA (1)...(19): siRNA sense strand
cacgagcacuugcaucuca

SEQ ID NO: 651671 - RNA, 19 nt, Homo sapiens
  misc_RNA (1)...(19): siRNA sense strand
ugcucugacuucuaaauua

SEQ ID NO: 651672 - RNA, 19 nt, Homo sapiens
  misc_RNA (1)...(19): siRNA sense strand
uccauagacuccaaacuga

SEQ ID NO: 651673 - RNA, 19 nt, Homo sapiens
  misc_RNA (1)...(19): siRNA sense strand
ugaacaccgugaaagaguu

SEQ ID NO: 651674 - RNA, 19 nt, Homo sapiens
  misc_RNA (1)...(19): siRNA sense strand
caaaccaccucugccugaa

SEQ ID NO: 651675 - RNA, 19 nt, Homo sapiens
  misc_RNA (1)...(19): siRNA sense strand
ggccaugacucaggaagug

SEQ ID NO: 651676 - RNA, 19 nt, Homo sapiens
  misc_RNA (1)...(19): siRNA sense strand
gggagauucugggaacuug

SEQ ID NO: 651677 - RNA, 19 nt, Homo sapiens
  misc_RNA (1)...(19): siRNA sense strand
gcauuggccuccauagacu

SEQ ID NO: 651678 - RNA, 19 nt, Homo sapiens
  misc_RNA (1)...(19): siRNA sense strand
uguuacaacucaccucuug

SEQ ID NO: 651679 - RNA, 19 nt, Homo sapiens
  misc_RNA (1)...(19): siRNA sense strand
uagcagaauuaugugauga

SEQ ID NO: 651680 - RNA, 19 nt, Homo sapiens
  misc_RNA (1)...(19): siRNA sense strand
gauaaacggauuagaacca

SEQ ID NO: 651681 - RNA, 19 nt, Homo sapiens
  misc_RNA (1)...(19): siRNA sense strand
ccaggcagcucagaugcuu

SEQ ID NO: 651682 - RNA, 19 nt, Homo sapiens
  misc_RNA (1)...(19): siRNA sense strand
cgaagccauugauaccaaa

SEQ ID NO: 651683 - RNA, 19 nt, Homo sapiens
  misc_RNA (1)...(19): siRNA sense strand
ugaacucugugcaggcaaa

SEQ ID NO: 651684 - RNA, 19 nt, Homo sapiens
  misc_RNA (1)...(19): siRNA sense strand
ggucucggcugcucguauc

SEQ ID NO: 651685 - RNA, 19 nt, Homo sapiens
  misc_RNA (1)...(19): siRNA sense strand
gugaugauccuaaagaaag

SEQ ID NO: 651686 - RNA, 19 nt, Homo sapiens
  misc_RNA (1)...(19): siRNA sense strand
uagggcagaugacugauca

SEQ ID NO: 651687 - RNA, 19 nt, Homo sapiens
  misc_RNA (1)...(19): siRNA sense strand
gaaagacucccugguacca

SEQ ID NO: 651688 - RNA, 19 nt, Homo sapiens
  misc_RNA (1)...(19): siRNA sense strand
cauaagcacccagcucaaa

SEQ ID NO: 651689 - RNA, 19 nt, Homo sapiens
  misc_RNA (1)...(19): siRNA sense strand
ccaccagcauuuauuaagg

SEQ ID NO: 651690 - RNA, 19 nt, Homo sapiens
  misc_RNA (1)...(19): siRNA sense strand
gcuccaagacuccuuaaag

SEQ ID NO: 651691 - RNA, 19 nt, Homo sapiens
  misc_RNA (1)...(19): siRNA sense strand
uagcagaucuacgaagaca

SEQ ID NO: 651692 - RNA, 19 nt, Homo sapiens
  misc_RNA (1)...(19): siRNA sense strand
aagcagagcauugcaaaga

SEQ ID NO: 651693 - RNA, 19 nt, Homo sapiens
  misc_RNA (1)...(19): siRNA sense strand
uaccacaacucccaucaag

SEQ ID NO: 651694 - RNA, 19 nt, Homo sapiens
  misc_RNA (1)...(19): siRNA sense strand
ggacagagccacuggguua

SEQ ID NO: 651695 - RNA, 19 nt, Homo sapiens
  misc_RNA (1)...(19): siRNA sense strand
ggacaacucugguggauag

SEQ ID NO: 651696 - RNA, 19 nt, Homo sapiens
  misc_RNA (1)...(19): siRNA sense strand
cgagugaguuggaauauaa

SEQ ID NO: 651697 - RNA, 19 nt, Homo sapiens
  misc_RNA (1)...(19): siRNA sense strand
gaacggugcuagcaucuuc

SEQ ID NO: 651698 - RNA, 19 nt, Homo sapiens
  misc_RNA (1)...(19): siRNA sense strand
guggaaagcuaauuauaug

SEQ ID NO: 651699 - RNA, 19 nt, Homo sapiens
  misc_RNA (1)...(19): siRNA sense strand
gaagaucuuuccauauucu

SEQ ID NO: 651700 - RNA, 19 nt, Homo sapiens
  misc_RNA (1)...(19): siRNA sense strand
ucacugauccuguucauga

SEQ ID NO: 651701 - RNA, 19 nt, Homo sapiens
  misc_RNA (1)...(19): siRNA sense strand
gaagacacauaguggaucu

SEQ ID NO: 651702 - RNA, 19 nt, Homo sapiens
  misc_RNA (1)...(19): siRNA sense strand
guaguugcauuucuuggaa

SEQ ID NO: 651703 - RNA, 19 nt, Homo sapiens
  misc_RNA (1)...(19): siRNA sense strand
gcgagugaguuggaauaua

SEQ ID NO: 651704 - RNA, 19 nt, Homo sapiens
  misc_RNA (1)...(19): siRNA sense strand
guaagauuguggaaagcua

SEQ ID NO: 651705 - RNA, 19 nt, Homo sapiens
  misc_RNA (1)...(19): siRNA sense strand
guucaaauauuccaagucu

SEQ ID NO: 651706 - RNA, 19 nt, Homo sapiens
  misc_RNA (1)...(19): siRNA sense strand
gaugauggguguguaagau

SEQ ID NO: 651707 - RNA, 19 nt, Homo sapiens
  misc_RNA (1)...(19): siRNA sense strand
gcguuaaggucugggauaa

SEQ ID NO: 651708 - RNA, 19 nt, Homo sapiens
  misc_RNA (1)...(19): siRNA sense strand
ggaaagcuaauuauaugga

SEQ ID NO: 651709 - RNA, 19 nt, Homo sapiens
  misc_RNA (1)...(19): siRNA sense strand
gcuaagcuguaguugcauu

SEQ ID NO: 651710 - RNA, 19 nt, Homo sapiens
  misc_RNA (1)...(19): siRNA sense strand
gaagaaauaguaggagaau

SEQ ID NO: 651711 - RNA, 19 nt, Homo sapiens
  misc_RNA (1)...(19): siRNA sense strand
gauuguggaaagcuaauua

SEQ ID NO: 651712 - RNA, 19 nt, Homo sapiens
  misc_RNA (1)...(19): siRNA sense strand
gagaucucauguaagcuaa

SEQ ID NO: 651713 - RNA, 19 nt, Homo sapiens
  misc_RNA (1)...(19): siRNA sense strand
ucucaggucuggcgaguga

SEQ ID NO: 651714 - RNA, 19 nt, Homo sapiens
  misc_RNA (1)...(19): siRNA sense strand
cagggaaccucaaauccuu

SEQ ID NO: 651715 - RNA, 19 nt, Homo sapiens
  misc_RNA (1)...(19): siRNA sense strand
gaaguguacugguauuuug

SEQ ID NO: 651716 - RNA, 19 nt, Homo sapiens
  misc_RNA (1)...(19): siRNA sense strand
ggaagaaauaguaggagaa

SEQ ID NO: 651717 - RNA, 19 nt, Homo sapiens
  misc_RNA (1)...(19): siRNA sense strand
ucaaauccuucccuagguu

SEQ ID NO: 651718 - RNA, 19 nt, Homo sapiens
  misc_RNA (1)...(19): siRNA sense strand
cauuaaagccugugaggaa

SEQ ID NO: 651719 - RNA, 19 nt, Homo sapiens
  misc_RNA (1)...(19): siRNA sense strand
ugcauucgcuccaaauuug

SEQ ID NO: 651720 - RNA, 19 nt, Homo sapiens
  misc_RNA (1)...(19): siRNA sense strand
cgaugucucuuucgacuuc

SEQ ID NO: 651721 - RNA, 19 nt, Homo sapiens
  misc_RNA (1)...(19): siRNA sense strand
ggagaugauggguguguaa

SEQ ID NO: 651722 - RNA, 19 nt, Homo sapiens
  misc_RNA (1)...(19): siRNA sense strand
ggaucuguauggcguguga

SEQ ID NO: 651723 - RNA, 19 nt, Homo sapiens
  misc_RNA (1)...(19): siRNA sense strand
ucaaauauuccaagucuuc

SEQ ID NO: 651724 - RNA, 19 nt, Homo sapiens
  misc_RNA (1)...(19): siRNA sense strand
agaaauaguaggagaauca

SEQ ID NO: 651725 - RNA, 19 nt, Homo sapiens
  misc_RNA (1)...(19): siRNA sense strand
gcucaguucgauaaucaua

SEQ ID NO: 651726 - RNA, 19 nt, Homo sapiens
  misc_RNA (1)...(19): siRNA sense strand
gaaaguggugauuggcauu

SEQ ID NO: 651727 - RNA, 19 nt, Homo sapiens
  misc_RNA (1)...(19): siRNA sense strand
gaaaacaccaggaaauaug

SEQ ID NO: 651728 - RNA, 19 nt, Homo sapiens
  misc_RNA (1)...(19): siRNA sense strand
gauauugcauucgcuccaa

SEQ ID NO: 651729 - RNA, 19 nt, Homo sapiens
  misc_RNA (1)...(19): siRNA sense strand
acacauaguggaucuguau

SEQ ID NO: 651730 - RNA, 19 nt, Homo sapiens
  misc_RNA (1)...(19): siRNA sense strand
uaaagccugugaggaaaga

SEQ ID NO: 651731 - RNA, 19 nt, Homo sapiens
  misc_RNA (1)...(19): siRNA sense strand
gcagaugguauaguaagaa

SEQ ID NO: 651732 - RNA, 19 nt, Homo sapiens
  misc_RNA (1)...(19): siRNA sense strand
aauuggaaguguacuggua

SEQ ID NO: 651733 - RNA, 19 nt, Homo sapiens
  misc_RNA (1)...(19): siRNA sense strand
cugaaacucuuaugacagu

SEQ ID NO: 651734 - RNA, 19 nt, Homo sapiens
  misc_RNA (1)...(19): siRNA sense strand
cagaugguauaguaagaau

SEQ ID NO: 651735 - RNA, 19 nt, Homo sapiens
  misc_RNA (1)...(19): siRNA sense strand
uuccaagucuucagaauuc

SEQ ID NO: 651736 - RNA, 19 nt, Homo sapiens
  misc_RNA (1)...(19): siRNA sense strand
ugauggguguguaagauug

SEQ ID NO: 651737 - RNA, 19 nt, Homo sapiens
  misc_RNA (1)...(19): siRNA sense strand
ggcaccagauguuaugaau

SEQ ID NO: 651738 - RNA, 19 nt, Homo sapiens
  misc_RNA (1)...(19): siRNA sense strand
gauuggcauuguacagcua

SEQ ID NO: 651739 - RNA, 19 nt, Homo sapiens
  misc_RNA (1)...(19): siRNA sense strand
gaaauaguaggagaaucaa

SEQ ID NO: 651740 - RNA, 19 nt, Homo sapiens
  misc_RNA (1)...(19): siRNA sense strand
uuccgcagaugguauagua

SEQ ID NO: 651741 - RNA, 19 nt, Homo sapiens
  misc_RNA (1)...(19): siRNA sense strand
uggcucaguucgauaauca

SEQ ID NO: 651742 - RNA, 19 nt, Homo sapiens
  misc_RNA (1)...(19): siRNA sense strand
gaugguauaguaagaaucu

SEQ ID NO: 651743 - RNA, 19 nt, Homo sapiens
  misc_RNA (1)...(19): siRNA sense strand
uguaugggaagaaauagua

SEQ ID NO: 651744 - RNA, 19 nt, Homo sapiens
  misc_RNA (1)...(19): siRNA sense strand
uguguaagauuguggaaag

SEQ ID NO: 651745 - RNA, 19 nt, Homo sapiens
  misc_RNA (1)...(19): siRNA sense strand
uauaguggcucaguucgau

SEQ ID NO: 651746 - RNA, 19 nt, Homo sapiens
  misc_RNA (1)...(19): siRNA sense strand
cguaggaagugaugacagu

SEQ ID NO: 651747 - RNA, 19 nt, Homo sapiens
  misc_RNA (1)...(19): siRNA sense strand
ccaagcacaugggucuuau

SEQ ID NO: 651748 - RNA, 19 nt, Homo sapiens
  misc_RNA (1)...(19): siRNA sense strand
gauaaacugcgaggacaga

SEQ ID NO: 651749 - RNA, 19 nt, Homo sapiens
  misc_RNA (1)...(19): siRNA sense strand
uuacugaugugaaguuugc

SEQ ID NO: 651750 - RNA, 19 nt, Homo sapiens
  misc_RNA (1)...(19): siRNA sense strand
gacacauaguggaucugua

SEQ ID NO: 651751 - RNA, 19 nt, Homo sapiens
  misc_RNA (1)...(19): siRNA sense strand
guuaaggucugggauaaaa

SEQ ID NO: 651752 - RNA, 19 nt, Homo sapiens
  misc_RNA (1)...(19): siRNA sense strand
uaagauuguggaaagcuaa

SEQ ID NO: 651753 - RNA, 19 nt, Homo sapiens
  misc_RNA (1)...(19): siRNA sense strand
caugaucgccguaggaagu

SEQ ID NO: 651754 - RNA, 19 nt, Homo sapiens
  misc_RNA (1)...(19): siRNA sense strand
uaugaggcaccagauguua

SEQ ID NO: 651755 - RNA, 19 nt, Homo sapiens
  misc_RNA (1)...(19): siRNA sense strand
ucccuagguucaaauauuc

SEQ ID NO: 651756 - RNA, 19 nt, Homo sapiens
  misc_RNA (1)...(19): siRNA sense strand
uucccuagguucaaauauu

SEQ ID NO: 651757 - RNA, 19 nt, Homo sapiens
  misc_RNA (1)...(19): siRNA sense strand
caaauuugggaagaucuuu

SEQ ID NO: 651758 - RNA, 19 nt, Homo sapiens
  misc_RNA (1)...(19): siRNA sense strand
caagucuucagaauucauu

SEQ ID NO: 651759 - RNA, 19 nt, Homo sapiens
  misc_RNA (1)...(19): siRNA sense strand
cagcagggaaccucaaauc

SEQ ID NO: 651760 - RNA, 19 nt, Homo sapiens
  misc_RNA (1)...(19): siRNA sense strand
ccaacgcaauggccaaggu

SEQ ID NO: 651761 - RNA, 19 nt, Homo sapiens
  misc_RNA (1)...(19): siRNA sense strand
ccauauaguggcucaguuc

SEQ ID NO: 651762 - RNA, 19 nt, Homo sapiens
  misc_RNA (1)...(19): siRNA sense strand
gcagggaaccucaaauccu

SEQ ID NO: 651763 - RNA, 19 nt, Homo sapiens
  misc_RNA (1)...(19): siRNA sense strand
gcugcuguaugggaagaaa

SEQ ID NO: 651764 - RNA, 19 nt, Homo sapiens
  misc_RNA (1)...(19): siRNA sense strand
aaagcugaaacucuuauga

SEQ ID NO: 651765 - RNA, 19 nt, Homo sapiens
  misc_RNA (1)...(19): siRNA sense strand
gcaauggccaagguucaga

SEQ ID NO: 651766 - RNA, 19 nt, Homo sapiens
  misc_RNA (1)...(19): siRNA sense strand
caagcucucgugcucauuc

SEQ ID NO: 651767 - RNA, 19 nt, Homo sapiens
  misc_RNA (1)...(19): siRNA sense strand
ggucuuauguuagcaaccu

SEQ ID NO: 651768 - RNA, 19 nt, Homo sapiens
  misc_RNA (1)...(19): siRNA sense strand
guacugguauuuugaaagg

SEQ ID NO: 651769 - RNA, 19 nt, Homo sapiens
  misc_RNA (1)...(19): siRNA sense strand
ggaaguguacugguauuuu

SEQ ID NO: 651770 - RNA, 19 nt, Homo sapiens
  misc_RNA (1)...(19): siRNA sense strand
auuaaagccugugaggaaa

SEQ ID NO: 651771 - RNA, 19 nt, Homo sapiens
  misc_RNA (1)...(19): siRNA sense strand
cugauccuguucaugauau

SEQ ID NO: 651772 - RNA, 19 nt, Homo sapiens
  misc_RNA (1)...(19): siRNA sense strand
cgcagaugguauaguaaga

SEQ ID NO: 651773 - RNA, 19 nt, Homo sapiens
  misc_RNA (1)...(19): siRNA sense strand
aaagugaaaguggugauug

SEQ ID NO: 651774 - RNA, 19 nt, Homo sapiens
  misc_RNA (1)...(19): siRNA sense strand
uggccaagguucagauuuu

SEQ ID NO: 651775 - RNA, 19 nt, Homo sapiens
  misc_RNA (1)...(19): siRNA sense strand
caacgcaauggccaagguu

SEQ ID NO: 651776 - RNA, 19 nt, Homo sapiens
  misc_RNA (1)...(19): siRNA sense strand
guaggaagugaugacagua

SEQ ID NO: 651777 - RNA, 19 nt, Homo sapiens
  misc_RNA (1)...(19): siRNA sense strand
ccaguggucuuugcagcau

SEQ ID NO: 651778 - RNA, 19 nt, Homo sapiens
  misc_RNA (1)...(19): siRNA sense strand
gacagagccacuggguuaa

SEQ ID NO: 651779 - RNA, 19 nt, Homo sapiens
  misc_RNA (1)...(19): siRNA sense strand
ggaccacaaggaucucauc

SEQ ID NO: 651780 - RNA, 19 nt, Homo sapiens
  misc_RNA (1)...(19): siRNA sense strand
ugaggcaccagauguuaug

SEQ ID NO: 651781 - RNA, 19 nt, Homo sapiens
  misc_RNA (1)...(19): siRNA sense strand
gaucucauguaagcuaagc

SEQ ID NO: 651782 - RNA, 19 nt, Homo sapiens
  misc_RNA (1)...(19): siRNA sense strand
ggucuuugcagcaugagau

SEQ ID NO: 651783 - RNA, 19 nt, Homo sapiens
  misc_RNA (1)...(19): siRNA sense strand
gcgaucagagcguuaaggu

SEQ ID NO: 651784 - RNA, 19 nt, Homo sapiens
  misc_RNA (1)...(19): siRNA sense strand
uugcauucgcuccaaauuu

SEQ ID NO: 651785 - RNA, 19 nt, Homo sapiens
  misc_RNA (1)...(19): siRNA sense strand
gcaccagauguuaugaauc

SEQ ID NO: 651786 - RNA, 19 nt, Homo sapiens
  misc_RNA (1)...(19): siRNA sense strand
caaauauuccaagucuuca

SEQ ID NO: 651787 - RNA, 19 nt, Homo sapiens
  misc_RNA (1)...(19): siRNA sense strand
uaguggcucaguucgauaa

SEQ ID NO: 651788 - RNA, 19 nt, Homo sapiens
  misc_RNA (1)...(19): siRNA sense strand
aguggugauuggcauugua

SEQ ID NO: 651789 - RNA, 19 nt, Homo sapiens
  misc_RNA (1)...(19): siRNA sense strand
ccagcgaucagagcguuaa

SEQ ID NO: 651790 - RNA, 19 nt, Homo sapiens
  misc_RNA (1)...(19): siRNA sense strand
aaggacaacucugguggau

SEQ ID NO: 651791 - RNA, 19 nt, Homo sapiens
  misc_RNA (1)...(19): siRNA sense strand
uauggacaauuggaagugu

SEQ ID NO: 651792 - RNA, 19 nt, Homo sapiens
  misc_RNA (1)...(19): siRNA sense strand
uggcgagugaguuggaaua

SEQ ID NO: 651793 - RNA, 19 nt, Homo sapiens
  misc_RNA (1)...(19): siRNA sense strand
ccaaugaugaucugaauua

SEQ ID NO: 651794 - RNA, 19 nt, Homo sapiens
  misc_RNA (1)...(19): siRNA sense strand
gcagaauuaugaaagaaga

SEQ ID NO: 651795 - RNA, 19 nt, Homo sapiens
  misc_RNA (1)...(19): siRNA sense strand
gcaguucuuuggauuaaug

SEQ ID NO: 651796 - RNA, 19 nt, Homo sapiens
  misc_RNA (1)...(19): siRNA sense strand
gaaauaggagccaaugaug

SEQ ID NO: 651797 - RNA, 19 nt, Homo sapiens
  misc_RNA (1)...(19): siRNA sense strand
cagcaguucuuuggauuaa

SEQ ID NO: 651798 - RNA, 19 nt, Homo sapiens
  misc_RNA (1)...(19): siRNA sense strand
gcuguuugcagaagaaaua

SEQ ID NO: 651799 - RNA, 19 nt, Homo sapiens
  misc_RNA (1)...(19): siRNA sense strand
gaagaaauaggagccaaug

SEQ ID NO: 651800 - RNA, 19 nt, Homo sapiens
  misc_RNA (1)...(19): siRNA sense strand
ggccagaucucucacaaaa

SEQ ID NO: 651801 - RNA, 19 nt, Homo sapiens
  misc_RNA (1)...(19): siRNA sense strand
gcaaugcagaauuaugaaa

SEQ ID NO: 651802 - RNA, 19 nt, Homo sapiens
  misc_RNA (1)...(19): siRNA sense strand
gacccaagccucagcaguu

SEQ ID NO: 651803 - RNA, 19 nt, Homo sapiens
  misc_RNA (1)...(19): siRNA sense strand
agaaauaggagccaaugau

SEQ ID NO: 651804 - RNA, 19 nt, Homo sapiens
  misc_RNA (1)...(19): siRNA sense strand
augaugaucugaauuacug

SEQ ID NO: 651805 - RNA, 19 nt, Homo sapiens
  misc_RNA (1)...(19): siRNA sense strand
aaauaggagccaaugauga

SEQ ID NO: 651806 - RNA, 19 nt, Homo sapiens
  misc_RNA (1)...(19): siRNA sense strand
ccucagcaguucuuuggau

SEQ ID NO: 651807 - RNA, 19 nt, Homo sapiens
  misc_RNA (1)...(19): siRNA sense strand
gaacugccggagcccuuug

SEQ ID NO: 651808 - RNA, 19 nt, Homo sapiens
  misc_RNA (1)...(19): siRNA sense strand
ucagcaguucuuuggauua

SEQ ID NO: 651809 - RNA, 19 nt, Homo sapiens
  misc_RNA (1)...(19): siRNA sense strand
ucagcuguuugcagaagaa

SEQ ID NO: 651810 - RNA, 19 nt, Homo sapiens
  misc_RNA (1)...(19): siRNA sense strand
ugucuccacucagcuguuu

SEQ ID NO: 651811 - RNA, 19 nt, Homo sapiens
  misc_RNA (1)...(19): siRNA sense strand
gagccaaugaugaucugaa

SEQ ID NO: 651812 - RNA, 19 nt, Homo sapiens
  misc_RNA (1)...(19): siRNA sense strand
gacauggccagaucucuca

SEQ ID NO: 651813 - RNA, 19 nt, Homo sapiens
  misc_RNA (1)...(19): siRNA sense strand
aauaggagccaaugaugau

SEQ ID NO: 651814 - RNA, 19 nt, Homo sapiens
  misc_RNA (1)...(19): siRNA sense strand
ggaacugccggagcccuuu

SEQ ID NO: 651815 - RNA, 19 nt, Homo sapiens
  misc_RNA (1)...(19): siRNA sense strand
guacgacagcgaccagauc

SEQ ID NO: 651816 - RNA, 19 nt, Homo sapiens
  misc_RNA (1)...(19): siRNA sense strand
caaugaugaucugaauuac

SEQ ID NO: 651817 - RNA, 19 nt, Homo sapiens
  misc_RNA (1)...(19): siRNA sense strand
caaugcagaauuaugaaag

SEQ ID NO: 651818 - RNA, 19 nt, Homo sapiens
  misc_RNA (1)...(19): siRNA sense strand
cgacagcgaccagaucaag

SEQ ID NO: 651819 - RNA, 19 nt, Homo sapiens
  misc_RNA (1)...(19): siRNA sense strand
agccaaugaugaucugaau

SEQ ID NO: 651820 - RNA, 19 nt, Homo sapiens
  misc_RNA (1)...(19): siRNA sense strand
cucagcaguucuuuggauu

SEQ ID NO: 651821 - RNA, 19 nt, Homo sapiens
  misc_RNA (1)...(19): siRNA sense strand
ccaaugaugaucugaauua

SEQ ID NO: 651822 - RNA, 19 nt, Homo sapiens
  misc_RNA (1)...(19): siRNA sense strand
gcagaauuaugaaagaaga

SEQ ID NO: 651823 - RNA, 19 nt, Homo sapiens
  misc_RNA (1)...(19): siRNA sense strand
gcaguucuuuggauuaaug

SEQ ID NO: 651824 - RNA, 19 nt, Homo sapiens
  misc_RNA (1)...(19): siRNA sense strand
gaaauaggagccaaugaug

SEQ ID NO: 651825 - RNA, 19 nt, Homo sapiens
  misc_RNA (1)...(19): siRNA sense strand
cagcaguucuuuggauuaa

SEQ ID NO: 651826 - RNA, 19 nt, Homo sapiens
  misc_RNA (1)...(19): siRNA sense strand
gcuguuugcagaagaaaua

SEQ ID NO: 651827 - RNA, 19 nt, Homo sapiens
  misc_RNA (1)...(19): siRNA sense strand
gaagaaauaggagccaaug

SEQ ID NO: 651828 - RNA, 19 nt, Homo sapiens
  misc_RNA (1)...(19): siRNA sense strand
ggccagaucucucacaaaa

SEQ ID NO: 651829 - RNA, 19 nt, Homo sapiens
  misc_RNA (1)...(19): siRNA sense strand
gcaaugcagaauuaugaaa

SEQ ID NO: 651830 - RNA, 19 nt, Homo sapiens
  misc_RNA (1)...(19): siRNA sense strand
gacccaagccucagcaguu

SEQ ID NO: 651831 - RNA, 19 nt, Homo sapiens
  misc_RNA (1)...(19): siRNA sense strand
agaaauaggagccaaugau

SEQ ID NO: 651832 - RNA, 19 nt, Homo sapiens
  misc_RNA (1)...(19): siRNA sense strand
augaugaucugaauuacug

SEQ ID NO: 651833 - RNA, 19 nt, Homo sapiens
  misc_RNA (1)...(19): siRNA sense strand
aaauaggagccaaugauga

SEQ ID NO: 651834 - RNA, 19 nt, Homo sapiens
  misc_RNA (1)...(19): siRNA sense strand
ccucagcaguucuuuggau

SEQ ID NO: 651835 - RNA, 19 nt, Homo sapiens
  misc_RNA (1)...(19): siRNA sense strand
gaacugccggagcccuuug

SEQ ID NO: 651836 - RNA, 19 nt, Homo sapiens
  misc_RNA (1)...(19): siRNA sense strand
ucagcaguucuuuggauua

SEQ ID NO: 651837 - RNA, 19 nt, Homo sapiens
  misc_RNA (1)...(19): siRNA sense strand
ucagcuguuugcagaagaa

SEQ ID NO: 651838 - RNA, 19 nt, Homo sapiens
  misc_RNA (1)...(19): siRNA sense strand
ugucuccacucagcuguuu

SEQ ID NO: 651839 - RNA, 19 nt, Homo sapiens
  misc_RNA (1)...(19): siRNA sense strand
gagccaaugaugaucugaa

SEQ ID NO: 651840 - RNA, 19 nt, Homo sapiens
  misc_RNA (1)...(19): siRNA sense strand
gacauggccagaucucuca

SEQ ID NO: 651841 - RNA, 19 nt, Homo sapiens
  misc_RNA (1)...(19): siRNA sense strand
aauaggagccaaugaugau

SEQ ID NO: 651842 - RNA, 19 nt, Homo sapiens
  misc_RNA (1)...(19): siRNA sense strand
ggaacugccggagcccuuu

SEQ ID NO: 651843 - RNA, 19 nt, Homo sapiens
  misc_RNA (1)...(19): siRNA sense strand
guacgacagcgaccagauc

SEQ ID NO: 651844 - RNA, 19 nt, Homo sapiens
  misc_RNA (1)...(19): siRNA sense strand
caaugaugaucugaauuac

SEQ ID NO: 651845 - RNA, 19 nt, Homo sapiens
  misc_RNA (1)...(19): siRNA sense strand
caaugcagaauuaugaaag

SEQ ID NO: 651846 - RNA, 19 nt, Homo sapiens
  misc_RNA (1)...(19): siRNA sense strand
cgacagcgaccagaucaag

SEQ ID NO: 651847 - RNA, 19 nt, Homo sapiens
  misc_RNA (1)...(19): siRNA sense strand
agccaaugaugaucugaau

SEQ ID NO: 651848 - RNA, 19 nt, Homo sapiens
  misc_RNA (1)...(19): siRNA sense strand
cucagcaguucuuuggauu

SEQ ID NO: 651849 - RNA, 19 nt, Homo sapiens
  misc_RNA (1)...(19): siRNA sense strand
ccaaugaugaucugaauua

SEQ ID NO: 651850 - RNA, 19 nt, Homo sapiens
  misc_RNA (1)...(19): siRNA sense strand
gcagaauuaugaaagaaga

SEQ ID NO: 651851 - RNA, 19 nt, Homo sapiens
  misc_RNA (1)...(19): siRNA sense strand
gcaguucuuuggauuaaug

SEQ ID NO: 651852 - RNA, 19 nt, Homo sapiens
  misc_RNA (1)...(19): siRNA sense strand
gaaauaggagccaaugaug

SEQ ID NO: 651853 - RNA, 19 nt, Homo sapiens
  misc_RNA (1)...(19): siRNA sense strand
cagcaguucuuuggauuaa

SEQ ID NO: 651854 - RNA, 19 nt, Homo sapiens
  misc_RNA (1)...(19): siRNA sense strand
gcuguuugcagaagaaaua

SEQ ID NO: 651855 - RNA, 19 nt, Homo sapiens
  misc_RNA (1)...(19): siRNA sense strand
gaagaaauaggagccaaug

SEQ ID NO: 651856 - RNA, 19 nt, Homo sapiens
  misc_RNA (1)...(19): siRNA sense strand
ggccagaucucucacaaaa

SEQ ID NO: 651857 - RNA, 19 nt, Homo sapiens
  misc_RNA (1)...(19): siRNA sense strand
gcaaugcagaauuaugaaa

SEQ ID NO: 651858 - RNA, 19 nt, Homo sapiens
  misc_RNA (1)...(19): siRNA sense strand
gacccaagccucagcaguu

SEQ ID NO: 651859 - RNA, 19 nt, Homo sapiens
  misc_RNA (1)...(19): siRNA sense strand
agaaauaggagccaaugau

SEQ ID NO: 651860 - RNA, 19 nt, Homo sapiens
  misc_RNA (1)...(19): siRNA sense strand
augaugaucugaauuacug

SEQ ID NO: 651861 - RNA, 19 nt, Homo sapiens
  misc_RNA (1)...(19): siRNA sense strand
aaauaggagccaaugauga

SEQ ID NO: 651862 - RNA, 19 nt, Homo sapiens
  misc_RNA (1)...(19): siRNA sense strand
ccucagcaguucuuuggau

SEQ ID NO: 651863 - RNA, 19 nt, Homo sapiens
  misc_RNA (1)...(19): siRNA sense strand
gaacugccggagcccuuug

SEQ ID NO: 651864 - RNA, 19 nt, Homo sapiens
  misc_RNA (1)...(19): siRNA sense strand
ucagcaguucuuuggauua

SEQ ID NO: 651865 - RNA, 19 nt, Homo sapiens
  misc_RNA (1)...(19): siRNA sense strand
ucagcuguuugcagaagaa

SEQ ID NO: 651866 - RNA, 19 nt, Homo sapiens
  misc_RNA (1)...(19): siRNA sense strand
ugucuccacucagcuguuu

SEQ ID NO: 651867 - RNA, 19 nt, Homo sapiens
  misc_RNA (1)...(19): siRNA sense strand
gagccaaugaugaucugaa

SEQ ID NO: 651868 - RNA, 19 nt, Homo sapiens
  misc_RNA (1)...(19): siRNA sense strand
gacauggccagaucucuca

SEQ ID NO: 651869 - RNA, 19 nt, Homo sapiens
  misc_RNA (1)...(19): siRNA sense strand
aauaggagccaaugaugau

SEQ ID NO: 651870 - RNA, 19 nt, Homo sapiens
  misc_RNA (1)...(19): siRNA sense strand
ggaacugccggagcccuuu

SEQ ID NO: 651871 - RNA, 19 nt, Homo sapiens
  misc_RNA (1)...(19): siRNA sense strand
guacgacagcgaccagauc

SEQ ID NO: 651872 - RNA, 19 nt, Homo sapiens
  misc_RNA (1)...(19): siRNA sense strand
caaugaugaucugaauuac

SEQ ID NO: 651873 - RNA, 19 nt, Homo sapiens
  misc_RNA (1)...(19): siRNA sense strand
caaugcagaauuaugaaag

SEQ ID NO: 651874 - RNA, 19 nt, Homo sapiens
  misc_RNA (1)...(19): siRNA sense strand
cgacagcgaccagaucaag

SEQ ID NO: 651875 - RNA, 19 nt, Homo sapiens
  misc_RNA (1)...(19): siRNA sense strand
agccaaugaugaucugaau

SEQ ID NO: 651876 - RNA, 19 nt, Homo sapiens
  misc_RNA (1)...(19): siRNA sense strand
cucagcaguucuuuggauu

SEQ ID NO: 651877 - RNA, 19 nt, Homo sapiens
  misc_RNA (1)...(19): siRNA sense strand
ccaaugaugaucugaauua

SEQ ID NO: 651878 - RNA, 19 nt, Homo sapiens
  misc_RNA (1)...(19): siRNA sense strand
gcagaauuaugaaagaaga

SEQ ID NO: 651879 - RNA, 19 nt, Homo sapiens
  misc_RNA (1)...(19): siRNA sense strand
gcaguucuuuggauuaaug

SEQ ID NO: 651880 - RNA, 19 nt, Homo sapiens
  misc_RNA (1)...(19): siRNA sense strand
gaaauaggagccaaugaug

SEQ ID NO: 651881 - RNA, 19 nt, Homo sapiens
  misc_RNA (1)...(19): siRNA sense strand
cagcaguucuuuggauuaa

SEQ ID NO: 651882 - RNA, 19 nt, Homo sapiens
  misc_RNA (1)...(19): siRNA sense strand
gcuguuugcagaagaaaua

SEQ ID NO: 651883 - RNA, 19 nt, Homo sapiens
  misc_RNA (1)...(19): siRNA sense strand
gaagaaauaggagccaaug

SEQ ID NO: 651884 - RNA, 19 nt, Homo sapiens
  misc_RNA (1)...(19): siRNA sense strand
ggccagaucucucacaaaa

SEQ ID NO: 651885 - RNA, 19 nt, Homo sapiens
  misc_RNA (1)...(19): siRNA sense strand
gcaaugcagaauuaugaaa

SEQ ID NO: 651886 - RNA, 19 nt, Homo sapiens
  misc_RNA (1)...(19): siRNA sense strand
gacccaagccucagcaguu

SEQ ID NO: 651887 - RNA, 19 nt, Homo sapiens
  misc_RNA (1)...(19): siRNA sense strand
agaaauaggagccaaugau

SEQ ID NO: 651888 - RNA, 19 nt, Homo sapiens
  misc_RNA (1)...(19): siRNA sense strand
augaugaucugaauuacug

SEQ ID NO: 651889 - RNA, 19 nt, Homo sapiens
  misc_RNA (1)...(19): siRNA sense strand
aaauaggagccaaugauga

SEQ ID NO: 651890 - RNA, 19 nt, Homo sapiens
  misc_RNA (1)...(19): siRNA sense strand
ccucagcaguucuuuggau

SEQ ID NO: 651891 - RNA, 19 nt, Homo sapiens
  misc_RNA (1)...(19): siRNA sense strand
gaacugccggagcccuuug

SEQ ID NO: 651892 - RNA, 19 nt, Homo sapiens
  misc_RNA (1)...(19): siRNA sense strand
ucagcaguucuuuggauua

SEQ ID NO: 651893 - RNA, 19 nt, Homo sapiens
  misc_RNA (1)...(19): siRNA sense strand
ucagcuguuugcagaagaa

SEQ ID NO: 651894 - RNA, 19 nt, Homo sapiens
  misc_RNA (1)...(19): siRNA sense strand
ugucuccacucagcuguuu

SEQ ID NO: 651895 - RNA, 19 nt, Homo sapiens
  misc_RNA (1)...(19): siRNA sense strand
gagccaaugaugaucugaa

SEQ ID NO: 651896 - RNA, 19 nt, Homo sapiens
  misc_RNA (1)...(19): siRNA sense strand
gacauggccagaucucuca

SEQ ID NO: 651897 - RNA, 19 nt, Homo sapiens
  misc_RNA (1)...(19): siRNA sense strand
aauaggagccaaugaugau

SEQ ID NO: 651898 - RNA, 19 nt, Homo sapiens
  misc_RNA (1)...(19): siRNA sense strand
ggaacugccggagcccuuu

SEQ ID NO: 651899 - RNA, 19 nt, Homo sapiens
  misc_RNA (1)...(19): siRNA sense strand
guacgacagcgaccagauc

SEQ ID NO: 651900 - RNA, 19 nt, Homo sapiens
  misc_RNA (1)...(19): siRNA sense strand
caaugaugaucugaauuac

SEQ ID NO: 651901 - RNA, 19 nt, Homo sapiens
  misc_RNA (1)...(19): siRNA sense strand
caaugcagaauuaugaaag

SEQ ID NO: 651902 - RNA, 19 nt, Homo sapiens
  misc_RNA (1)...(19): siRNA sense strand
cgacagcgaccagaucaag

SEQ ID NO: 651903 - RNA, 19 nt, Homo sapiens
  misc_RNA (1)...(19): siRNA sense strand
agccaaugaugaucugaau

SEQ ID NO: 651904 - RNA, 19 nt, Homo sapiens
  misc_RNA (1)...(19): siRNA sense strand
cucagcaguucuuuggauu

SEQ ID NO: 651905 - RNA, 19 nt, Homo sapiens
  misc_RNA (1)...(19): siRNA sense strand
ccaaugaugaucugaauua

SEQ ID NO: 651906 - RNA, 19 nt, Homo sapiens
  misc_RNA (1)...(19): siRNA sense strand
gcagaauuaugaaagaaga

SEQ ID NO: 651907 - RNA, 19 nt, Homo sapiens
  misc_RNA (1)...(19): siRNA sense strand
gcaguucuuuggauuaaug

SEQ ID NO: 651908 - RNA, 19 nt, Homo sapiens
  misc_RNA (1)...(19): siRNA sense strand
gaaauaggagccaaugaug

SEQ ID NO: 651909 - RNA, 19 nt, Homo sapiens
  misc_RNA (1)...(19): siRNA sense strand
cagcaguucuuuggauuaa

SEQ ID NO: 651910 - RNA, 19 nt, Homo sapiens
  misc_RNA (1)...(19): siRNA sense strand
gcuguuugcagaagaaaua

SEQ ID NO: 651911 - RNA, 19 nt, Homo sapiens
  misc_RNA (1)...(19): siRNA sense strand
gaagaaauaggagccaaug

SEQ ID NO: 651912 - RNA, 19 nt, Homo sapiens
  misc_RNA (1)...(19): siRNA sense strand
ggccagaucucucacaaaa

SEQ ID NO: 651913 - RNA, 19 nt, Homo sapiens
  misc_RNA (1)...(19): siRNA sense strand
gcaaugcagaauuaugaaa

SEQ ID NO: 651914 - RNA, 19 nt, Homo sapiens
  misc_RNA (1)...(19): siRNA sense strand
gacccaagccucagcaguu

SEQ ID NO: 651915 - RNA, 19 nt, Homo sapiens
  misc_RNA (1)...(19): siRNA sense strand
agaaauaggagccaaugau

SEQ ID NO: 651916 - RNA, 19 nt, Homo sapiens
  misc_RNA (1)...(19): siRNA sense strand
augaugaucugaauuacug

SEQ ID NO: 651917 - RNA, 19 nt, Homo sapiens
  misc_RNA (1)...(19): siRNA sense strand
aaauaggagccaaugauga

SEQ ID NO: 651918 - RNA, 19 nt, Homo sapiens
  misc_RNA (1)...(19): siRNA sense strand
ccucagcaguucuuuggau

SEQ ID NO: 651919 - RNA, 19 nt, Homo sapiens
  misc_RNA (1)...(19): siRNA sense strand
gaacugccggagcccuuug

SEQ ID NO: 651920 - RNA, 19 nt, Homo sapiens
  misc_RNA (1)...(19): siRNA sense strand
ucagcaguucuuuggauua

SEQ ID NO: 651921 - RNA, 19 nt, Homo sapiens
  misc_RNA (1)...(19): siRNA sense strand
ucagcuguuugcagaagaa

SEQ ID NO: 651922 - RNA, 19 nt, Homo sapiens
  misc_RNA (1)...(19): siRNA sense strand
ugucuccacucagcuguuu

SEQ ID NO: 651923 - RNA, 19 nt, Homo sapiens
  misc_RNA (1)...(19): siRNA sense strand
gagccaaugaugaucugaa

SEQ ID NO: 651924 - RNA, 19 nt, Homo sapiens
  misc_RNA (1)...(19): siRNA sense strand
gacauggccagaucucuca

SEQ ID NO: 651925 - RNA, 19 nt, Homo sapiens
  misc_RNA (1)...(19): siRNA sense strand
aauaggagccaaugaugau

SEQ ID NO: 651926 - RNA, 19 nt, Homo sapiens
  misc_RNA (1)...(19): siRNA sense strand
ggaacugccggagcccuuu

SEQ ID NO: 651927 - RNA, 19 nt, Homo sapiens
  misc_RNA (1)...(19): siRNA sense strand
guacgacagcgaccagauc

SEQ ID NO: 651928 - RNA, 19 nt, Homo sapiens
  misc_RNA (1)...(19): siRNA sense strand
caaugaugaucugaauuac

SEQ ID NO: 651929 - RNA, 19 nt, Homo sapiens
  misc_RNA (1)...(19): siRNA sense strand
caaugcagaauuaugaaag

SEQ ID NO: 651930 - RNA, 19 nt, Homo sapiens
  misc_RNA (1)...(19): siRNA sense strand
cgacagcgaccagaucaag

SEQ ID NO: 651931 - RNA, 19 nt, Homo sapiens
  misc_RNA (1)...(19): siRNA sense strand
agccaaugaugaucugaau

SEQ ID NO: 651932 - RNA, 19 nt, Homo sapiens
  misc_RNA (1)...(19): siRNA sense strand
cucagcaguucuuuggauu

SEQ ID NO: 651933 - RNA, 19 nt, Homo sapiens
  misc_RNA (1)...(19): siRNA sense strand
ccaaugaugaucugaauua

SEQ ID NO: 651934 - RNA, 19 nt, Homo sapiens
  misc_RNA (1)...(19): siRNA sense strand
gcagaauuaugaaagaaga

SEQ ID NO: 651935 - RNA, 19 nt, Homo sapiens
  misc_RNA (1)...(19): siRNA sense strand
gcaguucuuuggauuaaug

SEQ ID NO: 651936 - RNA, 19 nt, Homo sapiens
  misc_RNA (1)...(19): siRNA sense strand
gaaauaggagccaaugaug

SEQ ID NO: 651937 - RNA, 19 nt, Homo sapiens
  misc_RNA (1)...(19): siRNA sense strand
cagcaguucuuuggauuaa

SEQ ID NO: 651938 - RNA, 19 nt, Homo sapiens
  misc_RNA (1)...(19): siRNA sense strand
gcuguuugcagaagaaaua

SEQ ID NO: 651939 - RNA, 19 nt, Homo sapiens
  misc_RNA (1)...(19): siRNA sense strand
gaagaaauaggagccaaug

SEQ ID NO: 651940 - RNA, 19 nt, Homo sapiens
  misc_RNA (1)...(19): siRNA sense strand
ggccagaucucucacaaaa

SEQ ID NO: 651941 - RNA, 19 nt, Homo sapiens
  misc_RNA (1)...(19): siRNA sense strand
gcaaugcagaauuaugaaa

SEQ ID NO: 651942 - RNA, 19 nt, Homo sapiens
  misc_RNA (1)...(19): siRNA sense strand
gacccaagccucagcaguu

SEQ ID NO: 651943 - RNA, 19 nt, Homo sapiens
  misc_RNA (1)...(19): siRNA sense strand
agaaauaggagccaaugau

SEQ ID NO: 651944 - RNA, 19 nt, Homo sapiens
  misc_RNA (1)...(19): siRNA sense strand
augaugaucugaauuacug

SEQ ID NO: 651945 - RNA, 19 nt, Homo sapiens
  misc_RNA (1)...(19): siRNA sense strand
aaauaggagccaaugauga

SEQ ID NO: 651946 - RNA, 19 nt, Homo sapiens
  misc_RNA (1)...(19): siRNA sense strand
ccucagcaguucuuuggau

SEQ ID NO: 651947 - RNA, 19 nt, Homo sapiens
  misc_RNA (1)...(19): siRNA sense strand
gaacugccggagcccuuug

SEQ ID NO: 651948 - RNA, 19 nt, Homo sapiens
  misc_RNA (1)...(19): siRNA sense strand
ucagcaguucuuuggauua

SEQ ID NO: 651949 - RNA, 19 nt, Homo sapiens
  misc_RNA (1)...(19): siRNA sense strand
ucagcuguuugcagaagaa

SEQ ID NO: 651950 - RNA, 19 nt, Homo sapiens
  misc_RNA (1)...(19): siRNA sense strand
ugucuccacucagcuguuu

SEQ ID NO: 651951 - RNA, 19 nt, Homo sapiens
  misc_RNA (1)...(19): siRNA sense strand
gagccaaugaugaucugaa

SEQ ID NO: 651952 - RNA, 19 nt, Homo sapiens
  misc_RNA (1)...(19): siRNA sense strand
gacauggccagaucucuca

SEQ ID NO: 651953 - RNA, 19 nt, Homo sapiens
  misc_RNA (1)...(19): siRNA sense strand
aauaggagccaaugaugau

SEQ ID NO: 651954 - RNA, 19 nt, Homo sapiens
  misc_RNA (1)...(19): siRNA sense strand
ggaacugccggagcccuuu

SEQ ID NO: 651955 - RNA, 19 nt, Homo sapiens
  misc_RNA (1)...(19): siRNA sense strand
guacgacagcgaccagauc

SEQ ID NO: 651956 - RNA, 19 nt, Homo sapiens
  misc_RNA (1)...(19): siRNA sense strand
caaugaugaucugaauuac

SEQ ID NO: 651957 - RNA, 19 nt, Homo sapiens
  misc_RNA (1)...(19): siRNA sense strand
caaugcagaauuaugaaag

SEQ ID NO: 651958 - RNA, 19 nt, Homo sapiens
  misc_RNA (1)...(19): siRNA sense strand
cgacagcgaccagaucaag

SEQ ID NO: 651959 - RNA, 19 nt, Homo sapiens
  misc_RNA (1)...(19): siRNA sense strand
agccaaugaugaucugaau

SEQ ID NO: 651960 - RNA, 19 nt, Homo sapiens
  misc_RNA (1)...(19): siRNA sense strand
cucagcaguucuuuggauu

SEQ ID NO: 651961 - RNA, 19 nt, Homo sapiens
  misc_RNA (1)...(19): siRNA sense strand
ccaaugaugaucugaauua

SEQ ID NO: 651962 - RNA, 19 nt, Homo sapiens
  misc_RNA (1)...(19): siRNA sense strand
gcagaauuaugaaagaaga

SEQ ID NO: 651963 - RNA, 19 nt, Homo sapiens
  misc_RNA (1)...(19): siRNA sense strand
gcaguucuuuggauuaaug

SEQ ID NO: 651964 - RNA, 19 nt, Homo sapiens
  misc_RNA (1)...(19): siRNA sense strand
gaaauaggagccaaugaug

SEQ ID NO: 651965 - RNA, 19 nt, Homo sapiens
  misc_RNA (1)...(19): siRNA sense strand
cagcaguucuuuggauuaa

SEQ ID NO: 651966 - RNA, 19 nt, Homo sapiens
  misc_RNA (1)...(19): siRNA sense strand
gcuguuugcagaagaaaua

SEQ ID NO: 651967 - RNA, 19 nt, Homo sapiens
  misc_RNA (1)...(19): siRNA sense strand
gaagaaauaggagccaaug

SEQ ID NO: 651968 - RNA, 19 nt, Homo sapiens
  misc_RNA (1)...(19): siRNA sense strand
ggccagaucucucacaaaa

SEQ ID NO: 651969 - RNA, 19 nt, Homo sapiens
  misc_RNA (1)...(19): siRNA sense strand
gcaaugcagaauuaugaaa

SEQ ID NO: 651970 - RNA, 19 nt, Homo sapiens
  misc_RNA (1)...(19): siRNA sense strand
gacccaagccucagcaguu

SEQ ID NO: 651971 - RNA, 19 nt, Homo sapiens
  misc_RNA (1)...(19): siRNA sense strand
agaaauaggagccaaugau

SEQ ID NO: 651972 - RNA, 19 nt, Homo sapiens
  misc_RNA (1)...(19): siRNA sense strand
augaugaucugaauuacug

SEQ ID NO: 651973 - RNA, 19 nt, Homo sapiens
  misc_RNA (1)...(19): siRNA sense strand
aaauaggagccaaugauga

SEQ ID NO: 651974 - RNA, 19 nt, Homo sapiens
  misc_RNA (1)...(19): siRNA sense strand
ccucagcaguucuuuggau

SEQ ID NO: 651975 - RNA, 19 nt, Homo sapiens
  misc_RNA (1)...(19): siRNA sense strand
gaacugccggagcccuuug

SEQ ID NO: 651976 - RNA, 19 nt, Homo sapiens
  misc_RNA (1)...(19): siRNA sense strand
ucagcaguucuuuggauua

SEQ ID NO: 651977 - RNA, 19 nt, Homo sapiens
  misc_RNA (1)...(19): siRNA sense strand
ucagcuguuugcagaagaa

SEQ ID NO: 651978 - RNA, 19 nt, Homo sapiens
  misc_RNA (1)...(19): siRNA sense strand
ugucuccacucagcuguuu

SEQ ID NO: 651979 - RNA, 19 nt, Homo sapiens
  misc_RNA (1)...(19): siRNA sense strand
gagccaaugaugaucugaa

SEQ ID NO: 651980 - RNA, 19 nt, Homo sapiens
  misc_RNA (1)...(19): siRNA sense strand
gacauggccagaucucuca

SEQ ID NO: 651981 - RNA, 19 nt, Homo sapiens
  misc_RNA (1)...(19): siRNA sense strand
aauaggagccaaugaugau

SEQ ID NO: 651982 - RNA, 19 nt, Homo sapiens
  misc_RNA (1)...(19): siRNA sense strand
ggaacugccggagcccuuu

SEQ ID NO: 651983 - RNA, 19 nt, Homo sapiens
  misc_RNA (1)...(19): siRNA sense strand
guacgacagcgaccagauc

SEQ ID NO: 651984 - RNA, 19 nt, Homo sapiens
  misc_RNA (1)...(19): siRNA sense strand
caaugaugaucugaauuac

SEQ ID NO: 651985 - RNA, 19 nt, Homo sapiens
  misc_RNA (1)...(19): siRNA sense strand
caaugcagaauuaugaaag

SEQ ID NO: 651986 - RNA, 19 nt, Homo sapiens
  misc_RNA (1)...(19): siRNA sense strand
cgacagcgaccagaucaag

SEQ ID NO: 651987 - RNA, 19 nt, Homo sapiens
  misc_RNA (1)...(19): siRNA sense strand
agccaaugaugaucugaau

SEQ ID NO: 651988 - RNA, 19 nt, Homo sapiens
  misc_RNA (1)...(19): siRNA sense strand
cucagcaguucuuuggauu

SEQ ID NO: 651989 - RNA, 19 nt, Homo sapiens
  misc_RNA (1)...(19): siRNA sense strand
ccaaugaugaucugaauua

SEQ ID NO: 651990 - RNA, 19 nt, Homo sapiens
  misc_RNA (1)...(19): siRNA sense strand
gcagaauuaugaaagaaga

SEQ ID NO: 651991 - RNA, 19 nt, Homo sapiens
  misc_RNA (1)...(19): siRNA sense strand
gcaguucuuuggauuaaug

SEQ ID NO: 651992 - RNA, 19 nt, Homo sapiens
  misc_RNA (1)...(19): siRNA sense strand
gaaauaggagccaaugaug

SEQ ID NO: 651993 - RNA, 19 nt, Homo sapiens
  misc_RNA (1)...(19): siRNA sense strand
cagcaguucuuuggauuaa

SEQ ID NO: 651994 - RNA, 19 nt, Homo sapiens
  misc_RNA (1)...(19): siRNA sense strand
gcuguuugcagaagaaaua

SEQ ID NO: 651995 - RNA, 19 nt, Homo sapiens
  misc_RNA (1)...(19): siRNA sense strand
gaagaaauaggagccaaug

SEQ ID NO: 651996 - RNA, 19 nt, Homo sapiens
  misc_RNA (1)...(19): siRNA sense strand
ggccagaucucucacaaaa

SEQ ID NO: 651997 - RNA, 19 nt, Homo sapiens
  misc_RNA (1)...(19): siRNA sense strand
gcaaugcagaauuaugaaa

SEQ ID NO: 651998 - RNA, 19 nt, Homo sapiens
  misc_RNA (1)...(19): siRNA sense strand
gacccaagccucagcaguu

SEQ ID NO: 651999 - RNA, 19 nt, Homo sapiens
  misc_RNA (1)...(19): siRNA sense strand
agaaauaggagccaaugau

SEQ ID NO: 652000 - RNA, 19 nt, Homo sapiens
  misc_RNA (1)...(19): siRNA sense strand
augaugaucugaauuacug

SEQ ID NO: 652001 - RNA, 19 nt, Homo sapiens
  misc_RNA (1)...(19): siRNA sense strand
aaauaggagccaaugauga

SEQ ID NO: 652002 - RNA, 19 nt, Homo sapiens
  misc_RNA (1)...(19): siRNA sense strand
ccucagcaguucuuuggau

SEQ ID NO: 652003 - RNA, 19 nt, Homo sapiens
  misc_RNA (1)...(19): siRNA sense strand
gaacugccggagcccuuug

SEQ ID NO: 652004 - RNA, 19 nt, Homo sapiens
  misc_RNA (1)...(19): siRNA sense strand
ucagcaguucuuuggauua

SEQ ID NO: 652005 - RNA, 19 nt, Homo sapiens
  misc_RNA (1)...(19): siRNA sense strand
ucagcuguuugcagaagaa

SEQ ID NO: 652006 - RNA, 19 nt, Homo sapiens
  misc_RNA (1)...(19): siRNA sense strand
ugucuccacucagcuguuu

SEQ ID NO: 652007 - RNA, 19 nt, Homo sapiens
  misc_RNA (1)...(19): siRNA sense strand
gagccaaugaugaucugaa

SEQ ID NO: 652008 - RNA, 19 nt, Homo sapiens
  misc_RNA (1)...(19): siRNA sense strand
gacauggccagaucucuca

SEQ ID NO: 652009 - RNA, 19 nt, Homo sapiens
  misc_RNA (1)...(19): siRNA sense strand
aauaggagccaaugaugau

SEQ ID NO: 652010 - RNA, 19 nt, Homo sapiens
  misc_RNA (1)...(19): siRNA sense strand
ggaacugccggagcccuuu

SEQ ID NO: 652011 - RNA, 19 nt, Homo sapiens
  misc_RNA (1)...(19): siRNA sense strand
guacgacagcgaccagauc

SEQ ID NO: 652012 - RNA, 19 nt, Homo sapiens
  misc_RNA (1)...(19): siRNA sense strand
caaugaugaucugaauuac

SEQ ID NO: 652013 - RNA, 19 nt, Homo sapiens
  misc_RNA (1)...(19): siRNA sense strand
caaugcagaauuaugaaag

SEQ ID NO: 652014 - RNA, 19 nt, Homo sapiens
  misc_RNA (1)...(19): siRNA sense strand
cgacagcgaccagaucaag

SEQ ID NO: 652015 - RNA, 19 nt, Homo sapiens
  misc_RNA (1)...(19): siRNA sense strand
agccaaugaugaucugaau

SEQ ID NO: 652016 - RNA, 19 nt, Homo sapiens
  misc_RNA (1)...(19): siRNA sense strand
cucagcaguucuuuggauu

SEQ ID NO: 652017 - RNA, 19 nt, Homo sapiens
  misc_RNA (1)...(19): siRNA sense strand
gagaaaggcaucauauuua

SEQ ID NO: 652018 - RNA, 19 nt, Homo sapiens
  misc_RNA (1)...(19): siRNA sense strand
ggacaaacauuauccugaa

SEQ ID NO: 652019 - RNA, 19 nt, Homo sapiens
  misc_RNA (1)...(19): siRNA sense strand
caaagaauguuccuuauag

SEQ ID NO: 652020 - RNA, 19 nt, Homo sapiens
  misc_RNA (1)...(19): siRNA sense strand
gcaaagcacccuaauguug

SEQ ID NO: 652021 - RNA, 19 nt, Homo sapiens
  misc_RNA (1)...(19): siRNA sense strand
gcaaagaauguuccuuaua

SEQ ID NO: 652022 - RNA, 19 nt, Homo sapiens
  misc_RNA (1)...(19): siRNA sense strand
ggaagaauguauggacuuu

SEQ ID NO: 652023 - RNA, 19 nt, Homo sapiens
  misc_RNA (1)...(19): siRNA sense strand
aaacacaucuggacagguu

SEQ ID NO: 652024 - RNA, 19 nt, Homo sapiens
  misc_RNA (1)...(19): siRNA sense strand
gaaaguacaucgccauggu

SEQ ID NO: 652025 - RNA, 19 nt, Homo sapiens
  misc_RNA (1)...(19): siRNA sense strand
gcaaagccuuagaagauga

SEQ ID NO: 652026 - RNA, 19 nt, Homo sapiens
  misc_RNA (1)...(19): siRNA sense strand
ggagaggaaacacucauua

SEQ ID NO: 652027 - RNA, 19 nt, Homo sapiens
  misc_RNA (1)...(19): siRNA sense strand
uaaaggaaauccagacugu

SEQ ID NO: 652028 - RNA, 19 nt, Homo sapiens
  misc_RNA (1)...(19): siRNA sense strand
gaaagaugccauagaaguu

SEQ ID NO: 652029 - RNA, 19 nt, Homo sapiens
  misc_RNA (1)...(19): siRNA sense strand
gcgcaaagccuuagaagau

SEQ ID NO: 652030 - RNA, 19 nt, Homo sapiens
  misc_RNA (1)...(19): siRNA sense strand
ugagaaaggcaucauauuu

SEQ ID NO: 652031 - RNA, 19 nt, Homo sapiens
  misc_RNA (1)...(19): siRNA sense strand
ccaaugaauuuacucuuga

SEQ ID NO: 652032 - RNA, 19 nt, Homo sapiens
  misc_RNA (1)...(19): siRNA sense strand
gaggaaacacucauuauca

SEQ ID NO: 652033 - RNA, 19 nt, Homo sapiens
  misc_RNA (1)...(19): siRNA sense strand
aaccagacaucuucuuuaa

SEQ ID NO: 652034 - RNA, 19 nt, Homo sapiens
  misc_RNA (1)...(19): siRNA sense strand
cgaaagugcuaucgugguu

SEQ ID NO: 652035 - RNA, 19 nt, Homo sapiens
  misc_RNA (1)...(19): siRNA sense strand
agaagucugucaaggauuu

SEQ ID NO: 652036 - RNA, 19 nt, Homo sapiens
  misc_RNA (1)...(19): siRNA sense strand
uggaggaggugaccaauga

SEQ ID NO: 652037 - RNA, 19 nt, Homo sapiens
  misc_RNA (1)...(19): siRNA sense strand
aagagaaacuggaagaaug

SEQ ID NO: 652038 - RNA, 19 nt, Homo sapiens
  misc_RNA (1)...(19): siRNA sense strand
caaagcacccuaauguuga

SEQ ID NO: 652039 - RNA, 19 nt, Homo sapiens
  misc_RNA (1)...(19): siRNA sense strand
agagagacauaaagauuga

SEQ ID NO: 652040 - RNA, 19 nt, Homo sapiens
  misc_RNA (1)...(19): siRNA sense strand
gaagagaaacuggaagaau

SEQ ID NO: 652041 - RNA, 19 nt, Homo sapiens
  misc_RNA (1)...(19): siRNA sense strand
ugaacccgauacauuauaa

SEQ ID NO: 652042 - RNA, 19 nt, Homo sapiens
  misc_RNA (1)...(19): siRNA sense strand
gagagagacauaaagauug

SEQ ID NO: 652043 - RNA, 19 nt, Homo sapiens
  misc_RNA (1)...(19): siRNA sense strand
gaggaucccuuuggacgaa

SEQ ID NO: 652044 - RNA, 19 nt, Homo sapiens
  misc_RNA (1)...(19): siRNA sense strand
gcacccagaugagacuaaa

SEQ ID NO: 652045 - RNA, 19 nt, Homo sapiens
  misc_RNA (1)...(19): siRNA sense strand
aaagugcuaucgugguuaa

SEQ ID NO: 652046 - RNA, 19 nt, Homo sapiens
  misc_RNA (1)...(19): siRNA sense strand
uuugaaagaugccauagaa

SEQ ID NO: 652047 - RNA, 19 nt, Homo sapiens
  misc_RNA (1)...(19): siRNA sense strand
aaggaaauccagacuguua

SEQ ID NO: 652048 - RNA, 19 nt, Homo sapiens
  misc_RNA (1)...(19): siRNA sense strand
caccaugucugucucuuug

SEQ ID NO: 652049 - RNA, 19 nt, Homo sapiens
  misc_RNA (1)...(19): siRNA sense strand
gaaacguggugaccugaca

SEQ ID NO: 652050 - RNA, 19 nt, Homo sapiens
  misc_RNA (1)...(19): siRNA sense strand
ggacuuugccacugaguug

SEQ ID NO: 652051 - RNA, 19 nt, Homo sapiens
  misc_RNA (1)...(19): siRNA sense strand
cuuagaagaugauguaauc

SEQ ID NO: 652052 - RNA, 19 nt, Homo sapiens
  misc_RNA (1)...(19): siRNA sense strand
ugagagagacauaaagauu

SEQ ID NO: 652053 - RNA, 19 nt, Homo sapiens
  misc_RNA (1)...(19): siRNA sense strand
acucgacccuucuuuauga

SEQ ID NO: 652054 - RNA, 19 nt, Homo sapiens
  misc_RNA (1)...(19): siRNA sense strand
ggaaauccagacuguuauu

SEQ ID NO: 652055 - RNA, 19 nt, Homo sapiens
  misc_RNA (1)...(19): siRNA sense strand
guggugaccugacaagaga

SEQ ID NO: 652056 - RNA, 19 nt, Homo sapiens
  misc_RNA (1)...(19): siRNA sense strand
ugagaagucugucaaggau

SEQ ID NO: 652057 - RNA, 19 nt, Homo sapiens
  misc_RNA (1)...(19): siRNA sense strand
caaaccagacaucuucuuu

SEQ ID NO: 652058 - RNA, 19 nt, Homo sapiens
  misc_RNA (1)...(19): siRNA sense strand
ggcaagcucuccucaucaa

SEQ ID NO: 652059 - RNA, 19 nt, Homo sapiens
  misc_RNA (1)...(19): siRNA sense strand
caacucgacccuucuuuau

SEQ ID NO: 652060 - RNA, 19 nt, Homo sapiens
  misc_RNA (1)...(19): siRNA sense strand
guauggacuuugccacuga

SEQ ID NO: 652061 - RNA, 19 nt, Homo sapiens
  misc_RNA (1)...(19): siRNA sense strand
gagaggaaacacucauuau

SEQ ID NO: 652062 - RNA, 19 nt, Homo sapiens
  misc_RNA (1)...(19): siRNA sense strand
aaaccagacaucuucuuua

SEQ ID NO: 652063 - RNA, 19 nt, Homo sapiens
  misc_RNA (1)...(19): siRNA sense strand
caucaaaccagacaucuuc

SEQ ID NO: 652064 - RNA, 19 nt, Homo sapiens
  misc_RNA (1)...(19): siRNA sense strand
gaaagugcuaucgugguua

SEQ ID NO: 652065 - RNA, 19 nt, Homo sapiens
  misc_RNA (1)...(19): siRNA sense strand
cccaaugaauuuacucuug

SEQ ID NO: 652066 - RNA, 19 nt, Homo sapiens
  misc_RNA (1)...(19): siRNA sense strand
gaaacuggaagaauguaug

SEQ ID NO: 652067 - RNA, 19 nt, Homo sapiens
  misc_RNA (1)...(19): siRNA sense strand
guugagagcauacagaaga

SEQ ID NO: 652068 - RNA, 19 nt, Homo sapiens
  misc_RNA (1)...(19): siRNA sense strand
gaagaggcaauaauaaagg

SEQ ID NO: 652069 - RNA, 19 nt, Homo sapiens
  misc_RNA (1)...(19): siRNA sense strand
ggucaugcgcaaagccuua

SEQ ID NO: 652070 - RNA, 19 nt, Homo sapiens
  misc_RNA (1)...(19): siRNA sense strand
gaaauccagacuguuauug

SEQ ID NO: 652071 - RNA, 19 nt, Homo sapiens
  misc_RNA (1)...(19): siRNA sense strand
uugcaaagaauguuccuua

SEQ ID NO: 652072 - RNA, 19 nt, Homo sapiens
  misc_RNA (1)...(19): siRNA sense strand
ggugagagagacauaaaga

SEQ ID NO: 652073 - RNA, 19 nt, Homo sapiens
  misc_RNA (1)...(19): siRNA sense strand
gacaaacauuauccugaau

SEQ ID NO: 652074 - RNA, 19 nt, Homo sapiens
  misc_RNA (1)...(19): siRNA sense strand
ggcaucauauuuaacaaca

SEQ ID NO: 652075 - RNA, 19 nt, Homo sapiens
  misc_RNA (1)...(19): siRNA sense strand
ggaaaugcugaacccgaua

SEQ ID NO: 652076 - RNA, 19 nt, Homo sapiens
  misc_RNA (1)...(19): siRNA sense strand
guugaagaggcaauaauaa

SEQ ID NO: 652077 - RNA, 19 nt, Homo sapiens
  misc_RNA (1)...(19): siRNA sense strand
gaaccagugcauauuggaa

SEQ ID NO: 652078 - RNA, 19 nt, Homo sapiens
  misc_RNA (1)...(19): siRNA sense strand
ugaaagaugccauagaagu

SEQ ID NO: 652079 - RNA, 19 nt, Homo sapiens
  misc_RNA (1)...(19): siRNA sense strand
acaacucgacccuucuuua

SEQ ID NO: 652080 - RNA, 19 nt, Homo sapiens
  misc_RNA (1)...(19): siRNA sense strand
caaggacaguguguugaga

SEQ ID NO: 652081 - RNA, 19 nt, Homo sapiens
  misc_RNA (1)...(19): siRNA sense strand
agaauguuccuuauaggua

SEQ ID NO: 652082 - RNA, 19 nt, Homo sapiens
  misc_RNA (1)...(19): siRNA sense strand
caagagagaaugugaacca

SEQ ID NO: 652083 - RNA, 19 nt, Homo sapiens
  misc_RNA (1)...(19): siRNA sense strand
ggauuugaaagaugccaua

SEQ ID NO: 652084 - RNA, 19 nt, Homo sapiens
  misc_RNA (1)...(19): siRNA sense strand
gauuccacgugaagacauu

SEQ ID NO: 652085 - RNA, 19 nt, Homo sapiens
  misc_RNA (1)...(19): siRNA sense strand
gaaugugaaccagugcaua

SEQ ID NO: 652086 - RNA, 19 nt, Homo sapiens
  misc_RNA (1)...(19): siRNA sense strand
ccaugucugucucuuuguu

SEQ ID NO: 652087 - RNA, 19 nt, Homo sapiens
  misc_RNA (1)...(19): siRNA sense strand
ugaaagccauccucguuac

SEQ ID NO: 652088 - RNA, 19 nt, Homo sapiens
  misc_RNA (1)...(19): siRNA sense strand
aaacacucauuaucagcaa

SEQ ID NO: 652089 - RNA, 19 nt, Homo sapiens
  misc_RNA (1)...(19): siRNA sense strand
aaagcacccuaauguugaa

SEQ ID NO: 652090 - RNA, 19 nt, Homo sapiens
  misc_RNA (1)...(19): siRNA sense strand
cagaagagaaacuggaaga

SEQ ID NO: 652091 - RNA, 19 nt, Homo sapiens
  misc_RNA (1)...(19): siRNA sense strand
agaagaugauguaaucgau

SEQ ID NO: 652092 - RNA, 19 nt, Homo sapiens
  misc_RNA (1)...(19): siRNA sense strand
cagcaaguccucaaguaug

SEQ ID NO: 652093 - RNA, 19 nt, Homo sapiens
  misc_RNA (1)...(19): siRNA sense strand
cuaacacgcucuucuugag

SEQ ID NO: 652094 - RNA, 19 nt, Homo sapiens
  misc_RNA (1)...(19): siRNA sense strand
cauuacagcucucgauucg

SEQ ID NO: 652095 - RNA, 19 nt, Homo sapiens
  misc_RNA (1)...(19): siRNA sense strand
uacagaagauacacgacuu

SEQ ID NO: 652096 - RNA, 19 nt, Homo sapiens
  misc_RNA (1)...(19): siRNA sense strand
cccgauacauuauaacauc

SEQ ID NO: 652097 - RNA, 19 nt, Homo sapiens
  misc_RNA (1)...(19): siRNA sense strand
uguugaagaggcaauaaua

SEQ ID NO: 652098 - RNA, 19 nt, Homo sapiens
  misc_RNA (1)...(19): siRNA sense strand
uugcaaagcacccuaaugu

SEQ ID NO: 652099 - RNA, 19 nt, Homo sapiens
  misc_RNA (1)...(19): siRNA sense strand
ugaagaggcaauaauaaag

SEQ ID NO: 652100 - RNA, 19 nt, Homo sapiens
  misc_RNA (1)...(19): siRNA sense strand
gggcacauccucaauacca

SEQ ID NO: 652101 - RNA, 19 nt, Homo sapiens
  misc_RNA (1)...(19): siRNA sense strand
gaggcaauaauaaaggaaa

SEQ ID NO: 652102 - RNA, 19 nt, Homo sapiens
  misc_RNA (1)...(19): siRNA sense strand
gagaaacuggaagaaugua

SEQ ID NO: 652103 - RNA, 19 nt, Homo sapiens
  misc_RNA (1)...(19): siRNA sense strand
gacaguguguugagagcau

SEQ ID NO: 652104 - RNA, 19 nt, Homo sapiens
  misc_RNA (1)...(19): siRNA sense strand
gcaaggacaguguguugag

SEQ ID NO: 652105 - RNA, 19 nt, Homo sapiens
  misc_RNA (1)...(19): siRNA sense strand
ugcaaagaauguuccuuau

SEQ ID NO: 652106 - RNA, 19 nt, Homo sapiens
  misc_RNA (1)...(19): siRNA sense strand
caaugaaucgggcuaugug

SEQ ID NO: 652107 - RNA, 19 nt, Homo sapiens
  misc_RNA (1)...(19): siRNA sense strand
caaacccaaugaauuuacu

SEQ ID NO: 652108 - RNA, 19 nt, Homo sapiens
  misc_RNA (1)...(19): siRNA sense strand
cgcaaagccuuagaagaug

SEQ ID NO: 652109 - RNA, 19 nt, Homo sapiens
  misc_RNA (1)...(19): siRNA sense strand
aagaggcaauaauaaagga

SEQ ID NO: 652110 - RNA, 19 nt, Homo sapiens
  misc_RNA (1)...(19): siRNA sense strand
ugcugaacccgauacauua

SEQ ID NO: 652111 - RNA, 19 nt, Homo sapiens
  misc_RNA (1)...(19): siRNA sense strand
gaaagccauccucguuaca

SEQ ID NO: 652112 - RNA, 19 nt, Homo sapiens
  misc_RNA (1)...(19): siRNA sense strand
gcugaacccgauacauuau

SEQ ID NO: 652113 - RNA, 19 nt, Homo sapiens
  misc_RNA (1)...(19): siRNA sense strand
ggaauuaugagggcacauc

SEQ ID NO: 652114 - RNA, 19 nt, Homo sapiens
  misc_RNA (1)...(19): siRNA sense strand
gaaaggcaucauauuuaac

SEQ ID NO: 652115 - RNA, 19 nt, Homo sapiens
  misc_RNA (1)...(19): siRNA sense strand
aaagaauguuccuuauagg

SEQ ID NO: 652116 - RNA, 19 nt, Homo sapiens
  misc_RNA (1)...(19): siRNA sense strand
auagguacuuucagccauu

SEQ ID NO: 652117 - RNA, 19 nt, Homo sapiens
  misc_RNA (1)...(19): siRNA sense strand
gagaaaggcaucauauuua

SEQ ID NO: 652118 - RNA, 19 nt, Homo sapiens
  misc_RNA (1)...(19): siRNA sense strand
ggacaaacauuauccugaa

SEQ ID NO: 652119 - RNA, 19 nt, Homo sapiens
  misc_RNA (1)...(19): siRNA sense strand
caaagaauguuccuuauag

SEQ ID NO: 652120 - RNA, 19 nt, Homo sapiens
  misc_RNA (1)...(19): siRNA sense strand
gcaaagcacccuaauguug

SEQ ID NO: 652121 - RNA, 19 nt, Homo sapiens
  misc_RNA (1)...(19): siRNA sense strand
gcaaagaauguuccuuaua

SEQ ID NO: 652122 - RNA, 19 nt, Homo sapiens
  misc_RNA (1)...(19): siRNA sense strand
ggaagaauguauggacuuu

SEQ ID NO: 652123 - RNA, 19 nt, Homo sapiens
  misc_RNA (1)...(19): siRNA sense strand
aaacacaucuggacagguu

SEQ ID NO: 652124 - RNA, 19 nt, Homo sapiens
  misc_RNA (1)...(19): siRNA sense strand
gaaaguacaucgccauggu

SEQ ID NO: 652125 - RNA, 19 nt, Homo sapiens
  misc_RNA (1)...(19): siRNA sense strand
gcaaagccuuagaagauga

SEQ ID NO: 652126 - RNA, 19 nt, Homo sapiens
  misc_RNA (1)...(19): siRNA sense strand
ggagaggaaacacucauua

SEQ ID NO: 652127 - RNA, 19 nt, Homo sapiens
  misc_RNA (1)...(19): siRNA sense strand
uaaaggaaauccagacugu

SEQ ID NO: 652128 - RNA, 19 nt, Homo sapiens
  misc_RNA (1)...(19): siRNA sense strand
gaaagaugccauagaaguu

SEQ ID NO: 652129 - RNA, 19 nt, Homo sapiens
  misc_RNA (1)...(19): siRNA sense strand
gcgcaaagccuuagaagau

SEQ ID NO: 652130 - RNA, 19 nt, Homo sapiens
  misc_RNA (1)...(19): siRNA sense strand
ugagaaaggcaucauauuu

SEQ ID NO: 652131 - RNA, 19 nt, Homo sapiens
  misc_RNA (1)...(19): siRNA sense strand
ccaaugaauuuacucuuga

SEQ ID NO: 652132 - RNA, 19 nt, Homo sapiens
  misc_RNA (1)...(19): siRNA sense strand
gaggaaacacucauuauca

SEQ ID NO: 652133 - RNA, 19 nt, Homo sapiens
  misc_RNA (1)...(19): siRNA sense strand
aaccagacaucuucuuuaa

SEQ ID NO: 652134 - RNA, 19 nt, Homo sapiens
  misc_RNA (1)...(19): siRNA sense strand
cgaaagugcuaucgugguu

SEQ ID NO: 652135 - RNA, 19 nt, Homo sapiens
  misc_RNA (1)...(19): siRNA sense strand
agaagucugucaaggauuu

SEQ ID NO: 652136 - RNA, 19 nt, Homo sapiens
  misc_RNA (1)...(19): siRNA sense strand
uggaggaggugaccaauga

SEQ ID NO: 652137 - RNA, 19 nt, Homo sapiens
  misc_RNA (1)...(19): siRNA sense strand
aagagaaacuggaagaaug

SEQ ID NO: 652138 - RNA, 19 nt, Homo sapiens
  misc_RNA (1)...(19): siRNA sense strand
caaagcacccuaauguuga

SEQ ID NO: 652139 - RNA, 19 nt, Homo sapiens
  misc_RNA (1)...(19): siRNA sense strand
agagagacauaaagauuga

SEQ ID NO: 652140 - RNA, 19 nt, Homo sapiens
  misc_RNA (1)...(19): siRNA sense strand
gaagagaaacuggaagaau

SEQ ID NO: 652141 - RNA, 19 nt, Homo sapiens
  misc_RNA (1)...(19): siRNA sense strand
ugaacccgauacauuauaa

SEQ ID NO: 652142 - RNA, 19 nt, Homo sapiens
  misc_RNA (1)...(19): siRNA sense strand
gagagagacauaaagauug

SEQ ID NO: 652143 - RNA, 19 nt, Homo sapiens
  misc_RNA (1)...(19): siRNA sense strand
gaggaucccuuuggacgaa

SEQ ID NO: 652144 - RNA, 19 nt, Homo sapiens
  misc_RNA (1)...(19): siRNA sense strand
gcacccagaugagacuaaa

SEQ ID NO: 652145 - RNA, 19 nt, Homo sapiens
  misc_RNA (1)...(19): siRNA sense strand
aaagugcuaucgugguuaa

SEQ ID NO: 652146 - RNA, 19 nt, Homo sapiens
  misc_RNA (1)...(19): siRNA sense strand
uuugaaagaugccauagaa

SEQ ID NO: 652147 - RNA, 19 nt, Homo sapiens
  misc_RNA (1)...(19): siRNA sense strand
aaggaaauccagacuguua

SEQ ID NO: 652148 - RNA, 19 nt, Homo sapiens
  misc_RNA (1)...(19): siRNA sense strand
caccaugucugucucuuug

SEQ ID NO: 652149 - RNA, 19 nt, Homo sapiens
  misc_RNA (1)...(19): siRNA sense strand
gaaacguggugaccugaca

SEQ ID NO: 652150 - RNA, 19 nt, Homo sapiens
  misc_RNA (1)...(19): siRNA sense strand
ggacuuugccacugaguug

SEQ ID NO: 652151 - RNA, 19 nt, Homo sapiens
  misc_RNA (1)...(19): siRNA sense strand
cuuagaagaugauguaauc

SEQ ID NO: 652152 - RNA, 19 nt, Homo sapiens
  misc_RNA (1)...(19): siRNA sense strand
ugagagagacauaaagauu

SEQ ID NO: 652153 - RNA, 19 nt, Homo sapiens
  misc_RNA (1)...(19): siRNA sense strand
acucgacccuucuuuauga

SEQ ID NO: 652154 - RNA, 19 nt, Homo sapiens
  misc_RNA (1)...(19): siRNA sense strand
ggaaauccagacuguuauu

SEQ ID NO: 652155 - RNA, 19 nt, Homo sapiens
  misc_RNA (1)...(19): siRNA sense strand
guggugaccugacaagaga

SEQ ID NO: 652156 - RNA, 19 nt, Homo sapiens
  misc_RNA (1)...(19): siRNA sense strand
ugagaagucugucaaggau

SEQ ID NO: 652157 - RNA, 19 nt, Homo sapiens
  misc_RNA (1)...(19): siRNA sense strand
caaaccagacaucuucuuu

SEQ ID NO: 652158 - RNA, 19 nt, Homo sapiens
  misc_RNA (1)...(19): siRNA sense strand
ggcaagcucuccucaucaa

SEQ ID NO: 652159 - RNA, 19 nt, Homo sapiens
  misc_RNA (1)...(19): siRNA sense strand
caacucgacccuucuuuau

SEQ ID NO: 652160 - RNA, 19 nt, Homo sapiens
  misc_RNA (1)...(19): siRNA sense strand
guauggacuuugccacuga

SEQ ID NO: 652161 - RNA, 19 nt, Homo sapiens
  misc_RNA (1)...(19): siRNA sense strand
gagaggaaacacucauuau

SEQ ID NO: 652162 - RNA, 19 nt, Homo sapiens
  misc_RNA (1)...(19): siRNA sense strand
aaaccagacaucuucuuua

SEQ ID NO: 652163 - RNA, 19 nt, Homo sapiens
  misc_RNA (1)...(19): siRNA sense strand
caucaaaccagacaucuuc

SEQ ID NO: 652164 - RNA, 19 nt, Homo sapiens
  misc_RNA (1)...(19): siRNA sense strand
gaaagugcuaucgugguua

SEQ ID NO: 652165 - RNA, 19 nt, Homo sapiens
  misc_RNA (1)...(19): siRNA sense strand
cccaaugaauuuacucuug

SEQ ID NO: 652166 - RNA, 19 nt, Homo sapiens
  misc_RNA (1)...(19): siRNA sense strand
gaaacuggaagaauguaug

SEQ ID NO: 652167 - RNA, 19 nt, Homo sapiens
  misc_RNA (1)...(19): siRNA sense strand
guugagagcauacagaaga

SEQ ID NO: 652168 - RNA, 19 nt, Homo sapiens
  misc_RNA (1)...(19): siRNA sense strand
gaagaggcaauaauaaagg

SEQ ID NO: 652169 - RNA, 19 nt, Homo sapiens
  misc_RNA (1)...(19): siRNA sense strand
ggucaugcgcaaagccuua

SEQ ID NO: 652170 - RNA, 19 nt, Homo sapiens
  misc_RNA (1)...(19): siRNA sense strand
gaaauccagacuguuauug

SEQ ID NO: 652171 - RNA, 19 nt, Homo sapiens
  misc_RNA (1)...(19): siRNA sense strand
uugcaaagaauguuccuua

SEQ ID NO: 652172 - RNA, 19 nt, Homo sapiens
  misc_RNA (1)...(19): siRNA sense strand
ggugagagagacauaaaga

SEQ ID NO: 652173 - RNA, 19 nt, Homo sapiens
  misc_RNA (1)...(19): siRNA sense strand
gacaaacauuauccugaau

SEQ ID NO: 652174 - RNA, 19 nt, Homo sapiens
  misc_RNA (1)...(19): siRNA sense strand
ggcaucauauuuaacaaca

SEQ ID NO: 652175 - RNA, 19 nt, Homo sapiens
  misc_RNA (1)...(19): siRNA sense strand
ggaaaugcugaacccgaua

SEQ ID NO: 652176 - RNA, 19 nt, Homo sapiens
  misc_RNA (1)...(19): siRNA sense strand
guugaagaggcaauaauaa

SEQ ID NO: 652177 - RNA, 19 nt, Homo sapiens
  misc_RNA (1)...(19): siRNA sense strand
gaaccagugcauauuggaa

SEQ ID NO: 652178 - RNA, 19 nt, Homo sapiens
  misc_RNA (1)...(19): siRNA sense strand
ugaaagaugccauagaagu

SEQ ID NO: 652179 - RNA, 19 nt, Homo sapiens
  misc_RNA (1)...(19): siRNA sense strand
acaacucgacccuucuuua

SEQ ID NO: 652180 - RNA, 19 nt, Homo sapiens
  misc_RNA (1)...(19): siRNA sense strand
caaggacaguguguugaga

SEQ ID NO: 652181 - RNA, 19 nt, Homo sapiens
  misc_RNA (1)...(19): siRNA sense strand
agaauguuccuuauaggua

SEQ ID NO: 652182 - RNA, 19 nt, Homo sapiens
  misc_RNA (1)...(19): siRNA sense strand
caagagagaaugugaacca

SEQ ID NO: 652183 - RNA, 19 nt, Homo sapiens
  misc_RNA (1)...(19): siRNA sense strand
ggauuugaaagaugccaua

SEQ ID NO: 652184 - RNA, 19 nt, Homo sapiens
  misc_RNA (1)...(19): siRNA sense strand
gauuccacgugaagacauu

SEQ ID NO: 652185 - RNA, 19 nt, Homo sapiens
  misc_RNA (1)...(19): siRNA sense strand
gaaugugaaccagugcaua

SEQ ID NO: 652186 - RNA, 19 nt, Homo sapiens
  misc_RNA (1)...(19): siRNA sense strand
ccaugucugucucuuuguu

SEQ ID NO: 652187 - RNA, 19 nt, Homo sapiens
  misc_RNA (1)...(19): siRNA sense strand
ugaaagccauccucguuac

SEQ ID NO: 652188 - RNA, 19 nt, Homo sapiens
  misc_RNA (1)...(19): siRNA sense strand
aaacacucauuaucagcaa

SEQ ID NO: 652189 - RNA, 19 nt, Homo sapiens
  misc_RNA (1)...(19): siRNA sense strand
aaagcacccuaauguugaa

SEQ ID NO: 652190 - RNA, 19 nt, Homo sapiens
  misc_RNA (1)...(19): siRNA sense strand
cagaagagaaacuggaaga

SEQ ID NO: 652191 - RNA, 19 nt, Homo sapiens
  misc_RNA (1)...(19): siRNA sense strand
agaagaugauguaaucgau

SEQ ID NO: 652192 - RNA, 19 nt, Homo sapiens
  misc_RNA (1)...(19): siRNA sense strand
cagcaaguccucaaguaug

SEQ ID NO: 652193 - RNA, 19 nt, Homo sapiens
  misc_RNA (1)...(19): siRNA sense strand
cuaacacgcucuucuugag

SEQ ID NO: 652194 - RNA, 19 nt, Homo sapiens
  misc_RNA (1)...(19): siRNA sense strand
cauuacagcucucgauucg

SEQ ID NO: 652195 - RNA, 19 nt, Homo sapiens
  misc_RNA (1)...(19): siRNA sense strand
uacagaagauacacgacuu

SEQ ID NO: 652196 - RNA, 19 nt, Homo sapiens
  misc_RNA (1)...(19): siRNA sense strand
cccgauacauuauaacauc

SEQ ID NO: 652197 - RNA, 19 nt, Homo sapiens
  misc_RNA (1)...(19): siRNA sense strand
uguugaagaggcaauaaua

SEQ ID NO: 652198 - RNA, 19 nt, Homo sapiens
  misc_RNA (1)...(19): siRNA sense strand
uugcaaagcacccuaaugu

SEQ ID NO: 652199 - RNA, 19 nt, Homo sapiens
  misc_RNA (1)...(19): siRNA sense strand
ugaagaggcaauaauaaag

SEQ ID NO: 652200 - RNA, 19 nt, Homo sapiens
  misc_RNA (1)...(19): siRNA sense strand
gggcacauccucaauacca

SEQ ID NO: 652201 - RNA, 19 nt, Homo sapiens
  misc_RNA (1)...(19): siRNA sense strand
gaggcaauaauaaaggaaa

SEQ ID NO: 652202 - RNA, 19 nt, Homo sapiens
  misc_RNA (1)...(19): siRNA sense strand
gagaaacuggaagaaugua

SEQ ID NO: 652203 - RNA, 19 nt, Homo sapiens
  misc_RNA (1)...(19): siRNA sense strand
gacaguguguugagagcau

SEQ ID NO: 652204 - RNA, 19 nt, Homo sapiens
  misc_RNA (1)...(19): siRNA sense strand
gcaaggacaguguguugag

SEQ ID NO: 652205 - RNA, 19 nt, Homo sapiens
  misc_RNA (1)...(19): siRNA sense strand
ugcaaagaauguuccuuau

SEQ ID NO: 652206 - RNA, 19 nt, Homo sapiens
  misc_RNA (1)...(19): siRNA sense strand
caaugaaucgggcuaugug

SEQ ID NO: 652207 - RNA, 19 nt, Homo sapiens
  misc_RNA (1)...(19): siRNA sense strand
caaacccaaugaauuuacu

SEQ ID NO: 652208 - RNA, 19 nt, Homo sapiens
  misc_RNA (1)...(19): siRNA sense strand
cgcaaagccuuagaagaug

SEQ ID NO: 652209 - RNA, 19 nt, Homo sapiens
  misc_RNA (1)...(19): siRNA sense strand
aagaggcaauaauaaagga

SEQ ID NO: 652210 - RNA, 19 nt, Homo sapiens
  misc_RNA (1)...(19): siRNA sense strand
ugcugaacccgauacauua

SEQ ID NO: 652211 - RNA, 19 nt, Homo sapiens
  misc_RNA (1)...(19): siRNA sense strand
gaaagccauccucguuaca

SEQ ID NO: 652212 - RNA, 19 nt, Homo sapiens
  misc_RNA (1)...(19): siRNA sense strand
gcugaacccgauacauuau

SEQ ID NO: 652213 - RNA, 19 nt, Homo sapiens
  misc_RNA (1)...(19): siRNA sense strand
ggaauuaugagggcacauc

SEQ ID NO: 652214 - RNA, 19 nt, Homo sapiens
  misc_RNA (1)...(19): siRNA sense strand
gaaaggcaucauauuuaac

SEQ ID NO: 652215 - RNA, 19 nt, Homo sapiens
  misc_RNA (1)...(19): siRNA sense strand
aaagaauguuccuuauagg

SEQ ID NO: 652216 - RNA, 19 nt, Homo sapiens
  misc_RNA (1)...(19): siRNA sense strand
auagguacuuucagccauu

SEQ ID NO: 652217 - RNA, 19 nt, Homo sapiens
  misc_RNA (1)...(19): siRNA sense strand
gagaaaggcaucauauuua

SEQ ID NO: 652218 - RNA, 19 nt, Homo sapiens
  misc_RNA (1)...(19): siRNA sense strand
ggacaaacauuauccugaa

SEQ ID NO: 652219 - RNA, 19 nt, Homo sapiens
  misc_RNA (1)...(19): siRNA sense strand
caaagaauguuccuuauag

SEQ ID NO: 652220 - RNA, 19 nt, Homo sapiens
  misc_RNA (1)...(19): siRNA sense strand
gcaaagcacccuaauguug

SEQ ID NO: 652221 - RNA, 19 nt, Homo sapiens
  misc_RNA (1)...(19): siRNA sense strand
gcaaagaauguuccuuaua

SEQ ID NO: 652222 - RNA, 19 nt, Homo sapiens
  misc_RNA (1)...(19): siRNA sense strand
ggaagaauguauggacuuu

SEQ ID NO: 652223 - RNA, 19 nt, Homo sapiens
  misc_RNA (1)...(19): siRNA sense strand
aaacacaucuggacagguu

SEQ ID NO: 652224 - RNA, 19 nt, Homo sapiens
  misc_RNA (1)...(19): siRNA sense strand
gaaaguacaucgccauggu

SEQ ID NO: 652225 - RNA, 19 nt, Homo sapiens
  misc_RNA (1)...(19): siRNA sense strand
gcaaagccuuagaagauga

SEQ ID NO: 652226 - RNA, 19 nt, Homo sapiens
  misc_RNA (1)...(19): siRNA sense strand
ggagaggaaacacucauua

SEQ ID NO: 652227 - RNA, 19 nt, Homo sapiens
  misc_RNA (1)...(19): siRNA sense strand
uaaaggaaauccagacugu

SEQ ID NO: 652228 - RNA, 19 nt, Homo sapiens
  misc_RNA (1)...(19): siRNA sense strand
gaaagaugccauagaaguu

SEQ ID NO: 652229 - RNA, 19 nt, Homo sapiens
  misc_RNA (1)...(19): siRNA sense strand
gcgcaaagccuuagaagau

SEQ ID NO: 652230 - RNA, 19 nt, Homo sapiens
  misc_RNA (1)...(19): siRNA sense strand
ugagaaaggcaucauauuu

SEQ ID NO: 652231 - RNA, 19 nt, Homo sapiens
  misc_RNA (1)...(19): siRNA sense strand
ccaaugaauuuacucuuga

SEQ ID NO: 652232 - RNA, 19 nt, Homo sapiens
  misc_RNA (1)...(19): siRNA sense strand
gaggaaacacucauuauca

SEQ ID NO: 652233 - RNA, 19 nt, Homo sapiens
  misc_RNA (1)...(19): siRNA sense strand
aaccagacaucuucuuuaa

SEQ ID NO: 652234 - RNA, 19 nt, Homo sapiens
  misc_RNA (1)...(19): siRNA sense strand
cgaaagugcuaucgugguu

SEQ ID NO: 652235 - RNA, 19 nt, Homo sapiens
  misc_RNA (1)...(19): siRNA sense strand
agaagucugucaaggauuu

SEQ ID NO: 652236 - RNA, 19 nt, Homo sapiens
  misc_RNA (1)...(19): siRNA sense strand
uggaggaggugaccaauga

SEQ ID NO: 652237 - RNA, 19 nt, Homo sapiens
  misc_RNA (1)...(19): siRNA sense strand
aagagaaacuggaagaaug

SEQ ID NO: 652238 - RNA, 19 nt, Homo sapiens
  misc_RNA (1)...(19): siRNA sense strand
caaagcacccuaauguuga

SEQ ID NO: 652239 - RNA, 19 nt, Homo sapiens
  misc_RNA (1)...(19): siRNA sense strand
agagagacauaaagauuga

SEQ ID NO: 652240 - RNA, 19 nt, Homo sapiens
  misc_RNA (1)...(19): siRNA sense strand
gaagagaaacuggaagaau

SEQ ID NO: 652241 - RNA, 19 nt, Homo sapiens
  misc_RNA (1)...(19): siRNA sense strand
ugaacccgauacauuauaa

SEQ ID NO: 652242 - RNA, 19 nt, Homo sapiens
  misc_RNA (1)...(19): siRNA sense strand
gagagagacauaaagauug

SEQ ID NO: 652243 - RNA, 19 nt, Homo sapiens
  misc_RNA (1)...(19): siRNA sense strand
gaggaucccuuuggacgaa

SEQ ID NO: 652244 - RNA, 19 nt, Homo sapiens
  misc_RNA (1)...(19): siRNA sense strand
gcacccagaugagacuaaa

SEQ ID NO: 652245 - RNA, 19 nt, Homo sapiens
  misc_RNA (1)...(19): siRNA sense strand
aaagugcuaucgugguuaa

SEQ ID NO: 652246 - RNA, 19 nt, Homo sapiens
  misc_RNA (1)...(19): siRNA sense strand
uuugaaagaugccauagaa

SEQ ID NO: 652247 - RNA, 19 nt, Homo sapiens
  misc_RNA (1)...(19): siRNA sense strand
aaggaaauccagacuguua

SEQ ID NO: 652248 - RNA, 19 nt, Homo sapiens
  misc_RNA (1)...(19): siRNA sense strand
caccaugucugucucuuug

SEQ ID NO: 652249 - RNA, 19 nt, Homo sapiens
  misc_RNA (1)...(19): siRNA sense strand
gaaacguggugaccugaca

SEQ ID NO: 652250 - RNA, 19 nt, Homo sapiens
  misc_RNA (1)...(19): siRNA sense strand
ggacuuugccacugaguug

SEQ ID NO: 652251 - RNA, 19 nt, Homo sapiens
  misc_RNA (1)...(19): siRNA sense strand
cuuagaagaugauguaauc

SEQ ID NO: 652252 - RNA, 19 nt, Homo sapiens
  misc_RNA (1)...(19): siRNA sense strand
ugagagagacauaaagauu

SEQ ID NO: 652253 - RNA, 19 nt, Homo sapiens
  misc_RNA (1)...(19): siRNA sense strand
acucgacccuucuuuauga

SEQ ID NO: 652254 - RNA, 19 nt, Homo sapiens
  misc_RNA (1)...(19): siRNA sense strand
ggaaauccagacuguuauu

SEQ ID NO: 652255 - RNA, 19 nt, Homo sapiens
  misc_RNA (1)...(19): siRNA sense strand
guggugaccugacaagaga

SEQ ID NO: 652256 - RNA, 19 nt, Homo sapiens
  misc_RNA (1)...(19): siRNA sense strand
ugagaagucugucaaggau

SEQ ID NO: 652257 - RNA, 19 nt, Homo sapiens
  misc_RNA (1)...(19): siRNA sense strand
caaaccagacaucuucuuu

SEQ ID NO: 652258 - RNA, 19 nt, Homo sapiens
  misc_RNA (1)...(19): siRNA sense strand
ggcaagcucuccucaucaa

SEQ ID NO: 652259 - RNA, 19 nt, Homo sapiens
  misc_RNA (1)...(19): siRNA sense strand
caacucgacccuucuuuau

SEQ ID NO: 652260 - RNA, 19 nt, Homo sapiens
  misc_RNA (1)...(19): siRNA sense strand
guauggacuuugccacuga

SEQ ID NO: 652261 - RNA, 19 nt, Homo sapiens
  misc_RNA (1)...(19): siRNA sense strand
gagaggaaacacucauuau

SEQ ID NO: 652262 - RNA, 19 nt, Homo sapiens
  misc_RNA (1)...(19): siRNA sense strand
aaaccagacaucuucuuua

SEQ ID NO: 652263 - RNA, 19 nt, Homo sapiens
  misc_RNA (1)...(19): siRNA sense strand
caucaaaccagacaucuuc

SEQ ID NO: 652264 - RNA, 19 nt, Homo sapiens
  misc_RNA (1)...(19): siRNA sense strand
gaaagugcuaucgugguua

SEQ ID NO: 652265 - RNA, 19 nt, Homo sapiens
  misc_RNA (1)...(19): siRNA sense strand
cccaaugaauuuacucuug

SEQ ID NO: 652266 - RNA, 19 nt, Homo sapiens
  misc_RNA (1)...(19): siRNA sense strand
gaaacuggaagaauguaug

SEQ ID NO: 652267 - RNA, 19 nt, Homo sapiens
  misc_RNA (1)...(19): siRNA sense strand
guugagagcauacagaaga

SEQ ID NO: 652268 - RNA, 19 nt, Homo sapiens
  misc_RNA (1)...(19): siRNA sense strand
gaagaggcaauaauaaagg

SEQ ID NO: 652269 - RNA, 19 nt, Homo sapiens
  misc_RNA (1)...(19): siRNA sense strand
ggucaugcgcaaagccuua

SEQ ID NO: 652270 - RNA, 19 nt, Homo sapiens
  misc_RNA (1)...(19): siRNA sense strand
gaaauccagacuguuauug

SEQ ID NO: 652271 - RNA, 19 nt, Homo sapiens
  misc_RNA (1)...(19): siRNA sense strand
uugcaaagaauguuccuua

SEQ ID NO: 652272 - RNA, 19 nt, Homo sapiens
  misc_RNA (1)...(19): siRNA sense strand
ggugagagagacauaaaga

SEQ ID NO: 652273 - RNA, 19 nt, Homo sapiens
  misc_RNA (1)...(19): siRNA sense strand
gacaaacauuauccugaau

SEQ ID NO: 652274 - RNA, 19 nt, Homo sapiens
  misc_RNA (1)...(19): siRNA sense strand
ggcaucauauuuaacaaca

SEQ ID NO: 652275 - RNA, 19 nt, Homo sapiens
  misc_RNA (1)...(19): siRNA sense strand
ggaaaugcugaacccgaua

SEQ ID NO: 652276 - RNA, 19 nt, Homo sapiens
  misc_RNA (1)...(19): siRNA sense strand
guugaagaggcaauaauaa

SEQ ID NO: 652277 - RNA, 19 nt, Homo sapiens
  misc_RNA (1)...(19): siRNA sense strand
gaaccagugcauauuggaa

SEQ ID NO: 652278 - RNA, 19 nt, Homo sapiens
  misc_RNA (1)...(19): siRNA sense strand
ugaaagaugccauagaagu

SEQ ID NO: 652279 - RNA, 19 nt, Homo sapiens
  misc_RNA (1)...(19): siRNA sense strand
acaacucgacccuucuuua

SEQ ID NO: 652280 - RNA, 19 nt, Homo sapiens
  misc_RNA (1)...(19): siRNA sense strand
caaggacaguguguugaga

SEQ ID NO: 652281 - RNA, 19 nt, Homo sapiens
  misc_RNA (1)...(19): siRNA sense strand
agaauguuccuuauaggua

SEQ ID NO: 652282 - RNA, 19 nt, Homo sapiens
  misc_RNA (1)...(19): siRNA sense strand
caagagagaaugugaacca

SEQ ID NO: 652283 - RNA, 19 nt, Homo sapiens
  misc_RNA (1)...(19): siRNA sense strand
ggauuugaaagaugccaua

SEQ ID NO: 652284 - RNA, 19 nt, Homo sapiens
  misc_RNA (1)...(19): siRNA sense strand
gauuccacgugaagacauu

SEQ ID NO: 652285 - RNA, 19 nt, Homo sapiens
  misc_RNA (1)...(19): siRNA sense strand
gaaugugaaccagugcaua

SEQ ID NO: 652286 - RNA, 19 nt, Homo sapiens
  misc_RNA (1)...(19): siRNA sense strand
ccaugucugucucuuuguu

SEQ ID NO: 652287 - RNA, 19 nt, Homo sapiens
  misc_RNA (1)...(19): siRNA sense strand
ugaaagccauccucguuac

SEQ ID NO: 652288 - RNA, 19 nt, Homo sapiens
  misc_RNA (1)...(19): siRNA sense strand
aaacacucauuaucagcaa

SEQ ID NO: 652289 - RNA, 19 nt, Homo sapiens
  misc_RNA (1)...(19): siRNA sense strand
aaagcacccuaauguugaa

SEQ ID NO: 652290 - RNA, 19 nt, Homo sapiens
  misc_RNA (1)...(19): siRNA sense strand
cagaagagaaacuggaaga

SEQ ID NO: 652291 - RNA, 19 nt, Homo sapiens
  misc_RNA (1)...(19): siRNA sense strand
agaagaugauguaaucgau

SEQ ID NO: 652292 - RNA, 19 nt, Homo sapiens
  misc_RNA (1)...(19): siRNA sense strand
cagcaaguccucaaguaug

SEQ ID NO: 652293 - RNA, 19 nt, Homo sapiens
  misc_RNA (1)...(19): siRNA sense strand
cuaacacgcucuucuugag

SEQ ID NO: 652294 - RNA, 19 nt, Homo sapiens
  misc_RNA (1)...(19): siRNA sense strand
cauuacagcucucgauucg

SEQ ID NO: 652295 - RNA, 19 nt, Homo sapiens
  misc_RNA (1)...(19): siRNA sense strand
uacagaagauacacgacuu

SEQ ID NO: 652296 - RNA, 19 nt, Homo sapiens
  misc_RNA (1)...(19): siRNA sense strand
cccgauacauuauaacauc

SEQ ID NO: 652297 - RNA, 19 nt, Homo sapiens
  misc_RNA (1)...(19): siRNA sense strand
uguugaagaggcaauaaua

SEQ ID NO: 652298 - RNA, 19 nt, Homo sapiens
  misc_RNA (1)...(19): siRNA sense strand
uugcaaagcacccuaaugu

SEQ ID NO: 652299 - RNA, 19 nt, Homo sapiens
  misc_RNA (1)...(19): siRNA sense strand
ugaagaggcaauaauaaag

SEQ ID NO: 652300 - RNA, 19 nt, Homo sapiens
  misc_RNA (1)...(19): siRNA sense strand
gggcacauccucaauacca

SEQ ID NO: 652301 - RNA, 19 nt, Homo sapiens
  misc_RNA (1)...(19): siRNA sense strand
gaggcaauaauaaaggaaa

SEQ ID NO: 652302 - RNA, 19 nt, Homo sapiens
  misc_RNA (1)...(19): siRNA sense strand
gagaaacuggaagaaugua

SEQ ID NO: 652303 - RNA, 19 nt, Homo sapiens
  misc_RNA (1)...(19): siRNA sense strand
gacaguguguugagagcau

SEQ ID NO: 652304 - RNA, 19 nt, Homo sapiens
  misc_RNA (1)...(19): siRNA sense strand
gcaaggacaguguguugag

SEQ ID NO: 652305 - RNA, 19 nt, Homo sapiens
  misc_RNA (1)...(19): siRNA sense strand
ugcaaagaauguuccuuau

SEQ ID NO: 652306 - RNA, 19 nt, Homo sapiens
  misc_RNA (1)...(19): siRNA sense strand
caaugaaucgggcuaugug

SEQ ID NO: 652307 - RNA, 19 nt, Homo sapiens
  misc_RNA (1)...(19): siRNA sense strand
caaacccaaugaauuuacu

SEQ ID NO: 652308 - RNA, 19 nt, Homo sapiens
  misc_RNA (1)...(19): siRNA sense strand
cgcaaagccuuagaagaug

SEQ ID NO: 652309 - RNA, 19 nt, Homo sapiens
  misc_RNA (1)...(19): siRNA sense strand
aagaggcaauaauaaagga

SEQ ID NO: 652310 - RNA, 19 nt, Homo sapiens
  misc_RNA (1)...(19): siRNA sense strand
ugcugaacccgauacauua

SEQ ID NO: 652311 - RNA, 19 nt, Homo sapiens
  misc_RNA (1)...(19): siRNA sense strand
gaaagccauccucguuaca

SEQ ID NO: 652312 - RNA, 19 nt, Homo sapiens
  misc_RNA (1)...(19): siRNA sense strand
gcugaacccgauacauuau

SEQ ID NO: 652313 - RNA, 19 nt, Homo sapiens
  misc_RNA (1)...(19): siRNA sense strand
ggaauuaugagggcacauc

SEQ ID NO: 652314 - RNA, 19 nt, Homo sapiens
  misc_RNA (1)...(19): siRNA sense strand
gaaaggcaucauauuuaac

SEQ ID NO: 652315 - RNA, 19 nt, Homo sapiens
  misc_RNA (1)...(19): siRNA sense strand
aaagaauguuccuuauagg

SEQ ID NO: 652316 - RNA, 19 nt, Homo sapiens
  misc_RNA (1)...(19): siRNA sense strand
auagguacuuucagccauu

SEQ ID NO: 652317 - RNA, 19 nt, Homo sapiens
  misc_RNA (1)...(19): siRNA sense strand
gagaaaggcaucauauuua

SEQ ID NO: 652318 - RNA, 19 nt, Homo sapiens
  misc_RNA (1)...(19): siRNA sense strand
ggacaaacauuauccugaa

SEQ ID NO: 652319 - RNA, 19 nt, Homo sapiens
  misc_RNA (1)...(19): siRNA sense strand
caaagaauguuccuuauag

SEQ ID NO: 652320 - RNA, 19 nt, Homo sapiens
  misc_RNA (1)...(19): siRNA sense strand
gcaaagcacccuaauguug

SEQ ID NO: 652321 - RNA, 19 nt, Homo sapiens
  misc_RNA (1)...(19): siRNA sense strand
gcaaagaauguuccuuaua

SEQ ID NO: 652322 - RNA, 19 nt, Homo sapiens
  misc_RNA (1)...(19): siRNA sense strand
ggaagaauguauggacuuu

SEQ ID NO: 652323 - RNA, 19 nt, Homo sapiens
  misc_RNA (1)...(19): siRNA sense strand
aaacacaucuggacagguu

SEQ ID NO: 652324 - RNA, 19 nt, Homo sapiens
  misc_RNA (1)...(19): siRNA sense strand
gaaaguacaucgccauggu

SEQ ID NO: 652325 - RNA, 19 nt, Homo sapiens
  misc_RNA (1)...(19): siRNA sense strand
gcaaagccuuagaagauga

SEQ ID NO: 652326 - RNA, 19 nt, Homo sapiens
  misc_RNA (1)...(19): siRNA sense strand
ggagaggaaacacucauua

SEQ ID NO: 652327 - RNA, 19 nt, Homo sapiens
  misc_RNA (1)...(19): siRNA sense strand
uaaaggaaauccagacugu

SEQ ID NO: 652328 - RNA, 19 nt, Homo sapiens
  misc_RNA (1)...(19): siRNA sense strand
gaaagaugccauagaaguu

SEQ ID NO: 652329 - RNA, 19 nt, Homo sapiens
  misc_RNA (1)...(19): siRNA sense strand
gcgcaaagccuuagaagau

SEQ ID NO: 652330 - RNA, 19 nt, Homo sapiens
  misc_RNA (1)...(19): siRNA sense strand
ugagaaaggcaucauauuu

SEQ ID NO: 652331 - RNA, 19 nt, Homo sapiens
  misc_RNA (1)...(19): siRNA sense strand
ccaaugaauuuacucuuga

SEQ ID NO: 652332 - RNA, 19 nt, Homo sapiens
  misc_RNA (1)...(19): siRNA sense strand
gaggaaacacucauuauca

SEQ ID NO: 652333 - RNA, 19 nt, Homo sapiens
  misc_RNA (1)...(19): siRNA sense strand
aaccagacaucuucuuuaa

SEQ ID NO: 652334 - RNA, 19 nt, Homo sapiens
  misc_RNA (1)...(19): siRNA sense strand
cgaaagugcuaucgugguu

SEQ ID NO: 652335 - RNA, 19 nt, Homo sapiens
  misc_RNA (1)...(19): siRNA sense strand
agaagucugucaaggauuu

SEQ ID NO: 652336 - RNA, 19 nt, Homo sapiens
  misc_RNA (1)...(19): siRNA sense strand
uggaggaggugaccaauga

SEQ ID NO: 652337 - RNA, 19 nt, Homo sapiens
  misc_RNA (1)...(19): siRNA sense strand
aagagaaacuggaagaaug

SEQ ID NO: 652338 - RNA, 19 nt, Homo sapiens
  misc_RNA (1)...(19): siRNA sense strand
caaagcacccuaauguuga

SEQ ID NO: 652339 - RNA, 19 nt, Homo sapiens
  misc_RNA (1)...(19): siRNA sense strand
agagagacauaaagauuga

SEQ ID NO: 652340 - RNA, 19 nt, Homo sapiens
  misc_RNA (1)...(19): siRNA sense strand
gaagagaaacuggaagaau

SEQ ID NO: 652341 - RNA, 19 nt, Homo sapiens
  misc_RNA (1)...(19): siRNA sense strand
ugaacccgauacauuauaa

SEQ ID NO: 652342 - RNA, 19 nt, Homo sapiens
  misc_RNA (1)...(19): siRNA sense strand
gagagagacauaaagauug

SEQ ID NO: 652343 - RNA, 19 nt, Homo sapiens
  misc_RNA (1)...(19): siRNA sense strand
gaggaucccuuuggacgaa

SEQ ID NO: 652344 - RNA, 19 nt, Homo sapiens
  misc_RNA (1)...(19): siRNA sense strand
gcacccagaugagacuaaa

SEQ ID NO: 652345 - RNA, 19 nt, Homo sapiens
  misc_RNA (1)...(19): siRNA sense strand
aaagugcuaucgugguuaa

SEQ ID NO: 652346 - RNA, 19 nt, Homo sapiens
  misc_RNA (1)...(19): siRNA sense strand
uuugaaagaugccauagaa

SEQ ID NO: 652347 - RNA, 19 nt, Homo sapiens
  misc_RNA (1)...(19): siRNA sense strand
aaggaaauccagacuguua

SEQ ID NO: 652348 - RNA, 19 nt, Homo sapiens
  misc_RNA (1)...(19): siRNA sense strand
caccaugucugucucuuug

SEQ ID NO: 652349 - RNA, 19 nt, Homo sapiens
  misc_RNA (1)...(19): siRNA sense strand
gaaacguggugaccugaca

SEQ ID NO: 652350 - RNA, 19 nt, Homo sapiens
  misc_RNA (1)...(19): siRNA sense strand
ggacuuugccacugaguug

SEQ ID NO: 652351 - RNA, 19 nt, Homo sapiens
  misc_RNA (1)...(19): siRNA sense strand
cuuagaagaugauguaauc

SEQ ID NO: 652352 - RNA, 19 nt, Homo sapiens
  misc_RNA (1)...(19): siRNA sense strand
ugagagagacauaaagauu

SEQ ID NO: 652353 - RNA, 19 nt, Homo sapiens
  misc_RNA (1)...(19): siRNA sense strand
acucgacccuucuuuauga

SEQ ID NO: 652354 - RNA, 19 nt, Homo sapiens
  misc_RNA (1)...(19): siRNA sense strand
ggaaauccagacuguuauu

SEQ ID NO: 652355 - RNA, 19 nt, Homo sapiens
  misc_RNA (1)...(19): siRNA sense strand
guggugaccugacaagaga

SEQ ID NO: 652356 - RNA, 19 nt, Homo sapiens
  misc_RNA (1)...(19): siRNA sense strand
ugagaagucugucaaggau

SEQ ID NO: 652357 - RNA, 19 nt, Homo sapiens
  misc_RNA (1)...(19): siRNA sense strand
caaaccagacaucuucuuu

SEQ ID NO: 652358 - RNA, 19 nt, Homo sapiens
  misc_RNA (1)...(19): siRNA sense strand
ggcaagcucuccucaucaa

SEQ ID NO: 652359 - RNA, 19 nt, Homo sapiens
  misc_RNA (1)...(19): siRNA sense strand
caacucgacccuucuuuau

SEQ ID NO: 652360 - RNA, 19 nt, Homo sapiens
  misc_RNA (1)...(19): siRNA sense strand
guauggacuuugccacuga

SEQ ID NO: 652361 - RNA, 19 nt, Homo sapiens
  misc_RNA (1)...(19): siRNA sense strand
gagaggaaacacucauuau

SEQ ID NO: 652362 - RNA, 19 nt, Homo sapiens
  misc_RNA (1)...(19): siRNA sense strand
aaaccagacaucuucuuua

SEQ ID NO: 652363 - RNA, 19 nt, Homo sapiens
  misc_RNA (1)...(19): siRNA sense strand
caucaaaccagacaucuuc

SEQ ID NO: 652364 - RNA, 19 nt, Homo sapiens
  misc_RNA (1)...(19): siRNA sense strand
gaaagugcuaucgugguua

SEQ ID NO: 652365 - RNA, 19 nt, Homo sapiens
  misc_RNA (1)...(19): siRNA sense strand
cccaaugaauuuacucuug

SEQ ID NO: 652366 - RNA, 19 nt, Homo sapiens
  misc_RNA (1)...(19): siRNA sense strand
gaaacuggaagaauguaug

SEQ ID NO: 652367 - RNA, 19 nt, Homo sapiens
  misc_RNA (1)...(19): siRNA sense strand
guugagagcauacagaaga

SEQ ID NO: 652368 - RNA, 19 nt, Homo sapiens
  misc_RNA (1)...(19): siRNA sense strand
gaagaggcaauaauaaagg

SEQ ID NO: 652369 - RNA, 19 nt, Homo sapiens
  misc_RNA (1)...(19): siRNA sense strand
ggucaugcgcaaagccuua

SEQ ID NO: 652370 - RNA, 19 nt, Homo sapiens
  misc_RNA (1)...(19): siRNA sense strand
gaaauccagacuguuauug

SEQ ID NO: 652371 - RNA, 19 nt, Homo sapiens
  misc_RNA (1)...(19): siRNA sense strand
uugcaaagaauguuccuua

SEQ ID NO: 652372 - RNA, 19 nt, Homo sapiens
  misc_RNA (1)...(19): siRNA sense strand
ggugagagagacauaaaga

SEQ ID NO: 652373 - RNA, 19 nt, Homo sapiens
  misc_RNA (1)...(19): siRNA sense strand
gacaaacauuauccugaau

SEQ ID NO: 652374 - RNA, 19 nt, Homo sapiens
  misc_RNA (1)...(19): siRNA sense strand
ggcaucauauuuaacaaca

SEQ ID NO: 652375 - RNA, 19 nt, Homo sapiens
  misc_RNA (1)...(19): siRNA sense strand
ggaaaugcugaacccgaua

SEQ ID NO: 652376 - RNA, 19 nt, Homo sapiens
  misc_RNA (1)...(19): siRNA sense strand
guugaagaggcaauaauaa

SEQ ID NO: 652377 - RNA, 19 nt, Homo sapiens
  misc_RNA (1)...(19): siRNA sense strand
gaaccagugcauauuggaa

SEQ ID NO: 652378 - RNA, 19 nt, Homo sapiens
  misc_RNA (1)...(19): siRNA sense strand
ugaaagaugccauagaagu

SEQ ID NO: 652379 - RNA, 19 nt, Homo sapiens
  misc_RNA (1)...(19): siRNA sense strand
acaacucgacccuucuuua

SEQ ID NO: 652380 - RNA, 19 nt, Homo sapiens
  misc_RNA (1)...(19): siRNA sense strand
caaggacaguguguugaga

SEQ ID NO: 652381 - RNA, 19 nt, Homo sapiens
  misc_RNA (1)...(19): siRNA sense strand
agaauguuccuuauaggua

SEQ ID NO: 652382 - RNA, 19 nt, Homo sapiens
  misc_RNA (1)...(19): siRNA sense strand
caagagagaaugugaacca

SEQ ID NO: 652383 - RNA, 19 nt, Homo sapiens
  misc_RNA (1)...(19): siRNA sense strand
ggauuugaaagaugccaua

SEQ ID NO: 652384 - RNA, 19 nt, Homo sapiens
  misc_RNA (1)...(19): siRNA sense strand
gauuccacgugaagacauu

SEQ ID NO: 652385 - RNA, 19 nt, Homo sapiens
  misc_RNA (1)...(19): siRNA sense strand
gaaugugaaccagugcaua

SEQ ID NO: 652386 - RNA, 19 nt, Homo sapiens
  misc_RNA (1)...(19): siRNA sense strand
ccaugucugucucuuuguu

SEQ ID NO: 652387 - RNA, 19 nt, Homo sapiens
  misc_RNA (1)...(19): siRNA sense strand
ugaaagccauccucguuac

SEQ ID NO: 652388 - RNA, 19 nt, Homo sapiens
  misc_RNA (1)...(19): siRNA sense strand
aaacacucauuaucagcaa

SEQ ID NO: 652389 - RNA, 19 nt, Homo sapiens
  misc_RNA (1)...(19): siRNA sense strand
aaagcacccuaauguugaa

SEQ ID NO: 652390 - RNA, 19 nt, Homo sapiens
  misc_RNA (1)...(19): siRNA sense strand
cagaagagaaacuggaaga

SEQ ID NO: 652391 - RNA, 19 nt, Homo sapiens
  misc_RNA (1)...(19): siRNA sense strand
agaagaugauguaaucgau

SEQ ID NO: 652392 - RNA, 19 nt, Homo sapiens
  misc_RNA (1)...(19): siRNA sense strand
cagcaaguccucaaguaug

SEQ ID NO: 652393 - RNA, 19 nt, Homo sapiens
  misc_RNA (1)...(19): siRNA sense strand
cuaacacgcucuucuugag

SEQ ID NO: 652394 - RNA, 19 nt, Homo sapiens
  misc_RNA (1)...(19): siRNA sense strand
cauuacagcucucgauucg

SEQ ID NO: 652395 - RNA, 19 nt, Homo sapiens
  misc_RNA (1)...(19): siRNA sense strand
uacagaagauacacgacuu

SEQ ID NO: 652396 - RNA, 19 nt, Homo sapiens
  misc_RNA (1)...(19): siRNA sense strand
cccgauacauuauaacauc

SEQ ID NO: 652397 - RNA, 19 nt, Homo sapiens
  misc_RNA (1)...(19): siRNA sense strand
uguugaagaggcaauaaua

SEQ ID NO: 652398 - RNA, 19 nt, Homo sapiens
  misc_RNA (1)...(19): siRNA sense strand
uugcaaagcacccuaaugu

SEQ ID NO: 652399 - RNA, 19 nt, Homo sapiens
  misc_RNA (1)...(19): siRNA sense strand
ugaagaggcaauaauaaag

SEQ ID NO: 652400 - RNA, 19 nt, Homo sapiens
  misc_RNA (1)...(19): siRNA sense strand
gggcacauccucaauacca

SEQ ID NO: 652401 - RNA, 19 nt, Homo sapiens
  misc_RNA (1)...(19): siRNA sense strand
gaggcaauaauaaaggaaa

SEQ ID NO: 652402 - RNA, 19 nt, Homo sapiens
  misc_RNA (1)...(19): siRNA sense strand
gagaaacuggaagaaugua

SEQ ID NO: 652403 - RNA, 19 nt, Homo sapiens
  misc_RNA (1)...(19): siRNA sense strand
gacaguguguugagagcau

SEQ ID NO: 652404 - RNA, 19 nt, Homo sapiens
  misc_RNA (1)...(19): siRNA sense strand
gcaaggacaguguguugag

SEQ ID NO: 652405 - RNA, 19 nt, Homo sapiens
  misc_RNA (1)...(19): siRNA sense strand
ugcaaagaauguuccuuau

SEQ ID NO: 652406 - RNA, 19 nt, Homo sapiens
  misc_RNA (1)...(19): siRNA sense strand
caaugaaucgggcuaugug

SEQ ID NO: 652407 - RNA, 19 nt, Homo sapiens
  misc_RNA (1)...(19): siRNA sense strand
caaacccaaugaauuuacu

SEQ ID NO: 652408 - RNA, 19 nt, Homo sapiens
  misc_RNA (1)...(19): siRNA sense strand
cgcaaagccuuagaagaug

SEQ ID NO: 652409 - RNA, 19 nt, Homo sapiens
  misc_RNA (1)...(19): siRNA sense strand
aagaggcaauaauaaagga

SEQ ID NO: 652410 - RNA, 19 nt, Homo sapiens
  misc_RNA (1)...(19): siRNA sense strand
ugcugaacccgauacauua

SEQ ID NO: 652411 - RNA, 19 nt, Homo sapiens
  misc_RNA (1)...(19): siRNA sense strand
gaaagccauccucguuaca

SEQ ID NO: 652412 - RNA, 19 nt, Homo sapiens
  misc_RNA (1)...(19): siRNA sense strand
gcugaacccgauacauuau

SEQ ID NO: 652413 - RNA, 19 nt, Homo sapiens
  misc_RNA (1)...(19): siRNA sense strand
ggaauuaugagggcacauc

SEQ ID NO: 652414 - RNA, 19 nt, Homo sapiens
  misc_RNA (1)...(19): siRNA sense strand
gaaaggcaucauauuuaac

SEQ ID NO: 652415 - RNA, 19 nt, Homo sapiens
  misc_RNA (1)...(19): siRNA sense strand
aaagaauguuccuuauagg

SEQ ID NO: 652416 - RNA, 19 nt, Homo sapiens
  misc_RNA (1)...(19): siRNA sense strand
auagguacuuucagccauu

SEQ ID NO: 652417 - RNA, 19 nt, Homo sapiens
  misc_RNA (1)...(19): siRNA sense strand
cgacagagaugcugaaggu

SEQ ID NO: 652418 - RNA, 19 nt, Homo sapiens
  misc_RNA (1)...(19): siRNA sense strand
ggacagugccuaccucuau

SEQ ID NO: 652419 - RNA, 19 nt, Homo sapiens
  misc_RNA (1)...(19): siRNA sense strand
caagggauggugcuucuuu

SEQ ID NO: 652420 - RNA, 19 nt, Homo sapiens
  misc_RNA (1)...(19): siRNA sense strand
gaguucaccugcccugugu

SEQ ID NO: 652421 - RNA, 19 nt, Homo sapiens
  misc_RNA (1)...(19): siRNA sense strand
gaccugggcaucuccauug

SEQ ID NO: 652422 - RNA, 19 nt, Homo sapiens
  misc_RNA (1)...(19): siRNA sense strand
ggacgagaagaccaagaaa

SEQ ID NO: 652423 - RNA, 19 nt, Homo sapiens
  misc_RNA (1)...(19): siRNA sense strand
ucaacugccugcucugcaa

SEQ ID NO: 652424 - RNA, 19 nt, Homo sapiens
  misc_RNA (1)...(19): siRNA sense strand
ucaccugcccuguguguuu

SEQ ID NO: 652425 - RNA, 19 nt, Homo sapiens
  misc_RNA (1)...(19): siRNA sense strand
aggaugaugucaaugaguu

SEQ ID NO: 652426 - RNA, 19 nt, Homo sapiens
  misc_RNA (1)...(19): siRNA sense strand
ucacagugcgcccugauau

SEQ ID NO: 652427 - RNA, 19 nt, Homo sapiens
  misc_RNA (1)...(19): siRNA sense strand
cagagaugcugaaggugau

SEQ ID NO: 652428 - RNA, 19 nt, Homo sapiens
  misc_RNA (1)...(19): siRNA sense strand
gacagugccuaccucuauc

SEQ ID NO: 652429 - RNA, 19 nt, Homo sapiens
  misc_RNA (1)...(19): siRNA sense strand
gggugcaccuucaucaaca

SEQ ID NO: 652430 - RNA, 19 nt, Homo sapiens
  misc_RNA (1)...(19): siRNA sense strand
gggcaucuccauugcugaa

SEQ ID NO: 652431 - RNA, 19 nt, Homo sapiens
  misc_RNA (1)...(19): siRNA sense strand
cacccaagcugucagaacu

SEQ ID NO: 652432 - RNA, 19 nt, Homo sapiens
  misc_RNA (1)...(19): siRNA sense strand
acagugcgcccugauauga

SEQ ID NO: 652433 - RNA, 19 nt, Homo sapiens
  misc_RNA (1)...(19): siRNA sense strand
cguggaggaugcucagaug

SEQ ID NO: 652434 - RNA, 19 nt, Homo sapiens
  misc_RNA (1)...(19): siRNA sense strand
aggaggcgcugcgucagua

SEQ ID NO: 652435 - RNA, 19 nt, Homo sapiens
  misc_RNA (1)...(19): siRNA sense strand
ggauuaccagcgauuucua

SEQ ID NO: 652436 - RNA, 19 nt, Homo sapiens
  misc_RNA (1)...(19): siRNA sense strand
gaggauuaccagcgauuuc

SEQ ID NO: 652437 - RNA, 19 nt, Homo sapiens
  misc_RNA (1)...(19): siRNA sense strand
gccagaucgugguacagaa

SEQ ID NO: 652438 - RNA, 19 nt, Homo sapiens
  misc_RNA (1)...(19): siRNA sense strand
gacaguggcgucucucaag

SEQ ID NO: 652439 - RNA, 19 nt, Homo sapiens
  misc_RNA (1)...(19): siRNA sense strand
ggugcaccuucaucaacaa

SEQ ID NO: 652440 - RNA, 19 nt, Homo sapiens
  misc_RNA (1)...(19): siRNA sense strand
ugaggaugaugucaaugag

SEQ ID NO: 652441 - RNA, 19 nt, Homo sapiens
  misc_RNA (1)...(19): siRNA sense strand
gaugaacugcaaggaguau

SEQ ID NO: 652442 - RNA, 19 nt, Homo sapiens
  misc_RNA (1)...(19): siRNA sense strand
gcaucuccauugcugaaaa

SEQ ID NO: 652443 - RNA, 19 nt, Homo sapiens
  misc_RNA (1)...(19): siRNA sense strand
gacgagaagaccaagaaag

SEQ ID NO: 652444 - RNA, 19 nt, Homo sapiens
  misc_RNA (1)...(19): siRNA sense strand
uggcgucucucaaggacau

SEQ ID NO: 652445 - RNA, 19 nt, Homo sapiens
  misc_RNA (1)...(19): siRNA sense strand
ggugcuucuuugaggauga

SEQ ID NO: 652446 - RNA, 19 nt, Homo sapiens
  misc_RNA (1)...(19): siRNA sense strand
aagggauggugcuucuuug

SEQ ID NO: 652447 - RNA, 19 nt, Homo sapiens
  misc_RNA (1)...(19): siRNA sense strand
gauuaccagcgauuucuag

SEQ ID NO: 652448 - RNA, 19 nt, Homo sapiens
  misc_RNA (1)...(19): siRNA sense strand
cggccuggcugugagaugu

SEQ ID NO: 652449 - RNA, 19 nt, Homo sapiens
  misc_RNA (1)...(19): siRNA sense strand
cacgccagauggacgagaa

SEQ ID NO: 652450 - RNA, 19 nt, Homo sapiens
  misc_RNA (1)...(19): siRNA sense strand
cuaccucuaucugcuguca

SEQ ID NO: 652451 - RNA, 19 nt, Homo sapiens
  misc_RNA (1)...(19): siRNA sense strand
caccugcccuguguguuuc

SEQ ID NO: 652452 - RNA, 19 nt, Homo sapiens
  misc_RNA (1)...(19): siRNA sense strand
ggacagugccuaccucuau

SEQ ID NO: 652453 - RNA, 19 nt, Homo sapiens
  misc_RNA (1)...(19): siRNA sense strand
ggacgagaagaccaagaaa

SEQ ID NO: 652454 - RNA, 19 nt, Homo sapiens
  misc_RNA (1)...(19): siRNA sense strand
ucacagugcgcccugauau

SEQ ID NO: 652455 - RNA, 19 nt, Homo sapiens
  misc_RNA (1)...(19): siRNA sense strand
gacagugccuaccucuauc

SEQ ID NO: 652456 - RNA, 19 nt, Homo sapiens
  misc_RNA (1)...(19): siRNA sense strand
gggugcaccuucaucaaca

SEQ ID NO: 652457 - RNA, 19 nt, Homo sapiens
  misc_RNA (1)...(19): siRNA sense strand
cguggaggaugcucagaug

SEQ ID NO: 652458 - RNA, 19 nt, Homo sapiens
  misc_RNA (1)...(19): siRNA sense strand
aggaggcgcugcgucagua

SEQ ID NO: 652459 - RNA, 19 nt, Homo sapiens
  misc_RNA (1)...(19): siRNA sense strand
acagugcgcccugauauga

SEQ ID NO: 652460 - RNA, 19 nt, Homo sapiens
  misc_RNA (1)...(19): siRNA sense strand
gacaguggcgucucucaag

SEQ ID NO: 652461 - RNA, 19 nt, Homo sapiens
  misc_RNA (1)...(19): siRNA sense strand
ggugcaccuucaucaacaa

SEQ ID NO: 652462 - RNA, 19 nt, Homo sapiens
  misc_RNA (1)...(19): siRNA sense strand
gacgagaagaccaagaaag

SEQ ID NO: 652463 - RNA, 19 nt, Homo sapiens
  misc_RNA (1)...(19): siRNA sense strand
cacgccagauggacgagaa

SEQ ID NO: 652464 - RNA, 19 nt, Homo sapiens
  misc_RNA (1)...(19): siRNA sense strand
cggccuggcugugagaugu

SEQ ID NO: 652465 - RNA, 19 nt, Homo sapiens
  misc_RNA (1)...(19): siRNA sense strand
uggcgucucucaaggacau

SEQ ID NO: 652466 - RNA, 19 nt, Homo sapiens
  misc_RNA (1)...(19): siRNA sense strand
cuaccucuaucugcuguca

SEQ ID NO: 652467 - RNA, 19 nt, Homo sapiens
  misc_RNA (1)...(19): siRNA sense strand
ggacagugccuaccucuau

SEQ ID NO: 652468 - RNA, 19 nt, Homo sapiens
  misc_RNA (1)...(19): siRNA sense strand
ucacagugcgcccugauau

SEQ ID NO: 652469 - RNA, 19 nt, Homo sapiens
  misc_RNA (1)...(19): siRNA sense strand
gacagugccuaccucuauc

SEQ ID NO: 652470 - RNA, 19 nt, Homo sapiens
  misc_RNA (1)...(19): siRNA sense strand
gggugcaccuucaucaaca

SEQ ID NO: 652471 - RNA, 19 nt, Homo sapiens
  misc_RNA (1)...(19): siRNA sense strand
acagugcgcccugauauga

SEQ ID NO: 652472 - RNA, 19 nt, Homo sapiens
  misc_RNA (1)...(19): siRNA sense strand
aggaggcgcugcgucagua

SEQ ID NO: 652473 - RNA, 19 nt, Homo sapiens
  misc_RNA (1)...(19): siRNA sense strand
cguggaggaugcucagaug

SEQ ID NO: 652474 - RNA, 19 nt, Homo sapiens
  misc_RNA (1)...(19): siRNA sense strand
gacaguggcgucucucaag

SEQ ID NO: 652475 - RNA, 19 nt, Homo sapiens
  misc_RNA (1)...(19): siRNA sense strand
ggugcaccuucaucaacaa

SEQ ID NO: 652476 - RNA, 19 nt, Homo sapiens
  misc_RNA (1)...(19): siRNA sense strand
uggcgucucucaaggacau

SEQ ID NO: 652477 - RNA, 19 nt, Homo sapiens
  misc_RNA (1)...(19): siRNA sense strand
cggccuggcugugagaugu

SEQ ID NO: 652478 - RNA, 19 nt, Homo sapiens
  misc_RNA (1)...(19): siRNA sense strand
cuaccucuaucugcuguca

SEQ ID NO: 652479 - RNA, 19 nt, Homo sapiens
  misc_RNA (1)...(19): siRNA sense strand
cgacagagaugcugaaggu

SEQ ID NO: 652480 - RNA, 19 nt, Homo sapiens
  misc_RNA (1)...(19): siRNA sense strand
ggacagugccuaccucuau

SEQ ID NO: 652481 - RNA, 19 nt, Homo sapiens
  misc_RNA (1)...(19): siRNA sense strand
caagggauggugcuucuuu

SEQ ID NO: 652482 - RNA, 19 nt, Homo sapiens
  misc_RNA (1)...(19): siRNA sense strand
gaguucaccugcccugugu

SEQ ID NO: 652483 - RNA, 19 nt, Homo sapiens
  misc_RNA (1)...(19): siRNA sense strand
gaccugggcaucuccauug

SEQ ID NO: 652484 - RNA, 19 nt, Homo sapiens
  misc_RNA (1)...(19): siRNA sense strand
aggaugaugucaaugaguu

SEQ ID NO: 652485 - RNA, 19 nt, Homo sapiens
  misc_RNA (1)...(19): siRNA sense strand
ucaacugccugcucugcaa

SEQ ID NO: 652486 - RNA, 19 nt, Homo sapiens
  misc_RNA (1)...(19): siRNA sense strand
ucaccugcccuguguguuu

SEQ ID NO: 652487 - RNA, 19 nt, Homo sapiens
  misc_RNA (1)...(19): siRNA sense strand
ucacagugcgcccugauau

SEQ ID NO: 652488 - RNA, 19 nt, Homo sapiens
  misc_RNA (1)...(19): siRNA sense strand
cagagaugcugaaggugau

SEQ ID NO: 652489 - RNA, 19 nt, Homo sapiens
  misc_RNA (1)...(19): siRNA sense strand
gacagugccuaccucuauc

SEQ ID NO: 652490 - RNA, 19 nt, Homo sapiens
  misc_RNA (1)...(19): siRNA sense strand
gggugcaccuucaucaaca

SEQ ID NO: 652491 - RNA, 19 nt, Homo sapiens
  misc_RNA (1)...(19): siRNA sense strand
gggcaucuccauugcugaa

SEQ ID NO: 652492 - RNA, 19 nt, Homo sapiens
  misc_RNA (1)...(19): siRNA sense strand
cacccaagcugucagaacu

SEQ ID NO: 652493 - RNA, 19 nt, Homo sapiens
  misc_RNA (1)...(19): siRNA sense strand
acagugcgcccugauauga

SEQ ID NO: 652494 - RNA, 19 nt, Homo sapiens
  misc_RNA (1)...(19): siRNA sense strand
cguggaggaugcucagaug

SEQ ID NO: 652495 - RNA, 19 nt, Homo sapiens
  misc_RNA (1)...(19): siRNA sense strand
aggaggcgcugcgucagua

SEQ ID NO: 652496 - RNA, 19 nt, Homo sapiens
  misc_RNA (1)...(19): siRNA sense strand
ggauuaccagcgauuucua

SEQ ID NO: 652497 - RNA, 19 nt, Homo sapiens
  misc_RNA (1)...(19): siRNA sense strand
gaggauuaccagcgauuuc

SEQ ID NO: 652498 - RNA, 19 nt, Homo sapiens
  misc_RNA (1)...(19): siRNA sense strand
gccagaucgugguacagaa

SEQ ID NO: 652499 - RNA, 19 nt, Homo sapiens
  misc_RNA (1)...(19): siRNA sense strand
gacaguggcgucucucaag

SEQ ID NO: 652500 - RNA, 19 nt, Homo sapiens
  misc_RNA (1)...(19): siRNA sense strand
ggugcaccuucaucaacaa

SEQ ID NO: 652501 - RNA, 19 nt, Homo sapiens
  misc_RNA (1)...(19): siRNA sense strand
ugaggaugaugucaaugag

SEQ ID NO: 652502 - RNA, 19 nt, Homo sapiens
  misc_RNA (1)...(19): siRNA sense strand
gaugaacugcaaggaguau

SEQ ID NO: 652503 - RNA, 19 nt, Homo sapiens
  misc_RNA (1)...(19): siRNA sense strand
gcaucuccauugcugaaaa

SEQ ID NO: 652504 - RNA, 19 nt, Homo sapiens
  misc_RNA (1)...(19): siRNA sense strand
cggccuggcugugagaugu

SEQ ID NO: 652505 - RNA, 19 nt, Homo sapiens
  misc_RNA (1)...(19): siRNA sense strand
ggugcuucuuugaggauga

SEQ ID NO: 652506 - RNA, 19 nt, Homo sapiens
  misc_RNA (1)...(19): siRNA sense strand
aagggauggugcuucuuug

SEQ ID NO: 652507 - RNA, 19 nt, Homo sapiens
  misc_RNA (1)...(19): siRNA sense strand
uggcgucucucaaggacau

SEQ ID NO: 652508 - RNA, 19 nt, Homo sapiens
  misc_RNA (1)...(19): siRNA sense strand
gauuaccagcgauuucuag

SEQ ID NO: 652509 - RNA, 19 nt, Homo sapiens
  misc_RNA (1)...(19): siRNA sense strand
cuaccucuaucugcuguca

SEQ ID NO: 652510 - RNA, 19 nt, Homo sapiens
  misc_RNA (1)...(19): siRNA sense strand
caccugcccuguguguuuc

SEQ ID NO: 652511 - RNA, 19 nt, Homo sapiens
  misc_RNA (1)...(19): siRNA sense strand
ggacauaccuguaacuauu

SEQ ID NO: 652512 - RNA, 19 nt, Homo sapiens
  misc_RNA (1)...(19): siRNA sense strand
gaacuggcuucaagacuua

SEQ ID NO: 652513 - RNA, 19 nt, Homo sapiens
  misc_RNA (1)...(19): siRNA sense strand
gugcagaggucaaucuuua

SEQ ID NO: 652514 - RNA, 19 nt, Homo sapiens
  misc_RNA (1)...(19): siRNA sense strand
ccgaagagcucaucugaaa

SEQ ID NO: 652515 - RNA, 19 nt, Homo sapiens
  misc_RNA (1)...(19): siRNA sense strand
uaaagucucuccugauuau

SEQ ID NO: 652516 - RNA, 19 nt, Homo sapiens
  misc_RNA (1)...(19): siRNA sense strand
gaaauuugcugaauacacu

SEQ ID NO: 652517 - RNA, 19 nt, Homo sapiens
  misc_RNA (1)...(19): siRNA sense strand
gauuauaacugguuuagag

SEQ ID NO: 652518 - RNA, 19 nt, Homo sapiens
  misc_RNA (1)...(19): siRNA sense strand
uaucagguguccucucaua

SEQ ID NO: 652519 - RNA, 19 nt, Homo sapiens
  misc_RNA (1)...(19): siRNA sense strand
ugaauacacucacaaaucu

SEQ ID NO: 652520 - RNA, 19 nt, Homo sapiens
  misc_RNA (1)...(19): siRNA sense strand
agagugcgcuuucaacuga

SEQ ID NO: 652521 - RNA, 19 nt, Homo sapiens
  misc_RNA (1)...(19): siRNA sense strand
caacugaagcuaaagaaga

SEQ ID NO: 652522 - RNA, 19 nt, Homo sapiens
  misc_RNA (1)...(19): siRNA sense strand
ccagaaauuugcugaauac

SEQ ID NO: 652523 - RNA, 19 nt, Homo sapiens
  misc_RNA (1)...(19): siRNA sense strand
uagacaggcuagaaaguuu

SEQ ID NO: 652524 - RNA, 19 nt, Homo sapiens
  misc_RNA (1)...(19): siRNA sense strand
gaugaugacaguaagauau

SEQ ID NO: 652525 - RNA, 19 nt, Homo sapiens
  misc_RNA (1)...(19): siRNA sense strand
agacuuaccuugaauuguc

SEQ ID NO: 652526 - RNA, 19 nt, Homo sapiens
  misc_RNA (1)...(19): siRNA sense strand
gguuaucgcuuugcaguau

SEQ ID NO: 652527 - RNA, 19 nt, Homo sapiens
  misc_RNA (1)...(19): siRNA sense strand
uauaacugguuuagaggua

SEQ ID NO: 652528 - RNA, 19 nt, Homo sapiens
  misc_RNA (1)...(19): siRNA sense strand
agaggucaaucuuuaugua

SEQ ID NO: 652529 - RNA, 19 nt, Homo sapiens
  misc_RNA (1)...(19): siRNA sense strand
gacauaccuguaacuauua

SEQ ID NO: 652530 - RNA, 19 nt, Homo sapiens
  misc_RNA (1)...(19): siRNA sense strand
cccagaaauuugcugaaua

SEQ ID NO: 652531 - RNA, 19 nt, Homo sapiens
  misc_RNA (1)...(19): siRNA sense strand
cgaguucugugauggauuc

SEQ ID NO: 652532 - RNA, 19 nt, Homo sapiens
  misc_RNA (1)...(19): siRNA sense strand
auuaaagucucuccugauu

SEQ ID NO: 652533 - RNA, 19 nt, Homo sapiens
  misc_RNA (1)...(19): siRNA sense strand
gcccagaaauuugcugaau

SEQ ID NO: 652534 - RNA, 19 nt, Homo sapiens
  misc_RNA (1)...(19): siRNA sense strand
gcagaggucaaucuuuaug

SEQ ID NO: 652535 - RNA, 19 nt, Homo sapiens
  misc_RNA (1)...(19): siRNA sense strand
guagacaggcuagaaaguu

SEQ ID NO: 652536 - RNA, 19 nt, Homo sapiens
  misc_RNA (1)...(19): siRNA sense strand
gaucagagugcgcuuucaa

SEQ ID NO: 652537 - RNA, 19 nt, Homo sapiens
  misc_RNA (1)...(19): siRNA sense strand
cuagaaaguuugggucaga

SEQ ID NO: 652538 - RNA, 19 nt, Homo sapiens
  misc_RNA (1)...(19): siRNA sense strand
cagguguccucucauauuc

SEQ ID NO: 652539 - RNA, 19 nt, Homo sapiens
  misc_RNA (1)...(19): siRNA sense strand
ucagguguccucucauauu

SEQ ID NO: 652540 - RNA, 19 nt, Homo sapiens
  misc_RNA (1)...(19): siRNA sense strand
aagaagaaauguacaagcu

SEQ ID NO: 652541 - RNA, 19 nt, Homo sapiens
  misc_RNA (1)...(19): siRNA sense strand
aacugaagcuaaagaagaa

SEQ ID NO: 652542 - RNA, 19 nt, Homo sapiens
  misc_RNA (1)...(19): siRNA sense strand
uagaguccauucccuaauc

SEQ ID NO: 652543 - RNA, 19 nt, Homo sapiens
  misc_RNA (1)...(19): siRNA sense strand
gcuuugcaguauccaguuu

SEQ ID NO: 652544 - RNA, 19 nt, Homo sapiens
  misc_RNA (1)...(19): siRNA sense strand
uuaaagucucuccugauua

SEQ ID NO: 652545 - RNA, 19 nt, Homo sapiens
  misc_RNA (1)...(19): siRNA sense strand
guuaccggguuaucgcuuu

SEQ ID NO: 652546 - RNA, 19 nt, Homo sapiens
  misc_RNA (1)...(19): siRNA sense strand
uuauggauguguuugauca

SEQ ID NO: 652547 - RNA, 19 nt, Homo sapiens
  misc_RNA (1)...(19): siRNA sense strand
gaccauuuacaauuggaua

SEQ ID NO: 652548 - RNA, 19 nt, Homo sapiens
  misc_RNA (1)...(19): siRNA sense strand
ggauguguuugaucagagu

SEQ ID NO: 652549 - RNA, 19 nt, Homo sapiens
  misc_RNA (1)...(19): siRNA sense strand
gaagugcagaggucaaucu

SEQ ID NO: 652550 - RNA, 19 nt, Homo sapiens
  misc_RNA (1)...(19): siRNA sense strand
gcccgaagagcucaucuga

SEQ ID NO: 652551 - RNA, 19 nt, Homo sapiens
  misc_RNA (1)...(19): siRNA sense strand
ggaugaugaugacaguaag

SEQ ID NO: 652552 - RNA, 19 nt, Homo sapiens
  misc_RNA (1)...(19): siRNA sense strand
uaagauauggucgcucuau

SEQ ID NO: 652553 - RNA, 19 nt, Homo sapiens
  misc_RNA (1)...(19): siRNA sense strand
uguggaaccucauaaaauu

SEQ ID NO: 652554 - RNA, 19 nt, Homo sapiens
  misc_RNA (1)...(19): siRNA sense strand
gggaccaucucgaguucug

SEQ ID NO: 652555 - RNA, 19 nt, Homo sapiens
  misc_RNA (1)...(19): siRNA sense strand
ugacaccucuaucuucaac

SEQ ID NO: 652556 - RNA, 19 nt, Homo sapiens
  misc_RNA (1)...(19): siRNA sense strand
aguaucagguguccucuca

SEQ ID NO: 652557 - RNA, 19 nt, Homo sapiens
  misc_RNA (1)...(19): siRNA sense strand
ccauaccugugcagaagug

SEQ ID NO: 652558 - RNA, 19 nt, Homo sapiens
  misc_RNA (1)...(19): siRNA sense strand
uggaugaugaugacaguaa

SEQ ID NO: 652559 - RNA, 19 nt, Homo sapiens
  misc_RNA (1)...(19): siRNA sense strand
ugcaguauccaguuuauug

SEQ ID NO: 652560 - RNA, 19 nt, Homo sapiens
  misc_RNA (1)...(19): siRNA sense strand
gaagcuaaagaagaaaugu

SEQ ID NO: 652561 - RNA, 19 nt, Homo sapiens
  misc_RNA (1)...(19): siRNA sense strand
ucccuaauccucugcaauu

SEQ ID NO: 652562 - RNA, 19 nt, Homo sapiens
  misc_RNA (1)...(19): siRNA sense strand
agauauggucgcucuauga

SEQ ID NO: 652563 - RNA, 19 nt, Homo sapiens
  misc_RNA (1)...(19): siRNA sense strand
gauuaaagucucuccugau

SEQ ID NO: 652564 - RNA, 19 nt, Homo sapiens
  misc_RNA (1)...(19): siRNA sense strand
agugacaccucuaucuuca

SEQ ID NO: 652565 - RNA, 19 nt, Homo sapiens
  misc_RNA (1)...(19): siRNA sense strand
cugaauacacucacaaauc

SEQ ID NO: 652566 - RNA, 19 nt, Homo sapiens
  misc_RNA (1)...(19): siRNA sense strand
gagguacaguuccccuuaa

SEQ ID NO: 652567 - RNA, 19 nt, Homo sapiens
  misc_RNA (1)...(19): siRNA sense strand
agauuauuguggaugauga

SEQ ID NO: 652568 - RNA, 19 nt, Homo sapiens
  misc_RNA (1)...(19): siRNA sense strand
uaacugguuuagagguaca

SEQ ID NO: 652569 - RNA, 19 nt, Homo sapiens
  misc_RNA (1)...(19): siRNA sense strand
ggucaaucuuuauguacag

SEQ ID NO: 652570 - RNA, 19 nt, Homo sapiens
  misc_RNA (1)...(19): siRNA sense strand
caggaggcaauuucccaua

SEQ ID NO: 652571 - RNA, 19 nt, Homo sapiens
  misc_RNA (1)...(19): siRNA sense strand
gggacauaccuguaacuau

SEQ ID NO: 652572 - RNA, 19 nt, Homo sapiens
  misc_RNA (1)...(19): siRNA sense strand
gacuuaccuugaauuguca

SEQ ID NO: 652573 - RNA, 19 nt, Homo sapiens
  misc_RNA (1)...(19): siRNA sense strand
caaaucuccuagaguccau

SEQ ID NO: 652574 - RNA, 19 nt, Homo sapiens
  misc_RNA (1)...(19): siRNA sense strand
ccuagaguccauucccuaa

SEQ ID NO: 652575 - RNA, 19 nt, Homo sapiens
  misc_RNA (1)...(19): siRNA sense strand
gaugaugaugacaguaaga

SEQ ID NO: 652576 - RNA, 19 nt, Homo sapiens
  misc_RNA (1)...(19): siRNA sense strand
ccucugcaauuccuucagu

SEQ ID NO: 652577 - RNA, 19 nt, Homo sapiens
  misc_RNA (1)...(19): siRNA sense strand
gcaguauccaguuuauugg

SEQ ID NO: 652578 - RNA, 19 nt, Homo sapiens
  misc_RNA (1)...(19): siRNA sense strand
aaacuuggacugcaaacag

SEQ ID NO: 652579 - RNA, 19 nt, Homo sapiens
  misc_RNA (1)...(19): siRNA sense strand
ucagugacaccucuaucuu

SEQ ID NO: 652580 - RNA, 19 nt, Homo sapiens
  misc_RNA (1)...(19): siRNA sense strand
aagucucuccugauuauaa

SEQ ID NO: 652581 - RNA, 19 nt, Homo sapiens
  misc_RNA (1)...(19): siRNA sense strand
gcagaagugcagaggucaa

SEQ ID NO: 652582 - RNA, 19 nt, Homo sapiens
  misc_RNA (1)...(19): siRNA sense strand
aagauauggucgcucuaug

SEQ ID NO: 652583 - RNA, 19 nt, Homo sapiens
  misc_RNA (1)...(19): siRNA sense strand
acucacaaaucuccuagag

SEQ ID NO: 652584 - RNA, 19 nt, Homo sapiens
  misc_RNA (1)...(19): siRNA sense strand
gcugaauacacucacaaau

SEQ ID NO: 652585 - RNA, 19 nt, Homo sapiens
  misc_RNA (1)...(19): siRNA sense strand
ggaugggguuaccggguua

SEQ ID NO: 652586 - RNA, 19 nt, Homo sapiens
  misc_RNA (1)...(19): siRNA sense strand
uggaacugcagaugucuuu

SEQ ID NO: 652587 - RNA, 19 nt, Homo sapiens
  misc_RNA (1)...(19): siRNA sense strand
ugaugaugacaguaagaua

SEQ ID NO: 652588 - RNA, 19 nt, Homo sapiens
  misc_RNA (1)...(19): siRNA sense strand
aaaguuugggucagaguga

SEQ ID NO: 652589 - RNA, 19 nt, Homo sapiens
  misc_RNA (1)...(19): siRNA sense strand
gaagagcucaucugaaaac

SEQ ID NO: 652590 - RNA, 19 nt, Homo sapiens
  misc_RNA (1)...(19): siRNA sense strand
ugcaauuccuucagugaca

SEQ ID NO: 652591 - RNA, 19 nt, Homo sapiens
  misc_RNA (1)...(19): siRNA sense strand
ucccauaccugugcagaag

SEQ ID NO: 652592 - RNA, 19 nt, Homo sapiens
  misc_RNA (1)...(19): siRNA sense strand
cuguaacuauuauggaugu

SEQ ID NO: 652593 - RNA, 19 nt, Homo sapiens
  misc_RNA (1)...(19): siRNA sense strand
gcugaugccauugauuuca

SEQ ID NO: 652594 - RNA, 19 nt, Homo sapiens
  misc_RNA (1)...(19): siRNA sense strand
gguagacaggcuagaaagu

SEQ ID NO: 652595 - RNA, 19 nt, Homo sapiens
  misc_RNA (1)...(19): siRNA sense strand
ucauaaaauucgggacaua

SEQ ID NO: 652596 - RNA, 19 nt, Homo sapiens
  misc_RNA (1)...(19): siRNA sense strand
acaccucuaucuucaacca

SEQ ID NO: 652597 - RNA, 19 nt, Homo sapiens
  misc_RNA (1)...(19): siRNA sense strand
gagcuugaggugcagaaag

SEQ ID NO: 652598 - RNA, 19 nt, Homo sapiens
  misc_RNA (1)...(19): siRNA sense strand
gaggucaaucuuuauguac

SEQ ID NO: 652599 - RNA, 19 nt, Homo sapiens
  misc_RNA (1)...(19): siRNA sense strand
gauauggucgcucuaugac

SEQ ID NO: 652600 - RNA, 19 nt, Homo sapiens
  misc_RNA (1)...(19): siRNA sense strand
caugguagacaggcuagaa

SEQ ID NO: 652601 - RNA, 19 nt, Homo sapiens
  misc_RNA (1)...(19): siRNA sense strand
cagugacaccucuaucuuc

SEQ ID NO: 652602 - RNA, 19 nt, Homo sapiens
  misc_RNA (1)...(19): siRNA sense strand
ggucagugccgaggagcuu

SEQ ID NO: 652603 - RNA, 19 nt, Homo sapiens
  misc_RNA (1)...(19): siRNA sense strand
acaaugaccuuauuuccua

SEQ ID NO: 652604 - RNA, 19 nt, Homo sapiens
  misc_RNA (1)...(19): siRNA sense strand
gaagaaaauucggauguua

SEQ ID NO: 652605 - RNA, 19 nt, Homo sapiens
  misc_RNA (1)...(19): siRNA sense strand
gagugaacuugaauuauga

SEQ ID NO: 652606 - RNA, 19 nt, Homo sapiens
  misc_RNA (1)...(19): siRNA sense strand
ggaagaaugugacccuuac

SEQ ID NO: 652607 - RNA, 19 nt, Homo sapiens
  misc_RNA (1)...(19): siRNA sense strand
agagugaacuugaauuaug

SEQ ID NO: 652608 - RNA, 19 nt, Homo sapiens
  misc_RNA (1)...(19): siRNA sense strand
aaagaaggcacuugaaauu

SEQ ID NO: 652609 - RNA, 19 nt, Homo sapiens
  misc_RNA (1)...(19): siRNA sense strand
ugagaacaaugaccuuauu

SEQ ID NO: 652610 - RNA, 19 nt, Homo sapiens
  misc_RNA (1)...(19): siRNA sense strand
ggaugcacaugaagaaaug

SEQ ID NO: 652611 - RNA, 19 nt, Homo sapiens
  misc_RNA (1)...(19): siRNA sense strand
gaaggaugcacaugaagaa

SEQ ID NO: 652612 - RNA, 19 nt, Homo sapiens
  misc_RNA (1)...(19): siRNA sense strand
ggagcaggcuguggaagaa

SEQ ID NO: 652613 - RNA, 19 nt, Homo sapiens
  misc_RNA (1)...(19): siRNA sense strand
gaaggcacuugaaauuaca

SEQ ID NO: 652614 - RNA, 19 nt, Homo sapiens
  misc_RNA (1)...(19): siRNA sense strand
ccucagauaccaagagaua

SEQ ID NO: 652615 - RNA, 19 nt, Homo sapiens
  misc_RNA (1)...(19): siRNA sense strand
ucagagugaacuugaauua

SEQ ID NO: 652616 - RNA, 19 nt, Homo sapiens
  misc_RNA (1)...(19): siRNA sense strand
gcccuaguguggaugauuu

SEQ ID NO: 652617 - RNA, 19 nt, Homo sapiens
  misc_RNA (1)...(19): siRNA sense strand
gaugaaaucagcccuagug

SEQ ID NO: 652618 - RNA, 19 nt, Homo sapiens
  misc_RNA (1)...(19): siRNA sense strand
ccacgacucugaccauagu

SEQ ID NO: 652619 - RNA, 19 nt, Homo sapiens
  misc_RNA (1)...(19): siRNA sense strand
uaaagaaggcacuugaaau

SEQ ID NO: 652620 - RNA, 19 nt, Homo sapiens
  misc_RNA (1)...(19): siRNA sense strand
gagaacaaugaccuuauuu

SEQ ID NO: 652621 - RNA, 19 nt, Homo sapiens
  misc_RNA (1)...(19): siRNA sense strand
uggaucccuuuacuuauua

SEQ ID NO: 652622 - RNA, 19 nt, Homo sapiens
  misc_RNA (1)...(19): siRNA sense strand
gaccuuauuuccuacaaca

SEQ ID NO: 652623 - RNA, 19 nt, Homo sapiens
  misc_RNA (1)...(19): siRNA sense strand
ggucagaggacgaucaaga

SEQ ID NO: 652624 - RNA, 19 nt, Homo sapiens
  misc_RNA (1)...(19): siRNA sense strand
acucuggccucuugaauga

SEQ ID NO: 652625 - RNA, 19 nt, Homo sapiens
  misc_RNA (1)...(19): siRNA sense strand
gcagaugccucagauacca

SEQ ID NO: 652626 - RNA, 19 nt, Homo sapiens
  misc_RNA (1)...(19): siRNA sense strand
ugaccaagaauguggauuu

SEQ ID NO: 652627 - RNA, 19 nt, Homo sapiens
  misc_RNA (1)...(19): siRNA sense strand
agaaggcacuugaaauuac

SEQ ID NO: 652628 - RNA, 19 nt, Homo sapiens
  misc_RNA (1)...(19): siRNA sense strand
cugcgaaacuuguaucugu

SEQ ID NO: 652629 - RNA, 19 nt, Homo sapiens
  misc_RNA (1)...(19): siRNA sense strand
ugaaugauacugaggagaa

SEQ ID NO: 652630 - RNA, 19 nt, Homo sapiens
  misc_RNA (1)...(19): siRNA sense strand
aagaaggcacuugaaauua

SEQ ID NO: 652631 - RNA, 19 nt, Homo sapiens
  misc_RNA (1)...(19): siRNA sense strand
caaccacaaucaugaggau

SEQ ID NO: 652632 - RNA, 19 nt, Homo sapiens
  misc_RNA (1)...(19): siRNA sense strand
gaacaaugaccuuauuucc

SEQ ID NO: 652633 - RNA, 19 nt, Homo sapiens
  misc_RNA (1)...(19): siRNA sense strand
uuggaucccuuuacuuauu

SEQ ID NO: 652634 - RNA, 19 nt, Homo sapiens
  misc_RNA (1)...(19): siRNA sense strand
uuaaagaaggcacuugaaa

SEQ ID NO: 652635 - RNA, 19 nt, Homo sapiens
  misc_RNA (1)...(19): siRNA sense strand
ucuggccucuugaaugaua

SEQ ID NO: 652636 - RNA, 19 nt, Homo sapiens
  misc_RNA (1)...(19): siRNA sense strand
ggauguuaguggcagagaa

SEQ ID NO: 652637 - RNA, 19 nt, Homo sapiens
  misc_RNA (1)...(19): siRNA sense strand
ccagcaaucaggacuugua

SEQ ID NO: 652638 - RNA, 19 nt, Homo sapiens
  misc_RNA (1)...(19): siRNA sense strand
gaaucaaggagcucacuca

SEQ ID NO: 652639 - RNA, 19 nt, Homo sapiens
  misc_RNA (1)...(19): siRNA sense strand
aaucaggacuuguauuggu

SEQ ID NO: 652640 - RNA, 19 nt, Homo sapiens
  misc_RNA (1)...(19): siRNA sense strand
gauaccaagagauaacaaa

SEQ ID NO: 652641 - RNA, 19 nt, Homo sapiens
  misc_RNA (1)...(19): siRNA sense strand
aguuggaucccuuuacuua

SEQ ID NO: 652642 - RNA, 19 nt, Homo sapiens
  misc_RNA (1)...(19): siRNA sense strand
uggcucagcucauggaagu

SEQ ID NO: 652643 - RNA, 19 nt, Homo sapiens
  misc_RNA (1)...(19): siRNA sense strand
uccaaagccugccugaaga

SEQ ID NO: 652644 - RNA, 19 nt, Homo sapiens
  misc_RNA (1)...(19): siRNA sense strand
ccaagaauguggauuuugu

SEQ ID NO: 652645 - RNA, 19 nt, Homo sapiens
  misc_RNA (1)...(19): siRNA sense strand
caucaaggcauuuauugca

SEQ ID NO: 652646 - RNA, 19 nt, Homo sapiens
  misc_RNA (1)...(19): siRNA sense strand
gccagcagaugccucagau

SEQ ID NO: 652647 - RNA, 19 nt, Homo sapiens
  misc_RNA (1)...(19): siRNA sense strand
ggaucccuuuacuuauuaa

SEQ ID NO: 652648 - RNA, 19 nt, Homo sapiens
  misc_RNA (1)...(19): siRNA sense strand
gaggagaacaacucugaca

SEQ ID NO: 652649 - RNA, 19 nt, Homo sapiens
  misc_RNA (1)...(19): siRNA sense strand
gaauguggauuuugugaag

SEQ ID NO: 652650 - RNA, 19 nt, Homo sapiens
  misc_RNA (1)...(19): siRNA sense strand
ggagaacaacucugacaac

SEQ ID NO: 652651 - RNA, 19 nt, Homo sapiens
  misc_RNA (1)...(19): siRNA sense strand
gauguuaguggcagagaau

SEQ ID NO: 652652 - RNA, 19 nt, Homo sapiens
  misc_RNA (1)...(19): siRNA sense strand
ugaaggaugcacaugaaga

SEQ ID NO: 652653 - RNA, 19 nt, Homo sapiens
  misc_RNA (1)...(19): siRNA sense strand
aaucaauucugcgaaacuu

SEQ ID NO: 652654 - RNA, 19 nt, Homo sapiens
  misc_RNA (1)...(19): siRNA sense strand
gaucaagagcucauaaucc

SEQ ID NO: 652655 - RNA, 19 nt, Homo sapiens
  misc_RNA (1)...(19): siRNA sense strand
ggacgaucaagagcucaua

SEQ ID NO: 652656 - RNA, 19 nt, Homo sapiens
  misc_RNA (1)...(19): siRNA sense strand
uggaagaaugugacccuua

SEQ ID NO: 652657 - RNA, 19 nt, Homo sapiens
  misc_RNA (1)...(19): siRNA sense strand
cacaggaaacccagaaguu

SEQ ID NO: 652658 - RNA, 19 nt, Homo sapiens
  misc_RNA (1)...(19): siRNA sense strand
gcaugaauagaaucaagga

SEQ ID NO: 652659 - RNA, 19 nt, Homo sapiens
  misc_RNA (1)...(19): siRNA sense strand
gaccaagaauguggauuuu

SEQ ID NO: 652660 - RNA, 19 nt, Homo sapiens
  misc_RNA (1)...(19): siRNA sense strand
cagcagaugccucagauac

SEQ ID NO: 652661 - RNA, 19 nt, Homo sapiens
  misc_RNA (1)...(19): siRNA sense strand
aaucagcccuaguguggau

SEQ ID NO: 652662 - RNA, 19 nt, Homo sapiens
  misc_RNA (1)...(19): siRNA sense strand
ccaaagccugccugaagaa

SEQ ID NO: 652663 - RNA, 19 nt, Homo sapiens
  misc_RNA (1)...(19): siRNA sense strand
gccaucaaggcauuuauug

SEQ ID NO: 652664 - RNA, 19 nt, Homo sapiens
  misc_RNA (1)...(19): siRNA sense strand
gaaugauacugaggagaac

SEQ ID NO: 652665 - RNA, 19 nt, Homo sapiens
  misc_RNA (1)...(19): siRNA sense strand
aggcauuuauugcagugua

SEQ ID NO: 652666 - RNA, 19 nt, Homo sapiens
  misc_RNA (1)...(19): siRNA sense strand
gacgaucaagagcucauaa

SEQ ID NO: 652667 - RNA, 19 nt, Homo sapiens
  misc_RNA (1)...(19): siRNA sense strand
cagagaaugggaagaagga

SEQ ID NO: 652668 - RNA, 19 nt, Homo sapiens
  misc_RNA (1)...(19): siRNA sense strand
uuguggauauuucugauga

SEQ ID NO: 652669 - RNA, 19 nt, Homo sapiens
  misc_RNA (1)...(19): siRNA sense strand
caagggaagccacgacucu

SEQ ID NO: 652670 - RNA, 19 nt, Homo sapiens
  misc_RNA (1)...(19): siRNA sense strand
ugaccauagucuucucuca

SEQ ID NO: 652671 - RNA, 19 nt, Homo sapiens
  misc_RNA (1)...(19): siRNA sense strand
caccugaccgugcgaauca

SEQ ID NO: 652672 - RNA, 19 nt, Homo sapiens
  misc_RNA (1)...(19): siRNA sense strand
caaagccugccugaagaaa

SEQ ID NO: 652673 - RNA, 19 nt, Homo sapiens
  misc_RNA (1)...(19): siRNA sense strand
ccugagaacaaugaccuua

SEQ ID NO: 652674 - RNA, 19 nt, Homo sapiens
  misc_RNA (1)...(19): siRNA sense strand
guggaugauuuggcucuga

SEQ ID NO: 652675 - RNA, 19 nt, Homo sapiens
  misc_RNA (1)...(19): siRNA sense strand
cugaggagaacaacucuga

SEQ ID NO: 652676 - RNA, 19 nt, Homo sapiens
  misc_RNA (1)...(19): siRNA sense strand
guacuuuccgucacuccaa

SEQ ID NO: 652677 - RNA, 19 nt, Homo sapiens
  misc_RNA (1)...(19): siRNA sense strand
ucaauucugcgaaacuugu

SEQ ID NO: 652678 - RNA, 19 nt, Homo sapiens
  misc_RNA (1)...(19): siRNA sense strand
uauauccaccuauguguca

SEQ ID NO: 652679 - RNA, 19 nt, Homo sapiens
  misc_RNA (1)...(19): siRNA sense strand
agaaugggaagaaggauca

SEQ ID NO: 652680 - RNA, 19 nt, Homo sapiens
  misc_RNA (1)...(19): siRNA sense strand
cugagcauauauccaccua

SEQ ID NO: 652681 - RNA, 19 nt, Homo sapiens
  misc_RNA (1)...(19): siRNA sense strand
cagagugaacuugaauuau

SEQ ID NO: 652682 - RNA, 19 nt, Homo sapiens
  misc_RNA (1)...(19): siRNA sense strand
ccacaggaaacccagaagu

SEQ ID NO: 652683 - RNA, 19 nt, Homo sapiens
  misc_RNA (1)...(19): siRNA sense strand
caauucugcgaaacuugua

SEQ ID NO: 652684 - RNA, 19 nt, Homo sapiens
  misc_RNA (1)...(19): siRNA sense strand
agaacaaugaccuuauuuc

SEQ ID NO: 652685 - RNA, 19 nt, Homo sapiens
  misc_RNA (1)...(19): siRNA sense strand
acaggaaacccagaaguuc

SEQ ID NO: 652686 - RNA, 19 nt, Homo sapiens
  misc_RNA (1)...(19): siRNA sense strand
uggcagagaaugggaagaa

SEQ ID NO: 652687 - RNA, 19 nt, Homo sapiens
  misc_RNA (1)...(19): siRNA sense strand
ugaagaaaauucggauguu

SEQ ID NO: 652688 - RNA, 19 nt, Homo sapiens
  misc_RNA (1)...(19): siRNA sense strand
cccuuacucuggccucuug

SEQ ID NO: 652689 - RNA, 19 nt, Homo sapiens
  misc_RNA (1)...(19): siRNA sense strand
gggaucacccugagaaagc

SEQ ID NO: 652690 - RNA, 19 nt, Homo sapiens
  misc_RNA (1)...(19): siRNA sense strand
gauaguuggaucccuuuac

SEQ ID NO: 652691 - RNA, 19 nt, Homo sapiens
  misc_RNA (1)...(19): siRNA sense strand
cgaucaagagcucauaauc

SEQ ID NO: 652692 - RNA, 19 nt, Homo sapiens
  misc_RNA (1)...(19): siRNA sense strand
caacucugacaaccacaau

SEQ ID NO: 652693 - RNA, 19 nt, Homo sapiens
  misc_RNA (1)...(19): siRNA sense strand
ugcgaaacuuguaucuguu

SEQ ID NO: 652694 - RNA, 19 nt, Homo sapiens
  misc_RNA (1)...(19): siRNA sense strand
cagcaaucaggacuuguau

SEQ ID NO: 652695 - RNA, 19 nt, Homo sapiens
  misc_RNA (1)...(19): siRNA sense strand
ugccucagauaccaagaga

SEQ ID NO: 652696 - RNA, 19 nt, Homo sapiens
  misc_RNA (1)...(19): siRNA sense strand
cugacaaccacaaucauga

SEQ ID NO: 652697 - RNA, 19 nt, Homo sapiens
  misc_RNA (1)...(19): siRNA sense strand
ucagauaccaagagauaac

SEQ ID NO: 652698 - RNA, 19 nt, Homo sapiens
  misc_RNA (1)...(19): siRNA sense strand
acaaugaccuuauuuccua

SEQ ID NO: 652699 - RNA, 19 nt, Homo sapiens
  misc_RNA (1)...(19): siRNA sense strand
gaagaaaauucggauguua

SEQ ID NO: 652700 - RNA, 19 nt, Homo sapiens
  misc_RNA (1)...(19): siRNA sense strand
gagugaacuugaauuauga

SEQ ID NO: 652701 - RNA, 19 nt, Homo sapiens
  misc_RNA (1)...(19): siRNA sense strand
ggaagaaugugacccuuac

SEQ ID NO: 652702 - RNA, 19 nt, Homo sapiens
  misc_RNA (1)...(19): siRNA sense strand
agagugaacuugaauuaug

SEQ ID NO: 652703 - RNA, 19 nt, Homo sapiens
  misc_RNA (1)...(19): siRNA sense strand
aaagaaggcacuugaaauu

SEQ ID NO: 652704 - RNA, 19 nt, Homo sapiens
  misc_RNA (1)...(19): siRNA sense strand
ugagaacaaugaccuuauu

SEQ ID NO: 652705 - RNA, 19 nt, Homo sapiens
  misc_RNA (1)...(19): siRNA sense strand
ggaugcacaugaagaaaug

SEQ ID NO: 652706 - RNA, 19 nt, Homo sapiens
  misc_RNA (1)...(19): siRNA sense strand
gaaggaugcacaugaagaa

SEQ ID NO: 652707 - RNA, 19 nt, Homo sapiens
  misc_RNA (1)...(19): siRNA sense strand
ggagcaggcuguggaagaa

SEQ ID NO: 652708 - RNA, 19 nt, Homo sapiens
  misc_RNA (1)...(19): siRNA sense strand
gaaggcacuugaaauuaca

SEQ ID NO: 652709 - RNA, 19 nt, Homo sapiens
  misc_RNA (1)...(19): siRNA sense strand
ccucagauaccaagagaua

SEQ ID NO: 652710 - RNA, 19 nt, Homo sapiens
  misc_RNA (1)...(19): siRNA sense strand
ucagagugaacuugaauua

SEQ ID NO: 652711 - RNA, 19 nt, Homo sapiens
  misc_RNA (1)...(19): siRNA sense strand
gcccuaguguggaugauuu

SEQ ID NO: 652712 - RNA, 19 nt, Homo sapiens
  misc_RNA (1)...(19): siRNA sense strand
gaugaaaucagcccuagug

SEQ ID NO: 652713 - RNA, 19 nt, Homo sapiens
  misc_RNA (1)...(19): siRNA sense strand
uaaagaaggcacuugaaau

SEQ ID NO: 652714 - RNA, 19 nt, Homo sapiens
  misc_RNA (1)...(19): siRNA sense strand
gagaacaaugaccuuauuu

SEQ ID NO: 652715 - RNA, 19 nt, Homo sapiens
  misc_RNA (1)...(19): siRNA sense strand
uggaucccuuuacuuauua

SEQ ID NO: 652716 - RNA, 19 nt, Homo sapiens
  misc_RNA (1)...(19): siRNA sense strand
gaccuuauuuccuacaaca

SEQ ID NO: 652717 - RNA, 19 nt, Homo sapiens
  misc_RNA (1)...(19): siRNA sense strand
ggucagaggacgaucaaga

SEQ ID NO: 652718 - RNA, 19 nt, Homo sapiens
  misc_RNA (1)...(19): siRNA sense strand
acucuggccucuugaauga

SEQ ID NO: 652719 - RNA, 19 nt, Homo sapiens
  misc_RNA (1)...(19): siRNA sense strand
gcagaugccucagauacca

SEQ ID NO: 652720 - RNA, 19 nt, Homo sapiens
  misc_RNA (1)...(19): siRNA sense strand
ugaccaagaauguggauuu

SEQ ID NO: 652721 - RNA, 19 nt, Homo sapiens
  misc_RNA (1)...(19): siRNA sense strand
agaaggcacuugaaauuac

SEQ ID NO: 652722 - RNA, 19 nt, Homo sapiens
  misc_RNA (1)...(19): siRNA sense strand
cugcgaaacuuguaucugu

SEQ ID NO: 652723 - RNA, 19 nt, Homo sapiens
  misc_RNA (1)...(19): siRNA sense strand
ugaaugauacugaggagaa

SEQ ID NO: 652724 - RNA, 19 nt, Homo sapiens
  misc_RNA (1)...(19): siRNA sense strand
aagaaggcacuugaaauua

SEQ ID NO: 652725 - RNA, 19 nt, Homo sapiens
  misc_RNA (1)...(19): siRNA sense strand
caaccacaaucaugaggau

SEQ ID NO: 652726 - RNA, 19 nt, Homo sapiens
  misc_RNA (1)...(19): siRNA sense strand
gaacaaugaccuuauuucc

SEQ ID NO: 652727 - RNA, 19 nt, Homo sapiens
  misc_RNA (1)...(19): siRNA sense strand
uuggaucccuuuacuuauu

SEQ ID NO: 652728 - RNA, 19 nt, Homo sapiens
  misc_RNA (1)...(19): siRNA sense strand
uuaaagaaggcacuugaaa

SEQ ID NO: 652729 - RNA, 19 nt, Homo sapiens
  misc_RNA (1)...(19): siRNA sense strand
ucuggccucuugaaugaua

SEQ ID NO: 652730 - RNA, 19 nt, Homo sapiens
  misc_RNA (1)...(19): siRNA sense strand
ggauguuaguggcagagaa

SEQ ID NO: 652731 - RNA, 19 nt, Homo sapiens
  misc_RNA (1)...(19): siRNA sense strand
ccagcaaucaggacuugua

SEQ ID NO: 652732 - RNA, 19 nt, Homo sapiens
  misc_RNA (1)...(19): siRNA sense strand
gaaucaaggagcucacuca

SEQ ID NO: 652733 - RNA, 19 nt, Homo sapiens
  misc_RNA (1)...(19): siRNA sense strand
aaucaggacuuguauuggu

SEQ ID NO: 652734 - RNA, 19 nt, Homo sapiens
  misc_RNA (1)...(19): siRNA sense strand
gauaccaagagauaacaaa

SEQ ID NO: 652735 - RNA, 19 nt, Homo sapiens
  misc_RNA (1)...(19): siRNA sense strand
aguuggaucccuuuacuua

SEQ ID NO: 652736 - RNA, 19 nt, Homo sapiens
  misc_RNA (1)...(19): siRNA sense strand
ccaagaauguggauuuugu

SEQ ID NO: 652737 - RNA, 19 nt, Homo sapiens
  misc_RNA (1)...(19): siRNA sense strand
uccaaagccugccugaaga

SEQ ID NO: 652738 - RNA, 19 nt, Homo sapiens
  misc_RNA (1)...(19): siRNA sense strand
gaauguggauuuugugaag

SEQ ID NO: 652739 - RNA, 19 nt, Homo sapiens
  misc_RNA (1)...(19): siRNA sense strand
ggaucccuuuacuuauuaa

SEQ ID NO: 652740 - RNA, 19 nt, Homo sapiens
  misc_RNA (1)...(19): siRNA sense strand
gccagcagaugccucagau

SEQ ID NO: 652741 - RNA, 19 nt, Homo sapiens
  misc_RNA (1)...(19): siRNA sense strand
gaggagaacaacucugaca

SEQ ID NO: 652742 - RNA, 19 nt, Homo sapiens
  misc_RNA (1)...(19): siRNA sense strand
ggagaacaacucugacaac

SEQ ID NO: 652743 - RNA, 19 nt, Homo sapiens
  misc_RNA (1)...(19): siRNA sense strand
gauguuaguggcagagaau

SEQ ID NO: 652744 - RNA, 19 nt, Homo sapiens
  misc_RNA (1)...(19): siRNA sense strand
ugaaggaugcacaugaaga

SEQ ID NO: 652745 - RNA, 19 nt, Homo sapiens
  misc_RNA (1)...(19): siRNA sense strand
aaucaauucugcgaaacuu

SEQ ID NO: 652746 - RNA, 19 nt, Homo sapiens
  misc_RNA (1)...(19): siRNA sense strand
gaucaagagcucauaaucc

SEQ ID NO: 652747 - RNA, 19 nt, Homo sapiens
  misc_RNA (1)...(19): siRNA sense strand
ggacgaucaagagcucaua

SEQ ID NO: 652748 - RNA, 19 nt, Homo sapiens
  misc_RNA (1)...(19): siRNA sense strand
uggaagaaugugacccuua

SEQ ID NO: 652749 - RNA, 19 nt, Homo sapiens
  misc_RNA (1)...(19): siRNA sense strand
gaccaagaauguggauuuu

SEQ ID NO: 652750 - RNA, 19 nt, Homo sapiens
  misc_RNA (1)...(19): siRNA sense strand
gcaugaauagaaucaagga

SEQ ID NO: 652751 - RNA, 19 nt, Homo sapiens
  misc_RNA (1)...(19): siRNA sense strand
gaaugauacugaggagaac

SEQ ID NO: 652752 - RNA, 19 nt, Homo sapiens
  misc_RNA (1)...(19): siRNA sense strand
cagcagaugccucagauac

SEQ ID NO: 652753 - RNA, 19 nt, Homo sapiens
  misc_RNA (1)...(19): siRNA sense strand
aaucagcccuaguguggau

SEQ ID NO: 652754 - RNA, 19 nt, Homo sapiens
  misc_RNA (1)...(19): siRNA sense strand
ccaaagccugccugaagaa

SEQ ID NO: 652755 - RNA, 19 nt, Homo sapiens
  misc_RNA (1)...(19): siRNA sense strand
gacgaucaagagcucauaa

SEQ ID NO: 652756 - RNA, 19 nt, Homo sapiens
  misc_RNA (1)...(19): siRNA sense strand
cagagaaugggaagaagga

SEQ ID NO: 652757 - RNA, 19 nt, Homo sapiens
  misc_RNA (1)...(19): siRNA sense strand
uuguggauauuucugauga

SEQ ID NO: 652758 - RNA, 19 nt, Homo sapiens
  misc_RNA (1)...(19): siRNA sense strand
caccugaccgugcgaauca

SEQ ID NO: 652759 - RNA, 19 nt, Homo sapiens
  misc_RNA (1)...(19): siRNA sense strand
caaagccugccugaagaaa

SEQ ID NO: 652760 - RNA, 19 nt, Homo sapiens
  misc_RNA (1)...(19): siRNA sense strand
ccugagaacaaugaccuua

SEQ ID NO: 652761 - RNA, 19 nt, Homo sapiens
  misc_RNA (1)...(19): siRNA sense strand
guggaugauuuggcucuga

SEQ ID NO: 652762 - RNA, 19 nt, Homo sapiens
  misc_RNA (1)...(19): siRNA sense strand
cugaggagaacaacucuga

SEQ ID NO: 652763 - RNA, 19 nt, Homo sapiens
  misc_RNA (1)...(19): siRNA sense strand
ucaauucugcgaaacuugu

SEQ ID NO: 652764 - RNA, 19 nt, Homo sapiens
  misc_RNA (1)...(19): siRNA sense strand
uauauccaccuauguguca

SEQ ID NO: 652765 - RNA, 19 nt, Homo sapiens
  misc_RNA (1)...(19): siRNA sense strand
agaaugggaagaaggauca

SEQ ID NO: 652766 - RNA, 19 nt, Homo sapiens
  misc_RNA (1)...(19): siRNA sense strand
guacuuuccgucacuccaa

SEQ ID NO: 652767 - RNA, 19 nt, Homo sapiens
  misc_RNA (1)...(19): siRNA sense strand
cugagcauauauccaccua

SEQ ID NO: 652768 - RNA, 19 nt, Homo sapiens
  misc_RNA (1)...(19): siRNA sense strand
cagagugaacuugaauuau

SEQ ID NO: 652769 - RNA, 19 nt, Homo sapiens
  misc_RNA (1)...(19): siRNA sense strand
agaacaaugaccuuauuuc

SEQ ID NO: 652770 - RNA, 19 nt, Homo sapiens
  misc_RNA (1)...(19): siRNA sense strand
caauucugcgaaacuugua

SEQ ID NO: 652771 - RNA, 19 nt, Homo sapiens
  misc_RNA (1)...(19): siRNA sense strand
uggcagagaaugggaagaa

SEQ ID NO: 652772 - RNA, 19 nt, Homo sapiens
  misc_RNA (1)...(19): siRNA sense strand
ugaagaaaauucggauguu

SEQ ID NO: 652773 - RNA, 19 nt, Homo sapiens
  misc_RNA (1)...(19): siRNA sense strand
cccuuacucuggccucuug

SEQ ID NO: 652774 - RNA, 19 nt, Homo sapiens
  misc_RNA (1)...(19): siRNA sense strand
gauaguuggaucccuuuac

SEQ ID NO: 652775 - RNA, 19 nt, Homo sapiens
  misc_RNA (1)...(19): siRNA sense strand
cgaucaagagcucauaauc

SEQ ID NO: 652776 - RNA, 19 nt, Homo sapiens
  misc_RNA (1)...(19): siRNA sense strand
ugccucagauaccaagaga

SEQ ID NO: 652777 - RNA, 19 nt, Homo sapiens
  misc_RNA (1)...(19): siRNA sense strand
ugcgaaacuuguaucuguu

SEQ ID NO: 652778 - RNA, 19 nt, Homo sapiens
  misc_RNA (1)...(19): siRNA sense strand
cagcaaucaggacuuguau

SEQ ID NO: 652779 - RNA, 19 nt, Homo sapiens
  misc_RNA (1)...(19): siRNA sense strand
cugacaaccacaaucauga

SEQ ID NO: 652780 - RNA, 19 nt, Homo sapiens
  misc_RNA (1)...(19): siRNA sense strand
caacucugacaaccacaau

SEQ ID NO: 652781 - RNA, 19 nt, Homo sapiens
  misc_RNA (1)...(19): siRNA sense strand
ucagauaccaagagauaac

SEQ ID NO: 652782 - RNA, 19 nt, Homo sapiens
  misc_RNA (1)...(19): siRNA sense strand
gaaagucucacaaaucaaa

SEQ ID NO: 652783 - RNA, 19 nt, Homo sapiens
  misc_RNA (1)...(19): siRNA sense strand
gaugguagauggcuuugaa

SEQ ID NO: 652784 - RNA, 19 nt, Homo sapiens
  misc_RNA (1)...(19): siRNA sense strand
gaugacaacuccuaugaug

SEQ ID NO: 652785 - RNA, 19 nt, Homo sapiens
  misc_RNA (1)...(19): siRNA sense strand
cagagaaugugcugaguuu

SEQ ID NO: 652786 - RNA, 19 nt, Homo sapiens
  misc_RNA (1)...(19): siRNA sense strand
ccaagaagaugauggacaa

SEQ ID NO: 652787 - RNA, 19 nt, Homo sapiens
  misc_RNA (1)...(19): siRNA sense strand
gaugagaaguaccugauug

SEQ ID NO: 652788 - RNA, 19 nt, Homo sapiens
  misc_RNA (1)...(19): siRNA sense strand
ggagauguuugaagagaug

SEQ ID NO: 652789 - RNA, 19 nt, Homo sapiens
  misc_RNA (1)...(19): siRNA sense strand
caagagacgucacccuaga

SEQ ID NO: 652790 - RNA, 19 nt, Homo sapiens
  misc_RNA (1)...(19): siRNA sense strand
ugagaagauugaacaguuu

SEQ ID NO: 652791 - RNA, 19 nt, Homo sapiens
  misc_RNA (1)...(19): siRNA sense strand
caugggagauguuugaaga

SEQ ID NO: 652792 - RNA, 19 nt, Homo sapiens
  misc_RNA (1)...(19): siRNA sense strand
caaagaagcagaagaagca

SEQ ID NO: 652793 - RNA, 19 nt, Homo sapiens
  misc_RNA (1)...(19): siRNA sense strand
gaacugauccccuuuguga

SEQ ID NO: 652794 - RNA, 19 nt, Homo sapiens
  misc_RNA (1)...(19): siRNA sense strand
gcaagacaaucggagagaa

SEQ ID NO: 652795 - RNA, 19 nt, Homo sapiens
  misc_RNA (1)...(19): siRNA sense strand
caucaaagaagcagaagaa

SEQ ID NO: 652796 - RNA, 19 nt, Homo sapiens
  misc_RNA (1)...(19): siRNA sense strand
cugaaagucucacaaauca

SEQ ID NO: 652797 - RNA, 19 nt, Homo sapiens
  misc_RNA (1)...(19): siRNA sense strand
aaagaaagcagcagcaaga

SEQ ID NO: 652798 - RNA, 19 nt, Homo sapiens
  misc_RNA (1)...(19): siRNA sense strand
gaguuggucuccuguucua

SEQ ID NO: 652799 - RNA, 19 nt, Homo sapiens
  misc_RNA (1)...(19): siRNA sense strand
gaagaaguacucucaugug

SEQ ID NO: 652800 - RNA, 19 nt, Homo sapiens
  misc_RNA (1)...(19): siRNA sense strand
gcacagcucagccaguuug

SEQ ID NO: 652801 - RNA, 19 nt, Homo sapiens
  misc_RNA (1)...(19): siRNA sense strand
gagcaggagccaucaaaga

SEQ ID NO: 652802 - RNA, 19 nt, Homo sapiens
  misc_RNA (1)...(19): siRNA sense strand
ggauguggacaacaaagua

SEQ ID NO: 652803 - RNA, 19 nt, Homo sapiens
  misc_RNA (1)...(19): siRNA sense strand
ucacugugccugagaaauu

SEQ ID NO: 652804 - RNA, 19 nt, Homo sapiens
  misc_RNA (1)...(19): siRNA sense strand
gauaugggcaaaccaagaa

SEQ ID NO: 652805 - RNA, 19 nt, Homo sapiens
  misc_RNA (1)...(19): siRNA sense strand
ggaagaaguacucucaugu

SEQ ID NO: 652806 - RNA, 19 nt, Homo sapiens
  misc_RNA (1)...(19): siRNA sense strand
gggcaaaccaagaagauga

SEQ ID NO: 652807 - RNA, 19 nt, Homo sapiens
  misc_RNA (1)...(19): siRNA sense strand
ggaggucaccgaugcuuga

SEQ ID NO: 652808 - RNA, 19 nt, Homo sapiens
  misc_RNA (1)...(19): siRNA sense strand
guacagucaggaagaagua

SEQ ID NO: 652809 - RNA, 19 nt, Homo sapiens
  misc_RNA (1)...(19): siRNA sense strand
caaguaugcuggccugucu

SEQ ID NO: 652810 - RNA, 19 nt, Homo sapiens
  misc_RNA (1)...(19): siRNA sense strand
gggcuacauucccauuuau

SEQ ID NO: 652811 - RNA, 19 nt, Homo sapiens
  misc_RNA (1)...(19): siRNA sense strand
uugagaagauugaacaguu

SEQ ID NO: 652812 - RNA, 19 nt, Homo sapiens
  misc_RNA (1)...(19): siRNA sense strand
caacuccuaugaugagaag

SEQ ID NO: 652813 - RNA, 19 nt, Homo sapiens
  misc_RNA (1)...(19): siRNA sense strand
ugaaucaugcugccaguaa

SEQ ID NO: 652814 - RNA, 19 nt, Homo sapiens
  misc_RNA (1)...(19): siRNA sense strand
ugaacaagcugaagaaccu

SEQ ID NO: 652815 - RNA, 19 nt, Homo sapiens
  misc_RNA (1)...(19): siRNA sense strand
gcgccauccuggagaacua

SEQ ID NO: 652816 - RNA, 19 nt, Homo sapiens
  misc_RNA (1)...(19): siRNA sense strand
caacaaaguagagaggauu

SEQ ID NO: 652817 - RNA, 19 nt, Homo sapiens
  misc_RNA (1)...(19): siRNA sense strand
caagacaaucggagagaaa

SEQ ID NO: 652818 - RNA, 19 nt, Homo sapiens
  misc_RNA (1)...(19): siRNA sense strand
aagcagagcgguuugagaa

SEQ ID NO: 652819 - RNA, 19 nt, Homo sapiens
  misc_RNA (1)...(19): siRNA sense strand
aacaggcucucauccagua

SEQ ID NO: 652820 - RNA, 19 nt, Homo sapiens
  misc_RNA (1)...(19): siRNA sense strand
gggcagacaacuugaacaa

SEQ ID NO: 652821 - RNA, 19 nt, Homo sapiens
  misc_RNA (1)...(19): siRNA sense strand
ggaccugcccaucaaguau

SEQ ID NO: 652822 - RNA, 19 nt, Homo sapiens
  misc_RNA (1)...(19): siRNA sense strand
cggaggaccugcccaucaa

SEQ ID NO: 652823 - RNA, 19 nt, Homo sapiens
  misc_RNA (1)...(19): siRNA sense strand
ugaagaaccuaugcagcaa

SEQ ID NO: 652824 - RNA, 19 nt, Homo sapiens
  misc_RNA (1)...(19): siRNA sense strand
gaaccuaugcagcaagaca

SEQ ID NO: 652825 - RNA, 19 nt, Homo sapiens
  misc_RNA (1)...(19): siRNA sense strand
gaaucaugcugccaguaag

SEQ ID NO: 652826 - RNA, 19 nt, Homo sapiens
  misc_RNA (1)...(19): siRNA sense strand
ugucucagguucuuugaau

SEQ ID NO: 652827 - RNA, 19 nt, Homo sapiens
  misc_RNA (1)...(19): siRNA sense strand
gagaaccuccgagagauug

SEQ ID NO: 652828 - RNA, 19 nt, Homo sapiens
  misc_RNA (1)...(19): siRNA sense strand
gcaucacugugccugagaa

SEQ ID NO: 652829 - RNA, 19 nt, Homo sapiens
  misc_RNA (1)...(19): siRNA sense strand
gggauuccuuaccacauug

SEQ ID NO: 652830 - RNA, 19 nt, Homo sapiens
  misc_RNA (1)...(19): siRNA sense strand
caacaagucaugggagaug

SEQ ID NO: 652831 - RNA, 19 nt, Homo sapiens
  misc_RNA (1)...(19): siRNA sense strand
ugacacccguggcaucuuc

SEQ ID NO: 652832 - RNA, 19 nt, Homo sapiens
  misc_RNA (1)...(19): siRNA sense strand
gaugaagaacuuuauaagg

SEQ ID NO: 652833 - RNA, 19 nt, Homo sapiens
  misc_RNA (1)...(19): siRNA sense strand
cgcuuuagcuaaccugaaa

SEQ ID NO: 652834 - RNA, 19 nt, Homo sapiens
  misc_RNA (1)...(19): siRNA sense strand
gaagcagagcgguuugaga

SEQ ID NO: 652835 - RNA, 19 nt, Homo sapiens
  misc_RNA (1)...(19): siRNA sense strand
ggagagaaaaugaagaaaa

SEQ ID NO: 652836 - RNA, 19 nt, Homo sapiens
  misc_RNA (1)...(19): siRNA sense strand
gaaaacaggcugcagaaca

SEQ ID NO: 652837 - RNA, 19 nt, Homo sapiens
  misc_RNA (1)...(19): siRNA sense strand
gagaagauugaacaguuug

SEQ ID NO: 652838 - RNA, 19 nt, Homo sapiens
  misc_RNA (1)...(19): siRNA sense strand
uggcgacgauguagauuuc

SEQ ID NO: 652839 - RNA, 19 nt, Homo sapiens
  misc_RNA (1)...(19): siRNA sense strand
ggggcuacauucccauuua

SEQ ID NO: 652840 - RNA, 19 nt, Homo sapiens
  misc_RNA (1)...(19): siRNA sense strand
guccauaugcucaaugcua

SEQ ID NO: 652841 - RNA, 19 nt, Homo sapiens
  misc_RNA (1)...(19): siRNA sense strand
cagccaguuugaugaagaa

SEQ ID NO: 652842 - RNA, 19 nt, Homo sapiens
  misc_RNA (1)...(19): siRNA sense strand
aggaagaaguacucucaug

SEQ ID NO: 652843 - RNA, 19 nt, Homo sapiens
  misc_RNA (1)...(19): siRNA sense strand
gugaguuggucuccuguuc

SEQ ID NO: 652844 - RNA, 19 nt, Homo sapiens
  misc_RNA (1)...(19): siRNA sense strand
ucaggagccuuccgugagu

SEQ ID NO: 652845 - RNA, 19 nt, Homo sapiens
  misc_RNA (1)...(19): siRNA sense strand
gaguuucgaugaccuuacu

SEQ ID NO: 652846 - RNA, 19 nt, Homo sapiens
  misc_RNA (1)...(19): siRNA sense strand
ugacaacuccuaugaugag

SEQ ID NO: 652847 - RNA, 19 nt, Homo sapiens
  misc_RNA (1)...(19): siRNA sense strand
aagaaccuaugcagcaaga

SEQ ID NO: 652848 - RNA, 19 nt, Homo sapiens
  misc_RNA (1)...(19): siRNA sense strand
ucagccaguuugaugaaga

SEQ ID NO: 652849 - RNA, 19 nt, Homo sapiens
  misc_RNA (1)...(19): siRNA sense strand
cugcagacgcuuuagcuaa

SEQ ID NO: 652850 - RNA, 19 nt, Homo sapiens
  misc_RNA (1)...(19): siRNA sense strand
cugagaaauugaaggaguu

SEQ ID NO: 652851 - RNA, 19 nt, Homo sapiens
  misc_RNA (1)...(19): siRNA sense strand
gaacaagcugaagaaccua

SEQ ID NO: 652852 - RNA, 19 nt, Homo sapiens
  misc_RNA (1)...(19): siRNA sense strand
gggagauguuugaagagau

SEQ ID NO: 652853 - RNA, 19 nt, Homo sapiens
  misc_RNA (1)...(19): siRNA sense strand
gcucagccaguuugaugaa

SEQ ID NO: 652854 - RNA, 19 nt, Homo sapiens
  misc_RNA (1)...(19): siRNA sense strand
cagcucagccaguuugaug

SEQ ID NO: 652855 - RNA, 19 nt, Homo sapiens
  misc_RNA (1)...(19): siRNA sense strand
ucaggaagaaguacucuca

SEQ ID NO: 652856 - RNA, 19 nt, Homo sapiens
  misc_RNA (1)...(19): siRNA sense strand
ggugcuggaucuggauuug

SEQ ID NO: 652857 - RNA, 19 nt, Homo sapiens
  misc_RNA (1)...(19): siRNA sense strand
gcaggagccaucaaagaag

SEQ ID NO: 652858 - RNA, 19 nt, Homo sapiens
  misc_RNA (1)...(19): siRNA sense strand
agaagaugauggacaaggu

SEQ ID NO: 652859 - RNA, 19 nt, Homo sapiens
  misc_RNA (1)...(19): siRNA sense strand
gaagauugaacaguuugug

SEQ ID NO: 652860 - RNA, 19 nt, Homo sapiens
  misc_RNA (1)...(19): siRNA sense strand
ggugaugguagauggcuuu

SEQ ID NO: 652861 - RNA, 19 nt, Homo sapiens
  misc_RNA (1)...(19): siRNA sense strand
cagagaagggcaucacugu

SEQ ID NO: 652862 - RNA, 19 nt, Homo sapiens
  misc_RNA (1)...(19): siRNA sense strand
gaacuaccagacagagaag

SEQ ID NO: 652863 - RNA, 19 nt, Homo sapiens
  misc_RNA (1)...(19): siRNA sense strand
aaaccaagaagaugaugga

SEQ ID NO: 652864 - RNA, 19 nt, Homo sapiens
  misc_RNA (1)...(19): siRNA sense strand
cgaauccgauaugggcaaa

SEQ ID NO: 652865 - RNA, 19 nt, Homo sapiens
  misc_RNA (1)...(19): siRNA sense strand
ccugaaagucucacaaauc

SEQ ID NO: 652866 - RNA, 19 nt, Homo sapiens
  misc_RNA (1)...(19): siRNA sense strand
caaggacccgggacuagug

SEQ ID NO: 652867 - RNA, 19 nt, Homo sapiens
  misc_RNA (1)...(19): siRNA sense strand
gagaaugugcugaguuucg

SEQ ID NO: 652868 - RNA, 19 nt, Homo sapiens
  misc_RNA (1)...(19): siRNA sense strand
aauauugucucagguucuu

SEQ ID NO: 652869 - RNA, 19 nt, Homo sapiens
  misc_RNA (1)...(19): siRNA sense strand
ugggagauguuugaagaga

SEQ ID NO: 652870 - RNA, 19 nt, Homo sapiens
  misc_RNA (1)...(19): siRNA sense strand
caagucaugggagauguuu

SEQ ID NO: 652871 - RNA, 19 nt, Homo sapiens
  misc_RNA (1)...(19): siRNA sense strand
agauugaacaguuugugua

SEQ ID NO: 652872 - RNA, 19 nt, Homo sapiens
  misc_RNA (1)...(19): siRNA sense strand
acgcggagcggauaaaguu

SEQ ID NO: 652873 - RNA, 19 nt, Homo sapiens
  misc_RNA (1)...(19): siRNA sense strand
aagccauccugaaguguga

SEQ ID NO: 652874 - RNA, 19 nt, Homo sapiens
  misc_RNA (1)...(19): siRNA sense strand
agaacuaccagacagagaa

SEQ ID NO: 652875 - RNA, 19 nt, Homo sapiens
  misc_RNA (1)...(19): siRNA sense strand
gagaacuaccagacagaga

SEQ ID NO: 652876 - RNA, 19 nt, Homo sapiens
  misc_RNA (1)...(19): siRNA sense strand
ccagagaaugugcugaguu

SEQ ID NO: 652877 - RNA, 19 nt, Homo sapiens
  misc_RNA (1)...(19): siRNA sense strand
gugaauauugucucagguu

SEQ ID NO: 652878 - RNA, 19 nt, Homo sapiens
  misc_RNA (1)...(19): siRNA sense strand
guccaucaguuugagaaga

SEQ ID NO: 652879 - RNA, 19 nt, Homo sapiens
  misc_RNA (1)...(19): siRNA sense strand
gauuguacagucaggaaga

SEQ ID NO: 652880 - RNA, 19 nt, Homo sapiens
  misc_RNA (1)...(19): siRNA sense strand
gagucgaggguacuucuug

SEQ ID NO: 652881 - RNA, 19 nt, Homo sapiens
  misc_RNA (1)...(19): siRNA sense strand
gcaacaugagggcagcaaa

SEQ ID NO: 652882 - RNA, 19 nt, Homo sapiens
  misc_RNA (1)...(19): siRNA sense strand
ggagaaccauauacucuug

SEQ ID NO: 652883 - RNA, 19 nt, Homo sapiens
  misc_RNA (1)...(19): siRNA sense strand
gaauauguaccgacuguuu

SEQ ID NO: 652884 - RNA, 19 nt, Homo sapiens
  misc_RNA (1)...(19): siRNA sense strand
aaacaugucuccugauauc

SEQ ID NO: 652885 - RNA, 19 nt, Homo sapiens
  misc_RNA (1)...(19): siRNA sense strand
ucaaguauguggaguguuc

SEQ ID NO: 652886 - RNA, 19 nt, Homo sapiens
  misc_RNA (1)...(19): siRNA sense strand
uaaaacaugucuccugaua

SEQ ID NO: 652887 - RNA, 19 nt, Homo sapiens
  misc_RNA (1)...(19): siRNA sense strand
ccugaaggcugucaaguau

SEQ ID NO: 652888 - RNA, 19 nt, Homo sapiens
  misc_RNA (1)...(19): siRNA sense strand
gauuacgaccgcugaguua

SEQ ID NO: 652889 - RNA, 19 nt, Homo sapiens
  misc_RNA (1)...(19): siRNA sense strand
ugaaggcugucaaguaugu

SEQ ID NO: 652890 - RNA, 19 nt, Homo sapiens
  misc_RNA (1)...(19): siRNA sense strand
cgauggugcuguugguaaa

SEQ ID NO: 652891 - RNA, 19 nt, Homo sapiens
  misc_RNA (1)...(19): siRNA sense strand
gcagucacaguuaugauug

SEQ ID NO: 652892 - RNA, 19 nt, Homo sapiens
  misc_RNA (1)...(19): siRNA sense strand
ccgcugaguuauccacaaa

SEQ ID NO: 652893 - RNA, 19 nt, Homo sapiens
  misc_RNA (1)...(19): siRNA sense strand
gaugaccccucuacuauug

SEQ ID NO: 652894 - RNA, 19 nt, Homo sapiens
  misc_RNA (1)...(19): siRNA sense strand
ucaguggucucuccaucuu

SEQ ID NO: 652895 - RNA, 19 nt, Homo sapiens
  misc_RNA (1)...(19): siRNA sense strand
cggaauauguaccgacugu

SEQ ID NO: 652896 - RNA, 19 nt, Homo sapiens
  misc_RNA (1)...(19): siRNA sense strand
gcugaguuauccacaaaca

SEQ ID NO: 652897 - RNA, 19 nt, Homo sapiens
  misc_RNA (1)...(19): siRNA sense strand
acucaccacuguccaaaga

SEQ ID NO: 652898 - RNA, 19 nt, Homo sapiens
  misc_RNA (1)...(19): siRNA sense strand
ugaguuauccacaaacaga

SEQ ID NO: 652899 - RNA, 19 nt, Homo sapiens
  misc_RNA (1)...(19): siRNA sense strand
acagauguauuucuagucu

SEQ ID NO: 652900 - RNA, 19 nt, Homo sapiens
  misc_RNA (1)...(19): siRNA sense strand
gcgauggugcuguugguaa

SEQ ID NO: 652901 - RNA, 19 nt, Homo sapiens
  misc_RNA (1)...(19): siRNA sense strand
gcagacaauuaaguguguu

SEQ ID NO: 652902 - RNA, 19 nt, Homo sapiens
  misc_RNA (1)...(19): siRNA sense strand
gagaugaccccucuacuau

SEQ ID NO: 652903 - RNA, 19 nt, Homo sapiens
  misc_RNA (1)...(19): siRNA sense strand
ccugauauccuacacaaca

SEQ ID NO: 652904 - RNA, 19 nt, Homo sapiens
  misc_RNA (1)...(19): siRNA sense strand
gaacaaacagaagccuauc

SEQ ID NO: 652905 - RNA, 19 nt, Homo sapiens
  misc_RNA (1)...(19): siRNA sense strand
caugucuccugauauccua

SEQ ID NO: 652906 - RNA, 19 nt, Homo sapiens
  misc_RNA (1)...(19): siRNA sense strand
ccauauacucuuggacuuu

SEQ ID NO: 652907 - RNA, 19 nt, Homo sapiens
  misc_RNA (1)...(19): siRNA sense strand
aaagugggugccugagaua

SEQ ID NO: 652908 - RNA, 19 nt, Homo sapiens
  misc_RNA (1)...(19): siRNA sense strand
uccacaaacagauguauuu

SEQ ID NO: 652909 - RNA, 19 nt, Homo sapiens
  misc_RNA (1)...(19): siRNA sense strand
agauguauuucuagucugu

SEQ ID NO: 652910 - RNA, 19 nt, Homo sapiens
  misc_RNA (1)...(19): siRNA sense strand
ccucuacuauugagaaacu

SEQ ID NO: 652911 - RNA, 19 nt, Homo sapiens
  misc_RNA (1)...(19): siRNA sense strand
ggucucuccaucuucauuu

SEQ ID NO: 652912 - RNA, 19 nt, Homo sapiens
  misc_RNA (1)...(19): siRNA sense strand
uaacucaccacuguccaaa

SEQ ID NO: 652913 - RNA, 19 nt, Homo sapiens
  misc_RNA (1)...(19): siRNA sense strand
agaacaaacagaagccuau

SEQ ID NO: 652914 - RNA, 19 nt, Homo sapiens
  misc_RNA (1)...(19): siRNA sense strand
cauauacucuuggacuuuu

SEQ ID NO: 652915 - RNA, 19 nt, Homo sapiens
  misc_RNA (1)...(19): siRNA sense strand
caauuaaguguguuguugu

SEQ ID NO: 652916 - RNA, 19 nt, Homo sapiens
  misc_RNA (1)...(19): siRNA sense strand
ccacaaacagauguauuuc

SEQ ID NO: 652917 - RNA, 19 nt, Homo sapiens
  misc_RNA (1)...(19): siRNA sense strand
acuaugcagucacaguuau

SEQ ID NO: 652918 - RNA, 19 nt, Homo sapiens
  misc_RNA (1)...(19): siRNA sense strand
guggagaaccauauacucu

SEQ ID NO: 652919 - RNA, 19 nt, Homo sapiens
  misc_RNA (1)...(19): siRNA sense strand
aauuaaguguguuguugug

SEQ ID NO: 652920 - RNA, 19 nt, Homo sapiens
  misc_RNA (1)...(19): siRNA sense strand
ugucaaguauguggagugu

SEQ ID NO: 652921 - RNA, 19 nt, Homo sapiens
  misc_RNA (1)...(19): siRNA sense strand
gaaaagugggugccugaga

SEQ ID NO: 652922 - RNA, 19 nt, Homo sapiens
  misc_RNA (1)...(19): siRNA sense strand
cuccugauauccuacacaa

SEQ ID NO: 652923 - RNA, 19 nt, Homo sapiens
  misc_RNA (1)...(19): siRNA sense strand
gggcgauggugcuguuggu

SEQ ID NO: 652924 - RNA, 19 nt, Homo sapiens
  misc_RNA (1)...(19): siRNA sense strand
acuccuuucuugcuuguug

SEQ ID NO: 652925 - RNA, 19 nt, Homo sapiens
  misc_RNA (1)...(19): siRNA sense strand
caaacagauguauuucuag

SEQ ID NO: 652926 - RNA, 19 nt, Homo sapiens
  misc_RNA (1)...(19): siRNA sense strand
agaaccauauacucuugga

SEQ ID NO: 652927 - RNA, 19 nt, Homo sapiens
  misc_RNA (1)...(19): siRNA sense strand
cugauauccuacacaacaa

SEQ ID NO: 652928 - RNA, 19 nt, Homo sapiens
  misc_RNA (1)...(19): siRNA sense strand
gccuaucacuccagagacu

SEQ ID NO: 652929 - RNA, 19 nt, Homo sapiens
  misc_RNA (1)...(19): siRNA sense strand
ccuacacaacaaacaaauu

SEQ ID NO: 652930 - RNA, 19 nt, Homo sapiens
  misc_RNA (1)...(19): siRNA sense strand
ucaccacuguccaaagacu

SEQ ID NO: 652931 - RNA, 19 nt, Homo sapiens
  misc_RNA (1)...(19): siRNA sense strand
aaaagugggugccugagau

SEQ ID NO: 652932 - RNA, 19 nt, Homo sapiens
  misc_RNA (1)...(19): siRNA sense strand
aguggucucuccaucuuca

SEQ ID NO: 652933 - RNA, 19 nt, Homo sapiens
  misc_RNA (1)...(19): siRNA sense strand
ggagaaccauauacucuug

SEQ ID NO: 652934 - RNA, 19 nt, Homo sapiens
  misc_RNA (1)...(19): siRNA sense strand
gaauauguaccgacuguuu

SEQ ID NO: 652935 - RNA, 19 nt, Homo sapiens
  misc_RNA (1)...(19): siRNA sense strand
aaacaugucuccugauauc

SEQ ID NO: 652936 - RNA, 19 nt, Homo sapiens
  misc_RNA (1)...(19): siRNA sense strand
ucaaguauguggaguguuc

SEQ ID NO: 652937 - RNA, 19 nt, Homo sapiens
  misc_RNA (1)...(19): siRNA sense strand
uaaaacaugucuccugaua

SEQ ID NO: 652938 - RNA, 19 nt, Homo sapiens
  misc_RNA (1)...(19): siRNA sense strand
ccugaaggcugucaaguau

SEQ ID NO: 652939 - RNA, 19 nt, Homo sapiens
  misc_RNA (1)...(19): siRNA sense strand
gauuacgaccgcugaguua

SEQ ID NO: 652940 - RNA, 19 nt, Homo sapiens
  misc_RNA (1)...(19): siRNA sense strand
ugaaggcugucaaguaugu

SEQ ID NO: 652941 - RNA, 19 nt, Homo sapiens
  misc_RNA (1)...(19): siRNA sense strand
cgauggugcuguugguaaa

SEQ ID NO: 652942 - RNA, 19 nt, Homo sapiens
  misc_RNA (1)...(19): siRNA sense strand
gcagucacaguuaugauug

SEQ ID NO: 652943 - RNA, 19 nt, Homo sapiens
  misc_RNA (1)...(19): siRNA sense strand
ccgcugaguuauccacaaa

SEQ ID NO: 652944 - RNA, 19 nt, Homo sapiens
  misc_RNA (1)...(19): siRNA sense strand
gaugaccccucuacuauug

SEQ ID NO: 652945 - RNA, 19 nt, Homo sapiens
  misc_RNA (1)...(19): siRNA sense strand
ucaguggucucuccaucuu

SEQ ID NO: 652946 - RNA, 19 nt, Homo sapiens
  misc_RNA (1)...(19): siRNA sense strand
cggaauauguaccgacugu

SEQ ID NO: 652947 - RNA, 19 nt, Homo sapiens
  misc_RNA (1)...(19): siRNA sense strand
gcugaguuauccacaaaca

SEQ ID NO: 652948 - RNA, 19 nt, Homo sapiens
  misc_RNA (1)...(19): siRNA sense strand
acucaccacuguccaaaga

SEQ ID NO: 652949 - RNA, 19 nt, Homo sapiens
  misc_RNA (1)...(19): siRNA sense strand
ugaguuauccacaaacaga

SEQ ID NO: 652950 - RNA, 19 nt, Homo sapiens
  misc_RNA (1)...(19): siRNA sense strand
acagauguauuucuagucu

SEQ ID NO: 652951 - RNA, 19 nt, Homo sapiens
  misc_RNA (1)...(19): siRNA sense strand
gcgauggugcuguugguaa

SEQ ID NO: 652952 - RNA, 19 nt, Homo sapiens
  misc_RNA (1)...(19): siRNA sense strand
gcagacaauuaaguguguu

SEQ ID NO: 652953 - RNA, 19 nt, Homo sapiens
  misc_RNA (1)...(19): siRNA sense strand
gagaugaccccucuacuau

SEQ ID NO: 652954 - RNA, 19 nt, Homo sapiens
  misc_RNA (1)...(19): siRNA sense strand
ccugauauccuacacaaca

SEQ ID NO: 652955 - RNA, 19 nt, Homo sapiens
  misc_RNA (1)...(19): siRNA sense strand
gaacaaacagaagccuauc

SEQ ID NO: 652956 - RNA, 19 nt, Homo sapiens
  misc_RNA (1)...(19): siRNA sense strand
caugucuccugauauccua

SEQ ID NO: 652957 - RNA, 19 nt, Homo sapiens
  misc_RNA (1)...(19): siRNA sense strand
ccauauacucuuggacuuu

SEQ ID NO: 652958 - RNA, 19 nt, Homo sapiens
  misc_RNA (1)...(19): siRNA sense strand
aaagugggugccugagaua

SEQ ID NO: 652959 - RNA, 19 nt, Homo sapiens
  misc_RNA (1)...(19): siRNA sense strand
uccacaaacagauguauuu

SEQ ID NO: 652960 - RNA, 19 nt, Homo sapiens
  misc_RNA (1)...(19): siRNA sense strand
agauguauuucuagucugu

SEQ ID NO: 652961 - RNA, 19 nt, Homo sapiens
  misc_RNA (1)...(19): siRNA sense strand
ccucuacuauugagaaacu

SEQ ID NO: 652962 - RNA, 19 nt, Homo sapiens
  misc_RNA (1)...(19): siRNA sense strand
ggucucuccaucuucauuu

SEQ ID NO: 652963 - RNA, 19 nt, Homo sapiens
  misc_RNA (1)...(19): siRNA sense strand
uaacucaccacuguccaaa

SEQ ID NO: 652964 - RNA, 19 nt, Homo sapiens
  misc_RNA (1)...(19): siRNA sense strand
agaacaaacagaagccuau

SEQ ID NO: 652965 - RNA, 19 nt, Homo sapiens
  misc_RNA (1)...(19): siRNA sense strand
cauauacucuuggacuuuu

SEQ ID NO: 652966 - RNA, 19 nt, Homo sapiens
  misc_RNA (1)...(19): siRNA sense strand
caauuaaguguguuguugu

SEQ ID NO: 652967 - RNA, 19 nt, Homo sapiens
  misc_RNA (1)...(19): siRNA sense strand
ccacaaacagauguauuuc

SEQ ID NO: 652968 - RNA, 19 nt, Homo sapiens
  misc_RNA (1)...(19): siRNA sense strand
acuaugcagucacaguuau

SEQ ID NO: 652969 - RNA, 19 nt, Homo sapiens
  misc_RNA (1)...(19): siRNA sense strand
guggagaaccauauacucu

SEQ ID NO: 652970 - RNA, 19 nt, Homo sapiens
  misc_RNA (1)...(19): siRNA sense strand
aauuaaguguguuguugug

SEQ ID NO: 652971 - RNA, 19 nt, Homo sapiens
  misc_RNA (1)...(19): siRNA sense strand
ugucaaguauguggagugu

SEQ ID NO: 652972 - RNA, 19 nt, Homo sapiens
  misc_RNA (1)...(19): siRNA sense strand
gaaaagugggugccugaga

SEQ ID NO: 652973 - RNA, 19 nt, Homo sapiens
  misc_RNA (1)...(19): siRNA sense strand
cuccugauauccuacacaa

SEQ ID NO: 652974 - RNA, 19 nt, Homo sapiens
  misc_RNA (1)...(19): siRNA sense strand
gggcgauggugcuguuggu

SEQ ID NO: 652975 - RNA, 19 nt, Homo sapiens
  misc_RNA (1)...(19): siRNA sense strand
acuccuuucuugcuuguug

SEQ ID NO: 652976 - RNA, 19 nt, Homo sapiens
  misc_RNA (1)...(19): siRNA sense strand
caaacagauguauuucuag

SEQ ID NO: 652977 - RNA, 19 nt, Homo sapiens
  misc_RNA (1)...(19): siRNA sense strand
agaaccauauacucuugga

SEQ ID NO: 652978 - RNA, 19 nt, Homo sapiens
  misc_RNA (1)...(19): siRNA sense strand
cugauauccuacacaacaa

SEQ ID NO: 652979 - RNA, 19 nt, Homo sapiens
  misc_RNA (1)...(19): siRNA sense strand
gccuaucacuccagagacu

SEQ ID NO: 652980 - RNA, 19 nt, Homo sapiens
  misc_RNA (1)...(19): siRNA sense strand
ccuacacaacaaacaaauu

SEQ ID NO: 652981 - RNA, 19 nt, Homo sapiens
  misc_RNA (1)...(19): siRNA sense strand
ucaccacuguccaaagacu

SEQ ID NO: 652982 - RNA, 19 nt, Homo sapiens
  misc_RNA (1)...(19): siRNA sense strand
aaaagugggugccugagau

SEQ ID NO: 652983 - RNA, 19 nt, Homo sapiens
  misc_RNA (1)...(19): siRNA sense strand
aguggucucuccaucuuca

SEQ ID NO: 652984 - RNA, 19 nt, Homo sapiens
  misc_RNA (1)...(19): siRNA sense strand
gcacugaccuggacuuuga

SEQ ID NO: 652985 - RNA, 19 nt, Homo sapiens
  misc_RNA (1)...(19): siRNA sense strand
gaacagcccugcggccuuu

SEQ ID NO: 652986 - RNA, 19 nt, Homo sapiens
  misc_RNA (1)...(19): siRNA sense strand
agaggaagcugaaugaaga

SEQ ID NO: 652987 - RNA, 19 nt, Homo sapiens
  misc_RNA (1)...(19): siRNA sense strand
aaagaugucuggaaguuug

SEQ ID NO: 652988 - RNA, 19 nt, Homo sapiens
  misc_RNA (1)...(19): siRNA sense strand
gccaagaccucacccaguu

SEQ ID NO: 652989 - RNA, 19 nt, Homo sapiens
  misc_RNA (1)...(19): siRNA sense strand
gaaaagaugucuggaaguu

SEQ ID NO: 652990 - RNA, 19 nt, Homo sapiens
  misc_RNA (1)...(19): siRNA sense strand
cgacaaacuucccgauaga

SEQ ID NO: 652991 - RNA, 19 nt, Homo sapiens
  misc_RNA (1)...(19): siRNA sense strand
gucagcagaugucgaauaa

SEQ ID NO: 652992 - RNA, 19 nt, Homo sapiens
  misc_RNA (1)...(19): siRNA sense strand
cagcagaugucgaauaaag

SEQ ID NO: 652993 - RNA, 19 nt, Homo sapiens
  misc_RNA (1)...(19): siRNA sense strand
gaccagacguugauucaca

SEQ ID NO: 652994 - RNA, 19 nt, Homo sapiens
  misc_RNA (1)...(19): siRNA sense strand
agaagacgcgggagcauua

SEQ ID NO: 652995 - RNA, 19 nt, Homo sapiens
  misc_RNA (1)...(19): siRNA sense strand
ugaccuggacuuugacuua

SEQ ID NO: 652996 - RNA, 19 nt, Homo sapiens
  misc_RNA (1)...(19): siRNA sense strand
gcucaacgaccucauguga

SEQ ID NO: 652997 - RNA, 19 nt, Homo sapiens
  misc_RNA (1)...(19): siRNA sense strand
ucugauaacugugaagaaa

SEQ ID NO: 652998 - RNA, 19 nt, Homo sapiens
  misc_RNA (1)...(19): siRNA sense strand
gagcgguucuggugagguu

SEQ ID NO: 652999 - RNA, 19 nt, Homo sapiens
  misc_RNA (1)...(19): siRNA sense strand
ucacccaguugcagaguaa

SEQ ID NO: 653000 - RNA, 19 nt, Homo sapiens
  misc_RNA (1)...(19): siRNA sense strand
gcagacguggccauaauuu

SEQ ID NO: 653001 - RNA, 19 nt, Homo sapiens
  misc_RNA (1)...(19): siRNA sense strand
cgagaaagaaaguaaauca

SEQ ID NO: 653002 - RNA, 19 nt, Homo sapiens
  misc_RNA (1)...(19): siRNA sense strand
caaccgagcagcacuguca

SEQ ID NO: 653003 - RNA, 19 nt, Homo sapiens
  misc_RNA (1)...(19): siRNA sense strand
ggagcccucuuccuucaga

SEQ ID NO: 653004 - RNA, 19 nt, Homo sapiens
  misc_RNA (1)...(19): siRNA sense strand
gaacagcugggaagagaag

SEQ ID NO: 653005 - RNA, 19 nt, Homo sapiens
  misc_RNA (1)...(19): siRNA sense strand
gaccuggacuuugacuuau

SEQ ID NO: 653006 - RNA, 19 nt, Homo sapiens
  misc_RNA (1)...(19): siRNA sense strand
gaagaucgccaagcuguac

SEQ ID NO: 653007 - RNA, 19 nt, Homo sapiens
  misc_RNA (1)...(19): siRNA sense strand
ccgacaaacuucccgauag

SEQ ID NO: 653008 - RNA, 19 nt, Homo sapiens
  misc_RNA (1)...(19): siRNA sense strand
cgggaaaccuuagaaaucu

SEQ ID NO: 653009 - RNA, 19 nt, Homo sapiens
  misc_RNA (1)...(19): siRNA sense strand
uguacacacugacuacuau

SEQ ID NO: 653010 - RNA, 19 nt, Homo sapiens
  misc_RNA (1)...(19): siRNA sense strand
acaagaggaagcugaauga

SEQ ID NO: 653011 - RNA, 19 nt, Homo sapiens
  misc_RNA (1)...(19): siRNA sense strand
ggacgacauccuuggagaa

SEQ ID NO: 653012 - RNA, 19 nt, Homo sapiens
  misc_RNA (1)...(19): siRNA sense strand
uaucaagggaugaauguau

SEQ ID NO: 653013 - RNA, 19 nt, Homo sapiens
  misc_RNA (1)...(19): siRNA sense strand
gagaagacgcgggagcauu

SEQ ID NO: 653014 - RNA, 19 nt, Homo sapiens
  misc_RNA (1)...(19): siRNA sense strand
ccacccgguugucaugaaa

SEQ ID NO: 653015 - RNA, 19 nt, Homo sapiens
  misc_RNA (1)...(19): siRNA sense strand
cugaacagcugggaagaga

SEQ ID NO: 653016 - RNA, 19 nt, Homo sapiens
  misc_RNA (1)...(19): siRNA sense strand
caaacuucccgauagagaa

SEQ ID NO: 653017 - RNA, 19 nt, Homo sapiens
  misc_RNA (1)...(19): siRNA sense strand
cagacgagaaagaaaguaa

SEQ ID NO: 653018 - RNA, 19 nt, Homo sapiens
  misc_RNA (1)...(19): siRNA sense strand
aaacgggaaaccuuagaaa

SEQ ID NO: 653019 - RNA, 19 nt, Homo sapiens
  misc_RNA (1)...(19): siRNA sense strand
cuccaugguuugcauuauu

SEQ ID NO: 653020 - RNA, 19 nt, Homo sapiens
  misc_RNA (1)...(19): siRNA sense strand
ggaagcuggugcucauggu

SEQ ID NO: 653021 - RNA, 19 nt, Homo sapiens
  misc_RNA (1)...(19): siRNA sense strand
ggaguggagcccagcaaug

SEQ ID NO: 653022 - RNA, 19 nt, Homo sapiens
  misc_RNA (1)...(19): siRNA sense strand
gacgagaaagaaaguaaau

SEQ ID NO: 653023 - RNA, 19 nt, Homo sapiens
  misc_RNA (1)...(19): siRNA sense strand
gaaaggccugugugcugaa

SEQ ID NO: 653024 - RNA, 19 nt, Homo sapiens
  misc_RNA (1)...(19): siRNA sense strand
ccagaggccacaagaggaa

SEQ ID NO: 653025 - RNA, 19 nt, Homo sapiens
  misc_RNA (1)...(19): siRNA sense strand
gagacuccaugguuugcau

SEQ ID NO: 653026 - RNA, 19 nt, Homo sapiens
  misc_RNA (1)...(19): siRNA sense strand
uguacgagcugcacgucuu

SEQ ID NO: 653027 - RNA, 19 nt, Homo sapiens
  misc_RNA (1)...(19): siRNA sense strand
gcagcacugucagcagaug

SEQ ID NO: 653028 - RNA, 19 nt, Homo sapiens
  misc_RNA (1)...(19): siRNA sense strand
ggagauccugguccgugua

SEQ ID NO: 653029 - RNA, 19 nt, Homo sapiens
  misc_RNA (1)...(19): siRNA sense strand
ccaaucugauaacugugaa

SEQ ID NO: 653030 - RNA, 19 nt, Homo sapiens
  misc_RNA (1)...(19): siRNA sense strand
ugucagcagaugucgaaua

SEQ ID NO: 653031 - RNA, 19 nt, Homo sapiens
  misc_RNA (1)...(19): siRNA sense strand
uaugaccgcuaccucaaca

SEQ ID NO: 653032 - RNA, 19 nt, Homo sapiens
  misc_RNA (1)...(19): siRNA sense strand
uccaugguuugcauuauug

SEQ ID NO: 653033 - RNA, 19 nt, Homo sapiens
  misc_RNA (1)...(19): siRNA sense strand
ugguuugcauuauugauga

SEQ ID NO: 653034 - RNA, 19 nt, Homo sapiens
  misc_RNA (1)...(19): siRNA sense strand
gagaccgagucacagaaca

SEQ ID NO: 653035 - RNA, 19 nt, Homo sapiens
  misc_RNA (1)...(19): siRNA sense strand
aucaagggaugaauguauu

SEQ ID NO: 653036 - RNA, 19 nt, Homo sapiens
  misc_RNA (1)...(19): siRNA sense strand
gagcucaacgaccucaugu

SEQ ID NO: 653037 - RNA, 19 nt, Homo sapiens
  misc_RNA (1)...(19): siRNA sense strand
gcggagaccgagucacaga

SEQ ID NO: 653038 - RNA, 19 nt, Homo sapiens
  misc_RNA (1)...(19): siRNA sense strand
uggagaagaucgccaagcu

SEQ ID NO: 653039 - RNA, 19 nt, Homo sapiens
  misc_RNA (1)...(19): siRNA sense strand
ggagcucaacgaccucaug

SEQ ID NO: 653040 - RNA, 19 nt, Homo sapiens
  misc_RNA (1)...(19): siRNA sense strand
gaguggagcccagcaaugg

SEQ ID NO: 653041 - RNA, 19 nt, Homo sapiens
  misc_RNA (1)...(19): siRNA sense strand
caagggaugaauguauuga

SEQ ID NO: 653042 - RNA, 19 nt, Homo sapiens
  misc_RNA (1)...(19): siRNA sense strand
guauugacccauuuucuaa

SEQ ID NO: 653043 - RNA, 19 nt, Homo sapiens
  misc_RNA (1)...(19): siRNA sense strand
ggaaaccuuagaaaucucu

SEQ ID NO: 653044 - RNA, 19 nt, Homo sapiens
  misc_RNA (1)...(19): siRNA sense strand
caagaggaagcugaaugaa

SEQ ID NO: 653045 - RNA, 19 nt, Homo sapiens
  misc_RNA (1)...(19): siRNA sense strand
gaucacaccaaggcacaga

SEQ ID NO: 653046 - RNA, 19 nt, Homo sapiens
  misc_RNA (1)...(19): siRNA sense strand
gggcuacacccgacaaacu

SEQ ID NO: 653047 - RNA, 19 nt, Homo sapiens
  misc_RNA (1)...(19): siRNA sense strand
gccacccgguugucaugaa

SEQ ID NO: 653048 - RNA, 19 nt, Homo sapiens
  misc_RNA (1)...(19): siRNA sense strand
ggcagacguggccauaauu

SEQ ID NO: 653049 - RNA, 19 nt, Homo sapiens
  misc_RNA (1)...(19): siRNA sense strand
gcagggaguccagcaacga

SEQ ID NO: 653050 - RNA, 19 nt, Homo sapiens
  misc_RNA (1)...(19): siRNA sense strand
cacaagaggaagcugaaug

SEQ ID NO: 653051 - RNA, 19 nt, Homo sapiens
  misc_RNA (1)...(19): siRNA sense strand
cgacagcgacagcgagaag

SEQ ID NO: 653052 - RNA, 19 nt, Homo sapiens
  misc_RNA (1)...(19): siRNA sense strand
acaaacuucccgauagaga

SEQ ID NO: 653053 - RNA, 19 nt, Homo sapiens
  misc_RNA (1)...(19): siRNA sense strand
gggaaaccuuagaaaucuc

SEQ ID NO: 653054 - RNA, 19 nt, Homo sapiens
  misc_RNA (1)...(19): siRNA sense strand
agacgagaaagaaaguaaa

SEQ ID NO: 653055 - RNA, 19 nt, Homo sapiens
  misc_RNA (1)...(19): siRNA sense strand
gacuccaugguuugcauua

SEQ ID NO: 653056 - RNA, 19 nt, Homo sapiens
  misc_RNA (1)...(19): siRNA sense strand
gcauuauugaugaucgaaa

SEQ ID NO: 653057 - RNA, 19 nt, Homo sapiens
  misc_RNA (1)...(19): siRNA sense strand
gaauauuaucaagggauga

SEQ ID NO: 653058 - RNA, 19 nt, Homo sapiens
  misc_RNA (1)...(19): siRNA sense strand
gggcacugaccuggacuuu

SEQ ID NO: 653059 - RNA, 19 nt, Homo sapiens
  misc_RNA (1)...(19): siRNA sense strand
ucaagggaugaauguauug

SEQ ID NO: 653060 - RNA, 19 nt, Homo sapiens
  misc_RNA (1)...(19): siRNA sense strand
acgggaaaccuuagaaauc

SEQ ID NO: 653061 - RNA, 19 nt, Homo sapiens
  misc_RNA (1)...(19): siRNA sense strand
ggcuacacccgacaaacuu

SEQ ID NO: 653062 - RNA, 19 nt, Homo sapiens
  misc_RNA (1)...(19): siRNA sense strand
ggagaccgagucacagaac

SEQ ID NO: 653063 - RNA, 19 nt, Homo sapiens
  misc_RNA (1)...(19): siRNA sense strand
ccaaggcacagagggagaa

SEQ ID NO: 653064 - RNA, 19 nt, Homo sapiens
  misc_RNA (1)...(19): siRNA sense strand
gcacugaccuggacuuuga

SEQ ID NO: 653065 - RNA, 19 nt, Homo sapiens
  misc_RNA (1)...(19): siRNA sense strand
gaacagcccugcggccuuu

SEQ ID NO: 653066 - RNA, 19 nt, Homo sapiens
  misc_RNA (1)...(19): siRNA sense strand
aaagaugucuggaaguuug

SEQ ID NO: 653067 - RNA, 19 nt, Homo sapiens
  misc_RNA (1)...(19): siRNA sense strand
gccaagaccucacccaguu

SEQ ID NO: 653068 - RNA, 19 nt, Homo sapiens
  misc_RNA (1)...(19): siRNA sense strand
gaaaagaugucuggaaguu

SEQ ID NO: 653069 - RNA, 19 nt, Homo sapiens
  misc_RNA (1)...(19): siRNA sense strand
cgacaaacuucccgauaga

SEQ ID NO: 653070 - RNA, 19 nt, Homo sapiens
  misc_RNA (1)...(19): siRNA sense strand
gucagcagaugucgaauaa

SEQ ID NO: 653071 - RNA, 19 nt, Homo sapiens
  misc_RNA (1)...(19): siRNA sense strand
cagcagaugucgaauaaag

SEQ ID NO: 653072 - RNA, 19 nt, Homo sapiens
  misc_RNA (1)...(19): siRNA sense strand
gaccagacguugauucaca

SEQ ID NO: 653073 - RNA, 19 nt, Homo sapiens
  misc_RNA (1)...(19): siRNA sense strand
agaagacgcgggagcauua

SEQ ID NO: 653074 - RNA, 19 nt, Homo sapiens
  misc_RNA (1)...(19): siRNA sense strand
ugaccuggacuuugacuua

SEQ ID NO: 653075 - RNA, 19 nt, Homo sapiens
  misc_RNA (1)...(19): siRNA sense strand
gagcgguucuggugagguu

SEQ ID NO: 653076 - RNA, 19 nt, Homo sapiens
  misc_RNA (1)...(19): siRNA sense strand
ucugauaacugugaagaaa

SEQ ID NO: 653077 - RNA, 19 nt, Homo sapiens
  misc_RNA (1)...(19): siRNA sense strand
ucacccaguugcagaguaa

SEQ ID NO: 653078 - RNA, 19 nt, Homo sapiens
  misc_RNA (1)...(19): siRNA sense strand
gcagacguggccauaauuu

SEQ ID NO: 653079 - RNA, 19 nt, Homo sapiens
  misc_RNA (1)...(19): siRNA sense strand
cgagaaagaaaguaaauca

SEQ ID NO: 653080 - RNA, 19 nt, Homo sapiens
  misc_RNA (1)...(19): siRNA sense strand
caaccgagcagcacuguca

SEQ ID NO: 653081 - RNA, 19 nt, Homo sapiens
  misc_RNA (1)...(19): siRNA sense strand
ggagcccucuuccuucaga

SEQ ID NO: 653082 - RNA, 19 nt, Homo sapiens
  misc_RNA (1)...(19): siRNA sense strand
gaacagcugggaagagaag

SEQ ID NO: 653083 - RNA, 19 nt, Homo sapiens
  misc_RNA (1)...(19): siRNA sense strand
gaccuggacuuugacuuau

SEQ ID NO: 653084 - RNA, 19 nt, Homo sapiens
  misc_RNA (1)...(19): siRNA sense strand
gaagaucgccaagcuguac

SEQ ID NO: 653085 - RNA, 19 nt, Homo sapiens
  misc_RNA (1)...(19): siRNA sense strand
ccgacaaacuucccgauag

SEQ ID NO: 653086 - RNA, 19 nt, Homo sapiens
  misc_RNA (1)...(19): siRNA sense strand
cgggaaaccuuagaaaucu

SEQ ID NO: 653087 - RNA, 19 nt, Homo sapiens
  misc_RNA (1)...(19): siRNA sense strand
uguacacacugacuacuau

SEQ ID NO: 653088 - RNA, 19 nt, Homo sapiens
  misc_RNA (1)...(19): siRNA sense strand
ggacgacauccuuggagaa

SEQ ID NO: 653089 - RNA, 19 nt, Homo sapiens
  misc_RNA (1)...(19): siRNA sense strand
uaucaagggaugaauguau

SEQ ID NO: 653090 - RNA, 19 nt, Homo sapiens
  misc_RNA (1)...(19): siRNA sense strand
gagaagacgcgggagcauu

SEQ ID NO: 653091 - RNA, 19 nt, Homo sapiens
  misc_RNA (1)...(19): siRNA sense strand
ccacccgguugucaugaaa

SEQ ID NO: 653092 - RNA, 19 nt, Homo sapiens
  misc_RNA (1)...(19): siRNA sense strand
cugaacagcugggaagaga

SEQ ID NO: 653093 - RNA, 19 nt, Homo sapiens
  misc_RNA (1)...(19): siRNA sense strand
caaacuucccgauagagaa

SEQ ID NO: 653094 - RNA, 19 nt, Homo sapiens
  misc_RNA (1)...(19): siRNA sense strand
cagacgagaaagaaaguaa

SEQ ID NO: 653095 - RNA, 19 nt, Homo sapiens
  misc_RNA (1)...(19): siRNA sense strand
aaacgggaaaccuuagaaa

SEQ ID NO: 653096 - RNA, 19 nt, Homo sapiens
  misc_RNA (1)...(19): siRNA sense strand
cuccaugguuugcauuauu

SEQ ID NO: 653097 - RNA, 19 nt, Homo sapiens
  misc_RNA (1)...(19): siRNA sense strand
ggaagcuggugcucauggu

SEQ ID NO: 653098 - RNA, 19 nt, Homo sapiens
  misc_RNA (1)...(19): siRNA sense strand
ggaguggagcccagcaaug

SEQ ID NO: 653099 - RNA, 19 nt, Homo sapiens
  misc_RNA (1)...(19): siRNA sense strand
gacgagaaagaaaguaaau

SEQ ID NO: 653100 - RNA, 19 nt, Homo sapiens
  misc_RNA (1)...(19): siRNA sense strand
gaaaggccugugugcugaa

SEQ ID NO: 653101 - RNA, 19 nt, Homo sapiens
  misc_RNA (1)...(19): siRNA sense strand
ccagaggccacaagaggaa

SEQ ID NO: 653102 - RNA, 19 nt, Homo sapiens
  misc_RNA (1)...(19): siRNA sense strand
gagacuccaugguuugcau

SEQ ID NO: 653103 - RNA, 19 nt, Homo sapiens
  misc_RNA (1)...(19): siRNA sense strand
uguacgagcugcacgucuu

SEQ ID NO: 653104 - RNA, 19 nt, Homo sapiens
  misc_RNA (1)...(19): siRNA sense strand
gcagcacugucagcagaug

SEQ ID NO: 653105 - RNA, 19 nt, Homo sapiens
  misc_RNA (1)...(19): siRNA sense strand
ggagauccugguccgugua

SEQ ID NO: 653106 - RNA, 19 nt, Homo sapiens
  misc_RNA (1)...(19): siRNA sense strand
ccaaucugauaacugugaa

SEQ ID NO: 653107 - RNA, 19 nt, Homo sapiens
  misc_RNA (1)...(19): siRNA sense strand
ugucagcagaugucgaaua

SEQ ID NO: 653108 - RNA, 19 nt, Homo sapiens
  misc_RNA (1)...(19): siRNA sense strand
uaugaccgcuaccucaaca

SEQ ID NO: 653109 - RNA, 19 nt, Homo sapiens
  misc_RNA (1)...(19): siRNA sense strand
uccaugguuugcauuauug

SEQ ID NO: 653110 - RNA, 19 nt, Homo sapiens
  misc_RNA (1)...(19): siRNA sense strand
ugguuugcauuauugauga

SEQ ID NO: 653111 - RNA, 19 nt, Homo sapiens
  misc_RNA (1)...(19): siRNA sense strand
gagaccgagucacagaaca

SEQ ID NO: 653112 - RNA, 19 nt, Homo sapiens
  misc_RNA (1)...(19): siRNA sense strand
aucaagggaugaauguauu

SEQ ID NO: 653113 - RNA, 19 nt, Homo sapiens
  misc_RNA (1)...(19): siRNA sense strand
gcggagaccgagucacaga

SEQ ID NO: 653114 - RNA, 19 nt, Homo sapiens
  misc_RNA (1)...(19): siRNA sense strand
uggagaagaucgccaagcu

SEQ ID NO: 653115 - RNA, 19 nt, Homo sapiens
  misc_RNA (1)...(19): siRNA sense strand
gaguggagcccagcaaugg

SEQ ID NO: 653116 - RNA, 19 nt, Homo sapiens
  misc_RNA (1)...(19): siRNA sense strand
caagggaugaauguauuga

SEQ ID NO: 653117 - RNA, 19 nt, Homo sapiens
  misc_RNA (1)...(19): siRNA sense strand
guauugacccauuuucuaa

SEQ ID NO: 653118 - RNA, 19 nt, Homo sapiens
  misc_RNA (1)...(19): siRNA sense strand
ggaaaccuuagaaaucucu

SEQ ID NO: 653119 - RNA, 19 nt, Homo sapiens
  misc_RNA (1)...(19): siRNA sense strand
gaucacaccaaggcacaga

SEQ ID NO: 653120 - RNA, 19 nt, Homo sapiens
  misc_RNA (1)...(19): siRNA sense strand
gggcuacacccgacaaacu

SEQ ID NO: 653121 - RNA, 19 nt, Homo sapiens
  misc_RNA (1)...(19): siRNA sense strand
gccacccgguugucaugaa

SEQ ID NO: 653122 - RNA, 19 nt, Homo sapiens
  misc_RNA (1)...(19): siRNA sense strand
ggcagacguggccauaauu

SEQ ID NO: 653123 - RNA, 19 nt, Homo sapiens
  misc_RNA (1)...(19): siRNA sense strand
cgacagcgacagcgagaag

SEQ ID NO: 653124 - RNA, 19 nt, Homo sapiens
  misc_RNA (1)...(19): siRNA sense strand
acaaacuucccgauagaga

SEQ ID NO: 653125 - RNA, 19 nt, Homo sapiens
  misc_RNA (1)...(19): siRNA sense strand
gggaaaccuuagaaaucuc

SEQ ID NO: 653126 - RNA, 19 nt, Homo sapiens
  misc_RNA (1)...(19): siRNA sense strand
agacgagaaagaaaguaaa

SEQ ID NO: 653127 - RNA, 19 nt, Homo sapiens
  misc_RNA (1)...(19): siRNA sense strand
gacuccaugguuugcauua

SEQ ID NO: 653128 - RNA, 19 nt, Homo sapiens
  misc_RNA (1)...(19): siRNA sense strand
gcauuauugaugaucgaaa

SEQ ID NO: 653129 - RNA, 19 nt, Homo sapiens
  misc_RNA (1)...(19): siRNA sense strand
gaauauuaucaagggauga

SEQ ID NO: 653130 - RNA, 19 nt, Homo sapiens
  misc_RNA (1)...(19): siRNA sense strand
gggcacugaccuggacuuu

SEQ ID NO: 653131 - RNA, 19 nt, Homo sapiens
  misc_RNA (1)...(19): siRNA sense strand
ucaagggaugaauguauug

SEQ ID NO: 653132 - RNA, 19 nt, Homo sapiens
  misc_RNA (1)...(19): siRNA sense strand
acgggaaaccuuagaaauc

SEQ ID NO: 653133 - RNA, 19 nt, Homo sapiens
  misc_RNA (1)...(19): siRNA sense strand
ggcuacacccgacaaacuu

SEQ ID NO: 653134 - RNA, 19 nt, Homo sapiens
  misc_RNA (1)...(19): siRNA sense strand
ggagaccgagucacagaac

SEQ ID NO: 653135 - RNA, 19 nt, Homo sapiens
  misc_RNA (1)...(19): siRNA sense strand
ccaaggcacagagggagaa

SEQ ID NO: 653136 - RNA, 19 nt, Homo sapiens
  misc_RNA (1)...(19): siRNA sense strand
gcacugaccuggacuuuga

SEQ ID NO: 653137 - RNA, 19 nt, Homo sapiens
  misc_RNA (1)...(19): siRNA sense strand
gaacagcccugcggccuuu

SEQ ID NO: 653138 - RNA, 19 nt, Homo sapiens
  misc_RNA (1)...(19): siRNA sense strand
agaggaagcugaaugaaga

SEQ ID NO: 653139 - RNA, 19 nt, Homo sapiens
  misc_RNA (1)...(19): siRNA sense strand
aaagaugucuggaaguuug

SEQ ID NO: 653140 - RNA, 19 nt, Homo sapiens
  misc_RNA (1)...(19): siRNA sense strand
gccaagaccucacccaguu

SEQ ID NO: 653141 - RNA, 19 nt, Homo sapiens
  misc_RNA (1)...(19): siRNA sense strand
gaaaagaugucuggaaguu

SEQ ID NO: 653142 - RNA, 19 nt, Homo sapiens
  misc_RNA (1)...(19): siRNA sense strand
cgacaaacuucccgauaga

SEQ ID NO: 653143 - RNA, 19 nt, Homo sapiens
  misc_RNA (1)...(19): siRNA sense strand
gucagcagaugucgaauaa

SEQ ID NO: 653144 - RNA, 19 nt, Homo sapiens
  misc_RNA (1)...(19): siRNA sense strand
cagcagaugucgaauaaag

SEQ ID NO: 653145 - RNA, 19 nt, Homo sapiens
  misc_RNA (1)...(19): siRNA sense strand
gaccagacguugauucaca

SEQ ID NO: 653146 - RNA, 19 nt, Homo sapiens
  misc_RNA (1)...(19): siRNA sense strand
agaagacgcgggagcauua

SEQ ID NO: 653147 - RNA, 19 nt, Homo sapiens
  misc_RNA (1)...(19): siRNA sense strand
ugaccuggacuuugacuua

SEQ ID NO: 653148 - RNA, 19 nt, Homo sapiens
  misc_RNA (1)...(19): siRNA sense strand
gcucaacgaccucauguga

SEQ ID NO: 653149 - RNA, 19 nt, Homo sapiens
  misc_RNA (1)...(19): siRNA sense strand
ucugauaacugugaagaaa

SEQ ID NO: 653150 - RNA, 19 nt, Homo sapiens
  misc_RNA (1)...(19): siRNA sense strand
gagcgguucuggugagguu

SEQ ID NO: 653151 - RNA, 19 nt, Homo sapiens
  misc_RNA (1)...(19): siRNA sense strand
ucacccaguugcagaguaa

SEQ ID NO: 653152 - RNA, 19 nt, Homo sapiens
  misc_RNA (1)...(19): siRNA sense strand
gcagacguggccauaauuu

SEQ ID NO: 653153 - RNA, 19 nt, Homo sapiens
  misc_RNA (1)...(19): siRNA sense strand
cgagaaagaaaguaaauca

SEQ ID NO: 653154 - RNA, 19 nt, Homo sapiens
  misc_RNA (1)...(19): siRNA sense strand
caaccgagcagcacuguca

SEQ ID NO: 653155 - RNA, 19 nt, Homo sapiens
  misc_RNA (1)...(19): siRNA sense strand
ggagcccucuuccuucaga

SEQ ID NO: 653156 - RNA, 19 nt, Homo sapiens
  misc_RNA (1)...(19): siRNA sense strand
gaacagcugggaagagaag

SEQ ID NO: 653157 - RNA, 19 nt, Homo sapiens
  misc_RNA (1)...(19): siRNA sense strand
gaccuggacuuugacuuau

SEQ ID NO: 653158 - RNA, 19 nt, Homo sapiens
  misc_RNA (1)...(19): siRNA sense strand
gaagaucgccaagcuguac

SEQ ID NO: 653159 - RNA, 19 nt, Homo sapiens
  misc_RNA (1)...(19): siRNA sense strand
ccgacaaacuucccgauag

SEQ ID NO: 653160 - RNA, 19 nt, Homo sapiens
  misc_RNA (1)...(19): siRNA sense strand
cgggaaaccuuagaaaucu

SEQ ID NO: 653161 - RNA, 19 nt, Homo sapiens
  misc_RNA (1)...(19): siRNA sense strand
uguacacacugacuacuau

SEQ ID NO: 653162 - RNA, 19 nt, Homo sapiens
  misc_RNA (1)...(19): siRNA sense strand
acaagaggaagcugaauga

SEQ ID NO: 653163 - RNA, 19 nt, Homo sapiens
  misc_RNA (1)...(19): siRNA sense strand
ggacgacauccuuggagaa

SEQ ID NO: 653164 - RNA, 19 nt, Homo sapiens
  misc_RNA (1)...(19): siRNA sense strand
uaucaagggaugaauguau

SEQ ID NO: 653165 - RNA, 19 nt, Homo sapiens
  misc_RNA (1)...(19): siRNA sense strand
gagaagacgcgggagcauu

SEQ ID NO: 653166 - RNA, 19 nt, Homo sapiens
  misc_RNA (1)...(19): siRNA sense strand
ccacccgguugucaugaaa

SEQ ID NO: 653167 - RNA, 19 nt, Homo sapiens
  misc_RNA (1)...(19): siRNA sense strand
cugaacagcugggaagaga

SEQ ID NO: 653168 - RNA, 19 nt, Homo sapiens
  misc_RNA (1)...(19): siRNA sense strand
caaacuucccgauagagaa

SEQ ID NO: 653169 - RNA, 19 nt, Homo sapiens
  misc_RNA (1)...(19): siRNA sense strand
cagacgagaaagaaaguaa

SEQ ID NO: 653170 - RNA, 19 nt, Homo sapiens
  misc_RNA (1)...(19): siRNA sense strand
aaacgggaaaccuuagaaa

SEQ ID NO: 653171 - RNA, 19 nt, Homo sapiens
  misc_RNA (1)...(19): siRNA sense strand
cuccaugguuugcauuauu

SEQ ID NO: 653172 - RNA, 19 nt, Homo sapiens
  misc_RNA (1)...(19): siRNA sense strand
ggaagcuggugcucauggu

SEQ ID NO: 653173 - RNA, 19 nt, Homo sapiens
  misc_RNA (1)...(19): siRNA sense strand
ggaguggagcccagcaaug

SEQ ID NO: 653174 - RNA, 19 nt, Homo sapiens
  misc_RNA (1)...(19): siRNA sense strand
gacgagaaagaaaguaaau

SEQ ID NO: 653175 - RNA, 19 nt, Homo sapiens
  misc_RNA (1)...(19): siRNA sense strand
gaaaggccugugugcugaa

SEQ ID NO: 653176 - RNA, 19 nt, Homo sapiens
  misc_RNA (1)...(19): siRNA sense strand
ccagaggccacaagaggaa

SEQ ID NO: 653177 - RNA, 19 nt, Homo sapiens
  misc_RNA (1)...(19): siRNA sense strand
gagacuccaugguuugcau

SEQ ID NO: 653178 - RNA, 19 nt, Homo sapiens
  misc_RNA (1)...(19): siRNA sense strand
uguacgagcugcacgucuu

SEQ ID NO: 653179 - RNA, 19 nt, Homo sapiens
  misc_RNA (1)...(19): siRNA sense strand
gcagcacugucagcagaug

SEQ ID NO: 653180 - RNA, 19 nt, Homo sapiens
  misc_RNA (1)...(19): siRNA sense strand
ggagauccugguccgugua

SEQ ID NO: 653181 - RNA, 19 nt, Homo sapiens
  misc_RNA (1)...(19): siRNA sense strand
ccaaucugauaacugugaa

SEQ ID NO: 653182 - RNA, 19 nt, Homo sapiens
  misc_RNA (1)...(19): siRNA sense strand
ugucagcagaugucgaaua

SEQ ID NO: 653183 - RNA, 19 nt, Homo sapiens
  misc_RNA (1)...(19): siRNA sense strand
uaugaccgcuaccucaaca

SEQ ID NO: 653184 - RNA, 19 nt, Homo sapiens
  misc_RNA (1)...(19): siRNA sense strand
uccaugguuugcauuauug

SEQ ID NO: 653185 - RNA, 19 nt, Homo sapiens
  misc_RNA (1)...(19): siRNA sense strand
ugguuugcauuauugauga

SEQ ID NO: 653186 - RNA, 19 nt, Homo sapiens
  misc_RNA (1)...(19): siRNA sense strand
gagaccgagucacagaaca

SEQ ID NO: 653187 - RNA, 19 nt, Homo sapiens
  misc_RNA (1)...(19): siRNA sense strand
aucaagggaugaauguauu

SEQ ID NO: 653188 - RNA, 19 nt, Homo sapiens
  misc_RNA (1)...(19): siRNA sense strand
gagcucaacgaccucaugu

SEQ ID NO: 653189 - RNA, 19 nt, Homo sapiens
  misc_RNA (1)...(19): siRNA sense strand
gcggagaccgagucacaga

SEQ ID NO: 653190 - RNA, 19 nt, Homo sapiens
  misc_RNA (1)...(19): siRNA sense strand
uggagaagaucgccaagcu

SEQ ID NO: 653191 - RNA, 19 nt, Homo sapiens
  misc_RNA (1)...(19): siRNA sense strand
ggagcucaacgaccucaug

SEQ ID NO: 653192 - RNA, 19 nt, Homo sapiens
  misc_RNA (1)...(19): siRNA sense strand
gaguggagcccagcaaugg

SEQ ID NO: 653193 - RNA, 19 nt, Homo sapiens
  misc_RNA (1)...(19): siRNA sense strand
caagggaugaauguauuga

SEQ ID NO: 653194 - RNA, 19 nt, Homo sapiens
  misc_RNA (1)...(19): siRNA sense strand
guauugacccauuuucuaa

SEQ ID NO: 653195 - RNA, 19 nt, Homo sapiens
  misc_RNA (1)...(19): siRNA sense strand
ggaaaccuuagaaaucucu

SEQ ID NO: 653196 - RNA, 19 nt, Homo sapiens
  misc_RNA (1)...(19): siRNA sense strand
caagaggaagcugaaugaa

SEQ ID NO: 653197 - RNA, 19 nt, Homo sapiens
  misc_RNA (1)...(19): siRNA sense strand
gaucacaccaaggcacaga

SEQ ID NO: 653198 - RNA, 19 nt, Homo sapiens
  misc_RNA (1)...(19): siRNA sense strand
gggcuacacccgacaaacu

SEQ ID NO: 653199 - RNA, 19 nt, Homo sapiens
  misc_RNA (1)...(19): siRNA sense strand
gccacccgguugucaugaa

SEQ ID NO: 653200 - RNA, 19 nt, Homo sapiens
  misc_RNA (1)...(19): siRNA sense strand
ggcagacguggccauaauu

SEQ ID NO: 653201 - RNA, 19 nt, Homo sapiens
  misc_RNA (1)...(19): siRNA sense strand
gcagggaguccagcaacga

SEQ ID NO: 653202 - RNA, 19 nt, Homo sapiens
  misc_RNA (1)...(19): siRNA sense strand
cacaagaggaagcugaaug

SEQ ID NO: 653203 - RNA, 19 nt, Homo sapiens
  misc_RNA (1)...(19): siRNA sense strand
cgacagcgacagcgagaag

SEQ ID NO: 653204 - RNA, 19 nt, Homo sapiens
  misc_RNA (1)...(19): siRNA sense strand
acaaacuucccgauagaga

SEQ ID NO: 653205 - RNA, 19 nt, Homo sapiens
  misc_RNA (1)...(19): siRNA sense strand
gggaaaccuuagaaaucuc

SEQ ID NO: 653206 - RNA, 19 nt, Homo sapiens
  misc_RNA (1)...(19): siRNA sense strand
agacgagaaagaaaguaaa

SEQ ID NO: 653207 - RNA, 19 nt, Homo sapiens
  misc_RNA (1)...(19): siRNA sense strand
gacuccaugguuugcauua

SEQ ID NO: 653208 - RNA, 19 nt, Homo sapiens
  misc_RNA (1)...(19): siRNA sense strand
gcauuauugaugaucgaaa

SEQ ID NO: 653209 - RNA, 19 nt, Homo sapiens
  misc_RNA (1)...(19): siRNA sense strand
gaauauuaucaagggauga

SEQ ID NO: 653210 - RNA, 19 nt, Homo sapiens
  misc_RNA (1)...(19): siRNA sense strand
gggcacugaccuggacuuu

SEQ ID NO: 653211 - RNA, 19 nt, Homo sapiens
  misc_RNA (1)...(19): siRNA sense strand
ucaagggaugaauguauug

SEQ ID NO: 653212 - RNA, 19 nt, Homo sapiens
  misc_RNA (1)...(19): siRNA sense strand
acgggaaaccuuagaaauc

SEQ ID NO: 653213 - RNA, 19 nt, Homo sapiens
  misc_RNA (1)...(19): siRNA sense strand
ggcuacacccgacaaacuu

SEQ ID NO: 653214 - RNA, 19 nt, Homo sapiens
  misc_RNA (1)...(19): siRNA sense strand
ggagaccgagucacagaac

SEQ ID NO: 653215 - RNA, 19 nt, Homo sapiens
  misc_RNA (1)...(19): siRNA sense strand
ccaaggcacagagggagaa

SEQ ID NO: 653216 - RNA, 19 nt, Homo sapiens
  misc_RNA (1)...(19): siRNA sense strand
gcacugaccuggacuuuga

SEQ ID NO: 653217 - RNA, 19 nt, Homo sapiens
  misc_RNA (1)...(19): siRNA sense strand
gaacagcccugcggccuuu

SEQ ID NO: 653218 - RNA, 19 nt, Homo sapiens
  misc_RNA (1)...(19): siRNA sense strand
aaagaugucuggaaguuug

SEQ ID NO: 653219 - RNA, 19 nt, Homo sapiens
  misc_RNA (1)...(19): siRNA sense strand
gccaagaccucacccaguu

SEQ ID NO: 653220 - RNA, 19 nt, Homo sapiens
  misc_RNA (1)...(19): siRNA sense strand
gaaaagaugucuggaaguu

SEQ ID NO: 653221 - RNA, 19 nt, Homo sapiens
  misc_RNA (1)...(19): siRNA sense strand
cgacaaacuucccgauaga

SEQ ID NO: 653222 - RNA, 19 nt, Homo sapiens
  misc_RNA (1)...(19): siRNA sense strand
gucagcagaugucgaauaa

SEQ ID NO: 653223 - RNA, 19 nt, Homo sapiens
  misc_RNA (1)...(19): siRNA sense strand
cagcagaugucgaauaaag

SEQ ID NO: 653224 - RNA, 19 nt, Homo sapiens
  misc_RNA (1)...(19): siRNA sense strand
gaccagacguugauucaca

SEQ ID NO: 653225 - RNA, 19 nt, Homo sapiens
  misc_RNA (1)...(19): siRNA sense strand
agaagacgcgggagcauua

SEQ ID NO: 653226 - RNA, 19 nt, Homo sapiens
  misc_RNA (1)...(19): siRNA sense strand
ugaccuggacuuugacuua

SEQ ID NO: 653227 - RNA, 19 nt, Homo sapiens
  misc_RNA (1)...(19): siRNA sense strand
gagcgguucuggugagguu

SEQ ID NO: 653228 - RNA, 19 nt, Homo sapiens
  misc_RNA (1)...(19): siRNA sense strand
ucugauaacugugaagaaa

SEQ ID NO: 653229 - RNA, 19 nt, Homo sapiens
  misc_RNA (1)...(19): siRNA sense strand
ucacccaguugcagaguaa

SEQ ID NO: 653230 - RNA, 19 nt, Homo sapiens
  misc_RNA (1)...(19): siRNA sense strand
gcagacguggccauaauuu

SEQ ID NO: 653231 - RNA, 19 nt, Homo sapiens
  misc_RNA (1)...(19): siRNA sense strand
cgagaaagaaaguaaauca

SEQ ID NO: 653232 - RNA, 19 nt, Homo sapiens
  misc_RNA (1)...(19): siRNA sense strand
caaccgagcagcacuguca

SEQ ID NO: 653233 - RNA, 19 nt, Homo sapiens
  misc_RNA (1)...(19): siRNA sense strand
ggagcccucuuccuucaga

SEQ ID NO: 653234 - RNA, 19 nt, Homo sapiens
  misc_RNA (1)...(19): siRNA sense strand
gaacagcugggaagagaag

SEQ ID NO: 653235 - RNA, 19 nt, Homo sapiens
  misc_RNA (1)...(19): siRNA sense strand
gaccuggacuuugacuuau

SEQ ID NO: 653236 - RNA, 19 nt, Homo sapiens
  misc_RNA (1)...(19): siRNA sense strand
gaagaucgccaagcuguac

SEQ ID NO: 653237 - RNA, 19 nt, Homo sapiens
  misc_RNA (1)...(19): siRNA sense strand
ccgacaaacuucccgauag

SEQ ID NO: 653238 - RNA, 19 nt, Homo sapiens
  misc_RNA (1)...(19): siRNA sense strand
cgggaaaccuuagaaaucu

SEQ ID NO: 653239 - RNA, 19 nt, Homo sapiens
  misc_RNA (1)...(19): siRNA sense strand
uguacacacugacuacuau

SEQ ID NO: 653240 - RNA, 19 nt, Homo sapiens
  misc_RNA (1)...(19): siRNA sense strand
ggacgacauccuuggagaa

SEQ ID NO: 653241 - RNA, 19 nt, Homo sapiens
  misc_RNA (1)...(19): siRNA sense strand
uaucaagggaugaauguau

SEQ ID NO: 653242 - RNA, 19 nt, Homo sapiens
  misc_RNA (1)...(19): siRNA sense strand
gagaagacgcgggagcauu

SEQ ID NO: 653243 - RNA, 19 nt, Homo sapiens
  misc_RNA (1)...(19): siRNA sense strand
ccacccgguugucaugaaa

SEQ ID NO: 653244 - RNA, 19 nt, Homo sapiens
  misc_RNA (1)...(19): siRNA sense strand
cugaacagcugggaagaga

SEQ ID NO: 653245 - RNA, 19 nt, Homo sapiens
  misc_RNA (1)...(19): siRNA sense strand
caaacuucccgauagagaa

SEQ ID NO: 653246 - RNA, 19 nt, Homo sapiens
  misc_RNA (1)...(19): siRNA sense strand
cagacgagaaagaaaguaa

SEQ ID NO: 653247 - RNA, 19 nt, Homo sapiens
  misc_RNA (1)...(19): siRNA sense strand
aaacgggaaaccuuagaaa

SEQ ID NO: 653248 - RNA, 19 nt, Homo sapiens
  misc_RNA (1)...(19): siRNA sense strand
cuccaugguuugcauuauu

SEQ ID NO: 653249 - RNA, 19 nt, Homo sapiens
  misc_RNA (1)...(19): siRNA sense strand
ggaagcuggugcucauggu

SEQ ID NO: 653250 - RNA, 19 nt, Homo sapiens
  misc_RNA (1)...(19): siRNA sense strand
ggaguggagcccagcaaug

SEQ ID NO: 653251 - RNA, 19 nt, Homo sapiens
  misc_RNA (1)...(19): siRNA sense strand
gacgagaaagaaaguaaau

SEQ ID NO: 653252 - RNA, 19 nt, Homo sapiens
  misc_RNA (1)...(19): siRNA sense strand
gaaaggccugugugcugaa

SEQ ID NO: 653253 - RNA, 19 nt, Homo sapiens
  misc_RNA (1)...(19): siRNA sense strand
ccagaggccacaagaggaa

SEQ ID NO: 653254 - RNA, 19 nt, Homo sapiens
  misc_RNA (1)...(19): siRNA sense strand
gagacuccaugguuugcau

SEQ ID NO: 653255 - RNA, 19 nt, Homo sapiens
  misc_RNA (1)...(19): siRNA sense strand
uguacgagcugcacgucuu

SEQ ID NO: 653256 - RNA, 19 nt, Homo sapiens
  misc_RNA (1)...(19): siRNA sense strand
gcagcacugucagcagaug

SEQ ID NO: 653257 - RNA, 19 nt, Homo sapiens
  misc_RNA (1)...(19): siRNA sense strand
ggagauccugguccgugua

SEQ ID NO: 653258 - RNA, 19 nt, Homo sapiens
  misc_RNA (1)...(19): siRNA sense strand
ccaaucugauaacugugaa

SEQ ID NO: 653259 - RNA, 19 nt, Homo sapiens
  misc_RNA (1)...(19): siRNA sense strand
ugucagcagaugucgaaua

SEQ ID NO: 653260 - RNA, 19 nt, Homo sapiens
  misc_RNA (1)...(19): siRNA sense strand
uaugaccgcuaccucaaca

SEQ ID NO: 653261 - RNA, 19 nt, Homo sapiens
  misc_RNA (1)...(19): siRNA sense strand
uccaugguuugcauuauug

SEQ ID NO: 653262 - RNA, 19 nt, Homo sapiens
  misc_RNA (1)...(19): siRNA sense strand
ugguuugcauuauugauga

SEQ ID NO: 653263 - RNA, 19 nt, Homo sapiens
  misc_RNA (1)...(19): siRNA sense strand
gagaccgagucacagaaca

SEQ ID NO: 653264 - RNA, 19 nt, Homo sapiens
  misc_RNA (1)...(19): siRNA sense strand
aucaagggaugaauguauu

SEQ ID NO: 653265 - RNA, 19 nt, Homo sapiens
  misc_RNA (1)...(19): siRNA sense strand
gcggagaccgagucacaga

SEQ ID NO: 653266 - RNA, 19 nt, Homo sapiens
  misc_RNA (1)...(19): siRNA sense strand
uggagaagaucgccaagcu

SEQ ID NO: 653267 - RNA, 19 nt, Homo sapiens
  misc_RNA (1)...(19): siRNA sense strand
gaguggagcccagcaaugg

SEQ ID NO: 653268 - RNA, 19 nt, Homo sapiens
  misc_RNA (1)...(19): siRNA sense strand
caagggaugaauguauuga

SEQ ID NO: 653269 - RNA, 19 nt, Homo sapiens
  misc_RNA (1)...(19): siRNA sense strand
guauugacccauuuucuaa

SEQ ID NO: 653270 - RNA, 19 nt, Homo sapiens
  misc_RNA (1)...(19): siRNA sense strand
ggaaaccuuagaaaucucu

SEQ ID NO: 653271 - RNA, 19 nt, Homo sapiens
  misc_RNA (1)...(19): siRNA sense strand
gaucacaccaaggcacaga

SEQ ID NO: 653272 - RNA, 19 nt, Homo sapiens
  misc_RNA (1)...(19): siRNA sense strand
gggcuacacccgacaaacu

SEQ ID NO: 653273 - RNA, 19 nt, Homo sapiens
  misc_RNA (1)...(19): siRNA sense strand
gccacccgguugucaugaa

SEQ ID NO: 653274 - RNA, 19 nt, Homo sapiens
  misc_RNA (1)...(19): siRNA sense strand
ggcagacguggccauaauu

SEQ ID NO: 653275 - RNA, 19 nt, Homo sapiens
  misc_RNA (1)...(19): siRNA sense strand
cgacagcgacagcgagaag

SEQ ID NO: 653276 - RNA, 19 nt, Homo sapiens
  misc_RNA (1)...(19): siRNA sense strand
acaaacuucccgauagaga

SEQ ID NO: 653277 - RNA, 19 nt, Homo sapiens
  misc_RNA (1)...(19): siRNA sense strand
gggaaaccuuagaaaucuc

SEQ ID NO: 653278 - RNA, 19 nt, Homo sapiens
  misc_RNA (1)...(19): siRNA sense strand
agacgagaaagaaaguaaa

SEQ ID NO: 653279 - RNA, 19 nt, Homo sapiens
  misc_RNA (1)...(19): siRNA sense strand
gacuccaugguuugcauua

SEQ ID NO: 653280 - RNA, 19 nt, Homo sapiens
  misc_RNA (1)...(19): siRNA sense strand
gcauuauugaugaucgaaa

SEQ ID NO: 653281 - RNA, 19 nt, Homo sapiens
  misc_RNA (1)...(19): siRNA sense strand
gaauauuaucaagggauga

SEQ ID NO: 653282 - RNA, 19 nt, Homo sapiens
  misc_RNA (1)...(19): siRNA sense strand
gggcacugaccuggacuuu

SEQ ID NO: 653283 - RNA, 19 nt, Homo sapiens
  misc_RNA (1)...(19): siRNA sense strand
ucaagggaugaauguauug

SEQ ID NO: 653284 - RNA, 19 nt, Homo sapiens
  misc_RNA (1)...(19): siRNA sense strand
acgggaaaccuuagaaauc

SEQ ID NO: 653285 - RNA, 19 nt, Homo sapiens
  misc_RNA (1)...(19): siRNA sense strand
ggcuacacccgacaaacuu

SEQ ID NO: 653286 - RNA, 19 nt, Homo sapiens
  misc_RNA (1)...(19): siRNA sense strand
ggagaccgagucacagaac

SEQ ID NO: 653287 - RNA, 19 nt, Homo sapiens
  misc_RNA (1)...(19): siRNA sense strand
ccaaggcacagagggagaa

SEQ ID NO: 653288 - RNA, 19 nt, Homo sapiens
  misc_RNA (1)...(19): siRNA sense strand
gagagaagcugcacuacua

SEQ ID NO: 653289 - RNA, 19 nt, Homo sapiens
  misc_RNA (1)...(19): siRNA sense strand
ugagagacuuggaauauaa

SEQ ID NO: 653290 - RNA, 19 nt, Homo sapiens
  misc_RNA (1)...(19): siRNA sense strand
gaacucaucuacaccuuca

SEQ ID NO: 653291 - RNA, 19 nt, Homo sapiens
  misc_RNA (1)...(19): siRNA sense strand
gcagcaggaugcaaaguug

SEQ ID NO: 653292 - RNA, 19 nt, Homo sapiens
  misc_RNA (1)...(19): siRNA sense strand
gcaagaagccuuuuaagaa

SEQ ID NO: 653293 - RNA, 19 nt, Homo sapiens
  misc_RNA (1)...(19): siRNA sense strand
gaacacgccuccugcuaag

SEQ ID NO: 653294 - RNA, 19 nt, Homo sapiens
  misc_RNA (1)...(19): siRNA sense strand
gcaucgcccuggauuauga

SEQ ID NO: 653295 - RNA, 19 nt, Homo sapiens
  misc_RNA (1)...(19): siRNA sense strand
ggaacacgccuccugcuaa

SEQ ID NO: 653296 - RNA, 19 nt, Homo sapiens
  misc_RNA (1)...(19): siRNA sense strand
ggacgaagaugaggaaucg

SEQ ID NO: 653297 - RNA, 19 nt, Homo sapiens
  misc_RNA (1)...(19): siRNA sense strand
cagauaaacuccucucucu

SEQ ID NO: 653298 - RNA, 19 nt, Homo sapiens
  misc_RNA (1)...(19): siRNA sense strand
gcaaagggagaagcugaua

SEQ ID NO: 653299 - RNA, 19 nt, Homo sapiens
  misc_RNA (1)...(19): siRNA sense strand
gagacuuccuaaacaggua

SEQ ID NO: 653300 - RNA, 19 nt, Homo sapiens
  misc_RNA (1)...(19): siRNA sense strand
gaccagaggcaguacauug

SEQ ID NO: 653301 - RNA, 19 nt, Homo sapiens
  misc_RNA (1)...(19): siRNA sense strand
gcugagagacuuggaauau

SEQ ID NO: 653302 - RNA, 19 nt, Homo sapiens
  misc_RNA (1)...(19): siRNA sense strand
caacgaggccugagggaau

SEQ ID NO: 653303 - RNA, 19 nt, Homo sapiens
  misc_RNA (1)...(19): siRNA sense strand
gggaaacggacgaagauga

SEQ ID NO: 653304 - RNA, 19 nt, Homo sapiens
  misc_RNA (1)...(19): siRNA sense strand
ggaagaagaggaggaggaa

SEQ ID NO: 653305 - RNA, 19 nt, Homo sapiens
  misc_RNA (1)...(19): siRNA sense strand
cugagagacuuggaauaua

SEQ ID NO: 653306 - RNA, 19 nt, Homo sapiens
  misc_RNA (1)...(19): siRNA sense strand
guacauuguggcugaguuu

SEQ ID NO: 653307 - RNA, 19 nt, Homo sapiens
  misc_RNA (1)...(19): siRNA sense strand
ggucugaggaugaagaaga

SEQ ID NO: 653308 - RNA, 19 nt, Homo sapiens
  misc_RNA (1)...(19): siRNA sense strand
ggaagcugcugagagacuu

SEQ ID NO: 653309 - RNA, 19 nt, Homo sapiens
  misc_RNA (1)...(19): siRNA sense strand
gaaguucuggguugggaaa

SEQ ID NO: 653310 - RNA, 19 nt, Homo sapiens
  misc_RNA (1)...(19): siRNA sense strand
gggcuggucugaggaugaa

SEQ ID NO: 653311 - RNA, 19 nt, Homo sapiens
  misc_RNA (1)...(19): siRNA sense strand
caacgcagagucacaggaa

SEQ ID NO: 653312 - RNA, 19 nt, Homo sapiens
  misc_RNA (1)...(19): siRNA sense strand
ggaggaagaggaggaaguu

SEQ ID NO: 653313 - RNA, 19 nt, Homo sapiens
  misc_RNA (1)...(19): siRNA sense strand
ggacacgagagacuuccua

SEQ ID NO: 653314 - RNA, 19 nt, Homo sapiens
  misc_RNA (1)...(19): siRNA sense strand
caagaagccuuuuaagaag

SEQ ID NO: 653315 - RNA, 19 nt, Homo sapiens
  misc_RNA (1)...(19): siRNA sense strand
guugggcgaugaagaggaa

SEQ ID NO: 653316 - RNA, 19 nt, Homo sapiens
  misc_RNA (1)...(19): siRNA sense strand
ggaagugcgugaccuacac

SEQ ID NO: 653317 - RNA, 19 nt, Homo sapiens
  misc_RNA (1)...(19): siRNA sense strand
gcagggagaaguucaagag

SEQ ID NO: 653318 - RNA, 19 nt, Homo sapiens
  misc_RNA (1)...(19): siRNA sense strand
gggagcagcaggaugcaaa

SEQ ID NO: 653319 - RNA, 19 nt, Homo sapiens
  misc_RNA (1)...(19): siRNA sense strand
cgagagacuuccuaaacag

SEQ ID NO: 653320 - RNA, 19 nt, Homo sapiens
  misc_RNA (1)...(19): siRNA sense strand
gaagcugcacuacuacugu

SEQ ID NO: 653321 - RNA, 19 nt, Homo sapiens
  misc_RNA (1)...(19): siRNA sense strand
ggaggaaguucuggaaagc

SEQ ID NO: 653322 - RNA, 19 nt, Homo sapiens
  misc_RNA (1)...(19): siRNA sense strand
ggaaacggacgaagaugag

SEQ ID NO: 653323 - RNA, 19 nt, Homo sapiens
  misc_RNA (1)...(19): siRNA sense strand
ggaggaagagggagaagag

SEQ ID NO: 653324 - RNA, 19 nt, Homo sapiens
  misc_RNA (1)...(19): siRNA sense strand
ugagcagggucaucaguuc

SEQ ID NO: 653325 - RNA, 19 nt, Homo sapiens
  misc_RNA (1)...(19): siRNA sense strand
acgagagacuuccuaaaca

SEQ ID NO: 653326 - RNA, 19 nt, Homo sapiens
  misc_RNA (1)...(19): siRNA sense strand
ggauaugacgacugggaaa

SEQ ID NO: 653327 - RNA, 19 nt, Homo sapiens
  misc_RNA (1)...(19): siRNA sense strand
ggaagaggaggaaguucug

SEQ ID NO: 653328 - RNA, 19 nt, Homo sapiens
  misc_RNA (1)...(19): siRNA sense strand
gcgaugaagaggaagaaga

SEQ ID NO: 653329 - RNA, 19 nt, Homo sapiens
  misc_RNA (1)...(19): siRNA sense strand
ggaggaacaccugcuggaa

SEQ ID NO: 653330 - RNA, 19 nt, Homo sapiens
  misc_RNA (1)...(19): siRNA sense strand
gaggaggaaguucuggaaa

SEQ ID NO: 653331 - RNA, 19 nt, Homo sapiens
  misc_RNA (1)...(19): siRNA sense strand
gggacccugugaccauuga

SEQ ID NO: 653332 - RNA, 19 nt, Homo sapiens
  misc_RNA (1)...(19): siRNA sense strand
aaggagagacagagacaaa

SEQ ID NO: 653333 - RNA, 19 nt, Homo sapiens
  misc_RNA (1)...(19): siRNA sense strand
cacaggaacucaucuacac

SEQ ID NO: 653334 - RNA, 19 nt, Homo sapiens
  misc_RNA (1)...(19): siRNA sense strand
aagaagaggaggaggaaga

SEQ ID NO: 653335 - RNA, 19 nt, Homo sapiens
  misc_RNA (1)...(19): siRNA sense strand
gcgggacccugugaccauu

SEQ ID NO: 653336 - RNA, 19 nt, Homo sapiens
  misc_RNA (1)...(19): siRNA sense strand
gguauccacggaagaaguu

SEQ ID NO: 653337 - RNA, 19 nt, Homo sapiens
  misc_RNA (1)...(19): siRNA sense strand
aggaacaccugcuggaaca

SEQ ID NO: 653338 - RNA, 19 nt, Homo sapiens
  misc_RNA (1)...(19): siRNA sense strand
ggaagcugcugugcgugau

SEQ ID NO: 653339 - RNA, 19 nt, Homo sapiens
  misc_RNA (1)...(19): siRNA sense strand
caaagggagaagcugauau

SEQ ID NO: 653340 - RNA, 19 nt, Homo sapiens
  misc_RNA (1)...(19): siRNA sense strand
gcaggacacgagagacuuc

SEQ ID NO: 653341 - RNA, 19 nt, Homo sapiens
  misc_RNA (1)...(19): siRNA sense strand
acaccagccuguacaagag

SEQ ID NO: 653342 - RNA, 19 nt, Homo sapiens
  misc_RNA (1)...(19): siRNA sense strand
gacacgagagacuuccuaa

SEQ ID NO: 653343 - RNA, 19 nt, Homo sapiens
  misc_RNA (1)...(19): siRNA sense strand
gaacauugagcggcugaag

SEQ ID NO: 653344 - RNA, 19 nt, Homo sapiens
  misc_RNA (1)...(19): siRNA sense strand
ugaguacccuaaggagaga

SEQ ID NO: 653345 - RNA, 19 nt, Homo sapiens
  misc_RNA (1)...(19): siRNA sense strand
aaagggagaagcugauauc

SEQ ID NO: 653346 - RNA, 19 nt, Homo sapiens
  misc_RNA (1)...(19): siRNA sense strand
acacggccguccucaugga

SEQ ID NO: 653347 - RNA, 19 nt, Homo sapiens
  misc_RNA (1)...(19): siRNA sense strand
acccauugcucgagugguu

SEQ ID NO: 653348 - RNA, 19 nt, Homo sapiens
  misc_RNA (1)...(19): siRNA sense strand
ugagggagcgggaggaaca

SEQ ID NO: 653349 - RNA, 19 nt, Homo sapiens
  misc_RNA (1)...(19): siRNA sense strand
ucacaggaacucaucuaca

SEQ ID NO: 653350 - RNA, 19 nt, Homo sapiens
  misc_RNA (1)...(19): siRNA sense strand
cacgagagacuuccuaaac

SEQ ID NO: 653351 - RNA, 19 nt, Homo sapiens
  misc_RNA (1)...(19): siRNA sense strand
aggaggaaguucuggaaag

SEQ ID NO: 653352 - RNA, 19 nt, Homo sapiens
  misc_RNA (1)...(19): siRNA sense strand
ggaggaggaagaggaggaa

SEQ ID NO: 653353 - RNA, 19 nt, Homo sapiens
  misc_RNA (1)...(19): siRNA sense strand
agacuuggaauauaagaca

SEQ ID NO: 653354 - RNA, 19 nt, Homo sapiens
  misc_RNA (1)...(19): siRNA sense strand
ggucuacugggaaguggaa

SEQ ID NO: 653355 - RNA, 19 nt, Homo sapiens
  misc_RNA (1)...(19): siRNA sense strand
ggaccagaggcaguacauu

SEQ ID NO: 653356 - RNA, 19 nt, Homo sapiens
  misc_RNA (1)...(19): siRNA sense strand
aacgaggccugagggaauu

SEQ ID NO: 653357 - RNA, 19 nt, Homo sapiens
  misc_RNA (1)...(19): siRNA sense strand
gcuccaucugucuugauua

SEQ ID NO: 653358 - RNA, 19 nt, Homo sapiens
  misc_RNA (1)...(19): siRNA sense strand
aagaggaggaggaggaaga

SEQ ID NO: 653359 - RNA, 19 nt, Homo sapiens
  misc_RNA (1)...(19): siRNA sense strand
gagagacagagacaaaauu

SEQ ID NO: 653360 - RNA, 19 nt, Homo sapiens
  misc_RNA (1)...(19): siRNA sense strand
ugacuguggccacgucuuc

SEQ ID NO: 653361 - RNA, 19 nt, Homo sapiens
  misc_RNA (1)...(19): siRNA sense strand
agaauucucagauaaacuc

SEQ ID NO: 653362 - RNA, 19 nt, Homo sapiens
  misc_RNA (1)...(19): siRNA sense strand
ccaccugaguacccuaagg

SEQ ID NO: 653363 - RNA, 19 nt, Homo sapiens
  misc_RNA (1)...(19): siRNA sense strand
gcucaaguggccaggaaca

SEQ ID NO: 653364 - RNA, 19 nt, Homo sapiens
  misc_RNA (1)...(19): siRNA sense strand
cgaugaagaggaagaagag

SEQ ID NO: 653365 - RNA, 19 nt, Homo sapiens
  misc_RNA (1)...(19): siRNA sense strand
caaggucuacugggaagug

SEQ ID NO: 653366 - RNA, 19 nt, Homo sapiens
  misc_RNA (1)...(19): siRNA sense strand
gagagacuuggaauauaag

SEQ ID NO: 653367 - RNA, 19 nt, Homo sapiens
  misc_RNA (1)...(19): siRNA sense strand
acagguauccacggaagaa

SEQ ID NO: 653368 - RNA, 19 nt, Homo sapiens
  misc_RNA (1)...(19): siRNA sense strand
gaggaaaucccuacaguua

SEQ ID NO: 653369 - RNA, 19 nt, Homo sapiens
  misc_RNA (1)...(19): siRNA sense strand
gaucucacaugcccuauuu

SEQ ID NO: 653370 - RNA, 19 nt, Homo sapiens
  misc_RNA (1)...(19): siRNA sense strand
gaacaauguggcagaauuu

SEQ ID NO: 653371 - RNA, 19 nt, Homo sapiens
  misc_RNA (1)...(19): siRNA sense strand
cagauaaagugaaggaauu

SEQ ID NO: 653372 - RNA, 19 nt, Homo sapiens
  misc_RNA (1)...(19): siRNA sense strand
gaaauucugucugacuuug

SEQ ID NO: 653373 - RNA, 19 nt, Homo sapiens
  misc_RNA (1)...(19): siRNA sense strand
ggaaaucccuacaguuacu

SEQ ID NO: 653374 - RNA, 19 nt, Homo sapiens
  misc_RNA (1)...(19): siRNA sense strand
uaaaacagccgauuucaua

SEQ ID NO: 653375 - RNA, 19 nt, Homo sapiens
  misc_RNA (1)...(19): siRNA sense strand
ccaugaaacuugcuguuau

SEQ ID NO: 653376 - RNA, 19 nt, Homo sapiens
  misc_RNA (1)...(19): siRNA sense strand
ugaacaauguggcagaauu

SEQ ID NO: 653377 - RNA, 19 nt, Homo sapiens
  misc_RNA (1)...(19): siRNA sense strand
ucaagacacuggcacauuc

SEQ ID NO: 653378 - RNA, 19 nt, Homo sapiens
  misc_RNA (1)...(19): siRNA sense strand
gacacuggcacauucauua

SEQ ID NO: 653379 - RNA, 19 nt, Homo sapiens
  misc_RNA (1)...(19): siRNA sense strand
ucacaugcccuauuuguug

SEQ ID NO: 653380 - RNA, 19 nt, Homo sapiens
  misc_RNA (1)...(19): siRNA sense strand
caacagaugcaggaguuua

SEQ ID NO: 653381 - RNA, 19 nt, Homo sapiens
  misc_RNA (1)...(19): siRNA sense strand
guuguagucuguuugauga

SEQ ID NO: 653382 - RNA, 19 nt, Homo sapiens
  misc_RNA (1)...(19): siRNA sense strand
gagaccagcuccauucaag

SEQ ID NO: 653383 - RNA, 19 nt, Homo sapiens
  misc_RNA (1)...(19): siRNA sense strand
gaagggagugugcggaauu

SEQ ID NO: 653384 - RNA, 19 nt, Homo sapiens
  misc_RNA (1)...(19): siRNA sense strand
auuaauagccugcagguua

SEQ ID NO: 653385 - RNA, 19 nt, Homo sapiens
  misc_RNA (1)...(19): siRNA sense strand
cggauggccuuuaacauug

SEQ ID NO: 653386 - RNA, 19 nt, Homo sapiens
  misc_RNA (1)...(19): siRNA sense strand
gcaagcccuuuaaugaaga

SEQ ID NO: 653387 - RNA, 19 nt, Homo sapiens
  misc_RNA (1)...(19): siRNA sense strand
uaacauugcugaggcuuuc

SEQ ID NO: 653388 - RNA, 19 nt, Homo sapiens
  misc_RNA (1)...(19): siRNA sense strand
gcacauucauuagcaagau

SEQ ID NO: 653389 - RNA, 19 nt, Homo sapiens
  misc_RNA (1)...(19): siRNA sense strand
caagaucucucccaaaaug

SEQ ID NO: 653390 - RNA, 19 nt, Homo sapiens
  misc_RNA (1)...(19): siRNA sense strand
gcaggaguuuagagagaaa

SEQ ID NO: 653391 - RNA, 19 nt, Homo sapiens
  misc_RNA (1)...(19): siRNA sense strand
caccaaacaugucuucugu

SEQ ID NO: 653392 - RNA, 19 nt, Homo sapiens
  misc_RNA (1)...(19): siRNA sense strand
cuuagaagguaucuuagaa

SEQ ID NO: 653393 - RNA, 19 nt, Homo sapiens
  misc_RNA (1)...(19): siRNA sense strand
caugaaacuugcuguuaug

SEQ ID NO: 653394 - RNA, 19 nt, Homo sapiens
  misc_RNA (1)...(19): siRNA sense strand
gagcaacggauggccuuua

SEQ ID NO: 653395 - RNA, 19 nt, Homo sapiens
  misc_RNA (1)...(19): siRNA sense strand
caacacacacuggaucaaa

SEQ ID NO: 653396 - RNA, 19 nt, Homo sapiens
  misc_RNA (1)...(19): siRNA sense strand
gucagaacccauuguauuu

SEQ ID NO: 653397 - RNA, 19 nt, Homo sapiens
  misc_RNA (1)...(19): siRNA sense strand
ucaacaaacucaacaccau

SEQ ID NO: 653398 - RNA, 19 nt, Homo sapiens
  misc_RNA (1)...(19): siRNA sense strand
uugaugaccuggcaacuug

SEQ ID NO: 653399 - RNA, 19 nt, Homo sapiens
  misc_RNA (1)...(19): siRNA sense strand
caugucuucuguucuauug

SEQ ID NO: 653400 - RNA, 19 nt, Homo sapiens
  misc_RNA (1)...(19): siRNA sense strand
ugucagaacccauuguauu

SEQ ID NO: 653401 - RNA, 19 nt, Homo sapiens
  misc_RNA (1)...(19): siRNA sense strand
gaaacuaguaagaggaaau

SEQ ID NO: 653402 - RNA, 19 nt, Homo sapiens
  misc_RNA (1)...(19): siRNA sense strand
ugacugauaugcagcugau

SEQ ID NO: 653403 - RNA, 19 nt, Homo sapiens
  misc_RNA (1)...(19): siRNA sense strand
ccugcaagcccuuuaauga

SEQ ID NO: 653404 - RNA, 19 nt, Homo sapiens
  misc_RNA (1)...(19): siRNA sense strand
caacggauggccuuuaaca

SEQ ID NO: 653405 - RNA, 19 nt, Homo sapiens
  misc_RNA (1)...(19): siRNA sense strand
gggcagccucucaacauuu

SEQ ID NO: 653406 - RNA, 19 nt, Homo sapiens
  misc_RNA (1)...(19): siRNA sense strand
uuucaaagaugugucagaa

SEQ ID NO: 653407 - RNA, 19 nt, Homo sapiens
  misc_RNA (1)...(19): siRNA sense strand
uuggauaccuuggaaacua

SEQ ID NO: 653408 - RNA, 19 nt, Homo sapiens
  misc_RNA (1)...(19): siRNA sense strand
ggaaaaguauaacaagauc

SEQ ID NO: 653409 - RNA, 19 nt, Homo sapiens
  misc_RNA (1)...(19): siRNA sense strand
ccagagaucaacaaacuca

SEQ ID NO: 653410 - RNA, 19 nt, Homo sapiens
  misc_RNA (1)...(19): siRNA sense strand
gcacaccaaacaugucuuc

SEQ ID NO: 653411 - RNA, 19 nt, Homo sapiens
  misc_RNA (1)...(19): siRNA sense strand
ugucuucuguucuauugaa

SEQ ID NO: 653412 - RNA, 19 nt, Homo sapiens
  misc_RNA (1)...(19): siRNA sense strand
guuacugacuaaagauuca

SEQ ID NO: 653413 - RNA, 19 nt, Homo sapiens
  misc_RNA (1)...(19): siRNA sense strand
ggagcugcuugaagaagau

SEQ ID NO: 653414 - RNA, 19 nt, Homo sapiens
  misc_RNA (1)...(19): siRNA sense strand
ggaaacuaguaagaggaaa

SEQ ID NO: 653415 - RNA, 19 nt, Homo sapiens
  misc_RNA (1)...(19): siRNA sense strand
gaccagcuccauucaagug

SEQ ID NO: 653416 - RNA, 19 nt, Homo sapiens
  misc_RNA (1)...(19): siRNA sense strand
gcauaugacccagagauca

SEQ ID NO: 653417 - RNA, 19 nt, Homo sapiens
  misc_RNA (1)...(19): siRNA sense strand
gauaugcagcugauuugug

SEQ ID NO: 653418 - RNA, 19 nt, Homo sapiens
  misc_RNA (1)...(19): siRNA sense strand
ccugaaggguauuguggaa

SEQ ID NO: 653419 - RNA, 19 nt, Homo sapiens
  misc_RNA (1)...(19): siRNA sense strand
augcuuagaagguaucuua

SEQ ID NO: 653420 - RNA, 19 nt, Homo sapiens
  misc_RNA (1)...(19): siRNA sense strand
ucaaaguaaucaaggaaac

SEQ ID NO: 653421 - RNA, 19 nt, Homo sapiens
  misc_RNA (1)...(19): siRNA sense strand
uggcagaauuugugugcaa

SEQ ID NO: 653422 - RNA, 19 nt, Homo sapiens
  misc_RNA (1)...(19): siRNA sense strand
aaacagccgauuucauaga

SEQ ID NO: 653423 - RNA, 19 nt, Homo sapiens
  misc_RNA (1)...(19): siRNA sense strand
caagauucccuggagcuuu

SEQ ID NO: 653424 - RNA, 19 nt, Homo sapiens
  misc_RNA (1)...(19): siRNA sense strand
aagaggaaaucccuacagu

SEQ ID NO: 653425 - RNA, 19 nt, Homo sapiens
  misc_RNA (1)...(19): siRNA sense strand
gaauuuuacuuugguggua

SEQ ID NO: 653426 - RNA, 19 nt, Homo sapiens
  misc_RNA (1)...(19): siRNA sense strand
gucauugucuuugguccua

SEQ ID NO: 653427 - RNA, 19 nt, Homo sapiens
  misc_RNA (1)...(19): siRNA sense strand
gcccuuuaaugaagaacuu

SEQ ID NO: 653428 - RNA, 19 nt, Homo sapiens
  misc_RNA (1)...(19): siRNA sense strand
caaacucaacaccaucuug

SEQ ID NO: 653429 - RNA, 19 nt, Homo sapiens
  misc_RNA (1)...(19): siRNA sense strand
uuacuuuggugguacugaa

SEQ ID NO: 653430 - RNA, 19 nt, Homo sapiens
  misc_RNA (1)...(19): siRNA sense strand
aacagccgauuucauagaa

SEQ ID NO: 653431 - RNA, 19 nt, Homo sapiens
  misc_RNA (1)...(19): siRNA sense strand
acggauggccuuuaacauu

SEQ ID NO: 653432 - RNA, 19 nt, Homo sapiens
  misc_RNA (1)...(19): siRNA sense strand
agcaacggauggccuuuaa

SEQ ID NO: 653433 - RNA, 19 nt, Homo sapiens
  misc_RNA (1)...(19): siRNA sense strand
cauaugacccagagaucaa

SEQ ID NO: 653434 - RNA, 19 nt, Homo sapiens
  misc_RNA (1)...(19): siRNA sense strand
caauguggcagaauuugug

SEQ ID NO: 653435 - RNA, 19 nt, Homo sapiens
  misc_RNA (1)...(19): siRNA sense strand
ggagugugcggaauuccuu

SEQ ID NO: 653436 - RNA, 19 nt, Homo sapiens
  misc_RNA (1)...(19): siRNA sense strand
ugcaagcccuuuaaugaag

SEQ ID NO: 653437 - RNA, 19 nt, Homo sapiens
  misc_RNA (1)...(19): siRNA sense strand
ugaaggguauuguggaaaa

SEQ ID NO: 653438 - RNA, 19 nt, Homo sapiens
  misc_RNA (1)...(19): siRNA sense strand
gcuuagaagguaucuuaga

SEQ ID NO: 653439 - RNA, 19 nt, Homo sapiens
  misc_RNA (1)...(19): siRNA sense strand
cagccgauuucauagaaca

SEQ ID NO: 653440 - RNA, 19 nt, Homo sapiens
  misc_RNA (1)...(19): siRNA sense strand
cacauucauuagcaagauu

SEQ ID NO: 653441 - RNA, 19 nt, Homo sapiens
  misc_RNA (1)...(19): siRNA sense strand
acuagucgauguggauaaa

SEQ ID NO: 653442 - RNA, 19 nt, Homo sapiens
  misc_RNA (1)...(19): siRNA sense strand
gagaucaacaaacucaaca

SEQ ID NO: 653443 - RNA, 19 nt, Homo sapiens
  misc_RNA (1)...(19): siRNA sense strand
acccagagaucaacaaacu

SEQ ID NO: 653444 - RNA, 19 nt, Homo sapiens
  misc_RNA (1)...(19): siRNA sense strand
caaaaugccaguaugcaaa

SEQ ID NO: 653445 - RNA, 19 nt, Homo sapiens
  misc_RNA (1)...(19): siRNA sense strand
ucgcuuggauaccuuggaa

SEQ ID NO: 653446 - RNA, 19 nt, Homo sapiens
  misc_RNA (1)...(19): siRNA sense strand
aaggcugucuuucaaacuu

SEQ ID NO: 653447 - RNA, 19 nt, Homo sapiens
  misc_RNA (1)...(19): siRNA sense strand
ugaaauucugucugacuuu

SEQ ID NO: 653448 - RNA, 19 nt, Homo sapiens
  misc_RNA (1)...(19): siRNA sense strand
uuugagaaguuacaacaca

SEQ ID NO: 653449 - RNA, 19 nt, Homo sapiens
  misc_RNA (1)...(19): siRNA sense strand
ucagauaaagugaaggaau

SEQ ID NO: 653450 - RNA, 19 nt, Homo sapiens
  misc_RNA (1)...(19): siRNA sense strand
gagcacaccaaacaugucu

SEQ ID NO: 653451 - RNA, 19 nt, Homo sapiens
  misc_RNA (1)...(19): siRNA sense strand
ccauucaaguguccuacau

SEQ ID NO: 653452 - RNA, 19 nt, Homo sapiens
  misc_RNA (1)...(19): siRNA sense strand
cgauguggauaaacuuucu

SEQ ID NO: 653453 - RNA, 19 nt, Homo sapiens
  misc_RNA (1)...(19): siRNA sense strand
caagcccuuuaaugaagaa

SEQ ID NO: 653454 - RNA, 19 nt, Homo sapiens
  misc_RNA (1)...(19): siRNA sense strand
cugcaagcccuuuaaugaa

SEQ ID NO: 653455 - RNA, 19 nt, Homo sapiens
  misc_RNA (1)...(19): siRNA sense strand
cacaugcccuauuuguugu

SEQ ID NO: 653456 - RNA, 19 nt, Homo sapiens
  misc_RNA (1)...(19): siRNA sense strand
ccuauuuguuguagucugu

SEQ ID NO: 653457 - RNA, 19 nt, Homo sapiens
  misc_RNA (1)...(19): siRNA sense strand
gggagcacaccaaacaugu

SEQ ID NO: 653458 - RNA, 19 nt, Homo sapiens
  misc_RNA (1)...(19): siRNA sense strand
uaaacuuucuuugccucaa

SEQ ID NO: 653459 - RNA, 19 nt, Homo sapiens
  misc_RNA (1)...(19): siRNA sense strand
aaacuagucgauguggaua

SEQ ID NO: 653460 - RNA, 19 nt, Homo sapiens
  misc_RNA (1)...(19): siRNA sense strand
gaccaugaaacuugcuguu

SEQ ID NO: 653461 - RNA, 19 nt, Homo sapiens
  misc_RNA (1)...(19): siRNA sense strand
ccuaccauguuccuagaau

SEQ ID NO: 653462 - RNA, 19 nt, Homo sapiens
  misc_RNA (1)...(19): siRNA sense strand
gcaagauucccuggagcuu

SEQ ID NO: 653463 - RNA, 19 nt, Homo sapiens
  misc_RNA (1)...(19): siRNA sense strand
ggauggccuuuaacauugc

SEQ ID NO: 653464 - RNA, 19 nt, Homo sapiens
  misc_RNA (1)...(19): siRNA sense strand
aaacuuucuuugccucaag

SEQ ID NO: 653465 - RNA, 19 nt, Homo sapiens
  misc_RNA (1)...(19): siRNA sense strand
cuaccauguuccuagaaug

SEQ ID NO: 653466 - RNA, 19 nt, Homo sapiens
  misc_RNA (1)...(19): siRNA sense strand
guccuaccauguuccuaga

SEQ ID NO: 653467 - RNA, 19 nt, Homo sapiens
  misc_RNA (1)...(19): siRNA sense strand
caagacacuggcacauuca

SEQ ID NO: 653468 - RNA, 19 nt, Homo sapiens
  misc_RNA (1)...(19): siRNA sense strand
gaggaaaucccuacaguua

SEQ ID NO: 653469 - RNA, 19 nt, Homo sapiens
  misc_RNA (1)...(19): siRNA sense strand
gaucucacaugcccuauuu

SEQ ID NO: 653470 - RNA, 19 nt, Homo sapiens
  misc_RNA (1)...(19): siRNA sense strand
gaacaauguggcagaauuu

SEQ ID NO: 653471 - RNA, 19 nt, Homo sapiens
  misc_RNA (1)...(19): siRNA sense strand
cagauaaagugaaggaauu

SEQ ID NO: 653472 - RNA, 19 nt, Homo sapiens
  misc_RNA (1)...(19): siRNA sense strand
gaaauucugucugacuuug

SEQ ID NO: 653473 - RNA, 19 nt, Homo sapiens
  misc_RNA (1)...(19): siRNA sense strand
ggaaaucccuacaguuacu

SEQ ID NO: 653474 - RNA, 19 nt, Homo sapiens
  misc_RNA (1)...(19): siRNA sense strand
uaaaacagccgauuucaua

SEQ ID NO: 653475 - RNA, 19 nt, Homo sapiens
  misc_RNA (1)...(19): siRNA sense strand
ccaugaaacuugcuguuau

SEQ ID NO: 653476 - RNA, 19 nt, Homo sapiens
  misc_RNA (1)...(19): siRNA sense strand
ugaacaauguggcagaauu

SEQ ID NO: 653477 - RNA, 19 nt, Homo sapiens
  misc_RNA (1)...(19): siRNA sense strand
ucaagacacuggcacauuc

SEQ ID NO: 653478 - RNA, 19 nt, Homo sapiens
  misc_RNA (1)...(19): siRNA sense strand
gacacuggcacauucauua

SEQ ID NO: 653479 - RNA, 19 nt, Homo sapiens
  misc_RNA (1)...(19): siRNA sense strand
ucacaugcccuauuuguug

SEQ ID NO: 653480 - RNA, 19 nt, Homo sapiens
  misc_RNA (1)...(19): siRNA sense strand
caacagaugcaggaguuua

SEQ ID NO: 653481 - RNA, 19 nt, Homo sapiens
  misc_RNA (1)...(19): siRNA sense strand
guuguagucuguuugauga

SEQ ID NO: 653482 - RNA, 19 nt, Homo sapiens
  misc_RNA (1)...(19): siRNA sense strand
gagaccagcuccauucaag

SEQ ID NO: 653483 - RNA, 19 nt, Homo sapiens
  misc_RNA (1)...(19): siRNA sense strand
gaagggagugugcggaauu

SEQ ID NO: 653484 - RNA, 19 nt, Homo sapiens
  misc_RNA (1)...(19): siRNA sense strand
auuaauagccugcagguua

SEQ ID NO: 653485 - RNA, 19 nt, Homo sapiens
  misc_RNA (1)...(19): siRNA sense strand
cggauggccuuuaacauug

SEQ ID NO: 653486 - RNA, 19 nt, Homo sapiens
  misc_RNA (1)...(19): siRNA sense strand
gcaagcccuuuaaugaaga

SEQ ID NO: 653487 - RNA, 19 nt, Homo sapiens
  misc_RNA (1)...(19): siRNA sense strand
uaacauugcugaggcuuuc

SEQ ID NO: 653488 - RNA, 19 nt, Homo sapiens
  misc_RNA (1)...(19): siRNA sense strand
gcacauucauuagcaagau

SEQ ID NO: 653489 - RNA, 19 nt, Homo sapiens
  misc_RNA (1)...(19): siRNA sense strand
caagaucucucccaaaaug

SEQ ID NO: 653490 - RNA, 19 nt, Homo sapiens
  misc_RNA (1)...(19): siRNA sense strand
gcaggaguuuagagagaaa

SEQ ID NO: 653491 - RNA, 19 nt, Homo sapiens
  misc_RNA (1)...(19): siRNA sense strand
caccaaacaugucuucugu

SEQ ID NO: 653492 - RNA, 19 nt, Homo sapiens
  misc_RNA (1)...(19): siRNA sense strand
cuuagaagguaucuuagaa

SEQ ID NO: 653493 - RNA, 19 nt, Homo sapiens
  misc_RNA (1)...(19): siRNA sense strand
caugaaacuugcuguuaug

SEQ ID NO: 653494 - RNA, 19 nt, Homo sapiens
  misc_RNA (1)...(19): siRNA sense strand
gagcaacggauggccuuua

SEQ ID NO: 653495 - RNA, 19 nt, Homo sapiens
  misc_RNA (1)...(19): siRNA sense strand
caacacacacuggaucaaa

SEQ ID NO: 653496 - RNA, 19 nt, Homo sapiens
  misc_RNA (1)...(19): siRNA sense strand
gucagaacccauuguauuu

SEQ ID NO: 653497 - RNA, 19 nt, Homo sapiens
  misc_RNA (1)...(19): siRNA sense strand
ucaacaaacucaacaccau

SEQ ID NO: 653498 - RNA, 19 nt, Homo sapiens
  misc_RNA (1)...(19): siRNA sense strand
uugaugaccuggcaacuug

SEQ ID NO: 653499 - RNA, 19 nt, Homo sapiens
  misc_RNA (1)...(19): siRNA sense strand
caugucuucuguucuauug

SEQ ID NO: 653500 - RNA, 19 nt, Homo sapiens
  misc_RNA (1)...(19): siRNA sense strand
ugucagaacccauuguauu

SEQ ID NO: 653501 - RNA, 19 nt, Homo sapiens
  misc_RNA (1)...(19): siRNA sense strand
gaaacuaguaagaggaaau

SEQ ID NO: 653502 - RNA, 19 nt, Homo sapiens
  misc_RNA (1)...(19): siRNA sense strand
ugacugauaugcagcugau

SEQ ID NO: 653503 - RNA, 19 nt, Homo sapiens
  misc_RNA (1)...(19): siRNA sense strand
ccugcaagcccuuuaauga

SEQ ID NO: 653504 - RNA, 19 nt, Homo sapiens
  misc_RNA (1)...(19): siRNA sense strand
caacggauggccuuuaaca

SEQ ID NO: 653505 - RNA, 19 nt, Homo sapiens
  misc_RNA (1)...(19): siRNA sense strand
gggcagccucucaacauuu

SEQ ID NO: 653506 - RNA, 19 nt, Homo sapiens
  misc_RNA (1)...(19): siRNA sense strand
uuucaaagaugugucagaa

SEQ ID NO: 653507 - RNA, 19 nt, Homo sapiens
  misc_RNA (1)...(19): siRNA sense strand
uuggauaccuuggaaacua

SEQ ID NO: 653508 - RNA, 19 nt, Homo sapiens
  misc_RNA (1)...(19): siRNA sense strand
ggaaaaguauaacaagauc

SEQ ID NO: 653509 - RNA, 19 nt, Homo sapiens
  misc_RNA (1)...(19): siRNA sense strand
ccagagaucaacaaacuca

SEQ ID NO: 653510 - RNA, 19 nt, Homo sapiens
  misc_RNA (1)...(19): siRNA sense strand
gcacaccaaacaugucuuc

SEQ ID NO: 653511 - RNA, 19 nt, Homo sapiens
  misc_RNA (1)...(19): siRNA sense strand
ugucuucuguucuauugaa

SEQ ID NO: 653512 - RNA, 19 nt, Homo sapiens
  misc_RNA (1)...(19): siRNA sense strand
guuacugacuaaagauuca

SEQ ID NO: 653513 - RNA, 19 nt, Homo sapiens
  misc_RNA (1)...(19): siRNA sense strand
ggagcugcuugaagaagau

SEQ ID NO: 653514 - RNA, 19 nt, Homo sapiens
  misc_RNA (1)...(19): siRNA sense strand
ggaaacuaguaagaggaaa

SEQ ID NO: 653515 - RNA, 19 nt, Homo sapiens
  misc_RNA (1)...(19): siRNA sense strand
gaccagcuccauucaagug

SEQ ID NO: 653516 - RNA, 19 nt, Homo sapiens
  misc_RNA (1)...(19): siRNA sense strand
gcauaugacccagagauca

SEQ ID NO: 653517 - RNA, 19 nt, Homo sapiens
  misc_RNA (1)...(19): siRNA sense strand
gauaugcagcugauuugug

SEQ ID NO: 653518 - RNA, 19 nt, Homo sapiens
  misc_RNA (1)...(19): siRNA sense strand
ccugaaggguauuguggaa

SEQ ID NO: 653519 - RNA, 19 nt, Homo sapiens
  misc_RNA (1)...(19): siRNA sense strand
augcuuagaagguaucuua

SEQ ID NO: 653520 - RNA, 19 nt, Homo sapiens
  misc_RNA (1)...(19): siRNA sense strand
ucaaaguaaucaaggaaac

SEQ ID NO: 653521 - RNA, 19 nt, Homo sapiens
  misc_RNA (1)...(19): siRNA sense strand
uggcagaauuugugugcaa

SEQ ID NO: 653522 - RNA, 19 nt, Homo sapiens
  misc_RNA (1)...(19): siRNA sense strand
aaacagccgauuucauaga

SEQ ID NO: 653523 - RNA, 19 nt, Homo sapiens
  misc_RNA (1)...(19): siRNA sense strand
caagauucccuggagcuuu

SEQ ID NO: 653524 - RNA, 19 nt, Homo sapiens
  misc_RNA (1)...(19): siRNA sense strand
aagaggaaaucccuacagu

SEQ ID NO: 653525 - RNA, 19 nt, Homo sapiens
  misc_RNA (1)...(19): siRNA sense strand
gaauuuuacuuugguggua

SEQ ID NO: 653526 - RNA, 19 nt, Homo sapiens
  misc_RNA (1)...(19): siRNA sense strand
gucauugucuuugguccua

SEQ ID NO: 653527 - RNA, 19 nt, Homo sapiens
  misc_RNA (1)...(19): siRNA sense strand
gcccuuuaaugaagaacuu

SEQ ID NO: 653528 - RNA, 19 nt, Homo sapiens
  misc_RNA (1)...(19): siRNA sense strand
caaacucaacaccaucuug

SEQ ID NO: 653529 - RNA, 19 nt, Homo sapiens
  misc_RNA (1)...(19): siRNA sense strand
uuacuuuggugguacugaa

SEQ ID NO: 653530 - RNA, 19 nt, Homo sapiens
  misc_RNA (1)...(19): siRNA sense strand
aacagccgauuucauagaa

SEQ ID NO: 653531 - RNA, 19 nt, Homo sapiens
  misc_RNA (1)...(19): siRNA sense strand
acggauggccuuuaacauu

SEQ ID NO: 653532 - RNA, 19 nt, Homo sapiens
  misc_RNA (1)...(19): siRNA sense strand
agcaacggauggccuuuaa

SEQ ID NO: 653533 - RNA, 19 nt, Homo sapiens
  misc_RNA (1)...(19): siRNA sense strand
cauaugacccagagaucaa

SEQ ID NO: 653534 - RNA, 19 nt, Homo sapiens
  misc_RNA (1)...(19): siRNA sense strand
caauguggcagaauuugug

SEQ ID NO: 653535 - RNA, 19 nt, Homo sapiens
  misc_RNA (1)...(19): siRNA sense strand
ggagugugcggaauuccuu

SEQ ID NO: 653536 - RNA, 19 nt, Homo sapiens
  misc_RNA (1)...(19): siRNA sense strand
ugcaagcccuuuaaugaag

SEQ ID NO: 653537 - RNA, 19 nt, Homo sapiens
  misc_RNA (1)...(19): siRNA sense strand
ugaaggguauuguggaaaa

SEQ ID NO: 653538 - RNA, 19 nt, Homo sapiens
  misc_RNA (1)...(19): siRNA sense strand
gcuuagaagguaucuuaga

SEQ ID NO: 653539 - RNA, 19 nt, Homo sapiens
  misc_RNA (1)...(19): siRNA sense strand
cagccgauuucauagaaca

SEQ ID NO: 653540 - RNA, 19 nt, Homo sapiens
  misc_RNA (1)...(19): siRNA sense strand
cacauucauuagcaagauu

SEQ ID NO: 653541 - RNA, 19 nt, Homo sapiens
  misc_RNA (1)...(19): siRNA sense strand
acuagucgauguggauaaa

SEQ ID NO: 653542 - RNA, 19 nt, Homo sapiens
  misc_RNA (1)...(19): siRNA sense strand
gagaucaacaaacucaaca

SEQ ID NO: 653543 - RNA, 19 nt, Homo sapiens
  misc_RNA (1)...(19): siRNA sense strand
acccagagaucaacaaacu

SEQ ID NO: 653544 - RNA, 19 nt, Homo sapiens
  misc_RNA (1)...(19): siRNA sense strand
caaaaugccaguaugcaaa

SEQ ID NO: 653545 - RNA, 19 nt, Homo sapiens
  misc_RNA (1)...(19): siRNA sense strand
ucgcuuggauaccuuggaa

SEQ ID NO: 653546 - RNA, 19 nt, Homo sapiens
  misc_RNA (1)...(19): siRNA sense strand
aaggcugucuuucaaacuu

SEQ ID NO: 653547 - RNA, 19 nt, Homo sapiens
  misc_RNA (1)...(19): siRNA sense strand
ugaaauucugucugacuuu

SEQ ID NO: 653548 - RNA, 19 nt, Homo sapiens
  misc_RNA (1)...(19): siRNA sense strand
uuugagaaguuacaacaca

SEQ ID NO: 653549 - RNA, 19 nt, Homo sapiens
  misc_RNA (1)...(19): siRNA sense strand
ucagauaaagugaaggaau

SEQ ID NO: 653550 - RNA, 19 nt, Homo sapiens
  misc_RNA (1)...(19): siRNA sense strand
gagcacaccaaacaugucu

SEQ ID NO: 653551 - RNA, 19 nt, Homo sapiens
  misc_RNA (1)...(19): siRNA sense strand
ccauucaaguguccuacau

SEQ ID NO: 653552 - RNA, 19 nt, Homo sapiens
  misc_RNA (1)...(19): siRNA sense strand
cgauguggauaaacuuucu

SEQ ID NO: 653553 - RNA, 19 nt, Homo sapiens
  misc_RNA (1)...(19): siRNA sense strand
caagcccuuuaaugaagaa

SEQ ID NO: 653554 - RNA, 19 nt, Homo sapiens
  misc_RNA (1)...(19): siRNA sense strand
cugcaagcccuuuaaugaa

SEQ ID NO: 653555 - RNA, 19 nt, Homo sapiens
  misc_RNA (1)...(19): siRNA sense strand
cacaugcccuauuuguugu

SEQ ID NO: 653556 - RNA, 19 nt, Homo sapiens
  misc_RNA (1)...(19): siRNA sense strand
ccuauuuguuguagucugu

SEQ ID NO: 653557 - RNA, 19 nt, Homo sapiens
  misc_RNA (1)...(19): siRNA sense strand
gggagcacaccaaacaugu

SEQ ID NO: 653558 - RNA, 19 nt, Homo sapiens
  misc_RNA (1)...(19): siRNA sense strand
uaaacuuucuuugccucaa

SEQ ID NO: 653559 - RNA, 19 nt, Homo sapiens
  misc_RNA (1)...(19): siRNA sense strand
aaacuagucgauguggaua

SEQ ID NO: 653560 - RNA, 19 nt, Homo sapiens
  misc_RNA (1)...(19): siRNA sense strand
gaccaugaaacuugcuguu

SEQ ID NO: 653561 - RNA, 19 nt, Homo sapiens
  misc_RNA (1)...(19): siRNA sense strand
ccuaccauguuccuagaau

SEQ ID NO: 653562 - RNA, 19 nt, Homo sapiens
  misc_RNA (1)...(19): siRNA sense strand
gcaagauucccuggagcuu

SEQ ID NO: 653563 - RNA, 19 nt, Homo sapiens
  misc_RNA (1)...(19): siRNA sense strand
ggauggccuuuaacauugc

SEQ ID NO: 653564 - RNA, 19 nt, Homo sapiens
  misc_RNA (1)...(19): siRNA sense strand
aaacuuucuuugccucaag

SEQ ID NO: 653565 - RNA, 19 nt, Homo sapiens
  misc_RNA (1)...(19): siRNA sense strand
cuaccauguuccuagaaug

SEQ ID NO: 653566 - RNA, 19 nt, Homo sapiens
  misc_RNA (1)...(19): siRNA sense strand
guccuaccauguuccuaga

SEQ ID NO: 653567 - RNA, 19 nt, Homo sapiens
  misc_RNA (1)...(19): siRNA sense strand
caagacacuggcacauuca

SEQ ID NO: 653568 - RNA, 19 nt, Homo sapiens
  misc_RNA (1)...(19): siRNA sense strand
gaggaaaucccuacaguua

SEQ ID NO: 653569 - RNA, 19 nt, Homo sapiens
  misc_RNA (1)...(19): siRNA sense strand
gaucucacaugcccuauuu

SEQ ID NO: 653570 - RNA, 19 nt, Homo sapiens
  misc_RNA (1)...(19): siRNA sense strand
gaacaauguggcagaauuu

SEQ ID NO: 653571 - RNA, 19 nt, Homo sapiens
  misc_RNA (1)...(19): siRNA sense strand
cagauaaagugaaggaauu

SEQ ID NO: 653572 - RNA, 19 nt, Homo sapiens
  misc_RNA (1)...(19): siRNA sense strand
gaaauucugucugacuuug

SEQ ID NO: 653573 - RNA, 19 nt, Homo sapiens
  misc_RNA (1)...(19): siRNA sense strand
ggaaaucccuacaguuacu

SEQ ID NO: 653574 - RNA, 19 nt, Homo sapiens
  misc_RNA (1)...(19): siRNA sense strand
uaaaacagccgauuucaua

SEQ ID NO: 653575 - RNA, 19 nt, Homo sapiens
  misc_RNA (1)...(19): siRNA sense strand
ccaugaaacuugcuguuau

SEQ ID NO: 653576 - RNA, 19 nt, Homo sapiens
  misc_RNA (1)...(19): siRNA sense strand
ugaacaauguggcagaauu

SEQ ID NO: 653577 - RNA, 19 nt, Homo sapiens
  misc_RNA (1)...(19): siRNA sense strand
ucaagacacuggcacauuc

SEQ ID NO: 653578 - RNA, 19 nt, Homo sapiens
  misc_RNA (1)...(19): siRNA sense strand
gacacuggcacauucauua

SEQ ID NO: 653579 - RNA, 19 nt, Homo sapiens
  misc_RNA (1)...(19): siRNA sense strand
ucacaugcccuauuuguug

SEQ ID NO: 653580 - RNA, 19 nt, Homo sapiens
  misc_RNA (1)...(19): siRNA sense strand
caacagaugcaggaguuua

SEQ ID NO: 653581 - RNA, 19 nt, Homo sapiens
  misc_RNA (1)...(19): siRNA sense strand
guuguagucuguuugauga

SEQ ID NO: 653582 - RNA, 19 nt, Homo sapiens
  misc_RNA (1)...(19): siRNA sense strand
gagaccagcuccauucaag

SEQ ID NO: 653583 - RNA, 19 nt, Homo sapiens
  misc_RNA (1)...(19): siRNA sense strand
gaagggagugugcggaauu

SEQ ID NO: 653584 - RNA, 19 nt, Homo sapiens
  misc_RNA (1)...(19): siRNA sense strand
auuaauagccugcagguua

SEQ ID NO: 653585 - RNA, 19 nt, Homo sapiens
  misc_RNA (1)...(19): siRNA sense strand
cggauggccuuuaacauug

SEQ ID NO: 653586 - RNA, 19 nt, Homo sapiens
  misc_RNA (1)...(19): siRNA sense strand
gcaagcccuuuaaugaaga

SEQ ID NO: 653587 - RNA, 19 nt, Homo sapiens
  misc_RNA (1)...(19): siRNA sense strand
uaacauugcugaggcuuuc

SEQ ID NO: 653588 - RNA, 19 nt, Homo sapiens
  misc_RNA (1)...(19): siRNA sense strand
gcacauucauuagcaagau

SEQ ID NO: 653589 - RNA, 19 nt, Homo sapiens
  misc_RNA (1)...(19): siRNA sense strand
caagaucucucccaaaaug

SEQ ID NO: 653590 - RNA, 19 nt, Homo sapiens
  misc_RNA (1)...(19): siRNA sense strand
gcaggaguuuagagagaaa

SEQ ID NO: 653591 - RNA, 19 nt, Homo sapiens
  misc_RNA (1)...(19): siRNA sense strand
caccaaacaugucuucugu

SEQ ID NO: 653592 - RNA, 19 nt, Homo sapiens
  misc_RNA (1)...(19): siRNA sense strand
cuuagaagguaucuuagaa

SEQ ID NO: 653593 - RNA, 19 nt, Homo sapiens
  misc_RNA (1)...(19): siRNA sense strand
caugaaacuugcuguuaug

SEQ ID NO: 653594 - RNA, 19 nt, Homo sapiens
  misc_RNA (1)...(19): siRNA sense strand
gagcaacggauggccuuua

SEQ ID NO: 653595 - RNA, 19 nt, Homo sapiens
  misc_RNA (1)...(19): siRNA sense strand
caacacacacuggaucaaa

SEQ ID NO: 653596 - RNA, 19 nt, Homo sapiens
  misc_RNA (1)...(19): siRNA sense strand
gucagaacccauuguauuu

SEQ ID NO: 653597 - RNA, 19 nt, Homo sapiens
  misc_RNA (1)...(19): siRNA sense strand
ucaacaaacucaacaccau

SEQ ID NO: 653598 - RNA, 19 nt, Homo sapiens
  misc_RNA (1)...(19): siRNA sense strand
uugaugaccuggcaacuug

SEQ ID NO: 653599 - RNA, 19 nt, Homo sapiens
  misc_RNA (1)...(19): siRNA sense strand
caugucuucuguucuauug

SEQ ID NO: 653600 - RNA, 19 nt, Homo sapiens
  misc_RNA (1)...(19): siRNA sense strand
ugucagaacccauuguauu

SEQ ID NO: 653601 - RNA, 19 nt, Homo sapiens
  misc_RNA (1)...(19): siRNA sense strand
gaaacuaguaagaggaaau

SEQ ID NO: 653602 - RNA, 19 nt, Homo sapiens
  misc_RNA (1)...(19): siRNA sense strand
ugacugauaugcagcugau

SEQ ID NO: 653603 - RNA, 19 nt, Homo sapiens
  misc_RNA (1)...(19): siRNA sense strand
ccugcaagcccuuuaauga

SEQ ID NO: 653604 - RNA, 19 nt, Homo sapiens
  misc_RNA (1)...(19): siRNA sense strand
caacggauggccuuuaaca

SEQ ID NO: 653605 - RNA, 19 nt, Homo sapiens
  misc_RNA (1)...(19): siRNA sense strand
gggcagccucucaacauuu

SEQ ID NO: 653606 - RNA, 19 nt, Homo sapiens
  misc_RNA (1)...(19): siRNA sense strand
uuucaaagaugugucagaa

SEQ ID NO: 653607 - RNA, 19 nt, Homo sapiens
  misc_RNA (1)...(19): siRNA sense strand
uuggauaccuuggaaacua

SEQ ID NO: 653608 - RNA, 19 nt, Homo sapiens
  misc_RNA (1)...(19): siRNA sense strand
ggaaaaguauaacaagauc

SEQ ID NO: 653609 - RNA, 19 nt, Homo sapiens
  misc_RNA (1)...(19): siRNA sense strand
ccagagaucaacaaacuca

SEQ ID NO: 653610 - RNA, 19 nt, Homo sapiens
  misc_RNA (1)...(19): siRNA sense strand
gcacaccaaacaugucuuc

SEQ ID NO: 653611 - RNA, 19 nt, Homo sapiens
  misc_RNA (1)...(19): siRNA sense strand
ugucuucuguucuauugaa

SEQ ID NO: 653612 - RNA, 19 nt, Homo sapiens
  misc_RNA (1)...(19): siRNA sense strand
guuacugacuaaagauuca

SEQ ID NO: 653613 - RNA, 19 nt, Homo sapiens
  misc_RNA (1)...(19): siRNA sense strand
ggagcugcuugaagaagau

SEQ ID NO: 653614 - RNA, 19 nt, Homo sapiens
  misc_RNA (1)...(19): siRNA sense strand
ggaaacuaguaagaggaaa

SEQ ID NO: 653615 - RNA, 19 nt, Homo sapiens
  misc_RNA (1)...(19): siRNA sense strand
gaccagcuccauucaagug

SEQ ID NO: 653616 - RNA, 19 nt, Homo sapiens
  misc_RNA (1)...(19): siRNA sense strand
gcauaugacccagagauca

SEQ ID NO: 653617 - RNA, 19 nt, Homo sapiens
  misc_RNA (1)...(19): siRNA sense strand
gauaugcagcugauuugug

SEQ ID NO: 653618 - RNA, 19 nt, Homo sapiens
  misc_RNA (1)...(19): siRNA sense strand
ccugaaggguauuguggaa

SEQ ID NO: 653619 - RNA, 19 nt, Homo sapiens
  misc_RNA (1)...(19): siRNA sense strand
augcuuagaagguaucuua

SEQ ID NO: 653620 - RNA, 19 nt, Homo sapiens
  misc_RNA (1)...(19): siRNA sense strand
ucaaaguaaucaaggaaac

SEQ ID NO: 653621 - RNA, 19 nt, Homo sapiens
  misc_RNA (1)...(19): siRNA sense strand
uggcagaauuugugugcaa

SEQ ID NO: 653622 - RNA, 19 nt, Homo sapiens
  misc_RNA (1)...(19): siRNA sense strand
aaacagccgauuucauaga

SEQ ID NO: 653623 - RNA, 19 nt, Homo sapiens
  misc_RNA (1)...(19): siRNA sense strand
caagauucccuggagcuuu

SEQ ID NO: 653624 - RNA, 19 nt, Homo sapiens
  misc_RNA (1)...(19): siRNA sense strand
aagaggaaaucccuacagu

SEQ ID NO: 653625 - RNA, 19 nt, Homo sapiens
  misc_RNA (1)...(19): siRNA sense strand
gaauuuuacuuugguggua

SEQ ID NO: 653626 - RNA, 19 nt, Homo sapiens
  misc_RNA (1)...(19): siRNA sense strand
gucauugucuuugguccua

SEQ ID NO: 653627 - RNA, 19 nt, Homo sapiens
  misc_RNA (1)...(19): siRNA sense strand
gcccuuuaaugaagaacuu

SEQ ID NO: 653628 - RNA, 19 nt, Homo sapiens
  misc_RNA (1)...(19): siRNA sense strand
caaacucaacaccaucuug

SEQ ID NO: 653629 - RNA, 19 nt, Homo sapiens
  misc_RNA (1)...(19): siRNA sense strand
uuacuuuggugguacugaa

SEQ ID NO: 653630 - RNA, 19 nt, Homo sapiens
  misc_RNA (1)...(19): siRNA sense strand
aacagccgauuucauagaa

SEQ ID NO: 653631 - RNA, 19 nt, Homo sapiens
  misc_RNA (1)...(19): siRNA sense strand
acggauggccuuuaacauu

SEQ ID NO: 653632 - RNA, 19 nt, Homo sapiens
  misc_RNA (1)...(19): siRNA sense strand
agcaacggauggccuuuaa

SEQ ID NO: 653633 - RNA, 19 nt, Homo sapiens
  misc_RNA (1)...(19): siRNA sense strand
cauaugacccagagaucaa

SEQ ID NO: 653634 - RNA, 19 nt, Homo sapiens
  misc_RNA (1)...(19): siRNA sense strand
caauguggcagaauuugug

SEQ ID NO: 653635 - RNA, 19 nt, Homo sapiens
  misc_RNA (1)...(19): siRNA sense strand
ggagugugcggaauuccuu

SEQ ID NO: 653636 - RNA, 19 nt, Homo sapiens
  misc_RNA (1)...(19): siRNA sense strand
ugcaagcccuuuaaugaag

SEQ ID NO: 653637 - RNA, 19 nt, Homo sapiens
  misc_RNA (1)...(19): siRNA sense strand
ugaaggguauuguggaaaa

SEQ ID NO: 653638 - RNA, 19 nt, Homo sapiens
  misc_RNA (1)...(19): siRNA sense strand
gcuuagaagguaucuuaga

SEQ ID NO: 653639 - RNA, 19 nt, Homo sapiens
  misc_RNA (1)...(19): siRNA sense strand
cagccgauuucauagaaca

SEQ ID NO: 653640 - RNA, 19 nt, Homo sapiens
  misc_RNA (1)...(19): siRNA sense strand
cacauucauuagcaagauu

SEQ ID NO: 653641 - RNA, 19 nt, Homo sapiens
  misc_RNA (1)...(19): siRNA sense strand
acuagucgauguggauaaa

SEQ ID NO: 653642 - RNA, 19 nt, Homo sapiens
  misc_RNA (1)...(19): siRNA sense strand
gagaucaacaaacucaaca

SEQ ID NO: 653643 - RNA, 19 nt, Homo sapiens
  misc_RNA (1)...(19): siRNA sense strand
acccagagaucaacaaacu

SEQ ID NO: 653644 - RNA, 19 nt, Homo sapiens
  misc_RNA (1)...(19): siRNA sense strand
caaaaugccaguaugcaaa

SEQ ID NO: 653645 - RNA, 19 nt, Homo sapiens
  misc_RNA (1)...(19): siRNA sense strand
ucgcuuggauaccuuggaa

SEQ ID NO: 653646 - RNA, 19 nt, Homo sapiens
  misc_RNA (1)...(19): siRNA sense strand
aaggcugucuuucaaacuu

SEQ ID NO: 653647 - RNA, 19 nt, Homo sapiens
  misc_RNA (1)...(19): siRNA sense strand
ugaaauucugucugacuuu

SEQ ID NO: 653648 - RNA, 19 nt, Homo sapiens
  misc_RNA (1)...(19): siRNA sense strand
uuugagaaguuacaacaca

SEQ ID NO: 653649 - RNA, 19 nt, Homo sapiens
  misc_RNA (1)...(19): siRNA sense strand
ucagauaaagugaaggaau

SEQ ID NO: 653650 - RNA, 19 nt, Homo sapiens
  misc_RNA (1)...(19): siRNA sense strand
gagcacaccaaacaugucu

SEQ ID NO: 653651 - RNA, 19 nt, Homo sapiens
  misc_RNA (1)...(19): siRNA sense strand
ccauucaaguguccuacau

SEQ ID NO: 653652 - RNA, 19 nt, Homo sapiens
  misc_RNA (1)...(19): siRNA sense strand
cgauguggauaaacuuucu

SEQ ID NO: 653653 - RNA, 19 nt, Homo sapiens
  misc_RNA (1)...(19): siRNA sense strand
caagcccuuuaaugaagaa

SEQ ID NO: 653654 - RNA, 19 nt, Homo sapiens
  misc_RNA (1)...(19): siRNA sense strand
cugcaagcccuuuaaugaa

SEQ ID NO: 653655 - RNA, 19 nt, Homo sapiens
  misc_RNA (1)...(19): siRNA sense strand
cacaugcccuauuuguugu

SEQ ID NO: 653656 - RNA, 19 nt, Homo sapiens
  misc_RNA (1)...(19): siRNA sense strand
ccuauuuguuguagucugu

SEQ ID NO: 653657 - RNA, 19 nt, Homo sapiens
  misc_RNA (1)...(19): siRNA sense strand
gggagcacaccaaacaugu

SEQ ID NO: 653658 - RNA, 19 nt, Homo sapiens
  misc_RNA (1)...(19): siRNA sense strand
uaaacuuucuuugccucaa

SEQ ID NO: 653659 - RNA, 19 nt, Homo sapiens
  misc_RNA (1)...(19): siRNA sense strand
aaacuagucgauguggaua

SEQ ID NO: 653660 - RNA, 19 nt, Homo sapiens
  misc_RNA (1)...(19): siRNA sense strand
gaccaugaaacuugcuguu

SEQ ID NO: 653661 - RNA, 19 nt, Homo sapiens
  misc_RNA (1)...(19): siRNA sense strand
ccuaccauguuccuagaau

SEQ ID NO: 653662 - RNA, 19 nt, Homo sapiens
  misc_RNA (1)...(19): siRNA sense strand
gcaagauucccuggagcuu

SEQ ID NO: 653663 - RNA, 19 nt, Homo sapiens
  misc_RNA (1)...(19): siRNA sense strand
ggauggccuuuaacauugc

SEQ ID NO: 653664 - RNA, 19 nt, Homo sapiens
  misc_RNA (1)...(19): siRNA sense strand
aaacuuucuuugccucaag

SEQ ID NO: 653665 - RNA, 19 nt, Homo sapiens
  misc_RNA (1)...(19): siRNA sense strand
cuaccauguuccuagaaug

SEQ ID NO: 653666 - RNA, 19 nt, Homo sapiens
  misc_RNA (1)...(19): siRNA sense strand
guccuaccauguuccuaga

SEQ ID NO: 653667 - RNA, 19 nt, Homo sapiens
  misc_RNA (1)...(19): siRNA sense strand
caagacacuggcacauuca

SEQ ID NO: 653668 - RNA, 19 nt, Homo sapiens
  misc_RNA (1)...(19): siRNA sense strand
gaggaaaucccuacaguua

SEQ ID NO: 653669 - RNA, 19 nt, Homo sapiens
  misc_RNA (1)...(19): siRNA sense strand
gaucucacaugcccuauuu

SEQ ID NO: 653670 - RNA, 19 nt, Homo sapiens
  misc_RNA (1)...(19): siRNA sense strand
gaacaauguggcagaauuu

SEQ ID NO: 653671 - RNA, 19 nt, Homo sapiens
  misc_RNA (1)...(19): siRNA sense strand
cagauaaagugaaggaauu

SEQ ID NO: 653672 - RNA, 19 nt, Homo sapiens
  misc_RNA (1)...(19): siRNA sense strand
gaaauucugucugacuuug

SEQ ID NO: 653673 - RNA, 19 nt, Homo sapiens
  misc_RNA (1)...(19): siRNA sense strand
ggaaaucccuacaguuacu

SEQ ID NO: 653674 - RNA, 19 nt, Homo sapiens
  misc_RNA (1)...(19): siRNA sense strand
uaaaacagccgauuucaua

SEQ ID NO: 653675 - RNA, 19 nt, Homo sapiens
  misc_RNA (1)...(19): siRNA sense strand
ccaugaaacuugcuguuau

SEQ ID NO: 653676 - RNA, 19 nt, Homo sapiens
  misc_RNA (1)...(19): siRNA sense strand
ugaacaauguggcagaauu

SEQ ID NO: 653677 - RNA, 19 nt, Homo sapiens
  misc_RNA (1)...(19): siRNA sense strand
ucaagacacuggcacauuc

SEQ ID NO: 653678 - RNA, 19 nt, Homo sapiens
  misc_RNA (1)...(19): siRNA sense strand
gacacuggcacauucauua

SEQ ID NO: 653679 - RNA, 19 nt, Homo sapiens
  misc_RNA (1)...(19): siRNA sense strand
ucacaugcccuauuuguug

SEQ ID NO: 653680 - RNA, 19 nt, Homo sapiens
  misc_RNA (1)...(19): siRNA sense strand
caacagaugcaggaguuua

SEQ ID NO: 653681 - RNA, 19 nt, Homo sapiens
  misc_RNA (1)...(19): siRNA sense strand
guuguagucuguuugauga

SEQ ID NO: 653682 - RNA, 19 nt, Homo sapiens
  misc_RNA (1)...(19): siRNA sense strand
gagaccagcuccauucaag

SEQ ID NO: 653683 - RNA, 19 nt, Homo sapiens
  misc_RNA (1)...(19): siRNA sense strand
gaagggagugugcggaauu

SEQ ID NO: 653684 - RNA, 19 nt, Homo sapiens
  misc_RNA (1)...(19): siRNA sense strand
auuaauagccugcagguua

SEQ ID NO: 653685 - RNA, 19 nt, Homo sapiens
  misc_RNA (1)...(19): siRNA sense strand
cggauggccuuuaacauug

SEQ ID NO: 653686 - RNA, 19 nt, Homo sapiens
  misc_RNA (1)...(19): siRNA sense strand
gcaagcccuuuaaugaaga

SEQ ID NO: 653687 - RNA, 19 nt, Homo sapiens
  misc_RNA (1)...(19): siRNA sense strand
uaacauugcugaggcuuuc

SEQ ID NO: 653688 - RNA, 19 nt, Homo sapiens
  misc_RNA (1)...(19): siRNA sense strand
gcacauucauuagcaagau

SEQ ID NO: 653689 - RNA, 19 nt, Homo sapiens
  misc_RNA (1)...(19): siRNA sense strand
caagaucucucccaaaaug

SEQ ID NO: 653690 - RNA, 19 nt, Homo sapiens
  misc_RNA (1)...(19): siRNA sense strand
gcaggaguuuagagagaaa

SEQ ID NO: 653691 - RNA, 19 nt, Homo sapiens
  misc_RNA (1)...(19): siRNA sense strand
caccaaacaugucuucugu

SEQ ID NO: 653692 - RNA, 19 nt, Homo sapiens
  misc_RNA (1)...(19): siRNA sense strand
cuuagaagguaucuuagaa

SEQ ID NO: 653693 - RNA, 19 nt, Homo sapiens
  misc_RNA (1)...(19): siRNA sense strand
caugaaacuugcuguuaug

SEQ ID NO: 653694 - RNA, 19 nt, Homo sapiens
  misc_RNA (1)...(19): siRNA sense strand
gagcaacggauggccuuua

SEQ ID NO: 653695 - RNA, 19 nt, Homo sapiens
  misc_RNA (1)...(19): siRNA sense strand
caacacacacuggaucaaa

SEQ ID NO: 653696 - RNA, 19 nt, Homo sapiens
  misc_RNA (1)...(19): siRNA sense strand
gucagaacccauuguauuu

SEQ ID NO: 653697 - RNA, 19 nt, Homo sapiens
  misc_RNA (1)...(19): siRNA sense strand
ucaacaaacucaacaccau

SEQ ID NO: 653698 - RNA, 19 nt, Homo sapiens
  misc_RNA (1)...(19): siRNA sense strand
uugaugaccuggcaacuug

SEQ ID NO: 653699 - RNA, 19 nt, Homo sapiens
  misc_RNA (1)...(19): siRNA sense strand
caugucuucuguucuauug

SEQ ID NO: 653700 - RNA, 19 nt, Homo sapiens
  misc_RNA (1)...(19): siRNA sense strand
ugucagaacccauuguauu

SEQ ID NO: 653701 - RNA, 19 nt, Homo sapiens
  misc_RNA (1)...(19): siRNA sense strand
gaaacuaguaagaggaaau

SEQ ID NO: 653702 - RNA, 19 nt, Homo sapiens
  misc_RNA (1)...(19): siRNA sense strand
ugacugauaugcagcugau

SEQ ID NO: 653703 - RNA, 19 nt, Homo sapiens
  misc_RNA (1)...(19): siRNA sense strand
ccugcaagcccuuuaauga

SEQ ID NO: 653704 - RNA, 19 nt, Homo sapiens
  misc_RNA (1)...(19): siRNA sense strand
caacggauggccuuuaaca

SEQ ID NO: 653705 - RNA, 19 nt, Homo sapiens
  misc_RNA (1)...(19): siRNA sense strand
gggcagccucucaacauuu

SEQ ID NO: 653706 - RNA, 19 nt, Homo sapiens
  misc_RNA (1)...(19): siRNA sense strand
uuucaaagaugugucagaa

SEQ ID NO: 653707 - RNA, 19 nt, Homo sapiens
  misc_RNA (1)...(19): siRNA sense strand
uuggauaccuuggaaacua

SEQ ID NO: 653708 - RNA, 19 nt, Homo sapiens
  misc_RNA (1)...(19): siRNA sense strand
ggaaaaguauaacaagauc

SEQ ID NO: 653709 - RNA, 19 nt, Homo sapiens
  misc_RNA (1)...(19): siRNA sense strand
ccagagaucaacaaacuca

SEQ ID NO: 653710 - RNA, 19 nt, Homo sapiens
  misc_RNA (1)...(19): siRNA sense strand
gcacaccaaacaugucuuc

SEQ ID NO: 653711 - RNA, 19 nt, Homo sapiens
  misc_RNA (1)...(19): siRNA sense strand
ugucuucuguucuauugaa

SEQ ID NO: 653712 - RNA, 19 nt, Homo sapiens
  misc_RNA (1)...(19): siRNA sense strand
guuacugacuaaagauuca

SEQ ID NO: 653713 - RNA, 19 nt, Homo sapiens
  misc_RNA (1)...(19): siRNA sense strand
ggagcugcuugaagaagau

SEQ ID NO: 653714 - RNA, 19 nt, Homo sapiens
  misc_RNA (1)...(19): siRNA sense strand
ggaaacuaguaagaggaaa

SEQ ID NO: 653715 - RNA, 19 nt, Homo sapiens
  misc_RNA (1)...(19): siRNA sense strand
gaccagcuccauucaagug

SEQ ID NO: 653716 - RNA, 19 nt, Homo sapiens
  misc_RNA (1)...(19): siRNA sense strand
gcauaugacccagagauca

SEQ ID NO: 653717 - RNA, 19 nt, Homo sapiens
  misc_RNA (1)...(19): siRNA sense strand
gauaugcagcugauuugug

SEQ ID NO: 653718 - RNA, 19 nt, Homo sapiens
  misc_RNA (1)...(19): siRNA sense strand
ccugaaggguauuguggaa

SEQ ID NO: 653719 - RNA, 19 nt, Homo sapiens
  misc_RNA (1)...(19): siRNA sense strand
augcuuagaagguaucuua

SEQ ID NO: 653720 - RNA, 19 nt, Homo sapiens
  misc_RNA (1)...(19): siRNA sense strand
ucaaaguaaucaaggaaac

SEQ ID NO: 653721 - RNA, 19 nt, Homo sapiens
  misc_RNA (1)...(19): siRNA sense strand
uggcagaauuugugugcaa

SEQ ID NO: 653722 - RNA, 19 nt, Homo sapiens
  misc_RNA (1)...(19): siRNA sense strand
aaacagccgauuucauaga

SEQ ID NO: 653723 - RNA, 19 nt, Homo sapiens
  misc_RNA (1)...(19): siRNA sense strand
caagauucccuggagcuuu

SEQ ID NO: 653724 - RNA, 19 nt, Homo sapiens
  misc_RNA (1)...(19): siRNA sense strand
aagaggaaaucccuacagu

SEQ ID NO: 653725 - RNA, 19 nt, Homo sapiens
  misc_RNA (1)...(19): siRNA sense strand
gaauuuuacuuugguggua

SEQ ID NO: 653726 - RNA, 19 nt, Homo sapiens
  misc_RNA (1)...(19): siRNA sense strand
gucauugucuuugguccua

SEQ ID NO: 653727 - RNA, 19 nt, Homo sapiens
  misc_RNA (1)...(19): siRNA sense strand
gcccuuuaaugaagaacuu

SEQ ID NO: 653728 - RNA, 19 nt, Homo sapiens
  misc_RNA (1)...(19): siRNA sense strand
caaacucaacaccaucuug

SEQ ID NO: 653729 - RNA, 19 nt, Homo sapiens
  misc_RNA (1)...(19): siRNA sense strand
uuacuuuggugguacugaa

SEQ ID NO: 653730 - RNA, 19 nt, Homo sapiens
  misc_RNA (1)...(19): siRNA sense strand
aacagccgauuucauagaa

SEQ ID NO: 653731 - RNA, 19 nt, Homo sapiens
  misc_RNA (1)...(19): siRNA sense strand
acggauggccuuuaacauu

SEQ ID NO: 653732 - RNA, 19 nt, Homo sapiens
  misc_RNA (1)...(19): siRNA sense strand
agcaacggauggccuuuaa

SEQ ID NO: 653733 - RNA, 19 nt, Homo sapiens
  misc_RNA (1)...(19): siRNA sense strand
cauaugacccagagaucaa

SEQ ID NO: 653734 - RNA, 19 nt, Homo sapiens
  misc_RNA (1)...(19): siRNA sense strand
caauguggcagaauuugug

SEQ ID NO: 653735 - RNA, 19 nt, Homo sapiens
  misc_RNA (1)...(19): siRNA sense strand
ggagugugcggaauuccuu

SEQ ID NO: 653736 - RNA, 19 nt, Homo sapiens
  misc_RNA (1)...(19): siRNA sense strand
ugcaagcccuuuaaugaag

SEQ ID NO: 653737 - RNA, 19 nt, Homo sapiens
  misc_RNA (1)...(19): siRNA sense strand
ugaaggguauuguggaaaa

SEQ ID NO: 653738 - RNA, 19 nt, Homo sapiens
  misc_RNA (1)...(19): siRNA sense strand
gcuuagaagguaucuuaga

SEQ ID NO: 653739 - RNA, 19 nt, Homo sapiens
  misc_RNA (1)...(19): siRNA sense strand
cagccgauuucauagaaca

SEQ ID NO: 653740 - RNA, 19 nt, Homo sapiens
  misc_RNA (1)...(19): siRNA sense strand
cacauucauuagcaagauu

SEQ ID NO: 653741 - RNA, 19 nt, Homo sapiens
  misc_RNA (1)...(19): siRNA sense strand
acuagucgauguggauaaa

SEQ ID NO: 653742 - RNA, 19 nt, Homo sapiens
  misc_RNA (1)...(19): siRNA sense strand
gagaucaacaaacucaaca

SEQ ID NO: 653743 - RNA, 19 nt, Homo sapiens
  misc_RNA (1)...(19): siRNA sense strand
acccagagaucaacaaacu

SEQ ID NO: 653744 - RNA, 19 nt, Homo sapiens
  misc_RNA (1)...(19): siRNA sense strand
caaaaugccaguaugcaaa

SEQ ID NO: 653745 - RNA, 19 nt, Homo sapiens
  misc_RNA (1)...(19): siRNA sense strand
ucgcuuggauaccuuggaa

SEQ ID NO: 653746 - RNA, 19 nt, Homo sapiens
  misc_RNA (1)...(19): siRNA sense strand
aaggcugucuuucaaacuu

SEQ ID NO: 653747 - RNA, 19 nt, Homo sapiens
  misc_RNA (1)...(19): siRNA sense strand
ugaaauucugucugacuuu

SEQ ID NO: 653748 - RNA, 19 nt, Homo sapiens
  misc_RNA (1)...(19): siRNA sense strand
uuugagaaguuacaacaca

SEQ ID NO: 653749 - RNA, 19 nt, Homo sapiens
  misc_RNA (1)...(19): siRNA sense strand
ucagauaaagugaaggaau

SEQ ID NO: 653750 - RNA, 19 nt, Homo sapiens
  misc_RNA (1)...(19): siRNA sense strand
gagcacaccaaacaugucu

SEQ ID NO: 653751 - RNA, 19 nt, Homo sapiens
  misc_RNA (1)...(19): siRNA sense strand
ccauucaaguguccuacau

SEQ ID NO: 653752 - RNA, 19 nt, Homo sapiens
  misc_RNA (1)...(19): siRNA sense strand
cgauguggauaaacuuucu

SEQ ID NO: 653753 - RNA, 19 nt, Homo sapiens
  misc_RNA (1)...(19): siRNA sense strand
caagcccuuuaaugaagaa

SEQ ID NO: 653754 - RNA, 19 nt, Homo sapiens
  misc_RNA (1)...(19): siRNA sense strand
cugcaagcccuuuaaugaa

SEQ ID NO: 653755 - RNA, 19 nt, Homo sapiens
  misc_RNA (1)...(19): siRNA sense strand
cacaugcccuauuuguugu

SEQ ID NO: 653756 - RNA, 19 nt, Homo sapiens
  misc_RNA (1)...(19): siRNA sense strand
ccuauuuguuguagucugu

SEQ ID NO: 653757 - RNA, 19 nt, Homo sapiens
  misc_RNA (1)...(19): siRNA sense strand
gggagcacaccaaacaugu

SEQ ID NO: 653758 - RNA, 19 nt, Homo sapiens
  misc_RNA (1)...(19): siRNA sense strand
uaaacuuucuuugccucaa

SEQ ID NO: 653759 - RNA, 19 nt, Homo sapiens
  misc_RNA (1)...(19): siRNA sense strand
aaacuagucgauguggaua

SEQ ID NO: 653760 - RNA, 19 nt, Homo sapiens
  misc_RNA (1)...(19): siRNA sense strand
gaccaugaaacuugcuguu

SEQ ID NO: 653761 - RNA, 19 nt, Homo sapiens
  misc_RNA (1)...(19): siRNA sense strand
ccuaccauguuccuagaau

SEQ ID NO: 653762 - RNA, 19 nt, Homo sapiens
  misc_RNA (1)...(19): siRNA sense strand
gcaagauucccuggagcuu

SEQ ID NO: 653763 - RNA, 19 nt, Homo sapiens
  misc_RNA (1)...(19): siRNA sense strand
ggauggccuuuaacauugc

SEQ ID NO: 653764 - RNA, 19 nt, Homo sapiens
  misc_RNA (1)...(19): siRNA sense strand
aaacuuucuuugccucaag

SEQ ID NO: 653765 - RNA, 19 nt, Homo sapiens
  misc_RNA (1)...(19): siRNA sense strand
cuaccauguuccuagaaug

SEQ ID NO: 653766 - RNA, 19 nt, Homo sapiens
  misc_RNA (1)...(19): siRNA sense strand
guccuaccauguuccuaga

SEQ ID NO: 653767 - RNA, 19 nt, Homo sapiens
  misc_RNA (1)...(19): siRNA sense strand
caagacacuggcacauuca

SEQ ID NO: 653768 - RNA, 19 nt, Homo sapiens
  misc_RNA (1)...(19): siRNA sense strand
cccugaaggugguccauga

SEQ ID NO: 653769 - RNA, 19 nt, Homo sapiens
  misc_RNA (1)...(19): siRNA sense strand
gcgagaacgaugccgaguu

SEQ ID NO: 653770 - RNA, 19 nt, Homo sapiens
  misc_RNA (1)...(19): siRNA sense strand
gagcacggcgagaagaucu

SEQ ID NO: 653771 - RNA, 19 nt, Homo sapiens
  misc_RNA (1)...(19): siRNA sense strand
gaggagcacggcgagaaga

SEQ ID NO: 653772 - RNA, 19 nt, Homo sapiens
  misc_RNA (1)...(19): siRNA sense strand
cccugaaggugguccauga

SEQ ID NO: 653773 - RNA, 19 nt, Homo sapiens
  misc_RNA (1)...(19): siRNA sense strand
gcgagaacgaugccgaguu

SEQ ID NO: 653774 - RNA, 19 nt, Homo sapiens
  misc_RNA (1)...(19): siRNA sense strand
gagcacggcgagaagaucu

SEQ ID NO: 653775 - RNA, 19 nt, Homo sapiens
  misc_RNA (1)...(19): siRNA sense strand
gaggagcacggcgagaaga

SEQ ID NO: 653776 - RNA, 19 nt, Homo sapiens
  misc_RNA (1)...(19): siRNA sense strand
caaaugaguuccuguguga

SEQ ID NO: 653777 - RNA, 19 nt, Homo sapiens
  misc_RNA (1)...(19): siRNA sense strand
gcuggaaccuauucaguua

SEQ ID NO: 653778 - RNA, 19 nt, Homo sapiens
  misc_RNA (1)...(19): siRNA sense strand
gaacaucacucaggauaag

SEQ ID NO: 653779 - RNA, 19 nt, Homo sapiens
  misc_RNA (1)...(19): siRNA sense strand
uaagguugcuucaguuauu

SEQ ID NO: 653780 - RNA, 19 nt, Homo sapiens
  misc_RNA (1)...(19): siRNA sense strand
cuacugggauguucuugua

SEQ ID NO: 653781 - RNA, 19 nt, Homo sapiens
  misc_RNA (1)...(19): siRNA sense strand
ggauaagguugcuucaguu

SEQ ID NO: 653782 - RNA, 19 nt, Homo sapiens
  misc_RNA (1)...(19): siRNA sense strand
gcacagugagcacaaauga

SEQ ID NO: 653783 - RNA, 19 nt, Homo sapiens
  misc_RNA (1)...(19): siRNA sense strand
gauaagguugcuucaguua

SEQ ID NO: 653784 - RNA, 19 nt, Homo sapiens
  misc_RNA (1)...(19): siRNA sense strand
caaauaacaaucucagcua

SEQ ID NO: 653785 - RNA, 19 nt, Homo sapiens
  misc_RNA (1)...(19): siRNA sense strand
gcauguauuugguuaaugg

SEQ ID NO: 653786 - RNA, 19 nt, Homo sapiens
  misc_RNA (1)...(19): siRNA sense strand
gcaucuacuuauucaauug

SEQ ID NO: 653787 - RNA, 19 nt, Homo sapiens
  misc_RNA (1)...(19): siRNA sense strand
caacacuggugauaacaca

SEQ ID NO: 653788 - RNA, 19 nt, Homo sapiens
  misc_RNA (1)...(19): siRNA sense strand
cucaauagcagcaccauua

SEQ ID NO: 653789 - RNA, 19 nt, Homo sapiens
  misc_RNA (1)...(19): siRNA sense strand
gauaaaggaauucuuacug

SEQ ID NO: 653790 - RNA, 19 nt, Homo sapiens
  misc_RNA (1)...(19): siRNA sense strand
guucagccuuucaauguga

SEQ ID NO: 653791 - RNA, 19 nt, Homo sapiens
  misc_RNA (1)...(19): siRNA sense strand
ccaaggcagcaucuacuua

SEQ ID NO: 653792 - RNA, 19 nt, Homo sapiens
  misc_RNA (1)...(19): siRNA sense strand
aaagaaugauguuguccaa

SEQ ID NO: 653793 - RNA, 19 nt, Homo sapiens
  misc_RNA (1)...(19): siRNA sense strand
ggugauaacacaacauuuc

SEQ ID NO: 653794 - RNA, 19 nt, Homo sapiens
  misc_RNA (1)...(19): siRNA sense strand
gcauuggaacuuaauuuga

SEQ ID NO: 653795 - RNA, 19 nt, Homo sapiens
  misc_RNA (1)...(19): siRNA sense strand
gcagcaccauuaaguaucu

SEQ ID NO: 653796 - RNA, 19 nt, Homo sapiens
  misc_RNA (1)...(19): siRNA sense strand
gaaaaugccacuugccuuu

SEQ ID NO: 653797 - RNA, 19 nt, Homo sapiens
  misc_RNA (1)...(19): siRNA sense strand
cuacaacacuggugauaac

SEQ ID NO: 653798 - RNA, 19 nt, Homo sapiens
  misc_RNA (1)...(19): siRNA sense strand
acaaagagcagacuguuuc

SEQ ID NO: 653799 - RNA, 19 nt, Homo sapiens
  misc_RNA (1)...(19): siRNA sense strand
cuacaacaccuacuccaaa

SEQ ID NO: 653800 - RNA, 19 nt, Homo sapiens
  misc_RNA (1)...(19): siRNA sense strand
caaggcagcaucuacuuau

SEQ ID NO: 653801 - RNA, 19 nt, Homo sapiens
  misc_RNA (1)...(19): siRNA sense strand
guucuuauaugugcaacaa

SEQ ID NO: 653802 - RNA, 19 nt, Homo sapiens
  misc_RNA (1)...(19): siRNA sense strand
ucagaauggucccaaaaua

SEQ ID NO: 653803 - RNA, 19 nt, Homo sapiens
  misc_RNA (1)...(19): siRNA sense strand
ggcagcaucuacuuauuca

SEQ ID NO: 653804 - RNA, 19 nt, Homo sapiens
  misc_RNA (1)...(19): siRNA sense strand
gcaguucggaccuggcuuu

SEQ ID NO: 653805 - RNA, 19 nt, Homo sapiens
  misc_RNA (1)...(19): siRNA sense strand
uuuccuggauugcgaauuu

SEQ ID NO: 653806 - RNA, 19 nt, Homo sapiens
  misc_RNA (1)...(19): siRNA sense strand
cagcauguauuugguuaau

SEQ ID NO: 653807 - RNA, 19 nt, Homo sapiens
  misc_RNA (1)...(19): siRNA sense strand
caacaccuacuccaaagga

SEQ ID NO: 653808 - RNA, 19 nt, Homo sapiens
  misc_RNA (1)...(19): siRNA sense strand
cuacuuagacucaauagca

SEQ ID NO: 653809 - RNA, 19 nt, Homo sapiens
  misc_RNA (1)...(19): siRNA sense strand
aaaugccacuugccuuuau

SEQ ID NO: 653810 - RNA, 19 nt, Homo sapiens
  misc_RNA (1)...(19): siRNA sense strand
ccugggaaguucuuauaug

SEQ ID NO: 653811 - RNA, 19 nt, Homo sapiens
  misc_RNA (1)...(19): siRNA sense strand
aaggaauucuuacuguuga

SEQ ID NO: 653812 - RNA, 19 nt, Homo sapiens
  misc_RNA (1)...(19): siRNA sense strand
aaaggaauucuuacuguug

SEQ ID NO: 653813 - RNA, 19 nt, Homo sapiens
  misc_RNA (1)...(19): siRNA sense strand
gacuuugucuuugcuguga

SEQ ID NO: 653814 - RNA, 19 nt, Homo sapiens
  misc_RNA (1)...(19): siRNA sense strand
ucaauagcagcaccauuaa

SEQ ID NO: 653815 - RNA, 19 nt, Homo sapiens
  misc_RNA (1)...(19): siRNA sense strand
aagguugcuucaguuauua

SEQ ID NO: 653816 - RNA, 19 nt, Homo sapiens
  misc_RNA (1)...(19): siRNA sense strand
ggaaaagaaugauguuguc

SEQ ID NO: 653817 - RNA, 19 nt, Homo sapiens
  misc_RNA (1)...(19): siRNA sense strand
ucuuaugcauuggaacuua

SEQ ID NO: 653818 - RNA, 19 nt, Homo sapiens
  misc_RNA (1)...(19): siRNA sense strand
gcaacaaagagcagacugu

SEQ ID NO: 653819 - RNA, 19 nt, Homo sapiens
  misc_RNA (1)...(19): siRNA sense strand
uaacacaacauuuccugau

SEQ ID NO: 653820 - RNA, 19 nt, Homo sapiens
  misc_RNA (1)...(19): siRNA sense strand
cagcaucuacuuauucaau

SEQ ID NO: 653821 - RNA, 19 nt, Homo sapiens
  misc_RNA (1)...(19): siRNA sense strand
gcacugugacauauaaugg

SEQ ID NO: 653822 - RNA, 19 nt, Homo sapiens
  misc_RNA (1)...(19): siRNA sense strand
ggguucagccuuucaaugu

SEQ ID NO: 653823 - RNA, 19 nt, Homo sapiens
  misc_RNA (1)...(19): siRNA sense strand
caauugacagcgucucauu

SEQ ID NO: 653824 - RNA, 19 nt, Homo sapiens
  misc_RNA (1)...(19): siRNA sense strand
cugggaaguucuuauaugu

SEQ ID NO: 653825 - RNA, 19 nt, Homo sapiens
  misc_RNA (1)...(19): siRNA sense strand
ugaaggaagugaacaucag

SEQ ID NO: 653826 - RNA, 19 nt, Homo sapiens
  misc_RNA (1)...(19): siRNA sense strand
uagcagcaccauuaaguau

SEQ ID NO: 653827 - RNA, 19 nt, Homo sapiens
  misc_RNA (1)...(19): siRNA sense strand
uaauggcaaugauacuugu

SEQ ID NO: 653828 - RNA, 19 nt, Homo sapiens
  misc_RNA (1)...(19): siRNA sense strand
ccauggcacugugacauau

SEQ ID NO: 653829 - RNA, 19 nt, Homo sapiens
  misc_RNA (1)...(19): siRNA sense strand
gaauucuuacuguugauga

SEQ ID NO: 653830 - RNA, 19 nt, Homo sapiens
  misc_RNA (1)...(19): siRNA sense strand
uucagugucuggagcauuu

SEQ ID NO: 653831 - RNA, 19 nt, Homo sapiens
  misc_RNA (1)...(19): siRNA sense strand
gaaguucuuauaugugcaa

SEQ ID NO: 653832 - RNA, 19 nt, Homo sapiens
  misc_RNA (1)...(19): siRNA sense strand
aggauaagguugcuucagu

SEQ ID NO: 653833 - RNA, 19 nt, Homo sapiens
  misc_RNA (1)...(19): siRNA sense strand
aaugaguuccugugugaua

SEQ ID NO: 653834 - RNA, 19 nt, Homo sapiens
  misc_RNA (1)...(19): siRNA sense strand
ugggagcugugcggucuua

SEQ ID NO: 653835 - RNA, 19 nt, Homo sapiens
  misc_RNA (1)...(19): siRNA sense strand
ggaacuuaauuugacagau

SEQ ID NO: 653836 - RNA, 19 nt, Homo sapiens
  misc_RNA (1)...(19): siRNA sense strand
cauuggaacuuaauuugac

SEQ ID NO: 653837 - RNA, 19 nt, Homo sapiens
  misc_RNA (1)...(19): siRNA sense strand
gcugugcggucuuaugcau

SEQ ID NO: 653838 - RNA, 19 nt, Homo sapiens
  misc_RNA (1)...(19): siRNA sense strand
cuuaugcauuggaacuuaa

SEQ ID NO: 653839 - RNA, 19 nt, Homo sapiens
  misc_RNA (1)...(19): siRNA sense strand
ccaucagaauuccauugaa

SEQ ID NO: 653840 - RNA, 19 nt, Homo sapiens
  misc_RNA (1)...(19): siRNA sense strand
gccaucagaauuccauuga

SEQ ID NO: 653841 - RNA, 19 nt, Homo sapiens
  misc_RNA (1)...(19): siRNA sense strand
caaaauagcagugcaguuc

SEQ ID NO: 653842 - RNA, 19 nt, Homo sapiens
  misc_RNA (1)...(19): siRNA sense strand
gauuuuaucugaaggaagu

SEQ ID NO: 653843 - RNA, 19 nt, Homo sapiens
  misc_RNA (1)...(19): siRNA sense strand
uggaaccuauucaguuaau

SEQ ID NO: 653844 - RNA, 19 nt, Homo sapiens
  misc_RNA (1)...(19): siRNA sense strand
uacaacaccuacuccaaag

SEQ ID NO: 653845 - RNA, 19 nt, Homo sapiens
  misc_RNA (1)...(19): siRNA sense strand
ugugcggucuuaugcauug

SEQ ID NO: 653846 - RNA, 19 nt, Homo sapiens
  misc_RNA (1)...(19): siRNA sense strand
aaacuguaaccauuucaga

SEQ ID NO: 653847 - RNA, 19 nt, Homo sapiens
  misc_RNA (1)...(19): siRNA sense strand
cuggagcauuucagauaaa

SEQ ID NO: 653848 - RNA, 19 nt, Homo sapiens
  misc_RNA (1)...(19): siRNA sense strand
ucuuauaugugcaacaaag

SEQ ID NO: 653849 - RNA, 19 nt, Homo sapiens
  misc_RNA (1)...(19): siRNA sense strand
ucucacacugcucuacuua

SEQ ID NO: 653850 - RNA, 19 nt, Homo sapiens
  misc_RNA (1)...(19): siRNA sense strand
ccugugugauaaagacaaa

SEQ ID NO: 653851 - RNA, 19 nt, Homo sapiens
  misc_RNA (1)...(19): siRNA sense strand
acagugagcacaaaugagu

SEQ ID NO: 653852 - RNA, 19 nt, Homo sapiens
  misc_RNA (1)...(19): siRNA sense strand
aacacaacauuuccugaug

SEQ ID NO: 653853 - RNA, 19 nt, Homo sapiens
  misc_RNA (1)...(19): siRNA sense strand
gguucagccuuucaaugug

SEQ ID NO: 653854 - RNA, 19 nt, Homo sapiens
  misc_RNA (1)...(19): siRNA sense strand
gcaaaauggcagaugaauu

SEQ ID NO: 653855 - RNA, 19 nt, Homo sapiens
  misc_RNA (1)...(19): siRNA sense strand
ugaacaucacucaggauaa

SEQ ID NO: 653856 - RNA, 19 nt, Homo sapiens
  misc_RNA (1)...(19): siRNA sense strand
caaagagcagacuguuuca

SEQ ID NO: 653857 - RNA, 19 nt, Homo sapiens
  misc_RNA (1)...(19): siRNA sense strand
auaacaaucucagcuacug

SEQ ID NO: 653858 - RNA, 19 nt, Homo sapiens
  misc_RNA (1)...(19): siRNA sense strand
ugcugaagauaaaggaauu

SEQ ID NO: 653859 - RNA, 19 nt, Homo sapiens
  misc_RNA (1)...(19): siRNA sense strand
guuaauggcuccguuuuca

SEQ ID NO: 653860 - RNA, 19 nt, Homo sapiens
  misc_RNA (1)...(19): siRNA sense strand
aauagcagcaccauuaagu

SEQ ID NO: 653861 - RNA, 19 nt, Homo sapiens
  misc_RNA (1)...(19): siRNA sense strand
ggagcugugcggucuuaug

SEQ ID NO: 653862 - RNA, 19 nt, Homo sapiens
  misc_RNA (1)...(19): siRNA sense strand
gggcugcagcugaacauca

SEQ ID NO: 653863 - RNA, 19 nt, Homo sapiens
  misc_RNA (1)...(19): siRNA sense strand
acugugccaucuccuacua

SEQ ID NO: 653864 - RNA, 19 nt, Homo sapiens
  misc_RNA (1)...(19): siRNA sense strand
acugugacauauaauggaa

SEQ ID NO: 653865 - RNA, 19 nt, Homo sapiens
  misc_RNA (1)...(19): siRNA sense strand
aaggcagcaucuacuuauu

SEQ ID NO: 653866 - RNA, 19 nt, Homo sapiens
  misc_RNA (1)...(19): siRNA sense strand
gagcugugcggucuuaugc

SEQ ID NO: 653867 - RNA, 19 nt, Homo sapiens
  misc_RNA (1)...(19): siRNA sense strand
ggaauucuuacuguugaug

SEQ ID NO: 653868 - RNA, 19 nt, Homo sapiens
  misc_RNA (1)...(19): siRNA sense strand
ugaucagaauggucccaaa

SEQ ID NO: 653869 - RNA, 19 nt, Homo sapiens
  misc_RNA (1)...(19): siRNA sense strand
gcggucuuaugcauuggaa

SEQ ID NO: 653870 - RNA, 19 nt, Homo sapiens
  misc_RNA (1)...(19): siRNA sense strand
caucagcauguauuugguu

SEQ ID NO: 653871 - RNA, 19 nt, Homo sapiens
  misc_RNA (1)...(19): siRNA sense strand
uccugaugcugaagauaaa

SEQ ID NO: 653872 - RNA, 19 nt, Homo sapiens
  misc_RNA (1)...(19): siRNA sense strand
gaucagaauggucccaaaa

SEQ ID NO: 653873 - RNA, 19 nt, Homo sapiens
  misc_RNA (1)...(19): siRNA sense strand
cagaagcuggaaccuauuc

SEQ ID NO: 653874 - RNA, 19 nt, Homo sapiens
  misc_RNA (1)...(19): siRNA sense strand
aacauuuccugaugcugaa

SEQ ID NO: 653875 - RNA, 19 nt, Homo sapiens
  misc_RNA (1)...(19): siRNA sense strand
cgcuaugaaacuacaaaua

SEQ ID NO: 653876 - RNA, 19 nt, Homo sapiens
  misc_RNA (1)...(19): siRNA sense strand
caaaugaguuccuguguga

SEQ ID NO: 653877 - RNA, 19 nt, Homo sapiens
  misc_RNA (1)...(19): siRNA sense strand
gcuggaaccuauucaguua

SEQ ID NO: 653878 - RNA, 19 nt, Homo sapiens
  misc_RNA (1)...(19): siRNA sense strand
gaacaucacucaggauaag

SEQ ID NO: 653879 - RNA, 19 nt, Homo sapiens
  misc_RNA (1)...(19): siRNA sense strand
uaagguugcuucaguuauu

SEQ ID NO: 653880 - RNA, 19 nt, Homo sapiens
  misc_RNA (1)...(19): siRNA sense strand
cuacugggauguucuugua

SEQ ID NO: 653881 - RNA, 19 nt, Homo sapiens
  misc_RNA (1)...(19): siRNA sense strand
ggauaagguugcuucaguu

SEQ ID NO: 653882 - RNA, 19 nt, Homo sapiens
  misc_RNA (1)...(19): siRNA sense strand
gcacagugagcacaaauga

SEQ ID NO: 653883 - RNA, 19 nt, Homo sapiens
  misc_RNA (1)...(19): siRNA sense strand
gauaagguugcuucaguua

SEQ ID NO: 653884 - RNA, 19 nt, Homo sapiens
  misc_RNA (1)...(19): siRNA sense strand
caaauaacaaucucagcua

SEQ ID NO: 653885 - RNA, 19 nt, Homo sapiens
  misc_RNA (1)...(19): siRNA sense strand
gcauguauuugguuaaugg

SEQ ID NO: 653886 - RNA, 19 nt, Homo sapiens
  misc_RNA (1)...(19): siRNA sense strand
gcaucuacuuauucaauug

SEQ ID NO: 653887 - RNA, 19 nt, Homo sapiens
  misc_RNA (1)...(19): siRNA sense strand
caacacuggugauaacaca

SEQ ID NO: 653888 - RNA, 19 nt, Homo sapiens
  misc_RNA (1)...(19): siRNA sense strand
cucaauagcagcaccauua

SEQ ID NO: 653889 - RNA, 19 nt, Homo sapiens
  misc_RNA (1)...(19): siRNA sense strand
gauaaaggaauucuuacug

SEQ ID NO: 653890 - RNA, 19 nt, Homo sapiens
  misc_RNA (1)...(19): siRNA sense strand
guucagccuuucaauguga

SEQ ID NO: 653891 - RNA, 19 nt, Homo sapiens
  misc_RNA (1)...(19): siRNA sense strand
ccaaggcagcaucuacuua

SEQ ID NO: 653892 - RNA, 19 nt, Homo sapiens
  misc_RNA (1)...(19): siRNA sense strand
aaagaaugauguuguccaa

SEQ ID NO: 653893 - RNA, 19 nt, Homo sapiens
  misc_RNA (1)...(19): siRNA sense strand
ggugauaacacaacauuuc

SEQ ID NO: 653894 - RNA, 19 nt, Homo sapiens
  misc_RNA (1)...(19): siRNA sense strand
gcauuggaacuuaauuuga

SEQ ID NO: 653895 - RNA, 19 nt, Homo sapiens
  misc_RNA (1)...(19): siRNA sense strand
gcagcaccauuaaguaucu

SEQ ID NO: 653896 - RNA, 19 nt, Homo sapiens
  misc_RNA (1)...(19): siRNA sense strand
gaaaaugccacuugccuuu

SEQ ID NO: 653897 - RNA, 19 nt, Homo sapiens
  misc_RNA (1)...(19): siRNA sense strand
cuacaacacuggugauaac

SEQ ID NO: 653898 - RNA, 19 nt, Homo sapiens
  misc_RNA (1)...(19): siRNA sense strand
acaaagagcagacuguuuc

SEQ ID NO: 653899 - RNA, 19 nt, Homo sapiens
  misc_RNA (1)...(19): siRNA sense strand
cuacaacaccuacuccaaa

SEQ ID NO: 653900 - RNA, 19 nt, Homo sapiens
  misc_RNA (1)...(19): siRNA sense strand
caaggcagcaucuacuuau

SEQ ID NO: 653901 - RNA, 19 nt, Homo sapiens
  misc_RNA (1)...(19): siRNA sense strand
guucuuauaugugcaacaa

SEQ ID NO: 653902 - RNA, 19 nt, Homo sapiens
  misc_RNA (1)...(19): siRNA sense strand
ucagaauggucccaaaaua

SEQ ID NO: 653903 - RNA, 19 nt, Homo sapiens
  misc_RNA (1)...(19): siRNA sense strand
caaggaaaguauucuacag

SEQ ID NO: 653904 - RNA, 19 nt, Homo sapiens
  misc_RNA (1)...(19): siRNA sense strand
ggcagcaucuacuuauuca

SEQ ID NO: 653905 - RNA, 19 nt, Homo sapiens
  misc_RNA (1)...(19): siRNA sense strand
gcaguucggaccuggcuuu

SEQ ID NO: 653906 - RNA, 19 nt, Homo sapiens
  misc_RNA (1)...(19): siRNA sense strand
uuuccuggauugcgaauuu

SEQ ID NO: 653907 - RNA, 19 nt, Homo sapiens
  misc_RNA (1)...(19): siRNA sense strand
cagcauguauuugguuaau

SEQ ID NO: 653908 - RNA, 19 nt, Homo sapiens
  misc_RNA (1)...(19): siRNA sense strand
caacaccuacuccaaagga

SEQ ID NO: 653909 - RNA, 19 nt, Homo sapiens
  misc_RNA (1)...(19): siRNA sense strand
cuacuuagacucaauagca

SEQ ID NO: 653910 - RNA, 19 nt, Homo sapiens
  misc_RNA (1)...(19): siRNA sense strand
aaggaauucuuacuguuga

SEQ ID NO: 653911 - RNA, 19 nt, Homo sapiens
  misc_RNA (1)...(19): siRNA sense strand
ccugggaaguucuuauaug

SEQ ID NO: 653912 - RNA, 19 nt, Homo sapiens
  misc_RNA (1)...(19): siRNA sense strand
aaaugccacuugccuuuau

SEQ ID NO: 653913 - RNA, 19 nt, Homo sapiens
  misc_RNA (1)...(19): siRNA sense strand
aaaggaauucuuacuguug

SEQ ID NO: 653914 - RNA, 19 nt, Homo sapiens
  misc_RNA (1)...(19): siRNA sense strand
gacuuugucuuugcuguga

SEQ ID NO: 653915 - RNA, 19 nt, Homo sapiens
  misc_RNA (1)...(19): siRNA sense strand
ucaauagcagcaccauuaa

SEQ ID NO: 653916 - RNA, 19 nt, Homo sapiens
  misc_RNA (1)...(19): siRNA sense strand
aagguugcuucaguuauua

SEQ ID NO: 653917 - RNA, 19 nt, Homo sapiens
  misc_RNA (1)...(19): siRNA sense strand
ggaaaagaaugauguuguc

SEQ ID NO: 653918 - RNA, 19 nt, Homo sapiens
  misc_RNA (1)...(19): siRNA sense strand
ucuuaugcauuggaacuua

SEQ ID NO: 653919 - RNA, 19 nt, Homo sapiens
  misc_RNA (1)...(19): siRNA sense strand
gcaacaaagagcagacugu

SEQ ID NO: 653920 - RNA, 19 nt, Homo sapiens
  misc_RNA (1)...(19): siRNA sense strand
uaacacaacauuuccugau

SEQ ID NO: 653921 - RNA, 19 nt, Homo sapiens
  misc_RNA (1)...(19): siRNA sense strand
cagcaucuacuuauucaau

SEQ ID NO: 653922 - RNA, 19 nt, Homo sapiens
  misc_RNA (1)...(19): siRNA sense strand
gcacugugacauauaaugg

SEQ ID NO: 653923 - RNA, 19 nt, Homo sapiens
  misc_RNA (1)...(19): siRNA sense strand
ggguucagccuuucaaugu

SEQ ID NO: 653924 - RNA, 19 nt, Homo sapiens
  misc_RNA (1)...(19): siRNA sense strand
caauugacagcgucucauu

SEQ ID NO: 653925 - RNA, 19 nt, Homo sapiens
  misc_RNA (1)...(19): siRNA sense strand
cugggaaguucuuauaugu

SEQ ID NO: 653926 - RNA, 19 nt, Homo sapiens
  misc_RNA (1)...(19): siRNA sense strand
ugaaggaagugaacaucag

SEQ ID NO: 653927 - RNA, 19 nt, Homo sapiens
  misc_RNA (1)...(19): siRNA sense strand
uagcagcaccauuaaguau

SEQ ID NO: 653928 - RNA, 19 nt, Homo sapiens
  misc_RNA (1)...(19): siRNA sense strand
ccauggcacugugacauau

SEQ ID NO: 653929 - RNA, 19 nt, Homo sapiens
  misc_RNA (1)...(19): siRNA sense strand
uaauggcaaugauacuugu

SEQ ID NO: 653930 - RNA, 19 nt, Homo sapiens
  misc_RNA (1)...(19): siRNA sense strand
gaauucuuacuguugauga

SEQ ID NO: 653931 - RNA, 19 nt, Homo sapiens
  misc_RNA (1)...(19): siRNA sense strand
uucagugucuggagcauuu

SEQ ID NO: 653932 - RNA, 19 nt, Homo sapiens
  misc_RNA (1)...(19): siRNA sense strand
gaaguucuuauaugugcaa

SEQ ID NO: 653933 - RNA, 19 nt, Homo sapiens
  misc_RNA (1)...(19): siRNA sense strand
aggauaagguugcuucagu

SEQ ID NO: 653934 - RNA, 19 nt, Homo sapiens
  misc_RNA (1)...(19): siRNA sense strand
aaugaguuccugugugaua

SEQ ID NO: 653935 - RNA, 19 nt, Homo sapiens
  misc_RNA (1)...(19): siRNA sense strand
ugggagcugugcggucuua

SEQ ID NO: 653936 - RNA, 19 nt, Homo sapiens
  misc_RNA (1)...(19): siRNA sense strand
ggaacuuaauuugacagau

SEQ ID NO: 653937 - RNA, 19 nt, Homo sapiens
  misc_RNA (1)...(19): siRNA sense strand
acacaaggaaaguauucua

SEQ ID NO: 653938 - RNA, 19 nt, Homo sapiens
  misc_RNA (1)...(19): siRNA sense strand
cauuggaacuuaauuugac

SEQ ID NO: 653939 - RNA, 19 nt, Homo sapiens
  misc_RNA (1)...(19): siRNA sense strand
gcugugcggucuuaugcau

SEQ ID NO: 653940 - RNA, 19 nt, Homo sapiens
  misc_RNA (1)...(19): siRNA sense strand
cuuaugcauuggaacuuaa

SEQ ID NO: 653941 - RNA, 19 nt, Homo sapiens
  misc_RNA (1)...(19): siRNA sense strand
ccaucagaauuccauugaa

SEQ ID NO: 653942 - RNA, 19 nt, Homo sapiens
  misc_RNA (1)...(19): siRNA sense strand
gccaucagaauuccauuga

SEQ ID NO: 653943 - RNA, 19 nt, Homo sapiens
  misc_RNA (1)...(19): siRNA sense strand
caaaauagcagugcaguuc

SEQ ID NO: 653944 - RNA, 19 nt, Homo sapiens
  misc_RNA (1)...(19): siRNA sense strand
gauuuuaucugaaggaagu

SEQ ID NO: 653945 - RNA, 19 nt, Homo sapiens
  misc_RNA (1)...(19): siRNA sense strand
uggaaccuauucaguuaau

SEQ ID NO: 653946 - RNA, 19 nt, Homo sapiens
  misc_RNA (1)...(19): siRNA sense strand
ugacacaaggaaaguauuc

SEQ ID NO: 653947 - RNA, 19 nt, Homo sapiens
  misc_RNA (1)...(19): siRNA sense strand
uacaacaccuacuccaaag

SEQ ID NO: 653948 - RNA, 19 nt, Homo sapiens
  misc_RNA (1)...(19): siRNA sense strand
ugugcggucuuaugcauug

SEQ ID NO: 653949 - RNA, 19 nt, Homo sapiens
  misc_RNA (1)...(19): siRNA sense strand
aaacuguaaccauuucaga

SEQ ID NO: 653950 - RNA, 19 nt, Homo sapiens
  misc_RNA (1)...(19): siRNA sense strand
cuggagcauuucagauaaa

SEQ ID NO: 653951 - RNA, 19 nt, Homo sapiens
  misc_RNA (1)...(19): siRNA sense strand
ucuuauaugugcaacaaag

SEQ ID NO: 653952 - RNA, 19 nt, Homo sapiens
  misc_RNA (1)...(19): siRNA sense strand
ucucacacugcucuacuua

SEQ ID NO: 653953 - RNA, 19 nt, Homo sapiens
  misc_RNA (1)...(19): siRNA sense strand
ccugugugauaaagacaaa

SEQ ID NO: 653954 - RNA, 19 nt, Homo sapiens
  misc_RNA (1)...(19): siRNA sense strand
acagugagcacaaaugagu

SEQ ID NO: 653955 - RNA, 19 nt, Homo sapiens
  misc_RNA (1)...(19): siRNA sense strand
aacacaacauuuccugaug

SEQ ID NO: 653956 - RNA, 19 nt, Homo sapiens
  misc_RNA (1)...(19): siRNA sense strand
gguucagccuuucaaugug

SEQ ID NO: 653957 - RNA, 19 nt, Homo sapiens
  misc_RNA (1)...(19): siRNA sense strand
gcaaaauggcagaugaauu

SEQ ID NO: 653958 - RNA, 19 nt, Homo sapiens
  misc_RNA (1)...(19): siRNA sense strand
ugaacaucacucaggauaa

SEQ ID NO: 653959 - RNA, 19 nt, Homo sapiens
  misc_RNA (1)...(19): siRNA sense strand
caaagagcagacuguuuca

SEQ ID NO: 653960 - RNA, 19 nt, Homo sapiens
  misc_RNA (1)...(19): siRNA sense strand
auaacaaucucagcuacug

SEQ ID NO: 653961 - RNA, 19 nt, Homo sapiens
  misc_RNA (1)...(19): siRNA sense strand
ugcugaagauaaaggaauu

SEQ ID NO: 653962 - RNA, 19 nt, Homo sapiens
  misc_RNA (1)...(19): siRNA sense strand
guuaauggcuccguuuuca

SEQ ID NO: 653963 - RNA, 19 nt, Homo sapiens
  misc_RNA (1)...(19): siRNA sense strand
aauagcagcaccauuaagu

SEQ ID NO: 653964 - RNA, 19 nt, Homo sapiens
  misc_RNA (1)...(19): siRNA sense strand
ggagcugugcggucuuaug

SEQ ID NO: 653965 - RNA, 19 nt, Homo sapiens
  misc_RNA (1)...(19): siRNA sense strand
gggcugcagcugaacauca

SEQ ID NO: 653966 - RNA, 19 nt, Homo sapiens
  misc_RNA (1)...(19): siRNA sense strand
acugugccaucuccuacua

SEQ ID NO: 653967 - RNA, 19 nt, Homo sapiens
  misc_RNA (1)...(19): siRNA sense strand
acugugacauauaauggaa

SEQ ID NO: 653968 - RNA, 19 nt, Homo sapiens
  misc_RNA (1)...(19): siRNA sense strand
aaggcagcaucuacuuauu

SEQ ID NO: 653969 - RNA, 19 nt, Homo sapiens
  misc_RNA (1)...(19): siRNA sense strand
gagcugugcggucuuaugc

SEQ ID NO: 653970 - RNA, 19 nt, Homo sapiens
  misc_RNA (1)...(19): siRNA sense strand
ggaauucuuacuguugaug

SEQ ID NO: 653971 - RNA, 19 nt, Homo sapiens
  misc_RNA (1)...(19): siRNA sense strand
ugaucagaauggucccaaa

SEQ ID NO: 653972 - RNA, 19 nt, Homo sapiens
  misc_RNA (1)...(19): siRNA sense strand
gcggucuuaugcauuggaa

SEQ ID NO: 653973 - RNA, 19 nt, Homo sapiens
  misc_RNA (1)...(19): siRNA sense strand
caucagcauguauuugguu

SEQ ID NO: 653974 - RNA, 19 nt, Homo sapiens
  misc_RNA (1)...(19): siRNA sense strand
gaucagaauggucccaaaa

SEQ ID NO: 653975 - RNA, 19 nt, Homo sapiens
  misc_RNA (1)...(19): siRNA sense strand
cagaagcuggaaccuauuc

SEQ ID NO: 653976 - RNA, 19 nt, Homo sapiens
  misc_RNA (1)...(19): siRNA sense strand
ccaaugaugaucugaauua

SEQ ID NO: 653977 - RNA, 19 nt, Homo sapiens
  misc_RNA (1)...(19): siRNA sense strand
gcagaauuaugaaagaaga

SEQ ID NO: 653978 - RNA, 19 nt, Homo sapiens
  misc_RNA (1)...(19): siRNA sense strand
gcaguucuuuggauuaaug

SEQ ID NO: 653979 - RNA, 19 nt, Homo sapiens
  misc_RNA (1)...(19): siRNA sense strand
gaaauaggagccaaugaug

SEQ ID NO: 653980 - RNA, 19 nt, Homo sapiens
  misc_RNA (1)...(19): siRNA sense strand
cagcaguucuuuggauuaa

SEQ ID NO: 653981 - RNA, 19 nt, Homo sapiens
  misc_RNA (1)...(19): siRNA sense strand
gcuguuugcagaagaaaua

SEQ ID NO: 653982 - RNA, 19 nt, Homo sapiens
  misc_RNA (1)...(19): siRNA sense strand
gaagaaauaggagccaaug

SEQ ID NO: 653983 - RNA, 19 nt, Homo sapiens
  misc_RNA (1)...(19): siRNA sense strand
ggccagaucucucacaaaa

SEQ ID NO: 653984 - RNA, 19 nt, Homo sapiens
  misc_RNA (1)...(19): siRNA sense strand
gcaaugcagaauuaugaaa

SEQ ID NO: 653985 - RNA, 19 nt, Homo sapiens
  misc_RNA (1)...(19): siRNA sense strand
gacccaagccucagcaguu

SEQ ID NO: 653986 - RNA, 19 nt, Homo sapiens
  misc_RNA (1)...(19): siRNA sense strand
agaaauaggagccaaugau

SEQ ID NO: 653987 - RNA, 19 nt, Homo sapiens
  misc_RNA (1)...(19): siRNA sense strand
augaugaucugaauuacug

SEQ ID NO: 653988 - RNA, 19 nt, Homo sapiens
  misc_RNA (1)...(19): siRNA sense strand
aaauaggagccaaugauga

SEQ ID NO: 653989 - RNA, 19 nt, Homo sapiens
  misc_RNA (1)...(19): siRNA sense strand
ccucagcaguucuuuggau

SEQ ID NO: 653990 - RNA, 19 nt, Homo sapiens
  misc_RNA (1)...(19): siRNA sense strand
gaacugccggagcccuuug

SEQ ID NO: 653991 - RNA, 19 nt, Homo sapiens
  misc_RNA (1)...(19): siRNA sense strand
ucagcaguucuuuggauua

SEQ ID NO: 653992 - RNA, 19 nt, Homo sapiens
  misc_RNA (1)...(19): siRNA sense strand
ucagcuguuugcagaagaa

SEQ ID NO: 653993 - RNA, 19 nt, Homo sapiens
  misc_RNA (1)...(19): siRNA sense strand
ugucuccacucagcuguuu

SEQ ID NO: 653994 - RNA, 19 nt, Homo sapiens
  misc_RNA (1)...(19): siRNA sense strand
gagccaaugaugaucugaa

SEQ ID NO: 653995 - RNA, 19 nt, Homo sapiens
  misc_RNA (1)...(19): siRNA sense strand
gacauggccagaucucuca

SEQ ID NO: 653996 - RNA, 19 nt, Homo sapiens
  misc_RNA (1)...(19): siRNA sense strand
aauaggagccaaugaugau

SEQ ID NO: 653997 - RNA, 19 nt, Homo sapiens
  misc_RNA (1)...(19): siRNA sense strand
ggaacugccggagcccuuu

SEQ ID NO: 653998 - RNA, 19 nt, Homo sapiens
  misc_RNA (1)...(19): siRNA sense strand
guacgacagcgaccagauc

SEQ ID NO: 653999 - RNA, 19 nt, Homo sapiens
  misc_RNA (1)...(19): siRNA sense strand
caaugaugaucugaauuac

SEQ ID NO: 654000 - RNA, 19 nt, Homo sapiens
  misc_RNA (1)...(19): siRNA sense strand
caaugcagaauuaugaaag

SEQ ID NO: 654001 - RNA, 19 nt, Homo sapiens
  misc_RNA (1)...(19): siRNA sense strand
cgacagcgaccagaucaag

SEQ ID NO: 654002 - RNA, 19 nt, Homo sapiens
  misc_RNA (1)...(19): siRNA sense strand
agccaaugaugaucugaau

SEQ ID NO: 654003 - RNA, 19 nt, Homo sapiens
  misc_RNA (1)...(19): siRNA sense strand
cucagcaguucuuuggauu

SEQ ID NO: 654004 - RNA, 19 nt, Homo sapiens
  misc_RNA (1)...(19): siRNA sense strand
ccaaugaugaucugaauua

SEQ ID NO: 654005 - RNA, 19 nt, Homo sapiens
  misc_RNA (1)...(19): siRNA sense strand
gcagaauuaugaaagaaga

SEQ ID NO: 654006 - RNA, 19 nt, Homo sapiens
  misc_RNA (1)...(19): siRNA sense strand
gcaguucuuuggauuaaug

SEQ ID NO: 654007 - RNA, 19 nt, Homo sapiens
  misc_RNA (1)...(19): siRNA sense strand
gaaauaggagccaaugaug

SEQ ID NO: 654008 - RNA, 19 nt, Homo sapiens
  misc_RNA (1)...(19): siRNA sense strand
cagcaguucuuuggauuaa

SEQ ID NO: 654009 - RNA, 19 nt, Homo sapiens
  misc_RNA (1)...(19): siRNA sense strand
gcuguuugcagaagaaaua

SEQ ID NO: 654010 - RNA, 19 nt, Homo sapiens
  misc_RNA (1)...(19): siRNA sense strand
gaagaaauaggagccaaug

SEQ ID NO: 654011 - RNA, 19 nt, Homo sapiens
  misc_RNA (1)...(19): siRNA sense strand
ggccagaucucucacaaaa

SEQ ID NO: 654012 - RNA, 19 nt, Homo sapiens
  misc_RNA (1)...(19): siRNA sense strand
gcaaugcagaauuaugaaa

SEQ ID NO: 654013 - RNA, 19 nt, Homo sapiens
  misc_RNA (1)...(19): siRNA sense strand
gacccaagccucagcaguu

SEQ ID NO: 654014 - RNA, 19 nt, Homo sapiens
  misc_RNA (1)...(19): siRNA sense strand
agaaauaggagccaaugau

SEQ ID NO: 654015 - RNA, 19 nt, Homo sapiens
  misc_RNA (1)...(19): siRNA sense strand
augaugaucugaauuacug

SEQ ID NO: 654016 - RNA, 19 nt, Homo sapiens
  misc_RNA (1)...(19): siRNA sense strand
aaauaggagccaaugauga

SEQ ID NO: 654017 - RNA, 19 nt, Homo sapiens
  misc_RNA (1)...(19): siRNA sense strand
ccucagcaguucuuuggau

SEQ ID NO: 654018 - RNA, 19 nt, Homo sapiens
  misc_RNA (1)...(19): siRNA sense strand
gaacugccggagcccuuug

SEQ ID NO: 654019 - RNA, 19 nt, Homo sapiens
  misc_RNA (1)...(19): siRNA sense strand
ucagcaguucuuuggauua

SEQ ID NO: 654020 - RNA, 19 nt, Homo sapiens
  misc_RNA (1)...(19): siRNA sense strand
ucagcuguuugcagaagaa

SEQ ID NO: 654021 - RNA, 19 nt, Homo sapiens
  misc_RNA (1)...(19): siRNA sense strand
ugucuccacucagcuguuu

SEQ ID NO: 654022 - RNA, 19 nt, Homo sapiens
  misc_RNA (1)...(19): siRNA sense strand
gagccaaugaugaucugaa

SEQ ID NO: 654023 - RNA, 19 nt, Homo sapiens
  misc_RNA (1)...(19): siRNA sense strand
gacauggccagaucucuca

SEQ ID NO: 654024 - RNA, 19 nt, Homo sapiens
  misc_RNA (1)...(19): siRNA sense strand
aauaggagccaaugaugau

SEQ ID NO: 654025 - RNA, 19 nt, Homo sapiens
  misc_RNA (1)...(19): siRNA sense strand
ggaacugccggagcccuuu

SEQ ID NO: 654026 - RNA, 19 nt, Homo sapiens
  misc_RNA (1)...(19): siRNA sense strand
guacgacagcgaccagauc

SEQ ID NO: 654027 - RNA, 19 nt, Homo sapiens
  misc_RNA (1)...(19): siRNA sense strand
caaugaugaucugaauuac

SEQ ID NO: 654028 - RNA, 19 nt, Homo sapiens
  misc_RNA (1)...(19): siRNA sense strand
caaugcagaauuaugaaag

SEQ ID NO: 654029 - RNA, 19 nt, Homo sapiens
  misc_RNA (1)...(19): siRNA sense strand
cgacagcgaccagaucaag

SEQ ID NO: 654030 - RNA, 19 nt, Homo sapiens
  misc_RNA (1)...(19): siRNA sense strand
agccaaugaugaucugaau

SEQ ID NO: 654031 - RNA, 19 nt, Homo sapiens
  misc_RNA (1)...(19): siRNA sense strand
cucagcaguucuuuggauu

SEQ ID NO: 654032 - RNA, 19 nt, Homo sapiens
  misc_RNA (1)...(19): siRNA sense strand
ccaaugaugaucugaauua

SEQ ID NO: 654033 - RNA, 19 nt, Homo sapiens
  misc_RNA (1)...(19): siRNA sense strand
gcagaauuaugaaagaaga

SEQ ID NO: 654034 - RNA, 19 nt, Homo sapiens
  misc_RNA (1)...(19): siRNA sense strand
gcaguucuuuggauuaaug

SEQ ID NO: 654035 - RNA, 19 nt, Homo sapiens
  misc_RNA (1)...(19): siRNA sense strand
gaaauaggagccaaugaug

SEQ ID NO: 654036 - RNA, 19 nt, Homo sapiens
  misc_RNA (1)...(19): siRNA sense strand
cagcaguucuuuggauuaa

SEQ ID NO: 654037 - RNA, 19 nt, Homo sapiens
  misc_RNA (1)...(19): siRNA sense strand
gcuguuugcagaagaaaua

SEQ ID NO: 654038 - RNA, 19 nt, Homo sapiens
  misc_RNA (1)...(19): siRNA sense strand
gaagaaauaggagccaaug

SEQ ID NO: 654039 - RNA, 19 nt, Homo sapiens
  misc_RNA (1)...(19): siRNA sense strand
ggccagaucucucacaaaa

SEQ ID NO: 654040 - RNA, 19 nt, Homo sapiens
  misc_RNA (1)...(19): siRNA sense strand
gcaaugcagaauuaugaaa

SEQ ID NO: 654041 - RNA, 19 nt, Homo sapiens
  misc_RNA (1)...(19): siRNA sense strand
gacccaagccucagcaguu

SEQ ID NO: 654042 - RNA, 19 nt, Homo sapiens
  misc_RNA (1)...(19): siRNA sense strand
agaaauaggagccaaugau

SEQ ID NO: 654043 - RNA, 19 nt, Homo sapiens
  misc_RNA (1)...(19): siRNA sense strand
augaugaucugaauuacug

SEQ ID NO: 654044 - RNA, 19 nt, Homo sapiens
  misc_RNA (1)...(19): siRNA sense strand
aaauaggagccaaugauga

SEQ ID NO: 654045 - RNA, 19 nt, Homo sapiens
  misc_RNA (1)...(19): siRNA sense strand
ccucagcaguucuuuggau

SEQ ID NO: 654046 - RNA, 19 nt, Homo sapiens
  misc_RNA (1)...(19): siRNA sense strand
gaacugccggagcccuuug

SEQ ID NO: 654047 - RNA, 19 nt, Homo sapiens
  misc_RNA (1)...(19): siRNA sense strand
ucagcaguucuuuggauua

SEQ ID NO: 654048 - RNA, 19 nt, Homo sapiens
  misc_RNA (1)...(19): siRNA sense strand
ucagcuguuugcagaagaa

SEQ ID NO: 654049 - RNA, 19 nt, Homo sapiens
  misc_RNA (1)...(19): siRNA sense strand
ugucuccacucagcuguuu

SEQ ID NO: 654050 - RNA, 19 nt, Homo sapiens
  misc_RNA (1)...(19): siRNA sense strand
gagccaaugaugaucugaa

SEQ ID NO: 654051 - RNA, 19 nt, Homo sapiens
  misc_RNA (1)...(19): siRNA sense strand
gacauggccagaucucuca

SEQ ID NO: 654052 - RNA, 19 nt, Homo sapiens
  misc_RNA (1)...(19): siRNA sense strand
aauaggagccaaugaugau

SEQ ID NO: 654053 - RNA, 19 nt, Homo sapiens
  misc_RNA (1)...(19): siRNA sense strand
ggaacugccggagcccuuu

SEQ ID NO: 654054 - RNA, 19 nt, Homo sapiens
  misc_RNA (1)...(19): siRNA sense strand
guacgacagcgaccagauc

SEQ ID NO: 654055 - RNA, 19 nt, Homo sapiens
  misc_RNA (1)...(19): siRNA sense strand
caaugaugaucugaauuac

SEQ ID NO: 654056 - RNA, 19 nt, Homo sapiens
  misc_RNA (1)...(19): siRNA sense strand
caaugcagaauuaugaaag

SEQ ID NO: 654057 - RNA, 19 nt, Homo sapiens
  misc_RNA (1)...(19): siRNA sense strand
cgacagcgaccagaucaag

SEQ ID NO: 654058 - RNA, 19 nt, Homo sapiens
  misc_RNA (1)...(19): siRNA sense strand
agccaaugaugaucugaau

SEQ ID NO: 654059 - RNA, 19 nt, Homo sapiens
  misc_RNA (1)...(19): siRNA sense strand
cucagcaguucuuuggauu

SEQ ID NO: 654060 - RNA, 19 nt, Homo sapiens
  misc_RNA (1)...(19): siRNA sense strand
ccaaugaugaucugaauua

SEQ ID NO: 654061 - RNA, 19 nt, Homo sapiens
  misc_RNA (1)...(19): siRNA sense strand
gcagaauuaugaaagaaga

SEQ ID NO: 654062 - RNA, 19 nt, Homo sapiens
  misc_RNA (1)...(19): siRNA sense strand
gcaguucuuuggauuaaug

SEQ ID NO: 654063 - RNA, 19 nt, Homo sapiens
  misc_RNA (1)...(19): siRNA sense strand
gaaauaggagccaaugaug

SEQ ID NO: 654064 - RNA, 19 nt, Homo sapiens
  misc_RNA (1)...(19): siRNA sense strand
cagcaguucuuuggauuaa

SEQ ID NO: 654065 - RNA, 19 nt, Homo sapiens
  misc_RNA (1)...(19): siRNA sense strand
gcuguuugcagaagaaaua

SEQ ID NO: 654066 - RNA, 19 nt, Homo sapiens
  misc_RNA (1)...(19): siRNA sense strand
gaagaaauaggagccaaug

SEQ ID NO: 654067 - RNA, 19 nt, Homo sapiens
  misc_RNA (1)...(19): siRNA sense strand
ggccagaucucucacaaaa

SEQ ID NO: 654068 - RNA, 19 nt, Homo sapiens
  misc_RNA (1)...(19): siRNA sense strand
gcaaugcagaauuaugaaa

SEQ ID NO: 654069 - RNA, 19 nt, Homo sapiens
  misc_RNA (1)...(19): siRNA sense strand
gacccaagccucagcaguu

SEQ ID NO: 654070 - RNA, 19 nt, Homo sapiens
  misc_RNA (1)...(19): siRNA sense strand
agaaauaggagccaaugau

SEQ ID NO: 654071 - RNA, 19 nt, Homo sapiens
  misc_RNA (1)...(19): siRNA sense strand
augaugaucugaauuacug

SEQ ID NO: 654072 - RNA, 19 nt, Homo sapiens
  misc_RNA (1)...(19): siRNA sense strand
aaauaggagccaaugauga

SEQ ID NO: 654073 - RNA, 19 nt, Homo sapiens
  misc_RNA (1)...(19): siRNA sense strand
ccucagcaguucuuuggau

SEQ ID NO: 654074 - RNA, 19 nt, Homo sapiens
  misc_RNA (1)...(19): siRNA sense strand
gaacugccggagcccuuug

SEQ ID NO: 654075 - RNA, 19 nt, Homo sapiens
  misc_RNA (1)...(19): siRNA sense strand
ucagcaguucuuuggauua

SEQ ID NO: 654076 - RNA, 19 nt, Homo sapiens
  misc_RNA (1)...(19): siRNA sense strand
ucagcuguuugcagaagaa

SEQ ID NO: 654077 - RNA, 19 nt, Homo sapiens
  misc_RNA (1)...(19): siRNA sense strand
ugucuccacucagcuguuu

SEQ ID NO: 654078 - RNA, 19 nt, Homo sapiens
  misc_RNA (1)...(19): siRNA sense strand
gagccaaugaugaucugaa

SEQ ID NO: 654079 - RNA, 19 nt, Homo sapiens
  misc_RNA (1)...(19): siRNA sense strand
gacauggccagaucucuca

SEQ ID NO: 654080 - RNA, 19 nt, Homo sapiens
  misc_RNA (1)...(19): siRNA sense strand
aauaggagccaaugaugau

SEQ ID NO: 654081 - RNA, 19 nt, Homo sapiens
  misc_RNA (1)...(19): siRNA sense strand
ggaacugccggagcccuuu

SEQ ID NO: 654082 - RNA, 19 nt, Homo sapiens
  misc_RNA (1)...(19): siRNA sense strand
guacgacagcgaccagauc

SEQ ID NO: 654083 - RNA, 19 nt, Homo sapiens
  misc_RNA (1)...(19): siRNA sense strand
caaugaugaucugaauuac

SEQ ID NO: 654084 - RNA, 19 nt, Homo sapiens
  misc_RNA (1)...(19): siRNA sense strand
caaugcagaauuaugaaag

SEQ ID NO: 654085 - RNA, 19 nt, Homo sapiens
  misc_RNA (1)...(19): siRNA sense strand
cgacagcgaccagaucaag

SEQ ID NO: 654086 - RNA, 19 nt, Homo sapiens
  misc_RNA (1)...(19): siRNA sense strand
agccaaugaugaucugaau

SEQ ID NO: 654087 - RNA, 19 nt, Homo sapiens
  misc_RNA (1)...(19): siRNA sense strand
cucagcaguucuuuggauu

SEQ ID NO: 654088 - RNA, 19 nt, Homo sapiens
  misc_RNA (1)...(19): siRNA sense strand
cgacagagaugcugaaggu

SEQ ID NO: 654089 - RNA, 19 nt, Homo sapiens
  misc_RNA (1)...(19): siRNA sense strand
ggacagugccuaccucuau

SEQ ID NO: 654090 - RNA, 19 nt, Homo sapiens
  misc_RNA (1)...(19): siRNA sense strand
caagggauggugcuucuuu

SEQ ID NO: 654091 - RNA, 19 nt, Homo sapiens
  misc_RNA (1)...(19): siRNA sense strand
gaguucaccugcccugugu

SEQ ID NO: 654092 - RNA, 19 nt, Homo sapiens
  misc_RNA (1)...(19): siRNA sense strand
gaccugggcaucuccauug

SEQ ID NO: 654093 - RNA, 19 nt, Homo sapiens
  misc_RNA (1)...(19): siRNA sense strand
ggacgagaagaccaagaaa

SEQ ID NO: 654094 - RNA, 19 nt, Homo sapiens
  misc_RNA (1)...(19): siRNA sense strand
ucaacugccugcucugcaa

SEQ ID NO: 654095 - RNA, 19 nt, Homo sapiens
  misc_RNA (1)...(19): siRNA sense strand
ucaccugcccuguguguuu

SEQ ID NO: 654096 - RNA, 19 nt, Homo sapiens
  misc_RNA (1)...(19): siRNA sense strand
aggaugaugucaaugaguu

SEQ ID NO: 654097 - RNA, 19 nt, Homo sapiens
  misc_RNA (1)...(19): siRNA sense strand
ucacagugcgcccugauau

SEQ ID NO: 654098 - RNA, 19 nt, Homo sapiens
  misc_RNA (1)...(19): siRNA sense strand
cagagaugcugaaggugau

SEQ ID NO: 654099 - RNA, 19 nt, Homo sapiens
  misc_RNA (1)...(19): siRNA sense strand
gacagugccuaccucuauc

SEQ ID NO: 654100 - RNA, 19 nt, Homo sapiens
  misc_RNA (1)...(19): siRNA sense strand
gggugcaccuucaucaaca

SEQ ID NO: 654101 - RNA, 19 nt, Homo sapiens
  misc_RNA (1)...(19): siRNA sense strand
gggcaucuccauugcugaa

SEQ ID NO: 654102 - RNA, 19 nt, Homo sapiens
  misc_RNA (1)...(19): siRNA sense strand
cacccaagcugucagaacu

SEQ ID NO: 654103 - RNA, 19 nt, Homo sapiens
  misc_RNA (1)...(19): siRNA sense strand
acagugcgcccugauauga

SEQ ID NO: 654104 - RNA, 19 nt, Homo sapiens
  misc_RNA (1)...(19): siRNA sense strand
cguggaggaugcucagaug

SEQ ID NO: 654105 - RNA, 19 nt, Homo sapiens
  misc_RNA (1)...(19): siRNA sense strand
aggaggcgcugcgucagua

SEQ ID NO: 654106 - RNA, 19 nt, Homo sapiens
  misc_RNA (1)...(19): siRNA sense strand
ggauuaccagcgauuucua

SEQ ID NO: 654107 - RNA, 19 nt, Homo sapiens
  misc_RNA (1)...(19): siRNA sense strand
gaggauuaccagcgauuuc

SEQ ID NO: 654108 - RNA, 19 nt, Homo sapiens
  misc_RNA (1)...(19): siRNA sense strand
gccagaucgugguacagaa

SEQ ID NO: 654109 - RNA, 19 nt, Homo sapiens
  misc_RNA (1)...(19): siRNA sense strand
gacaguggcgucucucaag

SEQ ID NO: 654110 - RNA, 19 nt, Homo sapiens
  misc_RNA (1)...(19): siRNA sense strand
ggugcaccuucaucaacaa

SEQ ID NO: 654111 - RNA, 19 nt, Homo sapiens
  misc_RNA (1)...(19): siRNA sense strand
ugaggaugaugucaaugag

SEQ ID NO: 654112 - RNA, 19 nt, Homo sapiens
  misc_RNA (1)...(19): siRNA sense strand
gaugaacugcaaggaguau

SEQ ID NO: 654113 - RNA, 19 nt, Homo sapiens
  misc_RNA (1)...(19): siRNA sense strand
gcaucuccauugcugaaaa

SEQ ID NO: 654114 - RNA, 19 nt, Homo sapiens
  misc_RNA (1)...(19): siRNA sense strand
gacgagaagaccaagaaag

SEQ ID NO: 654115 - RNA, 19 nt, Homo sapiens
  misc_RNA (1)...(19): siRNA sense strand
uggcgucucucaaggacau

SEQ ID NO: 654116 - RNA, 19 nt, Homo sapiens
  misc_RNA (1)...(19): siRNA sense strand
ggugcuucuuugaggauga

SEQ ID NO: 654117 - RNA, 19 nt, Homo sapiens
  misc_RNA (1)...(19): siRNA sense strand
aagggauggugcuucuuug

SEQ ID NO: 654118 - RNA, 19 nt, Homo sapiens
  misc_RNA (1)...(19): siRNA sense strand
gauuaccagcgauuucuag

SEQ ID NO: 654119 - RNA, 19 nt, Homo sapiens
  misc_RNA (1)...(19): siRNA sense strand
cggccuggcugugagaugu

SEQ ID NO: 654120 - RNA, 19 nt, Homo sapiens
  misc_RNA (1)...(19): siRNA sense strand
cacgccagauggacgagaa

SEQ ID NO: 654121 - RNA, 19 nt, Homo sapiens
  misc_RNA (1)...(19): siRNA sense strand
cuaccucuaucugcuguca

SEQ ID NO: 654122 - RNA, 19 nt, Homo sapiens
  misc_RNA (1)...(19): siRNA sense strand
caccugcccuguguguuuc

SEQ ID NO: 654123 - RNA, 19 nt, Homo sapiens
  misc_RNA (1)...(19): siRNA sense strand
ggacagugccuaccucuau

SEQ ID NO: 654124 - RNA, 19 nt, Homo sapiens
  misc_RNA (1)...(19): siRNA sense strand
ggacgagaagaccaagaaa

SEQ ID NO: 654125 - RNA, 19 nt, Homo sapiens
  misc_RNA (1)...(19): siRNA sense strand
ucacagugcgcccugauau

SEQ ID NO: 654126 - RNA, 19 nt, Homo sapiens
  misc_RNA (1)...(19): siRNA sense strand
gacagugccuaccucuauc

SEQ ID NO: 654127 - RNA, 19 nt, Homo sapiens
  misc_RNA (1)...(19): siRNA sense strand
gggugcaccuucaucaaca

SEQ ID NO: 654128 - RNA, 19 nt, Homo sapiens
  misc_RNA (1)...(19): siRNA sense strand
cguggaggaugcucagaug

SEQ ID NO: 654129 - RNA, 19 nt, Homo sapiens
  misc_RNA (1)...(19): siRNA sense strand
aggaggcgcugcgucagua

SEQ ID NO: 654130 - RNA, 19 nt, Homo sapiens
  misc_RNA (1)...(19): siRNA sense strand
acagugcgcccugauauga

SEQ ID NO: 654131 - RNA, 19 nt, Homo sapiens
  misc_RNA (1)...(19): siRNA sense strand
gacaguggcgucucucaag

SEQ ID NO: 654132 - RNA, 19 nt, Homo sapiens
  misc_RNA (1)...(19): siRNA sense strand
ggugcaccuucaucaacaa

SEQ ID NO: 654133 - RNA, 19 nt, Homo sapiens
  misc_RNA (1)...(19): siRNA sense strand
gacgagaagaccaagaaag

SEQ ID NO: 654134 - RNA, 19 nt, Homo sapiens
  misc_RNA (1)...(19): siRNA sense strand
cacgccagauggacgagaa

SEQ ID NO: 654135 - RNA, 19 nt, Homo sapiens
  misc_RNA (1)...(19): siRNA sense strand
cggccuggcugugagaugu

SEQ ID NO: 654136 - RNA, 19 nt, Homo sapiens
  misc_RNA (1)...(19): siRNA sense strand
uggcgucucucaaggacau

SEQ ID NO: 654137 - RNA, 19 nt, Homo sapiens
  misc_RNA (1)...(19): siRNA sense strand
cuaccucuaucugcuguca

SEQ ID NO: 654138 - RNA, 19 nt, Homo sapiens
  misc_RNA (1)...(19): siRNA sense strand
ggacagugccuaccucuau

SEQ ID NO: 654139 - RNA, 19 nt, Homo sapiens
  misc_RNA (1)...(19): siRNA sense strand
ucacagugcgcccugauau

SEQ ID NO: 654140 - RNA, 19 nt, Homo sapiens
  misc_RNA (1)...(19): siRNA sense strand
gacagugccuaccucuauc

SEQ ID NO: 654141 - RNA, 19 nt, Homo sapiens
  misc_RNA (1)...(19): siRNA sense strand
gggugcaccuucaucaaca

SEQ ID NO: 654142 - RNA, 19 nt, Homo sapiens
  misc_RNA (1)...(19): siRNA sense strand
acagugcgcccugauauga

SEQ ID NO: 654143 - RNA, 19 nt, Homo sapiens
  misc_RNA (1)...(19): siRNA sense strand
aggaggcgcugcgucagua

SEQ ID NO: 654144 - RNA, 19 nt, Homo sapiens
  misc_RNA (1)...(19): siRNA sense strand
cguggaggaugcucagaug

SEQ ID NO: 654145 - RNA, 19 nt, Homo sapiens
  misc_RNA (1)...(19): siRNA sense strand
gacaguggcgucucucaag

SEQ ID NO: 654146 - RNA, 19 nt, Homo sapiens
  misc_RNA (1)...(19): siRNA sense strand
ggugcaccuucaucaacaa

SEQ ID NO: 654147 - RNA, 19 nt, Homo sapiens
  misc_RNA (1)...(19): siRNA sense strand
uggcgucucucaaggacau

SEQ ID NO: 654148 - RNA, 19 nt, Homo sapiens
  misc_RNA (1)...(19): siRNA sense strand
cggccuggcugugagaugu

SEQ ID NO: 654149 - RNA, 19 nt, Homo sapiens
  misc_RNA (1)...(19): siRNA sense strand
cuaccucuaucugcuguca

SEQ ID NO: 654150 - RNA, 19 nt, Homo sapiens
  misc_RNA (1)...(19): siRNA sense strand
cgacagagaugcugaaggu

SEQ ID NO: 654151 - RNA, 19 nt, Homo sapiens
  misc_RNA (1)...(19): siRNA sense strand
ggacagugccuaccucuau

SEQ ID NO: 654152 - RNA, 19 nt, Homo sapiens
  misc_RNA (1)...(19): siRNA sense strand
caagggauggugcuucuuu

SEQ ID NO: 654153 - RNA, 19 nt, Homo sapiens
  misc_RNA (1)...(19): siRNA sense strand
gaguucaccugcccugugu

SEQ ID NO: 654154 - RNA, 19 nt, Homo sapiens
  misc_RNA (1)...(19): siRNA sense strand
gaccugggcaucuccauug

SEQ ID NO: 654155 - RNA, 19 nt, Homo sapiens
  misc_RNA (1)...(19): siRNA sense strand
aggaugaugucaaugaguu

SEQ ID NO: 654156 - RNA, 19 nt, Homo sapiens
  misc_RNA (1)...(19): siRNA sense strand
ucaacugccugcucugcaa

SEQ ID NO: 654157 - RNA, 19 nt, Homo sapiens
  misc_RNA (1)...(19): siRNA sense strand
ucaccugcccuguguguuu

SEQ ID NO: 654158 - RNA, 19 nt, Homo sapiens
  misc_RNA (1)...(19): siRNA sense strand
ucacagugcgcccugauau

SEQ ID NO: 654159 - RNA, 19 nt, Homo sapiens
  misc_RNA (1)...(19): siRNA sense strand
cagagaugcugaaggugau

SEQ ID NO: 654160 - RNA, 19 nt, Homo sapiens
  misc_RNA (1)...(19): siRNA sense strand
gacagugccuaccucuauc

SEQ ID NO: 654161 - RNA, 19 nt, Homo sapiens
  misc_RNA (1)...(19): siRNA sense strand
gggugcaccuucaucaaca

SEQ ID NO: 654162 - RNA, 19 nt, Homo sapiens
  misc_RNA (1)...(19): siRNA sense strand
gggcaucuccauugcugaa

SEQ ID NO: 654163 - RNA, 19 nt, Homo sapiens
  misc_RNA (1)...(19): siRNA sense strand
cacccaagcugucagaacu

SEQ ID NO: 654164 - RNA, 19 nt, Homo sapiens
  misc_RNA (1)...(19): siRNA sense strand
acagugcgcccugauauga

SEQ ID NO: 654165 - RNA, 19 nt, Homo sapiens
  misc_RNA (1)...(19): siRNA sense strand
cguggaggaugcucagaug

SEQ ID NO: 654166 - RNA, 19 nt, Homo sapiens
  misc_RNA (1)...(19): siRNA sense strand
aggaggcgcugcgucagua

SEQ ID NO: 654167 - RNA, 19 nt, Homo sapiens
  misc_RNA (1)...(19): siRNA sense strand
ggauuaccagcgauuucua

SEQ ID NO: 654168 - RNA, 19 nt, Homo sapiens
  misc_RNA (1)...(19): siRNA sense strand
gaggauuaccagcgauuuc

SEQ ID NO: 654169 - RNA, 19 nt, Homo sapiens
  misc_RNA (1)...(19): siRNA sense strand
gccagaucgugguacagaa

SEQ ID NO: 654170 - RNA, 19 nt, Homo sapiens
  misc_RNA (1)...(19): siRNA sense strand
gacaguggcgucucucaag

SEQ ID NO: 654171 - RNA, 19 nt, Homo sapiens
  misc_RNA (1)...(19): siRNA sense strand
ggugcaccuucaucaacaa

SEQ ID NO: 654172 - RNA, 19 nt, Homo sapiens
  misc_RNA (1)...(19): siRNA sense strand
ugaggaugaugucaaugag

SEQ ID NO: 654173 - RNA, 19 nt, Homo sapiens
  misc_RNA (1)...(19): siRNA sense strand
gaugaacugcaaggaguau

SEQ ID NO: 654174 - RNA, 19 nt, Homo sapiens
  misc_RNA (1)...(19): siRNA sense strand
gcaucuccauugcugaaaa

SEQ ID NO: 654175 - RNA, 19 nt, Homo sapiens
  misc_RNA (1)...(19): siRNA sense strand
cggccuggcugugagaugu

SEQ ID NO: 654176 - RNA, 19 nt, Homo sapiens
  misc_RNA (1)...(19): siRNA sense strand
ggugcuucuuugaggauga

SEQ ID NO: 654177 - RNA, 19 nt, Homo sapiens
  misc_RNA (1)...(19): siRNA sense strand
aagggauggugcuucuuug

SEQ ID NO: 654178 - RNA, 19 nt, Homo sapiens
  misc_RNA (1)...(19): siRNA sense strand
uggcgucucucaaggacau

SEQ ID NO: 654179 - RNA, 19 nt, Homo sapiens
  misc_RNA (1)...(19): siRNA sense strand
gauuaccagcgauuucuag

SEQ ID NO: 654180 - RNA, 19 nt, Homo sapiens
  misc_RNA (1)...(19): siRNA sense strand
cuaccucuaucugcuguca

SEQ ID NO: 654181 - RNA, 19 nt, Homo sapiens
  misc_RNA (1)...(19): siRNA sense strand
caccugcccuguguguuuc

SEQ ID NO: 654182 - RNA, 19 nt, Homo sapiens
  misc_RNA (1)...(19): siRNA sense strand
cgacagagaugcugaaggu

SEQ ID NO: 654183 - RNA, 19 nt, Homo sapiens
  misc_RNA (1)...(19): siRNA sense strand
ggacagugccuaccucuau

SEQ ID NO: 654184 - RNA, 19 nt, Homo sapiens
  misc_RNA (1)...(19): siRNA sense strand
caagggauggugcuucuuu

SEQ ID NO: 654185 - RNA, 19 nt, Homo sapiens
  misc_RNA (1)...(19): siRNA sense strand
gaguucaccugcccugugu

SEQ ID NO: 654186 - RNA, 19 nt, Homo sapiens
  misc_RNA (1)...(19): siRNA sense strand
gaccugggcaucuccauug

SEQ ID NO: 654187 - RNA, 19 nt, Homo sapiens
  misc_RNA (1)...(19): siRNA sense strand
ggacgagaagaccaagaaa

SEQ ID NO: 654188 - RNA, 19 nt, Homo sapiens
  misc_RNA (1)...(19): siRNA sense strand
ucaacugccugcucugcaa

SEQ ID NO: 654189 - RNA, 19 nt, Homo sapiens
  misc_RNA (1)...(19): siRNA sense strand
ucaccugcccuguguguuu

SEQ ID NO: 654190 - RNA, 19 nt, Homo sapiens
  misc_RNA (1)...(19): siRNA sense strand
aggaugaugucaaugaguu

SEQ ID NO: 654191 - RNA, 19 nt, Homo sapiens
  misc_RNA (1)...(19): siRNA sense strand
ucacagugcgcccugauau

SEQ ID NO: 654192 - RNA, 19 nt, Homo sapiens
  misc_RNA (1)...(19): siRNA sense strand
cagagaugcugaaggugau

SEQ ID NO: 654193 - RNA, 19 nt, Homo sapiens
  misc_RNA (1)...(19): siRNA sense strand
gacagugccuaccucuauc

SEQ ID NO: 654194 - RNA, 19 nt, Homo sapiens
  misc_RNA (1)...(19): siRNA sense strand
gggugcaccuucaucaaca

SEQ ID NO: 654195 - RNA, 19 nt, Homo sapiens
  misc_RNA (1)...(19): siRNA sense strand
gggcaucuccauugcugaa

SEQ ID NO: 654196 - RNA, 19 nt, Homo sapiens
  misc_RNA (1)...(19): siRNA sense strand
cacccaagcugucagaacu

SEQ ID NO: 654197 - RNA, 19 nt, Homo sapiens
  misc_RNA (1)...(19): siRNA sense strand
acagugcgcccugauauga

SEQ ID NO: 654198 - RNA, 19 nt, Homo sapiens
  misc_RNA (1)...(19): siRNA sense strand
cguggaggaugcucagaug

SEQ ID NO: 654199 - RNA, 19 nt, Homo sapiens
  misc_RNA (1)...(19): siRNA sense strand
aggaggcgcugcgucagua

SEQ ID NO: 654200 - RNA, 19 nt, Homo sapiens
  misc_RNA (1)...(19): siRNA sense strand
ggauuaccagcgauuucua

SEQ ID NO: 654201 - RNA, 19 nt, Homo sapiens
  misc_RNA (1)...(19): siRNA sense strand
gaggauuaccagcgauuuc

SEQ ID NO: 654202 - RNA, 19 nt, Homo sapiens
  misc_RNA (1)...(19): siRNA sense strand
gccagaucgugguacagaa

SEQ ID NO: 654203 - RNA, 19 nt, Homo sapiens
  misc_RNA (1)...(19): siRNA sense strand
gacaguggcgucucucaag

SEQ ID NO: 654204 - RNA, 19 nt, Homo sapiens
  misc_RNA (1)...(19): siRNA sense strand
ggugcaccuucaucaacaa

SEQ ID NO: 654205 - RNA, 19 nt, Homo sapiens
  misc_RNA (1)...(19): siRNA sense strand
ugaggaugaugucaaugag

SEQ ID NO: 654206 - RNA, 19 nt, Homo sapiens
  misc_RNA (1)...(19): siRNA sense strand
gaugaacugcaaggaguau

SEQ ID NO: 654207 - RNA, 19 nt, Homo sapiens
  misc_RNA (1)...(19): siRNA sense strand
gcaucuccauugcugaaaa

SEQ ID NO: 654208 - RNA, 19 nt, Homo sapiens
  misc_RNA (1)...(19): siRNA sense strand
gacgagaagaccaagaaag

SEQ ID NO: 654209 - RNA, 19 nt, Homo sapiens
  misc_RNA (1)...(19): siRNA sense strand
uggcgucucucaaggacau

SEQ ID NO: 654210 - RNA, 19 nt, Homo sapiens
  misc_RNA (1)...(19): siRNA sense strand
ggugcuucuuugaggauga

SEQ ID NO: 654211 - RNA, 19 nt, Homo sapiens
  misc_RNA (1)...(19): siRNA sense strand
aagggauggugcuucuuug

SEQ ID NO: 654212 - RNA, 19 nt, Homo sapiens
  misc_RNA (1)...(19): siRNA sense strand
gauuaccagcgauuucuag

SEQ ID NO: 654213 - RNA, 19 nt, Homo sapiens
  misc_RNA (1)...(19): siRNA sense strand
cggccuggcugugagaugu

SEQ ID NO: 654214 - RNA, 19 nt, Homo sapiens
  misc_RNA (1)...(19): siRNA sense strand
cacgccagauggacgagaa

SEQ ID NO: 654215 - RNA, 19 nt, Homo sapiens
  misc_RNA (1)...(19): siRNA sense strand
cuaccucuaucugcuguca

SEQ ID NO: 654216 - RNA, 19 nt, Homo sapiens
  misc_RNA (1)...(19): siRNA sense strand
caccugcccuguguguuuc

SEQ ID NO: 654217 - RNA, 19 nt, Homo sapiens
  misc_RNA (1)...(19): siRNA sense strand
ggacagugccuaccucuau

SEQ ID NO: 654218 - RNA, 19 nt, Homo sapiens
  misc_RNA (1)...(19): siRNA sense strand
ggacgagaagaccaagaaa

SEQ ID NO: 654219 - RNA, 19 nt, Homo sapiens
  misc_RNA (1)...(19): siRNA sense strand
ucacagugcgcccugauau

SEQ ID NO: 654220 - RNA, 19 nt, Homo sapiens
  misc_RNA (1)...(19): siRNA sense strand
gacagugccuaccucuauc

SEQ ID NO: 654221 - RNA, 19 nt, Homo sapiens
  misc_RNA (1)...(19): siRNA sense strand
gggugcaccuucaucaaca

SEQ ID NO: 654222 - RNA, 19 nt, Homo sapiens
  misc_RNA (1)...(19): siRNA sense strand
cguggaggaugcucagaug

SEQ ID NO: 654223 - RNA, 19 nt, Homo sapiens
  misc_RNA (1)...(19): siRNA sense strand
aggaggcgcugcgucagua

SEQ ID NO: 654224 - RNA, 19 nt, Homo sapiens
  misc_RNA (1)...(19): siRNA sense strand
acagugcgcccugauauga

SEQ ID NO: 654225 - RNA, 19 nt, Homo sapiens
  misc_RNA (1)...(19): siRNA sense strand
gacaguggcgucucucaag

SEQ ID NO: 654226 - RNA, 19 nt, Homo sapiens
  misc_RNA (1)...(19): siRNA sense strand
ggugcaccuucaucaacaa

SEQ ID NO: 654227 - RNA, 19 nt, Homo sapiens
  misc_RNA (1)...(19): siRNA sense strand
gacgagaagaccaagaaag

SEQ ID NO: 654228 - RNA, 19 nt, Homo sapiens
  misc_RNA (1)...(19): siRNA sense strand
cacgccagauggacgagaa

SEQ ID NO: 654229 - RNA, 19 nt, Homo sapiens
  misc_RNA (1)...(19): siRNA sense strand
cggccuggcugugagaugu

SEQ ID NO: 654230 - RNA, 19 nt, Homo sapiens
  misc_RNA (1)...(19): siRNA sense strand
uggcgucucucaaggacau

SEQ ID NO: 654231 - RNA, 19 nt, Homo sapiens
  misc_RNA (1)...(19): siRNA sense strand
cuaccucuaucugcuguca

SEQ ID NO: 654232 - RNA, 19 nt, Homo sapiens
  misc_RNA (1)...(19): siRNA sense strand
ggacagugccuaccucuau

SEQ ID NO: 654233 - RNA, 19 nt, Homo sapiens
  misc_RNA (1)...(19): siRNA sense strand
ucacagugcgcccugauau

SEQ ID NO: 654234 - RNA, 19 nt, Homo sapiens
  misc_RNA (1)...(19): siRNA sense strand
gacagugccuaccucuauc

SEQ ID NO: 654235 - RNA, 19 nt, Homo sapiens
  misc_RNA (1)...(19): siRNA sense strand
gggugcaccuucaucaaca

SEQ ID NO: 654236 - RNA, 19 nt, Homo sapiens
  misc_RNA (1)...(19): siRNA sense strand
acagugcgcccugauauga

SEQ ID NO: 654237 - RNA, 19 nt, Homo sapiens
  misc_RNA (1)...(19): siRNA sense strand
aggaggcgcugcgucagua

SEQ ID NO: 654238 - RNA, 19 nt, Homo sapiens
  misc_RNA (1)...(19): siRNA sense strand
cguggaggaugcucagaug

SEQ ID NO: 654239 - RNA, 19 nt, Homo sapiens
  misc_RNA (1)...(19): siRNA sense strand
gacaguggcgucucucaag

SEQ ID NO: 654240 - RNA, 19 nt, Homo sapiens
  misc_RNA (1)...(19): siRNA sense strand
ggugcaccuucaucaacaa

SEQ ID NO: 654241 - RNA, 19 nt, Homo sapiens
  misc_RNA (1)...(19): siRNA sense strand
uggcgucucucaaggacau

SEQ ID NO: 654242 - RNA, 19 nt, Homo sapiens
  misc_RNA (1)...(19): siRNA sense strand
cggccuggcugugagaugu

SEQ ID NO: 654243 - RNA, 19 nt, Homo sapiens
  misc_RNA (1)...(19): siRNA sense strand
cuaccucuaucugcuguca

SEQ ID NO: 654244 - RNA, 19 nt, Homo sapiens
  misc_RNA (1)...(19): siRNA sense strand
cgacagagaugcugaaggu

SEQ ID NO: 654245 - RNA, 19 nt, Homo sapiens
  misc_RNA (1)...(19): siRNA sense strand
ggacagugccuaccucuau

SEQ ID NO: 654246 - RNA, 19 nt, Homo sapiens
  misc_RNA (1)...(19): siRNA sense strand
caagggauggugcuucuuu

SEQ ID NO: 654247 - RNA, 19 nt, Homo sapiens
  misc_RNA (1)...(19): siRNA sense strand
gaguucaccugcccugugu

SEQ ID NO: 654248 - RNA, 19 nt, Homo sapiens
  misc_RNA (1)...(19): siRNA sense strand
gaccugggcaucuccauug

SEQ ID NO: 654249 - RNA, 19 nt, Homo sapiens
  misc_RNA (1)...(19): siRNA sense strand
aggaugaugucaaugaguu

SEQ ID NO: 654250 - RNA, 19 nt, Homo sapiens
  misc_RNA (1)...(19): siRNA sense strand
ucaacugccugcucugcaa

SEQ ID NO: 654251 - RNA, 19 nt, Homo sapiens
  misc_RNA (1)...(19): siRNA sense strand
ucaccugcccuguguguuu

SEQ ID NO: 654252 - RNA, 19 nt, Homo sapiens
  misc_RNA (1)...(19): siRNA sense strand
ucacagugcgcccugauau

SEQ ID NO: 654253 - RNA, 19 nt, Homo sapiens
  misc_RNA (1)...(19): siRNA sense strand
cagagaugcugaaggugau

SEQ ID NO: 654254 - RNA, 19 nt, Homo sapiens
  misc_RNA (1)...(19): siRNA sense strand
gacagugccuaccucuauc

SEQ ID NO: 654255 - RNA, 19 nt, Homo sapiens
  misc_RNA (1)...(19): siRNA sense strand
gggugcaccuucaucaaca

SEQ ID NO: 654256 - RNA, 19 nt, Homo sapiens
  misc_RNA (1)...(19): siRNA sense strand
gggcaucuccauugcugaa

SEQ ID NO: 654257 - RNA, 19 nt, Homo sapiens
  misc_RNA (1)...(19): siRNA sense strand
cacccaagcugucagaacu

SEQ ID NO: 654258 - RNA, 19 nt, Homo sapiens
  misc_RNA (1)...(19): siRNA sense strand
acagugcgcccugauauga

SEQ ID NO: 654259 - RNA, 19 nt, Homo sapiens
  misc_RNA (1)...(19): siRNA sense strand
cguggaggaugcucagaug

SEQ ID NO: 654260 - RNA, 19 nt, Homo sapiens
  misc_RNA (1)...(19): siRNA sense strand
aggaggcgcugcgucagua

SEQ ID NO: 654261 - RNA, 19 nt, Homo sapiens
  misc_RNA (1)...(19): siRNA sense strand
ggauuaccagcgauuucua

SEQ ID NO: 654262 - RNA, 19 nt, Homo sapiens
  misc_RNA (1)...(19): siRNA sense strand
gaggauuaccagcgauuuc

SEQ ID NO: 654263 - RNA, 19 nt, Homo sapiens
  misc_RNA (1)...(19): siRNA sense strand
gccagaucgugguacagaa

SEQ ID NO: 654264 - RNA, 19 nt, Homo sapiens
  misc_RNA (1)...(19): siRNA sense strand
gacaguggcgucucucaag

SEQ ID NO: 654265 - RNA, 19 nt, Homo sapiens
  misc_RNA (1)...(19): siRNA sense strand
ggugcaccuucaucaacaa

SEQ ID NO: 654266 - RNA, 19 nt, Homo sapiens
  misc_RNA (1)...(19): siRNA sense strand
ugaggaugaugucaaugag

SEQ ID NO: 654267 - RNA, 19 nt, Homo sapiens
  misc_RNA (1)...(19): siRNA sense strand
gaugaacugcaaggaguau

SEQ ID NO: 654268 - RNA, 19 nt, Homo sapiens
  misc_RNA (1)...(19): siRNA sense strand
gcaucuccauugcugaaaa

SEQ ID NO: 654269 - RNA, 19 nt, Homo sapiens
  misc_RNA (1)...(19): siRNA sense strand
cggccuggcugugagaugu

SEQ ID NO: 654270 - RNA, 19 nt, Homo sapiens
  misc_RNA (1)...(19): siRNA sense strand
ggugcuucuuugaggauga

SEQ ID NO: 654271 - RNA, 19 nt, Homo sapiens
  misc_RNA (1)...(19): siRNA sense strand
aagggauggugcuucuuug

SEQ ID NO: 654272 - RNA, 19 nt, Homo sapiens
  misc_RNA (1)...(19): siRNA sense strand
uggcgucucucaaggacau

SEQ ID NO: 654273 - RNA, 19 nt, Homo sapiens
  misc_RNA (1)...(19): siRNA sense strand
gauuaccagcgauuucuag

SEQ ID NO: 654274 - RNA, 19 nt, Homo sapiens
  misc_RNA (1)...(19): siRNA sense strand
cuaccucuaucugcuguca

SEQ ID NO: 654275 - RNA, 19 nt, Homo sapiens
  misc_RNA (1)...(19): siRNA sense strand
caccugcccuguguguuuc

SEQ ID NO: 654276 - RNA, 19 nt, Homo sapiens
  misc_RNA (1)...(19): siRNA sense strand
ggagauuucuuuagacaaa

SEQ ID NO: 654277 - RNA, 19 nt, Homo sapiens
  misc_RNA (1)...(19): siRNA sense strand
caaacaaccuggccaacug

SEQ ID NO: 654278 - RNA, 19 nt, Homo sapiens
  misc_RNA (1)...(19): siRNA sense strand
gaaccuacgccaucucuuc

SEQ ID NO: 654279 - RNA, 19 nt, Homo sapiens
  misc_RNA (1)...(19): siRNA sense strand
caacaugaccaacgucuuc

SEQ ID NO: 654280 - RNA, 19 nt, Homo sapiens
  misc_RNA (1)...(19): siRNA sense strand
gcucaucuccuacaaccaa

SEQ ID NO: 654281 - RNA, 19 nt, Homo sapiens
  misc_RNA (1)...(19): siRNA sense strand
aaucgcagcugccuacauc

SEQ ID NO: 654282 - RNA, 19 nt, Homo sapiens
  misc_RNA (1)...(19): siRNA sense strand
ggcuggaccugccaaacaa

SEQ ID NO: 654283 - RNA, 19 nt, Homo sapiens
  misc_RNA (1)...(19): siRNA sense strand
uuaacugcauggucccuuu

SEQ ID NO: 654284 - RNA, 19 nt, Homo sapiens
  misc_RNA (1)...(19): siRNA sense strand
caagaaggagaccaagguu

SEQ ID NO: 654285 - RNA, 19 nt, Homo sapiens
  misc_RNA (1)...(19): siRNA sense strand
gggcuggaccugccaaaca

SEQ ID NO: 654286 - RNA, 19 nt, Homo sapiens
  misc_RNA (1)...(19): siRNA sense strand
ugaaugcagagaacuguga

SEQ ID NO: 654287 - RNA, 19 nt, Homo sapiens
  misc_RNA (1)...(19): siRNA sense strand
gcauguuccagaucuauca

SEQ ID NO: 654288 - RNA, 19 nt, Homo sapiens
  misc_RNA (1)...(19): siRNA sense strand
caacgccgacuuucagaag

SEQ ID NO: 654289 - RNA, 19 nt, Homo sapiens
  misc_RNA (1)...(19): siRNA sense strand
ucaagaaggagaccaaggu

SEQ ID NO: 654290 - RNA, 19 nt, Homo sapiens
  misc_RNA (1)...(19): siRNA sense strand
cggugaacaucagcaauga

SEQ ID NO: 654291 - RNA, 19 nt, Homo sapiens
  misc_RNA (1)...(19): siRNA sense strand
ugggcuaacuccucacuca

SEQ ID NO: 654292 - RNA, 19 nt, Homo sapiens
  misc_RNA (1)...(19): siRNA sense strand
gcgccaacaugaccaacgu

SEQ ID NO: 654293 - RNA, 19 nt, Homo sapiens
  misc_RNA (1)...(19): siRNA sense strand
guugcuggcugcccuucuu

SEQ ID NO: 654294 - RNA, 19 nt, Homo sapiens
  misc_RNA (1)...(19): siRNA sense strand
ccaucaugaucgugaccua

SEQ ID NO: 654295 - RNA, 19 nt, Homo sapiens
  misc_RNA (1)...(19): siRNA sense strand
cgucaucuaugccuucaac

SEQ ID NO: 654296 - RNA, 19 nt, Homo sapiens
  misc_RNA (1)...(19): siRNA sense strand
gccgguuacuggcccuuug

SEQ ID NO: 654297 - RNA, 19 nt, Homo sapiens
  misc_RNA (1)...(19): siRNA sense strand
ugaccaacgucuucaucgu

SEQ ID NO: 654298 - RNA, 19 nt, Homo sapiens
  misc_RNA (1)...(19): siRNA sense strand
ucagugagaccaccuucga

SEQ ID NO: 654299 - RNA, 19 nt, Homo sapiens
  misc_RNA (1)...(19): siRNA sense strand
cugcugacccuacucauca

SEQ ID NO: 654300 - RNA, 19 nt, Homo sapiens
  misc_RNA (1)...(19): siRNA sense strand
ggccuggcauggaccuugu

SEQ ID NO: 654301 - RNA, 19 nt, Homo sapiens
  misc_RNA (1)...(19): siRNA sense strand
cugcccuucuucauccuua

SEQ ID NO: 654302 - RNA, 19 nt, Homo sapiens
  misc_RNA (1)...(19): siRNA sense strand
gaccuuguccauccucauc

SEQ ID NO: 654303 - RNA, 19 nt, Homo sapiens
  misc_RNA (1)...(19): siRNA sense strand
gacuccagccugaaucgaa

SEQ ID NO: 654304 - RNA, 19 nt, Homo sapiens
  misc_RNA (1)...(19): siRNA sense strand
guggagacggugaacauca

SEQ ID NO: 654305 - RNA, 19 nt, Homo sapiens
  misc_RNA (1)...(19): siRNA sense strand
ccaaacaaccuggccaacu

SEQ ID NO: 654306 - RNA, 19 nt, Homo sapiens
  misc_RNA (1)...(19): siRNA sense strand
ccagauggugacccuguug

SEQ ID NO: 654307 - RNA, 19 nt, Homo sapiens
  misc_RNA (1)...(19): siRNA sense strand
ggccaaacguaccaagaaa

SEQ ID NO: 654308 - RNA, 19 nt, Homo sapiens
  misc_RNA (1)...(19): siRNA sense strand
ccaaacguaccaagaaagu

SEQ ID NO: 654309 - RNA, 19 nt, Homo sapiens
  misc_RNA (1)...(19): siRNA sense strand
guacacuugcucuuucugu

SEQ ID NO: 654310 - RNA, 19 nt, Homo sapiens
  misc_RNA (1)...(19): siRNA sense strand
ccaccaagcuggaguacga

SEQ ID NO: 654311 - RNA, 19 nt, Homo sapiens
  misc_RNA (1)...(19): siRNA sense strand
gagcagacaagaaugauga

SEQ ID NO: 654312 - RNA, 19 nt, Homo sapiens
  misc_RNA (1)...(19): siRNA sense strand
gcaucucaccgacaauuua

SEQ ID NO: 654313 - RNA, 19 nt, Homo sapiens
  misc_RNA (1)...(19): siRNA sense strand
gcagagcagacaagaauga

SEQ ID NO: 654314 - RNA, 19 nt, Homo sapiens
  misc_RNA (1)...(19): siRNA sense strand
ccugguggauaaugaauaa

SEQ ID NO: 654315 - RNA, 19 nt, Homo sapiens
  misc_RNA (1)...(19): siRNA sense strand
gaugggaagcucucauuug

SEQ ID NO: 654316 - RNA, 19 nt, Homo sapiens
  misc_RNA (1)...(19): siRNA sense strand
ggugcuggcugcauuggaa

SEQ ID NO: 654317 - RNA, 19 nt, Homo sapiens
  misc_RNA (1)...(19): siRNA sense strand
augggaagcucucauuuga

SEQ ID NO: 654318 - RNA, 19 nt, Homo sapiens
  misc_RNA (1)...(19): siRNA sense strand
gguggauaaugaauaacaa

SEQ ID NO: 654319 - RNA, 19 nt, Homo sapiens
  misc_RNA (1)...(19): siRNA sense strand
ccgcagagcagacaagaau

SEQ ID NO: 654320 - RNA, 19 nt, Homo sapiens
  misc_RNA (1)...(19): siRNA sense strand
caccgacaauuuagaaaca

SEQ ID NO: 654321 - RNA, 19 nt, Homo sapiens
  misc_RNA (1)...(19): siRNA sense strand
gcucagaggccgagaugca

SEQ ID NO: 654322 - RNA, 19 nt, Homo sapiens
  misc_RNA (1)...(19): siRNA sense strand
aaaguggaccaguuuguga

SEQ ID NO: 654323 - RNA, 19 nt, Homo sapiens
  misc_RNA (1)...(19): siRNA sense strand
gggcaucucaccgacaauu

SEQ ID NO: 654324 - RNA, 19 nt, Homo sapiens
  misc_RNA (1)...(19): siRNA sense strand
gcgcugcuauguggacuuc

SEQ ID NO: 654325 - RNA, 19 nt, Homo sapiens
  misc_RNA (1)...(19): siRNA sense strand
ggauaaugaauaacaacug

SEQ ID NO: 654326 - RNA, 19 nt, Homo sapiens
  misc_RNA (1)...(19): siRNA sense strand
aggaaggccugcaggacuu

SEQ ID NO: 654327 - RNA, 19 nt, Homo sapiens
  misc_RNA (1)...(19): siRNA sense strand
gcaguccgcccagaagaug

SEQ ID NO: 654328 - RNA, 19 nt, Homo sapiens
  misc_RNA (1)...(19): siRNA sense strand
ccucaccacuguguucuuc

SEQ ID NO: 654329 - RNA, 19 nt, Homo sapiens
  misc_RNA (1)...(19): siRNA sense strand
cggacacccucaccacugu

SEQ ID NO: 654330 - RNA, 19 nt, Homo sapiens
  misc_RNA (1)...(19): siRNA sense strand
ccgacaauuuagaaacaga

SEQ ID NO: 654331 - RNA, 19 nt, Homo sapiens
  misc_RNA (1)...(19): siRNA sense strand
cgacaauuuagaaacagaa

SEQ ID NO: 654332 - RNA, 19 nt, Homo sapiens
  misc_RNA (1)...(19): siRNA sense strand
ucucaccgacaauuuagaa

SEQ ID NO: 654333 - RNA, 19 nt, Homo sapiens
  misc_RNA (1)...(19): siRNA sense strand
gcagacaagaaugaugaug

SEQ ID NO: 654334 - RNA, 19 nt, Homo sapiens
  misc_RNA (1)...(19): siRNA sense strand
acacagggcgcagcucaga

SEQ ID NO: 654335 - RNA, 19 nt, Homo sapiens
  misc_RNA (1)...(19): siRNA sense strand
ggcaucucaccgacaauuu

SEQ ID NO: 654336 - RNA, 19 nt, Homo sapiens
  misc_RNA (1)...(19): siRNA sense strand
ccuucacccuguaugaguu

SEQ ID NO: 654337 - RNA, 19 nt, Homo sapiens
  misc_RNA (1)...(19): siRNA sense strand
gugccuccuucacccugua

SEQ ID NO: 654338 - RNA, 19 nt, Homo sapiens
  misc_RNA (1)...(19): siRNA sense strand
ugaugggaagcucucauuu

SEQ ID NO: 654339 - RNA, 19 nt, Homo sapiens
  misc_RNA (1)...(19): siRNA sense strand
ugacuugcacauccucaug

SEQ ID NO: 654340 - RNA, 19 nt, Homo sapiens
  misc_RNA (1)...(19): siRNA sense strand
ccaccaagcuggaguacga

SEQ ID NO: 654341 - RNA, 19 nt, Homo sapiens
  misc_RNA (1)...(19): siRNA sense strand
gagcagacaagaaugauga

SEQ ID NO: 654342 - RNA, 19 nt, Homo sapiens
  misc_RNA (1)...(19): siRNA sense strand
gcaucucaccgacaauuua

SEQ ID NO: 654343 - RNA, 19 nt, Homo sapiens
  misc_RNA (1)...(19): siRNA sense strand
gcagagcagacaagaauga

SEQ ID NO: 654344 - RNA, 19 nt, Homo sapiens
  misc_RNA (1)...(19): siRNA sense strand
ccugguggauaaugaauaa

SEQ ID NO: 654345 - RNA, 19 nt, Homo sapiens
  misc_RNA (1)...(19): siRNA sense strand
gaugggaagcucucauuug

SEQ ID NO: 654346 - RNA, 19 nt, Homo sapiens
  misc_RNA (1)...(19): siRNA sense strand
ggugcuggcugcauuggaa

SEQ ID NO: 654347 - RNA, 19 nt, Homo sapiens
  misc_RNA (1)...(19): siRNA sense strand
augggaagcucucauuuga

SEQ ID NO: 654348 - RNA, 19 nt, Homo sapiens
  misc_RNA (1)...(19): siRNA sense strand
gguggauaaugaauaacaa

SEQ ID NO: 654349 - RNA, 19 nt, Homo sapiens
  misc_RNA (1)...(19): siRNA sense strand
ccgcagagcagacaagaau

SEQ ID NO: 654350 - RNA, 19 nt, Homo sapiens
  misc_RNA (1)...(19): siRNA sense strand
caccgacaauuuagaaaca

SEQ ID NO: 654351 - RNA, 19 nt, Homo sapiens
  misc_RNA (1)...(19): siRNA sense strand
gcucagaggccgagaugca

SEQ ID NO: 654352 - RNA, 19 nt, Homo sapiens
  misc_RNA (1)...(19): siRNA sense strand
aaaguggaccaguuuguga

SEQ ID NO: 654353 - RNA, 19 nt, Homo sapiens
  misc_RNA (1)...(19): siRNA sense strand
gggcaucucaccgacaauu

SEQ ID NO: 654354 - RNA, 19 nt, Homo sapiens
  misc_RNA (1)...(19): siRNA sense strand
gcgcugcuauguggacuuc

SEQ ID NO: 654355 - RNA, 19 nt, Homo sapiens
  misc_RNA (1)...(19): siRNA sense strand
ggauaaugaauaacaacug

SEQ ID NO: 654356 - RNA, 19 nt, Homo sapiens
  misc_RNA (1)...(19): siRNA sense strand
aggaaggccugcaggacuu

SEQ ID NO: 654357 - RNA, 19 nt, Homo sapiens
  misc_RNA (1)...(19): siRNA sense strand
gcaguccgcccagaagaug

SEQ ID NO: 654358 - RNA, 19 nt, Homo sapiens
  misc_RNA (1)...(19): siRNA sense strand
ccucaccacuguguucuuc

SEQ ID NO: 654359 - RNA, 19 nt, Homo sapiens
  misc_RNA (1)...(19): siRNA sense strand
cggacacccucaccacugu

SEQ ID NO: 654360 - RNA, 19 nt, Homo sapiens
  misc_RNA (1)...(19): siRNA sense strand
ccgacaauuuagaaacaga

SEQ ID NO: 654361 - RNA, 19 nt, Homo sapiens
  misc_RNA (1)...(19): siRNA sense strand
cgacaauuuagaaacagaa

SEQ ID NO: 654362 - RNA, 19 nt, Homo sapiens
  misc_RNA (1)...(19): siRNA sense strand
ucucaccgacaauuuagaa

SEQ ID NO: 654363 - RNA, 19 nt, Homo sapiens
  misc_RNA (1)...(19): siRNA sense strand
gcagacaagaaugaugaug

SEQ ID NO: 654364 - RNA, 19 nt, Homo sapiens
  misc_RNA (1)...(19): siRNA sense strand
acacagggcgcagcucaga

SEQ ID NO: 654365 - RNA, 19 nt, Homo sapiens
  misc_RNA (1)...(19): siRNA sense strand
ggcaucucaccgacaauuu

SEQ ID NO: 654366 - RNA, 19 nt, Homo sapiens
  misc_RNA (1)...(19): siRNA sense strand
ccuucacccuguaugaguu

SEQ ID NO: 654367 - RNA, 19 nt, Homo sapiens
  misc_RNA (1)...(19): siRNA sense strand
gugccuccuucacccugua

SEQ ID NO: 654368 - RNA, 19 nt, Homo sapiens
  misc_RNA (1)...(19): siRNA sense strand
ugaugggaagcucucauuu

SEQ ID NO: 654369 - RNA, 19 nt, Homo sapiens
  misc_RNA (1)...(19): siRNA sense strand
ugacuugcacauccucaug

SEQ ID NO: 654370 - RNA, 19 nt, Homo sapiens
  misc_RNA (1)...(19): siRNA sense strand
ccaccaagcuggaguacga

SEQ ID NO: 654371 - RNA, 19 nt, Homo sapiens
  misc_RNA (1)...(19): siRNA sense strand
gagcagacaagaaugauga

SEQ ID NO: 654372 - RNA, 19 nt, Homo sapiens
  misc_RNA (1)...(19): siRNA sense strand
gcaucucaccgacaauuua

SEQ ID NO: 654373 - RNA, 19 nt, Homo sapiens
  misc_RNA (1)...(19): siRNA sense strand
gcagagcagacaagaauga

SEQ ID NO: 654374 - RNA, 19 nt, Homo sapiens
  misc_RNA (1)...(19): siRNA sense strand
ccugguggauaaugaauaa

SEQ ID NO: 654375 - RNA, 19 nt, Homo sapiens
  misc_RNA (1)...(19): siRNA sense strand
gaugggaagcucucauuug

SEQ ID NO: 654376 - RNA, 19 nt, Homo sapiens
  misc_RNA (1)...(19): siRNA sense strand
ggugcuggcugcauuggaa

SEQ ID NO: 654377 - RNA, 19 nt, Homo sapiens
  misc_RNA (1)...(19): siRNA sense strand
augggaagcucucauuuga

SEQ ID NO: 654378 - RNA, 19 nt, Homo sapiens
  misc_RNA (1)...(19): siRNA sense strand
gguggauaaugaauaacaa

SEQ ID NO: 654379 - RNA, 19 nt, Homo sapiens
  misc_RNA (1)...(19): siRNA sense strand
ccgcagagcagacaagaau

SEQ ID NO: 654380 - RNA, 19 nt, Homo sapiens
  misc_RNA (1)...(19): siRNA sense strand
caccgacaauuuagaaaca

SEQ ID NO: 654381 - RNA, 19 nt, Homo sapiens
  misc_RNA (1)...(19): siRNA sense strand
gcucagaggccgagaugca

SEQ ID NO: 654382 - RNA, 19 nt, Homo sapiens
  misc_RNA (1)...(19): siRNA sense strand
aaaguggaccaguuuguga

SEQ ID NO: 654383 - RNA, 19 nt, Homo sapiens
  misc_RNA (1)...(19): siRNA sense strand
gggcaucucaccgacaauu

SEQ ID NO: 654384 - RNA, 19 nt, Homo sapiens
  misc_RNA (1)...(19): siRNA sense strand
gcgcugcuauguggacuuc

SEQ ID NO: 654385 - RNA, 19 nt, Homo sapiens
  misc_RNA (1)...(19): siRNA sense strand
ggauaaugaauaacaacug

SEQ ID NO: 654386 - RNA, 19 nt, Homo sapiens
  misc_RNA (1)...(19): siRNA sense strand
aggaaggccugcaggacuu

SEQ ID NO: 654387 - RNA, 19 nt, Homo sapiens
  misc_RNA (1)...(19): siRNA sense strand
gcaguccgcccagaagaug

SEQ ID NO: 654388 - RNA, 19 nt, Homo sapiens
  misc_RNA (1)...(19): siRNA sense strand
ccucaccacuguguucuuc

SEQ ID NO: 654389 - RNA, 19 nt, Homo sapiens
  misc_RNA (1)...(19): siRNA sense strand
cggacacccucaccacugu

SEQ ID NO: 654390 - RNA, 19 nt, Homo sapiens
  misc_RNA (1)...(19): siRNA sense strand
ccgacaauuuagaaacaga

SEQ ID NO: 654391 - RNA, 19 nt, Homo sapiens
  misc_RNA (1)...(19): siRNA sense strand
cgacaauuuagaaacagaa

SEQ ID NO: 654392 - RNA, 19 nt, Homo sapiens
  misc_RNA (1)...(19): siRNA sense strand
ucucaccgacaauuuagaa

SEQ ID NO: 654393 - RNA, 19 nt, Homo sapiens
  misc_RNA (1)...(19): siRNA sense strand
gcagacaagaaugaugaug

SEQ ID NO: 654394 - RNA, 19 nt, Homo sapiens
  misc_RNA (1)...(19): siRNA sense strand
acacagggcgcagcucaga

SEQ ID NO: 654395 - RNA, 19 nt, Homo sapiens
  misc_RNA (1)...(19): siRNA sense strand
ggcaucucaccgacaauuu

SEQ ID NO: 654396 - RNA, 19 nt, Homo sapiens
  misc_RNA (1)...(19): siRNA sense strand
ccuucacccuguaugaguu

SEQ ID NO: 654397 - RNA, 19 nt, Homo sapiens
  misc_RNA (1)...(19): siRNA sense strand
gugccuccuucacccugua

SEQ ID NO: 654398 - RNA, 19 nt, Homo sapiens
  misc_RNA (1)...(19): siRNA sense strand
ugaugggaagcucucauuu

SEQ ID NO: 654399 - RNA, 19 nt, Homo sapiens
  misc_RNA (1)...(19): siRNA sense strand
ugacuugcacauccucaug

SEQ ID NO: 654400 - RNA, 19 nt, Homo sapiens
  misc_RNA (1)...(19): siRNA sense strand
ccaccaagcuggaguacga

SEQ ID NO: 654401 - RNA, 19 nt, Homo sapiens
  misc_RNA (1)...(19): siRNA sense strand
gagcagacaagaaugauga

SEQ ID NO: 654402 - RNA, 19 nt, Homo sapiens
  misc_RNA (1)...(19): siRNA sense strand
gcaucucaccgacaauuua

SEQ ID NO: 654403 - RNA, 19 nt, Homo sapiens
  misc_RNA (1)...(19): siRNA sense strand
gcagagcagacaagaauga

SEQ ID NO: 654404 - RNA, 19 nt, Homo sapiens
  misc_RNA (1)...(19): siRNA sense strand
ccugguggauaaugaauaa

SEQ ID NO: 654405 - RNA, 19 nt, Homo sapiens
  misc_RNA (1)...(19): siRNA sense strand
gaugggaagcucucauuug

SEQ ID NO: 654406 - RNA, 19 nt, Homo sapiens
  misc_RNA (1)...(19): siRNA sense strand
ggugcuggcugcauuggaa

SEQ ID NO: 654407 - RNA, 19 nt, Homo sapiens
  misc_RNA (1)...(19): siRNA sense strand
augggaagcucucauuuga

SEQ ID NO: 654408 - RNA, 19 nt, Homo sapiens
  misc_RNA (1)...(19): siRNA sense strand
gguggauaaugaauaacaa

SEQ ID NO: 654409 - RNA, 19 nt, Homo sapiens
  misc_RNA (1)...(19): siRNA sense strand
ccgcagagcagacaagaau

SEQ ID NO: 654410 - RNA, 19 nt, Homo sapiens
  misc_RNA (1)...(19): siRNA sense strand
caccgacaauuuagaaaca

SEQ ID NO: 654411 - RNA, 19 nt, Homo sapiens
  misc_RNA (1)...(19): siRNA sense strand
gcucagaggccgagaugca

SEQ ID NO: 654412 - RNA, 19 nt, Homo sapiens
  misc_RNA (1)...(19): siRNA sense strand
aaaguggaccaguuuguga

SEQ ID NO: 654413 - RNA, 19 nt, Homo sapiens
  misc_RNA (1)...(19): siRNA sense strand
gggcaucucaccgacaauu

SEQ ID NO: 654414 - RNA, 19 nt, Homo sapiens
  misc_RNA (1)...(19): siRNA sense strand
gcgcugcuauguggacuuc

SEQ ID NO: 654415 - RNA, 19 nt, Homo sapiens
  misc_RNA (1)...(19): siRNA sense strand
ggauaaugaauaacaacug

SEQ ID NO: 654416 - RNA, 19 nt, Homo sapiens
  misc_RNA (1)...(19): siRNA sense strand
aggaaggccugcaggacuu

SEQ ID NO: 654417 - RNA, 19 nt, Homo sapiens
  misc_RNA (1)...(19): siRNA sense strand
gcaguccgcccagaagaug

SEQ ID NO: 654418 - RNA, 19 nt, Homo sapiens
  misc_RNA (1)...(19): siRNA sense strand
ccucaccacuguguucuuc

SEQ ID NO: 654419 - RNA, 19 nt, Homo sapiens
  misc_RNA (1)...(19): siRNA sense strand
cggacacccucaccacugu

SEQ ID NO: 654420 - RNA, 19 nt, Homo sapiens
  misc_RNA (1)...(19): siRNA sense strand
ccgacaauuuagaaacaga

SEQ ID NO: 654421 - RNA, 19 nt, Homo sapiens
  misc_RNA (1)...(19): siRNA sense strand
cgacaauuuagaaacagaa

SEQ ID NO: 654422 - RNA, 19 nt, Homo sapiens
  misc_RNA (1)...(19): siRNA sense strand
ucucaccgacaauuuagaa

SEQ ID NO: 654423 - RNA, 19 nt, Homo sapiens
  misc_RNA (1)...(19): siRNA sense strand
gcagacaagaaugaugaug

SEQ ID NO: 654424 - RNA, 19 nt, Homo sapiens
  misc_RNA (1)...(19): siRNA sense strand
acacagggcgcagcucaga

SEQ ID NO: 654425 - RNA, 19 nt, Homo sapiens
  misc_RNA (1)...(19): siRNA sense strand
ggcaucucaccgacaauuu

SEQ ID NO: 654426 - RNA, 19 nt, Homo sapiens
  misc_RNA (1)...(19): siRNA sense strand
ccuucacccuguaugaguu

SEQ ID NO: 654427 - RNA, 19 nt, Homo sapiens
  misc_RNA (1)...(19): siRNA sense strand
gugccuccuucacccugua

SEQ ID NO: 654428 - RNA, 19 nt, Homo sapiens
  misc_RNA (1)...(19): siRNA sense strand
ugaugggaagcucucauuu

SEQ ID NO: 654429 - RNA, 19 nt, Homo sapiens
  misc_RNA (1)...(19): siRNA sense strand
ugacuugcacauccucaug

SEQ ID NO: 654430 - RNA, 19 nt, Homo sapiens
  misc_RNA (1)...(19): siRNA sense strand
uaaaugaacccaagaagaa

SEQ ID NO: 654431 - RNA, 19 nt, Homo sapiens
  misc_RNA (1)...(19): siRNA sense strand
ggacuugacuccuguugug

SEQ ID NO: 654432 - RNA, 19 nt, Homo sapiens
  misc_RNA (1)...(19): siRNA sense strand
gaagaaauaugcaaaagag

SEQ ID NO: 654433 - RNA, 19 nt, Homo sapiens
  misc_RNA (1)...(19): siRNA sense strand
guaaaugaacccaagaaga

SEQ ID NO: 654434 - RNA, 19 nt, Homo sapiens
  misc_RNA (1)...(19): siRNA sense strand
cuauaacccugaagcugua

SEQ ID NO: 654435 - RNA, 19 nt, Homo sapiens
  misc_RNA (1)...(19): siRNA sense strand
acaccuuccuugcugauuu

SEQ ID NO: 654436 - RNA, 19 nt, Homo sapiens
  misc_RNA (1)...(19): siRNA sense strand
gcaggcgcaugcagaacuu

SEQ ID NO: 654437 - RNA, 19 nt, Homo sapiens
  misc_RNA (1)...(19): siRNA sense strand
cgucagcagugaacaugaa

SEQ ID NO: 654438 - RNA, 19 nt, Homo sapiens
  misc_RNA (1)...(19): siRNA sense strand
cccugaagcuguaaaugaa

SEQ ID NO: 654439 - RNA, 19 nt, Homo sapiens
  misc_RNA (1)...(19): siRNA sense strand
ccaagaagaagaaauaugc

SEQ ID NO: 654440 - RNA, 19 nt, Homo sapiens
  misc_RNA (1)...(19): siRNA sense strand
caccaaacccugcagucua

SEQ ID NO: 654441 - RNA, 19 nt, Homo sapiens
  misc_RNA (1)...(19): siRNA sense strand
ggagcaggcgcaugcagaa

SEQ ID NO: 654442 - RNA, 19 nt, Homo sapiens
  misc_RNA (1)...(19): siRNA sense strand
caaacccugcagucuauaa

SEQ ID NO: 654443 - RNA, 19 nt, Homo sapiens
  misc_RNA (1)...(19): siRNA sense strand
caugaacccugcaccaaac

SEQ ID NO: 654444 - RNA, 19 nt, Homo sapiens
  misc_RNA (1)...(19): siRNA sense strand
accaaacccugcagucuau

SEQ ID NO: 654445 - RNA, 19 nt, Homo sapiens
  misc_RNA (1)...(19): siRNA sense strand
aacccaagaagaagaaaua

SEQ ID NO: 654446 - RNA, 19 nt, Homo sapiens
  misc_RNA (1)...(19): siRNA sense strand
gcaguggucccagucaaga

SEQ ID NO: 654447 - RNA, 19 nt, Homo sapiens
  misc_RNA (1)...(19): siRNA sense strand
gaacccaagaagaagaaau

SEQ ID NO: 654448 - RNA, 19 nt, Homo sapiens
  misc_RNA (1)...(19): siRNA sense strand
caccuuccuugcugauuug

SEQ ID NO: 654449 - RNA, 19 nt, Homo sapiens
  misc_RNA (1)...(19): siRNA sense strand
gcaccaaacccugcagucu

SEQ ID NO: 654450 - RNA, 19 nt, Homo sapiens
  misc_RNA (1)...(19): siRNA sense strand
ggcaagaagcccacaccuu

SEQ ID NO: 654451 - RNA, 19 nt, Homo sapiens
  misc_RNA (1)...(19): siRNA sense strand
acaugaacccugcaccaaa

SEQ ID NO: 654452 - RNA, 19 nt, Homo sapiens
  misc_RNA (1)...(19): siRNA sense strand
augcagaacuuugccuuca

SEQ ID NO: 654453 - RNA, 19 nt, Homo sapiens
  misc_RNA (1)...(19): siRNA sense strand
acccugaagcuguaaauga

SEQ ID NO: 654454 - RNA, 19 nt, Homo sapiens
  misc_RNA (1)...(19): siRNA sense strand
guugugccgucagcaguga

SEQ ID NO: 654455 - RNA, 19 nt, Homo sapiens
  misc_RNA (1)...(19): siRNA sense strand
caagaagaagaaauaugca

SEQ ID NO: 654456 - RNA, 19 nt, Homo sapiens
  misc_RNA (1)...(19): siRNA sense strand
gaagagaguuuuccugaua

SEQ ID NO: 654457 - RNA, 19 nt, Homo sapiens
  misc_RNA (1)...(19): siRNA sense strand
gagaaacccugauuugugu

SEQ ID NO: 654458 - RNA, 19 nt, Homo sapiens
  misc_RNA (1)...(19): siRNA sense strand
caaaggagacaaacuaauu

SEQ ID NO: 654459 - RNA, 19 nt, Homo sapiens
  misc_RNA (1)...(19): siRNA sense strand
uaaaugaacccaagaagaa

SEQ ID NO: 654460 - RNA, 19 nt, Homo sapiens
  misc_RNA (1)...(19): siRNA sense strand
gagacaaacuaauugagaa

SEQ ID NO: 654461 - RNA, 19 nt, Homo sapiens
  misc_RNA (1)...(19): siRNA sense strand
ggacuugacuccuguugug

SEQ ID NO: 654462 - RNA, 19 nt, Homo sapiens
  misc_RNA (1)...(19): siRNA sense strand
ggagaaacccugauuugug

SEQ ID NO: 654463 - RNA, 19 nt, Homo sapiens
  misc_RNA (1)...(19): siRNA sense strand
ggagggaaaucuggacauu

SEQ ID NO: 654464 - RNA, 19 nt, Homo sapiens
  misc_RNA (1)...(19): siRNA sense strand
ggagacaaacuaauugaga

SEQ ID NO: 654465 - RNA, 19 nt, Homo sapiens
  misc_RNA (1)...(19): siRNA sense strand
gaagaaauaugcaaaagag

SEQ ID NO: 654466 - RNA, 19 nt, Homo sapiens
  misc_RNA (1)...(19): siRNA sense strand
guaaaugaacccaagaaga

SEQ ID NO: 654467 - RNA, 19 nt, Homo sapiens
  misc_RNA (1)...(19): siRNA sense strand
aagcggauuucuacccuua

SEQ ID NO: 654468 - RNA, 19 nt, Homo sapiens
  misc_RNA (1)...(19): siRNA sense strand
ggaaaucuggacauucaaa

SEQ ID NO: 654469 - RNA, 19 nt, Homo sapiens
  misc_RNA (1)...(19): siRNA sense strand
cuauaacccugaagcugua

SEQ ID NO: 654470 - RNA, 19 nt, Homo sapiens
  misc_RNA (1)...(19): siRNA sense strand
gaccaaagaggaagaggaa

SEQ ID NO: 654471 - RNA, 19 nt, Homo sapiens
  misc_RNA (1)...(19): siRNA sense strand
ccacaagcaucugaagaga

SEQ ID NO: 654472 - RNA, 19 nt, Homo sapiens
  misc_RNA (1)...(19): siRNA sense strand
gagaaacugauuauugaug

SEQ ID NO: 654473 - RNA, 19 nt, Homo sapiens
  misc_RNA (1)...(19): siRNA sense strand
ccugauagaucucaacagu

SEQ ID NO: 654474 - RNA, 19 nt, Homo sapiens
  misc_RNA (1)...(19): siRNA sense strand
gcucuagccucccgcuguu

SEQ ID NO: 654475 - RNA, 19 nt, Homo sapiens
  misc_RNA (1)...(19): siRNA sense strand
acaccuuccuugcugauuu

SEQ ID NO: 654476 - RNA, 19 nt, Homo sapiens
  misc_RNA (1)...(19): siRNA sense strand
acaagcaucugaagagagu

SEQ ID NO: 654477 - RNA, 19 nt, Homo sapiens
  misc_RNA (1)...(19): siRNA sense strand
agggaaaucuggacauuca

SEQ ID NO: 654478 - RNA, 19 nt, Homo sapiens
  misc_RNA (1)...(19): siRNA sense strand
ccaaagaggaagaggaaga

SEQ ID NO: 654479 - RNA, 19 nt, Homo sapiens
  misc_RNA (1)...(19): siRNA sense strand
cgucagcagugaacaugaa

SEQ ID NO: 654480 - RNA, 19 nt, Homo sapiens
  misc_RNA (1)...(19): siRNA sense strand
gcaggcgcaugcagaacuu

SEQ ID NO: 654481 - RNA, 19 nt, Homo sapiens
  misc_RNA (1)...(19): siRNA sense strand
uuucuacccuuaccauuga

SEQ ID NO: 654482 - RNA, 19 nt, Homo sapiens
  misc_RNA (1)...(19): siRNA sense strand
caaacuaauugagaaacug

SEQ ID NO: 654483 - RNA, 19 nt, Homo sapiens
  misc_RNA (1)...(19): siRNA sense strand
ccaagaagaagaaauaugc

SEQ ID NO: 654484 - RNA, 19 nt, Homo sapiens
  misc_RNA (1)...(19): siRNA sense strand
cccugaagcuguaaaugaa

SEQ ID NO: 654485 - RNA, 19 nt, Homo sapiens
  misc_RNA (1)...(19): siRNA sense strand
gaaacccugauuuguguga

SEQ ID NO: 654486 - RNA, 19 nt, Homo sapiens
  misc_RNA (1)...(19): siRNA sense strand
gaaacugauuauugaugag

SEQ ID NO: 654487 - RNA, 19 nt, Homo sapiens
  misc_RNA (1)...(19): siRNA sense strand
guucaacacugcccacaac

SEQ ID NO: 654488 - RNA, 19 nt, Homo sapiens
  misc_RNA (1)...(19): siRNA sense strand
caaagaggaagaggaagaa

SEQ ID NO: 654489 - RNA, 19 nt, Homo sapiens
  misc_RNA (1)...(19): siRNA sense strand
agucaaaggagacaaacua

SEQ ID NO: 654490 - RNA, 19 nt, Homo sapiens
  misc_RNA (1)...(19): siRNA sense strand
caccaaacccugcagucua

SEQ ID NO: 654491 - RNA, 19 nt, Homo sapiens
  misc_RNA (1)...(19): siRNA sense strand
gaucaucaacccagaggau

SEQ ID NO: 654492 - RNA, 19 nt, Homo sapiens
  misc_RNA (1)...(19): siRNA sense strand
caacacugcccacaacaag

SEQ ID NO: 654493 - RNA, 19 nt, Homo sapiens
  misc_RNA (1)...(19): siRNA sense strand
aaaggagacaaacuaauug

SEQ ID NO: 654494 - RNA, 19 nt, Homo sapiens
  misc_RNA (1)...(19): siRNA sense strand
caaacccugcagucuauaa

SEQ ID NO: 654495 - RNA, 19 nt, Homo sapiens
  misc_RNA (1)...(19): siRNA sense strand
ggagcaggcgcaugcagaa

SEQ ID NO: 654496 - RNA, 19 nt, Homo sapiens
  misc_RNA (1)...(19): siRNA sense strand
ugugugacuuuaccauuga

SEQ ID NO: 654497 - RNA, 19 nt, Homo sapiens
  misc_RNA (1)...(19): siRNA sense strand
gggagaaacccugauuugu

SEQ ID NO: 654498 - RNA, 19 nt, Homo sapiens
  misc_RNA (1)...(19): siRNA sense strand
accaaacccugcagucuau

SEQ ID NO: 654499 - RNA, 19 nt, Homo sapiens
  misc_RNA (1)...(19): siRNA sense strand
caugaacccugcaccaaac

SEQ ID NO: 654500 - RNA, 19 nt, Homo sapiens
  misc_RNA (1)...(19): siRNA sense strand
gacauucaaagaccaaaga

SEQ ID NO: 654501 - RNA, 19 nt, Homo sapiens
  misc_RNA (1)...(19): siRNA sense strand
aacccaagaagaagaaaua

SEQ ID NO: 654502 - RNA, 19 nt, Homo sapiens
  misc_RNA (1)...(19): siRNA sense strand
gcaguggucccagucaaga

SEQ ID NO: 654503 - RNA, 19 nt, Homo sapiens
  misc_RNA (1)...(19): siRNA sense strand
ccauugaccaccagucuug

SEQ ID NO: 654504 - RNA, 19 nt, Homo sapiens
  misc_RNA (1)...(19): siRNA sense strand
ccugauuugugugacuuua

SEQ ID NO: 654505 - RNA, 19 nt, Homo sapiens
  misc_RNA (1)...(19): siRNA sense strand
guuggucgauucaggaaca

SEQ ID NO: 654506 - RNA, 19 nt, Homo sapiens
  misc_RNA (1)...(19): siRNA sense strand
gcccacaacaagcggauuu

SEQ ID NO: 654507 - RNA, 19 nt, Homo sapiens
  misc_RNA (1)...(19): siRNA sense strand
ucaggaacauggugcaaac

SEQ ID NO: 654508 - RNA, 19 nt, Homo sapiens
  misc_RNA (1)...(19): siRNA sense strand
gaaaucuggacauucaaag

SEQ ID NO: 654509 - RNA, 19 nt, Homo sapiens
  misc_RNA (1)...(19): siRNA sense strand
gaacccaagaagaagaaau

SEQ ID NO: 654510 - RNA, 19 nt, Homo sapiens
  misc_RNA (1)...(19): siRNA sense strand
caccuuccuugcugauuug

SEQ ID NO: 654511 - RNA, 19 nt, Homo sapiens
  misc_RNA (1)...(19): siRNA sense strand
gauuauugaugagaagaag

SEQ ID NO: 654512 - RNA, 19 nt, Homo sapiens
  misc_RNA (1)...(19): siRNA sense strand
gucaaaggagacaaacuaa

SEQ ID NO: 654513 - RNA, 19 nt, Homo sapiens
  misc_RNA (1)...(19): siRNA sense strand
gguccaugcugcacuuguc

SEQ ID NO: 654514 - RNA, 19 nt, Homo sapiens
  misc_RNA (1)...(19): siRNA sense strand
gcaccaaacccugcagucu

SEQ ID NO: 654515 - RNA, 19 nt, Homo sapiens
  misc_RNA (1)...(19): siRNA sense strand
cacaacaagcggauuucua

SEQ ID NO: 654516 - RNA, 19 nt, Homo sapiens
  misc_RNA (1)...(19): siRNA sense strand
caaagaccaaagaggaaga

SEQ ID NO: 654517 - RNA, 19 nt, Homo sapiens
  misc_RNA (1)...(19): siRNA sense strand
cagugaggaugaugagauc

SEQ ID NO: 654518 - RNA, 19 nt, Homo sapiens
  misc_RNA (1)...(19): siRNA sense strand
acaacaagcggauuucuac

SEQ ID NO: 654519 - RNA, 19 nt, Homo sapiens
  misc_RNA (1)...(19): siRNA sense strand
ggcaagaagcccacaccuu

SEQ ID NO: 654520 - RNA, 19 nt, Homo sapiens
  misc_RNA (1)...(19): siRNA sense strand
gauguggaucccucaguug

SEQ ID NO: 654521 - RNA, 19 nt, Homo sapiens
  misc_RNA (1)...(19): siRNA sense strand
gacauucagugaggaugau

SEQ ID NO: 654522 - RNA, 19 nt, Homo sapiens
  misc_RNA (1)...(19): siRNA sense strand
ugacauucagugaggauga

SEQ ID NO: 654523 - RNA, 19 nt, Homo sapiens
  misc_RNA (1)...(19): siRNA sense strand
acaugaacccugcaccaaa

SEQ ID NO: 654524 - RNA, 19 nt, Homo sapiens
  misc_RNA (1)...(19): siRNA sense strand
ugggagaaacccugauuug

SEQ ID NO: 654525 - RNA, 19 nt, Homo sapiens
  misc_RNA (1)...(19): siRNA sense strand
ucaaaggagacaaacuaau

SEQ ID NO: 654526 - RNA, 19 nt, Homo sapiens
  misc_RNA (1)...(19): siRNA sense strand
uugugugacuuuaccauug

SEQ ID NO: 654527 - RNA, 19 nt, Homo sapiens
  misc_RNA (1)...(19): siRNA sense strand
ucagugaggaugaugagau

SEQ ID NO: 654528 - RNA, 19 nt, Homo sapiens
  misc_RNA (1)...(19): siRNA sense strand
augcagaacuuugccuuca

SEQ ID NO: 654529 - RNA, 19 nt, Homo sapiens
  misc_RNA (1)...(19): siRNA sense strand
caacccagaggauguggau

SEQ ID NO: 654530 - RNA, 19 nt, Homo sapiens
  misc_RNA (1)...(19): siRNA sense strand
acccugaagcuguaaauga

SEQ ID NO: 654531 - RNA, 19 nt, Homo sapiens
  misc_RNA (1)...(19): siRNA sense strand
aagcaucugaagagaguuu

SEQ ID NO: 654532 - RNA, 19 nt, Homo sapiens
  misc_RNA (1)...(19): siRNA sense strand
guugugccgucagcaguga

SEQ ID NO: 654533 - RNA, 19 nt, Homo sapiens
  misc_RNA (1)...(19): siRNA sense strand
ggacauucaaagaccaaag

SEQ ID NO: 654534 - RNA, 19 nt, Homo sapiens
  misc_RNA (1)...(19): siRNA sense strand
aaggagacaaacuaauuga

SEQ ID NO: 654535 - RNA, 19 nt, Homo sapiens
  misc_RNA (1)...(19): siRNA sense strand
caagaagaagaaauaugca

SEQ ID NO: 654536 - RNA, 19 nt, Homo sapiens
  misc_RNA (1)...(19): siRNA sense strand
gagggaaaucuggacauuc

SEQ ID NO: 654537 - RNA, 19 nt, Homo sapiens
  misc_RNA (1)...(19): siRNA sense strand
ucaacacugcccacaacaa

SEQ ID NO: 654538 - RNA, 19 nt, Homo sapiens
  misc_RNA (1)...(19): siRNA sense strand
ggauuucuacccuuaccau

SEQ ID NO: 654539 - RNA, 19 nt, Homo sapiens
  misc_RNA (1)...(19): siRNA sense strand
uaaaugaacccaagaagaa

SEQ ID NO: 654540 - RNA, 19 nt, Homo sapiens
  misc_RNA (1)...(19): siRNA sense strand
ggacuugacuccuguugug

SEQ ID NO: 654541 - RNA, 19 nt, Homo sapiens
  misc_RNA (1)...(19): siRNA sense strand
ggagggaaaucuggacauu

SEQ ID NO: 654542 - RNA, 19 nt, Homo sapiens
  misc_RNA (1)...(19): siRNA sense strand
gaagaaauaugcaaaagag

SEQ ID NO: 654543 - RNA, 19 nt, Homo sapiens
  misc_RNA (1)...(19): siRNA sense strand
guaaaugaacccaagaaga

SEQ ID NO: 654544 - RNA, 19 nt, Homo sapiens
  misc_RNA (1)...(19): siRNA sense strand
aagcggauuucuacccuua

SEQ ID NO: 654545 - RNA, 19 nt, Homo sapiens
  misc_RNA (1)...(19): siRNA sense strand
ggaaaucuggacauucaaa

SEQ ID NO: 654546 - RNA, 19 nt, Homo sapiens
  misc_RNA (1)...(19): siRNA sense strand
cuauaacccugaagcugua

SEQ ID NO: 654547 - RNA, 19 nt, Homo sapiens
  misc_RNA (1)...(19): siRNA sense strand
gaccaaagaggaagaggaa

SEQ ID NO: 654548 - RNA, 19 nt, Homo sapiens
  misc_RNA (1)...(19): siRNA sense strand
acaccuuccuugcugauuu

SEQ ID NO: 654549 - RNA, 19 nt, Homo sapiens
  misc_RNA (1)...(19): siRNA sense strand
agggaaaucuggacauuca

SEQ ID NO: 654550 - RNA, 19 nt, Homo sapiens
  misc_RNA (1)...(19): siRNA sense strand
ccaaagaggaagaggaaga

SEQ ID NO: 654551 - RNA, 19 nt, Homo sapiens
  misc_RNA (1)...(19): siRNA sense strand
cgucagcagugaacaugaa

SEQ ID NO: 654552 - RNA, 19 nt, Homo sapiens
  misc_RNA (1)...(19): siRNA sense strand
gcaggcgcaugcagaacuu

SEQ ID NO: 654553 - RNA, 19 nt, Homo sapiens
  misc_RNA (1)...(19): siRNA sense strand
uuucuacccuuaccauuga

SEQ ID NO: 654554 - RNA, 19 nt, Homo sapiens
  misc_RNA (1)...(19): siRNA sense strand
cccugaagcuguaaaugaa

SEQ ID NO: 654555 - RNA, 19 nt, Homo sapiens
  misc_RNA (1)...(19): siRNA sense strand
ccaagaagaagaaauaugc

SEQ ID NO: 654556 - RNA, 19 nt, Homo sapiens
  misc_RNA (1)...(19): siRNA sense strand
caaagaggaagaggaagaa

SEQ ID NO: 654557 - RNA, 19 nt, Homo sapiens
  misc_RNA (1)...(19): siRNA sense strand
guucaacacugcccacaac

SEQ ID NO: 654558 - RNA, 19 nt, Homo sapiens
  misc_RNA (1)...(19): siRNA sense strand
gaucaucaacccagaggau

SEQ ID NO: 654559 - RNA, 19 nt, Homo sapiens
  misc_RNA (1)...(19): siRNA sense strand
caccaaacccugcagucua

SEQ ID NO: 654560 - RNA, 19 nt, Homo sapiens
  misc_RNA (1)...(19): siRNA sense strand
ggagcaggcgcaugcagaa

SEQ ID NO: 654561 - RNA, 19 nt, Homo sapiens
  misc_RNA (1)...(19): siRNA sense strand
caacacugcccacaacaag

SEQ ID NO: 654562 - RNA, 19 nt, Homo sapiens
  misc_RNA (1)...(19): siRNA sense strand
caaacccugcagucuauaa

SEQ ID NO: 654563 - RNA, 19 nt, Homo sapiens
  misc_RNA (1)...(19): siRNA sense strand
caugaacccugcaccaaac

SEQ ID NO: 654564 - RNA, 19 nt, Homo sapiens
  misc_RNA (1)...(19): siRNA sense strand
accaaacccugcagucuau

SEQ ID NO: 654565 - RNA, 19 nt, Homo sapiens
  misc_RNA (1)...(19): siRNA sense strand
gacauucaaagaccaaaga

SEQ ID NO: 654566 - RNA, 19 nt, Homo sapiens
  misc_RNA (1)...(19): siRNA sense strand
aacccaagaagaagaaaua

SEQ ID NO: 654567 - RNA, 19 nt, Homo sapiens
  misc_RNA (1)...(19): siRNA sense strand
gcaguggucccagucaaga

SEQ ID NO: 654568 - RNA, 19 nt, Homo sapiens
  misc_RNA (1)...(19): siRNA sense strand
guuggucgauucaggaaca

SEQ ID NO: 654569 - RNA, 19 nt, Homo sapiens
  misc_RNA (1)...(19): siRNA sense strand
gaaaucuggacauucaaag

SEQ ID NO: 654570 - RNA, 19 nt, Homo sapiens
  misc_RNA (1)...(19): siRNA sense strand
gcccacaacaagcggauuu

SEQ ID NO: 654571 - RNA, 19 nt, Homo sapiens
  misc_RNA (1)...(19): siRNA sense strand
ucaggaacauggugcaaac

SEQ ID NO: 654572 - RNA, 19 nt, Homo sapiens
  misc_RNA (1)...(19): siRNA sense strand
gaacccaagaagaagaaau

SEQ ID NO: 654573 - RNA, 19 nt, Homo sapiens
  misc_RNA (1)...(19): siRNA sense strand
caccuuccuugcugauuug

SEQ ID NO: 654574 - RNA, 19 nt, Homo sapiens
  misc_RNA (1)...(19): siRNA sense strand
cacaacaagcggauuucua

SEQ ID NO: 654575 - RNA, 19 nt, Homo sapiens
  misc_RNA (1)...(19): siRNA sense strand
gcaccaaacccugcagucu

SEQ ID NO: 654576 - RNA, 19 nt, Homo sapiens
  misc_RNA (1)...(19): siRNA sense strand
caaagaccaaagaggaaga

SEQ ID NO: 654577 - RNA, 19 nt, Homo sapiens
  misc_RNA (1)...(19): siRNA sense strand
cagugaggaugaugagauc

SEQ ID NO: 654578 - RNA, 19 nt, Homo sapiens
  misc_RNA (1)...(19): siRNA sense strand
acaacaagcggauuucuac

SEQ ID NO: 654579 - RNA, 19 nt, Homo sapiens
  misc_RNA (1)...(19): siRNA sense strand
ggcaagaagcccacaccuu

SEQ ID NO: 654580 - RNA, 19 nt, Homo sapiens
  misc_RNA (1)...(19): siRNA sense strand
gauguggaucccucaguug

SEQ ID NO: 654581 - RNA, 19 nt, Homo sapiens
  misc_RNA (1)...(19): siRNA sense strand
gacauucagugaggaugau

SEQ ID NO: 654582 - RNA, 19 nt, Homo sapiens
  misc_RNA (1)...(19): siRNA sense strand
ugacauucagugaggauga

SEQ ID NO: 654583 - RNA, 19 nt, Homo sapiens
  misc_RNA (1)...(19): siRNA sense strand
acaugaacccugcaccaaa

SEQ ID NO: 654584 - RNA, 19 nt, Homo sapiens
  misc_RNA (1)...(19): siRNA sense strand
ucagugaggaugaugagau

SEQ ID NO: 654585 - RNA, 19 nt, Homo sapiens
  misc_RNA (1)...(19): siRNA sense strand
augcagaacuuugccuuca

SEQ ID NO: 654586 - RNA, 19 nt, Homo sapiens
  misc_RNA (1)...(19): siRNA sense strand
caacccagaggauguggau

SEQ ID NO: 654587 - RNA, 19 nt, Homo sapiens
  misc_RNA (1)...(19): siRNA sense strand
acccugaagcuguaaauga

SEQ ID NO: 654588 - RNA, 19 nt, Homo sapiens
  misc_RNA (1)...(19): siRNA sense strand
guugugccgucagcaguga

SEQ ID NO: 654589 - RNA, 19 nt, Homo sapiens
  misc_RNA (1)...(19): siRNA sense strand
ggacauucaaagaccaaag

SEQ ID NO: 654590 - RNA, 19 nt, Homo sapiens
  misc_RNA (1)...(19): siRNA sense strand
caagaagaagaaauaugca

SEQ ID NO: 654591 - RNA, 19 nt, Homo sapiens
  misc_RNA (1)...(19): siRNA sense strand
gagggaaaucuggacauuc

SEQ ID NO: 654592 - RNA, 19 nt, Homo sapiens
  misc_RNA (1)...(19): siRNA sense strand
ucaacacugcccacaacaa

SEQ ID NO: 654593 - RNA, 19 nt, Homo sapiens
  misc_RNA (1)...(19): siRNA sense strand
ggauuucuacccuuaccau

SEQ ID NO: 654594 - RNA, 19 nt, Homo sapiens
  misc_RNA (1)...(19): siRNA sense strand
ccaaggacggcuggguuua

SEQ ID NO: 654595 - RNA, 19 nt, Homo sapiens
  misc_RNA (1)...(19): siRNA sense strand
ggacggcuggguuuacuac

SEQ ID NO: 654596 - RNA, 19 nt, Homo sapiens
  misc_RNA (1)...(19): siRNA sense strand
gggaggagagaaccaccaa

SEQ ID NO: 654597 - RNA, 19 nt, Homo sapiens
  misc_RNA (1)...(19): siRNA sense strand
ccaaggacggcuggguuua

SEQ ID NO: 654598 - RNA, 19 nt, Homo sapiens
  misc_RNA (1)...(19): siRNA sense strand
ggacggcuggguuuacuac

SEQ ID NO: 654599 - RNA, 19 nt, Homo sapiens
  misc_RNA (1)...(19): siRNA sense strand
gggaggagagaaccaccaa

SEQ ID NO: 654600 - RNA, 19 nt, Homo sapiens
  misc_RNA (1)...(19): siRNA sense strand
ccaaggacggcuggguuua

SEQ ID NO: 654601 - RNA, 19 nt, Homo sapiens
  misc_RNA (1)...(19): siRNA sense strand
ggacggcuggguuuacuac

SEQ ID NO: 654602 - RNA, 19 nt, Homo sapiens
  misc_RNA (1)...(19): siRNA sense strand
gggaggagagaaccaccaa

SEQ ID NO: 654603 - RNA, 19 nt, Homo sapiens
  misc_RNA (1)...(19): siRNA sense strand
ccaaggacggcuggguuua

SEQ ID NO: 654604 - RNA, 19 nt, Homo sapiens
  misc_RNA (1)...(19): siRNA sense strand
ggacggcuggguuuacuac

SEQ ID NO: 654605 - RNA, 19 nt, Homo sapiens
  misc_RNA (1)...(19): siRNA sense strand
gggaggagagaaccaccaa

SEQ ID NO: 654606 - RNA, 19 nt, Homo sapiens
  misc_RNA (1)...(19): siRNA sense strand
ccaaggacggcuggguuua

SEQ ID NO: 654607 - RNA, 19 nt, Homo sapiens
  misc_RNA (1)...(19): siRNA sense strand
ggacggcuggguuuacuac

SEQ ID NO: 654608 - RNA, 19 nt, Homo sapiens
  misc_RNA (1)...(19): siRNA sense strand
gggaggagagaaccaccaa

SEQ ID NO: 654609 - RNA, 19 nt, Homo sapiens
  misc_RNA (1)...(19): siRNA sense strand
ccaaggacggcuggguuua

SEQ ID NO: 654610 - RNA, 19 nt, Homo sapiens
  misc_RNA (1)...(19): siRNA sense strand
ggacggcuggguuuacuac

SEQ ID NO: 654611 - RNA, 19 nt, Homo sapiens
  misc_RNA (1)...(19): siRNA sense strand
gggaggagagaaccaccaa

SEQ ID NO: 654612 - RNA, 19 nt, Homo sapiens
  misc_RNA (1)...(19): siRNA sense strand
ccaaggacggcuggguuua

SEQ ID NO: 654613 - RNA, 19 nt, Homo sapiens
  misc_RNA (1)...(19): siRNA sense strand
ggacggcuggguuuacuac

SEQ ID NO: 654614 - RNA, 19 nt, Homo sapiens
  misc_RNA (1)...(19): siRNA sense strand
gggaggagagaaccaccaa

SEQ ID NO: 654615 - RNA, 19 nt, Homo sapiens
  misc_RNA (1)...(19): siRNA sense strand
gaacaucaccuuagagauu

SEQ ID NO: 654616 - RNA, 19 nt, Homo sapiens
  misc_RNA (1)...(19): siRNA sense strand
gagauuacuuugaggaaua

SEQ ID NO: 654617 - RNA, 19 nt, Homo sapiens
  misc_RNA (1)...(19): siRNA sense strand
uaaagaagauacugaggaa

SEQ ID NO: 654618 - RNA, 19 nt, Homo sapiens
  misc_RNA (1)...(19): siRNA sense strand
gaaauaccauaccaucaau

SEQ ID NO: 654619 - RNA, 19 nt, Homo sapiens
  misc_RNA (1)...(19): siRNA sense strand
gaaguggaaauuacaauga

SEQ ID NO: 654620 - RNA, 19 nt, Homo sapiens
  misc_RNA (1)...(19): siRNA sense strand
ccauugagauaauuacuga

SEQ ID NO: 654621 - RNA, 19 nt, Homo sapiens
  misc_RNA (1)...(19): siRNA sense strand
ugcaagaccucauucaauu

SEQ ID NO: 654622 - RNA, 19 nt, Homo sapiens
  misc_RNA (1)...(19): siRNA sense strand
gacaagaaaugcaggaagu

SEQ ID NO: 654623 - RNA, 19 nt, Homo sapiens
  misc_RNA (1)...(19): siRNA sense strand
gaacuacuacgaacaaugg

SEQ ID NO: 654624 - RNA, 19 nt, Homo sapiens
  misc_RNA (1)...(19): siRNA sense strand
ggagaguaguugagccaaa

SEQ ID NO: 654625 - RNA, 19 nt, Homo sapiens
  misc_RNA (1)...(19): siRNA sense strand
uaacuacgguccaaugaag

SEQ ID NO: 654626 - RNA, 19 nt, Homo sapiens
  misc_RNA (1)...(19): siRNA sense strand
ggaggcaacuuuggcuuug

SEQ ID NO: 654627 - RNA, 19 nt, Homo sapiens
  misc_RNA (1)...(19): siRNA sense strand
aaugaagaguggaaacuuu

SEQ ID NO: 654628 - RNA, 19 nt, Homo sapiens
  misc_RNA (1)...(19): siRNA sense strand
ugaggaacaucaccuuaga

SEQ ID NO: 654629 - RNA, 19 nt, Homo sapiens
  misc_RNA (1)...(19): siRNA sense strand
gauaggcagucuggaaaga

SEQ ID NO: 654630 - RNA, 19 nt, Homo sapiens
  misc_RNA (1)...(19): siRNA sense strand
gcucuuuauugguggcuua

SEQ ID NO: 654631 - RNA, 19 nt, Homo sapiens
  misc_RNA (1)...(19): siRNA sense strand
aacaucaccuuagagauua

SEQ ID NO: 654632 - RNA, 19 nt, Homo sapiens
  misc_RNA (1)...(19): siRNA sense strand
aggaggaucugauggauau

SEQ ID NO: 654633 - RNA, 19 nt, Homo sapiens
  misc_RNA (1)...(19): siRNA sense strand
gugaagaagcuguuuguug

SEQ ID NO: 654634 - RNA, 19 nt, Homo sapiens
  misc_RNA (1)...(19): siRNA sense strand
gagggauccugcaagcaaa

SEQ ID NO: 654635 - RNA, 19 nt, Homo sapiens
  misc_RNA (1)...(19): siRNA sense strand
ggaagaggaggcaacuuug

SEQ ID NO: 654636 - RNA, 19 nt, Homo sapiens
  misc_RNA (1)...(19): siRNA sense strand
caagaccucauucaauuga

SEQ ID NO: 654637 - RNA, 19 nt, Homo sapiens
  misc_RNA (1)...(19): siRNA sense strand
gcaagaccucauucaauug

SEQ ID NO: 654638 - RNA, 19 nt, Homo sapiens
  misc_RNA (1)...(19): siRNA sense strand
ccagcaaccuucuaacuac

SEQ ID NO: 654639 - RNA, 19 nt, Homo sapiens
  misc_RNA (1)...(19): siRNA sense strand
caagagaggaaucuggaaa

SEQ ID NO: 654640 - RNA, 19 nt, Homo sapiens
  misc_RNA (1)...(19): siRNA sense strand
gaacaauggggaaagcuua

SEQ ID NO: 654641 - RNA, 19 nt, Homo sapiens
  misc_RNA (1)...(19): siRNA sense strand
ggaaguggaaauuacaaug

SEQ ID NO: 654642 - RNA, 19 nt, Homo sapiens
  misc_RNA (1)...(19): siRNA sense strand
gaaauuauggaaguggaaa

SEQ ID NO: 654643 - RNA, 19 nt, Homo sapiens
  misc_RNA (1)...(19): siRNA sense strand
ggaccaggaccaggaagua

SEQ ID NO: 654644 - RNA, 19 nt, Homo sapiens
  misc_RNA (1)...(19): siRNA sense strand
caaaagaucaagaggauuu

SEQ ID NO: 654645 - RNA, 19 nt, Homo sapiens
  misc_RNA (1)...(19): siRNA sense strand
gaaguucagaguucuagga

SEQ ID NO: 654646 - RNA, 19 nt, Homo sapiens
  misc_RNA (1)...(19): siRNA sense strand
agaaauaccauaccaucaa

SEQ ID NO: 654647 - RNA, 19 nt, Homo sapiens
  misc_RNA (1)...(19): siRNA sense strand
gaggaacuacuacgaacaa

SEQ ID NO: 654648 - RNA, 19 nt, Homo sapiens
  misc_RNA (1)...(19): siRNA sense strand
gcuuuggcuuuguuacuuu

SEQ ID NO: 654649 - RNA, 19 nt, Homo sapiens
  misc_RNA (1)...(19): siRNA sense strand
gaucaagaggauuugguuu

SEQ ID NO: 654650 - RNA, 19 nt, Homo sapiens
  misc_RNA (1)...(19): siRNA sense strand
cagaagaaaguuugaggaa

SEQ ID NO: 654651 - RNA, 19 nt, Homo sapiens
  misc_RNA (1)...(19): siRNA sense strand
gaggaggaucugauggaua

SEQ ID NO: 654652 - RNA, 19 nt, Homo sapiens
  misc_RNA (1)...(19): siRNA sense strand
uggaagaggaggcaacuuu

SEQ ID NO: 654653 - RNA, 19 nt, Homo sapiens
  misc_RNA (1)...(19): siRNA sense strand
ggaggaaauuauggaagug

SEQ ID NO: 654654 - RNA, 19 nt, Homo sapiens
  misc_RNA (1)...(19): siRNA sense strand
ggauggcuauaauggguau

SEQ ID NO: 654655 - RNA, 19 nt, Homo sapiens
  misc_RNA (1)...(19): siRNA sense strand
uaggcagucuggaaagaaa

SEQ ID NO: 654656 - RNA, 19 nt, Homo sapiens
  misc_RNA (1)...(19): siRNA sense strand
caucaauggucauaaugca

SEQ ID NO: 654657 - RNA, 19 nt, Homo sapiens
  misc_RNA (1)...(19): siRNA sense strand
ggucauaaugcagaaguaa

SEQ ID NO: 654658 - RNA, 19 nt, Homo sapiens
  misc_RNA (1)...(19): siRNA sense strand
gcaggaaguucagaguucu

SEQ ID NO: 654659 - RNA, 19 nt, Homo sapiens
  misc_RNA (1)...(19): siRNA sense strand
gcuguuuguuggcggaauu

SEQ ID NO: 654660 - RNA, 19 nt, Homo sapiens
  misc_RNA (1)...(19): siRNA sense strand
gaagaggaggcaacuuugg

SEQ ID NO: 654661 - RNA, 19 nt, Homo sapiens
  misc_RNA (1)...(19): siRNA sense strand
gaccaggaccaggaaguaa

SEQ ID NO: 654662 - RNA, 19 nt, Homo sapiens
  misc_RNA (1)...(19): siRNA sense strand
aguggaaacuuugguggua

SEQ ID NO: 654663 - RNA, 19 nt, Homo sapiens
  misc_RNA (1)...(19): siRNA sense strand
ggaaauuauggaaguggaa

SEQ ID NO: 654664 - RNA, 19 nt, Homo sapiens
  misc_RNA (1)...(19): siRNA sense strand
ggaggaggaaauuauggaa

SEQ ID NO: 654665 - RNA, 19 nt, Homo sapiens
  misc_RNA (1)...(19): siRNA sense strand
gagaguaguugagccaaaa

SEQ ID NO: 654666 - RNA, 19 nt, Homo sapiens
  misc_RNA (1)...(19): siRNA sense strand
cuacggaggugguuaugac

SEQ ID NO: 654667 - RNA, 19 nt, Homo sapiens
  misc_RNA (1)...(19): siRNA sense strand
ggaggaagaggaggauaug

SEQ ID NO: 654668 - RNA, 19 nt, Homo sapiens
  misc_RNA (1)...(19): siRNA sense strand
ggaacuacuacgaacaaug

SEQ ID NO: 654669 - RNA, 19 nt, Homo sapiens
  misc_RNA (1)...(19): siRNA sense strand
gggcucauguaacugugaa

SEQ ID NO: 654670 - RNA, 19 nt, Homo sapiens
  misc_RNA (1)...(19): siRNA sense strand
guaaugagggauccugcaa

SEQ ID NO: 654671 - RNA, 19 nt, Homo sapiens
  misc_RNA (1)...(19): siRNA sense strand
ccuuagagauuacuuugag

SEQ ID NO: 654672 - RNA, 19 nt, Homo sapiens
  misc_RNA (1)...(19): siRNA sense strand
uccguaagcucuuuauugg

SEQ ID NO: 654673 - RNA, 19 nt, Homo sapiens
  misc_RNA (1)...(19): siRNA sense strand
gcaagagaggaaucuggaa

SEQ ID NO: 654674 - RNA, 19 nt, Homo sapiens
  misc_RNA (1)...(19): siRNA sense strand
ucauaaugcagaaguaaga

SEQ ID NO: 654675 - RNA, 19 nt, Homo sapiens
  misc_RNA (1)...(19): siRNA sense strand
ucauguaacugugaagaag

SEQ ID NO: 654676 - RNA, 19 nt, Homo sapiens
  misc_RNA (1)...(19): siRNA sense strand
caagaaaugcaggaaguuc

SEQ ID NO: 654677 - RNA, 19 nt, Homo sapiens
  misc_RNA (1)...(19): siRNA sense strand
ugagggauccugcaagcaa

SEQ ID NO: 654678 - RNA, 19 nt, Homo sapiens
  misc_RNA (1)...(19): siRNA sense strand
ggcuuuggcuuuguuacuu

SEQ ID NO: 654679 - RNA, 19 nt, Homo sapiens
  misc_RNA (1)...(19): siRNA sense strand
ugaaaccacagaagaaagu

SEQ ID NO: 654680 - RNA, 19 nt, Homo sapiens
  misc_RNA (1)...(19): siRNA sense strand
caacuauggaggaggaaau

SEQ ID NO: 654681 - RNA, 19 nt, Homo sapiens
  misc_RNA (1)...(19): siRNA sense strand
gaaaugcaggaaguucaga

SEQ ID NO: 654682 - RNA, 19 nt, Homo sapiens
  misc_RNA (1)...(19): siRNA sense strand
ugagauaauuacugauagg

SEQ ID NO: 654683 - RNA, 19 nt, Homo sapiens
  misc_RNA (1)...(19): siRNA sense strand
ggaauuaaagaagauacug

SEQ ID NO: 654684 - RNA, 19 nt, Homo sapiens
  misc_RNA (1)...(19): siRNA sense strand
caauggucauaaugcagaa

SEQ ID NO: 654685 - RNA, 19 nt, Homo sapiens
  misc_RNA (1)...(19): siRNA sense strand
aggaggaaauuauggaagu

SEQ ID NO: 654686 - RNA, 19 nt, Homo sapiens
  misc_RNA (1)...(19): siRNA sense strand
ugcaggaaguucagaguuc

SEQ ID NO: 654687 - RNA, 19 nt, Homo sapiens
  misc_RNA (1)...(19): siRNA sense strand
agaccucauucaauugaug

SEQ ID NO: 654688 - RNA, 19 nt, Homo sapiens
  misc_RNA (1)...(19): siRNA sense strand
gcuuugaaaccacagaaga

SEQ ID NO: 654689 - RNA, 19 nt, Homo sapiens
  misc_RNA (1)...(19): siRNA sense strand
gaaaccacagaagaaaguu

SEQ ID NO: 654690 - RNA, 19 nt, Homo sapiens
  misc_RNA (1)...(19): siRNA sense strand
aagaagauacugaggaaca

SEQ ID NO: 654691 - RNA, 19 nt, Homo sapiens
  misc_RNA (1)...(19): siRNA sense strand
cagaaauaccauaccauca

SEQ ID NO: 654692 - RNA, 19 nt, Homo sapiens
  misc_RNA (1)...(19): siRNA sense strand
caaugaagaguggaaacuu

SEQ ID NO: 654693 - RNA, 19 nt, Homo sapiens
  misc_RNA (1)...(19): siRNA sense strand
ggcuuaagcuuugaaacca

SEQ ID NO: 654694 - RNA, 19 nt, Homo sapiens
  misc_RNA (1)...(19): siRNA sense strand
gaggugguuaugacaacua

SEQ ID NO: 654695 - RNA, 19 nt, Homo sapiens
  misc_RNA (1)...(19): siRNA sense strand
auugguggcuuaagcuuug

SEQ ID NO: 654696 - RNA, 19 nt, Homo sapiens
  misc_RNA (1)...(19): siRNA sense strand
gcugcaagaccucauucaa

SEQ ID NO: 654697 - RNA, 19 nt, Homo sapiens
  misc_RNA (1)...(19): siRNA sense strand
uuauggaaguggaaauuac

SEQ ID NO: 654698 - RNA, 19 nt, Homo sapiens
  misc_RNA (1)...(19): siRNA sense strand
acaguuccguaagcucuuu

SEQ ID NO: 654699 - RNA, 19 nt, Homo sapiens
  misc_RNA (1)...(19): siRNA sense strand
agagauuacuuugaggaau

SEQ ID NO: 654700 - RNA, 19 nt, Homo sapiens
  misc_RNA (1)...(19): siRNA sense strand
cugcaagaccucauucaau

SEQ ID NO: 654701 - RNA, 19 nt, Homo sapiens
  misc_RNA (1)...(19): siRNA sense strand
cuauggaggaggaaauuau

SEQ ID NO: 654702 - RNA, 19 nt, Homo sapiens
  misc_RNA (1)...(19): siRNA sense strand
ucaagaggauuugguuuug

SEQ ID NO: 654703 - RNA, 19 nt, Homo sapiens
  misc_RNA (1)...(19): siRNA sense strand
aagaggcuuuggcuuuguu

SEQ ID NO: 654704 - RNA, 19 nt, Homo sapiens
  misc_RNA (1)...(19): siRNA sense strand
uaacugugaagaagcuguu

SEQ ID NO: 654705 - RNA, 19 nt, Homo sapiens
  misc_RNA (1)...(19): siRNA sense strand
gaagauacugaggaacauc

SEQ ID NO: 654706 - RNA, 19 nt, Homo sapiens
  misc_RNA (1)...(19): siRNA sense strand
uggcggaauuaaagaagau

SEQ ID NO: 654707 - RNA, 19 nt, Homo sapiens
  misc_RNA (1)...(19): siRNA sense strand
gaagaguggaaacuuuggu

SEQ ID NO: 654708 - RNA, 19 nt, Homo sapiens
  misc_RNA (1)...(19): siRNA sense strand
auaaccagcaaccuucuaa

SEQ ID NO: 654709 - RNA, 19 nt, Homo sapiens
  misc_RNA (1)...(19): siRNA sense strand
gggcuacggaggugguuau

SEQ ID NO: 654710 - RNA, 19 nt, Homo sapiens
  misc_RNA (1)...(19): siRNA sense strand
uagaggaggaucugaugga

SEQ ID NO: 654711 - RNA, 19 nt, Homo sapiens
  misc_RNA (1)...(19): siRNA sense strand
caccuuagagauuacuuug

SEQ ID NO: 654712 - RNA, 19 nt, Homo sapiens
  misc_RNA (1)...(19): siRNA sense strand
agaagauacugaggaacau

SEQ ID NO: 654713 - RNA, 19 nt, Homo sapiens
  misc_RNA (1)...(19): siRNA sense strand
aagaggauuugguuuugua

SEQ ID NO: 654714 - RNA, 19 nt, Homo sapiens
  misc_RNA (1)...(19): siRNA sense strand
ggaacaucaccuuagagau

SEQ ID NO: 654715 - RNA, 19 nt, Homo sapiens
  misc_RNA (1)...(19): siRNA sense strand
gaacaucaccuuagagauu

SEQ ID NO: 654716 - RNA, 19 nt, Homo sapiens
  misc_RNA (1)...(19): siRNA sense strand
gagauuacuuugaggaaua

SEQ ID NO: 654717 - RNA, 19 nt, Homo sapiens
  misc_RNA (1)...(19): siRNA sense strand
uaaagaagauacugaggaa

SEQ ID NO: 654718 - RNA, 19 nt, Homo sapiens
  misc_RNA (1)...(19): siRNA sense strand
gaaauaccauaccaucaau

SEQ ID NO: 654719 - RNA, 19 nt, Homo sapiens
  misc_RNA (1)...(19): siRNA sense strand
gaaguggaaauuacaauga

SEQ ID NO: 654720 - RNA, 19 nt, Homo sapiens
  misc_RNA (1)...(19): siRNA sense strand
ccauugagauaauuacuga

SEQ ID NO: 654721 - RNA, 19 nt, Homo sapiens
  misc_RNA (1)...(19): siRNA sense strand
ugcaagaccucauucaauu

SEQ ID NO: 654722 - RNA, 19 nt, Homo sapiens
  misc_RNA (1)...(19): siRNA sense strand
gacaagaaaugcaggaagu

SEQ ID NO: 654723 - RNA, 19 nt, Homo sapiens
  misc_RNA (1)...(19): siRNA sense strand
gaacuacuacgaacaaugg

SEQ ID NO: 654724 - RNA, 19 nt, Homo sapiens
  misc_RNA (1)...(19): siRNA sense strand
ggagaguaguugagccaaa

SEQ ID NO: 654725 - RNA, 19 nt, Homo sapiens
  misc_RNA (1)...(19): siRNA sense strand
uaacuacgguccaaugaag

SEQ ID NO: 654726 - RNA, 19 nt, Homo sapiens
  misc_RNA (1)...(19): siRNA sense strand
ggaggcaacuuuggcuuug

SEQ ID NO: 654727 - RNA, 19 nt, Homo sapiens
  misc_RNA (1)...(19): siRNA sense strand
aaugaagaguggaaacuuu

SEQ ID NO: 654728 - RNA, 19 nt, Homo sapiens
  misc_RNA (1)...(19): siRNA sense strand
ugaggaacaucaccuuaga

SEQ ID NO: 654729 - RNA, 19 nt, Homo sapiens
  misc_RNA (1)...(19): siRNA sense strand
gauaggcagucuggaaaga

SEQ ID NO: 654730 - RNA, 19 nt, Homo sapiens
  misc_RNA (1)...(19): siRNA sense strand
gcucuuuauugguggcuua

SEQ ID NO: 654731 - RNA, 19 nt, Homo sapiens
  misc_RNA (1)...(19): siRNA sense strand
aacaucaccuuagagauua

SEQ ID NO: 654732 - RNA, 19 nt, Homo sapiens
  misc_RNA (1)...(19): siRNA sense strand
aggaggaucugauggauau

SEQ ID NO: 654733 - RNA, 19 nt, Homo sapiens
  misc_RNA (1)...(19): siRNA sense strand
gugaagaagcuguuuguug

SEQ ID NO: 654734 - RNA, 19 nt, Homo sapiens
  misc_RNA (1)...(19): siRNA sense strand
gagggauccugcaagcaaa

SEQ ID NO: 654735 - RNA, 19 nt, Homo sapiens
  misc_RNA (1)...(19): siRNA sense strand
ggaagaggaggcaacuuug

SEQ ID NO: 654736 - RNA, 19 nt, Homo sapiens
  misc_RNA (1)...(19): siRNA sense strand
caagaccucauucaauuga

SEQ ID NO: 654737 - RNA, 19 nt, Homo sapiens
  misc_RNA (1)...(19): siRNA sense strand
gcaagaccucauucaauug

SEQ ID NO: 654738 - RNA, 19 nt, Homo sapiens
  misc_RNA (1)...(19): siRNA sense strand
ccagcaaccuucuaacuac

SEQ ID NO: 654739 - RNA, 19 nt, Homo sapiens
  misc_RNA (1)...(19): siRNA sense strand
caagagaggaaucuggaaa

SEQ ID NO: 654740 - RNA, 19 nt, Homo sapiens
  misc_RNA (1)...(19): siRNA sense strand
gaacaauggggaaagcuua

SEQ ID NO: 654741 - RNA, 19 nt, Homo sapiens
  misc_RNA (1)...(19): siRNA sense strand
ggaaguggaaauuacaaug

SEQ ID NO: 654742 - RNA, 19 nt, Homo sapiens
  misc_RNA (1)...(19): siRNA sense strand
gaaauuauggaaguggaaa

SEQ ID NO: 654743 - RNA, 19 nt, Homo sapiens
  misc_RNA (1)...(19): siRNA sense strand
ggaccaggaccaggaagua

SEQ ID NO: 654744 - RNA, 19 nt, Homo sapiens
  misc_RNA (1)...(19): siRNA sense strand
caaaagaucaagaggauuu

SEQ ID NO: 654745 - RNA, 19 nt, Homo sapiens
  misc_RNA (1)...(19): siRNA sense strand
gaaguucagaguucuagga

SEQ ID NO: 654746 - RNA, 19 nt, Homo sapiens
  misc_RNA (1)...(19): siRNA sense strand
agaaauaccauaccaucaa

SEQ ID NO: 654747 - RNA, 19 nt, Homo sapiens
  misc_RNA (1)...(19): siRNA sense strand
gaggaacuacuacgaacaa

SEQ ID NO: 654748 - RNA, 19 nt, Homo sapiens
  misc_RNA (1)...(19): siRNA sense strand
gcuuuggcuuuguuacuuu

SEQ ID NO: 654749 - RNA, 19 nt, Homo sapiens
  misc_RNA (1)...(19): siRNA sense strand
gaucaagaggauuugguuu

SEQ ID NO: 654750 - RNA, 19 nt, Homo sapiens
  misc_RNA (1)...(19): siRNA sense strand
cagaagaaaguuugaggaa

SEQ ID NO: 654751 - RNA, 19 nt, Homo sapiens
  misc_RNA (1)...(19): siRNA sense strand
gaggaggaucugauggaua

SEQ ID NO: 654752 - RNA, 19 nt, Homo sapiens
  misc_RNA (1)...(19): siRNA sense strand
uggaagaggaggcaacuuu

SEQ ID NO: 654753 - RNA, 19 nt, Homo sapiens
  misc_RNA (1)...(19): siRNA sense strand
ggaggaaauuauggaagug

SEQ ID NO: 654754 - RNA, 19 nt, Homo sapiens
  misc_RNA (1)...(19): siRNA sense strand
ggauggcuauaauggguau

SEQ ID NO: 654755 - RNA, 19 nt, Homo sapiens
  misc_RNA (1)...(19): siRNA sense strand
uaggcagucuggaaagaaa

SEQ ID NO: 654756 - RNA, 19 nt, Homo sapiens
  misc_RNA (1)...(19): siRNA sense strand
caucaauggucauaaugca

SEQ ID NO: 654757 - RNA, 19 nt, Homo sapiens
  misc_RNA (1)...(19): siRNA sense strand
ggucauaaugcagaaguaa

SEQ ID NO: 654758 - RNA, 19 nt, Homo sapiens
  misc_RNA (1)...(19): siRNA sense strand
gcaggaaguucagaguucu

SEQ ID NO: 654759 - RNA, 19 nt, Homo sapiens
  misc_RNA (1)...(19): siRNA sense strand
gcuguuuguuggcggaauu

SEQ ID NO: 654760 - RNA, 19 nt, Homo sapiens
  misc_RNA (1)...(19): siRNA sense strand
gaagaggaggcaacuuugg

SEQ ID NO: 654761 - RNA, 19 nt, Homo sapiens
  misc_RNA (1)...(19): siRNA sense strand
gaccaggaccaggaaguaa

SEQ ID NO: 654762 - RNA, 19 nt, Homo sapiens
  misc_RNA (1)...(19): siRNA sense strand
aguggaaacuuugguggua

SEQ ID NO: 654763 - RNA, 19 nt, Homo sapiens
  misc_RNA (1)...(19): siRNA sense strand
ggaaauuauggaaguggaa

SEQ ID NO: 654764 - RNA, 19 nt, Homo sapiens
  misc_RNA (1)...(19): siRNA sense strand
ggaggaggaaauuauggaa

SEQ ID NO: 654765 - RNA, 19 nt, Homo sapiens
  misc_RNA (1)...(19): siRNA sense strand
gagaguaguugagccaaaa

SEQ ID NO: 654766 - RNA, 19 nt, Homo sapiens
  misc_RNA (1)...(19): siRNA sense strand
cuacggaggugguuaugac

SEQ ID NO: 654767 - RNA, 19 nt, Homo sapiens
  misc_RNA (1)...(19): siRNA sense strand
ggaggaagaggaggauaug

SEQ ID NO: 654768 - RNA, 19 nt, Homo sapiens
  misc_RNA (1)...(19): siRNA sense strand
ggaacuacuacgaacaaug

SEQ ID NO: 654769 - RNA, 19 nt, Homo sapiens
  misc_RNA (1)...(19): siRNA sense strand
gggcucauguaacugugaa

SEQ ID NO: 654770 - RNA, 19 nt, Homo sapiens
  misc_RNA (1)...(19): siRNA sense strand
guaaugagggauccugcaa

SEQ ID NO: 654771 - RNA, 19 nt, Homo sapiens
  misc_RNA (1)...(19): siRNA sense strand
ccuuagagauuacuuugag

SEQ ID NO: 654772 - RNA, 19 nt, Homo sapiens
  misc_RNA (1)...(19): siRNA sense strand
uccguaagcucuuuauugg

SEQ ID NO: 654773 - RNA, 19 nt, Homo sapiens
  misc_RNA (1)...(19): siRNA sense strand
gcaagagaggaaucuggaa

SEQ ID NO: 654774 - RNA, 19 nt, Homo sapiens
  misc_RNA (1)...(19): siRNA sense strand
ucauaaugcagaaguaaga

SEQ ID NO: 654775 - RNA, 19 nt, Homo sapiens
  misc_RNA (1)...(19): siRNA sense strand
ucauguaacugugaagaag

SEQ ID NO: 654776 - RNA, 19 nt, Homo sapiens
  misc_RNA (1)...(19): siRNA sense strand
caagaaaugcaggaaguuc

SEQ ID NO: 654777 - RNA, 19 nt, Homo sapiens
  misc_RNA (1)...(19): siRNA sense strand
ugagggauccugcaagcaa

SEQ ID NO: 654778 - RNA, 19 nt, Homo sapiens
  misc_RNA (1)...(19): siRNA sense strand
ggcuuuggcuuuguuacuu

SEQ ID NO: 654779 - RNA, 19 nt, Homo sapiens
  misc_RNA (1)...(19): siRNA sense strand
ugaaaccacagaagaaagu

SEQ ID NO: 654780 - RNA, 19 nt, Homo sapiens
  misc_RNA (1)...(19): siRNA sense strand
caacuauggaggaggaaau

SEQ ID NO: 654781 - RNA, 19 nt, Homo sapiens
  misc_RNA (1)...(19): siRNA sense strand
gaaaugcaggaaguucaga

SEQ ID NO: 654782 - RNA, 19 nt, Homo sapiens
  misc_RNA (1)...(19): siRNA sense strand
ugagauaauuacugauagg

SEQ ID NO: 654783 - RNA, 19 nt, Homo sapiens
  misc_RNA (1)...(19): siRNA sense strand
ggaauuaaagaagauacug

SEQ ID NO: 654784 - RNA, 19 nt, Homo sapiens
  misc_RNA (1)...(19): siRNA sense strand
caauggucauaaugcagaa

SEQ ID NO: 654785 - RNA, 19 nt, Homo sapiens
  misc_RNA (1)...(19): siRNA sense strand
aggaggaaauuauggaagu

SEQ ID NO: 654786 - RNA, 19 nt, Homo sapiens
  misc_RNA (1)...(19): siRNA sense strand
ugcaggaaguucagaguuc

SEQ ID NO: 654787 - RNA, 19 nt, Homo sapiens
  misc_RNA (1)...(19): siRNA sense strand
agaccucauucaauugaug

SEQ ID NO: 654788 - RNA, 19 nt, Homo sapiens
  misc_RNA (1)...(19): siRNA sense strand
gcuuugaaaccacagaaga

SEQ ID NO: 654789 - RNA, 19 nt, Homo sapiens
  misc_RNA (1)...(19): siRNA sense strand
gaaaccacagaagaaaguu

SEQ ID NO: 654790 - RNA, 19 nt, Homo sapiens
  misc_RNA (1)...(19): siRNA sense strand
aagaagauacugaggaaca

SEQ ID NO: 654791 - RNA, 19 nt, Homo sapiens
  misc_RNA (1)...(19): siRNA sense strand
cagaaauaccauaccauca

SEQ ID NO: 654792 - RNA, 19 nt, Homo sapiens
  misc_RNA (1)...(19): siRNA sense strand
caaugaagaguggaaacuu

SEQ ID NO: 654793 - RNA, 19 nt, Homo sapiens
  misc_RNA (1)...(19): siRNA sense strand
ggcuuaagcuuugaaacca

SEQ ID NO: 654794 - RNA, 19 nt, Homo sapiens
  misc_RNA (1)...(19): siRNA sense strand
gaggugguuaugacaacua

SEQ ID NO: 654795 - RNA, 19 nt, Homo sapiens
  misc_RNA (1)...(19): siRNA sense strand
auugguggcuuaagcuuug

SEQ ID NO: 654796 - RNA, 19 nt, Homo sapiens
  misc_RNA (1)...(19): siRNA sense strand
gcugcaagaccucauucaa

SEQ ID NO: 654797 - RNA, 19 nt, Homo sapiens
  misc_RNA (1)...(19): siRNA sense strand
uuauggaaguggaaauuac

SEQ ID NO: 654798 - RNA, 19 nt, Homo sapiens
  misc_RNA (1)...(19): siRNA sense strand
acaguuccguaagcucuuu

SEQ ID NO: 654799 - RNA, 19 nt, Homo sapiens
  misc_RNA (1)...(19): siRNA sense strand
agagauuacuuugaggaau

SEQ ID NO: 654800 - RNA, 19 nt, Homo sapiens
  misc_RNA (1)...(19): siRNA sense strand
cugcaagaccucauucaau

SEQ ID NO: 654801 - RNA, 19 nt, Homo sapiens
  misc_RNA (1)...(19): siRNA sense strand
cuauggaggaggaaauuau

SEQ ID NO: 654802 - RNA, 19 nt, Homo sapiens
  misc_RNA (1)...(19): siRNA sense strand
ucaagaggauuugguuuug

SEQ ID NO: 654803 - RNA, 19 nt, Homo sapiens
  misc_RNA (1)...(19): siRNA sense strand
aagaggcuuuggcuuuguu

SEQ ID NO: 654804 - RNA, 19 nt, Homo sapiens
  misc_RNA (1)...(19): siRNA sense strand
uaacugugaagaagcuguu

SEQ ID NO: 654805 - RNA, 19 nt, Homo sapiens
  misc_RNA (1)...(19): siRNA sense strand
gaagauacugaggaacauc

SEQ ID NO: 654806 - RNA, 19 nt, Homo sapiens
  misc_RNA (1)...(19): siRNA sense strand
uggcggaauuaaagaagau

SEQ ID NO: 654807 - RNA, 19 nt, Homo sapiens
  misc_RNA (1)...(19): siRNA sense strand
gaagaguggaaacuuuggu

SEQ ID NO: 654808 - RNA, 19 nt, Homo sapiens
  misc_RNA (1)...(19): siRNA sense strand
auaaccagcaaccuucuaa

SEQ ID NO: 654809 - RNA, 19 nt, Homo sapiens
  misc_RNA (1)...(19): siRNA sense strand
gggcuacggaggugguuau

SEQ ID NO: 654810 - RNA, 19 nt, Homo sapiens
  misc_RNA (1)...(19): siRNA sense strand
uagaggaggaucugaugga

SEQ ID NO: 654811 - RNA, 19 nt, Homo sapiens
  misc_RNA (1)...(19): siRNA sense strand
caccuuagagauuacuuug

SEQ ID NO: 654812 - RNA, 19 nt, Homo sapiens
  misc_RNA (1)...(19): siRNA sense strand
agaagauacugaggaacau

SEQ ID NO: 654813 - RNA, 19 nt, Homo sapiens
  misc_RNA (1)...(19): siRNA sense strand
aagaggauuugguuuugua

SEQ ID NO: 654814 - RNA, 19 nt, Homo sapiens
  misc_RNA (1)...(19): siRNA sense strand
ggaacaucaccuuagagau

SEQ ID NO: 654815 - RNA, 19 nt, Homo sapiens
  misc_RNA (1)...(19): siRNA sense strand
ggagauccaugguagcuua

SEQ ID NO: 654816 - RNA, 19 nt, Homo sapiens
  misc_RNA (1)...(19): siRNA sense strand
guucaaguauggcagauuu

SEQ ID NO: 654817 - RNA, 19 nt, Homo sapiens
  misc_RNA (1)...(19): siRNA sense strand
cagaggagcuggagguuau

SEQ ID NO: 654818 - RNA, 19 nt, Homo sapiens
  misc_RNA (1)...(19): siRNA sense strand
gauccaugguagcuuauuu

SEQ ID NO: 654819 - RNA, 19 nt, Homo sapiens
  misc_RNA (1)...(19): siRNA sense strand
gcacauagucaucaucuca

SEQ ID NO: 654820 - RNA, 19 nt, Homo sapiens
  misc_RNA (1)...(19): siRNA sense strand
gaaaccagauuugccugaa

SEQ ID NO: 654821 - RNA, 19 nt, Homo sapiens
  misc_RNA (1)...(19): siRNA sense strand
ccacugugauuuaugucua

SEQ ID NO: 654822 - RNA, 19 nt, Homo sapiens
  misc_RNA (1)...(19): siRNA sense strand
gaguuguggcugagaauua

SEQ ID NO: 654823 - RNA, 19 nt, Homo sapiens
  misc_RNA (1)...(19): siRNA sense strand
guacccagcagccauguuu

SEQ ID NO: 654824 - RNA, 19 nt, Homo sapiens
  misc_RNA (1)...(19): siRNA sense strand
gcaaagcacauagucauca

SEQ ID NO: 654825 - RNA, 19 nt, Homo sapiens
  misc_RNA (1)...(19): siRNA sense strand
aaaccuggauccugccauu

SEQ ID NO: 654826 - RNA, 19 nt, Homo sapiens
  misc_RNA (1)...(19): siRNA sense strand
gaaccuggaacucaagaug

SEQ ID NO: 654827 - RNA, 19 nt, Homo sapiens
  misc_RNA (1)...(19): siRNA sense strand
uggaggagguugacagaga

SEQ ID NO: 654828 - RNA, 19 nt, Homo sapiens
  misc_RNA (1)...(19): siRNA sense strand
aaaccagauuugccugaaa

SEQ ID NO: 654829 - RNA, 19 nt, Homo sapiens
  misc_RNA (1)...(19): siRNA sense strand
gcaaggcuggcaccaagaa

SEQ ID NO: 654830 - RNA, 19 nt, Homo sapiens
  misc_RNA (1)...(19): siRNA sense strand
cagcaucccaguugagaaa

SEQ ID NO: 654831 - RNA, 19 nt, Homo sapiens
  misc_RNA (1)...(19): siRNA sense strand
gcacuuccucuguggugua

SEQ ID NO: 654832 - RNA, 19 nt, Homo sapiens
  misc_RNA (1)...(19): siRNA sense strand
gcucgcccacugugauuua

SEQ ID NO: 654833 - RNA, 19 nt, Homo sapiens
  misc_RNA (1)...(19): siRNA sense strand
caaagcacauagucaucau

SEQ ID NO: 654834 - RNA, 19 nt, Homo sapiens
  misc_RNA (1)...(19): siRNA sense strand
uccaauuuguccagcuuua

SEQ ID NO: 654835 - RNA, 19 nt, Homo sapiens
  misc_RNA (1)...(19): siRNA sense strand
gcucggccaaguucaagua

SEQ ID NO: 654836 - RNA, 19 nt, Homo sapiens
  misc_RNA (1)...(19): siRNA sense strand
cgauugauuucccagcuau

SEQ ID NO: 654837 - RNA, 19 nt, Homo sapiens
  misc_RNA (1)...(19): siRNA sense strand
aaagugguguuccgaccuu

SEQ ID NO: 654838 - RNA, 19 nt, Homo sapiens
  misc_RNA (1)...(19): siRNA sense strand
gcuggagguuauuggagaa

SEQ ID NO: 654839 - RNA, 19 nt, Homo sapiens
  misc_RNA (1)...(19): siRNA sense strand
cucaggagcugguguuagu

SEQ ID NO: 654840 - RNA, 19 nt, Homo sapiens
  misc_RNA (1)...(19): siRNA sense strand
gagcucgcccacugugauu

SEQ ID NO: 654841 - RNA, 19 nt, Homo sapiens
  misc_RNA (1)...(19): siRNA sense strand
ugauuucccagcuauauug

SEQ ID NO: 654842 - RNA, 19 nt, Homo sapiens
  misc_RNA (1)...(19): siRNA sense strand
ccacacgaaaccagauuug

SEQ ID NO: 654843 - RNA, 19 nt, Homo sapiens
  misc_RNA (1)...(19): siRNA sense strand
cggccaaguucaaguaugg

SEQ ID NO: 654844 - RNA, 19 nt, Homo sapiens
  misc_RNA (1)...(19): siRNA sense strand
gcuauauuguggccugaag

SEQ ID NO: 654845 - RNA, 19 nt, Homo sapiens
  misc_RNA (1)...(19): siRNA sense strand
ucagaggagcuggagguua

SEQ ID NO: 654846 - RNA, 19 nt, Homo sapiens
  misc_RNA (1)...(19): siRNA sense strand
gagaauuacaagaguccaa

SEQ ID NO: 654847 - RNA, 19 nt, Homo sapiens
  misc_RNA (1)...(19): siRNA sense strand
ugucccaagucgauugauu

SEQ ID NO: 654848 - RNA, 19 nt, Homo sapiens
  misc_RNA (1)...(19): siRNA sense strand
ggucaucacccagaacauc

SEQ ID NO: 654849 - RNA, 19 nt, Homo sapiens
  misc_RNA (1)...(19): siRNA sense strand
ucgauugauuucccagcua

SEQ ID NO: 654850 - RNA, 19 nt, Homo sapiens
  misc_RNA (1)...(19): siRNA sense strand
gucccaagucgauugauuu

SEQ ID NO: 654851 - RNA, 19 nt, Homo sapiens
  misc_RNA (1)...(19): siRNA sense strand
ucacccagaacaucgauga

SEQ ID NO: 654852 - RNA, 19 nt, Homo sapiens
  misc_RNA (1)...(19): siRNA sense strand
ggaguuguggcugagaauu

SEQ ID NO: 654853 - RNA, 19 nt, Homo sapiens
  misc_RNA (1)...(19): siRNA sense strand
guggaguuguggcugagaa

SEQ ID NO: 654854 - RNA, 19 nt, Homo sapiens
  misc_RNA (1)...(19): siRNA sense strand
cagauugucccaagucgau

SEQ ID NO: 654855 - RNA, 19 nt, Homo sapiens
  misc_RNA (1)...(19): siRNA sense strand
ggagcuggagguuauugga

SEQ ID NO: 654856 - RNA, 19 nt, Homo sapiens
  misc_RNA (1)...(19): siRNA sense strand
caauuuguccagcuuuauc

SEQ ID NO: 654857 - RNA, 19 nt, Homo sapiens
  misc_RNA (1)...(19): siRNA sense strand
aagcaaagcacauagucau

SEQ ID NO: 654858 - RNA, 19 nt, Homo sapiens
  misc_RNA (1)...(19): siRNA sense strand
guccagcuuuaucaggaaa

SEQ ID NO: 654859 - RNA, 19 nt, Homo sapiens
  misc_RNA (1)...(19): siRNA sense strand
gauugucccaagucgauug

SEQ ID NO: 654860 - RNA, 19 nt, Homo sapiens
  misc_RNA (1)...(19): siRNA sense strand
aggaaaaggugcuccagaa

SEQ ID NO: 654861 - RNA, 19 nt, Homo sapiens
  misc_RNA (1)...(19): siRNA sense strand
ccaugguagcuuauuuaaa

SEQ ID NO: 654862 - RNA, 19 nt, Homo sapiens
  misc_RNA (1)...(19): siRNA sense strand
cgcccacugugauuuaugu

SEQ ID NO: 654863 - RNA, 19 nt, Homo sapiens
  misc_RNA (1)...(19): siRNA sense strand
gaggagcuggagguuauug

SEQ ID NO: 654864 - RNA, 19 nt, Homo sapiens
  misc_RNA (1)...(19): siRNA sense strand
ggagguuauuggagaaaau

SEQ ID NO: 654865 - RNA, 19 nt, Homo sapiens
  misc_RNA (1)...(19): siRNA sense strand
ccuccagcguccacacgaa

SEQ ID NO: 654866 - RNA, 19 nt, Homo sapiens
  misc_RNA (1)...(19): siRNA sense strand
ggagauccaugguagcuua

SEQ ID NO: 654867 - RNA, 19 nt, Homo sapiens
  misc_RNA (1)...(19): siRNA sense strand
guucaaguauggcagauuu

SEQ ID NO: 654868 - RNA, 19 nt, Homo sapiens
  misc_RNA (1)...(19): siRNA sense strand
cagaggagcuggagguuau

SEQ ID NO: 654869 - RNA, 19 nt, Homo sapiens
  misc_RNA (1)...(19): siRNA sense strand
gauccaugguagcuuauuu

SEQ ID NO: 654870 - RNA, 19 nt, Homo sapiens
  misc_RNA (1)...(19): siRNA sense strand
gcacauagucaucaucuca

SEQ ID NO: 654871 - RNA, 19 nt, Homo sapiens
  misc_RNA (1)...(19): siRNA sense strand
gaaaccagauuugccugaa

SEQ ID NO: 654872 - RNA, 19 nt, Homo sapiens
  misc_RNA (1)...(19): siRNA sense strand
ccacugugauuuaugucua

SEQ ID NO: 654873 - RNA, 19 nt, Homo sapiens
  misc_RNA (1)...(19): siRNA sense strand
gaguuguggcugagaauua

SEQ ID NO: 654874 - RNA, 19 nt, Homo sapiens
  misc_RNA (1)...(19): siRNA sense strand
guacccagcagccauguuu

SEQ ID NO: 654875 - RNA, 19 nt, Homo sapiens
  misc_RNA (1)...(19): siRNA sense strand
gcaaagcacauagucauca

SEQ ID NO: 654876 - RNA, 19 nt, Homo sapiens
  misc_RNA (1)...(19): siRNA sense strand
aaaccuggauccugccauu

SEQ ID NO: 654877 - RNA, 19 nt, Homo sapiens
  misc_RNA (1)...(19): siRNA sense strand
gaaccuggaacucaagaug

SEQ ID NO: 654878 - RNA, 19 nt, Homo sapiens
  misc_RNA (1)...(19): siRNA sense strand
uggaggagguugacagaga

SEQ ID NO: 654879 - RNA, 19 nt, Homo sapiens
  misc_RNA (1)...(19): siRNA sense strand
aaaccagauuugccugaaa

SEQ ID NO: 654880 - RNA, 19 nt, Homo sapiens
  misc_RNA (1)...(19): siRNA sense strand
gcaaggcuggcaccaagaa

SEQ ID NO: 654881 - RNA, 19 nt, Homo sapiens
  misc_RNA (1)...(19): siRNA sense strand
cagcaucccaguugagaaa

SEQ ID NO: 654882 - RNA, 19 nt, Homo sapiens
  misc_RNA (1)...(19): siRNA sense strand
gcacuuccucuguggugua

SEQ ID NO: 654883 - RNA, 19 nt, Homo sapiens
  misc_RNA (1)...(19): siRNA sense strand
gcucgcccacugugauuua

SEQ ID NO: 654884 - RNA, 19 nt, Homo sapiens
  misc_RNA (1)...(19): siRNA sense strand
caaagcacauagucaucau

SEQ ID NO: 654885 - RNA, 19 nt, Homo sapiens
  misc_RNA (1)...(19): siRNA sense strand
uccaauuuguccagcuuua

SEQ ID NO: 654886 - RNA, 19 nt, Homo sapiens
  misc_RNA (1)...(19): siRNA sense strand
gcucggccaaguucaagua

SEQ ID NO: 654887 - RNA, 19 nt, Homo sapiens
  misc_RNA (1)...(19): siRNA sense strand
cgauugauuucccagcuau

SEQ ID NO: 654888 - RNA, 19 nt, Homo sapiens
  misc_RNA (1)...(19): siRNA sense strand
aaagugguguuccgaccuu

SEQ ID NO: 654889 - RNA, 19 nt, Homo sapiens
  misc_RNA (1)...(19): siRNA sense strand
gcuggagguuauuggagaa

SEQ ID NO: 654890 - RNA, 19 nt, Homo sapiens
  misc_RNA (1)...(19): siRNA sense strand
cucaggagcugguguuagu

SEQ ID NO: 654891 - RNA, 19 nt, Homo sapiens
  misc_RNA (1)...(19): siRNA sense strand
gagcucgcccacugugauu

SEQ ID NO: 654892 - RNA, 19 nt, Homo sapiens
  misc_RNA (1)...(19): siRNA sense strand
ugauuucccagcuauauug

SEQ ID NO: 654893 - RNA, 19 nt, Homo sapiens
  misc_RNA (1)...(19): siRNA sense strand
ccacacgaaaccagauuug

SEQ ID NO: 654894 - RNA, 19 nt, Homo sapiens
  misc_RNA (1)...(19): siRNA sense strand
cggccaaguucaaguaugg

SEQ ID NO: 654895 - RNA, 19 nt, Homo sapiens
  misc_RNA (1)...(19): siRNA sense strand
gcuauauuguggccugaag

SEQ ID NO: 654896 - RNA, 19 nt, Homo sapiens
  misc_RNA (1)...(19): siRNA sense strand
ucagaggagcuggagguua

SEQ ID NO: 654897 - RNA, 19 nt, Homo sapiens
  misc_RNA (1)...(19): siRNA sense strand
gagaauuacaagaguccaa

SEQ ID NO: 654898 - RNA, 19 nt, Homo sapiens
  misc_RNA (1)...(19): siRNA sense strand
ugucccaagucgauugauu

SEQ ID NO: 654899 - RNA, 19 nt, Homo sapiens
  misc_RNA (1)...(19): siRNA sense strand
ggucaucacccagaacauc

SEQ ID NO: 654900 - RNA, 19 nt, Homo sapiens
  misc_RNA (1)...(19): siRNA sense strand
ucgauugauuucccagcua

SEQ ID NO: 654901 - RNA, 19 nt, Homo sapiens
  misc_RNA (1)...(19): siRNA sense strand
gucccaagucgauugauuu

SEQ ID NO: 654902 - RNA, 19 nt, Homo sapiens
  misc_RNA (1)...(19): siRNA sense strand
ucacccagaacaucgauga

SEQ ID NO: 654903 - RNA, 19 nt, Homo sapiens
  misc_RNA (1)...(19): siRNA sense strand
ggaguuguggcugagaauu

SEQ ID NO: 654904 - RNA, 19 nt, Homo sapiens
  misc_RNA (1)...(19): siRNA sense strand
guggaguuguggcugagaa

SEQ ID NO: 654905 - RNA, 19 nt, Homo sapiens
  misc_RNA (1)...(19): siRNA sense strand
cagauugucccaagucgau

SEQ ID NO: 654906 - RNA, 19 nt, Homo sapiens
  misc_RNA (1)...(19): siRNA sense strand
ggagcuggagguuauugga

SEQ ID NO: 654907 - RNA, 19 nt, Homo sapiens
  misc_RNA (1)...(19): siRNA sense strand
caauuuguccagcuuuauc

SEQ ID NO: 654908 - RNA, 19 nt, Homo sapiens
  misc_RNA (1)...(19): siRNA sense strand
aagcaaagcacauagucau

SEQ ID NO: 654909 - RNA, 19 nt, Homo sapiens
  misc_RNA (1)...(19): siRNA sense strand
guccagcuuuaucaggaaa

SEQ ID NO: 654910 - RNA, 19 nt, Homo sapiens
  misc_RNA (1)...(19): siRNA sense strand
gauugucccaagucgauug

SEQ ID NO: 654911 - RNA, 19 nt, Homo sapiens
  misc_RNA (1)...(19): siRNA sense strand
aggaaaaggugcuccagaa

SEQ ID NO: 654912 - RNA, 19 nt, Homo sapiens
  misc_RNA (1)...(19): siRNA sense strand
ccaugguagcuuauuuaaa

SEQ ID NO: 654913 - RNA, 19 nt, Homo sapiens
  misc_RNA (1)...(19): siRNA sense strand
cgcccacugugauuuaugu

SEQ ID NO: 654914 - RNA, 19 nt, Homo sapiens
  misc_RNA (1)...(19): siRNA sense strand
gaggagcuggagguuauug

SEQ ID NO: 654915 - RNA, 19 nt, Homo sapiens
  misc_RNA (1)...(19): siRNA sense strand
ggagguuauuggagaaaau

SEQ ID NO: 654916 - RNA, 19 nt, Homo sapiens
  misc_RNA (1)...(19): siRNA sense strand
ccuccagcguccacacgaa

SEQ ID NO: 654917 - RNA, 19 nt, Homo sapiens
  misc_RNA (1)...(19): siRNA sense strand
caaagaagauugugcuaag

SEQ ID NO: 654918 - RNA, 19 nt, Homo sapiens
  misc_RNA (1)...(19): siRNA sense strand
agagaaugcuggcuauuaa

SEQ ID NO: 654919 - RNA, 19 nt, Homo sapiens
  misc_RNA (1)...(19): siRNA sense strand
gagcccaacugcagaucua

SEQ ID NO: 654920 - RNA, 19 nt, Homo sapiens
  misc_RNA (1)...(19): siRNA sense strand
gaagagaaagggccaagug

SEQ ID NO: 654921 - RNA, 19 nt, Homo sapiens
  misc_RNA (1)...(19): siRNA sense strand
ggaaagcggcguuaugaca

SEQ ID NO: 654922 - RNA, 19 nt, Homo sapiens
  misc_RNA (1)...(19): siRNA sense strand
gggcaaggauucucuguac

SEQ ID NO: 654923 - RNA, 19 nt, Homo sapiens
  misc_RNA (1)...(19): siRNA sense strand
gaggagauaagaagagaaa

SEQ ID NO: 654924 - RNA, 19 nt, Homo sapiens
  misc_RNA (1)...(19): siRNA sense strand
gaacugggaggagauaaga

SEQ ID NO: 654925 - RNA, 19 nt, Homo sapiens
  misc_RNA (1)...(19): siRNA sense strand
cccauaaagugacacagua

SEQ ID NO: 654926 - RNA, 19 nt, Homo sapiens
  misc_RNA (1)...(19): siRNA sense strand
gccaagugauccaguucua

SEQ ID NO: 654927 - RNA, 19 nt, Homo sapiens
  misc_RNA (1)...(19): siRNA sense strand
gggaggagauaagaagaga

SEQ ID NO: 654928 - RNA, 19 nt, Homo sapiens
  misc_RNA (1)...(19): siRNA sense strand
gagaaagggccaagugauc

SEQ ID NO: 654929 - RNA, 19 nt, Homo sapiens
  misc_RNA (1)...(19): siRNA sense strand
aagagaaugcuggcuauua

SEQ ID NO: 654930 - RNA, 19 nt, Homo sapiens
  misc_RNA (1)...(19): siRNA sense strand
cuaagagaaugcuggcuau

SEQ ID NO: 654931 - RNA, 19 nt, Homo sapiens
  misc_RNA (1)...(19): siRNA sense strand
gagaaugcuggcuauuaaa

SEQ ID NO: 654932 - RNA, 19 nt, Homo sapiens
  misc_RNA (1)...(19): siRNA sense strand
gaagcagaguggcuauggu

SEQ ID NO: 654933 - RNA, 19 nt, Homo sapiens
  misc_RNA (1)...(19): siRNA sense strand
gcuauggugggcaaacuaa

SEQ ID NO: 654934 - RNA, 19 nt, Homo sapiens
  misc_RNA (1)...(19): siRNA sense strand
caacugcagaucuaagaga

SEQ ID NO: 654935 - RNA, 19 nt, Homo sapiens
  misc_RNA (1)...(19): siRNA sense strand
gggcaaacuaagccgauuu

SEQ ID NO: 654936 - RNA, 19 nt, Homo sapiens
  misc_RNA (1)...(19): siRNA sense strand
ggagauaagaagagaaagg

SEQ ID NO: 654937 - RNA, 19 nt, Homo sapiens
  misc_RNA (1)...(19): siRNA sense strand
acaagaagggcaaggauuc

SEQ ID NO: 654938 - RNA, 19 nt, Homo sapiens
  misc_RNA (1)...(19): siRNA sense strand
cugcagaucuaagagaaug

SEQ ID NO: 654939 - RNA, 19 nt, Homo sapiens
  misc_RNA (1)...(19): siRNA sense strand
cgccggacuuucuguaaga

SEQ ID NO: 654940 - RNA, 19 nt, Homo sapiens
  misc_RNA (1)...(19): siRNA sense strand
aaagugacacaguacaaga

SEQ ID NO: 654941 - RNA, 19 nt, Homo sapiens
  misc_RNA (1)...(19): siRNA sense strand
ccaagugauccaguucuaa

SEQ ID NO: 654942 - RNA, 19 nt, Homo sapiens
  misc_RNA (1)...(19): siRNA sense strand
guacaagaagggcaaggau

SEQ ID NO: 654943 - RNA, 19 nt, Homo sapiens
  misc_RNA (1)...(19): siRNA sense strand
ggaagcagaguggcuaugg

SEQ ID NO: 654944 - RNA, 19 nt, Homo sapiens
  misc_RNA (1)...(19): siRNA sense strand
gcaccaaccccauaaagug

SEQ ID NO: 654945 - RNA, 19 nt, Homo sapiens
  misc_RNA (1)...(19): siRNA sense strand
gaaagggccaagugaucca

SEQ ID NO: 654946 - RNA, 19 nt, Homo sapiens
  misc_RNA (1)...(19): siRNA sense strand
agggaaagcggcguuauga

SEQ ID NO: 654947 - RNA, 19 nt, Homo sapiens
  misc_RNA (1)...(19): siRNA sense strand
gcaagcaccaaccccauaa

SEQ ID NO: 654948 - RNA, 19 nt, Homo sapiens
  misc_RNA (1)...(19): siRNA sense strand
aaagaagauugugcuaagg

SEQ ID NO: 654949 - RNA, 19 nt, Homo sapiens
  misc_RNA (1)...(19): siRNA sense strand
aagagaaagggccaaguga

SEQ ID NO: 654950 - RNA, 19 nt, Homo sapiens
  misc_RNA (1)...(19): siRNA sense strand
uacaagaagggcaaggauu

SEQ ID NO: 654951 - RNA, 19 nt, Homo sapiens
  misc_RNA (1)...(19): siRNA sense strand
uaaagugacacaguacaag

SEQ ID NO: 654952 - RNA, 19 nt, Homo sapiens
  misc_RNA (1)...(19): siRNA sense strand
cagggaaagcggcguuaug

SEQ ID NO: 654953 - RNA, 19 nt, Homo sapiens
  misc_RNA (1)...(19): siRNA sense strand
uaagagaaugcuggcuauu

SEQ ID NO: 654954 - RNA, 19 nt, Homo sapiens
  misc_RNA (1)...(19): siRNA sense strand
aacugcagaucuaagagaa

SEQ ID NO: 654955 - RNA, 19 nt, Homo sapiens
  misc_RNA (1)...(19): siRNA sense strand
guaagaaguguggcaagca

SEQ ID NO: 654956 - RNA, 19 nt, Homo sapiens
  misc_RNA (1)...(19): siRNA sense strand
ggaggagauaagaagagaa

SEQ ID NO: 654957 - RNA, 19 nt, Homo sapiens
  misc_RNA (1)...(19): siRNA sense strand
gaacagaucugaugaauga

SEQ ID NO: 654958 - RNA, 19 nt, Homo sapiens
  misc_RNA (1)...(19): siRNA sense strand
caagagagcugaagacuau

SEQ ID NO: 654959 - RNA, 19 nt, Homo sapiens
  misc_RNA (1)...(19): siRNA sense strand
gaagggaguuugcuaaauu

SEQ ID NO: 654960 - RNA, 19 nt, Homo sapiens
  misc_RNA (1)...(19): siRNA sense strand
ccacagacauuuacauuaa

SEQ ID NO: 654961 - RNA, 19 nt, Homo sapiens
  misc_RNA (1)...(19): siRNA sense strand
gcgcauaucuggaaauuug

SEQ ID NO: 654962 - RNA, 19 nt, Homo sapiens
  misc_RNA (1)...(19): siRNA sense strand
gaagagggauaauacaaau

SEQ ID NO: 654963 - RNA, 19 nt, Homo sapiens
  misc_RNA (1)...(19): siRNA sense strand
gugaagacauggaugcuua

SEQ ID NO: 654964 - RNA, 19 nt, Homo sapiens
  misc_RNA (1)...(19): siRNA sense strand
gaaagacgauuuggagaau

SEQ ID NO: 654965 - RNA, 19 nt, Homo sapiens
  misc_RNA (1)...(19): siRNA sense strand
guaauucaguugaucauug

SEQ ID NO: 654966 - RNA, 19 nt, Homo sapiens
  misc_RNA (1)...(19): siRNA sense strand
gaaaugaggaggauuacuu

SEQ ID NO: 654967 - RNA, 19 nt, Homo sapiens
  misc_RNA (1)...(19): siRNA sense strand
caaaucauguggagaaugu

SEQ ID NO: 654968 - RNA, 19 nt, Homo sapiens
  misc_RNA (1)...(19): siRNA sense strand
gaacugcaccagcccauuu

SEQ ID NO: 654969 - RNA, 19 nt, Homo sapiens
  misc_RNA (1)...(19): siRNA sense strand
guacagauccgaaguuuca

SEQ ID NO: 654970 - RNA, 19 nt, Homo sapiens
  misc_RNA (1)...(19): siRNA sense strand
cagaugaaguuaacaguga

SEQ ID NO: 654971 - RNA, 19 nt, Homo sapiens
  misc_RNA (1)...(19): siRNA sense strand
ggaguuugcuaaauuugaa

SEQ ID NO: 654972 - RNA, 19 nt, Homo sapiens
  misc_RNA (1)...(19): siRNA sense strand
gugcagagccuucaauaaa

SEQ ID NO: 654973 - RNA, 19 nt, Homo sapiens
  misc_RNA (1)...(19): siRNA sense strand
gaacaacgaggucaugguu

SEQ ID NO: 654974 - RNA, 19 nt, Homo sapiens
  misc_RNA (1)...(19): siRNA sense strand
gaaacuugguggcauuguu

SEQ ID NO: 654975 - RNA, 19 nt, Homo sapiens
  misc_RNA (1)...(19): siRNA sense strand
gaaaugguguuugcaagug

SEQ ID NO: 654976 - RNA, 19 nt, Homo sapiens
  misc_RNA (1)...(19): siRNA sense strand
ggaagagggauaauacaaa

SEQ ID NO: 654977 - RNA, 19 nt, Homo sapiens
  misc_RNA (1)...(19): siRNA sense strand
caaauugucagaaggagua

SEQ ID NO: 654978 - RNA, 19 nt, Homo sapiens
  misc_RNA (1)...(19): siRNA sense strand
ggagaaguauuuaaugaac

SEQ ID NO: 654979 - RNA, 19 nt, Homo sapiens
  misc_RNA (1)...(19): siRNA sense strand
cccagaggcuccaaagaua

SEQ ID NO: 654980 - RNA, 19 nt, Homo sapiens
  misc_RNA (1)...(19): siRNA sense strand
gcugaagacuaucccauug

SEQ ID NO: 654981 - RNA, 19 nt, Homo sapiens
  misc_RNA (1)...(19): siRNA sense strand
agacaucauuccaauugua

SEQ ID NO: 654982 - RNA, 19 nt, Homo sapiens
  misc_RNA (1)...(19): siRNA sense strand
gauccugugucccauugua

SEQ ID NO: 654983 - RNA, 19 nt, Homo sapiens
  misc_RNA (1)...(19): siRNA sense strand
ggaaguagagguuauucuu

SEQ ID NO: 654984 - RNA, 19 nt, Homo sapiens
  misc_RNA (1)...(19): siRNA sense strand
ucagaaggaguaacaauaa

SEQ ID NO: 654985 - RNA, 19 nt, Homo sapiens
  misc_RNA (1)...(19): siRNA sense strand
gaaaaugaaugccaaaugg

SEQ ID NO: 654986 - RNA, 19 nt, Homo sapiens
  misc_RNA (1)...(19): siRNA sense strand
gcaagugucguguguguga

SEQ ID NO: 654987 - RNA, 19 nt, Homo sapiens
  misc_RNA (1)...(19): siRNA sense strand
gugauaauuucaacuguga

SEQ ID NO: 654988 - RNA, 19 nt, Homo sapiens
  misc_RNA (1)...(19): siRNA sense strand
acaauucccuuuccucaga

SEQ ID NO: 654989 - RNA, 19 nt, Homo sapiens
  misc_RNA (1)...(19): siRNA sense strand
gaaggaguaacaauaaguu

SEQ ID NO: 654990 - RNA, 19 nt, Homo sapiens
  misc_RNA (1)...(19): siRNA sense strand
gcaauguaauucaguugau

SEQ ID NO: 654991 - RNA, 19 nt, Homo sapiens
  misc_RNA (1)...(19): siRNA sense strand
gguagaaagucgggacaaa

SEQ ID NO: 654992 - RNA, 19 nt, Homo sapiens
  misc_RNA (1)...(19): siRNA sense strand
gaaggauguugacgacugu

SEQ ID NO: 654993 - RNA, 19 nt, Homo sapiens
  misc_RNA (1)...(19): siRNA sense strand
aaacagcgcauaucuggaa

SEQ ID NO: 654994 - RNA, 19 nt, Homo sapiens
  misc_RNA (1)...(19): siRNA sense strand
ccagacaucauuccaauug

SEQ ID NO: 654995 - RNA, 19 nt, Homo sapiens
  misc_RNA (1)...(19): siRNA sense strand
guaaggagaaggauguuga

SEQ ID NO: 654996 - RNA, 19 nt, Homo sapiens
  misc_RNA (1)...(19): siRNA sense strand
ugauagauccaauggcuua

SEQ ID NO: 654997 - RNA, 19 nt, Homo sapiens
  misc_RNA (1)...(19): siRNA sense strand
gaaaucugcaguaacaaug

SEQ ID NO: 654998 - RNA, 19 nt, Homo sapiens
  misc_RNA (1)...(19): siRNA sense strand
gcaugugacuguucuuugg

SEQ ID NO: 654999 - RNA, 19 nt, Homo sapiens
  misc_RNA (1)...(19): siRNA sense strand
ggagaugagguucaauuug

SEQ ID NO: 655000 - RNA, 19 nt, Homo sapiens
  misc_RNA (1)...(19): siRNA sense strand
cagaggauauuacucagau

SEQ ID NO: 655001 - RNA, 19 nt, Homo sapiens
  misc_RNA (1)...(19): siRNA sense strand
gcaaacgugugagaugugu

SEQ ID NO: 655002 - RNA, 19 nt, Homo sapiens
  misc_RNA (1)...(19): siRNA sense strand
gaaagucccaagugucaug

SEQ ID NO: 655003 - RNA, 19 nt, Homo sapiens
  misc_RNA (1)...(19): siRNA sense strand
gugcucagucuuacuaaua

SEQ ID NO: 655004 - RNA, 19 nt, Homo sapiens
  misc_RNA (1)...(19): siRNA sense strand
ggacuucagaauuggauuu

SEQ ID NO: 655005 - RNA, 19 nt, Homo sapiens
  misc_RNA (1)...(19): siRNA sense strand
gcaaaggaacagcagagaa

SEQ ID NO: 655006 - RNA, 19 nt, Homo sapiens
  misc_RNA (1)...(19): siRNA sense strand
gggcaaacgugugagaugu

SEQ ID NO: 655007 - RNA, 19 nt, Homo sapiens
  misc_RNA (1)...(19): siRNA sense strand
ugcacgaugugaugauuua

SEQ ID NO: 655008 - RNA, 19 nt, Homo sapiens
  misc_RNA (1)...(19): siRNA sense strand
uagauccaauggcuuaauu

SEQ ID NO: 655009 - RNA, 19 nt, Homo sapiens
  misc_RNA (1)...(19): siRNA sense strand
gaauuggauuuggcucauu

SEQ ID NO: 655010 - RNA, 19 nt, Homo sapiens
  misc_RNA (1)...(19): siRNA sense strand
uagaaagucgggacaaauu

SEQ ID NO: 655011 - RNA, 19 nt, Homo sapiens
  misc_RNA (1)...(19): siRNA sense strand
aaugaaaugaggaggauua

SEQ ID NO: 655012 - RNA, 19 nt, Homo sapiens
  misc_RNA (1)...(19): siRNA sense strand
aauuguagcuggugugguu

SEQ ID NO: 655013 - RNA, 19 nt, Homo sapiens
  misc_RNA (1)...(19): siRNA sense strand
agaaagucgggacaaauua

SEQ ID NO: 655014 - RNA, 19 nt, Homo sapiens
  misc_RNA (1)...(19): siRNA sense strand
gagcauaaagaauguguuc

SEQ ID NO: 655015 - RNA, 19 nt, Homo sapiens
  misc_RNA (1)...(19): siRNA sense strand
uccaauggcuuaauuugug

SEQ ID NO: 655016 - RNA, 19 nt, Homo sapiens
  misc_RNA (1)...(19): siRNA sense strand
gaaguuaacagugaagaca

SEQ ID NO: 655017 - RNA, 19 nt, Homo sapiens
  misc_RNA (1)...(19): siRNA sense strand
cagcacagaugaaguuaac

SEQ ID NO: 655018 - RNA, 19 nt, Homo sapiens
  misc_RNA (1)...(19): siRNA sense strand
gcaaaugccaaaucaugug

SEQ ID NO: 655019 - RNA, 19 nt, Homo sapiens
  misc_RNA (1)...(19): siRNA sense strand
gaagaauuucagccuguuu

SEQ ID NO: 655020 - RNA, 19 nt, Homo sapiens
  misc_RNA (1)...(19): siRNA sense strand
cagaggcuccaaagauaua

SEQ ID NO: 655021 - RNA, 19 nt, Homo sapiens
  misc_RNA (1)...(19): siRNA sense strand
cugcugauauggaagcuuu

SEQ ID NO: 655022 - RNA, 19 nt, Homo sapiens
  misc_RNA (1)...(19): siRNA sense strand
caacugugauagauccaau

SEQ ID NO: 655023 - RNA, 19 nt, Homo sapiens
  misc_RNA (1)...(19): siRNA sense strand
uagagguuauucuucagua

SEQ ID NO: 655024 - RNA, 19 nt, Homo sapiens
  misc_RNA (1)...(19): siRNA sense strand
cagcgcauaucuggaaauu

SEQ ID NO: 655025 - RNA, 19 nt, Homo sapiens
  misc_RNA (1)...(19): siRNA sense strand
caaaggaacagcagagaag

SEQ ID NO: 655026 - RNA, 19 nt, Homo sapiens
  misc_RNA (1)...(19): siRNA sense strand
gaacagcagagaagcucaa

SEQ ID NO: 655027 - RNA, 19 nt, Homo sapiens
  misc_RNA (1)...(19): siRNA sense strand
gauccaauggcuuaauuug

SEQ ID NO: 655028 - RNA, 19 nt, Homo sapiens
  misc_RNA (1)...(19): siRNA sense strand
gaaaacaguucagaaaucu

SEQ ID NO: 655029 - RNA, 19 nt, Homo sapiens
  misc_RNA (1)...(19): siRNA sense strand
caagugucaugaaggaaau

SEQ ID NO: 655030 - RNA, 19 nt, Homo sapiens
  misc_RNA (1)...(19): siRNA sense strand
gucagaaggaguaacaaua

SEQ ID NO: 655031 - RNA, 19 nt, Homo sapiens
  misc_RNA (1)...(19): siRNA sense strand
gaggauuacuucggacuuc

SEQ ID NO: 655032 - RNA, 19 nt, Homo sapiens
  misc_RNA (1)...(19): siRNA sense strand
ugaaagacgauuuggagaa

SEQ ID NO: 655033 - RNA, 19 nt, Homo sapiens
  misc_RNA (1)...(19): siRNA sense strand
gccacagacauuuacauua

SEQ ID NO: 655034 - RNA, 19 nt, Homo sapiens
  misc_RNA (1)...(19): siRNA sense strand
gcaguugguuuugcgauua

SEQ ID NO: 655035 - RNA, 19 nt, Homo sapiens
  misc_RNA (1)...(19): siRNA sense strand
aaaagacugugaugccuua

SEQ ID NO: 655036 - RNA, 19 nt, Homo sapiens
  misc_RNA (1)...(19): siRNA sense strand
ggaaaugguguuugcaagu

SEQ ID NO: 655037 - RNA, 19 nt, Homo sapiens
  misc_RNA (1)...(19): siRNA sense strand
gcgaaggcaucccugaaag

SEQ ID NO: 655038 - RNA, 19 nt, Homo sapiens
  misc_RNA (1)...(19): siRNA sense strand
gcucagucuuacuaauaaa

SEQ ID NO: 655039 - RNA, 19 nt, Homo sapiens
  misc_RNA (1)...(19): siRNA sense strand
gcaccagcccauuuagcua

SEQ ID NO: 655040 - RNA, 19 nt, Homo sapiens
  misc_RNA (1)...(19): siRNA sense strand
aagggaguuugcuaaauuu

SEQ ID NO: 655041 - RNA, 19 nt, Homo sapiens
  misc_RNA (1)...(19): siRNA sense strand
acaacgaggucaugguuca

SEQ ID NO: 655042 - RNA, 19 nt, Homo sapiens
  misc_RNA (1)...(19): siRNA sense strand
cugauuggcuggaggaaug

SEQ ID NO: 655043 - RNA, 19 nt, Homo sapiens
  misc_RNA (1)...(19): siRNA sense strand
aaguagagguuauucuuca

SEQ ID NO: 655044 - RNA, 19 nt, Homo sapiens
  misc_RNA (1)...(19): siRNA sense strand
guccagacaucauuccaau

SEQ ID NO: 655045 - RNA, 19 nt, Homo sapiens
  misc_RNA (1)...(19): siRNA sense strand
gaaagucgggacaaauuac

SEQ ID NO: 655046 - RNA, 19 nt, Homo sapiens
  misc_RNA (1)...(19): siRNA sense strand
guguacagauccgaaguuu

SEQ ID NO: 655047 - RNA, 19 nt, Homo sapiens
  misc_RNA (1)...(19): siRNA sense strand
guaggaagagggauaauac

SEQ ID NO: 655048 - RNA, 19 nt, Homo sapiens
  misc_RNA (1)...(19): siRNA sense strand
ccaagugucaugaaggaaa

SEQ ID NO: 655049 - RNA, 19 nt, Homo sapiens
  misc_RNA (1)...(19): siRNA sense strand
gaucugaugaaugaaauga

SEQ ID NO: 655050 - RNA, 19 nt, Homo sapiens
  misc_RNA (1)...(19): siRNA sense strand
ggacaguguguuuguagga

SEQ ID NO: 655051 - RNA, 19 nt, Homo sapiens
  misc_RNA (1)...(19): siRNA sense strand
cauuacugcugauauggaa

SEQ ID NO: 655052 - RNA, 19 nt, Homo sapiens
  misc_RNA (1)...(19): siRNA sense strand
gcuccaaagauauaaagaa

SEQ ID NO: 655053 - RNA, 19 nt, Homo sapiens
  misc_RNA (1)...(19): siRNA sense strand
ugacgacuguugguucuau

SEQ ID NO: 655054 - RNA, 19 nt, Homo sapiens
  misc_RNA (1)...(19): siRNA sense strand
uguggugucuguaagugua

SEQ ID NO: 655055 - RNA, 19 nt, Homo sapiens
  misc_RNA (1)...(19): siRNA sense strand
gaggaaaugguguuugcaa

SEQ ID NO: 655056 - RNA, 19 nt, Homo sapiens
  misc_RNA (1)...(19): siRNA sense strand
gacaguguguuuguaggaa

SEQ ID NO: 655057 - RNA, 19 nt, Homo sapiens
  misc_RNA (1)...(19): siRNA sense strand
gaacagaucugaugaauga

SEQ ID NO: 655058 - RNA, 19 nt, Homo sapiens
  misc_RNA (1)...(19): siRNA sense strand
caagagagcugaagacuau

SEQ ID NO: 655059 - RNA, 19 nt, Homo sapiens
  misc_RNA (1)...(19): siRNA sense strand
gaagggaguuugcuaaauu

SEQ ID NO: 655060 - RNA, 19 nt, Homo sapiens
  misc_RNA (1)...(19): siRNA sense strand
ccacagacauuuacauuaa

SEQ ID NO: 655061 - RNA, 19 nt, Homo sapiens
  misc_RNA (1)...(19): siRNA sense strand
gcgcauaucuggaaauuug

SEQ ID NO: 655062 - RNA, 19 nt, Homo sapiens
  misc_RNA (1)...(19): siRNA sense strand
gaagagggauaauacaaau

SEQ ID NO: 655063 - RNA, 19 nt, Homo sapiens
  misc_RNA (1)...(19): siRNA sense strand
gugaagacauggaugcuua

SEQ ID NO: 655064 - RNA, 19 nt, Homo sapiens
  misc_RNA (1)...(19): siRNA sense strand
gaaagacgauuuggagaau

SEQ ID NO: 655065 - RNA, 19 nt, Homo sapiens
  misc_RNA (1)...(19): siRNA sense strand
guaauucaguugaucauug

SEQ ID NO: 655066 - RNA, 19 nt, Homo sapiens
  misc_RNA (1)...(19): siRNA sense strand
gaaaugaggaggauuacuu

SEQ ID NO: 655067 - RNA, 19 nt, Homo sapiens
  misc_RNA (1)...(19): siRNA sense strand
caaaucauguggagaaugu

SEQ ID NO: 655068 - RNA, 19 nt, Homo sapiens
  misc_RNA (1)...(19): siRNA sense strand
gaacugcaccagcccauuu

SEQ ID NO: 655069 - RNA, 19 nt, Homo sapiens
  misc_RNA (1)...(19): siRNA sense strand
guacagauccgaaguuuca

SEQ ID NO: 655070 - RNA, 19 nt, Homo sapiens
  misc_RNA (1)...(19): siRNA sense strand
cagaugaaguuaacaguga

SEQ ID NO: 655071 - RNA, 19 nt, Homo sapiens
  misc_RNA (1)...(19): siRNA sense strand
ggaguuugcuaaauuugaa

SEQ ID NO: 655072 - RNA, 19 nt, Homo sapiens
  misc_RNA (1)...(19): siRNA sense strand
gugcagagccuucaauaaa

SEQ ID NO: 655073 - RNA, 19 nt, Homo sapiens
  misc_RNA (1)...(19): siRNA sense strand
gaacaacgaggucaugguu

SEQ ID NO: 655074 - RNA, 19 nt, Homo sapiens
  misc_RNA (1)...(19): siRNA sense strand
gaaacuugguggcauuguu

SEQ ID NO: 655075 - RNA, 19 nt, Homo sapiens
  misc_RNA (1)...(19): siRNA sense strand
gaaaugguguuugcaagug

SEQ ID NO: 655076 - RNA, 19 nt, Homo sapiens
  misc_RNA (1)...(19): siRNA sense strand
ggaagagggauaauacaaa

SEQ ID NO: 655077 - RNA, 19 nt, Homo sapiens
  misc_RNA (1)...(19): siRNA sense strand
caaauugucagaaggagua

SEQ ID NO: 655078 - RNA, 19 nt, Homo sapiens
  misc_RNA (1)...(19): siRNA sense strand
ggagaaguauuuaaugaac

SEQ ID NO: 655079 - RNA, 19 nt, Homo sapiens
  misc_RNA (1)...(19): siRNA sense strand
cccagaggcuccaaagaua

SEQ ID NO: 655080 - RNA, 19 nt, Homo sapiens
  misc_RNA (1)...(19): siRNA sense strand
gcugaagacuaucccauug

SEQ ID NO: 655081 - RNA, 19 nt, Homo sapiens
  misc_RNA (1)...(19): siRNA sense strand
agacaucauuccaauugua

SEQ ID NO: 655082 - RNA, 19 nt, Homo sapiens
  misc_RNA (1)...(19): siRNA sense strand
gauccugugucccauugua

SEQ ID NO: 655083 - RNA, 19 nt, Homo sapiens
  misc_RNA (1)...(19): siRNA sense strand
ggaaguagagguuauucuu

SEQ ID NO: 655084 - RNA, 19 nt, Homo sapiens
  misc_RNA (1)...(19): siRNA sense strand
ucagaaggaguaacaauaa

SEQ ID NO: 655085 - RNA, 19 nt, Homo sapiens
  misc_RNA (1)...(19): siRNA sense strand
gaaaaugaaugccaaaugg

SEQ ID NO: 655086 - RNA, 19 nt, Homo sapiens
  misc_RNA (1)...(19): siRNA sense strand
gcaagugucguguguguga

SEQ ID NO: 655087 - RNA, 19 nt, Homo sapiens
  misc_RNA (1)...(19): siRNA sense strand
gugauaauuucaacuguga

SEQ ID NO: 655088 - RNA, 19 nt, Homo sapiens
  misc_RNA (1)...(19): siRNA sense strand
acaauucccuuuccucaga

SEQ ID NO: 655089 - RNA, 19 nt, Homo sapiens
  misc_RNA (1)...(19): siRNA sense strand
gaaggaguaacaauaaguu

SEQ ID NO: 655090 - RNA, 19 nt, Homo sapiens
  misc_RNA (1)...(19): siRNA sense strand
gcaauguaauucaguugau

SEQ ID NO: 655091 - RNA, 19 nt, Homo sapiens
  misc_RNA (1)...(19): siRNA sense strand
gguagaaagucgggacaaa

SEQ ID NO: 655092 - RNA, 19 nt, Homo sapiens
  misc_RNA (1)...(19): siRNA sense strand
gaaggauguugacgacugu

SEQ ID NO: 655093 - RNA, 19 nt, Homo sapiens
  misc_RNA (1)...(19): siRNA sense strand
aaacagcgcauaucuggaa

SEQ ID NO: 655094 - RNA, 19 nt, Homo sapiens
  misc_RNA (1)...(19): siRNA sense strand
ccagacaucauuccaauug

SEQ ID NO: 655095 - RNA, 19 nt, Homo sapiens
  misc_RNA (1)...(19): siRNA sense strand
guaaggagaaggauguuga

SEQ ID NO: 655096 - RNA, 19 nt, Homo sapiens
  misc_RNA (1)...(19): siRNA sense strand
ugauagauccaauggcuua

SEQ ID NO: 655097 - RNA, 19 nt, Homo sapiens
  misc_RNA (1)...(19): siRNA sense strand
gaaaucugcaguaacaaug

SEQ ID NO: 655098 - RNA, 19 nt, Homo sapiens
  misc_RNA (1)...(19): siRNA sense strand
gcaugugacuguucuuugg

SEQ ID NO: 655099 - RNA, 19 nt, Homo sapiens
  misc_RNA (1)...(19): siRNA sense strand
ggagaugagguucaauuug

SEQ ID NO: 655100 - RNA, 19 nt, Homo sapiens
  misc_RNA (1)...(19): siRNA sense strand
cagaggauauuacucagau

SEQ ID NO: 655101 - RNA, 19 nt, Homo sapiens
  misc_RNA (1)...(19): siRNA sense strand
gcaaacgugugagaugugu

SEQ ID NO: 655102 - RNA, 19 nt, Homo sapiens
  misc_RNA (1)...(19): siRNA sense strand
gaaagucccaagugucaug

SEQ ID NO: 655103 - RNA, 19 nt, Homo sapiens
  misc_RNA (1)...(19): siRNA sense strand
gugcucagucuuacuaaua

SEQ ID NO: 655104 - RNA, 19 nt, Homo sapiens
  misc_RNA (1)...(19): siRNA sense strand
ggacuucagaauuggauuu

SEQ ID NO: 655105 - RNA, 19 nt, Homo sapiens
  misc_RNA (1)...(19): siRNA sense strand
gcaaaggaacagcagagaa

SEQ ID NO: 655106 - RNA, 19 nt, Homo sapiens
  misc_RNA (1)...(19): siRNA sense strand
gggcaaacgugugagaugu

SEQ ID NO: 655107 - RNA, 19 nt, Homo sapiens
  misc_RNA (1)...(19): siRNA sense strand
ugcacgaugugaugauuua

SEQ ID NO: 655108 - RNA, 19 nt, Homo sapiens
  misc_RNA (1)...(19): siRNA sense strand
uagauccaauggcuuaauu

SEQ ID NO: 655109 - RNA, 19 nt, Homo sapiens
  misc_RNA (1)...(19): siRNA sense strand
gaauuggauuuggcucauu

SEQ ID NO: 655110 - RNA, 19 nt, Homo sapiens
  misc_RNA (1)...(19): siRNA sense strand
uagaaagucgggacaaauu

SEQ ID NO: 655111 - RNA, 19 nt, Homo sapiens
  misc_RNA (1)...(19): siRNA sense strand
aaugaaaugaggaggauua

SEQ ID NO: 655112 - RNA, 19 nt, Homo sapiens
  misc_RNA (1)...(19): siRNA sense strand
aauuguagcuggugugguu

SEQ ID NO: 655113 - RNA, 19 nt, Homo sapiens
  misc_RNA (1)...(19): siRNA sense strand
agaaagucgggacaaauua

SEQ ID NO: 655114 - RNA, 19 nt, Homo sapiens
  misc_RNA (1)...(19): siRNA sense strand
gagcauaaagaauguguuc

SEQ ID NO: 655115 - RNA, 19 nt, Homo sapiens
  misc_RNA (1)...(19): siRNA sense strand
uccaauggcuuaauuugug

SEQ ID NO: 655116 - RNA, 19 nt, Homo sapiens
  misc_RNA (1)...(19): siRNA sense strand
gaaguuaacagugaagaca

SEQ ID NO: 655117 - RNA, 19 nt, Homo sapiens
  misc_RNA (1)...(19): siRNA sense strand
cagcacagaugaaguuaac

SEQ ID NO: 655118 - RNA, 19 nt, Homo sapiens
  misc_RNA (1)...(19): siRNA sense strand
gcaaaugccaaaucaugug

SEQ ID NO: 655119 - RNA, 19 nt, Homo sapiens
  misc_RNA (1)...(19): siRNA sense strand
gaagaauuucagccuguuu

SEQ ID NO: 655120 - RNA, 19 nt, Homo sapiens
  misc_RNA (1)...(19): siRNA sense strand
cagaggcuccaaagauaua

SEQ ID NO: 655121 - RNA, 19 nt, Homo sapiens
  misc_RNA (1)...(19): siRNA sense strand
cugcugauauggaagcuuu

SEQ ID NO: 655122 - RNA, 19 nt, Homo sapiens
  misc_RNA (1)...(19): siRNA sense strand
caacugugauagauccaau

SEQ ID NO: 655123 - RNA, 19 nt, Homo sapiens
  misc_RNA (1)...(19): siRNA sense strand
uagagguuauucuucagua

SEQ ID NO: 655124 - RNA, 19 nt, Homo sapiens
  misc_RNA (1)...(19): siRNA sense strand
cagcgcauaucuggaaauu

SEQ ID NO: 655125 - RNA, 19 nt, Homo sapiens
  misc_RNA (1)...(19): siRNA sense strand
caaaggaacagcagagaag

SEQ ID NO: 655126 - RNA, 19 nt, Homo sapiens
  misc_RNA (1)...(19): siRNA sense strand
gaacagcagagaagcucaa

SEQ ID NO: 655127 - RNA, 19 nt, Homo sapiens
  misc_RNA (1)...(19): siRNA sense strand
gauccaauggcuuaauuug

SEQ ID NO: 655128 - RNA, 19 nt, Homo sapiens
  misc_RNA (1)...(19): siRNA sense strand
gaaaacaguucagaaaucu

SEQ ID NO: 655129 - RNA, 19 nt, Homo sapiens
  misc_RNA (1)...(19): siRNA sense strand
caagugucaugaaggaaau

SEQ ID NO: 655130 - RNA, 19 nt, Homo sapiens
  misc_RNA (1)...(19): siRNA sense strand
gucagaaggaguaacaaua

SEQ ID NO: 655131 - RNA, 19 nt, Homo sapiens
  misc_RNA (1)...(19): siRNA sense strand
gaggauuacuucggacuuc

SEQ ID NO: 655132 - RNA, 19 nt, Homo sapiens
  misc_RNA (1)...(19): siRNA sense strand
ugaaagacgauuuggagaa

SEQ ID NO: 655133 - RNA, 19 nt, Homo sapiens
  misc_RNA (1)...(19): siRNA sense strand
gccacagacauuuacauua

SEQ ID NO: 655134 - RNA, 19 nt, Homo sapiens
  misc_RNA (1)...(19): siRNA sense strand
gcaguugguuuugcgauua

SEQ ID NO: 655135 - RNA, 19 nt, Homo sapiens
  misc_RNA (1)...(19): siRNA sense strand
aaaagacugugaugccuua

SEQ ID NO: 655136 - RNA, 19 nt, Homo sapiens
  misc_RNA (1)...(19): siRNA sense strand
ggaaaugguguuugcaagu

SEQ ID NO: 655137 - RNA, 19 nt, Homo sapiens
  misc_RNA (1)...(19): siRNA sense strand
gcgaaggcaucccugaaag

SEQ ID NO: 655138 - RNA, 19 nt, Homo sapiens
  misc_RNA (1)...(19): siRNA sense strand
gcucagucuuacuaauaaa

SEQ ID NO: 655139 - RNA, 19 nt, Homo sapiens
  misc_RNA (1)...(19): siRNA sense strand
gcaccagcccauuuagcua

SEQ ID NO: 655140 - RNA, 19 nt, Homo sapiens
  misc_RNA (1)...(19): siRNA sense strand
aagggaguuugcuaaauuu

SEQ ID NO: 655141 - RNA, 19 nt, Homo sapiens
  misc_RNA (1)...(19): siRNA sense strand
acaacgaggucaugguuca

SEQ ID NO: 655142 - RNA, 19 nt, Homo sapiens
  misc_RNA (1)...(19): siRNA sense strand
cugauuggcuggaggaaug

SEQ ID NO: 655143 - RNA, 19 nt, Homo sapiens
  misc_RNA (1)...(19): siRNA sense strand
aaguagagguuauucuuca

SEQ ID NO: 655144 - RNA, 19 nt, Homo sapiens
  misc_RNA (1)...(19): siRNA sense strand
guccagacaucauuccaau

SEQ ID NO: 655145 - RNA, 19 nt, Homo sapiens
  misc_RNA (1)...(19): siRNA sense strand
gaaagucgggacaaauuac

SEQ ID NO: 655146 - RNA, 19 nt, Homo sapiens
  misc_RNA (1)...(19): siRNA sense strand
guguacagauccgaaguuu

SEQ ID NO: 655147 - RNA, 19 nt, Homo sapiens
  misc_RNA (1)...(19): siRNA sense strand
guaggaagagggauaauac

SEQ ID NO: 655148 - RNA, 19 nt, Homo sapiens
  misc_RNA (1)...(19): siRNA sense strand
ccaagugucaugaaggaaa

SEQ ID NO: 655149 - RNA, 19 nt, Homo sapiens
  misc_RNA (1)...(19): siRNA sense strand
gaucugaugaaugaaauga

SEQ ID NO: 655150 - RNA, 19 nt, Homo sapiens
  misc_RNA (1)...(19): siRNA sense strand
ggacaguguguuuguagga

SEQ ID NO: 655151 - RNA, 19 nt, Homo sapiens
  misc_RNA (1)...(19): siRNA sense strand
cauuacugcugauauggaa

SEQ ID NO: 655152 - RNA, 19 nt, Homo sapiens
  misc_RNA (1)...(19): siRNA sense strand
gcuccaaagauauaaagaa

SEQ ID NO: 655153 - RNA, 19 nt, Homo sapiens
  misc_RNA (1)...(19): siRNA sense strand
ugacgacuguugguucuau

SEQ ID NO: 655154 - RNA, 19 nt, Homo sapiens
  misc_RNA (1)...(19): siRNA sense strand
uguggugucuguaagugua

SEQ ID NO: 655155 - RNA, 19 nt, Homo sapiens
  misc_RNA (1)...(19): siRNA sense strand
gaggaaaugguguuugcaa

SEQ ID NO: 655156 - RNA, 19 nt, Homo sapiens
  misc_RNA (1)...(19): siRNA sense strand
gacaguguguuuguaggaa

SEQ ID NO: 655157 - RNA, 19 nt, Homo sapiens
  misc_RNA (1)...(19): siRNA sense strand
gaacagaucugaugaauga

SEQ ID NO: 655158 - RNA, 19 nt, Homo sapiens
  misc_RNA (1)...(19): siRNA sense strand
caagagagcugaagacuau

SEQ ID NO: 655159 - RNA, 19 nt, Homo sapiens
  misc_RNA (1)...(19): siRNA sense strand
gaagggaguuugcuaaauu

SEQ ID NO: 655160 - RNA, 19 nt, Homo sapiens
  misc_RNA (1)...(19): siRNA sense strand
ccacagacauuuacauuaa

SEQ ID NO: 655161 - RNA, 19 nt, Homo sapiens
  misc_RNA (1)...(19): siRNA sense strand
gcgcauaucuggaaauuug

SEQ ID NO: 655162 - RNA, 19 nt, Homo sapiens
  misc_RNA (1)...(19): siRNA sense strand
gaagagggauaauacaaau

SEQ ID NO: 655163 - RNA, 19 nt, Homo sapiens
  misc_RNA (1)...(19): siRNA sense strand
gugaagacauggaugcuua

SEQ ID NO: 655164 - RNA, 19 nt, Homo sapiens
  misc_RNA (1)...(19): siRNA sense strand
gaaagacgauuuggagaau

SEQ ID NO: 655165 - RNA, 19 nt, Homo sapiens
  misc_RNA (1)...(19): siRNA sense strand
guaauucaguugaucauug

SEQ ID NO: 655166 - RNA, 19 nt, Homo sapiens
  misc_RNA (1)...(19): siRNA sense strand
gaaaugaggaggauuacuu

SEQ ID NO: 655167 - RNA, 19 nt, Homo sapiens
  misc_RNA (1)...(19): siRNA sense strand
caaaucauguggagaaugu

SEQ ID NO: 655168 - RNA, 19 nt, Homo sapiens
  misc_RNA (1)...(19): siRNA sense strand
gaacugcaccagcccauuu

SEQ ID NO: 655169 - RNA, 19 nt, Homo sapiens
  misc_RNA (1)...(19): siRNA sense strand
guacagauccgaaguuuca

SEQ ID NO: 655170 - RNA, 19 nt, Homo sapiens
  misc_RNA (1)...(19): siRNA sense strand
cagaugaaguuaacaguga

SEQ ID NO: 655171 - RNA, 19 nt, Homo sapiens
  misc_RNA (1)...(19): siRNA sense strand
ggaguuugcuaaauuugaa

SEQ ID NO: 655172 - RNA, 19 nt, Homo sapiens
  misc_RNA (1)...(19): siRNA sense strand
gugcagagccuucaauaaa

SEQ ID NO: 655173 - RNA, 19 nt, Homo sapiens
  misc_RNA (1)...(19): siRNA sense strand
gaacaacgaggucaugguu

SEQ ID NO: 655174 - RNA, 19 nt, Homo sapiens
  misc_RNA (1)...(19): siRNA sense strand
gaaacuugguggcauuguu

SEQ ID NO: 655175 - RNA, 19 nt, Homo sapiens
  misc_RNA (1)...(19): siRNA sense strand
gaaaugguguuugcaagug

SEQ ID NO: 655176 - RNA, 19 nt, Homo sapiens
  misc_RNA (1)...(19): siRNA sense strand
ggaagagggauaauacaaa

SEQ ID NO: 655177 - RNA, 19 nt, Homo sapiens
  misc_RNA (1)...(19): siRNA sense strand
caaauugucagaaggagua

SEQ ID NO: 655178 - RNA, 19 nt, Homo sapiens
  misc_RNA (1)...(19): siRNA sense strand
ggagaaguauuuaaugaac

SEQ ID NO: 655179 - RNA, 19 nt, Homo sapiens
  misc_RNA (1)...(19): siRNA sense strand
cccagaggcuccaaagaua

SEQ ID NO: 655180 - RNA, 19 nt, Homo sapiens
  misc_RNA (1)...(19): siRNA sense strand
gcugaagacuaucccauug

SEQ ID NO: 655181 - RNA, 19 nt, Homo sapiens
  misc_RNA (1)...(19): siRNA sense strand
agacaucauuccaauugua

SEQ ID NO: 655182 - RNA, 19 nt, Homo sapiens
  misc_RNA (1)...(19): siRNA sense strand
gauccugugucccauugua

SEQ ID NO: 655183 - RNA, 19 nt, Homo sapiens
  misc_RNA (1)...(19): siRNA sense strand
ggaaguagagguuauucuu

SEQ ID NO: 655184 - RNA, 19 nt, Homo sapiens
  misc_RNA (1)...(19): siRNA sense strand
ucagaaggaguaacaauaa

SEQ ID NO: 655185 - RNA, 19 nt, Homo sapiens
  misc_RNA (1)...(19): siRNA sense strand
gaaaaugaaugccaaaugg

SEQ ID NO: 655186 - RNA, 19 nt, Homo sapiens
  misc_RNA (1)...(19): siRNA sense strand
gcaagugucguguguguga

SEQ ID NO: 655187 - RNA, 19 nt, Homo sapiens
  misc_RNA (1)...(19): siRNA sense strand
gugauaauuucaacuguga

SEQ ID NO: 655188 - RNA, 19 nt, Homo sapiens
  misc_RNA (1)...(19): siRNA sense strand
acaauucccuuuccucaga

SEQ ID NO: 655189 - RNA, 19 nt, Homo sapiens
  misc_RNA (1)...(19): siRNA sense strand
gaaggaguaacaauaaguu

SEQ ID NO: 655190 - RNA, 19 nt, Homo sapiens
  misc_RNA (1)...(19): siRNA sense strand
gcaauguaauucaguugau

SEQ ID NO: 655191 - RNA, 19 nt, Homo sapiens
  misc_RNA (1)...(19): siRNA sense strand
gguagaaagucgggacaaa

SEQ ID NO: 655192 - RNA, 19 nt, Homo sapiens
  misc_RNA (1)...(19): siRNA sense strand
gaaggauguugacgacugu

SEQ ID NO: 655193 - RNA, 19 nt, Homo sapiens
  misc_RNA (1)...(19): siRNA sense strand
aaacagcgcauaucuggaa

SEQ ID NO: 655194 - RNA, 19 nt, Homo sapiens
  misc_RNA (1)...(19): siRNA sense strand
ccagacaucauuccaauug

SEQ ID NO: 655195 - RNA, 19 nt, Homo sapiens
  misc_RNA (1)...(19): siRNA sense strand
guaaggagaaggauguuga

SEQ ID NO: 655196 - RNA, 19 nt, Homo sapiens
  misc_RNA (1)...(19): siRNA sense strand
ugauagauccaauggcuua

SEQ ID NO: 655197 - RNA, 19 nt, Homo sapiens
  misc_RNA (1)...(19): siRNA sense strand
gaaaucugcaguaacaaug

SEQ ID NO: 655198 - RNA, 19 nt, Homo sapiens
  misc_RNA (1)...(19): siRNA sense strand
gcaugugacuguucuuugg

SEQ ID NO: 655199 - RNA, 19 nt, Homo sapiens
  misc_RNA (1)...(19): siRNA sense strand
ggagaugagguucaauuug

SEQ ID NO: 655200 - RNA, 19 nt, Homo sapiens
  misc_RNA (1)...(19): siRNA sense strand
cagaggauauuacucagau

SEQ ID NO: 655201 - RNA, 19 nt, Homo sapiens
  misc_RNA (1)...(19): siRNA sense strand
gcaaacgugugagaugugu

SEQ ID NO: 655202 - RNA, 19 nt, Homo sapiens
  misc_RNA (1)...(19): siRNA sense strand
gaaagucccaagugucaug

SEQ ID NO: 655203 - RNA, 19 nt, Homo sapiens
  misc_RNA (1)...(19): siRNA sense strand
gugcucagucuuacuaaua

SEQ ID NO: 655204 - RNA, 19 nt, Homo sapiens
  misc_RNA (1)...(19): siRNA sense strand
ggacuucagaauuggauuu

SEQ ID NO: 655205 - RNA, 19 nt, Homo sapiens
  misc_RNA (1)...(19): siRNA sense strand
gcaaaggaacagcagagaa

SEQ ID NO: 655206 - RNA, 19 nt, Homo sapiens
  misc_RNA (1)...(19): siRNA sense strand
gggcaaacgugugagaugu

SEQ ID NO: 655207 - RNA, 19 nt, Homo sapiens
  misc_RNA (1)...(19): siRNA sense strand
ugcacgaugugaugauuua

SEQ ID NO: 655208 - RNA, 19 nt, Homo sapiens
  misc_RNA (1)...(19): siRNA sense strand
uagauccaauggcuuaauu

SEQ ID NO: 655209 - RNA, 19 nt, Homo sapiens
  misc_RNA (1)...(19): siRNA sense strand
gaauuggauuuggcucauu

SEQ ID NO: 655210 - RNA, 19 nt, Homo sapiens
  misc_RNA (1)...(19): siRNA sense strand
uagaaagucgggacaaauu

SEQ ID NO: 655211 - RNA, 19 nt, Homo sapiens
  misc_RNA (1)...(19): siRNA sense strand
aaugaaaugaggaggauua

SEQ ID NO: 655212 - RNA, 19 nt, Homo sapiens
  misc_RNA (1)...(19): siRNA sense strand
aauuguagcuggugugguu

SEQ ID NO: 655213 - RNA, 19 nt, Homo sapiens
  misc_RNA (1)...(19): siRNA sense strand
agaaagucgggacaaauua

SEQ ID NO: 655214 - RNA, 19 nt, Homo sapiens
  misc_RNA (1)...(19): siRNA sense strand
gagcauaaagaauguguuc

SEQ ID NO: 655215 - RNA, 19 nt, Homo sapiens
  misc_RNA (1)...(19): siRNA sense strand
uccaauggcuuaauuugug

SEQ ID NO: 655216 - RNA, 19 nt, Homo sapiens
  misc_RNA (1)...(19): siRNA sense strand
gaaguuaacagugaagaca

SEQ ID NO: 655217 - RNA, 19 nt, Homo sapiens
  misc_RNA (1)...(19): siRNA sense strand
cagcacagaugaaguuaac

SEQ ID NO: 655218 - RNA, 19 nt, Homo sapiens
  misc_RNA (1)...(19): siRNA sense strand
gcaaaugccaaaucaugug

SEQ ID NO: 655219 - RNA, 19 nt, Homo sapiens
  misc_RNA (1)...(19): siRNA sense strand
gaagaauuucagccuguuu

SEQ ID NO: 655220 - RNA, 19 nt, Homo sapiens
  misc_RNA (1)...(19): siRNA sense strand
cagaggcuccaaagauaua

SEQ ID NO: 655221 - RNA, 19 nt, Homo sapiens
  misc_RNA (1)...(19): siRNA sense strand
cugcugauauggaagcuuu

SEQ ID NO: 655222 - RNA, 19 nt, Homo sapiens
  misc_RNA (1)...(19): siRNA sense strand
caacugugauagauccaau

SEQ ID NO: 655223 - RNA, 19 nt, Homo sapiens
  misc_RNA (1)...(19): siRNA sense strand
uagagguuauucuucagua

SEQ ID NO: 655224 - RNA, 19 nt, Homo sapiens
  misc_RNA (1)...(19): siRNA sense strand
cagcgcauaucuggaaauu

SEQ ID NO: 655225 - RNA, 19 nt, Homo sapiens
  misc_RNA (1)...(19): siRNA sense strand
caaaggaacagcagagaag

SEQ ID NO: 655226 - RNA, 19 nt, Homo sapiens
  misc_RNA (1)...(19): siRNA sense strand
gaacagcagagaagcucaa

SEQ ID NO: 655227 - RNA, 19 nt, Homo sapiens
  misc_RNA (1)...(19): siRNA sense strand
gauccaauggcuuaauuug

SEQ ID NO: 655228 - RNA, 19 nt, Homo sapiens
  misc_RNA (1)...(19): siRNA sense strand
gaaaacaguucagaaaucu

SEQ ID NO: 655229 - RNA, 19 nt, Homo sapiens
  misc_RNA (1)...(19): siRNA sense strand
caagugucaugaaggaaau

SEQ ID NO: 655230 - RNA, 19 nt, Homo sapiens
  misc_RNA (1)...(19): siRNA sense strand
gucagaaggaguaacaaua

SEQ ID NO: 655231 - RNA, 19 nt, Homo sapiens
  misc_RNA (1)...(19): siRNA sense strand
gaggauuacuucggacuuc

SEQ ID NO: 655232 - RNA, 19 nt, Homo sapiens
  misc_RNA (1)...(19): siRNA sense strand
ugaaagacgauuuggagaa

SEQ ID NO: 655233 - RNA, 19 nt, Homo sapiens
  misc_RNA (1)...(19): siRNA sense strand
gccacagacauuuacauua

SEQ ID NO: 655234 - RNA, 19 nt, Homo sapiens
  misc_RNA (1)...(19): siRNA sense strand
gcaguugguuuugcgauua

SEQ ID NO: 655235 - RNA, 19 nt, Homo sapiens
  misc_RNA (1)...(19): siRNA sense strand
aaaagacugugaugccuua

SEQ ID NO: 655236 - RNA, 19 nt, Homo sapiens
  misc_RNA (1)...(19): siRNA sense strand
ggaaaugguguuugcaagu

SEQ ID NO: 655237 - RNA, 19 nt, Homo sapiens
  misc_RNA (1)...(19): siRNA sense strand
gcgaaggcaucccugaaag

SEQ ID NO: 655238 - RNA, 19 nt, Homo sapiens
  misc_RNA (1)...(19): siRNA sense strand
gcucagucuuacuaauaaa

SEQ ID NO: 655239 - RNA, 19 nt, Homo sapiens
  misc_RNA (1)...(19): siRNA sense strand
gcaccagcccauuuagcua

SEQ ID NO: 655240 - RNA, 19 nt, Homo sapiens
  misc_RNA (1)...(19): siRNA sense strand
aagggaguuugcuaaauuu

SEQ ID NO: 655241 - RNA, 19 nt, Homo sapiens
  misc_RNA (1)...(19): siRNA sense strand
acaacgaggucaugguuca

SEQ ID NO: 655242 - RNA, 19 nt, Homo sapiens
  misc_RNA (1)...(19): siRNA sense strand
cugauuggcuggaggaaug

SEQ ID NO: 655243 - RNA, 19 nt, Homo sapiens
  misc_RNA (1)...(19): siRNA sense strand
aaguagagguuauucuuca

SEQ ID NO: 655244 - RNA, 19 nt, Homo sapiens
  misc_RNA (1)...(19): siRNA sense strand
guccagacaucauuccaau

SEQ ID NO: 655245 - RNA, 19 nt, Homo sapiens
  misc_RNA (1)...(19): siRNA sense strand
gaaagucgggacaaauuac

SEQ ID NO: 655246 - RNA, 19 nt, Homo sapiens
  misc_RNA (1)...(19): siRNA sense strand
guguacagauccgaaguuu

SEQ ID NO: 655247 - RNA, 19 nt, Homo sapiens
  misc_RNA (1)...(19): siRNA sense strand
guaggaagagggauaauac

SEQ ID NO: 655248 - RNA, 19 nt, Homo sapiens
  misc_RNA (1)...(19): siRNA sense strand
ccaagugucaugaaggaaa

SEQ ID NO: 655249 - RNA, 19 nt, Homo sapiens
  misc_RNA (1)...(19): siRNA sense strand
gaucugaugaaugaaauga

SEQ ID NO: 655250 - RNA, 19 nt, Homo sapiens
  misc_RNA (1)...(19): siRNA sense strand
ggacaguguguuuguagga

SEQ ID NO: 655251 - RNA, 19 nt, Homo sapiens
  misc_RNA (1)...(19): siRNA sense strand
cauuacugcugauauggaa

SEQ ID NO: 655252 - RNA, 19 nt, Homo sapiens
  misc_RNA (1)...(19): siRNA sense strand
gcuccaaagauauaaagaa

SEQ ID NO: 655253 - RNA, 19 nt, Homo sapiens
  misc_RNA (1)...(19): siRNA sense strand
ugacgacuguugguucuau

SEQ ID NO: 655254 - RNA, 19 nt, Homo sapiens
  misc_RNA (1)...(19): siRNA sense strand
uguggugucuguaagugua

SEQ ID NO: 655255 - RNA, 19 nt, Homo sapiens
  misc_RNA (1)...(19): siRNA sense strand
gaggaaaugguguuugcaa

SEQ ID NO: 655256 - RNA, 19 nt, Homo sapiens
  misc_RNA (1)...(19): siRNA sense strand
gacaguguguuuguaggaa

SEQ ID NO: 655257 - RNA, 19 nt, Homo sapiens
  misc_RNA (1)...(19): siRNA sense strand
gaacagaucugaugaauga

SEQ ID NO: 655258 - RNA, 19 nt, Homo sapiens
  misc_RNA (1)...(19): siRNA sense strand
caagagagcugaagacuau

SEQ ID NO: 655259 - RNA, 19 nt, Homo sapiens
  misc_RNA (1)...(19): siRNA sense strand
gaagggaguuugcuaaauu

SEQ ID NO: 655260 - RNA, 19 nt, Homo sapiens
  misc_RNA (1)...(19): siRNA sense strand
ccacagacauuuacauuaa

SEQ ID NO: 655261 - RNA, 19 nt, Homo sapiens
  misc_RNA (1)...(19): siRNA sense strand
gcgcauaucuggaaauuug

SEQ ID NO: 655262 - RNA, 19 nt, Homo sapiens
  misc_RNA (1)...(19): siRNA sense strand
gaagagggauaauacaaau

SEQ ID NO: 655263 - RNA, 19 nt, Homo sapiens
  misc_RNA (1)...(19): siRNA sense strand
gugaagacauggaugcuua

SEQ ID NO: 655264 - RNA, 19 nt, Homo sapiens
  misc_RNA (1)...(19): siRNA sense strand
gaaagacgauuuggagaau

SEQ ID NO: 655265 - RNA, 19 nt, Homo sapiens
  misc_RNA (1)...(19): siRNA sense strand
guaauucaguugaucauug

SEQ ID NO: 655266 - RNA, 19 nt, Homo sapiens
  misc_RNA (1)...(19): siRNA sense strand
gaaaugaggaggauuacuu

SEQ ID NO: 655267 - RNA, 19 nt, Homo sapiens
  misc_RNA (1)...(19): siRNA sense strand
caaaucauguggagaaugu

SEQ ID NO: 655268 - RNA, 19 nt, Homo sapiens
  misc_RNA (1)...(19): siRNA sense strand
gaacugcaccagcccauuu

SEQ ID NO: 655269 - RNA, 19 nt, Homo sapiens
  misc_RNA (1)...(19): siRNA sense strand
guacagauccgaaguuuca

SEQ ID NO: 655270 - RNA, 19 nt, Homo sapiens
  misc_RNA (1)...(19): siRNA sense strand
cagaugaaguuaacaguga

SEQ ID NO: 655271 - RNA, 19 nt, Homo sapiens
  misc_RNA (1)...(19): siRNA sense strand
ggaguuugcuaaauuugaa

SEQ ID NO: 655272 - RNA, 19 nt, Homo sapiens
  misc_RNA (1)...(19): siRNA sense strand
gugcagagccuucaauaaa

SEQ ID NO: 655273 - RNA, 19 nt, Homo sapiens
  misc_RNA (1)...(19): siRNA sense strand
gaacaacgaggucaugguu

SEQ ID NO: 655274 - RNA, 19 nt, Homo sapiens
  misc_RNA (1)...(19): siRNA sense strand
gaaacuugguggcauuguu

SEQ ID NO: 655275 - RNA, 19 nt, Homo sapiens
  misc_RNA (1)...(19): siRNA sense strand
gaaaugguguuugcaagug

SEQ ID NO: 655276 - RNA, 19 nt, Homo sapiens
  misc_RNA (1)...(19): siRNA sense strand
ggaagagggauaauacaaa

SEQ ID NO: 655277 - RNA, 19 nt, Homo sapiens
  misc_RNA (1)...(19): siRNA sense strand
caaauugucagaaggagua

SEQ ID NO: 655278 - RNA, 19 nt, Homo sapiens
  misc_RNA (1)...(19): siRNA sense strand
ggagaaguauuuaaugaac

SEQ ID NO: 655279 - RNA, 19 nt, Homo sapiens
  misc_RNA (1)...(19): siRNA sense strand
cccagaggcuccaaagaua

SEQ ID NO: 655280 - RNA, 19 nt, Homo sapiens
  misc_RNA (1)...(19): siRNA sense strand
gcugaagacuaucccauug

SEQ ID NO: 655281 - RNA, 19 nt, Homo sapiens
  misc_RNA (1)...(19): siRNA sense strand
agacaucauuccaauugua

SEQ ID NO: 655282 - RNA, 19 nt, Homo sapiens
  misc_RNA (1)...(19): siRNA sense strand
gauccugugucccauugua

SEQ ID NO: 655283 - RNA, 19 nt, Homo sapiens
  misc_RNA (1)...(19): siRNA sense strand
ggaaguagagguuauucuu

SEQ ID NO: 655284 - RNA, 19 nt, Homo sapiens
  misc_RNA (1)...(19): siRNA sense strand
ucagaaggaguaacaauaa

SEQ ID NO: 655285 - RNA, 19 nt, Homo sapiens
  misc_RNA (1)...(19): siRNA sense strand
gaaaaugaaugccaaaugg

SEQ ID NO: 655286 - RNA, 19 nt, Homo sapiens
  misc_RNA (1)...(19): siRNA sense strand
gcaagugucguguguguga

SEQ ID NO: 655287 - RNA, 19 nt, Homo sapiens
  misc_RNA (1)...(19): siRNA sense strand
gugauaauuucaacuguga

SEQ ID NO: 655288 - RNA, 19 nt, Homo sapiens
  misc_RNA (1)...(19): siRNA sense strand
acaauucccuuuccucaga

SEQ ID NO: 655289 - RNA, 19 nt, Homo sapiens
  misc_RNA (1)...(19): siRNA sense strand
gaaggaguaacaauaaguu

SEQ ID NO: 655290 - RNA, 19 nt, Homo sapiens
  misc_RNA (1)...(19): siRNA sense strand
gcaauguaauucaguugau

SEQ ID NO: 655291 - RNA, 19 nt, Homo sapiens
  misc_RNA (1)...(19): siRNA sense strand
gguagaaagucgggacaaa

SEQ ID NO: 655292 - RNA, 19 nt, Homo sapiens
  misc_RNA (1)...(19): siRNA sense strand
gaaggauguugacgacugu

SEQ ID NO: 655293 - RNA, 19 nt, Homo sapiens
  misc_RNA (1)...(19): siRNA sense strand
aaacagcgcauaucuggaa

SEQ ID NO: 655294 - RNA, 19 nt, Homo sapiens
  misc_RNA (1)...(19): siRNA sense strand
ccagacaucauuccaauug

SEQ ID NO: 655295 - RNA, 19 nt, Homo sapiens
  misc_RNA (1)...(19): siRNA sense strand
guaaggagaaggauguuga

SEQ ID NO: 655296 - RNA, 19 nt, Homo sapiens
  misc_RNA (1)...(19): siRNA sense strand
ugauagauccaauggcuua

SEQ ID NO: 655297 - RNA, 19 nt, Homo sapiens
  misc_RNA (1)...(19): siRNA sense strand
gaaaucugcaguaacaaug

SEQ ID NO: 655298 - RNA, 19 nt, Homo sapiens
  misc_RNA (1)...(19): siRNA sense strand
gcaugugacuguucuuugg

SEQ ID NO: 655299 - RNA, 19 nt, Homo sapiens
  misc_RNA (1)...(19): siRNA sense strand
ggagaugagguucaauuug

SEQ ID NO: 655300 - RNA, 19 nt, Homo sapiens
  misc_RNA (1)...(19): siRNA sense strand
cagaggauauuacucagau

SEQ ID NO: 655301 - RNA, 19 nt, Homo sapiens
  misc_RNA (1)...(19): siRNA sense strand
gcaaacgugugagaugugu

SEQ ID NO: 655302 - RNA, 19 nt, Homo sapiens
  misc_RNA (1)...(19): siRNA sense strand
gaaagucccaagugucaug

SEQ ID NO: 655303 - RNA, 19 nt, Homo sapiens
  misc_RNA (1)...(19): siRNA sense strand
gugcucagucuuacuaaua

SEQ ID NO: 655304 - RNA, 19 nt, Homo sapiens
  misc_RNA (1)...(19): siRNA sense strand
ggacuucagaauuggauuu

SEQ ID NO: 655305 - RNA, 19 nt, Homo sapiens
  misc_RNA (1)...(19): siRNA sense strand
gcaaaggaacagcagagaa

SEQ ID NO: 655306 - RNA, 19 nt, Homo sapiens
  misc_RNA (1)...(19): siRNA sense strand
gggcaaacgugugagaugu

SEQ ID NO: 655307 - RNA, 19 nt, Homo sapiens
  misc_RNA (1)...(19): siRNA sense strand
ugcacgaugugaugauuua

SEQ ID NO: 655308 - RNA, 19 nt, Homo sapiens
  misc_RNA (1)...(19): siRNA sense strand
uagauccaauggcuuaauu

SEQ ID NO: 655309 - RNA, 19 nt, Homo sapiens
  misc_RNA (1)...(19): siRNA sense strand
gaauuggauuuggcucauu

SEQ ID NO: 655310 - RNA, 19 nt, Homo sapiens
  misc_RNA (1)...(19): siRNA sense strand
uagaaagucgggacaaauu

SEQ ID NO: 655311 - RNA, 19 nt, Homo sapiens
  misc_RNA (1)...(19): siRNA sense strand
aaugaaaugaggaggauua

SEQ ID NO: 655312 - RNA, 19 nt, Homo sapiens
  misc_RNA (1)...(19): siRNA sense strand
aauuguagcuggugugguu

SEQ ID NO: 655313 - RNA, 19 nt, Homo sapiens
  misc_RNA (1)...(19): siRNA sense strand
agaaagucgggacaaauua

SEQ ID NO: 655314 - RNA, 19 nt, Homo sapiens
  misc_RNA (1)...(19): siRNA sense strand
gagcauaaagaauguguuc

SEQ ID NO: 655315 - RNA, 19 nt, Homo sapiens
  misc_RNA (1)...(19): siRNA sense strand
uccaauggcuuaauuugug

SEQ ID NO: 655316 - RNA, 19 nt, Homo sapiens
  misc_RNA (1)...(19): siRNA sense strand
gaaguuaacagugaagaca

SEQ ID NO: 655317 - RNA, 19 nt, Homo sapiens
  misc_RNA (1)...(19): siRNA sense strand
cagcacagaugaaguuaac

SEQ ID NO: 655318 - RNA, 19 nt, Homo sapiens
  misc_RNA (1)...(19): siRNA sense strand
gcaaaugccaaaucaugug

SEQ ID NO: 655319 - RNA, 19 nt, Homo sapiens
  misc_RNA (1)...(19): siRNA sense strand
gaagaauuucagccuguuu

SEQ ID NO: 655320 - RNA, 19 nt, Homo sapiens
  misc_RNA (1)...(19): siRNA sense strand
cagaggcuccaaagauaua

SEQ ID NO: 655321 - RNA, 19 nt, Homo sapiens
  misc_RNA (1)...(19): siRNA sense strand
cugcugauauggaagcuuu

SEQ ID NO: 655322 - RNA, 19 nt, Homo sapiens
  misc_RNA (1)...(19): siRNA sense strand
caacugugauagauccaau

SEQ ID NO: 655323 - RNA, 19 nt, Homo sapiens
  misc_RNA (1)...(19): siRNA sense strand
uagagguuauucuucagua

SEQ ID NO: 655324 - RNA, 19 nt, Homo sapiens
  misc_RNA (1)...(19): siRNA sense strand
cagcgcauaucuggaaauu

SEQ ID NO: 655325 - RNA, 19 nt, Homo sapiens
  misc_RNA (1)...(19): siRNA sense strand
caaaggaacagcagagaag

SEQ ID NO: 655326 - RNA, 19 nt, Homo sapiens
  misc_RNA (1)...(19): siRNA sense strand
gaacagcagagaagcucaa

SEQ ID NO: 655327 - RNA, 19 nt, Homo sapiens
  misc_RNA (1)...(19): siRNA sense strand
gauccaauggcuuaauuug

SEQ ID NO: 655328 - RNA, 19 nt, Homo sapiens
  misc_RNA (1)...(19): siRNA sense strand
gaaaacaguucagaaaucu

SEQ ID NO: 655329 - RNA, 19 nt, Homo sapiens
  misc_RNA (1)...(19): siRNA sense strand
caagugucaugaaggaaau

SEQ ID NO: 655330 - RNA, 19 nt, Homo sapiens
  misc_RNA (1)...(19): siRNA sense strand
gucagaaggaguaacaaua

SEQ ID NO: 655331 - RNA, 19 nt, Homo sapiens
  misc_RNA (1)...(19): siRNA sense strand
gaggauuacuucggacuuc

SEQ ID NO: 655332 - RNA, 19 nt, Homo sapiens
  misc_RNA (1)...(19): siRNA sense strand
ugaaagacgauuuggagaa

SEQ ID NO: 655333 - RNA, 19 nt, Homo sapiens
  misc_RNA (1)...(19): siRNA sense strand
gccacagacauuuacauua

SEQ ID NO: 655334 - RNA, 19 nt, Homo sapiens
  misc_RNA (1)...(19): siRNA sense strand
gcaguugguuuugcgauua

SEQ ID NO: 655335 - RNA, 19 nt, Homo sapiens
  misc_RNA (1)...(19): siRNA sense strand
aaaagacugugaugccuua

SEQ ID NO: 655336 - RNA, 19 nt, Homo sapiens
  misc_RNA (1)...(19): siRNA sense strand
ggaaaugguguuugcaagu

SEQ ID NO: 655337 - RNA, 19 nt, Homo sapiens
  misc_RNA (1)...(19): siRNA sense strand
gcgaaggcaucccugaaag

SEQ ID NO: 655338 - RNA, 19 nt, Homo sapiens
  misc_RNA (1)...(19): siRNA sense strand
gcucagucuuacuaauaaa

SEQ ID NO: 655339 - RNA, 19 nt, Homo sapiens
  misc_RNA (1)...(19): siRNA sense strand
gcaccagcccauuuagcua

SEQ ID NO: 655340 - RNA, 19 nt, Homo sapiens
  misc_RNA (1)...(19): siRNA sense strand
aagggaguuugcuaaauuu

SEQ ID NO: 655341 - RNA, 19 nt, Homo sapiens
  misc_RNA (1)...(19): siRNA sense strand
acaacgaggucaugguuca

SEQ ID NO: 655342 - RNA, 19 nt, Homo sapiens
  misc_RNA (1)...(19): siRNA sense strand
cugauuggcuggaggaaug

SEQ ID NO: 655343 - RNA, 19 nt, Homo sapiens
  misc_RNA (1)...(19): siRNA sense strand
aaguagagguuauucuuca

SEQ ID NO: 655344 - RNA, 19 nt, Homo sapiens
  misc_RNA (1)...(19): siRNA sense strand
guccagacaucauuccaau

SEQ ID NO: 655345 - RNA, 19 nt, Homo sapiens
  misc_RNA (1)...(19): siRNA sense strand
gaaagucgggacaaauuac

SEQ ID NO: 655346 - RNA, 19 nt, Homo sapiens
  misc_RNA (1)...(19): siRNA sense strand
guguacagauccgaaguuu

SEQ ID NO: 655347 - RNA, 19 nt, Homo sapiens
  misc_RNA (1)...(19): siRNA sense strand
guaggaagagggauaauac

SEQ ID NO: 655348 - RNA, 19 nt, Homo sapiens
  misc_RNA (1)...(19): siRNA sense strand
ccaagugucaugaaggaaa

SEQ ID NO: 655349 - RNA, 19 nt, Homo sapiens
  misc_RNA (1)...(19): siRNA sense strand
gaucugaugaaugaaauga

SEQ ID NO: 655350 - RNA, 19 nt, Homo sapiens
  misc_RNA (1)...(19): siRNA sense strand
ggacaguguguuuguagga

SEQ ID NO: 655351 - RNA, 19 nt, Homo sapiens
  misc_RNA (1)...(19): siRNA sense strand
cauuacugcugauauggaa

SEQ ID NO: 655352 - RNA, 19 nt, Homo sapiens
  misc_RNA (1)...(19): siRNA sense strand
gcuccaaagauauaaagaa

SEQ ID NO: 655353 - RNA, 19 nt, Homo sapiens
  misc_RNA (1)...(19): siRNA sense strand
ugacgacuguugguucuau

SEQ ID NO: 655354 - RNA, 19 nt, Homo sapiens
  misc_RNA (1)...(19): siRNA sense strand
uguggugucuguaagugua

SEQ ID NO: 655355 - RNA, 19 nt, Homo sapiens
  misc_RNA (1)...(19): siRNA sense strand
gaggaaaugguguuugcaa

SEQ ID NO: 655356 - RNA, 19 nt, Homo sapiens
  misc_RNA (1)...(19): siRNA sense strand
gacaguguguuuguaggaa

SEQ ID NO: 655357 - RNA, 19 nt, Homo sapiens
  misc_RNA (1)...(19): siRNA sense strand
gaacagaucugaugaauga

SEQ ID NO: 655358 - RNA, 19 nt, Homo sapiens
  misc_RNA (1)...(19): siRNA sense strand
caagagagcugaagacuau

SEQ ID NO: 655359 - RNA, 19 nt, Homo sapiens
  misc_RNA (1)...(19): siRNA sense strand
gaagggaguuugcuaaauu

SEQ ID NO: 655360 - RNA, 19 nt, Homo sapiens
  misc_RNA (1)...(19): siRNA sense strand
ccacagacauuuacauuaa

SEQ ID NO: 655361 - RNA, 19 nt, Homo sapiens
  misc_RNA (1)...(19): siRNA sense strand
gcgcauaucuggaaauuug

SEQ ID NO: 655362 - RNA, 19 nt, Homo sapiens
  misc_RNA (1)...(19): siRNA sense strand
gaagagggauaauacaaau

SEQ ID NO: 655363 - RNA, 19 nt, Homo sapiens
  misc_RNA (1)...(19): siRNA sense strand
gugaagacauggaugcuua

SEQ ID NO: 655364 - RNA, 19 nt, Homo sapiens
  misc_RNA (1)...(19): siRNA sense strand
gaaagacgauuuggagaau

SEQ ID NO: 655365 - RNA, 19 nt, Homo sapiens
  misc_RNA (1)...(19): siRNA sense strand
guaauucaguugaucauug

SEQ ID NO: 655366 - RNA, 19 nt, Homo sapiens
  misc_RNA (1)...(19): siRNA sense strand
gaaaugaggaggauuacuu

SEQ ID NO: 655367 - RNA, 19 nt, Homo sapiens
  misc_RNA (1)...(19): siRNA sense strand
caaaucauguggagaaugu

SEQ ID NO: 655368 - RNA, 19 nt, Homo sapiens
  misc_RNA (1)...(19): siRNA sense strand
gaacugcaccagcccauuu

SEQ ID NO: 655369 - RNA, 19 nt, Homo sapiens
  misc_RNA (1)...(19): siRNA sense strand
guacagauccgaaguuuca

SEQ ID NO: 655370 - RNA, 19 nt, Homo sapiens
  misc_RNA (1)...(19): siRNA sense strand
cagaugaaguuaacaguga

SEQ ID NO: 655371 - RNA, 19 nt, Homo sapiens
  misc_RNA (1)...(19): siRNA sense strand
ggaguuugcuaaauuugaa

SEQ ID NO: 655372 - RNA, 19 nt, Homo sapiens
  misc_RNA (1)...(19): siRNA sense strand
gugcagagccuucaauaaa

SEQ ID NO: 655373 - RNA, 19 nt, Homo sapiens
  misc_RNA (1)...(19): siRNA sense strand
gaacaacgaggucaugguu

SEQ ID NO: 655374 - RNA, 19 nt, Homo sapiens
  misc_RNA (1)...(19): siRNA sense strand
gaaacuugguggcauuguu

SEQ ID NO: 655375 - RNA, 19 nt, Homo sapiens
  misc_RNA (1)...(19): siRNA sense strand
gaaaugguguuugcaagug

SEQ ID NO: 655376 - RNA, 19 nt, Homo sapiens
  misc_RNA (1)...(19): siRNA sense strand
ggaagagggauaauacaaa

SEQ ID NO: 655377 - RNA, 19 nt, Homo sapiens
  misc_RNA (1)...(19): siRNA sense strand
caaauugucagaaggagua

SEQ ID NO: 655378 - RNA, 19 nt, Homo sapiens
  misc_RNA (1)...(19): siRNA sense strand
ggagaaguauuuaaugaac

SEQ ID NO: 655379 - RNA, 19 nt, Homo sapiens
  misc_RNA (1)...(19): siRNA sense strand
cccagaggcuccaaagaua

SEQ ID NO: 655380 - RNA, 19 nt, Homo sapiens
  misc_RNA (1)...(19): siRNA sense strand
gcugaagacuaucccauug

SEQ ID NO: 655381 - RNA, 19 nt, Homo sapiens
  misc_RNA (1)...(19): siRNA sense strand
agacaucauuccaauugua

SEQ ID NO: 655382 - RNA, 19 nt, Homo sapiens
  misc_RNA (1)...(19): siRNA sense strand
gauccugugucccauugua

SEQ ID NO: 655383 - RNA, 19 nt, Homo sapiens
  misc_RNA (1)...(19): siRNA sense strand
ggaaguagagguuauucuu

SEQ ID NO: 655384 - RNA, 19 nt, Homo sapiens
  misc_RNA (1)...(19): siRNA sense strand
ucagaaggaguaacaauaa

SEQ ID NO: 655385 - RNA, 19 nt, Homo sapiens
  misc_RNA (1)...(19): siRNA sense strand
gaaaaugaaugccaaaugg

SEQ ID NO: 655386 - RNA, 19 nt, Homo sapiens
  misc_RNA (1)...(19): siRNA sense strand
gcaagugucguguguguga

SEQ ID NO: 655387 - RNA, 19 nt, Homo sapiens
  misc_RNA (1)...(19): siRNA sense strand
gugauaauuucaacuguga

SEQ ID NO: 655388 - RNA, 19 nt, Homo sapiens
  misc_RNA (1)...(19): siRNA sense strand
acaauucccuuuccucaga

SEQ ID NO: 655389 - RNA, 19 nt, Homo sapiens
  misc_RNA (1)...(19): siRNA sense strand
gaaggaguaacaauaaguu

SEQ ID NO: 655390 - RNA, 19 nt, Homo sapiens
  misc_RNA (1)...(19): siRNA sense strand
gcaauguaauucaguugau

SEQ ID NO: 655391 - RNA, 19 nt, Homo sapiens
  misc_RNA (1)...(19): siRNA sense strand
gguagaaagucgggacaaa

SEQ ID NO: 655392 - RNA, 19 nt, Homo sapiens
  misc_RNA (1)...(19): siRNA sense strand
gaaggauguugacgacugu

SEQ ID NO: 655393 - RNA, 19 nt, Homo sapiens
  misc_RNA (1)...(19): siRNA sense strand
aaacagcgcauaucuggaa

SEQ ID NO: 655394 - RNA, 19 nt, Homo sapiens
  misc_RNA (1)...(19): siRNA sense strand
ccagacaucauuccaauug

SEQ ID NO: 655395 - RNA, 19 nt, Homo sapiens
  misc_RNA (1)...(19): siRNA sense strand
guaaggagaaggauguuga

SEQ ID NO: 655396 - RNA, 19 nt, Homo sapiens
  misc_RNA (1)...(19): siRNA sense strand
ugauagauccaauggcuua

SEQ ID NO: 655397 - RNA, 19 nt, Homo sapiens
  misc_RNA (1)...(19): siRNA sense strand
gaaaucugcaguaacaaug

SEQ ID NO: 655398 - RNA, 19 nt, Homo sapiens
  misc_RNA (1)...(19): siRNA sense strand
gcaugugacuguucuuugg

SEQ ID NO: 655399 - RNA, 19 nt, Homo sapiens
  misc_RNA (1)...(19): siRNA sense strand
ggagaugagguucaauuug

SEQ ID NO: 655400 - RNA, 19 nt, Homo sapiens
  misc_RNA (1)...(19): siRNA sense strand
cagaggauauuacucagau

SEQ ID NO: 655401 - RNA, 19 nt, Homo sapiens
  misc_RNA (1)...(19): siRNA sense strand
gcaaacgugugagaugugu

SEQ ID NO: 655402 - RNA, 19 nt, Homo sapiens
  misc_RNA (1)...(19): siRNA sense strand
gaaagucccaagugucaug

SEQ ID NO: 655403 - RNA, 19 nt, Homo sapiens
  misc_RNA (1)...(19): siRNA sense strand
gugcucagucuuacuaaua

SEQ ID NO: 655404 - RNA, 19 nt, Homo sapiens
  misc_RNA (1)...(19): siRNA sense strand
ggacuucagaauuggauuu

SEQ ID NO: 655405 - RNA, 19 nt, Homo sapiens
  misc_RNA (1)...(19): siRNA sense strand
gcaaaggaacagcagagaa

SEQ ID NO: 655406 - RNA, 19 nt, Homo sapiens
  misc_RNA (1)...(19): siRNA sense strand
gggcaaacgugugagaugu

SEQ ID NO: 655407 - RNA, 19 nt, Homo sapiens
  misc_RNA (1)...(19): siRNA sense strand
ugcacgaugugaugauuua

SEQ ID NO: 655408 - RNA, 19 nt, Homo sapiens
  misc_RNA (1)...(19): siRNA sense strand
uagauccaauggcuuaauu

SEQ ID NO: 655409 - RNA, 19 nt, Homo sapiens
  misc_RNA (1)...(19): siRNA sense strand
gaauuggauuuggcucauu

SEQ ID NO: 655410 - RNA, 19 nt, Homo sapiens
  misc_RNA (1)...(19): siRNA sense strand
uagaaagucgggacaaauu

SEQ ID NO: 655411 - RNA, 19 nt, Homo sapiens
  misc_RNA (1)...(19): siRNA sense strand
aaugaaaugaggaggauua

SEQ ID NO: 655412 - RNA, 19 nt, Homo sapiens
  misc_RNA (1)...(19): siRNA sense strand
aauuguagcuggugugguu

SEQ ID NO: 655413 - RNA, 19 nt, Homo sapiens
  misc_RNA (1)...(19): siRNA sense strand
agaaagucgggacaaauua

SEQ ID NO: 655414 - RNA, 19 nt, Homo sapiens
  misc_RNA (1)...(19): siRNA sense strand
gagcauaaagaauguguuc

SEQ ID NO: 655415 - RNA, 19 nt, Homo sapiens
  misc_RNA (1)...(19): siRNA sense strand
uccaauggcuuaauuugug

SEQ ID NO: 655416 - RNA, 19 nt, Homo sapiens
  misc_RNA (1)...(19): siRNA sense strand
gaaguuaacagugaagaca

SEQ ID NO: 655417 - RNA, 19 nt, Homo sapiens
  misc_RNA (1)...(19): siRNA sense strand
cagcacagaugaaguuaac

SEQ ID NO: 655418 - RNA, 19 nt, Homo sapiens
  misc_RNA (1)...(19): siRNA sense strand
gcaaaugccaaaucaugug

SEQ ID NO: 655419 - RNA, 19 nt, Homo sapiens
  misc_RNA (1)...(19): siRNA sense strand
gaagaauuucagccuguuu

SEQ ID NO: 655420 - RNA, 19 nt, Homo sapiens
  misc_RNA (1)...(19): siRNA sense strand
cagaggcuccaaagauaua

SEQ ID NO: 655421 - RNA, 19 nt, Homo sapiens
  misc_RNA (1)...(19): siRNA sense strand
cugcugauauggaagcuuu

SEQ ID NO: 655422 - RNA, 19 nt, Homo sapiens
  misc_RNA (1)...(19): siRNA sense strand
caacugugauagauccaau

SEQ ID NO: 655423 - RNA, 19 nt, Homo sapiens
  misc_RNA (1)...(19): siRNA sense strand
uagagguuauucuucagua

SEQ ID NO: 655424 - RNA, 19 nt, Homo sapiens
  misc_RNA (1)...(19): siRNA sense strand
cagcgcauaucuggaaauu

SEQ ID NO: 655425 - RNA, 19 nt, Homo sapiens
  misc_RNA (1)...(19): siRNA sense strand
caaaggaacagcagagaag

SEQ ID NO: 655426 - RNA, 19 nt, Homo sapiens
  misc_RNA (1)...(19): siRNA sense strand
gaacagcagagaagcucaa

SEQ ID NO: 655427 - RNA, 19 nt, Homo sapiens
  misc_RNA (1)...(19): siRNA sense strand
gauccaauggcuuaauuug

SEQ ID NO: 655428 - RNA, 19 nt, Homo sapiens
  misc_RNA (1)...(19): siRNA sense strand
gaaaacaguucagaaaucu

SEQ ID NO: 655429 - RNA, 19 nt, Homo sapiens
  misc_RNA (1)...(19): siRNA sense strand
caagugucaugaaggaaau

SEQ ID NO: 655430 - RNA, 19 nt, Homo sapiens
  misc_RNA (1)...(19): siRNA sense strand
gucagaaggaguaacaaua

SEQ ID NO: 655431 - RNA, 19 nt, Homo sapiens
  misc_RNA (1)...(19): siRNA sense strand
gaggauuacuucggacuuc

SEQ ID NO: 655432 - RNA, 19 nt, Homo sapiens
  misc_RNA (1)...(19): siRNA sense strand
ugaaagacgauuuggagaa

SEQ ID NO: 655433 - RNA, 19 nt, Homo sapiens
  misc_RNA (1)...(19): siRNA sense strand
gccacagacauuuacauua

SEQ ID NO: 655434 - RNA, 19 nt, Homo sapiens
  misc_RNA (1)...(19): siRNA sense strand
gcaguugguuuugcgauua

SEQ ID NO: 655435 - RNA, 19 nt, Homo sapiens
  misc_RNA (1)...(19): siRNA sense strand
aaaagacugugaugccuua

SEQ ID NO: 655436 - RNA, 19 nt, Homo sapiens
  misc_RNA (1)...(19): siRNA sense strand
ggaaaugguguuugcaagu

SEQ ID NO: 655437 - RNA, 19 nt, Homo sapiens
  misc_RNA (1)...(19): siRNA sense strand
gcgaaggcaucccugaaag

SEQ ID NO: 655438 - RNA, 19 nt, Homo sapiens
  misc_RNA (1)...(19): siRNA sense strand
gcucagucuuacuaauaaa

SEQ ID NO: 655439 - RNA, 19 nt, Homo sapiens
  misc_RNA (1)...(19): siRNA sense strand
gcaccagcccauuuagcua

SEQ ID NO: 655440 - RNA, 19 nt, Homo sapiens
  misc_RNA (1)...(19): siRNA sense strand
aagggaguuugcuaaauuu

SEQ ID NO: 655441 - RNA, 19 nt, Homo sapiens
  misc_RNA (1)...(19): siRNA sense strand
acaacgaggucaugguuca

SEQ ID NO: 655442 - RNA, 19 nt, Homo sapiens
  misc_RNA (1)...(19): siRNA sense strand
cugauuggcuggaggaaug

SEQ ID NO: 655443 - RNA, 19 nt, Homo sapiens
  misc_RNA (1)...(19): siRNA sense strand
aaguagagguuauucuuca

SEQ ID NO: 655444 - RNA, 19 nt, Homo sapiens
  misc_RNA (1)...(19): siRNA sense strand
guccagacaucauuccaau

SEQ ID NO: 655445 - RNA, 19 nt, Homo sapiens
  misc_RNA (1)...(19): siRNA sense strand
gaaagucgggacaaauuac

SEQ ID NO: 655446 - RNA, 19 nt, Homo sapiens
  misc_RNA (1)...(19): siRNA sense strand
guguacagauccgaaguuu

SEQ ID NO: 655447 - RNA, 19 nt, Homo sapiens
  misc_RNA (1)...(19): siRNA sense strand
guaggaagagggauaauac

SEQ ID NO: 655448 - RNA, 19 nt, Homo sapiens
  misc_RNA (1)...(19): siRNA sense strand
ccaagugucaugaaggaaa

SEQ ID NO: 655449 - RNA, 19 nt, Homo sapiens
  misc_RNA (1)...(19): siRNA sense strand
gaucugaugaaugaaauga

SEQ ID NO: 655450 - RNA, 19 nt, Homo sapiens
  misc_RNA (1)...(19): siRNA sense strand
ggacaguguguuuguagga

SEQ ID NO: 655451 - RNA, 19 nt, Homo sapiens
  misc_RNA (1)...(19): siRNA sense strand
cauuacugcugauauggaa

SEQ ID NO: 655452 - RNA, 19 nt, Homo sapiens
  misc_RNA (1)...(19): siRNA sense strand
gcuccaaagauauaaagaa

SEQ ID NO: 655453 - RNA, 19 nt, Homo sapiens
  misc_RNA (1)...(19): siRNA sense strand
ugacgacuguugguucuau

SEQ ID NO: 655454 - RNA, 19 nt, Homo sapiens
  misc_RNA (1)...(19): siRNA sense strand
uguggugucuguaagugua

SEQ ID NO: 655455 - RNA, 19 nt, Homo sapiens
  misc_RNA (1)...(19): siRNA sense strand
gaggaaaugguguuugcaa

SEQ ID NO: 655456 - RNA, 19 nt, Homo sapiens
  misc_RNA (1)...(19): siRNA sense strand
gacaguguguuuguaggaa

SEQ ID NO: 655457 - RNA, 19 nt, Homo sapiens
  misc_RNA (1)...(19): siRNA sense strand
gaacagaucugaugaauga

SEQ ID NO: 655458 - RNA, 19 nt, Homo sapiens
  misc_RNA (1)...(19): siRNA sense strand
caagagagcugaagacuau

SEQ ID NO: 655459 - RNA, 19 nt, Homo sapiens
  misc_RNA (1)...(19): siRNA sense strand
gaagggaguuugcuaaauu

SEQ ID NO: 655460 - RNA, 19 nt, Homo sapiens
  misc_RNA (1)...(19): siRNA sense strand
ccacagacauuuacauuaa

SEQ ID NO: 655461 - RNA, 19 nt, Homo sapiens
  misc_RNA (1)...(19): siRNA sense strand
gcgcauaucuggaaauuug

SEQ ID NO: 655462 - RNA, 19 nt, Homo sapiens
  misc_RNA (1)...(19): siRNA sense strand
gaagagggauaauacaaau

SEQ ID NO: 655463 - RNA, 19 nt, Homo sapiens
  misc_RNA (1)...(19): siRNA sense strand
gugaagacauggaugcuua

SEQ ID NO: 655464 - RNA, 19 nt, Homo sapiens
  misc_RNA (1)...(19): siRNA sense strand
gaaagacgauuuggagaau

SEQ ID NO: 655465 - RNA, 19 nt, Homo sapiens
  misc_RNA (1)...(19): siRNA sense strand
guaauucaguugaucauug

SEQ ID NO: 655466 - RNA, 19 nt, Homo sapiens
  misc_RNA (1)...(19): siRNA sense strand
gaaaugaggaggauuacuu

SEQ ID NO: 655467 - RNA, 19 nt, Homo sapiens
  misc_RNA (1)...(19): siRNA sense strand
caaaucauguggagaaugu

SEQ ID NO: 655468 - RNA, 19 nt, Homo sapiens
  misc_RNA (1)...(19): siRNA sense strand
gaacugcaccagcccauuu

SEQ ID NO: 655469 - RNA, 19 nt, Homo sapiens
  misc_RNA (1)...(19): siRNA sense strand
guacagauccgaaguuuca

SEQ ID NO: 655470 - RNA, 19 nt, Homo sapiens
  misc_RNA (1)...(19): siRNA sense strand
cagaugaaguuaacaguga

SEQ ID NO: 655471 - RNA, 19 nt, Homo sapiens
  misc_RNA (1)...(19): siRNA sense strand
ggaguuugcuaaauuugaa

SEQ ID NO: 655472 - RNA, 19 nt, Homo sapiens
  misc_RNA (1)...(19): siRNA sense strand
gugcagagccuucaauaaa

SEQ ID NO: 655473 - RNA, 19 nt, Homo sapiens
  misc_RNA (1)...(19): siRNA sense strand
gaacaacgaggucaugguu

SEQ ID NO: 655474 - RNA, 19 nt, Homo sapiens
  misc_RNA (1)...(19): siRNA sense strand
gaaacuugguggcauuguu

SEQ ID NO: 655475 - RNA, 19 nt, Homo sapiens
  misc_RNA (1)...(19): siRNA sense strand
gaaaugguguuugcaagug

SEQ ID NO: 655476 - RNA, 19 nt, Homo sapiens
  misc_RNA (1)...(19): siRNA sense strand
ggaagagggauaauacaaa

SEQ ID NO: 655477 - RNA, 19 nt, Homo sapiens
  misc_RNA (1)...(19): siRNA sense strand
caaauugucagaaggagua

SEQ ID NO: 655478 - RNA, 19 nt, Homo sapiens
  misc_RNA (1)...(19): siRNA sense strand
ggagaaguauuuaaugaac

SEQ ID NO: 655479 - RNA, 19 nt, Homo sapiens
  misc_RNA (1)...(19): siRNA sense strand
cccagaggcuccaaagaua

SEQ ID NO: 655480 - RNA, 19 nt, Homo sapiens
  misc_RNA (1)...(19): siRNA sense strand
gcugaagacuaucccauug

SEQ ID NO: 655481 - RNA, 19 nt, Homo sapiens
  misc_RNA (1)...(19): siRNA sense strand
agacaucauuccaauugua

SEQ ID NO: 655482 - RNA, 19 nt, Homo sapiens
  misc_RNA (1)...(19): siRNA sense strand
gauccugugucccauugua

SEQ ID NO: 655483 - RNA, 19 nt, Homo sapiens
  misc_RNA (1)...(19): siRNA sense strand
ggaaguagagguuauucuu

SEQ ID NO: 655484 - RNA, 19 nt, Homo sapiens
  misc_RNA (1)...(19): siRNA sense strand
ucagaaggaguaacaauaa

SEQ ID NO: 655485 - RNA, 19 nt, Homo sapiens
  misc_RNA (1)...(19): siRNA sense strand
gaaaaugaaugccaaaugg

SEQ ID NO: 655486 - RNA, 19 nt, Homo sapiens
  misc_RNA (1)...(19): siRNA sense strand
gcaagugucguguguguga

SEQ ID NO: 655487 - RNA, 19 nt, Homo sapiens
  misc_RNA (1)...(19): siRNA sense strand
gugauaauuucaacuguga

SEQ ID NO: 655488 - RNA, 19 nt, Homo sapiens
  misc_RNA (1)...(19): siRNA sense strand
acaauucccuuuccucaga

SEQ ID NO: 655489 - RNA, 19 nt, Homo sapiens
  misc_RNA (1)...(19): siRNA sense strand
gaaggaguaacaauaaguu

SEQ ID NO: 655490 - RNA, 19 nt, Homo sapiens
  misc_RNA (1)...(19): siRNA sense strand
gcaauguaauucaguugau

SEQ ID NO: 655491 - RNA, 19 nt, Homo sapiens
  misc_RNA (1)...(19): siRNA sense strand
gguagaaagucgggacaaa

SEQ ID NO: 655492 - RNA, 19 nt, Homo sapiens
  misc_RNA (1)...(19): siRNA sense strand
gaaggauguugacgacugu

SEQ ID NO: 655493 - RNA, 19 nt, Homo sapiens
  misc_RNA (1)...(19): siRNA sense strand
aaacagcgcauaucuggaa

SEQ ID NO: 655494 - RNA, 19 nt, Homo sapiens
  misc_RNA (1)...(19): siRNA sense strand
ccagacaucauuccaauug

SEQ ID NO: 655495 - RNA, 19 nt, Homo sapiens
  misc_RNA (1)...(19): siRNA sense strand
guaaggagaaggauguuga

SEQ ID NO: 655496 - RNA, 19 nt, Homo sapiens
  misc_RNA (1)...(19): siRNA sense strand
ugauagauccaauggcuua

SEQ ID NO: 655497 - RNA, 19 nt, Homo sapiens
  misc_RNA (1)...(19): siRNA sense strand
gaaaucugcaguaacaaug

SEQ ID NO: 655498 - RNA, 19 nt, Homo sapiens
  misc_RNA (1)...(19): siRNA sense strand
gcaugugacuguucuuugg

SEQ ID NO: 655499 - RNA, 19 nt, Homo sapiens
  misc_RNA (1)...(19): siRNA sense strand
ggagaugagguucaauuug

SEQ ID NO: 655500 - RNA, 19 nt, Homo sapiens
  misc_RNA (1)...(19): siRNA sense strand
cagaggauauuacucagau

SEQ ID NO: 655501 - RNA, 19 nt, Homo sapiens
  misc_RNA (1)...(19): siRNA sense strand
gcaaacgugugagaugugu

SEQ ID NO: 655502 - RNA, 19 nt, Homo sapiens
  misc_RNA (1)...(19): siRNA sense strand
gaaagucccaagugucaug

SEQ ID NO: 655503 - RNA, 19 nt, Homo sapiens
  misc_RNA (1)...(19): siRNA sense strand
gugcucagucuuacuaaua

SEQ ID NO: 655504 - RNA, 19 nt, Homo sapiens
  misc_RNA (1)...(19): siRNA sense strand
ggacuucagaauuggauuu

SEQ ID NO: 655505 - RNA, 19 nt, Homo sapiens
  misc_RNA (1)...(19): siRNA sense strand
gcaaaggaacagcagagaa

SEQ ID NO: 655506 - RNA, 19 nt, Homo sapiens
  misc_RNA (1)...(19): siRNA sense strand
gggcaaacgugugagaugu

SEQ ID NO: 655507 - RNA, 19 nt, Homo sapiens
  misc_RNA (1)...(19): siRNA sense strand
ugcacgaugugaugauuua

SEQ ID NO: 655508 - RNA, 19 nt, Homo sapiens
  misc_RNA (1)...(19): siRNA sense strand
uagauccaauggcuuaauu

SEQ ID NO: 655509 - RNA, 19 nt, Homo sapiens
  misc_RNA (1)...(19): siRNA sense strand
gaauuggauuuggcucauu

SEQ ID NO: 655510 - RNA, 19 nt, Homo sapiens
  misc_RNA (1)...(19): siRNA sense strand
uagaaagucgggacaaauu

SEQ ID NO: 655511 - RNA, 19 nt, Homo sapiens
  misc_RNA (1)...(19): siRNA sense strand
aaugaaaugaggaggauua

SEQ ID NO: 655512 - RNA, 19 nt, Homo sapiens
  misc_RNA (1)...(19): siRNA sense strand
aauuguagcuggugugguu

SEQ ID NO: 655513 - RNA, 19 nt, Homo sapiens
  misc_RNA (1)...(19): siRNA sense strand
agaaagucgggacaaauua

SEQ ID NO: 655514 - RNA, 19 nt, Homo sapiens
  misc_RNA (1)...(19): siRNA sense strand
gagcauaaagaauguguuc

SEQ ID NO: 655515 - RNA, 19 nt, Homo sapiens
  misc_RNA (1)...(19): siRNA sense strand
uccaauggcuuaauuugug

SEQ ID NO: 655516 - RNA, 19 nt, Homo sapiens
  misc_RNA (1)...(19): siRNA sense strand
gaaguuaacagugaagaca

SEQ ID NO: 655517 - RNA, 19 nt, Homo sapiens
  misc_RNA (1)...(19): siRNA sense strand
cagcacagaugaaguuaac

SEQ ID NO: 655518 - RNA, 19 nt, Homo sapiens
  misc_RNA (1)...(19): siRNA sense strand
gcaaaugccaaaucaugug

SEQ ID NO: 655519 - RNA, 19 nt, Homo sapiens
  misc_RNA (1)...(19): siRNA sense strand
gaagaauuucagccuguuu

SEQ ID NO: 655520 - RNA, 19 nt, Homo sapiens
  misc_RNA (1)...(19): siRNA sense strand
cagaggcuccaaagauaua

SEQ ID NO: 655521 - RNA, 19 nt, Homo sapiens
  misc_RNA (1)...(19): siRNA sense strand
cugcugauauggaagcuuu

SEQ ID NO: 655522 - RNA, 19 nt, Homo sapiens
  misc_RNA (1)...(19): siRNA sense strand
caacugugauagauccaau

SEQ ID NO: 655523 - RNA, 19 nt, Homo sapiens
  misc_RNA (1)...(19): siRNA sense strand
uagagguuauucuucagua

SEQ ID NO: 655524 - RNA, 19 nt, Homo sapiens
  misc_RNA (1)...(19): siRNA sense strand
cagcgcauaucuggaaauu

SEQ ID NO: 655525 - RNA, 19 nt, Homo sapiens
  misc_RNA (1)...(19): siRNA sense strand
caaaggaacagcagagaag

SEQ ID NO: 655526 - RNA, 19 nt, Homo sapiens
  misc_RNA (1)...(19): siRNA sense strand
gaacagcagagaagcucaa

SEQ ID NO: 655527 - RNA, 19 nt, Homo sapiens
  misc_RNA (1)...(19): siRNA sense strand
gauccaauggcuuaauuug

SEQ ID NO: 655528 - RNA, 19 nt, Homo sapiens
  misc_RNA (1)...(19): siRNA sense strand
gaaaacaguucagaaaucu

SEQ ID NO: 655529 - RNA, 19 nt, Homo sapiens
  misc_RNA (1)...(19): siRNA sense strand
caagugucaugaaggaaau

SEQ ID NO: 655530 - RNA, 19 nt, Homo sapiens
  misc_RNA (1)...(19): siRNA sense strand
gucagaaggaguaacaaua

SEQ ID NO: 655531 - RNA, 19 nt, Homo sapiens
  misc_RNA (1)...(19): siRNA sense strand
gaggauuacuucggacuuc

SEQ ID NO: 655532 - RNA, 19 nt, Homo sapiens
  misc_RNA (1)...(19): siRNA sense strand
ugaaagacgauuuggagaa

SEQ ID NO: 655533 - RNA, 19 nt, Homo sapiens
  misc_RNA (1)...(19): siRNA sense strand
gccacagacauuuacauua

SEQ ID NO: 655534 - RNA, 19 nt, Homo sapiens
  misc_RNA (1)...(19): siRNA sense strand
gcaguugguuuugcgauua

SEQ ID NO: 655535 - RNA, 19 nt, Homo sapiens
  misc_RNA (1)...(19): siRNA sense strand
aaaagacugugaugccuua

SEQ ID NO: 655536 - RNA, 19 nt, Homo sapiens
  misc_RNA (1)...(19): siRNA sense strand
ggaaaugguguuugcaagu

SEQ ID NO: 655537 - RNA, 19 nt, Homo sapiens
  misc_RNA (1)...(19): siRNA sense strand
gcgaaggcaucccugaaag

SEQ ID NO: 655538 - RNA, 19 nt, Homo sapiens
  misc_RNA (1)...(19): siRNA sense strand
gcucagucuuacuaauaaa

SEQ ID NO: 655539 - RNA, 19 nt, Homo sapiens
  misc_RNA (1)...(19): siRNA sense strand
gcaccagcccauuuagcua

SEQ ID NO: 655540 - RNA, 19 nt, Homo sapiens
  misc_RNA (1)...(19): siRNA sense strand
aagggaguuugcuaaauuu

SEQ ID NO: 655541 - RNA, 19 nt, Homo sapiens
  misc_RNA (1)...(19): siRNA sense strand
acaacgaggucaugguuca

SEQ ID NO: 655542 - RNA, 19 nt, Homo sapiens
  misc_RNA (1)...(19): siRNA sense strand
cugauuggcuggaggaaug

SEQ ID NO: 655543 - RNA, 19 nt, Homo sapiens
  misc_RNA (1)...(19): siRNA sense strand
aaguagagguuauucuuca

SEQ ID NO: 655544 - RNA, 19 nt, Homo sapiens
  misc_RNA (1)...(19): siRNA sense strand
guccagacaucauuccaau

SEQ ID NO: 655545 - RNA, 19 nt, Homo sapiens
  misc_RNA (1)...(19): siRNA sense strand
gaaagucgggacaaauuac

SEQ ID NO: 655546 - RNA, 19 nt, Homo sapiens
  misc_RNA (1)...(19): siRNA sense strand
guguacagauccgaaguuu

SEQ ID NO: 655547 - RNA, 19 nt, Homo sapiens
  misc_RNA (1)...(19): siRNA sense strand
guaggaagagggauaauac

SEQ ID NO: 655548 - RNA, 19 nt, Homo sapiens
  misc_RNA (1)...(19): siRNA sense strand
ccaagugucaugaaggaaa

SEQ ID NO: 655549 - RNA, 19 nt, Homo sapiens
  misc_RNA (1)...(19): siRNA sense strand
gaucugaugaaugaaauga

SEQ ID NO: 655550 - RNA, 19 nt, Homo sapiens
  misc_RNA (1)...(19): siRNA sense strand
ggacaguguguuuguagga

SEQ ID NO: 655551 - RNA, 19 nt, Homo sapiens
  misc_RNA (1)...(19): siRNA sense strand
cauuacugcugauauggaa

SEQ ID NO: 655552 - RNA, 19 nt, Homo sapiens
  misc_RNA (1)...(19): siRNA sense strand
gcuccaaagauauaaagaa

SEQ ID NO: 655553 - RNA, 19 nt, Homo sapiens
  misc_RNA (1)...(19): siRNA sense strand
ugacgacuguugguucuau

SEQ ID NO: 655554 - RNA, 19 nt, Homo sapiens
  misc_RNA (1)...(19): siRNA sense strand
uguggugucuguaagugua

SEQ ID NO: 655555 - RNA, 19 nt, Homo sapiens
  misc_RNA (1)...(19): siRNA sense strand
gaggaaaugguguuugcaa

SEQ ID NO: 655556 - RNA, 19 nt, Homo sapiens
  misc_RNA (1)...(19): siRNA sense strand
gacaguguguuuguaggaa

SEQ ID NO: 655557 - RNA, 19 nt, Homo sapiens
  misc_RNA (1)...(19): siRNA sense strand
gaacagaucugaugaauga

SEQ ID NO: 655558 - RNA, 19 nt, Homo sapiens
  misc_RNA (1)...(19): siRNA sense strand
caagagagcugaagacuau

SEQ ID NO: 655559 - RNA, 19 nt, Homo sapiens
  misc_RNA (1)...(19): siRNA sense strand
gaagggaguuugcuaaauu

SEQ ID NO: 655560 - RNA, 19 nt, Homo sapiens
  misc_RNA (1)...(19): siRNA sense strand
ccacagacauuuacauuaa

SEQ ID NO: 655561 - RNA, 19 nt, Homo sapiens
  misc_RNA (1)...(19): siRNA sense strand
gcgcauaucuggaaauuug

SEQ ID NO: 655562 - RNA, 19 nt, Homo sapiens
  misc_RNA (1)...(19): siRNA sense strand
gaagagggauaauacaaau

SEQ ID NO: 655563 - RNA, 19 nt, Homo sapiens
  misc_RNA (1)...(19): siRNA sense strand
gugaagacauggaugcuua

SEQ ID NO: 655564 - RNA, 19 nt, Homo sapiens
  misc_RNA (1)...(19): siRNA sense strand
gaaagacgauuuggagaau

SEQ ID NO: 655565 - RNA, 19 nt, Homo sapiens
  misc_RNA (1)...(19): siRNA sense strand
guaauucaguugaucauug

SEQ ID NO: 655566 - RNA, 19 nt, Homo sapiens
  misc_RNA (1)...(19): siRNA sense strand
gaaaugaggaggauuacuu

SEQ ID NO: 655567 - RNA, 19 nt, Homo sapiens
  misc_RNA (1)...(19): siRNA sense strand
caaaucauguggagaaugu

SEQ ID NO: 655568 - RNA, 19 nt, Homo sapiens
  misc_RNA (1)...(19): siRNA sense strand
gaacugcaccagcccauuu

SEQ ID NO: 655569 - RNA, 19 nt, Homo sapiens
  misc_RNA (1)...(19): siRNA sense strand
guacagauccgaaguuuca

SEQ ID NO: 655570 - RNA, 19 nt, Homo sapiens
  misc_RNA (1)...(19): siRNA sense strand
cagaugaaguuaacaguga

SEQ ID NO: 655571 - RNA, 19 nt, Homo sapiens
  misc_RNA (1)...(19): siRNA sense strand
ggaguuugcuaaauuugaa

SEQ ID NO: 655572 - RNA, 19 nt, Homo sapiens
  misc_RNA (1)...(19): siRNA sense strand
gugcagagccuucaauaaa

SEQ ID NO: 655573 - RNA, 19 nt, Homo sapiens
  misc_RNA (1)...(19): siRNA sense strand
gaacaacgaggucaugguu

SEQ ID NO: 655574 - RNA, 19 nt, Homo sapiens
  misc_RNA (1)...(19): siRNA sense strand
gaaacuugguggcauuguu

SEQ ID NO: 655575 - RNA, 19 nt, Homo sapiens
  misc_RNA (1)...(19): siRNA sense strand
gaaaugguguuugcaagug

SEQ ID NO: 655576 - RNA, 19 nt, Homo sapiens
  misc_RNA (1)...(19): siRNA sense strand
ggaagagggauaauacaaa

SEQ ID NO: 655577 - RNA, 19 nt, Homo sapiens
  misc_RNA (1)...(19): siRNA sense strand
caaauugucagaaggagua

SEQ ID NO: 655578 - RNA, 19 nt, Homo sapiens
  misc_RNA (1)...(19): siRNA sense strand
ggagaaguauuuaaugaac

SEQ ID NO: 655579 - RNA, 19 nt, Homo sapiens
  misc_RNA (1)...(19): siRNA sense strand
cccagaggcuccaaagaua

SEQ ID NO: 655580 - RNA, 19 nt, Homo sapiens
  misc_RNA (1)...(19): siRNA sense strand
gcugaagacuaucccauug

SEQ ID NO: 655581 - RNA, 19 nt, Homo sapiens
  misc_RNA (1)...(19): siRNA sense strand
agacaucauuccaauugua

SEQ ID NO: 655582 - RNA, 19 nt, Homo sapiens
  misc_RNA (1)...(19): siRNA sense strand
gauccugugucccauugua

SEQ ID NO: 655583 - RNA, 19 nt, Homo sapiens
  misc_RNA (1)...(19): siRNA sense strand
ggaaguagagguuauucuu

SEQ ID NO: 655584 - RNA, 19 nt, Homo sapiens
  misc_RNA (1)...(19): siRNA sense strand
ucagaaggaguaacaauaa

SEQ ID NO: 655585 - RNA, 19 nt, Homo sapiens
  misc_RNA (1)...(19): siRNA sense strand
gaaaaugaaugccaaaugg

SEQ ID NO: 655586 - RNA, 19 nt, Homo sapiens
  misc_RNA (1)...(19): siRNA sense strand
gcaagugucguguguguga

SEQ ID NO: 655587 - RNA, 19 nt, Homo sapiens
  misc_RNA (1)...(19): siRNA sense strand
gugauaauuucaacuguga

SEQ ID NO: 655588 - RNA, 19 nt, Homo sapiens
  misc_RNA (1)...(19): siRNA sense strand
acaauucccuuuccucaga

SEQ ID NO: 655589 - RNA, 19 nt, Homo sapiens
  misc_RNA (1)...(19): siRNA sense strand
gaaggaguaacaauaaguu

SEQ ID NO: 655590 - RNA, 19 nt, Homo sapiens
  misc_RNA (1)...(19): siRNA sense strand
gcaauguaauucaguugau

SEQ ID NO: 655591 - RNA, 19 nt, Homo sapiens
  misc_RNA (1)...(19): siRNA sense strand
gguagaaagucgggacaaa

SEQ ID NO: 655592 - RNA, 19 nt, Homo sapiens
  misc_RNA (1)...(19): siRNA sense strand
gaaggauguugacgacugu

SEQ ID NO: 655593 - RNA, 19 nt, Homo sapiens
  misc_RNA (1)...(19): siRNA sense strand
aaacagcgcauaucuggaa

SEQ ID NO: 655594 - RNA, 19 nt, Homo sapiens
  misc_RNA (1)...(19): siRNA sense strand
ccagacaucauuccaauug

SEQ ID NO: 655595 - RNA, 19 nt, Homo sapiens
  misc_RNA (1)...(19): siRNA sense strand
guaaggagaaggauguuga

SEQ ID NO: 655596 - RNA, 19 nt, Homo sapiens
  misc_RNA (1)...(19): siRNA sense strand
ugauagauccaauggcuua

SEQ ID NO: 655597 - RNA, 19 nt, Homo sapiens
  misc_RNA (1)...(19): siRNA sense strand
gaaaucugcaguaacaaug

SEQ ID NO: 655598 - RNA, 19 nt, Homo sapiens
  misc_RNA (1)...(19): siRNA sense strand
gcaugugacuguucuuugg

SEQ ID NO: 655599 - RNA, 19 nt, Homo sapiens
  misc_RNA (1)...(19): siRNA sense strand
ggagaugagguucaauuug

SEQ ID NO: 655600 - RNA, 19 nt, Homo sapiens
  misc_RNA (1)...(19): siRNA sense strand
cagaggauauuacucagau

SEQ ID NO: 655601 - RNA, 19 nt, Homo sapiens
  misc_RNA (1)...(19): siRNA sense strand
gcaaacgugugagaugugu

SEQ ID NO: 655602 - RNA, 19 nt, Homo sapiens
  misc_RNA (1)...(19): siRNA sense strand
gaaagucccaagugucaug

SEQ ID NO: 655603 - RNA, 19 nt, Homo sapiens
  misc_RNA (1)...(19): siRNA sense strand
gugcucagucuuacuaaua

SEQ ID NO: 655604 - RNA, 19 nt, Homo sapiens
  misc_RNA (1)...(19): siRNA sense strand
ggacuucagaauuggauuu

SEQ ID NO: 655605 - RNA, 19 nt, Homo sapiens
  misc_RNA (1)...(19): siRNA sense strand
gcaaaggaacagcagagaa

SEQ ID NO: 655606 - RNA, 19 nt, Homo sapiens
  misc_RNA (1)...(19): siRNA sense strand
gggcaaacgugugagaugu

SEQ ID NO: 655607 - RNA, 19 nt, Homo sapiens
  misc_RNA (1)...(19): siRNA sense strand
ugcacgaugugaugauuua

SEQ ID NO: 655608 - RNA, 19 nt, Homo sapiens
  misc_RNA (1)...(19): siRNA sense strand
uagauccaauggcuuaauu

SEQ ID NO: 655609 - RNA, 19 nt, Homo sapiens
  misc_RNA (1)...(19): siRNA sense strand
gaauuggauuuggcucauu

SEQ ID NO: 655610 - RNA, 19 nt, Homo sapiens
  misc_RNA (1)...(19): siRNA sense strand
uagaaagucgggacaaauu

SEQ ID NO: 655611 - RNA, 19 nt, Homo sapiens
  misc_RNA (1)...(19): siRNA sense strand
aaugaaaugaggaggauua

SEQ ID NO: 655612 - RNA, 19 nt, Homo sapiens
  misc_RNA (1)...(19): siRNA sense strand
aauuguagcuggugugguu

SEQ ID NO: 655613 - RNA, 19 nt, Homo sapiens
  misc_RNA (1)...(19): siRNA sense strand
agaaagucgggacaaauua

SEQ ID NO: 655614 - RNA, 19 nt, Homo sapiens
  misc_RNA (1)...(19): siRNA sense strand
gagcauaaagaauguguuc

SEQ ID NO: 655615 - RNA, 19 nt, Homo sapiens
  misc_RNA (1)...(19): siRNA sense strand
uccaauggcuuaauuugug

SEQ ID NO: 655616 - RNA, 19 nt, Homo sapiens
  misc_RNA (1)...(19): siRNA sense strand
gaaguuaacagugaagaca

SEQ ID NO: 655617 - RNA, 19 nt, Homo sapiens
  misc_RNA (1)...(19): siRNA sense strand
cagcacagaugaaguuaac

SEQ ID NO: 655618 - RNA, 19 nt, Homo sapiens
  misc_RNA (1)...(19): siRNA sense strand
gcaaaugccaaaucaugug

SEQ ID NO: 655619 - RNA, 19 nt, Homo sapiens
  misc_RNA (1)...(19): siRNA sense strand
gaagaauuucagccuguuu

SEQ ID NO: 655620 - RNA, 19 nt, Homo sapiens
  misc_RNA (1)...(19): siRNA sense strand
cagaggcuccaaagauaua

SEQ ID NO: 655621 - RNA, 19 nt, Homo sapiens
  misc_RNA (1)...(19): siRNA sense strand
cugcugauauggaagcuuu

SEQ ID NO: 655622 - RNA, 19 nt, Homo sapiens
  misc_RNA (1)...(19): siRNA sense strand
caacugugauagauccaau

SEQ ID NO: 655623 - RNA, 19 nt, Homo sapiens
  misc_RNA (1)...(19): siRNA sense strand
uagagguuauucuucagua

SEQ ID NO: 655624 - RNA, 19 nt, Homo sapiens
  misc_RNA (1)...(19): siRNA sense strand
cagcgcauaucuggaaauu

SEQ ID NO: 655625 - RNA, 19 nt, Homo sapiens
  misc_RNA (1)...(19): siRNA sense strand
caaaggaacagcagagaag

SEQ ID NO: 655626 - RNA, 19 nt, Homo sapiens
  misc_RNA (1)...(19): siRNA sense strand
gaacagcagagaagcucaa

SEQ ID NO: 655627 - RNA, 19 nt, Homo sapiens
  misc_RNA (1)...(19): siRNA sense strand
gauccaauggcuuaauuug

SEQ ID NO: 655628 - RNA, 19 nt, Homo sapiens
  misc_RNA (1)...(19): siRNA sense strand
gaaaacaguucagaaaucu

SEQ ID NO: 655629 - RNA, 19 nt, Homo sapiens
  misc_RNA (1)...(19): siRNA sense strand
caagugucaugaaggaaau

SEQ ID NO: 655630 - RNA, 19 nt, Homo sapiens
  misc_RNA (1)...(19): siRNA sense strand
gucagaaggaguaacaaua

SEQ ID NO: 655631 - RNA, 19 nt, Homo sapiens
  misc_RNA (1)...(19): siRNA sense strand
gaggauuacuucggacuuc

SEQ ID NO: 655632 - RNA, 19 nt, Homo sapiens
  misc_RNA (1)...(19): siRNA sense strand
ugaaagacgauuuggagaa

SEQ ID NO: 655633 - RNA, 19 nt, Homo sapiens
  misc_RNA (1)...(19): siRNA sense strand
gccacagacauuuacauua

SEQ ID NO: 655634 - RNA, 19 nt, Homo sapiens
  misc_RNA (1)...(19): siRNA sense strand
gcaguugguuuugcgauua

SEQ ID NO: 655635 - RNA, 19 nt, Homo sapiens
  misc_RNA (1)...(19): siRNA sense strand
aaaagacugugaugccuua

SEQ ID NO: 655636 - RNA, 19 nt, Homo sapiens
  misc_RNA (1)...(19): siRNA sense strand
ggaaaugguguuugcaagu

SEQ ID NO: 655637 - RNA, 19 nt, Homo sapiens
  misc_RNA (1)...(19): siRNA sense strand
gcgaaggcaucccugaaag

SEQ ID NO: 655638 - RNA, 19 nt, Homo sapiens
  misc_RNA (1)...(19): siRNA sense strand
gcucagucuuacuaauaaa

SEQ ID NO: 655639 - RNA, 19 nt, Homo sapiens
  misc_RNA (1)...(19): siRNA sense strand
gcaccagcccauuuagcua

SEQ ID NO: 655640 - RNA, 19 nt, Homo sapiens
  misc_RNA (1)...(19): siRNA sense strand
aagggaguuugcuaaauuu

SEQ ID NO: 655641 - RNA, 19 nt, Homo sapiens
  misc_RNA (1)...(19): siRNA sense strand
acaacgaggucaugguuca

SEQ ID NO: 655642 - RNA, 19 nt, Homo sapiens
  misc_RNA (1)...(19): siRNA sense strand
cugauuggcuggaggaaug

SEQ ID NO: 655643 - RNA, 19 nt, Homo sapiens
  misc_RNA (1)...(19): siRNA sense strand
aaguagagguuauucuuca

SEQ ID NO: 655644 - RNA, 19 nt, Homo sapiens
  misc_RNA (1)...(19): siRNA sense strand
guccagacaucauuccaau

SEQ ID NO: 655645 - RNA, 19 nt, Homo sapiens
  misc_RNA (1)...(19): siRNA sense strand
gaaagucgggacaaauuac

SEQ ID NO: 655646 - RNA, 19 nt, Homo sapiens
  misc_RNA (1)...(19): siRNA sense strand
guguacagauccgaaguuu

SEQ ID NO: 655647 - RNA, 19 nt, Homo sapiens
  misc_RNA (1)...(19): siRNA sense strand
guaggaagagggauaauac

SEQ ID NO: 655648 - RNA, 19 nt, Homo sapiens
  misc_RNA (1)...(19): siRNA sense strand
ccaagugucaugaaggaaa

SEQ ID NO: 655649 - RNA, 19 nt, Homo sapiens
  misc_RNA (1)...(19): siRNA sense strand
gaucugaugaaugaaauga

SEQ ID NO: 655650 - RNA, 19 nt, Homo sapiens
  misc_RNA (1)...(19): siRNA sense strand
ggacaguguguuuguagga

SEQ ID NO: 655651 - RNA, 19 nt, Homo sapiens
  misc_RNA (1)...(19): siRNA sense strand
cauuacugcugauauggaa

SEQ ID NO: 655652 - RNA, 19 nt, Homo sapiens
  misc_RNA (1)...(19): siRNA sense strand
gcuccaaagauauaaagaa

SEQ ID NO: 655653 - RNA, 19 nt, Homo sapiens
  misc_RNA (1)...(19): siRNA sense strand
ugacgacuguugguucuau

SEQ ID NO: 655654 - RNA, 19 nt, Homo sapiens
  misc_RNA (1)...(19): siRNA sense strand
uguggugucuguaagugua

SEQ ID NO: 655655 - RNA, 19 nt, Homo sapiens
  misc_RNA (1)...(19): siRNA sense strand
gaggaaaugguguuugcaa

SEQ ID NO: 655656 - RNA, 19 nt, Homo sapiens
  misc_RNA (1)...(19): siRNA sense strand
gacaguguguuuguaggaa

SEQ ID NO: 655657 - RNA, 19 nt, Homo sapiens
  misc_RNA (1)...(19): siRNA sense strand
gaacagaucugaugaauga

SEQ ID NO: 655658 - RNA, 19 nt, Homo sapiens
  misc_RNA (1)...(19): siRNA sense strand
caagagagcugaagacuau

SEQ ID NO: 655659 - RNA, 19 nt, Homo sapiens
  misc_RNA (1)...(19): siRNA sense strand
gaagggaguuugcuaaauu

SEQ ID NO: 655660 - RNA, 19 nt, Homo sapiens
  misc_RNA (1)...(19): siRNA sense strand
ccacagacauuuacauuaa

SEQ ID NO: 655661 - RNA, 19 nt, Homo sapiens
  misc_RNA (1)...(19): siRNA sense strand
gcgcauaucuggaaauuug

SEQ ID NO: 655662 - RNA, 19 nt, Homo sapiens
  misc_RNA (1)...(19): siRNA sense strand
gaagagggauaauacaaau

SEQ ID NO: 655663 - RNA, 19 nt, Homo sapiens
  misc_RNA (1)...(19): siRNA sense strand
gugaagacauggaugcuua

SEQ ID NO: 655664 - RNA, 19 nt, Homo sapiens
  misc_RNA (1)...(19): siRNA sense strand
gaaagacgauuuggagaau

SEQ ID NO: 655665 - RNA, 19 nt, Homo sapiens
  misc_RNA (1)...(19): siRNA sense strand
guaauucaguugaucauug

SEQ ID NO: 655666 - RNA, 19 nt, Homo sapiens
  misc_RNA (1)...(19): siRNA sense strand
gaaaugaggaggauuacuu

SEQ ID NO: 655667 - RNA, 19 nt, Homo sapiens
  misc_RNA (1)...(19): siRNA sense strand
caaaucauguggagaaugu

SEQ ID NO: 655668 - RNA, 19 nt, Homo sapiens
  misc_RNA (1)...(19): siRNA sense strand
gaacugcaccagcccauuu

SEQ ID NO: 655669 - RNA, 19 nt, Homo sapiens
  misc_RNA (1)...(19): siRNA sense strand
guacagauccgaaguuuca

SEQ ID NO: 655670 - RNA, 19 nt, Homo sapiens
  misc_RNA (1)...(19): siRNA sense strand
cagaugaaguuaacaguga

SEQ ID NO: 655671 - RNA, 19 nt, Homo sapiens
  misc_RNA (1)...(19): siRNA sense strand
ggaguuugcuaaauuugaa

SEQ ID NO: 655672 - RNA, 19 nt, Homo sapiens
  misc_RNA (1)...(19): siRNA sense strand
gugcagagccuucaauaaa

SEQ ID NO: 655673 - RNA, 19 nt, Homo sapiens
  misc_RNA (1)...(19): siRNA sense strand
gaacaacgaggucaugguu

SEQ ID NO: 655674 - RNA, 19 nt, Homo sapiens
  misc_RNA (1)...(19): siRNA sense strand
gaaacuugguggcauuguu

SEQ ID NO: 655675 - RNA, 19 nt, Homo sapiens
  misc_RNA (1)...(19): siRNA sense strand
gaaaugguguuugcaagug

SEQ ID NO: 655676 - RNA, 19 nt, Homo sapiens
  misc_RNA (1)...(19): siRNA sense strand
ggaagagggauaauacaaa

SEQ ID NO: 655677 - RNA, 19 nt, Homo sapiens
  misc_RNA (1)...(19): siRNA sense strand
caaauugucagaaggagua

SEQ ID NO: 655678 - RNA, 19 nt, Homo sapiens
  misc_RNA (1)...(19): siRNA sense strand
ggagaaguauuuaaugaac

SEQ ID NO: 655679 - RNA, 19 nt, Homo sapiens
  misc_RNA (1)...(19): siRNA sense strand
cccagaggcuccaaagaua

SEQ ID NO: 655680 - RNA, 19 nt, Homo sapiens
  misc_RNA (1)...(19): siRNA sense strand
gcugaagacuaucccauug

SEQ ID NO: 655681 - RNA, 19 nt, Homo sapiens
  misc_RNA (1)...(19): siRNA sense strand
agacaucauuccaauugua

SEQ ID NO: 655682 - RNA, 19 nt, Homo sapiens
  misc_RNA (1)...(19): siRNA sense strand
gauccugugucccauugua

SEQ ID NO: 655683 - RNA, 19 nt, Homo sapiens
  misc_RNA (1)...(19): siRNA sense strand
ggaaguagagguuauucuu

SEQ ID NO: 655684 - RNA, 19 nt, Homo sapiens
  misc_RNA (1)...(19): siRNA sense strand
ucagaaggaguaacaauaa

SEQ ID NO: 655685 - RNA, 19 nt, Homo sapiens
  misc_RNA (1)...(19): siRNA sense strand
gaaaaugaaugccaaaugg

SEQ ID NO: 655686 - RNA, 19 nt, Homo sapiens
  misc_RNA (1)...(19): siRNA sense strand
gcaagugucguguguguga

SEQ ID NO: 655687 - RNA, 19 nt, Homo sapiens
  misc_RNA (1)...(19): siRNA sense strand
gugauaauuucaacuguga

SEQ ID NO: 655688 - RNA, 19 nt, Homo sapiens
  misc_RNA (1)...(19): siRNA sense strand
acaauucccuuuccucaga

SEQ ID NO: 655689 - RNA, 19 nt, Homo sapiens
  misc_RNA (1)...(19): siRNA sense strand
gaaggaguaacaauaaguu

SEQ ID NO: 655690 - RNA, 19 nt, Homo sapiens
  misc_RNA (1)...(19): siRNA sense strand
gcaauguaauucaguugau

SEQ ID NO: 655691 - RNA, 19 nt, Homo sapiens
  misc_RNA (1)...(19): siRNA sense strand
gguagaaagucgggacaaa

SEQ ID NO: 655692 - RNA, 19 nt, Homo sapiens
  misc_RNA (1)...(19): siRNA sense strand
gaaggauguugacgacugu

SEQ ID NO: 655693 - RNA, 19 nt, Homo sapiens
  misc_RNA (1)...(19): siRNA sense strand
aaacagcgcauaucuggaa

SEQ ID NO: 655694 - RNA, 19 nt, Homo sapiens
  misc_RNA (1)...(19): siRNA sense strand
ccagacaucauuccaauug

SEQ ID NO: 655695 - RNA, 19 nt, Homo sapiens
  misc_RNA (1)...(19): siRNA sense strand
guaaggagaaggauguuga

SEQ ID NO: 655696 - RNA, 19 nt, Homo sapiens
  misc_RNA (1)...(19): siRNA sense strand
ugauagauccaauggcuua

SEQ ID NO: 655697 - RNA, 19 nt, Homo sapiens
  misc_RNA (1)...(19): siRNA sense strand
gaaaucugcaguaacaaug

SEQ ID NO: 655698 - RNA, 19 nt, Homo sapiens
  misc_RNA (1)...(19): siRNA sense strand
gcaugugacuguucuuugg

SEQ ID NO: 655699 - RNA, 19 nt, Homo sapiens
  misc_RNA (1)...(19): siRNA sense strand
ggagaugagguucaauuug

SEQ ID NO: 655700 - RNA, 19 nt, Homo sapiens
  misc_RNA (1)...(19): siRNA sense strand
cagaggauauuacucagau

SEQ ID NO: 655701 - RNA, 19 nt, Homo sapiens
  misc_RNA (1)...(19): siRNA sense strand
gcaaacgugugagaugugu

SEQ ID NO: 655702 - RNA, 19 nt, Homo sapiens
  misc_RNA (1)...(19): siRNA sense strand
gaaagucccaagugucaug

SEQ ID NO: 655703 - RNA, 19 nt, Homo sapiens
  misc_RNA (1)...(19): siRNA sense strand
gugcucagucuuacuaaua

SEQ ID NO: 655704 - RNA, 19 nt, Homo sapiens
  misc_RNA (1)...(19): siRNA sense strand
ggacuucagaauuggauuu

SEQ ID NO: 655705 - RNA, 19 nt, Homo sapiens
  misc_RNA (1)...(19): siRNA sense strand
gcaaaggaacagcagagaa

SEQ ID NO: 655706 - RNA, 19 nt, Homo sapiens
  misc_RNA (1)...(19): siRNA sense strand
gggcaaacgugugagaugu

SEQ ID NO: 655707 - RNA, 19 nt, Homo sapiens
  misc_RNA (1)...(19): siRNA sense strand
ugcacgaugugaugauuua

SEQ ID NO: 655708 - RNA, 19 nt, Homo sapiens
  misc_RNA (1)...(19): siRNA sense strand
uagauccaauggcuuaauu

SEQ ID NO: 655709 - RNA, 19 nt, Homo sapiens
  misc_RNA (1)...(19): siRNA sense strand
gaauuggauuuggcucauu

SEQ ID NO: 655710 - RNA, 19 nt, Homo sapiens
  misc_RNA (1)...(19): siRNA sense strand
uagaaagucgggacaaauu

SEQ ID NO: 655711 - RNA, 19 nt, Homo sapiens
  misc_RNA (1)...(19): siRNA sense strand
aaugaaaugaggaggauua

SEQ ID NO: 655712 - RNA, 19 nt, Homo sapiens
  misc_RNA (1)...(19): siRNA sense strand
aauuguagcuggugugguu

SEQ ID NO: 655713 - RNA, 19 nt, Homo sapiens
  misc_RNA (1)...(19): siRNA sense strand
agaaagucgggacaaauua

SEQ ID NO: 655714 - RNA, 19 nt, Homo sapiens
  misc_RNA (1)...(19): siRNA sense strand
gagcauaaagaauguguuc

SEQ ID NO: 655715 - RNA, 19 nt, Homo sapiens
  misc_RNA (1)...(19): siRNA sense strand
uccaauggcuuaauuugug

SEQ ID NO: 655716 - RNA, 19 nt, Homo sapiens
  misc_RNA (1)...(19): siRNA sense strand
gaaguuaacagugaagaca

SEQ ID NO: 655717 - RNA, 19 nt, Homo sapiens
  misc_RNA (1)...(19): siRNA sense strand
cagcacagaugaaguuaac

SEQ ID NO: 655718 - RNA, 19 nt, Homo sapiens
  misc_RNA (1)...(19): siRNA sense strand
gcaaaugccaaaucaugug

SEQ ID NO: 655719 - RNA, 19 nt, Homo sapiens
  misc_RNA (1)...(19): siRNA sense strand
gaagaauuucagccuguuu

SEQ ID NO: 655720 - RNA, 19 nt, Homo sapiens
  misc_RNA (1)...(19): siRNA sense strand
cagaggcuccaaagauaua

SEQ ID NO: 655721 - RNA, 19 nt, Homo sapiens
  misc_RNA (1)...(19): siRNA sense strand
cugcugauauggaagcuuu

SEQ ID NO: 655722 - RNA, 19 nt, Homo sapiens
  misc_RNA (1)...(19): siRNA sense strand
caacugugauagauccaau

SEQ ID NO: 655723 - RNA, 19 nt, Homo sapiens
  misc_RNA (1)...(19): siRNA sense strand
uagagguuauucuucagua

SEQ ID NO: 655724 - RNA, 19 nt, Homo sapiens
  misc_RNA (1)...(19): siRNA sense strand
cagcgcauaucuggaaauu

SEQ ID NO: 655725 - RNA, 19 nt, Homo sapiens
  misc_RNA (1)...(19): siRNA sense strand
caaaggaacagcagagaag

SEQ ID NO: 655726 - RNA, 19 nt, Homo sapiens
  misc_RNA (1)...(19): siRNA sense strand
gaacagcagagaagcucaa

SEQ ID NO: 655727 - RNA, 19 nt, Homo sapiens
  misc_RNA (1)...(19): siRNA sense strand
gauccaauggcuuaauuug

SEQ ID NO: 655728 - RNA, 19 nt, Homo sapiens
  misc_RNA (1)...(19): siRNA sense strand
gaaaacaguucagaaaucu

SEQ ID NO: 655729 - RNA, 19 nt, Homo sapiens
  misc_RNA (1)...(19): siRNA sense strand
caagugucaugaaggaaau

SEQ ID NO: 655730 - RNA, 19 nt, Homo sapiens
  misc_RNA (1)...(19): siRNA sense strand
gucagaaggaguaacaaua

SEQ ID NO: 655731 - RNA, 19 nt, Homo sapiens
  misc_RNA (1)...(19): siRNA sense strand
gaggauuacuucggacuuc

SEQ ID NO: 655732 - RNA, 19 nt, Homo sapiens
  misc_RNA (1)...(19): siRNA sense strand
ugaaagacgauuuggagaa

SEQ ID NO: 655733 - RNA, 19 nt, Homo sapiens
  misc_RNA (1)...(19): siRNA sense strand
gccacagacauuuacauua

SEQ ID NO: 655734 - RNA, 19 nt, Homo sapiens
  misc_RNA (1)...(19): siRNA sense strand
gcaguugguuuugcgauua

SEQ ID NO: 655735 - RNA, 19 nt, Homo sapiens
  misc_RNA (1)...(19): siRNA sense strand
aaaagacugugaugccuua

SEQ ID NO: 655736 - RNA, 19 nt, Homo sapiens
  misc_RNA (1)...(19): siRNA sense strand
ggaaaugguguuugcaagu

SEQ ID NO: 655737 - RNA, 19 nt, Homo sapiens
  misc_RNA (1)...(19): siRNA sense strand
gcgaaggcaucccugaaag

SEQ ID NO: 655738 - RNA, 19 nt, Homo sapiens
  misc_RNA (1)...(19): siRNA sense strand
gcucagucuuacuaauaaa

SEQ ID NO: 655739 - RNA, 19 nt, Homo sapiens
  misc_RNA (1)...(19): siRNA sense strand
gcaccagcccauuuagcua

SEQ ID NO: 655740 - RNA, 19 nt, Homo sapiens
  misc_RNA (1)...(19): siRNA sense strand
aagggaguuugcuaaauuu

SEQ ID NO: 655741 - RNA, 19 nt, Homo sapiens
  misc_RNA (1)...(19): siRNA sense strand
acaacgaggucaugguuca

SEQ ID NO: 655742 - RNA, 19 nt, Homo sapiens
  misc_RNA (1)...(19): siRNA sense strand
cugauuggcuggaggaaug

SEQ ID NO: 655743 - RNA, 19 nt, Homo sapiens
  misc_RNA (1)...(19): siRNA sense strand
aaguagagguuauucuuca

SEQ ID NO: 655744 - RNA, 19 nt, Homo sapiens
  misc_RNA (1)...(19): siRNA sense strand
guccagacaucauuccaau

SEQ ID NO: 655745 - RNA, 19 nt, Homo sapiens
  misc_RNA (1)...(19): siRNA sense strand
gaaagucgggacaaauuac

SEQ ID NO: 655746 - RNA, 19 nt, Homo sapiens
  misc_RNA (1)...(19): siRNA sense strand
guguacagauccgaaguuu

SEQ ID NO: 655747 - RNA, 19 nt, Homo sapiens
  misc_RNA (1)...(19): siRNA sense strand
guaggaagagggauaauac

SEQ ID NO: 655748 - RNA, 19 nt, Homo sapiens
  misc_RNA (1)...(19): siRNA sense strand
ccaagugucaugaaggaaa

SEQ ID NO: 655749 - RNA, 19 nt, Homo sapiens
  misc_RNA (1)...(19): siRNA sense strand
gaucugaugaaugaaauga

SEQ ID NO: 655750 - RNA, 19 nt, Homo sapiens
  misc_RNA (1)...(19): siRNA sense strand
ggacaguguguuuguagga

SEQ ID NO: 655751 - RNA, 19 nt, Homo sapiens
  misc_RNA (1)...(19): siRNA sense strand
cauuacugcugauauggaa

SEQ ID NO: 655752 - RNA, 19 nt, Homo sapiens
  misc_RNA (1)...(19): siRNA sense strand
gcuccaaagauauaaagaa

SEQ ID NO: 655753 - RNA, 19 nt, Homo sapiens
  misc_RNA (1)...(19): siRNA sense strand
ugacgacuguugguucuau

SEQ ID NO: 655754 - RNA, 19 nt, Homo sapiens
  misc_RNA (1)...(19): siRNA sense strand
uguggugucuguaagugua

SEQ ID NO: 655755 - RNA, 19 nt, Homo sapiens
  misc_RNA (1)...(19): siRNA sense strand
gaggaaaugguguuugcaa

SEQ ID NO: 655756 - RNA, 19 nt, Homo sapiens
  misc_RNA (1)...(19): siRNA sense strand
gacaguguguuuguaggaa

SEQ ID NO: 655757 - RNA, 19 nt, Homo sapiens
  misc_RNA (1)...(19): siRNA sense strand
gaacagaucugaugaauga

SEQ ID NO: 655758 - RNA, 19 nt, Homo sapiens
  misc_RNA (1)...(19): siRNA sense strand
caagagagcugaagacuau

SEQ ID NO: 655759 - RNA, 19 nt, Homo sapiens
  misc_RNA (1)...(19): siRNA sense strand
gaagggaguuugcuaaauu

SEQ ID NO: 655760 - RNA, 19 nt, Homo sapiens
  misc_RNA (1)...(19): siRNA sense strand
ccacagacauuuacauuaa

SEQ ID NO: 655761 - RNA, 19 nt, Homo sapiens
  misc_RNA (1)...(19): siRNA sense strand
gcgcauaucuggaaauuug

SEQ ID NO: 655762 - RNA, 19 nt, Homo sapiens
  misc_RNA (1)...(19): siRNA sense strand
gaagagggauaauacaaau

SEQ ID NO: 655763 - RNA, 19 nt, Homo sapiens
  misc_RNA (1)...(19): siRNA sense strand
gugaagacauggaugcuua

SEQ ID NO: 655764 - RNA, 19 nt, Homo sapiens
  misc_RNA (1)...(19): siRNA sense strand
gaaagacgauuuggagaau

SEQ ID NO: 655765 - RNA, 19 nt, Homo sapiens
  misc_RNA (1)...(19): siRNA sense strand
guaauucaguugaucauug

SEQ ID NO: 655766 - RNA, 19 nt, Homo sapiens
  misc_RNA (1)...(19): siRNA sense strand
gaaaugaggaggauuacuu

SEQ ID NO: 655767 - RNA, 19 nt, Homo sapiens
  misc_RNA (1)...(19): siRNA sense strand
caaaucauguggagaaugu

SEQ ID NO: 655768 - RNA, 19 nt, Homo sapiens
  misc_RNA (1)...(19): siRNA sense strand
gaacugcaccagcccauuu

SEQ ID NO: 655769 - RNA, 19 nt, Homo sapiens
  misc_RNA (1)...(19): siRNA sense strand
guacagauccgaaguuuca

SEQ ID NO: 655770 - RNA, 19 nt, Homo sapiens
  misc_RNA (1)...(19): siRNA sense strand
cagaugaaguuaacaguga

SEQ ID NO: 655771 - RNA, 19 nt, Homo sapiens
  misc_RNA (1)...(19): siRNA sense strand
ggaguuugcuaaauuugaa

SEQ ID NO: 655772 - RNA, 19 nt, Homo sapiens
  misc_RNA (1)...(19): siRNA sense strand
gugcagagccuucaauaaa

SEQ ID NO: 655773 - RNA, 19 nt, Homo sapiens
  misc_RNA (1)...(19): siRNA sense strand
gaacaacgaggucaugguu

SEQ ID NO: 655774 - RNA, 19 nt, Homo sapiens
  misc_RNA (1)...(19): siRNA sense strand
gaaacuugguggcauuguu

SEQ ID NO: 655775 - RNA, 19 nt, Homo sapiens
  misc_RNA (1)...(19): siRNA sense strand
gaaaugguguuugcaagug

SEQ ID NO: 655776 - RNA, 19 nt, Homo sapiens
  misc_RNA (1)...(19): siRNA sense strand
ggaagagggauaauacaaa

SEQ ID NO: 655777 - RNA, 19 nt, Homo sapiens
  misc_RNA (1)...(19): siRNA sense strand
caaauugucagaaggagua

SEQ ID NO: 655778 - RNA, 19 nt, Homo sapiens
  misc_RNA (1)...(19): siRNA sense strand
ggagaaguauuuaaugaac

SEQ ID NO: 655779 - RNA, 19 nt, Homo sapiens
  misc_RNA (1)...(19): siRNA sense strand
cccagaggcuccaaagaua

SEQ ID NO: 655780 - RNA, 19 nt, Homo sapiens
  misc_RNA (1)...(19): siRNA sense strand
gcugaagacuaucccauug

SEQ ID NO: 655781 - RNA, 19 nt, Homo sapiens
  misc_RNA (1)...(19): siRNA sense strand
agacaucauuccaauugua

SEQ ID NO: 655782 - RNA, 19 nt, Homo sapiens
  misc_RNA (1)...(19): siRNA sense strand
gauccugugucccauugua

SEQ ID NO: 655783 - RNA, 19 nt, Homo sapiens
  misc_RNA (1)...(19): siRNA sense strand
ggaaguagagguuauucuu

SEQ ID NO: 655784 - RNA, 19 nt, Homo sapiens
  misc_RNA (1)...(19): siRNA sense strand
ucagaaggaguaacaauaa

SEQ ID NO: 655785 - RNA, 19 nt, Homo sapiens
  misc_RNA (1)...(19): siRNA sense strand
gaaaaugaaugccaaaugg

SEQ ID NO: 655786 - RNA, 19 nt, Homo sapiens
  misc_RNA (1)...(19): siRNA sense strand
gcaagugucguguguguga

SEQ ID NO: 655787 - RNA, 19 nt, Homo sapiens
  misc_RNA (1)...(19): siRNA sense strand
gugauaauuucaacuguga

SEQ ID NO: 655788 - RNA, 19 nt, Homo sapiens
  misc_RNA (1)...(19): siRNA sense strand
acaauucccuuuccucaga

SEQ ID NO: 655789 - RNA, 19 nt, Homo sapiens
  misc_RNA (1)...(19): siRNA sense strand
gaaggaguaacaauaaguu

SEQ ID NO: 655790 - RNA, 19 nt, Homo sapiens
  misc_RNA (1)...(19): siRNA sense strand
gcaauguaauucaguugau

SEQ ID NO: 655791 - RNA, 19 nt, Homo sapiens
  misc_RNA (1)...(19): siRNA sense strand
gguagaaagucgggacaaa

SEQ ID NO: 655792 - RNA, 19 nt, Homo sapiens
  misc_RNA (1)...(19): siRNA sense strand
gaaggauguugacgacugu

SEQ ID NO: 655793 - RNA, 19 nt, Homo sapiens
  misc_RNA (1)...(19): siRNA sense strand
aaacagcgcauaucuggaa

SEQ ID NO: 655794 - RNA, 19 nt, Homo sapiens
  misc_RNA (1)...(19): siRNA sense strand
ccagacaucauuccaauug

SEQ ID NO: 655795 - RNA, 19 nt, Homo sapiens
  misc_RNA (1)...(19): siRNA sense strand
guaaggagaaggauguuga

SEQ ID NO: 655796 - RNA, 19 nt, Homo sapiens
  misc_RNA (1)...(19): siRNA sense strand
ugauagauccaauggcuua

SEQ ID NO: 655797 - RNA, 19 nt, Homo sapiens
  misc_RNA (1)...(19): siRNA sense strand
gaaaucugcaguaacaaug

SEQ ID NO: 655798 - RNA, 19 nt, Homo sapiens
  misc_RNA (1)...(19): siRNA sense strand
gcaugugacuguucuuugg

SEQ ID NO: 655799 - RNA, 19 nt, Homo sapiens
  misc_RNA (1)...(19): siRNA sense strand
ggagaugagguucaauuug

SEQ ID NO: 655800 - RNA, 19 nt, Homo sapiens
  misc_RNA (1)...(19): siRNA sense strand
cagaggauauuacucagau

SEQ ID NO: 655801 - RNA, 19 nt, Homo sapiens
  misc_RNA (1)...(19): siRNA sense strand
gcaaacgugugagaugugu

SEQ ID NO: 655802 - RNA, 19 nt, Homo sapiens
  misc_RNA (1)...(19): siRNA sense strand
gaaagucccaagugucaug

SEQ ID NO: 655803 - RNA, 19 nt, Homo sapiens
  misc_RNA (1)...(19): siRNA sense strand
gugcucagucuuacuaaua

SEQ ID NO: 655804 - RNA, 19 nt, Homo sapiens
  misc_RNA (1)...(19): siRNA sense strand
ggacuucagaauuggauuu

SEQ ID NO: 655805 - RNA, 19 nt, Homo sapiens
  misc_RNA (1)...(19): siRNA sense strand
gcaaaggaacagcagagaa

SEQ ID NO: 655806 - RNA, 19 nt, Homo sapiens
  misc_RNA (1)...(19): siRNA sense strand
gggcaaacgugugagaugu

SEQ ID NO: 655807 - RNA, 19 nt, Homo sapiens
  misc_RNA (1)...(19): siRNA sense strand
ugcacgaugugaugauuua

SEQ ID NO: 655808 - RNA, 19 nt, Homo sapiens
  misc_RNA (1)...(19): siRNA sense strand
uagauccaauggcuuaauu

SEQ ID NO: 655809 - RNA, 19 nt, Homo sapiens
  misc_RNA (1)...(19): siRNA sense strand
gaauuggauuuggcucauu

SEQ ID NO: 655810 - RNA, 19 nt, Homo sapiens
  misc_RNA (1)...(19): siRNA sense strand
uagaaagucgggacaaauu

SEQ ID NO: 655811 - RNA, 19 nt, Homo sapiens
  misc_RNA (1)...(19): siRNA sense strand
aaugaaaugaggaggauua

SEQ ID NO: 655812 - RNA, 19 nt, Homo sapiens
  misc_RNA (1)...(19): siRNA sense strand
aauuguagcuggugugguu

SEQ ID NO: 655813 - RNA, 19 nt, Homo sapiens
  misc_RNA (1)...(19): siRNA sense strand
agaaagucgggacaaauua

SEQ ID NO: 655814 - RNA, 19 nt, Homo sapiens
  misc_RNA (1)...(19): siRNA sense strand
gagcauaaagaauguguuc

SEQ ID NO: 655815 - RNA, 19 nt, Homo sapiens
  misc_RNA (1)...(19): siRNA sense strand
uccaauggcuuaauuugug

SEQ ID NO: 655816 - RNA, 19 nt, Homo sapiens
  misc_RNA (1)...(19): siRNA sense strand
gaaguuaacagugaagaca

SEQ ID NO: 655817 - RNA, 19 nt, Homo sapiens
  misc_RNA (1)...(19): siRNA sense strand
cagcacagaugaaguuaac

SEQ ID NO: 655818 - RNA, 19 nt, Homo sapiens
  misc_RNA (1)...(19): siRNA sense strand
gcaaaugccaaaucaugug

SEQ ID NO: 655819 - RNA, 19 nt, Homo sapiens
  misc_RNA (1)...(19): siRNA sense strand
gaagaauuucagccuguuu

SEQ ID NO: 655820 - RNA, 19 nt, Homo sapiens
  misc_RNA (1)...(19): siRNA sense strand
cagaggcuccaaagauaua

SEQ ID NO: 655821 - RNA, 19 nt, Homo sapiens
  misc_RNA (1)...(19): siRNA sense strand
cugcugauauggaagcuuu

SEQ ID NO: 655822 - RNA, 19 nt, Homo sapiens
  misc_RNA (1)...(19): siRNA sense strand
caacugugauagauccaau

SEQ ID NO: 655823 - RNA, 19 nt, Homo sapiens
  misc_RNA (1)...(19): siRNA sense strand
uagagguuauucuucagua

SEQ ID NO: 655824 - RNA, 19 nt, Homo sapiens
  misc_RNA (1)...(19): siRNA sense strand
cagcgcauaucuggaaauu

SEQ ID NO: 655825 - RNA, 19 nt, Homo sapiens
  misc_RNA (1)...(19): siRNA sense strand
caaaggaacagcagagaag

SEQ ID NO: 655826 - RNA, 19 nt, Homo sapiens
  misc_RNA (1)...(19): siRNA sense strand
gaacagcagagaagcucaa

SEQ ID NO: 655827 - RNA, 19 nt, Homo sapiens
  misc_RNA (1)...(19): siRNA sense strand
gauccaauggcuuaauuug

SEQ ID NO: 655828 - RNA, 19 nt, Homo sapiens
  misc_RNA (1)...(19): siRNA sense strand
gaaaacaguucagaaaucu

SEQ ID NO: 655829 - RNA, 19 nt, Homo sapiens
  misc_RNA (1)...(19): siRNA sense strand
caagugucaugaaggaaau

SEQ ID NO: 655830 - RNA, 19 nt, Homo sapiens
  misc_RNA (1)...(19): siRNA sense strand
gucagaaggaguaacaaua

SEQ ID NO: 655831 - RNA, 19 nt, Homo sapiens
  misc_RNA (1)...(19): siRNA sense strand
gaggauuacuucggacuuc

SEQ ID NO: 655832 - RNA, 19 nt, Homo sapiens
  misc_RNA (1)...(19): siRNA sense strand
ugaaagacgauuuggagaa

SEQ ID NO: 655833 - RNA, 19 nt, Homo sapiens
  misc_RNA (1)...(19): siRNA sense strand
gccacagacauuuacauua

SEQ ID NO: 655834 - RNA, 19 nt, Homo sapiens
  misc_RNA (1)...(19): siRNA sense strand
gcaguugguuuugcgauua

SEQ ID NO: 655835 - RNA, 19 nt, Homo sapiens
  misc_RNA (1)...(19): siRNA sense strand
aaaagacugugaugccuua

SEQ ID NO: 655836 - RNA, 19 nt, Homo sapiens
  misc_RNA (1)...(19): siRNA sense strand
ggaaaugguguuugcaagu

SEQ ID NO: 655837 - RNA, 19 nt, Homo sapiens
  misc_RNA (1)...(19): siRNA sense strand
gcgaaggcaucccugaaag

SEQ ID NO: 655838 - RNA, 19 nt, Homo sapiens
  misc_RNA (1)...(19): siRNA sense strand
gcucagucuuacuaauaaa

SEQ ID NO: 655839 - RNA, 19 nt, Homo sapiens
  misc_RNA (1)...(19): siRNA sense strand
gcaccagcccauuuagcua

SEQ ID NO: 655840 - RNA, 19 nt, Homo sapiens
  misc_RNA (1)...(19): siRNA sense strand
aagggaguuugcuaaauuu

SEQ ID NO: 655841 - RNA, 19 nt, Homo sapiens
  misc_RNA (1)...(19): siRNA sense strand
acaacgaggucaugguuca

SEQ ID NO: 655842 - RNA, 19 nt, Homo sapiens
  misc_RNA (1)...(19): siRNA sense strand
cugauuggcuggaggaaug

SEQ ID NO: 655843 - RNA, 19 nt, Homo sapiens
  misc_RNA (1)...(19): siRNA sense strand
aaguagagguuauucuuca

SEQ ID NO: 655844 - RNA, 19 nt, Homo sapiens
  misc_RNA (1)...(19): siRNA sense strand
guccagacaucauuccaau

SEQ ID NO: 655845 - RNA, 19 nt, Homo sapiens
  misc_RNA (1)...(19): siRNA sense strand
gaaagucgggacaaauuac

SEQ ID NO: 655846 - RNA, 19 nt, Homo sapiens
  misc_RNA (1)...(19): siRNA sense strand
guguacagauccgaaguuu

SEQ ID NO: 655847 - RNA, 19 nt, Homo sapiens
  misc_RNA (1)...(19): siRNA sense strand
guaggaagagggauaauac

SEQ ID NO: 655848 - RNA, 19 nt, Homo sapiens
  misc_RNA (1)...(19): siRNA sense strand
ccaagugucaugaaggaaa

SEQ ID NO: 655849 - RNA, 19 nt, Homo sapiens
  misc_RNA (1)...(19): siRNA sense strand
gaucugaugaaugaaauga

SEQ ID NO: 655850 - RNA, 19 nt, Homo sapiens
  misc_RNA (1)...(19): siRNA sense strand
ggacaguguguuuguagga

SEQ ID NO: 655851 - RNA, 19 nt, Homo sapiens
  misc_RNA (1)...(19): siRNA sense strand
cauuacugcugauauggaa

SEQ ID NO: 655852 - RNA, 19 nt, Homo sapiens
  misc_RNA (1)...(19): siRNA sense strand
gcuccaaagauauaaagaa

SEQ ID NO: 655853 - RNA, 19 nt, Homo sapiens
  misc_RNA (1)...(19): siRNA sense strand
ugacgacuguugguucuau

SEQ ID NO: 655854 - RNA, 19 nt, Homo sapiens
  misc_RNA (1)...(19): siRNA sense strand
uguggugucuguaagugua

SEQ ID NO: 655855 - RNA, 19 nt, Homo sapiens
  misc_RNA (1)...(19): siRNA sense strand
gaggaaaugguguuugcaa

SEQ ID NO: 655856 - RNA, 19 nt, Homo sapiens
  misc_RNA (1)...(19): siRNA sense strand
gacaguguguuuguaggaa

SEQ ID NO: 655857 - RNA, 19 nt, Homo sapiens
  misc_RNA (1)...(19): siRNA sense strand
gaacagaucugaugaauga

SEQ ID NO: 655858 - RNA, 19 nt, Homo sapiens
  misc_RNA (1)...(19): siRNA sense strand
caagagagcugaagacuau

SEQ ID NO: 655859 - RNA, 19 nt, Homo sapiens
  misc_RNA (1)...(19): siRNA sense strand
gaagggaguuugcuaaauu

SEQ ID NO: 655860 - RNA, 19 nt, Homo sapiens
  misc_RNA (1)...(19): siRNA sense strand
ccacagacauuuacauuaa

SEQ ID NO: 655861 - RNA, 19 nt, Homo sapiens
  misc_RNA (1)...(19): siRNA sense strand
gcgcauaucuggaaauuug

SEQ ID NO: 655862 - RNA, 19 nt, Homo sapiens
  misc_RNA (1)...(19): siRNA sense strand
gaagagggauaauacaaau

SEQ ID NO: 655863 - RNA, 19 nt, Homo sapiens
  misc_RNA (1)...(19): siRNA sense strand
gugaagacauggaugcuua

SEQ ID NO: 655864 - RNA, 19 nt, Homo sapiens
  misc_RNA (1)...(19): siRNA sense strand
gaaagacgauuuggagaau

SEQ ID NO: 655865 - RNA, 19 nt, Homo sapiens
  misc_RNA (1)...(19): siRNA sense strand
guaauucaguugaucauug

SEQ ID NO: 655866 - RNA, 19 nt, Homo sapiens
  misc_RNA (1)...(19): siRNA sense strand
gaaaugaggaggauuacuu

SEQ ID NO: 655867 - RNA, 19 nt, Homo sapiens
  misc_RNA (1)...(19): siRNA sense strand
caaaucauguggagaaugu

SEQ ID NO: 655868 - RNA, 19 nt, Homo sapiens
  misc_RNA (1)...(19): siRNA sense strand
gaacugcaccagcccauuu

SEQ ID NO: 655869 - RNA, 19 nt, Homo sapiens
  misc_RNA (1)...(19): siRNA sense strand
guacagauccgaaguuuca

SEQ ID NO: 655870 - RNA, 19 nt, Homo sapiens
  misc_RNA (1)...(19): siRNA sense strand
cagaugaaguuaacaguga

SEQ ID NO: 655871 - RNA, 19 nt, Homo sapiens
  misc_RNA (1)...(19): siRNA sense strand
ggaguuugcuaaauuugaa

SEQ ID NO: 655872 - RNA, 19 nt, Homo sapiens
  misc_RNA (1)...(19): siRNA sense strand
gugcagagccuucaauaaa

SEQ ID NO: 655873 - RNA, 19 nt, Homo sapiens
  misc_RNA (1)...(19): siRNA sense strand
gaacaacgaggucaugguu

SEQ ID NO: 655874 - RNA, 19 nt, Homo sapiens
  misc_RNA (1)...(19): siRNA sense strand
gaaacuugguggcauuguu

SEQ ID NO: 655875 - RNA, 19 nt, Homo sapiens
  misc_RNA (1)...(19): siRNA sense strand
gaaaugguguuugcaagug

SEQ ID NO: 655876 - RNA, 19 nt, Homo sapiens
  misc_RNA (1)...(19): siRNA sense strand
ggaagagggauaauacaaa

SEQ ID NO: 655877 - RNA, 19 nt, Homo sapiens
  misc_RNA (1)...(19): siRNA sense strand
caaauugucagaaggagua

SEQ ID NO: 655878 - RNA, 19 nt, Homo sapiens
  misc_RNA (1)...(19): siRNA sense strand
ggagaaguauuuaaugaac

SEQ ID NO: 655879 - RNA, 19 nt, Homo sapiens
  misc_RNA (1)...(19): siRNA sense strand
cccagaggcuccaaagaua

SEQ ID NO: 655880 - RNA, 19 nt, Homo sapiens
  misc_RNA (1)...(19): siRNA sense strand
gcugaagacuaucccauug

SEQ ID NO: 655881 - RNA, 19 nt, Homo sapiens
  misc_RNA (1)...(19): siRNA sense strand
agacaucauuccaauugua

SEQ ID NO: 655882 - RNA, 19 nt, Homo sapiens
  misc_RNA (1)...(19): siRNA sense strand
gauccugugucccauugua

SEQ ID NO: 655883 - RNA, 19 nt, Homo sapiens
  misc_RNA (1)...(19): siRNA sense strand
ggaaguagagguuauucuu

SEQ ID NO: 655884 - RNA, 19 nt, Homo sapiens
  misc_RNA (1)...(19): siRNA sense strand
ucagaaggaguaacaauaa

SEQ ID NO: 655885 - RNA, 19 nt, Homo sapiens
  misc_RNA (1)...(19): siRNA sense strand
gaaaaugaaugccaaaugg

SEQ ID NO: 655886 - RNA, 19 nt, Homo sapiens
  misc_RNA (1)...(19): siRNA sense strand
gcaagugucguguguguga

SEQ ID NO: 655887 - RNA, 19 nt, Homo sapiens
  misc_RNA (1)...(19): siRNA sense strand
gugauaauuucaacuguga

SEQ ID NO: 655888 - RNA, 19 nt, Homo sapiens
  misc_RNA (1)...(19): siRNA sense strand
acaauucccuuuccucaga

SEQ ID NO: 655889 - RNA, 19 nt, Homo sapiens
  misc_RNA (1)...(19): siRNA sense strand
gaaggaguaacaauaaguu

SEQ ID NO: 655890 - RNA, 19 nt, Homo sapiens
  misc_RNA (1)...(19): siRNA sense strand
gcaauguaauucaguugau

SEQ ID NO: 655891 - RNA, 19 nt, Homo sapiens
  misc_RNA (1)...(19): siRNA sense strand
gguagaaagucgggacaaa

SEQ ID NO: 655892 - RNA, 19 nt, Homo sapiens
  misc_RNA (1)...(19): siRNA sense strand
gaaggauguugacgacugu

SEQ ID NO: 655893 - RNA, 19 nt, Homo sapiens
  misc_RNA (1)...(19): siRNA sense strand
aaacagcgcauaucuggaa

SEQ ID NO: 655894 - RNA, 19 nt, Homo sapiens
  misc_RNA (1)...(19): siRNA sense strand
ccagacaucauuccaauug

SEQ ID NO: 655895 - RNA, 19 nt, Homo sapiens
  misc_RNA (1)...(19): siRNA sense strand
guaaggagaaggauguuga

SEQ ID NO: 655896 - RNA, 19 nt, Homo sapiens
  misc_RNA (1)...(19): siRNA sense strand
ugauagauccaauggcuua

SEQ ID NO: 655897 - RNA, 19 nt, Homo sapiens
  misc_RNA (1)...(19): siRNA sense strand
gaaaucugcaguaacaaug

SEQ ID NO: 655898 - RNA, 19 nt, Homo sapiens
  misc_RNA (1)...(19): siRNA sense strand
gcaugugacuguucuuugg

SEQ ID NO: 655899 - RNA, 19 nt, Homo sapiens
  misc_RNA (1)...(19): siRNA sense strand
ggagaugagguucaauuug

SEQ ID NO: 655900 - RNA, 19 nt, Homo sapiens
  misc_RNA (1)...(19): siRNA sense strand
cagaggauauuacucagau

SEQ ID NO: 655901 - RNA, 19 nt, Homo sapiens
  misc_RNA (1)...(19): siRNA sense strand
gcaaacgugugagaugugu

SEQ ID NO: 655902 - RNA, 19 nt, Homo sapiens
  misc_RNA (1)...(19): siRNA sense strand
gaaagucccaagugucaug

SEQ ID NO: 655903 - RNA, 19 nt, Homo sapiens
  misc_RNA (1)...(19): siRNA sense strand
gugcucagucuuacuaaua

SEQ ID NO: 655904 - RNA, 19 nt, Homo sapiens
  misc_RNA (1)...(19): siRNA sense strand
ggacuucagaauuggauuu

SEQ ID NO: 655905 - RNA, 19 nt, Homo sapiens
  misc_RNA (1)...(19): siRNA sense strand
gcaaaggaacagcagagaa

SEQ ID NO: 655906 - RNA, 19 nt, Homo sapiens
  misc_RNA (1)...(19): siRNA sense strand
gggcaaacgugugagaugu

SEQ ID NO: 655907 - RNA, 19 nt, Homo sapiens
  misc_RNA (1)...(19): siRNA sense strand
ugcacgaugugaugauuua

SEQ ID NO: 655908 - RNA, 19 nt, Homo sapiens
  misc_RNA (1)...(19): siRNA sense strand
uagauccaauggcuuaauu

SEQ ID NO: 655909 - RNA, 19 nt, Homo sapiens
  misc_RNA (1)...(19): siRNA sense strand
gaauuggauuuggcucauu

SEQ ID NO: 655910 - RNA, 19 nt, Homo sapiens
  misc_RNA (1)...(19): siRNA sense strand
uagaaagucgggacaaauu

SEQ ID NO: 655911 - RNA, 19 nt, Homo sapiens
  misc_RNA (1)...(19): siRNA sense strand
aaugaaaugaggaggauua

SEQ ID NO: 655912 - RNA, 19 nt, Homo sapiens
  misc_RNA (1)...(19): siRNA sense strand
aauuguagcuggugugguu

SEQ ID NO: 655913 - RNA, 19 nt, Homo sapiens
  misc_RNA (1)...(19): siRNA sense strand
agaaagucgggacaaauua

SEQ ID NO: 655914 - RNA, 19 nt, Homo sapiens
  misc_RNA (1)...(19): siRNA sense strand
gagcauaaagaauguguuc

SEQ ID NO: 655915 - RNA, 19 nt, Homo sapiens
  misc_RNA (1)...(19): siRNA sense strand
uccaauggcuuaauuugug

SEQ ID NO: 655916 - RNA, 19 nt, Homo sapiens
  misc_RNA (1)...(19): siRNA sense strand
gaaguuaacagugaagaca

SEQ ID NO: 655917 - RNA, 19 nt, Homo sapiens
  misc_RNA (1)...(19): siRNA sense strand
cagcacagaugaaguuaac

SEQ ID NO: 655918 - RNA, 19 nt, Homo sapiens
  misc_RNA (1)...(19): siRNA sense strand
gcaaaugccaaaucaugug

SEQ ID NO: 655919 - RNA, 19 nt, Homo sapiens
  misc_RNA (1)...(19): siRNA sense strand
gaagaauuucagccuguuu

SEQ ID NO: 655920 - RNA, 19 nt, Homo sapiens
  misc_RNA (1)...(19): siRNA sense strand
cagaggcuccaaagauaua

SEQ ID NO: 655921 - RNA, 19 nt, Homo sapiens
  misc_RNA (1)...(19): siRNA sense strand
cugcugauauggaagcuuu

SEQ ID NO: 655922 - RNA, 19 nt, Homo sapiens
  misc_RNA (1)...(19): siRNA sense strand
caacugugauagauccaau

SEQ ID NO: 655923 - RNA, 19 nt, Homo sapiens
  misc_RNA (1)...(19): siRNA sense strand
uagagguuauucuucagua

SEQ ID NO: 655924 - RNA, 19 nt, Homo sapiens
  misc_RNA (1)...(19): siRNA sense strand
cagcgcauaucuggaaauu

SEQ ID NO: 655925 - RNA, 19 nt, Homo sapiens
  misc_RNA (1)...(19): siRNA sense strand
caaaggaacagcagagaag

SEQ ID NO: 655926 - RNA, 19 nt, Homo sapiens
  misc_RNA (1)...(19): siRNA sense strand
gaacagcagagaagcucaa

SEQ ID NO: 655927 - RNA, 19 nt, Homo sapiens
  misc_RNA (1)...(19): siRNA sense strand
gauccaauggcuuaauuug

SEQ ID NO: 655928 - RNA, 19 nt, Homo sapiens
  misc_RNA (1)...(19): siRNA sense strand
gaaaacaguucagaaaucu

SEQ ID NO: 655929 - RNA, 19 nt, Homo sapiens
  misc_RNA (1)...(19): siRNA sense strand
caagugucaugaaggaaau

SEQ ID NO: 655930 - RNA, 19 nt, Homo sapiens
  misc_RNA (1)...(19): siRNA sense strand
gucagaaggaguaacaaua

SEQ ID NO: 655931 - RNA, 19 nt, Homo sapiens
  misc_RNA (1)...(19): siRNA sense strand
gaggauuacuucggacuuc

SEQ ID NO: 655932 - RNA, 19 nt, Homo sapiens
  misc_RNA (1)...(19): siRNA sense strand
ugaaagacgauuuggagaa

SEQ ID NO: 655933 - RNA, 19 nt, Homo sapiens
  misc_RNA (1)...(19): siRNA sense strand
gccacagacauuuacauua

SEQ ID NO: 655934 - RNA, 19 nt, Homo sapiens
  misc_RNA (1)...(19): siRNA sense strand
gcaguugguuuugcgauua

SEQ ID NO: 655935 - RNA, 19 nt, Homo sapiens
  misc_RNA (1)...(19): siRNA sense strand
aaaagacugugaugccuua

SEQ ID NO: 655936 - RNA, 19 nt, Homo sapiens
  misc_RNA (1)...(19): siRNA sense strand
ggaaaugguguuugcaagu

SEQ ID NO: 655937 - RNA, 19 nt, Homo sapiens
  misc_RNA (1)...(19): siRNA sense strand
gcgaaggcaucccugaaag

SEQ ID NO: 655938 - RNA, 19 nt, Homo sapiens
  misc_RNA (1)...(19): siRNA sense strand
gcucagucuuacuaauaaa

SEQ ID NO: 655939 - RNA, 19 nt, Homo sapiens
  misc_RNA (1)...(19): siRNA sense strand
gcaccagcccauuuagcua

SEQ ID NO: 655940 - RNA, 19 nt, Homo sapiens
  misc_RNA (1)...(19): siRNA sense strand
aagggaguuugcuaaauuu

SEQ ID NO: 655941 - RNA, 19 nt, Homo sapiens
  misc_RNA (1)...(19): siRNA sense strand
acaacgaggucaugguuca

SEQ ID NO: 655942 - RNA, 19 nt, Homo sapiens
  misc_RNA (1)...(19): siRNA sense strand
cugauuggcuggaggaaug

SEQ ID NO: 655943 - RNA, 19 nt, Homo sapiens
  misc_RNA (1)...(19): siRNA sense strand
aaguagagguuauucuuca

SEQ ID NO: 655944 - RNA, 19 nt, Homo sapiens
  misc_RNA (1)...(19): siRNA sense strand
guccagacaucauuccaau

SEQ ID NO: 655945 - RNA, 19 nt, Homo sapiens
  misc_RNA (1)...(19): siRNA sense strand
gaaagucgggacaaauuac

SEQ ID NO: 655946 - RNA, 19 nt, Homo sapiens
  misc_RNA (1)...(19): siRNA sense strand
guguacagauccgaaguuu

SEQ ID NO: 655947 - RNA, 19 nt, Homo sapiens
  misc_RNA (1)...(19): siRNA sense strand
guaggaagagggauaauac

SEQ ID NO: 655948 - RNA, 19 nt, Homo sapiens
  misc_RNA (1)...(19): siRNA sense strand
ccaagugucaugaaggaaa

SEQ ID NO: 655949 - RNA, 19 nt, Homo sapiens
  misc_RNA (1)...(19): siRNA sense strand
gaucugaugaaugaaauga

SEQ ID NO: 655950 - RNA, 19 nt, Homo sapiens
  misc_RNA (1)...(19): siRNA sense strand
ggacaguguguuuguagga

SEQ ID NO: 655951 - RNA, 19 nt, Homo sapiens
  misc_RNA (1)...(19): siRNA sense strand
cauuacugcugauauggaa

SEQ ID NO: 655952 - RNA, 19 nt, Homo sapiens
  misc_RNA (1)...(19): siRNA sense strand
gcuccaaagauauaaagaa

SEQ ID NO: 655953 - RNA, 19 nt, Homo sapiens
  misc_RNA (1)...(19): siRNA sense strand
ugacgacuguugguucuau

SEQ ID NO: 655954 - RNA, 19 nt, Homo sapiens
  misc_RNA (1)...(19): siRNA sense strand
uguggugucuguaagugua

SEQ ID NO: 655955 - RNA, 19 nt, Homo sapiens
  misc_RNA (1)...(19): siRNA sense strand
gaggaaaugguguuugcaa

SEQ ID NO: 655956 - RNA, 19 nt, Homo sapiens
  misc_RNA (1)...(19): siRNA sense strand
gacaguguguuuguaggaa

SEQ ID NO: 655957 - RNA, 19 nt, Homo sapiens
  misc_RNA (1)...(19): siRNA sense strand
gaacagaucugaugaauga

SEQ ID NO: 655958 - RNA, 19 nt, Homo sapiens
  misc_RNA (1)...(19): siRNA sense strand
caagagagcugaagacuau

SEQ ID NO: 655959 - RNA, 19 nt, Homo sapiens
  misc_RNA (1)...(19): siRNA sense strand
gaagggaguuugcuaaauu

SEQ ID NO: 655960 - RNA, 19 nt, Homo sapiens
  misc_RNA (1)...(19): siRNA sense strand
ccacagacauuuacauuaa

SEQ ID NO: 655961 - RNA, 19 nt, Homo sapiens
  misc_RNA (1)...(19): siRNA sense strand
gcgcauaucuggaaauuug

SEQ ID NO: 655962 - RNA, 19 nt, Homo sapiens
  misc_RNA (1)...(19): siRNA sense strand
gaagagggauaauacaaau

SEQ ID NO: 655963 - RNA, 19 nt, Homo sapiens
  misc_RNA (1)...(19): siRNA sense strand
gugaagacauggaugcuua

SEQ ID NO: 655964 - RNA, 19 nt, Homo sapiens
  misc_RNA (1)...(19): siRNA sense strand
gaaagacgauuuggagaau

SEQ ID NO: 655965 - RNA, 19 nt, Homo sapiens
  misc_RNA (1)...(19): siRNA sense strand
guaauucaguugaucauug

SEQ ID NO: 655966 - RNA, 19 nt, Homo sapiens
  misc_RNA (1)...(19): siRNA sense strand
gaaaugaggaggauuacuu

SEQ ID NO: 655967 - RNA, 19 nt, Homo sapiens
  misc_RNA (1)...(19): siRNA sense strand
caaaucauguggagaaugu

SEQ ID NO: 655968 - RNA, 19 nt, Homo sapiens
  misc_RNA (1)...(19): siRNA sense strand
gaacugcaccagcccauuu

SEQ ID NO: 655969 - RNA, 19 nt, Homo sapiens
  misc_RNA (1)...(19): siRNA sense strand
guacagauccgaaguuuca

SEQ ID NO: 655970 - RNA, 19 nt, Homo sapiens
  misc_RNA (1)...(19): siRNA sense strand
cagaugaaguuaacaguga

SEQ ID NO: 655971 - RNA, 19 nt, Homo sapiens
  misc_RNA (1)...(19): siRNA sense strand
ggaguuugcuaaauuugaa

SEQ ID NO: 655972 - RNA, 19 nt, Homo sapiens
  misc_RNA (1)...(19): siRNA sense strand
gugcagagccuucaauaaa

SEQ ID NO: 655973 - RNA, 19 nt, Homo sapiens
  misc_RNA (1)...(19): siRNA sense strand
gaacaacgaggucaugguu

SEQ ID NO: 655974 - RNA, 19 nt, Homo sapiens
  misc_RNA (1)...(19): siRNA sense strand
gaaacuugguggcauuguu

SEQ ID NO: 655975 - RNA, 19 nt, Homo sapiens
  misc_RNA (1)...(19): siRNA sense strand
gaaaugguguuugcaagug

SEQ ID NO: 655976 - RNA, 19 nt, Homo sapiens
  misc_RNA (1)...(19): siRNA sense strand
ggaagagggauaauacaaa

SEQ ID NO: 655977 - RNA, 19 nt, Homo sapiens
  misc_RNA (1)...(19): siRNA sense strand
caaauugucagaaggagua

SEQ ID NO: 655978 - RNA, 19 nt, Homo sapiens
  misc_RNA (1)...(19): siRNA sense strand
ggagaaguauuuaaugaac

SEQ ID NO: 655979 - RNA, 19 nt, Homo sapiens
  misc_RNA (1)...(19): siRNA sense strand
cccagaggcuccaaagaua

SEQ ID NO: 655980 - RNA, 19 nt, Homo sapiens
  misc_RNA (1)...(19): siRNA sense strand
gcugaagacuaucccauug

SEQ ID NO: 655981 - RNA, 19 nt, Homo sapiens
  misc_RNA (1)...(19): siRNA sense strand
agacaucauuccaauugua

SEQ ID NO: 655982 - RNA, 19 nt, Homo sapiens
  misc_RNA (1)...(19): siRNA sense strand
gauccugugucccauugua

SEQ ID NO: 655983 - RNA, 19 nt, Homo sapiens
  misc_RNA (1)...(19): siRNA sense strand
ggaaguagagguuauucuu

SEQ ID NO: 655984 - RNA, 19 nt, Homo sapiens
  misc_RNA (1)...(19): siRNA sense strand
ucagaaggaguaacaauaa

SEQ ID NO: 655985 - RNA, 19 nt, Homo sapiens
  misc_RNA (1)...(19): siRNA sense strand
gaaaaugaaugccaaaugg

SEQ ID NO: 655986 - RNA, 19 nt, Homo sapiens
  misc_RNA (1)...(19): siRNA sense strand
gcaagugucguguguguga

SEQ ID NO: 655987 - RNA, 19 nt, Homo sapiens
  misc_RNA (1)...(19): siRNA sense strand
gugauaauuucaacuguga

SEQ ID NO: 655988 - RNA, 19 nt, Homo sapiens
  misc_RNA (1)...(19): siRNA sense strand
acaauucccuuuccucaga

SEQ ID NO: 655989 - RNA, 19 nt, Homo sapiens
  misc_RNA (1)...(19): siRNA sense strand
gaaggaguaacaauaaguu

SEQ ID NO: 655990 - RNA, 19 nt, Homo sapiens
  misc_RNA (1)...(19): siRNA sense strand
gcaauguaauucaguugau

SEQ ID NO: 655991 - RNA, 19 nt, Homo sapiens
  misc_RNA (1)...(19): siRNA sense strand
gguagaaagucgggacaaa

SEQ ID NO: 655992 - RNA, 19 nt, Homo sapiens
  misc_RNA (1)...(19): siRNA sense strand
gaaggauguugacgacugu

SEQ ID NO: 655993 - RNA, 19 nt, Homo sapiens
  misc_RNA (1)...(19): siRNA sense strand
aaacagcgcauaucuggaa

SEQ ID NO: 655994 - RNA, 19 nt, Homo sapiens
  misc_RNA (1)...(19): siRNA sense strand
ccagacaucauuccaauug

SEQ ID NO: 655995 - RNA, 19 nt, Homo sapiens
  misc_RNA (1)...(19): siRNA sense strand
guaaggagaaggauguuga

SEQ ID NO: 655996 - RNA, 19 nt, Homo sapiens
  misc_RNA (1)...(19): siRNA sense strand
ugauagauccaauggcuua

SEQ ID NO: 655997 - RNA, 19 nt, Homo sapiens
  misc_RNA (1)...(19): siRNA sense strand
gaaaucugcaguaacaaug

SEQ ID NO: 655998 - RNA, 19 nt, Homo sapiens
  misc_RNA (1)...(19): siRNA sense strand
gcaugugacuguucuuugg

SEQ ID NO: 655999 - RNA, 19 nt, Homo sapiens
  misc_RNA (1)...(19): siRNA sense strand
ggagaugagguucaauuug

SEQ ID NO: 656000 - RNA, 19 nt, Homo sapiens
  misc_RNA (1)...(19): siRNA sense strand
cagaggauauuacucagau

SEQ ID NO: 656001 - RNA, 19 nt, Homo sapiens
  misc_RNA (1)...(19): siRNA sense strand
gcaaacgugugagaugugu

SEQ ID NO: 656002 - RNA, 19 nt, Homo sapiens
  misc_RNA (1)...(19): siRNA sense strand
gaaagucccaagugucaug

SEQ ID NO: 656003 - RNA, 19 nt, Homo sapiens
  misc_RNA (1)...(19): siRNA sense strand
gugcucagucuuacuaaua

SEQ ID NO: 656004 - RNA, 19 nt, Homo sapiens
  misc_RNA (1)...(19): siRNA sense strand
ggacuucagaauuggauuu

SEQ ID NO: 656005 - RNA, 19 nt, Homo sapiens
  misc_RNA (1)...(19): siRNA sense strand
gcaaaggaacagcagagaa

SEQ ID NO: 656006 - RNA, 19 nt, Homo sapiens
  misc_RNA (1)...(19): siRNA sense strand
gggcaaacgugugagaugu

SEQ ID NO: 656007 - RNA, 19 nt, Homo sapiens
  misc_RNA (1)...(19): siRNA sense strand
ugcacgaugugaugauuua

SEQ ID NO: 656008 - RNA, 19 nt, Homo sapiens
  misc_RNA (1)...(19): siRNA sense strand
uagauccaauggcuuaauu

SEQ ID NO: 656009 - RNA, 19 nt, Homo sapiens
  misc_RNA (1)...(19): siRNA sense strand
gaauuggauuuggcucauu

SEQ ID NO: 656010 - RNA, 19 nt, Homo sapiens
  misc_RNA (1)...(19): siRNA sense strand
uagaaagucgggacaaauu

SEQ ID NO: 656011 - RNA, 19 nt, Homo sapiens
  misc_RNA (1)...(19): siRNA sense strand
aaugaaaugaggaggauua

SEQ ID NO: 656012 - RNA, 19 nt, Homo sapiens
  misc_RNA (1)...(19): siRNA sense strand
aauuguagcuggugugguu

SEQ ID NO: 656013 - RNA, 19 nt, Homo sapiens
  misc_RNA (1)...(19): siRNA sense strand
agaaagucgggacaaauua

SEQ ID NO: 656014 - RNA, 19 nt, Homo sapiens
  misc_RNA (1)...(19): siRNA sense strand
gagcauaaagaauguguuc

SEQ ID NO: 656015 - RNA, 19 nt, Homo sapiens
  misc_RNA (1)...(19): siRNA sense strand
uccaauggcuuaauuugug

SEQ ID NO: 656016 - RNA, 19 nt, Homo sapiens
  misc_RNA (1)...(19): siRNA sense strand
gaaguuaacagugaagaca

SEQ ID NO: 656017 - RNA, 19 nt, Homo sapiens
  misc_RNA (1)...(19): siRNA sense strand
cagcacagaugaaguuaac

SEQ ID NO: 656018 - RNA, 19 nt, Homo sapiens
  misc_RNA (1)...(19): siRNA sense strand
gcaaaugccaaaucaugug

SEQ ID NO: 656019 - RNA, 19 nt, Homo sapiens
  misc_RNA (1)...(19): siRNA sense strand
gaagaauuucagccuguuu

SEQ ID NO: 656020 - RNA, 19 nt, Homo sapiens
  misc_RNA (1)...(19): siRNA sense strand
cagaggcuccaaagauaua

SEQ ID NO: 656021 - RNA, 19 nt, Homo sapiens
  misc_RNA (1)...(19): siRNA sense strand
cugcugauauggaagcuuu

SEQ ID NO: 656022 - RNA, 19 nt, Homo sapiens
  misc_RNA (1)...(19): siRNA sense strand
caacugugauagauccaau

SEQ ID NO: 656023 - RNA, 19 nt, Homo sapiens
  misc_RNA (1)...(19): siRNA sense strand
uagagguuauucuucagua

SEQ ID NO: 656024 - RNA, 19 nt, Homo sapiens
  misc_RNA (1)...(19): siRNA sense strand
cagcgcauaucuggaaauu

SEQ ID NO: 656025 - RNA, 19 nt, Homo sapiens
  misc_RNA (1)...(19): siRNA sense strand
caaaggaacagcagagaag

SEQ ID NO: 656026 - RNA, 19 nt, Homo sapiens
  misc_RNA (1)...(19): siRNA sense strand
gaacagcagagaagcucaa

SEQ ID NO: 656027 - RNA, 19 nt, Homo sapiens
  misc_RNA (1)...(19): siRNA sense strand
gauccaauggcuuaauuug

SEQ ID NO: 656028 - RNA, 19 nt, Homo sapiens
  misc_RNA (1)...(19): siRNA sense strand
gaaaacaguucagaaaucu

SEQ ID NO: 656029 - RNA, 19 nt, Homo sapiens
  misc_RNA (1)...(19): siRNA sense strand
caagugucaugaaggaaau

SEQ ID NO: 656030 - RNA, 19 nt, Homo sapiens
  misc_RNA (1)...(19): siRNA sense strand
gucagaaggaguaacaaua

SEQ ID NO: 656031 - RNA, 19 nt, Homo sapiens
  misc_RNA (1)...(19): siRNA sense strand
gaggauuacuucggacuuc

SEQ ID NO: 656032 - RNA, 19 nt, Homo sapiens
  misc_RNA (1)...(19): siRNA sense strand
ugaaagacgauuuggagaa

SEQ ID NO: 656033 - RNA, 19 nt, Homo sapiens
  misc_RNA (1)...(19): siRNA sense strand
gccacagacauuuacauua

SEQ ID NO: 656034 - RNA, 19 nt, Homo sapiens
  misc_RNA (1)...(19): siRNA sense strand
gcaguugguuuugcgauua

SEQ ID NO: 656035 - RNA, 19 nt, Homo sapiens
  misc_RNA (1)...(19): siRNA sense strand
aaaagacugugaugccuua

SEQ ID NO: 656036 - RNA, 19 nt, Homo sapiens
  misc_RNA (1)...(19): siRNA sense strand
ggaaaugguguuugcaagu

SEQ ID NO: 656037 - RNA, 19 nt, Homo sapiens
  misc_RNA (1)...(19): siRNA sense strand
gcgaaggcaucccugaaag

SEQ ID NO: 656038 - RNA, 19 nt, Homo sapiens
  misc_RNA (1)...(19): siRNA sense strand
gcucagucuuacuaauaaa

SEQ ID NO: 656039 - RNA, 19 nt, Homo sapiens
  misc_RNA (1)...(19): siRNA sense strand
gcaccagcccauuuagcua

SEQ ID NO: 656040 - RNA, 19 nt, Homo sapiens
  misc_RNA (1)...(19): siRNA sense strand
aagggaguuugcuaaauuu

SEQ ID NO: 656041 - RNA, 19 nt, Homo sapiens
  misc_RNA (1)...(19): siRNA sense strand
acaacgaggucaugguuca

SEQ ID NO: 656042 - RNA, 19 nt, Homo sapiens
  misc_RNA (1)...(19): siRNA sense strand
cugauuggcuggaggaaug

SEQ ID NO: 656043 - RNA, 19 nt, Homo sapiens
  misc_RNA (1)...(19): siRNA sense strand
aaguagagguuauucuuca

SEQ ID NO: 656044 - RNA, 19 nt, Homo sapiens
  misc_RNA (1)...(19): siRNA sense strand
guccagacaucauuccaau

SEQ ID NO: 656045 - RNA, 19 nt, Homo sapiens
  misc_RNA (1)...(19): siRNA sense strand
gaaagucgggacaaauuac

SEQ ID NO: 656046 - RNA, 19 nt, Homo sapiens
  misc_RNA (1)...(19): siRNA sense strand
guguacagauccgaaguuu

SEQ ID NO: 656047 - RNA, 19 nt, Homo sapiens
  misc_RNA (1)...(19): siRNA sense strand
guaggaagagggauaauac

SEQ ID NO: 656048 - RNA, 19 nt, Homo sapiens
  misc_RNA (1)...(19): siRNA sense strand
ccaagugucaugaaggaaa

SEQ ID NO: 656049 - RNA, 19 nt, Homo sapiens
  misc_RNA (1)...(19): siRNA sense strand
gaucugaugaaugaaauga

SEQ ID NO: 656050 - RNA, 19 nt, Homo sapiens
  misc_RNA (1)...(19): siRNA sense strand
ggacaguguguuuguagga

SEQ ID NO: 656051 - RNA, 19 nt, Homo sapiens
  misc_RNA (1)...(19): siRNA sense strand
cauuacugcugauauggaa

SEQ ID NO: 656052 - RNA, 19 nt, Homo sapiens
  misc_RNA (1)...(19): siRNA sense strand
gcuccaaagauauaaagaa

SEQ ID NO: 656053 - RNA, 19 nt, Homo sapiens
  misc_RNA (1)...(19): siRNA sense strand
ugacgacuguugguucuau

SEQ ID NO: 656054 - RNA, 19 nt, Homo sapiens
  misc_RNA (1)...(19): siRNA sense strand
uguggugucuguaagugua

SEQ ID NO: 656055 - RNA, 19 nt, Homo sapiens
  misc_RNA (1)...(19): siRNA sense strand
gaggaaaugguguuugcaa

SEQ ID NO: 656056 - RNA, 19 nt, Homo sapiens
  misc_RNA (1)...(19): siRNA sense strand
gacaguguguuuguaggaa

SEQ ID NO: 656057 - RNA, 19 nt, Homo sapiens
  misc_RNA (1)...(19): siRNA sense strand
gaacagaucugaugaauga

SEQ ID NO: 656058 - RNA, 19 nt, Homo sapiens
  misc_RNA (1)...(19): siRNA sense strand
caagagagcugaagacuau

SEQ ID NO: 656059 - RNA, 19 nt, Homo sapiens
  misc_RNA (1)...(19): siRNA sense strand
gaagggaguuugcuaaauu

SEQ ID NO: 656060 - RNA, 19 nt, Homo sapiens
  misc_RNA (1)...(19): siRNA sense strand
ccacagacauuuacauuaa

SEQ ID NO: 656061 - RNA, 19 nt, Homo sapiens
  misc_RNA (1)...(19): siRNA sense strand
gcgcauaucuggaaauuug

SEQ ID NO: 656062 - RNA, 19 nt, Homo sapiens
  misc_RNA (1)...(19): siRNA sense strand
gaagagggauaauacaaau

SEQ ID NO: 656063 - RNA, 19 nt, Homo sapiens
  misc_RNA (1)...(19): siRNA sense strand
gugaagacauggaugcuua

SEQ ID NO: 656064 - RNA, 19 nt, Homo sapiens
  misc_RNA (1)...(19): siRNA sense strand
gaaagacgauuuggagaau

SEQ ID NO: 656065 - RNA, 19 nt, Homo sapiens
  misc_RNA (1)...(19): siRNA sense strand
guaauucaguugaucauug

SEQ ID NO: 656066 - RNA, 19 nt, Homo sapiens
  misc_RNA (1)...(19): siRNA sense strand
gaaaugaggaggauuacuu

SEQ ID NO: 656067 - RNA, 19 nt, Homo sapiens
  misc_RNA (1)...(19): siRNA sense strand
caaaucauguggagaaugu

SEQ ID NO: 656068 - RNA, 19 nt, Homo sapiens
  misc_RNA (1)...(19): siRNA sense strand
gaacugcaccagcccauuu

SEQ ID NO: 656069 - RNA, 19 nt, Homo sapiens
  misc_RNA (1)...(19): siRNA sense strand
guacagauccgaaguuuca

SEQ ID NO: 656070 - RNA, 19 nt, Homo sapiens
  misc_RNA (1)...(19): siRNA sense strand
cagaugaaguuaacaguga

SEQ ID NO: 656071 - RNA, 19 nt, Homo sapiens
  misc_RNA (1)...(19): siRNA sense strand
ggaguuugcuaaauuugaa

SEQ ID NO: 656072 - RNA, 19 nt, Homo sapiens
  misc_RNA (1)...(19): siRNA sense strand
gugcagagccuucaauaaa

SEQ ID NO: 656073 - RNA, 19 nt, Homo sapiens
  misc_RNA (1)...(19): siRNA sense strand
gaacaacgaggucaugguu

SEQ ID NO: 656074 - RNA, 19 nt, Homo sapiens
  misc_RNA (1)...(19): siRNA sense strand
gaaacuugguggcauuguu

SEQ ID NO: 656075 - RNA, 19 nt, Homo sapiens
  misc_RNA (1)...(19): siRNA sense strand
gaaaugguguuugcaagug

SEQ ID NO: 656076 - RNA, 19 nt, Homo sapiens
  misc_RNA (1)...(19): siRNA sense strand
ggaagagggauaauacaaa

SEQ ID NO: 656077 - RNA, 19 nt, Homo sapiens
  misc_RNA (1)...(19): siRNA sense strand
caaauugucagaaggagua

SEQ ID NO: 656078 - RNA, 19 nt, Homo sapiens
  misc_RNA (1)...(19): siRNA sense strand
ggagaaguauuuaaugaac

SEQ ID NO: 656079 - RNA, 19 nt, Homo sapiens
  misc_RNA (1)...(19): siRNA sense strand
cccagaggcuccaaagaua

SEQ ID NO: 656080 - RNA, 19 nt, Homo sapiens
  misc_RNA (1)...(19): siRNA sense strand
gcugaagacuaucccauug

SEQ ID NO: 656081 - RNA, 19 nt, Homo sapiens
  misc_RNA (1)...(19): siRNA sense strand
agacaucauuccaauugua

SEQ ID NO: 656082 - RNA, 19 nt, Homo sapiens
  misc_RNA (1)...(19): siRNA sense strand
gauccugugucccauugua

SEQ ID NO: 656083 - RNA, 19 nt, Homo sapiens
  misc_RNA (1)...(19): siRNA sense strand
ggaaguagagguuauucuu

SEQ ID NO: 656084 - RNA, 19 nt, Homo sapiens
  misc_RNA (1)...(19): siRNA sense strand
ucagaaggaguaacaauaa

SEQ ID NO: 656085 - RNA, 19 nt, Homo sapiens
  misc_RNA (1)...(19): siRNA sense strand
gaaaaugaaugccaaaugg

SEQ ID NO: 656086 - RNA, 19 nt, Homo sapiens
  misc_RNA (1)...(19): siRNA sense strand
gcaagugucguguguguga

SEQ ID NO: 656087 - RNA, 19 nt, Homo sapiens
  misc_RNA (1)...(19): siRNA sense strand
gugauaauuucaacuguga

SEQ ID NO: 656088 - RNA, 19 nt, Homo sapiens
  misc_RNA (1)...(19): siRNA sense strand
acaauucccuuuccucaga

SEQ ID NO: 656089 - RNA, 19 nt, Homo sapiens
  misc_RNA (1)...(19): siRNA sense strand
gaaggaguaacaauaaguu

SEQ ID NO: 656090 - RNA, 19 nt, Homo sapiens
  misc_RNA (1)...(19): siRNA sense strand
gcaauguaauucaguugau

SEQ ID NO: 656091 - RNA, 19 nt, Homo sapiens
  misc_RNA (1)...(19): siRNA sense strand
gguagaaagucgggacaaa

SEQ ID NO: 656092 - RNA, 19 nt, Homo sapiens
  misc_RNA (1)...(19): siRNA sense strand
gaaggauguugacgacugu

SEQ ID NO: 656093 - RNA, 19 nt, Homo sapiens
  misc_RNA (1)...(19): siRNA sense strand
aaacagcgcauaucuggaa

SEQ ID NO: 656094 - RNA, 19 nt, Homo sapiens
  misc_RNA (1)...(19): siRNA sense strand
ccagacaucauuccaauug

SEQ ID NO: 656095 - RNA, 19 nt, Homo sapiens
  misc_RNA (1)...(19): siRNA sense strand
guaaggagaaggauguuga

SEQ ID NO: 656096 - RNA, 19 nt, Homo sapiens
  misc_RNA (1)...(19): siRNA sense strand
ugauagauccaauggcuua

SEQ ID NO: 656097 - RNA, 19 nt, Homo sapiens
  misc_RNA (1)...(19): siRNA sense strand
gaaaucugcaguaacaaug

SEQ ID NO: 656098 - RNA, 19 nt, Homo sapiens
  misc_RNA (1)...(19): siRNA sense strand
gcaugugacuguucuuugg

SEQ ID NO: 656099 - RNA, 19 nt, Homo sapiens
  misc_RNA (1)...(19): siRNA sense strand
ggagaugagguucaauuug

SEQ ID NO: 656100 - RNA, 19 nt, Homo sapiens
  misc_RNA (1)...(19): siRNA sense strand
cagaggauauuacucagau

SEQ ID NO: 656101 - RNA, 19 nt, Homo sapiens
  misc_RNA (1)...(19): siRNA sense strand
gcaaacgugugagaugugu

SEQ ID NO: 656102 - RNA, 19 nt, Homo sapiens
  misc_RNA (1)...(19): siRNA sense strand
gaaagucccaagugucaug

SEQ ID NO: 656103 - RNA, 19 nt, Homo sapiens
  misc_RNA (1)...(19): siRNA sense strand
gugcucagucuuacuaaua

SEQ ID NO: 656104 - RNA, 19 nt, Homo sapiens
  misc_RNA (1)...(19): siRNA sense strand
ggacuucagaauuggauuu

SEQ ID NO: 656105 - RNA, 19 nt, Homo sapiens
  misc_RNA (1)...(19): siRNA sense strand
gcaaaggaacagcagagaa

SEQ ID NO: 656106 - RNA, 19 nt, Homo sapiens
  misc_RNA (1)...(19): siRNA sense strand
gggcaaacgugugagaugu

SEQ ID NO: 656107 - RNA, 19 nt, Homo sapiens
  misc_RNA (1)...(19): siRNA sense strand
ugcacgaugugaugauuua

SEQ ID NO: 656108 - RNA, 19 nt, Homo sapiens
  misc_RNA (1)...(19): siRNA sense strand
uagauccaauggcuuaauu

SEQ ID NO: 656109 - RNA, 19 nt, Homo sapiens
  misc_RNA (1)...(19): siRNA sense strand
gaauuggauuuggcucauu

SEQ ID NO: 656110 - RNA, 19 nt, Homo sapiens
  misc_RNA (1)...(19): siRNA sense strand
uagaaagucgggacaaauu

SEQ ID NO: 656111 - RNA, 19 nt, Homo sapiens
  misc_RNA (1)...(19): siRNA sense strand
aaugaaaugaggaggauua

SEQ ID NO: 656112 - RNA, 19 nt, Homo sapiens
  misc_RNA (1)...(19): siRNA sense strand
aauuguagcuggugugguu

SEQ ID NO: 656113 - RNA, 19 nt, Homo sapiens
  misc_RNA (1)...(19): siRNA sense strand
agaaagucgggacaaauua

SEQ ID NO: 656114 - RNA, 19 nt, Homo sapiens
  misc_RNA (1)...(19): siRNA sense strand
gagcauaaagaauguguuc

SEQ ID NO: 656115 - RNA, 19 nt, Homo sapiens
  misc_RNA (1)...(19): siRNA sense strand
uccaauggcuuaauuugug

SEQ ID NO: 656116 - RNA, 19 nt, Homo sapiens
  misc_RNA (1)...(19): siRNA sense strand
gaaguuaacagugaagaca

SEQ ID NO: 656117 - RNA, 19 nt, Homo sapiens
  misc_RNA (1)...(19): siRNA sense strand
cagcacagaugaaguuaac

SEQ ID NO: 656118 - RNA, 19 nt, Homo sapiens
  misc_RNA (1)...(19): siRNA sense strand
gcaaaugccaaaucaugug

SEQ ID NO: 656119 - RNA, 19 nt, Homo sapiens
  misc_RNA (1)...(19): siRNA sense strand
gaagaauuucagccuguuu

SEQ ID NO: 656120 - RNA, 19 nt, Homo sapiens
  misc_RNA (1)...(19): siRNA sense strand
cagaggcuccaaagauaua

SEQ ID NO: 656121 - RNA, 19 nt, Homo sapiens
  misc_RNA (1)...(19): siRNA sense strand
cugcugauauggaagcuuu

SEQ ID NO: 656122 - RNA, 19 nt, Homo sapiens
  misc_RNA (1)...(19): siRNA sense strand
caacugugauagauccaau

SEQ ID NO: 656123 - RNA, 19 nt, Homo sapiens
  misc_RNA (1)...(19): siRNA sense strand
uagagguuauucuucagua

SEQ ID NO: 656124 - RNA, 19 nt, Homo sapiens
  misc_RNA (1)...(19): siRNA sense strand
cagcgcauaucuggaaauu

SEQ ID NO: 656125 - RNA, 19 nt, Homo sapiens
  misc_RNA (1)...(19): siRNA sense strand
caaaggaacagcagagaag

SEQ ID NO: 656126 - RNA, 19 nt, Homo sapiens
  misc_RNA (1)...(19): siRNA sense strand
gaacagcagagaagcucaa

SEQ ID NO: 656127 - RNA, 19 nt, Homo sapiens
  misc_RNA (1)...(19): siRNA sense strand
gauccaauggcuuaauuug

SEQ ID NO: 656128 - RNA, 19 nt, Homo sapiens
  misc_RNA (1)...(19): siRNA sense strand
gaaaacaguucagaaaucu

SEQ ID NO: 656129 - RNA, 19 nt, Homo sapiens
  misc_RNA (1)...(19): siRNA sense strand
caagugucaugaaggaaau

SEQ ID NO: 656130 - RNA, 19 nt, Homo sapiens
  misc_RNA (1)...(19): siRNA sense strand
gucagaaggaguaacaaua

SEQ ID NO: 656131 - RNA, 19 nt, Homo sapiens
  misc_RNA (1)...(19): siRNA sense strand
gaggauuacuucggacuuc

SEQ ID NO: 656132 - RNA, 19 nt, Homo sapiens
  misc_RNA (1)...(19): siRNA sense strand
ugaaagacgauuuggagaa

SEQ ID NO: 656133 - RNA, 19 nt, Homo sapiens
  misc_RNA (1)...(19): siRNA sense strand
gccacagacauuuacauua

SEQ ID NO: 656134 - RNA, 19 nt, Homo sapiens
  misc_RNA (1)...(19): siRNA sense strand
gcaguugguuuugcgauua

SEQ ID NO: 656135 - RNA, 19 nt, Homo sapiens
  misc_RNA (1)...(19): siRNA sense strand
aaaagacugugaugccuua

SEQ ID NO: 656136 - RNA, 19 nt, Homo sapiens
  misc_RNA (1)...(19): siRNA sense strand
ggaaaugguguuugcaagu

SEQ ID NO: 656137 - RNA, 19 nt, Homo sapiens
  misc_RNA (1)...(19): siRNA sense strand
gcgaaggcaucccugaaag

SEQ ID NO: 656138 - RNA, 19 nt, Homo sapiens
  misc_RNA (1)...(19): siRNA sense strand
gcucagucuuacuaauaaa

SEQ ID NO: 656139 - RNA, 19 nt, Homo sapiens
  misc_RNA (1)...(19): siRNA sense strand
gcaccagcccauuuagcua

SEQ ID NO: 656140 - RNA, 19 nt, Homo sapiens
  misc_RNA (1)...(19): siRNA sense strand
aagggaguuugcuaaauuu

SEQ ID NO: 656141 - RNA, 19 nt, Homo sapiens
  misc_RNA (1)...(19): siRNA sense strand
acaacgaggucaugguuca

SEQ ID NO: 656142 - RNA, 19 nt, Homo sapiens
  misc_RNA (1)...(19): siRNA sense strand
cugauuggcuggaggaaug

SEQ ID NO: 656143 - RNA, 19 nt, Homo sapiens
  misc_RNA (1)...(19): siRNA sense strand
aaguagagguuauucuuca

SEQ ID NO: 656144 - RNA, 19 nt, Homo sapiens
  misc_RNA (1)...(19): siRNA sense strand
guccagacaucauuccaau

SEQ ID NO: 656145 - RNA, 19 nt, Homo sapiens
  misc_RNA (1)...(19): siRNA sense strand
gaaagucgggacaaauuac

SEQ ID NO: 656146 - RNA, 19 nt, Homo sapiens
  misc_RNA (1)...(19): siRNA sense strand
guguacagauccgaaguuu

SEQ ID NO: 656147 - RNA, 19 nt, Homo sapiens
  misc_RNA (1)...(19): siRNA sense strand
guaggaagagggauaauac

SEQ ID NO: 656148 - RNA, 19 nt, Homo sapiens
  misc_RNA (1)...(19): siRNA sense strand
ccaagugucaugaaggaaa

SEQ ID NO: 656149 - RNA, 19 nt, Homo sapiens
  misc_RNA (1)...(19): siRNA sense strand
gaucugaugaaugaaauga

SEQ ID NO: 656150 - RNA, 19 nt, Homo sapiens
  misc_RNA (1)...(19): siRNA sense strand
ggacaguguguuuguagga

SEQ ID NO: 656151 - RNA, 19 nt, Homo sapiens
  misc_RNA (1)...(19): siRNA sense strand
cauuacugcugauauggaa

SEQ ID NO: 656152 - RNA, 19 nt, Homo sapiens
  misc_RNA (1)...(19): siRNA sense strand
gcuccaaagauauaaagaa

SEQ ID NO: 656153 - RNA, 19 nt, Homo sapiens
  misc_RNA (1)...(19): siRNA sense strand
ugacgacuguugguucuau

SEQ ID NO: 656154 - RNA, 19 nt, Homo sapiens
  misc_RNA (1)...(19): siRNA sense strand
uguggugucuguaagugua

SEQ ID NO: 656155 - RNA, 19 nt, Homo sapiens
  misc_RNA (1)...(19): siRNA sense strand
gaggaaaugguguuugcaa

SEQ ID NO: 656156 - RNA, 19 nt, Homo sapiens
  misc_RNA (1)...(19): siRNA sense strand
gacaguguguuuguaggaa

SEQ ID NO: 656157 - RNA, 19 nt, Homo sapiens
  misc_RNA (1)...(19): siRNA sense strand
gaacagaucugaugaauga

SEQ ID NO: 656158 - RNA, 19 nt, Homo sapiens
  misc_RNA (1)...(19): siRNA sense strand
caagagagcugaagacuau

SEQ ID NO: 656159 - RNA, 19 nt, Homo sapiens
  misc_RNA (1)...(19): siRNA sense strand
gaagggaguuugcuaaauu

SEQ ID NO: 656160 - RNA, 19 nt, Homo sapiens
  misc_RNA (1)...(19): siRNA sense strand
ccacagacauuuacauuaa

SEQ ID NO: 656161 - RNA, 19 nt, Homo sapiens
  misc_RNA (1)...(19): siRNA sense strand
gcgcauaucuggaaauuug

SEQ ID NO: 656162 - RNA, 19 nt, Homo sapiens
  misc_RNA (1)...(19): siRNA sense strand
gaagagggauaauacaaau

SEQ ID NO: 656163 - RNA, 19 nt, Homo sapiens
  misc_RNA (1)...(19): siRNA sense strand
gugaagacauggaugcuua

SEQ ID NO: 656164 - RNA, 19 nt, Homo sapiens
  misc_RNA (1)...(19): siRNA sense strand
gaaagacgauuuggagaau

SEQ ID NO: 656165 - RNA, 19 nt, Homo sapiens
  misc_RNA (1)...(19): siRNA sense strand
guaauucaguugaucauug

SEQ ID NO: 656166 - RNA, 19 nt, Homo sapiens
  misc_RNA (1)...(19): siRNA sense strand
gaaaugaggaggauuacuu

SEQ ID NO: 656167 - RNA, 19 nt, Homo sapiens
  misc_RNA (1)...(19): siRNA sense strand
caaaucauguggagaaugu

SEQ ID NO: 656168 - RNA, 19 nt, Homo sapiens
  misc_RNA (1)...(19): siRNA sense strand
gaacugcaccagcccauuu

SEQ ID NO: 656169 - RNA, 19 nt, Homo sapiens
  misc_RNA (1)...(19): siRNA sense strand
guacagauccgaaguuuca

SEQ ID NO: 656170 - RNA, 19 nt, Homo sapiens
  misc_RNA (1)...(19): siRNA sense strand
cagaugaaguuaacaguga

SEQ ID NO: 656171 - RNA, 19 nt, Homo sapiens
  misc_RNA (1)...(19): siRNA sense strand
ggaguuugcuaaauuugaa

SEQ ID NO: 656172 - RNA, 19 nt, Homo sapiens
  misc_RNA (1)...(19): siRNA sense strand
gugcagagccuucaauaaa

SEQ ID NO: 656173 - RNA, 19 nt, Homo sapiens
  misc_RNA (1)...(19): siRNA sense strand
gaacaacgaggucaugguu

SEQ ID NO: 656174 - RNA, 19 nt, Homo sapiens
  misc_RNA (1)...(19): siRNA sense strand
gaaacuugguggcauuguu

SEQ ID NO: 656175 - RNA, 19 nt, Homo sapiens
  misc_RNA (1)...(19): siRNA sense strand
gaaaugguguuugcaagug

SEQ ID NO: 656176 - RNA, 19 nt, Homo sapiens
  misc_RNA (1)...(19): siRNA sense strand
ggaagagggauaauacaaa

SEQ ID NO: 656177 - RNA, 19 nt, Homo sapiens
  misc_RNA (1)...(19): siRNA sense strand
caaauugucagaaggagua

SEQ ID NO: 656178 - RNA, 19 nt, Homo sapiens
  misc_RNA (1)...(19): siRNA sense strand
ggagaaguauuuaaugaac

SEQ ID NO: 656179 - RNA, 19 nt, Homo sapiens
  misc_RNA (1)...(19): siRNA sense strand
cccagaggcuccaaagaua

SEQ ID NO: 656180 - RNA, 19 nt, Homo sapiens
  misc_RNA (1)...(19): siRNA sense strand
gcugaagacuaucccauug

SEQ ID NO: 656181 - RNA, 19 nt, Homo sapiens
  misc_RNA (1)...(19): siRNA sense strand
agacaucauuccaauugua

SEQ ID NO: 656182 - RNA, 19 nt, Homo sapiens
  misc_RNA (1)...(19): siRNA sense strand
gauccugugucccauugua

SEQ ID NO: 656183 - RNA, 19 nt, Homo sapiens
  misc_RNA (1)...(19): siRNA sense strand
ggaaguagagguuauucuu

SEQ ID NO: 656184 - RNA, 19 nt, Homo sapiens
  misc_RNA (1)...(19): siRNA sense strand
ucagaaggaguaacaauaa

SEQ ID NO: 656185 - RNA, 19 nt, Homo sapiens
  misc_RNA (1)...(19): siRNA sense strand
gaaaaugaaugccaaaugg

SEQ ID NO: 656186 - RNA, 19 nt, Homo sapiens
  misc_RNA (1)...(19): siRNA sense strand
gcaagugucguguguguga

SEQ ID NO: 656187 - RNA, 19 nt, Homo sapiens
  misc_RNA (1)...(19): siRNA sense strand
gugauaauuucaacuguga

SEQ ID NO: 656188 - RNA, 19 nt, Homo sapiens
  misc_RNA (1)...(19): siRNA sense strand
acaauucccuuuccucaga

SEQ ID NO: 656189 - RNA, 19 nt, Homo sapiens
  misc_RNA (1)...(19): siRNA sense strand
gaaggaguaacaauaaguu

SEQ ID NO: 656190 - RNA, 19 nt, Homo sapiens
  misc_RNA (1)...(19): siRNA sense strand
gcaauguaauucaguugau

SEQ ID NO: 656191 - RNA, 19 nt, Homo sapiens
  misc_RNA (1)...(19): siRNA sense strand
gguagaaagucgggacaaa

SEQ ID NO: 656192 - RNA, 19 nt, Homo sapiens
  misc_RNA (1)...(19): siRNA sense strand
gaaggauguugacgacugu

SEQ ID NO: 656193 - RNA, 19 nt, Homo sapiens
  misc_RNA (1)...(19): siRNA sense strand
aaacagcgcauaucuggaa

SEQ ID NO: 656194 - RNA, 19 nt, Homo sapiens
  misc_RNA (1)...(19): siRNA sense strand
ccagacaucauuccaauug

SEQ ID NO: 656195 - RNA, 19 nt, Homo sapiens
  misc_RNA (1)...(19): siRNA sense strand
guaaggagaaggauguuga

SEQ ID NO: 656196 - RNA, 19 nt, Homo sapiens
  misc_RNA (1)...(19): siRNA sense strand
ugauagauccaauggcuua

SEQ ID NO: 656197 - RNA, 19 nt, Homo sapiens
  misc_RNA (1)...(19): siRNA sense strand
gaaaucugcaguaacaaug

SEQ ID NO: 656198 - RNA, 19 nt, Homo sapiens
  misc_RNA (1)...(19): siRNA sense strand
gcaugugacuguucuuugg

SEQ ID NO: 656199 - RNA, 19 nt, Homo sapiens
  misc_RNA (1)...(19): siRNA sense strand
ggagaugagguucaauuug

SEQ ID NO: 656200 - RNA, 19 nt, Homo sapiens
  misc_RNA (1)...(19): siRNA sense strand
cagaggauauuacucagau

SEQ ID NO: 656201 - RNA, 19 nt, Homo sapiens
  misc_RNA (1)...(19): siRNA sense strand
gcaaacgugugagaugugu

SEQ ID NO: 656202 - RNA, 19 nt, Homo sapiens
  misc_RNA (1)...(19): siRNA sense strand
gaaagucccaagugucaug

SEQ ID NO: 656203 - RNA, 19 nt, Homo sapiens
  misc_RNA (1)...(19): siRNA sense strand
gugcucagucuuacuaaua

SEQ ID NO: 656204 - RNA, 19 nt, Homo sapiens
  misc_RNA (1)...(19): siRNA sense strand
ggacuucagaauuggauuu

SEQ ID NO: 656205 - RNA, 19 nt, Homo sapiens
  misc_RNA (1)...(19): siRNA sense strand
gcaaaggaacagcagagaa

SEQ ID NO: 656206 - RNA, 19 nt, Homo sapiens
  misc_RNA (1)...(19): siRNA sense strand
gggcaaacgugugagaugu

SEQ ID NO: 656207 - RNA, 19 nt, Homo sapiens
  misc_RNA (1)...(19): siRNA sense strand
ugcacgaugugaugauuua

SEQ ID NO: 656208 - RNA, 19 nt, Homo sapiens
  misc_RNA (1)...(19): siRNA sense strand
uagauccaauggcuuaauu

SEQ ID NO: 656209 - RNA, 19 nt, Homo sapiens
  misc_RNA (1)...(19): siRNA sense strand
gaauuggauuuggcucauu

SEQ ID NO: 656210 - RNA, 19 nt, Homo sapiens
  misc_RNA (1)...(19): siRNA sense strand
uagaaagucgggacaaauu

SEQ ID NO: 656211 - RNA, 19 nt, Homo sapiens
  misc_RNA (1)...(19): siRNA sense strand
aaugaaaugaggaggauua

SEQ ID NO: 656212 - RNA, 19 nt, Homo sapiens
  misc_RNA (1)...(19): siRNA sense strand
aauuguagcuggugugguu

SEQ ID NO: 656213 - RNA, 19 nt, Homo sapiens
  misc_RNA (1)...(19): siRNA sense strand
agaaagucgggacaaauua

SEQ ID NO: 656214 - RNA, 19 nt, Homo sapiens
  misc_RNA (1)...(19): siRNA sense strand
gagcauaaagaauguguuc

SEQ ID NO: 656215 - RNA, 19 nt, Homo sapiens
  misc_RNA (1)...(19): siRNA sense strand
uccaauggcuuaauuugug

SEQ ID NO: 656216 - RNA, 19 nt, Homo sapiens
  misc_RNA (1)...(19): siRNA sense strand
gaaguuaacagugaagaca

SEQ ID NO: 656217 - RNA, 19 nt, Homo sapiens
  misc_RNA (1)...(19): siRNA sense strand
cagcacagaugaaguuaac

SEQ ID NO: 656218 - RNA, 19 nt, Homo sapiens
  misc_RNA (1)...(19): siRNA sense strand
gcaaaugccaaaucaugug

SEQ ID NO: 656219 - RNA, 19 nt, Homo sapiens
  misc_RNA (1)...(19): siRNA sense strand
gaagaauuucagccuguuu

SEQ ID NO: 656220 - RNA, 19 nt, Homo sapiens
  misc_RNA (1)...(19): siRNA sense strand
cagaggcuccaaagauaua

SEQ ID NO: 656221 - RNA, 19 nt, Homo sapiens
  misc_RNA (1)...(19): siRNA sense strand
cugcugauauggaagcuuu

SEQ ID NO: 656222 - RNA, 19 nt, Homo sapiens
  misc_RNA (1)...(19): siRNA sense strand
caacugugauagauccaau

SEQ ID NO: 656223 - RNA, 19 nt, Homo sapiens
  misc_RNA (1)...(19): siRNA sense strand
uagagguuauucuucagua

SEQ ID NO: 656224 - RNA, 19 nt, Homo sapiens
  misc_RNA (1)...(19): siRNA sense strand
cagcgcauaucuggaaauu

SEQ ID NO: 656225 - RNA, 19 nt, Homo sapiens
  misc_RNA (1)...(19): siRNA sense strand
caaaggaacagcagagaag

SEQ ID NO: 656226 - RNA, 19 nt, Homo sapiens
  misc_RNA (1)...(19): siRNA sense strand
gaacagcagagaagcucaa

SEQ ID NO: 656227 - RNA, 19 nt, Homo sapiens
  misc_RNA (1)...(19): siRNA sense strand
gauccaauggcuuaauuug

SEQ ID NO: 656228 - RNA, 19 nt, Homo sapiens
  misc_RNA (1)...(19): siRNA sense strand
gaaaacaguucagaaaucu

SEQ ID NO: 656229 - RNA, 19 nt, Homo sapiens
  misc_RNA (1)...(19): siRNA sense strand
caagugucaugaaggaaau

SEQ ID NO: 656230 - RNA, 19 nt, Homo sapiens
  misc_RNA (1)...(19): siRNA sense strand
gucagaaggaguaacaaua

SEQ ID NO: 656231 - RNA, 19 nt, Homo sapiens
  misc_RNA (1)...(19): siRNA sense strand
gaggauuacuucggacuuc

SEQ ID NO: 656232 - RNA, 19 nt, Homo sapiens
  misc_RNA (1)...(19): siRNA sense strand
ugaaagacgauuuggagaa

SEQ ID NO: 656233 - RNA, 19 nt, Homo sapiens
  misc_RNA (1)...(19): siRNA sense strand
gccacagacauuuacauua

SEQ ID NO: 656234 - RNA, 19 nt, Homo sapiens
  misc_RNA (1)...(19): siRNA sense strand
gcaguugguuuugcgauua

SEQ ID NO: 656235 - RNA, 19 nt, Homo sapiens
  misc_RNA (1)...(19): siRNA sense strand
aaaagacugugaugccuua

SEQ ID NO: 656236 - RNA, 19 nt, Homo sapiens
  misc_RNA (1)...(19): siRNA sense strand
ggaaaugguguuugcaagu

SEQ ID NO: 656237 - RNA, 19 nt, Homo sapiens
  misc_RNA (1)...(19): siRNA sense strand
gcgaaggcaucccugaaag

SEQ ID NO: 656238 - RNA, 19 nt, Homo sapiens
  misc_RNA (1)...(19): siRNA sense strand
gcucagucuuacuaauaaa

SEQ ID NO: 656239 - RNA, 19 nt, Homo sapiens
  misc_RNA (1)...(19): siRNA sense strand
gcaccagcccauuuagcua

SEQ ID NO: 656240 - RNA, 19 nt, Homo sapiens
  misc_RNA (1)...(19): siRNA sense strand
aagggaguuugcuaaauuu

SEQ ID NO: 656241 - RNA, 19 nt, Homo sapiens
  misc_RNA (1)...(19): siRNA sense strand
acaacgaggucaugguuca

SEQ ID NO: 656242 - RNA, 19 nt, Homo sapiens
  misc_RNA (1)...(19): siRNA sense strand
cugauuggcuggaggaaug

SEQ ID NO: 656243 - RNA, 19 nt, Homo sapiens
  misc_RNA (1)...(19): siRNA sense strand
aaguagagguuauucuuca

SEQ ID NO: 656244 - RNA, 19 nt, Homo sapiens
  misc_RNA (1)...(19): siRNA sense strand
guccagacaucauuccaau

SEQ ID NO: 656245 - RNA, 19 nt, Homo sapiens
  misc_RNA (1)...(19): siRNA sense strand
gaaagucgggacaaauuac

SEQ ID NO: 656246 - RNA, 19 nt, Homo sapiens
  misc_RNA (1)...(19): siRNA sense strand
guguacagauccgaaguuu

SEQ ID NO: 656247 - RNA, 19 nt, Homo sapiens
  misc_RNA (1)...(19): siRNA sense strand
guaggaagagggauaauac

SEQ ID NO: 656248 - RNA, 19 nt, Homo sapiens
  misc_RNA (1)...(19): siRNA sense strand
ccaagugucaugaaggaaa

SEQ ID NO: 656249 - RNA, 19 nt, Homo sapiens
  misc_RNA (1)...(19): siRNA sense strand
gaucugaugaaugaaauga

SEQ ID NO: 656250 - RNA, 19 nt, Homo sapiens
  misc_RNA (1)...(19): siRNA sense strand
ggacaguguguuuguagga

SEQ ID NO: 656251 - RNA, 19 nt, Homo sapiens
  misc_RNA (1)...(19): siRNA sense strand
cauuacugcugauauggaa

SEQ ID NO: 656252 - RNA, 19 nt, Homo sapiens
  misc_RNA (1)...(19): siRNA sense strand
gcuccaaagauauaaagaa

SEQ ID NO: 656253 - RNA, 19 nt, Homo sapiens
  misc_RNA (1)...(19): siRNA sense strand
ugacgacuguugguucuau

SEQ ID NO: 656254 - RNA, 19 nt, Homo sapiens
  misc_RNA (1)...(19): siRNA sense strand
uguggugucuguaagugua

SEQ ID NO: 656255 - RNA, 19 nt, Homo sapiens
  misc_RNA (1)...(19): siRNA sense strand
gaggaaaugguguuugcaa

SEQ ID NO: 656256 - RNA, 19 nt, Homo sapiens
  misc_RNA (1)...(19): siRNA sense strand
gacaguguguuuguaggaa

SEQ ID NO: 656257 - RNA, 19 nt, Homo sapiens
  misc_RNA (1)...(19): siRNA sense strand
gaacagaucugaugaauga

SEQ ID NO: 656258 - RNA, 19 nt, Homo sapiens
  misc_RNA (1)...(19): siRNA sense strand
caagagagcugaagacuau

SEQ ID NO: 656259 - RNA, 19 nt, Homo sapiens
  misc_RNA (1)...(19): siRNA sense strand
gaagggaguuugcuaaauu

SEQ ID NO: 656260 - RNA, 19 nt, Homo sapiens
  misc_RNA (1)...(19): siRNA sense strand
ccacagacauuuacauuaa

SEQ ID NO: 656261 - RNA, 19 nt, Homo sapiens
  misc_RNA (1)...(19): siRNA sense strand
gcgcauaucuggaaauuug

SEQ ID NO: 656262 - RNA, 19 nt, Homo sapiens
  misc_RNA (1)...(19): siRNA sense strand
gaagagggauaauacaaau

SEQ ID NO: 656263 - RNA, 19 nt, Homo sapiens
  misc_RNA (1)...(19): siRNA sense strand
gugaagacauggaugcuua

SEQ ID NO: 656264 - RNA, 19 nt, Homo sapiens
  misc_RNA (1)...(19): siRNA sense strand
gaaagacgauuuggagaau

SEQ ID NO: 656265 - RNA, 19 nt, Homo sapiens
  misc_RNA (1)...(19): siRNA sense strand
guaauucaguugaucauug

SEQ ID NO: 656266 - RNA, 19 nt, Homo sapiens
  misc_RNA (1)...(19): siRNA sense strand
gaaaugaggaggauuacuu

SEQ ID NO: 656267 - RNA, 19 nt, Homo sapiens
  misc_RNA (1)...(19): siRNA sense strand
caaaucauguggagaaugu

SEQ ID NO: 656268 - RNA, 19 nt, Homo sapiens
  misc_RNA (1)...(19): siRNA sense strand
gaacugcaccagcccauuu

SEQ ID NO: 656269 - RNA, 19 nt, Homo sapiens
  misc_RNA (1)...(19): siRNA sense strand
guacagauccgaaguuuca

SEQ ID NO: 656270 - RNA, 19 nt, Homo sapiens
  misc_RNA (1)...(19): siRNA sense strand
cagaugaaguuaacaguga

SEQ ID NO: 656271 - RNA, 19 nt, Homo sapiens
  misc_RNA (1)...(19): siRNA sense strand
ggaguuugcuaaauuugaa

SEQ ID NO: 656272 - RNA, 19 nt, Homo sapiens
  misc_RNA (1)...(19): siRNA sense strand
gugcagagccuucaauaaa

SEQ ID NO: 656273 - RNA, 19 nt, Homo sapiens
  misc_RNA (1)...(19): siRNA sense strand
gaacaacgaggucaugguu

SEQ ID NO: 656274 - RNA, 19 nt, Homo sapiens
  misc_RNA (1)...(19): siRNA sense strand
gaaacuugguggcauuguu

SEQ ID NO: 656275 - RNA, 19 nt, Homo sapiens
  misc_RNA (1)...(19): siRNA sense strand
gaaaugguguuugcaagug

SEQ ID NO: 656276 - RNA, 19 nt, Homo sapiens
  misc_RNA (1)...(19): siRNA sense strand
ggaagagggauaauacaaa

SEQ ID NO: 656277 - RNA, 19 nt, Homo sapiens
  misc_RNA (1)...(19): siRNA sense strand
caaauugucagaaggagua

SEQ ID NO: 656278 - RNA, 19 nt, Homo sapiens
  misc_RNA (1)...(19): siRNA sense strand
ggagaaguauuuaaugaac

SEQ ID NO: 656279 - RNA, 19 nt, Homo sapiens
  misc_RNA (1)...(19): siRNA sense strand
cccagaggcuccaaagaua

SEQ ID NO: 656280 - RNA, 19 nt, Homo sapiens
  misc_RNA (1)...(19): siRNA sense strand
gcugaagacuaucccauug

SEQ ID NO: 656281 - RNA, 19 nt, Homo sapiens
  misc_RNA (1)...(19): siRNA sense strand
agacaucauuccaauugua

SEQ ID NO: 656282 - RNA, 19 nt, Homo sapiens
  misc_RNA (1)...(19): siRNA sense strand
gauccugugucccauugua

SEQ ID NO: 656283 - RNA, 19 nt, Homo sapiens
  misc_RNA (1)...(19): siRNA sense strand
ggaaguagagguuauucuu

SEQ ID NO: 656284 - RNA, 19 nt, Homo sapiens
  misc_RNA (1)...(19): siRNA sense strand
ucagaaggaguaacaauaa

SEQ ID NO: 656285 - RNA, 19 nt, Homo sapiens
  misc_RNA (1)...(19): siRNA sense strand
gaaaaugaaugccaaaugg

SEQ ID NO: 656286 - RNA, 19 nt, Homo sapiens
  misc_RNA (1)...(19): siRNA sense strand
gcaagugucguguguguga

SEQ ID NO: 656287 - RNA, 19 nt, Homo sapiens
  misc_RNA (1)...(19): siRNA sense strand
gugauaauuucaacuguga

SEQ ID NO: 656288 - RNA, 19 nt, Homo sapiens
  misc_RNA (1)...(19): siRNA sense strand
acaauucccuuuccucaga

SEQ ID NO: 656289 - RNA, 19 nt, Homo sapiens
  misc_RNA (1)...(19): siRNA sense strand
gaaggaguaacaauaaguu

SEQ ID NO: 656290 - RNA, 19 nt, Homo sapiens
  misc_RNA (1)...(19): siRNA sense strand
gcaauguaauucaguugau

SEQ ID NO: 656291 - RNA, 19 nt, Homo sapiens
  misc_RNA (1)...(19): siRNA sense strand
gguagaaagucgggacaaa

SEQ ID NO: 656292 - RNA, 19 nt, Homo sapiens
  misc_RNA (1)...(19): siRNA sense strand
gaaggauguugacgacugu

SEQ ID NO: 656293 - RNA, 19 nt, Homo sapiens
  misc_RNA (1)...(19): siRNA sense strand
aaacagcgcauaucuggaa

SEQ ID NO: 656294 - RNA, 19 nt, Homo sapiens
  misc_RNA (1)...(19): siRNA sense strand
ccagacaucauuccaauug

SEQ ID NO: 656295 - RNA, 19 nt, Homo sapiens
  misc_RNA (1)...(19): siRNA sense strand
guaaggagaaggauguuga

SEQ ID NO: 656296 - RNA, 19 nt, Homo sapiens
  misc_RNA (1)...(19): siRNA sense strand
ugauagauccaauggcuua

SEQ ID NO: 656297 - RNA, 19 nt, Homo sapiens
  misc_RNA (1)...(19): siRNA sense strand
gaaaucugcaguaacaaug

SEQ ID NO: 656298 - RNA, 19 nt, Homo sapiens
  misc_RNA (1)...(19): siRNA sense strand
gcaugugacuguucuuugg

SEQ ID NO: 656299 - RNA, 19 nt, Homo sapiens
  misc_RNA (1)...(19): siRNA sense strand
ggagaugagguucaauuug

SEQ ID NO: 656300 - RNA, 19 nt, Homo sapiens
  misc_RNA (1)...(19): siRNA sense strand
cagaggauauuacucagau

SEQ ID NO: 656301 - RNA, 19 nt, Homo sapiens
  misc_RNA (1)...(19): siRNA sense strand
gcaaacgugugagaugugu

SEQ ID NO: 656302 - RNA, 19 nt, Homo sapiens
  misc_RNA (1)...(19): siRNA sense strand
gaaagucccaagugucaug

SEQ ID NO: 656303 - RNA, 19 nt, Homo sapiens
  misc_RNA (1)...(19): siRNA sense strand
gugcucagucuuacuaaua

SEQ ID NO: 656304 - RNA, 19 nt, Homo sapiens
  misc_RNA (1)...(19): siRNA sense strand
ggacuucagaauuggauuu

SEQ ID NO: 656305 - RNA, 19 nt, Homo sapiens
  misc_RNA (1)...(19): siRNA sense strand
gcaaaggaacagcagagaa

SEQ ID NO: 656306 - RNA, 19 nt, Homo sapiens
  misc_RNA (1)...(19): siRNA sense strand
gggcaaacgugugagaugu

SEQ ID NO: 656307 - RNA, 19 nt, Homo sapiens
  misc_RNA (1)...(19): siRNA sense strand
ugcacgaugugaugauuua

SEQ ID NO: 656308 - RNA, 19 nt, Homo sapiens
  misc_RNA (1)...(19): siRNA sense strand
uagauccaauggcuuaauu

SEQ ID NO: 656309 - RNA, 19 nt, Homo sapiens
  misc_RNA (1)...(19): siRNA sense strand
gaauuggauuuggcucauu

SEQ ID NO: 656310 - RNA, 19 nt, Homo sapiens
  misc_RNA (1)...(19): siRNA sense strand
uagaaagucgggacaaauu

SEQ ID NO: 656311 - RNA, 19 nt, Homo sapiens
  misc_RNA (1)...(19): siRNA sense strand
aaugaaaugaggaggauua

SEQ ID NO: 656312 - RNA, 19 nt, Homo sapiens
  misc_RNA (1)...(19): siRNA sense strand
aauuguagcuggugugguu

SEQ ID NO: 656313 - RNA, 19 nt, Homo sapiens
  misc_RNA (1)...(19): siRNA sense strand
agaaagucgggacaaauua

SEQ ID NO: 656314 - RNA, 19 nt, Homo sapiens
  misc_RNA (1)...(19): siRNA sense strand
gagcauaaagaauguguuc

SEQ ID NO: 656315 - RNA, 19 nt, Homo sapiens
  misc_RNA (1)...(19): siRNA sense strand
uccaauggcuuaauuugug

SEQ ID NO: 656316 - RNA, 19 nt, Homo sapiens
  misc_RNA (1)...(19): siRNA sense strand
gaaguuaacagugaagaca

SEQ ID NO: 656317 - RNA, 19 nt, Homo sapiens
  misc_RNA (1)...(19): siRNA sense strand
cagcacagaugaaguuaac

SEQ ID NO: 656318 - RNA, 19 nt, Homo sapiens
  misc_RNA (1)...(19): siRNA sense strand
gcaaaugccaaaucaugug

SEQ ID NO: 656319 - RNA, 19 nt, Homo sapiens
  misc_RNA (1)...(19): siRNA sense strand
gaagaauuucagccuguuu

SEQ ID NO: 656320 - RNA, 19 nt, Homo sapiens
  misc_RNA (1)...(19): siRNA sense strand
cagaggcuccaaagauaua

SEQ ID NO: 656321 - RNA, 19 nt, Homo sapiens
  misc_RNA (1)...(19): siRNA sense strand
cugcugauauggaagcuuu

SEQ ID NO: 656322 - RNA, 19 nt, Homo sapiens
  misc_RNA (1)...(19): siRNA sense strand
caacugugauagauccaau

SEQ ID NO: 656323 - RNA, 19 nt, Homo sapiens
  misc_RNA (1)...(19): siRNA sense strand
uagagguuauucuucagua

SEQ ID NO: 656324 - RNA, 19 nt, Homo sapiens
  misc_RNA (1)...(19): siRNA sense strand
cagcgcauaucuggaaauu

SEQ ID NO: 656325 - RNA, 19 nt, Homo sapiens
  misc_RNA (1)...(19): siRNA sense strand
caaaggaacagcagagaag

SEQ ID NO: 656326 - RNA, 19 nt, Homo sapiens
  misc_RNA (1)...(19): siRNA sense strand
gaacagcagagaagcucaa

SEQ ID NO: 656327 - RNA, 19 nt, Homo sapiens
  misc_RNA (1)...(19): siRNA sense strand
gauccaauggcuuaauuug

SEQ ID NO: 656328 - RNA, 19 nt, Homo sapiens
  misc_RNA (1)...(19): siRNA sense strand
gaaaacaguucagaaaucu

SEQ ID NO: 656329 - RNA, 19 nt, Homo sapiens
  misc_RNA (1)...(19): siRNA sense strand
caagugucaugaaggaaau

SEQ ID NO: 656330 - RNA, 19 nt, Homo sapiens
  misc_RNA (1)...(19): siRNA sense strand
gucagaaggaguaacaaua

SEQ ID NO: 656331 - RNA, 19 nt, Homo sapiens
  misc_RNA (1)...(19): siRNA sense strand
gaggauuacuucggacuuc

SEQ ID NO: 656332 - RNA, 19 nt, Homo sapiens
  misc_RNA (1)...(19): siRNA sense strand
ugaaagacgauuuggagaa

SEQ ID NO: 656333 - RNA, 19 nt, Homo sapiens
  misc_RNA (1)...(19): siRNA sense strand
gccacagacauuuacauua

SEQ ID NO: 656334 - RNA, 19 nt, Homo sapiens
  misc_RNA (1)...(19): siRNA sense strand
gcaguugguuuugcgauua

SEQ ID NO: 656335 - RNA, 19 nt, Homo sapiens
  misc_RNA (1)...(19): siRNA sense strand
aaaagacugugaugccuua

SEQ ID NO: 656336 - RNA, 19 nt, Homo sapiens
  misc_RNA (1)...(19): siRNA sense strand
ggaaaugguguuugcaagu

SEQ ID NO: 656337 - RNA, 19 nt, Homo sapiens
  misc_RNA (1)...(19): siRNA sense strand
gcgaaggcaucccugaaag

SEQ ID NO: 656338 - RNA, 19 nt, Homo sapiens
  misc_RNA (1)...(19): siRNA sense strand
gcucagucuuacuaauaaa

SEQ ID NO: 656339 - RNA, 19 nt, Homo sapiens
  misc_RNA (1)...(19): siRNA sense strand
gcaccagcccauuuagcua

SEQ ID NO: 656340 - RNA, 19 nt, Homo sapiens
  misc_RNA (1)...(19): siRNA sense strand
aagggaguuugcuaaauuu

SEQ ID NO: 656341 - RNA, 19 nt, Homo sapiens
  misc_RNA (1)...(19): siRNA sense strand
acaacgaggucaugguuca

SEQ ID NO: 656342 - RNA, 19 nt, Homo sapiens
  misc_RNA (1)...(19): siRNA sense strand
cugauuggcuggaggaaug

SEQ ID NO: 656343 - RNA, 19 nt, Homo sapiens
  misc_RNA (1)...(19): siRNA sense strand
aaguagagguuauucuuca

SEQ ID NO: 656344 - RNA, 19 nt, Homo sapiens
  misc_RNA (1)...(19): siRNA sense strand
guccagacaucauuccaau

SEQ ID NO: 656345 - RNA, 19 nt, Homo sapiens
  misc_RNA (1)...(19): siRNA sense strand
gaaagucgggacaaauuac

SEQ ID NO: 656346 - RNA, 19 nt, Homo sapiens
  misc_RNA (1)...(19): siRNA sense strand
guguacagauccgaaguuu

SEQ ID NO: 656347 - RNA, 19 nt, Homo sapiens
  misc_RNA (1)...(19): siRNA sense strand
guaggaagagggauaauac

SEQ ID NO: 656348 - RNA, 19 nt, Homo sapiens
  misc_RNA (1)...(19): siRNA sense strand
ccaagugucaugaaggaaa

SEQ ID NO: 656349 - RNA, 19 nt, Homo sapiens
  misc_RNA (1)...(19): siRNA sense strand
gaucugaugaaugaaauga

SEQ ID NO: 656350 - RNA, 19 nt, Homo sapiens
  misc_RNA (1)...(19): siRNA sense strand
ggacaguguguuuguagga

SEQ ID NO: 656351 - RNA, 19 nt, Homo sapiens
  misc_RNA (1)...(19): siRNA sense strand
cauuacugcugauauggaa

SEQ ID NO: 656352 - RNA, 19 nt, Homo sapiens
  misc_RNA (1)...(19): siRNA sense strand
gcuccaaagauauaaagaa

SEQ ID NO: 656353 - RNA, 19 nt, Homo sapiens
  misc_RNA (1)...(19): siRNA sense strand
ugacgacuguugguucuau

SEQ ID NO: 656354 - RNA, 19 nt, Homo sapiens
  misc_RNA (1)...(19): siRNA sense strand
uguggugucuguaagugua

SEQ ID NO: 656355 - RNA, 19 nt, Homo sapiens
  misc_RNA (1)...(19): siRNA sense strand
gaggaaaugguguuugcaa

SEQ ID NO: 656356 - RNA, 19 nt, Homo sapiens
  misc_RNA (1)...(19): siRNA sense strand
gacaguguguuuguaggaa

SEQ ID NO: 656357 - RNA, 19 nt, Homo sapiens
  misc_RNA (1)...(19): siRNA sense strand
gaacagaucugaugaauga

SEQ ID NO: 656358 - RNA, 19 nt, Homo sapiens
  misc_RNA (1)...(19): siRNA sense strand
caagagagcugaagacuau

SEQ ID NO: 656359 - RNA, 19 nt, Homo sapiens
  misc_RNA (1)...(19): siRNA sense strand
gaagggaguuugcuaaauu

SEQ ID NO: 656360 - RNA, 19 nt, Homo sapiens
  misc_RNA (1)...(19): siRNA sense strand
ccacagacauuuacauuaa

SEQ ID NO: 656361 - RNA, 19 nt, Homo sapiens
  misc_RNA (1)...(19): siRNA sense strand
gcgcauaucuggaaauuug

SEQ ID NO: 656362 - RNA, 19 nt, Homo sapiens
  misc_RNA (1)...(19): siRNA sense strand
gaagagggauaauacaaau

SEQ ID NO: 656363 - RNA, 19 nt, Homo sapiens
  misc_RNA (1)...(19): siRNA sense strand
gugaagacauggaugcuua

SEQ ID NO: 656364 - RNA, 19 nt, Homo sapiens
  misc_RNA (1)...(19): siRNA sense strand
gaaagacgauuuggagaau

SEQ ID NO: 656365 - RNA, 19 nt, Homo sapiens
  misc_RNA (1)...(19): siRNA sense strand
guaauucaguugaucauug

SEQ ID NO: 656366 - RNA, 19 nt, Homo sapiens
  misc_RNA (1)...(19): siRNA sense strand
gaaaugaggaggauuacuu

SEQ ID NO: 656367 - RNA, 19 nt, Homo sapiens
  misc_RNA (1)...(19): siRNA sense strand
caaaucauguggagaaugu

SEQ ID NO: 656368 - RNA, 19 nt, Homo sapiens
  misc_RNA (1)...(19): siRNA sense strand
gaacugcaccagcccauuu

SEQ ID NO: 656369 - RNA, 19 nt, Homo sapiens
  misc_RNA (1)...(19): siRNA sense strand
guacagauccgaaguuuca

SEQ ID NO: 656370 - RNA, 19 nt, Homo sapiens
  misc_RNA (1)...(19): siRNA sense strand
cagaugaaguuaacaguga

SEQ ID NO: 656371 - RNA, 19 nt, Homo sapiens
  misc_RNA (1)...(19): siRNA sense strand
ggaguuugcuaaauuugaa

SEQ ID NO: 656372 - RNA, 19 nt, Homo sapiens
  misc_RNA (1)...(19): siRNA sense strand
gugcagagccuucaauaaa

SEQ ID NO: 656373 - RNA, 19 nt, Homo sapiens
  misc_RNA (1)...(19): siRNA sense strand
gaacaacgaggucaugguu

SEQ ID NO: 656374 - RNA, 19 nt, Homo sapiens
  misc_RNA (1)...(19): siRNA sense strand
gaaacuugguggcauuguu

SEQ ID NO: 656375 - RNA, 19 nt, Homo sapiens
  misc_RNA (1)...(19): siRNA sense strand
gaaaugguguuugcaagug

SEQ ID NO: 656376 - RNA, 19 nt, Homo sapiens
  misc_RNA (1)...(19): siRNA sense strand
ggaagagggauaauacaaa

SEQ ID NO: 656377 - RNA, 19 nt, Homo sapiens
  misc_RNA (1)...(19): siRNA sense strand
caaauugucagaaggagua

SEQ ID NO: 656378 - RNA, 19 nt, Homo sapiens
  misc_RNA (1)...(19): siRNA sense strand
ggagaaguauuuaaugaac

SEQ ID NO: 656379 - RNA, 19 nt, Homo sapiens
  misc_RNA (1)...(19): siRNA sense strand
cccagaggcuccaaagaua

SEQ ID NO: 656380 - RNA, 19 nt, Homo sapiens
  misc_RNA (1)...(19): siRNA sense strand
gcugaagacuaucccauug

SEQ ID NO: 656381 - RNA, 19 nt, Homo sapiens
  misc_RNA (1)...(19): siRNA sense strand
agacaucauuccaauugua

SEQ ID NO: 656382 - RNA, 19 nt, Homo sapiens
  misc_RNA (1)...(19): siRNA sense strand
gauccugugucccauugua

SEQ ID NO: 656383 - RNA, 19 nt, Homo sapiens
  misc_RNA (1)...(19): siRNA sense strand
ggaaguagagguuauucuu

SEQ ID NO: 656384 - RNA, 19 nt, Homo sapiens
  misc_RNA (1)...(19): siRNA sense strand
ucagaaggaguaacaauaa

SEQ ID NO: 656385 - RNA, 19 nt, Homo sapiens
  misc_RNA (1)...(19): siRNA sense strand
gaaaaugaaugccaaaugg

SEQ ID NO: 656386 - RNA, 19 nt, Homo sapiens
  misc_RNA (1)...(19): siRNA sense strand
gcaagugucguguguguga

SEQ ID NO: 656387 - RNA, 19 nt, Homo sapiens
  misc_RNA (1)...(19): siRNA sense strand
gugauaauuucaacuguga

SEQ ID NO: 656388 - RNA, 19 nt, Homo sapiens
  misc_RNA (1)...(19): siRNA sense strand
acaauucccuuuccucaga

SEQ ID NO: 656389 - RNA, 19 nt, Homo sapiens
  misc_RNA (1)...(19): siRNA sense strand
gaaggaguaacaauaaguu

SEQ ID NO: 656390 - RNA, 19 nt, Homo sapiens
  misc_RNA (1)...(19): siRNA sense strand
gcaauguaauucaguugau

SEQ ID NO: 656391 - RNA, 19 nt, Homo sapiens
  misc_RNA (1)...(19): siRNA sense strand
gguagaaagucgggacaaa

SEQ ID NO: 656392 - RNA, 19 nt, Homo sapiens
  misc_RNA (1)...(19): siRNA sense strand
gaaggauguugacgacugu

SEQ ID NO: 656393 - RNA, 19 nt, Homo sapiens
  misc_RNA (1)...(19): siRNA sense strand
aaacagcgcauaucuggaa

SEQ ID NO: 656394 - RNA, 19 nt, Homo sapiens
  misc_RNA (1)...(19): siRNA sense strand
ccagacaucauuccaauug

SEQ ID NO: 656395 - RNA, 19 nt, Homo sapiens
  misc_RNA (1)...(19): siRNA sense strand
guaaggagaaggauguuga

SEQ ID NO: 656396 - RNA, 19 nt, Homo sapiens
  misc_RNA (1)...(19): siRNA sense strand
ugauagauccaauggcuua

SEQ ID NO: 656397 - RNA, 19 nt, Homo sapiens
  misc_RNA (1)...(19): siRNA sense strand
gaaaucugcaguaacaaug

SEQ ID NO: 656398 - RNA, 19 nt, Homo sapiens
  misc_RNA (1)...(19): siRNA sense strand
gcaugugacuguucuuugg

SEQ ID NO: 656399 - RNA, 19 nt, Homo sapiens
  misc_RNA (1)...(19): siRNA sense strand
ggagaugagguucaauuug

SEQ ID NO: 656400 - RNA, 19 nt, Homo sapiens
  misc_RNA (1)...(19): siRNA sense strand
cagaggauauuacucagau

SEQ ID NO: 656401 - RNA, 19 nt, Homo sapiens
  misc_RNA (1)...(19): siRNA sense strand
gcaaacgugugagaugugu

SEQ ID NO: 656402 - RNA, 19 nt, Homo sapiens
  misc_RNA (1)...(19): siRNA sense strand
gaaagucccaagugucaug

SEQ ID NO: 656403 - RNA, 19 nt, Homo sapiens
  misc_RNA (1)...(19): siRNA sense strand
gugcucagucuuacuaaua

SEQ ID NO: 656404 - RNA, 19 nt, Homo sapiens
  misc_RNA (1)...(19): siRNA sense strand
ggacuucagaauuggauuu

SEQ ID NO: 656405 - RNA, 19 nt, Homo sapiens
  misc_RNA (1)...(19): siRNA sense strand
gcaaaggaacagcagagaa

SEQ ID NO: 656406 - RNA, 19 nt, Homo sapiens
  misc_RNA (1)...(19): siRNA sense strand
gggcaaacgugugagaugu

SEQ ID NO: 656407 - RNA, 19 nt, Homo sapiens
  misc_RNA (1)...(19): siRNA sense strand
ugcacgaugugaugauuua

SEQ ID NO: 656408 - RNA, 19 nt, Homo sapiens
  misc_RNA (1)...(19): siRNA sense strand
uagauccaauggcuuaauu

SEQ ID NO: 656409 - RNA, 19 nt, Homo sapiens
  misc_RNA (1)...(19): siRNA sense strand
gaauuggauuuggcucauu

SEQ ID NO: 656410 - RNA, 19 nt, Homo sapiens
  misc_RNA (1)...(19): siRNA sense strand
uagaaagucgggacaaauu

SEQ ID NO: 656411 - RNA, 19 nt, Homo sapiens
  misc_RNA (1)...(19): siRNA sense strand
aaugaaaugaggaggauua

SEQ ID NO: 656412 - RNA, 19 nt, Homo sapiens
  misc_RNA (1)...(19): siRNA sense strand
aauuguagcuggugugguu

SEQ ID NO: 656413 - RNA, 19 nt, Homo sapiens
  misc_RNA (1)...(19): siRNA sense strand
agaaagucgggacaaauua

SEQ ID NO: 656414 - RNA, 19 nt, Homo sapiens
  misc_RNA (1)...(19): siRNA sense strand
gagcauaaagaauguguuc

SEQ ID NO: 656415 - RNA, 19 nt, Homo sapiens
  misc_RNA (1)...(19): siRNA sense strand
uccaauggcuuaauuugug

SEQ ID NO: 656416 - RNA, 19 nt, Homo sapiens
  misc_RNA (1)...(19): siRNA sense strand
gaaguuaacagugaagaca

SEQ ID NO: 656417 - RNA, 19 nt, Homo sapiens
  misc_RNA (1)...(19): siRNA sense strand
cagcacagaugaaguuaac

SEQ ID NO: 656418 - RNA, 19 nt, Homo sapiens
  misc_RNA (1)...(19): siRNA sense strand
gcaaaugccaaaucaugug

SEQ ID NO: 656419 - RNA, 19 nt, Homo sapiens
  misc_RNA (1)...(19): siRNA sense strand
gaagaauuucagccuguuu

SEQ ID NO: 656420 - RNA, 19 nt, Homo sapiens
  misc_RNA (1)...(19): siRNA sense strand
cagaggcuccaaagauaua

SEQ ID NO: 656421 - RNA, 19 nt, Homo sapiens
  misc_RNA (1)...(19): siRNA sense strand
cugcugauauggaagcuuu

SEQ ID NO: 656422 - RNA, 19 nt, Homo sapiens
  misc_RNA (1)...(19): siRNA sense strand
caacugugauagauccaau

SEQ ID NO: 656423 - RNA, 19 nt, Homo sapiens
  misc_RNA (1)...(19): siRNA sense strand
uagagguuauucuucagua

SEQ ID NO: 656424 - RNA, 19 nt, Homo sapiens
  misc_RNA (1)...(19): siRNA sense strand
cagcgcauaucuggaaauu

SEQ ID NO: 656425 - RNA, 19 nt, Homo sapiens
  misc_RNA (1)...(19): siRNA sense strand
caaaggaacagcagagaag

SEQ ID NO: 656426 - RNA, 19 nt, Homo sapiens
  misc_RNA (1)...(19): siRNA sense strand
gaacagcagagaagcucaa

SEQ ID NO: 656427 - RNA, 19 nt, Homo sapiens
  misc_RNA (1)...(19): siRNA sense strand
gauccaauggcuuaauuug

SEQ ID NO: 656428 - RNA, 19 nt, Homo sapiens
  misc_RNA (1)...(19): siRNA sense strand
gaaaacaguucagaaaucu

SEQ ID NO: 656429 - RNA, 19 nt, Homo sapiens
  misc_RNA (1)...(19): siRNA sense strand
caagugucaugaaggaaau

SEQ ID NO: 656430 - RNA, 19 nt, Homo sapiens
  misc_RNA (1)...(19): siRNA sense strand
gucagaaggaguaacaaua

SEQ ID NO: 656431 - RNA, 19 nt, Homo sapiens
  misc_RNA (1)...(19): siRNA sense strand
gaggauuacuucggacuuc

SEQ ID NO: 656432 - RNA, 19 nt, Homo sapiens
  misc_RNA (1)...(19): siRNA sense strand
ugaaagacgauuuggagaa

SEQ ID NO: 656433 - RNA, 19 nt, Homo sapiens
  misc_RNA (1)...(19): siRNA sense strand
gccacagacauuuacauua

SEQ ID NO: 656434 - RNA, 19 nt, Homo sapiens
  misc_RNA (1)...(19): siRNA sense strand
gcaguugguuuugcgauua

SEQ ID NO: 656435 - RNA, 19 nt, Homo sapiens
  misc_RNA (1)...(19): siRNA sense strand
aaaagacugugaugccuua

SEQ ID NO: 656436 - RNA, 19 nt, Homo sapiens
  misc_RNA (1)...(19): siRNA sense strand
ggaaaugguguuugcaagu

SEQ ID NO: 656437 - RNA, 19 nt, Homo sapiens
  misc_RNA (1)...(19): siRNA sense strand
gcgaaggcaucccugaaag

SEQ ID NO: 656438 - RNA, 19 nt, Homo sapiens
  misc_RNA (1)...(19): siRNA sense strand
gcucagucuuacuaauaaa

SEQ ID NO: 656439 - RNA, 19 nt, Homo sapiens
  misc_RNA (1)...(19): siRNA sense strand
gcaccagcccauuuagcua

SEQ ID NO: 656440 - RNA, 19 nt, Homo sapiens
  misc_RNA (1)...(19): siRNA sense strand
aagggaguuugcuaaauuu

SEQ ID NO: 656441 - RNA, 19 nt, Homo sapiens
  misc_RNA (1)...(19): siRNA sense strand
acaacgaggucaugguuca

SEQ ID NO: 656442 - RNA, 19 nt, Homo sapiens
  misc_RNA (1)...(19): siRNA sense strand
cugauuggcuggaggaaug

SEQ ID NO: 656443 - RNA, 19 nt, Homo sapiens
  misc_RNA (1)...(19): siRNA sense strand
aaguagagguuauucuuca

SEQ ID NO: 656444 - RNA, 19 nt, Homo sapiens
  misc_RNA (1)...(19): siRNA sense strand
guccagacaucauuccaau

SEQ ID NO: 656445 - RNA, 19 nt, Homo sapiens
  misc_RNA (1)...(19): siRNA sense strand
gaaagucgggacaaauuac

SEQ ID NO: 656446 - RNA, 19 nt, Homo sapiens
  misc_RNA (1)...(19): siRNA sense strand
guguacagauccgaaguuu

SEQ ID NO: 656447 - RNA, 19 nt, Homo sapiens
  misc_RNA (1)...(19): siRNA sense strand
guaggaagagggauaauac

SEQ ID NO: 656448 - RNA, 19 nt, Homo sapiens
  misc_RNA (1)...(19): siRNA sense strand
ccaagugucaugaaggaaa

SEQ ID NO: 656449 - RNA, 19 nt, Homo sapiens
  misc_RNA (1)...(19): siRNA sense strand
gaucugaugaaugaaauga

SEQ ID NO: 656450 - RNA, 19 nt, Homo sapiens
  misc_RNA (1)...(19): siRNA sense strand
ggacaguguguuuguagga

SEQ ID NO: 656451 - RNA, 19 nt, Homo sapiens
  misc_RNA (1)...(19): siRNA sense strand
cauuacugcugauauggaa

SEQ ID NO: 656452 - RNA, 19 nt, Homo sapiens
  misc_RNA (1)...(19): siRNA sense strand
gcuccaaagauauaaagaa

SEQ ID NO: 656453 - RNA, 19 nt, Homo sapiens
  misc_RNA (1)...(19): siRNA sense strand
ugacgacuguugguucuau

SEQ ID NO: 656454 - RNA, 19 nt, Homo sapiens
  misc_RNA (1)...(19): siRNA sense strand
uguggugucuguaagugua

SEQ ID NO: 656455 - RNA, 19 nt, Homo sapiens
  misc_RNA (1)...(19): siRNA sense strand
gaggaaaugguguuugcaa

SEQ ID NO: 656456 - RNA, 19 nt, Homo sapiens
  misc_RNA (1)...(19): siRNA sense strand
gacaguguguuuguaggaa

SEQ ID NO: 656457 - RNA, 19 nt, Homo sapiens
  misc_RNA (1)...(19): siRNA sense strand
gaacagaucugaugaauga

SEQ ID NO: 656458 - RNA, 19 nt, Homo sapiens
  misc_RNA (1)...(19): siRNA sense strand
caagagagcugaagacuau

SEQ ID NO: 656459 - RNA, 19 nt, Homo sapiens
  misc_RNA (1)...(19): siRNA sense strand
gaagggaguuugcuaaauu

SEQ ID NO: 656460 - RNA, 19 nt, Homo sapiens
  misc_RNA (1)...(19): siRNA sense strand
ccacagacauuuacauuaa

SEQ ID NO: 656461 - RNA, 19 nt, Homo sapiens
  misc_RNA (1)...(19): siRNA sense strand
gcgcauaucuggaaauuug

SEQ ID NO: 656462 - RNA, 19 nt, Homo sapiens
  misc_RNA (1)...(19): siRNA sense strand
gaagagggauaauacaaau

SEQ ID NO: 656463 - RNA, 19 nt, Homo sapiens
  misc_RNA (1)...(19): siRNA sense strand
gugaagacauggaugcuua

SEQ ID NO: 656464 - RNA, 19 nt, Homo sapiens
  misc_RNA (1)...(19): siRNA sense strand
gaaagacgauuuggagaau

SEQ ID NO: 656465 - RNA, 19 nt, Homo sapiens
  misc_RNA (1)...(19): siRNA sense strand
guaauucaguugaucauug

SEQ ID NO: 656466 - RNA, 19 nt, Homo sapiens
  misc_RNA (1)...(19): siRNA sense strand
gaaaugaggaggauuacuu

SEQ ID NO: 656467 - RNA, 19 nt, Homo sapiens
  misc_RNA (1)...(19): siRNA sense strand
caaaucauguggagaaugu

SEQ ID NO: 656468 - RNA, 19 nt, Homo sapiens
  misc_RNA (1)...(19): siRNA sense strand
gaacugcaccagcccauuu

SEQ ID NO: 656469 - RNA, 19 nt, Homo sapiens
  misc_RNA (1)...(19): siRNA sense strand
guacagauccgaaguuuca

SEQ ID NO: 656470 - RNA, 19 nt, Homo sapiens
  misc_RNA (1)...(19): siRNA sense strand
cagaugaaguuaacaguga

SEQ ID NO: 656471 - RNA, 19 nt, Homo sapiens
  misc_RNA (1)...(19): siRNA sense strand
ggaguuugcuaaauuugaa

SEQ ID NO: 656472 - RNA, 19 nt, Homo sapiens
  misc_RNA (1)...(19): siRNA sense strand
gugcagagccuucaauaaa

SEQ ID NO: 656473 - RNA, 19 nt, Homo sapiens
  misc_RNA (1)...(19): siRNA sense strand
gaacaacgaggucaugguu

SEQ ID NO: 656474 - RNA, 19 nt, Homo sapiens
  misc_RNA (1)...(19): siRNA sense strand
gaaacuugguggcauuguu

SEQ ID NO: 656475 - RNA, 19 nt, Homo sapiens
  misc_RNA (1)...(19): siRNA sense strand
gaaaugguguuugcaagug

SEQ ID NO: 656476 - RNA, 19 nt, Homo sapiens
  misc_RNA (1)...(19): siRNA sense strand
ggaagagggauaauacaaa

SEQ ID NO: 656477 - RNA, 19 nt, Homo sapiens
  misc_RNA (1)...(19): siRNA sense strand
caaauugucagaaggagua

SEQ ID NO: 656478 - RNA, 19 nt, Homo sapiens
  misc_RNA (1)...(19): siRNA sense strand
ggagaaguauuuaaugaac

SEQ ID NO: 656479 - RNA, 19 nt, Homo sapiens
  misc_RNA (1)...(19): siRNA sense strand
cccagaggcuccaaagaua

SEQ ID NO: 656480 - RNA, 19 nt, Homo sapiens
  misc_RNA (1)...(19): siRNA sense strand
gcugaagacuaucccauug

SEQ ID NO: 656481 - RNA, 19 nt, Homo sapiens
  misc_RNA (1)...(19): siRNA sense strand
agacaucauuccaauugua

SEQ ID NO: 656482 - RNA, 19 nt, Homo sapiens
  misc_RNA (1)...(19): siRNA sense strand
gauccugugucccauugua

SEQ ID NO: 656483 - RNA, 19 nt, Homo sapiens
  misc_RNA (1)...(19): siRNA sense strand
ggaaguagagguuauucuu

SEQ ID NO: 656484 - RNA, 19 nt, Homo sapiens
  misc_RNA (1)...(19): siRNA sense strand
ucagaaggaguaacaauaa

SEQ ID NO: 656485 - RNA, 19 nt, Homo sapiens
  misc_RNA (1)...(19): siRNA sense strand
gaaaaugaaugccaaaugg

SEQ ID NO: 656486 - RNA, 19 nt, Homo sapiens
  misc_RNA (1)...(19): siRNA sense strand
gcaagugucguguguguga

SEQ ID NO: 656487 - RNA, 19 nt, Homo sapiens
  misc_RNA (1)...(19): siRNA sense strand
gugauaauuucaacuguga

SEQ ID NO: 656488 - RNA, 19 nt, Homo sapiens
  misc_RNA (1)...(19): siRNA sense strand
acaauucccuuuccucaga

SEQ ID NO: 656489 - RNA, 19 nt, Homo sapiens
  misc_RNA (1)...(19): siRNA sense strand
gaaggaguaacaauaaguu

SEQ ID NO: 656490 - RNA, 19 nt, Homo sapiens
  misc_RNA (1)...(19): siRNA sense strand
gcaauguaauucaguugau

SEQ ID NO: 656491 - RNA, 19 nt, Homo sapiens
  misc_RNA (1)...(19): siRNA sense strand
gguagaaagucgggacaaa

SEQ ID NO: 656492 - RNA, 19 nt, Homo sapiens
  misc_RNA (1)...(19): siRNA sense strand
gaaggauguugacgacugu

SEQ ID NO: 656493 - RNA, 19 nt, Homo sapiens
  misc_RNA (1)...(19): siRNA sense strand
aaacagcgcauaucuggaa

SEQ ID NO: 656494 - RNA, 19 nt, Homo sapiens
  misc_RNA (1)...(19): siRNA sense strand
ccagacaucauuccaauug

SEQ ID NO: 656495 - RNA, 19 nt, Homo sapiens
  misc_RNA (1)...(19): siRNA sense strand
guaaggagaaggauguuga

SEQ ID NO: 656496 - RNA, 19 nt, Homo sapiens
  misc_RNA (1)...(19): siRNA sense strand
ugauagauccaauggcuua

SEQ ID NO: 656497 - RNA, 19 nt, Homo sapiens
  misc_RNA (1)...(19): siRNA sense strand
gaaaucugcaguaacaaug

SEQ ID NO: 656498 - RNA, 19 nt, Homo sapiens
  misc_RNA (1)...(19): siRNA sense strand
gcaugugacuguucuuugg

SEQ ID NO: 656499 - RNA, 19 nt, Homo sapiens
  misc_RNA (1)...(19): siRNA sense strand
ggagaugagguucaauuug

SEQ ID NO: 656500 - RNA, 19 nt, Homo sapiens
  misc_RNA (1)...(19): siRNA sense strand
cagaggauauuacucagau

SEQ ID NO: 656501 - RNA, 19 nt, Homo sapiens
  misc_RNA (1)...(19): siRNA sense strand
gcaaacgugugagaugugu

SEQ ID NO: 656502 - RNA, 19 nt, Homo sapiens
  misc_RNA (1)...(19): siRNA sense strand
gaaagucccaagugucaug

SEQ ID NO: 656503 - RNA, 19 nt, Homo sapiens
  misc_RNA (1)...(19): siRNA sense strand
gugcucagucuuacuaaua

SEQ ID NO: 656504 - RNA, 19 nt, Homo sapiens
  misc_RNA (1)...(19): siRNA sense strand
ggacuucagaauuggauuu

SEQ ID NO: 656505 - RNA, 19 nt, Homo sapiens
  misc_RNA (1)...(19): siRNA sense strand
gcaaaggaacagcagagaa

SEQ ID NO: 656506 - RNA, 19 nt, Homo sapiens
  misc_RNA (1)...(19): siRNA sense strand
gggcaaacgugugagaugu

SEQ ID NO: 656507 - RNA, 19 nt, Homo sapiens
  misc_RNA (1)...(19): siRNA sense strand
ugcacgaugugaugauuua

SEQ ID NO: 656508 - RNA, 19 nt, Homo sapiens
  misc_RNA (1)...(19): siRNA sense strand
uagauccaauggcuuaauu

SEQ ID NO: 656509 - RNA, 19 nt, Homo sapiens
  misc_RNA (1)...(19): siRNA sense strand
gaauuggauuuggcucauu

SEQ ID NO: 656510 - RNA, 19 nt, Homo sapiens
  misc_RNA (1)...(19): siRNA sense strand
uagaaagucgggacaaauu

SEQ ID NO: 656511 - RNA, 19 nt, Homo sapiens
  misc_RNA (1)...(19): siRNA sense strand
aaugaaaugaggaggauua

SEQ ID NO: 656512 - RNA, 19 nt, Homo sapiens
  misc_RNA (1)...(19): siRNA sense strand
aauuguagcuggugugguu

SEQ ID NO: 656513 - RNA, 19 nt, Homo sapiens
  misc_RNA (1)...(19): siRNA sense strand
agaaagucgggacaaauua

SEQ ID NO: 656514 - RNA, 19 nt, Homo sapiens
  misc_RNA (1)...(19): siRNA sense strand
gagcauaaagaauguguuc

SEQ ID NO: 656515 - RNA, 19 nt, Homo sapiens
  misc_RNA (1)...(19): siRNA sense strand
uccaauggcuuaauuugug

SEQ ID NO: 656516 - RNA, 19 nt, Homo sapiens
  misc_RNA (1)...(19): siRNA sense strand
gaaguuaacagugaagaca

SEQ ID NO: 656517 - RNA, 19 nt, Homo sapiens
  misc_RNA (1)...(19): siRNA sense strand
cagcacagaugaaguuaac

SEQ ID NO: 656518 - RNA, 19 nt, Homo sapiens
  misc_RNA (1)...(19): siRNA sense strand
gcaaaugccaaaucaugug

SEQ ID NO: 656519 - RNA, 19 nt, Homo sapiens
  misc_RNA (1)...(19): siRNA sense strand
gaagaauuucagccuguuu

SEQ ID NO: 656520 - RNA, 19 nt, Homo sapiens
  misc_RNA (1)...(19): siRNA sense strand
cagaggcuccaaagauaua

SEQ ID NO: 656521 - RNA, 19 nt, Homo sapiens
  misc_RNA (1)...(19): siRNA sense strand
cugcugauauggaagcuuu

SEQ ID NO: 656522 - RNA, 19 nt, Homo sapiens
  misc_RNA (1)...(19): siRNA sense strand
caacugugauagauccaau

SEQ ID NO: 656523 - RNA, 19 nt, Homo sapiens
  misc_RNA (1)...(19): siRNA sense strand
uagagguuauucuucagua

SEQ ID NO: 656524 - RNA, 19 nt, Homo sapiens
  misc_RNA (1)...(19): siRNA sense strand
cagcgcauaucuggaaauu

SEQ ID NO: 656525 - RNA, 19 nt, Homo sapiens
  misc_RNA (1)...(19): siRNA sense strand
caaaggaacagcagagaag

SEQ ID NO: 656526 - RNA, 19 nt, Homo sapiens
  misc_RNA (1)...(19): siRNA sense strand
gaacagcagagaagcucaa

SEQ ID NO: 656527 - RNA, 19 nt, Homo sapiens
  misc_RNA (1)...(19): siRNA sense strand
gauccaauggcuuaauuug

SEQ ID NO: 656528 - RNA, 19 nt, Homo sapiens
  misc_RNA (1)...(19): siRNA sense strand
gaaaacaguucagaaaucu

SEQ ID NO: 656529 - RNA, 19 nt, Homo sapiens
  misc_RNA (1)...(19): siRNA sense strand
caagugucaugaaggaaau

SEQ ID NO: 656530 - RNA, 19 nt, Homo sapiens
  misc_RNA (1)...(19): siRNA sense strand
gucagaaggaguaacaaua

SEQ ID NO: 656531 - RNA, 19 nt, Homo sapiens
  misc_RNA (1)...(19): siRNA sense strand
gaggauuacuucggacuuc

SEQ ID NO: 656532 - RNA, 19 nt, Homo sapiens
  misc_RNA (1)...(19): siRNA sense strand
ugaaagacgauuuggagaa

SEQ ID NO: 656533 - RNA, 19 nt, Homo sapiens
  misc_RNA (1)...(19): siRNA sense strand
gccacagacauuuacauua

SEQ ID NO: 656534 - RNA, 19 nt, Homo sapiens
  misc_RNA (1)...(19): siRNA sense strand
gcaguugguuuugcgauua

SEQ ID NO: 656535 - RNA, 19 nt, Homo sapiens
  misc_RNA (1)...(19): siRNA sense strand
aaaagacugugaugccuua

SEQ ID NO: 656536 - RNA, 19 nt, Homo sapiens
  misc_RNA (1)...(19): siRNA sense strand
ggaaaugguguuugcaagu

SEQ ID NO: 656537 - RNA, 19 nt, Homo sapiens
  misc_RNA (1)...(19): siRNA sense strand
gcgaaggcaucccugaaag

SEQ ID NO: 656538 - RNA, 19 nt, Homo sapiens
  misc_RNA (1)...(19): siRNA sense strand
gcucagucuuacuaauaaa

SEQ ID NO: 656539 - RNA, 19 nt, Homo sapiens
  misc_RNA (1)...(19): siRNA sense strand
gcaccagcccauuuagcua

SEQ ID NO: 656540 - RNA, 19 nt, Homo sapiens
  misc_RNA (1)...(19): siRNA sense strand
aagggaguuugcuaaauuu

SEQ ID NO: 656541 - RNA, 19 nt, Homo sapiens
  misc_RNA (1)...(19): siRNA sense strand
acaacgaggucaugguuca

SEQ ID NO: 656542 - RNA, 19 nt, Homo sapiens
  misc_RNA (1)...(19): siRNA sense strand
cugauuggcuggaggaaug

SEQ ID NO: 656543 - RNA, 19 nt, Homo sapiens
  misc_RNA (1)...(19): siRNA sense strand
aaguagagguuauucuuca

SEQ ID NO: 656544 - RNA, 19 nt, Homo sapiens
  misc_RNA (1)...(19): siRNA sense strand
guccagacaucauuccaau

SEQ ID NO: 656545 - RNA, 19 nt, Homo sapiens
  misc_RNA (1)...(19): siRNA sense strand
gaaagucgggacaaauuac

SEQ ID NO: 656546 - RNA, 19 nt, Homo sapiens
  misc_RNA (1)...(19): siRNA sense strand
guguacagauccgaaguuu

SEQ ID NO: 656547 - RNA, 19 nt, Homo sapiens
  misc_RNA (1)...(19): siRNA sense strand
guaggaagagggauaauac

SEQ ID NO: 656548 - RNA, 19 nt, Homo sapiens
  misc_RNA (1)...(19): siRNA sense strand
ccaagugucaugaaggaaa

SEQ ID NO: 656549 - RNA, 19 nt, Homo sapiens
  misc_RNA (1)...(19): siRNA sense strand
gaucugaugaaugaaauga

SEQ ID NO: 656550 - RNA, 19 nt, Homo sapiens
  misc_RNA (1)...(19): siRNA sense strand
ggacaguguguuuguagga

SEQ ID NO: 656551 - RNA, 19 nt, Homo sapiens
  misc_RNA (1)...(19): siRNA sense strand
cauuacugcugauauggaa

SEQ ID NO: 656552 - RNA, 19 nt, Homo sapiens
  misc_RNA (1)...(19): siRNA sense strand
gcuccaaagauauaaagaa

SEQ ID NO: 656553 - RNA, 19 nt, Homo sapiens
  misc_RNA (1)...(19): siRNA sense strand
ugacgacuguugguucuau

SEQ ID NO: 656554 - RNA, 19 nt, Homo sapiens
  misc_RNA (1)...(19): siRNA sense strand
uguggugucuguaagugua

SEQ ID NO: 656555 - RNA, 19 nt, Homo sapiens
  misc_RNA (1)...(19): siRNA sense strand
gaggaaaugguguuugcaa

SEQ ID NO: 656556 - RNA, 19 nt, Homo sapiens
  misc_RNA (1)...(19): siRNA sense strand
gacaguguguuuguaggaa

SEQ ID NO: 656557 - RNA, 19 nt, Homo sapiens
  misc_RNA (1)...(19): siRNA sense strand
gaacagaucugaugaauga

SEQ ID NO: 656558 - RNA, 19 nt, Homo sapiens
  misc_RNA (1)...(19): siRNA sense strand
caagagagcugaagacuau

SEQ ID NO: 656559 - RNA, 19 nt, Homo sapiens
  misc_RNA (1)...(19): siRNA sense strand
gaagggaguuugcuaaauu

SEQ ID NO: 656560 - RNA, 19 nt, Homo sapiens
  misc_RNA (1)...(19): siRNA sense strand
ccacagacauuuacauuaa

SEQ ID NO: 656561 - RNA, 19 nt, Homo sapiens
  misc_RNA (1)...(19): siRNA sense strand
gcgcauaucuggaaauuug

SEQ ID NO: 656562 - RNA, 19 nt, Homo sapiens
  misc_RNA (1)...(19): siRNA sense strand
gaagagggauaauacaaau

SEQ ID NO: 656563 - RNA, 19 nt, Homo sapiens
  misc_RNA (1)...(19): siRNA sense strand
gugaagacauggaugcuua

SEQ ID NO: 656564 - RNA, 19 nt, Homo sapiens
  misc_RNA (1)...(19): siRNA sense strand
gaaagacgauuuggagaau

SEQ ID NO: 656565 - RNA, 19 nt, Homo sapiens
  misc_RNA (1)...(19): siRNA sense strand
guaauucaguugaucauug

SEQ ID NO: 656566 - RNA, 19 nt, Homo sapiens
  misc_RNA (1)...(19): siRNA sense strand
gaaaugaggaggauuacuu

SEQ ID NO: 656567 - RNA, 19 nt, Homo sapiens
  misc_RNA (1)...(19): siRNA sense strand
caaaucauguggagaaugu

SEQ ID NO: 656568 - RNA, 19 nt, Homo sapiens
  misc_RNA (1)...(19): siRNA sense strand
gaacugcaccagcccauuu

SEQ ID NO: 656569 - RNA, 19 nt, Homo sapiens
  misc_RNA (1)...(19): siRNA sense strand
guacagauccgaaguuuca

SEQ ID NO: 656570 - RNA, 19 nt, Homo sapiens
  misc_RNA (1)...(19): siRNA sense strand
cagaugaaguuaacaguga

SEQ ID NO: 656571 - RNA, 19 nt, Homo sapiens
  misc_RNA (1)...(19): siRNA sense strand
ggaguuugcuaaauuugaa

SEQ ID NO: 656572 - RNA, 19 nt, Homo sapiens
  misc_RNA (1)...(19): siRNA sense strand
gugcagagccuucaauaaa

SEQ ID NO: 656573 - RNA, 19 nt, Homo sapiens
  misc_RNA (1)...(19): siRNA sense strand
gaacaacgaggucaugguu

SEQ ID NO: 656574 - RNA, 19 nt, Homo sapiens
  misc_RNA (1)...(19): siRNA sense strand
gaaacuugguggcauuguu

SEQ ID NO: 656575 - RNA, 19 nt, Homo sapiens
  misc_RNA (1)...(19): siRNA sense strand
gaaaugguguuugcaagug

SEQ ID NO: 656576 - RNA, 19 nt, Homo sapiens
  misc_RNA (1)...(19): siRNA sense strand
ggaagagggauaauacaaa

SEQ ID NO: 656577 - RNA, 19 nt, Homo sapiens
  misc_RNA (1)...(19): siRNA sense strand
caaauugucagaaggagua

SEQ ID NO: 656578 - RNA, 19 nt, Homo sapiens
  misc_RNA (1)...(19): siRNA sense strand
ggagaaguauuuaaugaac

SEQ ID NO: 656579 - RNA, 19 nt, Homo sapiens
  misc_RNA (1)...(19): siRNA sense strand
cccagaggcuccaaagaua

SEQ ID NO: 656580 - RNA, 19 nt, Homo sapiens
  misc_RNA (1)...(19): siRNA sense strand
gcugaagacuaucccauug

SEQ ID NO: 656581 - RNA, 19 nt, Homo sapiens
  misc_RNA (1)...(19): siRNA sense strand
agacaucauuccaauugua

SEQ ID NO: 656582 - RNA, 19 nt, Homo sapiens
  misc_RNA (1)...(19): siRNA sense strand
gauccugugucccauugua

SEQ ID NO: 656583 - RNA, 19 nt, Homo sapiens
  misc_RNA (1)...(19): siRNA sense strand
ggaaguagagguuauucuu

SEQ ID NO: 656584 - RNA, 19 nt, Homo sapiens
  misc_RNA (1)...(19): siRNA sense strand
ucagaaggaguaacaauaa

SEQ ID NO: 656585 - RNA, 19 nt, Homo sapiens
  misc_RNA (1)...(19): siRNA sense strand
gaaaaugaaugccaaaugg

SEQ ID NO: 656586 - RNA, 19 nt, Homo sapiens
  misc_RNA (1)...(19): siRNA sense strand
gcaagugucguguguguga

SEQ ID NO: 656587 - RNA, 19 nt, Homo sapiens
  misc_RNA (1)...(19): siRNA sense strand
gugauaauuucaacuguga

SEQ ID NO: 656588 - RNA, 19 nt, Homo sapiens
  misc_RNA (1)...(19): siRNA sense strand
acaauucccuuuccucaga

SEQ ID NO: 656589 - RNA, 19 nt, Homo sapiens
  misc_RNA (1)...(19): siRNA sense strand
gaaggaguaacaauaaguu

SEQ ID NO: 656590 - RNA, 19 nt, Homo sapiens
  misc_RNA (1)...(19): siRNA sense strand
gcaauguaauucaguugau

SEQ ID NO: 656591 - RNA, 19 nt, Homo sapiens
  misc_RNA (1)...(19): siRNA sense strand
gguagaaagucgggacaaa

SEQ ID NO: 656592 - RNA, 19 nt, Homo sapiens
  misc_RNA (1)...(19): siRNA sense strand
gaaggauguugacgacugu

SEQ ID NO: 656593 - RNA, 19 nt, Homo sapiens
  misc_RNA (1)...(19): siRNA sense strand
aaacagcgcauaucuggaa

SEQ ID NO: 656594 - RNA, 19 nt, Homo sapiens
  misc_RNA (1)...(19): siRNA sense strand
ccagacaucauuccaauug

SEQ ID NO: 656595 - RNA, 19 nt, Homo sapiens
  misc_RNA (1)...(19): siRNA sense strand
guaaggagaaggauguuga

SEQ ID NO: 656596 - RNA, 19 nt, Homo sapiens
  misc_RNA (1)...(19): siRNA sense strand
ugauagauccaauggcuua

SEQ ID NO: 656597 - RNA, 19 nt, Homo sapiens
  misc_RNA (1)...(19): siRNA sense strand
gaaaucugcaguaacaaug

SEQ ID NO: 656598 - RNA, 19 nt, Homo sapiens
  misc_RNA (1)...(19): siRNA sense strand
gcaugugacuguucuuugg

SEQ ID NO: 656599 - RNA, 19 nt, Homo sapiens
  misc_RNA (1)...(19): siRNA sense strand
ggagaugagguucaauuug

SEQ ID NO: 656600 - RNA, 19 nt, Homo sapiens
  misc_RNA (1)...(19): siRNA sense strand
cagaggauauuacucagau

SEQ ID NO: 656601 - RNA, 19 nt, Homo sapiens
  misc_RNA (1)...(19): siRNA sense strand
gcaaacgugugagaugugu

SEQ ID NO: 656602 - RNA, 19 nt, Homo sapiens
  misc_RNA (1)...(19): siRNA sense strand
gaaagucccaagugucaug

SEQ ID NO: 656603 - RNA, 19 nt, Homo sapiens
  misc_RNA (1)...(19): siRNA sense strand
gugcucagucuuacuaaua

SEQ ID NO: 656604 - RNA, 19 nt, Homo sapiens
  misc_RNA (1)...(19): siRNA sense strand
ggacuucagaauuggauuu

SEQ ID NO: 656605 - RNA, 19 nt, Homo sapiens
  misc_RNA (1)...(19): siRNA sense strand
gcaaaggaacagcagagaa

SEQ ID NO: 656606 - RNA, 19 nt, Homo sapiens
  misc_RNA (1)...(19): siRNA sense strand
gggcaaacgugugagaugu

SEQ ID NO: 656607 - RNA, 19 nt, Homo sapiens
  misc_RNA (1)...(19): siRNA sense strand
ugcacgaugugaugauuua

SEQ ID NO: 656608 - RNA, 19 nt, Homo sapiens
  misc_RNA (1)...(19): siRNA sense strand
uagauccaauggcuuaauu

SEQ ID NO: 656609 - RNA, 19 nt, Homo sapiens
  misc_RNA (1)...(19): siRNA sense strand
gaauuggauuuggcucauu

SEQ ID NO: 656610 - RNA, 19 nt, Homo sapiens
  misc_RNA (1)...(19): siRNA sense strand
uagaaagucgggacaaauu

SEQ ID NO: 656611 - RNA, 19 nt, Homo sapiens
  misc_RNA (1)...(19): siRNA sense strand
aaugaaaugaggaggauua

SEQ ID NO: 656612 - RNA, 19 nt, Homo sapiens
  misc_RNA (1)...(19): siRNA sense strand
aauuguagcuggugugguu

SEQ ID NO: 656613 - RNA, 19 nt, Homo sapiens
  misc_RNA (1)...(19): siRNA sense strand
agaaagucgggacaaauua

SEQ ID NO: 656614 - RNA, 19 nt, Homo sapiens
  misc_RNA (1)...(19): siRNA sense strand
gagcauaaagaauguguuc

SEQ ID NO: 656615 - RNA, 19 nt, Homo sapiens
  misc_RNA (1)...(19): siRNA sense strand
uccaauggcuuaauuugug

SEQ ID NO: 656616 - RNA, 19 nt, Homo sapiens
  misc_RNA (1)...(19): siRNA sense strand
gaaguuaacagugaagaca

SEQ ID NO: 656617 - RNA, 19 nt, Homo sapiens
  misc_RNA (1)...(19): siRNA sense strand
cagcacagaugaaguuaac

SEQ ID NO: 656618 - RNA, 19 nt, Homo sapiens
  misc_RNA (1)...(19): siRNA sense strand
gcaaaugccaaaucaugug

SEQ ID NO: 656619 - RNA, 19 nt, Homo sapiens
  misc_RNA (1)...(19): siRNA sense strand
gaagaauuucagccuguuu

SEQ ID NO: 656620 - RNA, 19 nt, Homo sapiens
  misc_RNA (1)...(19): siRNA sense strand
cagaggcuccaaagauaua

SEQ ID NO: 656621 - RNA, 19 nt, Homo sapiens
  misc_RNA (1)...(19): siRNA sense strand
cugcugauauggaagcuuu

SEQ ID NO: 656622 - RNA, 19 nt, Homo sapiens
  misc_RNA (1)...(19): siRNA sense strand
caacugugauagauccaau

SEQ ID NO: 656623 - RNA, 19 nt, Homo sapiens
  misc_RNA (1)...(19): siRNA sense strand
uagagguuauucuucagua

SEQ ID NO: 656624 - RNA, 19 nt, Homo sapiens
  misc_RNA (1)...(19): siRNA sense strand
cagcgcauaucuggaaauu

SEQ ID NO: 656625 - RNA, 19 nt, Homo sapiens
  misc_RNA (1)...(19): siRNA sense strand
caaaggaacagcagagaag

SEQ ID NO: 656626 - RNA, 19 nt, Homo sapiens
  misc_RNA (1)...(19): siRNA sense strand
gaacagcagagaagcucaa

SEQ ID NO: 656627 - RNA, 19 nt, Homo sapiens
  misc_RNA (1)...(19): siRNA sense strand
gauccaauggcuuaauuug

SEQ ID NO: 656628 - RNA, 19 nt, Homo sapiens
  misc_RNA (1)...(19): siRNA sense strand
gaaaacaguucagaaaucu

SEQ ID NO: 656629 - RNA, 19 nt, Homo sapiens
  misc_RNA (1)...(19): siRNA sense strand
caagugucaugaaggaaau

SEQ ID NO: 656630 - RNA, 19 nt, Homo sapiens
  misc_RNA (1)...(19): siRNA sense strand
gucagaaggaguaacaaua

SEQ ID NO: 656631 - RNA, 19 nt, Homo sapiens
  misc_RNA (1)...(19): siRNA sense strand
gaggauuacuucggacuuc

SEQ ID NO: 656632 - RNA, 19 nt, Homo sapiens
  misc_RNA (1)...(19): siRNA sense strand
ugaaagacgauuuggagaa

SEQ ID NO: 656633 - RNA, 19 nt, Homo sapiens
  misc_RNA (1)...(19): siRNA sense strand
gccacagacauuuacauua

SEQ ID NO: 656634 - RNA, 19 nt, Homo sapiens
  misc_RNA (1)...(19): siRNA sense strand
gcaguugguuuugcgauua

SEQ ID NO: 656635 - RNA, 19 nt, Homo sapiens
  misc_RNA (1)...(19): siRNA sense strand
aaaagacugugaugccuua

SEQ ID NO: 656636 - RNA, 19 nt, Homo sapiens
  misc_RNA (1)...(19): siRNA sense strand
ggaaaugguguuugcaagu

SEQ ID NO: 656637 - RNA, 19 nt, Homo sapiens
  misc_RNA (1)...(19): siRNA sense strand
gcgaaggcaucccugaaag

SEQ ID NO: 656638 - RNA, 19 nt, Homo sapiens
  misc_RNA (1)...(19): siRNA sense strand
gcucagucuuacuaauaaa

SEQ ID NO: 656639 - RNA, 19 nt, Homo sapiens
  misc_RNA (1)...(19): siRNA sense strand
gcaccagcccauuuagcua

SEQ ID NO: 656640 - RNA, 19 nt, Homo sapiens
  misc_RNA (1)...(19): siRNA sense strand
aagggaguuugcuaaauuu

SEQ ID NO: 656641 - RNA, 19 nt, Homo sapiens
  misc_RNA (1)...(19): siRNA sense strand
acaacgaggucaugguuca

SEQ ID NO: 656642 - RNA, 19 nt, Homo sapiens
  misc_RNA (1)...(19): siRNA sense strand
cugauuggcuggaggaaug

SEQ ID NO: 656643 - RNA, 19 nt, Homo sapiens
  misc_RNA (1)...(19): siRNA sense strand
aaguagagguuauucuuca

SEQ ID NO: 656644 - RNA, 19 nt, Homo sapiens
  misc_RNA (1)...(19): siRNA sense strand
guccagacaucauuccaau

SEQ ID NO: 656645 - RNA, 19 nt, Homo sapiens
  misc_RNA (1)...(19): siRNA sense strand
gaaagucgggacaaauuac

SEQ ID NO: 656646 - RNA, 19 nt, Homo sapiens
  misc_RNA (1)...(19): siRNA sense strand
guguacagauccgaaguuu

SEQ ID NO: 656647 - RNA, 19 nt, Homo sapiens
  misc_RNA (1)...(19): siRNA sense strand
guaggaagagggauaauac

SEQ ID NO: 656648 - RNA, 19 nt, Homo sapiens
  misc_RNA (1)...(19): siRNA sense strand
ccaagugucaugaaggaaa

SEQ ID NO: 656649 - RNA, 19 nt, Homo sapiens
  misc_RNA (1)...(19): siRNA sense strand
gaucugaugaaugaaauga

SEQ ID NO: 656650 - RNA, 19 nt, Homo sapiens
  misc_RNA (1)...(19): siRNA sense strand
ggacaguguguuuguagga

SEQ ID NO: 656651 - RNA, 19 nt, Homo sapiens
  misc_RNA (1)...(19): siRNA sense strand
cauuacugcugauauggaa

SEQ ID NO: 656652 - RNA, 19 nt, Homo sapiens
  misc_RNA (1)...(19): siRNA sense strand
gcuccaaagauauaaagaa

SEQ ID NO: 656653 - RNA, 19 nt, Homo sapiens
  misc_RNA (1)...(19): siRNA sense strand
ugacgacuguugguucuau

SEQ ID NO: 656654 - RNA, 19 nt, Homo sapiens
  misc_RNA (1)...(19): siRNA sense strand
uguggugucuguaagugua

SEQ ID NO: 656655 - RNA, 19 nt, Homo sapiens
  misc_RNA (1)...(19): siRNA sense strand
gaggaaaugguguuugcaa

SEQ ID NO: 656656 - RNA, 19 nt, Homo sapiens
  misc_RNA (1)...(19): siRNA sense strand
gacaguguguuuguaggaa

SEQ ID NO: 656657 - RNA, 19 nt, Homo sapiens
  misc_RNA (1)...(19): siRNA sense strand
gaacagaucugaugaauga

SEQ ID NO: 656658 - RNA, 19 nt, Homo sapiens
  misc_RNA (1)...(19): siRNA sense strand
caagagagcugaagacuau

SEQ ID NO: 656659 - RNA, 19 nt, Homo sapiens
  misc_RNA (1)...(19): siRNA sense strand
gaagggaguuugcuaaauu

SEQ ID NO: 656660 - RNA, 19 nt, Homo sapiens
  misc_RNA (1)...(19): siRNA sense strand
ccacagacauuuacauuaa

SEQ ID NO: 656661 - RNA, 19 nt, Homo sapiens
  misc_RNA (1)...(19): siRNA sense strand
gcgcauaucuggaaauuug

SEQ ID NO: 656662 - RNA, 19 nt, Homo sapiens
  misc_RNA (1)...(19): siRNA sense strand
gaagagggauaauacaaau

SEQ ID NO: 656663 - RNA, 19 nt, Homo sapiens
  misc_RNA (1)...(19): siRNA sense strand
gugaagacauggaugcuua

SEQ ID NO: 656664 - RNA, 19 nt, Homo sapiens
  misc_RNA (1)...(19): siRNA sense strand
gaaagacgauuuggagaau

SEQ ID NO: 656665 - RNA, 19 nt, Homo sapiens
  misc_RNA (1)...(19): siRNA sense strand
guaauucaguugaucauug

SEQ ID NO: 656666 - RNA, 19 nt, Homo sapiens
  misc_RNA (1)...(19): siRNA sense strand
gaaaugaggaggauuacuu

SEQ ID NO: 656667 - RNA, 19 nt, Homo sapiens
  misc_RNA (1)...(19): siRNA sense strand
caaaucauguggagaaugu

SEQ ID NO: 656668 - RNA, 19 nt, Homo sapiens
  misc_RNA (1)...(19): siRNA sense strand
gaacugcaccagcccauuu

SEQ ID NO: 656669 - RNA, 19 nt, Homo sapiens
  misc_RNA (1)...(19): siRNA sense strand
guacagauccgaaguuuca

SEQ ID NO: 656670 - RNA, 19 nt, Homo sapiens
  misc_RNA (1)...(19): siRNA sense strand
cagaugaaguuaacaguga

SEQ ID NO: 656671 - RNA, 19 nt, Homo sapiens
  misc_RNA (1)...(19): siRNA sense strand
ggaguuugcuaaauuugaa

SEQ ID NO: 656672 - RNA, 19 nt, Homo sapiens
  misc_RNA (1)...(19): siRNA sense strand
gugcagagccuucaauaaa

SEQ ID NO: 656673 - RNA, 19 nt, Homo sapiens
  misc_RNA (1)...(19): siRNA sense strand
gaacaacgaggucaugguu

SEQ ID NO: 656674 - RNA, 19 nt, Homo sapiens
  misc_RNA (1)...(19): siRNA sense strand
gaaacuugguggcauuguu

SEQ ID NO: 656675 - RNA, 19 nt, Homo sapiens
  misc_RNA (1)...(19): siRNA sense strand
gaaaugguguuugcaagug

SEQ ID NO: 656676 - RNA, 19 nt, Homo sapiens
  misc_RNA (1)...(19): siRNA sense strand
ggaagagggauaauacaaa

SEQ ID NO: 656677 - RNA, 19 nt, Homo sapiens
  misc_RNA (1)...(19): siRNA sense strand
caaauugucagaaggagua

SEQ ID NO: 656678 - RNA, 19 nt, Homo sapiens
  misc_RNA (1)...(19): siRNA sense strand
ggagaaguauuuaaugaac

SEQ ID NO: 656679 - RNA, 19 nt, Homo sapiens
  misc_RNA (1)...(19): siRNA sense strand
cccagaggcuccaaagaua

SEQ ID NO: 656680 - RNA, 19 nt, Homo sapiens
  misc_RNA (1)...(19): siRNA sense strand
gcugaagacuaucccauug

SEQ ID NO: 656681 - RNA, 19 nt, Homo sapiens
  misc_RNA (1)...(19): siRNA sense strand
agacaucauuccaauugua

SEQ ID NO: 656682 - RNA, 19 nt, Homo sapiens
  misc_RNA (1)...(19): siRNA sense strand
gauccugugucccauugua

SEQ ID NO: 656683 - RNA, 19 nt, Homo sapiens
  misc_RNA (1)...(19): siRNA sense strand
ggaaguagagguuauucuu

SEQ ID NO: 656684 - RNA, 19 nt, Homo sapiens
  misc_RNA (1)...(19): siRNA sense strand
ucagaaggaguaacaauaa

SEQ ID NO: 656685 - RNA, 19 nt, Homo sapiens
  misc_RNA (1)...(19): siRNA sense strand
gaaaaugaaugccaaaugg

SEQ ID NO: 656686 - RNA, 19 nt, Homo sapiens
  misc_RNA (1)...(19): siRNA sense strand
gcaagugucguguguguga

SEQ ID NO: 656687 - RNA, 19 nt, Homo sapiens
  misc_RNA (1)...(19): siRNA sense strand
gugauaauuucaacuguga

SEQ ID NO: 656688 - RNA, 19 nt, Homo sapiens
  misc_RNA (1)...(19): siRNA sense strand
acaauucccuuuccucaga

SEQ ID NO: 656689 - RNA, 19 nt, Homo sapiens
  misc_RNA (1)...(19): siRNA sense strand
gaaggaguaacaauaaguu

SEQ ID NO: 656690 - RNA, 19 nt, Homo sapiens
  misc_RNA (1)...(19): siRNA sense strand
gcaauguaauucaguugau

SEQ ID NO: 656691 - RNA, 19 nt, Homo sapiens
  misc_RNA (1)...(19): siRNA sense strand
gguagaaagucgggacaaa

SEQ ID NO: 656692 - RNA, 19 nt, Homo sapiens
  misc_RNA (1)...(19): siRNA sense strand
gaaggauguugacgacugu

SEQ ID NO: 656693 - RNA, 19 nt, Homo sapiens
  misc_RNA (1)...(19): siRNA sense strand
aaacagcgcauaucuggaa

SEQ ID NO: 656694 - RNA, 19 nt, Homo sapiens
  misc_RNA (1)...(19): siRNA sense strand
ccagacaucauuccaauug

SEQ ID NO: 656695 - RNA, 19 nt, Homo sapiens
  misc_RNA (1)...(19): siRNA sense strand
guaaggagaaggauguuga

SEQ ID NO: 656696 - RNA, 19 nt, Homo sapiens
  misc_RNA (1)...(19): siRNA sense strand
ugauagauccaauggcuua

SEQ ID NO: 656697 - RNA, 19 nt, Homo sapiens
  misc_RNA (1)...(19): siRNA sense strand
gaaaucugcaguaacaaug

SEQ ID NO: 656698 - RNA, 19 nt, Homo sapiens
  misc_RNA (1)...(19): siRNA sense strand
gcaugugacuguucuuugg

SEQ ID NO: 656699 - RNA, 19 nt, Homo sapiens
  misc_RNA (1)...(19): siRNA sense strand
ggagaugagguucaauuug

SEQ ID NO: 656700 - RNA, 19 nt, Homo sapiens
  misc_RNA (1)...(19): siRNA sense strand
cagaggauauuacucagau

SEQ ID NO: 656701 - RNA, 19 nt, Homo sapiens
  misc_RNA (1)...(19): siRNA sense strand
gcaaacgugugagaugugu

SEQ ID NO: 656702 - RNA, 19 nt, Homo sapiens
  misc_RNA (1)...(19): siRNA sense strand
gaaagucccaagugucaug

SEQ ID NO: 656703 - RNA, 19 nt, Homo sapiens
  misc_RNA (1)...(19): siRNA sense strand
gugcucagucuuacuaaua

SEQ ID NO: 656704 - RNA, 19 nt, Homo sapiens
  misc_RNA (1)...(19): siRNA sense strand
ggacuucagaauuggauuu

SEQ ID NO: 656705 - RNA, 19 nt, Homo sapiens
  misc_RNA (1)...(19): siRNA sense strand
gcaaaggaacagcagagaa

SEQ ID NO: 656706 - RNA, 19 nt, Homo sapiens
  misc_RNA (1)...(19): siRNA sense strand
gggcaaacgugugagaugu

SEQ ID NO: 656707 - RNA, 19 nt, Homo sapiens
  misc_RNA (1)...(19): siRNA sense strand
ugcacgaugugaugauuua

SEQ ID NO: 656708 - RNA, 19 nt, Homo sapiens
  misc_RNA (1)...(19): siRNA sense strand
uagauccaauggcuuaauu

SEQ ID NO: 656709 - RNA, 19 nt, Homo sapiens
  misc_RNA (1)...(19): siRNA sense strand
gaauuggauuuggcucauu

SEQ ID NO: 656710 - RNA, 19 nt, Homo sapiens
  misc_RNA (1)...(19): siRNA sense strand
uagaaagucgggacaaauu

SEQ ID NO: 656711 - RNA, 19 nt, Homo sapiens
  misc_RNA (1)...(19): siRNA sense strand
aaugaaaugaggaggauua

SEQ ID NO: 656712 - RNA, 19 nt, Homo sapiens
  misc_RNA (1)...(19): siRNA sense strand
aauuguagcuggugugguu

SEQ ID NO: 656713 - RNA, 19 nt, Homo sapiens
  misc_RNA (1)...(19): siRNA sense strand
agaaagucgggacaaauua

SEQ ID NO: 656714 - RNA, 19 nt, Homo sapiens
  misc_RNA (1)...(19): siRNA sense strand
gagcauaaagaauguguuc

SEQ ID NO: 656715 - RNA, 19 nt, Homo sapiens
  misc_RNA (1)...(19): siRNA sense strand
uccaauggcuuaauuugug

SEQ ID NO: 656716 - RNA, 19 nt, Homo sapiens
  misc_RNA (1)...(19): siRNA sense strand
gaaguuaacagugaagaca

SEQ ID NO: 656717 - RNA, 19 nt, Homo sapiens
  misc_RNA (1)...(19): siRNA sense strand
cagcacagaugaaguuaac

SEQ ID NO: 656718 - RNA, 19 nt, Homo sapiens
  misc_RNA (1)...(19): siRNA sense strand
gcaaaugccaaaucaugug

SEQ ID NO: 656719 - RNA, 19 nt, Homo sapiens
  misc_RNA (1)...(19): siRNA sense strand
gaagaauuucagccuguuu

SEQ ID NO: 656720 - RNA, 19 nt, Homo sapiens
  misc_RNA (1)...(19): siRNA sense strand
cagaggcuccaaagauaua

SEQ ID NO: 656721 - RNA, 19 nt, Homo sapiens
  misc_RNA (1)...(19): siRNA sense strand
cugcugauauggaagcuuu

SEQ ID NO: 656722 - RNA, 19 nt, Homo sapiens
  misc_RNA (1)...(19): siRNA sense strand
caacugugauagauccaau

SEQ ID NO: 656723 - RNA, 19 nt, Homo sapiens
  misc_RNA (1)...(19): siRNA sense strand
uagagguuauucuucagua

SEQ ID NO: 656724 - RNA, 19 nt, Homo sapiens
  misc_RNA (1)...(19): siRNA sense strand
cagcgcauaucuggaaauu

SEQ ID NO: 656725 - RNA, 19 nt, Homo sapiens
  misc_RNA (1)...(19): siRNA sense strand
caaaggaacagcagagaag

SEQ ID NO: 656726 - RNA, 19 nt, Homo sapiens
  misc_RNA (1)...(19): siRNA sense strand
gaacagcagagaagcucaa

SEQ ID NO: 656727 - RNA, 19 nt, Homo sapiens
  misc_RNA (1)...(19): siRNA sense strand
gauccaauggcuuaauuug

SEQ ID NO: 656728 - RNA, 19 nt, Homo sapiens
  misc_RNA (1)...(19): siRNA sense strand
gaaaacaguucagaaaucu

SEQ ID NO: 656729 - RNA, 19 nt, Homo sapiens
  misc_RNA (1)...(19): siRNA sense strand
caagugucaugaaggaaau

SEQ ID NO: 656730 - RNA, 19 nt, Homo sapiens
  misc_RNA (1)...(19): siRNA sense strand
gucagaaggaguaacaaua

SEQ ID NO: 656731 - RNA, 19 nt, Homo sapiens
  misc_RNA (1)...(19): siRNA sense strand
gaggauuacuucggacuuc

SEQ ID NO: 656732 - RNA, 19 nt, Homo sapiens
  misc_RNA (1)...(19): siRNA sense strand
ugaaagacgauuuggagaa

SEQ ID NO: 656733 - RNA, 19 nt, Homo sapiens
  misc_RNA (1)...(19): siRNA sense strand
gccacagacauuuacauua

SEQ ID NO: 656734 - RNA, 19 nt, Homo sapiens
  misc_RNA (1)...(19): siRNA sense strand
gcaguugguuuugcgauua

SEQ ID NO: 656735 - RNA, 19 nt, Homo sapiens
  misc_RNA (1)...(19): siRNA sense strand
aaaagacugugaugccuua

SEQ ID NO: 656736 - RNA, 19 nt, Homo sapiens
  misc_RNA (1)...(19): siRNA sense strand
ggaaaugguguuugcaagu

SEQ ID NO: 656737 - RNA, 19 nt, Homo sapiens
  misc_RNA (1)...(19): siRNA sense strand
gcgaaggcaucccugaaag

SEQ ID NO: 656738 - RNA, 19 nt, Homo sapiens
  misc_RNA (1)...(19): siRNA sense strand
gcucagucuuacuaauaaa

SEQ ID NO: 656739 - RNA, 19 nt, Homo sapiens
  misc_RNA (1)...(19): siRNA sense strand
gcaccagcccauuuagcua

SEQ ID NO: 656740 - RNA, 19 nt, Homo sapiens
  misc_RNA (1)...(19): siRNA sense strand
aagggaguuugcuaaauuu

SEQ ID NO: 656741 - RNA, 19 nt, Homo sapiens
  misc_RNA (1)...(19): siRNA sense strand
acaacgaggucaugguuca

SEQ ID NO: 656742 - RNA, 19 nt, Homo sapiens
  misc_RNA (1)...(19): siRNA sense strand
cugauuggcuggaggaaug

SEQ ID NO: 656743 - RNA, 19 nt, Homo sapiens
  misc_RNA (1)...(19): siRNA sense strand
aaguagagguuauucuuca

SEQ ID NO: 656744 - RNA, 19 nt, Homo sapiens
  misc_RNA (1)...(19): siRNA sense strand
guccagacaucauuccaau

SEQ ID NO: 656745 - RNA, 19 nt, Homo sapiens
  misc_RNA (1)...(19): siRNA sense strand
gaaagucgggacaaauuac

SEQ ID NO: 656746 - RNA, 19 nt, Homo sapiens
  misc_RNA (1)...(19): siRNA sense strand
guguacagauccgaaguuu

SEQ ID NO: 656747 - RNA, 19 nt, Homo sapiens
  misc_RNA (1)...(19): siRNA sense strand
guaggaagagggauaauac

SEQ ID NO: 656748 - RNA, 19 nt, Homo sapiens
  misc_RNA (1)...(19): siRNA sense strand
ccaagugucaugaaggaaa

SEQ ID NO: 656749 - RNA, 19 nt, Homo sapiens
  misc_RNA (1)...(19): siRNA sense strand
gaucugaugaaugaaauga

SEQ ID NO: 656750 - RNA, 19 nt, Homo sapiens
  misc_RNA (1)...(19): siRNA sense strand
ggacaguguguuuguagga

SEQ ID NO: 656751 - RNA, 19 nt, Homo sapiens
  misc_RNA (1)...(19): siRNA sense strand
cauuacugcugauauggaa

SEQ ID NO: 656752 - RNA, 19 nt, Homo sapiens
  misc_RNA (1)...(19): siRNA sense strand
gcuccaaagauauaaagaa

SEQ ID NO: 656753 - RNA, 19 nt, Homo sapiens
  misc_RNA (1)...(19): siRNA sense strand
ugacgacuguugguucuau

SEQ ID NO: 656754 - RNA, 19 nt, Homo sapiens
  misc_RNA (1)...(19): siRNA sense strand
uguggugucuguaagugua

SEQ ID NO: 656755 - RNA, 19 nt, Homo sapiens
  misc_RNA (1)...(19): siRNA sense strand
gaggaaaugguguuugcaa

SEQ ID NO: 656756 - RNA, 19 nt, Homo sapiens
  misc_RNA (1)...(19): siRNA sense strand
gacaguguguuuguaggaa

SEQ ID NO: 656757 - RNA, 19 nt, Homo sapiens
  misc_RNA (1)...(19): siRNA sense strand
gaacagaucugaugaauga

SEQ ID NO: 656758 - RNA, 19 nt, Homo sapiens
  misc_RNA (1)...(19): siRNA sense strand
caagagagcugaagacuau

SEQ ID NO: 656759 - RNA, 19 nt, Homo sapiens
  misc_RNA (1)...(19): siRNA sense strand
gaagggaguuugcuaaauu

SEQ ID NO: 656760 - RNA, 19 nt, Homo sapiens
  misc_RNA (1)...(19): siRNA sense strand
ccacagacauuuacauuaa

SEQ ID NO: 656761 - RNA, 19 nt, Homo sapiens
  misc_RNA (1)...(19): siRNA sense strand
gcgcauaucuggaaauuug

SEQ ID NO: 656762 - RNA, 19 nt, Homo sapiens
  misc_RNA (1)...(19): siRNA sense strand
gaagagggauaauacaaau

SEQ ID NO: 656763 - RNA, 19 nt, Homo sapiens
  misc_RNA (1)...(19): siRNA sense strand
gugaagacauggaugcuua

SEQ ID NO: 656764 - RNA, 19 nt, Homo sapiens
  misc_RNA (1)...(19): siRNA sense strand
gaaagacgauuuggagaau

SEQ ID NO: 656765 - RNA, 19 nt, Homo sapiens
  misc_RNA (1)...(19): siRNA sense strand
guaauucaguugaucauug

SEQ ID NO: 656766 - RNA, 19 nt, Homo sapiens
  misc_RNA (1)...(19): siRNA sense strand
gaaaugaggaggauuacuu

SEQ ID NO: 656767 - RNA, 19 nt, Homo sapiens
  misc_RNA (1)...(19): siRNA sense strand
caaaucauguggagaaugu

SEQ ID NO: 656768 - RNA, 19 nt, Homo sapiens
  misc_RNA (1)...(19): siRNA sense strand
gaacugcaccagcccauuu

SEQ ID NO: 656769 - RNA, 19 nt, Homo sapiens
  misc_RNA (1)...(19): siRNA sense strand
guacagauccgaaguuuca

SEQ ID NO: 656770 - RNA, 19 nt, Homo sapiens
  misc_RNA (1)...(19): siRNA sense strand
cagaugaaguuaacaguga

SEQ ID NO: 656771 - RNA, 19 nt, Homo sapiens
  misc_RNA (1)...(19): siRNA sense strand
ggaguuugcuaaauuugaa

SEQ ID NO: 656772 - RNA, 19 nt, Homo sapiens
  misc_RNA (1)...(19): siRNA sense strand
gugcagagccuucaauaaa

SEQ ID NO: 656773 - RNA, 19 nt, Homo sapiens
  misc_RNA (1)...(19): siRNA sense strand
gaacaacgaggucaugguu

SEQ ID NO: 656774 - RNA, 19 nt, Homo sapiens
  misc_RNA (1)...(19): siRNA sense strand
gaaacuugguggcauuguu

SEQ ID NO: 656775 - RNA, 19 nt, Homo sapiens
  misc_RNA (1)...(19): siRNA sense strand
gaaaugguguuugcaagug

SEQ ID NO: 656776 - RNA, 19 nt, Homo sapiens
  misc_RNA (1)...(19): siRNA sense strand
ggaagagggauaauacaaa

SEQ ID NO: 656777 - RNA, 19 nt, Homo sapiens
  misc_RNA (1)...(19): siRNA sense strand
caaauugucagaaggagua

SEQ ID NO: 656778 - RNA, 19 nt, Homo sapiens
  misc_RNA (1)...(19): siRNA sense strand
ggagaaguauuuaaugaac

SEQ ID NO: 656779 - RNA, 19 nt, Homo sapiens
  misc_RNA (1)...(19): siRNA sense strand
cccagaggcuccaaagaua

SEQ ID NO: 656780 - RNA, 19 nt, Homo sapiens
  misc_RNA (1)...(19): siRNA sense strand
gcugaagacuaucccauug

SEQ ID NO: 656781 - RNA, 19 nt, Homo sapiens
  misc_RNA (1)...(19): siRNA sense strand
agacaucauuccaauugua

SEQ ID NO: 656782 - RNA, 19 nt, Homo sapiens
  misc_RNA (1)...(19): siRNA sense strand
gauccugugucccauugua

SEQ ID NO: 656783 - RNA, 19 nt, Homo sapiens
  misc_RNA (1)...(19): siRNA sense strand
ggaaguagagguuauucuu

SEQ ID NO: 656784 - RNA, 19 nt, Homo sapiens
  misc_RNA (1)...(19): siRNA sense strand
ucagaaggaguaacaauaa

SEQ ID NO: 656785 - RNA, 19 nt, Homo sapiens
  misc_RNA (1)...(19): siRNA sense strand
gaaaaugaaugccaaaugg

SEQ ID NO: 656786 - RNA, 19 nt, Homo sapiens
  misc_RNA (1)...(19): siRNA sense strand
gcaagugucguguguguga

SEQ ID NO: 656787 - RNA, 19 nt, Homo sapiens
  misc_RNA (1)...(19): siRNA sense strand
gugauaauuucaacuguga

SEQ ID NO: 656788 - RNA, 19 nt, Homo sapiens
  misc_RNA (1)...(19): siRNA sense strand
acaauucccuuuccucaga

SEQ ID NO: 656789 - RNA, 19 nt, Homo sapiens
  misc_RNA (1)...(19): siRNA sense strand
gaaggaguaacaauaaguu

SEQ ID NO: 656790 - RNA, 19 nt, Homo sapiens
  misc_RNA (1)...(19): siRNA sense strand
gcaauguaauucaguugau

SEQ ID NO: 656791 - RNA, 19 nt, Homo sapiens
  misc_RNA (1)...(19): siRNA sense strand
gguagaaagucgggacaaa

SEQ ID NO: 656792 - RNA, 19 nt, Homo sapiens
  misc_RNA (1)...(19): siRNA sense strand
gaaggauguugacgacugu

SEQ ID NO: 656793 - RNA, 19 nt, Homo sapiens
  misc_RNA (1)...(19): siRNA sense strand
aaacagcgcauaucuggaa

SEQ ID NO: 656794 - RNA, 19 nt, Homo sapiens
  misc_RNA (1)...(19): siRNA sense strand
ccagacaucauuccaauug

SEQ ID NO: 656795 - RNA, 19 nt, Homo sapiens
  misc_RNA (1)...(19): siRNA sense strand
guaaggagaaggauguuga

SEQ ID NO: 656796 - RNA, 19 nt, Homo sapiens
  misc_RNA (1)...(19): siRNA sense strand
ugauagauccaauggcuua

SEQ ID NO: 656797 - RNA, 19 nt, Homo sapiens
  misc_RNA (1)...(19): siRNA sense strand
gaaaucugcaguaacaaug

SEQ ID NO: 656798 - RNA, 19 nt, Homo sapiens
  misc_RNA (1)...(19): siRNA sense strand
gcaugugacuguucuuugg

SEQ ID NO: 656799 - RNA, 19 nt, Homo sapiens
  misc_RNA (1)...(19): siRNA sense strand
ggagaugagguucaauuug

SEQ ID NO: 656800 - RNA, 19 nt, Homo sapiens
  misc_RNA (1)...(19): siRNA sense strand
cagaggauauuacucagau

SEQ ID NO: 656801 - RNA, 19 nt, Homo sapiens
  misc_RNA (1)...(19): siRNA sense strand
gcaaacgugugagaugugu

SEQ ID NO: 656802 - RNA, 19 nt, Homo sapiens
  misc_RNA (1)...(19): siRNA sense strand
gaaagucccaagugucaug

SEQ ID NO: 656803 - RNA, 19 nt, Homo sapiens
  misc_RNA (1)...(19): siRNA sense strand
gugcucagucuuacuaaua

SEQ ID NO: 656804 - RNA, 19 nt, Homo sapiens
  misc_RNA (1)...(19): siRNA sense strand
ggacuucagaauuggauuu

SEQ ID NO: 656805 - RNA, 19 nt, Homo sapiens
  misc_RNA (1)...(19): siRNA sense strand
gcaaaggaacagcagagaa

SEQ ID NO: 656806 - RNA, 19 nt, Homo sapiens
  misc_RNA (1)...(19): siRNA sense strand
gggcaaacgugugagaugu

SEQ ID NO: 656807 - RNA, 19 nt, Homo sapiens
  misc_RNA (1)...(19): siRNA sense strand
ugcacgaugugaugauuua

SEQ ID NO: 656808 - RNA, 19 nt, Homo sapiens
  misc_RNA (1)...(19): siRNA sense strand
uagauccaauggcuuaauu

SEQ ID NO: 656809 - RNA, 19 nt, Homo sapiens
  misc_RNA (1)...(19): siRNA sense strand
gaauuggauuuggcucauu

SEQ ID NO: 656810 - RNA, 19 nt, Homo sapiens
  misc_RNA (1)...(19): siRNA sense strand
uagaaagucgggacaaauu

SEQ ID NO: 656811 - RNA, 19 nt, Homo sapiens
  misc_RNA (1)...(19): siRNA sense strand
aaugaaaugaggaggauua

SEQ ID NO: 656812 - RNA, 19 nt, Homo sapiens
  misc_RNA (1)...(19): siRNA sense strand
aauuguagcuggugugguu

SEQ ID NO: 656813 - RNA, 19 nt, Homo sapiens
  misc_RNA (1)...(19): siRNA sense strand
agaaagucgggacaaauua

SEQ ID NO: 656814 - RNA, 19 nt, Homo sapiens
  misc_RNA (1)...(19): siRNA sense strand
gagcauaaagaauguguuc

SEQ ID NO: 656815 - RNA, 19 nt, Homo sapiens
  misc_RNA (1)...(19): siRNA sense strand
uccaauggcuuaauuugug

SEQ ID NO: 656816 - RNA, 19 nt, Homo sapiens
  misc_RNA (1)...(19): siRNA sense strand
gaaguuaacagugaagaca

SEQ ID NO: 656817 - RNA, 19 nt, Homo sapiens
  misc_RNA (1)...(19): siRNA sense strand
cagcacagaugaaguuaac

SEQ ID NO: 656818 - RNA, 19 nt, Homo sapiens
  misc_RNA (1)...(19): siRNA sense strand
gcaaaugccaaaucaugug

SEQ ID NO: 656819 - RNA, 19 nt, Homo sapiens
  misc_RNA (1)...(19): siRNA sense strand
gaagaauuucagccuguuu

SEQ ID NO: 656820 - RNA, 19 nt, Homo sapiens
  misc_RNA (1)...(19): siRNA sense strand
cagaggcuccaaagauaua

SEQ ID NO: 656821 - RNA, 19 nt, Homo sapiens
  misc_RNA (1)...(19): siRNA sense strand
cugcugauauggaagcuuu

SEQ ID NO: 656822 - RNA, 19 nt, Homo sapiens
  misc_RNA (1)...(19): siRNA sense strand
caacugugauagauccaau

SEQ ID NO: 656823 - RNA, 19 nt, Homo sapiens
  misc_RNA (1)...(19): siRNA sense strand
uagagguuauucuucagua

SEQ ID NO: 656824 - RNA, 19 nt, Homo sapiens
  misc_RNA (1)...(19): siRNA sense strand
cagcgcauaucuggaaauu

SEQ ID NO: 656825 - RNA, 19 nt, Homo sapiens
  misc_RNA (1)...(19): siRNA sense strand
caaaggaacagcagagaag

SEQ ID NO: 656826 - RNA, 19 nt, Homo sapiens
  misc_RNA (1)...(19): siRNA sense strand
gaacagcagagaagcucaa

SEQ ID NO: 656827 - RNA, 19 nt, Homo sapiens
  misc_RNA (1)...(19): siRNA sense strand
gauccaauggcuuaauuug

SEQ ID NO: 656828 - RNA, 19 nt, Homo sapiens
  misc_RNA (1)...(19): siRNA sense strand
gaaaacaguucagaaaucu

SEQ ID NO: 656829 - RNA, 19 nt, Homo sapiens
  misc_RNA (1)...(19): siRNA sense strand
caagugucaugaaggaaau

SEQ ID NO: 656830 - RNA, 19 nt, Homo sapiens
  misc_RNA (1)...(19): siRNA sense strand
gucagaaggaguaacaaua

SEQ ID NO: 656831 - RNA, 19 nt, Homo sapiens
  misc_RNA (1)...(19): siRNA sense strand
gaggauuacuucggacuuc

SEQ ID NO: 656832 - RNA, 19 nt, Homo sapiens
  misc_RNA (1)...(19): siRNA sense strand
ugaaagacgauuuggagaa

SEQ ID NO: 656833 - RNA, 19 nt, Homo sapiens
  misc_RNA (1)...(19): siRNA sense strand
gccacagacauuuacauua

SEQ ID NO: 656834 - RNA, 19 nt, Homo sapiens
  misc_RNA (1)...(19): siRNA sense strand
gcaguugguuuugcgauua

SEQ ID NO: 656835 - RNA, 19 nt, Homo sapiens
  misc_RNA (1)...(19): siRNA sense strand
aaaagacugugaugccuua

SEQ ID NO: 656836 - RNA, 19 nt, Homo sapiens
  misc_RNA (1)...(19): siRNA sense strand
ggaaaugguguuugcaagu

SEQ ID NO: 656837 - RNA, 19 nt, Homo sapiens
  misc_RNA (1)...(19): siRNA sense strand
gcgaaggcaucccugaaag

SEQ ID NO: 656838 - RNA, 19 nt, Homo sapiens
  misc_RNA (1)...(19): siRNA sense strand
gcucagucuuacuaauaaa

SEQ ID NO: 656839 - RNA, 19 nt, Homo sapiens
  misc_RNA (1)...(19): siRNA sense strand
gcaccagcccauuuagcua

SEQ ID NO: 656840 - RNA, 19 nt, Homo sapiens
  misc_RNA (1)...(19): siRNA sense strand
aagggaguuugcuaaauuu

SEQ ID NO: 656841 - RNA, 19 nt, Homo sapiens
  misc_RNA (1)...(19): siRNA sense strand
acaacgaggucaugguuca

SEQ ID NO: 656842 - RNA, 19 nt, Homo sapiens
  misc_RNA (1)...(19): siRNA sense strand
cugauuggcuggaggaaug

SEQ ID NO: 656843 - RNA, 19 nt, Homo sapiens
  misc_RNA (1)...(19): siRNA sense strand
aaguagagguuauucuuca

SEQ ID NO: 656844 - RNA, 19 nt, Homo sapiens
  misc_RNA (1)...(19): siRNA sense strand
guccagacaucauuccaau

SEQ ID NO: 656845 - RNA, 19 nt, Homo sapiens
  misc_RNA (1)...(19): siRNA sense strand
gaaagucgggacaaauuac

SEQ ID NO: 656846 - RNA, 19 nt, Homo sapiens
  misc_RNA (1)...(19): siRNA sense strand
guguacagauccgaaguuu

SEQ ID NO: 656847 - RNA, 19 nt, Homo sapiens
  misc_RNA (1)...(19): siRNA sense strand
guaggaagagggauaauac

SEQ ID NO: 656848 - RNA, 19 nt, Homo sapiens
  misc_RNA (1)...(19): siRNA sense strand
ccaagugucaugaaggaaa

SEQ ID NO: 656849 - RNA, 19 nt, Homo sapiens
  misc_RNA (1)...(19): siRNA sense strand
gaucugaugaaugaaauga

SEQ ID NO: 656850 - RNA, 19 nt, Homo sapiens
  misc_RNA (1)...(19): siRNA sense strand
ggacaguguguuuguagga

SEQ ID NO: 656851 - RNA, 19 nt, Homo sapiens
  misc_RNA (1)...(19): siRNA sense strand
cauuacugcugauauggaa

SEQ ID NO: 656852 - RNA, 19 nt, Homo sapiens
  misc_RNA (1)...(19): siRNA sense strand
gcuccaaagauauaaagaa

SEQ ID NO: 656853 - RNA, 19 nt, Homo sapiens
  misc_RNA (1)...(19): siRNA sense strand
ugacgacuguugguucuau

SEQ ID NO: 656854 - RNA, 19 nt, Homo sapiens
  misc_RNA (1)...(19): siRNA sense strand
uguggugucuguaagugua

SEQ ID NO: 656855 - RNA, 19 nt, Homo sapiens
  misc_RNA (1)...(19): siRNA sense strand
gaggaaaugguguuugcaa

SEQ ID NO: 656856 - RNA, 19 nt, Homo sapiens
  misc_RNA (1)...(19): siRNA sense strand
gacaguguguuuguaggaa

SEQ ID NO: 656857 - RNA, 19 nt, Homo sapiens
  misc_RNA (1)...(19): siRNA sense strand
gaacagaucugaugaauga

SEQ ID NO: 656858 - RNA, 19 nt, Homo sapiens
  misc_RNA (1)...(19): siRNA sense strand
caagagagcugaagacuau

SEQ ID NO: 656859 - RNA, 19 nt, Homo sapiens
  misc_RNA (1)...(19): siRNA sense strand
gaagggaguuugcuaaauu

SEQ ID NO: 656860 - RNA, 19 nt, Homo sapiens
  misc_RNA (1)...(19): siRNA sense strand
ccacagacauuuacauuaa

SEQ ID NO: 656861 - RNA, 19 nt, Homo sapiens
  misc_RNA (1)...(19): siRNA sense strand
gcgcauaucuggaaauuug

SEQ ID NO: 656862 - RNA, 19 nt, Homo sapiens
  misc_RNA (1)...(19): siRNA sense strand
gaagagggauaauacaaau

SEQ ID NO: 656863 - RNA, 19 nt, Homo sapiens
  misc_RNA (1)...(19): siRNA sense strand
gugaagacauggaugcuua

SEQ ID NO: 656864 - RNA, 19 nt, Homo sapiens
  misc_RNA (1)...(19): siRNA sense strand
gaaagacgauuuggagaau

SEQ ID NO: 656865 - RNA, 19 nt, Homo sapiens
  misc_RNA (1)...(19): siRNA sense strand
guaauucaguugaucauug

SEQ ID NO: 656866 - RNA, 19 nt, Homo sapiens
  misc_RNA (1)...(19): siRNA sense strand
gaaaugaggaggauuacuu

SEQ ID NO: 656867 - RNA, 19 nt, Homo sapiens
  misc_RNA (1)...(19): siRNA sense strand
caaaucauguggagaaugu

SEQ ID NO: 656868 - RNA, 19 nt, Homo sapiens
  misc_RNA (1)...(19): siRNA sense strand
gaacugcaccagcccauuu

SEQ ID NO: 656869 - RNA, 19 nt, Homo sapiens
  misc_RNA (1)...(19): siRNA sense strand
guacagauccgaaguuuca

SEQ ID NO: 656870 - RNA, 19 nt, Homo sapiens
  misc_RNA (1)...(19): siRNA sense strand
cagaugaaguuaacaguga

SEQ ID NO: 656871 - RNA, 19 nt, Homo sapiens
  misc_RNA (1)...(19): siRNA sense strand
ggaguuugcuaaauuugaa

SEQ ID NO: 656872 - RNA, 19 nt, Homo sapiens
  misc_RNA (1)...(19): siRNA sense strand
gugcagagccuucaauaaa

SEQ ID NO: 656873 - RNA, 19 nt, Homo sapiens
  misc_RNA (1)...(19): siRNA sense strand
gaacaacgaggucaugguu

SEQ ID NO: 656874 - RNA, 19 nt, Homo sapiens
  misc_RNA (1)...(19): siRNA sense strand
gaaacuugguggcauuguu

SEQ ID NO: 656875 - RNA, 19 nt, Homo sapiens
  misc_RNA (1)...(19): siRNA sense strand
gaaaugguguuugcaagug

SEQ ID NO: 656876 - RNA, 19 nt, Homo sapiens
  misc_RNA (1)...(19): siRNA sense strand
ggaagagggauaauacaaa

SEQ ID NO: 656877 - RNA, 19 nt, Homo sapiens
  misc_RNA (1)...(19): siRNA sense strand
caaauugucagaaggagua

SEQ ID NO: 656878 - RNA, 19 nt, Homo sapiens
  misc_RNA (1)...(19): siRNA sense strand
ggagaaguauuuaaugaac

SEQ ID NO: 656879 - RNA, 19 nt, Homo sapiens
  misc_RNA (1)...(19): siRNA sense strand
cccagaggcuccaaagaua

SEQ ID NO: 656880 - RNA, 19 nt, Homo sapiens
  misc_RNA (1)...(19): siRNA sense strand
gcugaagacuaucccauug

SEQ ID NO: 656881 - RNA, 19 nt, Homo sapiens
  misc_RNA (1)...(19): siRNA sense strand
agacaucauuccaauugua

SEQ ID NO: 656882 - RNA, 19 nt, Homo sapiens
  misc_RNA (1)...(19): siRNA sense strand
gauccugugucccauugua

SEQ ID NO: 656883 - RNA, 19 nt, Homo sapiens
  misc_RNA (1)...(19): siRNA sense strand
ggaaguagagguuauucuu

SEQ ID NO: 656884 - RNA, 19 nt, Homo sapiens
  misc_RNA (1)...(19): siRNA sense strand
ucagaaggaguaacaauaa

SEQ ID NO: 656885 - RNA, 19 nt, Homo sapiens
  misc_RNA (1)...(19): siRNA sense strand
gaaaaugaaugccaaaugg

SEQ ID NO: 656886 - RNA, 19 nt, Homo sapiens
  misc_RNA (1)...(19): siRNA sense strand
gcaagugucguguguguga

SEQ ID NO: 656887 - RNA, 19 nt, Homo sapiens
  misc_RNA (1)...(19): siRNA sense strand
gugauaauuucaacuguga

SEQ ID NO: 656888 - RNA, 19 nt, Homo sapiens
  misc_RNA (1)...(19): siRNA sense strand
acaauucccuuuccucaga

SEQ ID NO: 656889 - RNA, 19 nt, Homo sapiens
  misc_RNA (1)...(19): siRNA sense strand
gaaggaguaacaauaaguu

SEQ ID NO: 656890 - RNA, 19 nt, Homo sapiens
  misc_RNA (1)...(19): siRNA sense strand
gcaauguaauucaguugau

SEQ ID NO: 656891 - RNA, 19 nt, Homo sapiens
  misc_RNA (1)...(19): siRNA sense strand
gguagaaagucgggacaaa

SEQ ID NO: 656892 - RNA, 19 nt, Homo sapiens
  misc_RNA (1)...(19): siRNA sense strand
gaaggauguugacgacugu

SEQ ID NO: 656893 - RNA, 19 nt, Homo sapiens
  misc_RNA (1)...(19): siRNA sense strand
aaacagcgcauaucuggaa

SEQ ID NO: 656894 - RNA, 19 nt, Homo sapiens
  misc_RNA (1)...(19): siRNA sense strand
ccagacaucauuccaauug

SEQ ID NO: 656895 - RNA, 19 nt, Homo sapiens
  misc_RNA (1)...(19): siRNA sense strand
guaaggagaaggauguuga

SEQ ID NO: 656896 - RNA, 19 nt, Homo sapiens
  misc_RNA (1)...(19): siRNA sense strand
ugauagauccaauggcuua

SEQ ID NO: 656897 - RNA, 19 nt, Homo sapiens
  misc_RNA (1)...(19): siRNA sense strand
gaaaucugcaguaacaaug

SEQ ID NO: 656898 - RNA, 19 nt, Homo sapiens
  misc_RNA (1)...(19): siRNA sense strand
gcaugugacuguucuuugg

SEQ ID NO: 656899 - RNA, 19 nt, Homo sapiens
  misc_RNA (1)...(19): siRNA sense strand
ggagaugagguucaauuug

SEQ ID NO: 656900 - RNA, 19 nt, Homo sapiens
  misc_RNA (1)...(19): siRNA sense strand
cagaggauauuacucagau

SEQ ID NO: 656901 - RNA, 19 nt, Homo sapiens
  misc_RNA (1)...(19): siRNA sense strand
gcaaacgugugagaugugu

SEQ ID NO: 656902 - RNA, 19 nt, Homo sapiens
  misc_RNA (1)...(19): siRNA sense strand
gaaagucccaagugucaug

SEQ ID NO: 656903 - RNA, 19 nt, Homo sapiens
  misc_RNA (1)...(19): siRNA sense strand
gugcucagucuuacuaaua

SEQ ID NO: 656904 - RNA, 19 nt, Homo sapiens
  misc_RNA (1)...(19): siRNA sense strand
ggacuucagaauuggauuu

SEQ ID NO: 656905 - RNA, 19 nt, Homo sapiens
  misc_RNA (1)...(19): siRNA sense strand
gcaaaggaacagcagagaa

SEQ ID NO: 656906 - RNA, 19 nt, Homo sapiens
  misc_RNA (1)...(19): siRNA sense strand
gggcaaacgugugagaugu

SEQ ID NO: 656907 - RNA, 19 nt, Homo sapiens
  misc_RNA (1)...(19): siRNA sense strand
ugcacgaugugaugauuua

SEQ ID NO: 656908 - RNA, 19 nt, Homo sapiens
  misc_RNA (1)...(19): siRNA sense strand
uagauccaauggcuuaauu

SEQ ID NO: 656909 - RNA, 19 nt, Homo sapiens
  misc_RNA (1)...(19): siRNA sense strand
gaauuggauuuggcucauu

SEQ ID NO: 656910 - RNA, 19 nt, Homo sapiens
  misc_RNA (1)...(19): siRNA sense strand
uagaaagucgggacaaauu

SEQ ID NO: 656911 - RNA, 19 nt, Homo sapiens
  misc_RNA (1)...(19): siRNA sense strand
aaugaaaugaggaggauua

SEQ ID NO: 656912 - RNA, 19 nt, Homo sapiens
  misc_RNA (1)...(19): siRNA sense strand
aauuguagcuggugugguu

SEQ ID NO: 656913 - RNA, 19 nt, Homo sapiens
  misc_RNA (1)...(19): siRNA sense strand
agaaagucgggacaaauua

SEQ ID NO: 656914 - RNA, 19 nt, Homo sapiens
  misc_RNA (1)...(19): siRNA sense strand
gagcauaaagaauguguuc

SEQ ID NO: 656915 - RNA, 19 nt, Homo sapiens
  misc_RNA (1)...(19): siRNA sense strand
uccaauggcuuaauuugug

SEQ ID NO: 656916 - RNA, 19 nt, Homo sapiens
  misc_RNA (1)...(19): siRNA sense strand
gaaguuaacagugaagaca

SEQ ID NO: 656917 - RNA, 19 nt, Homo sapiens
  misc_RNA (1)...(19): siRNA sense strand
cagcacagaugaaguuaac

SEQ ID NO: 656918 - RNA, 19 nt, Homo sapiens
  misc_RNA (1)...(19): siRNA sense strand
gcaaaugccaaaucaugug

SEQ ID NO: 656919 - RNA, 19 nt, Homo sapiens
  misc_RNA (1)...(19): siRNA sense strand
gaagaauuucagccuguuu

SEQ ID NO: 656920 - RNA, 19 nt, Homo sapiens
  misc_RNA (1)...(19): siRNA sense strand
cagaggcuccaaagauaua

SEQ ID NO: 656921 - RNA, 19 nt, Homo sapiens
  misc_RNA (1)...(19): siRNA sense strand
cugcugauauggaagcuuu

SEQ ID NO: 656922 - RNA, 19 nt, Homo sapiens
  misc_RNA (1)...(19): siRNA sense strand
caacugugauagauccaau

SEQ ID NO: 656923 - RNA, 19 nt, Homo sapiens
  misc_RNA (1)...(19): siRNA sense strand
uagagguuauucuucagua

SEQ ID NO: 656924 - RNA, 19 nt, Homo sapiens
  misc_RNA (1)...(19): siRNA sense strand
cagcgcauaucuggaaauu

SEQ ID NO: 656925 - RNA, 19 nt, Homo sapiens
  misc_RNA (1)...(19): siRNA sense strand
caaaggaacagcagagaag

SEQ ID NO: 656926 - RNA, 19 nt, Homo sapiens
  misc_RNA (1)...(19): siRNA sense strand
gaacagcagagaagcucaa

SEQ ID NO: 656927 - RNA, 19 nt, Homo sapiens
  misc_RNA (1)...(19): siRNA sense strand
gauccaauggcuuaauuug

SEQ ID NO: 656928 - RNA, 19 nt, Homo sapiens
  misc_RNA (1)...(19): siRNA sense strand
gaaaacaguucagaaaucu

SEQ ID NO: 656929 - RNA, 19 nt, Homo sapiens
  misc_RNA (1)...(19): siRNA sense strand
caagugucaugaaggaaau

SEQ ID NO: 656930 - RNA, 19 nt, Homo sapiens
  misc_RNA (1)...(19): siRNA sense strand
gucagaaggaguaacaaua

SEQ ID NO: 656931 - RNA, 19 nt, Homo sapiens
  misc_RNA (1)...(19): siRNA sense strand
gaggauuacuucggacuuc

SEQ ID NO: 656932 - RNA, 19 nt, Homo sapiens
  misc_RNA (1)...(19): siRNA sense strand
ugaaagacgauuuggagaa

SEQ ID NO: 656933 - RNA, 19 nt, Homo sapiens
  misc_RNA (1)...(19): siRNA sense strand
gccacagacauuuacauua

SEQ ID NO: 656934 - RNA, 19 nt, Homo sapiens
  misc_RNA (1)...(19): siRNA sense strand
gcaguugguuuugcgauua

SEQ ID NO: 656935 - RNA, 19 nt, Homo sapiens
  misc_RNA (1)...(19): siRNA sense strand
aaaagacugugaugccuua

SEQ ID NO: 656936 - RNA, 19 nt, Homo sapiens
  misc_RNA (1)...(19): siRNA sense strand
ggaaaugguguuugcaagu

SEQ ID NO: 656937 - RNA, 19 nt, Homo sapiens
  misc_RNA (1)...(19): siRNA sense strand
gcgaaggcaucccugaaag

SEQ ID NO: 656938 - RNA, 19 nt, Homo sapiens
  misc_RNA (1)...(19): siRNA sense strand
gcucagucuuacuaauaaa

SEQ ID NO: 656939 - RNA, 19 nt, Homo sapiens
  misc_RNA (1)...(19): siRNA sense strand
gcaccagcccauuuagcua

SEQ ID NO: 656940 - RNA, 19 nt, Homo sapiens
  misc_RNA (1)...(19): siRNA sense strand
aagggaguuugcuaaauuu

SEQ ID NO: 656941 - RNA, 19 nt, Homo sapiens
  misc_RNA (1)...(19): siRNA sense strand
acaacgaggucaugguuca

SEQ ID NO: 656942 - RNA, 19 nt, Homo sapiens
  misc_RNA (1)...(19): siRNA sense strand
cugauuggcuggaggaaug

SEQ ID NO: 656943 - RNA, 19 nt, Homo sapiens
  misc_RNA (1)...(19): siRNA sense strand
aaguagagguuauucuuca

SEQ ID NO: 656944 - RNA, 19 nt, Homo sapiens
  misc_RNA (1)...(19): siRNA sense strand
guccagacaucauuccaau

SEQ ID NO: 656945 - RNA, 19 nt, Homo sapiens
  misc_RNA (1)...(19): siRNA sense strand
gaaagucgggacaaauuac

SEQ ID NO: 656946 - RNA, 19 nt, Homo sapiens
  misc_RNA (1)...(19): siRNA sense strand
guguacagauccgaaguuu

SEQ ID NO: 656947 - RNA, 19 nt, Homo sapiens
  misc_RNA (1)...(19): siRNA sense strand
guaggaagagggauaauac

SEQ ID NO: 656948 - RNA, 19 nt, Homo sapiens
  misc_RNA (1)...(19): siRNA sense strand
ccaagugucaugaaggaaa

SEQ ID NO: 656949 - RNA, 19 nt, Homo sapiens
  misc_RNA (1)...(19): siRNA sense strand
gaucugaugaaugaaauga

SEQ ID NO: 656950 - RNA, 19 nt, Homo sapiens
  misc_RNA (1)...(19): siRNA sense strand
ggacaguguguuuguagga

SEQ ID NO: 656951 - RNA, 19 nt, Homo sapiens
  misc_RNA (1)...(19): siRNA sense strand
cauuacugcugauauggaa

SEQ ID NO: 656952 - RNA, 19 nt, Homo sapiens
  misc_RNA (1)...(19): siRNA sense strand
gcuccaaagauauaaagaa

SEQ ID NO: 656953 - RNA, 19 nt, Homo sapiens
  misc_RNA (1)...(19): siRNA sense strand
ugacgacuguugguucuau

SEQ ID NO: 656954 - RNA, 19 nt, Homo sapiens
  misc_RNA (1)...(19): siRNA sense strand
uguggugucuguaagugua

SEQ ID NO: 656955 - RNA, 19 nt, Homo sapiens
  misc_RNA (1)...(19): siRNA sense strand
gaggaaaugguguuugcaa

SEQ ID NO: 656956 - RNA, 19 nt, Homo sapiens
  misc_RNA (1)...(19): siRNA sense strand
gacaguguguuuguaggaa

SEQ ID NO: 656957 - RNA, 19 nt, Homo sapiens
  misc_RNA (1)...(19): siRNA sense strand
gaacagaucugaugaauga

SEQ ID NO: 656958 - RNA, 19 nt, Homo sapiens
  misc_RNA (1)...(19): siRNA sense strand
caagagagcugaagacuau

SEQ ID NO: 656959 - RNA, 19 nt, Homo sapiens
  misc_RNA (1)...(19): siRNA sense strand
gaagggaguuugcuaaauu

SEQ ID NO: 656960 - RNA, 19 nt, Homo sapiens
  misc_RNA (1)...(19): siRNA sense strand
ccacagacauuuacauuaa

SEQ ID NO: 656961 - RNA, 19 nt, Homo sapiens
  misc_RNA (1)...(19): siRNA sense strand
gcgcauaucuggaaauuug

SEQ ID NO: 656962 - RNA, 19 nt, Homo sapiens
  misc_RNA (1)...(19): siRNA sense strand
gaagagggauaauacaaau

SEQ ID NO: 656963 - RNA, 19 nt, Homo sapiens
  misc_RNA (1)...(19): siRNA sense strand
gugaagacauggaugcuua

SEQ ID NO: 656964 - RNA, 19 nt, Homo sapiens
  misc_RNA (1)...(19): siRNA sense strand
gaaagacgauuuggagaau

SEQ ID NO: 656965 - RNA, 19 nt, Homo sapiens
  misc_RNA (1)...(19): siRNA sense strand
guaauucaguugaucauug

SEQ ID NO: 656966 - RNA, 19 nt, Homo sapiens
  misc_RNA (1)...(19): siRNA sense strand
gaaaugaggaggauuacuu

SEQ ID NO: 656967 - RNA, 19 nt, Homo sapiens
  misc_RNA (1)...(19): siRNA sense strand
caaaucauguggagaaugu

SEQ ID NO: 656968 - RNA, 19 nt, Homo sapiens
  misc_RNA (1)...(19): siRNA sense strand
gaacugcaccagcccauuu

SEQ ID NO: 656969 - RNA, 19 nt, Homo sapiens
  misc_RNA (1)...(19): siRNA sense strand
guacagauccgaaguuuca

SEQ ID NO: 656970 - RNA, 19 nt, Homo sapiens
  misc_RNA (1)...(19): siRNA sense strand
cagaugaaguuaacaguga

SEQ ID NO: 656971 - RNA, 19 nt, Homo sapiens
  misc_RNA (1)...(19): siRNA sense strand
ggaguuugcuaaauuugaa

SEQ ID NO: 656972 - RNA, 19 nt, Homo sapiens
  misc_RNA (1)...(19): siRNA sense strand
gugcagagccuucaauaaa

SEQ ID NO: 656973 - RNA, 19 nt, Homo sapiens
  misc_RNA (1)...(19): siRNA sense strand
gaacaacgaggucaugguu

SEQ ID NO: 656974 - RNA, 19 nt, Homo sapiens
  misc_RNA (1)...(19): siRNA sense strand
gaaacuugguggcauuguu

SEQ ID NO: 656975 - RNA, 19 nt, Homo sapiens
  misc_RNA (1)...(19): siRNA sense strand
gaaaugguguuugcaagug

SEQ ID NO: 656976 - RNA, 19 nt, Homo sapiens
  misc_RNA (1)...(19): siRNA sense strand
ggaagagggauaauacaaa

SEQ ID NO: 656977 - RNA, 19 nt, Homo sapiens
  misc_RNA (1)...(19): siRNA sense strand
caaauugucagaaggagua

SEQ ID NO: 656978 - RNA, 19 nt, Homo sapiens
  misc_RNA (1)...(19): siRNA sense strand
ggagaaguauuuaaugaac

SEQ ID NO: 656979 - RNA, 19 nt, Homo sapiens
  misc_RNA (1)...(19): siRNA sense strand
cccagaggcuccaaagaua

SEQ ID NO: 656980 - RNA, 19 nt, Homo sapiens
  misc_RNA (1)...(19): siRNA sense strand
gcugaagacuaucccauug

SEQ ID NO: 656981 - RNA, 19 nt, Homo sapiens
  misc_RNA (1)...(19): siRNA sense strand
agacaucauuccaauugua

SEQ ID NO: 656982 - RNA, 19 nt, Homo sapiens
  misc_RNA (1)...(19): siRNA sense strand
gauccugugucccauugua

SEQ ID NO: 656983 - RNA, 19 nt, Homo sapiens
  misc_RNA (1)...(19): siRNA sense strand
ggaaguagagguuauucuu

SEQ ID NO: 656984 - RNA, 19 nt, Homo sapiens
  misc_RNA (1)...(19): siRNA sense strand
ucagaaggaguaacaauaa

SEQ ID NO: 656985 - RNA, 19 nt, Homo sapiens
  misc_RNA (1)...(19): siRNA sense strand
gaaaaugaaugccaaaugg

SEQ ID NO: 656986 - RNA, 19 nt, Homo sapiens
  misc_RNA (1)...(19): siRNA sense strand
gcaagugucguguguguga

SEQ ID NO: 656987 - RNA, 19 nt, Homo sapiens
  misc_RNA (1)...(19): siRNA sense strand
gugauaauuucaacuguga

SEQ ID NO: 656988 - RNA, 19 nt, Homo sapiens
  misc_RNA (1)...(19): siRNA sense strand
acaauucccuuuccucaga

SEQ ID NO: 656989 - RNA, 19 nt, Homo sapiens
  misc_RNA (1)...(19): siRNA sense strand
gaaggaguaacaauaaguu

SEQ ID NO: 656990 - RNA, 19 nt, Homo sapiens
  misc_RNA (1)...(19): siRNA sense strand
gcaauguaauucaguugau

SEQ ID NO: 656991 - RNA, 19 nt, Homo sapiens
  misc_RNA (1)...(19): siRNA sense strand
gguagaaagucgggacaaa

SEQ ID NO: 656992 - RNA, 19 nt, Homo sapiens
  misc_RNA (1)...(19): siRNA sense strand
gaaggauguugacgacugu

SEQ ID NO: 656993 - RNA, 19 nt, Homo sapiens
  misc_RNA (1)...(19): siRNA sense strand
aaacagcgcauaucuggaa

SEQ ID NO: 656994 - RNA, 19 nt, Homo sapiens
  misc_RNA (1)...(19): siRNA sense strand
ccagacaucauuccaauug

SEQ ID NO: 656995 - RNA, 19 nt, Homo sapiens
  misc_RNA (1)...(19): siRNA sense strand
guaaggagaaggauguuga

SEQ ID NO: 656996 - RNA, 19 nt, Homo sapiens
  misc_RNA (1)...(19): siRNA sense strand
ugauagauccaauggcuua

SEQ ID NO: 656997 - RNA, 19 nt, Homo sapiens
  misc_RNA (1)...(19): siRNA sense strand
gaaaucugcaguaacaaug

SEQ ID NO: 656998 - RNA, 19 nt, Homo sapiens
  misc_RNA (1)...(19): siRNA sense strand
gcaugugacuguucuuugg

SEQ ID NO: 656999 - RNA, 19 nt, Homo sapiens
  misc_RNA (1)...(19): siRNA sense strand
ggagaugagguucaauuug

SEQ ID NO: 657000 - RNA, 19 nt, Homo sapiens
  misc_RNA (1)...(19): siRNA sense strand
cagaggauauuacucagau

SEQ ID NO: 657001 - RNA, 19 nt, Homo sapiens
  misc_RNA (1)...(19): siRNA sense strand
gcaaacgugugagaugugu

SEQ ID NO: 657002 - RNA, 19 nt, Homo sapiens
  misc_RNA (1)...(19): siRNA sense strand
gaaagucccaagugucaug

SEQ ID NO: 657003 - RNA, 19 nt, Homo sapiens
  misc_RNA (1)...(19): siRNA sense strand
gugcucagucuuacuaaua

SEQ ID NO: 657004 - RNA, 19 nt, Homo sapiens
  misc_RNA (1)...(19): siRNA sense strand
ggacuucagaauuggauuu

SEQ ID NO: 657005 - RNA, 19 nt, Homo sapiens
  misc_RNA (1)...(19): siRNA sense strand
gcaaaggaacagcagagaa

SEQ ID NO: 657006 - RNA, 19 nt, Homo sapiens
  misc_RNA (1)...(19): siRNA sense strand
gggcaaacgugugagaugu

SEQ ID NO: 657007 - RNA, 19 nt, Homo sapiens
  misc_RNA (1)...(19): siRNA sense strand
ugcacgaugugaugauuua

SEQ ID NO: 657008 - RNA, 19 nt, Homo sapiens
  misc_RNA (1)...(19): siRNA sense strand
uagauccaauggcuuaauu

SEQ ID NO: 657009 - RNA, 19 nt, Homo sapiens
  misc_RNA (1)...(19): siRNA sense strand
gaauuggauuuggcucauu

SEQ ID NO: 657010 - RNA, 19 nt, Homo sapiens
  misc_RNA (1)...(19): siRNA sense strand
uagaaagucgggacaaauu

SEQ ID NO: 657011 - RNA, 19 nt, Homo sapiens
  misc_RNA (1)...(19): siRNA sense strand
aaugaaaugaggaggauua

SEQ ID NO: 657012 - RNA, 19 nt, Homo sapiens
  misc_RNA (1)...(19): siRNA sense strand
aauuguagcuggugugguu

SEQ ID NO: 657013 - RNA, 19 nt, Homo sapiens
  misc_RNA (1)...(19): siRNA sense strand
agaaagucgggacaaauua

SEQ ID NO: 657014 - RNA, 19 nt, Homo sapiens
  misc_RNA (1)...(19): siRNA sense strand
gagcauaaagaauguguuc

SEQ ID NO: 657015 - RNA, 19 nt, Homo sapiens
  misc_RNA (1)...(19): siRNA sense strand
uccaauggcuuaauuugug

SEQ ID NO: 657016 - RNA, 19 nt, Homo sapiens
  misc_RNA (1)...(19): siRNA sense strand
gaaguuaacagugaagaca

SEQ ID NO: 657017 - RNA, 19 nt, Homo sapiens
  misc_RNA (1)...(19): siRNA sense strand
cagcacagaugaaguuaac

SEQ ID NO: 657018 - RNA, 19 nt, Homo sapiens
  misc_RNA (1)...(19): siRNA sense strand
gcaaaugccaaaucaugug

SEQ ID NO: 657019 - RNA, 19 nt, Homo sapiens
  misc_RNA (1)...(19): siRNA sense strand
gaagaauuucagccuguuu

SEQ ID NO: 657020 - RNA, 19 nt, Homo sapiens
  misc_RNA (1)...(19): siRNA sense strand
cagaggcuccaaagauaua

SEQ ID NO: 657021 - RNA, 19 nt, Homo sapiens
  misc_RNA (1)...(19): siRNA sense strand
cugcugauauggaagcuuu

SEQ ID NO: 657022 - RNA, 19 nt, Homo sapiens
  misc_RNA (1)...(19): siRNA sense strand
caacugugauagauccaau

SEQ ID NO: 657023 - RNA, 19 nt, Homo sapiens
  misc_RNA (1)...(19): siRNA sense strand
uagagguuauucuucagua

SEQ ID NO: 657024 - RNA, 19 nt, Homo sapiens
  misc_RNA (1)...(19): siRNA sense strand
cagcgcauaucuggaaauu

SEQ ID NO: 657025 - RNA, 19 nt, Homo sapiens
  misc_RNA (1)...(19): siRNA sense strand
caaaggaacagcagagaag

SEQ ID NO: 657026 - RNA, 19 nt, Homo sapiens
  misc_RNA (1)...(19): siRNA sense strand
gaacagcagagaagcucaa

SEQ ID NO: 657027 - RNA, 19 nt, Homo sapiens
  misc_RNA (1)...(19): siRNA sense strand
gauccaauggcuuaauuug

SEQ ID NO: 657028 - RNA, 19 nt, Homo sapiens
  misc_RNA (1)...(19): siRNA sense strand
gaaaacaguucagaaaucu

SEQ ID NO: 657029 - RNA, 19 nt, Homo sapiens
  misc_RNA (1)...(19): siRNA sense strand
caagugucaugaaggaaau

SEQ ID NO: 657030 - RNA, 19 nt, Homo sapiens
  misc_RNA (1)...(19): siRNA sense strand
gucagaaggaguaacaaua

SEQ ID NO: 657031 - RNA, 19 nt, Homo sapiens
  misc_RNA (1)...(19): siRNA sense strand
gaggauuacuucggacuuc

SEQ ID NO: 657032 - RNA, 19 nt, Homo sapiens
  misc_RNA (1)...(19): siRNA sense strand
ugaaagacgauuuggagaa

SEQ ID NO: 657033 - RNA, 19 nt, Homo sapiens
  misc_RNA (1)...(19): siRNA sense strand
gccacagacauuuacauua

SEQ ID NO: 657034 - RNA, 19 nt, Homo sapiens
  misc_RNA (1)...(19): siRNA sense strand
gcaguugguuuugcgauua

SEQ ID NO: 657035 - RNA, 19 nt, Homo sapiens
  misc_RNA (1)...(19): siRNA sense strand
aaaagacugugaugccuua

SEQ ID NO: 657036 - RNA, 19 nt, Homo sapiens
  misc_RNA (1)...(19): siRNA sense strand
ggaaaugguguuugcaagu

SEQ ID NO: 657037 - RNA, 19 nt, Homo sapiens
  misc_RNA (1)...(19): siRNA sense strand
gcgaaggcaucccugaaag

SEQ ID NO: 657038 - RNA, 19 nt, Homo sapiens
  misc_RNA (1)...(19): siRNA sense strand
gcucagucuuacuaauaaa

SEQ ID NO: 657039 - RNA, 19 nt, Homo sapiens
  misc_RNA (1)...(19): siRNA sense strand
gcaccagcccauuuagcua

SEQ ID NO: 657040 - RNA, 19 nt, Homo sapiens
  misc_RNA (1)...(19): siRNA sense strand
aagggaguuugcuaaauuu

SEQ ID NO: 657041 - RNA, 19 nt, Homo sapiens
  misc_RNA (1)...(19): siRNA sense strand
acaacgaggucaugguuca

SEQ ID NO: 657042 - RNA, 19 nt, Homo sapiens
  misc_RNA (1)...(19): siRNA sense strand
cugauuggcuggaggaaug

SEQ ID NO: 657043 - RNA, 19 nt, Homo sapiens
  misc_RNA (1)...(19): siRNA sense strand
aaguagagguuauucuuca

SEQ ID NO: 657044 - RNA, 19 nt, Homo sapiens
  misc_RNA (1)...(19): siRNA sense strand
guccagacaucauuccaau

SEQ ID NO: 657045 - RNA, 19 nt, Homo sapiens
  misc_RNA (1)...(19): siRNA sense strand
gaaagucgggacaaauuac

SEQ ID NO: 657046 - RNA, 19 nt, Homo sapiens
  misc_RNA (1)...(19): siRNA sense strand
guguacagauccgaaguuu

SEQ ID NO: 657047 - RNA, 19 nt, Homo sapiens
  misc_RNA (1)...(19): siRNA sense strand
guaggaagagggauaauac

SEQ ID NO: 657048 - RNA, 19 nt, Homo sapiens
  misc_RNA (1)...(19): siRNA sense strand
ccaagugucaugaaggaaa

SEQ ID NO: 657049 - RNA, 19 nt, Homo sapiens
  misc_RNA (1)...(19): siRNA sense strand
gaucugaugaaugaaauga

SEQ ID NO: 657050 - RNA, 19 nt, Homo sapiens
  misc_RNA (1)...(19): siRNA sense strand
ggacaguguguuuguagga

SEQ ID NO: 657051 - RNA, 19 nt, Homo sapiens
  misc_RNA (1)...(19): siRNA sense strand
cauuacugcugauauggaa

SEQ ID NO: 657052 - RNA, 19 nt, Homo sapiens
  misc_RNA (1)...(19): siRNA sense strand
gcuccaaagauauaaagaa

SEQ ID NO: 657053 - RNA, 19 nt, Homo sapiens
  misc_RNA (1)...(19): siRNA sense strand
ugacgacuguugguucuau

SEQ ID NO: 657054 - RNA, 19 nt, Homo sapiens
  misc_RNA (1)...(19): siRNA sense strand
uguggugucuguaagugua

SEQ ID NO: 657055 - RNA, 19 nt, Homo sapiens
  misc_RNA (1)...(19): siRNA sense strand
gaggaaaugguguuugcaa

SEQ ID NO: 657056 - RNA, 19 nt, Homo sapiens
  misc_RNA (1)...(19): siRNA sense strand
gacaguguguuuguaggaa

SEQ ID NO: 657057 - RNA, 19 nt, Homo sapiens
  misc_RNA (1)...(19): siRNA sense strand
gaacagaucugaugaauga

SEQ ID NO: 657058 - RNA, 19 nt, Homo sapiens
  misc_RNA (1)...(19): siRNA sense strand
caagagagcugaagacuau

SEQ ID NO: 657059 - RNA, 19 nt, Homo sapiens
  misc_RNA (1)...(19): siRNA sense strand
gaagggaguuugcuaaauu

SEQ ID NO: 657060 - RNA, 19 nt, Homo sapiens
  misc_RNA (1)...(19): siRNA sense strand
ccacagacauuuacauuaa

SEQ ID NO: 657061 - RNA, 19 nt, Homo sapiens
  misc_RNA (1)...(19): siRNA sense strand
gcgcauaucuggaaauuug

SEQ ID NO: 657062 - RNA, 19 nt, Homo sapiens
  misc_RNA (1)...(19): siRNA sense strand
gaagagggauaauacaaau

SEQ ID NO: 657063 - RNA, 19 nt, Homo sapiens
  misc_RNA (1)...(19): siRNA sense strand
gugaagacauggaugcuua

SEQ ID NO: 657064 - RNA, 19 nt, Homo sapiens
  misc_RNA (1)...(19): siRNA sense strand
gaaagacgauuuggagaau

SEQ ID NO: 657065 - RNA, 19 nt, Homo sapiens
  misc_RNA (1)...(19): siRNA sense strand
guaauucaguugaucauug

SEQ ID NO: 657066 - RNA, 19 nt, Homo sapiens
  misc_RNA (1)...(19): siRNA sense strand
gaaaugaggaggauuacuu

SEQ ID NO: 657067 - RNA, 19 nt, Homo sapiens
  misc_RNA (1)...(19): siRNA sense strand
caaaucauguggagaaugu

SEQ ID NO: 657068 - RNA, 19 nt, Homo sapiens
  misc_RNA (1)...(19): siRNA sense strand
gaacugcaccagcccauuu

SEQ ID NO: 657069 - RNA, 19 nt, Homo sapiens
  misc_RNA (1)...(19): siRNA sense strand
guacagauccgaaguuuca

SEQ ID NO: 657070 - RNA, 19 nt, Homo sapiens
  misc_RNA (1)...(19): siRNA sense strand
cagaugaaguuaacaguga

SEQ ID NO: 657071 - RNA, 19 nt, Homo sapiens
  misc_RNA (1)...(19): siRNA sense strand
ggaguuugcuaaauuugaa

SEQ ID NO: 657072 - RNA, 19 nt, Homo sapiens
  misc_RNA (1)...(19): siRNA sense strand
gugcagagccuucaauaaa

SEQ ID NO: 657073 - RNA, 19 nt, Homo sapiens
  misc_RNA (1)...(19): siRNA sense strand
gaacaacgaggucaugguu

SEQ ID NO: 657074 - RNA, 19 nt, Homo sapiens
  misc_RNA (1)...(19): siRNA sense strand
gaaacuugguggcauuguu

SEQ ID NO: 657075 - RNA, 19 nt, Homo sapiens
  misc_RNA (1)...(19): siRNA sense strand
gaaaugguguuugcaagug

SEQ ID NO: 657076 - RNA, 19 nt, Homo sapiens
  misc_RNA (1)...(19): siRNA sense strand
ggaagagggauaauacaaa

SEQ ID NO: 657077 - RNA, 19 nt, Homo sapiens
  misc_RNA (1)...(19): siRNA sense strand
caaauugucagaaggagua

SEQ ID NO: 657078 - RNA, 19 nt, Homo sapiens
  misc_RNA (1)...(19): siRNA sense strand
ggagaaguauuuaaugaac

SEQ ID NO: 657079 - RNA, 19 nt, Homo sapiens
  misc_RNA (1)...(19): siRNA sense strand
cccagaggcuccaaagaua

SEQ ID NO: 657080 - RNA, 19 nt, Homo sapiens
  misc_RNA (1)...(19): siRNA sense strand
gcugaagacuaucccauug

SEQ ID NO: 657081 - RNA, 19 nt, Homo sapiens
  misc_RNA (1)...(19): siRNA sense strand
agacaucauuccaauugua

SEQ ID NO: 657082 - RNA, 19 nt, Homo sapiens
  misc_RNA (1)...(19): siRNA sense strand
gauccugugucccauugua

SEQ ID NO: 657083 - RNA, 19 nt, Homo sapiens
  misc_RNA (1)...(19): siRNA sense strand
ggaaguagagguuauucuu

SEQ ID NO: 657084 - RNA, 19 nt, Homo sapiens
  misc_RNA (1)...(19): siRNA sense strand
ucagaaggaguaacaauaa

SEQ ID NO: 657085 - RNA, 19 nt, Homo sapiens
  misc_RNA (1)...(19): siRNA sense strand
gaaaaugaaugccaaaugg

SEQ ID NO: 657086 - RNA, 19 nt, Homo sapiens
  misc_RNA (1)...(19): siRNA sense strand
gcaagugucguguguguga

SEQ ID NO: 657087 - RNA, 19 nt, Homo sapiens
  misc_RNA (1)...(19): siRNA sense strand
gugauaauuucaacuguga

SEQ ID NO: 657088 - RNA, 19 nt, Homo sapiens
  misc_RNA (1)...(19): siRNA sense strand
acaauucccuuuccucaga

SEQ ID NO: 657089 - RNA, 19 nt, Homo sapiens
  misc_RNA (1)...(19): siRNA sense strand
gaaggaguaacaauaaguu

SEQ ID NO: 657090 - RNA, 19 nt, Homo sapiens
  misc_RNA (1)...(19): siRNA sense strand
gcaauguaauucaguugau

SEQ ID NO: 657091 - RNA, 19 nt, Homo sapiens
  misc_RNA (1)...(19): siRNA sense strand
gguagaaagucgggacaaa

SEQ ID NO: 657092 - RNA, 19 nt, Homo sapiens
  misc_RNA (1)...(19): siRNA sense strand
gaaggauguugacgacugu

SEQ ID NO: 657093 - RNA, 19 nt, Homo sapiens
  misc_RNA (1)...(19): siRNA sense strand
aaacagcgcauaucuggaa

SEQ ID NO: 657094 - RNA, 19 nt, Homo sapiens
  misc_RNA (1)...(19): siRNA sense strand
ccagacaucauuccaauug

SEQ ID NO: 657095 - RNA, 19 nt, Homo sapiens
  misc_RNA (1)...(19): siRNA sense strand
guaaggagaaggauguuga

SEQ ID NO: 657096 - RNA, 19 nt, Homo sapiens
  misc_RNA (1)...(19): siRNA sense strand
ugauagauccaauggcuua

SEQ ID NO: 657097 - RNA, 19 nt, Homo sapiens
  misc_RNA (1)...(19): siRNA sense strand
gaaaucugcaguaacaaug

SEQ ID NO: 657098 - RNA, 19 nt, Homo sapiens
  misc_RNA (1)...(19): siRNA sense strand
gcaugugacuguucuuugg

SEQ ID NO: 657099 - RNA, 19 nt, Homo sapiens
  misc_RNA (1)...(19): siRNA sense strand
ggagaugagguucaauuug

SEQ ID NO: 657100 - RNA, 19 nt, Homo sapiens
  misc_RNA (1)...(19): siRNA sense strand
cagaggauauuacucagau

SEQ ID NO: 657101 - RNA, 19 nt, Homo sapiens
  misc_RNA (1)...(19): siRNA sense strand
gcaaacgugugagaugugu

SEQ ID NO: 657102 - RNA, 19 nt, Homo sapiens
  misc_RNA (1)...(19): siRNA sense strand
gaaagucccaagugucaug

SEQ ID NO: 657103 - RNA, 19 nt, Homo sapiens
  misc_RNA (1)...(19): siRNA sense strand
gugcucagucuuacuaaua

SEQ ID NO: 657104 - RNA, 19 nt, Homo sapiens
  misc_RNA (1)...(19): siRNA sense strand
ggacuucagaauuggauuu

SEQ ID NO: 657105 - RNA, 19 nt, Homo sapiens
  misc_RNA (1)...(19): siRNA sense strand
gcaaaggaacagcagagaa

SEQ ID NO: 657106 - RNA, 19 nt, Homo sapiens
  misc_RNA (1)...(19): siRNA sense strand
gggcaaacgugugagaugu

SEQ ID NO: 657107 - RNA, 19 nt, Homo sapiens
  misc_RNA (1)...(19): siRNA sense strand
ugcacgaugugaugauuua

SEQ ID NO: 657108 - RNA, 19 nt, Homo sapiens
  misc_RNA (1)...(19): siRNA sense strand
uagauccaauggcuuaauu

SEQ ID NO: 657109 - RNA, 19 nt, Homo sapiens
  misc_RNA (1)...(19): siRNA sense strand
gaauuggauuuggcucauu

SEQ ID NO: 657110 - RNA, 19 nt, Homo sapiens
  misc_RNA (1)...(19): siRNA sense strand
uagaaagucgggacaaauu

SEQ ID NO: 657111 - RNA, 19 nt, Homo sapiens
  misc_RNA (1)...(19): siRNA sense strand
aaugaaaugaggaggauua

SEQ ID NO: 657112 - RNA, 19 nt, Homo sapiens
  misc_RNA (1)...(19): siRNA sense strand
aauuguagcuggugugguu

SEQ ID NO: 657113 - RNA, 19 nt, Homo sapiens
  misc_RNA (1)...(19): siRNA sense strand
agaaagucgggacaaauua

SEQ ID NO: 657114 - RNA, 19 nt, Homo sapiens
  misc_RNA (1)...(19): siRNA sense strand
gagcauaaagaauguguuc

SEQ ID NO: 657115 - RNA, 19 nt, Homo sapiens
  misc_RNA (1)...(19): siRNA sense strand
uccaauggcuuaauuugug

SEQ ID NO: 657116 - RNA, 19 nt, Homo sapiens
  misc_RNA (1)...(19): siRNA sense strand
gaaguuaacagugaagaca

SEQ ID NO: 657117 - RNA, 19 nt, Homo sapiens
  misc_RNA (1)...(19): siRNA sense strand
cagcacagaugaaguuaac

SEQ ID NO: 657118 - RNA, 19 nt, Homo sapiens
  misc_RNA (1)...(19): siRNA sense strand
gcaaaugccaaaucaugug

SEQ ID NO: 657119 - RNA, 19 nt, Homo sapiens
  misc_RNA (1)...(19): siRNA sense strand
gaagaauuucagccuguuu

SEQ ID NO: 657120 - RNA, 19 nt, Homo sapiens
  misc_RNA (1)...(19): siRNA sense strand
cagaggcuccaaagauaua

SEQ ID NO: 657121 - RNA, 19 nt, Homo sapiens
  misc_RNA (1)...(19): siRNA sense strand
cugcugauauggaagcuuu

SEQ ID NO: 657122 - RNA, 19 nt, Homo sapiens
  misc_RNA (1)...(19): siRNA sense strand
caacugugauagauccaau

SEQ ID NO: 657123 - RNA, 19 nt, Homo sapiens
  misc_RNA (1)...(19): siRNA sense strand
uagagguuauucuucagua

SEQ ID NO: 657124 - RNA, 19 nt, Homo sapiens
  misc_RNA (1)...(19): siRNA sense strand
cagcgcauaucuggaaauu

SEQ ID NO: 657125 - RNA, 19 nt, Homo sapiens
  misc_RNA (1)...(19): siRNA sense strand
caaaggaacagcagagaag

SEQ ID NO: 657126 - RNA, 19 nt, Homo sapiens
  misc_RNA (1)...(19): siRNA sense strand
gaacagcagagaagcucaa

SEQ ID NO: 657127 - RNA, 19 nt, Homo sapiens
  misc_RNA (1)...(19): siRNA sense strand
gauccaauggcuuaauuug

SEQ ID NO: 657128 - RNA, 19 nt, Homo sapiens
  misc_RNA (1)...(19): siRNA sense strand
gaaaacaguucagaaaucu

SEQ ID NO: 657129 - RNA, 19 nt, Homo sapiens
  misc_RNA (1)...(19): siRNA sense strand
caagugucaugaaggaaau

SEQ ID NO: 657130 - RNA, 19 nt, Homo sapiens
  misc_RNA (1)...(19): siRNA sense strand
gucagaaggaguaacaaua

SEQ ID NO: 657131 - RNA, 19 nt, Homo sapiens
  misc_RNA (1)...(19): siRNA sense strand
gaggauuacuucggacuuc

SEQ ID NO: 657132 - RNA, 19 nt, Homo sapiens
  misc_RNA (1)...(19): siRNA sense strand
ugaaagacgauuuggagaa

SEQ ID NO: 657133 - RNA, 19 nt, Homo sapiens
  misc_RNA (1)...(19): siRNA sense strand
gccacagacauuuacauua

SEQ ID NO: 657134 - RNA, 19 nt, Homo sapiens
  misc_RNA (1)...(19): siRNA sense strand
gcaguugguuuugcgauua

SEQ ID NO: 657135 - RNA, 19 nt, Homo sapiens
  misc_RNA (1)...(19): siRNA sense strand
aaaagacugugaugccuua

SEQ ID NO: 657136 - RNA, 19 nt, Homo sapiens
  misc_RNA (1)...(19): siRNA sense strand
ggaaaugguguuugcaagu

SEQ ID NO: 657137 - RNA, 19 nt, Homo sapiens
  misc_RNA (1)...(19): siRNA sense strand
gcgaaggcaucccugaaag

SEQ ID NO: 657138 - RNA, 19 nt, Homo sapiens
  misc_RNA (1)...(19): siRNA sense strand
gcucagucuuacuaauaaa

SEQ ID NO: 657139 - RNA, 19 nt, Homo sapiens
  misc_RNA (1)...(19): siRNA sense strand
gcaccagcccauuuagcua

SEQ ID NO: 657140 - RNA, 19 nt, Homo sapiens
  misc_RNA (1)...(19): siRNA sense strand
aagggaguuugcuaaauuu

SEQ ID NO: 657141 - RNA, 19 nt, Homo sapiens
  misc_RNA (1)...(19): siRNA sense strand
acaacgaggucaugguuca

SEQ ID NO: 657142 - RNA, 19 nt, Homo sapiens
  misc_RNA (1)...(19): siRNA sense strand
cugauuggcuggaggaaug

SEQ ID NO: 657143 - RNA, 19 nt, Homo sapiens
  misc_RNA (1)...(19): siRNA sense strand
aaguagagguuauucuuca

SEQ ID NO: 657144 - RNA, 19 nt, Homo sapiens
  misc_RNA (1)...(19): siRNA sense strand
guccagacaucauuccaau

SEQ ID NO: 657145 - RNA, 19 nt, Homo sapiens
  misc_RNA (1)...(19): siRNA sense strand
gaaagucgggacaaauuac

SEQ ID NO: 657146 - RNA, 19 nt, Homo sapiens
  misc_RNA (1)...(19): siRNA sense strand
guguacagauccgaaguuu

SEQ ID NO: 657147 - RNA, 19 nt, Homo sapiens
  misc_RNA (1)...(19): siRNA sense strand
guaggaagagggauaauac

SEQ ID NO: 657148 - RNA, 19 nt, Homo sapiens
  misc_RNA (1)...(19): siRNA sense strand
ccaagugucaugaaggaaa

SEQ ID NO: 657149 - RNA, 19 nt, Homo sapiens
  misc_RNA (1)...(19): siRNA sense strand
gaucugaugaaugaaauga

SEQ ID NO: 657150 - RNA, 19 nt, Homo sapiens
  misc_RNA (1)...(19): siRNA sense strand
ggacaguguguuuguagga

SEQ ID NO: 657151 - RNA, 19 nt, Homo sapiens
  misc_RNA (1)...(19): siRNA sense strand
cauuacugcugauauggaa

SEQ ID NO: 657152 - RNA, 19 nt, Homo sapiens
  misc_RNA (1)...(19): siRNA sense strand
gcuccaaagauauaaagaa

SEQ ID NO: 657153 - RNA, 19 nt, Homo sapiens
  misc_RNA (1)...(19): siRNA sense strand
ugacgacuguugguucuau

SEQ ID NO: 657154 - RNA, 19 nt, Homo sapiens
  misc_RNA (1)...(19): siRNA sense strand
uguggugucuguaagugua

SEQ ID NO: 657155 - RNA, 19 nt, Homo sapiens
  misc_RNA (1)...(19): siRNA sense strand
gaggaaaugguguuugcaa

SEQ ID NO: 657156 - RNA, 19 nt, Homo sapiens
  misc_RNA (1)...(19): siRNA sense strand
gacaguguguuuguaggaa

SEQ ID NO: 657157 - RNA, 19 nt, Homo sapiens
  misc_RNA (1)...(19): siRNA sense strand
gaacagaucugaugaauga

SEQ ID NO: 657158 - RNA, 19 nt, Homo sapiens
  misc_RNA (1)...(19): siRNA sense strand
caagagagcugaagacuau

SEQ ID NO: 657159 - RNA, 19 nt, Homo sapiens
  misc_RNA (1)...(19): siRNA sense strand
gaagggaguuugcuaaauu

SEQ ID NO: 657160 - RNA, 19 nt, Homo sapiens
  misc_RNA (1)...(19): siRNA sense strand
ccacagacauuuacauuaa

SEQ ID NO: 657161 - RNA, 19 nt, Homo sapiens
  misc_RNA (1)...(19): siRNA sense strand
gcgcauaucuggaaauuug

SEQ ID NO: 657162 - RNA, 19 nt, Homo sapiens
  misc_RNA (1)...(19): siRNA sense strand
gaagagggauaauacaaau

SEQ ID NO: 657163 - RNA, 19 nt, Homo sapiens
  misc_RNA (1)...(19): siRNA sense strand
gugaagacauggaugcuua

SEQ ID NO: 657164 - RNA, 19 nt, Homo sapiens
  misc_RNA (1)...(19): siRNA sense strand
gaaagacgauuuggagaau

SEQ ID NO: 657165 - RNA, 19 nt, Homo sapiens
  misc_RNA (1)...(19): siRNA sense strand
guaauucaguugaucauug

SEQ ID NO: 657166 - RNA, 19 nt, Homo sapiens
  misc_RNA (1)...(19): siRNA sense strand
gaaaugaggaggauuacuu

SEQ ID NO: 657167 - RNA, 19 nt, Homo sapiens
  misc_RNA (1)...(19): siRNA sense strand
caaaucauguggagaaugu

SEQ ID NO: 657168 - RNA, 19 nt, Homo sapiens
  misc_RNA (1)...(19): siRNA sense strand
gaacugcaccagcccauuu

SEQ ID NO: 657169 - RNA, 19 nt, Homo sapiens
  misc_RNA (1)...(19): siRNA sense strand
guacagauccgaaguuuca

SEQ ID NO: 657170 - RNA, 19 nt, Homo sapiens
  misc_RNA (1)...(19): siRNA sense strand
cagaugaaguuaacaguga

SEQ ID NO: 657171 - RNA, 19 nt, Homo sapiens
  misc_RNA (1)...(19): siRNA sense strand
ggaguuugcuaaauuugaa

SEQ ID NO: 657172 - RNA, 19 nt, Homo sapiens
  misc_RNA (1)...(19): siRNA sense strand
gugcagagccuucaauaaa

SEQ ID NO: 657173 - RNA, 19 nt, Homo sapiens
  misc_RNA (1)...(19): siRNA sense strand
gaacaacgaggucaugguu

SEQ ID NO: 657174 - RNA, 19 nt, Homo sapiens
  misc_RNA (1)...(19): siRNA sense strand
gaaacuugguggcauuguu

SEQ ID NO: 657175 - RNA, 19 nt, Homo sapiens
  misc_RNA (1)...(19): siRNA sense strand
gaaaugguguuugcaagug

SEQ ID NO: 657176 - RNA, 19 nt, Homo sapiens
  misc_RNA (1)...(19): siRNA sense strand
ggaagagggauaauacaaa

SEQ ID NO: 657177 - RNA, 19 nt, Homo sapiens
  misc_RNA (1)...(19): siRNA sense strand
caaauugucagaaggagua

SEQ ID NO: 657178 - RNA, 19 nt, Homo sapiens
  misc_RNA (1)...(19): siRNA sense strand
ggagaaguauuuaaugaac

SEQ ID NO: 657179 - RNA, 19 nt, Homo sapiens
  misc_RNA (1)...(19): siRNA sense strand
cccagaggcuccaaagaua

SEQ ID NO: 657180 - RNA, 19 nt, Homo sapiens
  misc_RNA (1)...(19): siRNA sense strand
gcugaagacuaucccauug

SEQ ID NO: 657181 - RNA, 19 nt, Homo sapiens
  misc_RNA (1)...(19): siRNA sense strand
agacaucauuccaauugua

SEQ ID NO: 657182 - RNA, 19 nt, Homo sapiens
  misc_RNA (1)...(19): siRNA sense strand
gauccugugucccauugua

SEQ ID NO: 657183 - RNA, 19 nt, Homo sapiens
  misc_RNA (1)...(19): siRNA sense strand
ggaaguagagguuauucuu

SEQ ID NO: 657184 - RNA, 19 nt, Homo sapiens
  misc_RNA (1)...(19): siRNA sense strand
ucagaaggaguaacaauaa

SEQ ID NO: 657185 - RNA, 19 nt, Homo sapiens
  misc_RNA (1)...(19): siRNA sense strand
gaaaaugaaugccaaaugg

SEQ ID NO: 657186 - RNA, 19 nt, Homo sapiens
  misc_RNA (1)...(19): siRNA sense strand
gcaagugucguguguguga

SEQ ID NO: 657187 - RNA, 19 nt, Homo sapiens
  misc_RNA (1)...(19): siRNA sense strand
gugauaauuucaacuguga

SEQ ID NO: 657188 - RNA, 19 nt, Homo sapiens
  misc_RNA (1)...(19): siRNA sense strand
acaauucccuuuccucaga

SEQ ID NO: 657189 - RNA, 19 nt, Homo sapiens
  misc_RNA (1)...(19): siRNA sense strand
gaaggaguaacaauaaguu

SEQ ID NO: 657190 - RNA, 19 nt, Homo sapiens
  misc_RNA (1)...(19): siRNA sense strand
gcaauguaauucaguugau

SEQ ID NO: 657191 - RNA, 19 nt, Homo sapiens
  misc_RNA (1)...(19): siRNA sense strand
gguagaaagucgggacaaa

SEQ ID NO: 657192 - RNA, 19 nt, Homo sapiens
  misc_RNA (1)...(19): siRNA sense strand
gaaggauguugacgacugu

SEQ ID NO: 657193 - RNA, 19 nt, Homo sapiens
  misc_RNA (1)...(19): siRNA sense strand
aaacagcgcauaucuggaa

SEQ ID NO: 657194 - RNA, 19 nt, Homo sapiens
  misc_RNA (1)...(19): siRNA sense strand
ccagacaucauuccaauug

SEQ ID NO: 657195 - RNA, 19 nt, Homo sapiens
  misc_RNA (1)...(19): siRNA sense strand
guaaggagaaggauguuga

SEQ ID NO: 657196 - RNA, 19 nt, Homo sapiens
  misc_RNA (1)...(19): siRNA sense strand
ugauagauccaauggcuua

SEQ ID NO: 657197 - RNA, 19 nt, Homo sapiens
  misc_RNA (1)...(19): siRNA sense strand
gaaaucugcaguaacaaug

SEQ ID NO: 657198 - RNA, 19 nt, Homo sapiens
  misc_RNA (1)...(19): siRNA sense strand
gcaugugacuguucuuugg

SEQ ID NO: 657199 - RNA, 19 nt, Homo sapiens
  misc_RNA (1)...(19): siRNA sense strand
ggagaugagguucaauuug

SEQ ID NO: 657200 - RNA, 19 nt, Homo sapiens
  misc_RNA (1)...(19): siRNA sense strand
cagaggauauuacucagau

SEQ ID NO: 657201 - RNA, 19 nt, Homo sapiens
  misc_RNA (1)...(19): siRNA sense strand
gcaaacgugugagaugugu

SEQ ID NO: 657202 - RNA, 19 nt, Homo sapiens
  misc_RNA (1)...(19): siRNA sense strand
gaaagucccaagugucaug

SEQ ID NO: 657203 - RNA, 19 nt, Homo sapiens
  misc_RNA (1)...(19): siRNA sense strand
gugcucagucuuacuaaua

SEQ ID NO: 657204 - RNA, 19 nt, Homo sapiens
  misc_RNA (1)...(19): siRNA sense strand
ggacuucagaauuggauuu

SEQ ID NO: 657205 - RNA, 19 nt, Homo sapiens
  misc_RNA (1)...(19): siRNA sense strand
gcaaaggaacagcagagaa

SEQ ID NO: 657206 - RNA, 19 nt, Homo sapiens
  misc_RNA (1)...(19): siRNA sense strand
gggcaaacgugugagaugu

SEQ ID NO: 657207 - RNA, 19 nt, Homo sapiens
  misc_RNA (1)...(19): siRNA sense strand
ugcacgaugugaugauuua

SEQ ID NO: 657208 - RNA, 19 nt, Homo sapiens
  misc_RNA (1)...(19): siRNA sense strand
uagauccaauggcuuaauu

SEQ ID NO: 657209 - RNA, 19 nt, Homo sapiens
  misc_RNA (1)...(19): siRNA sense strand
gaauuggauuuggcucauu

SEQ ID NO: 657210 - RNA, 19 nt, Homo sapiens
  misc_RNA (1)...(19): siRNA sense strand
uagaaagucgggacaaauu

SEQ ID NO: 657211 - RNA, 19 nt, Homo sapiens
  misc_RNA (1)...(19): siRNA sense strand
aaugaaaugaggaggauua

SEQ ID NO: 657212 - RNA, 19 nt, Homo sapiens
  misc_RNA (1)...(19): siRNA sense strand
aauuguagcuggugugguu

SEQ ID NO: 657213 - RNA, 19 nt, Homo sapiens
  misc_RNA (1)...(19): siRNA sense strand
agaaagucgggacaaauua

SEQ ID NO: 657214 - RNA, 19 nt, Homo sapiens
  misc_RNA (1)...(19): siRNA sense strand
gagcauaaagaauguguuc

SEQ ID NO: 657215 - RNA, 19 nt, Homo sapiens
  misc_RNA (1)...(19): siRNA sense strand
uccaauggcuuaauuugug

SEQ ID NO: 657216 - RNA, 19 nt, Homo sapiens
  misc_RNA (1)...(19): siRNA sense strand
gaaguuaacagugaagaca

SEQ ID NO: 657217 - RNA, 19 nt, Homo sapiens
  misc_RNA (1)...(19): siRNA sense strand
cagcacagaugaaguuaac

SEQ ID NO: 657218 - RNA, 19 nt, Homo sapiens
  misc_RNA (1)...(19): siRNA sense strand
gcaaaugccaaaucaugug

SEQ ID NO: 657219 - RNA, 19 nt, Homo sapiens
  misc_RNA (1)...(19): siRNA sense strand
gaagaauuucagccuguuu

SEQ ID NO: 657220 - RNA, 19 nt, Homo sapiens
  misc_RNA (1)...(19): siRNA sense strand
cagaggcuccaaagauaua

SEQ ID NO: 657221 - RNA, 19 nt, Homo sapiens
  misc_RNA (1)...(19): siRNA sense strand
cugcugauauggaagcuuu

SEQ ID NO: 657222 - RNA, 19 nt, Homo sapiens
  misc_RNA (1)...(19): siRNA sense strand
caacugugauagauccaau

SEQ ID NO: 657223 - RNA, 19 nt, Homo sapiens
  misc_RNA (1)...(19): siRNA sense strand
uagagguuauucuucagua

SEQ ID NO: 657224 - RNA, 19 nt, Homo sapiens
  misc_RNA (1)...(19): siRNA sense strand
cagcgcauaucuggaaauu

SEQ ID NO: 657225 - RNA, 19 nt, Homo sapiens
  misc_RNA (1)...(19): siRNA sense strand
caaaggaacagcagagaag

SEQ ID NO: 657226 - RNA, 19 nt, Homo sapiens
  misc_RNA (1)...(19): siRNA sense strand
gaacagcagagaagcucaa

SEQ ID NO: 657227 - RNA, 19 nt, Homo sapiens
  misc_RNA (1)...(19): siRNA sense strand
gauccaauggcuuaauuug

SEQ ID NO: 657228 - RNA, 19 nt, Homo sapiens
  misc_RNA (1)...(19): siRNA sense strand
gaaaacaguucagaaaucu

SEQ ID NO: 657229 - RNA, 19 nt, Homo sapiens
  misc_RNA (1)...(19): siRNA sense strand
caagugucaugaaggaaau

SEQ ID NO: 657230 - RNA, 19 nt, Homo sapiens
  misc_RNA (1)...(19): siRNA sense strand
gucagaaggaguaacaaua

SEQ ID NO: 657231 - RNA, 19 nt, Homo sapiens
  misc_RNA (1)...(19): siRNA sense strand
gaggauuacuucggacuuc

SEQ ID NO: 657232 - RNA, 19 nt, Homo sapiens
  misc_RNA (1)...(19): siRNA sense strand
ugaaagacgauuuggagaa

SEQ ID NO: 657233 - RNA, 19 nt, Homo sapiens
  misc_RNA (1)...(19): siRNA sense strand
gccacagacauuuacauua

SEQ ID NO: 657234 - RNA, 19 nt, Homo sapiens
  misc_RNA (1)...(19): siRNA sense strand
gcaguugguuuugcgauua

SEQ ID NO: 657235 - RNA, 19 nt, Homo sapiens
  misc_RNA (1)...(19): siRNA sense strand
aaaagacugugaugccuua

SEQ ID NO: 657236 - RNA, 19 nt, Homo sapiens
  misc_RNA (1)...(19): siRNA sense strand
ggaaaugguguuugcaagu

SEQ ID NO: 657237 - RNA, 19 nt, Homo sapiens
  misc_RNA (1)...(19): siRNA sense strand
gcgaaggcaucccugaaag

SEQ ID NO: 657238 - RNA, 19 nt, Homo sapiens
  misc_RNA (1)...(19): siRNA sense strand
gcucagucuuacuaauaaa

SEQ ID NO: 657239 - RNA, 19 nt, Homo sapiens
  misc_RNA (1)...(19): siRNA sense strand
gcaccagcccauuuagcua

SEQ ID NO: 657240 - RNA, 19 nt, Homo sapiens
  misc_RNA (1)...(19): siRNA sense strand
aagggaguuugcuaaauuu

SEQ ID NO: 657241 - RNA, 19 nt, Homo sapiens
  misc_RNA (1)...(19): siRNA sense strand
acaacgaggucaugguuca

SEQ ID NO: 657242 - RNA, 19 nt, Homo sapiens
  misc_RNA (1)...(19): siRNA sense strand
cugauuggcuggaggaaug

SEQ ID NO: 657243 - RNA, 19 nt, Homo sapiens
  misc_RNA (1)...(19): siRNA sense strand
aaguagagguuauucuuca

SEQ ID NO: 657244 - RNA, 19 nt, Homo sapiens
  misc_RNA (1)...(19): siRNA sense strand
guccagacaucauuccaau

SEQ ID NO: 657245 - RNA, 19 nt, Homo sapiens
  misc_RNA (1)...(19): siRNA sense strand
gaaagucgggacaaauuac

SEQ ID NO: 657246 - RNA, 19 nt, Homo sapiens
  misc_RNA (1)...(19): siRNA sense strand
guguacagauccgaaguuu

SEQ ID NO: 657247 - RNA, 19 nt, Homo sapiens
  misc_RNA (1)...(19): siRNA sense strand
guaggaagagggauaauac

SEQ ID NO: 657248 - RNA, 19 nt, Homo sapiens
  misc_RNA (1)...(19): siRNA sense strand
ccaagugucaugaaggaaa

SEQ ID NO: 657249 - RNA, 19 nt, Homo sapiens
  misc_RNA (1)...(19): siRNA sense strand
gaucugaugaaugaaauga

SEQ ID NO: 657250 - RNA, 19 nt, Homo sapiens
  misc_RNA (1)...(19): siRNA sense strand
ggacaguguguuuguagga

SEQ ID NO: 657251 - RNA, 19 nt, Homo sapiens
  misc_RNA (1)...(19): siRNA sense strand
cauuacugcugauauggaa

SEQ ID NO: 657252 - RNA, 19 nt, Homo sapiens
  misc_RNA (1)...(19): siRNA sense strand
gcuccaaagauauaaagaa

SEQ ID NO: 657253 - RNA, 19 nt, Homo sapiens
  misc_RNA (1)...(19): siRNA sense strand
ugacgacuguugguucuau

SEQ ID NO: 657254 - RNA, 19 nt, Homo sapiens
  misc_RNA (1)...(19): siRNA sense strand
uguggugucuguaagugua

SEQ ID NO: 657255 - RNA, 19 nt, Homo sapiens
  misc_RNA (1)...(19): siRNA sense strand
gaggaaaugguguuugcaa

SEQ ID NO: 657256 - RNA, 19 nt, Homo sapiens
  misc_RNA (1)...(19): siRNA sense strand
gacaguguguuuguaggaa

SEQ ID NO: 657257 - RNA, 19 nt, Homo sapiens
  misc_RNA (1)...(19): siRNA sense strand
gaacagaucugaugaauga

SEQ ID NO: 657258 - RNA, 19 nt, Homo sapiens
  misc_RNA (1)...(19): siRNA sense strand
caagagagcugaagacuau

SEQ ID NO: 657259 - RNA, 19 nt, Homo sapiens
  misc_RNA (1)...(19): siRNA sense strand
gaagggaguuugcuaaauu

SEQ ID NO: 657260 - RNA, 19 nt, Homo sapiens
  misc_RNA (1)...(19): siRNA sense strand
ccacagacauuuacauuaa

SEQ ID NO: 657261 - RNA, 19 nt, Homo sapiens
  misc_RNA (1)...(19): siRNA sense strand
gcgcauaucuggaaauuug

SEQ ID NO: 657262 - RNA, 19 nt, Homo sapiens
  misc_RNA (1)...(19): siRNA sense strand
gaagagggauaauacaaau

SEQ ID NO: 657263 - RNA, 19 nt, Homo sapiens
  misc_RNA (1)...(19): siRNA sense strand
gugaagacauggaugcuua

SEQ ID NO: 657264 - RNA, 19 nt, Homo sapiens
  misc_RNA (1)...(19): siRNA sense strand
gaaagacgauuuggagaau

SEQ ID NO: 657265 - RNA, 19 nt, Homo sapiens
  misc_RNA (1)...(19): siRNA sense strand
guaauucaguugaucauug

SEQ ID NO: 657266 - RNA, 19 nt, Homo sapiens
  misc_RNA (1)...(19): siRNA sense strand
gaaaugaggaggauuacuu

SEQ ID NO: 657267 - RNA, 19 nt, Homo sapiens
  misc_RNA (1)...(19): siRNA sense strand
caaaucauguggagaaugu

SEQ ID NO: 657268 - RNA, 19 nt, Homo sapiens
  misc_RNA (1)...(19): siRNA sense strand
gaacugcaccagcccauuu

SEQ ID NO: 657269 - RNA, 19 nt, Homo sapiens
  misc_RNA (1)...(19): siRNA sense strand
guacagauccgaaguuuca

SEQ ID NO: 657270 - RNA, 19 nt, Homo sapiens
  misc_RNA (1)...(19): siRNA sense strand
cagaugaaguuaacaguga

SEQ ID NO: 657271 - RNA, 19 nt, Homo sapiens
  misc_RNA (1)...(19): siRNA sense strand
ggaguuugcuaaauuugaa

SEQ ID NO: 657272 - RNA, 19 nt, Homo sapiens
  misc_RNA (1)...(19): siRNA sense strand
gugcagagccuucaauaaa

SEQ ID NO: 657273 - RNA, 19 nt, Homo sapiens
  misc_RNA (1)...(19): siRNA sense strand
gaacaacgaggucaugguu

SEQ ID NO: 657274 - RNA, 19 nt, Homo sapiens
  misc_RNA (1)...(19): siRNA sense strand
gaaacuugguggcauuguu

SEQ ID NO: 657275 - RNA, 19 nt, Homo sapiens
  misc_RNA (1)...(19): siRNA sense strand
gaaaugguguuugcaagug

SEQ ID NO: 657276 - RNA, 19 nt, Homo sapiens
  misc_RNA (1)...(19): siRNA sense strand
ggaagagggauaauacaaa

SEQ ID NO: 657277 - RNA, 19 nt, Homo sapiens
  misc_RNA (1)...(19): siRNA sense strand
caaauugucagaaggagua

SEQ ID NO: 657278 - RNA, 19 nt, Homo sapiens
  misc_RNA (1)...(19): siRNA sense strand
ggagaaguauuuaaugaac

SEQ ID NO: 657279 - RNA, 19 nt, Homo sapiens
  misc_RNA (1)...(19): siRNA sense strand
cccagaggcuccaaagaua

SEQ ID NO: 657280 - RNA, 19 nt, Homo sapiens
  misc_RNA (1)...(19): siRNA sense strand
gcugaagacuaucccauug

SEQ ID NO: 657281 - RNA, 19 nt, Homo sapiens
  misc_RNA (1)...(19): siRNA sense strand
agacaucauuccaauugua

SEQ ID NO: 657282 - RNA, 19 nt, Homo sapiens
  misc_RNA (1)...(19): siRNA sense strand
gauccugugucccauugua

SEQ ID NO: 657283 - RNA, 19 nt, Homo sapiens
  misc_RNA (1)...(19): siRNA sense strand
ggaaguagagguuauucuu

SEQ ID NO: 657284 - RNA, 19 nt, Homo sapiens
  misc_RNA (1)...(19): siRNA sense strand
ucagaaggaguaacaauaa

SEQ ID NO: 657285 - RNA, 19 nt, Homo sapiens
  misc_RNA (1)...(19): siRNA sense strand
gaaaaugaaugccaaaugg

SEQ ID NO: 657286 - RNA, 19 nt, Homo sapiens
  misc_RNA (1)...(19): siRNA sense strand
gcaagugucguguguguga

SEQ ID NO: 657287 - RNA, 19 nt, Homo sapiens
  misc_RNA (1)...(19): siRNA sense strand
gugauaauuucaacuguga

SEQ ID NO: 657288 - RNA, 19 nt, Homo sapiens
  misc_RNA (1)...(19): siRNA sense strand
acaauucccuuuccucaga

SEQ ID NO: 657289 - RNA, 19 nt, Homo sapiens
  misc_RNA (1)...(19): siRNA sense strand
gaaggaguaacaauaaguu

SEQ ID NO: 657290 - RNA, 19 nt, Homo sapiens
  misc_RNA (1)...(19): siRNA sense strand
gcaauguaauucaguugau

SEQ ID NO: 657291 - RNA, 19 nt, Homo sapiens
  misc_RNA (1)...(19): siRNA sense strand
gguagaaagucgggacaaa

SEQ ID NO: 657292 - RNA, 19 nt, Homo sapiens
  misc_RNA (1)...(19): siRNA sense strand
gaaggauguugacgacugu

SEQ ID NO: 657293 - RNA, 19 nt, Homo sapiens
  misc_RNA (1)...(19): siRNA sense strand
aaacagcgcauaucuggaa

SEQ ID NO: 657294 - RNA, 19 nt, Homo sapiens
  misc_RNA (1)...(19): siRNA sense strand
ccagacaucauuccaauug

SEQ ID NO: 657295 - RNA, 19 nt, Homo sapiens
  misc_RNA (1)...(19): siRNA sense strand
guaaggagaaggauguuga

SEQ ID NO: 657296 - RNA, 19 nt, Homo sapiens
  misc_RNA (1)...(19): siRNA sense strand
ugauagauccaauggcuua

SEQ ID NO: 657297 - RNA, 19 nt, Homo sapiens
  misc_RNA (1)...(19): siRNA sense strand
gaaaucugcaguaacaaug

SEQ ID NO: 657298 - RNA, 19 nt, Homo sapiens
  misc_RNA (1)...(19): siRNA sense strand
gcaugugacuguucuuugg

SEQ ID NO: 657299 - RNA, 19 nt, Homo sapiens
  misc_RNA (1)...(19): siRNA sense strand
ggagaugagguucaauuug

SEQ ID NO: 657300 - RNA, 19 nt, Homo sapiens
  misc_RNA (1)...(19): siRNA sense strand
cagaggauauuacucagau

SEQ ID NO: 657301 - RNA, 19 nt, Homo sapiens
  misc_RNA (1)...(19): siRNA sense strand
gcaaacgugugagaugugu

SEQ ID NO: 657302 - RNA, 19 nt, Homo sapiens
  misc_RNA (1)...(19): siRNA sense strand
gaaagucccaagugucaug

SEQ ID NO: 657303 - RNA, 19 nt, Homo sapiens
  misc_RNA (1)...(19): siRNA sense strand
gugcucagucuuacuaaua

SEQ ID NO: 657304 - RNA, 19 nt, Homo sapiens
  misc_RNA (1)...(19): siRNA sense strand
ggacuucagaauuggauuu

SEQ ID NO: 657305 - RNA, 19 nt, Homo sapiens
  misc_RNA (1)...(19): siRNA sense strand
gcaaaggaacagcagagaa

SEQ ID NO: 657306 - RNA, 19 nt, Homo sapiens
  misc_RNA (1)...(19): siRNA sense strand
gggcaaacgugugagaugu

SEQ ID NO: 657307 - RNA, 19 nt, Homo sapiens
  misc_RNA (1)...(19): siRNA sense strand
ugcacgaugugaugauuua

SEQ ID NO: 657308 - RNA, 19 nt, Homo sapiens
  misc_RNA (1)...(19): siRNA sense strand
uagauccaauggcuuaauu

SEQ ID NO: 657309 - RNA, 19 nt, Homo sapiens
  misc_RNA (1)...(19): siRNA sense strand
gaauuggauuuggcucauu

SEQ ID NO: 657310 - RNA, 19 nt, Homo sapiens
  misc_RNA (1)...(19): siRNA sense strand
uagaaagucgggacaaauu

SEQ ID NO: 657311 - RNA, 19 nt, Homo sapiens
  misc_RNA (1)...(19): siRNA sense strand
aaugaaaugaggaggauua

SEQ ID NO: 657312 - RNA, 19 nt, Homo sapiens
  misc_RNA (1)...(19): siRNA sense strand
aauuguagcuggugugguu

SEQ ID NO: 657313 - RNA, 19 nt, Homo sapiens
  misc_RNA (1)...(19): siRNA sense strand
agaaagucgggacaaauua

SEQ ID NO: 657314 - RNA, 19 nt, Homo sapiens
  misc_RNA (1)...(19): siRNA sense strand
gagcauaaagaauguguuc

SEQ ID NO: 657315 - RNA, 19 nt, Homo sapiens
  misc_RNA (1)...(19): siRNA sense strand
uccaauggcuuaauuugug

SEQ ID NO: 657316 - RNA, 19 nt, Homo sapiens
  misc_RNA (1)...(19): siRNA sense strand
gaaguuaacagugaagaca

SEQ ID NO: 657317 - RNA, 19 nt, Homo sapiens
  misc_RNA (1)...(19): siRNA sense strand
cagcacagaugaaguuaac

SEQ ID NO: 657318 - RNA, 19 nt, Homo sapiens
  misc_RNA (1)...(19): siRNA sense strand
gcaaaugccaaaucaugug

SEQ ID NO: 657319 - RNA, 19 nt, Homo sapiens
  misc_RNA (1)...(19): siRNA sense strand
gaagaauuucagccuguuu

SEQ ID NO: 657320 - RNA, 19 nt, Homo sapiens
  misc_RNA (1)...(19): siRNA sense strand
cagaggcuccaaagauaua

SEQ ID NO: 657321 - RNA, 19 nt, Homo sapiens
  misc_RNA (1)...(19): siRNA sense strand
cugcugauauggaagcuuu

SEQ ID NO: 657322 - RNA, 19 nt, Homo sapiens
  misc_RNA (1)...(19): siRNA sense strand
caacugugauagauccaau

SEQ ID NO: 657323 - RNA, 19 nt, Homo sapiens
  misc_RNA (1)...(19): siRNA sense strand
uagagguuauucuucagua

SEQ ID NO: 657324 - RNA, 19 nt, Homo sapiens
  misc_RNA (1)...(19): siRNA sense strand
cagcgcauaucuggaaauu

SEQ ID NO: 657325 - RNA, 19 nt, Homo sapiens
  misc_RNA (1)...(19): siRNA sense strand
caaaggaacagcagagaag

SEQ ID NO: 657326 - RNA, 19 nt, Homo sapiens
  misc_RNA (1)...(19): siRNA sense strand
gaacagcagagaagcucaa

SEQ ID NO: 657327 - RNA, 19 nt, Homo sapiens
  misc_RNA (1)...(19): siRNA sense strand
gauccaauggcuuaauuug

SEQ ID NO: 657328 - RNA, 19 nt, Homo sapiens
  misc_RNA (1)...(19): siRNA sense strand
gaaaacaguucagaaaucu

SEQ ID NO: 657329 - RNA, 19 nt, Homo sapiens
  misc_RNA (1)...(19): siRNA sense strand
caagugucaugaaggaaau

SEQ ID NO: 657330 - RNA, 19 nt, Homo sapiens
  misc_RNA (1)...(19): siRNA sense strand
gucagaaggaguaacaaua

SEQ ID NO: 657331 - RNA, 19 nt, Homo sapiens
  misc_RNA (1)...(19): siRNA sense strand
gaggauuacuucggacuuc

SEQ ID NO: 657332 - RNA, 19 nt, Homo sapiens
  misc_RNA (1)...(19): siRNA sense strand
ugaaagacgauuuggagaa

SEQ ID NO: 657333 - RNA, 19 nt, Homo sapiens
  misc_RNA (1)...(19): siRNA sense strand
gccacagacauuuacauua

SEQ ID NO: 657334 - RNA, 19 nt, Homo sapiens
  misc_RNA (1)...(19): siRNA sense strand
gcaguugguuuugcgauua

SEQ ID NO: 657335 - RNA, 19 nt, Homo sapiens
  misc_RNA (1)...(19): siRNA sense strand
aaaagacugugaugccuua

SEQ ID NO: 657336 - RNA, 19 nt, Homo sapiens
  misc_RNA (1)...(19): siRNA sense strand
ggaaaugguguuugcaagu

SEQ ID NO: 657337 - RNA, 19 nt, Homo sapiens
  misc_RNA (1)...(19): siRNA sense strand
gcgaaggcaucccugaaag

SEQ ID NO: 657338 - RNA, 19 nt, Homo sapiens
  misc_RNA (1)...(19): siRNA sense strand
gcucagucuuacuaauaaa

SEQ ID NO: 657339 - RNA, 19 nt, Homo sapiens
  misc_RNA (1)...(19): siRNA sense strand
gcaccagcccauuuagcua

SEQ ID NO: 657340 - RNA, 19 nt, Homo sapiens
  misc_RNA (1)...(19): siRNA sense strand
aagggaguuugcuaaauuu

SEQ ID NO: 657341 - RNA, 19 nt, Homo sapiens
  misc_RNA (1)...(19): siRNA sense strand
acaacgaggucaugguuca

SEQ ID NO: 657342 - RNA, 19 nt, Homo sapiens
  misc_RNA (1)...(19): siRNA sense strand
cugauuggcuggaggaaug

SEQ ID NO: 657343 - RNA, 19 nt, Homo sapiens
  misc_RNA (1)...(19): siRNA sense strand
aaguagagguuauucuuca

SEQ ID NO: 657344 - RNA, 19 nt, Homo sapiens
  misc_RNA (1)...(19): siRNA sense strand
guccagacaucauuccaau

SEQ ID NO: 657345 - RNA, 19 nt, Homo sapiens
  misc_RNA (1)...(19): siRNA sense strand
gaaagucgggacaaauuac

SEQ ID NO: 657346 - RNA, 19 nt, Homo sapiens
  misc_RNA (1)...(19): siRNA sense strand
guguacagauccgaaguuu

SEQ ID NO: 657347 - RNA, 19 nt, Homo sapiens
  misc_RNA (1)...(19): siRNA sense strand
guaggaagagggauaauac

SEQ ID NO: 657348 - RNA, 19 nt, Homo sapiens
  misc_RNA (1)...(19): siRNA sense strand
ccaagugucaugaaggaaa

SEQ ID NO: 657349 - RNA, 19 nt, Homo sapiens
  misc_RNA (1)...(19): siRNA sense strand
gaucugaugaaugaaauga

SEQ ID NO: 657350 - RNA, 19 nt, Homo sapiens
  misc_RNA (1)...(19): siRNA sense strand
ggacaguguguuuguagga

SEQ ID NO: 657351 - RNA, 19 nt, Homo sapiens
  misc_RNA (1)...(19): siRNA sense strand
cauuacugcugauauggaa

SEQ ID NO: 657352 - RNA, 19 nt, Homo sapiens
  misc_RNA (1)...(19): siRNA sense strand
gcuccaaagauauaaagaa

SEQ ID NO: 657353 - RNA, 19 nt, Homo sapiens
  misc_RNA (1)...(19): siRNA sense strand
ugacgacuguugguucuau

SEQ ID NO: 657354 - RNA, 19 nt, Homo sapiens
  misc_RNA (1)...(19): siRNA sense strand
uguggugucuguaagugua

SEQ ID NO: 657355 - RNA, 19 nt, Homo sapiens
  misc_RNA (1)...(19): siRNA sense strand
gaggaaaugguguuugcaa

SEQ ID NO: 657356 - RNA, 19 nt, Homo sapiens
  misc_RNA (1)...(19): siRNA sense strand
gacaguguguuuguaggaa

SEQ ID NO: 657357 - RNA, 19 nt, Homo sapiens
  misc_RNA (1)...(19): siRNA sense strand
ccaaagaaaucaagacugu

SEQ ID NO: 657358 - RNA, 19 nt, Homo sapiens
  misc_RNA (1)...(19): siRNA sense strand
ccaagaacaugaccuuuga

SEQ ID NO: 657359 - RNA, 19 nt, Homo sapiens
  misc_RNA (1)...(19): siRNA sense strand
caaggaauccaguugaaua

SEQ ID NO: 657360 - RNA, 19 nt, Homo sapiens
  misc_RNA (1)...(19): siRNA sense strand
gguggaagguggccaguuu

SEQ ID NO: 657361 - RNA, 19 nt, Homo sapiens
  misc_RNA (1)...(19): siRNA sense strand
ggacauacacucacucuca

SEQ ID NO: 657362 - RNA, 19 nt, Homo sapiens
  misc_RNA (1)...(19): siRNA sense strand
ugacaaggcuucucaacau

SEQ ID NO: 657363 - RNA, 19 nt, Homo sapiens
  misc_RNA (1)...(19): siRNA sense strand
gcguucagcucaugaguuu

SEQ ID NO: 657364 - RNA, 19 nt, Homo sapiens
  misc_RNA (1)...(19): siRNA sense strand
ccagagacccugccuuuaa

SEQ ID NO: 657365 - RNA, 19 nt, Homo sapiens
  misc_RNA (1)...(19): siRNA sense strand
ggaauccaguugaauacaa

SEQ ID NO: 657366 - RNA, 19 nt, Homo sapiens
  misc_RNA (1)...(19): siRNA sense strand
gcacccagguccacaugaa

SEQ ID NO: 657367 - RNA, 19 nt, Homo sapiens
  misc_RNA (1)...(19): siRNA sense strand
cagagacccugccuuuaaa

SEQ ID NO: 657368 - RNA, 19 nt, Homo sapiens
  misc_RNA (1)...(19): siRNA sense strand
cgagaaaugcaacacguua

SEQ ID NO: 657369 - RNA, 19 nt, Homo sapiens
  misc_RNA (1)...(19): siRNA sense strand
ucaagacuguggaaucuau

SEQ ID NO: 657370 - RNA, 19 nt, Homo sapiens
  misc_RNA (1)...(19): siRNA sense strand
gaauccaguugaauacaau

SEQ ID NO: 657371 - RNA, 19 nt, Homo sapiens
  misc_RNA (1)...(19): siRNA sense strand
aaugcgagcuccaaagaaa

SEQ ID NO: 657372 - RNA, 19 nt, Homo sapiens
  misc_RNA (1)...(19): siRNA sense strand
gacauacacucacucucaa

SEQ ID NO: 657373 - RNA, 19 nt, Homo sapiens
  misc_RNA (1)...(19): siRNA sense strand
ggaagaggacauacacuca

SEQ ID NO: 657374 - RNA, 19 nt, Homo sapiens
  misc_RNA (1)...(19): siRNA sense strand
gaacuacgacaccaagagu

SEQ ID NO: 657375 - RNA, 19 nt, Homo sapiens
  misc_RNA (1)...(19): siRNA sense strand
cagggcagauauagauaaa

SEQ ID NO: 657376 - RNA, 19 nt, Homo sapiens
  misc_RNA (1)...(19): siRNA sense strand
ugacaucagggcagauaua

SEQ ID NO: 657377 - RNA, 19 nt, Homo sapiens
  misc_RNA (1)...(19): siRNA sense strand
caucagggcagauauagau

SEQ ID NO: 657378 - RNA, 19 nt, Homo sapiens
  misc_RNA (1)...(19): siRNA sense strand
aaauacagauguguuagug

SEQ ID NO: 657379 - RNA, 19 nt, Homo sapiens
  misc_RNA (1)...(19): siRNA sense strand
caacgggaccgcgugcaua

SEQ ID NO: 657380 - RNA, 19 nt, Homo sapiens
  misc_RNA (1)...(19): siRNA sense strand
gagacacgcugugaacaag

SEQ ID NO: 657381 - RNA, 19 nt, Homo sapiens
  misc_RNA (1)...(19): siRNA sense strand
gacaaggcuucucaacauc

SEQ ID NO: 657382 - RNA, 19 nt, Homo sapiens
  misc_RNA (1)...(19): siRNA sense strand
uacaaggaauccaguugaa

SEQ ID NO: 657383 - RNA, 19 nt, Homo sapiens
  misc_RNA (1)...(19): siRNA sense strand
gcucaugaguuuuguuuau

SEQ ID NO: 657384 - RNA, 19 nt, Homo sapiens
  misc_RNA (1)...(19): siRNA sense strand
ccaaugcgagcuccaaaga

SEQ ID NO: 657385 - RNA, 19 nt, Homo sapiens
  misc_RNA (1)...(19): siRNA sense strand
caaggcuucucaacaucaa

SEQ ID NO: 657386 - RNA, 19 nt, Homo sapiens
  misc_RNA (1)...(19): siRNA sense strand
ccuuugaccugccaucaga

SEQ ID NO: 657387 - RNA, 19 nt, Homo sapiens
  misc_RNA (1)...(19): siRNA sense strand
ggagagacacgcugugaac

SEQ ID NO: 657388 - RNA, 19 nt, Homo sapiens
  misc_RNA (1)...(19): siRNA sense strand
aaccgcagcuccuguggaa

SEQ ID NO: 657389 - RNA, 19 nt, Homo sapiens
  misc_RNA (1)...(19): siRNA sense strand
cuacaaggaauccaguuga

SEQ ID NO: 657390 - RNA, 19 nt, Homo sapiens
  misc_RNA (1)...(19): siRNA sense strand
gcaccaccguccugcucuu

SEQ ID NO: 657391 - RNA, 19 nt, Homo sapiens
  misc_RNA (1)...(19): siRNA sense strand
cagcugaaccucaccuaug

SEQ ID NO: 657392 - RNA, 19 nt, Homo sapiens
  misc_RNA (1)...(19): siRNA sense strand
aaucaagacuguggaaucu

SEQ ID NO: 657393 - RNA, 19 nt, Homo sapiens
  misc_RNA (1)...(19): siRNA sense strand
cauaauggccaacuucucu

SEQ ID NO: 657394 - RNA, 19 nt, Homo sapiens
  misc_RNA (1)...(19): siRNA sense strand
uacacucacucucaauuuc

SEQ ID NO: 657395 - RNA, 19 nt, Homo sapiens
  misc_RNA (1)...(19): siRNA sense strand
cgccagagacccugccuuu

SEQ ID NO: 657396 - RNA, 19 nt, Homo sapiens
  misc_RNA (1)...(19): siRNA sense strand
ccagucucgugauugcuuu

SEQ ID NO: 657397 - RNA, 19 nt, Homo sapiens
  misc_RNA (1)...(19): siRNA sense strand
gggaugaaugcaaguucua

SEQ ID NO: 657398 - RNA, 19 nt, Homo sapiens
  misc_RNA (1)...(19): siRNA sense strand
ucagggcagauauagauaa

SEQ ID NO: 657399 - RNA, 19 nt, Homo sapiens
  misc_RNA (1)...(19): siRNA sense strand
gaaaucaagacuguggaau

SEQ ID NO: 657400 - RNA, 19 nt, Homo sapiens
  misc_RNA (1)...(19): siRNA sense strand
uuacagcguucagcucaug

SEQ ID NO: 657401 - RNA, 19 nt, Homo sapiens
  misc_RNA (1)...(19): siRNA sense strand
gccagagacccugccuuua

SEQ ID NO: 657402 - RNA, 19 nt, Homo sapiens
  misc_RNA (1)...(19): siRNA sense strand
agcugaaccucaccuauga

SEQ ID NO: 657403 - RNA, 19 nt, Homo sapiens
  misc_RNA (1)...(19): siRNA sense strand
cauacacucacucucaauu

SEQ ID NO: 657404 - RNA, 19 nt, Homo sapiens
  misc_RNA (1)...(19): siRNA sense strand
gcaauuccuacaagugcaa

SEQ ID NO: 657405 - RNA, 19 nt, Homo sapiens
  misc_RNA (1)...(19): siRNA sense strand
gaccguaacgcuccaugau

SEQ ID NO: 657406 - RNA, 19 nt, Homo sapiens
  misc_RNA (1)...(19): siRNA sense strand
caagacuguggaaucuaua

SEQ ID NO: 657407 - RNA, 19 nt, Homo sapiens
  misc_RNA (1)...(19): siRNA sense strand
cccaagaacaugaccuuug

SEQ ID NO: 657408 - RNA, 19 nt, Homo sapiens
  misc_RNA (1)...(19): siRNA sense strand
ucugcugccuucucaguga

SEQ ID NO: 657409 - RNA, 19 nt, Homo sapiens
  misc_RNA (1)...(19): siRNA sense strand
cgucagcagccauguuuau

SEQ ID NO: 657410 - RNA, 19 nt, Homo sapiens
  misc_RNA (1)...(19): siRNA sense strand
gaacaacgugaccguaacg

SEQ ID NO: 657411 - RNA, 19 nt, Homo sapiens
  misc_RNA (1)...(19): siRNA sense strand
aaguguggguccaggcuuu

SEQ ID NO: 657412 - RNA, 19 nt, Homo sapiens
  misc_RNA (1)...(19): siRNA sense strand
gcagcugaaccucaccuau

SEQ ID NO: 657413 - RNA, 19 nt, Homo sapiens
  misc_RNA (1)...(19): siRNA sense strand
gcauggggcugcagcugaa

SEQ ID NO: 657414 - RNA, 19 nt, Homo sapiens
  misc_RNA (1)...(19): siRNA sense strand
auacacucacucucaauuu

SEQ ID NO: 657415 - RNA, 19 nt, Homo sapiens
  misc_RNA (1)...(19): siRNA sense strand
gaaucuauaacugacauca

SEQ ID NO: 657416 - RNA, 19 nt, Homo sapiens
  misc_RNA (1)...(19): siRNA sense strand
gucgucagcagccauguuu

SEQ ID NO: 657417 - RNA, 19 nt, Homo sapiens
  misc_RNA (1)...(19): siRNA sense strand
cacgcaggcuaccagacua

SEQ ID NO: 657418 - RNA, 19 nt, Homo sapiens
  misc_RNA (1)...(19): siRNA sense strand
ccacagucggcaauuccua

SEQ ID NO: 657419 - RNA, 19 nt, Homo sapiens
  misc_RNA (1)...(19): siRNA sense strand
aggcguaccuuuccaacag

SEQ ID NO: 657420 - RNA, 19 nt, Homo sapiens
  misc_RNA (1)...(19): siRNA sense strand
gagaaaugcaacacguuac

SEQ ID NO: 657421 - RNA, 19 nt, Homo sapiens
  misc_RNA (1)...(19): siRNA sense strand
ugcaaguucuagccgguuu

SEQ ID NO: 657422 - RNA, 19 nt, Homo sapiens
  misc_RNA (1)...(19): siRNA sense strand
ggacaacacgacggugaca

SEQ ID NO: 657423 - RNA, 19 nt, Homo sapiens
  misc_RNA (1)...(19): siRNA sense strand
ugaacaacgugaccguaac

SEQ ID NO: 657424 - RNA, 19 nt, Homo sapiens
  misc_RNA (1)...(19): siRNA sense strand
caaugcgagcuccaaagaa

SEQ ID NO: 657425 - RNA, 19 nt, Homo sapiens
  misc_RNA (1)...(19): siRNA sense strand
caggcuaccagacuaucua

SEQ ID NO: 657426 - RNA, 19 nt, Homo sapiens
  misc_RNA (1)...(19): siRNA sense strand
gugcauaauggccaacuuc

SEQ ID NO: 657427 - RNA, 19 nt, Homo sapiens
  misc_RNA (1)...(19): siRNA sense strand
gugacaaggcuucucaaca

SEQ ID NO: 657428 - RNA, 19 nt, Homo sapiens
  misc_RNA (1)...(19): siRNA sense strand
ccuaugagaggaaggacaa

SEQ ID NO: 657429 - RNA, 19 nt, Homo sapiens
  misc_RNA (1)...(19): siRNA sense strand
agagacacgcugugaacaa

SEQ ID NO: 657430 - RNA, 19 nt, Homo sapiens
  misc_RNA (1)...(19): siRNA sense strand
gggagagacacgcugugaa

SEQ ID NO: 657431 - RNA, 19 nt, Homo sapiens
  misc_RNA (1)...(19): siRNA sense strand
gaaaugcaacacguuacag

SEQ ID NO: 657432 - RNA, 19 nt, Homo sapiens
  misc_RNA (1)...(19): siRNA sense strand
gacaucagggcagauauag

SEQ ID NO: 657433 - RNA, 19 nt, Homo sapiens
  misc_RNA (1)...(19): siRNA sense strand
aaaucaagacuguggaauc

SEQ ID NO: 657434 - RNA, 19 nt, Homo sapiens
  misc_RNA (1)...(19): siRNA sense strand
agaaaucaagacuguggaa

SEQ ID NO: 657435 - RNA, 19 nt, Homo sapiens
  misc_RNA (1)...(19): siRNA sense strand
gaaggcguuuucagucaau

SEQ ID NO: 657436 - RNA, 19 nt, Homo sapiens
  misc_RNA (1)...(19): siRNA sense strand
cuucucugcugccuucuca

SEQ ID NO: 657437 - RNA, 19 nt, Homo sapiens
  misc_RNA (1)...(19): siRNA sense strand
gacacgcugugaacaagac

SEQ ID NO: 657438 - RNA, 19 nt, Homo sapiens
  misc_RNA (1)...(19): siRNA sense strand
gggaccgcgugcauaaugg

SEQ ID NO: 657439 - RNA, 19 nt, Homo sapiens
  misc_RNA (1)...(19): siRNA sense strand
uggaaucuauaacugacau

SEQ ID NO: 657440 - RNA, 19 nt, Homo sapiens
  misc_RNA (1)...(19): siRNA sense strand
cgugauugcuuuuggaaga

SEQ ID NO: 657441 - RNA, 19 nt, Homo sapiens
  misc_RNA (1)...(19): siRNA sense strand
ggaugaaugcaaguucuag

SEQ ID NO: 657442 - RNA, 19 nt, Homo sapiens
  misc_RNA (1)...(19): siRNA sense strand
gagagacacgcugugaaca

SEQ ID NO: 657443 - RNA, 19 nt, Homo sapiens
  misc_RNA (1)...(19): siRNA sense strand
agaaaugcaacacguuaca

SEQ ID NO: 657444 - RNA, 19 nt, Homo sapiens
  misc_RNA (1)...(19): siRNA sense strand
gaggacauacacucacucu

SEQ ID NO: 657445 - RNA, 19 nt, Homo sapiens
  misc_RNA (1)...(19): siRNA sense strand
ggaaagagcucaagaagga

SEQ ID NO: 657446 - RNA, 19 nt, Homo sapiens
  misc_RNA (1)...(19): siRNA sense strand
ggauaaggcuuuagaacaa

SEQ ID NO: 657447 - RNA, 19 nt, Homo sapiens
  misc_RNA (1)...(19): siRNA sense strand
gagagaagcuuucaguaug

SEQ ID NO: 657448 - RNA, 19 nt, Homo sapiens
  misc_RNA (1)...(19): siRNA sense strand
ccacugagcaugucucuua

SEQ ID NO: 657449 - RNA, 19 nt, Homo sapiens
  misc_RNA (1)...(19): siRNA sense strand
gauaaagacuuggaacaaa

SEQ ID NO: 657450 - RNA, 19 nt, Homo sapiens
  misc_RNA (1)...(19): siRNA sense strand
gaagaaggaugccaagaag

SEQ ID NO: 657451 - RNA, 19 nt, Homo sapiens
  misc_RNA (1)...(19): siRNA sense strand
gaagagaggagagaucaua

SEQ ID NO: 657452 - RNA, 19 nt, Homo sapiens
  misc_RNA (1)...(19): siRNA sense strand
ugacaaacuuucuuccuuu

SEQ ID NO: 657453 - RNA, 19 nt, Homo sapiens
  misc_RNA (1)...(19): siRNA sense strand
gaagacacccagucacuuu

SEQ ID NO: 657454 - RNA, 19 nt, Homo sapiens
  misc_RNA (1)...(19): siRNA sense strand
gacaaagacuuagaagaaa

SEQ ID NO: 657455 - RNA, 19 nt, Homo sapiens
  misc_RNA (1)...(19): siRNA sense strand
gaagaucccagaagagaaa

SEQ ID NO: 657456 - RNA, 19 nt, Homo sapiens
  misc_RNA (1)...(19): siRNA sense strand
gaaggaaggaggagaagaa

SEQ ID NO: 657457 - RNA, 19 nt, Homo sapiens
  misc_RNA (1)...(19): siRNA sense strand
gaaacugaggcacauguua

SEQ ID NO: 657458 - RNA, 19 nt, Homo sapiens
  misc_RNA (1)...(19): siRNA sense strand
ccaagagccuccagucuga

SEQ ID NO: 657459 - RNA, 19 nt, Homo sapiens
  misc_RNA (1)...(19): siRNA sense strand
gacaaagccuuagaucaaa

SEQ ID NO: 657460 - RNA, 19 nt, Homo sapiens
  misc_RNA (1)...(19): siRNA sense strand
gacaaagccuuagaacaaa

SEQ ID NO: 657461 - RNA, 19 nt, Homo sapiens
  misc_RNA (1)...(19): siRNA sense strand
gaagagggcacacuagaga

SEQ ID NO: 657462 - RNA, 19 nt, Homo sapiens
  misc_RNA (1)...(19): siRNA sense strand
ggaaagugaaccugaagua

SEQ ID NO: 657463 - RNA, 19 nt, Homo sapiens
  misc_RNA (1)...(19): siRNA sense strand
agacaaagccuuagaacaa

SEQ ID NO: 657464 - RNA, 19 nt, Homo sapiens
  misc_RNA (1)...(19): siRNA sense strand
gggaggaggugguagaaga

SEQ ID NO: 657465 - RNA, 19 nt, Homo sapiens
  misc_RNA (1)...(19): siRNA sense strand
agacaaagacuuagaagaa

SEQ ID NO: 657466 - RNA, 19 nt, Homo sapiens
  misc_RNA (1)...(19): siRNA sense strand
gaaagcugaucaaagacaa

SEQ ID NO: 657467 - RNA, 19 nt, Homo sapiens
  misc_RNA (1)...(19): siRNA sense strand
gaacagaaggauaagauuc

SEQ ID NO: 657468 - RNA, 19 nt, Homo sapiens
  misc_RNA (1)...(19): siRNA sense strand
ccacacagcucccaugucu

SEQ ID NO: 657469 - RNA, 19 nt, Homo sapiens
  misc_RNA (1)...(19): siRNA sense strand
gacaaucccuggcuacuca

SEQ ID NO: 657470 - RNA, 19 nt, Homo sapiens
  misc_RNA (1)...(19): siRNA sense strand
gaaagugaaccugaaguaa

SEQ ID NO: 657471 - RNA, 19 nt, Homo sapiens
  misc_RNA (1)...(19): siRNA sense strand
gauaagccauucccucuag

SEQ ID NO: 657472 - RNA, 19 nt, Homo sapiens
  misc_RNA (1)...(19): siRNA sense strand
gaaggaaccugagccaaag

SEQ ID NO: 657473 - RNA, 19 nt, Homo sapiens
  misc_RNA (1)...(19): siRNA sense strand
gaaagacaaagccuuagaa

SEQ ID NO: 657474 - RNA, 19 nt, Homo sapiens
  misc_RNA (1)...(19): siRNA sense strand
ggaaugacccugccaaugg

SEQ ID NO: 657475 - RNA, 19 nt, Homo sapiens
  misc_RNA (1)...(19): siRNA sense strand
uaucaaagcuggaagaaaa

SEQ ID NO: 657476 - RNA, 19 nt, Homo sapiens
  misc_RNA (1)...(19): siRNA sense strand
aaacacaucugcagagaag

SEQ ID NO: 657477 - RNA, 19 nt, Homo sapiens
  misc_RNA (1)...(19): siRNA sense strand
ccucagacuucaaggauuu

SEQ ID NO: 657478 - RNA, 19 nt, Homo sapiens
  misc_RNA (1)...(19): siRNA sense strand
gcaaaccucagaaagauga

SEQ ID NO: 657479 - RNA, 19 nt, Homo sapiens
  misc_RNA (1)...(19): siRNA sense strand
gaggagaagaggaaagaua

SEQ ID NO: 657480 - RNA, 19 nt, Homo sapiens
  misc_RNA (1)...(19): siRNA sense strand
aaagauaccugggaggaaa

SEQ ID NO: 657481 - RNA, 19 nt, Homo sapiens
  misc_RNA (1)...(19): siRNA sense strand
caagaaacaucuccuacca

SEQ ID NO: 657482 - RNA, 19 nt, Homo sapiens
  misc_RNA (1)...(19): siRNA sense strand
gauaaggcuuuagaacaaa

SEQ ID NO: 657483 - RNA, 19 nt, Homo sapiens
  misc_RNA (1)...(19): siRNA sense strand
gagaaacuuugcagucaau

SEQ ID NO: 657484 - RNA, 19 nt, Homo sapiens
  misc_RNA (1)...(19): siRNA sense strand
gcagaggagcggugccuua

SEQ ID NO: 657485 - RNA, 19 nt, Homo sapiens
  misc_RNA (1)...(19): siRNA sense strand
agacaaagccuuagaucaa

SEQ ID NO: 657486 - RNA, 19 nt, Homo sapiens
  misc_RNA (1)...(19): siRNA sense strand
ggaaggaggagaagaagga

SEQ ID NO: 657487 - RNA, 19 nt, Homo sapiens
  misc_RNA (1)...(19): siRNA sense strand
gaacaguaccuacacaaag

SEQ ID NO: 657488 - RNA, 19 nt, Homo sapiens
  misc_RNA (1)...(19): siRNA sense strand
aagcagcucucuccagaaa

SEQ ID NO: 657489 - RNA, 19 nt, Homo sapiens
  misc_RNA (1)...(19): siRNA sense strand
cgacucagaugaagaugga

SEQ ID NO: 657490 - RNA, 19 nt, Homo sapiens
  misc_RNA (1)...(19): siRNA sense strand
ggacagagaccuagaacag

SEQ ID NO: 657491 - RNA, 19 nt, Homo sapiens
  misc_RNA (1)...(19): siRNA sense strand
gccaaaggaugaaguuuua

SEQ ID NO: 657492 - RNA, 19 nt, Homo sapiens
  misc_RNA (1)...(19): siRNA sense strand
gacagaaccucagaacaga

SEQ ID NO: 657493 - RNA, 19 nt, Homo sapiens
  misc_RNA (1)...(19): siRNA sense strand
gccauaaagugggaagaua

SEQ ID NO: 657494 - RNA, 19 nt, Homo sapiens
  misc_RNA (1)...(19): siRNA sense strand
gaagaggaaagauaccaaa

SEQ ID NO: 657495 - RNA, 19 nt, Homo sapiens
  misc_RNA (1)...(19): siRNA sense strand
gagaagaucccagaagaga

SEQ ID NO: 657496 - RNA, 19 nt, Homo sapiens
  misc_RNA (1)...(19): siRNA sense strand
ccacccagauuucauacaa

SEQ ID NO: 657497 - RNA, 19 nt, Homo sapiens
  misc_RNA (1)...(19): siRNA sense strand
guaagacccucuauaaagc

SEQ ID NO: 657498 - RNA, 19 nt, Homo sapiens
  misc_RNA (1)...(19): siRNA sense strand
ugacagcacuagugacuca

SEQ ID NO: 657499 - RNA, 19 nt, Homo sapiens
  misc_RNA (1)...(19): siRNA sense strand
gaagagaaccaccaaacuc

SEQ ID NO: 657500 - RNA, 19 nt, Homo sapiens
  misc_RNA (1)...(19): siRNA sense strand
agagaaagacaaagccuua

SEQ ID NO: 657501 - RNA, 19 nt, Homo sapiens
  misc_RNA (1)...(19): siRNA sense strand
agagaaagacaaagccuua

SEQ ID NO: 657502 - RNA, 19 nt, Homo sapiens
  misc_RNA (1)...(19): siRNA sense strand
agcgaaagcugaucaaaga

SEQ ID NO: 657503 - RNA, 19 nt, Homo sapiens
  misc_RNA (1)...(19): siRNA sense strand
gaaggagaccucguuauuc

SEQ ID NO: 657504 - RNA, 19 nt, Homo sapiens
  misc_RNA (1)...(19): siRNA sense strand
acacaggacuaggagauaa

SEQ ID NO: 657505 - RNA, 19 nt, Homo sapiens
  misc_RNA (1)...(19): siRNA sense strand
guacguaagacccucuaua

SEQ ID NO: 657506 - RNA, 19 nt, Homo sapiens
  misc_RNA (1)...(19): siRNA sense strand
gcagagaggcucccagaca

SEQ ID NO: 657507 - RNA, 19 nt, Homo sapiens
  misc_RNA (1)...(19): siRNA sense strand
ugaggaaguucggcuagua

SEQ ID NO: 657508 - RNA, 19 nt, Homo sapiens
  misc_RNA (1)...(19): siRNA sense strand
ggaggagacagcaaacgua

SEQ ID NO: 657509 - RNA, 19 nt, Homo sapiens
  misc_RNA (1)...(19): siRNA sense strand
uaaaggaggaugugauaga

SEQ ID NO: 657510 - RNA, 19 nt, Homo sapiens
  misc_RNA (1)...(19): siRNA sense strand
aaagugaaccugaaguaaa

SEQ ID NO: 657511 - RNA, 19 nt, Homo sapiens
  misc_RNA (1)...(19): siRNA sense strand
ggacaagaagaacauguga

SEQ ID NO: 657512 - RNA, 19 nt, Homo sapiens
  misc_RNA (1)...(19): siRNA sense strand
gaaagacaaagccuuagau

SEQ ID NO: 657513 - RNA, 19 nt, Homo sapiens
  misc_RNA (1)...(19): siRNA sense strand
acacagcccuagaacagaa

SEQ ID NO: 657514 - RNA, 19 nt, Homo sapiens
  misc_RNA (1)...(19): siRNA sense strand
aaacagaggaagagaaaga

SEQ ID NO: 657515 - RNA, 19 nt, Homo sapiens
  misc_RNA (1)...(19): siRNA sense strand
aaccugagcucaagaagau

SEQ ID NO: 657516 - RNA, 19 nt, Homo sapiens
  misc_RNA (1)...(19): siRNA sense strand
gauaaagucucagaaaaga

SEQ ID NO: 657517 - RNA, 19 nt, Homo sapiens
  misc_RNA (1)...(19): siRNA sense strand
acaaggcccuggaaccaaa

SEQ ID NO: 657518 - RNA, 19 nt, Homo sapiens
  misc_RNA (1)...(19): siRNA sense strand
auacagcccuggaacagaa

SEQ ID NO: 657519 - RNA, 19 nt, Homo sapiens
  misc_RNA (1)...(19): siRNA sense strand
acaaggcccuggaacagaa

SEQ ID NO: 657520 - RNA, 19 nt, Homo sapiens
  misc_RNA (1)...(19): siRNA sense strand
acaaggcccuggaaccaaa

SEQ ID NO: 657521 - RNA, 19 nt, Homo sapiens
  misc_RNA (1)...(19): siRNA sense strand
gggcagagacuuagagcaa

SEQ ID NO: 657522 - RNA, 19 nt, Homo sapiens
  misc_RNA (1)...(19): siRNA sense strand
gugacaaacuuucuuccuu

SEQ ID NO: 657523 - RNA, 19 nt, Homo sapiens
  misc_RNA (1)...(19): siRNA sense strand
ugaaacagaggaagagaaa

SEQ ID NO: 657524 - RNA, 19 nt, Homo sapiens
  misc_RNA (1)...(19): siRNA sense strand
aaaggaggaugugauagaa

SEQ ID NO: 657525 - RNA, 19 nt, Homo sapiens
  misc_RNA (1)...(19): siRNA sense strand
cgaaacacaucugcagaga

SEQ ID NO: 657526 - RNA, 19 nt, Homo sapiens
  misc_RNA (1)...(19): siRNA sense strand
aggauaagauuccagaaga

SEQ ID NO: 657527 - RNA, 19 nt, Homo sapiens
  misc_RNA (1)...(19): siRNA sense strand
gauagcuccuucuccaaga

SEQ ID NO: 657528 - RNA, 19 nt, Homo sapiens
  misc_RNA (1)...(19): siRNA sense strand
gaacucaccuaccccacua

SEQ ID NO: 657529 - RNA, 19 nt, Homo sapiens
  misc_RNA (1)...(19): siRNA sense strand
ugaaggugcuggcccauuc

SEQ ID NO: 657530 - RNA, 19 nt, Homo sapiens
  misc_RNA (1)...(19): siRNA sense strand
agaaggagaccucguuauu

SEQ ID NO: 657531 - RNA, 19 nt, Homo sapiens
  misc_RNA (1)...(19): siRNA sense strand
gcccuuuacuccugaggua

SEQ ID NO: 657532 - RNA, 19 nt, Homo sapiens
  misc_RNA (1)...(19): siRNA sense strand
ggaaagggaagaagaaggu

SEQ ID NO: 657533 - RNA, 19 nt, Homo sapiens
  misc_RNA (1)...(19): siRNA sense strand
gaaggacagagaccuagaa

SEQ ID NO: 657534 - RNA, 19 nt, Homo sapiens
  misc_RNA (1)...(19): siRNA sense strand
ggacacggucgcugaaaug

SEQ ID NO: 657535 - RNA, 19 nt, Homo sapiens
  misc_RNA (1)...(19): siRNA sense strand
ggaggacauugccauaaag

SEQ ID NO: 657536 - RNA, 19 nt, Homo sapiens
  misc_RNA (1)...(19): siRNA sense strand
uggaggacauugccauaaa

SEQ ID NO: 657537 - RNA, 19 nt, Homo sapiens
  misc_RNA (1)...(19): siRNA sense strand
ugugaggacuucucuguga

SEQ ID NO: 657538 - RNA, 19 nt, Homo sapiens
  misc_RNA (1)...(19): siRNA sense strand
ggagaccucguuauuccua

SEQ ID NO: 657539 - RNA, 19 nt, Homo sapiens
  misc_RNA (1)...(19): siRNA sense strand
caacugaaaccagcccuaa

SEQ ID NO: 657540 - RNA, 19 nt, Homo sapiens
  misc_RNA (1)...(19): siRNA sense strand
ugagagaagcuuucaguau

SEQ ID NO: 657541 - RNA, 19 nt, Homo sapiens
  misc_RNA (1)...(19): siRNA sense strand
uggcugaguucuccgagua

SEQ ID NO: 657542 - RNA, 19 nt, Homo sapiens
  misc_RNA (1)...(19): siRNA sense strand
ccauaaagugggaagauaa

SEQ ID NO: 657543 - RNA, 19 nt, Homo sapiens
  misc_RNA (1)...(19): siRNA sense strand
gaaccuggcaaaccucaga

SEQ ID NO: 657544 - RNA, 19 nt, Homo sapiens
  misc_RNA (1)...(19): siRNA sense strand
agacaagggcuucaaauca

SEQ ID NO: 657545 - RNA, 19 nt, Homo sapiens
  misc_RNA (1)...(19): siRNA sense strand
gcauaaagaucauccuuga

SEQ ID NO: 657546 - RNA, 19 nt, Homo sapiens
  misc_RNA (1)...(19): siRNA sense strand
ugacagaguuguucuuauu

SEQ ID NO: 657547 - RNA, 19 nt, Homo sapiens
  misc_RNA (1)...(19): siRNA sense strand
gcagauggcuuaugaacca

SEQ ID NO: 657548 - RNA, 19 nt, Homo sapiens
  misc_RNA (1)...(19): siRNA sense strand
gagcgcauauugaguauca

SEQ ID NO: 657549 - RNA, 19 nt, Homo sapiens
  misc_RNA (1)...(19): siRNA sense strand
ggaagaggaacaagcauuu

SEQ ID NO: 657550 - RNA, 19 nt, Homo sapiens
  misc_RNA (1)...(19): siRNA sense strand
gaucuugguggaccuauua

SEQ ID NO: 657551 - RNA, 19 nt, Homo sapiens
  misc_RNA (1)...(19): siRNA sense strand
gaugaaaccuaugauuaug

SEQ ID NO: 657552 - RNA, 19 nt, Homo sapiens
  misc_RNA (1)...(19): siRNA sense strand
gaagaggaacaagcauuua

SEQ ID NO: 657553 - RNA, 19 nt, Homo sapiens
  misc_RNA (1)...(19): siRNA sense strand
uagaaacacugaugagaug

SEQ ID NO: 657554 - RNA, 19 nt, Homo sapiens
  misc_RNA (1)...(19): siRNA sense strand
acaaguaacuauucccaaa

SEQ ID NO: 657555 - RNA, 19 nt, Homo sapiens
  misc_RNA (1)...(19): siRNA sense strand
cagaauggcagauggcuua

SEQ ID NO: 657556 - RNA, 19 nt, Homo sapiens
  misc_RNA (1)...(19): siRNA sense strand
aaaggaggcaagaauauua

SEQ ID NO: 657557 - RNA, 19 nt, Homo sapiens
  misc_RNA (1)...(19): siRNA sense strand
gaacacaggaccagauaca

SEQ ID NO: 657558 - RNA, 19 nt, Homo sapiens
  misc_RNA (1)...(19): siRNA sense strand
cugaugagaugguugaauu

SEQ ID NO: 657559 - RNA, 19 nt, Homo sapiens
  misc_RNA (1)...(19): siRNA sense strand
aaacaaauccgucaugagu

SEQ ID NO: 657560 - RNA, 19 nt, Homo sapiens
  misc_RNA (1)...(19): siRNA sense strand
uagcagagcucggaaucuu

SEQ ID NO: 657561 - RNA, 19 nt, Homo sapiens
  misc_RNA (1)...(19): siRNA sense strand
uaaacgcccugcagaagau

SEQ ID NO: 657562 - RNA, 19 nt, Homo sapiens
  misc_RNA (1)...(19): siRNA sense strand
ggucagcggauuaaacaaa

SEQ ID NO: 657563 - RNA, 19 nt, Homo sapiens
  misc_RNA (1)...(19): siRNA sense strand
ggaaaaggaggcaagaaua

SEQ ID NO: 657564 - RNA, 19 nt, Homo sapiens
  misc_RNA (1)...(19): siRNA sense strand
caaaauugaugagccuuua

SEQ ID NO: 657565 - RNA, 19 nt, Homo sapiens
  misc_RNA (1)...(19): siRNA sense strand
aauggcagauggcuuauga

SEQ ID NO: 657566 - RNA, 19 nt, Homo sapiens
  misc_RNA (1)...(19): siRNA sense strand
cgaugaaaccuaugauuau

SEQ ID NO: 657567 - RNA, 19 nt, Homo sapiens
  misc_RNA (1)...(19): siRNA sense strand
ggaacaagcauuuaaaaga

SEQ ID NO: 657568 - RNA, 19 nt, Homo sapiens
  misc_RNA (1)...(19): siRNA sense strand
uuaaacaaauccgucauga

SEQ ID NO: 657569 - RNA, 19 nt, Homo sapiens
  misc_RNA (1)...(19): siRNA sense strand
acgaugaaaccuaugauua

SEQ ID NO: 657570 - RNA, 19 nt, Homo sapiens
  misc_RNA (1)...(19): siRNA sense strand
guaaacgcccugcagaaga

SEQ ID NO: 657571 - RNA, 19 nt, Homo sapiens
  misc_RNA (1)...(19): siRNA sense strand
aaacugaacagccagaaga

SEQ ID NO: 657572 - RNA, 19 nt, Homo sapiens
  misc_RNA (1)...(19): siRNA sense strand
uaccaacacuauaaaggaa

SEQ ID NO: 657573 - RNA, 19 nt, Homo sapiens
  misc_RNA (1)...(19): siRNA sense strand
gaucuagaaacacugauga

SEQ ID NO: 657574 - RNA, 19 nt, Homo sapiens
  misc_RNA (1)...(19): siRNA sense strand
agaacagugugaagcagua

SEQ ID NO: 657575 - RNA, 19 nt, Homo sapiens
  misc_RNA (1)...(19): siRNA sense strand
guaacuauucccaaagauu

SEQ ID NO: 657576 - RNA, 19 nt, Homo sapiens
  misc_RNA (1)...(19): siRNA sense strand
guuguagagugcauaaaga

SEQ ID NO: 657577 - RNA, 19 nt, Homo sapiens
  misc_RNA (1)...(19): siRNA sense strand
caaaccaccaucaagcuuu

SEQ ID NO: 657578 - RNA, 19 nt, Homo sapiens
  misc_RNA (1)...(19): siRNA sense strand
aaucaucccuaccuuggaa

SEQ ID NO: 657579 - RNA, 19 nt, Homo sapiens
  misc_RNA (1)...(19): siRNA sense strand
gaaaaggaggcaagaauau

SEQ ID NO: 657580 - RNA, 19 nt, Homo sapiens
  misc_RNA (1)...(19): siRNA sense strand
cuugguggaccuauuauua

SEQ ID NO: 657581 - RNA, 19 nt, Homo sapiens
  misc_RNA (1)...(19): siRNA sense strand
guagagugcauaaagauca

SEQ ID NO: 657582 - RNA, 19 nt, Homo sapiens
  misc_RNA (1)...(19): siRNA sense strand
ggaagagggccugcaguug

SEQ ID NO: 657583 - RNA, 19 nt, Homo sapiens
  misc_RNA (1)...(19): siRNA sense strand
cgaaucugaugcuguggaa

SEQ ID NO: 657584 - RNA, 19 nt, Homo sapiens
  misc_RNA (1)...(19): siRNA sense strand
gucgggagcuucgaucaaa

SEQ ID NO: 657585 - RNA, 19 nt, Homo sapiens
  misc_RNA (1)...(19): siRNA sense strand
caaagguggucagcggauu

SEQ ID NO: 657586 - RNA, 19 nt, Homo sapiens
  misc_RNA (1)...(19): siRNA sense strand
ggauaugauuauuccuaug

SEQ ID NO: 657587 - RNA, 19 nt, Homo sapiens
  misc_RNA (1)...(19): siRNA sense strand
gaguugaggcuguugauuc

SEQ ID NO: 657588 - RNA, 19 nt, Homo sapiens
  misc_RNA (1)...(19): siRNA sense strand
gauuuggcuggaucuauua

SEQ ID NO: 657589 - RNA, 19 nt, Homo sapiens
  misc_RNA (1)...(19): siRNA sense strand
gagucuagcaggaggaauu

SEQ ID NO: 657590 - RNA, 19 nt, Homo sapiens
  misc_RNA (1)...(19): siRNA sense strand
cacaguauuugcugcagaa

SEQ ID NO: 657591 - RNA, 19 nt, Homo sapiens
  misc_RNA (1)...(19): siRNA sense strand
cggauaugauuauuccuau

SEQ ID NO: 657592 - RNA, 19 nt, Homo sapiens
  misc_RNA (1)...(19): siRNA sense strand
uccuugaucuuauaucuga

SEQ ID NO: 657593 - RNA, 19 nt, Homo sapiens
  misc_RNA (1)...(19): siRNA sense strand
gaccuauuauuacuacaca

SEQ ID NO: 657594 - RNA, 19 nt, Homo sapiens
  misc_RNA (1)...(19): siRNA sense strand
agacuacaaugccaguguu

SEQ ID NO: 657595 - RNA, 19 nt, Homo sapiens
  misc_RNA (1)...(19): siRNA sense strand
aaguaacuauucccaaaga

SEQ ID NO: 657596 - RNA, 19 nt, Homo sapiens
  misc_RNA (1)...(19): siRNA sense strand
ugaaaccuaugauuauggu

SEQ ID NO: 657597 - RNA, 19 nt, Homo sapiens
  misc_RNA (1)...(19): siRNA sense strand
aaacacugaugagaugguu

SEQ ID NO: 657598 - RNA, 19 nt, Homo sapiens
  misc_RNA (1)...(19): siRNA sense strand
uacagaaugcacaguauuu

SEQ ID NO: 657599 - RNA, 19 nt, Homo sapiens
  misc_RNA (1)...(19): siRNA sense strand
aaagguggucagcggauua

SEQ ID NO: 657600 - RNA, 19 nt, Homo sapiens
  misc_RNA (1)...(19): siRNA sense strand
aagaggaacaagcauuuaa

SEQ ID NO: 657601 - RNA, 19 nt, Homo sapiens
  misc_RNA (1)...(19): siRNA sense strand
uauuaaggcucuccguaca

SEQ ID NO: 657602 - RNA, 19 nt, Homo sapiens
  misc_RNA (1)...(19): siRNA sense strand
gacgugcacagccuuauga

SEQ ID NO: 657603 - RNA, 19 nt, Homo sapiens
  misc_RNA (1)...(19): siRNA sense strand
uuaaggcucuccguacaga

SEQ ID NO: 657604 - RNA, 19 nt, Homo sapiens
  misc_RNA (1)...(19): siRNA sense strand
ggagaccuggagaccguua

SEQ ID NO: 657605 - RNA, 19 nt, Homo sapiens
  misc_RNA (1)...(19): siRNA sense strand
cauccuugaucuuauaucu

SEQ ID NO: 657606 - RNA, 19 nt, Homo sapiens
  misc_RNA (1)...(19): siRNA sense strand
ggacgugcacagccuuaug

SEQ ID NO: 657607 - RNA, 19 nt, Homo sapiens
  misc_RNA (1)...(19): siRNA sense strand
gagauuaugaugauaugag

SEQ ID NO: 657608 - RNA, 19 nt, Homo sapiens
  misc_RNA (1)...(19): siRNA sense strand
ugacuuugacugcgaguug

SEQ ID NO: 657609 - RNA, 19 nt, Homo sapiens
  misc_RNA (1)...(19): siRNA sense strand
acacaggaccagauacaga

SEQ ID NO: 657610 - RNA, 19 nt, Homo sapiens
  misc_RNA (1)...(19): siRNA sense strand
caggguggcuccggauaug

SEQ ID NO: 657611 - RNA, 19 nt, Homo sapiens
  misc_RNA (1)...(19): siRNA sense strand
ugaugagaugguugaauua

SEQ ID NO: 657612 - RNA, 19 nt, Homo sapiens
  misc_RNA (1)...(19): siRNA sense strand
cuagaagagauuaugauga

SEQ ID NO: 657613 - RNA, 19 nt, Homo sapiens
  misc_RNA (1)...(19): siRNA sense strand
cagaguuguucuuauugga

SEQ ID NO: 657614 - RNA, 19 nt, Homo sapiens
  misc_RNA (1)...(19): siRNA sense strand
gacagaguuguucuuauug

SEQ ID NO: 657615 - RNA, 19 nt, Homo sapiens
  misc_RNA (1)...(19): siRNA sense strand
cgagagaacacucaaacca

SEQ ID NO: 657616 - RNA, 19 nt, Homo sapiens
  misc_RNA (1)...(19): siRNA sense strand
cuacaaugccaguguuuca

SEQ ID NO: 657617 - RNA, 19 nt, Homo sapiens
  misc_RNA (1)...(19): siRNA sense strand
gucagcggauuaaacaaau

SEQ ID NO: 657618 - RNA, 19 nt, Homo sapiens
  misc_RNA (1)...(19): siRNA sense strand
gauaugauuauuccuaugc

SEQ ID NO: 657619 - RNA, 19 nt, Homo sapiens
  misc_RNA (1)...(19): siRNA sense strand
cggcaugguugguuucagu

SEQ ID NO: 657620 - RNA, 19 nt, Homo sapiens
  misc_RNA (1)...(19): siRNA sense strand
aaaccuucccuaacacuga

SEQ ID NO: 657621 - RNA, 19 nt, Homo sapiens
  misc_RNA (1)...(19): siRNA sense strand
gguaaacgcccugcagaag

SEQ ID NO: 657622 - RNA, 19 nt, Homo sapiens
  misc_RNA (1)...(19): siRNA sense strand
cuagaaacacugaugagau

SEQ ID NO: 657623 - RNA, 19 nt, Homo sapiens
  misc_RNA (1)...(19): siRNA sense strand
agaggaacaagcauuuaaa

SEQ ID NO: 657624 - RNA, 19 nt, Homo sapiens
  misc_RNA (1)...(19): siRNA sense strand
ccaacacuauaaaggaagu

SEQ ID NO: 657625 - RNA, 19 nt, Homo sapiens
  misc_RNA (1)...(19): siRNA sense strand
gacuuugacugcgaguuga

SEQ ID NO: 657626 - RNA, 19 nt, Homo sapiens
  misc_RNA (1)...(19): siRNA sense strand
agauacagaaugcacagua

SEQ ID NO: 657627 - RNA, 19 nt, Homo sapiens
  misc_RNA (1)...(19): siRNA sense strand
gaucuauuauuggcaaagg

SEQ ID NO: 657628 - RNA, 19 nt, Homo sapiens
  misc_RNA (1)...(19): siRNA sense strand
ucccaugccuccaucuaga

SEQ ID NO: 657629 - RNA, 19 nt, Homo sapiens
  misc_RNA (1)...(19): siRNA sense strand
aaagaucuagaaacacuga

SEQ ID NO: 657630 - RNA, 19 nt, Homo sapiens
  misc_RNA (1)...(19): siRNA sense strand
gaaacugaacagccagaag

SEQ ID NO: 657631 - RNA, 19 nt, Homo sapiens
  misc_RNA (1)...(19): siRNA sense strand
gaacagugugaagcaguau

SEQ ID NO: 657632 - RNA, 19 nt, Homo sapiens
  misc_RNA (1)...(19): siRNA sense strand
cacaggaccagauacagaa

SEQ ID NO: 657633 - RNA, 19 nt, Homo sapiens
  misc_RNA (1)...(19): siRNA sense strand
uuggcuggaucuauuauug

SEQ ID NO: 657634 - RNA, 19 nt, Homo sapiens
  misc_RNA (1)...(19): siRNA sense strand
ccggauaugauuauuccua

SEQ ID NO: 657635 - RNA, 19 nt, Homo sapiens
  misc_RNA (1)...(19): siRNA sense strand
acacugaugagaugguuga

SEQ ID NO: 657636 - RNA, 19 nt, Homo sapiens
  misc_RNA (1)...(19): siRNA sense strand
ugaugaaacuugggacucu

SEQ ID NO: 657637 - RNA, 19 nt, Homo sapiens
  misc_RNA (1)...(19): siRNA sense strand
cauggccuaugacagaaga

SEQ ID NO: 657638 - RNA, 19 nt, Homo sapiens
  misc_RNA (1)...(19): siRNA sense strand
cccgagcgcauauugagua

SEQ ID NO: 657639 - RNA, 19 nt, Homo sapiens
  misc_RNA (1)...(19): siRNA sense strand
guggaccuauuauuacuac

SEQ ID NO: 657640 - RNA, 19 nt, Homo sapiens
  misc_RNA (1)...(19): siRNA sense strand
gaugguugaauuacgcauu

SEQ ID NO: 657641 - RNA, 19 nt, Homo sapiens
  misc_RNA (1)...(19): siRNA sense strand
aguugaggcuguugauuca

SEQ ID NO: 657642 - RNA, 19 nt, Homo sapiens
  misc_RNA (1)...(19): siRNA sense strand
aaggaggcaagaauauuaa

SEQ ID NO: 657643 - RNA, 19 nt, Homo sapiens
  misc_RNA (1)...(19): siRNA sense strand
gaaacacugaugagauggu

SEQ ID NO: 657644 - RNA, 19 nt, Homo sapiens
  misc_RNA (1)...(19): siRNA sense strand
acagaguuguucuuauugg

SEQ ID NO: 657645 - RNA, 19 nt, Homo sapiens
  misc_RNA (1)...(19): siRNA sense strand
gcauaaagaucauccuuga

SEQ ID NO: 657646 - RNA, 19 nt, Homo sapiens
  misc_RNA (1)...(19): siRNA sense strand
ugacagaguuguucuuauu

SEQ ID NO: 657647 - RNA, 19 nt, Homo sapiens
  misc_RNA (1)...(19): siRNA sense strand
gcaguauucuggaaaguuu

SEQ ID NO: 657648 - RNA, 19 nt, Homo sapiens
  misc_RNA (1)...(19): siRNA sense strand
gcagauggcuuaugaacca

SEQ ID NO: 657649 - RNA, 19 nt, Homo sapiens
  misc_RNA (1)...(19): siRNA sense strand
gagcgcauauugaguauca

SEQ ID NO: 657650 - RNA, 19 nt, Homo sapiens
  misc_RNA (1)...(19): siRNA sense strand
ggaagaggaacaagcauuu

SEQ ID NO: 657651 - RNA, 19 nt, Homo sapiens
  misc_RNA (1)...(19): siRNA sense strand
gaucuugguggaccuauua

SEQ ID NO: 657652 - RNA, 19 nt, Homo sapiens
  misc_RNA (1)...(19): siRNA sense strand
gaugaaaccuaugauuaug

SEQ ID NO: 657653 - RNA, 19 nt, Homo sapiens
  misc_RNA (1)...(19): siRNA sense strand
gaagaggaacaagcauuua

SEQ ID NO: 657654 - RNA, 19 nt, Homo sapiens
  misc_RNA (1)...(19): siRNA sense strand
uagaaacacugaugagaug

SEQ ID NO: 657655 - RNA, 19 nt, Homo sapiens
  misc_RNA (1)...(19): siRNA sense strand
acaaguaacuauucccaaa

SEQ ID NO: 657656 - RNA, 19 nt, Homo sapiens
  misc_RNA (1)...(19): siRNA sense strand
cagaauggcagauggcuua

SEQ ID NO: 657657 - RNA, 19 nt, Homo sapiens
  misc_RNA (1)...(19): siRNA sense strand
aaaggaggcaagaauauua

SEQ ID NO: 657658 - RNA, 19 nt, Homo sapiens
  misc_RNA (1)...(19): siRNA sense strand
gaacacaggaccagauaca

SEQ ID NO: 657659 - RNA, 19 nt, Homo sapiens
  misc_RNA (1)...(19): siRNA sense strand
cugaugagaugguugaauu

SEQ ID NO: 657660 - RNA, 19 nt, Homo sapiens
  misc_RNA (1)...(19): siRNA sense strand
aaacaaauccgucaugagu

SEQ ID NO: 657661 - RNA, 19 nt, Homo sapiens
  misc_RNA (1)...(19): siRNA sense strand
uagcagagcucggaaucuu

SEQ ID NO: 657662 - RNA, 19 nt, Homo sapiens
  misc_RNA (1)...(19): siRNA sense strand
uaaacgcccugcagaagau

SEQ ID NO: 657663 - RNA, 19 nt, Homo sapiens
  misc_RNA (1)...(19): siRNA sense strand
gaagcaguauucuggaaag

SEQ ID NO: 657664 - RNA, 19 nt, Homo sapiens
  misc_RNA (1)...(19): siRNA sense strand
ggucagcggauuaaacaaa

SEQ ID NO: 657665 - RNA, 19 nt, Homo sapiens
  misc_RNA (1)...(19): siRNA sense strand
ggaaaaggaggcaagaaua

SEQ ID NO: 657666 - RNA, 19 nt, Homo sapiens
  misc_RNA (1)...(19): siRNA sense strand
caaaauugaugagccuuua

SEQ ID NO: 657667 - RNA, 19 nt, Homo sapiens
  misc_RNA (1)...(19): siRNA sense strand
aauggcagauggcuuauga

SEQ ID NO: 657668 - RNA, 19 nt, Homo sapiens
  misc_RNA (1)...(19): siRNA sense strand
cgaugaaaccuaugauuau

SEQ ID NO: 657669 - RNA, 19 nt, Homo sapiens
  misc_RNA (1)...(19): siRNA sense strand
ggaacaagcauuuaaaaga

SEQ ID NO: 657670 - RNA, 19 nt, Homo sapiens
  misc_RNA (1)...(19): siRNA sense strand
uuaaacaaauccgucauga

SEQ ID NO: 657671 - RNA, 19 nt, Homo sapiens
  misc_RNA (1)...(19): siRNA sense strand
acgaugaaaccuaugauua

SEQ ID NO: 657672 - RNA, 19 nt, Homo sapiens
  misc_RNA (1)...(19): siRNA sense strand
guaaacgcccugcagaaga

SEQ ID NO: 657673 - RNA, 19 nt, Homo sapiens
  misc_RNA (1)...(19): siRNA sense strand
aaacugaacagccagaaga

SEQ ID NO: 657674 - RNA, 19 nt, Homo sapiens
  misc_RNA (1)...(19): siRNA sense strand
uaccaacacuauaaaggaa

SEQ ID NO: 657675 - RNA, 19 nt, Homo sapiens
  misc_RNA (1)...(19): siRNA sense strand
gaucuagaaacacugauga

SEQ ID NO: 657676 - RNA, 19 nt, Homo sapiens
  misc_RNA (1)...(19): siRNA sense strand
agaacagugugaagcagua

SEQ ID NO: 657677 - RNA, 19 nt, Homo sapiens
  misc_RNA (1)...(19): siRNA sense strand
guaacuauucccaaagauu

SEQ ID NO: 657678 - RNA, 19 nt, Homo sapiens
  misc_RNA (1)...(19): siRNA sense strand
guuguagagugcauaaaga

SEQ ID NO: 657679 - RNA, 19 nt, Homo sapiens
  misc_RNA (1)...(19): siRNA sense strand
caaaccaccaucaagcuuu

SEQ ID NO: 657680 - RNA, 19 nt, Homo sapiens
  misc_RNA (1)...(19): siRNA sense strand
aaucaucccuaccuuggaa

SEQ ID NO: 657681 - RNA, 19 nt, Homo sapiens
  misc_RNA (1)...(19): siRNA sense strand
gaaaaggaggcaagaauau

SEQ ID NO: 657682 - RNA, 19 nt, Homo sapiens
  misc_RNA (1)...(19): siRNA sense strand
cuugguggaccuauuauua

SEQ ID NO: 657683 - RNA, 19 nt, Homo sapiens
  misc_RNA (1)...(19): siRNA sense strand
guagagugcauaaagauca

SEQ ID NO: 657684 - RNA, 19 nt, Homo sapiens
  misc_RNA (1)...(19): siRNA sense strand
ggaagagggccugcaguug

SEQ ID NO: 657685 - RNA, 19 nt, Homo sapiens
  misc_RNA (1)...(19): siRNA sense strand
cgaaucugaugcuguggaa

SEQ ID NO: 657686 - RNA, 19 nt, Homo sapiens
  misc_RNA (1)...(19): siRNA sense strand
gugaagcaguauucuggaa

SEQ ID NO: 657687 - RNA, 19 nt, Homo sapiens
  misc_RNA (1)...(19): siRNA sense strand
gucgggagcuucgaucaaa

SEQ ID NO: 657688 - RNA, 19 nt, Homo sapiens
  misc_RNA (1)...(19): siRNA sense strand
caaagguggucagcggauu

SEQ ID NO: 657689 - RNA, 19 nt, Homo sapiens
  misc_RNA (1)...(19): siRNA sense strand
ggauaugauuauuccuaug

SEQ ID NO: 657690 - RNA, 19 nt, Homo sapiens
  misc_RNA (1)...(19): siRNA sense strand
gaguugaggcuguugauuc

SEQ ID NO: 657691 - RNA, 19 nt, Homo sapiens
  misc_RNA (1)...(19): siRNA sense strand
gauuuggcuggaucuauua

SEQ ID NO: 657692 - RNA, 19 nt, Homo sapiens
  misc_RNA (1)...(19): siRNA sense strand
gagucuagcaggaggaauu

SEQ ID NO: 657693 - RNA, 19 nt, Homo sapiens
  misc_RNA (1)...(19): siRNA sense strand
cacaguauuugcugcagaa

SEQ ID NO: 657694 - RNA, 19 nt, Homo sapiens
  misc_RNA (1)...(19): siRNA sense strand
cggauaugauuauuccuau

SEQ ID NO: 657695 - RNA, 19 nt, Homo sapiens
  misc_RNA (1)...(19): siRNA sense strand
uccuugaucuuauaucuga

SEQ ID NO: 657696 - RNA, 19 nt, Homo sapiens
  misc_RNA (1)...(19): siRNA sense strand
gaccuauuauuacuacaca

SEQ ID NO: 657697 - RNA, 19 nt, Homo sapiens
  misc_RNA (1)...(19): siRNA sense strand
agacuacaaugccaguguu

SEQ ID NO: 657698 - RNA, 19 nt, Homo sapiens
  misc_RNA (1)...(19): siRNA sense strand
aaguaacuauucccaaaga

SEQ ID NO: 657699 - RNA, 19 nt, Homo sapiens
  misc_RNA (1)...(19): siRNA sense strand
ugaaaccuaugauuauggu

SEQ ID NO: 657700 - RNA, 19 nt, Homo sapiens
  misc_RNA (1)...(19): siRNA sense strand
aaacacugaugagaugguu

SEQ ID NO: 657701 - RNA, 19 nt, Homo sapiens
  misc_RNA (1)...(19): siRNA sense strand
uacagaaugcacaguauuu

SEQ ID NO: 657702 - RNA, 19 nt, Homo sapiens
  misc_RNA (1)...(19): siRNA sense strand
aaagguggucagcggauua

SEQ ID NO: 657703 - RNA, 19 nt, Homo sapiens
  misc_RNA (1)...(19): siRNA sense strand
aagaggaacaagcauuuaa

SEQ ID NO: 657704 - RNA, 19 nt, Homo sapiens
  misc_RNA (1)...(19): siRNA sense strand
uauuaaggcucuccguaca

SEQ ID NO: 657705 - RNA, 19 nt, Homo sapiens
  misc_RNA (1)...(19): siRNA sense strand
gacgugcacagccuuauga

SEQ ID NO: 657706 - RNA, 19 nt, Homo sapiens
  misc_RNA (1)...(19): siRNA sense strand
uuaaggcucuccguacaga

SEQ ID NO: 657707 - RNA, 19 nt, Homo sapiens
  misc_RNA (1)...(19): siRNA sense strand
ggagaccuggagaccguua

SEQ ID NO: 657708 - RNA, 19 nt, Homo sapiens
  misc_RNA (1)...(19): siRNA sense strand
cauccuugaucuuauaucu

SEQ ID NO: 657709 - RNA, 19 nt, Homo sapiens
  misc_RNA (1)...(19): siRNA sense strand
ggacgugcacagccuuaug

SEQ ID NO: 657710 - RNA, 19 nt, Homo sapiens
  misc_RNA (1)...(19): siRNA sense strand
gagauuaugaugauaugag

SEQ ID NO: 657711 - RNA, 19 nt, Homo sapiens
  misc_RNA (1)...(19): siRNA sense strand
ugacuuugacugcgaguug

SEQ ID NO: 657712 - RNA, 19 nt, Homo sapiens
  misc_RNA (1)...(19): siRNA sense strand
acacaggaccagauacaga

SEQ ID NO: 657713 - RNA, 19 nt, Homo sapiens
  misc_RNA (1)...(19): siRNA sense strand
caggguggcuccggauaug

SEQ ID NO: 657714 - RNA, 19 nt, Homo sapiens
  misc_RNA (1)...(19): siRNA sense strand
ugaugagaugguugaauua

SEQ ID NO: 657715 - RNA, 19 nt, Homo sapiens
  misc_RNA (1)...(19): siRNA sense strand
cuagaagagauuaugauga

SEQ ID NO: 657716 - RNA, 19 nt, Homo sapiens
  misc_RNA (1)...(19): siRNA sense strand
cagaguuguucuuauugga

SEQ ID NO: 657717 - RNA, 19 nt, Homo sapiens
  misc_RNA (1)...(19): siRNA sense strand
gacagaguuguucuuauug

SEQ ID NO: 657718 - RNA, 19 nt, Homo sapiens
  misc_RNA (1)...(19): siRNA sense strand
cgagagaacacucaaacca

SEQ ID NO: 657719 - RNA, 19 nt, Homo sapiens
  misc_RNA (1)...(19): siRNA sense strand
cuacaaugccaguguuuca

SEQ ID NO: 657720 - RNA, 19 nt, Homo sapiens
  misc_RNA (1)...(19): siRNA sense strand
gucagcggauuaaacaaau

SEQ ID NO: 657721 - RNA, 19 nt, Homo sapiens
  misc_RNA (1)...(19): siRNA sense strand
gauaugauuauuccuaugc

SEQ ID NO: 657722 - RNA, 19 nt, Homo sapiens
  misc_RNA (1)...(19): siRNA sense strand
cggcaugguugguuucagu

SEQ ID NO: 657723 - RNA, 19 nt, Homo sapiens
  misc_RNA (1)...(19): siRNA sense strand
aaaccuucccuaacacuga

SEQ ID NO: 657724 - RNA, 19 nt, Homo sapiens
  misc_RNA (1)...(19): siRNA sense strand
cuagaaacacugaugagau

SEQ ID NO: 657725 - RNA, 19 nt, Homo sapiens
  misc_RNA (1)...(19): siRNA sense strand
gguaaacgcccugcagaag

SEQ ID NO: 657726 - RNA, 19 nt, Homo sapiens
  misc_RNA (1)...(19): siRNA sense strand
agaggaacaagcauuuaaa

SEQ ID NO: 657727 - RNA, 19 nt, Homo sapiens
  misc_RNA (1)...(19): siRNA sense strand
ccaacacuauaaaggaagu

SEQ ID NO: 657728 - RNA, 19 nt, Homo sapiens
  misc_RNA (1)...(19): siRNA sense strand
gacuuugacugcgaguuga

SEQ ID NO: 657729 - RNA, 19 nt, Homo sapiens
  misc_RNA (1)...(19): siRNA sense strand
agauacagaaugcacagua

SEQ ID NO: 657730 - RNA, 19 nt, Homo sapiens
  misc_RNA (1)...(19): siRNA sense strand
gaucuauuauuggcaaagg

SEQ ID NO: 657731 - RNA, 19 nt, Homo sapiens
  misc_RNA (1)...(19): siRNA sense strand
ucccaugccuccaucuaga

SEQ ID NO: 657732 - RNA, 19 nt, Homo sapiens
  misc_RNA (1)...(19): siRNA sense strand
aaagaucuagaaacacuga

SEQ ID NO: 657733 - RNA, 19 nt, Homo sapiens
  misc_RNA (1)...(19): siRNA sense strand
ccggauaugauuauuccua

SEQ ID NO: 657734 - RNA, 19 nt, Homo sapiens
  misc_RNA (1)...(19): siRNA sense strand
gaaacugaacagccagaag

SEQ ID NO: 657735 - RNA, 19 nt, Homo sapiens
  misc_RNA (1)...(19): siRNA sense strand
gaacagugugaagcaguau

SEQ ID NO: 657736 - RNA, 19 nt, Homo sapiens
  misc_RNA (1)...(19): siRNA sense strand
cacaggaccagauacagaa

SEQ ID NO: 657737 - RNA, 19 nt, Homo sapiens
  misc_RNA (1)...(19): siRNA sense strand
uuggcuggaucuauuauug

SEQ ID NO: 657738 - RNA, 19 nt, Homo sapiens
  misc_RNA (1)...(19): siRNA sense strand
cauggccuaugacagaaga

SEQ ID NO: 657739 - RNA, 19 nt, Homo sapiens
  misc_RNA (1)...(19): siRNA sense strand
acacugaugagaugguuga

SEQ ID NO: 657740 - RNA, 19 nt, Homo sapiens
  misc_RNA (1)...(19): siRNA sense strand
ugaugaaacuugggacucu

SEQ ID NO: 657741 - RNA, 19 nt, Homo sapiens
  misc_RNA (1)...(19): siRNA sense strand
aguugaggcuguugauuca

SEQ ID NO: 657742 - RNA, 19 nt, Homo sapiens
  misc_RNA (1)...(19): siRNA sense strand
ugaagcaguauucuggaaa

SEQ ID NO: 657743 - RNA, 19 nt, Homo sapiens
  misc_RNA (1)...(19): siRNA sense strand
guggaccuauuauuacuac

SEQ ID NO: 657744 - RNA, 19 nt, Homo sapiens
  misc_RNA (1)...(19): siRNA sense strand
gaugguugaauuacgcauu

SEQ ID NO: 657745 - RNA, 19 nt, Homo sapiens
  misc_RNA (1)...(19): siRNA sense strand
gcauaaagaucauccuuga

SEQ ID NO: 657746 - RNA, 19 nt, Homo sapiens
  misc_RNA (1)...(19): siRNA sense strand
ugacagaguuguucuuauu

SEQ ID NO: 657747 - RNA, 19 nt, Homo sapiens
  misc_RNA (1)...(19): siRNA sense strand
gcagauggcuuaugaacca

SEQ ID NO: 657748 - RNA, 19 nt, Homo sapiens
  misc_RNA (1)...(19): siRNA sense strand
gagcgcauauugaguauca

SEQ ID NO: 657749 - RNA, 19 nt, Homo sapiens
  misc_RNA (1)...(19): siRNA sense strand
ggaagaggaacaagcauuu

SEQ ID NO: 657750 - RNA, 19 nt, Homo sapiens
  misc_RNA (1)...(19): siRNA sense strand
gaucuugguggaccuauua

SEQ ID NO: 657751 - RNA, 19 nt, Homo sapiens
  misc_RNA (1)...(19): siRNA sense strand
gaugaaaccuaugauuaug

SEQ ID NO: 657752 - RNA, 19 nt, Homo sapiens
  misc_RNA (1)...(19): siRNA sense strand
gaagaggaacaagcauuua

SEQ ID NO: 657753 - RNA, 19 nt, Homo sapiens
  misc_RNA (1)...(19): siRNA sense strand
uagaaacacugaugagaug

SEQ ID NO: 657754 - RNA, 19 nt, Homo sapiens
  misc_RNA (1)...(19): siRNA sense strand
acaaguaacuauucccaaa

SEQ ID NO: 657755 - RNA, 19 nt, Homo sapiens
  misc_RNA (1)...(19): siRNA sense strand
cagaauggcagauggcuua

SEQ ID NO: 657756 - RNA, 19 nt, Homo sapiens
  misc_RNA (1)...(19): siRNA sense strand
aaaggaggcaagaauauua

SEQ ID NO: 657757 - RNA, 19 nt, Homo sapiens
  misc_RNA (1)...(19): siRNA sense strand
gaacacaggaccagauaca

SEQ ID NO: 657758 - RNA, 19 nt, Homo sapiens
  misc_RNA (1)...(19): siRNA sense strand
cugaugagaugguugaauu

SEQ ID NO: 657759 - RNA, 19 nt, Homo sapiens
  misc_RNA (1)...(19): siRNA sense strand
aaacaaauccgucaugagu

SEQ ID NO: 657760 - RNA, 19 nt, Homo sapiens
  misc_RNA (1)...(19): siRNA sense strand
uagcagagcucggaaucuu

SEQ ID NO: 657761 - RNA, 19 nt, Homo sapiens
  misc_RNA (1)...(19): siRNA sense strand
uaaacgcccugcagaagau

SEQ ID NO: 657762 - RNA, 19 nt, Homo sapiens
  misc_RNA (1)...(19): siRNA sense strand
ggucagcggauuaaacaaa

SEQ ID NO: 657763 - RNA, 19 nt, Homo sapiens
  misc_RNA (1)...(19): siRNA sense strand
ggaaaaggaggcaagaaua

SEQ ID NO: 657764 - RNA, 19 nt, Homo sapiens
  misc_RNA (1)...(19): siRNA sense strand
caaaauugaugagccuuua

SEQ ID NO: 657765 - RNA, 19 nt, Homo sapiens
  misc_RNA (1)...(19): siRNA sense strand
aauggcagauggcuuauga

SEQ ID NO: 657766 - RNA, 19 nt, Homo sapiens
  misc_RNA (1)...(19): siRNA sense strand
cgaugaaaccuaugauuau

SEQ ID NO: 657767 - RNA, 19 nt, Homo sapiens
  misc_RNA (1)...(19): siRNA sense strand
ggaacaagcauuuaaaaga

SEQ ID NO: 657768 - RNA, 19 nt, Homo sapiens
  misc_RNA (1)...(19): siRNA sense strand
uuaaacaaauccgucauga

SEQ ID NO: 657769 - RNA, 19 nt, Homo sapiens
  misc_RNA (1)...(19): siRNA sense strand
acgaugaaaccuaugauua

SEQ ID NO: 657770 - RNA, 19 nt, Homo sapiens
  misc_RNA (1)...(19): siRNA sense strand
guaaacgcccugcagaaga

SEQ ID NO: 657771 - RNA, 19 nt, Homo sapiens
  misc_RNA (1)...(19): siRNA sense strand
aaacugaacagccagaaga

SEQ ID NO: 657772 - RNA, 19 nt, Homo sapiens
  misc_RNA (1)...(19): siRNA sense strand
uaccaacacuauaaaggaa

SEQ ID NO: 657773 - RNA, 19 nt, Homo sapiens
  misc_RNA (1)...(19): siRNA sense strand
gaucuagaaacacugauga

SEQ ID NO: 657774 - RNA, 19 nt, Homo sapiens
  misc_RNA (1)...(19): siRNA sense strand
agaacagugugaagcagua

SEQ ID NO: 657775 - RNA, 19 nt, Homo sapiens
  misc_RNA (1)...(19): siRNA sense strand
guaacuauucccaaagauu

SEQ ID NO: 657776 - RNA, 19 nt, Homo sapiens
  misc_RNA (1)...(19): siRNA sense strand
guuguagagugcauaaaga

SEQ ID NO: 657777 - RNA, 19 nt, Homo sapiens
  misc_RNA (1)...(19): siRNA sense strand
caaaccaccaucaagcuuu

SEQ ID NO: 657778 - RNA, 19 nt, Homo sapiens
  misc_RNA (1)...(19): siRNA sense strand
aaucaucccuaccuuggaa

SEQ ID NO: 657779 - RNA, 19 nt, Homo sapiens
  misc_RNA (1)...(19): siRNA sense strand
gaaaaggaggcaagaauau

SEQ ID NO: 657780 - RNA, 19 nt, Homo sapiens
  misc_RNA (1)...(19): siRNA sense strand
cuugguggaccuauuauua

SEQ ID NO: 657781 - RNA, 19 nt, Homo sapiens
  misc_RNA (1)...(19): siRNA sense strand
guagagugcauaaagauca

SEQ ID NO: 657782 - RNA, 19 nt, Homo sapiens
  misc_RNA (1)...(19): siRNA sense strand
ggaagagggccugcaguug

SEQ ID NO: 657783 - RNA, 19 nt, Homo sapiens
  misc_RNA (1)...(19): siRNA sense strand
cgaaucugaugcuguggaa

SEQ ID NO: 657784 - RNA, 19 nt, Homo sapiens
  misc_RNA (1)...(19): siRNA sense strand
gucgggagcuucgaucaaa

SEQ ID NO: 657785 - RNA, 19 nt, Homo sapiens
  misc_RNA (1)...(19): siRNA sense strand
caaagguggucagcggauu

SEQ ID NO: 657786 - RNA, 19 nt, Homo sapiens
  misc_RNA (1)...(19): siRNA sense strand
ggauaugauuauuccuaug

SEQ ID NO: 657787 - RNA, 19 nt, Homo sapiens
  misc_RNA (1)...(19): siRNA sense strand
gaguugaggcuguugauuc

SEQ ID NO: 657788 - RNA, 19 nt, Homo sapiens
  misc_RNA (1)...(19): siRNA sense strand
gauuuggcuggaucuauua

SEQ ID NO: 657789 - RNA, 19 nt, Homo sapiens
  misc_RNA (1)...(19): siRNA sense strand
gagucuagcaggaggaauu

SEQ ID NO: 657790 - RNA, 19 nt, Homo sapiens
  misc_RNA (1)...(19): siRNA sense strand
cacaguauuugcugcagaa

SEQ ID NO: 657791 - RNA, 19 nt, Homo sapiens
  misc_RNA (1)...(19): siRNA sense strand
cggauaugauuauuccuau

SEQ ID NO: 657792 - RNA, 19 nt, Homo sapiens
  misc_RNA (1)...(19): siRNA sense strand
uccuugaucuuauaucuga

SEQ ID NO: 657793 - RNA, 19 nt, Homo sapiens
  misc_RNA (1)...(19): siRNA sense strand
gaccuauuauuacuacaca

SEQ ID NO: 657794 - RNA, 19 nt, Homo sapiens
  misc_RNA (1)...(19): siRNA sense strand
agacuacaaugccaguguu

SEQ ID NO: 657795 - RNA, 19 nt, Homo sapiens
  misc_RNA (1)...(19): siRNA sense strand
aaguaacuauucccaaaga

SEQ ID NO: 657796 - RNA, 19 nt, Homo sapiens
  misc_RNA (1)...(19): siRNA sense strand
ugaaaccuaugauuauggu

SEQ ID NO: 657797 - RNA, 19 nt, Homo sapiens
  misc_RNA (1)...(19): siRNA sense strand
aaacacugaugagaugguu

SEQ ID NO: 657798 - RNA, 19 nt, Homo sapiens
  misc_RNA (1)...(19): siRNA sense strand
uacagaaugcacaguauuu

SEQ ID NO: 657799 - RNA, 19 nt, Homo sapiens
  misc_RNA (1)...(19): siRNA sense strand
aaagguggucagcggauua

SEQ ID NO: 657800 - RNA, 19 nt, Homo sapiens
  misc_RNA (1)...(19): siRNA sense strand
aagaggaacaagcauuuaa

SEQ ID NO: 657801 - RNA, 19 nt, Homo sapiens
  misc_RNA (1)...(19): siRNA sense strand
uauuaaggcucuccguaca

SEQ ID NO: 657802 - RNA, 19 nt, Homo sapiens
  misc_RNA (1)...(19): siRNA sense strand
gacgugcacagccuuauga

SEQ ID NO: 657803 - RNA, 19 nt, Homo sapiens
  misc_RNA (1)...(19): siRNA sense strand
uuaaggcucuccguacaga

SEQ ID NO: 657804 - RNA, 19 nt, Homo sapiens
  misc_RNA (1)...(19): siRNA sense strand
ggagaccuggagaccguua

SEQ ID NO: 657805 - RNA, 19 nt, Homo sapiens
  misc_RNA (1)...(19): siRNA sense strand
cauccuugaucuuauaucu

SEQ ID NO: 657806 - RNA, 19 nt, Homo sapiens
  misc_RNA (1)...(19): siRNA sense strand
ggacgugcacagccuuaug

SEQ ID NO: 657807 - RNA, 19 nt, Homo sapiens
  misc_RNA (1)...(19): siRNA sense strand
gagauuaugaugauaugag

SEQ ID NO: 657808 - RNA, 19 nt, Homo sapiens
  misc_RNA (1)...(19): siRNA sense strand
ugacuuugacugcgaguug

SEQ ID NO: 657809 - RNA, 19 nt, Homo sapiens
  misc_RNA (1)...(19): siRNA sense strand
acacaggaccagauacaga

SEQ ID NO: 657810 - RNA, 19 nt, Homo sapiens
  misc_RNA (1)...(19): siRNA sense strand
caggguggcuccggauaug

SEQ ID NO: 657811 - RNA, 19 nt, Homo sapiens
  misc_RNA (1)...(19): siRNA sense strand
ugaugagaugguugaauua

SEQ ID NO: 657812 - RNA, 19 nt, Homo sapiens
  misc_RNA (1)...(19): siRNA sense strand
cuagaagagauuaugauga

SEQ ID NO: 657813 - RNA, 19 nt, Homo sapiens
  misc_RNA (1)...(19): siRNA sense strand
cagaguuguucuuauugga

SEQ ID NO: 657814 - RNA, 19 nt, Homo sapiens
  misc_RNA (1)...(19): siRNA sense strand
gacagaguuguucuuauug

SEQ ID NO: 657815 - RNA, 19 nt, Homo sapiens
  misc_RNA (1)...(19): siRNA sense strand
cgagagaacacucaaacca

SEQ ID NO: 657816 - RNA, 19 nt, Homo sapiens
  misc_RNA (1)...(19): siRNA sense strand
cuacaaugccaguguuuca

SEQ ID NO: 657817 - RNA, 19 nt, Homo sapiens
  misc_RNA (1)...(19): siRNA sense strand
gucagcggauuaaacaaau

SEQ ID NO: 657818 - RNA, 19 nt, Homo sapiens
  misc_RNA (1)...(19): siRNA sense strand
gauaugauuauuccuaugc

SEQ ID NO: 657819 - RNA, 19 nt, Homo sapiens
  misc_RNA (1)...(19): siRNA sense strand
cggcaugguugguuucagu

SEQ ID NO: 657820 - RNA, 19 nt, Homo sapiens
  misc_RNA (1)...(19): siRNA sense strand
aaaccuucccuaacacuga

SEQ ID NO: 657821 - RNA, 19 nt, Homo sapiens
  misc_RNA (1)...(19): siRNA sense strand
gguaaacgcccugcagaag

SEQ ID NO: 657822 - RNA, 19 nt, Homo sapiens
  misc_RNA (1)...(19): siRNA sense strand
cuagaaacacugaugagau

SEQ ID NO: 657823 - RNA, 19 nt, Homo sapiens
  misc_RNA (1)...(19): siRNA sense strand
agaggaacaagcauuuaaa

SEQ ID NO: 657824 - RNA, 19 nt, Homo sapiens
  misc_RNA (1)...(19): siRNA sense strand
ccaacacuauaaaggaagu

SEQ ID NO: 657825 - RNA, 19 nt, Homo sapiens
  misc_RNA (1)...(19): siRNA sense strand
gacuuugacugcgaguuga

SEQ ID NO: 657826 - RNA, 19 nt, Homo sapiens
  misc_RNA (1)...(19): siRNA sense strand
agauacagaaugcacagua

SEQ ID NO: 657827 - RNA, 19 nt, Homo sapiens
  misc_RNA (1)...(19): siRNA sense strand
gaucuauuauuggcaaagg

SEQ ID NO: 657828 - RNA, 19 nt, Homo sapiens
  misc_RNA (1)...(19): siRNA sense strand
ucccaugccuccaucuaga

SEQ ID NO: 657829 - RNA, 19 nt, Homo sapiens
  misc_RNA (1)...(19): siRNA sense strand
aaagaucuagaaacacuga

SEQ ID NO: 657830 - RNA, 19 nt, Homo sapiens
  misc_RNA (1)...(19): siRNA sense strand
gaaacugaacagccagaag

SEQ ID NO: 657831 - RNA, 19 nt, Homo sapiens
  misc_RNA (1)...(19): siRNA sense strand
gaacagugugaagcaguau

SEQ ID NO: 657832 - RNA, 19 nt, Homo sapiens
  misc_RNA (1)...(19): siRNA sense strand
cacaggaccagauacagaa

SEQ ID NO: 657833 - RNA, 19 nt, Homo sapiens
  misc_RNA (1)...(19): siRNA sense strand
uuggcuggaucuauuauug

SEQ ID NO: 657834 - RNA, 19 nt, Homo sapiens
  misc_RNA (1)...(19): siRNA sense strand
ccggauaugauuauuccua

SEQ ID NO: 657835 - RNA, 19 nt, Homo sapiens
  misc_RNA (1)...(19): siRNA sense strand
acacugaugagaugguuga

SEQ ID NO: 657836 - RNA, 19 nt, Homo sapiens
  misc_RNA (1)...(19): siRNA sense strand
ugaugaaacuugggacucu

SEQ ID NO: 657837 - RNA, 19 nt, Homo sapiens
  misc_RNA (1)...(19): siRNA sense strand
cauggccuaugacagaaga

SEQ ID NO: 657838 - RNA, 19 nt, Homo sapiens
  misc_RNA (1)...(19): siRNA sense strand
cccgagcgcauauugagua

SEQ ID NO: 657839 - RNA, 19 nt, Homo sapiens
  misc_RNA (1)...(19): siRNA sense strand
guggaccuauuauuacuac

SEQ ID NO: 657840 - RNA, 19 nt, Homo sapiens
  misc_RNA (1)...(19): siRNA sense strand
gaugguugaauuacgcauu

SEQ ID NO: 657841 - RNA, 19 nt, Homo sapiens
  misc_RNA (1)...(19): siRNA sense strand
aguugaggcuguugauuca

SEQ ID NO: 657842 - RNA, 19 nt, Homo sapiens
  misc_RNA (1)...(19): siRNA sense strand
aaggaggcaagaauauuaa

SEQ ID NO: 657843 - RNA, 19 nt, Homo sapiens
  misc_RNA (1)...(19): siRNA sense strand
gaaacacugaugagauggu

SEQ ID NO: 657844 - RNA, 19 nt, Homo sapiens
  misc_RNA (1)...(19): siRNA sense strand
acagaguuguucuuauugg

SEQ ID NO: 657845 - RNA, 19 nt, Homo sapiens
  misc_RNA (1)...(19): siRNA sense strand
gcauaaagaucauccuuga

SEQ ID NO: 657846 - RNA, 19 nt, Homo sapiens
  misc_RNA (1)...(19): siRNA sense strand
ugacagaguuguucuuauu

SEQ ID NO: 657847 - RNA, 19 nt, Homo sapiens
  misc_RNA (1)...(19): siRNA sense strand
gcagauggcuuaugaacca

SEQ ID NO: 657848 - RNA, 19 nt, Homo sapiens
  misc_RNA (1)...(19): siRNA sense strand
gagcgcauauugaguauca

SEQ ID NO: 657849 - RNA, 19 nt, Homo sapiens
  misc_RNA (1)...(19): siRNA sense strand
ggaagaggaacaagcauuu

SEQ ID NO: 657850 - RNA, 19 nt, Homo sapiens
  misc_RNA (1)...(19): siRNA sense strand
gaucuugguggaccuauua

SEQ ID NO: 657851 - RNA, 19 nt, Homo sapiens
  misc_RNA (1)...(19): siRNA sense strand
gaugaaaccuaugauuaug

SEQ ID NO: 657852 - RNA, 19 nt, Homo sapiens
  misc_RNA (1)...(19): siRNA sense strand
gaagaggaacaagcauuua

SEQ ID NO: 657853 - RNA, 19 nt, Homo sapiens
  misc_RNA (1)...(19): siRNA sense strand
uagaaacacugaugagaug

SEQ ID NO: 657854 - RNA, 19 nt, Homo sapiens
  misc_RNA (1)...(19): siRNA sense strand
acaaguaacuauucccaaa

SEQ ID NO: 657855 - RNA, 19 nt, Homo sapiens
  misc_RNA (1)...(19): siRNA sense strand
cagaauggcagauggcuua

SEQ ID NO: 657856 - RNA, 19 nt, Homo sapiens
  misc_RNA (1)...(19): siRNA sense strand
aaaggaggcaagaauauua

SEQ ID NO: 657857 - RNA, 19 nt, Homo sapiens
  misc_RNA (1)...(19): siRNA sense strand
gaacacaggaccagauaca

SEQ ID NO: 657858 - RNA, 19 nt, Homo sapiens
  misc_RNA (1)...(19): siRNA sense strand
cugaugagaugguugaauu

SEQ ID NO: 657859 - RNA, 19 nt, Homo sapiens
  misc_RNA (1)...(19): siRNA sense strand
aaacaaauccgucaugagu

SEQ ID NO: 657860 - RNA, 19 nt, Homo sapiens
  misc_RNA (1)...(19): siRNA sense strand
uagcagagcucggaaucuu

SEQ ID NO: 657861 - RNA, 19 nt, Homo sapiens
  misc_RNA (1)...(19): siRNA sense strand
uaaacgcccugcagaagau

SEQ ID NO: 657862 - RNA, 19 nt, Homo sapiens
  misc_RNA (1)...(19): siRNA sense strand
ggucagcggauuaaacaaa

SEQ ID NO: 657863 - RNA, 19 nt, Homo sapiens
  misc_RNA (1)...(19): siRNA sense strand
ggaaaaggaggcaagaaua

SEQ ID NO: 657864 - RNA, 19 nt, Homo sapiens
  misc_RNA (1)...(19): siRNA sense strand
caaaauugaugagccuuua

SEQ ID NO: 657865 - RNA, 19 nt, Homo sapiens
  misc_RNA (1)...(19): siRNA sense strand
aauggcagauggcuuauga

SEQ ID NO: 657866 - RNA, 19 nt, Homo sapiens
  misc_RNA (1)...(19): siRNA sense strand
cgaugaaaccuaugauuau

SEQ ID NO: 657867 - RNA, 19 nt, Homo sapiens
  misc_RNA (1)...(19): siRNA sense strand
ggaacaagcauuuaaaaga

SEQ ID NO: 657868 - RNA, 19 nt, Homo sapiens
  misc_RNA (1)...(19): siRNA sense strand
uuaaacaaauccgucauga

SEQ ID NO: 657869 - RNA, 19 nt, Homo sapiens
  misc_RNA (1)...(19): siRNA sense strand
acgaugaaaccuaugauua

SEQ ID NO: 657870 - RNA, 19 nt, Homo sapiens
  misc_RNA (1)...(19): siRNA sense strand
guaaacgcccugcagaaga

SEQ ID NO: 657871 - RNA, 19 nt, Homo sapiens
  misc_RNA (1)...(19): siRNA sense strand
aaacugaacagccagaaga

SEQ ID NO: 657872 - RNA, 19 nt, Homo sapiens
  misc_RNA (1)...(19): siRNA sense strand
uaccaacacuauaaaggaa

SEQ ID NO: 657873 - RNA, 19 nt, Homo sapiens
  misc_RNA (1)...(19): siRNA sense strand
gaucuagaaacacugauga

SEQ ID NO: 657874 - RNA, 19 nt, Homo sapiens
  misc_RNA (1)...(19): siRNA sense strand
agaacagugugaagcagua

SEQ ID NO: 657875 - RNA, 19 nt, Homo sapiens
  misc_RNA (1)...(19): siRNA sense strand
guaacuauucccaaagauu

SEQ ID NO: 657876 - RNA, 19 nt, Homo sapiens
  misc_RNA (1)...(19): siRNA sense strand
guuguagagugcauaaaga

SEQ ID NO: 657877 - RNA, 19 nt, Homo sapiens
  misc_RNA (1)...(19): siRNA sense strand
caaaccaccaucaagcuuu

SEQ ID NO: 657878 - RNA, 19 nt, Homo sapiens
  misc_RNA (1)...(19): siRNA sense strand
aaucaucccuaccuuggaa

SEQ ID NO: 657879 - RNA, 19 nt, Homo sapiens
  misc_RNA (1)...(19): siRNA sense strand
gaaaaggaggcaagaauau

SEQ ID NO: 657880 - RNA, 19 nt, Homo sapiens
  misc_RNA (1)...(19): siRNA sense strand
cuugguggaccuauuauua

SEQ ID NO: 657881 - RNA, 19 nt, Homo sapiens
  misc_RNA (1)...(19): siRNA sense strand
guagagugcauaaagauca

SEQ ID NO: 657882 - RNA, 19 nt, Homo sapiens
  misc_RNA (1)...(19): siRNA sense strand
ggaagagggccugcaguug

SEQ ID NO: 657883 - RNA, 19 nt, Homo sapiens
  misc_RNA (1)...(19): siRNA sense strand
cgaaucugaugcuguggaa

SEQ ID NO: 657884 - RNA, 19 nt, Homo sapiens
  misc_RNA (1)...(19): siRNA sense strand
gucgggagcuucgaucaaa

SEQ ID NO: 657885 - RNA, 19 nt, Homo sapiens
  misc_RNA (1)...(19): siRNA sense strand
caaagguggucagcggauu

SEQ ID NO: 657886 - RNA, 19 nt, Homo sapiens
  misc_RNA (1)...(19): siRNA sense strand
ggauaugauuauuccuaug

SEQ ID NO: 657887 - RNA, 19 nt, Homo sapiens
  misc_RNA (1)...(19): siRNA sense strand
gaguugaggcuguugauuc

SEQ ID NO: 657888 - RNA, 19 nt, Homo sapiens
  misc_RNA (1)...(19): siRNA sense strand
gauuuggcuggaucuauua

SEQ ID NO: 657889 - RNA, 19 nt, Homo sapiens
  misc_RNA (1)...(19): siRNA sense strand
gagucuagcaggaggaauu

SEQ ID NO: 657890 - RNA, 19 nt, Homo sapiens
  misc_RNA (1)...(19): siRNA sense strand
cacaguauuugcugcagaa

SEQ ID NO: 657891 - RNA, 19 nt, Homo sapiens
  misc_RNA (1)...(19): siRNA sense strand
cggauaugauuauuccuau

SEQ ID NO: 657892 - RNA, 19 nt, Homo sapiens
  misc_RNA (1)...(19): siRNA sense strand
uccuugaucuuauaucuga

SEQ ID NO: 657893 - RNA, 19 nt, Homo sapiens
  misc_RNA (1)...(19): siRNA sense strand
gaccuauuauuacuacaca

SEQ ID NO: 657894 - RNA, 19 nt, Homo sapiens
  misc_RNA (1)...(19): siRNA sense strand
agacuacaaugccaguguu

SEQ ID NO: 657895 - RNA, 19 nt, Homo sapiens
  misc_RNA (1)...(19): siRNA sense strand
aaguaacuauucccaaaga

SEQ ID NO: 657896 - RNA, 19 nt, Homo sapiens
  misc_RNA (1)...(19): siRNA sense strand
ugaaaccuaugauuauggu

SEQ ID NO: 657897 - RNA, 19 nt, Homo sapiens
  misc_RNA (1)...(19): siRNA sense strand
aaacacugaugagaugguu

SEQ ID NO: 657898 - RNA, 19 nt, Homo sapiens
  misc_RNA (1)...(19): siRNA sense strand
uacagaaugcacaguauuu

SEQ ID NO: 657899 - RNA, 19 nt, Homo sapiens
  misc_RNA (1)...(19): siRNA sense strand
aaagguggucagcggauua

SEQ ID NO: 657900 - RNA, 19 nt, Homo sapiens
  misc_RNA (1)...(19): siRNA sense strand
aagaggaacaagcauuuaa

SEQ ID NO: 657901 - RNA, 19 nt, Homo sapiens
  misc_RNA (1)...(19): siRNA sense strand
uauuaaggcucuccguaca

SEQ ID NO: 657902 - RNA, 19 nt, Homo sapiens
  misc_RNA (1)...(19): siRNA sense strand
gacgugcacagccuuauga

SEQ ID NO: 657903 - RNA, 19 nt, Homo sapiens
  misc_RNA (1)...(19): siRNA sense strand
uuaaggcucuccguacaga

SEQ ID NO: 657904 - RNA, 19 nt, Homo sapiens
  misc_RNA (1)...(19): siRNA sense strand
ggagaccuggagaccguua

SEQ ID NO: 657905 - RNA, 19 nt, Homo sapiens
  misc_RNA (1)...(19): siRNA sense strand
cauccuugaucuuauaucu

SEQ ID NO: 657906 - RNA, 19 nt, Homo sapiens
  misc_RNA (1)...(19): siRNA sense strand
ggacgugcacagccuuaug

SEQ ID NO: 657907 - RNA, 19 nt, Homo sapiens
  misc_RNA (1)...(19): siRNA sense strand
gagauuaugaugauaugag

SEQ ID NO: 657908 - RNA, 19 nt, Homo sapiens
  misc_RNA (1)...(19): siRNA sense strand
ugacuuugacugcgaguug

SEQ ID NO: 657909 - RNA, 19 nt, Homo sapiens
  misc_RNA (1)...(19): siRNA sense strand
acacaggaccagauacaga

SEQ ID NO: 657910 - RNA, 19 nt, Homo sapiens
  misc_RNA (1)...(19): siRNA sense strand
caggguggcuccggauaug

SEQ ID NO: 657911 - RNA, 19 nt, Homo sapiens
  misc_RNA (1)...(19): siRNA sense strand
ugaugagaugguugaauua

SEQ ID NO: 657912 - RNA, 19 nt, Homo sapiens
  misc_RNA (1)...(19): siRNA sense strand
cuagaagagauuaugauga

SEQ ID NO: 657913 - RNA, 19 nt, Homo sapiens
  misc_RNA (1)...(19): siRNA sense strand
cagaguuguucuuauugga

SEQ ID NO: 657914 - RNA, 19 nt, Homo sapiens
  misc_RNA (1)...(19): siRNA sense strand
gacagaguuguucuuauug

SEQ ID NO: 657915 - RNA, 19 nt, Homo sapiens
  misc_RNA (1)...(19): siRNA sense strand
cgagagaacacucaaacca

SEQ ID NO: 657916 - RNA, 19 nt, Homo sapiens
  misc_RNA (1)...(19): siRNA sense strand
cuacaaugccaguguuuca

SEQ ID NO: 657917 - RNA, 19 nt, Homo sapiens
  misc_RNA (1)...(19): siRNA sense strand
gucagcggauuaaacaaau

SEQ ID NO: 657918 - RNA, 19 nt, Homo sapiens
  misc_RNA (1)...(19): siRNA sense strand
gauaugauuauuccuaugc

SEQ ID NO: 657919 - RNA, 19 nt, Homo sapiens
  misc_RNA (1)...(19): siRNA sense strand
cggcaugguugguuucagu

SEQ ID NO: 657920 - RNA, 19 nt, Homo sapiens
  misc_RNA (1)...(19): siRNA sense strand
aaaccuucccuaacacuga

SEQ ID NO: 657921 - RNA, 19 nt, Homo sapiens
  misc_RNA (1)...(19): siRNA sense strand
gguaaacgcccugcagaag

SEQ ID NO: 657922 - RNA, 19 nt, Homo sapiens
  misc_RNA (1)...(19): siRNA sense strand
cuagaaacacugaugagau

SEQ ID NO: 657923 - RNA, 19 nt, Homo sapiens
  misc_RNA (1)...(19): siRNA sense strand
agaggaacaagcauuuaaa

SEQ ID NO: 657924 - RNA, 19 nt, Homo sapiens
  misc_RNA (1)...(19): siRNA sense strand
ccaacacuauaaaggaagu

SEQ ID NO: 657925 - RNA, 19 nt, Homo sapiens
  misc_RNA (1)...(19): siRNA sense strand
gacuuugacugcgaguuga

SEQ ID NO: 657926 - RNA, 19 nt, Homo sapiens
  misc_RNA (1)...(19): siRNA sense strand
agauacagaaugcacagua

SEQ ID NO: 657927 - RNA, 19 nt, Homo sapiens
  misc_RNA (1)...(19): siRNA sense strand
gaucuauuauuggcaaagg

SEQ ID NO: 657928 - RNA, 19 nt, Homo sapiens
  misc_RNA (1)...(19): siRNA sense strand
ucccaugccuccaucuaga

SEQ ID NO: 657929 - RNA, 19 nt, Homo sapiens
  misc_RNA (1)...(19): siRNA sense strand
aaagaucuagaaacacuga

SEQ ID NO: 657930 - RNA, 19 nt, Homo sapiens
  misc_RNA (1)...(19): siRNA sense strand
gaaacugaacagccagaag

SEQ ID NO: 657931 - RNA, 19 nt, Homo sapiens
  misc_RNA (1)...(19): siRNA sense strand
gaacagugugaagcaguau

SEQ ID NO: 657932 - RNA, 19 nt, Homo sapiens
  misc_RNA (1)...(19): siRNA sense strand
cacaggaccagauacagaa

SEQ ID NO: 657933 - RNA, 19 nt, Homo sapiens
  misc_RNA (1)...(19): siRNA sense strand
uuggcuggaucuauuauug

SEQ ID NO: 657934 - RNA, 19 nt, Homo sapiens
  misc_RNA (1)...(19): siRNA sense strand
ccggauaugauuauuccua

SEQ ID NO: 657935 - RNA, 19 nt, Homo sapiens
  misc_RNA (1)...(19): siRNA sense strand
acacugaugagaugguuga

SEQ ID NO: 657936 - RNA, 19 nt, Homo sapiens
  misc_RNA (1)...(19): siRNA sense strand
ugaugaaacuugggacucu

SEQ ID NO: 657937 - RNA, 19 nt, Homo sapiens
  misc_RNA (1)...(19): siRNA sense strand
cauggccuaugacagaaga

SEQ ID NO: 657938 - RNA, 19 nt, Homo sapiens
  misc_RNA (1)...(19): siRNA sense strand
cccgagcgcauauugagua

SEQ ID NO: 657939 - RNA, 19 nt, Homo sapiens
  misc_RNA (1)...(19): siRNA sense strand
guggaccuauuauuacuac

SEQ ID NO: 657940 - RNA, 19 nt, Homo sapiens
  misc_RNA (1)...(19): siRNA sense strand
gaugguugaauuacgcauu

SEQ ID NO: 657941 - RNA, 19 nt, Homo sapiens
  misc_RNA (1)...(19): siRNA sense strand
aguugaggcuguugauuca

SEQ ID NO: 657942 - RNA, 19 nt, Homo sapiens
  misc_RNA (1)...(19): siRNA sense strand
aaggaggcaagaauauuaa

SEQ ID NO: 657943 - RNA, 19 nt, Homo sapiens
  misc_RNA (1)...(19): siRNA sense strand
gaaacacugaugagauggu

SEQ ID NO: 657944 - RNA, 19 nt, Homo sapiens
  misc_RNA (1)...(19): siRNA sense strand
acagaguuguucuuauugg

SEQ ID NO: 657945 - RNA, 19 nt, Homo sapiens
  misc_RNA (1)...(19): siRNA sense strand
gcauaaagaucauccuuga

SEQ ID NO: 657946 - RNA, 19 nt, Homo sapiens
  misc_RNA (1)...(19): siRNA sense strand
ugacagaguuguucuuauu

SEQ ID NO: 657947 - RNA, 19 nt, Homo sapiens
  misc_RNA (1)...(19): siRNA sense strand
gcaguauucuggaaaguuu

SEQ ID NO: 657948 - RNA, 19 nt, Homo sapiens
  misc_RNA (1)...(19): siRNA sense strand
gcagauggcuuaugaacca

SEQ ID NO: 657949 - RNA, 19 nt, Homo sapiens
  misc_RNA (1)...(19): siRNA sense strand
gagcgcauauugaguauca

SEQ ID NO: 657950 - RNA, 19 nt, Homo sapiens
  misc_RNA (1)...(19): siRNA sense strand
ggaagaggaacaagcauuu

SEQ ID NO: 657951 - RNA, 19 nt, Homo sapiens
  misc_RNA (1)...(19): siRNA sense strand
gaucuugguggaccuauua

SEQ ID NO: 657952 - RNA, 19 nt, Homo sapiens
  misc_RNA (1)...(19): siRNA sense strand
gaugaaaccuaugauuaug

SEQ ID NO: 657953 - RNA, 19 nt, Homo sapiens
  misc_RNA (1)...(19): siRNA sense strand
gaagaggaacaagcauuua

SEQ ID NO: 657954 - RNA, 19 nt, Homo sapiens
  misc_RNA (1)...(19): siRNA sense strand
uagaaacacugaugagaug

SEQ ID NO: 657955 - RNA, 19 nt, Homo sapiens
  misc_RNA (1)...(19): siRNA sense strand
acaaguaacuauucccaaa

SEQ ID NO: 657956 - RNA, 19 nt, Homo sapiens
  misc_RNA (1)...(19): siRNA sense strand
cagaauggcagauggcuua

SEQ ID NO: 657957 - RNA, 19 nt, Homo sapiens
  misc_RNA (1)...(19): siRNA sense strand
aaaggaggcaagaauauua

SEQ ID NO: 657958 - RNA, 19 nt, Homo sapiens
  misc_RNA (1)...(19): siRNA sense strand
gaacacaggaccagauaca

SEQ ID NO: 657959 - RNA, 19 nt, Homo sapiens
  misc_RNA (1)...(19): siRNA sense strand
cugaugagaugguugaauu

SEQ ID NO: 657960 - RNA, 19 nt, Homo sapiens
  misc_RNA (1)...(19): siRNA sense strand
aaacaaauccgucaugagu

SEQ ID NO: 657961 - RNA, 19 nt, Homo sapiens
  misc_RNA (1)...(19): siRNA sense strand
uagcagagcucggaaucuu

SEQ ID NO: 657962 - RNA, 19 nt, Homo sapiens
  misc_RNA (1)...(19): siRNA sense strand
uaaacgcccugcagaagau

SEQ ID NO: 657963 - RNA, 19 nt, Homo sapiens
  misc_RNA (1)...(19): siRNA sense strand
gaagcaguauucuggaaag

SEQ ID NO: 657964 - RNA, 19 nt, Homo sapiens
  misc_RNA (1)...(19): siRNA sense strand
ggucagcggauuaaacaaa

SEQ ID NO: 657965 - RNA, 19 nt, Homo sapiens
  misc_RNA (1)...(19): siRNA sense strand
ggaaaaggaggcaagaaua

SEQ ID NO: 657966 - RNA, 19 nt, Homo sapiens
  misc_RNA (1)...(19): siRNA sense strand
caaaauugaugagccuuua

SEQ ID NO: 657967 - RNA, 19 nt, Homo sapiens
  misc_RNA (1)...(19): siRNA sense strand
aauggcagauggcuuauga

SEQ ID NO: 657968 - RNA, 19 nt, Homo sapiens
  misc_RNA (1)...(19): siRNA sense strand
cgaugaaaccuaugauuau

SEQ ID NO: 657969 - RNA, 19 nt, Homo sapiens
  misc_RNA (1)...(19): siRNA sense strand
ggaacaagcauuuaaaaga

SEQ ID NO: 657970 - RNA, 19 nt, Homo sapiens
  misc_RNA (1)...(19): siRNA sense strand
uuaaacaaauccgucauga

SEQ ID NO: 657971 - RNA, 19 nt, Homo sapiens
  misc_RNA (1)...(19): siRNA sense strand
acgaugaaaccuaugauua

SEQ ID NO: 657972 - RNA, 19 nt, Homo sapiens
  misc_RNA (1)...(19): siRNA sense strand
guaaacgcccugcagaaga

SEQ ID NO: 657973 - RNA, 19 nt, Homo sapiens
  misc_RNA (1)...(19): siRNA sense strand
aaacugaacagccagaaga

SEQ ID NO: 657974 - RNA, 19 nt, Homo sapiens
  misc_RNA (1)...(19): siRNA sense strand
uaccaacacuauaaaggaa

SEQ ID NO: 657975 - RNA, 19 nt, Homo sapiens
  misc_RNA (1)...(19): siRNA sense strand
gaucuagaaacacugauga

SEQ ID NO: 657976 - RNA, 19 nt, Homo sapiens
  misc_RNA (1)...(19): siRNA sense strand
agaacagugugaagcagua

SEQ ID NO: 657977 - RNA, 19 nt, Homo sapiens
  misc_RNA (1)...(19): siRNA sense strand
guaacuauucccaaagauu

SEQ ID NO: 657978 - RNA, 19 nt, Homo sapiens
  misc_RNA (1)...(19): siRNA sense strand
guuguagagugcauaaaga

SEQ ID NO: 657979 - RNA, 19 nt, Homo sapiens
  misc_RNA (1)...(19): siRNA sense strand
caaaccaccaucaagcuuu

SEQ ID NO: 657980 - RNA, 19 nt, Homo sapiens
  misc_RNA (1)...(19): siRNA sense strand
aaucaucccuaccuuggaa

SEQ ID NO: 657981 - RNA, 19 nt, Homo sapiens
  misc_RNA (1)...(19): siRNA sense strand
gaaaaggaggcaagaauau

SEQ ID NO: 657982 - RNA, 19 nt, Homo sapiens
  misc_RNA (1)...(19): siRNA sense strand
cuugguggaccuauuauua

SEQ ID NO: 657983 - RNA, 19 nt, Homo sapiens
  misc_RNA (1)...(19): siRNA sense strand
guagagugcauaaagauca

SEQ ID NO: 657984 - RNA, 19 nt, Homo sapiens
  misc_RNA (1)...(19): siRNA sense strand
ggaagagggccugcaguug

SEQ ID NO: 657985 - RNA, 19 nt, Homo sapiens
  misc_RNA (1)...(19): siRNA sense strand
cgaaucugaugcuguggaa

SEQ ID NO: 657986 - RNA, 19 nt, Homo sapiens
  misc_RNA (1)...(19): siRNA sense strand
gugaagcaguauucuggaa

SEQ ID NO: 657987 - RNA, 19 nt, Homo sapiens
  misc_RNA (1)...(19): siRNA sense strand
gucgggagcuucgaucaaa

SEQ ID NO: 657988 - RNA, 19 nt, Homo sapiens
  misc_RNA (1)...(19): siRNA sense strand
caaagguggucagcggauu

SEQ ID NO: 657989 - RNA, 19 nt, Homo sapiens
  misc_RNA (1)...(19): siRNA sense strand
ggauaugauuauuccuaug

SEQ ID NO: 657990 - RNA, 19 nt, Homo sapiens
  misc_RNA (1)...(19): siRNA sense strand
gaguugaggcuguugauuc

SEQ ID NO: 657991 - RNA, 19 nt, Homo sapiens
  misc_RNA (1)...(19): siRNA sense strand
gauuuggcuggaucuauua

SEQ ID NO: 657992 - RNA, 19 nt, Homo sapiens
  misc_RNA (1)...(19): siRNA sense strand
gagucuagcaggaggaauu

SEQ ID NO: 657993 - RNA, 19 nt, Homo sapiens
  misc_RNA (1)...(19): siRNA sense strand
cacaguauuugcugcagaa

SEQ ID NO: 657994 - RNA, 19 nt, Homo sapiens
  misc_RNA (1)...(19): siRNA sense strand
cggauaugauuauuccuau

SEQ ID NO: 657995 - RNA, 19 nt, Homo sapiens
  misc_RNA (1)...(19): siRNA sense strand
uccuugaucuuauaucuga

SEQ ID NO: 657996 - RNA, 19 nt, Homo sapiens
  misc_RNA (1)...(19): siRNA sense strand
gaccuauuauuacuacaca

SEQ ID NO: 657997 - RNA, 19 nt, Homo sapiens
  misc_RNA (1)...(19): siRNA sense strand
agacuacaaugccaguguu

SEQ ID NO: 657998 - RNA, 19 nt, Homo sapiens
  misc_RNA (1)...(19): siRNA sense strand
aaguaacuauucccaaaga

SEQ ID NO: 657999 - RNA, 19 nt, Homo sapiens
  misc_RNA (1)...(19): siRNA sense strand
ugaaaccuaugauuauggu

SEQ ID NO: 658000 - RNA, 19 nt, Homo sapiens
  misc_RNA (1)...(19): siRNA sense strand
aaacacugaugagaugguu

SEQ ID NO: 658001 - RNA, 19 nt, Homo sapiens
  misc_RNA (1)...(19): siRNA sense strand
uacagaaugcacaguauuu

SEQ ID NO: 658002 - RNA, 19 nt, Homo sapiens
  misc_RNA (1)...(19): siRNA sense strand
aaagguggucagcggauua

SEQ ID NO: 658003 - RNA, 19 nt, Homo sapiens
  misc_RNA (1)...(19): siRNA sense strand
aagaggaacaagcauuuaa

SEQ ID NO: 658004 - RNA, 19 nt, Homo sapiens
  misc_RNA (1)...(19): siRNA sense strand
uauuaaggcucuccguaca

SEQ ID NO: 658005 - RNA, 19 nt, Homo sapiens
  misc_RNA (1)...(19): siRNA sense strand
gacgugcacagccuuauga

SEQ ID NO: 658006 - RNA, 19 nt, Homo sapiens
  misc_RNA (1)...(19): siRNA sense strand
uuaaggcucuccguacaga

SEQ ID NO: 658007 - RNA, 19 nt, Homo sapiens
  misc_RNA (1)...(19): siRNA sense strand
ggagaccuggagaccguua

SEQ ID NO: 658008 - RNA, 19 nt, Homo sapiens
  misc_RNA (1)...(19): siRNA sense strand
cauccuugaucuuauaucu

SEQ ID NO: 658009 - RNA, 19 nt, Homo sapiens
  misc_RNA (1)...(19): siRNA sense strand
ggacgugcacagccuuaug

SEQ ID NO: 658010 - RNA, 19 nt, Homo sapiens
  misc_RNA (1)...(19): siRNA sense strand
gagauuaugaugauaugag

SEQ ID NO: 658011 - RNA, 19 nt, Homo sapiens
  misc_RNA (1)...(19): siRNA sense strand
ugacuuugacugcgaguug

SEQ ID NO: 658012 - RNA, 19 nt, Homo sapiens
  misc_RNA (1)...(19): siRNA sense strand
acacaggaccagauacaga

SEQ ID NO: 658013 - RNA, 19 nt, Homo sapiens
  misc_RNA (1)...(19): siRNA sense strand
caggguggcuccggauaug

SEQ ID NO: 658014 - RNA, 19 nt, Homo sapiens
  misc_RNA (1)...(19): siRNA sense strand
ugaugagaugguugaauua

SEQ ID NO: 658015 - RNA, 19 nt, Homo sapiens
  misc_RNA (1)...(19): siRNA sense strand
cuagaagagauuaugauga

SEQ ID NO: 658016 - RNA, 19 nt, Homo sapiens
  misc_RNA (1)...(19): siRNA sense strand
cagaguuguucuuauugga

SEQ ID NO: 658017 - RNA, 19 nt, Homo sapiens
  misc_RNA (1)...(19): siRNA sense strand
gacagaguuguucuuauug

SEQ ID NO: 658018 - RNA, 19 nt, Homo sapiens
  misc_RNA (1)...(19): siRNA sense strand
cgagagaacacucaaacca

SEQ ID NO: 658019 - RNA, 19 nt, Homo sapiens
  misc_RNA (1)...(19): siRNA sense strand
cuacaaugccaguguuuca

SEQ ID NO: 658020 - RNA, 19 nt, Homo sapiens
  misc_RNA (1)...(19): siRNA sense strand
gucagcggauuaaacaaau

SEQ ID NO: 658021 - RNA, 19 nt, Homo sapiens
  misc_RNA (1)...(19): siRNA sense strand
gauaugauuauuccuaugc

SEQ ID NO: 658022 - RNA, 19 nt, Homo sapiens
  misc_RNA (1)...(19): siRNA sense strand
cggcaugguugguuucagu

SEQ ID NO: 658023 - RNA, 19 nt, Homo sapiens
  misc_RNA (1)...(19): siRNA sense strand
aaaccuucccuaacacuga

SEQ ID NO: 658024 - RNA, 19 nt, Homo sapiens
  misc_RNA (1)...(19): siRNA sense strand
cuagaaacacugaugagau

SEQ ID NO: 658025 - RNA, 19 nt, Homo sapiens
  misc_RNA (1)...(19): siRNA sense strand
gguaaacgcccugcagaag

SEQ ID NO: 658026 - RNA, 19 nt, Homo sapiens
  misc_RNA (1)...(19): siRNA sense strand
agaggaacaagcauuuaaa

SEQ ID NO: 658027 - RNA, 19 nt, Homo sapiens
  misc_RNA (1)...(19): siRNA sense strand
ccaacacuauaaaggaagu

SEQ ID NO: 658028 - RNA, 19 nt, Homo sapiens
  misc_RNA (1)...(19): siRNA sense strand
gacuuugacugcgaguuga

SEQ ID NO: 658029 - RNA, 19 nt, Homo sapiens
  misc_RNA (1)...(19): siRNA sense strand
agauacagaaugcacagua

SEQ ID NO: 658030 - RNA, 19 nt, Homo sapiens
  misc_RNA (1)...(19): siRNA sense strand
gaucuauuauuggcaaagg

SEQ ID NO: 658031 - RNA, 19 nt, Homo sapiens
  misc_RNA (1)...(19): siRNA sense strand
ucccaugccuccaucuaga

SEQ ID NO: 658032 - RNA, 19 nt, Homo sapiens
  misc_RNA (1)...(19): siRNA sense strand
aaagaucuagaaacacuga

SEQ ID NO: 658033 - RNA, 19 nt, Homo sapiens
  misc_RNA (1)...(19): siRNA sense strand
ccggauaugauuauuccua

SEQ ID NO: 658034 - RNA, 19 nt, Homo sapiens
  misc_RNA (1)...(19): siRNA sense strand
gaaacugaacagccagaag

SEQ ID NO: 658035 - RNA, 19 nt, Homo sapiens
  misc_RNA (1)...(19): siRNA sense strand
gaacagugugaagcaguau

SEQ ID NO: 658036 - RNA, 19 nt, Homo sapiens
  misc_RNA (1)...(19): siRNA sense strand
cacaggaccagauacagaa

SEQ ID NO: 658037 - RNA, 19 nt, Homo sapiens
  misc_RNA (1)...(19): siRNA sense strand
uuggcuggaucuauuauug

SEQ ID NO: 658038 - RNA, 19 nt, Homo sapiens
  misc_RNA (1)...(19): siRNA sense strand
cauggccuaugacagaaga

SEQ ID NO: 658039 - RNA, 19 nt, Homo sapiens
  misc_RNA (1)...(19): siRNA sense strand
acacugaugagaugguuga

SEQ ID NO: 658040 - RNA, 19 nt, Homo sapiens
  misc_RNA (1)...(19): siRNA sense strand
ugaugaaacuugggacucu

SEQ ID NO: 658041 - RNA, 19 nt, Homo sapiens
  misc_RNA (1)...(19): siRNA sense strand
aguugaggcuguugauuca

SEQ ID NO: 658042 - RNA, 19 nt, Homo sapiens
  misc_RNA (1)...(19): siRNA sense strand
ugaagcaguauucuggaaa

SEQ ID NO: 658043 - RNA, 19 nt, Homo sapiens
  misc_RNA (1)...(19): siRNA sense strand
guggaccuauuauuacuac

SEQ ID NO: 658044 - RNA, 19 nt, Homo sapiens
  misc_RNA (1)...(19): siRNA sense strand
gaugguugaauuacgcauu

SEQ ID NO: 658045 - RNA, 19 nt, Homo sapiens
  misc_RNA (1)...(19): siRNA sense strand
gcauaaagaucauccuuga

SEQ ID NO: 658046 - RNA, 19 nt, Homo sapiens
  misc_RNA (1)...(19): siRNA sense strand
ugacagaguuguucuuauu

SEQ ID NO: 658047 - RNA, 19 nt, Homo sapiens
  misc_RNA (1)...(19): siRNA sense strand
gcagauggcuuaugaacca

SEQ ID NO: 658048 - RNA, 19 nt, Homo sapiens
  misc_RNA (1)...(19): siRNA sense strand
gagcgcauauugaguauca

SEQ ID NO: 658049 - RNA, 19 nt, Homo sapiens
  misc_RNA (1)...(19): siRNA sense strand
ggaagaggaacaagcauuu

SEQ ID NO: 658050 - RNA, 19 nt, Homo sapiens
  misc_RNA (1)...(19): siRNA sense strand
gaucuugguggaccuauua

SEQ ID NO: 658051 - RNA, 19 nt, Homo sapiens
  misc_RNA (1)...(19): siRNA sense strand
gaugaaaccuaugauuaug

SEQ ID NO: 658052 - RNA, 19 nt, Homo sapiens
  misc_RNA (1)...(19): siRNA sense strand
gaagaggaacaagcauuua

SEQ ID NO: 658053 - RNA, 19 nt, Homo sapiens
  misc_RNA (1)...(19): siRNA sense strand
uagaaacacugaugagaug

SEQ ID NO: 658054 - RNA, 19 nt, Homo sapiens
  misc_RNA (1)...(19): siRNA sense strand
acaaguaacuauucccaaa

SEQ ID NO: 658055 - RNA, 19 nt, Homo sapiens
  misc_RNA (1)...(19): siRNA sense strand
cagaauggcagauggcuua

SEQ ID NO: 658056 - RNA, 19 nt, Homo sapiens
  misc_RNA (1)...(19): siRNA sense strand
aaaggaggcaagaauauua

SEQ ID NO: 658057 - RNA, 19 nt, Homo sapiens
  misc_RNA (1)...(19): siRNA sense strand
gaacacaggaccagauaca

SEQ ID NO: 658058 - RNA, 19 nt, Homo sapiens
  misc_RNA (1)...(19): siRNA sense strand
cugaugagaugguugaauu

SEQ ID NO: 658059 - RNA, 19 nt, Homo sapiens
  misc_RNA (1)...(19): siRNA sense strand
aaacaaauccgucaugagu

SEQ ID NO: 658060 - RNA, 19 nt, Homo sapiens
  misc_RNA (1)...(19): siRNA sense strand
uagcagagcucggaaucuu

SEQ ID NO: 658061 - RNA, 19 nt, Homo sapiens
  misc_RNA (1)...(19): siRNA sense strand
uaaacgcccugcagaagau

SEQ ID NO: 658062 - RNA, 19 nt, Homo sapiens
  misc_RNA (1)...(19): siRNA sense strand
ggucagcggauuaaacaaa

SEQ ID NO: 658063 - RNA, 19 nt, Homo sapiens
  misc_RNA (1)...(19): siRNA sense strand
ggaaaaggaggcaagaaua

SEQ ID NO: 658064 - RNA, 19 nt, Homo sapiens
  misc_RNA (1)...(19): siRNA sense strand
caaaauugaugagccuuua

SEQ ID NO: 658065 - RNA, 19 nt, Homo sapiens
  misc_RNA (1)...(19): siRNA sense strand
aauggcagauggcuuauga

SEQ ID NO: 658066 - RNA, 19 nt, Homo sapiens
  misc_RNA (1)...(19): siRNA sense strand
cgaugaaaccuaugauuau

SEQ ID NO: 658067 - RNA, 19 nt, Homo sapiens
  misc_RNA (1)...(19): siRNA sense strand
ggaacaagcauuuaaaaga

SEQ ID NO: 658068 - RNA, 19 nt, Homo sapiens
  misc_RNA (1)...(19): siRNA sense strand
uuaaacaaauccgucauga

SEQ ID NO: 658069 - RNA, 19 nt, Homo sapiens
  misc_RNA (1)...(19): siRNA sense strand
acgaugaaaccuaugauua

SEQ ID NO: 658070 - RNA, 19 nt, Homo sapiens
  misc_RNA (1)...(19): siRNA sense strand
guaaacgcccugcagaaga

SEQ ID NO: 658071 - RNA, 19 nt, Homo sapiens
  misc_RNA (1)...(19): siRNA sense strand
aaacugaacagccagaaga

SEQ ID NO: 658072 - RNA, 19 nt, Homo sapiens
  misc_RNA (1)...(19): siRNA sense strand
uaccaacacuauaaaggaa

SEQ ID NO: 658073 - RNA, 19 nt, Homo sapiens
  misc_RNA (1)...(19): siRNA sense strand
gaucuagaaacacugauga

SEQ ID NO: 658074 - RNA, 19 nt, Homo sapiens
  misc_RNA (1)...(19): siRNA sense strand
agaacagugugaagcagua

SEQ ID NO: 658075 - RNA, 19 nt, Homo sapiens
  misc_RNA (1)...(19): siRNA sense strand
guaacuauucccaaagauu

SEQ ID NO: 658076 - RNA, 19 nt, Homo sapiens
  misc_RNA (1)...(19): siRNA sense strand
guuguagagugcauaaaga

SEQ ID NO: 658077 - RNA, 19 nt, Homo sapiens
  misc_RNA (1)...(19): siRNA sense strand
caaaccaccaucaagcuuu

SEQ ID NO: 658078 - RNA, 19 nt, Homo sapiens
  misc_RNA (1)...(19): siRNA sense strand
aaucaucccuaccuuggaa

SEQ ID NO: 658079 - RNA, 19 nt, Homo sapiens
  misc_RNA (1)...(19): siRNA sense strand
gaaaaggaggcaagaauau

SEQ ID NO: 658080 - RNA, 19 nt, Homo sapiens
  misc_RNA (1)...(19): siRNA sense strand
cuugguggaccuauuauua

SEQ ID NO: 658081 - RNA, 19 nt, Homo sapiens
  misc_RNA (1)...(19): siRNA sense strand
guagagugcauaaagauca

SEQ ID NO: 658082 - RNA, 19 nt, Homo sapiens
  misc_RNA (1)...(19): siRNA sense strand
ggaagagggccugcaguug

SEQ ID NO: 658083 - RNA, 19 nt, Homo sapiens
  misc_RNA (1)...(19): siRNA sense strand
cgaaucugaugcuguggaa

SEQ ID NO: 658084 - RNA, 19 nt, Homo sapiens
  misc_RNA (1)...(19): siRNA sense strand
gucgggagcuucgaucaaa

SEQ ID NO: 658085 - RNA, 19 nt, Homo sapiens
  misc_RNA (1)...(19): siRNA sense strand
caaagguggucagcggauu

SEQ ID NO: 658086 - RNA, 19 nt, Homo sapiens
  misc_RNA (1)...(19): siRNA sense strand
ggauaugauuauuccuaug

SEQ ID NO: 658087 - RNA, 19 nt, Homo sapiens
  misc_RNA (1)...(19): siRNA sense strand
gaguugaggcuguugauuc

SEQ ID NO: 658088 - RNA, 19 nt, Homo sapiens
  misc_RNA (1)...(19): siRNA sense strand
gauuuggcuggaucuauua

SEQ ID NO: 658089 - RNA, 19 nt, Homo sapiens
  misc_RNA (1)...(19): siRNA sense strand
gagucuagcaggaggaauu

SEQ ID NO: 658090 - RNA, 19 nt, Homo sapiens
  misc_RNA (1)...(19): siRNA sense strand
cacaguauuugcugcagaa

SEQ ID NO: 658091 - RNA, 19 nt, Homo sapiens
  misc_RNA (1)...(19): siRNA sense strand
cggauaugauuauuccuau

SEQ ID NO: 658092 - RNA, 19 nt, Homo sapiens
  misc_RNA (1)...(19): siRNA sense strand
uccuugaucuuauaucuga

SEQ ID NO: 658093 - RNA, 19 nt, Homo sapiens
  misc_RNA (1)...(19): siRNA sense strand
gaccuauuauuacuacaca

SEQ ID NO: 658094 - RNA, 19 nt, Homo sapiens
  misc_RNA (1)...(19): siRNA sense strand
agacuacaaugccaguguu

SEQ ID NO: 658095 - RNA, 19 nt, Homo sapiens
  misc_RNA (1)...(19): siRNA sense strand
aaguaacuauucccaaaga

SEQ ID NO: 658096 - RNA, 19 nt, Homo sapiens
  misc_RNA (1)...(19): siRNA sense strand
ugaaaccuaugauuauggu

SEQ ID NO: 658097 - RNA, 19 nt, Homo sapiens
  misc_RNA (1)...(19): siRNA sense strand
aaacacugaugagaugguu

SEQ ID NO: 658098 - RNA, 19 nt, Homo sapiens
  misc_RNA (1)...(19): siRNA sense strand
uacagaaugcacaguauuu

SEQ ID NO: 658099 - RNA, 19 nt, Homo sapiens
  misc_RNA (1)...(19): siRNA sense strand
aaagguggucagcggauua

SEQ ID NO: 658100 - RNA, 19 nt, Homo sapiens
  misc_RNA (1)...(19): siRNA sense strand
aagaggaacaagcauuuaa

SEQ ID NO: 658101 - RNA, 19 nt, Homo sapiens
  misc_RNA (1)...(19): siRNA sense strand
uauuaaggcucuccguaca

SEQ ID NO: 658102 - RNA, 19 nt, Homo sapiens
  misc_RNA (1)...(19): siRNA sense strand
gacgugcacagccuuauga

SEQ ID NO: 658103 - RNA, 19 nt, Homo sapiens
  misc_RNA (1)...(19): siRNA sense strand
uuaaggcucuccguacaga

SEQ ID NO: 658104 - RNA, 19 nt, Homo sapiens
  misc_RNA (1)...(19): siRNA sense strand
ggagaccuggagaccguua

SEQ ID NO: 658105 - RNA, 19 nt, Homo sapiens
  misc_RNA (1)...(19): siRNA sense strand
cauccuugaucuuauaucu

SEQ ID NO: 658106 - RNA, 19 nt, Homo sapiens
  misc_RNA (1)...(19): siRNA sense strand
ggacgugcacagccuuaug

SEQ ID NO: 658107 - RNA, 19 nt, Homo sapiens
  misc_RNA (1)...(19): siRNA sense strand
gagauuaugaugauaugag

SEQ ID NO: 658108 - RNA, 19 nt, Homo sapiens
  misc_RNA (1)...(19): siRNA sense strand
ugacuuugacugcgaguug

SEQ ID NO: 658109 - RNA, 19 nt, Homo sapiens
  misc_RNA (1)...(19): siRNA sense strand
acacaggaccagauacaga

SEQ ID NO: 658110 - RNA, 19 nt, Homo sapiens
  misc_RNA (1)...(19): siRNA sense strand
caggguggcuccggauaug

SEQ ID NO: 658111 - RNA, 19 nt, Homo sapiens
  misc_RNA (1)...(19): siRNA sense strand
ugaugagaugguugaauua

SEQ ID NO: 658112 - RNA, 19 nt, Homo sapiens
  misc_RNA (1)...(19): siRNA sense strand
cuagaagagauuaugauga

SEQ ID NO: 658113 - RNA, 19 nt, Homo sapiens
  misc_RNA (1)...(19): siRNA sense strand
cagaguuguucuuauugga

SEQ ID NO: 658114 - RNA, 19 nt, Homo sapiens
  misc_RNA (1)...(19): siRNA sense strand
gacagaguuguucuuauug

SEQ ID NO: 658115 - RNA, 19 nt, Homo sapiens
  misc_RNA (1)...(19): siRNA sense strand
cgagagaacacucaaacca

SEQ ID NO: 658116 - RNA, 19 nt, Homo sapiens
  misc_RNA (1)...(19): siRNA sense strand
cuacaaugccaguguuuca

SEQ ID NO: 658117 - RNA, 19 nt, Homo sapiens
  misc_RNA (1)...(19): siRNA sense strand
gucagcggauuaaacaaau

SEQ ID NO: 658118 - RNA, 19 nt, Homo sapiens
  misc_RNA (1)...(19): siRNA sense strand
gauaugauuauuccuaugc

SEQ ID NO: 658119 - RNA, 19 nt, Homo sapiens
  misc_RNA (1)...(19): siRNA sense strand
cggcaugguugguuucagu

SEQ ID NO: 658120 - RNA, 19 nt, Homo sapiens
  misc_RNA (1)...(19): siRNA sense strand
aaaccuucccuaacacuga

SEQ ID NO: 658121 - RNA, 19 nt, Homo sapiens
  misc_RNA (1)...(19): siRNA sense strand
gguaaacgcccugcagaag

SEQ ID NO: 658122 - RNA, 19 nt, Homo sapiens
  misc_RNA (1)...(19): siRNA sense strand
cuagaaacacugaugagau

SEQ ID NO: 658123 - RNA, 19 nt, Homo sapiens
  misc_RNA (1)...(19): siRNA sense strand
agaggaacaagcauuuaaa

SEQ ID NO: 658124 - RNA, 19 nt, Homo sapiens
  misc_RNA (1)...(19): siRNA sense strand
ccaacacuauaaaggaagu

SEQ ID NO: 658125 - RNA, 19 nt, Homo sapiens
  misc_RNA (1)...(19): siRNA sense strand
gacuuugacugcgaguuga

SEQ ID NO: 658126 - RNA, 19 nt, Homo sapiens
  misc_RNA (1)...(19): siRNA sense strand
agauacagaaugcacagua

SEQ ID NO: 658127 - RNA, 19 nt, Homo sapiens
  misc_RNA (1)...(19): siRNA sense strand
gaucuauuauuggcaaagg

SEQ ID NO: 658128 - RNA, 19 nt, Homo sapiens
  misc_RNA (1)...(19): siRNA sense strand
ucccaugccuccaucuaga

SEQ ID NO: 658129 - RNA, 19 nt, Homo sapiens
  misc_RNA (1)...(19): siRNA sense strand
aaagaucuagaaacacuga

SEQ ID NO: 658130 - RNA, 19 nt, Homo sapiens
  misc_RNA (1)...(19): siRNA sense strand
gaaacugaacagccagaag

SEQ ID NO: 658131 - RNA, 19 nt, Homo sapiens
  misc_RNA (1)...(19): siRNA sense strand
gaacagugugaagcaguau

SEQ ID NO: 658132 - RNA, 19 nt, Homo sapiens
  misc_RNA (1)...(19): siRNA sense strand
cacaggaccagauacagaa

SEQ ID NO: 658133 - RNA, 19 nt, Homo sapiens
  misc_RNA (1)...(19): siRNA sense strand
uuggcuggaucuauuauug

SEQ ID NO: 658134 - RNA, 19 nt, Homo sapiens
  misc_RNA (1)...(19): siRNA sense strand
ccggauaugauuauuccua

SEQ ID NO: 658135 - RNA, 19 nt, Homo sapiens
  misc_RNA (1)...(19): siRNA sense strand
acacugaugagaugguuga

SEQ ID NO: 658136 - RNA, 19 nt, Homo sapiens
  misc_RNA (1)...(19): siRNA sense strand
ugaugaaacuugggacucu

SEQ ID NO: 658137 - RNA, 19 nt, Homo sapiens
  misc_RNA (1)...(19): siRNA sense strand
cauggccuaugacagaaga

SEQ ID NO: 658138 - RNA, 19 nt, Homo sapiens
  misc_RNA (1)...(19): siRNA sense strand
cccgagcgcauauugagua

SEQ ID NO: 658139 - RNA, 19 nt, Homo sapiens
  misc_RNA (1)...(19): siRNA sense strand
guggaccuauuauuacuac

SEQ ID NO: 658140 - RNA, 19 nt, Homo sapiens
  misc_RNA (1)...(19): siRNA sense strand
gaugguugaauuacgcauu

SEQ ID NO: 658141 - RNA, 19 nt, Homo sapiens
  misc_RNA (1)...(19): siRNA sense strand
aguugaggcuguugauuca

SEQ ID NO: 658142 - RNA, 19 nt, Homo sapiens
  misc_RNA (1)...(19): siRNA sense strand
aaggaggcaagaauauuaa

SEQ ID NO: 658143 - RNA, 19 nt, Homo sapiens
  misc_RNA (1)...(19): siRNA sense strand
gaaacacugaugagauggu

SEQ ID NO: 658144 - RNA, 19 nt, Homo sapiens
  misc_RNA (1)...(19): siRNA sense strand
acagaguuguucuuauugg

SEQ ID NO: 658145 - RNA, 19 nt, Homo sapiens
  misc_RNA (1)...(19): siRNA sense strand
gaacaaggacaucuuugaa

SEQ ID NO: 658146 - RNA, 19 nt, Homo sapiens
  misc_RNA (1)...(19): siRNA sense strand
gccaucacauaucgaauua

SEQ ID NO: 658147 - RNA, 19 nt, Homo sapiens
  misc_RNA (1)...(19): siRNA sense strand
caacgugacuccugauuac

SEQ ID NO: 658148 - RNA, 19 nt, Homo sapiens
  misc_RNA (1)...(19): siRNA sense strand
ggacaucuuugaaguagag

SEQ ID NO: 658149 - RNA, 19 nt, Homo sapiens
  misc_RNA (1)...(19): siRNA sense strand
gaggagaacacaaauguca

SEQ ID NO: 658150 - RNA, 19 nt, Homo sapiens
  misc_RNA (1)...(19): siRNA sense strand
gcccaguacugcucuguga

SEQ ID NO: 658151 - RNA, 19 nt, Homo sapiens
  misc_RNA (1)...(19): siRNA sense strand
caaggacaucuuugaagua

SEQ ID NO: 658152 - RNA, 19 nt, Homo sapiens
  misc_RNA (1)...(19): siRNA sense strand
acaaggacaucuuugaagu

SEQ ID NO: 658153 - RNA, 19 nt, Homo sapiens
  misc_RNA (1)...(19): siRNA sense strand
gaggaggacacgaaaguga

SEQ ID NO: 658154 - RNA, 19 nt, Homo sapiens
  misc_RNA (1)...(19): siRNA sense strand
caacucggccaucacauau

SEQ ID NO: 658155 - RNA, 19 nt, Homo sapiens
  misc_RNA (1)...(19): siRNA sense strand
guacugcucugugaacaag

SEQ ID NO: 658156 - RNA, 19 nt, Homo sapiens
  misc_RNA (1)...(19): siRNA sense strand
ucaacucggccaucacaua

SEQ ID NO: 658157 - RNA, 19 nt, Homo sapiens
  misc_RNA (1)...(19): siRNA sense strand
ucaacgugacuccugauua

SEQ ID NO: 658158 - RNA, 19 nt, Homo sapiens
  misc_RNA (1)...(19): siRNA sense strand
ucacauaucgaauuaccaa

SEQ ID NO: 658159 - RNA, 19 nt, Homo sapiens
  misc_RNA (1)...(19): siRNA sense strand
caucaucuacagcaucuuu

SEQ ID NO: 658160 - RNA, 19 nt, Homo sapiens
  misc_RNA (1)...(19): siRNA sense strand
ugaacaaggacaucuuuga

SEQ ID NO: 658161 - RNA, 19 nt, Homo sapiens
  misc_RNA (1)...(19): siRNA sense strand
ggccaucacauaucgaauu

SEQ ID NO: 658162 - RNA, 19 nt, Homo sapiens
  misc_RNA (1)...(19): siRNA sense strand
ucaaccagcccaucaucua

SEQ ID NO: 658163 - RNA, 19 nt, Homo sapiens
  misc_RNA (1)...(19): siRNA sense strand
gaccucaacucggccauca

SEQ ID NO: 658164 - RNA, 19 nt, Homo sapiens
  misc_RNA (1)...(19): siRNA sense strand
uagaggagaacacaaaugu

SEQ ID NO: 658165 - RNA, 19 nt, Homo sapiens
  misc_RNA (1)...(19): siRNA sense strand
ggacgacauucuguucuac

SEQ ID NO: 658166 - RNA, 19 nt, Homo sapiens
  misc_RNA (1)...(19): siRNA sense strand
cgacaaggacgacauucug

SEQ ID NO: 658167 - RNA, 19 nt, Homo sapiens
  misc_RNA (1)...(19): siRNA sense strand
caaggacgacauucuguuc

SEQ ID NO: 658168 - RNA, 19 nt, Homo sapiens
  misc_RNA (1)...(19): siRNA sense strand
aaggacaucuuugaaguag

SEQ ID NO: 658169 - RNA, 19 nt, Homo sapiens
  misc_RNA (1)...(19): siRNA sense strand
ggccgaacaugaccuucug

SEQ ID NO: 658170 - RNA, 19 nt, Homo sapiens
  misc_RNA (1)...(19): siRNA sense strand
guucuacacccuccaggaa

SEQ ID NO: 658171 - RNA, 19 nt, Homo sapiens
  misc_RNA (1)...(19): siRNA sense strand
ugacagcaggugccaguga

SEQ ID NO: 658172 - RNA, 19 nt, Homo sapiens
  misc_RNA (1)...(19): siRNA sense strand
guagaggagaacacaaaug

SEQ ID NO: 658173 - RNA, 19 nt, Homo sapiens
  misc_RNA (1)...(19): siRNA sense strand
aggacgacauucuguucua

SEQ ID NO: 658174 - RNA, 19 nt, Homo sapiens
  misc_RNA (1)...(19): siRNA sense strand
ugucagugcuggacgucaa

SEQ ID NO: 658175 - RNA, 19 nt, Homo sapiens
  misc_RNA (1)...(19): siRNA sense strand
ucagagcggaggcacauug

SEQ ID NO: 658176 - RNA, 19 nt, Homo sapiens
  misc_RNA (1)...(19): siRNA sense strand
gaaguagaggagaacacaa

SEQ ID NO: 658177 - RNA, 19 nt, Homo sapiens
  misc_RNA (1)...(19): siRNA sense strand
gcuaaggguguucguguca

SEQ ID NO: 658178 - RNA, 19 nt, Homo sapiens
  misc_RNA (1)...(19): siRNA sense strand
gacaaggacgacauucugu

SEQ ID NO: 658179 - RNA, 19 nt, Homo sapiens
  misc_RNA (1)...(19): siRNA sense strand
ucuacacccuccaggaaau

SEQ ID NO: 658180 - RNA, 19 nt, Homo sapiens
  misc_RNA (1)...(19): siRNA sense strand
gaauuaccaaccacucaca

SEQ ID NO: 658181 - RNA, 19 nt, Homo sapiens
  misc_RNA (1)...(19): siRNA sense strand
aaguagaggagaacacaaa

SEQ ID NO: 658182 - RNA, 19 nt, Homo sapiens
  misc_RNA (1)...(19): siRNA sense strand
cauaucgaauuaccaacca

SEQ ID NO: 658183 - RNA, 19 nt, Homo sapiens
  misc_RNA (1)...(19): siRNA sense strand
caucacauaucgaauuacc

SEQ ID NO: 658184 - RNA, 19 nt, Homo sapiens
  misc_RNA (1)...(19): siRNA sense strand
uaaggguguucgugucagu

SEQ ID NO: 658185 - RNA, 19 nt, Homo sapiens
  misc_RNA (1)...(19): siRNA sense strand
cgaccuugcccgcuacuca

SEQ ID NO: 658186 - RNA, 19 nt, Homo sapiens
  misc_RNA (1)...(19): siRNA sense strand
ggaguucucggaccucaac

SEQ ID NO: 658187 - RNA, 19 nt, Homo sapiens
  misc_RNA (1)...(19): siRNA sense strand
ugugaacaaggacaucuuu

SEQ ID NO: 658188 - RNA, 19 nt, Homo sapiens
  misc_RNA (1)...(19): siRNA sense strand
caaccagcccaucaucuac

SEQ ID NO: 658189 - RNA, 19 nt, Homo sapiens
  misc_RNA (1)...(19): siRNA sense strand
ggaggaggacacgaaagug

SEQ ID NO: 658190 - RNA, 19 nt, Homo sapiens
  misc_RNA (1)...(19): siRNA sense strand
ugaaguagaggagaacaca

SEQ ID NO: 658191 - RNA, 19 nt, Homo sapiens
  misc_RNA (1)...(19): siRNA sense strand
ccacacuagugcugaacgu

SEQ ID NO: 658192 - RNA, 19 nt, Homo sapiens
  misc_RNA (1)...(19): siRNA sense strand
gguggaggaggacacgaaa

SEQ ID NO: 658193 - RNA, 19 nt, Homo sapiens
  misc_RNA (1)...(19): siRNA sense strand
acaaggacgacauucuguu

SEQ ID NO: 658194 - RNA, 19 nt, Homo sapiens
  misc_RNA (1)...(19): siRNA sense strand
ggcuacgucugcauucaag

SEQ ID NO: 658195 - RNA, 19 nt, Homo sapiens
  misc_RNA (1)...(19): siRNA sense strand
uuuaagaccaaggagauaa

SEQ ID NO: 658196 - RNA, 19 nt, Homo sapiens
  misc_RNA (1)...(19): siRNA sense strand
ucuuugaaguagaggagaa

SEQ ID NO: 658197 - RNA, 19 nt, Homo sapiens
  misc_RNA (1)...(19): siRNA sense strand
ggagaagucacugcuugag

SEQ ID NO: 658198 - RNA, 19 nt, Homo sapiens
  misc_RNA (1)...(19): siRNA sense strand
gaacaaggacaucuuugaa

SEQ ID NO: 658199 - RNA, 19 nt, Homo sapiens
  misc_RNA (1)...(19): siRNA sense strand
gccaucacauaucgaauua

SEQ ID NO: 658200 - RNA, 19 nt, Homo sapiens
  misc_RNA (1)...(19): siRNA sense strand
caacgugacuccugauuac

SEQ ID NO: 658201 - RNA, 19 nt, Homo sapiens
  misc_RNA (1)...(19): siRNA sense strand
ggacaucuuugaaguagag

SEQ ID NO: 658202 - RNA, 19 nt, Homo sapiens
  misc_RNA (1)...(19): siRNA sense strand
gaggagaacacaaauguca

SEQ ID NO: 658203 - RNA, 19 nt, Homo sapiens
  misc_RNA (1)...(19): siRNA sense strand
gcccaguacugcucuguga

SEQ ID NO: 658204 - RNA, 19 nt, Homo sapiens
  misc_RNA (1)...(19): siRNA sense strand
caaggacaucuuugaagua

SEQ ID NO: 658205 - RNA, 19 nt, Homo sapiens
  misc_RNA (1)...(19): siRNA sense strand
acaaggacaucuuugaagu

SEQ ID NO: 658206 - RNA, 19 nt, Homo sapiens
  misc_RNA (1)...(19): siRNA sense strand
gaggaggacacgaaaguga

SEQ ID NO: 658207 - RNA, 19 nt, Homo sapiens
  misc_RNA (1)...(19): siRNA sense strand
caacucggccaucacauau

SEQ ID NO: 658208 - RNA, 19 nt, Homo sapiens
  misc_RNA (1)...(19): siRNA sense strand
guacugcucugugaacaag

SEQ ID NO: 658209 - RNA, 19 nt, Homo sapiens
  misc_RNA (1)...(19): siRNA sense strand
ucaacucggccaucacaua

SEQ ID NO: 658210 - RNA, 19 nt, Homo sapiens
  misc_RNA (1)...(19): siRNA sense strand
ucaacgugacuccugauua

SEQ ID NO: 658211 - RNA, 19 nt, Homo sapiens
  misc_RNA (1)...(19): siRNA sense strand
ucacauaucgaauuaccaa

SEQ ID NO: 658212 - RNA, 19 nt, Homo sapiens
  misc_RNA (1)...(19): siRNA sense strand
caucaucuacagcaucuuu

SEQ ID NO: 658213 - RNA, 19 nt, Homo sapiens
  misc_RNA (1)...(19): siRNA sense strand
ugaacaaggacaucuuuga

SEQ ID NO: 658214 - RNA, 19 nt, Homo sapiens
  misc_RNA (1)...(19): siRNA sense strand
ggccaucacauaucgaauu

SEQ ID NO: 658215 - RNA, 19 nt, Homo sapiens
  misc_RNA (1)...(19): siRNA sense strand
ucaaccagcccaucaucua

SEQ ID NO: 658216 - RNA, 19 nt, Homo sapiens
  misc_RNA (1)...(19): siRNA sense strand
gaccucaacucggccauca

SEQ ID NO: 658217 - RNA, 19 nt, Homo sapiens
  misc_RNA (1)...(19): siRNA sense strand
uagaggagaacacaaaugu

SEQ ID NO: 658218 - RNA, 19 nt, Homo sapiens
  misc_RNA (1)...(19): siRNA sense strand
ggacgacauucuguucuac

SEQ ID NO: 658219 - RNA, 19 nt, Homo sapiens
  misc_RNA (1)...(19): siRNA sense strand
cgacaaggacgacauucug

SEQ ID NO: 658220 - RNA, 19 nt, Homo sapiens
  misc_RNA (1)...(19): siRNA sense strand
caaggacgacauucuguuc

SEQ ID NO: 658221 - RNA, 19 nt, Homo sapiens
  misc_RNA (1)...(19): siRNA sense strand
aaggacaucuuugaaguag

SEQ ID NO: 658222 - RNA, 19 nt, Homo sapiens
  misc_RNA (1)...(19): siRNA sense strand
ggccgaacaugaccuucug

SEQ ID NO: 658223 - RNA, 19 nt, Homo sapiens
  misc_RNA (1)...(19): siRNA sense strand
guucuacacccuccaggaa

SEQ ID NO: 658224 - RNA, 19 nt, Homo sapiens
  misc_RNA (1)...(19): siRNA sense strand
ugacagcaggugccaguga

SEQ ID NO: 658225 - RNA, 19 nt, Homo sapiens
  misc_RNA (1)...(19): siRNA sense strand
guagaggagaacacaaaug

SEQ ID NO: 658226 - RNA, 19 nt, Homo sapiens
  misc_RNA (1)...(19): siRNA sense strand
aggacgacauucuguucua

SEQ ID NO: 658227 - RNA, 19 nt, Homo sapiens
  misc_RNA (1)...(19): siRNA sense strand
ugucagugcuggacgucaa

SEQ ID NO: 658228 - RNA, 19 nt, Homo sapiens
  misc_RNA (1)...(19): siRNA sense strand
ucagagcggaggcacauug

SEQ ID NO: 658229 - RNA, 19 nt, Homo sapiens
  misc_RNA (1)...(19): siRNA sense strand
gaaguagaggagaacacaa

SEQ ID NO: 658230 - RNA, 19 nt, Homo sapiens
  misc_RNA (1)...(19): siRNA sense strand
gcuaaggguguucguguca

SEQ ID NO: 658231 - RNA, 19 nt, Homo sapiens
  misc_RNA (1)...(19): siRNA sense strand
gacaaggacgacauucugu

SEQ ID NO: 658232 - RNA, 19 nt, Homo sapiens
  misc_RNA (1)...(19): siRNA sense strand
ucuacacccuccaggaaau

SEQ ID NO: 658233 - RNA, 19 nt, Homo sapiens
  misc_RNA (1)...(19): siRNA sense strand
gaauuaccaaccacucaca

SEQ ID NO: 658234 - RNA, 19 nt, Homo sapiens
  misc_RNA (1)...(19): siRNA sense strand
aaguagaggagaacacaaa

SEQ ID NO: 658235 - RNA, 19 nt, Homo sapiens
  misc_RNA (1)...(19): siRNA sense strand
cauaucgaauuaccaacca

SEQ ID NO: 658236 - RNA, 19 nt, Homo sapiens
  misc_RNA (1)...(19): siRNA sense strand
caucacauaucgaauuacc

SEQ ID NO: 658237 - RNA, 19 nt, Homo sapiens
  misc_RNA (1)...(19): siRNA sense strand
uaaggguguucgugucagu

SEQ ID NO: 658238 - RNA, 19 nt, Homo sapiens
  misc_RNA (1)...(19): siRNA sense strand
cgaccuugcccgcuacuca

SEQ ID NO: 658239 - RNA, 19 nt, Homo sapiens
  misc_RNA (1)...(19): siRNA sense strand
ggaguucucggaccucaac

SEQ ID NO: 658240 - RNA, 19 nt, Homo sapiens
  misc_RNA (1)...(19): siRNA sense strand
ugugaacaaggacaucuuu

SEQ ID NO: 658241 - RNA, 19 nt, Homo sapiens
  misc_RNA (1)...(19): siRNA sense strand
caaccagcccaucaucuac

SEQ ID NO: 658242 - RNA, 19 nt, Homo sapiens
  misc_RNA (1)...(19): siRNA sense strand
ggaggaggacacgaaagug

SEQ ID NO: 658243 - RNA, 19 nt, Homo sapiens
  misc_RNA (1)...(19): siRNA sense strand
ugaaguagaggagaacaca

SEQ ID NO: 658244 - RNA, 19 nt, Homo sapiens
  misc_RNA (1)...(19): siRNA sense strand
ccacacuagugcugaacgu

SEQ ID NO: 658245 - RNA, 19 nt, Homo sapiens
  misc_RNA (1)...(19): siRNA sense strand
gguggaggaggacacgaaa

SEQ ID NO: 658246 - RNA, 19 nt, Homo sapiens
  misc_RNA (1)...(19): siRNA sense strand
acaaggacgacauucuguu

SEQ ID NO: 658247 - RNA, 19 nt, Homo sapiens
  misc_RNA (1)...(19): siRNA sense strand
ggcuacgucugcauucaag

SEQ ID NO: 658248 - RNA, 19 nt, Homo sapiens
  misc_RNA (1)...(19): siRNA sense strand
uuuaagaccaaggagauaa

SEQ ID NO: 658249 - RNA, 19 nt, Homo sapiens
  misc_RNA (1)...(19): siRNA sense strand
ucuuugaaguagaggagaa

SEQ ID NO: 658250 - RNA, 19 nt, Homo sapiens
  misc_RNA (1)...(19): siRNA sense strand
ggagaagucacugcuugag

SEQ ID NO: 658251 - RNA, 19 nt, Homo sapiens
  misc_RNA (1)...(19): siRNA sense strand
gaacaaggacaucuuugaa

SEQ ID NO: 658252 - RNA, 19 nt, Homo sapiens
  misc_RNA (1)...(19): siRNA sense strand
gccaucacauaucgaauua

SEQ ID NO: 658253 - RNA, 19 nt, Homo sapiens
  misc_RNA (1)...(19): siRNA sense strand
caacgugacuccugauuac

SEQ ID NO: 658254 - RNA, 19 nt, Homo sapiens
  misc_RNA (1)...(19): siRNA sense strand
ggacaucuuugaaguagag

SEQ ID NO: 658255 - RNA, 19 nt, Homo sapiens
  misc_RNA (1)...(19): siRNA sense strand
gaggagaacacaaauguca

SEQ ID NO: 658256 - RNA, 19 nt, Homo sapiens
  misc_RNA (1)...(19): siRNA sense strand
gcccaguacugcucuguga

SEQ ID NO: 658257 - RNA, 19 nt, Homo sapiens
  misc_RNA (1)...(19): siRNA sense strand
caaggacaucuuugaagua

SEQ ID NO: 658258 - RNA, 19 nt, Homo sapiens
  misc_RNA (1)...(19): siRNA sense strand
acaaggacaucuuugaagu

SEQ ID NO: 658259 - RNA, 19 nt, Homo sapiens
  misc_RNA (1)...(19): siRNA sense strand
gaggaggacacgaaaguga

SEQ ID NO: 658260 - RNA, 19 nt, Homo sapiens
  misc_RNA (1)...(19): siRNA sense strand
caacucggccaucacauau

SEQ ID NO: 658261 - RNA, 19 nt, Homo sapiens
  misc_RNA (1)...(19): siRNA sense strand
guacugcucugugaacaag

SEQ ID NO: 658262 - RNA, 19 nt, Homo sapiens
  misc_RNA (1)...(19): siRNA sense strand
ucaacucggccaucacaua

SEQ ID NO: 658263 - RNA, 19 nt, Homo sapiens
  misc_RNA (1)...(19): siRNA sense strand
ucaacgugacuccugauua

SEQ ID NO: 658264 - RNA, 19 nt, Homo sapiens
  misc_RNA (1)...(19): siRNA sense strand
ucacauaucgaauuaccaa

SEQ ID NO: 658265 - RNA, 19 nt, Homo sapiens
  misc_RNA (1)...(19): siRNA sense strand
caucaucuacagcaucuuu

SEQ ID NO: 658266 - RNA, 19 nt, Homo sapiens
  misc_RNA (1)...(19): siRNA sense strand
ugaacaaggacaucuuuga

SEQ ID NO: 658267 - RNA, 19 nt, Homo sapiens
  misc_RNA (1)...(19): siRNA sense strand
ggccaucacauaucgaauu

SEQ ID NO: 658268 - RNA, 19 nt, Homo sapiens
  misc_RNA (1)...(19): siRNA sense strand
ucaaccagcccaucaucua

SEQ ID NO: 658269 - RNA, 19 nt, Homo sapiens
  misc_RNA (1)...(19): siRNA sense strand
gaccucaacucggccauca

SEQ ID NO: 658270 - RNA, 19 nt, Homo sapiens
  misc_RNA (1)...(19): siRNA sense strand
uagaggagaacacaaaugu

SEQ ID NO: 658271 - RNA, 19 nt, Homo sapiens
  misc_RNA (1)...(19): siRNA sense strand
ggacgacauucuguucuac

SEQ ID NO: 658272 - RNA, 19 nt, Homo sapiens
  misc_RNA (1)...(19): siRNA sense strand
cgacaaggacgacauucug

SEQ ID NO: 658273 - RNA, 19 nt, Homo sapiens
  misc_RNA (1)...(19): siRNA sense strand
caaggacgacauucuguuc

SEQ ID NO: 658274 - RNA, 19 nt, Homo sapiens
  misc_RNA (1)...(19): siRNA sense strand
aaggacaucuuugaaguag

SEQ ID NO: 658275 - RNA, 19 nt, Homo sapiens
  misc_RNA (1)...(19): siRNA sense strand
ggccgaacaugaccuucug

SEQ ID NO: 658276 - RNA, 19 nt, Homo sapiens
  misc_RNA (1)...(19): siRNA sense strand
guucuacacccuccaggaa

SEQ ID NO: 658277 - RNA, 19 nt, Homo sapiens
  misc_RNA (1)...(19): siRNA sense strand
ugacagcaggugccaguga

SEQ ID NO: 658278 - RNA, 19 nt, Homo sapiens
  misc_RNA (1)...(19): siRNA sense strand
guagaggagaacacaaaug

SEQ ID NO: 658279 - RNA, 19 nt, Homo sapiens
  misc_RNA (1)...(19): siRNA sense strand
aggacgacauucuguucua

SEQ ID NO: 658280 - RNA, 19 nt, Homo sapiens
  misc_RNA (1)...(19): siRNA sense strand
ugucagugcuggacgucaa

SEQ ID NO: 658281 - RNA, 19 nt, Homo sapiens
  misc_RNA (1)...(19): siRNA sense strand
ucagagcggaggcacauug

SEQ ID NO: 658282 - RNA, 19 nt, Homo sapiens
  misc_RNA (1)...(19): siRNA sense strand
gaaguagaggagaacacaa

SEQ ID NO: 658283 - RNA, 19 nt, Homo sapiens
  misc_RNA (1)...(19): siRNA sense strand
gcuaaggguguucguguca

SEQ ID NO: 658284 - RNA, 19 nt, Homo sapiens
  misc_RNA (1)...(19): siRNA sense strand
gacaaggacgacauucugu

SEQ ID NO: 658285 - RNA, 19 nt, Homo sapiens
  misc_RNA (1)...(19): siRNA sense strand
ucuacacccuccaggaaau

SEQ ID NO: 658286 - RNA, 19 nt, Homo sapiens
  misc_RNA (1)...(19): siRNA sense strand
gaauuaccaaccacucaca

SEQ ID NO: 658287 - RNA, 19 nt, Homo sapiens
  misc_RNA (1)...(19): siRNA sense strand
aaguagaggagaacacaaa

SEQ ID NO: 658288 - RNA, 19 nt, Homo sapiens
  misc_RNA (1)...(19): siRNA sense strand
cauaucgaauuaccaacca

SEQ ID NO: 658289 - RNA, 19 nt, Homo sapiens
  misc_RNA (1)...(19): siRNA sense strand
caucacauaucgaauuacc

SEQ ID NO: 658290 - RNA, 19 nt, Homo sapiens
  misc_RNA (1)...(19): siRNA sense strand
uaaggguguucgugucagu

SEQ ID NO: 658291 - RNA, 19 nt, Homo sapiens
  misc_RNA (1)...(19): siRNA sense strand
cgaccuugcccgcuacuca

SEQ ID NO: 658292 - RNA, 19 nt, Homo sapiens
  misc_RNA (1)...(19): siRNA sense strand
ggaguucucggaccucaac

SEQ ID NO: 658293 - RNA, 19 nt, Homo sapiens
  misc_RNA (1)...(19): siRNA sense strand
ugugaacaaggacaucuuu

SEQ ID NO: 658294 - RNA, 19 nt, Homo sapiens
  misc_RNA (1)...(19): siRNA sense strand
caaccagcccaucaucuac

SEQ ID NO: 658295 - RNA, 19 nt, Homo sapiens
  misc_RNA (1)...(19): siRNA sense strand
ggaggaggacacgaaagug

SEQ ID NO: 658296 - RNA, 19 nt, Homo sapiens
  misc_RNA (1)...(19): siRNA sense strand
ugaaguagaggagaacaca

SEQ ID NO: 658297 - RNA, 19 nt, Homo sapiens
  misc_RNA (1)...(19): siRNA sense strand
ccacacuagugcugaacgu

SEQ ID NO: 658298 - RNA, 19 nt, Homo sapiens
  misc_RNA (1)...(19): siRNA sense strand
gguggaggaggacacgaaa

SEQ ID NO: 658299 - RNA, 19 nt, Homo sapiens
  misc_RNA (1)...(19): siRNA sense strand
acaaggacgacauucuguu

SEQ ID NO: 658300 - RNA, 19 nt, Homo sapiens
  misc_RNA (1)...(19): siRNA sense strand
ggcuacgucugcauucaag

SEQ ID NO: 658301 - RNA, 19 nt, Homo sapiens
  misc_RNA (1)...(19): siRNA sense strand
uuuaagaccaaggagauaa

SEQ ID NO: 658302 - RNA, 19 nt, Homo sapiens
  misc_RNA (1)...(19): siRNA sense strand
ucuuugaaguagaggagaa

SEQ ID NO: 658303 - RNA, 19 nt, Homo sapiens
  misc_RNA (1)...(19): siRNA sense strand
ggagaagucacugcuugag

SEQ ID NO: 658304 - RNA, 19 nt, Homo sapiens
  misc_RNA (1)...(19): siRNA sense strand
gaacaaggacaucuuugaa

SEQ ID NO: 658305 - RNA, 19 nt, Homo sapiens
  misc_RNA (1)...(19): siRNA sense strand
caacgugacuccugauuac

SEQ ID NO: 658306 - RNA, 19 nt, Homo sapiens
  misc_RNA (1)...(19): siRNA sense strand
ggacaucuuugaaguagag

SEQ ID NO: 658307 - RNA, 19 nt, Homo sapiens
  misc_RNA (1)...(19): siRNA sense strand
gaggagaacacaaauguca

SEQ ID NO: 658308 - RNA, 19 nt, Homo sapiens
  misc_RNA (1)...(19): siRNA sense strand
gcccaguacugcucuguga

SEQ ID NO: 658309 - RNA, 19 nt, Homo sapiens
  misc_RNA (1)...(19): siRNA sense strand
caaggacaucuuugaagua

SEQ ID NO: 658310 - RNA, 19 nt, Homo sapiens
  misc_RNA (1)...(19): siRNA sense strand
acaaggacaucuuugaagu

SEQ ID NO: 658311 - RNA, 19 nt, Homo sapiens
  misc_RNA (1)...(19): siRNA sense strand
guacugcucugugaacaag

SEQ ID NO: 658312 - RNA, 19 nt, Homo sapiens
  misc_RNA (1)...(19): siRNA sense strand
ucaacgugacuccugauua

SEQ ID NO: 658313 - RNA, 19 nt, Homo sapiens
  misc_RNA (1)...(19): siRNA sense strand
ugaacaaggacaucuuuga

SEQ ID NO: 658314 - RNA, 19 nt, Homo sapiens
  misc_RNA (1)...(19): siRNA sense strand
uagaggagaacacaaaugu

SEQ ID NO: 658315 - RNA, 19 nt, Homo sapiens
  misc_RNA (1)...(19): siRNA sense strand
aaggacaucuuugaaguag

SEQ ID NO: 658316 - RNA, 19 nt, Homo sapiens
  misc_RNA (1)...(19): siRNA sense strand
gaaguagaggagaacacaa

SEQ ID NO: 658317 - RNA, 19 nt, Homo sapiens
  misc_RNA (1)...(19): siRNA sense strand
guagaggagaacacaaaug

SEQ ID NO: 658318 - RNA, 19 nt, Homo sapiens
  misc_RNA (1)...(19): siRNA sense strand
aaguagaggagaacacaaa

SEQ ID NO: 658319 - RNA, 19 nt, Homo sapiens
  misc_RNA (1)...(19): siRNA sense strand
ugugaacaaggacaucuuu

SEQ ID NO: 658320 - RNA, 19 nt, Homo sapiens
  misc_RNA (1)...(19): siRNA sense strand
ugaaguagaggagaacaca

SEQ ID NO: 658321 - RNA, 19 nt, Homo sapiens
  misc_RNA (1)...(19): siRNA sense strand
ucuuugaaguagaggagaa

SEQ ID NO: 658322 - RNA, 19 nt, Homo sapiens
  misc_RNA (1)...(19): siRNA sense strand
gaacaaggacaucuuugaa

SEQ ID NO: 658323 - RNA, 19 nt, Homo sapiens
  misc_RNA (1)...(19): siRNA sense strand
gccaucacauaucgaauua

SEQ ID NO: 658324 - RNA, 19 nt, Homo sapiens
  misc_RNA (1)...(19): siRNA sense strand
caacgugacuccugauuac

SEQ ID NO: 658325 - RNA, 19 nt, Homo sapiens
  misc_RNA (1)...(19): siRNA sense strand
ggacaucuuugaaguagag

SEQ ID NO: 658326 - RNA, 19 nt, Homo sapiens
  misc_RNA (1)...(19): siRNA sense strand
gaggagaacacaaauguca

SEQ ID NO: 658327 - RNA, 19 nt, Homo sapiens
  misc_RNA (1)...(19): siRNA sense strand
gcccaguacugcucuguga

SEQ ID NO: 658328 - RNA, 19 nt, Homo sapiens
  misc_RNA (1)...(19): siRNA sense strand
caaggacaucuuugaagua

SEQ ID NO: 658329 - RNA, 19 nt, Homo sapiens
  misc_RNA (1)...(19): siRNA sense strand
acaaggacaucuuugaagu

SEQ ID NO: 658330 - RNA, 19 nt, Homo sapiens
  misc_RNA (1)...(19): siRNA sense strand
gaggaggacacgaaaguga

SEQ ID NO: 658331 - RNA, 19 nt, Homo sapiens
  misc_RNA (1)...(19): siRNA sense strand
caacucggccaucacauau

SEQ ID NO: 658332 - RNA, 19 nt, Homo sapiens
  misc_RNA (1)...(19): siRNA sense strand
guacugcucugugaacaag

SEQ ID NO: 658333 - RNA, 19 nt, Homo sapiens
  misc_RNA (1)...(19): siRNA sense strand
ucaacucggccaucacaua

SEQ ID NO: 658334 - RNA, 19 nt, Homo sapiens
  misc_RNA (1)...(19): siRNA sense strand
ucaacgugacuccugauua

SEQ ID NO: 658335 - RNA, 19 nt, Homo sapiens
  misc_RNA (1)...(19): siRNA sense strand
ucacauaucgaauuaccaa

SEQ ID NO: 658336 - RNA, 19 nt, Homo sapiens
  misc_RNA (1)...(19): siRNA sense strand
caucaucuacagcaucuuu

SEQ ID NO: 658337 - RNA, 19 nt, Homo sapiens
  misc_RNA (1)...(19): siRNA sense strand
ugaacaaggacaucuuuga

SEQ ID NO: 658338 - RNA, 19 nt, Homo sapiens
  misc_RNA (1)...(19): siRNA sense strand
ggccaucacauaucgaauu

SEQ ID NO: 658339 - RNA, 19 nt, Homo sapiens
  misc_RNA (1)...(19): siRNA sense strand
ucaaccagcccaucaucua

SEQ ID NO: 658340 - RNA, 19 nt, Homo sapiens
  misc_RNA (1)...(19): siRNA sense strand
gaccucaacucggccauca

SEQ ID NO: 658341 - RNA, 19 nt, Homo sapiens
  misc_RNA (1)...(19): siRNA sense strand
uagaggagaacacaaaugu

SEQ ID NO: 658342 - RNA, 19 nt, Homo sapiens
  misc_RNA (1)...(19): siRNA sense strand
ggacgacauucuguucuac

SEQ ID NO: 658343 - RNA, 19 nt, Homo sapiens
  misc_RNA (1)...(19): siRNA sense strand
cgacaaggacgacauucug

SEQ ID NO: 658344 - RNA, 19 nt, Homo sapiens
  misc_RNA (1)...(19): siRNA sense strand
caaggacgacauucuguuc

SEQ ID NO: 658345 - RNA, 19 nt, Homo sapiens
  misc_RNA (1)...(19): siRNA sense strand
aaggacaucuuugaaguag

SEQ ID NO: 658346 - RNA, 19 nt, Homo sapiens
  misc_RNA (1)...(19): siRNA sense strand
ggccgaacaugaccuucug

SEQ ID NO: 658347 - RNA, 19 nt, Homo sapiens
  misc_RNA (1)...(19): siRNA sense strand
guucuacacccuccaggaa

SEQ ID NO: 658348 - RNA, 19 nt, Homo sapiens
  misc_RNA (1)...(19): siRNA sense strand
ugacagcaggugccaguga

SEQ ID NO: 658349 - RNA, 19 nt, Homo sapiens
  misc_RNA (1)...(19): siRNA sense strand
guagaggagaacacaaaug

SEQ ID NO: 658350 - RNA, 19 nt, Homo sapiens
  misc_RNA (1)...(19): siRNA sense strand
aggacgacauucuguucua

SEQ ID NO: 658351 - RNA, 19 nt, Homo sapiens
  misc_RNA (1)...(19): siRNA sense strand
ugucagugcuggacgucaa

SEQ ID NO: 658352 - RNA, 19 nt, Homo sapiens
  misc_RNA (1)...(19): siRNA sense strand
ucagagcggaggcacauug

SEQ ID NO: 658353 - RNA, 19 nt, Homo sapiens
  misc_RNA (1)...(19): siRNA sense strand
gaaguagaggagaacacaa

SEQ ID NO: 658354 - RNA, 19 nt, Homo sapiens
  misc_RNA (1)...(19): siRNA sense strand
gcuaaggguguucguguca

SEQ ID NO: 658355 - RNA, 19 nt, Homo sapiens
  misc_RNA (1)...(19): siRNA sense strand
gacaaggacgacauucugu

SEQ ID NO: 658356 - RNA, 19 nt, Homo sapiens
  misc_RNA (1)...(19): siRNA sense strand
ucuacacccuccaggaaau

SEQ ID NO: 658357 - RNA, 19 nt, Homo sapiens
  misc_RNA (1)...(19): siRNA sense strand
gaauuaccaaccacucaca

SEQ ID NO: 658358 - RNA, 19 nt, Homo sapiens
  misc_RNA (1)...(19): siRNA sense strand
aaguagaggagaacacaaa

SEQ ID NO: 658359 - RNA, 19 nt, Homo sapiens
  misc_RNA (1)...(19): siRNA sense strand
cauaucgaauuaccaacca

SEQ ID NO: 658360 - RNA, 19 nt, Homo sapiens
  misc_RNA (1)...(19): siRNA sense strand
caucacauaucgaauuacc

SEQ ID NO: 658361 - RNA, 19 nt, Homo sapiens
  misc_RNA (1)...(19): siRNA sense strand
uaaggguguucgugucagu

SEQ ID NO: 658362 - RNA, 19 nt, Homo sapiens
  misc_RNA (1)...(19): siRNA sense strand
cgaccuugcccgcuacuca

SEQ ID NO: 658363 - RNA, 19 nt, Homo sapiens
  misc_RNA (1)...(19): siRNA sense strand
ggaguucucggaccucaac

SEQ ID NO: 658364 - RNA, 19 nt, Homo sapiens
  misc_RNA (1)...(19): siRNA sense strand
ugugaacaaggacaucuuu

SEQ ID NO: 658365 - RNA, 19 nt, Homo sapiens
  misc_RNA (1)...(19): siRNA sense strand
caaccagcccaucaucuac

SEQ ID NO: 658366 - RNA, 19 nt, Homo sapiens
  misc_RNA (1)...(19): siRNA sense strand
ggaggaggacacgaaagug

SEQ ID NO: 658367 - RNA, 19 nt, Homo sapiens
  misc_RNA (1)...(19): siRNA sense strand
ugaaguagaggagaacaca

SEQ ID NO: 658368 - RNA, 19 nt, Homo sapiens
  misc_RNA (1)...(19): siRNA sense strand
ccacacuagugcugaacgu

SEQ ID NO: 658369 - RNA, 19 nt, Homo sapiens
  misc_RNA (1)...(19): siRNA sense strand
gguggaggaggacacgaaa

SEQ ID NO: 658370 - RNA, 19 nt, Homo sapiens
  misc_RNA (1)...(19): siRNA sense strand
acaaggacgacauucuguu

SEQ ID NO: 658371 - RNA, 19 nt, Homo sapiens
  misc_RNA (1)...(19): siRNA sense strand
ggcuacgucugcauucaag

SEQ ID NO: 658372 - RNA, 19 nt, Homo sapiens
  misc_RNA (1)...(19): siRNA sense strand
uuuaagaccaaggagauaa

SEQ ID NO: 658373 - RNA, 19 nt, Homo sapiens
  misc_RNA (1)...(19): siRNA sense strand
ucuuugaaguagaggagaa

SEQ ID NO: 658374 - RNA, 19 nt, Homo sapiens
  misc_RNA (1)...(19): siRNA sense strand
ggagaagucacugcuugag

SEQ ID NO: 658375 - RNA, 19 nt, Homo sapiens
  misc_RNA (1)...(19): siRNA sense strand
gaacaaggacaucuuugaa

SEQ ID NO: 658376 - RNA, 19 nt, Homo sapiens
  misc_RNA (1)...(19): siRNA sense strand
gccaucacauaucgaauua

SEQ ID NO: 658377 - RNA, 19 nt, Homo sapiens
  misc_RNA (1)...(19): siRNA sense strand
caacgugacuccugauuac

SEQ ID NO: 658378 - RNA, 19 nt, Homo sapiens
  misc_RNA (1)...(19): siRNA sense strand
ggacaucuuugaaguagag

SEQ ID NO: 658379 - RNA, 19 nt, Homo sapiens
  misc_RNA (1)...(19): siRNA sense strand
gaggagaacacaaauguca

SEQ ID NO: 658380 - RNA, 19 nt, Homo sapiens
  misc_RNA (1)...(19): siRNA sense strand
gcccaguacugcucuguga

SEQ ID NO: 658381 - RNA, 19 nt, Homo sapiens
  misc_RNA (1)...(19): siRNA sense strand
caaggacaucuuugaagua

SEQ ID NO: 658382 - RNA, 19 nt, Homo sapiens
  misc_RNA (1)...(19): siRNA sense strand
acaaggacaucuuugaagu

SEQ ID NO: 658383 - RNA, 19 nt, Homo sapiens
  misc_RNA (1)...(19): siRNA sense strand
gaggaggacacgaaaguga

SEQ ID NO: 658384 - RNA, 19 nt, Homo sapiens
  misc_RNA (1)...(19): siRNA sense strand
caacucggccaucacauau

SEQ ID NO: 658385 - RNA, 19 nt, Homo sapiens
  misc_RNA (1)...(19): siRNA sense strand
guacugcucugugaacaag

SEQ ID NO: 658386 - RNA, 19 nt, Homo sapiens
  misc_RNA (1)...(19): siRNA sense strand
ucaacucggccaucacaua

SEQ ID NO: 658387 - RNA, 19 nt, Homo sapiens
  misc_RNA (1)...(19): siRNA sense strand
ucaacgugacuccugauua

SEQ ID NO: 658388 - RNA, 19 nt, Homo sapiens
  misc_RNA (1)...(19): siRNA sense strand
ucacauaucgaauuaccaa

SEQ ID NO: 658389 - RNA, 19 nt, Homo sapiens
  misc_RNA (1)...(19): siRNA sense strand
caucaucuacagcaucuuu

SEQ ID NO: 658390 - RNA, 19 nt, Homo sapiens
  misc_RNA (1)...(19): siRNA sense strand
ugaacaaggacaucuuuga

SEQ ID NO: 658391 - RNA, 19 nt, Homo sapiens
  misc_RNA (1)...(19): siRNA sense strand
ggccaucacauaucgaauu

SEQ ID NO: 658392 - RNA, 19 nt, Homo sapiens
  misc_RNA (1)...(19): siRNA sense strand
ucaaccagcccaucaucua

SEQ ID NO: 658393 - RNA, 19 nt, Homo sapiens
  misc_RNA (1)...(19): siRNA sense strand
gaccucaacucggccauca

SEQ ID NO: 658394 - RNA, 19 nt, Homo sapiens
  misc_RNA (1)...(19): siRNA sense strand
uagaggagaacacaaaugu

SEQ ID NO: 658395 - RNA, 19 nt, Homo sapiens
  misc_RNA (1)...(19): siRNA sense strand
ggacgacauucuguucuac

SEQ ID NO: 658396 - RNA, 19 nt, Homo sapiens
  misc_RNA (1)...(19): siRNA sense strand
cgacaaggacgacauucug

SEQ ID NO: 658397 - RNA, 19 nt, Homo sapiens
  misc_RNA (1)...(19): siRNA sense strand
caaggacgacauucuguuc

SEQ ID NO: 658398 - RNA, 19 nt, Homo sapiens
  misc_RNA (1)...(19): siRNA sense strand
aaggacaucuuugaaguag

SEQ ID NO: 658399 - RNA, 19 nt, Homo sapiens
  misc_RNA (1)...(19): siRNA sense strand
ggccgaacaugaccuucug

SEQ ID NO: 658400 - RNA, 19 nt, Homo sapiens
  misc_RNA (1)...(19): siRNA sense strand
guucuacacccuccaggaa

SEQ ID NO: 658401 - RNA, 19 nt, Homo sapiens
  misc_RNA (1)...(19): siRNA sense strand
ugacagcaggugccaguga

SEQ ID NO: 658402 - RNA, 19 nt, Homo sapiens
  misc_RNA (1)...(19): siRNA sense strand
guagaggagaacacaaaug

SEQ ID NO: 658403 - RNA, 19 nt, Homo sapiens
  misc_RNA (1)...(19): siRNA sense strand
aggacgacauucuguucua

SEQ ID NO: 658404 - RNA, 19 nt, Homo sapiens
  misc_RNA (1)...(19): siRNA sense strand
ugucagugcuggacgucaa

SEQ ID NO: 658405 - RNA, 19 nt, Homo sapiens
  misc_RNA (1)...(19): siRNA sense strand
ucagagcggaggcacauug

SEQ ID NO: 658406 - RNA, 19 nt, Homo sapiens
  misc_RNA (1)...(19): siRNA sense strand
gaaguagaggagaacacaa

SEQ ID NO: 658407 - RNA, 19 nt, Homo sapiens
  misc_RNA (1)...(19): siRNA sense strand
gcuaaggguguucguguca

SEQ ID NO: 658408 - RNA, 19 nt, Homo sapiens
  misc_RNA (1)...(19): siRNA sense strand
gacaaggacgacauucugu

SEQ ID NO: 658409 - RNA, 19 nt, Homo sapiens
  misc_RNA (1)...(19): siRNA sense strand
ucuacacccuccaggaaau

SEQ ID NO: 658410 - RNA, 19 nt, Homo sapiens
  misc_RNA (1)...(19): siRNA sense strand
gaauuaccaaccacucaca

SEQ ID NO: 658411 - RNA, 19 nt, Homo sapiens
  misc_RNA (1)...(19): siRNA sense strand
aaguagaggagaacacaaa

SEQ ID NO: 658412 - RNA, 19 nt, Homo sapiens
  misc_RNA (1)...(19): siRNA sense strand
cauaucgaauuaccaacca

SEQ ID NO: 658413 - RNA, 19 nt, Homo sapiens
  misc_RNA (1)...(19): siRNA sense strand
caucacauaucgaauuacc

SEQ ID NO: 658414 - RNA, 19 nt, Homo sapiens
  misc_RNA (1)...(19): siRNA sense strand
uaaggguguucgugucagu

SEQ ID NO: 658415 - RNA, 19 nt, Homo sapiens
  misc_RNA (1)...(19): siRNA sense strand
cgaccuugcccgcuacuca

SEQ ID NO: 658416 - RNA, 19 nt, Homo sapiens
  misc_RNA (1)...(19): siRNA sense strand
ggaguucucggaccucaac

SEQ ID NO: 658417 - RNA, 19 nt, Homo sapiens
  misc_RNA (1)...(19): siRNA sense strand
ugugaacaaggacaucuuu

SEQ ID NO: 658418 - RNA, 19 nt, Homo sapiens
  misc_RNA (1)...(19): siRNA sense strand
caaccagcccaucaucuac

SEQ ID NO: 658419 - RNA, 19 nt, Homo sapiens
  misc_RNA (1)...(19): siRNA sense strand
ggaggaggacacgaaagug

SEQ ID NO: 658420 - RNA, 19 nt, Homo sapiens
  misc_RNA (1)...(19): siRNA sense strand
ugaaguagaggagaacaca

SEQ ID NO: 658421 - RNA, 19 nt, Homo sapiens
  misc_RNA (1)...(19): siRNA sense strand
ccacacuagugcugaacgu

SEQ ID NO: 658422 - RNA, 19 nt, Homo sapiens
  misc_RNA (1)...(19): siRNA sense strand
gguggaggaggacacgaaa

SEQ ID NO: 658423 - RNA, 19 nt, Homo sapiens
  misc_RNA (1)...(19): siRNA sense strand
acaaggacgacauucuguu

SEQ ID NO: 658424 - RNA, 19 nt, Homo sapiens
  misc_RNA (1)...(19): siRNA sense strand
ggcuacgucugcauucaag

SEQ ID NO: 658425 - RNA, 19 nt, Homo sapiens
  misc_RNA (1)...(19): siRNA sense strand
uuuaagaccaaggagauaa

SEQ ID NO: 658426 - RNA, 19 nt, Homo sapiens
  misc_RNA (1)...(19): siRNA sense strand
ucuuugaaguagaggagaa

SEQ ID NO: 658427 - RNA, 19 nt, Homo sapiens
  misc_RNA (1)...(19): siRNA sense strand
ggagaagucacugcuugag

SEQ ID NO: 658428 - RNA, 19 nt, Homo sapiens
  misc_RNA (1)...(19): siRNA sense strand
gaacaaggacaucuuugaa

SEQ ID NO: 658429 - RNA, 19 nt, Homo sapiens
  misc_RNA (1)...(19): siRNA sense strand
gccaucacauaucgaauua

SEQ ID NO: 658430 - RNA, 19 nt, Homo sapiens
  misc_RNA (1)...(19): siRNA sense strand
caacgugacuccugauuac

SEQ ID NO: 658431 - RNA, 19 nt, Homo sapiens
  misc_RNA (1)...(19): siRNA sense strand
ggacaucuuugaaguagag

SEQ ID NO: 658432 - RNA, 19 nt, Homo sapiens
  misc_RNA (1)...(19): siRNA sense strand
gaggagaacacaaauguca

SEQ ID NO: 658433 - RNA, 19 nt, Homo sapiens
  misc_RNA (1)...(19): siRNA sense strand
gcccaguacugcucuguga

SEQ ID NO: 658434 - RNA, 19 nt, Homo sapiens
  misc_RNA (1)...(19): siRNA sense strand
caaggacaucuuugaagua

SEQ ID NO: 658435 - RNA, 19 nt, Homo sapiens
  misc_RNA (1)...(19): siRNA sense strand
acaaggacaucuuugaagu

SEQ ID NO: 658436 - RNA, 19 nt, Homo sapiens
  misc_RNA (1)...(19): siRNA sense strand
gaggaggacacgaaaguga

SEQ ID NO: 658437 - RNA, 19 nt, Homo sapiens
  misc_RNA (1)...(19): siRNA sense strand
caacucggccaucacauau

SEQ ID NO: 658438 - RNA, 19 nt, Homo sapiens
  misc_RNA (1)...(19): siRNA sense strand
guacugcucugugaacaag

SEQ ID NO: 658439 - RNA, 19 nt, Homo sapiens
  misc_RNA (1)...(19): siRNA sense strand
ucaacucggccaucacaua

SEQ ID NO: 658440 - RNA, 19 nt, Homo sapiens
  misc_RNA (1)...(19): siRNA sense strand
ucaacgugacuccugauua

SEQ ID NO: 658441 - RNA, 19 nt, Homo sapiens
  misc_RNA (1)...(19): siRNA sense strand
ucacauaucgaauuaccaa

SEQ ID NO: 658442 - RNA, 19 nt, Homo sapiens
  misc_RNA (1)...(19): siRNA sense strand
caucaucuacagcaucuuu

SEQ ID NO: 658443 - RNA, 19 nt, Homo sapiens
  misc_RNA (1)...(19): siRNA sense strand
ugaacaaggacaucuuuga

SEQ ID NO: 658444 - RNA, 19 nt, Homo sapiens
  misc_RNA (1)...(19): siRNA sense strand
ggccaucacauaucgaauu

SEQ ID NO: 658445 - RNA, 19 nt, Homo sapiens
  misc_RNA (1)...(19): siRNA sense strand
ucaaccagcccaucaucua

SEQ ID NO: 658446 - RNA, 19 nt, Homo sapiens
  misc_RNA (1)...(19): siRNA sense strand
gaccucaacucggccauca

SEQ ID NO: 658447 - RNA, 19 nt, Homo sapiens
  misc_RNA (1)...(19): siRNA sense strand
uagaggagaacacaaaugu

SEQ ID NO: 658448 - RNA, 19 nt, Homo sapiens
  misc_RNA (1)...(19): siRNA sense strand
ggacgacauucuguucuac

SEQ ID NO: 658449 - RNA, 19 nt, Homo sapiens
  misc_RNA (1)...(19): siRNA sense strand
cgacaaggacgacauucug

SEQ ID NO: 658450 - RNA, 19 nt, Homo sapiens
  misc_RNA (1)...(19): siRNA sense strand
caaggacgacauucuguuc

SEQ ID NO: 658451 - RNA, 19 nt, Homo sapiens
  misc_RNA (1)...(19): siRNA sense strand
aaggacaucuuugaaguag

SEQ ID NO: 658452 - RNA, 19 nt, Homo sapiens
  misc_RNA (1)...(19): siRNA sense strand
ggccgaacaugaccuucug

SEQ ID NO: 658453 - RNA, 19 nt, Homo sapiens
  misc_RNA (1)...(19): siRNA sense strand
guucuacacccuccaggaa

SEQ ID NO: 658454 - RNA, 19 nt, Homo sapiens
  misc_RNA (1)...(19): siRNA sense strand
ugacagcaggugccaguga

SEQ ID NO: 658455 - RNA, 19 nt, Homo sapiens
  misc_RNA (1)...(19): siRNA sense strand
guagaggagaacacaaaug

SEQ ID NO: 658456 - RNA, 19 nt, Homo sapiens
  misc_RNA (1)...(19): siRNA sense strand
aggacgacauucuguucua

SEQ ID NO: 658457 - RNA, 19 nt, Homo sapiens
  misc_RNA (1)...(19): siRNA sense strand
ugucagugcuggacgucaa

SEQ ID NO: 658458 - RNA, 19 nt, Homo sapiens
  misc_RNA (1)...(19): siRNA sense strand
ucagagcggaggcacauug

SEQ ID NO: 658459 - RNA, 19 nt, Homo sapiens
  misc_RNA (1)...(19): siRNA sense strand
gaaguagaggagaacacaa

SEQ ID NO: 658460 - RNA, 19 nt, Homo sapiens
  misc_RNA (1)...(19): siRNA sense strand
gcuaaggguguucguguca

SEQ ID NO: 658461 - RNA, 19 nt, Homo sapiens
  misc_RNA (1)...(19): siRNA sense strand
gacaaggacgacauucugu

SEQ ID NO: 658462 - RNA, 19 nt, Homo sapiens
  misc_RNA (1)...(19): siRNA sense strand
ucuacacccuccaggaaau

SEQ ID NO: 658463 - RNA, 19 nt, Homo sapiens
  misc_RNA (1)...(19): siRNA sense strand
gaauuaccaaccacucaca

SEQ ID NO: 658464 - RNA, 19 nt, Homo sapiens
  misc_RNA (1)...(19): siRNA sense strand
aaguagaggagaacacaaa

SEQ ID NO: 658465 - RNA, 19 nt, Homo sapiens
  misc_RNA (1)...(19): siRNA sense strand
cauaucgaauuaccaacca

SEQ ID NO: 658466 - RNA, 19 nt, Homo sapiens
  misc_RNA (1)...(19): siRNA sense strand
caucacauaucgaauuacc

SEQ ID NO: 658467 - RNA, 19 nt, Homo sapiens
  misc_RNA (1)...(19): siRNA sense strand
uaaggguguucgugucagu

SEQ ID NO: 658468 - RNA, 19 nt, Homo sapiens
  misc_RNA (1)...(19): siRNA sense strand
cgaccuugcccgcuacuca

SEQ ID NO: 658469 - RNA, 19 nt, Homo sapiens
  misc_RNA (1)...(19): siRNA sense strand
ggaguucucggaccucaac

SEQ ID NO: 658470 - RNA, 19 nt, Homo sapiens
  misc_RNA (1)...(19): siRNA sense strand
ugugaacaaggacaucuuu

SEQ ID NO: 658471 - RNA, 19 nt, Homo sapiens
  misc_RNA (1)...(19): siRNA sense strand
caaccagcccaucaucuac

SEQ ID NO: 658472 - RNA, 19 nt, Homo sapiens
  misc_RNA (1)...(19): siRNA sense strand
ggaggaggacacgaaagug

SEQ ID NO: 658473 - RNA, 19 nt, Homo sapiens
  misc_RNA (1)...(19): siRNA sense strand
ugaaguagaggagaacaca

SEQ ID NO: 658474 - RNA, 19 nt, Homo sapiens
  misc_RNA (1)...(19): siRNA sense strand
ccacacuagugcugaacgu

SEQ ID NO: 658475 - RNA, 19 nt, Homo sapiens
  misc_RNA (1)...(19): siRNA sense strand
gguggaggaggacacgaaa

SEQ ID NO: 658476 - RNA, 19 nt, Homo sapiens
  misc_RNA (1)...(19): siRNA sense strand
acaaggacgacauucuguu

SEQ ID NO: 658477 - RNA, 19 nt, Homo sapiens
  misc_RNA (1)...(19): siRNA sense strand
ggcuacgucugcauucaag

SEQ ID NO: 658478 - RNA, 19 nt, Homo sapiens
  misc_RNA (1)...(19): siRNA sense strand
uuuaagaccaaggagauaa

SEQ ID NO: 658479 - RNA, 19 nt, Homo sapiens
  misc_RNA (1)...(19): siRNA sense strand
ucuuugaaguagaggagaa

SEQ ID NO: 658480 - RNA, 19 nt, Homo sapiens
  misc_RNA (1)...(19): siRNA sense strand
ggagaagucacugcuugag

SEQ ID NO: 658481 - RNA, 19 nt, Homo sapiens
  misc_RNA (1)...(19): siRNA sense strand
gaacaaggacaucuuugaa

SEQ ID NO: 658482 - RNA, 19 nt, Homo sapiens
  misc_RNA (1)...(19): siRNA sense strand
caacgugacuccugauuac

SEQ ID NO: 658483 - RNA, 19 nt, Homo sapiens
  misc_RNA (1)...(19): siRNA sense strand
ggacaucuuugaaguagag

SEQ ID NO: 658484 - RNA, 19 nt, Homo sapiens
  misc_RNA (1)...(19): siRNA sense strand
gaggagaacacaaauguca

SEQ ID NO: 658485 - RNA, 19 nt, Homo sapiens
  misc_RNA (1)...(19): siRNA sense strand
gcccaguacugcucuguga

SEQ ID NO: 658486 - RNA, 19 nt, Homo sapiens
  misc_RNA (1)...(19): siRNA sense strand
caaggacaucuuugaagua

SEQ ID NO: 658487 - RNA, 19 nt, Homo sapiens
  misc_RNA (1)...(19): siRNA sense strand
acaaggacaucuuugaagu

SEQ ID NO: 658488 - RNA, 19 nt, Homo sapiens
  misc_RNA (1)...(19): siRNA sense strand
guacugcucugugaacaag

SEQ ID NO: 658489 - RNA, 19 nt, Homo sapiens
  misc_RNA (1)...(19): siRNA sense strand
ucaacgugacuccugauua

SEQ ID NO: 658490 - RNA, 19 nt, Homo sapiens
  misc_RNA (1)...(19): siRNA sense strand
ugaacaaggacaucuuuga

SEQ ID NO: 658491 - RNA, 19 nt, Homo sapiens
  misc_RNA (1)...(19): siRNA sense strand
uagaggagaacacaaaugu

SEQ ID NO: 658492 - RNA, 19 nt, Homo sapiens
  misc_RNA (1)...(19): siRNA sense strand
aaggacaucuuugaaguag

SEQ ID NO: 658493 - RNA, 19 nt, Homo sapiens
  misc_RNA (1)...(19): siRNA sense strand
gaaguagaggagaacacaa

SEQ ID NO: 658494 - RNA, 19 nt, Homo sapiens
  misc_RNA (1)...(19): siRNA sense strand
guagaggagaacacaaaug

SEQ ID NO: 658495 - RNA, 19 nt, Homo sapiens
  misc_RNA (1)...(19): siRNA sense strand
aaguagaggagaacacaaa

SEQ ID NO: 658496 - RNA, 19 nt, Homo sapiens
  misc_RNA (1)...(19): siRNA sense strand
ugugaacaaggacaucuuu

SEQ ID NO: 658497 - RNA, 19 nt, Homo sapiens
  misc_RNA (1)...(19): siRNA sense strand
ugaaguagaggagaacaca

SEQ ID NO: 658498 - RNA, 19 nt, Homo sapiens
  misc_RNA (1)...(19): siRNA sense strand
ucuuugaaguagaggagaa

SEQ ID NO: 658499 - RNA, 19 nt, Homo sapiens
  misc_RNA (1)...(19): siRNA sense strand
ggaguacuuuggcgaguuu

SEQ ID NO: 658500 - RNA, 19 nt, Homo sapiens
  misc_RNA (1)...(19): siRNA sense strand
gccaauggauccaaaguug

SEQ ID NO: 658501 - RNA, 19 nt, Homo sapiens
  misc_RNA (1)...(19): siRNA sense strand
ucaagaggguuuggguuua

SEQ ID NO: 658502 - RNA, 19 nt, Homo sapiens
  misc_RNA (1)...(19): siRNA sense strand
ggccugagcugggauacua

SEQ ID NO: 658503 - RNA, 19 nt, Homo sapiens
  misc_RNA (1)...(19): siRNA sense strand
gagcugggauacuagcaaa

SEQ ID NO: 658504 - RNA, 19 nt, Homo sapiens
  misc_RNA (1)...(19): siRNA sense strand
gucguugacuguacaauaa

SEQ ID NO: 658505 - RNA, 19 nt, Homo sapiens
  misc_RNA (1)...(19): siRNA sense strand
ggaagcaagugugagauca

SEQ ID NO: 658506 - RNA, 19 nt, Homo sapiens
  misc_RNA (1)...(19): siRNA sense strand
caagaggguuuggguuuau

SEQ ID NO: 658507 - RNA, 19 nt, Homo sapiens
  misc_RNA (1)...(19): siRNA sense strand
aagaagaacccgugaagaa

SEQ ID NO: 658508 - RNA, 19 nt, Homo sapiens
  misc_RNA (1)...(19): siRNA sense strand
ggucguugacuguacaaua

SEQ ID NO: 658509 - RNA, 19 nt, Homo sapiens
  misc_RNA (1)...(19): siRNA sense strand
gauugaggccauugaauug

SEQ ID NO: 658510 - RNA, 19 nt, Homo sapiens
  misc_RNA (1)...(19): siRNA sense strand
gaaagucccacugaggaaa

SEQ ID NO: 658511 - RNA, 19 nt, Homo sapiens
  misc_RNA (1)...(19): siRNA sense strand
gguuuauccuguucaaaga

SEQ ID NO: 658512 - RNA, 19 nt, Homo sapiens
  misc_RNA (1)...(19): siRNA sense strand
gaagaagaacccgugaaga

SEQ ID NO: 658513 - RNA, 19 nt, Homo sapiens
  misc_RNA (1)...(19): siRNA sense strand
gauccaaaguugaacaaaa

SEQ ID NO: 658514 - RNA, 19 nt, Homo sapiens
  misc_RNA (1)...(19): siRNA sense strand
caauggauccaaaguugaa

SEQ ID NO: 658515 - RNA, 19 nt, Homo sapiens
  misc_RNA (1)...(19): siRNA sense strand
uaacuacaagccauacuga

SEQ ID NO: 658516 - RNA, 19 nt, Homo sapiens
  misc_RNA (1)...(19): siRNA sense strand
ggagaggucguugacugua

SEQ ID NO: 658517 - RNA, 19 nt, Homo sapiens
  misc_RNA (1)...(19): siRNA sense strand
ggagauugaggccauugaa

SEQ ID NO: 658518 - RNA, 19 nt, Homo sapiens
  misc_RNA (1)...(19): siRNA sense strand
gaucaacgccagcaagaac

SEQ ID NO: 658519 - RNA, 19 nt, Homo sapiens
  misc_RNA (1)...(19): siRNA sense strand
gaagcaagugugagaucaa

SEQ ID NO: 658520 - RNA, 19 nt, Homo sapiens
  misc_RNA (1)...(19): siRNA sense strand
gucaagaggguuuggguuu

SEQ ID NO: 658521 - RNA, 19 nt, Homo sapiens
  misc_RNA (1)...(19): siRNA sense strand
ccauggcuaugaagaagga

SEQ ID NO: 658522 - RNA, 19 nt, Homo sapiens
  misc_RNA (1)...(19): siRNA sense strand
gggaguacuuuggcgaguu

SEQ ID NO: 658523 - RNA, 19 nt, Homo sapiens
  misc_RNA (1)...(19): siRNA sense strand
gugguggccaucagaauaa

SEQ ID NO: 658524 - RNA, 19 nt, Homo sapiens
  misc_RNA (1)...(19): siRNA sense strand
agauugaggccauugaauu

SEQ ID NO: 658525 - RNA, 19 nt, Homo sapiens
  misc_RNA (1)...(19): siRNA sense strand
gagaggucguugacuguac

SEQ ID NO: 658526 - RNA, 19 nt, Homo sapiens
  misc_RNA (1)...(19): siRNA sense strand
agaauaacuacaagccaua

SEQ ID NO: 658527 - RNA, 19 nt, Homo sapiens
  misc_RNA (1)...(19): siRNA sense strand
ucaaagaugcagccagugu

SEQ ID NO: 658528 - RNA, 19 nt, Homo sapiens
  misc_RNA (1)...(19): siRNA sense strand
cgugguggccaucagaaua

SEQ ID NO: 658529 - RNA, 19 nt, Homo sapiens
  misc_RNA (1)...(19): siRNA sense strand
caagguggcccagcccaaa

SEQ ID NO: 658530 - RNA, 19 nt, Homo sapiens
  misc_RNA (1)...(19): siRNA sense strand
ggccauggcuaugaagaag

SEQ ID NO: 658531 - RNA, 19 nt, Homo sapiens
  misc_RNA (1)...(19): siRNA sense strand
ucuaucagcagcagcagua

SEQ ID NO: 658532 - RNA, 19 nt, Homo sapiens
  misc_RNA (1)...(19): siRNA sense strand
gagauugaggccauugaau

SEQ ID NO: 658533 - RNA, 19 nt, Homo sapiens
  misc_RNA (1)...(19): siRNA sense strand
gcaagugugagaucaaggu

SEQ ID NO: 658534 - RNA, 19 nt, Homo sapiens
  misc_RNA (1)...(19): siRNA sense strand
ccaauggauccaaaguuga

SEQ ID NO: 658535 - RNA, 19 nt, Homo sapiens
  misc_RNA (1)...(19): siRNA sense strand
gguuuggguuuauccuguu

SEQ ID NO: 658536 - RNA, 19 nt, Homo sapiens
  misc_RNA (1)...(19): siRNA sense strand
aagacgagguuuuguguuu

SEQ ID NO: 658537 - RNA, 19 nt, Homo sapiens
  misc_RNA (1)...(19): siRNA sense strand
ggguuuauccuguucaaag

SEQ ID NO: 658538 - RNA, 19 nt, Homo sapiens
  misc_RNA (1)...(19): siRNA sense strand
gccaucagaauaacuacaa

SEQ ID NO: 658539 - RNA, 19 nt, Homo sapiens
  misc_RNA (1)...(19): siRNA sense strand
cagaucaacgccagcaaga

SEQ ID NO: 658540 - RNA, 19 nt, Homo sapiens
  misc_RNA (1)...(19): siRNA sense strand
ugaaagucccacugaggaa

SEQ ID NO: 658541 - RNA, 19 nt, Homo sapiens
  misc_RNA (1)...(19): siRNA sense strand
ccaccgagaacggacauga

SEQ ID NO: 658542 - RNA, 19 nt, Homo sapiens
  misc_RNA (1)...(19): siRNA sense strand
aaaaggccauggcuaugaa

SEQ ID NO: 658543 - RNA, 19 nt, Homo sapiens
  misc_RNA (1)...(19): siRNA sense strand
agaagaagaacccgugaag

SEQ ID NO: 658544 - RNA, 19 nt, Homo sapiens
  misc_RNA (1)...(19): siRNA sense strand
gcuggauggccgugucauu

SEQ ID NO: 658545 - RNA, 19 nt, Homo sapiens
  misc_RNA (1)...(19): siRNA sense strand
aggaaaagaucagggagua

SEQ ID NO: 658546 - RNA, 19 nt, Homo sapiens
  misc_RNA (1)...(19): siRNA sense strand
gaauaacuacaagccauac

SEQ ID NO: 658547 - RNA, 19 nt, Homo sapiens
  misc_RNA (1)...(19): siRNA sense strand
ucaguggaagcaaguguga

SEQ ID NO: 658548 - RNA, 19 nt, Homo sapiens
  misc_RNA (1)...(19): siRNA sense strand
agacgagguuuuguguuua

SEQ ID NO: 658549 - RNA, 19 nt, Homo sapiens
  misc_RNA (1)...(19): siRNA sense strand
gggucugaauccugaaagu

SEQ ID NO: 658550 - RNA, 19 nt, Homo sapiens
  misc_RNA (1)...(19): siRNA sense strand
cgacgugguggccaucaga

SEQ ID NO: 658551 - RNA, 19 nt, Homo sapiens
  misc_RNA (1)...(19): siRNA sense strand
aagaacccgugaagaaggu

SEQ ID NO: 658552 - RNA, 19 nt, Homo sapiens
  misc_RNA (1)...(19): siRNA sense strand
agaagaacccgugaagaag

SEQ ID NO: 658553 - RNA, 19 nt, Homo sapiens
  misc_RNA (1)...(19): siRNA sense strand
cagccaguguggagaaggu

SEQ ID NO: 658554 - RNA, 19 nt, Homo sapiens
  misc_RNA (1)...(19): siRNA sense strand
guggccaucagaauaacua

SEQ ID NO: 658555 - RNA, 19 nt, Homo sapiens
  misc_RNA (1)...(19): siRNA sense strand
agaggucguugacuguaca

SEQ ID NO: 658556 - RNA, 19 nt, Homo sapiens
  misc_RNA (1)...(19): siRNA sense strand
aagcaagugugagaucaag

SEQ ID NO: 658557 - RNA, 19 nt, Homo sapiens
  misc_RNA (1)...(19): siRNA sense strand
gacgagguuuuguguuuau

SEQ ID NO: 658558 - RNA, 19 nt, Homo sapiens
  misc_RNA (1)...(19): siRNA sense strand
ggaguacuuuggcgaguuu

SEQ ID NO: 658559 - RNA, 19 nt, Homo sapiens
  misc_RNA (1)...(19): siRNA sense strand
gccaauggauccaaaguug

SEQ ID NO: 658560 - RNA, 19 nt, Homo sapiens
  misc_RNA (1)...(19): siRNA sense strand
ucaagaggguuuggguuua

SEQ ID NO: 658561 - RNA, 19 nt, Homo sapiens
  misc_RNA (1)...(19): siRNA sense strand
ggccugagcugggauacua

SEQ ID NO: 658562 - RNA, 19 nt, Homo sapiens
  misc_RNA (1)...(19): siRNA sense strand
gagcugggauacuagcaaa

SEQ ID NO: 658563 - RNA, 19 nt, Homo sapiens
  misc_RNA (1)...(19): siRNA sense strand
gucguugacuguacaauaa

SEQ ID NO: 658564 - RNA, 19 nt, Homo sapiens
  misc_RNA (1)...(19): siRNA sense strand
ggaagcaagugugagauca

SEQ ID NO: 658565 - RNA, 19 nt, Homo sapiens
  misc_RNA (1)...(19): siRNA sense strand
caagaggguuuggguuuau

SEQ ID NO: 658566 - RNA, 19 nt, Homo sapiens
  misc_RNA (1)...(19): siRNA sense strand
aagaagaacccgugaagaa

SEQ ID NO: 658567 - RNA, 19 nt, Homo sapiens
  misc_RNA (1)...(19): siRNA sense strand
ggucguugacuguacaaua

SEQ ID NO: 658568 - RNA, 19 nt, Homo sapiens
  misc_RNA (1)...(19): siRNA sense strand
gauugaggccauugaauug

SEQ ID NO: 658569 - RNA, 19 nt, Homo sapiens
  misc_RNA (1)...(19): siRNA sense strand
gaaagucccacugaggaaa

SEQ ID NO: 658570 - RNA, 19 nt, Homo sapiens
  misc_RNA (1)...(19): siRNA sense strand
gguuuauccuguucaaaga

SEQ ID NO: 658571 - RNA, 19 nt, Homo sapiens
  misc_RNA (1)...(19): siRNA sense strand
gaagaagaacccgugaaga

SEQ ID NO: 658572 - RNA, 19 nt, Homo sapiens
  misc_RNA (1)...(19): siRNA sense strand
gauccaaaguugaacaaaa

SEQ ID NO: 658573 - RNA, 19 nt, Homo sapiens
  misc_RNA (1)...(19): siRNA sense strand
caauggauccaaaguugaa

SEQ ID NO: 658574 - RNA, 19 nt, Homo sapiens
  misc_RNA (1)...(19): siRNA sense strand
uaacuacaagccauacuga

SEQ ID NO: 658575 - RNA, 19 nt, Homo sapiens
  misc_RNA (1)...(19): siRNA sense strand
ggagaggucguugacugua

SEQ ID NO: 658576 - RNA, 19 nt, Homo sapiens
  misc_RNA (1)...(19): siRNA sense strand
ggagauugaggccauugaa

SEQ ID NO: 658577 - RNA, 19 nt, Homo sapiens
  misc_RNA (1)...(19): siRNA sense strand
gaucaacgccagcaagaac

SEQ ID NO: 658578 - RNA, 19 nt, Homo sapiens
  misc_RNA (1)...(19): siRNA sense strand
gaagcaagugugagaucaa

SEQ ID NO: 658579 - RNA, 19 nt, Homo sapiens
  misc_RNA (1)...(19): siRNA sense strand
gucaagaggguuuggguuu

SEQ ID NO: 658580 - RNA, 19 nt, Homo sapiens
  misc_RNA (1)...(19): siRNA sense strand
ccauggcuaugaagaagga

SEQ ID NO: 658581 - RNA, 19 nt, Homo sapiens
  misc_RNA (1)...(19): siRNA sense strand
gggaguacuuuggcgaguu

SEQ ID NO: 658582 - RNA, 19 nt, Homo sapiens
  misc_RNA (1)...(19): siRNA sense strand
gugguggccaucagaauaa

SEQ ID NO: 658583 - RNA, 19 nt, Homo sapiens
  misc_RNA (1)...(19): siRNA sense strand
agauugaggccauugaauu

SEQ ID NO: 658584 - RNA, 19 nt, Homo sapiens
  misc_RNA (1)...(19): siRNA sense strand
gagaggucguugacuguac

SEQ ID NO: 658585 - RNA, 19 nt, Homo sapiens
  misc_RNA (1)...(19): siRNA sense strand
agaauaacuacaagccaua

SEQ ID NO: 658586 - RNA, 19 nt, Homo sapiens
  misc_RNA (1)...(19): siRNA sense strand
ucaaagaugcagccagugu

SEQ ID NO: 658587 - RNA, 19 nt, Homo sapiens
  misc_RNA (1)...(19): siRNA sense strand
cgugguggccaucagaaua

SEQ ID NO: 658588 - RNA, 19 nt, Homo sapiens
  misc_RNA (1)...(19): siRNA sense strand
caagguggcccagcccaaa

SEQ ID NO: 658589 - RNA, 19 nt, Homo sapiens
  misc_RNA (1)...(19): siRNA sense strand
ggccauggcuaugaagaag

SEQ ID NO: 658590 - RNA, 19 nt, Homo sapiens
  misc_RNA (1)...(19): siRNA sense strand
ucuaucagcagcagcagua

SEQ ID NO: 658591 - RNA, 19 nt, Homo sapiens
  misc_RNA (1)...(19): siRNA sense strand
gagauugaggccauugaau

SEQ ID NO: 658592 - RNA, 19 nt, Homo sapiens
  misc_RNA (1)...(19): siRNA sense strand
gcaagugugagaucaaggu

SEQ ID NO: 658593 - RNA, 19 nt, Homo sapiens
  misc_RNA (1)...(19): siRNA sense strand
ccaauggauccaaaguuga

SEQ ID NO: 658594 - RNA, 19 nt, Homo sapiens
  misc_RNA (1)...(19): siRNA sense strand
gguuuggguuuauccuguu

SEQ ID NO: 658595 - RNA, 19 nt, Homo sapiens
  misc_RNA (1)...(19): siRNA sense strand
aagacgagguuuuguguuu

SEQ ID NO: 658596 - RNA, 19 nt, Homo sapiens
  misc_RNA (1)...(19): siRNA sense strand
ggguuuauccuguucaaag

SEQ ID NO: 658597 - RNA, 19 nt, Homo sapiens
  misc_RNA (1)...(19): siRNA sense strand
gccaucagaauaacuacaa

SEQ ID NO: 658598 - RNA, 19 nt, Homo sapiens
  misc_RNA (1)...(19): siRNA sense strand
cagaucaacgccagcaaga

SEQ ID NO: 658599 - RNA, 19 nt, Homo sapiens
  misc_RNA (1)...(19): siRNA sense strand
ugaaagucccacugaggaa

SEQ ID NO: 658600 - RNA, 19 nt, Homo sapiens
  misc_RNA (1)...(19): siRNA sense strand
ccaccgagaacggacauga

SEQ ID NO: 658601 - RNA, 19 nt, Homo sapiens
  misc_RNA (1)...(19): siRNA sense strand
aaaaggccauggcuaugaa

SEQ ID NO: 658602 - RNA, 19 nt, Homo sapiens
  misc_RNA (1)...(19): siRNA sense strand
agaagaagaacccgugaag

SEQ ID NO: 658603 - RNA, 19 nt, Homo sapiens
  misc_RNA (1)...(19): siRNA sense strand
gcuggauggccgugucauu

SEQ ID NO: 658604 - RNA, 19 nt, Homo sapiens
  misc_RNA (1)...(19): siRNA sense strand
aggaaaagaucagggagua

SEQ ID NO: 658605 - RNA, 19 nt, Homo sapiens
  misc_RNA (1)...(19): siRNA sense strand
gaauaacuacaagccauac

SEQ ID NO: 658606 - RNA, 19 nt, Homo sapiens
  misc_RNA (1)...(19): siRNA sense strand
ucaguggaagcaaguguga

SEQ ID NO: 658607 - RNA, 19 nt, Homo sapiens
  misc_RNA (1)...(19): siRNA sense strand
agacgagguuuuguguuua

SEQ ID NO: 658608 - RNA, 19 nt, Homo sapiens
  misc_RNA (1)...(19): siRNA sense strand
gggucugaauccugaaagu

SEQ ID NO: 658609 - RNA, 19 nt, Homo sapiens
  misc_RNA (1)...(19): siRNA sense strand
cgacgugguggccaucaga

SEQ ID NO: 658610 - RNA, 19 nt, Homo sapiens
  misc_RNA (1)...(19): siRNA sense strand
aagaacccgugaagaaggu

SEQ ID NO: 658611 - RNA, 19 nt, Homo sapiens
  misc_RNA (1)...(19): siRNA sense strand
agaagaacccgugaagaag

SEQ ID NO: 658612 - RNA, 19 nt, Homo sapiens
  misc_RNA (1)...(19): siRNA sense strand
cagccaguguggagaaggu

SEQ ID NO: 658613 - RNA, 19 nt, Homo sapiens
  misc_RNA (1)...(19): siRNA sense strand
guggccaucagaauaacua

SEQ ID NO: 658614 - RNA, 19 nt, Homo sapiens
  misc_RNA (1)...(19): siRNA sense strand
agaggucguugacuguaca

SEQ ID NO: 658615 - RNA, 19 nt, Homo sapiens
  misc_RNA (1)...(19): siRNA sense strand
aagcaagugugagaucaag

SEQ ID NO: 658616 - RNA, 19 nt, Homo sapiens
  misc_RNA (1)...(19): siRNA sense strand
gacgagguuuuguguuuau

SEQ ID NO: 658617 - RNA, 19 nt, Homo sapiens
  misc_RNA (1)...(19): siRNA sense strand
ggaguacuuuggcgaguuu

SEQ ID NO: 658618 - RNA, 19 nt, Homo sapiens
  misc_RNA (1)...(19): siRNA sense strand
gccaauggauccaaaguug

SEQ ID NO: 658619 - RNA, 19 nt, Homo sapiens
  misc_RNA (1)...(19): siRNA sense strand
ucaagaggguuuggguuua

SEQ ID NO: 658620 - RNA, 19 nt, Homo sapiens
  misc_RNA (1)...(19): siRNA sense strand
ggccugagcugggauacua

SEQ ID NO: 658621 - RNA, 19 nt, Homo sapiens
  misc_RNA (1)...(19): siRNA sense strand
gagcugggauacuagcaaa

SEQ ID NO: 658622 - RNA, 19 nt, Homo sapiens
  misc_RNA (1)...(19): siRNA sense strand
gucguugacuguacaauaa

SEQ ID NO: 658623 - RNA, 19 nt, Homo sapiens
  misc_RNA (1)...(19): siRNA sense strand
ggaagcaagugugagauca

SEQ ID NO: 658624 - RNA, 19 nt, Homo sapiens
  misc_RNA (1)...(19): siRNA sense strand
caagaggguuuggguuuau

SEQ ID NO: 658625 - RNA, 19 nt, Homo sapiens
  misc_RNA (1)...(19): siRNA sense strand
aagaagaacccgugaagaa

SEQ ID NO: 658626 - RNA, 19 nt, Homo sapiens
  misc_RNA (1)...(19): siRNA sense strand
ggucguugacuguacaaua

SEQ ID NO: 658627 - RNA, 19 nt, Homo sapiens
  misc_RNA (1)...(19): siRNA sense strand
gauugaggccauugaauug

SEQ ID NO: 658628 - RNA, 19 nt, Homo sapiens
  misc_RNA (1)...(19): siRNA sense strand
gaaagucccacugaggaaa

SEQ ID NO: 658629 - RNA, 19 nt, Homo sapiens
  misc_RNA (1)...(19): siRNA sense strand
gguuuauccuguucaaaga

SEQ ID NO: 658630 - RNA, 19 nt, Homo sapiens
  misc_RNA (1)...(19): siRNA sense strand
gaagaagaacccgugaaga

SEQ ID NO: 658631 - RNA, 19 nt, Homo sapiens
  misc_RNA (1)...(19): siRNA sense strand
gauccaaaguugaacaaaa

SEQ ID NO: 658632 - RNA, 19 nt, Homo sapiens
  misc_RNA (1)...(19): siRNA sense strand
caauggauccaaaguugaa

SEQ ID NO: 658633 - RNA, 19 nt, Homo sapiens
  misc_RNA (1)...(19): siRNA sense strand
uaacuacaagccauacuga

SEQ ID NO: 658634 - RNA, 19 nt, Homo sapiens
  misc_RNA (1)...(19): siRNA sense strand
ggagaggucguugacugua

SEQ ID NO: 658635 - RNA, 19 nt, Homo sapiens
  misc_RNA (1)...(19): siRNA sense strand
ggagauugaggccauugaa

SEQ ID NO: 658636 - RNA, 19 nt, Homo sapiens
  misc_RNA (1)...(19): siRNA sense strand
gaucaacgccagcaagaac

SEQ ID NO: 658637 - RNA, 19 nt, Homo sapiens
  misc_RNA (1)...(19): siRNA sense strand
gaagcaagugugagaucaa

SEQ ID NO: 658638 - RNA, 19 nt, Homo sapiens
  misc_RNA (1)...(19): siRNA sense strand
gucaagaggguuuggguuu

SEQ ID NO: 658639 - RNA, 19 nt, Homo sapiens
  misc_RNA (1)...(19): siRNA sense strand
ccauggcuaugaagaagga

SEQ ID NO: 658640 - RNA, 19 nt, Homo sapiens
  misc_RNA (1)...(19): siRNA sense strand
gggaguacuuuggcgaguu

SEQ ID NO: 658641 - RNA, 19 nt, Homo sapiens
  misc_RNA (1)...(19): siRNA sense strand
gugguggccaucagaauaa

SEQ ID NO: 658642 - RNA, 19 nt, Homo sapiens
  misc_RNA (1)...(19): siRNA sense strand
agauugaggccauugaauu

SEQ ID NO: 658643 - RNA, 19 nt, Homo sapiens
  misc_RNA (1)...(19): siRNA sense strand
gagaggucguugacuguac

SEQ ID NO: 658644 - RNA, 19 nt, Homo sapiens
  misc_RNA (1)...(19): siRNA sense strand
agaauaacuacaagccaua

SEQ ID NO: 658645 - RNA, 19 nt, Homo sapiens
  misc_RNA (1)...(19): siRNA sense strand
ucaaagaugcagccagugu

SEQ ID NO: 658646 - RNA, 19 nt, Homo sapiens
  misc_RNA (1)...(19): siRNA sense strand
cgugguggccaucagaaua

SEQ ID NO: 658647 - RNA, 19 nt, Homo sapiens
  misc_RNA (1)...(19): siRNA sense strand
caagguggcccagcccaaa

SEQ ID NO: 658648 - RNA, 19 nt, Homo sapiens
  misc_RNA (1)...(19): siRNA sense strand
ggccauggcuaugaagaag

SEQ ID NO: 658649 - RNA, 19 nt, Homo sapiens
  misc_RNA (1)...(19): siRNA sense strand
ucuaucagcagcagcagua

SEQ ID NO: 658650 - RNA, 19 nt, Homo sapiens
  misc_RNA (1)...(19): siRNA sense strand
gagauugaggccauugaau

SEQ ID NO: 658651 - RNA, 19 nt, Homo sapiens
  misc_RNA (1)...(19): siRNA sense strand
gcaagugugagaucaaggu

SEQ ID NO: 658652 - RNA, 19 nt, Homo sapiens
  misc_RNA (1)...(19): siRNA sense strand
ccaauggauccaaaguuga

SEQ ID NO: 658653 - RNA, 19 nt, Homo sapiens
  misc_RNA (1)...(19): siRNA sense strand
gguuuggguuuauccuguu

SEQ ID NO: 658654 - RNA, 19 nt, Homo sapiens
  misc_RNA (1)...(19): siRNA sense strand
aagacgagguuuuguguuu

SEQ ID NO: 658655 - RNA, 19 nt, Homo sapiens
  misc_RNA (1)...(19): siRNA sense strand
ggguuuauccuguucaaag

SEQ ID NO: 658656 - RNA, 19 nt, Homo sapiens
  misc_RNA (1)...(19): siRNA sense strand
gccaucagaauaacuacaa

SEQ ID NO: 658657 - RNA, 19 nt, Homo sapiens
  misc_RNA (1)...(19): siRNA sense strand
cagaucaacgccagcaaga

SEQ ID NO: 658658 - RNA, 19 nt, Homo sapiens
  misc_RNA (1)...(19): siRNA sense strand
ugaaagucccacugaggaa

SEQ ID NO: 658659 - RNA, 19 nt, Homo sapiens
  misc_RNA (1)...(19): siRNA sense strand
ccaccgagaacggacauga

SEQ ID NO: 658660 - RNA, 19 nt, Homo sapiens
  misc_RNA (1)...(19): siRNA sense strand
aaaaggccauggcuaugaa

SEQ ID NO: 658661 - RNA, 19 nt, Homo sapiens
  misc_RNA (1)...(19): siRNA sense strand
agaagaagaacccgugaag

SEQ ID NO: 658662 - RNA, 19 nt, Homo sapiens
  misc_RNA (1)...(19): siRNA sense strand
gcuggauggccgugucauu

SEQ ID NO: 658663 - RNA, 19 nt, Homo sapiens
  misc_RNA (1)...(19): siRNA sense strand
aggaaaagaucagggagua

SEQ ID NO: 658664 - RNA, 19 nt, Homo sapiens
  misc_RNA (1)...(19): siRNA sense strand
gaauaacuacaagccauac

SEQ ID NO: 658665 - RNA, 19 nt, Homo sapiens
  misc_RNA (1)...(19): siRNA sense strand
ucaguggaagcaaguguga

SEQ ID NO: 658666 - RNA, 19 nt, Homo sapiens
  misc_RNA (1)...(19): siRNA sense strand
agacgagguuuuguguuua

SEQ ID NO: 658667 - RNA, 19 nt, Homo sapiens
  misc_RNA (1)...(19): siRNA sense strand
gggucugaauccugaaagu

SEQ ID NO: 658668 - RNA, 19 nt, Homo sapiens
  misc_RNA (1)...(19): siRNA sense strand
cgacgugguggccaucaga

SEQ ID NO: 658669 - RNA, 19 nt, Homo sapiens
  misc_RNA (1)...(19): siRNA sense strand
aagaacccgugaagaaggu

SEQ ID NO: 658670 - RNA, 19 nt, Homo sapiens
  misc_RNA (1)...(19): siRNA sense strand
agaagaacccgugaagaag

SEQ ID NO: 658671 - RNA, 19 nt, Homo sapiens
  misc_RNA (1)...(19): siRNA sense strand
cagccaguguggagaaggu

SEQ ID NO: 658672 - RNA, 19 nt, Homo sapiens
  misc_RNA (1)...(19): siRNA sense strand
guggccaucagaauaacua

SEQ ID NO: 658673 - RNA, 19 nt, Homo sapiens
  misc_RNA (1)...(19): siRNA sense strand
agaggucguugacuguaca

SEQ ID NO: 658674 - RNA, 19 nt, Homo sapiens
  misc_RNA (1)...(19): siRNA sense strand
aagcaagugugagaucaag

SEQ ID NO: 658675 - RNA, 19 nt, Homo sapiens
  misc_RNA (1)...(19): siRNA sense strand
gacgagguuuuguguuuau

SEQ ID NO: 658676 - RNA, 19 nt, Homo sapiens
  misc_RNA (1)...(19): siRNA sense strand
ggaguacuuuggcgaguuu

SEQ ID NO: 658677 - RNA, 19 nt, Homo sapiens
  misc_RNA (1)...(19): siRNA sense strand
gccaauggauccaaaguug

SEQ ID NO: 658678 - RNA, 19 nt, Homo sapiens
  misc_RNA (1)...(19): siRNA sense strand
ucaagaggguuuggguuua

SEQ ID NO: 658679 - RNA, 19 nt, Homo sapiens
  misc_RNA (1)...(19): siRNA sense strand
ggccugagcugggauacua

SEQ ID NO: 658680 - RNA, 19 nt, Homo sapiens
  misc_RNA (1)...(19): siRNA sense strand
gagcugggauacuagcaaa

SEQ ID NO: 658681 - RNA, 19 nt, Homo sapiens
  misc_RNA (1)...(19): siRNA sense strand
gucguugacuguacaauaa

SEQ ID NO: 658682 - RNA, 19 nt, Homo sapiens
  misc_RNA (1)...(19): siRNA sense strand
ggaagcaagugugagauca

SEQ ID NO: 658683 - RNA, 19 nt, Homo sapiens
  misc_RNA (1)...(19): siRNA sense strand
caagaggguuuggguuuau

SEQ ID NO: 658684 - RNA, 19 nt, Homo sapiens
  misc_RNA (1)...(19): siRNA sense strand
aagaagaacccgugaagaa

SEQ ID NO: 658685 - RNA, 19 nt, Homo sapiens
  misc_RNA (1)...(19): siRNA sense strand
ggucguugacuguacaaua

SEQ ID NO: 658686 - RNA, 19 nt, Homo sapiens
  misc_RNA (1)...(19): siRNA sense strand
gauugaggccauugaauug

SEQ ID NO: 658687 - RNA, 19 nt, Homo sapiens
  misc_RNA (1)...(19): siRNA sense strand
gaaagucccacugaggaaa

SEQ ID NO: 658688 - RNA, 19 nt, Homo sapiens
  misc_RNA (1)...(19): siRNA sense strand
gguuuauccuguucaaaga

SEQ ID NO: 658689 - RNA, 19 nt, Homo sapiens
  misc_RNA (1)...(19): siRNA sense strand
gaagaagaacccgugaaga

SEQ ID NO: 658690 - RNA, 19 nt, Homo sapiens
  misc_RNA (1)...(19): siRNA sense strand
gauccaaaguugaacaaaa

SEQ ID NO: 658691 - RNA, 19 nt, Homo sapiens
  misc_RNA (1)...(19): siRNA sense strand
caauggauccaaaguugaa

SEQ ID NO: 658692 - RNA, 19 nt, Homo sapiens
  misc_RNA (1)...(19): siRNA sense strand
uaacuacaagccauacuga

SEQ ID NO: 658693 - RNA, 19 nt, Homo sapiens
  misc_RNA (1)...(19): siRNA sense strand
ggagaggucguugacugua

SEQ ID NO: 658694 - RNA, 19 nt, Homo sapiens
  misc_RNA (1)...(19): siRNA sense strand
ggagauugaggccauugaa

SEQ ID NO: 658695 - RNA, 19 nt, Homo sapiens
  misc_RNA (1)...(19): siRNA sense strand
gaucaacgccagcaagaac

SEQ ID NO: 658696 - RNA, 19 nt, Homo sapiens
  misc_RNA (1)...(19): siRNA sense strand
gaagcaagugugagaucaa

SEQ ID NO: 658697 - RNA, 19 nt, Homo sapiens
  misc_RNA (1)...(19): siRNA sense strand
gucaagaggguuuggguuu

SEQ ID NO: 658698 - RNA, 19 nt, Homo sapiens
  misc_RNA (1)...(19): siRNA sense strand
ccauggcuaugaagaagga

SEQ ID NO: 658699 - RNA, 19 nt, Homo sapiens
  misc_RNA (1)...(19): siRNA sense strand
gggaguacuuuggcgaguu

SEQ ID NO: 658700 - RNA, 19 nt, Homo sapiens
  misc_RNA (1)...(19): siRNA sense strand
gugguggccaucagaauaa

SEQ ID NO: 658701 - RNA, 19 nt, Homo sapiens
  misc_RNA (1)...(19): siRNA sense strand
agauugaggccauugaauu

SEQ ID NO: 658702 - RNA, 19 nt, Homo sapiens
  misc_RNA (1)...(19): siRNA sense strand
gagaggucguugacuguac

SEQ ID NO: 658703 - RNA, 19 nt, Homo sapiens
  misc_RNA (1)...(19): siRNA sense strand
agaauaacuacaagccaua

SEQ ID NO: 658704 - RNA, 19 nt, Homo sapiens
  misc_RNA (1)...(19): siRNA sense strand
ucaaagaugcagccagugu

SEQ ID NO: 658705 - RNA, 19 nt, Homo sapiens
  misc_RNA (1)...(19): siRNA sense strand
cgugguggccaucagaaua

SEQ ID NO: 658706 - RNA, 19 nt, Homo sapiens
  misc_RNA (1)...(19): siRNA sense strand
caagguggcccagcccaaa

SEQ ID NO: 658707 - RNA, 19 nt, Homo sapiens
  misc_RNA (1)...(19): siRNA sense strand
ggccauggcuaugaagaag

SEQ ID NO: 658708 - RNA, 19 nt, Homo sapiens
  misc_RNA (1)...(19): siRNA sense strand
ucuaucagcagcagcagua

SEQ ID NO: 658709 - RNA, 19 nt, Homo sapiens
  misc_RNA (1)...(19): siRNA sense strand
gagauugaggccauugaau

SEQ ID NO: 658710 - RNA, 19 nt, Homo sapiens
  misc_RNA (1)...(19): siRNA sense strand
gcaagugugagaucaaggu

SEQ ID NO: 658711 - RNA, 19 nt, Homo sapiens
  misc_RNA (1)...(19): siRNA sense strand
ccaauggauccaaaguuga

SEQ ID NO: 658712 - RNA, 19 nt, Homo sapiens
  misc_RNA (1)...(19): siRNA sense strand
gguuuggguuuauccuguu

SEQ ID NO: 658713 - RNA, 19 nt, Homo sapiens
  misc_RNA (1)...(19): siRNA sense strand
aagacgagguuuuguguuu

SEQ ID NO: 658714 - RNA, 19 nt, Homo sapiens
  misc_RNA (1)...(19): siRNA sense strand
ggguuuauccuguucaaag

SEQ ID NO: 658715 - RNA, 19 nt, Homo sapiens
  misc_RNA (1)...(19): siRNA sense strand
gccaucagaauaacuacaa

SEQ ID NO: 658716 - RNA, 19 nt, Homo sapiens
  misc_RNA (1)...(19): siRNA sense strand
cagaucaacgccagcaaga

SEQ ID NO: 658717 - RNA, 19 nt, Homo sapiens
  misc_RNA (1)...(19): siRNA sense strand
ugaaagucccacugaggaa

SEQ ID NO: 658718 - RNA, 19 nt, Homo sapiens
  misc_RNA (1)...(19): siRNA sense strand
ccaccgagaacggacauga

SEQ ID NO: 658719 - RNA, 19 nt, Homo sapiens
  misc_RNA (1)...(19): siRNA sense strand
aaaaggccauggcuaugaa

SEQ ID NO: 658720 - RNA, 19 nt, Homo sapiens
  misc_RNA (1)...(19): siRNA sense strand
agaagaagaacccgugaag

SEQ ID NO: 658721 - RNA, 19 nt, Homo sapiens
  misc_RNA (1)...(19): siRNA sense strand
gcuggauggccgugucauu

SEQ ID NO: 658722 - RNA, 19 nt, Homo sapiens
  misc_RNA (1)...(19): siRNA sense strand
aggaaaagaucagggagua

SEQ ID NO: 658723 - RNA, 19 nt, Homo sapiens
  misc_RNA (1)...(19): siRNA sense strand
gaauaacuacaagccauac

SEQ ID NO: 658724 - RNA, 19 nt, Homo sapiens
  misc_RNA (1)...(19): siRNA sense strand
ucaguggaagcaaguguga

SEQ ID NO: 658725 - RNA, 19 nt, Homo sapiens
  misc_RNA (1)...(19): siRNA sense strand
agacgagguuuuguguuua

SEQ ID NO: 658726 - RNA, 19 nt, Homo sapiens
  misc_RNA (1)...(19): siRNA sense strand
gggucugaauccugaaagu

SEQ ID NO: 658727 - RNA, 19 nt, Homo sapiens
  misc_RNA (1)...(19): siRNA sense strand
cgacgugguggccaucaga

SEQ ID NO: 658728 - RNA, 19 nt, Homo sapiens
  misc_RNA (1)...(19): siRNA sense strand
aagaacccgugaagaaggu

SEQ ID NO: 658729 - RNA, 19 nt, Homo sapiens
  misc_RNA (1)...(19): siRNA sense strand
agaagaacccgugaagaag

SEQ ID NO: 658730 - RNA, 19 nt, Homo sapiens
  misc_RNA (1)...(19): siRNA sense strand
cagccaguguggagaaggu

SEQ ID NO: 658731 - RNA, 19 nt, Homo sapiens
  misc_RNA (1)...(19): siRNA sense strand
guggccaucagaauaacua

SEQ ID NO: 658732 - RNA, 19 nt, Homo sapiens
  misc_RNA (1)...(19): siRNA sense strand
agaggucguugacuguaca

SEQ ID NO: 658733 - RNA, 19 nt, Homo sapiens
  misc_RNA (1)...(19): siRNA sense strand
aagcaagugugagaucaag

SEQ ID NO: 658734 - RNA, 19 nt, Homo sapiens
  misc_RNA (1)...(19): siRNA sense strand
gacgagguuuuguguuuau

SEQ ID NO: 658735 - RNA, 19 nt, Homo sapiens
  misc_RNA (1)...(19): siRNA sense strand
gaugauguuuccacaauua

SEQ ID NO: 658736 - RNA, 19 nt, Homo sapiens
  misc_RNA (1)...(19): siRNA sense strand
gcaauaucgucgaaaguua

SEQ ID NO: 658737 - RNA, 19 nt, Homo sapiens
  misc_RNA (1)...(19): siRNA sense strand
gcagaaagaugugcuacua

SEQ ID NO: 658738 - RNA, 19 nt, Homo sapiens
  misc_RNA (1)...(19): siRNA sense strand
gcaagauugucaugaguua

SEQ ID NO: 658739 - RNA, 19 nt, Homo sapiens
  misc_RNA (1)...(19): siRNA sense strand
uaacuauggugguaacuua

SEQ ID NO: 658740 - RNA, 19 nt, Homo sapiens
  misc_RNA (1)...(19): siRNA sense strand
cagcaaagaugcacaacua

SEQ ID NO: 658741 - RNA, 19 nt, Homo sapiens
  misc_RNA (1)...(19): siRNA sense strand
gcugauagcuuacgaggaa

SEQ ID NO: 658742 - RNA, 19 nt, Homo sapiens
  misc_RNA (1)...(19): siRNA sense strand
ggagcaacauguagcuuua

SEQ ID NO: 658743 - RNA, 19 nt, Homo sapiens
  misc_RNA (1)...(19): siRNA sense strand
gauauucagucuuuggaua

SEQ ID NO: 658744 - RNA, 19 nt, Homo sapiens
  misc_RNA (1)...(19): siRNA sense strand
uaaagacacuggagaaaug

SEQ ID NO: 658745 - RNA, 19 nt, Homo sapiens
  misc_RNA (1)...(19): siRNA sense strand
gaagaaagucggccguaua

SEQ ID NO: 658746 - RNA, 19 nt, Homo sapiens
  misc_RNA (1)...(19): siRNA sense strand
gaaagucggccguauacua

SEQ ID NO: 658747 - RNA, 19 nt, Homo sapiens
  misc_RNA (1)...(19): siRNA sense strand
caagaaagcagucauaguu

SEQ ID NO: 658748 - RNA, 19 nt, Homo sapiens
  misc_RNA (1)...(19): siRNA sense strand
ggacaaaggugcauuuuau

SEQ ID NO: 658749 - RNA, 19 nt, Homo sapiens
  misc_RNA (1)...(19): siRNA sense strand
gcaaagaugcacaacuaua

SEQ ID NO: 658750 - RNA, 19 nt, Homo sapiens
  misc_RNA (1)...(19): siRNA sense strand
gcgcuagacuuauuugauu

SEQ ID NO: 658751 - RNA, 19 nt, Homo sapiens
  misc_RNA (1)...(19): siRNA sense strand
uaacgaagguggaaaauaa

SEQ ID NO: 658752 - RNA, 19 nt, Homo sapiens
  misc_RNA (1)...(19): siRNA sense strand
ccaaggaccuggauauuca

SEQ ID NO: 658753 - RNA, 19 nt, Homo sapiens
  misc_RNA (1)...(19): siRNA sense strand
caaagaugcacaacuauaa

SEQ ID NO: 658754 - RNA, 19 nt, Homo sapiens
  misc_RNA (1)...(19): siRNA sense strand
ggacagaccuggacuucuc

SEQ ID NO: 658755 - RNA, 19 nt, Homo sapiens
  misc_RNA (1)...(19): siRNA sense strand
gggcaugacugaugauguu

SEQ ID NO: 658756 - RNA, 19 nt, Homo sapiens
  misc_RNA (1)...(19): siRNA sense strand
ugaggaagaucuagauuau

SEQ ID NO: 658757 - RNA, 19 nt, Homo sapiens
  misc_RNA (1)...(19): siRNA sense strand
gagaaggugggauugauua

SEQ ID NO: 658758 - RNA, 19 nt, Homo sapiens
  misc_RNA (1)...(19): siRNA sense strand
gagaaaugguagccuuaaa

SEQ ID NO: 658759 - RNA, 19 nt, Homo sapiens
  misc_RNA (1)...(19): siRNA sense strand
gauaucaucggaauuauug

SEQ ID NO: 658760 - RNA, 19 nt, Homo sapiens
  misc_RNA (1)...(19): siRNA sense strand
ggaaauagugacugauaaa

SEQ ID NO: 658761 - RNA, 19 nt, Homo sapiens
  misc_RNA (1)...(19): siRNA sense strand
gaaucaggcuugguucauu

SEQ ID NO: 658762 - RNA, 19 nt, Homo sapiens
  misc_RNA (1)...(19): siRNA sense strand
gagaguaaaucugcugcua

SEQ ID NO: 658763 - RNA, 19 nt, Homo sapiens
  misc_RNA (1)...(19): siRNA sense strand
gaauucagccuucuucuca

SEQ ID NO: 658764 - RNA, 19 nt, Homo sapiens
  misc_RNA (1)...(19): siRNA sense strand
caccagaucucccuuuaug

SEQ ID NO: 658765 - RNA, 19 nt, Homo sapiens
  misc_RNA (1)...(19): siRNA sense strand
gaagcaauaucgucgaaag

SEQ ID NO: 658766 - RNA, 19 nt, Homo sapiens
  misc_RNA (1)...(19): siRNA sense strand
gaagauaaagaagcugaua

SEQ ID NO: 658767 - RNA, 19 nt, Homo sapiens
  misc_RNA (1)...(19): siRNA sense strand
ggagaaggagcaacaugua

SEQ ID NO: 658768 - RNA, 19 nt, Homo sapiens
  misc_RNA (1)...(19): siRNA sense strand
gaauauagccaugguccua

SEQ ID NO: 658769 - RNA, 19 nt, Homo sapiens
  misc_RNA (1)...(19): siRNA sense strand
ugaaggaaauagugacuga

SEQ ID NO: 658770 - RNA, 19 nt, Homo sapiens
  misc_RNA (1)...(19): siRNA sense strand
gaaaacaacaacacaguua

SEQ ID NO: 658771 - RNA, 19 nt, Homo sapiens
  misc_RNA (1)...(19): siRNA sense strand
guaaaucugcugcuacaaa

SEQ ID NO: 658772 - RNA, 19 nt, Homo sapiens
  misc_RNA (1)...(19): siRNA sense strand
gauaaaacuugcagacuuu

SEQ ID NO: 658773 - RNA, 19 nt, Homo sapiens
  misc_RNA (1)...(19): siRNA sense strand
gaugucuucuugcugauuu

SEQ ID NO: 658774 - RNA, 19 nt, Homo sapiens
  misc_RNA (1)...(19): siRNA sense strand
caccaccaguucuucauua

SEQ ID NO: 658775 - RNA, 19 nt, Homo sapiens
  misc_RNA (1)...(19): siRNA sense strand
agaaagaugugcuacuaga

SEQ ID NO: 658776 - RNA, 19 nt, Homo sapiens
  misc_RNA (1)...(19): siRNA sense strand
cagcugcgcuagacuuauu

SEQ ID NO: 658777 - RNA, 19 nt, Homo sapiens
  misc_RNA (1)...(19): siRNA sense strand
cagcugaauugaacaagaa

SEQ ID NO: 658778 - RNA, 19 nt, Homo sapiens
  misc_RNA (1)...(19): siRNA sense strand
agacaaggaccauagauuu

SEQ ID NO: 658779 - RNA, 19 nt, Homo sapiens
  misc_RNA (1)...(19): siRNA sense strand
gaagaugcuuuggauuuca

SEQ ID NO: 658780 - RNA, 19 nt, Homo sapiens
  misc_RNA (1)...(19): siRNA sense strand
aaacuccgaugucuucuug

SEQ ID NO: 658781 - RNA, 19 nt, Homo sapiens
  misc_RNA (1)...(19): siRNA sense strand
gaguaaaucugcugcuaca

SEQ ID NO: 658782 - RNA, 19 nt, Homo sapiens
  misc_RNA (1)...(19): siRNA sense strand
aaacaaaccaugugaagga

SEQ ID NO: 658783 - RNA, 19 nt, Homo sapiens
  misc_RNA (1)...(19): siRNA sense strand
guauggagcuguggcugua

SEQ ID NO: 658784 - RNA, 19 nt, Homo sapiens
  misc_RNA (1)...(19): siRNA sense strand
gaaggacaaaggugcauuu

SEQ ID NO: 658785 - RNA, 19 nt, Homo sapiens
  misc_RNA (1)...(19): siRNA sense strand
acaacacaguuacauagua

SEQ ID NO: 658786 - RNA, 19 nt, Homo sapiens
  misc_RNA (1)...(19): siRNA sense strand
ucaaacacuucuacaccua

SEQ ID NO: 658787 - RNA, 19 nt, Homo sapiens
  misc_RNA (1)...(19): siRNA sense strand
gcacaacuauaacuauggu

SEQ ID NO: 658788 - RNA, 19 nt, Homo sapiens
  misc_RNA (1)...(19): siRNA sense strand
caacaacacaguuacauag

SEQ ID NO: 658789 - RNA, 19 nt, Homo sapiens
  misc_RNA (1)...(19): siRNA sense strand
ggaaucaguaucucuuaaa

SEQ ID NO: 658790 - RNA, 19 nt, Homo sapiens
  misc_RNA (1)...(19): siRNA sense strand
gcagcugaauugaacaaga

SEQ ID NO: 658791 - RNA, 19 nt, Homo sapiens
  misc_RNA (1)...(19): siRNA sense strand
ggucuggauuauugucaua

SEQ ID NO: 658792 - RNA, 19 nt, Homo sapiens
  misc_RNA (1)...(19): siRNA sense strand
ggaaaacucugcguggaua

SEQ ID NO: 658793 - RNA, 19 nt, Homo sapiens
  misc_RNA (1)...(19): siRNA sense strand
gcaaggaccgggacucgaa

SEQ ID NO: 658794 - RNA, 19 nt, Homo sapiens
  misc_RNA (1)...(19): siRNA sense strand
gaaucaguaucucuuaaag

SEQ ID NO: 658795 - RNA, 19 nt, Homo sapiens
  misc_RNA (1)...(19): siRNA sense strand
ugucaugaguuauggagua

SEQ ID NO: 658796 - RNA, 19 nt, Homo sapiens
  misc_RNA (1)...(19): siRNA sense strand
ggacuugcucgauuguaua

SEQ ID NO: 658797 - RNA, 19 nt, Homo sapiens
  misc_RNA (1)...(19): siRNA sense strand
aauaauagagggcagauaa

SEQ ID NO: 658798 - RNA, 19 nt, Homo sapiens
  misc_RNA (1)...(19): siRNA sense strand
aaacaaagccaccucuuca

SEQ ID NO: 658799 - RNA, 19 nt, Homo sapiens
  misc_RNA (1)...(19): siRNA sense strand
caacaggagucuucgaaac

SEQ ID NO: 658800 - RNA, 19 nt, Homo sapiens
  misc_RNA (1)...(19): siRNA sense strand
gaagaagacagaagcagau

SEQ ID NO: 658801 - RNA, 19 nt, Homo sapiens
  misc_RNA (1)...(19): siRNA sense strand
ucaggaacuugcacaacua

SEQ ID NO: 658802 - RNA, 19 nt, Homo sapiens
  misc_RNA (1)...(19): siRNA sense strand
uggagggucuggauuauug

SEQ ID NO: 658803 - RNA, 19 nt, Homo sapiens
  misc_RNA (1)...(19): siRNA sense strand
ggauaaagacacuggagaa

SEQ ID NO: 658804 - RNA, 19 nt, Homo sapiens
  misc_RNA (1)...(19): siRNA sense strand
caaaccaugugaaggaugu

SEQ ID NO: 658805 - RNA, 19 nt, Homo sapiens
  misc_RNA (1)...(19): siRNA sense strand
aagaagaugcuuuggauuu

SEQ ID NO: 658806 - RNA, 19 nt, Homo sapiens
  misc_RNA (1)...(19): siRNA sense strand
gaagucgucauucuaguau

SEQ ID NO: 658807 - RNA, 19 nt, Homo sapiens
  misc_RNA (1)...(19): siRNA sense strand
gaaccagaccggccucgaa

SEQ ID NO: 658808 - RNA, 19 nt, Homo sapiens
  misc_RNA (1)...(19): siRNA sense strand
gaaagaugugcuacuagaa

SEQ ID NO: 658809 - RNA, 19 nt, Homo sapiens
  misc_RNA (1)...(19): siRNA sense strand
gcaguucuguugacucagu

SEQ ID NO: 658810 - RNA, 19 nt, Homo sapiens
  misc_RNA (1)...(19): siRNA sense strand
caagguaauuacuuuaugg

SEQ ID NO: 658811 - RNA, 19 nt, Homo sapiens
  misc_RNA (1)...(19): siRNA sense strand
gcagaagcccguauucauc

SEQ ID NO: 658812 - RNA, 19 nt, Homo sapiens
  misc_RNA (1)...(19): siRNA sense strand
gaggaaucaguaucucuua

SEQ ID NO: 658813 - RNA, 19 nt, Homo sapiens
  misc_RNA (1)...(19): siRNA sense strand
caaggaccauagauuugaa

SEQ ID NO: 658814 - RNA, 19 nt, Homo sapiens
  misc_RNA (1)...(19): siRNA sense strand
gaaaauggaucgggacaug

SEQ ID NO: 658815 - RNA, 19 nt, Homo sapiens
  misc_RNA (1)...(19): siRNA sense strand
ucuguugacucaguuaaua

SEQ ID NO: 658816 - RNA, 19 nt, Homo sapiens
  misc_RNA (1)...(19): siRNA sense strand
gaacuugcacaacuagaau

SEQ ID NO: 658817 - RNA, 19 nt, Homo sapiens
  misc_RNA (1)...(19): siRNA sense strand
gagaaaaccaaaccacuua

SEQ ID NO: 658818 - RNA, 19 nt, Homo sapiens
  misc_RNA (1)...(19): siRNA sense strand
uaaaucugcugcuacaaag

SEQ ID NO: 658819 - RNA, 19 nt, Homo sapiens
  misc_RNA (1)...(19): siRNA sense strand
gcagaggguuaccauacug

SEQ ID NO: 658820 - RNA, 19 nt, Homo sapiens
  misc_RNA (1)...(19): siRNA sense strand
ggacauauuagcacaucaa

SEQ ID NO: 658821 - RNA, 19 nt, Homo sapiens
  misc_RNA (1)...(19): siRNA sense strand
gagacaaggaccauagauu

SEQ ID NO: 658822 - RNA, 19 nt, Homo sapiens
  misc_RNA (1)...(19): siRNA sense strand
gaagcgucauuacaacuca

SEQ ID NO: 658823 - RNA, 19 nt, Homo sapiens
  misc_RNA (1)...(19): siRNA sense strand
caauaucgucgaaaguuaa

SEQ ID NO: 658824 - RNA, 19 nt, Homo sapiens
  misc_RNA (1)...(19): siRNA sense strand
uuaauaagccgaauaugug

SEQ ID NO: 658825 - RNA, 19 nt, Homo sapiens
  misc_RNA (1)...(19): siRNA sense strand
ggaacuugcacaacuagaa

SEQ ID NO: 658826 - RNA, 19 nt, Homo sapiens
  misc_RNA (1)...(19): siRNA sense strand
aaagucggccguauacuaa

SEQ ID NO: 658827 - RNA, 19 nt, Homo sapiens
  misc_RNA (1)...(19): siRNA sense strand
guuccaauauccuucuaaa

SEQ ID NO: 658828 - RNA, 19 nt, Homo sapiens
  misc_RNA (1)...(19): siRNA sense strand
aaucaggcuugguucauuu

SEQ ID NO: 658829 - RNA, 19 nt, Homo sapiens
  misc_RNA (1)...(19): siRNA sense strand
gauaaagacacuggagaaa

SEQ ID NO: 658830 - RNA, 19 nt, Homo sapiens
  misc_RNA (1)...(19): siRNA sense strand
caacauguagcuuuaguca

SEQ ID NO: 658831 - RNA, 19 nt, Homo sapiens
  misc_RNA (1)...(19): siRNA sense strand
ggaccuggauauucacaag

SEQ ID NO: 658832 - RNA, 19 nt, Homo sapiens
  misc_RNA (1)...(19): siRNA sense strand
gacaaggaccauagauuug

SEQ ID NO: 658833 - RNA, 19 nt, Homo sapiens
  misc_RNA (1)...(19): siRNA sense strand
uaaaggcucagcagucaaa

SEQ ID NO: 658834 - RNA, 19 nt, Homo sapiens
  misc_RNA (1)...(19): siRNA sense strand
ggagaaaugguagccuuaa

SEQ ID NO: 658835 - RNA, 19 nt, Homo sapiens
  misc_RNA (1)...(19): siRNA sense strand
gaugauguuuccacaauua

SEQ ID NO: 658836 - RNA, 19 nt, Homo sapiens
  misc_RNA (1)...(19): siRNA sense strand
gcaauaucgucgaaaguua

SEQ ID NO: 658837 - RNA, 19 nt, Homo sapiens
  misc_RNA (1)...(19): siRNA sense strand
gcagaaagaugugcuacua

SEQ ID NO: 658838 - RNA, 19 nt, Homo sapiens
  misc_RNA (1)...(19): siRNA sense strand
gcaagauugucaugaguua

SEQ ID NO: 658839 - RNA, 19 nt, Homo sapiens
  misc_RNA (1)...(19): siRNA sense strand
uaacuauggugguaacuua

SEQ ID NO: 658840 - RNA, 19 nt, Homo sapiens
  misc_RNA (1)...(19): siRNA sense strand
cagcaaagaugcacaacua

SEQ ID NO: 658841 - RNA, 19 nt, Homo sapiens
  misc_RNA (1)...(19): siRNA sense strand
gcugauagcuuacgaggaa

SEQ ID NO: 658842 - RNA, 19 nt, Homo sapiens
  misc_RNA (1)...(19): siRNA sense strand
ggagcaacauguagcuuua

SEQ ID NO: 658843 - RNA, 19 nt, Homo sapiens
  misc_RNA (1)...(19): siRNA sense strand
gauauucagucuuuggaua

SEQ ID NO: 658844 - RNA, 19 nt, Homo sapiens
  misc_RNA (1)...(19): siRNA sense strand
uaaagacacuggagaaaug

SEQ ID NO: 658845 - RNA, 19 nt, Homo sapiens
  misc_RNA (1)...(19): siRNA sense strand
gaagaaagucggccguaua

SEQ ID NO: 658846 - RNA, 19 nt, Homo sapiens
  misc_RNA (1)...(19): siRNA sense strand
gaaagucggccguauacua

SEQ ID NO: 658847 - RNA, 19 nt, Homo sapiens
  misc_RNA (1)...(19): siRNA sense strand
caagaaagcagucauaguu

SEQ ID NO: 658848 - RNA, 19 nt, Homo sapiens
  misc_RNA (1)...(19): siRNA sense strand
ggacaaaggugcauuuuau

SEQ ID NO: 658849 - RNA, 19 nt, Homo sapiens
  misc_RNA (1)...(19): siRNA sense strand
gcaaagaugcacaacuaua

SEQ ID NO: 658850 - RNA, 19 nt, Homo sapiens
  misc_RNA (1)...(19): siRNA sense strand
gcgcuagacuuauuugauu

SEQ ID NO: 658851 - RNA, 19 nt, Homo sapiens
  misc_RNA (1)...(19): siRNA sense strand
uaacgaagguggaaaauaa

SEQ ID NO: 658852 - RNA, 19 nt, Homo sapiens
  misc_RNA (1)...(19): siRNA sense strand
ccaaggaccuggauauuca

SEQ ID NO: 658853 - RNA, 19 nt, Homo sapiens
  misc_RNA (1)...(19): siRNA sense strand
caaagaugcacaacuauaa

SEQ ID NO: 658854 - RNA, 19 nt, Homo sapiens
  misc_RNA (1)...(19): siRNA sense strand
ggacagaccuggacuucuc

SEQ ID NO: 658855 - RNA, 19 nt, Homo sapiens
  misc_RNA (1)...(19): siRNA sense strand
gggcaugacugaugauguu

SEQ ID NO: 658856 - RNA, 19 nt, Homo sapiens
  misc_RNA (1)...(19): siRNA sense strand
ugaggaagaucuagauuau

SEQ ID NO: 658857 - RNA, 19 nt, Homo sapiens
  misc_RNA (1)...(19): siRNA sense strand
gagaaggugggauugauua

SEQ ID NO: 658858 - RNA, 19 nt, Homo sapiens
  misc_RNA (1)...(19): siRNA sense strand
gagaaaugguagccuuaaa

SEQ ID NO: 658859 - RNA, 19 nt, Homo sapiens
  misc_RNA (1)...(19): siRNA sense strand
gauaucaucggaauuauug

SEQ ID NO: 658860 - RNA, 19 nt, Homo sapiens
  misc_RNA (1)...(19): siRNA sense strand
ggaaauagugacugauaaa

SEQ ID NO: 658861 - RNA, 19 nt, Homo sapiens
  misc_RNA (1)...(19): siRNA sense strand
gaaucaggcuugguucauu

SEQ ID NO: 658862 - RNA, 19 nt, Homo sapiens
  misc_RNA (1)...(19): siRNA sense strand
gagaguaaaucugcugcua

SEQ ID NO: 658863 - RNA, 19 nt, Homo sapiens
  misc_RNA (1)...(19): siRNA sense strand
gaauucagccuucuucuca

SEQ ID NO: 658864 - RNA, 19 nt, Homo sapiens
  misc_RNA (1)...(19): siRNA sense strand
caccagaucucccuuuaug

SEQ ID NO: 658865 - RNA, 19 nt, Homo sapiens
  misc_RNA (1)...(19): siRNA sense strand
gaagcaauaucgucgaaag

SEQ ID NO: 658866 - RNA, 19 nt, Homo sapiens
  misc_RNA (1)...(19): siRNA sense strand
gaagauaaagaagcugaua

SEQ ID NO: 658867 - RNA, 19 nt, Homo sapiens
  misc_RNA (1)...(19): siRNA sense strand
ggagaaggagcaacaugua

SEQ ID NO: 658868 - RNA, 19 nt, Homo sapiens
  misc_RNA (1)...(19): siRNA sense strand
gaauauagccaugguccua

SEQ ID NO: 658869 - RNA, 19 nt, Homo sapiens
  misc_RNA (1)...(19): siRNA sense strand
ugaaggaaauagugacuga

SEQ ID NO: 658870 - RNA, 19 nt, Homo sapiens
  misc_RNA (1)...(19): siRNA sense strand
gaaaacaacaacacaguua

SEQ ID NO: 658871 - RNA, 19 nt, Homo sapiens
  misc_RNA (1)...(19): siRNA sense strand
guaaaucugcugcuacaaa

SEQ ID NO: 658872 - RNA, 19 nt, Homo sapiens
  misc_RNA (1)...(19): siRNA sense strand
gauaaaacuugcagacuuu

SEQ ID NO: 658873 - RNA, 19 nt, Homo sapiens
  misc_RNA (1)...(19): siRNA sense strand
gaugucuucuugcugauuu

SEQ ID NO: 658874 - RNA, 19 nt, Homo sapiens
  misc_RNA (1)...(19): siRNA sense strand
caccaccaguucuucauua

SEQ ID NO: 658875 - RNA, 19 nt, Homo sapiens
  misc_RNA (1)...(19): siRNA sense strand
agaaagaugugcuacuaga

SEQ ID NO: 658876 - RNA, 19 nt, Homo sapiens
  misc_RNA (1)...(19): siRNA sense strand
cagcugcgcuagacuuauu

SEQ ID NO: 658877 - RNA, 19 nt, Homo sapiens
  misc_RNA (1)...(19): siRNA sense strand
cagcugaauugaacaagaa

SEQ ID NO: 658878 - RNA, 19 nt, Homo sapiens
  misc_RNA (1)...(19): siRNA sense strand
agacaaggaccauagauuu

SEQ ID NO: 658879 - RNA, 19 nt, Homo sapiens
  misc_RNA (1)...(19): siRNA sense strand
gaagaugcuuuggauuuca

SEQ ID NO: 658880 - RNA, 19 nt, Homo sapiens
  misc_RNA (1)...(19): siRNA sense strand
aaacuccgaugucuucuug

SEQ ID NO: 658881 - RNA, 19 nt, Homo sapiens
  misc_RNA (1)...(19): siRNA sense strand
gaguaaaucugcugcuaca

SEQ ID NO: 658882 - RNA, 19 nt, Homo sapiens
  misc_RNA (1)...(19): siRNA sense strand
aaacaaaccaugugaagga

SEQ ID NO: 658883 - RNA, 19 nt, Homo sapiens
  misc_RNA (1)...(19): siRNA sense strand
guauggagcuguggcugua

SEQ ID NO: 658884 - RNA, 19 nt, Homo sapiens
  misc_RNA (1)...(19): siRNA sense strand
gaaggacaaaggugcauuu

SEQ ID NO: 658885 - RNA, 19 nt, Homo sapiens
  misc_RNA (1)...(19): siRNA sense strand
acaacacaguuacauagua

SEQ ID NO: 658886 - RNA, 19 nt, Homo sapiens
  misc_RNA (1)...(19): siRNA sense strand
ucaaacacuucuacaccua

SEQ ID NO: 658887 - RNA, 19 nt, Homo sapiens
  misc_RNA (1)...(19): siRNA sense strand
gcacaacuauaacuauggu

SEQ ID NO: 658888 - RNA, 19 nt, Homo sapiens
  misc_RNA (1)...(19): siRNA sense strand
caacaacacaguuacauag

SEQ ID NO: 658889 - RNA, 19 nt, Homo sapiens
  misc_RNA (1)...(19): siRNA sense strand
ggaaucaguaucucuuaaa

SEQ ID NO: 658890 - RNA, 19 nt, Homo sapiens
  misc_RNA (1)...(19): siRNA sense strand
gcagcugaauugaacaaga

SEQ ID NO: 658891 - RNA, 19 nt, Homo sapiens
  misc_RNA (1)...(19): siRNA sense strand
ggucuggauuauugucaua

SEQ ID NO: 658892 - RNA, 19 nt, Homo sapiens
  misc_RNA (1)...(19): siRNA sense strand
ggaaaacucugcguggaua

SEQ ID NO: 658893 - RNA, 19 nt, Homo sapiens
  misc_RNA (1)...(19): siRNA sense strand
gcaaggaccgggacucgaa

SEQ ID NO: 658894 - RNA, 19 nt, Homo sapiens
  misc_RNA (1)...(19): siRNA sense strand
gaaucaguaucucuuaaag

SEQ ID NO: 658895 - RNA, 19 nt, Homo sapiens
  misc_RNA (1)...(19): siRNA sense strand
ugucaugaguuauggagua

SEQ ID NO: 658896 - RNA, 19 nt, Homo sapiens
  misc_RNA (1)...(19): siRNA sense strand
ggacuugcucgauuguaua

SEQ ID NO: 658897 - RNA, 19 nt, Homo sapiens
  misc_RNA (1)...(19): siRNA sense strand
aauaauagagggcagauaa

SEQ ID NO: 658898 - RNA, 19 nt, Homo sapiens
  misc_RNA (1)...(19): siRNA sense strand
aaacaaagccaccucuuca

SEQ ID NO: 658899 - RNA, 19 nt, Homo sapiens
  misc_RNA (1)...(19): siRNA sense strand
caacaggagucuucgaaac

SEQ ID NO: 658900 - RNA, 19 nt, Homo sapiens
  misc_RNA (1)...(19): siRNA sense strand
gaagaagacagaagcagau

SEQ ID NO: 658901 - RNA, 19 nt, Homo sapiens
  misc_RNA (1)...(19): siRNA sense strand
ucaggaacuugcacaacua

SEQ ID NO: 658902 - RNA, 19 nt, Homo sapiens
  misc_RNA (1)...(19): siRNA sense strand
uggagggucuggauuauug

SEQ ID NO: 658903 - RNA, 19 nt, Homo sapiens
  misc_RNA (1)...(19): siRNA sense strand
ggauaaagacacuggagaa

SEQ ID NO: 658904 - RNA, 19 nt, Homo sapiens
  misc_RNA (1)...(19): siRNA sense strand
caaaccaugugaaggaugu

SEQ ID NO: 658905 - RNA, 19 nt, Homo sapiens
  misc_RNA (1)...(19): siRNA sense strand
aagaagaugcuuuggauuu

SEQ ID NO: 658906 - RNA, 19 nt, Homo sapiens
  misc_RNA (1)...(19): siRNA sense strand
gaagucgucauucuaguau

SEQ ID NO: 658907 - RNA, 19 nt, Homo sapiens
  misc_RNA (1)...(19): siRNA sense strand
gaaccagaccggccucgaa

SEQ ID NO: 658908 - RNA, 19 nt, Homo sapiens
  misc_RNA (1)...(19): siRNA sense strand
gaaagaugugcuacuagaa

SEQ ID NO: 658909 - RNA, 19 nt, Homo sapiens
  misc_RNA (1)...(19): siRNA sense strand
gcaguucuguugacucagu

SEQ ID NO: 658910 - RNA, 19 nt, Homo sapiens
  misc_RNA (1)...(19): siRNA sense strand
caagguaauuacuuuaugg

SEQ ID NO: 658911 - RNA, 19 nt, Homo sapiens
  misc_RNA (1)...(19): siRNA sense strand
gcagaagcccguauucauc

SEQ ID NO: 658912 - RNA, 19 nt, Homo sapiens
  misc_RNA (1)...(19): siRNA sense strand
gaggaaucaguaucucuua

SEQ ID NO: 658913 - RNA, 19 nt, Homo sapiens
  misc_RNA (1)...(19): siRNA sense strand
caaggaccauagauuugaa

SEQ ID NO: 658914 - RNA, 19 nt, Homo sapiens
  misc_RNA (1)...(19): siRNA sense strand
gaaaauggaucgggacaug

SEQ ID NO: 658915 - RNA, 19 nt, Homo sapiens
  misc_RNA (1)...(19): siRNA sense strand
ucuguugacucaguuaaua

SEQ ID NO: 658916 - RNA, 19 nt, Homo sapiens
  misc_RNA (1)...(19): siRNA sense strand
gaacuugcacaacuagaau

SEQ ID NO: 658917 - RNA, 19 nt, Homo sapiens
  misc_RNA (1)...(19): siRNA sense strand
gagaaaaccaaaccacuua

SEQ ID NO: 658918 - RNA, 19 nt, Homo sapiens
  misc_RNA (1)...(19): siRNA sense strand
uaaaucugcugcuacaaag

SEQ ID NO: 658919 - RNA, 19 nt, Homo sapiens
  misc_RNA (1)...(19): siRNA sense strand
gcagaggguuaccauacug

SEQ ID NO: 658920 - RNA, 19 nt, Homo sapiens
  misc_RNA (1)...(19): siRNA sense strand
ggacauauuagcacaucaa

SEQ ID NO: 658921 - RNA, 19 nt, Homo sapiens
  misc_RNA (1)...(19): siRNA sense strand
gagacaaggaccauagauu

SEQ ID NO: 658922 - RNA, 19 nt, Homo sapiens
  misc_RNA (1)...(19): siRNA sense strand
gaagcgucauuacaacuca

SEQ ID NO: 658923 - RNA, 19 nt, Homo sapiens
  misc_RNA (1)...(19): siRNA sense strand
caauaucgucgaaaguuaa

SEQ ID NO: 658924 - RNA, 19 nt, Homo sapiens
  misc_RNA (1)...(19): siRNA sense strand
uuaauaagccgaauaugug

SEQ ID NO: 658925 - RNA, 19 nt, Homo sapiens
  misc_RNA (1)...(19): siRNA sense strand
ggaacuugcacaacuagaa

SEQ ID NO: 658926 - RNA, 19 nt, Homo sapiens
  misc_RNA (1)...(19): siRNA sense strand
aaagucggccguauacuaa

SEQ ID NO: 658927 - RNA, 19 nt, Homo sapiens
  misc_RNA (1)...(19): siRNA sense strand
guuccaauauccuucuaaa

SEQ ID NO: 658928 - RNA, 19 nt, Homo sapiens
  misc_RNA (1)...(19): siRNA sense strand
aaucaggcuugguucauuu

SEQ ID NO: 658929 - RNA, 19 nt, Homo sapiens
  misc_RNA (1)...(19): siRNA sense strand
gauaaagacacuggagaaa

SEQ ID NO: 658930 - RNA, 19 nt, Homo sapiens
  misc_RNA (1)...(19): siRNA sense strand
caacauguagcuuuaguca

SEQ ID NO: 658931 - RNA, 19 nt, Homo sapiens
  misc_RNA (1)...(19): siRNA sense strand
ggaccuggauauucacaag

SEQ ID NO: 658932 - RNA, 19 nt, Homo sapiens
  misc_RNA (1)...(19): siRNA sense strand
gacaaggaccauagauuug

SEQ ID NO: 658933 - RNA, 19 nt, Homo sapiens
  misc_RNA (1)...(19): siRNA sense strand
uaaaggcucagcagucaaa

SEQ ID NO: 658934 - RNA, 19 nt, Homo sapiens
  misc_RNA (1)...(19): siRNA sense strand
ggagaaaugguagccuuaa

SEQ ID NO: 658935 - RNA, 19 nt, Homo sapiens
  misc_RNA (1)...(19): siRNA sense strand
gaugauguuuccacaauua

SEQ ID NO: 658936 - RNA, 19 nt, Homo sapiens
  misc_RNA (1)...(19): siRNA sense strand
gcaauaucgucgaaaguua

SEQ ID NO: 658937 - RNA, 19 nt, Homo sapiens
  misc_RNA (1)...(19): siRNA sense strand
gcagaaagaugugcuacua

SEQ ID NO: 658938 - RNA, 19 nt, Homo sapiens
  misc_RNA (1)...(19): siRNA sense strand
gcaagauugucaugaguua

SEQ ID NO: 658939 - RNA, 19 nt, Homo sapiens
  misc_RNA (1)...(19): siRNA sense strand
uaacuauggugguaacuua

SEQ ID NO: 658940 - RNA, 19 nt, Homo sapiens
  misc_RNA (1)...(19): siRNA sense strand
cagcaaagaugcacaacua

SEQ ID NO: 658941 - RNA, 19 nt, Homo sapiens
  misc_RNA (1)...(19): siRNA sense strand
gcugauagcuuacgaggaa

SEQ ID NO: 658942 - RNA, 19 nt, Homo sapiens
  misc_RNA (1)...(19): siRNA sense strand
ggagcaacauguagcuuua

SEQ ID NO: 658943 - RNA, 19 nt, Homo sapiens
  misc_RNA (1)...(19): siRNA sense strand
gauauucagucuuuggaua

SEQ ID NO: 658944 - RNA, 19 nt, Homo sapiens
  misc_RNA (1)...(19): siRNA sense strand
uaaagacacuggagaaaug

SEQ ID NO: 658945 - RNA, 19 nt, Homo sapiens
  misc_RNA (1)...(19): siRNA sense strand
gaagaaagucggccguaua

SEQ ID NO: 658946 - RNA, 19 nt, Homo sapiens
  misc_RNA (1)...(19): siRNA sense strand
gaaagucggccguauacua

SEQ ID NO: 658947 - RNA, 19 nt, Homo sapiens
  misc_RNA (1)...(19): siRNA sense strand
caagaaagcagucauaguu

SEQ ID NO: 658948 - RNA, 19 nt, Homo sapiens
  misc_RNA (1)...(19): siRNA sense strand
ggacaaaggugcauuuuau

SEQ ID NO: 658949 - RNA, 19 nt, Homo sapiens
  misc_RNA (1)...(19): siRNA sense strand
gcaaagaugcacaacuaua

SEQ ID NO: 658950 - RNA, 19 nt, Homo sapiens
  misc_RNA (1)...(19): siRNA sense strand
gcgcuagacuuauuugauu

SEQ ID NO: 658951 - RNA, 19 nt, Homo sapiens
  misc_RNA (1)...(19): siRNA sense strand
uaacgaagguggaaaauaa

SEQ ID NO: 658952 - RNA, 19 nt, Homo sapiens
  misc_RNA (1)...(19): siRNA sense strand
ccaaggaccuggauauuca

SEQ ID NO: 658953 - RNA, 19 nt, Homo sapiens
  misc_RNA (1)...(19): siRNA sense strand
caaagaugcacaacuauaa

SEQ ID NO: 658954 - RNA, 19 nt, Homo sapiens
  misc_RNA (1)...(19): siRNA sense strand
ggacagaccuggacuucuc

SEQ ID NO: 658955 - RNA, 19 nt, Homo sapiens
  misc_RNA (1)...(19): siRNA sense strand
gggcaugacugaugauguu

SEQ ID NO: 658956 - RNA, 19 nt, Homo sapiens
  misc_RNA (1)...(19): siRNA sense strand
ugaggaagaucuagauuau

SEQ ID NO: 658957 - RNA, 19 nt, Homo sapiens
  misc_RNA (1)...(19): siRNA sense strand
gagaaggugggauugauua

SEQ ID NO: 658958 - RNA, 19 nt, Homo sapiens
  misc_RNA (1)...(19): siRNA sense strand
gagaaaugguagccuuaaa

SEQ ID NO: 658959 - RNA, 19 nt, Homo sapiens
  misc_RNA (1)...(19): siRNA sense strand
gauaucaucggaauuauug

SEQ ID NO: 658960 - RNA, 19 nt, Homo sapiens
  misc_RNA (1)...(19): siRNA sense strand
ggaaauagugacugauaaa

SEQ ID NO: 658961 - RNA, 19 nt, Homo sapiens
  misc_RNA (1)...(19): siRNA sense strand
gaaucaggcuugguucauu

SEQ ID NO: 658962 - RNA, 19 nt, Homo sapiens
  misc_RNA (1)...(19): siRNA sense strand
gagaguaaaucugcugcua

SEQ ID NO: 658963 - RNA, 19 nt, Homo sapiens
  misc_RNA (1)...(19): siRNA sense strand
gaauucagccuucuucuca

SEQ ID NO: 658964 - RNA, 19 nt, Homo sapiens
  misc_RNA (1)...(19): siRNA sense strand
caccagaucucccuuuaug

SEQ ID NO: 658965 - RNA, 19 nt, Homo sapiens
  misc_RNA (1)...(19): siRNA sense strand
gaagcaauaucgucgaaag

SEQ ID NO: 658966 - RNA, 19 nt, Homo sapiens
  misc_RNA (1)...(19): siRNA sense strand
gaagauaaagaagcugaua

SEQ ID NO: 658967 - RNA, 19 nt, Homo sapiens
  misc_RNA (1)...(19): siRNA sense strand
ggagaaggagcaacaugua

SEQ ID NO: 658968 - RNA, 19 nt, Homo sapiens
  misc_RNA (1)...(19): siRNA sense strand
gaauauagccaugguccua

SEQ ID NO: 658969 - RNA, 19 nt, Homo sapiens
  misc_RNA (1)...(19): siRNA sense strand
ugaaggaaauagugacuga

SEQ ID NO: 658970 - RNA, 19 nt, Homo sapiens
  misc_RNA (1)...(19): siRNA sense strand
gaaaacaacaacacaguua

SEQ ID NO: 658971 - RNA, 19 nt, Homo sapiens
  misc_RNA (1)...(19): siRNA sense strand
guaaaucugcugcuacaaa

SEQ ID NO: 658972 - RNA, 19 nt, Homo sapiens
  misc_RNA (1)...(19): siRNA sense strand
gauaaaacuugcagacuuu

SEQ ID NO: 658973 - RNA, 19 nt, Homo sapiens
  misc_RNA (1)...(19): siRNA sense strand
gaugucuucuugcugauuu

SEQ ID NO: 658974 - RNA, 19 nt, Homo sapiens
  misc_RNA (1)...(19): siRNA sense strand
caccaccaguucuucauua

SEQ ID NO: 658975 - RNA, 19 nt, Homo sapiens
  misc_RNA (1)...(19): siRNA sense strand
agaaagaugugcuacuaga

SEQ ID NO: 658976 - RNA, 19 nt, Homo sapiens
  misc_RNA (1)...(19): siRNA sense strand
cagcugcgcuagacuuauu

SEQ ID NO: 658977 - RNA, 19 nt, Homo sapiens
  misc_RNA (1)...(19): siRNA sense strand
cagcugaauugaacaagaa

SEQ ID NO: 658978 - RNA, 19 nt, Homo sapiens
  misc_RNA (1)...(19): siRNA sense strand
agacaaggaccauagauuu

SEQ ID NO: 658979 - RNA, 19 nt, Homo sapiens
  misc_RNA (1)...(19): siRNA sense strand
gaagaugcuuuggauuuca

SEQ ID NO: 658980 - RNA, 19 nt, Homo sapiens
  misc_RNA (1)...(19): siRNA sense strand
aaacuccgaugucuucuug

SEQ ID NO: 658981 - RNA, 19 nt, Homo sapiens
  misc_RNA (1)...(19): siRNA sense strand
gaguaaaucugcugcuaca

SEQ ID NO: 658982 - RNA, 19 nt, Homo sapiens
  misc_RNA (1)...(19): siRNA sense strand
aaacaaaccaugugaagga

SEQ ID NO: 658983 - RNA, 19 nt, Homo sapiens
  misc_RNA (1)...(19): siRNA sense strand
guauggagcuguggcugua

SEQ ID NO: 658984 - RNA, 19 nt, Homo sapiens
  misc_RNA (1)...(19): siRNA sense strand
gaaggacaaaggugcauuu

SEQ ID NO: 658985 - RNA, 19 nt, Homo sapiens
  misc_RNA (1)...(19): siRNA sense strand
acaacacaguuacauagua

SEQ ID NO: 658986 - RNA, 19 nt, Homo sapiens
  misc_RNA (1)...(19): siRNA sense strand
ucaaacacuucuacaccua

SEQ ID NO: 658987 - RNA, 19 nt, Homo sapiens
  misc_RNA (1)...(19): siRNA sense strand
gcacaacuauaacuauggu

SEQ ID NO: 658988 - RNA, 19 nt, Homo sapiens
  misc_RNA (1)...(19): siRNA sense strand
caacaacacaguuacauag

SEQ ID NO: 658989 - RNA, 19 nt, Homo sapiens
  misc_RNA (1)...(19): siRNA sense strand
ggaaucaguaucucuuaaa

SEQ ID NO: 658990 - RNA, 19 nt, Homo sapiens
  misc_RNA (1)...(19): siRNA sense strand
gcagcugaauugaacaaga

SEQ ID NO: 658991 - RNA, 19 nt, Homo sapiens
  misc_RNA (1)...(19): siRNA sense strand
ggucuggauuauugucaua

SEQ ID NO: 658992 - RNA, 19 nt, Homo sapiens
  misc_RNA (1)...(19): siRNA sense strand
ggaaaacucugcguggaua

SEQ ID NO: 658993 - RNA, 19 nt, Homo sapiens
  misc_RNA (1)...(19): siRNA sense strand
gcaaggaccgggacucgaa

SEQ ID NO: 658994 - RNA, 19 nt, Homo sapiens
  misc_RNA (1)...(19): siRNA sense strand
gaaucaguaucucuuaaag

SEQ ID NO: 658995 - RNA, 19 nt, Homo sapiens
  misc_RNA (1)...(19): siRNA sense strand
ugucaugaguuauggagua

SEQ ID NO: 658996 - RNA, 19 nt, Homo sapiens
  misc_RNA (1)...(19): siRNA sense strand
ggacuugcucgauuguaua

SEQ ID NO: 658997 - RNA, 19 nt, Homo sapiens
  misc_RNA (1)...(19): siRNA sense strand
aauaauagagggcagauaa

SEQ ID NO: 658998 - RNA, 19 nt, Homo sapiens
  misc_RNA (1)...(19): siRNA sense strand
aaacaaagccaccucuuca

SEQ ID NO: 658999 - RNA, 19 nt, Homo sapiens
  misc_RNA (1)...(19): siRNA sense strand
caacaggagucuucgaaac

SEQ ID NO: 659000 - RNA, 19 nt, Homo sapiens
  misc_RNA (1)...(19): siRNA sense strand
gaagaagacagaagcagau

SEQ ID NO: 659001 - RNA, 19 nt, Homo sapiens
  misc_RNA (1)...(19): siRNA sense strand
ucaggaacuugcacaacua

SEQ ID NO: 659002 - RNA, 19 nt, Homo sapiens
  misc_RNA (1)...(19): siRNA sense strand
uggagggucuggauuauug

SEQ ID NO: 659003 - RNA, 19 nt, Homo sapiens
  misc_RNA (1)...(19): siRNA sense strand
ggauaaagacacuggagaa

SEQ ID NO: 659004 - RNA, 19 nt, Homo sapiens
  misc_RNA (1)...(19): siRNA sense strand
caaaccaugugaaggaugu

SEQ ID NO: 659005 - RNA, 19 nt, Homo sapiens
  misc_RNA (1)...(19): siRNA sense strand
aagaagaugcuuuggauuu

SEQ ID NO: 659006 - RNA, 19 nt, Homo sapiens
  misc_RNA (1)...(19): siRNA sense strand
gaagucgucauucuaguau

SEQ ID NO: 659007 - RNA, 19 nt, Homo sapiens
  misc_RNA (1)...(19): siRNA sense strand
gaaccagaccggccucgaa

SEQ ID NO: 659008 - RNA, 19 nt, Homo sapiens
  misc_RNA (1)...(19): siRNA sense strand
gaaagaugugcuacuagaa

SEQ ID NO: 659009 - RNA, 19 nt, Homo sapiens
  misc_RNA (1)...(19): siRNA sense strand
gcaguucuguugacucagu

SEQ ID NO: 659010 - RNA, 19 nt, Homo sapiens
  misc_RNA (1)...(19): siRNA sense strand
caagguaauuacuuuaugg

SEQ ID NO: 659011 - RNA, 19 nt, Homo sapiens
  misc_RNA (1)...(19): siRNA sense strand
gcagaagcccguauucauc

SEQ ID NO: 659012 - RNA, 19 nt, Homo sapiens
  misc_RNA (1)...(19): siRNA sense strand
gaggaaucaguaucucuua

SEQ ID NO: 659013 - RNA, 19 nt, Homo sapiens
  misc_RNA (1)...(19): siRNA sense strand
caaggaccauagauuugaa

SEQ ID NO: 659014 - RNA, 19 nt, Homo sapiens
  misc_RNA (1)...(19): siRNA sense strand
gaaaauggaucgggacaug

SEQ ID NO: 659015 - RNA, 19 nt, Homo sapiens
  misc_RNA (1)...(19): siRNA sense strand
ucuguugacucaguuaaua

SEQ ID NO: 659016 - RNA, 19 nt, Homo sapiens
  misc_RNA (1)...(19): siRNA sense strand
gaacuugcacaacuagaau

SEQ ID NO: 659017 - RNA, 19 nt, Homo sapiens
  misc_RNA (1)...(19): siRNA sense strand
gagaaaaccaaaccacuua

SEQ ID NO: 659018 - RNA, 19 nt, Homo sapiens
  misc_RNA (1)...(19): siRNA sense strand
uaaaucugcugcuacaaag

SEQ ID NO: 659019 - RNA, 19 nt, Homo sapiens
  misc_RNA (1)...(19): siRNA sense strand
gcagaggguuaccauacug

SEQ ID NO: 659020 - RNA, 19 nt, Homo sapiens
  misc_RNA (1)...(19): siRNA sense strand
ggacauauuagcacaucaa

SEQ ID NO: 659021 - RNA, 19 nt, Homo sapiens
  misc_RNA (1)...(19): siRNA sense strand
gagacaaggaccauagauu

SEQ ID NO: 659022 - RNA, 19 nt, Homo sapiens
  misc_RNA (1)...(19): siRNA sense strand
gaagcgucauuacaacuca

SEQ ID NO: 659023 - RNA, 19 nt, Homo sapiens
  misc_RNA (1)...(19): siRNA sense strand
caauaucgucgaaaguuaa

SEQ ID NO: 659024 - RNA, 19 nt, Homo sapiens
  misc_RNA (1)...(19): siRNA sense strand
uuaauaagccgaauaugug

SEQ ID NO: 659025 - RNA, 19 nt, Homo sapiens
  misc_RNA (1)...(19): siRNA sense strand
ggaacuugcacaacuagaa

SEQ ID NO: 659026 - RNA, 19 nt, Homo sapiens
  misc_RNA (1)...(19): siRNA sense strand
aaagucggccguauacuaa

SEQ ID NO: 659027 - RNA, 19 nt, Homo sapiens
  misc_RNA (1)...(19): siRNA sense strand
guuccaauauccuucuaaa

SEQ ID NO: 659028 - RNA, 19 nt, Homo sapiens
  misc_RNA (1)...(19): siRNA sense strand
aaucaggcuugguucauuu

SEQ ID NO: 659029 - RNA, 19 nt, Homo sapiens
  misc_RNA (1)...(19): siRNA sense strand
gauaaagacacuggagaaa

SEQ ID NO: 659030 - RNA, 19 nt, Homo sapiens
  misc_RNA (1)...(19): siRNA sense strand
caacauguagcuuuaguca

SEQ ID NO: 659031 - RNA, 19 nt, Homo sapiens
  misc_RNA (1)...(19): siRNA sense strand
ggaccuggauauucacaag

SEQ ID NO: 659032 - RNA, 19 nt, Homo sapiens
  misc_RNA (1)...(19): siRNA sense strand
gacaaggaccauagauuug

SEQ ID NO: 659033 - RNA, 19 nt, Homo sapiens
  misc_RNA (1)...(19): siRNA sense strand
uaaaggcucagcagucaaa

SEQ ID NO: 659034 - RNA, 19 nt, Homo sapiens
  misc_RNA (1)...(19): siRNA sense strand
ggagaaaugguagccuuaa

SEQ ID NO: 659035 - RNA, 19 nt, Homo sapiens
  misc_RNA (1)...(19): siRNA sense strand
gaugauguuuccacaauua

SEQ ID NO: 659036 - RNA, 19 nt, Homo sapiens
  misc_RNA (1)...(19): siRNA sense strand
gcaauaucgucgaaaguua

SEQ ID NO: 659037 - RNA, 19 nt, Homo sapiens
  misc_RNA (1)...(19): siRNA sense strand
gcagaaagaugugcuacua

SEQ ID NO: 659038 - RNA, 19 nt, Homo sapiens
  misc_RNA (1)...(19): siRNA sense strand
gcaagauugucaugaguua

SEQ ID NO: 659039 - RNA, 19 nt, Homo sapiens
  misc_RNA (1)...(19): siRNA sense strand
uaacuauggugguaacuua

SEQ ID NO: 659040 - RNA, 19 nt, Homo sapiens
  misc_RNA (1)...(19): siRNA sense strand
cagcaaagaugcacaacua

SEQ ID NO: 659041 - RNA, 19 nt, Homo sapiens
  misc_RNA (1)...(19): siRNA sense strand
gcugauagcuuacgaggaa

SEQ ID NO: 659042 - RNA, 19 nt, Homo sapiens
  misc_RNA (1)...(19): siRNA sense strand
ggagcaacauguagcuuua

SEQ ID NO: 659043 - RNA, 19 nt, Homo sapiens
  misc_RNA (1)...(19): siRNA sense strand
gauauucagucuuuggaua

SEQ ID NO: 659044 - RNA, 19 nt, Homo sapiens
  misc_RNA (1)...(19): siRNA sense strand
uaaagacacuggagaaaug

SEQ ID NO: 659045 - RNA, 19 nt, Homo sapiens
  misc_RNA (1)...(19): siRNA sense strand
gaagaaagucggccguaua

SEQ ID NO: 659046 - RNA, 19 nt, Homo sapiens
  misc_RNA (1)...(19): siRNA sense strand
gaaagucggccguauacua

SEQ ID NO: 659047 - RNA, 19 nt, Homo sapiens
  misc_RNA (1)...(19): siRNA sense strand
caagaaagcagucauaguu

SEQ ID NO: 659048 - RNA, 19 nt, Homo sapiens
  misc_RNA (1)...(19): siRNA sense strand
ggacaaaggugcauuuuau

SEQ ID NO: 659049 - RNA, 19 nt, Homo sapiens
  misc_RNA (1)...(19): siRNA sense strand
gcaaagaugcacaacuaua

SEQ ID NO: 659050 - RNA, 19 nt, Homo sapiens
  misc_RNA (1)...(19): siRNA sense strand
gcgcuagacuuauuugauu

SEQ ID NO: 659051 - RNA, 19 nt, Homo sapiens
  misc_RNA (1)...(19): siRNA sense strand
uaacgaagguggaaaauaa

SEQ ID NO: 659052 - RNA, 19 nt, Homo sapiens
  misc_RNA (1)...(19): siRNA sense strand
ccaaggaccuggauauuca

SEQ ID NO: 659053 - RNA, 19 nt, Homo sapiens
  misc_RNA (1)...(19): siRNA sense strand
caaagaugcacaacuauaa

SEQ ID NO: 659054 - RNA, 19 nt, Homo sapiens
  misc_RNA (1)...(19): siRNA sense strand
ggacagaccuggacuucuc

SEQ ID NO: 659055 - RNA, 19 nt, Homo sapiens
  misc_RNA (1)...(19): siRNA sense strand
gggcaugacugaugauguu

SEQ ID NO: 659056 - RNA, 19 nt, Homo sapiens
  misc_RNA (1)...(19): siRNA sense strand
ugaggaagaucuagauuau

SEQ ID NO: 659057 - RNA, 19 nt, Homo sapiens
  misc_RNA (1)...(19): siRNA sense strand
gagaaggugggauugauua

SEQ ID NO: 659058 - RNA, 19 nt, Homo sapiens
  misc_RNA (1)...(19): siRNA sense strand
gagaaaugguagccuuaaa

SEQ ID NO: 659059 - RNA, 19 nt, Homo sapiens
  misc_RNA (1)...(19): siRNA sense strand
gauaucaucggaauuauug

SEQ ID NO: 659060 - RNA, 19 nt, Homo sapiens
  misc_RNA (1)...(19): siRNA sense strand
ggaaauagugacugauaaa

SEQ ID NO: 659061 - RNA, 19 nt, Homo sapiens
  misc_RNA (1)...(19): siRNA sense strand
gaaucaggcuugguucauu

SEQ ID NO: 659062 - RNA, 19 nt, Homo sapiens
  misc_RNA (1)...(19): siRNA sense strand
gagaguaaaucugcugcua

SEQ ID NO: 659063 - RNA, 19 nt, Homo sapiens
  misc_RNA (1)...(19): siRNA sense strand
gaauucagccuucuucuca

SEQ ID NO: 659064 - RNA, 19 nt, Homo sapiens
  misc_RNA (1)...(19): siRNA sense strand
caccagaucucccuuuaug

SEQ ID NO: 659065 - RNA, 19 nt, Homo sapiens
  misc_RNA (1)...(19): siRNA sense strand
gaagcaauaucgucgaaag

SEQ ID NO: 659066 - RNA, 19 nt, Homo sapiens
  misc_RNA (1)...(19): siRNA sense strand
gaagauaaagaagcugaua

SEQ ID NO: 659067 - RNA, 19 nt, Homo sapiens
  misc_RNA (1)...(19): siRNA sense strand
ggagaaggagcaacaugua

SEQ ID NO: 659068 - RNA, 19 nt, Homo sapiens
  misc_RNA (1)...(19): siRNA sense strand
gaauauagccaugguccua

SEQ ID NO: 659069 - RNA, 19 nt, Homo sapiens
  misc_RNA (1)...(19): siRNA sense strand
ugaaggaaauagugacuga

SEQ ID NO: 659070 - RNA, 19 nt, Homo sapiens
  misc_RNA (1)...(19): siRNA sense strand
gaaaacaacaacacaguua

SEQ ID NO: 659071 - RNA, 19 nt, Homo sapiens
  misc_RNA (1)...(19): siRNA sense strand
guaaaucugcugcuacaaa

SEQ ID NO: 659072 - RNA, 19 nt, Homo sapiens
  misc_RNA (1)...(19): siRNA sense strand
gauaaaacuugcagacuuu

SEQ ID NO: 659073 - RNA, 19 nt, Homo sapiens
  misc_RNA (1)...(19): siRNA sense strand
gaugucuucuugcugauuu

SEQ ID NO: 659074 - RNA, 19 nt, Homo sapiens
  misc_RNA (1)...(19): siRNA sense strand
caccaccaguucuucauua

SEQ ID NO: 659075 - RNA, 19 nt, Homo sapiens
  misc_RNA (1)...(19): siRNA sense strand
agaaagaugugcuacuaga

SEQ ID NO: 659076 - RNA, 19 nt, Homo sapiens
  misc_RNA (1)...(19): siRNA sense strand
cagcugcgcuagacuuauu

SEQ ID NO: 659077 - RNA, 19 nt, Homo sapiens
  misc_RNA (1)...(19): siRNA sense strand
cagcugaauugaacaagaa

SEQ ID NO: 659078 - RNA, 19 nt, Homo sapiens
  misc_RNA (1)...(19): siRNA sense strand
agacaaggaccauagauuu

SEQ ID NO: 659079 - RNA, 19 nt, Homo sapiens
  misc_RNA (1)...(19): siRNA sense strand
gaagaugcuuuggauuuca

SEQ ID NO: 659080 - RNA, 19 nt, Homo sapiens
  misc_RNA (1)...(19): siRNA sense strand
aaacuccgaugucuucuug

SEQ ID NO: 659081 - RNA, 19 nt, Homo sapiens
  misc_RNA (1)...(19): siRNA sense strand
gaguaaaucugcugcuaca

SEQ ID NO: 659082 - RNA, 19 nt, Homo sapiens
  misc_RNA (1)...(19): siRNA sense strand
aaacaaaccaugugaagga

SEQ ID NO: 659083 - RNA, 19 nt, Homo sapiens
  misc_RNA (1)...(19): siRNA sense strand
guauggagcuguggcugua

SEQ ID NO: 659084 - RNA, 19 nt, Homo sapiens
  misc_RNA (1)...(19): siRNA sense strand
gaaggacaaaggugcauuu

SEQ ID NO: 659085 - RNA, 19 nt, Homo sapiens
  misc_RNA (1)...(19): siRNA sense strand
acaacacaguuacauagua

SEQ ID NO: 659086 - RNA, 19 nt, Homo sapiens
  misc_RNA (1)...(19): siRNA sense strand
ucaaacacuucuacaccua

SEQ ID NO: 659087 - RNA, 19 nt, Homo sapiens
  misc_RNA (1)...(19): siRNA sense strand
gcacaacuauaacuauggu

SEQ ID NO: 659088 - RNA, 19 nt, Homo sapiens
  misc_RNA (1)...(19): siRNA sense strand
caacaacacaguuacauag

SEQ ID NO: 659089 - RNA, 19 nt, Homo sapiens
  misc_RNA (1)...(19): siRNA sense strand
ggaaucaguaucucuuaaa

SEQ ID NO: 659090 - RNA, 19 nt, Homo sapiens
  misc_RNA (1)...(19): siRNA sense strand
gcagcugaauugaacaaga

SEQ ID NO: 659091 - RNA, 19 nt, Homo sapiens
  misc_RNA (1)...(19): siRNA sense strand
ggucuggauuauugucaua

SEQ ID NO: 659092 - RNA, 19 nt, Homo sapiens
  misc_RNA (1)...(19): siRNA sense strand
ggaaaacucugcguggaua

SEQ ID NO: 659093 - RNA, 19 nt, Homo sapiens
  misc_RNA (1)...(19): siRNA sense strand
gcaaggaccgggacucgaa

SEQ ID NO: 659094 - RNA, 19 nt, Homo sapiens
  misc_RNA (1)...(19): siRNA sense strand
gaaucaguaucucuuaaag

SEQ ID NO: 659095 - RNA, 19 nt, Homo sapiens
  misc_RNA (1)...(19): siRNA sense strand
ugucaugaguuauggagua

SEQ ID NO: 659096 - RNA, 19 nt, Homo sapiens
  misc_RNA (1)...(19): siRNA sense strand
ggacuugcucgauuguaua

SEQ ID NO: 659097 - RNA, 19 nt, Homo sapiens
  misc_RNA (1)...(19): siRNA sense strand
aauaauagagggcagauaa

SEQ ID NO: 659098 - RNA, 19 nt, Homo sapiens
  misc_RNA (1)...(19): siRNA sense strand
aaacaaagccaccucuuca

SEQ ID NO: 659099 - RNA, 19 nt, Homo sapiens
  misc_RNA (1)...(19): siRNA sense strand
caacaggagucuucgaaac

SEQ ID NO: 659100 - RNA, 19 nt, Homo sapiens
  misc_RNA (1)...(19): siRNA sense strand
gaagaagacagaagcagau

SEQ ID NO: 659101 - RNA, 19 nt, Homo sapiens
  misc_RNA (1)...(19): siRNA sense strand
ucaggaacuugcacaacua

SEQ ID NO: 659102 - RNA, 19 nt, Homo sapiens
  misc_RNA (1)...(19): siRNA sense strand
uggagggucuggauuauug

SEQ ID NO: 659103 - RNA, 19 nt, Homo sapiens
  misc_RNA (1)...(19): siRNA sense strand
ggauaaagacacuggagaa

SEQ ID NO: 659104 - RNA, 19 nt, Homo sapiens
  misc_RNA (1)...(19): siRNA sense strand
caaaccaugugaaggaugu

SEQ ID NO: 659105 - RNA, 19 nt, Homo sapiens
  misc_RNA (1)...(19): siRNA sense strand
aagaagaugcuuuggauuu

SEQ ID NO: 659106 - RNA, 19 nt, Homo sapiens
  misc_RNA (1)...(19): siRNA sense strand
gaagucgucauucuaguau

SEQ ID NO: 659107 - RNA, 19 nt, Homo sapiens
  misc_RNA (1)...(19): siRNA sense strand
gaaccagaccggccucgaa

SEQ ID NO: 659108 - RNA, 19 nt, Homo sapiens
  misc_RNA (1)...(19): siRNA sense strand
gaaagaugugcuacuagaa

SEQ ID NO: 659109 - RNA, 19 nt, Homo sapiens
  misc_RNA (1)...(19): siRNA sense strand
gcaguucuguugacucagu

SEQ ID NO: 659110 - RNA, 19 nt, Homo sapiens
  misc_RNA (1)...(19): siRNA sense strand
caagguaauuacuuuaugg

SEQ ID NO: 659111 - RNA, 19 nt, Homo sapiens
  misc_RNA (1)...(19): siRNA sense strand
gcagaagcccguauucauc

SEQ ID NO: 659112 - RNA, 19 nt, Homo sapiens
  misc_RNA (1)...(19): siRNA sense strand
gaggaaucaguaucucuua

SEQ ID NO: 659113 - RNA, 19 nt, Homo sapiens
  misc_RNA (1)...(19): siRNA sense strand
caaggaccauagauuugaa

SEQ ID NO: 659114 - RNA, 19 nt, Homo sapiens
  misc_RNA (1)...(19): siRNA sense strand
gaaaauggaucgggacaug

SEQ ID NO: 659115 - RNA, 19 nt, Homo sapiens
  misc_RNA (1)...(19): siRNA sense strand
ucuguugacucaguuaaua

SEQ ID NO: 659116 - RNA, 19 nt, Homo sapiens
  misc_RNA (1)...(19): siRNA sense strand
gaacuugcacaacuagaau

SEQ ID NO: 659117 - RNA, 19 nt, Homo sapiens
  misc_RNA (1)...(19): siRNA sense strand
gagaaaaccaaaccacuua

SEQ ID NO: 659118 - RNA, 19 nt, Homo sapiens
  misc_RNA (1)...(19): siRNA sense strand
uaaaucugcugcuacaaag

SEQ ID NO: 659119 - RNA, 19 nt, Homo sapiens
  misc_RNA (1)...(19): siRNA sense strand
gcagaggguuaccauacug

SEQ ID NO: 659120 - RNA, 19 nt, Homo sapiens
  misc_RNA (1)...(19): siRNA sense strand
ggacauauuagcacaucaa

SEQ ID NO: 659121 - RNA, 19 nt, Homo sapiens
  misc_RNA (1)...(19): siRNA sense strand
gagacaaggaccauagauu

SEQ ID NO: 659122 - RNA, 19 nt, Homo sapiens
  misc_RNA (1)...(19): siRNA sense strand
gaagcgucauuacaacuca

SEQ ID NO: 659123 - RNA, 19 nt, Homo sapiens
  misc_RNA (1)...(19): siRNA sense strand
caauaucgucgaaaguuaa

SEQ ID NO: 659124 - RNA, 19 nt, Homo sapiens
  misc_RNA (1)...(19): siRNA sense strand
uuaauaagccgaauaugug

SEQ ID NO: 659125 - RNA, 19 nt, Homo sapiens
  misc_RNA (1)...(19): siRNA sense strand
ggaacuugcacaacuagaa

SEQ ID NO: 659126 - RNA, 19 nt, Homo sapiens
  misc_RNA (1)...(19): siRNA sense strand
aaagucggccguauacuaa

SEQ ID NO: 659127 - RNA, 19 nt, Homo sapiens
  misc_RNA (1)...(19): siRNA sense strand
guuccaauauccuucuaaa

SEQ ID NO: 659128 - RNA, 19 nt, Homo sapiens
  misc_RNA (1)...(19): siRNA sense strand
aaucaggcuugguucauuu

SEQ ID NO: 659129 - RNA, 19 nt, Homo sapiens
  misc_RNA (1)...(19): siRNA sense strand
gauaaagacacuggagaaa

SEQ ID NO: 659130 - RNA, 19 nt, Homo sapiens
  misc_RNA (1)...(19): siRNA sense strand
caacauguagcuuuaguca

SEQ ID NO: 659131 - RNA, 19 nt, Homo sapiens
  misc_RNA (1)...(19): siRNA sense strand
ggaccuggauauucacaag

SEQ ID NO: 659132 - RNA, 19 nt, Homo sapiens
  misc_RNA (1)...(19): siRNA sense strand
gacaaggaccauagauuug

SEQ ID NO: 659133 - RNA, 19 nt, Homo sapiens
  misc_RNA (1)...(19): siRNA sense strand
uaaaggcucagcagucaaa

SEQ ID NO: 659134 - RNA, 19 nt, Homo sapiens
  misc_RNA (1)...(19): siRNA sense strand
ggagaaaugguagccuuaa

SEQ ID NO: 659135 - RNA, 19 nt, Homo sapiens
  misc_RNA (1)...(19): siRNA sense strand
caagaaagcaggaaaguca

SEQ ID NO: 659136 - RNA, 19 nt, Homo sapiens
  misc_RNA (1)...(19): siRNA sense strand
ugacugagacgaucauguu

SEQ ID NO: 659137 - RNA, 19 nt, Homo sapiens
  misc_RNA (1)...(19): siRNA sense strand
cggaaacgguccaggcuau

SEQ ID NO: 659138 - RNA, 19 nt, Homo sapiens
  misc_RNA (1)...(19): siRNA sense strand
ccuacacgguccuccuaua

SEQ ID NO: 659139 - RNA, 19 nt, Homo sapiens
  misc_RNA (1)...(19): siRNA sense strand
gccaagaaccucaucaucu

SEQ ID NO: 659140 - RNA, 19 nt, Homo sapiens
  misc_RNA (1)...(19): siRNA sense strand
gcacagacagccgccaaga

SEQ ID NO: 659141 - RNA, 19 nt, Homo sapiens
  misc_RNA (1)...(19): siRNA sense strand
gcaggagcagaccuucaua

SEQ ID NO: 659142 - RNA, 19 nt, Homo sapiens
  misc_RNA (1)...(19): siRNA sense strand
gcagaagaaggacaaacug

SEQ ID NO: 659143 - RNA, 19 nt, Homo sapiens
  misc_RNA (1)...(19): siRNA sense strand
gaaacgguccaggcuaugu

SEQ ID NO: 659144 - RNA, 19 nt, Homo sapiens
  misc_RNA (1)...(19): siRNA sense strand
caggcuaugugcucaagga

SEQ ID NO: 659145 - RNA, 19 nt, Homo sapiens
  misc_RNA (1)...(19): siRNA sense strand
cuucauagcgcacgucaug

SEQ ID NO: 659146 - RNA, 19 nt, Homo sapiens
  misc_RNA (1)...(19): siRNA sense strand
cuggagacaugaaauacga

SEQ ID NO: 659147 - RNA, 19 nt, Homo sapiens
  misc_RNA (1)...(19): siRNA sense strand
ggucaucuccguggugaau

SEQ ID NO: 659148 - RNA, 19 nt, Homo sapiens
  misc_RNA (1)...(19): siRNA sense strand
uaaaagggcagaagaagga

SEQ ID NO: 659149 - RNA, 19 nt, Homo sapiens
  misc_RNA (1)...(19): siRNA sense strand
gcacugacugagacgauca

SEQ ID NO: 659150 - RNA, 19 nt, Homo sapiens
  misc_RNA (1)...(19): siRNA sense strand
agaaucuggugcaggaaug

SEQ ID NO: 659151 - RNA, 19 nt, Homo sapiens
  misc_RNA (1)...(19): siRNA sense strand
cgaccacucccacgucuuc

SEQ ID NO: 659152 - RNA, 19 nt, Homo sapiens
  misc_RNA (1)...(19): siRNA sense strand
aaagucagugggaguggua

SEQ ID NO: 659153 - RNA, 19 nt, Homo sapiens
  misc_RNA (1)...(19): siRNA sense strand
gguggaggccgaaaguaca

SEQ ID NO: 659154 - RNA, 19 nt, Homo sapiens
  misc_RNA (1)...(19): siRNA sense strand
gcgagggagcuccaucuuc

SEQ ID NO: 659155 - RNA, 19 nt, Homo sapiens
  misc_RNA (1)...(19): siRNA sense strand
cauguucgacgacgccauu

SEQ ID NO: 659156 - RNA, 19 nt, Homo sapiens
  misc_RNA (1)...(19): siRNA sense strand
gacccugaguacccagaug

SEQ ID NO: 659157 - RNA, 19 nt, Homo sapiens
  misc_RNA (1)...(19): siRNA sense strand
ccagaccauuggcuugagu

SEQ ID NO: 659158 - RNA, 19 nt, Homo sapiens
  misc_RNA (1)...(19): siRNA sense strand
cugaguacccagaugacua

SEQ ID NO: 659159 - RNA, 19 nt, Homo sapiens
  misc_RNA (1)...(19): siRNA sense strand
ggaaacgguccaggcuaug

SEQ ID NO: 659160 - RNA, 19 nt, Homo sapiens
  misc_RNA (1)...(19): siRNA sense strand
cugagacgaucauguucga

SEQ ID NO: 659161 - RNA, 19 nt, Homo sapiens
  misc_RNA (1)...(19): siRNA sense strand
gggccaagaaagcaggaaa

SEQ ID NO: 659162 - RNA, 19 nt, Homo sapiens
  misc_RNA (1)...(19): siRNA sense strand
ggccuacacgguccuccua

SEQ ID NO: 659163 - RNA, 19 nt, Homo sapiens
  misc_RNA (1)...(19): siRNA sense strand
agacaugaaauacgagauc

SEQ ID NO: 659164 - RNA, 19 nt, Homo sapiens
  misc_RNA (1)...(19): siRNA sense strand
gcagcucaucuccaacaug

SEQ ID NO: 659165 - RNA, 19 nt, Homo sapiens
  misc_RNA (1)...(19): siRNA sense strand
ggcagaagaaggacaaacu

SEQ ID NO: 659166 - RNA, 19 nt, Homo sapiens
  misc_RNA (1)...(19): siRNA sense strand
ggaggagaacccggacuuc

SEQ ID NO: 659167 - RNA, 19 nt, Homo sapiens
  misc_RNA (1)...(19): siRNA sense strand
acagacagccgccaagaac

SEQ ID NO: 659168 - RNA, 19 nt, Homo sapiens
  misc_RNA (1)...(19): siRNA sense strand
agaccuuccuggccaugga

SEQ ID NO: 659169 - RNA, 19 nt, Homo sapiens
  misc_RNA (1)...(19): siRNA sense strand
gaacauauauggagacaaa

SEQ ID NO: 659170 - RNA, 19 nt, Homo sapiens
  misc_RNA (1)...(19): siRNA sense strand
gagcagagcuguagagaaa

SEQ ID NO: 659171 - RNA, 19 nt, Homo sapiens
  misc_RNA (1)...(19): siRNA sense strand
gaacagugcucuucaggua

SEQ ID NO: 659172 - RNA, 19 nt, Homo sapiens
  misc_RNA (1)...(19): siRNA sense strand
ggaagcagauguuucuuua

SEQ ID NO: 659173 - RNA, 19 nt, Homo sapiens
  misc_RNA (1)...(19): siRNA sense strand
gaacuuaccagcccaauuu

SEQ ID NO: 659174 - RNA, 19 nt, Homo sapiens
  misc_RNA (1)...(19): siRNA sense strand
caaagcaguuguucacuua

SEQ ID NO: 659175 - RNA, 19 nt, Homo sapiens
  misc_RNA (1)...(19): siRNA sense strand
ggaguuaacuuuggagaua

SEQ ID NO: 659176 - RNA, 19 nt, Homo sapiens
  misc_RNA (1)...(19): siRNA sense strand
gaaaugaucuccucaaagg

SEQ ID NO: 659177 - RNA, 19 nt, Homo sapiens
  misc_RNA (1)...(19): siRNA sense strand
gagguagaaucaagaauua

SEQ ID NO: 659178 - RNA, 19 nt, Homo sapiens
  misc_RNA (1)...(19): siRNA sense strand
gaagaauccugcuuaaaug

SEQ ID NO: 659179 - RNA, 19 nt, Homo sapiens
  misc_RNA (1)...(19): siRNA sense strand
uaaggaagauggagaaauu

SEQ ID NO: 659180 - RNA, 19 nt, Homo sapiens
  misc_RNA (1)...(19): siRNA sense strand
gaagaaguguagagcauuu

SEQ ID NO: 659181 - RNA, 19 nt, Homo sapiens
  misc_RNA (1)...(19): siRNA sense strand
gaauagugcuucaugugua

SEQ ID NO: 659182 - RNA, 19 nt, Homo sapiens
  misc_RNA (1)...(19): siRNA sense strand
gaucaacuguuaauacuga

SEQ ID NO: 659183 - RNA, 19 nt, Homo sapiens
  misc_RNA (1)...(19): siRNA sense strand
gaucagaacauaccacaua

SEQ ID NO: 659184 - RNA, 19 nt, Homo sapiens
  misc_RNA (1)...(19): siRNA sense strand
gaacauaccacauaaagau

SEQ ID NO: 659185 - RNA, 19 nt, Homo sapiens
  misc_RNA (1)...(19): siRNA sense strand
gaagacaguuccaaacaug

SEQ ID NO: 659186 - RNA, 19 nt, Homo sapiens
  misc_RNA (1)...(19): siRNA sense strand
caaagaaacuagacaaaca

SEQ ID NO: 659187 - RNA, 19 nt, Homo sapiens
  misc_RNA (1)...(19): siRNA sense strand
caagagaacuguugguaga

SEQ ID NO: 659188 - RNA, 19 nt, Homo sapiens
  misc_RNA (1)...(19): siRNA sense strand
gcagagaauucuuacugua

SEQ ID NO: 659189 - RNA, 19 nt, Homo sapiens
  misc_RNA (1)...(19): siRNA sense strand
aaagaaaccuggaaguaaa

SEQ ID NO: 659190 - RNA, 19 nt, Homo sapiens
  misc_RNA (1)...(19): siRNA sense strand
aaagauaacucaacagaug

SEQ ID NO: 659191 - RNA, 19 nt, Homo sapiens
  misc_RNA (1)...(19): siRNA sense strand
uaaaugaucucuaccaaca

SEQ ID NO: 659192 - RNA, 19 nt, Homo sapiens
  misc_RNA (1)...(19): siRNA sense strand
ccacauauauugacuuugu

SEQ ID NO: 659193 - RNA, 19 nt, Homo sapiens
  misc_RNA (1)...(19): siRNA sense strand
aaacaaaugucacugagaa

SEQ ID NO: 659194 - RNA, 19 nt, Homo sapiens
  misc_RNA (1)...(19): siRNA sense strand
gcagauguuucuuuacaaa

SEQ ID NO: 659195 - RNA, 19 nt, Homo sapiens
  misc_RNA (1)...(19): siRNA sense strand
aaagucagaucauccaaua

SEQ ID NO: 659196 - RNA, 19 nt, Homo sapiens
  misc_RNA (1)...(19): siRNA sense strand
gagaagaguucagauaaug

SEQ ID NO: 659197 - RNA, 19 nt, Homo sapiens
  misc_RNA (1)...(19): siRNA sense strand
gaaagacacugaggacaga

SEQ ID NO: 659198 - RNA, 19 nt, Homo sapiens
  misc_RNA (1)...(19): siRNA sense strand
gaaguaaaguggacagauc

SEQ ID NO: 659199 - RNA, 19 nt, Homo sapiens
  misc_RNA (1)...(19): siRNA sense strand
ucagaaacauguauuguga

SEQ ID NO: 659200 - RNA, 19 nt, Homo sapiens
  misc_RNA (1)...(19): siRNA sense strand
ucaaauaccugcuucuaau

SEQ ID NO: 659201 - RNA, 19 nt, Homo sapiens
  misc_RNA (1)...(19): siRNA sense strand
gaagaaaccugcgucauac

SEQ ID NO: 659202 - RNA, 19 nt, Homo sapiens
  misc_RNA (1)...(19): siRNA sense strand
guaauugccuccauacaga

SEQ ID NO: 659203 - RNA, 19 nt, Homo sapiens
  misc_RNA (1)...(19): siRNA sense strand
ccaauacugugcauacuuu

SEQ ID NO: 659204 - RNA, 19 nt, Homo sapiens
  misc_RNA (1)...(19): siRNA sense strand
guacaagucagucaguuua

SEQ ID NO: 659205 - RNA, 19 nt, Homo sapiens
  misc_RNA (1)...(19): siRNA sense strand
gcucauaugcuauucauuu

SEQ ID NO: 659206 - RNA, 19 nt, Homo sapiens
  misc_RNA (1)...(19): siRNA sense strand
caacuaacuugauugauuc

SEQ ID NO: 659207 - RNA, 19 nt, Homo sapiens
  misc_RNA (1)...(19): siRNA sense strand
gaaccagugucauuagaga

SEQ ID NO: 659208 - RNA, 19 nt, Homo sapiens
  misc_RNA (1)...(19): siRNA sense strand
gaaacuuguucuucugaaa

SEQ ID NO: 659209 - RNA, 19 nt, Homo sapiens
  misc_RNA (1)...(19): siRNA sense strand
aaacuucgcugaccuggaa

SEQ ID NO: 659210 - RNA, 19 nt, Homo sapiens
  misc_RNA (1)...(19): siRNA sense strand
caagagaacuucaagaacu

SEQ ID NO: 659211 - RNA, 19 nt, Homo sapiens
  misc_RNA (1)...(19): siRNA sense strand
ccauuuaccuguggaguua

SEQ ID NO: 659212 - RNA, 19 nt, Homo sapiens
  misc_RNA (1)...(19): siRNA sense strand
gacuuaccaugaucaauua

SEQ ID NO: 659213 - RNA, 19 nt, Homo sapiens
  misc_RNA (1)...(19): siRNA sense strand
caaaugucacugagaauua

SEQ ID NO: 659214 - RNA, 19 nt, Homo sapiens
  misc_RNA (1)...(19): siRNA sense strand
gauauauggcugaauguua

SEQ ID NO: 659215 - RNA, 19 nt, Homo sapiens
  misc_RNA (1)...(19): siRNA sense strand
ggauaaggaugaacuagau

SEQ ID NO: 659216 - RNA, 19 nt, Homo sapiens
  misc_RNA (1)...(19): siRNA sense strand
uaaugacgaucaccagaua

SEQ ID NO: 659217 - RNA, 19 nt, Homo sapiens
  misc_RNA (1)...(19): siRNA sense strand
guuaauugcucauaugcua

SEQ ID NO: 659218 - RNA, 19 nt, Homo sapiens
  misc_RNA (1)...(19): siRNA sense strand
ugaagaaaccugcgucaua

SEQ ID NO: 659219 - RNA, 19 nt, Homo sapiens
  misc_RNA (1)...(19): siRNA sense strand
ugucaaagcacaagucuua

SEQ ID NO: 659220 - RNA, 19 nt, Homo sapiens
  misc_RNA (1)...(19): siRNA sense strand
ucaagaacauccugaauca

SEQ ID NO: 659221 - RNA, 19 nt, Homo sapiens
  misc_RNA (1)...(19): siRNA sense strand
gaaaguaagcauugaugaa

SEQ ID NO: 659222 - RNA, 19 nt, Homo sapiens
  misc_RNA (1)...(19): siRNA sense strand
uaaugaaugugaagccaua

SEQ ID NO: 659223 - RNA, 19 nt, Homo sapiens
  misc_RNA (1)...(19): siRNA sense strand
gcaacugcauuauuagaga

SEQ ID NO: 659224 - RNA, 19 nt, Homo sapiens
  misc_RNA (1)...(19): siRNA sense strand
ugaagaaguccaaguauuu

SEQ ID NO: 659225 - RNA, 19 nt, Homo sapiens
  misc_RNA (1)...(19): siRNA sense strand
gcucugaagucucguauca

SEQ ID NO: 659226 - RNA, 19 nt, Homo sapiens
  misc_RNA (1)...(19): siRNA sense strand
gcauugaauuggaaaguga

SEQ ID NO: 659227 - RNA, 19 nt, Homo sapiens
  misc_RNA (1)...(19): siRNA sense strand
caccagauauaccaguuua

SEQ ID NO: 659228 - RNA, 19 nt, Homo sapiens
  misc_RNA (1)...(19): siRNA sense strand
gaccaucuguggauuauca

SEQ ID NO: 659229 - RNA, 19 nt, Homo sapiens
  misc_RNA (1)...(19): siRNA sense strand
gcacaagucuuauaaaaca

SEQ ID NO: 659230 - RNA, 19 nt, Homo sapiens
  misc_RNA (1)...(19): siRNA sense strand
gggaaaagcugugauaaaa

SEQ ID NO: 659231 - RNA, 19 nt, Homo sapiens
  misc_RNA (1)...(19): siRNA sense strand
ugacagaguuagaauacaa

SEQ ID NO: 659232 - RNA, 19 nt, Homo sapiens
  misc_RNA (1)...(19): siRNA sense strand
guacagaucacuuagaaau

SEQ ID NO: 659233 - RNA, 19 nt, Homo sapiens
  misc_RNA (1)...(19): siRNA sense strand
caagucagucaguuuauua

SEQ ID NO: 659234 - RNA, 19 nt, Homo sapiens
  misc_RNA (1)...(19): siRNA sense strand
ggagguagaaucaagaauu

SEQ ID NO: 659235 - RNA, 19 nt, Homo sapiens
  misc_RNA (1)...(19): siRNA sense strand
aaacaugcuuugugaagaa

SEQ ID NO: 659236 - RNA, 19 nt, Homo sapiens
  misc_RNA (1)...(19): siRNA sense strand
ucagagagacuauaaagaa

SEQ ID NO: 659237 - RNA, 19 nt, Homo sapiens
  misc_RNA (1)...(19): siRNA sense strand
cauauaacccuuaauguga

SEQ ID NO: 659238 - RNA, 19 nt, Homo sapiens
  misc_RNA (1)...(19): siRNA sense strand
caacagcagucuaauuucu

SEQ ID NO: 659239 - RNA, 19 nt, Homo sapiens
  misc_RNA (1)...(19): siRNA sense strand
uguaagcaauccaaguuua

SEQ ID NO: 659240 - RNA, 19 nt, Homo sapiens
  misc_RNA (1)...(19): siRNA sense strand
caaagcacaagucuuauaa

SEQ ID NO: 659241 - RNA, 19 nt, Homo sapiens
  misc_RNA (1)...(19): siRNA sense strand
cacaaucuguucuguaauu

SEQ ID NO: 659242 - RNA, 19 nt, Homo sapiens
  misc_RNA (1)...(19): siRNA sense strand
aaagcaaacuucauggaaa

SEQ ID NO: 659243 - RNA, 19 nt, Homo sapiens
  misc_RNA (1)...(19): siRNA sense strand
acugaaggaucaacuguua

SEQ ID NO: 659244 - RNA, 19 nt, Homo sapiens
  misc_RNA (1)...(19): siRNA sense strand
uaaaguaggagaagaaaga

SEQ ID NO: 659245 - RNA, 19 nt, Homo sapiens
  misc_RNA (1)...(19): siRNA sense strand
gcuuauaacuaaaguagga

SEQ ID NO: 659246 - RNA, 19 nt, Homo sapiens
  misc_RNA (1)...(19): siRNA sense strand
cuaaauauccuaagugaug

SEQ ID NO: 659247 - RNA, 19 nt, Homo sapiens
  misc_RNA (1)...(19): siRNA sense strand
aaaggaagcuacauauauc

SEQ ID NO: 659248 - RNA, 19 nt, Homo sapiens
  misc_RNA (1)...(19): siRNA sense strand
gaaggucuguuagcacuug

SEQ ID NO: 659249 - RNA, 19 nt, Homo sapiens
  misc_RNA (1)...(19): siRNA sense strand
agaaacagcucaugacagu

SEQ ID NO: 659250 - RNA, 19 nt, Homo sapiens
  misc_RNA (1)...(19): siRNA sense strand
gcaaauuacuccaaguuuu

SEQ ID NO: 659251 - RNA, 19 nt, Homo sapiens
  misc_RNA (1)...(19): siRNA sense strand
ggaaaguugugaccuucaa

SEQ ID NO: 659252 - RNA, 19 nt, Homo sapiens
  misc_RNA (1)...(19): siRNA sense strand
gaauagugaucagcauuau

SEQ ID NO: 659253 - RNA, 19 nt, Homo sapiens
  misc_RNA (1)...(19): siRNA sense strand
cagagagacuauaaagaaa

SEQ ID NO: 659254 - RNA, 19 nt, Homo sapiens
  misc_RNA (1)...(19): siRNA sense strand
gcucaugacaguucaaauu

SEQ ID NO: 659255 - RNA, 19 nt, Homo sapiens
  misc_RNA (1)...(19): siRNA sense strand
gcauauaacccuuaaugug

SEQ ID NO: 659256 - RNA, 19 nt, Homo sapiens
  misc_RNA (1)...(19): siRNA sense strand
gaaaagaaaugugaacuuc

SEQ ID NO: 659257 - RNA, 19 nt, Homo sapiens
  misc_RNA (1)...(19): siRNA sense strand
gagauguacagaucacuua

SEQ ID NO: 659258 - RNA, 19 nt, Homo sapiens
  misc_RNA (1)...(19): siRNA sense strand
ucagaagaauccugcuuaa

SEQ ID NO: 659259 - RNA, 19 nt, Homo sapiens
  misc_RNA (1)...(19): siRNA sense strand
gaaagggcccauuaccaaa

SEQ ID NO: 659260 - RNA, 19 nt, Homo sapiens
  misc_RNA (1)...(19): siRNA sense strand
caacaggaguccgguaaug

SEQ ID NO: 659261 - RNA, 19 nt, Homo sapiens
  misc_RNA (1)...(19): siRNA sense strand
agacuuaacuguuucaucu

SEQ ID NO: 659262 - RNA, 19 nt, Homo sapiens
  misc_RNA (1)...(19): siRNA sense strand
uaaugaagcuguuaauugc

SEQ ID NO: 659263 - RNA, 19 nt, Homo sapiens
  misc_RNA (1)...(19): siRNA sense strand
gcuacaagauaauaacaug

SEQ ID NO: 659264 - RNA, 19 nt, Homo sapiens
  misc_RNA (1)...(19): siRNA sense strand
ugaggaggauacuauaauu

SEQ ID NO: 659265 - RNA, 19 nt, Homo sapiens
  misc_RNA (1)...(19): siRNA sense strand
guacaguauuccucaggua

SEQ ID NO: 659266 - RNA, 19 nt, Homo sapiens
  misc_RNA (1)...(19): siRNA sense strand
agaaagaaagggcccauua

SEQ ID NO: 659267 - RNA, 19 nt, Homo sapiens
  misc_RNA (1)...(19): siRNA sense strand
gaacaacagcaagauacua

SEQ ID NO: 659268 - RNA, 19 nt, Homo sapiens
  misc_RNA (1)...(19): siRNA sense strand
acaaauacaugaaggauac

SEQ ID NO: 659269 - RNA, 19 nt, Homo sapiens
  misc_RNA (1)...(19): siRNA sense strand
gaacacagaugaacaauuu

SEQ ID NO: 659270 - RNA, 19 nt, Homo sapiens
  misc_RNA (1)...(19): siRNA sense strand
caaaggaacugaaagagaa

SEQ ID NO: 659271 - RNA, 19 nt, Homo sapiens
  misc_RNA (1)...(19): siRNA sense strand
uaaggaagcuucaugcaaa

SEQ ID NO: 659272 - RNA, 19 nt, Homo sapiens
  misc_RNA (1)...(19): siRNA sense strand
ugaaagaaauggcaaagaa

SEQ ID NO: 659273 - RNA, 19 nt, Homo sapiens
  misc_RNA (1)...(19): siRNA sense strand
gaugauaggcugaggaaua

SEQ ID NO: 659274 - RNA, 19 nt, Homo sapiens
  misc_RNA (1)...(19): siRNA sense strand
gaagaggacuuugaaggaa

SEQ ID NO: 659275 - RNA, 19 nt, Homo sapiens
  misc_RNA (1)...(19): siRNA sense strand
ccagguagaugaacugaaa

SEQ ID NO: 659276 - RNA, 19 nt, Homo sapiens
  misc_RNA (1)...(19): siRNA sense strand
gaagauaguaguaugcuuu

SEQ ID NO: 659277 - RNA, 19 nt, Homo sapiens
  misc_RNA (1)...(19): siRNA sense strand
gaaacaagcaggauccaaa

SEQ ID NO: 659278 - RNA, 19 nt, Homo sapiens
  misc_RNA (1)...(19): siRNA sense strand
gcacuuagaagaacaagaa

SEQ ID NO: 659279 - RNA, 19 nt, Homo sapiens
  misc_RNA (1)...(19): siRNA sense strand
gaaggagccugccuaaagu

SEQ ID NO: 659280 - RNA, 19 nt, Homo sapiens
  misc_RNA (1)...(19): siRNA sense strand
uuagauggcucaguuguua

SEQ ID NO: 659281 - RNA, 19 nt, Homo sapiens
  misc_RNA (1)...(19): siRNA sense strand
gaaacuggauucucuccuu

SEQ ID NO: 659282 - RNA, 19 nt, Homo sapiens
  misc_RNA (1)...(19): siRNA sense strand
uauaaagacugccuugaaa

SEQ ID NO: 659283 - RNA, 19 nt, Homo sapiens
  misc_RNA (1)...(19): siRNA sense strand
uaaagaugauggaaaggua

SEQ ID NO: 659284 - RNA, 19 nt, Homo sapiens
  misc_RNA (1)...(19): siRNA sense strand
aagaagagcuggauaagau

SEQ ID NO: 659285 - RNA, 19 nt, Homo sapiens
  misc_RNA (1)...(19): siRNA sense strand
cagaggaaauggcaaguuu

SEQ ID NO: 659286 - RNA, 19 nt, Homo sapiens
  misc_RNA (1)...(19): siRNA sense strand
ggaacuaugugaaagugaa

SEQ ID NO: 659287 - RNA, 19 nt, Homo sapiens
  misc_RNA (1)...(19): siRNA sense strand
gaaauucguugauguucug

SEQ ID NO: 659288 - RNA, 19 nt, Homo sapiens
  misc_RNA (1)...(19): siRNA sense strand
caagagaguuuacaaaugc

SEQ ID NO: 659289 - RNA, 19 nt, Homo sapiens
  misc_RNA (1)...(19): siRNA sense strand
ggcaaucaguggauccuua

SEQ ID NO: 659290 - RNA, 19 nt, Homo sapiens
  misc_RNA (1)...(19): siRNA sense strand
gaaagaaauggcaaagaaa

SEQ ID NO: 659291 - RNA, 19 nt, Homo sapiens
  misc_RNA (1)...(19): siRNA sense strand
gggcuuagauggcucaguu

SEQ ID NO: 659292 - RNA, 19 nt, Homo sapiens
  misc_RNA (1)...(19): siRNA sense strand
gagaaagacauaucauuga

SEQ ID NO: 659293 - RNA, 19 nt, Homo sapiens
  misc_RNA (1)...(19): siRNA sense strand
cuaccaagauuuccaagaa

SEQ ID NO: 659294 - RNA, 19 nt, Homo sapiens
  misc_RNA (1)...(19): siRNA sense strand
gaaaucagaggguguucua

SEQ ID NO: 659295 - RNA, 19 nt, Homo sapiens
  misc_RNA (1)...(19): siRNA sense strand
gaaggcagccacagugaaa

SEQ ID NO: 659296 - RNA, 19 nt, Homo sapiens
  misc_RNA (1)...(19): siRNA sense strand
ggagacaaauaucaaagau

SEQ ID NO: 659297 - RNA, 19 nt, Homo sapiens
  misc_RNA (1)...(19): siRNA sense strand
aaacuggauucucuccuua

SEQ ID NO: 659298 - RNA, 19 nt, Homo sapiens
  misc_RNA (1)...(19): siRNA sense strand
aggaguaucucaucaguaa

SEQ ID NO: 659299 - RNA, 19 nt, Homo sapiens
  misc_RNA (1)...(19): siRNA sense strand
caccaaggguucacucuuu

SEQ ID NO: 659300 - RNA, 19 nt, Homo sapiens
  misc_RNA (1)...(19): siRNA sense strand
gaaagagaaagacauauca

SEQ ID NO: 659301 - RNA, 19 nt, Homo sapiens
  misc_RNA (1)...(19): siRNA sense strand
gcagaaagaccgaacuaug

SEQ ID NO: 659302 - RNA, 19 nt, Homo sapiens
  misc_RNA (1)...(19): siRNA sense strand
ucaagagaguuuacaaaug

SEQ ID NO: 659303 - RNA, 19 nt, Homo sapiens
  misc_RNA (1)...(19): siRNA sense strand
ugaaauccauggaagaaga

SEQ ID NO: 659304 - RNA, 19 nt, Homo sapiens
  misc_RNA (1)...(19): siRNA sense strand
cagaaagaccgaacuauga

SEQ ID NO: 659305 - RNA, 19 nt, Homo sapiens
  misc_RNA (1)...(19): siRNA sense strand
gaacacagcaagugaugga

SEQ ID NO: 659306 - RNA, 19 nt, Homo sapiens
  misc_RNA (1)...(19): siRNA sense strand
ggagcuacuugaugacauu

SEQ ID NO: 659307 - RNA, 19 nt, Homo sapiens
  misc_RNA (1)...(19): siRNA sense strand
gaaagggagacaaauauca

SEQ ID NO: 659308 - RNA, 19 nt, Homo sapiens
  misc_RNA (1)...(19): siRNA sense strand
gagcagauauuagaugaag

SEQ ID NO: 659309 - RNA, 19 nt, Homo sapiens
  misc_RNA (1)...(19): siRNA sense strand
gaaagaaugcugagauuuu

SEQ ID NO: 659310 - RNA, 19 nt, Homo sapiens
  misc_RNA (1)...(19): siRNA sense strand
ucaagucucuggugaggaa

SEQ ID NO: 659311 - RNA, 19 nt, Homo sapiens
  misc_RNA (1)...(19): siRNA sense strand
gaugagagcucuucaaaag

SEQ ID NO: 659312 - RNA, 19 nt, Homo sapiens
  misc_RNA (1)...(19): siRNA sense strand
gcacccaucucccagacaa

SEQ ID NO: 659313 - RNA, 19 nt, Homo sapiens
  misc_RNA (1)...(19): siRNA sense strand
cuuggaagcuucaccagua

SEQ ID NO: 659314 - RNA, 19 nt, Homo sapiens
  misc_RNA (1)...(19): siRNA sense strand
uacaaaugccuacaaguua

SEQ ID NO: 659315 - RNA, 19 nt, Homo sapiens
  misc_RNA (1)...(19): siRNA sense strand
acauugagcucuugaaaca

SEQ ID NO: 659316 - RNA, 19 nt, Homo sapiens
  misc_RNA (1)...(19): siRNA sense strand
gagccugccuaaaguagaa

SEQ ID NO: 659317 - RNA, 19 nt, Homo sapiens
  misc_RNA (1)...(19): siRNA sense strand
gcagcgaguuauugaguau

SEQ ID NO: 659318 - RNA, 19 nt, Homo sapiens
  misc_RNA (1)...(19): siRNA sense strand
cagaagugaucuuacagaa

SEQ ID NO: 659319 - RNA, 19 nt, Homo sapiens
  misc_RNA (1)...(19): siRNA sense strand
ggaaagaaugcugagauuu

SEQ ID NO: 659320 - RNA, 19 nt, Homo sapiens
  misc_RNA (1)...(19): siRNA sense strand
gcacccagauaguggaguu

SEQ ID NO: 659321 - RNA, 19 nt, Homo sapiens
  misc_RNA (1)...(19): siRNA sense strand
aaauggaggugaaagaaau

SEQ ID NO: 659322 - RNA, 19 nt, Homo sapiens
  misc_RNA (1)...(19): siRNA sense strand
caagaaugcugccgacucu

SEQ ID NO: 659323 - RNA, 19 nt, Homo sapiens
  misc_RNA (1)...(19): siRNA sense strand
gaagaaugacuuaaaggau

SEQ ID NO: 659324 - RNA, 19 nt, Homo sapiens
  misc_RNA (1)...(19): siRNA sense strand
guauaaagacugccuugaa

SEQ ID NO: 659325 - RNA, 19 nt, Homo sapiens
  misc_RNA (1)...(19): siRNA sense strand
gcaaaacacccaaaauaaa

SEQ ID NO: 659326 - RNA, 19 nt, Homo sapiens
  misc_RNA (1)...(19): siRNA sense strand
ggaaauggcaaguuugaca

SEQ ID NO: 659327 - RNA, 19 nt, Homo sapiens
  misc_RNA (1)...(19): siRNA sense strand
gaagaagagcuggauaaga

SEQ ID NO: 659328 - RNA, 19 nt, Homo sapiens
  misc_RNA (1)...(19): siRNA sense strand
agagacaccugacauggaa

SEQ ID NO: 659329 - RNA, 19 nt, Homo sapiens
  misc_RNA (1)...(19): siRNA sense strand
gcccaggucucaauuucaa

SEQ ID NO: 659330 - RNA, 19 nt, Homo sapiens
  misc_RNA (1)...(19): siRNA sense strand
uagaugaagucgagaugaa

SEQ ID NO: 659331 - RNA, 19 nt, Homo sapiens
  misc_RNA (1)...(19): siRNA sense strand
uaaaggaaaugggcaguca

SEQ ID NO: 659332 - RNA, 19 nt, Homo sapiens
  misc_RNA (1)...(19): siRNA sense strand
ggaaauucguugauguucu

SEQ ID NO: 659333 - RNA, 19 nt, Homo sapiens
  misc_RNA (1)...(19): siRNA sense strand
gaggaaauggcaaguuuga

SEQ ID NO: 659334 - RNA, 19 nt, Homo sapiens
  misc_RNA (1)...(19): siRNA sense strand
gcacgagaaugaugauagg

SEQ ID NO: 659335 - RNA, 19 nt, Homo sapiens
  misc_RNA (1)...(19): siRNA sense strand
caauaaugcacgagaauga

SEQ ID NO: 659336 - RNA, 19 nt, Homo sapiens
  misc_RNA (1)...(19): siRNA sense strand
uggauaagauggagagaga

SEQ ID NO: 659337 - RNA, 19 nt, Homo sapiens
  misc_RNA (1)...(19): siRNA sense strand
gagcguagcacccagauag

SEQ ID NO: 659338 - RNA, 19 nt, Homo sapiens
  misc_RNA (1)...(19): siRNA sense strand
gagcaaagaaacuggauuc

SEQ ID NO: 659339 - RNA, 19 nt, Homo sapiens
  misc_RNA (1)...(19): siRNA sense strand
gaggaggcacugcaaauga

SEQ ID NO: 659340 - RNA, 19 nt, Homo sapiens
  misc_RNA (1)...(19): siRNA sense strand
cuugguaccuuaagaaaug

SEQ ID NO: 659341 - RNA, 19 nt, Homo sapiens
  misc_RNA (1)...(19): siRNA sense strand
gaucaaaggcacuuagaag

SEQ ID NO: 659342 - RNA, 19 nt, Homo sapiens
  misc_RNA (1)...(19): siRNA sense strand
cuggaacagucaagaauuu

SEQ ID NO: 659343 - RNA, 19 nt, Homo sapiens
  misc_RNA (1)...(19): siRNA sense strand
aguaucacauuucagguua

SEQ ID NO: 659344 - RNA, 19 nt, Homo sapiens
  misc_RNA (1)...(19): siRNA sense strand
gaaaacagaacacagauga

SEQ ID NO: 659345 - RNA, 19 nt, Homo sapiens
  misc_RNA (1)...(19): siRNA sense strand
cgugggcccuccaucuuua

SEQ ID NO: 659346 - RNA, 19 nt, Homo sapiens
  misc_RNA (1)...(19): siRNA sense strand
uuacaaaugccuacaaguu

SEQ ID NO: 659347 - RNA, 19 nt, Homo sapiens
  misc_RNA (1)...(19): siRNA sense strand
uagaugaacugaaauccau

SEQ ID NO: 659348 - RNA, 19 nt, Homo sapiens
  misc_RNA (1)...(19): siRNA sense strand
ugaccaaccuaguguggaa

SEQ ID NO: 659349 - RNA, 19 nt, Homo sapiens
  misc_RNA (1)...(19): siRNA sense strand
ucaaaggcacuuagaagaa

SEQ ID NO: 659350 - RNA, 19 nt, Homo sapiens
  misc_RNA (1)...(19): siRNA sense strand
uaaggcaugugacucauca

SEQ ID NO: 659351 - RNA, 19 nt, Homo sapiens
  misc_RNA (1)...(19): siRNA sense strand
ugucuaguaucuccuauga

SEQ ID NO: 659352 - RNA, 19 nt, Homo sapiens
  misc_RNA (1)...(19): siRNA sense strand
uggaaagaaugcugagauu

SEQ ID NO: 659353 - RNA, 19 nt, Homo sapiens
  misc_RNA (1)...(19): siRNA sense strand
gaaauggcaaguuugacaa

SEQ ID NO: 659354 - RNA, 19 nt, Homo sapiens
  misc_RNA (1)...(19): siRNA sense strand
ccaaagccacacaguuuaa

SEQ ID NO: 659355 - RNA, 19 nt, Homo sapiens
  misc_RNA (1)...(19): siRNA sense strand
gccaaagccacacaguuua

SEQ ID NO: 659356 - RNA, 19 nt, Homo sapiens
  misc_RNA (1)...(19): siRNA sense strand
ugagauaccugcauuucca

SEQ ID NO: 659357 - RNA, 19 nt, Homo sapiens
  misc_RNA (1)...(19): siRNA sense strand
ggagucauuucugcucaaa

SEQ ID NO: 659358 - RNA, 19 nt, Homo sapiens
  misc_RNA (1)...(19): siRNA sense strand
cauccacgguguugcauga

SEQ ID NO: 659359 - RNA, 19 nt, Homo sapiens
  misc_RNA (1)...(19): siRNA sense strand
gaacugaaagagaaagaca

SEQ ID NO: 659360 - RNA, 19 nt, Homo sapiens
  misc_RNA (1)...(19): siRNA sense strand
ccagggagacucagaauca

SEQ ID NO: 659361 - RNA, 19 nt, Homo sapiens
  misc_RNA (1)...(19): siRNA sense strand
ccgaaaccuuacuaugaua

SEQ ID NO: 659362 - RNA, 19 nt, Homo sapiens
  misc_RNA (1)...(19): siRNA sense strand
aaucagacaucuacagcuu

SEQ ID NO: 659363 - RNA, 19 nt, Homo sapiens
  misc_RNA (1)...(19): siRNA sense strand
guacugaagaugaacaaga

SEQ ID NO: 659364 - RNA, 19 nt, Homo sapiens
  misc_RNA (1)...(19): siRNA sense strand
ccaaagaaacugaagaucu

SEQ ID NO: 659365 - RNA, 19 nt, Homo sapiens
  misc_RNA (1)...(19): siRNA sense strand
agagaaagacauaucauug

SEQ ID NO: 659366 - RNA, 19 nt, Homo sapiens
  misc_RNA (1)...(19): siRNA sense strand
ccaaaggaacugaaagaga

SEQ ID NO: 659367 - RNA, 19 nt, Homo sapiens
  misc_RNA (1)...(19): siRNA sense strand
caucaaaggagucaccaaa

SEQ ID NO: 659368 - RNA, 19 nt, Homo sapiens
  misc_RNA (1)...(19): siRNA sense strand
gaacaagaagagacaucaa

SEQ ID NO: 659369 - RNA, 19 nt, Homo sapiens
  misc_RNA (1)...(19): siRNA sense strand
gaacacagaugaacaauuu

SEQ ID NO: 659370 - RNA, 19 nt, Homo sapiens
  misc_RNA (1)...(19): siRNA sense strand
caaaggaacugaaagagaa

SEQ ID NO: 659371 - RNA, 19 nt, Homo sapiens
  misc_RNA (1)...(19): siRNA sense strand
uaaggaagcuucaugcaaa

SEQ ID NO: 659372 - RNA, 19 nt, Homo sapiens
  misc_RNA (1)...(19): siRNA sense strand
ugaaagaaauggcaaagaa

SEQ ID NO: 659373 - RNA, 19 nt, Homo sapiens
  misc_RNA (1)...(19): siRNA sense strand
gaugauaggcugaggaaua

SEQ ID NO: 659374 - RNA, 19 nt, Homo sapiens
  misc_RNA (1)...(19): siRNA sense strand
gaagaggacuuugaaggaa

SEQ ID NO: 659375 - RNA, 19 nt, Homo sapiens
  misc_RNA (1)...(19): siRNA sense strand
ccagguagaugaacugaaa

SEQ ID NO: 659376 - RNA, 19 nt, Homo sapiens
  misc_RNA (1)...(19): siRNA sense strand
gaagauaguaguaugcuuu

SEQ ID NO: 659377 - RNA, 19 nt, Homo sapiens
  misc_RNA (1)...(19): siRNA sense strand
gaaacaagcaggauccaaa

SEQ ID NO: 659378 - RNA, 19 nt, Homo sapiens
  misc_RNA (1)...(19): siRNA sense strand
gcacuuagaagaacaagaa

SEQ ID NO: 659379 - RNA, 19 nt, Homo sapiens
  misc_RNA (1)...(19): siRNA sense strand
gaaggagccugccuaaagu

SEQ ID NO: 659380 - RNA, 19 nt, Homo sapiens
  misc_RNA (1)...(19): siRNA sense strand
uuagauggcucaguuguua

SEQ ID NO: 659381 - RNA, 19 nt, Homo sapiens
  misc_RNA (1)...(19): siRNA sense strand
gaaacuggauucucuccuu

SEQ ID NO: 659382 - RNA, 19 nt, Homo sapiens
  misc_RNA (1)...(19): siRNA sense strand
uauaaagacugccuugaaa

SEQ ID NO: 659383 - RNA, 19 nt, Homo sapiens
  misc_RNA (1)...(19): siRNA sense strand
uaaagaugauggaaaggua

SEQ ID NO: 659384 - RNA, 19 nt, Homo sapiens
  misc_RNA (1)...(19): siRNA sense strand
aagaagagcuggauaagau

SEQ ID NO: 659385 - RNA, 19 nt, Homo sapiens
  misc_RNA (1)...(19): siRNA sense strand
cagaggaaauggcaaguuu

SEQ ID NO: 659386 - RNA, 19 nt, Homo sapiens
  misc_RNA (1)...(19): siRNA sense strand
ggaacuaugugaaagugaa

SEQ ID NO: 659387 - RNA, 19 nt, Homo sapiens
  misc_RNA (1)...(19): siRNA sense strand
gaaauucguugauguucug

SEQ ID NO: 659388 - RNA, 19 nt, Homo sapiens
  misc_RNA (1)...(19): siRNA sense strand
caagagaguuuacaaaugc

SEQ ID NO: 659389 - RNA, 19 nt, Homo sapiens
  misc_RNA (1)...(19): siRNA sense strand
ggcaaucaguggauccuua

SEQ ID NO: 659390 - RNA, 19 nt, Homo sapiens
  misc_RNA (1)...(19): siRNA sense strand
gaaagaaauggcaaagaaa

SEQ ID NO: 659391 - RNA, 19 nt, Homo sapiens
  misc_RNA (1)...(19): siRNA sense strand
gggcuuagauggcucaguu

SEQ ID NO: 659392 - RNA, 19 nt, Homo sapiens
  misc_RNA (1)...(19): siRNA sense strand
gagaaagacauaucauuga

SEQ ID NO: 659393 - RNA, 19 nt, Homo sapiens
  misc_RNA (1)...(19): siRNA sense strand
cuaccaagauuuccaagaa

SEQ ID NO: 659394 - RNA, 19 nt, Homo sapiens
  misc_RNA (1)...(19): siRNA sense strand
gaaaucagaggguguucua

SEQ ID NO: 659395 - RNA, 19 nt, Homo sapiens
  misc_RNA (1)...(19): siRNA sense strand
gaaggcagccacagugaaa

SEQ ID NO: 659396 - RNA, 19 nt, Homo sapiens
  misc_RNA (1)...(19): siRNA sense strand
ggagacaaauaucaaagau

SEQ ID NO: 659397 - RNA, 19 nt, Homo sapiens
  misc_RNA (1)...(19): siRNA sense strand
aaacuggauucucuccuua

SEQ ID NO: 659398 - RNA, 19 nt, Homo sapiens
  misc_RNA (1)...(19): siRNA sense strand
aggaguaucucaucaguaa

SEQ ID NO: 659399 - RNA, 19 nt, Homo sapiens
  misc_RNA (1)...(19): siRNA sense strand
caccaaggguucacucuuu

SEQ ID NO: 659400 - RNA, 19 nt, Homo sapiens
  misc_RNA (1)...(19): siRNA sense strand
gaaagagaaagacauauca

SEQ ID NO: 659401 - RNA, 19 nt, Homo sapiens
  misc_RNA (1)...(19): siRNA sense strand
gcagaaagaccgaacuaug

SEQ ID NO: 659402 - RNA, 19 nt, Homo sapiens
  misc_RNA (1)...(19): siRNA sense strand
ucaagagaguuuacaaaug

SEQ ID NO: 659403 - RNA, 19 nt, Homo sapiens
  misc_RNA (1)...(19): siRNA sense strand
ugaaauccauggaagaaga

SEQ ID NO: 659404 - RNA, 19 nt, Homo sapiens
  misc_RNA (1)...(19): siRNA sense strand
cagaaagaccgaacuauga

SEQ ID NO: 659405 - RNA, 19 nt, Homo sapiens
  misc_RNA (1)...(19): siRNA sense strand
gaacacagcaagugaugga

SEQ ID NO: 659406 - RNA, 19 nt, Homo sapiens
  misc_RNA (1)...(19): siRNA sense strand
ggagcuacuugaugacauu

SEQ ID NO: 659407 - RNA, 19 nt, Homo sapiens
  misc_RNA (1)...(19): siRNA sense strand
gaaagggagacaaauauca

SEQ ID NO: 659408 - RNA, 19 nt, Homo sapiens
  misc_RNA (1)...(19): siRNA sense strand
gagcagauauuagaugaag

SEQ ID NO: 659409 - RNA, 19 nt, Homo sapiens
  misc_RNA (1)...(19): siRNA sense strand
gaaagaaugcugagauuuu

SEQ ID NO: 659410 - RNA, 19 nt, Homo sapiens
  misc_RNA (1)...(19): siRNA sense strand
ucaagucucuggugaggaa

SEQ ID NO: 659411 - RNA, 19 nt, Homo sapiens
  misc_RNA (1)...(19): siRNA sense strand
gaugagagcucuucaaaag

SEQ ID NO: 659412 - RNA, 19 nt, Homo sapiens
  misc_RNA (1)...(19): siRNA sense strand
gcacccaucucccagacaa

SEQ ID NO: 659413 - RNA, 19 nt, Homo sapiens
  misc_RNA (1)...(19): siRNA sense strand
cuuggaagcuucaccagua

SEQ ID NO: 659414 - RNA, 19 nt, Homo sapiens
  misc_RNA (1)...(19): siRNA sense strand
uacaaaugccuacaaguua

SEQ ID NO: 659415 - RNA, 19 nt, Homo sapiens
  misc_RNA (1)...(19): siRNA sense strand
acauugagcucuugaaaca

SEQ ID NO: 659416 - RNA, 19 nt, Homo sapiens
  misc_RNA (1)...(19): siRNA sense strand
gagccugccuaaaguagaa

SEQ ID NO: 659417 - RNA, 19 nt, Homo sapiens
  misc_RNA (1)...(19): siRNA sense strand
gcagcgaguuauugaguau

SEQ ID NO: 659418 - RNA, 19 nt, Homo sapiens
  misc_RNA (1)...(19): siRNA sense strand
cagaagugaucuuacagaa

SEQ ID NO: 659419 - RNA, 19 nt, Homo sapiens
  misc_RNA (1)...(19): siRNA sense strand
ggaaagaaugcugagauuu

SEQ ID NO: 659420 - RNA, 19 nt, Homo sapiens
  misc_RNA (1)...(19): siRNA sense strand
gcacccagauaguggaguu

SEQ ID NO: 659421 - RNA, 19 nt, Homo sapiens
  misc_RNA (1)...(19): siRNA sense strand
aaauggaggugaaagaaau

SEQ ID NO: 659422 - RNA, 19 nt, Homo sapiens
  misc_RNA (1)...(19): siRNA sense strand
caagaaugcugccgacucu

SEQ ID NO: 659423 - RNA, 19 nt, Homo sapiens
  misc_RNA (1)...(19): siRNA sense strand
gaagaaugacuuaaaggau

SEQ ID NO: 659424 - RNA, 19 nt, Homo sapiens
  misc_RNA (1)...(19): siRNA sense strand
guauaaagacugccuugaa

SEQ ID NO: 659425 - RNA, 19 nt, Homo sapiens
  misc_RNA (1)...(19): siRNA sense strand
gcaaaacacccaaaauaaa

SEQ ID NO: 659426 - RNA, 19 nt, Homo sapiens
  misc_RNA (1)...(19): siRNA sense strand
ggaaauggcaaguuugaca

SEQ ID NO: 659427 - RNA, 19 nt, Homo sapiens
  misc_RNA (1)...(19): siRNA sense strand
gaagaagagcuggauaaga

SEQ ID NO: 659428 - RNA, 19 nt, Homo sapiens
  misc_RNA (1)...(19): siRNA sense strand
agagacaccugacauggaa

SEQ ID NO: 659429 - RNA, 19 nt, Homo sapiens
  misc_RNA (1)...(19): siRNA sense strand
gcccaggucucaauuucaa

SEQ ID NO: 659430 - RNA, 19 nt, Homo sapiens
  misc_RNA (1)...(19): siRNA sense strand
uagaugaagucgagaugaa

SEQ ID NO: 659431 - RNA, 19 nt, Homo sapiens
  misc_RNA (1)...(19): siRNA sense strand
uaaaggaaaugggcaguca

SEQ ID NO: 659432 - RNA, 19 nt, Homo sapiens
  misc_RNA (1)...(19): siRNA sense strand
ggaaauucguugauguucu

SEQ ID NO: 659433 - RNA, 19 nt, Homo sapiens
  misc_RNA (1)...(19): siRNA sense strand
gaggaaauggcaaguuuga

SEQ ID NO: 659434 - RNA, 19 nt, Homo sapiens
  misc_RNA (1)...(19): siRNA sense strand
gcacgagaaugaugauagg

SEQ ID NO: 659435 - RNA, 19 nt, Homo sapiens
  misc_RNA (1)...(19): siRNA sense strand
caauaaugcacgagaauga

SEQ ID NO: 659436 - RNA, 19 nt, Homo sapiens
  misc_RNA (1)...(19): siRNA sense strand
uggauaagauggagagaga

SEQ ID NO: 659437 - RNA, 19 nt, Homo sapiens
  misc_RNA (1)...(19): siRNA sense strand
gagcguagcacccagauag

SEQ ID NO: 659438 - RNA, 19 nt, Homo sapiens
  misc_RNA (1)...(19): siRNA sense strand
gagcaaagaaacuggauuc

SEQ ID NO: 659439 - RNA, 19 nt, Homo sapiens
  misc_RNA (1)...(19): siRNA sense strand
gaggaggcacugcaaauga

SEQ ID NO: 659440 - RNA, 19 nt, Homo sapiens
  misc_RNA (1)...(19): siRNA sense strand
cuugguaccuuaagaaaug

SEQ ID NO: 659441 - RNA, 19 nt, Homo sapiens
  misc_RNA (1)...(19): siRNA sense strand
gaucaaaggcacuuagaag

SEQ ID NO: 659442 - RNA, 19 nt, Homo sapiens
  misc_RNA (1)...(19): siRNA sense strand
cuggaacagucaagaauuu

SEQ ID NO: 659443 - RNA, 19 nt, Homo sapiens
  misc_RNA (1)...(19): siRNA sense strand
aguaucacauuucagguua

SEQ ID NO: 659444 - RNA, 19 nt, Homo sapiens
  misc_RNA (1)...(19): siRNA sense strand
gaaaacagaacacagauga

SEQ ID NO: 659445 - RNA, 19 nt, Homo sapiens
  misc_RNA (1)...(19): siRNA sense strand
cgugggcccuccaucuuua

SEQ ID NO: 659446 - RNA, 19 nt, Homo sapiens
  misc_RNA (1)...(19): siRNA sense strand
uuacaaaugccuacaaguu

SEQ ID NO: 659447 - RNA, 19 nt, Homo sapiens
  misc_RNA (1)...(19): siRNA sense strand
uagaugaacugaaauccau

SEQ ID NO: 659448 - RNA, 19 nt, Homo sapiens
  misc_RNA (1)...(19): siRNA sense strand
ugaccaaccuaguguggaa

SEQ ID NO: 659449 - RNA, 19 nt, Homo sapiens
  misc_RNA (1)...(19): siRNA sense strand
ucaaaggcacuuagaagaa

SEQ ID NO: 659450 - RNA, 19 nt, Homo sapiens
  misc_RNA (1)...(19): siRNA sense strand
uaaggcaugugacucauca

SEQ ID NO: 659451 - RNA, 19 nt, Homo sapiens
  misc_RNA (1)...(19): siRNA sense strand
ugucuaguaucuccuauga

SEQ ID NO: 659452 - RNA, 19 nt, Homo sapiens
  misc_RNA (1)...(19): siRNA sense strand
uggaaagaaugcugagauu

SEQ ID NO: 659453 - RNA, 19 nt, Homo sapiens
  misc_RNA (1)...(19): siRNA sense strand
gaaauggcaaguuugacaa

SEQ ID NO: 659454 - RNA, 19 nt, Homo sapiens
  misc_RNA (1)...(19): siRNA sense strand
ccaaagccacacaguuuaa

SEQ ID NO: 659455 - RNA, 19 nt, Homo sapiens
  misc_RNA (1)...(19): siRNA sense strand
gccaaagccacacaguuua

SEQ ID NO: 659456 - RNA, 19 nt, Homo sapiens
  misc_RNA (1)...(19): siRNA sense strand
ugagauaccugcauuucca

SEQ ID NO: 659457 - RNA, 19 nt, Homo sapiens
  misc_RNA (1)...(19): siRNA sense strand
ggagucauuucugcucaaa

SEQ ID NO: 659458 - RNA, 19 nt, Homo sapiens
  misc_RNA (1)...(19): siRNA sense strand
cauccacgguguugcauga

SEQ ID NO: 659459 - RNA, 19 nt, Homo sapiens
  misc_RNA (1)...(19): siRNA sense strand
gaacugaaagagaaagaca

SEQ ID NO: 659460 - RNA, 19 nt, Homo sapiens
  misc_RNA (1)...(19): siRNA sense strand
ccagggagacucagaauca

SEQ ID NO: 659461 - RNA, 19 nt, Homo sapiens
  misc_RNA (1)...(19): siRNA sense strand
ccgaaaccuuacuaugaua

SEQ ID NO: 659462 - RNA, 19 nt, Homo sapiens
  misc_RNA (1)...(19): siRNA sense strand
aaucagacaucuacagcuu

SEQ ID NO: 659463 - RNA, 19 nt, Homo sapiens
  misc_RNA (1)...(19): siRNA sense strand
guacugaagaugaacaaga

SEQ ID NO: 659464 - RNA, 19 nt, Homo sapiens
  misc_RNA (1)...(19): siRNA sense strand
ccaaagaaacugaagaucu

SEQ ID NO: 659465 - RNA, 19 nt, Homo sapiens
  misc_RNA (1)...(19): siRNA sense strand
agagaaagacauaucauug

SEQ ID NO: 659466 - RNA, 19 nt, Homo sapiens
  misc_RNA (1)...(19): siRNA sense strand
ccaaaggaacugaaagaga

SEQ ID NO: 659467 - RNA, 19 nt, Homo sapiens
  misc_RNA (1)...(19): siRNA sense strand
caucaaaggagucaccaaa

SEQ ID NO: 659468 - RNA, 19 nt, Homo sapiens
  misc_RNA (1)...(19): siRNA sense strand
gaacaagaagagacaucaa

SEQ ID NO: 659469 - RNA, 19 nt, Homo sapiens
  misc_RNA (1)...(19): siRNA sense strand
gcaggcaaauuacaccuuu

SEQ ID NO: 659470 - RNA, 19 nt, Homo sapiens
  misc_RNA (1)...(19): siRNA sense strand
caacucagaugccuuucaa

SEQ ID NO: 659471 - RNA, 19 nt, Homo sapiens
  misc_RNA (1)...(19): siRNA sense strand
gaucucaggucaguacaaa

SEQ ID NO: 659472 - RNA, 19 nt, Homo sapiens
  misc_RNA (1)...(19): siRNA sense strand
ugacggaacucaaggaaca

SEQ ID NO: 659473 - RNA, 19 nt, Homo sapiens
  misc_RNA (1)...(19): siRNA sense strand
uauuguagcaggcaaauua

SEQ ID NO: 659474 - RNA, 19 nt, Homo sapiens
  misc_RNA (1)...(19): siRNA sense strand
gggaggagguggaagacaa

SEQ ID NO: 659475 - RNA, 19 nt, Homo sapiens
  misc_RNA (1)...(19): siRNA sense strand
gggccaggcuacaguguuu

SEQ ID NO: 659476 - RNA, 19 nt, Homo sapiens
  misc_RNA (1)...(19): siRNA sense strand
gagaauauauccuuauccu

SEQ ID NO: 659477 - RNA, 19 nt, Homo sapiens
  misc_RNA (1)...(19): siRNA sense strand
agaaagaucucaggucagu

SEQ ID NO: 659478 - RNA, 19 nt, Homo sapiens
  misc_RNA (1)...(19): siRNA sense strand
ccucaaaccugacggaacu

SEQ ID NO: 659479 - RNA, 19 nt, Homo sapiens
  misc_RNA (1)...(19): siRNA sense strand
gaaacgugguggccuucau

SEQ ID NO: 659480 - RNA, 19 nt, Homo sapiens
  misc_RNA (1)...(19): siRNA sense strand
cuucgagaauauauccuua

SEQ ID NO: 659481 - RNA, 19 nt, Homo sapiens
  misc_RNA (1)...(19): siRNA sense strand
gcaaugaggcgaccuucca

SEQ ID NO: 659482 - RNA, 19 nt, Homo sapiens
  misc_RNA (1)...(19): siRNA sense strand
gggcuuggguccacagucu

SEQ ID NO: 659483 - RNA, 19 nt, Homo sapiens
  misc_RNA (1)...(19): siRNA sense strand
ucucagccauacccaauau

SEQ ID NO: 659484 - RNA, 19 nt, Homo sapiens
  misc_RNA (1)...(19): siRNA sense strand
gaacagcaggagauggaau

SEQ ID NO: 659485 - RNA, 19 nt, Homo sapiens
  misc_RNA (1)...(19): siRNA sense strand
gaaaaggagaggagaggua

SEQ ID NO: 659486 - RNA, 19 nt, Homo sapiens
  misc_RNA (1)...(19): siRNA sense strand
gcagagagagcgggacaug

SEQ ID NO: 659487 - RNA, 19 nt, Homo sapiens
  misc_RNA (1)...(19): siRNA sense strand
ggccuugggugugcgcuuu

SEQ ID NO: 659488 - RNA, 19 nt, Homo sapiens
  misc_RNA (1)...(19): siRNA sense strand
ggagauggaaugcaaugag

SEQ ID NO: 659489 - RNA, 19 nt, Homo sapiens
  misc_RNA (1)...(19): siRNA sense strand
gggacaugcugagauggaa

SEQ ID NO: 659490 - RNA, 19 nt, Homo sapiens
  misc_RNA (1)...(19): siRNA sense strand
uugcggaggugcagagaga

SEQ ID NO: 659491 - RNA, 19 nt, Homo sapiens
  misc_RNA (1)...(19): siRNA sense strand
ccagcucccuaccucauuc

SEQ ID NO: 659492 - RNA, 19 nt, Homo sapiens
  misc_RNA (1)...(19): siRNA sense strand
ucgagaauauauccuuauc

SEQ ID NO: 659493 - RNA, 19 nt, Homo sapiens
  misc_RNA (1)...(19): siRNA sense strand
ucaaggaacagcaggagau

SEQ ID NO: 659494 - RNA, 19 nt, Homo sapiens
  misc_RNA (1)...(19): siRNA sense strand
gggcagagggagaaagauc

SEQ ID NO: 659495 - RNA, 19 nt, Homo sapiens
  misc_RNA (1)...(19): siRNA sense strand
gaaagaucucaggucagua

SEQ ID NO: 659496 - RNA, 19 nt, Homo sapiens
  misc_RNA (1)...(19): siRNA sense strand
gcgcuggucuuggccucaa

SEQ ID NO: 659497 - RNA, 19 nt, Homo sapiens
  misc_RNA (1)...(19): siRNA sense strand
ccucauucacauacucaua

SEQ ID NO: 659498 - RNA, 19 nt, Homo sapiens
  misc_RNA (1)...(19): siRNA sense strand
gagcgggacaugcugagau

SEQ ID NO: 659499 - RNA, 19 nt, Homo sapiens
  misc_RNA (1)...(19): siRNA sense strand
agcaggagauggaaugcaa

SEQ ID NO: 659500 - RNA, 19 nt, Homo sapiens
  misc_RNA (1)...(19): siRNA sense strand
aaagaucucaggucaguac

SEQ ID NO: 659501 - RNA, 19 nt, Homo sapiens
  misc_RNA (1)...(19): siRNA sense strand
ucauacccaugcccuuugu

SEQ ID NO: 659502 - RNA, 19 nt, Homo sapiens
  misc_RNA (1)...(19): siRNA sense strand
uugccaaacugcacagauc

SEQ ID NO: 659503 - RNA, 19 nt, Homo sapiens
  misc_RNA (1)...(19): siRNA sense strand
ugaggcgaccuuccaguug

SEQ ID NO: 659504 - RNA, 19 nt, Homo sapiens
  misc_RNA (1)...(19): siRNA sense strand
ucucaggucaguacaaaca

SEQ ID NO: 659505 - RNA, 19 nt, Homo sapiens
  misc_RNA (1)...(19): siRNA sense strand
caaggaacagcaggagaug

SEQ ID NO: 659506 - RNA, 19 nt, Homo sapiens
  misc_RNA (1)...(19): siRNA sense strand
agccaugucugucuucucu

SEQ ID NO: 659507 - RNA, 19 nt, Homo sapiens
  misc_RNA (1)...(19): siRNA sense strand
ggaggagguggaagacaag

SEQ ID NO: 659508 - RNA, 19 nt, Homo sapiens
  misc_RNA (1)...(19): siRNA sense strand
gagaagaauuucagcaaga

SEQ ID NO: 659509 - RNA, 19 nt, Homo sapiens
  misc_RNA (1)...(19): siRNA sense strand
ggacaauaacgccaacaua

SEQ ID NO: 659510 - RNA, 19 nt, Homo sapiens
  misc_RNA (1)...(19): siRNA sense strand
ggcauuggcuggagaagaa

SEQ ID NO: 659511 - RNA, 19 nt, Homo sapiens
  misc_RNA (1)...(19): siRNA sense strand
aaacuagauuagcugguua

SEQ ID NO: 659512 - RNA, 19 nt, Homo sapiens
  misc_RNA (1)...(19): siRNA sense strand
gacaauaacgccaacauag

SEQ ID NO: 659513 - RNA, 19 nt, Homo sapiens
  misc_RNA (1)...(19): siRNA sense strand
agaaggaggugacaacagu

SEQ ID NO: 659514 - RNA, 19 nt, Homo sapiens
  misc_RNA (1)...(19): siRNA sense strand
gcaaugguacccaggagaa

SEQ ID NO: 659515 - RNA, 19 nt, Homo sapiens
  misc_RNA (1)...(19): siRNA sense strand
gaaccaggaagaucgaugu

SEQ ID NO: 659516 - RNA, 19 nt, Homo sapiens
  misc_RNA (1)...(19): siRNA sense strand
ccacaugccaccuucuuga

SEQ ID NO: 659517 - RNA, 19 nt, Homo sapiens
  misc_RNA (1)...(19): siRNA sense strand
gacaacaguggcaauggua

SEQ ID NO: 659518 - RNA, 19 nt, Homo sapiens
  misc_RNA (1)...(19): siRNA sense strand
ccuccucgaugccuacaaa

SEQ ID NO: 659519 - RNA, 19 nt, Homo sapiens
  misc_RNA (1)...(19): siRNA sense strand
gugcaugucuccaguacag

SEQ ID NO: 659520 - RNA, 19 nt, Homo sapiens
  misc_RNA (1)...(19): siRNA sense strand
cuacaaacaggugaaauug

SEQ ID NO: 659521 - RNA, 19 nt, Homo sapiens
  misc_RNA (1)...(19): siRNA sense strand
ugacaacaguggcaauggu

SEQ ID NO: 659522 - RNA, 19 nt, Homo sapiens
  misc_RNA (1)...(19): siRNA sense strand
ccuacaaacaggugaaauu

SEQ ID NO: 659523 - RNA, 19 nt, Homo sapiens
  misc_RNA (1)...(19): siRNA sense strand
cagcaagagaugaaagaaa

SEQ ID NO: 659524 - RNA, 19 nt, Homo sapiens
  misc_RNA (1)...(19): siRNA sense strand
ucagauggcugggcgauac

SEQ ID NO: 659525 - RNA, 19 nt, Homo sapiens
  misc_RNA (1)...(19): siRNA sense strand
uggaagaguucuccucagu

SEQ ID NO: 659526 - RNA, 19 nt, Homo sapiens
  misc_RNA (1)...(19): siRNA sense strand
gcugaucacacugcaaauu

SEQ ID NO: 659527 - RNA, 19 nt, Homo sapiens
  misc_RNA (1)...(19): siRNA sense strand
ggacuccucuuugucuuuu

SEQ ID NO: 659528 - RNA, 19 nt, Homo sapiens
  misc_RNA (1)...(19): siRNA sense strand
gcaugucuccaguacagaa

SEQ ID NO: 659529 - RNA, 19 nt, Homo sapiens
  misc_RNA (1)...(19): siRNA sense strand
gaagaauuucagcaagaga

SEQ ID NO: 659530 - RNA, 19 nt, Homo sapiens
  misc_RNA (1)...(19): siRNA sense strand
ugaagaagcaccagaacca

SEQ ID NO: 659531 - RNA, 19 nt, Homo sapiens
  misc_RNA (1)...(19): siRNA sense strand
gcugaccgcauggacaaua

SEQ ID NO: 659532 - RNA, 19 nt, Homo sapiens
  misc_RNA (1)...(19): siRNA sense strand
gacagaaaauugcuuaucu

SEQ ID NO: 659533 - RNA, 19 nt, Homo sapiens
  misc_RNA (1)...(19): siRNA sense strand
cugcaaauucugccaguuu

SEQ ID NO: 659534 - RNA, 19 nt, Homo sapiens
  misc_RNA (1)...(19): siRNA sense strand
caugccaccuucuugacuu

SEQ ID NO: 659535 - RNA, 19 nt, Homo sapiens
  misc_RNA (1)...(19): siRNA sense strand
gaauuucagcaagagauga

SEQ ID NO: 659536 - RNA, 19 nt, Homo sapiens
  misc_RNA (1)...(19): siRNA sense strand
uugcuuaucugggaggaaa

SEQ ID NO: 659537 - RNA, 19 nt, Homo sapiens
  misc_RNA (1)...(19): siRNA sense strand
caauaacgccaacauagcu

SEQ ID NO: 659538 - RNA, 19 nt, Homo sapiens
  misc_RNA (1)...(19): siRNA sense strand
cugcuggucuacauugaug

SEQ ID NO: 659539 - RNA, 19 nt, Homo sapiens
  misc_RNA (1)...(19): siRNA sense strand
agcaagagaugaaagaaaa

SEQ ID NO: 659540 - RNA, 19 nt, Homo sapiens
  misc_RNA (1)...(19): siRNA sense strand
gggacuccucuuugucuuu

SEQ ID NO: 659541 - RNA, 19 nt, Homo sapiens
  misc_RNA (1)...(19): siRNA sense strand
cugaccgcauggacaauaa

SEQ ID NO: 659542 - RNA, 19 nt, Homo sapiens
  misc_RNA (1)...(19): siRNA sense strand
gugcagagacagaaaauug

SEQ ID NO: 659543 - RNA, 19 nt, Homo sapiens
  misc_RNA (1)...(19): siRNA sense strand
agaagaauuucagcaagag

SEQ ID NO: 659544 - RNA, 19 nt, Homo sapiens
  misc_RNA (1)...(19): siRNA sense strand
ugaucacacugcaaauucu

SEQ ID NO: 659545 - RNA, 19 nt, Homo sapiens
  misc_RNA (1)...(19): siRNA sense strand
aaaacuagauuagcugguu

SEQ ID NO: 659546 - RNA, 19 nt, Homo sapiens
  misc_RNA (1)...(19): siRNA sense strand
gaucacacugcaaauucug

SEQ ID NO: 659547 - RNA, 19 nt, Homo sapiens
  misc_RNA (1)...(19): siRNA sense strand
uggagaagaauuucagcaa

SEQ ID NO: 659548 - RNA, 19 nt, Homo sapiens
  misc_RNA (1)...(19): siRNA sense strand
gaagcaccagaaccaggaa

SEQ ID NO: 659549 - RNA, 19 nt, Homo sapiens
  misc_RNA (1)...(19): siRNA sense strand
uccgcaaacugguggaaga

SEQ ID NO: 659550 - RNA, 19 nt, Homo sapiens
  misc_RNA (1)...(19): siRNA sense strand
guacagaaggaggugacaa

SEQ ID NO: 659551 - RNA, 19 nt, Homo sapiens
  misc_RNA (1)...(19): siRNA sense strand
cauccucagcguagacuug

SEQ ID NO: 659552 - RNA, 19 nt, Homo sapiens
  misc_RNA (1)...(19): siRNA sense strand
uucaagaaguccggcauug

SEQ ID NO: 659553 - RNA, 19 nt, Homo sapiens
  misc_RNA (1)...(19): siRNA sense strand
gcaccagaaccaggaagau

SEQ ID NO: 659554 - RNA, 19 nt, Homo sapiens
  misc_RNA (1)...(19): siRNA sense strand
uagacuugcugaucacacu

SEQ ID NO: 659555 - RNA, 19 nt, Homo sapiens
  misc_RNA (1)...(19): siRNA sense strand
gcauugugcagagacagaa

SEQ ID NO: 659556 - RNA, 19 nt, Homo sapiens
  misc_RNA (1)...(19): siRNA sense strand
gagaagaauuucagcaaga

SEQ ID NO: 659557 - RNA, 19 nt, Homo sapiens
  misc_RNA (1)...(19): siRNA sense strand
ggacaauaacgccaacaua

SEQ ID NO: 659558 - RNA, 19 nt, Homo sapiens
  misc_RNA (1)...(19): siRNA sense strand
ggcauuggcuggagaagaa

SEQ ID NO: 659559 - RNA, 19 nt, Homo sapiens
  misc_RNA (1)...(19): siRNA sense strand
aaacuagauuagcugguua

SEQ ID NO: 659560 - RNA, 19 nt, Homo sapiens
  misc_RNA (1)...(19): siRNA sense strand
gacaauaacgccaacauag

SEQ ID NO: 659561 - RNA, 19 nt, Homo sapiens
  misc_RNA (1)...(19): siRNA sense strand
agaaggaggugacaacagu

SEQ ID NO: 659562 - RNA, 19 nt, Homo sapiens
  misc_RNA (1)...(19): siRNA sense strand
gcaaugguacccaggagaa

SEQ ID NO: 659563 - RNA, 19 nt, Homo sapiens
  misc_RNA (1)...(19): siRNA sense strand
gaaccaggaagaucgaugu

SEQ ID NO: 659564 - RNA, 19 nt, Homo sapiens
  misc_RNA (1)...(19): siRNA sense strand
ccacaugccaccuucuuga

SEQ ID NO: 659565 - RNA, 19 nt, Homo sapiens
  misc_RNA (1)...(19): siRNA sense strand
gacaacaguggcaauggua

SEQ ID NO: 659566 - RNA, 19 nt, Homo sapiens
  misc_RNA (1)...(19): siRNA sense strand
ccuccucgaugccuacaaa

SEQ ID NO: 659567 - RNA, 19 nt, Homo sapiens
  misc_RNA (1)...(19): siRNA sense strand
gugcaugucuccaguacag

SEQ ID NO: 659568 - RNA, 19 nt, Homo sapiens
  misc_RNA (1)...(19): siRNA sense strand
cuacaaacaggugaaauug

SEQ ID NO: 659569 - RNA, 19 nt, Homo sapiens
  misc_RNA (1)...(19): siRNA sense strand
ugacaacaguggcaauggu

SEQ ID NO: 659570 - RNA, 19 nt, Homo sapiens
  misc_RNA (1)...(19): siRNA sense strand
ccuacaaacaggugaaauu

SEQ ID NO: 659571 - RNA, 19 nt, Homo sapiens
  misc_RNA (1)...(19): siRNA sense strand
cagcaagagaugaaagaaa

SEQ ID NO: 659572 - RNA, 19 nt, Homo sapiens
  misc_RNA (1)...(19): siRNA sense strand
ucagauggcugggcgauac

SEQ ID NO: 659573 - RNA, 19 nt, Homo sapiens
  misc_RNA (1)...(19): siRNA sense strand
uggaagaguucuccucagu

SEQ ID NO: 659574 - RNA, 19 nt, Homo sapiens
  misc_RNA (1)...(19): siRNA sense strand
gcugaucacacugcaaauu

SEQ ID NO: 659575 - RNA, 19 nt, Homo sapiens
  misc_RNA (1)...(19): siRNA sense strand
ggacuccucuuugucuuuu

SEQ ID NO: 659576 - RNA, 19 nt, Homo sapiens
  misc_RNA (1)...(19): siRNA sense strand
gcaugucuccaguacagaa

SEQ ID NO: 659577 - RNA, 19 nt, Homo sapiens
  misc_RNA (1)...(19): siRNA sense strand
gaagaauuucagcaagaga

SEQ ID NO: 659578 - RNA, 19 nt, Homo sapiens
  misc_RNA (1)...(19): siRNA sense strand
ugaagaagcaccagaacca

SEQ ID NO: 659579 - RNA, 19 nt, Homo sapiens
  misc_RNA (1)...(19): siRNA sense strand
gcugaccgcauggacaaua

SEQ ID NO: 659580 - RNA, 19 nt, Homo sapiens
  misc_RNA (1)...(19): siRNA sense strand
gacagaaaauugcuuaucu

SEQ ID NO: 659581 - RNA, 19 nt, Homo sapiens
  misc_RNA (1)...(19): siRNA sense strand
cugcaaauucugccaguuu

SEQ ID NO: 659582 - RNA, 19 nt, Homo sapiens
  misc_RNA (1)...(19): siRNA sense strand
caugccaccuucuugacuu

SEQ ID NO: 659583 - RNA, 19 nt, Homo sapiens
  misc_RNA (1)...(19): siRNA sense strand
gaauuucagcaagagauga

SEQ ID NO: 659584 - RNA, 19 nt, Homo sapiens
  misc_RNA (1)...(19): siRNA sense strand
uugcuuaucugggaggaaa

SEQ ID NO: 659585 - RNA, 19 nt, Homo sapiens
  misc_RNA (1)...(19): siRNA sense strand
caauaacgccaacauagcu

SEQ ID NO: 659586 - RNA, 19 nt, Homo sapiens
  misc_RNA (1)...(19): siRNA sense strand
cugcuggucuacauugaug

SEQ ID NO: 659587 - RNA, 19 nt, Homo sapiens
  misc_RNA (1)...(19): siRNA sense strand
agcaagagaugaaagaaaa

SEQ ID NO: 659588 - RNA, 19 nt, Homo sapiens
  misc_RNA (1)...(19): siRNA sense strand
gggacuccucuuugucuuu

SEQ ID NO: 659589 - RNA, 19 nt, Homo sapiens
  misc_RNA (1)...(19): siRNA sense strand
cugaccgcauggacaauaa

SEQ ID NO: 659590 - RNA, 19 nt, Homo sapiens
  misc_RNA (1)...(19): siRNA sense strand
gugcagagacagaaaauug

SEQ ID NO: 659591 - RNA, 19 nt, Homo sapiens
  misc_RNA (1)...(19): siRNA sense strand
agaagaauuucagcaagag

SEQ ID NO: 659592 - RNA, 19 nt, Homo sapiens
  misc_RNA (1)...(19): siRNA sense strand
ugaucacacugcaaauucu

SEQ ID NO: 659593 - RNA, 19 nt, Homo sapiens
  misc_RNA (1)...(19): siRNA sense strand
aaaacuagauuagcugguu

SEQ ID NO: 659594 - RNA, 19 nt, Homo sapiens
  misc_RNA (1)...(19): siRNA sense strand
gaucacacugcaaauucug

SEQ ID NO: 659595 - RNA, 19 nt, Homo sapiens
  misc_RNA (1)...(19): siRNA sense strand
uggagaagaauuucagcaa

SEQ ID NO: 659596 - RNA, 19 nt, Homo sapiens
  misc_RNA (1)...(19): siRNA sense strand
gaagcaccagaaccaggaa

SEQ ID NO: 659597 - RNA, 19 nt, Homo sapiens
  misc_RNA (1)...(19): siRNA sense strand
uccgcaaacugguggaaga

SEQ ID NO: 659598 - RNA, 19 nt, Homo sapiens
  misc_RNA (1)...(19): siRNA sense strand
guacagaaggaggugacaa

SEQ ID NO: 659599 - RNA, 19 nt, Homo sapiens
  misc_RNA (1)...(19): siRNA sense strand
cauccucagcguagacuug

SEQ ID NO: 659600 - RNA, 19 nt, Homo sapiens
  misc_RNA (1)...(19): siRNA sense strand
uucaagaaguccggcauug

SEQ ID NO: 659601 - RNA, 19 nt, Homo sapiens
  misc_RNA (1)...(19): siRNA sense strand
gcaccagaaccaggaagau

SEQ ID NO: 659602 - RNA, 19 nt, Homo sapiens
  misc_RNA (1)...(19): siRNA sense strand
uagacuugcugaucacacu

SEQ ID NO: 659603 - RNA, 19 nt, Homo sapiens
  misc_RNA (1)...(19): siRNA sense strand
gcauugugcagagacagaa

SEQ ID NO: 659604 - RNA, 19 nt, Homo sapiens
  misc_RNA (1)...(19): siRNA sense strand
gaaagaguguccaucuaua

SEQ ID NO: 659605 - RNA, 19 nt, Homo sapiens
  misc_RNA (1)...(19): siRNA sense strand
gcacagaacuauuuaagau

SEQ ID NO: 659606 - RNA, 19 nt, Homo sapiens
  misc_RNA (1)...(19): siRNA sense strand
ggaaagagcuggaagaaaa

SEQ ID NO: 659607 - RNA, 19 nt, Homo sapiens
  misc_RNA (1)...(19): siRNA sense strand
gaaggacaauucaucgaua

SEQ ID NO: 659608 - RNA, 19 nt, Homo sapiens
  misc_RNA (1)...(19): siRNA sense strand
gcagggagguucacacaaa

SEQ ID NO: 659609 - RNA, 19 nt, Homo sapiens
  misc_RNA (1)...(19): siRNA sense strand
gaaaugagcggucugcaaa

SEQ ID NO: 659610 - RNA, 19 nt, Homo sapiens
  misc_RNA (1)...(19): siRNA sense strand
ccaaagcugucuacgauaa

SEQ ID NO: 659611 - RNA, 19 nt, Homo sapiens
  misc_RNA (1)...(19): siRNA sense strand
ggaaaggugugaccagcua

SEQ ID NO: 659612 - RNA, 19 nt, Homo sapiens
  misc_RNA (1)...(19): siRNA sense strand
ugaauaagcugaugaccaa

SEQ ID NO: 659613 - RNA, 19 nt, Homo sapiens
  misc_RNA (1)...(19): siRNA sense strand
gaaggaagaauuugagaaa

SEQ ID NO: 659614 - RNA, 19 nt, Homo sapiens
  misc_RNA (1)...(19): siRNA sense strand
gagaaucagucuaucuuga

SEQ ID NO: 659615 - RNA, 19 nt, Homo sapiens
  misc_RNA (1)...(19): siRNA sense strand
gaagagaaaccacauuaga

SEQ ID NO: 659616 - RNA, 19 nt, Homo sapiens
  misc_RNA (1)...(19): siRNA sense strand
gcuuugagaucuuugauuu

SEQ ID NO: 659617 - RNA, 19 nt, Homo sapiens
  misc_RNA (1)...(19): siRNA sense strand
gaagccagaucuaauugaa

SEQ ID NO: 659618 - RNA, 19 nt, Homo sapiens
  misc_RNA (1)...(19): siRNA sense strand
gcacugaaguugcugacaa

SEQ ID NO: 659619 - RNA, 19 nt, Homo sapiens
  misc_RNA (1)...(19): siRNA sense strand
agaagaagcuggagacaga

SEQ ID NO: 659620 - RNA, 19 nt, Homo sapiens
  misc_RNA (1)...(19): siRNA sense strand
ggaagaagcagauccagaa

SEQ ID NO: 659621 - RNA, 19 nt, Homo sapiens
  misc_RNA (1)...(19): siRNA sense strand
caacaugaaggaagaauuu

SEQ ID NO: 659622 - RNA, 19 nt, Homo sapiens
  misc_RNA (1)...(19): siRNA sense strand
gaagaucaacugagugaaa

SEQ ID NO: 659623 - RNA, 19 nt, Homo sapiens
  misc_RNA (1)...(19): siRNA sense strand
gaaacuggcuucugcugau

SEQ ID NO: 659624 - RNA, 19 nt, Homo sapiens
  misc_RNA (1)...(19): siRNA sense strand
gaagaagcaugcagauagu

SEQ ID NO: 659625 - RNA, 19 nt, Homo sapiens
  misc_RNA (1)...(19): siRNA sense strand
aaacagaagugugaagaaa

SEQ ID NO: 659626 - RNA, 19 nt, Homo sapiens
  misc_RNA (1)...(19): siRNA sense strand
ggaagaagcaugcagauag

SEQ ID NO: 659627 - RNA, 19 nt, Homo sapiens
  misc_RNA (1)...(19): siRNA sense strand
ggaaagggcugacauugcu

SEQ ID NO: 659628 - RNA, 19 nt, Homo sapiens
  misc_RNA (1)...(19): siRNA sense strand
aagcaaaggugaaauccua

SEQ ID NO: 659629 - RNA, 19 nt, Homo sapiens
  misc_RNA (1)...(19): siRNA sense strand
gaggaagaccgcaagaaua

SEQ ID NO: 659630 - RNA, 19 nt, Homo sapiens
  misc_RNA (1)...(19): siRNA sense strand
ugaagaaacucaugcugaa

SEQ ID NO: 659631 - RNA, 19 nt, Homo sapiens
  misc_RNA (1)...(19): siRNA sense strand
caugaacccucccaaauau

SEQ ID NO: 659632 - RNA, 19 nt, Homo sapiens
  misc_RNA (1)...(19): siRNA sense strand
gaggaaagcgcauccauga

SEQ ID NO: 659633 - RNA, 19 nt, Homo sapiens
  misc_RNA (1)...(19): siRNA sense strand
aaagcaagauugaagauga

SEQ ID NO: 659634 - RNA, 19 nt, Homo sapiens
  misc_RNA (1)...(19): siRNA sense strand
gaaagacauugaugaccuu

SEQ ID NO: 659635 - RNA, 19 nt, Homo sapiens
  misc_RNA (1)...(19): siRNA sense strand
ggccaaagcugucuacgau

SEQ ID NO: 659636 - RNA, 19 nt, Homo sapiens
  misc_RNA (1)...(19): siRNA sense strand
ccauuaggcucaagaagaa

SEQ ID NO: 659637 - RNA, 19 nt, Homo sapiens
  misc_RNA (1)...(19): siRNA sense strand
gaaauugaccagaugaaga

SEQ ID NO: 659638 - RNA, 19 nt, Homo sapiens
  misc_RNA (1)...(19): siRNA sense strand
gcugaaagaagcuaucaua

SEQ ID NO: 659639 - RNA, 19 nt, Homo sapiens
  misc_RNA (1)...(19): siRNA sense strand
gaagcaaguugagcaagaa

SEQ ID NO: 659640 - RNA, 19 nt, Homo sapiens
  misc_RNA (1)...(19): siRNA sense strand
ggacauugcuggcuuugag

SEQ ID NO: 659641 - RNA, 19 nt, Homo sapiens
  misc_RNA (1)...(19): siRNA sense strand
gaucaugucuaacaagaag

SEQ ID NO: 659642 - RNA, 19 nt, Homo sapiens
  misc_RNA (1)...(19): siRNA sense strand
gaucaacugagugaaauua

SEQ ID NO: 659643 - RNA, 19 nt, Homo sapiens
  misc_RNA (1)...(19): siRNA sense strand
gauacaagguguuaaaugc

SEQ ID NO: 659644 - RNA, 19 nt, Homo sapiens
  misc_RNA (1)...(19): siRNA sense strand
aaagaaaggugguaagaag

SEQ ID NO: 659645 - RNA, 19 nt, Homo sapiens
  misc_RNA (1)...(19): siRNA sense strand
ggaagacugugaacaccaa

SEQ ID NO: 659646 - RNA, 19 nt, Homo sapiens
  misc_RNA (1)...(19): siRNA sense strand
gaccaaagcuaaaaucaaa

SEQ ID NO: 659647 - RNA, 19 nt, Homo sapiens
  misc_RNA (1)...(19): siRNA sense strand
caagaagccagaucuaauu

SEQ ID NO: 659648 - RNA, 19 nt, Homo sapiens
  misc_RNA (1)...(19): siRNA sense strand
gaagaagaaggaagaaguu

SEQ ID NO: 659649 - RNA, 19 nt, Homo sapiens
  misc_RNA (1)...(19): siRNA sense strand
agaggaaacuggaggauga

SEQ ID NO: 659650 - RNA, 19 nt, Homo sapiens
  misc_RNA (1)...(19): siRNA sense strand
cuggagaagucuagaguua

SEQ ID NO: 659651 - RNA, 19 nt, Homo sapiens
  misc_RNA (1)...(19): siRNA sense strand
cugcugauauugaaacaua

SEQ ID NO: 659652 - RNA, 19 nt, Homo sapiens
  misc_RNA (1)...(19): siRNA sense strand
gcauccagcuugaguugaa

SEQ ID NO: 659653 - RNA, 19 nt, Homo sapiens
  misc_RNA (1)...(19): siRNA sense strand
ccaugaacccucccaaaua

SEQ ID NO: 659654 - RNA, 19 nt, Homo sapiens
  misc_RNA (1)...(19): siRNA sense strand
ccaccaacccauacgauua

SEQ ID NO: 659655 - RNA, 19 nt, Homo sapiens
  misc_RNA (1)...(19): siRNA sense strand
ggaacucacuuaccaaacu

SEQ ID NO: 659656 - RNA, 19 nt, Homo sapiens
  misc_RNA (1)...(19): siRNA sense strand
ugaggaaucuuuagaccaa

SEQ ID NO: 659657 - RNA, 19 nt, Homo sapiens
  misc_RNA (1)...(19): siRNA sense strand
gcaaacaagccuuuacuca

SEQ ID NO: 659658 - RNA, 19 nt, Homo sapiens
  misc_RNA (1)...(19): siRNA sense strand
ugaaggaucuuuggaacaa

SEQ ID NO: 659659 - RNA, 19 nt, Homo sapiens
  misc_RNA (1)...(19): siRNA sense strand
cagcauugaugaccaagaa

SEQ ID NO: 659660 - RNA, 19 nt, Homo sapiens
  misc_RNA (1)...(19): siRNA sense strand
ccaagaaggccaucacuga

SEQ ID NO: 659661 - RNA, 19 nt, Homo sapiens
  misc_RNA (1)...(19): siRNA sense strand
ucagggagaauuugaauaa

SEQ ID NO: 659662 - RNA, 19 nt, Homo sapiens
  misc_RNA (1)...(19): siRNA sense strand
gaaagaaaggugguaagaa

SEQ ID NO: 659663 - RNA, 19 nt, Homo sapiens
  misc_RNA (1)...(19): siRNA sense strand
agaacaagcuguaugaaca

SEQ ID NO: 659664 - RNA, 19 nt, Homo sapiens
  misc_RNA (1)...(19): siRNA sense strand
gcaucaacuucaccaauga

SEQ ID NO: 659665 - RNA, 19 nt, Homo sapiens
  misc_RNA (1)...(19): siRNA sense strand
gaagcuguauuucaagauc

SEQ ID NO: 659666 - RNA, 19 nt, Homo sapiens
  misc_RNA (1)...(19): siRNA sense strand
gaagaccgcaagaauauuc

SEQ ID NO: 659667 - RNA, 19 nt, Homo sapiens
  misc_RNA (1)...(19): siRNA sense strand
agauugagaugaacaagaa

SEQ ID NO: 659668 - RNA, 19 nt, Homo sapiens
  misc_RNA (1)...(19): siRNA sense strand
caacuucaccaaugagaaa

SEQ ID NO: 659669 - RNA, 19 nt, Homo sapiens
  misc_RNA (1)...(19): siRNA sense strand
ggugaaauccuacaagaga

SEQ ID NO: 659670 - RNA, 19 nt, Homo sapiens
  misc_RNA (1)...(19): siRNA sense strand
aaacaagccuuuacucaac

SEQ ID NO: 659671 - RNA, 19 nt, Homo sapiens
  misc_RNA (1)...(19): siRNA sense strand
gaaaaggacacacuaguuu

SEQ ID NO: 659672 - RNA, 19 nt, Homo sapiens
  misc_RNA (1)...(19): siRNA sense strand
ggaaagaaaggugguaaga

SEQ ID NO: 659673 - RNA, 19 nt, Homo sapiens
  misc_RNA (1)...(19): siRNA sense strand
ugaaggaacucacuuacca

SEQ ID NO: 659674 - RNA, 19 nt, Homo sapiens
  misc_RNA (1)...(19): siRNA sense strand
caaacaagccuuuacucaa

SEQ ID NO: 659675 - RNA, 19 nt, Homo sapiens
  misc_RNA (1)...(19): siRNA sense strand
gaaauucugggcuuuacuu

SEQ ID NO: 659676 - RNA, 19 nt, Homo sapiens
  misc_RNA (1)...(19): siRNA sense strand
gcaaacagaaucaggugaa

SEQ ID NO: 659677 - RNA, 19 nt, Homo sapiens
  misc_RNA (1)...(19): siRNA sense strand
gaaacuggaggaugaaugu

SEQ ID NO: 659678 - RNA, 19 nt, Homo sapiens
  misc_RNA (1)...(19): siRNA sense strand
gaacaagcuguaugaacaa

SEQ ID NO: 659679 - RNA, 19 nt, Homo sapiens
  misc_RNA (1)...(19): siRNA sense strand
ugacaacuccucucgcuuu

SEQ ID NO: 659680 - RNA, 19 nt, Homo sapiens
  misc_RNA (1)...(19): siRNA sense strand
caagagacaagcugaagaa

SEQ ID NO: 659681 - RNA, 19 nt, Homo sapiens
  misc_RNA (1)...(19): siRNA sense strand
gaacucacuuaccaaacug

SEQ ID NO: 659682 - RNA, 19 nt, Homo sapiens
  misc_RNA (1)...(19): siRNA sense strand
gauaagauccuggcagaau

SEQ ID NO: 659683 - RNA, 19 nt, Homo sapiens
  misc_RNA (1)...(19): siRNA sense strand
gacaaugccuaucaguuca

SEQ ID NO: 659684 - RNA, 19 nt, Homo sapiens
  misc_RNA (1)...(19): siRNA sense strand
gaauugaagcccagaacaa

SEQ ID NO: 659685 - RNA, 19 nt, Homo sapiens
  misc_RNA (1)...(19): siRNA sense strand
aagaagaacuuggaacaga

SEQ ID NO: 659686 - RNA, 19 nt, Homo sapiens
  misc_RNA (1)...(19): siRNA sense strand
cugaggagcugaagaagga

SEQ ID NO: 659687 - RNA, 19 nt, Homo sapiens
  misc_RNA (1)...(19): siRNA sense strand
aggcaucucuugaacauga

SEQ ID NO: 659688 - RNA, 19 nt, Homo sapiens
  misc_RNA (1)...(19): siRNA sense strand
gaaacagaagugugaagaa

SEQ ID NO: 659689 - RNA, 19 nt, Homo sapiens
  misc_RNA (1)...(19): siRNA sense strand
caaaugugcuucccuugag

SEQ ID NO: 659690 - RNA, 19 nt, Homo sapiens
  misc_RNA (1)...(19): siRNA sense strand
gaucaaugcugagcugaca

SEQ ID NO: 659691 - RNA, 19 nt, Homo sapiens
  misc_RNA (1)...(19): siRNA sense strand
acagacaccuccuucaaga

SEQ ID NO: 659692 - RNA, 19 nt, Homo sapiens
  misc_RNA (1)...(19): siRNA sense strand
ggagaagucuagaguuacu

SEQ ID NO: 659693 - RNA, 19 nt, Homo sapiens
  misc_RNA (1)...(19): siRNA sense strand
ccaagcgugucauccagua

SEQ ID NO: 659694 - RNA, 19 nt, Homo sapiens
  misc_RNA (1)...(19): siRNA sense strand
ugagugaaauuaagaccaa

SEQ ID NO: 659695 - RNA, 19 nt, Homo sapiens
  misc_RNA (1)...(19): siRNA sense strand
ccggauggaucuagaaaga

SEQ ID NO: 659696 - RNA, 19 nt, Homo sapiens
  misc_RNA (1)...(19): siRNA sense strand
aagaagagcuggcuaagac

SEQ ID NO: 659697 - RNA, 19 nt, Homo sapiens
  misc_RNA (1)...(19): siRNA sense strand
ccaaagaagagcuggcuaa

SEQ ID NO: 659698 - RNA, 19 nt, Homo sapiens
  misc_RNA (1)...(19): siRNA sense strand
cagaucaugucuaacaaga

SEQ ID NO: 659699 - RNA, 19 nt, Homo sapiens
  misc_RNA (1)...(19): siRNA sense strand
caacugagugaaauuaaga

SEQ ID NO: 659700 - RNA, 19 nt, Homo sapiens
  misc_RNA (1)...(19): siRNA sense strand
agaaagaguuugaaaugag

SEQ ID NO: 659701 - RNA, 19 nt, Homo sapiens
  misc_RNA (1)...(19): siRNA sense strand
gacucuggcucuccucuuu

SEQ ID NO: 659702 - RNA, 19 nt, Homo sapiens
  misc_RNA (1)...(19): siRNA sense strand
caaugaguaugucaccaaa

SEQ ID NO: 659703 - RNA, 19 nt, Homo sapiens
  misc_RNA (1)...(19): siRNA sense strand
ggagcaagcugagccagau

SEQ ID NO: 659704 - RNA, 19 nt, Homo sapiens
  misc_RNA (1)...(19): siRNA sense strand
gcaaagaccuccaguauau

SEQ ID NO: 659705 - RNA, 19 nt, Homo sapiens
  misc_RNA (1)...(19): siRNA sense strand
cagagaagcuggagagaau

SEQ ID NO: 659706 - RNA, 19 nt, Homo sapiens
  misc_RNA (1)...(19): siRNA sense strand
gggagaagguggaagacaa

SEQ ID NO: 659707 - RNA, 19 nt, Homo sapiens
  misc_RNA (1)...(19): siRNA sense strand
gaaacagccacaucuuauu

SEQ ID NO: 659708 - RNA, 19 nt, Homo sapiens
  misc_RNA (1)...(19): siRNA sense strand
gcagagggauguggagguu

SEQ ID NO: 659709 - RNA, 19 nt, Homo sapiens
  misc_RNA (1)...(19): siRNA sense strand
aaacagccacaucuuauuu

SEQ ID NO: 659710 - RNA, 19 nt, Homo sapiens
  misc_RNA (1)...(19): siRNA sense strand
gguguaacgcugugaauuu

SEQ ID NO: 659711 - RNA, 19 nt, Homo sapiens
  misc_RNA (1)...(19): siRNA sense strand
cagcaaagaccuccaguau

SEQ ID NO: 659712 - RNA, 19 nt, Homo sapiens
  misc_RNA (1)...(19): siRNA sense strand
gagaauauauccuuauccu

SEQ ID NO: 659713 - RNA, 19 nt, Homo sapiens
  misc_RNA (1)...(19): siRNA sense strand
cgaaacagccacaucuuau

SEQ ID NO: 659714 - RNA, 19 nt, Homo sapiens
  misc_RNA (1)...(19): siRNA sense strand
guccagagccucaucagaa

SEQ ID NO: 659715 - RNA, 19 nt, Homo sapiens
  misc_RNA (1)...(19): siRNA sense strand
ucgaaacagccacaucuua

SEQ ID NO: 659716 - RNA, 19 nt, Homo sapiens
  misc_RNA (1)...(19): siRNA sense strand
aagggaaucuggcugcaaa

SEQ ID NO: 659717 - RNA, 19 nt, Homo sapiens
  misc_RNA (1)...(19): siRNA sense strand
ucucagacauacccacuau

SEQ ID NO: 659718 - RNA, 19 nt, Homo sapiens
  misc_RNA (1)...(19): siRNA sense strand
ucagacauacccacuauau

SEQ ID NO: 659719 - RNA, 19 nt, Homo sapiens
  misc_RNA (1)...(19): siRNA sense strand
acagcgaggugcccaguga

SEQ ID NO: 659720 - RNA, 19 nt, Homo sapiens
  misc_RNA (1)...(19): siRNA sense strand
gcagaaagagagagacaag

SEQ ID NO: 659721 - RNA, 19 nt, Homo sapiens
  misc_RNA (1)...(19): siRNA sense strand
gcacaggccuuggcaucag

SEQ ID NO: 659722 - RNA, 19 nt, Homo sapiens
  misc_RNA (1)...(19): siRNA sense strand
ucgccaaacugcacaaauc

SEQ ID NO: 659723 - RNA, 19 nt, Homo sapiens
  misc_RNA (1)...(19): siRNA sense strand
ccucauacucauacucaua

SEQ ID NO: 659724 - RNA, 19 nt, Homo sapiens
  misc_RNA (1)...(19): siRNA sense strand
gaucuccggucggucgaaa

SEQ ID NO: 659725 - RNA, 19 nt, Homo sapiens
  misc_RNA (1)...(19): siRNA sense strand
uggagaugcugaucaggaa

SEQ ID NO: 659726 - RNA, 19 nt, Homo sapiens
  misc_RNA (1)...(19): siRNA sense strand
ugggaggccuuugauacua

SEQ ID NO: 659727 - RNA, 19 nt, Homo sapiens
  misc_RNA (1)...(19): siRNA sense strand
ggacugcccuugguguaac

SEQ ID NO: 659728 - RNA, 19 nt, Homo sapiens
  misc_RNA (1)...(19): siRNA sense strand
gggaggccuuugauacuag

SEQ ID NO: 659729 - RNA, 19 nt, Homo sapiens
  misc_RNA (1)...(19): siRNA sense strand
agaaagagagagacaagga

SEQ ID NO: 659730 - RNA, 19 nt, Homo sapiens
  misc_RNA (1)...(19): siRNA sense strand
auacuagccuguggucuga

SEQ ID NO: 659731 - RNA, 19 nt, Homo sapiens
  misc_RNA (1)...(19): siRNA sense strand
ggccuugggugugcgcuuu

SEQ ID NO: 659732 - RNA, 19 nt, Homo sapiens
  misc_RNA (1)...(19): siRNA sense strand
ccauggagaccacagagaa

SEQ ID NO: 659733 - RNA, 19 nt, Homo sapiens
  misc_RNA (1)...(19): siRNA sense strand
gagcagcugaggaggaaga

SEQ ID NO: 659734 - RNA, 19 nt, Homo sapiens
  misc_RNA (1)...(19): siRNA sense strand
ucguggaggugcagaaaga

SEQ ID NO: 659735 - RNA, 19 nt, Homo sapiens
  misc_RNA (1)...(19): siRNA sense strand
cagcugaggaggaagaaga

SEQ ID NO: 659736 - RNA, 19 nt, Homo sapiens
  misc_RNA (1)...(19): siRNA sense strand
gcaacgugguggccuucau

SEQ ID NO: 659737 - RNA, 19 nt, Homo sapiens
  misc_RNA (1)...(19): siRNA sense strand
ccacaggcaggcacagcua

SEQ ID NO: 659738 - RNA, 19 nt, Homo sapiens
  misc_RNA (1)...(19): siRNA sense strand
agagggauguggagguugu

SEQ ID NO: 659739 - RNA, 19 nt, Homo sapiens
  misc_RNA (1)...(19): siRNA sense strand
gaaaaggagcagaagaaga

SEQ ID NO: 659740 - RNA, 19 nt, Homo sapiens
  misc_RNA (1)...(19): siRNA sense strand
ggagaagguggaagacaag

SEQ ID NO: 659741 - RNA, 19 nt, Homo sapiens
  misc_RNA (1)...(19): siRNA sense strand
ggucgaaacagccacaucu

SEQ ID NO: 659742 - RNA, 19 nt, Homo sapiens
  misc_RNA (1)...(19): siRNA sense strand
ccagcucccugccucauac

SEQ ID NO: 659743 - RNA, 19 nt, Homo sapiens
  misc_RNA (1)...(19): siRNA sense strand
gaagggaaucuggcugcaa

SEQ ID NO: 659744 - RNA, 19 nt, Homo sapiens
  misc_RNA (1)...(19): siRNA sense strand
aguagcggguuccggcaua

SEQ ID NO: 659745 - RNA, 19 nt, Homo sapiens
  misc_RNA (1)...(19): siRNA sense strand
gggacugcccuugguguaa

SEQ ID NO: 659746 - RNA, 19 nt, Homo sapiens
  misc_RNA (1)...(19): siRNA sense strand
cuccgaaccucaucagcaa

SEQ ID NO: 659747 - RNA, 19 nt, Homo sapiens
  misc_RNA (1)...(19): siRNA sense strand
gagauacuccgaaccucau

SEQ ID NO: 659748 - RNA, 19 nt, Homo sapiens
  misc_RNA (1)...(19): siRNA sense strand
agccacaucuuauuucucu

SEQ ID NO: 659749 - RNA, 19 nt, Homo sapiens
  misc_RNA (1)...(19): siRNA sense strand
agcaaagaccuccaguaua

SEQ ID NO: 659750 - RNA, 19 nt, Homo sapiens
  misc_RNA (1)...(19): siRNA sense strand
gcacggcuucgccaaacug

SEQ ID NO: 659751 - RNA, 19 nt, Homo sapiens
  misc_RNA (1)...(19): siRNA sense strand
agacauacccacuauaucc

SEQ ID NO: 659752 - RNA, 19 nt, Homo sapiens
  misc_RNA (1)...(19): siRNA sense strand
aggagcagcugaggaggaa

SEQ ID NO: 659753 - RNA, 19 nt, Homo sapiens
  misc_RNA (1)...(19): siRNA sense strand
guguaacgcugugaauuuu

SEQ ID NO: 659754 - RNA, 19 nt, Homo sapiens
  misc_RNA (1)...(19): siRNA sense strand
gcagaaggagggagaucuc

SEQ ID NO: 659755 - RNA, 19 nt, Homo sapiens
  misc_RNA (1)...(19): siRNA sense strand
ggagaugcugaucaggaaa

SEQ ID NO: 659756 - RNA, 19 nt, Homo sapiens
  misc_RNA (1)...(19): siRNA sense strand
aagaagagcagagggaugu

SEQ ID NO: 659757 - RNA, 19 nt, Homo sapiens
  misc_RNA (1)...(19): siRNA sense strand
ggaggugcagaaagagaga

SEQ ID NO: 659758 - RNA, 19 nt, Homo sapiens
  misc_RNA (1)...(19): siRNA sense strand
ggagggauacuugcuucga

SEQ ID NO: 659759 - RNA, 19 nt, Homo sapiens
  misc_RNA (1)...(19): siRNA sense strand
ucagcaaagaccuccagua

SEQ ID NO: 659760 - RNA, 19 nt, Homo sapiens
  misc_RNA (1)...(19): siRNA sense strand
caggagcacccaagagaca

SEQ ID NO: 659761 - RNA, 19 nt, Homo sapiens
  misc_RNA (1)...(19): siRNA sense strand
caacgugguggccuucauc

SEQ ID NO: 659762 - RNA, 19 nt, Homo sapiens
  misc_RNA (1)...(19): siRNA sense strand
cacaggccuuggcaucaga

SEQ ID NO: 659763 - RNA, 19 nt, Homo sapiens
  misc_RNA (1)...(19): siRNA sense strand
acagagaagcuggagagaa

SEQ ID NO: 659764 - RNA, 19 nt, Homo sapiens
  misc_RNA (1)...(19): siRNA sense strand
cgacugggaggccuuugau

SEQ ID NO: 659765 - RNA, 19 nt, Homo sapiens
  misc_RNA (1)...(19): siRNA sense strand
auacucauacucauacuca

SEQ ID NO: 659766 - RNA, 19 nt, Homo sapiens
  misc_RNA (1)...(19): siRNA sense strand
caggaaaaguacaccuauu

SEQ ID NO: 659767 - RNA, 19 nt, Homo sapiens
  misc_RNA (1)...(19): siRNA sense strand
gcaggcacagcuacaaagg

SEQ ID NO: 659768 - RNA, 19 nt, Homo sapiens
  misc_RNA (1)...(19): siRNA sense strand
gacugggaggccuuugaua

SEQ ID NO: 659769 - RNA, 19 nt, Homo sapiens
  misc_RNA (1)...(19): siRNA sense strand
cgacagagguuuacaguga

SEQ ID NO: 659770 - RNA, 19 nt, Homo sapiens
  misc_RNA (1)...(19): siRNA sense strand
gcaaacacauuacacagau

SEQ ID NO: 659771 - RNA, 19 nt, Homo sapiens
  misc_RNA (1)...(19): siRNA sense strand
ugagauagaugaacucuuc

SEQ ID NO: 659772 - RNA, 19 nt, Homo sapiens
  misc_RNA (1)...(19): siRNA sense strand
caaagaagccaaugcuauu

SEQ ID NO: 659773 - RNA, 19 nt, Homo sapiens
  misc_RNA (1)...(19): siRNA sense strand
gaugugagcaaggaaauua

SEQ ID NO: 659774 - RNA, 19 nt, Homo sapiens
  misc_RNA (1)...(19): siRNA sense strand
gauggcaaaucaccuugua

SEQ ID NO: 659775 - RNA, 19 nt, Homo sapiens
  misc_RNA (1)...(19): siRNA sense strand
ccacagcuguccucucuug

SEQ ID NO: 659776 - RNA, 19 nt, Homo sapiens
  misc_RNA (1)...(19): siRNA sense strand
caaacacauuacacagaua

SEQ ID NO: 659777 - RNA, 19 nt, Homo sapiens
  misc_RNA (1)...(19): siRNA sense strand
uaaaugaugugagcaagga

SEQ ID NO: 659778 - RNA, 19 nt, Homo sapiens
  misc_RNA (1)...(19): siRNA sense strand
uguaaagccugauaauaga

SEQ ID NO: 659779 - RNA, 19 nt, Homo sapiens
  misc_RNA (1)...(19): siRNA sense strand
gcaagaggccaagagaauu

SEQ ID NO: 659780 - RNA, 19 nt, Homo sapiens
  misc_RNA (1)...(19): siRNA sense strand
gagcaaggaaauuaaucua

SEQ ID NO: 659781 - RNA, 19 nt, Homo sapiens
  misc_RNA (1)...(19): siRNA sense strand
ucaaagaagccaaugcuau

SEQ ID NO: 659782 - RNA, 19 nt, Homo sapiens
  misc_RNA (1)...(19): siRNA sense strand
caagaggccaagagaauug

SEQ ID NO: 659783 - RNA, 19 nt, Homo sapiens
  misc_RNA (1)...(19): siRNA sense strand
gaugaagccuuggagaaag

SEQ ID NO: 659784 - RNA, 19 nt, Homo sapiens
  misc_RNA (1)...(19): siRNA sense strand
gcaaagcuuuuaagugaga

SEQ ID NO: 659785 - RNA, 19 nt, Homo sapiens
  misc_RNA (1)...(19): siRNA sense strand
ugagagagcagcaguagau

SEQ ID NO: 659786 - RNA, 19 nt, Homo sapiens
  misc_RNA (1)...(19): siRNA sense strand
cagcuguccucucuuggaa

SEQ ID NO: 659787 - RNA, 19 nt, Homo sapiens
  misc_RNA (1)...(19): siRNA sense strand
gcaaaucaccuuguaaagc

SEQ ID NO: 659788 - RNA, 19 nt, Homo sapiens
  misc_RNA (1)...(19): siRNA sense strand
guccacagcuguccucucu

SEQ ID NO: 659789 - RNA, 19 nt, Homo sapiens
  misc_RNA (1)...(19): siRNA sense strand
gguuuacagugauugcaaa

SEQ ID NO: 659790 - RNA, 19 nt, Homo sapiens
  misc_RNA (1)...(19): siRNA sense strand
augcaaagcuuuuaaguga

SEQ ID NO: 659791 - RNA, 19 nt, Homo sapiens
  misc_RNA (1)...(19): siRNA sense strand
uggcaaaucaccuuguaaa

SEQ ID NO: 659792 - RNA, 19 nt, Homo sapiens
  misc_RNA (1)...(19): siRNA sense strand
guaaagccugauaauagaa

SEQ ID NO: 659793 - RNA, 19 nt, Homo sapiens
  misc_RNA (1)...(19): siRNA sense strand
gacagagguuuacagugau

SEQ ID NO: 659794 - RNA, 19 nt, Homo sapiens
  misc_RNA (1)...(19): siRNA sense strand
acagagguuuacagugauu

SEQ ID NO: 659795 - RNA, 19 nt, Homo sapiens
  misc_RNA (1)...(19): siRNA sense strand
gagagcagcaguagaugca

SEQ ID NO: 659796 - RNA, 19 nt, Homo sapiens
  misc_RNA (1)...(19): siRNA sense strand
uuguaaagccugauaauag

SEQ ID NO: 659797 - RNA, 19 nt, Homo sapiens
  misc_RNA (1)...(19): siRNA sense strand
agaugaagccuuggagaaa

SEQ ID NO: 659798 - RNA, 19 nt, Homo sapiens
  misc_RNA (1)...(19): siRNA sense strand
cuaauguugucuaccuaug

SEQ ID NO: 659799 - RNA, 19 nt, Homo sapiens
  misc_RNA (1)...(19): siRNA sense strand
aagaugaagccuuggagaa

SEQ ID NO: 659800 - RNA, 19 nt, Homo sapiens
  misc_RNA (1)...(19): siRNA sense strand
agugauugcaaacacauua

SEQ ID NO: 659801 - RNA, 19 nt, Homo sapiens
  misc_RNA (1)...(19): siRNA sense strand
cuuguaaagccugauaaua

SEQ ID NO: 659802 - RNA, 19 nt, Homo sapiens
  misc_RNA (1)...(19): siRNA sense strand
ucugaaauuuccggacuau

SEQ ID NO: 659803 - RNA, 19 nt, Homo sapiens
  misc_RNA (1)...(19): siRNA sense strand
aaucuaauguugucuaccu

SEQ ID NO: 659804 - RNA, 19 nt, Homo sapiens
  misc_RNA (1)...(19): siRNA sense strand
ugcaagaggccaagagaau

SEQ ID NO: 659805 - RNA, 19 nt, Homo sapiens
  misc_RNA (1)...(19): siRNA sense strand
uuacagugauugcaaacac

SEQ ID NO: 659806 - RNA, 19 nt, Homo sapiens
  misc_RNA (1)...(19): siRNA sense strand
acauugaugagauagauga

SEQ ID NO: 659807 - RNA, 19 nt, Homo sapiens
  misc_RNA (1)...(19): siRNA sense strand
gcuguccucucuuggaaaa

SEQ ID NO: 659808 - RNA, 19 nt, Homo sapiens
  misc_RNA (1)...(19): siRNA sense strand
augaagccuuggagaaaga

SEQ ID NO: 659809 - RNA, 19 nt, Homo sapiens
  misc_RNA (1)...(19): siRNA sense strand
agagaguuccugcgacaga

SEQ ID NO: 659810 - RNA, 19 nt, Homo sapiens
  misc_RNA (1)...(19): siRNA sense strand
gagucuccagugccagaua

SEQ ID NO: 659811 - RNA, 19 nt, Homo sapiens
  misc_RNA (1)...(19): siRNA sense strand
gcaaugacauccauaauuu

SEQ ID NO: 659812 - RNA, 19 nt, Homo sapiens
  misc_RNA (1)...(19): siRNA sense strand
gaauagagccuuugugaaa

SEQ ID NO: 659813 - RNA, 19 nt, Homo sapiens
  misc_RNA (1)...(19): siRNA sense strand
uaacagacauucagauuga

SEQ ID NO: 659814 - RNA, 19 nt, Homo sapiens
  misc_RNA (1)...(19): siRNA sense strand
gagguuggcuuguaaauga

SEQ ID NO: 659815 - RNA, 19 nt, Homo sapiens
  misc_RNA (1)...(19): siRNA sense strand
gaacuuggcugugcaaugu

SEQ ID NO: 659816 - RNA, 19 nt, Homo sapiens
  misc_RNA (1)...(19): siRNA sense strand
guacugcaauguaaagaua

SEQ ID NO: 659817 - RNA, 19 nt, Homo sapiens
  misc_RNA (1)...(19): siRNA sense strand
ggaguugccucauuuagaa

SEQ ID NO: 659818 - RNA, 19 nt, Homo sapiens
  misc_RNA (1)...(19): siRNA sense strand
gcaaauguaugcacaacuu

SEQ ID NO: 659819 - RNA, 19 nt, Homo sapiens
  misc_RNA (1)...(19): siRNA sense strand
gaagaagccuuaaguuugg

SEQ ID NO: 659820 - RNA, 19 nt, Homo sapiens
  misc_RNA (1)...(19): siRNA sense strand
gaacugggcacuuaccaua

SEQ ID NO: 659821 - RNA, 19 nt, Homo sapiens
  misc_RNA (1)...(19): siRNA sense strand
cgaaacaucuaaugaagaa

SEQ ID NO: 659822 - RNA, 19 nt, Homo sapiens
  misc_RNA (1)...(19): siRNA sense strand
gggaugacaccaaauauua

SEQ ID NO: 659823 - RNA, 19 nt, Homo sapiens
  misc_RNA (1)...(19): siRNA sense strand
ugacaaagauccagugaug

SEQ ID NO: 659824 - RNA, 19 nt, Homo sapiens
  misc_RNA (1)...(19): siRNA sense strand
ggaagaaccaauugauaua

SEQ ID NO: 659825 - RNA, 19 nt, Homo sapiens
  misc_RNA (1)...(19): siRNA sense strand
gaaguuagagccaaauuga

SEQ ID NO: 659826 - RNA, 19 nt, Homo sapiens
  misc_RNA (1)...(19): siRNA sense strand
guagaaacccagaagaaua

SEQ ID NO: 659827 - RNA, 19 nt, Homo sapiens
  misc_RNA (1)...(19): siRNA sense strand
ggaggagguuggcuuguaa

SEQ ID NO: 659828 - RNA, 19 nt, Homo sapiens
  misc_RNA (1)...(19): siRNA sense strand
gaagauuacuguugagagu

SEQ ID NO: 659829 - RNA, 19 nt, Homo sapiens
  misc_RNA (1)...(19): siRNA sense strand
guaaagauauguugaugag

SEQ ID NO: 659830 - RNA, 19 nt, Homo sapiens
  misc_RNA (1)...(19): siRNA sense strand
gaugaagagucagaagaua

SEQ ID NO: 659831 - RNA, 19 nt, Homo sapiens
  misc_RNA (1)...(19): siRNA sense strand
ucuaaucgcugaugaaugu

SEQ ID NO: 659832 - RNA, 19 nt, Homo sapiens
  misc_RNA (1)...(19): siRNA sense strand
uaaugaagcucagugguuu

SEQ ID NO: 659833 - RNA, 19 nt, Homo sapiens
  misc_RNA (1)...(19): siRNA sense strand
gagaauggacaacaaauug

SEQ ID NO: 659834 - RNA, 19 nt, Homo sapiens
  misc_RNA (1)...(19): siRNA sense strand
ucaaugaacugguuacaca

SEQ ID NO: 659835 - RNA, 19 nt, Homo sapiens
  misc_RNA (1)...(19): siRNA sense strand
aagagaaucuguuggguuu

SEQ ID NO: 659836 - RNA, 19 nt, Homo sapiens
  misc_RNA (1)...(19): siRNA sense strand
ucaccaagcugcagaggaa

SEQ ID NO: 659837 - RNA, 19 nt, Homo sapiens
  misc_RNA (1)...(19): siRNA sense strand
ugaagaagccuuaaguuug

SEQ ID NO: 659838 - RNA, 19 nt, Homo sapiens
  misc_RNA (1)...(19): siRNA sense strand
ugaauaugcuguauaguca

SEQ ID NO: 659839 - RNA, 19 nt, Homo sapiens
  misc_RNA (1)...(19): siRNA sense strand
gcaaacaaggaacauuuaa

SEQ ID NO: 659840 - RNA, 19 nt, Homo sapiens
  misc_RNA (1)...(19): siRNA sense strand
gcaauaauagcaauggaaa

SEQ ID NO: 659841 - RNA, 19 nt, Homo sapiens
  misc_RNA (1)...(19): siRNA sense strand
uaaaguguuugcuucguuu

SEQ ID NO: 659842 - RNA, 19 nt, Homo sapiens
  misc_RNA (1)...(19): siRNA sense strand
ggaaaagccugcacacuau

SEQ ID NO: 659843 - RNA, 19 nt, Homo sapiens
  misc_RNA (1)...(19): siRNA sense strand
gaaauaacagacauucaga

SEQ ID NO: 659844 - RNA, 19 nt, Homo sapiens
  misc_RNA (1)...(19): siRNA sense strand
acagggaccuucucaaaug

SEQ ID NO: 659845 - RNA, 19 nt, Homo sapiens
  misc_RNA (1)...(19): siRNA sense strand
gaagcucagugguuucgaa

SEQ ID NO: 659846 - RNA, 19 nt, Homo sapiens
  misc_RNA (1)...(19): siRNA sense strand
guaaaguguuugcuucguu

SEQ ID NO: 659847 - RNA, 19 nt, Homo sapiens
  misc_RNA (1)...(19): siRNA sense strand
cuaccaugcuucuaaguuu

SEQ ID NO: 659848 - RNA, 19 nt, Homo sapiens
  misc_RNA (1)...(19): siRNA sense strand
ucaaagagcaucuaugugu

SEQ ID NO: 659849 - RNA, 19 nt, Homo sapiens
  misc_RNA (1)...(19): siRNA sense strand
cagaaaugcuggcuaaagu

SEQ ID NO: 659850 - RNA, 19 nt, Homo sapiens
  misc_RNA (1)...(19): siRNA sense strand
aaguuuagcugcccaguuu

SEQ ID NO: 659851 - RNA, 19 nt, Homo sapiens
  misc_RNA (1)...(19): siRNA sense strand
gagacaagcugccaguagu

SEQ ID NO: 659852 - RNA, 19 nt, Homo sapiens
  misc_RNA (1)...(19): siRNA sense strand
cagaaucaaugaacugguu

SEQ ID NO: 659853 - RNA, 19 nt, Homo sapiens
  misc_RNA (1)...(19): siRNA sense strand
gugaagaagccuuaaguuu

SEQ ID NO: 659854 - RNA, 19 nt, Homo sapiens
  misc_RNA (1)...(19): siRNA sense strand
uagaaacccagaagaauaa

SEQ ID NO: 659855 - RNA, 19 nt, Homo sapiens
  misc_RNA (1)...(19): siRNA sense strand
aaacagggaccuucucaaa

SEQ ID NO: 659856 - RNA, 19 nt, Homo sapiens
  misc_RNA (1)...(19): siRNA sense strand
cuauggaacugggcacuua

SEQ ID NO: 659857 - RNA, 19 nt, Homo sapiens
  misc_RNA (1)...(19): siRNA sense strand
uggagaagauuacuguuga

SEQ ID NO: 659858 - RNA, 19 nt, Homo sapiens
  misc_RNA (1)...(19): siRNA sense strand
guacgaguuugaaguuaga

SEQ ID NO: 659859 - RNA, 19 nt, Homo sapiens
  misc_RNA (1)...(19): siRNA sense strand
ucucaaugcuguaaaccua

SEQ ID NO: 659860 - RNA, 19 nt, Homo sapiens
  misc_RNA (1)...(19): siRNA sense strand
gagaaucuguuggguuuca

SEQ ID NO: 659861 - RNA, 19 nt, Homo sapiens
  misc_RNA (1)...(19): siRNA sense strand
caacuugguuaaccucuca

SEQ ID NO: 659862 - RNA, 19 nt, Homo sapiens
  misc_RNA (1)...(19): siRNA sense strand
uaacauaccagaggcaauu

SEQ ID NO: 659863 - RNA, 19 nt, Homo sapiens
  misc_RNA (1)...(19): siRNA sense strand
gaaauggcaguaaaccuau

SEQ ID NO: 659864 - RNA, 19 nt, Homo sapiens
  misc_RNA (1)...(19): siRNA sense strand
ccaguuugcucuagagaau

SEQ ID NO: 659865 - RNA, 19 nt, Homo sapiens
  misc_RNA (1)...(19): siRNA sense strand
ugaaauggaucuggacuuc

SEQ ID NO: 659866 - RNA, 19 nt, Homo sapiens
  misc_RNA (1)...(19): siRNA sense strand
gaaaugcuggcuaaaguuc

SEQ ID NO: 659867 - RNA, 19 nt, Homo sapiens
  misc_RNA (1)...(19): siRNA sense strand
cgacugauuaugaugaaua

SEQ ID NO: 659868 - RNA, 19 nt, Homo sapiens
  misc_RNA (1)...(19): siRNA sense strand
gaacugguuacacaacauu

SEQ ID NO: 659869 - RNA, 19 nt, Homo sapiens
  misc_RNA (1)...(19): siRNA sense strand
uaccaugcuucuaaguuua

SEQ ID NO: 659870 - RNA, 19 nt, Homo sapiens
  misc_RNA (1)...(19): siRNA sense strand
gcuguuaccugaauuugca

SEQ ID NO: 659871 - RNA, 19 nt, Homo sapiens
  misc_RNA (1)...(19): siRNA sense strand
agaaauggcaguaaaccua

SEQ ID NO: 659872 - RNA, 19 nt, Homo sapiens
  misc_RNA (1)...(19): siRNA sense strand
ggcagaagcugaacgacau

SEQ ID NO: 659873 - RNA, 19 nt, Homo sapiens
  misc_RNA (1)...(19): siRNA sense strand
gaaacccagaagaauaaua

SEQ ID NO: 659874 - RNA, 19 nt, Homo sapiens
  misc_RNA (1)...(19): siRNA sense strand
uuacaacuuuggaguagaa

SEQ ID NO: 659875 - RNA, 19 nt, Homo sapiens
  misc_RNA (1)...(19): siRNA sense strand
caucaucucuguuacaacu

SEQ ID NO: 659876 - RNA, 19 nt, Homo sapiens
  misc_RNA (1)...(19): siRNA sense strand
cuuauaagaugucccaguu

SEQ ID NO: 659877 - RNA, 19 nt, Homo sapiens
  misc_RNA (1)...(19): siRNA sense strand
gaaagaaauggaucgacuu

SEQ ID NO: 659878 - RNA, 19 nt, Homo sapiens
  misc_RNA (1)...(19): siRNA sense strand
gaguagaaacccagaagaa

SEQ ID NO: 659879 - RNA, 19 nt, Homo sapiens
  misc_RNA (1)...(19): siRNA sense strand
gcuaugauauugggaagau

SEQ ID NO: 659880 - RNA, 19 nt, Homo sapiens
  misc_RNA (1)...(19): siRNA sense strand
ccaaggagaagauugaaga

SEQ ID NO: 659881 - RNA, 19 nt, Homo sapiens
  misc_RNA (1)...(19): siRNA sense strand
gaaauacuacaucuugaca

SEQ ID NO: 659882 - RNA, 19 nt, Homo sapiens
  misc_RNA (1)...(19): siRNA sense strand
ccuugaagcugucauggaa

SEQ ID NO: 659883 - RNA, 19 nt, Homo sapiens
  misc_RNA (1)...(19): siRNA sense strand
uagcaaacaaggaacauuu

SEQ ID NO: 659884 - RNA, 19 nt, Homo sapiens
  misc_RNA (1)...(19): siRNA sense strand
caaaguauucaacgacuga

SEQ ID NO: 659885 - RNA, 19 nt, Homo sapiens
  misc_RNA (1)...(19): siRNA sense strand
gcuaugaaacucagaugaa

SEQ ID NO: 659886 - RNA, 19 nt, Homo sapiens
  misc_RNA (1)...(19): siRNA sense strand
uaaagacuacccagaaaug

SEQ ID NO: 659887 - RNA, 19 nt, Homo sapiens
  misc_RNA (1)...(19): siRNA sense strand
caacgacugauuaugauga

SEQ ID NO: 659888 - RNA, 19 nt, Homo sapiens
  misc_RNA (1)...(19): siRNA sense strand
gauauugggaagauggaua

SEQ ID NO: 659889 - RNA, 19 nt, Homo sapiens
  misc_RNA (1)...(19): siRNA sense strand
gggagucuauggcugaaau

SEQ ID NO: 659890 - RNA, 19 nt, Homo sapiens
  misc_RNA (1)...(19): siRNA sense strand
gaaauugcuucugcuguac

SEQ ID NO: 659891 - RNA, 19 nt, Homo sapiens
  misc_RNA (1)...(19): siRNA sense strand
ucaccuaccaugcuucuaa

SEQ ID NO: 659892 - RNA, 19 nt, Homo sapiens
  misc_RNA (1)...(19): siRNA sense strand
aggagaagauugaagaaau

SEQ ID NO: 659893 - RNA, 19 nt, Homo sapiens
  misc_RNA (1)...(19): siRNA sense strand
ugacaugcccuuagacuuc

SEQ ID NO: 659894 - RNA, 19 nt, Homo sapiens
  misc_RNA (1)...(19): siRNA sense strand
gcaguaaaccuauggaacu

SEQ ID NO: 659895 - RNA, 19 nt, Homo sapiens
  misc_RNA (1)...(19): siRNA sense strand
agccaaagcuaugauauug

SEQ ID NO: 659896 - RNA, 19 nt, Homo sapiens
  misc_RNA (1)...(19): siRNA sense strand
gauggaucaugaaagagaa

SEQ ID NO: 659897 - RNA, 19 nt, Homo sapiens
  misc_RNA (1)...(19): siRNA sense strand
gcaauguaaagauauguug

SEQ ID NO: 659898 - RNA, 19 nt, Homo sapiens
  misc_RNA (1)...(19): siRNA sense strand
agaugaauaugcuguauag

SEQ ID NO: 659899 - RNA, 19 nt, Homo sapiens
  misc_RNA (1)...(19): siRNA sense strand
acuaaagacuacccagaaa

SEQ ID NO: 659900 - RNA, 19 nt, Homo sapiens
  misc_RNA (1)...(19): siRNA sense strand
uugaagaaauggcaguaaa

SEQ ID NO: 659901 - RNA, 19 nt, Homo sapiens
  misc_RNA (1)...(19): siRNA sense strand
ggaugacaccaaauauuau

SEQ ID NO: 659902 - RNA, 19 nt, Homo sapiens
  misc_RNA (1)...(19): siRNA sense strand
uggaauaccggaguacuua

SEQ ID NO: 659903 - RNA, 19 nt, Homo sapiens
  misc_RNA (1)...(19): siRNA sense strand
gucuauggcugaaauaaca

SEQ ID NO: 659904 - RNA, 19 nt, Homo sapiens
  misc_RNA (1)...(19): siRNA sense strand
ucagcgacauagcaaauau

SEQ ID NO: 659905 - RNA, 19 nt, Homo sapiens
  misc_RNA (1)...(19): siRNA sense strand
ugugggaguugccucauuu

SEQ ID NO: 659906 - RNA, 19 nt, Homo sapiens
  misc_RNA (1)...(19): siRNA sense strand
caaacaggaagacaacuga

SEQ ID NO: 659907 - RNA, 19 nt, Homo sapiens
  misc_RNA (1)...(19): siRNA sense strand
ggcgaaacaucuaaugaag

SEQ ID NO: 659908 - RNA, 19 nt, Homo sapiens
  misc_RNA (1)...(19): siRNA sense strand
gaaaggcgaaacaucuaau

SEQ ID NO: 659909 - RNA, 19 nt, Homo sapiens
  misc_RNA (1)...(19): siRNA sense strand
cgacauagcaaauaucaac

SEQ ID NO: 659910 - RNA, 19 nt, Homo sapiens
  misc_RNA (1)...(19): siRNA sense strand
gcccuacaaugguacuauu

SEQ ID NO: 659911 - RNA, 19 nt, Homo sapiens
  misc_RNA (1)...(19): siRNA sense strand
gaacuaugcuuguuaauga

SEQ ID NO: 659912 - RNA, 19 nt, Homo sapiens
  misc_RNA (1)...(19): siRNA sense strand
gaacauagcaagagcauua

SEQ ID NO: 659913 - RNA, 19 nt, Homo sapiens
  misc_RNA (1)...(19): siRNA sense strand
gaagaaugcaccacaauua

SEQ ID NO: 659914 - RNA, 19 nt, Homo sapiens
  misc_RNA (1)...(19): siRNA sense strand
gaaccugugugaagaauuu

SEQ ID NO: 659915 - RNA, 19 nt, Homo sapiens
  misc_RNA (1)...(19): siRNA sense strand
ggaaagagaaagaguuaua

SEQ ID NO: 659916 - RNA, 19 nt, Homo sapiens
  misc_RNA (1)...(19): siRNA sense strand
gcaagagcauuacaauuau

SEQ ID NO: 659917 - RNA, 19 nt, Homo sapiens
  misc_RNA (1)...(19): siRNA sense strand
gcaguuaacuucagauagu

SEQ ID NO: 659918 - RNA, 19 nt, Homo sapiens
  misc_RNA (1)...(19): siRNA sense strand
caagaacuacugaugauua

SEQ ID NO: 659919 - RNA, 19 nt, Homo sapiens
  misc_RNA (1)...(19): siRNA sense strand
gaacuuucuuguuacgaua

SEQ ID NO: 659920 - RNA, 19 nt, Homo sapiens
  misc_RNA (1)...(19): siRNA sense strand
gaaauuagacagaauguuc

SEQ ID NO: 659921 - RNA, 19 nt, Homo sapiens
  misc_RNA (1)...(19): siRNA sense strand
gaggaaagagaaagaguua

SEQ ID NO: 659922 - RNA, 19 nt, Homo sapiens
  misc_RNA (1)...(19): siRNA sense strand
ccaaaguacuggagaagaa

SEQ ID NO: 659923 - RNA, 19 nt, Homo sapiens
  misc_RNA (1)...(19): siRNA sense strand
gaacucaucagcuguaaug

SEQ ID NO: 659924 - RNA, 19 nt, Homo sapiens
  misc_RNA (1)...(19): siRNA sense strand
acaauuauaugcccugauu

SEQ ID NO: 659925 - RNA, 19 nt, Homo sapiens
  misc_RNA (1)...(19): siRNA sense strand
gagaaagaguuauagaagu

SEQ ID NO: 659926 - RNA, 19 nt, Homo sapiens
  misc_RNA (1)...(19): siRNA sense strand
cuaagacgauaaagaauug

SEQ ID NO: 659927 - RNA, 19 nt, Homo sapiens
  misc_RNA (1)...(19): siRNA sense strand
gaauuguucucaggacuuu

SEQ ID NO: 659928 - RNA, 19 nt, Homo sapiens
  misc_RNA (1)...(19): siRNA sense strand
ucagcuaacuacugguuua

SEQ ID NO: 659929 - RNA, 19 nt, Homo sapiens
  misc_RNA (1)...(19): siRNA sense strand
cccaauggcuggauauauu

SEQ ID NO: 659930 - RNA, 19 nt, Homo sapiens
  misc_RNA (1)...(19): siRNA sense strand
agcaagagcauuacaauua

SEQ ID NO: 659931 - RNA, 19 nt, Homo sapiens
  misc_RNA (1)...(19): siRNA sense strand
agaaauugaugaagcauug

SEQ ID NO: 659932 - RNA, 19 nt, Homo sapiens
  misc_RNA (1)...(19): siRNA sense strand
gcccugaugugauaauuga

SEQ ID NO: 659933 - RNA, 19 nt, Homo sapiens
  misc_RNA (1)...(19): siRNA sense strand
gaaugcaccacaauuauau

SEQ ID NO: 659934 - RNA, 19 nt, Homo sapiens
  misc_RNA (1)...(19): siRNA sense strand
gaacacaugcagaagcaaa

SEQ ID NO: 659935 - RNA, 19 nt, Homo sapiens
  misc_RNA (1)...(19): siRNA sense strand
uaaggaagacuccauaaug

SEQ ID NO: 659936 - RNA, 19 nt, Homo sapiens
  misc_RNA (1)...(19): siRNA sense strand
gaaggaggguauccagauc

SEQ ID NO: 659937 - RNA, 19 nt, Homo sapiens
  misc_RNA (1)...(19): siRNA sense strand
gaacauacugugaccugaa

SEQ ID NO: 659938 - RNA, 19 nt, Homo sapiens
  misc_RNA (1)...(19): siRNA sense strand
guuaaugacugaagaaugc

SEQ ID NO: 659939 - RNA, 19 nt, Homo sapiens
  misc_RNA (1)...(19): siRNA sense strand
uaauagauccuugccauuu

SEQ ID NO: 659940 - RNA, 19 nt, Homo sapiens
  misc_RNA (1)...(19): siRNA sense strand
gaaaagcacuugaacacau

SEQ ID NO: 659941 - RNA, 19 nt, Homo sapiens
  misc_RNA (1)...(19): siRNA sense strand
ucucaggacuuuaagaaga

SEQ ID NO: 659942 - RNA, 19 nt, Homo sapiens
  misc_RNA (1)...(19): siRNA sense strand
ccaauggcuggauauauua

SEQ ID NO: 659943 - RNA, 19 nt, Homo sapiens
  misc_RNA (1)...(19): siRNA sense strand
ggaacuuucuuguuacgau

SEQ ID NO: 659944 - RNA, 19 nt, Homo sapiens
  misc_RNA (1)...(19): siRNA sense strand
ugggaaagauugaauuuag

SEQ ID NO: 659945 - RNA, 19 nt, Homo sapiens
  misc_RNA (1)...(19): siRNA sense strand
gaacuacugaugauuaucu

SEQ ID NO: 659946 - RNA, 19 nt, Homo sapiens
  misc_RNA (1)...(19): siRNA sense strand
ggacuuugcaguuaacuuc

SEQ ID NO: 659947 - RNA, 19 nt, Homo sapiens
  misc_RNA (1)...(19): siRNA sense strand
gaauacagcacaccauagu

SEQ ID NO: 659948 - RNA, 19 nt, Homo sapiens
  misc_RNA (1)...(19): siRNA sense strand
uauccggacuuugcaguua

SEQ ID NO: 659949 - RNA, 19 nt, Homo sapiens
  misc_RNA (1)...(19): siRNA sense strand
aaagcuacauugaagagaa

SEQ ID NO: 659950 - RNA, 19 nt, Homo sapiens
  misc_RNA (1)...(19): siRNA sense strand
caaguuaguucuccacaac

SEQ ID NO: 659951 - RNA, 19 nt, Homo sapiens
  misc_RNA (1)...(19): siRNA sense strand
ggacacuaauacugcagaa

SEQ ID NO: 659952 - RNA, 19 nt, Homo sapiens
  misc_RNA (1)...(19): siRNA sense strand
uauagaaguuguggagaaa

SEQ ID NO: 659953 - RNA, 19 nt, Homo sapiens
  misc_RNA (1)...(19): siRNA sense strand
agaaugcaccacaauuaua

SEQ ID NO: 659954 - RNA, 19 nt, Homo sapiens
  misc_RNA (1)...(19): siRNA sense strand
gaagaauuugcaagaacua

SEQ ID NO: 659955 - RNA, 19 nt, Homo sapiens
  misc_RNA (1)...(19): siRNA sense strand
ggaaggaggguauccagau

SEQ ID NO: 659956 - RNA, 19 nt, Homo sapiens
  misc_RNA (1)...(19): siRNA sense strand
gaugaagcauugaauacag

SEQ ID NO: 659957 - RNA, 19 nt, Homo sapiens
  misc_RNA (1)...(19): siRNA sense strand
gaagcaaacgauagaggaa

SEQ ID NO: 659958 - RNA, 19 nt, Homo sapiens
  misc_RNA (1)...(19): siRNA sense strand
uaaaaccauugcuguguua

SEQ ID NO: 659959 - RNA, 19 nt, Homo sapiens
  misc_RNA (1)...(19): siRNA sense strand
gaauuuagggacucaacaa

SEQ ID NO: 659960 - RNA, 19 nt, Homo sapiens
  misc_RNA (1)...(19): siRNA sense strand
ugaauuagcacaaguuagu

SEQ ID NO: 659961 - RNA, 19 nt, Homo sapiens
  misc_RNA (1)...(19): siRNA sense strand
gaaagagaaagaguuauag

SEQ ID NO: 659962 - RNA, 19 nt, Homo sapiens
  misc_RNA (1)...(19): siRNA sense strand
gcuguaauguuggacacua

SEQ ID NO: 659963 - RNA, 19 nt, Homo sapiens
  misc_RNA (1)...(19): siRNA sense strand
uuauagaaguuguggagaa

SEQ ID NO: 659964 - RNA, 19 nt, Homo sapiens
  misc_RNA (1)...(19): siRNA sense strand
cuggauauauuaaggaaga

SEQ ID NO: 659965 - RNA, 19 nt, Homo sapiens
  misc_RNA (1)...(19): siRNA sense strand
ugagacaaaugauguacau

SEQ ID NO: 659966 - RNA, 19 nt, Homo sapiens
  misc_RNA (1)...(19): siRNA sense strand
gacagaauguucaaaagaa

SEQ ID NO: 659967 - RNA, 19 nt, Homo sapiens
  misc_RNA (1)...(19): siRNA sense strand
gcuaaaagcuacauugaag

SEQ ID NO: 659968 - RNA, 19 nt, Homo sapiens
  misc_RNA (1)...(19): siRNA sense strand
ugugaacuaugcuuguuaa

SEQ ID NO: 659969 - RNA, 19 nt, Homo sapiens
  misc_RNA (1)...(19): siRNA sense strand
cucaucagcuguaauguug

SEQ ID NO: 659970 - RNA, 19 nt, Homo sapiens
  misc_RNA (1)...(19): siRNA sense strand
uaagaagacugcugaucag

SEQ ID NO: 659971 - RNA, 19 nt, Homo sapiens
  misc_RNA (1)...(19): siRNA sense strand
gaucauccggucaccauug

SEQ ID NO: 659972 - RNA, 19 nt, Homo sapiens
  misc_RNA (1)...(19): siRNA sense strand
caagagcauuacaauuauc

SEQ ID NO: 659973 - RNA, 19 nt, Homo sapiens
  misc_RNA (1)...(19): siRNA sense strand
agaagaaauugaugaagca

SEQ ID NO: 659974 - RNA, 19 nt, Homo sapiens
  misc_RNA (1)...(19): siRNA sense strand
ggaucuagcccugauguga

SEQ ID NO: 659975 - RNA, 19 nt, Homo sapiens
  misc_RNA (1)...(19): siRNA sense strand
gauagaggaaagagaaaga

SEQ ID NO: 659976 - RNA, 19 nt, Homo sapiens
  misc_RNA (1)...(19): siRNA sense strand
gaucagcuaacuacugguu

SEQ ID NO: 659977 - RNA, 19 nt, Homo sapiens
  misc_RNA (1)...(19): siRNA sense strand
uguaagccauguaauagau

SEQ ID NO: 659978 - RNA, 19 nt, Homo sapiens
  misc_RNA (1)...(19): siRNA sense strand
gaugggaucuagcccugau

SEQ ID NO: 659979 - RNA, 19 nt, Homo sapiens
  misc_RNA (1)...(19): siRNA sense strand
gcaacagcauccccuaaaa

SEQ ID NO: 659980 - RNA, 19 nt, Homo sapiens
  misc_RNA (1)...(19): siRNA sense strand
gaaagaguuauagaaguug

SEQ ID NO: 659981 - RNA, 19 nt, Homo sapiens
  misc_RNA (1)...(19): siRNA sense strand
ccuaagacgauaaagaauu

SEQ ID NO: 659982 - RNA, 19 nt, Homo sapiens
  misc_RNA (1)...(19): siRNA sense strand
gaauugcagugagaucauc

SEQ ID NO: 659983 - RNA, 19 nt, Homo sapiens
  misc_RNA (1)...(19): siRNA sense strand
gauagugaauuagcacaag

SEQ ID NO: 659984 - RNA, 19 nt, Homo sapiens
  misc_RNA (1)...(19): siRNA sense strand
guaauguuggacacuaaua

SEQ ID NO: 659985 - RNA, 19 nt, Homo sapiens
  misc_RNA (1)...(19): siRNA sense strand
uuaagaagacugcugauca

SEQ ID NO: 659986 - RNA, 19 nt, Homo sapiens
  misc_RNA (1)...(19): siRNA sense strand
auacagcacaccauaguuu

SEQ ID NO: 659987 - RNA, 19 nt, Homo sapiens
  misc_RNA (1)...(19): siRNA sense strand
ugauguacauuuagaagca

SEQ ID NO: 659988 - RNA, 19 nt, Homo sapiens
  misc_RNA (1)...(19): siRNA sense strand
gcaagaacuacugaugauu

SEQ ID NO: 659989 - RNA, 19 nt, Homo sapiens
  misc_RNA (1)...(19): siRNA sense strand
ugaagaaugcaccacaauu

SEQ ID NO: 659990 - RNA, 19 nt, Homo sapiens
  misc_RNA (1)...(19): siRNA sense strand
caucagcuguaauguugga

SEQ ID NO: 659991 - RNA, 19 nt, Homo sapiens
  misc_RNA (1)...(19): siRNA sense strand
gggaaagauugaauuuagg

SEQ ID NO: 659992 - RNA, 19 nt, Homo sapiens
  misc_RNA (1)...(19): siRNA sense strand
uaauuugaaugcagcuaug

SEQ ID NO: 659993 - RNA, 19 nt, Homo sapiens
  misc_RNA (1)...(19): siRNA sense strand
acacuaauacugcagaaga

SEQ ID NO: 659994 - RNA, 19 nt, Homo sapiens
  misc_RNA (1)...(19): siRNA sense strand
gugaagaauuugcaagaac

SEQ ID NO: 659995 - RNA, 19 nt, Homo sapiens
  misc_RNA (1)...(19): siRNA sense strand
ucaacaauaugggaaagau

SEQ ID NO: 659996 - RNA, 19 nt, Homo sapiens
  misc_RNA (1)...(19): siRNA sense strand
acaauuaucgccuucucua

SEQ ID NO: 659997 - RNA, 19 nt, Homo sapiens
  misc_RNA (1)...(19): siRNA sense strand
aagcuacauugaagagaaa

SEQ ID NO: 659998 - RNA, 19 nt, Homo sapiens
  misc_RNA (1)...(19): siRNA sense strand
ugaagaauuugcaagaacu

SEQ ID NO: 659999 - RNA, 19 nt, Homo sapiens
  misc_RNA (1)...(19): siRNA sense strand
uagaaguuguggagaaaca

SEQ ID NO: 660000 - RNA, 19 nt, Homo sapiens
  misc_RNA (1)...(19): siRNA sense strand
caacaauaugggaaagauu

SEQ ID NO: 660001 - RNA, 19 nt, Homo sapiens
  misc_RNA (1)...(19): siRNA sense strand
ccucccagguugaguguga

SEQ ID NO: 660002 - RNA, 19 nt, Homo sapiens
  misc_RNA (1)...(19): siRNA sense strand
cacuaauacugcagaagaa

SEQ ID NO: 660003 - RNA, 19 nt, Homo sapiens
  misc_RNA (1)...(19): siRNA sense strand
guaauagauccuugccauu

SEQ ID NO: 660004 - RNA, 19 nt, Homo sapiens
  misc_RNA (1)...(19): siRNA sense strand
acagaaagacguugcaaca

SEQ ID NO: 660005 - RNA, 19 nt, Homo sapiens
  misc_RNA (1)...(19): siRNA sense strand
caacgcuacuacccaaugg

SEQ ID NO: 660006 - RNA, 19 nt, Homo sapiens
  misc_RNA (1)...(19): siRNA sense strand
aauaaaagacgccaaagua

SEQ ID NO: 660007 - RNA, 19 nt, Homo sapiens
  misc_RNA (1)...(19): siRNA sense strand
aauagauccuugccauuuc

SEQ ID NO: 660008 - RNA, 19 nt, Homo sapiens
  misc_RNA (1)...(19): siRNA sense strand
ccauaguuucgaacaguua

SEQ ID NO: 660009 - RNA, 19 nt, Homo sapiens
  misc_RNA (1)...(19): siRNA sense strand
gaucuagcccugaugugau

SEQ ID NO: 660010 - RNA, 19 nt, Homo sapiens
  misc_RNA (1)...(19): siRNA sense strand
caauuaucgccuucucuaa

SEQ ID NO: 660011 - RNA, 19 nt, Homo sapiens
  misc_RNA (1)...(19): siRNA sense strand
gaacuaugcuuguuaauga

SEQ ID NO: 660012 - RNA, 19 nt, Homo sapiens
  misc_RNA (1)...(19): siRNA sense strand
gaacauagcaagagcauua

SEQ ID NO: 660013 - RNA, 19 nt, Homo sapiens
  misc_RNA (1)...(19): siRNA sense strand
gaagaaugcaccacaauua

SEQ ID NO: 660014 - RNA, 19 nt, Homo sapiens
  misc_RNA (1)...(19): siRNA sense strand
gaaccugugugaagaauuu

SEQ ID NO: 660015 - RNA, 19 nt, Homo sapiens
  misc_RNA (1)...(19): siRNA sense strand
ggaaagagaaagaguuaua

SEQ ID NO: 660016 - RNA, 19 nt, Homo sapiens
  misc_RNA (1)...(19): siRNA sense strand
gcaagagcauuacaauuau

SEQ ID NO: 660017 - RNA, 19 nt, Homo sapiens
  misc_RNA (1)...(19): siRNA sense strand
gcaguuaacuucagauagu

SEQ ID NO: 660018 - RNA, 19 nt, Homo sapiens
  misc_RNA (1)...(19): siRNA sense strand
caagaacuacugaugauua

SEQ ID NO: 660019 - RNA, 19 nt, Homo sapiens
  misc_RNA (1)...(19): siRNA sense strand
gaacuuucuuguuacgaua

SEQ ID NO: 660020 - RNA, 19 nt, Homo sapiens
  misc_RNA (1)...(19): siRNA sense strand
gaaauuagacagaauguuc

SEQ ID NO: 660021 - RNA, 19 nt, Homo sapiens
  misc_RNA (1)...(19): siRNA sense strand
gaggaaagagaaagaguua

SEQ ID NO: 660022 - RNA, 19 nt, Homo sapiens
  misc_RNA (1)...(19): siRNA sense strand
gaacucaucagcuguaaug

SEQ ID NO: 660023 - RNA, 19 nt, Homo sapiens
  misc_RNA (1)...(19): siRNA sense strand
acaauuauaugcccugauu

SEQ ID NO: 660024 - RNA, 19 nt, Homo sapiens
  misc_RNA (1)...(19): siRNA sense strand
gagaaagaguuauagaagu

SEQ ID NO: 660025 - RNA, 19 nt, Homo sapiens
  misc_RNA (1)...(19): siRNA sense strand
cuaagacgauaaagaauug

SEQ ID NO: 660026 - RNA, 19 nt, Homo sapiens
  misc_RNA (1)...(19): siRNA sense strand
gaauuguucucaggacuuu

SEQ ID NO: 660027 - RNA, 19 nt, Homo sapiens
  misc_RNA (1)...(19): siRNA sense strand
ucagcuaacuacugguuua

SEQ ID NO: 660028 - RNA, 19 nt, Homo sapiens
  misc_RNA (1)...(19): siRNA sense strand
cccaauggcuggauauauu

SEQ ID NO: 660029 - RNA, 19 nt, Homo sapiens
  misc_RNA (1)...(19): siRNA sense strand
agcaagagcauuacaauua

SEQ ID NO: 660030 - RNA, 19 nt, Homo sapiens
  misc_RNA (1)...(19): siRNA sense strand
agaaauugaugaagcauug

SEQ ID NO: 660031 - RNA, 19 nt, Homo sapiens
  misc_RNA (1)...(19): siRNA sense strand
gcccugaugugauaauuga

SEQ ID NO: 660032 - RNA, 19 nt, Homo sapiens
  misc_RNA (1)...(19): siRNA sense strand
gaaugcaccacaauuauau

SEQ ID NO: 660033 - RNA, 19 nt, Homo sapiens
  misc_RNA (1)...(19): siRNA sense strand
gaacacaugcagaagcaaa

SEQ ID NO: 660034 - RNA, 19 nt, Homo sapiens
  misc_RNA (1)...(19): siRNA sense strand
uaaggaagacuccauaaug

SEQ ID NO: 660035 - RNA, 19 nt, Homo sapiens
  misc_RNA (1)...(19): siRNA sense strand
gaaggaggguauccagauc

SEQ ID NO: 660036 - RNA, 19 nt, Homo sapiens
  misc_RNA (1)...(19): siRNA sense strand
gaacauacugugaccugaa

SEQ ID NO: 660037 - RNA, 19 nt, Homo sapiens
  misc_RNA (1)...(19): siRNA sense strand
guuaaugacugaagaaugc

SEQ ID NO: 660038 - RNA, 19 nt, Homo sapiens
  misc_RNA (1)...(19): siRNA sense strand
gaaaagcacuugaacacau

SEQ ID NO: 660039 - RNA, 19 nt, Homo sapiens
  misc_RNA (1)...(19): siRNA sense strand
ucucaggacuuuaagaaga

SEQ ID NO: 660040 - RNA, 19 nt, Homo sapiens
  misc_RNA (1)...(19): siRNA sense strand
ccaauggcuggauauauua

SEQ ID NO: 660041 - RNA, 19 nt, Homo sapiens
  misc_RNA (1)...(19): siRNA sense strand
ggaacuuucuuguuacgau

SEQ ID NO: 660042 - RNA, 19 nt, Homo sapiens
  misc_RNA (1)...(19): siRNA sense strand
ugggaaagauugaauuuag

SEQ ID NO: 660043 - RNA, 19 nt, Homo sapiens
  misc_RNA (1)...(19): siRNA sense strand
gaacuacugaugauuaucu

SEQ ID NO: 660044 - RNA, 19 nt, Homo sapiens
  misc_RNA (1)...(19): siRNA sense strand
ggacuuugcaguuaacuuc

SEQ ID NO: 660045 - RNA, 19 nt, Homo sapiens
  misc_RNA (1)...(19): siRNA sense strand
gaauacagcacaccauagu

SEQ ID NO: 660046 - RNA, 19 nt, Homo sapiens
  misc_RNA (1)...(19): siRNA sense strand
uauccggacuuugcaguua

SEQ ID NO: 660047 - RNA, 19 nt, Homo sapiens
  misc_RNA (1)...(19): siRNA sense strand
aaagcuacauugaagagaa

SEQ ID NO: 660048 - RNA, 19 nt, Homo sapiens
  misc_RNA (1)...(19): siRNA sense strand
caaguuaguucuccacaac

SEQ ID NO: 660049 - RNA, 19 nt, Homo sapiens
  misc_RNA (1)...(19): siRNA sense strand
ggacacuaauacugcagaa

SEQ ID NO: 660050 - RNA, 19 nt, Homo sapiens
  misc_RNA (1)...(19): siRNA sense strand
uauagaaguuguggagaaa

SEQ ID NO: 660051 - RNA, 19 nt, Homo sapiens
  misc_RNA (1)...(19): siRNA sense strand
agaaugcaccacaauuaua

SEQ ID NO: 660052 - RNA, 19 nt, Homo sapiens
  misc_RNA (1)...(19): siRNA sense strand
gaagaauuugcaagaacua

SEQ ID NO: 660053 - RNA, 19 nt, Homo sapiens
  misc_RNA (1)...(19): siRNA sense strand
gaugaagcauugaauacag

SEQ ID NO: 660054 - RNA, 19 nt, Homo sapiens
  misc_RNA (1)...(19): siRNA sense strand
ggaaggaggguauccagau

SEQ ID NO: 660055 - RNA, 19 nt, Homo sapiens
  misc_RNA (1)...(19): siRNA sense strand
gaagcaaacgauagaggaa

SEQ ID NO: 660056 - RNA, 19 nt, Homo sapiens
  misc_RNA (1)...(19): siRNA sense strand
uaaaaccauugcuguguua

SEQ ID NO: 660057 - RNA, 19 nt, Homo sapiens
  misc_RNA (1)...(19): siRNA sense strand
gaauuuagggacucaacaa

SEQ ID NO: 660058 - RNA, 19 nt, Homo sapiens
  misc_RNA (1)...(19): siRNA sense strand
ugaauuagcacaaguuagu

SEQ ID NO: 660059 - RNA, 19 nt, Homo sapiens
  misc_RNA (1)...(19): siRNA sense strand
gaaagagaaagaguuauag

SEQ ID NO: 660060 - RNA, 19 nt, Homo sapiens
  misc_RNA (1)...(19): siRNA sense strand
gcuguaauguuggacacua

SEQ ID NO: 660061 - RNA, 19 nt, Homo sapiens
  misc_RNA (1)...(19): siRNA sense strand
uuauagaaguuguggagaa

SEQ ID NO: 660062 - RNA, 19 nt, Homo sapiens
  misc_RNA (1)...(19): siRNA sense strand
cuggauauauuaaggaaga

SEQ ID NO: 660063 - RNA, 19 nt, Homo sapiens
  misc_RNA (1)...(19): siRNA sense strand
ugagacaaaugauguacau

SEQ ID NO: 660064 - RNA, 19 nt, Homo sapiens
  misc_RNA (1)...(19): siRNA sense strand
gacagaauguucaaaagaa

SEQ ID NO: 660065 - RNA, 19 nt, Homo sapiens
  misc_RNA (1)...(19): siRNA sense strand
ugugaacuaugcuuguuaa

SEQ ID NO: 660066 - RNA, 19 nt, Homo sapiens
  misc_RNA (1)...(19): siRNA sense strand
gcuaaaagcuacauugaag

SEQ ID NO: 660067 - RNA, 19 nt, Homo sapiens
  misc_RNA (1)...(19): siRNA sense strand
cucaucagcuguaauguug

SEQ ID NO: 660068 - RNA, 19 nt, Homo sapiens
  misc_RNA (1)...(19): siRNA sense strand
uaagaagacugcugaucag

SEQ ID NO: 660069 - RNA, 19 nt, Homo sapiens
  misc_RNA (1)...(19): siRNA sense strand
caagagcauuacaauuauc

SEQ ID NO: 660070 - RNA, 19 nt, Homo sapiens
  misc_RNA (1)...(19): siRNA sense strand
gaucauccggucaccauug

SEQ ID NO: 660071 - RNA, 19 nt, Homo sapiens
  misc_RNA (1)...(19): siRNA sense strand
agaagaaauugaugaagca

SEQ ID NO: 660072 - RNA, 19 nt, Homo sapiens
  misc_RNA (1)...(19): siRNA sense strand
ggaucuagcccugauguga

SEQ ID NO: 660073 - RNA, 19 nt, Homo sapiens
  misc_RNA (1)...(19): siRNA sense strand
gauagaggaaagagaaaga

SEQ ID NO: 660074 - RNA, 19 nt, Homo sapiens
  misc_RNA (1)...(19): siRNA sense strand
gaucagcuaacuacugguu

SEQ ID NO: 660075 - RNA, 19 nt, Homo sapiens
  misc_RNA (1)...(19): siRNA sense strand
gaugggaucuagcccugau

SEQ ID NO: 660076 - RNA, 19 nt, Homo sapiens
  misc_RNA (1)...(19): siRNA sense strand
gcaacagcauccccuaaaa

SEQ ID NO: 660077 - RNA, 19 nt, Homo sapiens
  misc_RNA (1)...(19): siRNA sense strand
gaaagaguuauagaaguug

SEQ ID NO: 660078 - RNA, 19 nt, Homo sapiens
  misc_RNA (1)...(19): siRNA sense strand
ccuaagacgauaaagaauu

SEQ ID NO: 660079 - RNA, 19 nt, Homo sapiens
  misc_RNA (1)...(19): siRNA sense strand
gaauugcagugagaucauc

SEQ ID NO: 660080 - RNA, 19 nt, Homo sapiens
  misc_RNA (1)...(19): siRNA sense strand
gauagugaauuagcacaag

SEQ ID NO: 660081 - RNA, 19 nt, Homo sapiens
  misc_RNA (1)...(19): siRNA sense strand
guaauguuggacacuaaua

SEQ ID NO: 660082 - RNA, 19 nt, Homo sapiens
  misc_RNA (1)...(19): siRNA sense strand
uuaagaagacugcugauca

SEQ ID NO: 660083 - RNA, 19 nt, Homo sapiens
  misc_RNA (1)...(19): siRNA sense strand
auacagcacaccauaguuu

SEQ ID NO: 660084 - RNA, 19 nt, Homo sapiens
  misc_RNA (1)...(19): siRNA sense strand
ugauguacauuuagaagca

SEQ ID NO: 660085 - RNA, 19 nt, Homo sapiens
  misc_RNA (1)...(19): siRNA sense strand
ugaagaaugcaccacaauu

SEQ ID NO: 660086 - RNA, 19 nt, Homo sapiens
  misc_RNA (1)...(19): siRNA sense strand
gcaagaacuacugaugauu

SEQ ID NO: 660087 - RNA, 19 nt, Homo sapiens
  misc_RNA (1)...(19): siRNA sense strand
caucagcuguaauguugga

SEQ ID NO: 660088 - RNA, 19 nt, Homo sapiens
  misc_RNA (1)...(19): siRNA sense strand
gggaaagauugaauuuagg

SEQ ID NO: 660089 - RNA, 19 nt, Homo sapiens
  misc_RNA (1)...(19): siRNA sense strand
uaauuugaaugcagcuaug

SEQ ID NO: 660090 - RNA, 19 nt, Homo sapiens
  misc_RNA (1)...(19): siRNA sense strand
acacuaauacugcagaaga

SEQ ID NO: 660091 - RNA, 19 nt, Homo sapiens
  misc_RNA (1)...(19): siRNA sense strand
gugaagaauuugcaagaac

SEQ ID NO: 660092 - RNA, 19 nt, Homo sapiens
  misc_RNA (1)...(19): siRNA sense strand
ucaacaauaugggaaagau

SEQ ID NO: 660093 - RNA, 19 nt, Homo sapiens
  misc_RNA (1)...(19): siRNA sense strand
acaauuaucgccuucucua

SEQ ID NO: 660094 - RNA, 19 nt, Homo sapiens
  misc_RNA (1)...(19): siRNA sense strand
aagcuacauugaagagaaa

SEQ ID NO: 660095 - RNA, 19 nt, Homo sapiens
  misc_RNA (1)...(19): siRNA sense strand
ugaagaauuugcaagaacu

SEQ ID NO: 660096 - RNA, 19 nt, Homo sapiens
  misc_RNA (1)...(19): siRNA sense strand
uagaaguuguggagaaaca

SEQ ID NO: 660097 - RNA, 19 nt, Homo sapiens
  misc_RNA (1)...(19): siRNA sense strand
caacaauaugggaaagauu

SEQ ID NO: 660098 - RNA, 19 nt, Homo sapiens
  misc_RNA (1)...(19): siRNA sense strand
ccucccagguugaguguga

SEQ ID NO: 660099 - RNA, 19 nt, Homo sapiens
  misc_RNA (1)...(19): siRNA sense strand
cacuaauacugcagaagaa

SEQ ID NO: 660100 - RNA, 19 nt, Homo sapiens
  misc_RNA (1)...(19): siRNA sense strand
acagaaagacguugcaaca

SEQ ID NO: 660101 - RNA, 19 nt, Homo sapiens
  misc_RNA (1)...(19): siRNA sense strand
caacgcuacuacccaaugg

SEQ ID NO: 660102 - RNA, 19 nt, Homo sapiens
  misc_RNA (1)...(19): siRNA sense strand
ccauaguuucgaacaguua

SEQ ID NO: 660103 - RNA, 19 nt, Homo sapiens
  misc_RNA (1)...(19): siRNA sense strand
gaucuagcccugaugugau

SEQ ID NO: 660104 - RNA, 19 nt, Homo sapiens
  misc_RNA (1)...(19): siRNA sense strand
gaaauugaugaagcauuga

SEQ ID NO: 660105 - RNA, 19 nt, Homo sapiens
  misc_RNA (1)...(19): siRNA sense strand
caauuaucgccuucucuaa

SEQ ID NO: 660106 - RNA, 19 nt, Homo sapiens
  misc_RNA (1)...(19): siRNA sense strand
ugcaagaacuacugaugau

SEQ ID NO: 660107 - RNA, 19 nt, Homo sapiens
  misc_RNA (1)...(19): siRNA sense strand
aaaagaaccugugugaaga

SEQ ID NO: 660108 - RNA, 19 nt, Homo sapiens
  misc_RNA (1)...(19): siRNA sense strand
agagaaagaguuauagaag

SEQ ID NO: 660109 - RNA, 19 nt, Homo sapiens
  misc_RNA (1)...(19): siRNA sense strand
aaacuuccagccacagaaa

SEQ ID NO: 660110 - RNA, 19 nt, Homo sapiens
  misc_RNA (1)...(19): siRNA sense strand
gaucaucuguauguucaac

SEQ ID NO: 660111 - RNA, 19 nt, Homo sapiens
  misc_RNA (1)...(19): siRNA sense strand
gcacaugucuuauauauug

SEQ ID NO: 660112 - RNA, 19 nt, Homo sapiens
  misc_RNA (1)...(19): siRNA sense strand
guugacagcugaauuauua

SEQ ID NO: 660113 - RNA, 19 nt, Homo sapiens
  misc_RNA (1)...(19): siRNA sense strand
gaauguaggugaugaguuu

SEQ ID NO: 660114 - RNA, 19 nt, Homo sapiens
  misc_RNA (1)...(19): siRNA sense strand
gagaauuccuuguccauaa

SEQ ID NO: 660115 - RNA, 19 nt, Homo sapiens
  misc_RNA (1)...(19): siRNA sense strand
ugacagagccauuuaauuu

SEQ ID NO: 660116 - RNA, 19 nt, Homo sapiens
  misc_RNA (1)...(19): siRNA sense strand
gaaggcacaugucuuauau

SEQ ID NO: 660117 - RNA, 19 nt, Homo sapiens
  misc_RNA (1)...(19): siRNA sense strand
gaaauaaaggguacgguua

SEQ ID NO: 660118 - RNA, 19 nt, Homo sapiens
  misc_RNA (1)...(19): siRNA sense strand
gaacagagcaaucauacaa

SEQ ID NO: 660119 - RNA, 19 nt, Homo sapiens
  misc_RNA (1)...(19): siRNA sense strand
gaaugggacugucgaugua

SEQ ID NO: 660120 - RNA, 19 nt, Homo sapiens
  misc_RNA (1)...(19): siRNA sense strand
gaaguuaccuaaugguuuc

SEQ ID NO: 660121 - RNA, 19 nt, Homo sapiens
  misc_RNA (1)...(19): siRNA sense strand
cauaaagacuuaccaaaug

SEQ ID NO: 660122 - RNA, 19 nt, Homo sapiens
  misc_RNA (1)...(19): siRNA sense strand
gcacagaguuacagaaaca

SEQ ID NO: 660123 - RNA, 19 nt, Homo sapiens
  misc_RNA (1)...(19): siRNA sense strand
caaaggauguggagguaaa

SEQ ID NO: 660124 - RNA, 19 nt, Homo sapiens
  misc_RNA (1)...(19): siRNA sense strand
gcgcuuccuuuccaaauua

SEQ ID NO: 660125 - RNA, 19 nt, Homo sapiens
  misc_RNA (1)...(19): siRNA sense strand
ccaaaugacagacuuguua

SEQ ID NO: 660126 - RNA, 19 nt, Homo sapiens
  misc_RNA (1)...(19): siRNA sense strand
gaacaagucauuagcagaa

SEQ ID NO: 660127 - RNA, 19 nt, Homo sapiens
  misc_RNA (1)...(19): siRNA sense strand
gaugagacuuugucccaua

SEQ ID NO: 660128 - RNA, 19 nt, Homo sapiens
  misc_RNA (1)...(19): siRNA sense strand
gcagagugcuuuaaauaca

SEQ ID NO: 660129 - RNA, 19 nt, Homo sapiens
  misc_RNA (1)...(19): siRNA sense strand
gaagcuauuugucucauga

SEQ ID NO: 660130 - RNA, 19 nt, Homo sapiens
  misc_RNA (1)...(19): siRNA sense strand
guaaagccaucauuaggaa

SEQ ID NO: 660131 - RNA, 19 nt, Homo sapiens
  misc_RNA (1)...(19): siRNA sense strand
gcaagcagaccuacuauug

SEQ ID NO: 660132 - RNA, 19 nt, Homo sapiens
  misc_RNA (1)...(19): siRNA sense strand
gaaaagauguauaggauga

SEQ ID NO: 660133 - RNA, 19 nt, Homo sapiens
  misc_RNA (1)...(19): siRNA sense strand
cagcagaaguuaccuaaug

SEQ ID NO: 660134 - RNA, 19 nt, Homo sapiens
  misc_RNA (1)...(19): siRNA sense strand
ccaacucucugccagcuua

SEQ ID NO: 660135 - RNA, 19 nt, Homo sapiens
  misc_RNA (1)...(19): siRNA sense strand
ggucggauauguagauuau

SEQ ID NO: 660136 - RNA, 19 nt, Homo sapiens
  misc_RNA (1)...(19): siRNA sense strand
gaacuucaggcaucccuua

SEQ ID NO: 660137 - RNA, 19 nt, Homo sapiens
  misc_RNA (1)...(19): siRNA sense strand
caaagaauguccauacagu

SEQ ID NO: 660138 - RNA, 19 nt, Homo sapiens
  misc_RNA (1)...(19): siRNA sense strand
ucaaggaaaucuuaccaaa

SEQ ID NO: 660139 - RNA, 19 nt, Homo sapiens
  misc_RNA (1)...(19): siRNA sense strand
ggaaacaucgaagaaguua

SEQ ID NO: 660140 - RNA, 19 nt, Homo sapiens
  misc_RNA (1)...(19): siRNA sense strand
aaggaaaucuuaccaaaug

SEQ ID NO: 660141 - RNA, 19 nt, Homo sapiens
  misc_RNA (1)...(19): siRNA sense strand
gaaaugggauauggcuuga

SEQ ID NO: 660142 - RNA, 19 nt, Homo sapiens
  misc_RNA (1)...(19): siRNA sense strand
gauauacagucuagaaaca

SEQ ID NO: 660143 - RNA, 19 nt, Homo sapiens
  misc_RNA (1)...(19): siRNA sense strand
gaaguugagcugccaaauu

SEQ ID NO: 660144 - RNA, 19 nt, Homo sapiens
  misc_RNA (1)...(19): siRNA sense strand
ggaauacggugccaguuag

SEQ ID NO: 660145 - RNA, 19 nt, Homo sapiens
  misc_RNA (1)...(19): siRNA sense strand
gagcaaaccaaacaauauu

SEQ ID NO: 660146 - RNA, 19 nt, Homo sapiens
  misc_RNA (1)...(19): siRNA sense strand
gcagaugaacuccgaauga

SEQ ID NO: 660147 - RNA, 19 nt, Homo sapiens
  misc_RNA (1)...(19): siRNA sense strand
gggaauacggugccaguua

SEQ ID NO: 660148 - RNA, 19 nt, Homo sapiens
  misc_RNA (1)...(19): siRNA sense strand
gcagauauacagucuagaa

SEQ ID NO: 660149 - RNA, 19 nt, Homo sapiens
  misc_RNA (1)...(19): siRNA sense strand
gcucagagaauggaaauaa

SEQ ID NO: 660150 - RNA, 19 nt, Homo sapiens
  misc_RNA (1)...(19): siRNA sense strand
ucaccgaucucuccacuug

SEQ ID NO: 660151 - RNA, 19 nt, Homo sapiens
  misc_RNA (1)...(19): siRNA sense strand
gaagaagccauaacaagau

SEQ ID NO: 660152 - RNA, 19 nt, Homo sapiens
  misc_RNA (1)...(19): siRNA sense strand
uaaacaaguuggucgagaa

SEQ ID NO: 660153 - RNA, 19 nt, Homo sapiens
  misc_RNA (1)...(19): siRNA sense strand
ggaagacaauucaguuucu

SEQ ID NO: 660154 - RNA, 19 nt, Homo sapiens
  misc_RNA (1)...(19): siRNA sense strand
ugaaagugguggacaaguu

SEQ ID NO: 660155 - RNA, 19 nt, Homo sapiens
  misc_RNA (1)...(19): siRNA sense strand
ggacuucuacgugcaguua

SEQ ID NO: 660156 - RNA, 19 nt, Homo sapiens
  misc_RNA (1)...(19): siRNA sense strand
guacagggacuucaagcua

SEQ ID NO: 660157 - RNA, 19 nt, Homo sapiens
  misc_RNA (1)...(19): siRNA sense strand
gaaacaaacauuggucuga

SEQ ID NO: 660158 - RNA, 19 nt, Homo sapiens
  misc_RNA (1)...(19): siRNA sense strand
gaugaacuccgaaugauau

SEQ ID NO: 660159 - RNA, 19 nt, Homo sapiens
  misc_RNA (1)...(19): siRNA sense strand
ggaagcaccuccuuguaag

SEQ ID NO: 660160 - RNA, 19 nt, Homo sapiens
  misc_RNA (1)...(19): siRNA sense strand
uaucaaagcuacuaaacca

SEQ ID NO: 660161 - RNA, 19 nt, Homo sapiens
  misc_RNA (1)...(19): siRNA sense strand
gaaaagcugugcauguuga

SEQ ID NO: 660162 - RNA, 19 nt, Homo sapiens
  misc_RNA (1)...(19): siRNA sense strand
caaaagggaugccagaaaa

SEQ ID NO: 660163 - RNA, 19 nt, Homo sapiens
  misc_RNA (1)...(19): siRNA sense strand
aaagugaccuaaucccaaa

SEQ ID NO: 660164 - RNA, 19 nt, Homo sapiens
  misc_RNA (1)...(19): siRNA sense strand
gcaccuccuuguaagauga

SEQ ID NO: 660165 - RNA, 19 nt, Homo sapiens
  misc_RNA (1)...(19): siRNA sense strand
gaaagugguggacaaguug

SEQ ID NO: 660166 - RNA, 19 nt, Homo sapiens
  misc_RNA (1)...(19): siRNA sense strand
cagcaucucuuggagguaa

SEQ ID NO: 660167 - RNA, 19 nt, Homo sapiens
  misc_RNA (1)...(19): siRNA sense strand
cugauaagcuagugacauu

SEQ ID NO: 660168 - RNA, 19 nt, Homo sapiens
  misc_RNA (1)...(19): siRNA sense strand
agaggaugcuuuaaagaaa

SEQ ID NO: 660169 - RNA, 19 nt, Homo sapiens
  misc_RNA (1)...(19): siRNA sense strand
uagcaaaguucuccuagau

SEQ ID NO: 660170 - RNA, 19 nt, Homo sapiens
  misc_RNA (1)...(19): siRNA sense strand
aaacaaacauuggucugaa

SEQ ID NO: 660171 - RNA, 19 nt, Homo sapiens
  misc_RNA (1)...(19): siRNA sense strand
ugaagaagccauaacaaga

SEQ ID NO: 660172 - RNA, 19 nt, Homo sapiens
  misc_RNA (1)...(19): siRNA sense strand
cauguugacagcugaauua

SEQ ID NO: 660173 - RNA, 19 nt, Homo sapiens
  misc_RNA (1)...(19): siRNA sense strand
ucaaagugauccugaagau

SEQ ID NO: 660174 - RNA, 19 nt, Homo sapiens
  misc_RNA (1)...(19): siRNA sense strand
uuagugauguucugauuga

SEQ ID NO: 660175 - RNA, 19 nt, Homo sapiens
  misc_RNA (1)...(19): siRNA sense strand
gauauauaguccuggagaa

SEQ ID NO: 660176 - RNA, 19 nt, Homo sapiens
  misc_RNA (1)...(19): siRNA sense strand
gaaacccaguggacaagau

SEQ ID NO: 660177 - RNA, 19 nt, Homo sapiens
  misc_RNA (1)...(19): siRNA sense strand
gugauguucugauugauga

SEQ ID NO: 660178 - RNA, 19 nt, Homo sapiens
  misc_RNA (1)...(19): siRNA sense strand
uaacaagauuccagaugug

SEQ ID NO: 660179 - RNA, 19 nt, Homo sapiens
  misc_RNA (1)...(19): siRNA sense strand
cauuugggcugagagaaua

SEQ ID NO: 660180 - RNA, 19 nt, Homo sapiens
  misc_RNA (1)...(19): siRNA sense strand
gauaagcuagugacauuug

SEQ ID NO: 660181 - RNA, 19 nt, Homo sapiens
  misc_RNA (1)...(19): siRNA sense strand
aaguugagcugccaaauuc

SEQ ID NO: 660182 - RNA, 19 nt, Homo sapiens
  misc_RNA (1)...(19): siRNA sense strand
ccauaaagauugucgacau

SEQ ID NO: 660183 - RNA, 19 nt, Homo sapiens
  misc_RNA (1)...(19): siRNA sense strand
guacugcuccauaaagauu

SEQ ID NO: 660184 - RNA, 19 nt, Homo sapiens
  misc_RNA (1)...(19): siRNA sense strand
cuaaaccacuguuaaugga

SEQ ID NO: 660185 - RNA, 19 nt, Homo sapiens
  misc_RNA (1)...(19): siRNA sense strand
caacaggaacauugacuug

SEQ ID NO: 660186 - RNA, 19 nt, Homo sapiens
  misc_RNA (1)...(19): siRNA sense strand
gaauguccauacaguguca

SEQ ID NO: 660187 - RNA, 19 nt, Homo sapiens
  misc_RNA (1)...(19): siRNA sense strand
gaaucagaauguaaugcuu

SEQ ID NO: 660188 - RNA, 19 nt, Homo sapiens
  misc_RNA (1)...(19): siRNA sense strand
caaaugacagacuuguuaa

SEQ ID NO: 660189 - RNA, 19 nt, Homo sapiens
  misc_RNA (1)...(19): siRNA sense strand
ggaguaaagccaucauuag

SEQ ID NO: 660190 - RNA, 19 nt, Homo sapiens
  misc_RNA (1)...(19): siRNA sense strand
gaccaugugcuuauagaaa

SEQ ID NO: 660191 - RNA, 19 nt, Homo sapiens
  misc_RNA (1)...(19): siRNA sense strand
guaauucaccacccaaaga

SEQ ID NO: 660192 - RNA, 19 nt, Homo sapiens
  misc_RNA (1)...(19): siRNA sense strand
gauguguguugcugggaua

SEQ ID NO: 660193 - RNA, 19 nt, Homo sapiens
  misc_RNA (1)...(19): siRNA sense strand
caaauggacauguuaaagu

SEQ ID NO: 660194 - RNA, 19 nt, Homo sapiens
  misc_RNA (1)...(19): siRNA sense strand
agaguauggugacagauaa

SEQ ID NO: 660195 - RNA, 19 nt, Homo sapiens
  misc_RNA (1)...(19): siRNA sense strand
gcuauaaaguguguacuag

SEQ ID NO: 660196 - RNA, 19 nt, Homo sapiens
  misc_RNA (1)...(19): siRNA sense strand
aggcacaugucuuauauau

SEQ ID NO: 660197 - RNA, 19 nt, Homo sapiens
  misc_RNA (1)...(19): siRNA sense strand
aacaugagcuucaaguuca

SEQ ID NO: 660198 - RNA, 19 nt, Homo sapiens
  misc_RNA (1)...(19): siRNA sense strand
gccgaaagcuugcugaacu

SEQ ID NO: 660199 - RNA, 19 nt, Homo sapiens
  misc_RNA (1)...(19): siRNA sense strand
gaaggaaaaugcagaucaa

SEQ ID NO: 660200 - RNA, 19 nt, Homo sapiens
  misc_RNA (1)...(19): siRNA sense strand
uagcagauauacagucuag

SEQ ID NO: 660201 - RNA, 19 nt, Homo sapiens
  misc_RNA (1)...(19): siRNA sense strand
acaaguuggucgagaauuc

SEQ ID NO: 660202 - RNA, 19 nt, Homo sapiens
  misc_RNA (1)...(19): siRNA sense strand
cgaagaaguuacugcagau

SEQ ID NO: 660203 - RNA, 19 nt, Homo sapiens
  misc_RNA (1)...(19): siRNA sense strand
auauaguccuggagaauuu

SEQ ID NO: 660204 - RNA, 19 nt, Homo sapiens
  misc_RNA (1)...(19): siRNA sense strand
cagaguauggugacagaua

SEQ ID NO: 660205 - RNA, 19 nt, Homo sapiens
  misc_RNA (1)...(19): siRNA sense strand
gaaauccuuaguuugauga

SEQ ID NO: 660206 - RNA, 19 nt, Homo sapiens
  misc_RNA (1)...(19): siRNA sense strand
uaccuuugcuguagaaguu

SEQ ID NO: 660207 - RNA, 19 nt, Homo sapiens
  misc_RNA (1)...(19): siRNA sense strand
ccaaguacacuguugauca

SEQ ID NO: 660208 - RNA, 19 nt, Homo sapiens
  misc_RNA (1)...(19): siRNA sense strand
gauguggagguaaacaaua

SEQ ID NO: 660209 - RNA, 19 nt, Homo sapiens
  misc_RNA (1)...(19): siRNA sense strand
uauaaaguguguacuagca

SEQ ID NO: 660210 - RNA, 19 nt, Homo sapiens
  misc_RNA (1)...(19): siRNA sense strand
agaaguuacugcagaugaa

SEQ ID NO: 660211 - RNA, 19 nt, Homo sapiens
  misc_RNA (1)...(19): siRNA sense strand
aaacuaacuucaacuccau

SEQ ID NO: 660212 - RNA, 19 nt, Homo sapiens
  misc_RNA (1)...(19): siRNA sense strand
ucaacuccaucgccaagau

SEQ ID NO: 660213 - RNA, 19 nt, Homo sapiens
  misc_RNA (1)...(19): siRNA sense strand
gaucuuggcccagcagaca

SEQ ID NO: 660214 - RNA, 19 nt, Homo sapiens
  misc_RNA (1)...(19): siRNA sense strand
cagcaaaacuaacuucaac

SEQ ID NO: 660215 - RNA, 19 nt, Homo sapiens
  misc_RNA (1)...(19): siRNA sense strand
aaacuaacuucaacuccau

SEQ ID NO: 660216 - RNA, 19 nt, Homo sapiens
  misc_RNA (1)...(19): siRNA sense strand
ucaacuccaucgccaagau

SEQ ID NO: 660217 - RNA, 19 nt, Homo sapiens
  misc_RNA (1)...(19): siRNA sense strand
gaucuuggcccagcagaca

SEQ ID NO: 660218 - RNA, 19 nt, Homo sapiens
  misc_RNA (1)...(19): siRNA sense strand
cagcaaaacuaacuucaac

SEQ ID NO: 660219 - RNA, 19 nt, Homo sapiens
  misc_RNA (1)...(19): siRNA sense strand
aaacuaacuucaacuccau

SEQ ID NO: 660220 - RNA, 19 nt, Homo sapiens
  misc_RNA (1)...(19): siRNA sense strand
ucaacuccaucgccaagau

SEQ ID NO: 660221 - RNA, 19 nt, Homo sapiens
  misc_RNA (1)...(19): siRNA sense strand
gaucuuggcccagcagaca

SEQ ID NO: 660222 - RNA, 19 nt, Homo sapiens
  misc_RNA (1)...(19): siRNA sense strand
cagcaaaacuaacuucaac

SEQ ID NO: 660223 - RNA, 19 nt, Homo sapiens
  misc_RNA (1)...(19): siRNA sense strand
aaacuaacuucaacuccau

SEQ ID NO: 660224 - RNA, 19 nt, Homo sapiens
  misc_RNA (1)...(19): siRNA sense strand
ucaacuccaucgccaagau

SEQ ID NO: 660225 - RNA, 19 nt, Homo sapiens
  misc_RNA (1)...(19): siRNA sense strand
gaucuuggcccagcagaca

SEQ ID NO: 660226 - RNA, 19 nt, Homo sapiens
  misc_RNA (1)...(19): siRNA sense strand
cagcaaaacuaacuucaac

SEQ ID NO: 660227 - RNA, 19 nt, Homo sapiens
  misc_RNA (1)...(19): siRNA sense strand
aaacuaacuucaacuccau

SEQ ID NO: 660228 - RNA, 19 nt, Homo sapiens
  misc_RNA (1)...(19): siRNA sense strand
ucaacuccaucgccaagau

SEQ ID NO: 660229 - RNA, 19 nt, Homo sapiens
  misc_RNA (1)...(19): siRNA sense strand
gaucuuggcccagcagaca

SEQ ID NO: 660230 - RNA, 19 nt, Homo sapiens
  misc_RNA (1)...(19): siRNA sense strand
cagcaaaacuaacuucaac

SEQ ID NO: 660231 - RNA, 19 nt, Homo sapiens
  misc_RNA (1)...(19): siRNA sense strand
aaacuaacuucaacuccau

SEQ ID NO: 660232 - RNA, 19 nt, Homo sapiens
  misc_RNA (1)...(19): siRNA sense strand
ucaacuccaucgccaagau

SEQ ID NO: 660233 - RNA, 19 nt, Homo sapiens
  misc_RNA (1)...(19): siRNA sense strand
gaucuuggcccagcagaca

SEQ ID NO: 660234 - RNA, 19 nt, Homo sapiens
  misc_RNA (1)...(19): siRNA sense strand
cagcaaaacuaacuucaac

SEQ ID NO: 660235 - RNA, 19 nt, Homo sapiens
  misc_RNA (1)...(19): siRNA sense strand
gcgcucaaguccuaucuca

SEQ ID NO: 660236 - RNA, 19 nt, Homo sapiens
  misc_RNA (1)...(19): siRNA sense strand
gcggacgccuucuucauca

SEQ ID NO: 660237 - RNA, 19 nt, Homo sapiens
  misc_RNA (1)...(19): siRNA sense strand
gguccuuccuggucaagaa

SEQ ID NO: 660238 - RNA, 19 nt, Homo sapiens
  misc_RNA (1)...(19): siRNA sense strand
gcuucgcgcucaaguccua

SEQ ID NO: 660239 - RNA, 19 nt, Homo sapiens
  misc_RNA (1)...(19): siRNA sense strand
caaguccuaucucaacaag

SEQ ID NO: 660240 - RNA, 19 nt, Homo sapiens
  misc_RNA (1)...(19): siRNA sense strand
ggucaagaaggucaaacuu

SEQ ID NO: 660241 - RNA, 19 nt, Homo sapiens
  misc_RNA (1)...(19): siRNA sense strand
gcucaaguccuaucucaac

SEQ ID NO: 660242 - RNA, 19 nt, Homo sapiens
  misc_RNA (1)...(19): siRNA sense strand
aaggguaccucagcgacua

SEQ ID NO: 660243 - RNA, 19 nt, Homo sapiens
  misc_RNA (1)...(19): siRNA sense strand
gaaccugagccgccacaag

SEQ ID NO: 660244 - RNA, 19 nt, Homo sapiens
  misc_RNA (1)...(19): siRNA sense strand
aguccuaucucaacaagca

SEQ ID NO: 660245 - RNA, 19 nt, Homo sapiens
  misc_RNA (1)...(19): siRNA sense strand
aggcugcgcugcucaaagg

SEQ ID NO: 660246 - RNA, 19 nt, Homo sapiens
  misc_RNA (1)...(19): siRNA sense strand
cgacgugcggcaaggugua

SEQ ID NO: 660247 - RNA, 19 nt, Homo sapiens
  misc_RNA (1)...(19): siRNA sense strand
aaacuugacgcguucucuu

SEQ ID NO: 660248 - RNA, 19 nt, Homo sapiens
  misc_RNA (1)...(19): siRNA sense strand
cgagucggccugcuucaag

SEQ ID NO: 660249 - RNA, 19 nt, Homo sapiens
  misc_RNA (1)...(19): siRNA sense strand
ggacagccauuauuucuca

SEQ ID NO: 660250 - RNA, 19 nt, Homo sapiens
  misc_RNA (1)...(19): siRNA sense strand
gaacggaauugcuauugga

SEQ ID NO: 660251 - RNA, 19 nt, Homo sapiens
  misc_RNA (1)...(19): siRNA sense strand
gcagugccaugaaugcaua

SEQ ID NO: 660252 - RNA, 19 nt, Homo sapiens
  misc_RNA (1)...(19): siRNA sense strand
gacugaacaugaagaguua

SEQ ID NO: 660253 - RNA, 19 nt, Homo sapiens
  misc_RNA (1)...(19): siRNA sense strand
uaacaagugauccuucuua

SEQ ID NO: 660254 - RNA, 19 nt, Homo sapiens
  misc_RNA (1)...(19): siRNA sense strand
ggaaaggaucccaggaaua

SEQ ID NO: 660255 - RNA, 19 nt, Homo sapiens
  misc_RNA (1)...(19): siRNA sense strand
ggacugaacaugaagaguu

SEQ ID NO: 660256 - RNA, 19 nt, Homo sapiens
  misc_RNA (1)...(19): siRNA sense strand
ggagauggauauucugauc

SEQ ID NO: 660257 - RNA, 19 nt, Homo sapiens
  misc_RNA (1)...(19): siRNA sense strand
gcacggaaccugaggauca

SEQ ID NO: 660258 - RNA, 19 nt, Homo sapiens
  misc_RNA (1)...(19): siRNA sense strand
ggaagagaauugaguuugg

SEQ ID NO: 660259 - RNA, 19 nt, Homo sapiens
  misc_RNA (1)...(19): siRNA sense strand
gaucagcuuuacuauguga

SEQ ID NO: 660260 - RNA, 19 nt, Homo sapiens
  misc_RNA (1)...(19): siRNA sense strand
ugagagaggugaagaucaa

SEQ ID NO: 660261 - RNA, 19 nt, Homo sapiens
  misc_RNA (1)...(19): siRNA sense strand
gaacugguuugaggccuuu

SEQ ID NO: 660262 - RNA, 19 nt, Homo sapiens
  misc_RNA (1)...(19): siRNA sense strand
acagugaaguggcugguua

SEQ ID NO: 660263 - RNA, 19 nt, Homo sapiens
  misc_RNA (1)...(19): siRNA sense strand
gaaaggaucccaggaauac

SEQ ID NO: 660264 - RNA, 19 nt, Homo sapiens
  misc_RNA (1)...(19): siRNA sense strand
ccacggauaugcagucaau

SEQ ID NO: 660265 - RNA, 19 nt, Homo sapiens
  misc_RNA (1)...(19): siRNA sense strand
ugaaguggcugguuacauc

SEQ ID NO: 660266 - RNA, 19 nt, Homo sapiens
  misc_RNA (1)...(19): siRNA sense strand
acuacuagauggcgacuua

SEQ ID NO: 660267 - RNA, 19 nt, Homo sapiens
  misc_RNA (1)...(19): siRNA sense strand
gcauagaacacaucaggaa

SEQ ID NO: 660268 - RNA, 19 nt, Homo sapiens
  misc_RNA (1)...(19): siRNA sense strand
gaagagaauugaguuuggu

SEQ ID NO: 660269 - RNA, 19 nt, Homo sapiens
  misc_RNA (1)...(19): siRNA sense strand
cagaauuccuguaccaaau

SEQ ID NO: 660270 - RNA, 19 nt, Homo sapiens
  misc_RNA (1)...(19): siRNA sense strand
gcagaauuccuguaccaaa

SEQ ID NO: 660271 - RNA, 19 nt, Homo sapiens
  misc_RNA (1)...(19): siRNA sense strand
guuugaggccuuugaaaua

SEQ ID NO: 660272 - RNA, 19 nt, Homo sapiens
  misc_RNA (1)...(19): siRNA sense strand
gaucuacaauggccaacug

SEQ ID NO: 660273 - RNA, 19 nt, Homo sapiens
  misc_RNA (1)...(19): siRNA sense strand
ggaaucagacuuuuaauga

SEQ ID NO: 660274 - RNA, 19 nt, Homo sapiens
  misc_RNA (1)...(19): siRNA sense strand
aggaucagcuuuacuaugu

SEQ ID NO: 660275 - RNA, 19 nt, Homo sapiens
  misc_RNA (1)...(19): siRNA sense strand
caacagcaaccucuucuuc

SEQ ID NO: 660276 - RNA, 19 nt, Homo sapiens
  misc_RNA (1)...(19): siRNA sense strand
ugacuuccaucagguaauu

SEQ ID NO: 660277 - RNA, 19 nt, Homo sapiens
  misc_RNA (1)...(19): siRNA sense strand
ccacaacgcucuccaugcu

SEQ ID NO: 660278 - RNA, 19 nt, Homo sapiens
  misc_RNA (1)...(19): siRNA sense strand
gauacaguacagucaguua

SEQ ID NO: 660279 - RNA, 19 nt, Homo sapiens
  misc_RNA (1)...(19): siRNA sense strand
ggagguucauccauguuug

SEQ ID NO: 660280 - RNA, 19 nt, Homo sapiens
  misc_RNA (1)...(19): siRNA sense strand
acaacgcucuccaugcuuu

SEQ ID NO: 660281 - RNA, 19 nt, Homo sapiens
  misc_RNA (1)...(19): siRNA sense strand
gaucccgaaucaauuauag

SEQ ID NO: 660282 - RNA, 19 nt, Homo sapiens
  misc_RNA (1)...(19): siRNA sense strand
cagaagcagugccaugaau

SEQ ID NO: 660283 - RNA, 19 nt, Homo sapiens
  misc_RNA (1)...(19): siRNA sense strand
cgauguagcacgggauuua

SEQ ID NO: 660284 - RNA, 19 nt, Homo sapiens
  misc_RNA (1)...(19): siRNA sense strand
cgagguggaggacauauuu

SEQ ID NO: 660285 - RNA, 19 nt, Homo sapiens
  misc_RNA (1)...(19): siRNA sense strand
gaaaaguacuugcgagaag

SEQ ID NO: 660286 - RNA, 19 nt, Homo sapiens
  misc_RNA (1)...(19): siRNA sense strand
ugacaugauuaaucgauuc

SEQ ID NO: 660287 - RNA, 19 nt, Homo sapiens
  misc_RNA (1)...(19): siRNA sense strand
ggcacaggcuucaguuuua

SEQ ID NO: 660288 - RNA, 19 nt, Homo sapiens
  misc_RNA (1)...(19): siRNA sense strand
ggaagcagaacugguuuga

SEQ ID NO: 660289 - RNA, 19 nt, Homo sapiens
  misc_RNA (1)...(19): siRNA sense strand
gcgagaagauacaguacag

SEQ ID NO: 660290 - RNA, 19 nt, Homo sapiens
  misc_RNA (1)...(19): siRNA sense strand
ggauuuauacagugcacua

SEQ ID NO: 660291 - RNA, 19 nt, Homo sapiens
  misc_RNA (1)...(19): siRNA sense strand
gaaauaugugccagccauu

SEQ ID NO: 660292 - RNA, 19 nt, Homo sapiens
  misc_RNA (1)...(19): siRNA sense strand
ccuuugaaauacuggauaa

SEQ ID NO: 660293 - RNA, 19 nt, Homo sapiens
  misc_RNA (1)...(19): siRNA sense strand
ucaggaagcagaacugguu

SEQ ID NO: 660294 - RNA, 19 nt, Homo sapiens
  misc_RNA (1)...(19): siRNA sense strand
guucuucccagcucagaua

SEQ ID NO: 660295 - RNA, 19 nt, Homo sapiens
  misc_RNA (1)...(19): siRNA sense strand
ggagucuuaugcagggaaa

SEQ ID NO: 660296 - RNA, 19 nt, Homo sapiens
  misc_RNA (1)...(19): siRNA sense strand
acagugcacuaauucaguu

SEQ ID NO: 660297 - RNA, 19 nt, Homo sapiens
  misc_RNA (1)...(19): siRNA sense strand
ucuccaugcuuuacauuga

SEQ ID NO: 660298 - RNA, 19 nt, Homo sapiens
  misc_RNA (1)...(19): siRNA sense strand
gaaauacuggauaaacuac

SEQ ID NO: 660299 - RNA, 19 nt, Homo sapiens
  misc_RNA (1)...(19): siRNA sense strand
cuuuaaaucugacagugaa

SEQ ID NO: 660300 - RNA, 19 nt, Homo sapiens
  misc_RNA (1)...(19): siRNA sense strand
ggcauggacuggaaaggau

SEQ ID NO: 660301 - RNA, 19 nt, Homo sapiens
  misc_RNA (1)...(19): siRNA sense strand
ucccaggacugaacaugaa

SEQ ID NO: 660302 - RNA, 19 nt, Homo sapiens
  misc_RNA (1)...(19): siRNA sense strand
auaagguucugaucuacaa

SEQ ID NO: 660303 - RNA, 19 nt, Homo sapiens
  misc_RNA (1)...(19): siRNA sense strand
uugcacaccucauccauuc

SEQ ID NO: 660304 - RNA, 19 nt, Homo sapiens
  misc_RNA (1)...(19): siRNA sense strand
gaugauacccacggauaug

SEQ ID NO: 660305 - RNA, 19 nt, Homo sapiens
  misc_RNA (1)...(19): siRNA sense strand
uggaaaggaucccaggaau

SEQ ID NO: 660306 - RNA, 19 nt, Homo sapiens
  misc_RNA (1)...(19): siRNA sense strand
gaggaucagcuuuacuaug

SEQ ID NO: 660307 - RNA, 19 nt, Homo sapiens
  misc_RNA (1)...(19): siRNA sense strand
uguggaaggugauuguuuc

SEQ ID NO: 660308 - RNA, 19 nt, Homo sapiens
  misc_RNA (1)...(19): siRNA sense strand
aaauuggcuuguuggauga

SEQ ID NO: 660309 - RNA, 19 nt, Homo sapiens
  misc_RNA (1)...(19): siRNA sense strand
cauugaagcugggaagauc

SEQ ID NO: 660310 - RNA, 19 nt, Homo sapiens
  misc_RNA (1)...(19): siRNA sense strand
cggaauugcuauuggagau

SEQ ID NO: 660311 - RNA, 19 nt, Homo sapiens
  misc_RNA (1)...(19): siRNA sense strand
gggagguucauccauguuu

SEQ ID NO: 660312 - RNA, 19 nt, Homo sapiens
  misc_RNA (1)...(19): siRNA sense strand
gccagaagaugccccagua

SEQ ID NO: 660313 - RNA, 19 nt, Homo sapiens
  misc_RNA (1)...(19): siRNA sense strand
aacaugaccuugcgugaca

SEQ ID NO: 660314 - RNA, 19 nt, Homo sapiens
  misc_RNA (1)...(19): siRNA sense strand
augguuaacugaaaucaug

SEQ ID NO: 660315 - RNA, 19 nt, Homo sapiens
  misc_RNA (1)...(19): siRNA sense strand
uauuggagauggauauucu

SEQ ID NO: 660316 - RNA, 19 nt, Homo sapiens
  misc_RNA (1)...(19): siRNA sense strand
aaaggaagagaauugaguu

SEQ ID NO: 660317 - RNA, 19 nt, Homo sapiens
  misc_RNA (1)...(19): siRNA sense strand
ucugagagcuuuugacaug

SEQ ID NO: 660318 - RNA, 19 nt, Homo sapiens
  misc_RNA (1)...(19): siRNA sense strand
ccagaauguuacaggaugu

SEQ ID NO: 660319 - RNA, 19 nt, Homo sapiens
  misc_RNA (1)...(19): siRNA sense strand
gguuugaggccuuugaaau

SEQ ID NO: 660320 - RNA, 19 nt, Homo sapiens
  misc_RNA (1)...(19): siRNA sense strand
agacucaggacagccauua

SEQ ID NO: 660321 - RNA, 19 nt, Homo sapiens
  misc_RNA (1)...(19): siRNA sense strand
uuccagauauuuccugaau

SEQ ID NO: 660322 - RNA, 19 nt, Homo sapiens
  misc_RNA (1)...(19): siRNA sense strand
gaagcugggaagauccaaa

SEQ ID NO: 660323 - RNA, 19 nt, Homo sapiens
  misc_RNA (1)...(19): siRNA sense strand
aagccaugguuaacugaaa

SEQ ID NO: 660324 - RNA, 19 nt, Homo sapiens
  misc_RNA (1)...(19): siRNA sense strand
acagcaaccucuucuucug

SEQ ID NO: 660325 - RNA, 19 nt, Homo sapiens
  misc_RNA (1)...(19): siRNA sense strand
gaucccaggaauacaagaa

SEQ ID NO: 660326 - RNA, 19 nt, Homo sapiens
  misc_RNA (1)...(19): siRNA sense strand
gggcauggacuggaaagga

SEQ ID NO: 660327 - RNA, 19 nt, Homo sapiens
  misc_RNA (1)...(19): siRNA sense strand
ugaacggaauugcuauugg

SEQ ID NO: 660328 - RNA, 19 nt, Homo sapiens
  misc_RNA (1)...(19): siRNA sense strand
gaucaaccugaacggaauu

SEQ ID NO: 660329 - RNA, 19 nt, Homo sapiens
  misc_RNA (1)...(19): siRNA sense strand
guguuuccaugccaccuaa

SEQ ID NO: 660330 - RNA, 19 nt, Homo sapiens
  misc_RNA (1)...(19): siRNA sense strand
ucagauacagccagaagau

SEQ ID NO: 660331 - RNA, 19 nt, Homo sapiens
  misc_RNA (1)...(19): siRNA sense strand
cuagauggcgacuuaacaa

SEQ ID NO: 660332 - RNA, 19 nt, Homo sapiens
  misc_RNA (1)...(19): siRNA sense strand
caacgcucuccaugcuuua

SEQ ID NO: 660333 - RNA, 19 nt, Homo sapiens
  misc_RNA (1)...(19): siRNA sense strand
ggaucagcuuuacuaugug

SEQ ID NO: 660334 - RNA, 19 nt, Homo sapiens
  misc_RNA (1)...(19): siRNA sense strand
gaauacaagaaggcagaaa

SEQ ID NO: 660335 - RNA, 19 nt, Homo sapiens
  misc_RNA (1)...(19): siRNA sense strand
gcucagauacagccagaag

SEQ ID NO: 660336 - RNA, 19 nt, Homo sapiens
  misc_RNA (1)...(19): siRNA sense strand
ugaugggcauggacuggaa

SEQ ID NO: 660337 - RNA, 19 nt, Homo sapiens
  misc_RNA (1)...(19): siRNA sense strand
cauuauuucucaccccuua

SEQ ID NO: 660338 - RNA, 19 nt, Homo sapiens
  misc_RNA (1)...(19): siRNA sense strand
gaaugcauagaacacauca

SEQ ID NO: 660339 - RNA, 19 nt, Homo sapiens
  misc_RNA (1)...(19): siRNA sense strand
gaagcagugccaugaaugc

SEQ ID NO: 660340 - RNA, 19 nt, Homo sapiens
  misc_RNA (1)...(19): siRNA sense strand
agaucaaccugaacggaau

SEQ ID NO: 660341 - RNA, 19 nt, Homo sapiens
  misc_RNA (1)...(19): siRNA sense strand
cugaugauacccacggaua

SEQ ID NO: 660342 - RNA, 19 nt, Homo sapiens
  misc_RNA (1)...(19): siRNA sense strand
ucacaaguaacaugaccuu

SEQ ID NO: 660343 - RNA, 19 nt, Homo sapiens
  misc_RNA (1)...(19): siRNA sense strand
ugaguuuggucggcccuuu

SEQ ID NO: 660344 - RNA, 19 nt, Homo sapiens
  misc_RNA (1)...(19): siRNA sense strand
uagaacacaucaggaagca

SEQ ID NO: 660345 - RNA, 19 nt, Homo sapiens
  misc_RNA (1)...(19): siRNA sense strand
caaugaggacgauguagca

SEQ ID NO: 660346 - RNA, 19 nt, Homo sapiens
  misc_RNA (1)...(19): siRNA sense strand
auacaguacagucaguuaa

SEQ ID NO: 660347 - RNA, 19 nt, Homo sapiens
  misc_RNA (1)...(19): siRNA sense strand
caggacagccauuauuucu

SEQ ID NO: 660348 - RNA, 19 nt, Homo sapiens
  misc_RNA (1)...(19): siRNA sense strand
guacuugcgagaagauaca

SEQ ID NO: 660349 - RNA, 19 nt, Homo sapiens
  misc_RNA (1)...(19): siRNA sense strand
ggacagccauuauuucuca

SEQ ID NO: 660350 - RNA, 19 nt, Homo sapiens
  misc_RNA (1)...(19): siRNA sense strand
gaacggaauugcuauugga

SEQ ID NO: 660351 - RNA, 19 nt, Homo sapiens
  misc_RNA (1)...(19): siRNA sense strand
gcagugccaugaaugcaua

SEQ ID NO: 660352 - RNA, 19 nt, Homo sapiens
  misc_RNA (1)...(19): siRNA sense strand
gacugaacaugaagaguua

SEQ ID NO: 660353 - RNA, 19 nt, Homo sapiens
  misc_RNA (1)...(19): siRNA sense strand
uaacaagugauccuucuua

SEQ ID NO: 660354 - RNA, 19 nt, Homo sapiens
  misc_RNA (1)...(19): siRNA sense strand
ggaaaggaucccaggaaua

SEQ ID NO: 660355 - RNA, 19 nt, Homo sapiens
  misc_RNA (1)...(19): siRNA sense strand
ggacugaacaugaagaguu

SEQ ID NO: 660356 - RNA, 19 nt, Homo sapiens
  misc_RNA (1)...(19): siRNA sense strand
ggagauggauauucugauc

SEQ ID NO: 660357 - RNA, 19 nt, Homo sapiens
  misc_RNA (1)...(19): siRNA sense strand
gcacggaaccugaggauca

SEQ ID NO: 660358 - RNA, 19 nt, Homo sapiens
  misc_RNA (1)...(19): siRNA sense strand
ggaagagaauugaguuugg

SEQ ID NO: 660359 - RNA, 19 nt, Homo sapiens
  misc_RNA (1)...(19): siRNA sense strand
gaucagcuuuacuauguga

SEQ ID NO: 660360 - RNA, 19 nt, Homo sapiens
  misc_RNA (1)...(19): siRNA sense strand
ugagagaggugaagaucaa

SEQ ID NO: 660361 - RNA, 19 nt, Homo sapiens
  misc_RNA (1)...(19): siRNA sense strand
gaacugguuugaggccuuu

SEQ ID NO: 660362 - RNA, 19 nt, Homo sapiens
  misc_RNA (1)...(19): siRNA sense strand
acagugaaguggcugguua

SEQ ID NO: 660363 - RNA, 19 nt, Homo sapiens
  misc_RNA (1)...(19): siRNA sense strand
gaaaggaucccaggaauac

SEQ ID NO: 660364 - RNA, 19 nt, Homo sapiens
  misc_RNA (1)...(19): siRNA sense strand
ccacggauaugcagucaau

SEQ ID NO: 660365 - RNA, 19 nt, Homo sapiens
  misc_RNA (1)...(19): siRNA sense strand
ugaaguggcugguuacauc

SEQ ID NO: 660366 - RNA, 19 nt, Homo sapiens
  misc_RNA (1)...(19): siRNA sense strand
acuacuagauggcgacuua

SEQ ID NO: 660367 - RNA, 19 nt, Homo sapiens
  misc_RNA (1)...(19): siRNA sense strand
gcauagaacacaucaggaa

SEQ ID NO: 660368 - RNA, 19 nt, Homo sapiens
  misc_RNA (1)...(19): siRNA sense strand
gaagagaauugaguuuggu

SEQ ID NO: 660369 - RNA, 19 nt, Homo sapiens
  misc_RNA (1)...(19): siRNA sense strand
cagaauuccuguaccaaau

SEQ ID NO: 660370 - RNA, 19 nt, Homo sapiens
  misc_RNA (1)...(19): siRNA sense strand
gcagaauuccuguaccaaa

SEQ ID NO: 660371 - RNA, 19 nt, Homo sapiens
  misc_RNA (1)...(19): siRNA sense strand
guuugaggccuuugaaaua

SEQ ID NO: 660372 - RNA, 19 nt, Homo sapiens
  misc_RNA (1)...(19): siRNA sense strand
gaucuacaauggccaacug

SEQ ID NO: 660373 - RNA, 19 nt, Homo sapiens
  misc_RNA (1)...(19): siRNA sense strand
ggaaucagacuuuuaauga

SEQ ID NO: 660374 - RNA, 19 nt, Homo sapiens
  misc_RNA (1)...(19): siRNA sense strand
aggaucagcuuuacuaugu

SEQ ID NO: 660375 - RNA, 19 nt, Homo sapiens
  misc_RNA (1)...(19): siRNA sense strand
caacagcaaccucuucuuc

SEQ ID NO: 660376 - RNA, 19 nt, Homo sapiens
  misc_RNA (1)...(19): siRNA sense strand
ugacuuccaucagguaauu

SEQ ID NO: 660377 - RNA, 19 nt, Homo sapiens
  misc_RNA (1)...(19): siRNA sense strand
ccacaacgcucuccaugcu

SEQ ID NO: 660378 - RNA, 19 nt, Homo sapiens
  misc_RNA (1)...(19): siRNA sense strand
gauacaguacagucaguua

SEQ ID NO: 660379 - RNA, 19 nt, Homo sapiens
  misc_RNA (1)...(19): siRNA sense strand
ggagguucauccauguuug

SEQ ID NO: 660380 - RNA, 19 nt, Homo sapiens
  misc_RNA (1)...(19): siRNA sense strand
acaacgcucuccaugcuuu

SEQ ID NO: 660381 - RNA, 19 nt, Homo sapiens
  misc_RNA (1)...(19): siRNA sense strand
gaucccgaaucaauuauag

SEQ ID NO: 660382 - RNA, 19 nt, Homo sapiens
  misc_RNA (1)...(19): siRNA sense strand
cagaagcagugccaugaau

SEQ ID NO: 660383 - RNA, 19 nt, Homo sapiens
  misc_RNA (1)...(19): siRNA sense strand
cgauguagcacgggauuua

SEQ ID NO: 660384 - RNA, 19 nt, Homo sapiens
  misc_RNA (1)...(19): siRNA sense strand
cgagguggaggacauauuu

SEQ ID NO: 660385 - RNA, 19 nt, Homo sapiens
  misc_RNA (1)...(19): siRNA sense strand
gaaaaguacuugcgagaag

SEQ ID NO: 660386 - RNA, 19 nt, Homo sapiens
  misc_RNA (1)...(19): siRNA sense strand
ugacaugauuaaucgauuc

SEQ ID NO: 660387 - RNA, 19 nt, Homo sapiens
  misc_RNA (1)...(19): siRNA sense strand
ggcacaggcuucaguuuua

SEQ ID NO: 660388 - RNA, 19 nt, Homo sapiens
  misc_RNA (1)...(19): siRNA sense strand
ggaagcagaacugguuuga

SEQ ID NO: 660389 - RNA, 19 nt, Homo sapiens
  misc_RNA (1)...(19): siRNA sense strand
gcgagaagauacaguacag

SEQ ID NO: 660390 - RNA, 19 nt, Homo sapiens
  misc_RNA (1)...(19): siRNA sense strand
ggauuuauacagugcacua

SEQ ID NO: 660391 - RNA, 19 nt, Homo sapiens
  misc_RNA (1)...(19): siRNA sense strand
gaaauaugugccagccauu

SEQ ID NO: 660392 - RNA, 19 nt, Homo sapiens
  misc_RNA (1)...(19): siRNA sense strand
ccuuugaaauacuggauaa

SEQ ID NO: 660393 - RNA, 19 nt, Homo sapiens
  misc_RNA (1)...(19): siRNA sense strand
ucaggaagcagaacugguu

SEQ ID NO: 660394 - RNA, 19 nt, Homo sapiens
  misc_RNA (1)...(19): siRNA sense strand
guucuucccagcucagaua

SEQ ID NO: 660395 - RNA, 19 nt, Homo sapiens
  misc_RNA (1)...(19): siRNA sense strand
ggagucuuaugcagggaaa

SEQ ID NO: 660396 - RNA, 19 nt, Homo sapiens
  misc_RNA (1)...(19): siRNA sense strand
acagugcacuaauucaguu

SEQ ID NO: 660397 - RNA, 19 nt, Homo sapiens
  misc_RNA (1)...(19): siRNA sense strand
ucuccaugcuuuacauuga

SEQ ID NO: 660398 - RNA, 19 nt, Homo sapiens
  misc_RNA (1)...(19): siRNA sense strand
gaaauacuggauaaacuac

SEQ ID NO: 660399 - RNA, 19 nt, Homo sapiens
  misc_RNA (1)...(19): siRNA sense strand
cuuuaaaucugacagugaa

SEQ ID NO: 660400 - RNA, 19 nt, Homo sapiens
  misc_RNA (1)...(19): siRNA sense strand
ggcauggacuggaaaggau

SEQ ID NO: 660401 - RNA, 19 nt, Homo sapiens
  misc_RNA (1)...(19): siRNA sense strand
ucccaggacugaacaugaa

SEQ ID NO: 660402 - RNA, 19 nt, Homo sapiens
  misc_RNA (1)...(19): siRNA sense strand
auaagguucugaucuacaa

SEQ ID NO: 660403 - RNA, 19 nt, Homo sapiens
  misc_RNA (1)...(19): siRNA sense strand
uugcacaccucauccauuc

SEQ ID NO: 660404 - RNA, 19 nt, Homo sapiens
  misc_RNA (1)...(19): siRNA sense strand
gaugauacccacggauaug

SEQ ID NO: 660405 - RNA, 19 nt, Homo sapiens
  misc_RNA (1)...(19): siRNA sense strand
uggaaaggaucccaggaau

SEQ ID NO: 660406 - RNA, 19 nt, Homo sapiens
  misc_RNA (1)...(19): siRNA sense strand
gaggaucagcuuuacuaug

SEQ ID NO: 660407 - RNA, 19 nt, Homo sapiens
  misc_RNA (1)...(19): siRNA sense strand
uguggaaggugauuguuuc

SEQ ID NO: 660408 - RNA, 19 nt, Homo sapiens
  misc_RNA (1)...(19): siRNA sense strand
aaauuggcuuguuggauga

SEQ ID NO: 660409 - RNA, 19 nt, Homo sapiens
  misc_RNA (1)...(19): siRNA sense strand
cauugaagcugggaagauc

SEQ ID NO: 660410 - RNA, 19 nt, Homo sapiens
  misc_RNA (1)...(19): siRNA sense strand
cggaauugcuauuggagau

SEQ ID NO: 660411 - RNA, 19 nt, Homo sapiens
  misc_RNA (1)...(19): siRNA sense strand
gggagguucauccauguuu

SEQ ID NO: 660412 - RNA, 19 nt, Homo sapiens
  misc_RNA (1)...(19): siRNA sense strand
gccagaagaugccccagua

SEQ ID NO: 660413 - RNA, 19 nt, Homo sapiens
  misc_RNA (1)...(19): siRNA sense strand
aacaugaccuugcgugaca

SEQ ID NO: 660414 - RNA, 19 nt, Homo sapiens
  misc_RNA (1)...(19): siRNA sense strand
augguuaacugaaaucaug

SEQ ID NO: 660415 - RNA, 19 nt, Homo sapiens
  misc_RNA (1)...(19): siRNA sense strand
uauuggagauggauauucu

SEQ ID NO: 660416 - RNA, 19 nt, Homo sapiens
  misc_RNA (1)...(19): siRNA sense strand
aaaggaagagaauugaguu

SEQ ID NO: 660417 - RNA, 19 nt, Homo sapiens
  misc_RNA (1)...(19): siRNA sense strand
ucugagagcuuuugacaug

SEQ ID NO: 660418 - RNA, 19 nt, Homo sapiens
  misc_RNA (1)...(19): siRNA sense strand
ccagaauguuacaggaugu

SEQ ID NO: 660419 - RNA, 19 nt, Homo sapiens
  misc_RNA (1)...(19): siRNA sense strand
gguuugaggccuuugaaau

SEQ ID NO: 660420 - RNA, 19 nt, Homo sapiens
  misc_RNA (1)...(19): siRNA sense strand
agacucaggacagccauua

SEQ ID NO: 660421 - RNA, 19 nt, Homo sapiens
  misc_RNA (1)...(19): siRNA sense strand
uuccagauauuuccugaau

SEQ ID NO: 660422 - RNA, 19 nt, Homo sapiens
  misc_RNA (1)...(19): siRNA sense strand
gaagcugggaagauccaaa

SEQ ID NO: 660423 - RNA, 19 nt, Homo sapiens
  misc_RNA (1)...(19): siRNA sense strand
aagccaugguuaacugaaa

SEQ ID NO: 660424 - RNA, 19 nt, Homo sapiens
  misc_RNA (1)...(19): siRNA sense strand
acagcaaccucuucuucug

SEQ ID NO: 660425 - RNA, 19 nt, Homo sapiens
  misc_RNA (1)...(19): siRNA sense strand
gaucccaggaauacaagaa

SEQ ID NO: 660426 - RNA, 19 nt, Homo sapiens
  misc_RNA (1)...(19): siRNA sense strand
gggcauggacuggaaagga

SEQ ID NO: 660427 - RNA, 19 nt, Homo sapiens
  misc_RNA (1)...(19): siRNA sense strand
ugaacggaauugcuauugg

SEQ ID NO: 660428 - RNA, 19 nt, Homo sapiens
  misc_RNA (1)...(19): siRNA sense strand
gaucaaccugaacggaauu

SEQ ID NO: 660429 - RNA, 19 nt, Homo sapiens
  misc_RNA (1)...(19): siRNA sense strand
guguuuccaugccaccuaa

SEQ ID NO: 660430 - RNA, 19 nt, Homo sapiens
  misc_RNA (1)...(19): siRNA sense strand
ucagauacagccagaagau

SEQ ID NO: 660431 - RNA, 19 nt, Homo sapiens
  misc_RNA (1)...(19): siRNA sense strand
cuagauggcgacuuaacaa

SEQ ID NO: 660432 - RNA, 19 nt, Homo sapiens
  misc_RNA (1)...(19): siRNA sense strand
caacgcucuccaugcuuua

SEQ ID NO: 660433 - RNA, 19 nt, Homo sapiens
  misc_RNA (1)...(19): siRNA sense strand
ggaucagcuuuacuaugug

SEQ ID NO: 660434 - RNA, 19 nt, Homo sapiens
  misc_RNA (1)...(19): siRNA sense strand
gaauacaagaaggcagaaa

SEQ ID NO: 660435 - RNA, 19 nt, Homo sapiens
  misc_RNA (1)...(19): siRNA sense strand
gcucagauacagccagaag

SEQ ID NO: 660436 - RNA, 19 nt, Homo sapiens
  misc_RNA (1)...(19): siRNA sense strand
ugaugggcauggacuggaa

SEQ ID NO: 660437 - RNA, 19 nt, Homo sapiens
  misc_RNA (1)...(19): siRNA sense strand
cauuauuucucaccccuua

SEQ ID NO: 660438 - RNA, 19 nt, Homo sapiens
  misc_RNA (1)...(19): siRNA sense strand
gaaugcauagaacacauca

SEQ ID NO: 660439 - RNA, 19 nt, Homo sapiens
  misc_RNA (1)...(19): siRNA sense strand
gaagcagugccaugaaugc

SEQ ID NO: 660440 - RNA, 19 nt, Homo sapiens
  misc_RNA (1)...(19): siRNA sense strand
agaucaaccugaacggaau

SEQ ID NO: 660441 - RNA, 19 nt, Homo sapiens
  misc_RNA (1)...(19): siRNA sense strand
cugaugauacccacggaua

SEQ ID NO: 660442 - RNA, 19 nt, Homo sapiens
  misc_RNA (1)...(19): siRNA sense strand
ucacaaguaacaugaccuu

SEQ ID NO: 660443 - RNA, 19 nt, Homo sapiens
  misc_RNA (1)...(19): siRNA sense strand
ugaguuuggucggcccuuu

SEQ ID NO: 660444 - RNA, 19 nt, Homo sapiens
  misc_RNA (1)...(19): siRNA sense strand
uagaacacaucaggaagca

SEQ ID NO: 660445 - RNA, 19 nt, Homo sapiens
  misc_RNA (1)...(19): siRNA sense strand
caaugaggacgauguagca

SEQ ID NO: 660446 - RNA, 19 nt, Homo sapiens
  misc_RNA (1)...(19): siRNA sense strand
auacaguacagucaguuaa

SEQ ID NO: 660447 - RNA, 19 nt, Homo sapiens
  misc_RNA (1)...(19): siRNA sense strand
caggacagccauuauuucu

SEQ ID NO: 660448 - RNA, 19 nt, Homo sapiens
  misc_RNA (1)...(19): siRNA sense strand
guacuugcgagaagauaca

SEQ ID NO: 660449 - RNA, 19 nt, Homo sapiens
  misc_RNA (1)...(19): siRNA sense strand
gaaagucucugguguucuu

SEQ ID NO: 660450 - RNA, 19 nt, Homo sapiens
  misc_RNA (1)...(19): siRNA sense strand
gaaaagaagucacaagaaa

SEQ ID NO: 660451 - RNA, 19 nt, Homo sapiens
  misc_RNA (1)...(19): siRNA sense strand
gcaccugucuaugcuguua

SEQ ID NO: 660452 - RNA, 19 nt, Homo sapiens
  misc_RNA (1)...(19): siRNA sense strand
gcagacagcaguuggugua

SEQ ID NO: 660453 - RNA, 19 nt, Homo sapiens
  misc_RNA (1)...(19): siRNA sense strand
guacagcccugacuuucau

SEQ ID NO: 660454 - RNA, 19 nt, Homo sapiens
  misc_RNA (1)...(19): siRNA sense strand
ccuccuaccugaagaagaa

SEQ ID NO: 660455 - RNA, 19 nt, Homo sapiens
  misc_RNA (1)...(19): siRNA sense strand
gagagcaccguguuaaaga

SEQ ID NO: 660456 - RNA, 19 nt, Homo sapiens
  misc_RNA (1)...(19): siRNA sense strand
gaacugggccaugcuggaa

SEQ ID NO: 660457 - RNA, 19 nt, Homo sapiens
  misc_RNA (1)...(19): siRNA sense strand
gcacuccuguggucuacau

SEQ ID NO: 660458 - RNA, 19 nt, Homo sapiens
  misc_RNA (1)...(19): siRNA sense strand
gacagccucuucaucuaug

SEQ ID NO: 660459 - RNA, 19 nt, Homo sapiens
  misc_RNA (1)...(19): siRNA sense strand
gagcaccguguuaaagaaa

SEQ ID NO: 660460 - RNA, 19 nt, Homo sapiens
  misc_RNA (1)...(19): siRNA sense strand
aaagaaagucucugguguu

SEQ ID NO: 660461 - RNA, 19 nt, Homo sapiens
  misc_RNA (1)...(19): siRNA sense strand
gggaggcgacgcuaaguug

SEQ ID NO: 660462 - RNA, 19 nt, Homo sapiens
  misc_RNA (1)...(19): siRNA sense strand
gaagaagaaagaggagaga

SEQ ID NO: 660463 - RNA, 19 nt, Homo sapiens
  misc_RNA (1)...(19): siRNA sense strand
aagaaagucucugguguuc

SEQ ID NO: 660464 - RNA, 19 nt, Homo sapiens
  misc_RNA (1)...(19): siRNA sense strand
gggcaugccaagaagauga

SEQ ID NO: 660465 - RNA, 19 nt, Homo sapiens
  misc_RNA (1)...(19): siRNA sense strand
gcaccguguuaaagaaagu

SEQ ID NO: 660466 - RNA, 19 nt, Homo sapiens
  misc_RNA (1)...(19): siRNA sense strand
cgacgggcaugccaagaag

SEQ ID NO: 660467 - RNA, 19 nt, Homo sapiens
  misc_RNA (1)...(19): siRNA sense strand
gguguacagcccugacuuu

SEQ ID NO: 660468 - RNA, 19 nt, Homo sapiens
  misc_RNA (1)...(19): siRNA sense strand
gaugaugacagccucuuca

SEQ ID NO: 660469 - RNA, 19 nt, Homo sapiens
  misc_RNA (1)...(19): siRNA sense strand
gcugucaccuggccagucu

SEQ ID NO: 660470 - RNA, 19 nt, Homo sapiens
  misc_RNA (1)...(19): siRNA sense strand
agagcaccguguuaaagaa

SEQ ID NO: 660471 - RNA, 19 nt, Homo sapiens
  misc_RNA (1)...(19): siRNA sense strand
ugacagccucuucaucuau

SEQ ID NO: 660472 - RNA, 19 nt, Homo sapiens
  misc_RNA (1)...(19): siRNA sense strand
ccaagucuggcagcuauuu

SEQ ID NO: 660473 - RNA, 19 nt, Homo sapiens
  misc_RNA (1)...(19): siRNA sense strand
uggcagcuauuuugcuuua

SEQ ID NO: 660474 - RNA, 19 nt, Homo sapiens
  misc_RNA (1)...(19): siRNA sense strand
agcagcagcuagagaagaa

SEQ ID NO: 660475 - RNA, 19 nt, Homo sapiens
  misc_RNA (1)...(19): siRNA sense strand
ucgacaacgugaccuccua

SEQ ID NO: 660476 - RNA, 19 nt, Homo sapiens
  misc_RNA (1)...(19): siRNA sense strand
gacagcaguugguguacag

SEQ ID NO: 660477 - RNA, 19 nt, Homo sapiens
  misc_RNA (1)...(19): siRNA sense strand
ccugagagcaccguguuaa

SEQ ID NO: 660478 - RNA, 19 nt, Homo sapiens
  misc_RNA (1)...(19): siRNA sense strand
cuccaagucuggcagcuau

SEQ ID NO: 660479 - RNA, 19 nt, Homo sapiens
  misc_RNA (1)...(19): siRNA sense strand
gacgagaagauccgaguca

SEQ ID NO: 660480 - RNA, 19 nt, Homo sapiens
  misc_RNA (1)...(19): siRNA sense strand
gcuccaggacugccaggaa

SEQ ID NO: 660481 - RNA, 19 nt, Homo sapiens
  misc_RNA (1)...(19): siRNA sense strand
cuucagcagucucuacaag

SEQ ID NO: 660482 - RNA, 19 nt, Homo sapiens
  misc_RNA (1)...(19): siRNA sense strand
gcaucgaguccuucugcuu

SEQ ID NO: 660483 - RNA, 19 nt, Homo sapiens
  misc_RNA (1)...(19): siRNA sense strand
ugagagcaccguguuaaag

SEQ ID NO: 660484 - RNA, 19 nt, Homo sapiens
  misc_RNA (1)...(19): siRNA sense strand
agacagcaguugguguaca

SEQ ID NO: 660485 - RNA, 19 nt, Homo sapiens
  misc_RNA (1)...(19): siRNA sense strand
cagaaaagaagucacaaga

SEQ ID NO: 660486 - RNA, 19 nt, Homo sapiens
  misc_RNA (1)...(19): siRNA sense strand
gaccaguggcagucuguuc

SEQ ID NO: 660487 - RNA, 19 nt, Homo sapiens
  misc_RNA (1)...(19): siRNA sense strand
cguccaggauugcauucug

SEQ ID NO: 660488 - RNA, 19 nt, Homo sapiens
  misc_RNA (1)...(19): siRNA sense strand
gcguccaccuucuccaagu

SEQ ID NO: 660489 - RNA, 19 nt, Homo sapiens
  misc_RNA (1)...(19): siRNA sense strand
gaaagucucugguguucuu

SEQ ID NO: 660490 - RNA, 19 nt, Homo sapiens
  misc_RNA (1)...(19): siRNA sense strand
gaaaagaagucacaagaaa

SEQ ID NO: 660491 - RNA, 19 nt, Homo sapiens
  misc_RNA (1)...(19): siRNA sense strand
gcaccugucuaugcuguua

SEQ ID NO: 660492 - RNA, 19 nt, Homo sapiens
  misc_RNA (1)...(19): siRNA sense strand
gcagacagcaguuggugua

SEQ ID NO: 660493 - RNA, 19 nt, Homo sapiens
  misc_RNA (1)...(19): siRNA sense strand
guacagcccugacuuucau

SEQ ID NO: 660494 - RNA, 19 nt, Homo sapiens
  misc_RNA (1)...(19): siRNA sense strand
ccuccuaccugaagaagaa

SEQ ID NO: 660495 - RNA, 19 nt, Homo sapiens
  misc_RNA (1)...(19): siRNA sense strand
gagagcaccguguuaaaga

SEQ ID NO: 660496 - RNA, 19 nt, Homo sapiens
  misc_RNA (1)...(19): siRNA sense strand
gaacugggccaugcuggaa

SEQ ID NO: 660497 - RNA, 19 nt, Homo sapiens
  misc_RNA (1)...(19): siRNA sense strand
gcacuccuguggucuacau

SEQ ID NO: 660498 - RNA, 19 nt, Homo sapiens
  misc_RNA (1)...(19): siRNA sense strand
gacagccucuucaucuaug

SEQ ID NO: 660499 - RNA, 19 nt, Homo sapiens
  misc_RNA (1)...(19): siRNA sense strand
gagcaccguguuaaagaaa

SEQ ID NO: 660500 - RNA, 19 nt, Homo sapiens
  misc_RNA (1)...(19): siRNA sense strand
aaagaaagucucugguguu

SEQ ID NO: 660501 - RNA, 19 nt, Homo sapiens
  misc_RNA (1)...(19): siRNA sense strand
gggaggcgacgcuaaguug

SEQ ID NO: 660502 - RNA, 19 nt, Homo sapiens
  misc_RNA (1)...(19): siRNA sense strand
gaagaagaaagaggagaga

SEQ ID NO: 660503 - RNA, 19 nt, Homo sapiens
  misc_RNA (1)...(19): siRNA sense strand
aagaaagucucugguguuc

SEQ ID NO: 660504 - RNA, 19 nt, Homo sapiens
  misc_RNA (1)...(19): siRNA sense strand
gggcaugccaagaagauga

SEQ ID NO: 660505 - RNA, 19 nt, Homo sapiens
  misc_RNA (1)...(19): siRNA sense strand
gcaccguguuaaagaaagu

SEQ ID NO: 660506 - RNA, 19 nt, Homo sapiens
  misc_RNA (1)...(19): siRNA sense strand
cgacgggcaugccaagaag

SEQ ID NO: 660507 - RNA, 19 nt, Homo sapiens
  misc_RNA (1)...(19): siRNA sense strand
gguguacagcccugacuuu

SEQ ID NO: 660508 - RNA, 19 nt, Homo sapiens
  misc_RNA (1)...(19): siRNA sense strand
gaugaugacagccucuuca

SEQ ID NO: 660509 - RNA, 19 nt, Homo sapiens
  misc_RNA (1)...(19): siRNA sense strand
gcugucaccuggccagucu

SEQ ID NO: 660510 - RNA, 19 nt, Homo sapiens
  misc_RNA (1)...(19): siRNA sense strand
agagcaccguguuaaagaa

SEQ ID NO: 660511 - RNA, 19 nt, Homo sapiens
  misc_RNA (1)...(19): siRNA sense strand
ugacagccucuucaucuau

SEQ ID NO: 660512 - RNA, 19 nt, Homo sapiens
  misc_RNA (1)...(19): siRNA sense strand
ccaagucuggcagcuauuu

SEQ ID NO: 660513 - RNA, 19 nt, Homo sapiens
  misc_RNA (1)...(19): siRNA sense strand
uggcagcuauuuugcuuua

SEQ ID NO: 660514 - RNA, 19 nt, Homo sapiens
  misc_RNA (1)...(19): siRNA sense strand
agcagcagcuagagaagaa

SEQ ID NO: 660515 - RNA, 19 nt, Homo sapiens
  misc_RNA (1)...(19): siRNA sense strand
ucgacaacgugaccuccua

SEQ ID NO: 660516 - RNA, 19 nt, Homo sapiens
  misc_RNA (1)...(19): siRNA sense strand
gacagcaguugguguacag

SEQ ID NO: 660517 - RNA, 19 nt, Homo sapiens
  misc_RNA (1)...(19): siRNA sense strand
ccugagagcaccguguuaa

SEQ ID NO: 660518 - RNA, 19 nt, Homo sapiens
  misc_RNA (1)...(19): siRNA sense strand
cuccaagucuggcagcuau

SEQ ID NO: 660519 - RNA, 19 nt, Homo sapiens
  misc_RNA (1)...(19): siRNA sense strand
gacgagaagauccgaguca

SEQ ID NO: 660520 - RNA, 19 nt, Homo sapiens
  misc_RNA (1)...(19): siRNA sense strand
gcuccaggacugccaggaa

SEQ ID NO: 660521 - RNA, 19 nt, Homo sapiens
  misc_RNA (1)...(19): siRNA sense strand
cuucagcagucucuacaag

SEQ ID NO: 660522 - RNA, 19 nt, Homo sapiens
  misc_RNA (1)...(19): siRNA sense strand
gcaucgaguccuucugcuu

SEQ ID NO: 660523 - RNA, 19 nt, Homo sapiens
  misc_RNA (1)...(19): siRNA sense strand
ugagagcaccguguuaaag

SEQ ID NO: 660524 - RNA, 19 nt, Homo sapiens
  misc_RNA (1)...(19): siRNA sense strand
agacagcaguugguguaca

SEQ ID NO: 660525 - RNA, 19 nt, Homo sapiens
  misc_RNA (1)...(19): siRNA sense strand
cagaaaagaagucacaaga

SEQ ID NO: 660526 - RNA, 19 nt, Homo sapiens
  misc_RNA (1)...(19): siRNA sense strand
gaccaguggcagucuguuc

SEQ ID NO: 660527 - RNA, 19 nt, Homo sapiens
  misc_RNA (1)...(19): siRNA sense strand
cguccaggauugcauucug

SEQ ID NO: 660528 - RNA, 19 nt, Homo sapiens
  misc_RNA (1)...(19): siRNA sense strand
gcguccaccuucuccaagu

SEQ ID NO: 660529 - RNA, 19 nt, Homo sapiens
  misc_RNA (1)...(19): siRNA sense strand
gaaagucucugguguucuu

SEQ ID NO: 660530 - RNA, 19 nt, Homo sapiens
  misc_RNA (1)...(19): siRNA sense strand
gcagacagcaguuggugua

SEQ ID NO: 660531 - RNA, 19 nt, Homo sapiens
  misc_RNA (1)...(19): siRNA sense strand
ccuccuaccugaagaagaa

SEQ ID NO: 660532 - RNA, 19 nt, Homo sapiens
  misc_RNA (1)...(19): siRNA sense strand
gagagcaccguguuaaaga

SEQ ID NO: 660533 - RNA, 19 nt, Homo sapiens
  misc_RNA (1)...(19): siRNA sense strand
gaacugggccaugcuggaa

SEQ ID NO: 660534 - RNA, 19 nt, Homo sapiens
  misc_RNA (1)...(19): siRNA sense strand
gagcaccguguuaaagaaa

SEQ ID NO: 660535 - RNA, 19 nt, Homo sapiens
  misc_RNA (1)...(19): siRNA sense strand
aaagaaagucucugguguu

SEQ ID NO: 660536 - RNA, 19 nt, Homo sapiens
  misc_RNA (1)...(19): siRNA sense strand
gggaggcgacgcuaaguug

SEQ ID NO: 660537 - RNA, 19 nt, Homo sapiens
  misc_RNA (1)...(19): siRNA sense strand
gaagaagaaagaggagaga

SEQ ID NO: 660538 - RNA, 19 nt, Homo sapiens
  misc_RNA (1)...(19): siRNA sense strand
aagaaagucucugguguuc

SEQ ID NO: 660539 - RNA, 19 nt, Homo sapiens
  misc_RNA (1)...(19): siRNA sense strand
gggcaugccaagaagauga

SEQ ID NO: 660540 - RNA, 19 nt, Homo sapiens
  misc_RNA (1)...(19): siRNA sense strand
gcaccguguuaaagaaagu

SEQ ID NO: 660541 - RNA, 19 nt, Homo sapiens
  misc_RNA (1)...(19): siRNA sense strand
cgacgggcaugccaagaag

SEQ ID NO: 660542 - RNA, 19 nt, Homo sapiens
  misc_RNA (1)...(19): siRNA sense strand
gcugucaccuggccagucu

SEQ ID NO: 660543 - RNA, 19 nt, Homo sapiens
  misc_RNA (1)...(19): siRNA sense strand
agagcaccguguuaaagaa

SEQ ID NO: 660544 - RNA, 19 nt, Homo sapiens
  misc_RNA (1)...(19): siRNA sense strand
ucgacaacgugaccuccua

SEQ ID NO: 660545 - RNA, 19 nt, Homo sapiens
  misc_RNA (1)...(19): siRNA sense strand
agcagcagcuagagaagaa

SEQ ID NO: 660546 - RNA, 19 nt, Homo sapiens
  misc_RNA (1)...(19): siRNA sense strand
gacagcaguugguguacag

SEQ ID NO: 660547 - RNA, 19 nt, Homo sapiens
  misc_RNA (1)...(19): siRNA sense strand
ccugagagcaccguguuaa

SEQ ID NO: 660548 - RNA, 19 nt, Homo sapiens
  misc_RNA (1)...(19): siRNA sense strand
gacgagaagauccgaguca

SEQ ID NO: 660549 - RNA, 19 nt, Homo sapiens
  misc_RNA (1)...(19): siRNA sense strand
gcuccaggacugccaggaa

SEQ ID NO: 660550 - RNA, 19 nt, Homo sapiens
  misc_RNA (1)...(19): siRNA sense strand
cuucagcagucucuacaag

SEQ ID NO: 660551 - RNA, 19 nt, Homo sapiens
  misc_RNA (1)...(19): siRNA sense strand
gcaucgaguccuucugcuu

SEQ ID NO: 660552 - RNA, 19 nt, Homo sapiens
  misc_RNA (1)...(19): siRNA sense strand
ugagagcaccguguuaaag

SEQ ID NO: 660553 - RNA, 19 nt, Homo sapiens
  misc_RNA (1)...(19): siRNA sense strand
agacagcaguugguguaca

SEQ ID NO: 660554 - RNA, 19 nt, Homo sapiens
  misc_RNA (1)...(19): siRNA sense strand
gaccaguggcagucuguuc

SEQ ID NO: 660555 - RNA, 19 nt, Homo sapiens
  misc_RNA (1)...(19): siRNA sense strand
cguccaggauugcauucug

SEQ ID NO: 660556 - RNA, 19 nt, Homo sapiens
  misc_RNA (1)...(19): siRNA sense strand
ggacggaucuuucauauug

SEQ ID NO: 660557 - RNA, 19 nt, Homo sapiens
  misc_RNA (1)...(19): siRNA sense strand
gcuauuagaucuugaacuu

SEQ ID NO: 660558 - RNA, 19 nt, Homo sapiens
  misc_RNA (1)...(19): siRNA sense strand
gaaagaagaacaucaugaa

SEQ ID NO: 660559 - RNA, 19 nt, Homo sapiens
  misc_RNA (1)...(19): siRNA sense strand
ggagaaugaucuguacaua

SEQ ID NO: 660560 - RNA, 19 nt, Homo sapiens
  misc_RNA (1)...(19): siRNA sense strand
agaaugaucuguacauaga

SEQ ID NO: 660561 - RNA, 19 nt, Homo sapiens
  misc_RNA (1)...(19): siRNA sense strand
ggagagaaauaccagaaag

SEQ ID NO: 660562 - RNA, 19 nt, Homo sapiens
  misc_RNA (1)...(19): siRNA sense strand
caacuguacuagaggcuaa

SEQ ID NO: 660563 - RNA, 19 nt, Homo sapiens
  misc_RNA (1)...(19): siRNA sense strand
agaaguggauggagagaaa

SEQ ID NO: 660564 - RNA, 19 nt, Homo sapiens
  misc_RNA (1)...(19): siRNA sense strand
gaugggaccugcaaaggau

SEQ ID NO: 660565 - RNA, 19 nt, Homo sapiens
  misc_RNA (1)...(19): siRNA sense strand
gaaagugguaguuccaaug

SEQ ID NO: 660566 - RNA, 19 nt, Homo sapiens
  misc_RNA (1)...(19): siRNA sense strand
gagaguggauccgaaagug

SEQ ID NO: 660567 - RNA, 19 nt, Homo sapiens
  misc_RNA (1)...(19): siRNA sense strand
cgaaagaagaacaucauga

SEQ ID NO: 660568 - RNA, 19 nt, Homo sapiens
  misc_RNA (1)...(19): siRNA sense strand
ggaauccuuugcaucuaug

SEQ ID NO: 660569 - RNA, 19 nt, Homo sapiens
  misc_RNA (1)...(19): siRNA sense strand
gagaaauaccagaaaggaa

SEQ ID NO: 660570 - RNA, 19 nt, Homo sapiens
  misc_RNA (1)...(19): siRNA sense strand
gaucuugaacuuacgucua

SEQ ID NO: 660571 - RNA, 19 nt, Homo sapiens
  misc_RNA (1)...(19): siRNA sense strand
cgaaagugguaguuccaau

SEQ ID NO: 660572 - RNA, 19 nt, Homo sapiens
  misc_RNA (1)...(19): siRNA sense strand
gcgaguguuucucuucuuc

SEQ ID NO: 660573 - RNA, 19 nt, Homo sapiens
  misc_RNA (1)...(19): siRNA sense strand
gagaaugaucuguacauag

SEQ ID NO: 660574 - RNA, 19 nt, Homo sapiens
  misc_RNA (1)...(19): siRNA sense strand
caucuaugcugagacauuc

SEQ ID NO: 660575 - RNA, 19 nt, Homo sapiens
  misc_RNA (1)...(19): siRNA sense strand
uaaagacucaagaucgaaa

SEQ ID NO: 660576 - RNA, 19 nt, Homo sapiens
  misc_RNA (1)...(19): siRNA sense strand
uggaauccuuugcaucuau

SEQ ID NO: 660577 - RNA, 19 nt, Homo sapiens
  misc_RNA (1)...(19): siRNA sense strand
aggauaaacuggucauugg

SEQ ID NO: 660578 - RNA, 19 nt, Homo sapiens
  misc_RNA (1)...(19): siRNA sense strand
gacauucuccucuuacaca

SEQ ID NO: 660579 - RNA, 19 nt, Homo sapiens
  misc_RNA (1)...(19): siRNA sense strand
gaucgaaagaagaacauca

SEQ ID NO: 660580 - RNA, 19 nt, Homo sapiens
  misc_RNA (1)...(19): siRNA sense strand
gcaguucucuugggaaucc

SEQ ID NO: 660581 - RNA, 19 nt, Homo sapiens
  misc_RNA (1)...(19): siRNA sense strand
acuagaggcuaaugcaguu

SEQ ID NO: 660582 - RNA, 19 nt, Homo sapiens
  misc_RNA (1)...(19): siRNA sense strand
aguaaagacucaagaucga

SEQ ID NO: 660583 - RNA, 19 nt, Homo sapiens
  misc_RNA (1)...(19): siRNA sense strand
gacucaagaucgaaagaag

SEQ ID NO: 660584 - RNA, 19 nt, Homo sapiens
  misc_RNA (1)...(19): siRNA sense strand
ccaaugccaaggagccuaa

SEQ ID NO: 660585 - RNA, 19 nt, Homo sapiens
  misc_RNA (1)...(19): siRNA sense strand
caagaucgaaagaagaaca

SEQ ID NO: 660586 - RNA, 19 nt, Homo sapiens
  misc_RNA (1)...(19): siRNA sense strand
guaaagacucaagaucgaa

SEQ ID NO: 660587 - RNA, 19 nt, Homo sapiens
  misc_RNA (1)...(19): siRNA sense strand
uagaagaccagaaguggau

SEQ ID NO: 660588 - RNA, 19 nt, Homo sapiens
  misc_RNA (1)...(19): siRNA sense strand
guggaauccuuugcaucua

SEQ ID NO: 660589 - RNA, 19 nt, Homo sapiens
  misc_RNA (1)...(19): siRNA sense strand
ggauaaacuggucauugga

SEQ ID NO: 660590 - RNA, 19 nt, Homo sapiens
  misc_RNA (1)...(19): siRNA sense strand
gcaacaacagauacaacug

SEQ ID NO: 660591 - RNA, 19 nt, Homo sapiens
  misc_RNA (1)...(19): siRNA sense strand
ggucauuggacggaucuuu

SEQ ID NO: 660592 - RNA, 19 nt, Homo sapiens
  misc_RNA (1)...(19): siRNA sense strand
uuggacggaucuuucauau

SEQ ID NO: 660593 - RNA, 19 nt, Homo sapiens
  misc_RNA (1)...(19): siRNA sense strand
gaauccaggagaguaaaga

SEQ ID NO: 660594 - RNA, 19 nt, Homo sapiens
  misc_RNA (1)...(19): siRNA sense strand
gagagaaauaccagaaagg

SEQ ID NO: 660595 - RNA, 19 nt, Homo sapiens
  misc_RNA (1)...(19): siRNA sense strand
agagaaauaccagaaagga

SEQ ID NO: 660596 - RNA, 19 nt, Homo sapiens
  misc_RNA (1)...(19): siRNA sense strand
guauguagaagaccagaag

SEQ ID NO: 660597 - RNA, 19 nt, Homo sapiens
  misc_RNA (1)...(19): siRNA sense strand
gagcaacaacagauacaac

SEQ ID NO: 660598 - RNA, 19 nt, Homo sapiens
  misc_RNA (1)...(19): siRNA sense strand
acacagaugggaccugcaa

SEQ ID NO: 660599 - RNA, 19 nt, Homo sapiens
  misc_RNA (1)...(19): siRNA sense strand
guaguuccaaugccaagga

SEQ ID NO: 660600 - RNA, 19 nt, Homo sapiens
  misc_RNA (1)...(19): siRNA sense strand
gacggaucuuucauauugu

SEQ ID NO: 660601 - RNA, 19 nt, Homo sapiens
  misc_RNA (1)...(19): siRNA sense strand
ggagcaacaacagauacaa

SEQ ID NO: 660602 - RNA, 19 nt, Homo sapiens
  misc_RNA (1)...(19): siRNA sense strand
aaggauaaacuggucauug

SEQ ID NO: 660603 - RNA, 19 nt, Homo sapiens
  misc_RNA (1)...(19): siRNA sense strand
gguugcggcuauuagaucu

SEQ ID NO: 660604 - RNA, 19 nt, Homo sapiens
  misc_RNA (1)...(19): siRNA sense strand
ucuuucauauuguggagaa

SEQ ID NO: 660605 - RNA, 19 nt, Homo sapiens
  misc_RNA (1)...(19): siRNA sense strand
cucaagaucgaaagaagaa

SEQ ID NO: 660606 - RNA, 19 nt, Homo sapiens
  misc_RNA (1)...(19): siRNA sense strand
gaguguuucucuucuucag

SEQ ID NO: 660607 - RNA, 19 nt, Homo sapiens
  misc_RNA (1)...(19): siRNA sense strand
gcacucggagcuucuacag

SEQ ID NO: 660608 - RNA, 19 nt, Homo sapiens
  misc_RNA (1)...(19): siRNA sense strand
ggaauccaggagaguaaag

SEQ ID NO: 660609 - RNA, 19 nt, Homo sapiens
  misc_RNA (1)...(19): siRNA sense strand
gggaauccaggagaguaaa

SEQ ID NO: 660610 - RNA, 19 nt, Homo sapiens
  misc_RNA (1)...(19): siRNA sense strand
ggcuaaugcaguucucuug

SEQ ID NO: 660611 - RNA, 19 nt, Homo sapiens
  misc_RNA (1)...(19): siRNA sense strand
gauccgaaagugguaguuc

SEQ ID NO: 660612 - RNA, 19 nt, Homo sapiens
  misc_RNA (1)...(19): siRNA sense strand
gaaguggauggagagaaau

SEQ ID NO: 660613 - RNA, 19 nt, Homo sapiens
  misc_RNA (1)...(19): siRNA sense strand
gaagaaggcaacccaaaug

SEQ ID NO: 660614 - RNA, 19 nt, Homo sapiens
  misc_RNA (1)...(19): siRNA sense strand
gcaauggccuggugugcau

SEQ ID NO: 660615 - RNA, 19 nt, Homo sapiens
  misc_RNA (1)...(19): siRNA sense strand
gguggagucuggaauuuca

SEQ ID NO: 660616 - RNA, 19 nt, Homo sapiens
  misc_RNA (1)...(19): siRNA sense strand
guccugcccucuucuguuu

SEQ ID NO: 660617 - RNA, 19 nt, Homo sapiens
  misc_RNA (1)...(19): siRNA sense strand
gagaagaaggcaacccaaa

SEQ ID NO: 660618 - RNA, 19 nt, Homo sapiens
  misc_RNA (1)...(19): siRNA sense strand
guacuggccuuugcugugu

SEQ ID NO: 660619 - RNA, 19 nt, Homo sapiens
  misc_RNA (1)...(19): siRNA sense strand
gcauggcugugcugaagga

SEQ ID NO: 660620 - RNA, 19 nt, Homo sapiens
  misc_RNA (1)...(19): siRNA sense strand
guacagccagcauccuuaa

SEQ ID NO: 660621 - RNA, 19 nt, Homo sapiens
  misc_RNA (1)...(19): siRNA sense strand
ccucuucuguuuggcuuua

SEQ ID NO: 660622 - RNA, 19 nt, Homo sapiens
  misc_RNA (1)...(19): siRNA sense strand
cgacauggcugggcuacgu

SEQ ID NO: 660623 - RNA, 19 nt, Homo sapiens
  misc_RNA (1)...(19): siRNA sense strand
cagguggagucuggaauuu

SEQ ID NO: 660624 - RNA, 19 nt, Homo sapiens
  misc_RNA (1)...(19): siRNA sense strand
uggcugggcuacgugaaua

SEQ ID NO: 660625 - RNA, 19 nt, Homo sapiens
  misc_RNA (1)...(19): siRNA sense strand
gugcauggcugugcugaag

SEQ ID NO: 660626 - RNA, 19 nt, Homo sapiens
  misc_RNA (1)...(19): siRNA sense strand
uggcugcccuucuucuuga

SEQ ID NO: 660627 - RNA, 19 nt, Homo sapiens
  misc_RNA (1)...(19): siRNA sense strand
gacuaccaccaacuacuua

SEQ ID NO: 660628 - RNA, 19 nt, Homo sapiens
  misc_RNA (1)...(19): siRNA sense strand
cgcauuugcugugauguuu

SEQ ID NO: 660629 - RNA, 19 nt, Homo sapiens
  misc_RNA (1)...(19): siRNA sense strand
ugacccauguucucaauac

SEQ ID NO: 660630 - RNA, 19 nt, Homo sapiens
  misc_RNA (1)...(19): siRNA sense strand
ggucaugcccguucacuac

SEQ ID NO: 660631 - RNA, 19 nt, Homo sapiens
  misc_RNA (1)...(19): siRNA sense strand
cagcauccuuaaucucugu

SEQ ID NO: 660632 - RNA, 19 nt, Homo sapiens
  misc_RNA (1)...(19): siRNA sense strand
gcuguguccugcccucuuc

SEQ ID NO: 660633 - RNA, 19 nt, Homo sapiens
  misc_RNA (1)...(19): siRNA sense strand
cuuaaucucugugccauca

SEQ ID NO: 660634 - RNA, 19 nt, Homo sapiens
  misc_RNA (1)...(19): siRNA sense strand
ugaguagccaccugaacua

SEQ ID NO: 660635 - RNA, 19 nt, Homo sapiens
  misc_RNA (1)...(19): siRNA sense strand
ggugaugcccuggguggua

SEQ ID NO: 660636 - RNA, 19 nt, Homo sapiens
  misc_RNA (1)...(19): siRNA sense strand
cacccuggaugucaugaug

SEQ ID NO: 660637 - RNA, 19 nt, Homo sapiens
  misc_RNA (1)...(19): siRNA sense strand
agaagaaggcaacccaaau

SEQ ID NO: 660638 - RNA, 19 nt, Homo sapiens
  misc_RNA (1)...(19): siRNA sense strand
gugaugcccugggugguau

SEQ ID NO: 660639 - RNA, 19 nt, Homo sapiens
  misc_RNA (1)...(19): siRNA sense strand
cagccagcauccuuaaucu

SEQ ID NO: 660640 - RNA, 19 nt, Homo sapiens
  misc_RNA (1)...(19): siRNA sense strand
ccaucagcauagacaggua

SEQ ID NO: 660641 - RNA, 19 nt, Homo sapiens
  misc_RNA (1)...(19): siRNA sense strand
uggaauuucagccgcauuu

SEQ ID NO: 660642 - RNA, 19 nt, Homo sapiens
  misc_RNA (1)...(19): siRNA sense strand
acuaugcccucuccuacug

SEQ ID NO: 660643 - RNA, 19 nt, Homo sapiens
  misc_RNA (1)...(19): siRNA sense strand
agacuaccaccaacuacuu

SEQ ID NO: 660644 - RNA, 19 nt, Homo sapiens
  misc_RNA (1)...(19): siRNA sense strand
gaauuucagccgcauuugc

SEQ ID NO: 660645 - RNA, 19 nt, Homo sapiens
  misc_RNA (1)...(19): siRNA sense strand
ccgcccacaugccuacuau

SEQ ID NO: 660646 - RNA, 19 nt, Homo sapiens
  misc_RNA (1)...(19): siRNA sense strand
ggaauuucagccgcauuug

SEQ ID NO: 660647 - RNA, 19 nt, Homo sapiens
  misc_RNA (1)...(19): siRNA sense strand
cagcauggcacgggacaga

SEQ ID NO: 660648 - RNA, 19 nt, Homo sapiens
  misc_RNA (1)...(19): siRNA sense strand
gccaucgucuucggcaaug

SEQ ID NO: 660649 - RNA, 19 nt, Homo sapiens
  misc_RNA (1)...(19): siRNA sense strand
acagguggagucuggaauu

SEQ ID NO: 660650 - RNA, 19 nt, Homo sapiens
  misc_RNA (1)...(19): siRNA sense strand
gccagcauccuuaaucucu

SEQ ID NO: 660651 - RNA, 19 nt, Homo sapiens
  misc_RNA (1)...(19): siRNA sense strand
uguacagccagcauccuua

SEQ ID NO: 660652 - RNA, 19 nt, Homo sapiens
  misc_RNA (1)...(19): siRNA sense strand
ucucugugccaucagcaua

SEQ ID NO: 660653 - RNA, 19 nt, Homo sapiens
  misc_RNA (1)...(19): siRNA sense strand
cauccuggccaucgucuuc

SEQ ID NO: 660654 - RNA, 19 nt, Homo sapiens
  misc_RNA (1)...(19): siRNA sense strand
ccuacuaugcccucuccua

SEQ ID NO: 660655 - RNA, 19 nt, Homo sapiens
  misc_RNA (1)...(19): siRNA sense strand
cuguuuggcuuuaauacca

SEQ ID NO: 660656 - RNA, 19 nt, Homo sapiens
  misc_RNA (1)...(19): siRNA sense strand
gcaauggccuggugugcau

SEQ ID NO: 660657 - RNA, 19 nt, Homo sapiens
  misc_RNA (1)...(19): siRNA sense strand
gguggagucuggaauuuca

SEQ ID NO: 660658 - RNA, 19 nt, Homo sapiens
  misc_RNA (1)...(19): siRNA sense strand
guccugcccucuucuguuu

SEQ ID NO: 660659 - RNA, 19 nt, Homo sapiens
  misc_RNA (1)...(19): siRNA sense strand
guacuggccuuugcugugu

SEQ ID NO: 660660 - RNA, 19 nt, Homo sapiens
  misc_RNA (1)...(19): siRNA sense strand
gcauggcugugcugaagga

SEQ ID NO: 660661 - RNA, 19 nt, Homo sapiens
  misc_RNA (1)...(19): siRNA sense strand
guacagccagcauccuuaa

SEQ ID NO: 660662 - RNA, 19 nt, Homo sapiens
  misc_RNA (1)...(19): siRNA sense strand
ccucuucuguuuggcuuua

SEQ ID NO: 660663 - RNA, 19 nt, Homo sapiens
  misc_RNA (1)...(19): siRNA sense strand
cagguggagucuggaauuu

SEQ ID NO: 660664 - RNA, 19 nt, Homo sapiens
  misc_RNA (1)...(19): siRNA sense strand
gugcauggcugugcugaag

SEQ ID NO: 660665 - RNA, 19 nt, Homo sapiens
  misc_RNA (1)...(19): siRNA sense strand
gacuaccaccaacuacuua

SEQ ID NO: 660666 - RNA, 19 nt, Homo sapiens
  misc_RNA (1)...(19): siRNA sense strand
cgcauuugcugugauguuu

SEQ ID NO: 660667 - RNA, 19 nt, Homo sapiens
  misc_RNA (1)...(19): siRNA sense strand
ggucaugcccguucacuac

SEQ ID NO: 660668 - RNA, 19 nt, Homo sapiens
  misc_RNA (1)...(19): siRNA sense strand
cagcauccuuaaucucugu

SEQ ID NO: 660669 - RNA, 19 nt, Homo sapiens
  misc_RNA (1)...(19): siRNA sense strand
gcuguguccugcccucuuc

SEQ ID NO: 660670 - RNA, 19 nt, Homo sapiens
  misc_RNA (1)...(19): siRNA sense strand
cuuaaucucugugccauca

SEQ ID NO: 660671 - RNA, 19 nt, Homo sapiens
  misc_RNA (1)...(19): siRNA sense strand
ugaguagccaccugaacua

SEQ ID NO: 660672 - RNA, 19 nt, Homo sapiens
  misc_RNA (1)...(19): siRNA sense strand
ggugaugcccuggguggua

SEQ ID NO: 660673 - RNA, 19 nt, Homo sapiens
  misc_RNA (1)...(19): siRNA sense strand
cacccuggaugucaugaug

SEQ ID NO: 660674 - RNA, 19 nt, Homo sapiens
  misc_RNA (1)...(19): siRNA sense strand
gugaugcccugggugguau

SEQ ID NO: 660675 - RNA, 19 nt, Homo sapiens
  misc_RNA (1)...(19): siRNA sense strand
cagccagcauccuuaaucu

SEQ ID NO: 660676 - RNA, 19 nt, Homo sapiens
  misc_RNA (1)...(19): siRNA sense strand
ccaucagcauagacaggua

SEQ ID NO: 660677 - RNA, 19 nt, Homo sapiens
  misc_RNA (1)...(19): siRNA sense strand
agacuaccaccaacuacuu

SEQ ID NO: 660678 - RNA, 19 nt, Homo sapiens
  misc_RNA (1)...(19): siRNA sense strand
acuaugcccucuccuacug

SEQ ID NO: 660679 - RNA, 19 nt, Homo sapiens
  misc_RNA (1)...(19): siRNA sense strand
uggaauuucagccgcauuu

SEQ ID NO: 660680 - RNA, 19 nt, Homo sapiens
  misc_RNA (1)...(19): siRNA sense strand
gaauuucagccgcauuugc

SEQ ID NO: 660681 - RNA, 19 nt, Homo sapiens
  misc_RNA (1)...(19): siRNA sense strand
ccgcccacaugccuacuau

SEQ ID NO: 660682 - RNA, 19 nt, Homo sapiens
  misc_RNA (1)...(19): siRNA sense strand
ggaauuucagccgcauuug

SEQ ID NO: 660683 - RNA, 19 nt, Homo sapiens
  misc_RNA (1)...(19): siRNA sense strand
cagcauggcacgggacaga

SEQ ID NO: 660684 - RNA, 19 nt, Homo sapiens
  misc_RNA (1)...(19): siRNA sense strand
gccaucgucuucggcaaug

SEQ ID NO: 660685 - RNA, 19 nt, Homo sapiens
  misc_RNA (1)...(19): siRNA sense strand
acagguggagucuggaauu

SEQ ID NO: 660686 - RNA, 19 nt, Homo sapiens
  misc_RNA (1)...(19): siRNA sense strand
gccagcauccuuaaucucu

SEQ ID NO: 660687 - RNA, 19 nt, Homo sapiens
  misc_RNA (1)...(19): siRNA sense strand
uguacagccagcauccuua

SEQ ID NO: 660688 - RNA, 19 nt, Homo sapiens
  misc_RNA (1)...(19): siRNA sense strand
cauccuggccaucgucuuc

SEQ ID NO: 660689 - RNA, 19 nt, Homo sapiens
  misc_RNA (1)...(19): siRNA sense strand
ucucugugccaucagcaua

SEQ ID NO: 660690 - RNA, 19 nt, Homo sapiens
  misc_RNA (1)...(19): siRNA sense strand
ccuacuaugcccucuccua

SEQ ID NO: 660691 - RNA, 19 nt, Homo sapiens
  misc_RNA (1)...(19): siRNA sense strand
cuguuuggcuuuaauacca

SEQ ID NO: 660692 - RNA, 19 nt, Homo sapiens
  misc_RNA (1)...(19): siRNA sense strand
gaagaaggcaacccaaaug

SEQ ID NO: 660693 - RNA, 19 nt, Homo sapiens
  misc_RNA (1)...(19): siRNA sense strand
gcaauggccuggugugcau

SEQ ID NO: 660694 - RNA, 19 nt, Homo sapiens
  misc_RNA (1)...(19): siRNA sense strand
gguggagucuggaauuuca

SEQ ID NO: 660695 - RNA, 19 nt, Homo sapiens
  misc_RNA (1)...(19): siRNA sense strand
guccugcccucuucuguuu

SEQ ID NO: 660696 - RNA, 19 nt, Homo sapiens
  misc_RNA (1)...(19): siRNA sense strand
gagaagaaggcaacccaaa

SEQ ID NO: 660697 - RNA, 19 nt, Homo sapiens
  misc_RNA (1)...(19): siRNA sense strand
guacuggccuuugcugugu

SEQ ID NO: 660698 - RNA, 19 nt, Homo sapiens
  misc_RNA (1)...(19): siRNA sense strand
gcauggcugugcugaagga

SEQ ID NO: 660699 - RNA, 19 nt, Homo sapiens
  misc_RNA (1)...(19): siRNA sense strand
guacagccagcauccuuaa

SEQ ID NO: 660700 - RNA, 19 nt, Homo sapiens
  misc_RNA (1)...(19): siRNA sense strand
ccucuucuguuuggcuuua

SEQ ID NO: 660701 - RNA, 19 nt, Homo sapiens
  misc_RNA (1)...(19): siRNA sense strand
cgacauggcugggcuacgu

SEQ ID NO: 660702 - RNA, 19 nt, Homo sapiens
  misc_RNA (1)...(19): siRNA sense strand
cagguggagucuggaauuu

SEQ ID NO: 660703 - RNA, 19 nt, Homo sapiens
  misc_RNA (1)...(19): siRNA sense strand
uggcugggcuacgugaaua

SEQ ID NO: 660704 - RNA, 19 nt, Homo sapiens
  misc_RNA (1)...(19): siRNA sense strand
gugcauggcugugcugaag

SEQ ID NO: 660705 - RNA, 19 nt, Homo sapiens
  misc_RNA (1)...(19): siRNA sense strand
uggcugcccuucuucuuga

SEQ ID NO: 660706 - RNA, 19 nt, Homo sapiens
  misc_RNA (1)...(19): siRNA sense strand
gacuaccaccaacuacuua

SEQ ID NO: 660707 - RNA, 19 nt, Homo sapiens
  misc_RNA (1)...(19): siRNA sense strand
cgcauuugcugugauguuu

SEQ ID NO: 660708 - RNA, 19 nt, Homo sapiens
  misc_RNA (1)...(19): siRNA sense strand
ugacccauguucucaauac

SEQ ID NO: 660709 - RNA, 19 nt, Homo sapiens
  misc_RNA (1)...(19): siRNA sense strand
ggucaugcccguucacuac

SEQ ID NO: 660710 - RNA, 19 nt, Homo sapiens
  misc_RNA (1)...(19): siRNA sense strand
cagcauccuuaaucucugu

SEQ ID NO: 660711 - RNA, 19 nt, Homo sapiens
  misc_RNA (1)...(19): siRNA sense strand
gcuguguccugcccucuuc

SEQ ID NO: 660712 - RNA, 19 nt, Homo sapiens
  misc_RNA (1)...(19): siRNA sense strand
cuuaaucucugugccauca

SEQ ID NO: 660713 - RNA, 19 nt, Homo sapiens
  misc_RNA (1)...(19): siRNA sense strand
ugaguagccaccugaacua

SEQ ID NO: 660714 - RNA, 19 nt, Homo sapiens
  misc_RNA (1)...(19): siRNA sense strand
ggugaugcccuggguggua

SEQ ID NO: 660715 - RNA, 19 nt, Homo sapiens
  misc_RNA (1)...(19): siRNA sense strand
cacccuggaugucaugaug

SEQ ID NO: 660716 - RNA, 19 nt, Homo sapiens
  misc_RNA (1)...(19): siRNA sense strand
agaagaaggcaacccaaau

SEQ ID NO: 660717 - RNA, 19 nt, Homo sapiens
  misc_RNA (1)...(19): siRNA sense strand
gugaugcccugggugguau

SEQ ID NO: 660718 - RNA, 19 nt, Homo sapiens
  misc_RNA (1)...(19): siRNA sense strand
cagccagcauccuuaaucu

SEQ ID NO: 660719 - RNA, 19 nt, Homo sapiens
  misc_RNA (1)...(19): siRNA sense strand
ccaucagcauagacaggua

SEQ ID NO: 660720 - RNA, 19 nt, Homo sapiens
  misc_RNA (1)...(19): siRNA sense strand
uggaauuucagccgcauuu

SEQ ID NO: 660721 - RNA, 19 nt, Homo sapiens
  misc_RNA (1)...(19): siRNA sense strand
acuaugcccucuccuacug

SEQ ID NO: 660722 - RNA, 19 nt, Homo sapiens
  misc_RNA (1)...(19): siRNA sense strand
agacuaccaccaacuacuu

SEQ ID NO: 660723 - RNA, 19 nt, Homo sapiens
  misc_RNA (1)...(19): siRNA sense strand
gaauuucagccgcauuugc

SEQ ID NO: 660724 - RNA, 19 nt, Homo sapiens
  misc_RNA (1)...(19): siRNA sense strand
ccgcccacaugccuacuau

SEQ ID NO: 660725 - RNA, 19 nt, Homo sapiens
  misc_RNA (1)...(19): siRNA sense strand
ggaauuucagccgcauuug

SEQ ID NO: 660726 - RNA, 19 nt, Homo sapiens
  misc_RNA (1)...(19): siRNA sense strand
cagcauggcacgggacaga

SEQ ID NO: 660727 - RNA, 19 nt, Homo sapiens
  misc_RNA (1)...(19): siRNA sense strand
gccaucgucuucggcaaug

SEQ ID NO: 660728 - RNA, 19 nt, Homo sapiens
  misc_RNA (1)...(19): siRNA sense strand
acagguggagucuggaauu

SEQ ID NO: 660729 - RNA, 19 nt, Homo sapiens
  misc_RNA (1)...(19): siRNA sense strand
gccagcauccuuaaucucu

SEQ ID NO: 660730 - RNA, 19 nt, Homo sapiens
  misc_RNA (1)...(19): siRNA sense strand
uguacagccagcauccuua

SEQ ID NO: 660731 - RNA, 19 nt, Homo sapiens
  misc_RNA (1)...(19): siRNA sense strand
ucucugugccaucagcaua

SEQ ID NO: 660732 - RNA, 19 nt, Homo sapiens
  misc_RNA (1)...(19): siRNA sense strand
cauccuggccaucgucuuc

SEQ ID NO: 660733 - RNA, 19 nt, Homo sapiens
  misc_RNA (1)...(19): siRNA sense strand
ccuacuaugcccucuccua

SEQ ID NO: 660734 - RNA, 19 nt, Homo sapiens
  misc_RNA (1)...(19): siRNA sense strand
cuguuuggcuuuaauacca

SEQ ID NO: 660735 - RNA, 19 nt, Homo sapiens
  misc_RNA (1)...(19): siRNA sense strand
gaagaaggcaacccaaaug

SEQ ID NO: 660736 - RNA, 19 nt, Homo sapiens
  misc_RNA (1)...(19): siRNA sense strand
gcaauggccuggugugcau

SEQ ID NO: 660737 - RNA, 19 nt, Homo sapiens
  misc_RNA (1)...(19): siRNA sense strand
gguggagucuggaauuuca

SEQ ID NO: 660738 - RNA, 19 nt, Homo sapiens
  misc_RNA (1)...(19): siRNA sense strand
guccugcccucuucuguuu

SEQ ID NO: 660739 - RNA, 19 nt, Homo sapiens
  misc_RNA (1)...(19): siRNA sense strand
gagaagaaggcaacccaaa

SEQ ID NO: 660740 - RNA, 19 nt, Homo sapiens
  misc_RNA (1)...(19): siRNA sense strand
guacuggccuuugcugugu

SEQ ID NO: 660741 - RNA, 19 nt, Homo sapiens
  misc_RNA (1)...(19): siRNA sense strand
gcauggcugugcugaagga

SEQ ID NO: 660742 - RNA, 19 nt, Homo sapiens
  misc_RNA (1)...(19): siRNA sense strand
guacagccagcauccuuaa

SEQ ID NO: 660743 - RNA, 19 nt, Homo sapiens
  misc_RNA (1)...(19): siRNA sense strand
ccucuucuguuuggcuuua

SEQ ID NO: 660744 - RNA, 19 nt, Homo sapiens
  misc_RNA (1)...(19): siRNA sense strand
cgacauggcugggcuacgu

SEQ ID NO: 660745 - RNA, 19 nt, Homo sapiens
  misc_RNA (1)...(19): siRNA sense strand
cagguggagucuggaauuu

SEQ ID NO: 660746 - RNA, 19 nt, Homo sapiens
  misc_RNA (1)...(19): siRNA sense strand
uggcugggcuacgugaaua

SEQ ID NO: 660747 - RNA, 19 nt, Homo sapiens
  misc_RNA (1)...(19): siRNA sense strand
gugcauggcugugcugaag

SEQ ID NO: 660748 - RNA, 19 nt, Homo sapiens
  misc_RNA (1)...(19): siRNA sense strand
uggcugcccuucuucuuga

SEQ ID NO: 660749 - RNA, 19 nt, Homo sapiens
  misc_RNA (1)...(19): siRNA sense strand
gacuaccaccaacuacuua

SEQ ID NO: 660750 - RNA, 19 nt, Homo sapiens
  misc_RNA (1)...(19): siRNA sense strand
cgcauuugcugugauguuu

SEQ ID NO: 660751 - RNA, 19 nt, Homo sapiens
  misc_RNA (1)...(19): siRNA sense strand
ugacccauguucucaauac

SEQ ID NO: 660752 - RNA, 19 nt, Homo sapiens
  misc_RNA (1)...(19): siRNA sense strand
ggucaugcccguucacuac

SEQ ID NO: 660753 - RNA, 19 nt, Homo sapiens
  misc_RNA (1)...(19): siRNA sense strand
cagcauccuuaaucucugu

SEQ ID NO: 660754 - RNA, 19 nt, Homo sapiens
  misc_RNA (1)...(19): siRNA sense strand
gcuguguccugcccucuuc

SEQ ID NO: 660755 - RNA, 19 nt, Homo sapiens
  misc_RNA (1)...(19): siRNA sense strand
cuuaaucucugugccauca

SEQ ID NO: 660756 - RNA, 19 nt, Homo sapiens
  misc_RNA (1)...(19): siRNA sense strand
ugaguagccaccugaacua

SEQ ID NO: 660757 - RNA, 19 nt, Homo sapiens
  misc_RNA (1)...(19): siRNA sense strand
ggugaugcccuggguggua

SEQ ID NO: 660758 - RNA, 19 nt, Homo sapiens
  misc_RNA (1)...(19): siRNA sense strand
cacccuggaugucaugaug

SEQ ID NO: 660759 - RNA, 19 nt, Homo sapiens
  misc_RNA (1)...(19): siRNA sense strand
agaagaaggcaacccaaau

SEQ ID NO: 660760 - RNA, 19 nt, Homo sapiens
  misc_RNA (1)...(19): siRNA sense strand
gugaugcccugggugguau

SEQ ID NO: 660761 - RNA, 19 nt, Homo sapiens
  misc_RNA (1)...(19): siRNA sense strand
cagccagcauccuuaaucu

SEQ ID NO: 660762 - RNA, 19 nt, Homo sapiens
  misc_RNA (1)...(19): siRNA sense strand
ccaucagcauagacaggua

SEQ ID NO: 660763 - RNA, 19 nt, Homo sapiens
  misc_RNA (1)...(19): siRNA sense strand
uggaauuucagccgcauuu

SEQ ID NO: 660764 - RNA, 19 nt, Homo sapiens
  misc_RNA (1)...(19): siRNA sense strand
acuaugcccucuccuacug

SEQ ID NO: 660765 - RNA, 19 nt, Homo sapiens
  misc_RNA (1)...(19): siRNA sense strand
agacuaccaccaacuacuu

SEQ ID NO: 660766 - RNA, 19 nt, Homo sapiens
  misc_RNA (1)...(19): siRNA sense strand
gaauuucagccgcauuugc

SEQ ID NO: 660767 - RNA, 19 nt, Homo sapiens
  misc_RNA (1)...(19): siRNA sense strand
ccgcccacaugccuacuau

SEQ ID NO: 660768 - RNA, 19 nt, Homo sapiens
  misc_RNA (1)...(19): siRNA sense strand
ggaauuucagccgcauuug

SEQ ID NO: 660769 - RNA, 19 nt, Homo sapiens
  misc_RNA (1)...(19): siRNA sense strand
cagcauggcacgggacaga

SEQ ID NO: 660770 - RNA, 19 nt, Homo sapiens
  misc_RNA (1)...(19): siRNA sense strand
gccaucgucuucggcaaug

SEQ ID NO: 660771 - RNA, 19 nt, Homo sapiens
  misc_RNA (1)...(19): siRNA sense strand
acagguggagucuggaauu

SEQ ID NO: 660772 - RNA, 19 nt, Homo sapiens
  misc_RNA (1)...(19): siRNA sense strand
gccagcauccuuaaucucu

SEQ ID NO: 660773 - RNA, 19 nt, Homo sapiens
  misc_RNA (1)...(19): siRNA sense strand
uguacagccagcauccuua

SEQ ID NO: 660774 - RNA, 19 nt, Homo sapiens
  misc_RNA (1)...(19): siRNA sense strand
ucucugugccaucagcaua

SEQ ID NO: 660775 - RNA, 19 nt, Homo sapiens
  misc_RNA (1)...(19): siRNA sense strand
cauccuggccaucgucuuc

SEQ ID NO: 660776 - RNA, 19 nt, Homo sapiens
  misc_RNA (1)...(19): siRNA sense strand
ccuacuaugcccucuccua

SEQ ID NO: 660777 - RNA, 19 nt, Homo sapiens
  misc_RNA (1)...(19): siRNA sense strand
cuguuuggcuuuaauacca

SEQ ID NO: 660778 - RNA, 19 nt, Homo sapiens
  misc_RNA (1)...(19): siRNA sense strand
gaagaaggcaacccaaaug

SEQ ID NO: 660779 - RNA, 19 nt, Homo sapiens
  misc_RNA (1)...(19): siRNA sense strand
gcaauggccuggugugcau

SEQ ID NO: 660780 - RNA, 19 nt, Homo sapiens
  misc_RNA (1)...(19): siRNA sense strand
gguggagucuggaauuuca

SEQ ID NO: 660781 - RNA, 19 nt, Homo sapiens
  misc_RNA (1)...(19): siRNA sense strand
guccugcccucuucuguuu

SEQ ID NO: 660782 - RNA, 19 nt, Homo sapiens
  misc_RNA (1)...(19): siRNA sense strand
gagaagaaggcaacccaaa

SEQ ID NO: 660783 - RNA, 19 nt, Homo sapiens
  misc_RNA (1)...(19): siRNA sense strand
guacuggccuuugcugugu

SEQ ID NO: 660784 - RNA, 19 nt, Homo sapiens
  misc_RNA (1)...(19): siRNA sense strand
gcauggcugugcugaagga

SEQ ID NO: 660785 - RNA, 19 nt, Homo sapiens
  misc_RNA (1)...(19): siRNA sense strand
guacagccagcauccuuaa

SEQ ID NO: 660786 - RNA, 19 nt, Homo sapiens
  misc_RNA (1)...(19): siRNA sense strand
ccucuucuguuuggcuuua

SEQ ID NO: 660787 - RNA, 19 nt, Homo sapiens
  misc_RNA (1)...(19): siRNA sense strand
cgacauggcugggcuacgu

SEQ ID NO: 660788 - RNA, 19 nt, Homo sapiens
  misc_RNA (1)...(19): siRNA sense strand
cagguggagucuggaauuu

SEQ ID NO: 660789 - RNA, 19 nt, Homo sapiens
  misc_RNA (1)...(19): siRNA sense strand
uggcugggcuacgugaaua

SEQ ID NO: 660790 - RNA, 19 nt, Homo sapiens
  misc_RNA (1)...(19): siRNA sense strand
gugcauggcugugcugaag

SEQ ID NO: 660791 - RNA, 19 nt, Homo sapiens
  misc_RNA (1)...(19): siRNA sense strand
uggcugcccuucuucuuga

SEQ ID NO: 660792 - RNA, 19 nt, Homo sapiens
  misc_RNA (1)...(19): siRNA sense strand
gacuaccaccaacuacuua

SEQ ID NO: 660793 - RNA, 19 nt, Homo sapiens
  misc_RNA (1)...(19): siRNA sense strand
cgcauuugcugugauguuu

SEQ ID NO: 660794 - RNA, 19 nt, Homo sapiens
  misc_RNA (1)...(19): siRNA sense strand
ugacccauguucucaauac

SEQ ID NO: 660795 - RNA, 19 nt, Homo sapiens
  misc_RNA (1)...(19): siRNA sense strand
ggucaugcccguucacuac

SEQ ID NO: 660796 - RNA, 19 nt, Homo sapiens
  misc_RNA (1)...(19): siRNA sense strand
cagcauccuuaaucucugu

SEQ ID NO: 660797 - RNA, 19 nt, Homo sapiens
  misc_RNA (1)...(19): siRNA sense strand
gcuguguccugcccucuuc

SEQ ID NO: 660798 - RNA, 19 nt, Homo sapiens
  misc_RNA (1)...(19): siRNA sense strand
cuuaaucucugugccauca

SEQ ID NO: 660799 - RNA, 19 nt, Homo sapiens
  misc_RNA (1)...(19): siRNA sense strand
ugaguagccaccugaacua

SEQ ID NO: 660800 - RNA, 19 nt, Homo sapiens
  misc_RNA (1)...(19): siRNA sense strand
ggugaugcccuggguggua

SEQ ID NO: 660801 - RNA, 19 nt, Homo sapiens
  misc_RNA (1)...(19): siRNA sense strand
cacccuggaugucaugaug

SEQ ID NO: 660802 - RNA, 19 nt, Homo sapiens
  misc_RNA (1)...(19): siRNA sense strand
agaagaaggcaacccaaau

SEQ ID NO: 660803 - RNA, 19 nt, Homo sapiens
  misc_RNA (1)...(19): siRNA sense strand
gugaugcccugggugguau

SEQ ID NO: 660804 - RNA, 19 nt, Homo sapiens
  misc_RNA (1)...(19): siRNA sense strand
cagccagcauccuuaaucu

SEQ ID NO: 660805 - RNA, 19 nt, Homo sapiens
  misc_RNA (1)...(19): siRNA sense strand
ccaucagcauagacaggua

SEQ ID NO: 660806 - RNA, 19 nt, Homo sapiens
  misc_RNA (1)...(19): siRNA sense strand
uggaauuucagccgcauuu

SEQ ID NO: 660807 - RNA, 19 nt, Homo sapiens
  misc_RNA (1)...(19): siRNA sense strand
acuaugcccucuccuacug

SEQ ID NO: 660808 - RNA, 19 nt, Homo sapiens
  misc_RNA (1)...(19): siRNA sense strand
agacuaccaccaacuacuu

SEQ ID NO: 660809 - RNA, 19 nt, Homo sapiens
  misc_RNA (1)...(19): siRNA sense strand
gaauuucagccgcauuugc

SEQ ID NO: 660810 - RNA, 19 nt, Homo sapiens
  misc_RNA (1)...(19): siRNA sense strand
ccgcccacaugccuacuau

SEQ ID NO: 660811 - RNA, 19 nt, Homo sapiens
  misc_RNA (1)...(19): siRNA sense strand
ggaauuucagccgcauuug

SEQ ID NO: 660812 - RNA, 19 nt, Homo sapiens
  misc_RNA (1)...(19): siRNA sense strand
cagcauggcacgggacaga

SEQ ID NO: 660813 - RNA, 19 nt, Homo sapiens
  misc_RNA (1)...(19): siRNA sense strand
gccaucgucuucggcaaug

SEQ ID NO: 660814 - RNA, 19 nt, Homo sapiens
  misc_RNA (1)...(19): siRNA sense strand
acagguggagucuggaauu

SEQ ID NO: 660815 - RNA, 19 nt, Homo sapiens
  misc_RNA (1)...(19): siRNA sense strand
gccagcauccuuaaucucu

SEQ ID NO: 660816 - RNA, 19 nt, Homo sapiens
  misc_RNA (1)...(19): siRNA sense strand
uguacagccagcauccuua

SEQ ID NO: 660817 - RNA, 19 nt, Homo sapiens
  misc_RNA (1)...(19): siRNA sense strand
ucucugugccaucagcaua

SEQ ID NO: 660818 - RNA, 19 nt, Homo sapiens
  misc_RNA (1)...(19): siRNA sense strand
cauccuggccaucgucuuc

SEQ ID NO: 660819 - RNA, 19 nt, Homo sapiens
  misc_RNA (1)...(19): siRNA sense strand
ccuacuaugcccucuccua

SEQ ID NO: 660820 - RNA, 19 nt, Homo sapiens
  misc_RNA (1)...(19): siRNA sense strand
cuguuuggcuuuaauacca

SEQ ID NO: 660821 - RNA, 19 nt, Homo sapiens
  misc_RNA (1)...(19): siRNA sense strand
ggaaggagcuggaaccauu

SEQ ID NO: 660822 - RNA, 19 nt, Homo sapiens
  misc_RNA (1)...(19): siRNA sense strand
gugagaacaucauuacuua

SEQ ID NO: 660823 - RNA, 19 nt, Homo sapiens
  misc_RNA (1)...(19): siRNA sense strand
ggacauggguggacauaug

SEQ ID NO: 660824 - RNA, 19 nt, Homo sapiens
  misc_RNA (1)...(19): siRNA sense strand
gaaacuagcagauuuguau

SEQ ID NO: 660825 - RNA, 19 nt, Homo sapiens
  misc_RNA (1)...(19): siRNA sense strand
gaaggagaacuacuguuua

SEQ ID NO: 660826 - RNA, 19 nt, Homo sapiens
  misc_RNA (1)...(19): siRNA sense strand
gaacagcccuacccaacau

SEQ ID NO: 660827 - RNA, 19 nt, Homo sapiens
  misc_RNA (1)...(19): siRNA sense strand
ggaaauagcgccaaguuag

SEQ ID NO: 660828 - RNA, 19 nt, Homo sapiens
  misc_RNA (1)...(19): siRNA sense strand
caacaucacugucuuugca

SEQ ID NO: 660829 - RNA, 19 nt, Homo sapiens
  misc_RNA (1)...(19): siRNA sense strand
acacugaccucgacagauu

SEQ ID NO: 660830 - RNA, 19 nt, Homo sapiens
  misc_RNA (1)...(19): siRNA sense strand
cgauaaugcucccaaguuu

SEQ ID NO: 660831 - RNA, 19 nt, Homo sapiens
  misc_RNA (1)...(19): siRNA sense strand
gccaauggaccaagauuua

SEQ ID NO: 660832 - RNA, 19 nt, Homo sapiens
  misc_RNA (1)...(19): siRNA sense strand
gcacaucgacccgaaguuu

SEQ ID NO: 660833 - RNA, 19 nt, Homo sapiens
  misc_RNA (1)...(19): siRNA sense strand
gaucagaccaagccacuuu

SEQ ID NO: 660834 - RNA, 19 nt, Homo sapiens
  misc_RNA (1)...(19): siRNA sense strand
gauaagguauuccaucgau

SEQ ID NO: 660835 - RNA, 19 nt, Homo sapiens
  misc_RNA (1)...(19): siRNA sense strand
ggaaguaggaagagugaaa

SEQ ID NO: 660836 - RNA, 19 nt, Homo sapiens
  misc_RNA (1)...(19): siRNA sense strand
ccauucaaaucuacgguua

SEQ ID NO: 660837 - RNA, 19 nt, Homo sapiens
  misc_RNA (1)...(19): siRNA sense strand
gauauugacucuggugaug

SEQ ID NO: 660838 - RNA, 19 nt, Homo sapiens
  misc_RNA (1)...(19): siRNA sense strand
gaaagaaccacucauuguc

SEQ ID NO: 660839 - RNA, 19 nt, Homo sapiens
  misc_RNA (1)...(19): siRNA sense strand
gcacagacagguaucauca

SEQ ID NO: 660840 - RNA, 19 nt, Homo sapiens
  misc_RNA (1)...(19): siRNA sense strand
gagaacaucauuacuuaug

SEQ ID NO: 660841 - RNA, 19 nt, Homo sapiens
  misc_RNA (1)...(19): siRNA sense strand
caccacagauucagacuug

SEQ ID NO: 660842 - RNA, 19 nt, Homo sapiens
  misc_RNA (1)...(19): siRNA sense strand
gagaagagagagcccagua

SEQ ID NO: 660843 - RNA, 19 nt, Homo sapiens
  misc_RNA (1)...(19): siRNA sense strand
acagaagccuuugauauug

SEQ ID NO: 660844 - RNA, 19 nt, Homo sapiens
  misc_RNA (1)...(19): siRNA sense strand
caaguuacauccacgaagu

SEQ ID NO: 660845 - RNA, 19 nt, Homo sapiens
  misc_RNA (1)...(19): siRNA sense strand
cacagaagccuuugauauu

SEQ ID NO: 660846 - RNA, 19 nt, Homo sapiens
  misc_RNA (1)...(19): siRNA sense strand
ggagaacuacuguuuacaa

SEQ ID NO: 660847 - RNA, 19 nt, Homo sapiens
  misc_RNA (1)...(19): siRNA sense strand
aaagaaagaaccacucauu

SEQ ID NO: 660848 - RNA, 19 nt, Homo sapiens
  misc_RNA (1)...(19): siRNA sense strand
ggacuaugauuaucuacag

SEQ ID NO: 660849 - RNA, 19 nt, Homo sapiens
  misc_RNA (1)...(19): siRNA sense strand
ugacaacccaccaaaguuu

SEQ ID NO: 660850 - RNA, 19 nt, Homo sapiens
  misc_RNA (1)...(19): siRNA sense strand
ccacggcuccuccuuauga

SEQ ID NO: 660851 - RNA, 19 nt, Homo sapiens
  misc_RNA (1)...(19): siRNA sense strand
gugaugggaacauuaaaua

SEQ ID NO: 660852 - RNA, 19 nt, Homo sapiens
  misc_RNA (1)...(19): siRNA sense strand
ggagagugcaugccaaaga

SEQ ID NO: 660853 - RNA, 19 nt, Homo sapiens
  misc_RNA (1)...(19): siRNA sense strand
ggugacagcuucagaugca

SEQ ID NO: 660854 - RNA, 19 nt, Homo sapiens
  misc_RNA (1)...(19): siRNA sense strand
gagaacuacuguuuacaag

SEQ ID NO: 660855 - RNA, 19 nt, Homo sapiens
  misc_RNA (1)...(19): siRNA sense strand
gaugguaucaauggauuua

SEQ ID NO: 660856 - RNA, 19 nt, Homo sapiens
  misc_RNA (1)...(19): siRNA sense strand
ugauggagaugguauggaa

SEQ ID NO: 660857 - RNA, 19 nt, Homo sapiens
  misc_RNA (1)...(19): siRNA sense strand
gaagagagagcccaguaca

SEQ ID NO: 660858 - RNA, 19 nt, Homo sapiens
  misc_RNA (1)...(19): siRNA sense strand
uaggaagagugaaagcuaa

SEQ ID NO: 660859 - RNA, 19 nt, Homo sapiens
  misc_RNA (1)...(19): siRNA sense strand
ccaaguuaguguacaguau

SEQ ID NO: 660860 - RNA, 19 nt, Homo sapiens
  misc_RNA (1)...(19): siRNA sense strand
gaaauagcgccaaguuagu

SEQ ID NO: 660861 - RNA, 19 nt, Homo sapiens
  misc_RNA (1)...(19): siRNA sense strand
ccuuaugacuccauucaaa

SEQ ID NO: 660862 - RNA, 19 nt, Homo sapiens
  misc_RNA (1)...(19): siRNA sense strand
ggcagaagcaggacuugua

SEQ ID NO: 660863 - RNA, 19 nt, Homo sapiens
  misc_RNA (1)...(19): siRNA sense strand
cagcagaaauccacaaucg

SEQ ID NO: 660864 - RNA, 19 nt, Homo sapiens
  misc_RNA (1)...(19): siRNA sense strand
gaaaauggcuuagucacau

SEQ ID NO: 660865 - RNA, 19 nt, Homo sapiens
  misc_RNA (1)...(19): siRNA sense strand
guaggaagagugaaagcua

SEQ ID NO: 660866 - RNA, 19 nt, Homo sapiens
  misc_RNA (1)...(19): siRNA sense strand
acacagaagccuuugauau

SEQ ID NO: 660867 - RNA, 19 nt, Homo sapiens
  misc_RNA (1)...(19): siRNA sense strand
gaagagugaaagcuaaaga

SEQ ID NO: 660868 - RNA, 19 nt, Homo sapiens
  misc_RNA (1)...(19): siRNA sense strand
caacgcagaggccuacauu

SEQ ID NO: 660869 - RNA, 19 nt, Homo sapiens
  misc_RNA (1)...(19): siRNA sense strand
gaagauguccgugagaaca

SEQ ID NO: 660870 - RNA, 19 nt, Homo sapiens
  misc_RNA (1)...(19): siRNA sense strand
gaaggagcuggaaccauuu

SEQ ID NO: 660871 - RNA, 19 nt, Homo sapiens
  misc_RNA (1)...(19): siRNA sense strand
ugacaacccuccggaguuc

SEQ ID NO: 660872 - RNA, 19 nt, Homo sapiens
  misc_RNA (1)...(19): siRNA sense strand
ugacaaaucagggaacauu

SEQ ID NO: 660873 - RNA, 19 nt, Homo sapiens
  misc_RNA (1)...(19): siRNA sense strand
ccaacacccucaccaucaa

SEQ ID NO: 660874 - RNA, 19 nt, Homo sapiens
  misc_RNA (1)...(19): siRNA sense strand
ucaaaucuacgguuaugaa

SEQ ID NO: 660875 - RNA, 19 nt, Homo sapiens
  misc_RNA (1)...(19): siRNA sense strand
acagacagguaucaucaga

SEQ ID NO: 660876 - RNA, 19 nt, Homo sapiens
  misc_RNA (1)...(19): siRNA sense strand
gaugggaacauuaaauaca

SEQ ID NO: 660877 - RNA, 19 nt, Homo sapiens
  misc_RNA (1)...(19): siRNA sense strand
ccaacagcccgauaaggua

SEQ ID NO: 660878 - RNA, 19 nt, Homo sapiens
  misc_RNA (1)...(19): siRNA sense strand
agaaagaaccacucauugu

SEQ ID NO: 660879 - RNA, 19 nt, Homo sapiens
  misc_RNA (1)...(19): siRNA sense strand
uaagaaacuagcagauuug

SEQ ID NO: 660880 - RNA, 19 nt, Homo sapiens
  misc_RNA (1)...(19): siRNA sense strand
ccauuaggguccuugaugu

SEQ ID NO: 660881 - RNA, 19 nt, Homo sapiens
  misc_RNA (1)...(19): siRNA sense strand
agacuuggacuaugauuau

SEQ ID NO: 660882 - RNA, 19 nt, Homo sapiens
  misc_RNA (1)...(19): siRNA sense strand
gaauacaggaggcagacaa

SEQ ID NO: 660883 - RNA, 19 nt, Homo sapiens
  misc_RNA (1)...(19): siRNA sense strand
gaagaagauguccgugaga

SEQ ID NO: 660884 - RNA, 19 nt, Homo sapiens
  misc_RNA (1)...(19): siRNA sense strand
gggcacugcucuccugcaa

SEQ ID NO: 660885 - RNA, 19 nt, Homo sapiens
  misc_RNA (1)...(19): siRNA sense strand
gaaaucauucacaauccaa

SEQ ID NO: 660886 - RNA, 19 nt, Homo sapiens
  misc_RNA (1)...(19): siRNA sense strand
gauaaugcucccaaguuug

SEQ ID NO: 660887 - RNA, 19 nt, Homo sapiens
  misc_RNA (1)...(19): siRNA sense strand
caacagcccgauaagguau

SEQ ID NO: 660888 - RNA, 19 nt, Homo sapiens
  misc_RNA (1)...(19): siRNA sense strand
auucagacuuggacuauga

SEQ ID NO: 660889 - RNA, 19 nt, Homo sapiens
  misc_RNA (1)...(19): siRNA sense strand
gaggaaguaggaagaguga

SEQ ID NO: 660890 - RNA, 19 nt, Homo sapiens
  misc_RNA (1)...(19): siRNA sense strand
gaugacaaaucagggaaca

SEQ ID NO: 660891 - RNA, 19 nt, Homo sapiens
  misc_RNA (1)...(19): siRNA sense strand
caauauuguugauggagau

SEQ ID NO: 660892 - RNA, 19 nt, Homo sapiens
  misc_RNA (1)...(19): siRNA sense strand
ccagaauccugaugguauc

SEQ ID NO: 660893 - RNA, 19 nt, Homo sapiens
  misc_RNA (1)...(19): siRNA sense strand
aagaagauguccgugagaa

SEQ ID NO: 660894 - RNA, 19 nt, Homo sapiens
  misc_RNA (1)...(19): siRNA sense strand
gaaccacucauugucuuug

SEQ ID NO: 660895 - RNA, 19 nt, Homo sapiens
  misc_RNA (1)...(19): siRNA sense strand
gagagugcaugccaaagac

SEQ ID NO: 660896 - RNA, 19 nt, Homo sapiens
  misc_RNA (1)...(19): siRNA sense strand
uaucagcaauggcccuuuc

SEQ ID NO: 660897 - RNA, 19 nt, Homo sapiens
  misc_RNA (1)...(19): siRNA sense strand
gugcagaugacaaggauga

SEQ ID NO: 660898 - RNA, 19 nt, Homo sapiens
  misc_RNA (1)...(19): siRNA sense strand
gucaagaucucaguagaag

SEQ ID NO: 660899 - RNA, 19 nt, Homo sapiens
  misc_RNA (1)...(19): siRNA sense strand
gcucaacaucacugucuuu

SEQ ID NO: 660900 - RNA, 19 nt, Homo sapiens
  misc_RNA (1)...(19): siRNA sense strand
gggcaggcuucauucagau

SEQ ID NO: 660901 - RNA, 19 nt, Homo sapiens
  misc_RNA (1)...(19): siRNA sense strand
aaggagaacuacuguuuac

SEQ ID NO: 660902 - RNA, 19 nt, Homo sapiens
  misc_RNA (1)...(19): siRNA sense strand
gacguuggaucgagaagag

SEQ ID NO: 660903 - RNA, 19 nt, Homo sapiens
  misc_RNA (1)...(19): siRNA sense strand
ccaagccacuuuccaacca

SEQ ID NO: 660904 - RNA, 19 nt, Homo sapiens
  misc_RNA (1)...(19): siRNA sense strand
cuaaagauccagacauugg

SEQ ID NO: 660905 - RNA, 19 nt, Homo sapiens
  misc_RNA (1)...(19): siRNA sense strand
agacagguaucaucagaac

SEQ ID NO: 660906 - RNA, 19 nt, Homo sapiens
  misc_RNA (1)...(19): siRNA sense strand
agcuaaagauccagacauu

SEQ ID NO: 660907 - RNA, 19 nt, Homo sapiens
  misc_RNA (1)...(19): siRNA sense strand
agaagacacagaagccuuu

SEQ ID NO: 660908 - RNA, 19 nt, Homo sapiens
  misc_RNA (1)...(19): siRNA sense strand
cgugagaacaucauuacuu

SEQ ID NO: 660909 - RNA, 19 nt, Homo sapiens
  misc_RNA (1)...(19): siRNA sense strand
gccaacagcccgauaaggu

SEQ ID NO: 660910 - RNA, 19 nt, Homo sapiens
  misc_RNA (1)...(19): siRNA sense strand
uggaaauagcgccaaguua

SEQ ID NO: 660911 - RNA, 19 nt, Homo sapiens
  misc_RNA (1)...(19): siRNA sense strand
cagacuuggacuaugauua

SEQ ID NO: 660912 - RNA, 19 nt, Homo sapiens
  misc_RNA (1)...(19): siRNA sense strand
ucccugagcucccuagagu

SEQ ID NO: 660913 - RNA, 19 nt, Homo sapiens
  misc_RNA (1)...(19): siRNA sense strand
gcguggaugucgaugacuu

SEQ ID NO: 660914 - RNA, 19 nt, Homo sapiens
  misc_RNA (1)...(19): siRNA sense strand
aagaaagaaccacucauug

SEQ ID NO: 660915 - RNA, 19 nt, Homo sapiens
  misc_RNA (1)...(19): siRNA sense strand
cacaucgacccgaaguuua

SEQ ID NO: 660916 - RNA, 19 nt, Homo sapiens
  misc_RNA (1)...(19): siRNA sense strand
ucaaugacaacccaccaaa

SEQ ID NO: 660917 - RNA, 19 nt, Homo sapiens
  misc_RNA (1)...(19): siRNA sense strand
ucgaaggacaacccuauuu

SEQ ID NO: 660918 - RNA, 19 nt, Homo sapiens
  misc_RNA (1)...(19): siRNA sense strand
gacacagaagccuuugaua

SEQ ID NO: 660919 - RNA, 19 nt, Homo sapiens
  misc_RNA (1)...(19): siRNA sense strand
ucagagacaaccgagauaa

SEQ ID NO: 660920 - RNA, 19 nt, Homo sapiens
  misc_RNA (1)...(19): siRNA sense strand
gaacuggggaccucguuuu

SEQ ID NO: 660921 - RNA, 19 nt, Homo sapiens
  misc_RNA (1)...(19): siRNA sense strand
ggaaggagcuggaaccauu

SEQ ID NO: 660922 - RNA, 19 nt, Homo sapiens
  misc_RNA (1)...(19): siRNA sense strand
ggacauggguggacauaug

SEQ ID NO: 660923 - RNA, 19 nt, Homo sapiens
  misc_RNA (1)...(19): siRNA sense strand
gaaggagaacuacuguuua

SEQ ID NO: 660924 - RNA, 19 nt, Homo sapiens
  misc_RNA (1)...(19): siRNA sense strand
gaacagcccuacccaacau

SEQ ID NO: 660925 - RNA, 19 nt, Homo sapiens
  misc_RNA (1)...(19): siRNA sense strand
ggaaauagcgccaaguuag

SEQ ID NO: 660926 - RNA, 19 nt, Homo sapiens
  misc_RNA (1)...(19): siRNA sense strand
caacaucacugucuuugca

SEQ ID NO: 660927 - RNA, 19 nt, Homo sapiens
  misc_RNA (1)...(19): siRNA sense strand
acacugaccucgacagauu

SEQ ID NO: 660928 - RNA, 19 nt, Homo sapiens
  misc_RNA (1)...(19): siRNA sense strand
cgauaaugcucccaaguuu

SEQ ID NO: 660929 - RNA, 19 nt, Homo sapiens
  misc_RNA (1)...(19): siRNA sense strand
gccaauggaccaagauuua

SEQ ID NO: 660930 - RNA, 19 nt, Homo sapiens
  misc_RNA (1)...(19): siRNA sense strand
gcacaucgacccgaaguuu

SEQ ID NO: 660931 - RNA, 19 nt, Homo sapiens
  misc_RNA (1)...(19): siRNA sense strand
gaucagaccaagccacuuu

SEQ ID NO: 660932 - RNA, 19 nt, Homo sapiens
  misc_RNA (1)...(19): siRNA sense strand
gauaagguauuccaucgau

SEQ ID NO: 660933 - RNA, 19 nt, Homo sapiens
  misc_RNA (1)...(19): siRNA sense strand
ggaaguaggaagagugaaa

SEQ ID NO: 660934 - RNA, 19 nt, Homo sapiens
  misc_RNA (1)...(19): siRNA sense strand
gauauugacucuggugaug

SEQ ID NO: 660935 - RNA, 19 nt, Homo sapiens
  misc_RNA (1)...(19): siRNA sense strand
gcacagacagguaucauca

SEQ ID NO: 660936 - RNA, 19 nt, Homo sapiens
  misc_RNA (1)...(19): siRNA sense strand
gagaagagagagcccagua

SEQ ID NO: 660937 - RNA, 19 nt, Homo sapiens
  misc_RNA (1)...(19): siRNA sense strand
caaguuacauccacgaagu

SEQ ID NO: 660938 - RNA, 19 nt, Homo sapiens
  misc_RNA (1)...(19): siRNA sense strand
ggagaacuacuguuuacaa

SEQ ID NO: 660939 - RNA, 19 nt, Homo sapiens
  misc_RNA (1)...(19): siRNA sense strand
ugacaacccaccaaaguuu

SEQ ID NO: 660940 - RNA, 19 nt, Homo sapiens
  misc_RNA (1)...(19): siRNA sense strand
gugaugggaacauuaaaua

SEQ ID NO: 660941 - RNA, 19 nt, Homo sapiens
  misc_RNA (1)...(19): siRNA sense strand
ggagagugcaugccaaaga

SEQ ID NO: 660942 - RNA, 19 nt, Homo sapiens
  misc_RNA (1)...(19): siRNA sense strand
ggugacagcuucagaugca

SEQ ID NO: 660943 - RNA, 19 nt, Homo sapiens
  misc_RNA (1)...(19): siRNA sense strand
gagaacuacuguuuacaag

SEQ ID NO: 660944 - RNA, 19 nt, Homo sapiens
  misc_RNA (1)...(19): siRNA sense strand
ugauggagaugguauggaa

SEQ ID NO: 660945 - RNA, 19 nt, Homo sapiens
  misc_RNA (1)...(19): siRNA sense strand
gaagagagagcccaguaca

SEQ ID NO: 660946 - RNA, 19 nt, Homo sapiens
  misc_RNA (1)...(19): siRNA sense strand
uaggaagagugaaagcuaa

SEQ ID NO: 660947 - RNA, 19 nt, Homo sapiens
  misc_RNA (1)...(19): siRNA sense strand
ccaaguuaguguacaguau

SEQ ID NO: 660948 - RNA, 19 nt, Homo sapiens
  misc_RNA (1)...(19): siRNA sense strand
gaaauagcgccaaguuagu

SEQ ID NO: 660949 - RNA, 19 nt, Homo sapiens
  misc_RNA (1)...(19): siRNA sense strand
ggcagaagcaggacuugua

SEQ ID NO: 660950 - RNA, 19 nt, Homo sapiens
  misc_RNA (1)...(19): siRNA sense strand
cagcagaaauccacaaucg

SEQ ID NO: 660951 - RNA, 19 nt, Homo sapiens
  misc_RNA (1)...(19): siRNA sense strand
gaaaauggcuuagucacau

SEQ ID NO: 660952 - RNA, 19 nt, Homo sapiens
  misc_RNA (1)...(19): siRNA sense strand
guaggaagagugaaagcua

SEQ ID NO: 660953 - RNA, 19 nt, Homo sapiens
  misc_RNA (1)...(19): siRNA sense strand
gaagagugaaagcuaaaga

SEQ ID NO: 660954 - RNA, 19 nt, Homo sapiens
  misc_RNA (1)...(19): siRNA sense strand
caacgcagaggccuacauu

SEQ ID NO: 660955 - RNA, 19 nt, Homo sapiens
  misc_RNA (1)...(19): siRNA sense strand
gaaggagcuggaaccauuu

SEQ ID NO: 660956 - RNA, 19 nt, Homo sapiens
  misc_RNA (1)...(19): siRNA sense strand
ugacaacccuccggaguuc

SEQ ID NO: 660957 - RNA, 19 nt, Homo sapiens
  misc_RNA (1)...(19): siRNA sense strand
ugacaaaucagggaacauu

SEQ ID NO: 660958 - RNA, 19 nt, Homo sapiens
  misc_RNA (1)...(19): siRNA sense strand
ccaacacccucaccaucaa

SEQ ID NO: 660959 - RNA, 19 nt, Homo sapiens
  misc_RNA (1)...(19): siRNA sense strand
gaugggaacauuaaauaca

SEQ ID NO: 660960 - RNA, 19 nt, Homo sapiens
  misc_RNA (1)...(19): siRNA sense strand
ccaacagcccgauaaggua

SEQ ID NO: 660961 - RNA, 19 nt, Homo sapiens
  misc_RNA (1)...(19): siRNA sense strand
acagacagguaucaucaga

SEQ ID NO: 660962 - RNA, 19 nt, Homo sapiens
  misc_RNA (1)...(19): siRNA sense strand
ccauuaggguccuugaugu

SEQ ID NO: 660963 - RNA, 19 nt, Homo sapiens
  misc_RNA (1)...(19): siRNA sense strand
gggcacugcucuccugcaa

SEQ ID NO: 660964 - RNA, 19 nt, Homo sapiens
  misc_RNA (1)...(19): siRNA sense strand
gaaaucauucacaauccaa

SEQ ID NO: 660965 - RNA, 19 nt, Homo sapiens
  misc_RNA (1)...(19): siRNA sense strand
gauaaugcucccaaguuug

SEQ ID NO: 660966 - RNA, 19 nt, Homo sapiens
  misc_RNA (1)...(19): siRNA sense strand
caacagcccgauaagguau

SEQ ID NO: 660967 - RNA, 19 nt, Homo sapiens
  misc_RNA (1)...(19): siRNA sense strand
gaugacaaaucagggaaca

SEQ ID NO: 660968 - RNA, 19 nt, Homo sapiens
  misc_RNA (1)...(19): siRNA sense strand
gaggaaguaggaagaguga

SEQ ID NO: 660969 - RNA, 19 nt, Homo sapiens
  misc_RNA (1)...(19): siRNA sense strand
caauauuguugauggagau

SEQ ID NO: 660970 - RNA, 19 nt, Homo sapiens
  misc_RNA (1)...(19): siRNA sense strand
gagagugcaugccaaagac

SEQ ID NO: 660971 - RNA, 19 nt, Homo sapiens
  misc_RNA (1)...(19): siRNA sense strand
uaucagcaauggcccuuuc

SEQ ID NO: 660972 - RNA, 19 nt, Homo sapiens
  misc_RNA (1)...(19): siRNA sense strand
gugcagaugacaaggauga

SEQ ID NO: 660973 - RNA, 19 nt, Homo sapiens
  misc_RNA (1)...(19): siRNA sense strand
gucaagaucucaguagaag

SEQ ID NO: 660974 - RNA, 19 nt, Homo sapiens
  misc_RNA (1)...(19): siRNA sense strand
gacguuggaucgagaagag

SEQ ID NO: 660975 - RNA, 19 nt, Homo sapiens
  misc_RNA (1)...(19): siRNA sense strand
ccaagccacuuuccaacca

SEQ ID NO: 660976 - RNA, 19 nt, Homo sapiens
  misc_RNA (1)...(19): siRNA sense strand
gggcaggcuucauucagau

SEQ ID NO: 660977 - RNA, 19 nt, Homo sapiens
  misc_RNA (1)...(19): siRNA sense strand
gcucaacaucacugucuuu

SEQ ID NO: 660978 - RNA, 19 nt, Homo sapiens
  misc_RNA (1)...(19): siRNA sense strand
aaggagaacuacuguuuac

SEQ ID NO: 660979 - RNA, 19 nt, Homo sapiens
  misc_RNA (1)...(19): siRNA sense strand
cuaaagauccagacauugg

SEQ ID NO: 660980 - RNA, 19 nt, Homo sapiens
  misc_RNA (1)...(19): siRNA sense strand
agacagguaucaucagaac

SEQ ID NO: 660981 - RNA, 19 nt, Homo sapiens
  misc_RNA (1)...(19): siRNA sense strand
agcuaaagauccagacauu

SEQ ID NO: 660982 - RNA, 19 nt, Homo sapiens
  misc_RNA (1)...(19): siRNA sense strand
gccaacagcccgauaaggu

SEQ ID NO: 660983 - RNA, 19 nt, Homo sapiens
  misc_RNA (1)...(19): siRNA sense strand
uggaaauagcgccaaguua

SEQ ID NO: 660984 - RNA, 19 nt, Homo sapiens
  misc_RNA (1)...(19): siRNA sense strand
cacaucgacccgaaguuua

SEQ ID NO: 660985 - RNA, 19 nt, Homo sapiens
  misc_RNA (1)...(19): siRNA sense strand
ucaaugacaacccaccaaa

SEQ ID NO: 660986 - RNA, 19 nt, Homo sapiens
  misc_RNA (1)...(19): siRNA sense strand
ucgaaggacaacccuauuu

SEQ ID NO: 660987 - RNA, 19 nt, Homo sapiens
  misc_RNA (1)...(19): siRNA sense strand
ucagagacaaccgagauaa

SEQ ID NO: 660988 - RNA, 19 nt, Homo sapiens
  misc_RNA (1)...(19): siRNA sense strand
gaaaucacaacggacuaug

SEQ ID NO: 660989 - RNA, 19 nt, Homo sapiens
  misc_RNA (1)...(19): siRNA sense strand
ggccaauggaccaagauuu

SEQ ID NO: 660990 - RNA, 19 nt, Homo sapiens
  misc_RNA (1)...(19): siRNA sense strand
caacggacuaugaaacaca

SEQ ID NO: 660991 - RNA, 19 nt, Homo sapiens
  misc_RNA (1)...(19): siRNA sense strand
aauccaaauuucacaguca

SEQ ID NO: 660992 - RNA, 19 nt, Homo sapiens
  misc_RNA (1)...(19): siRNA sense strand
ccaauggaccaagauuuau

SEQ ID NO: 660993 - RNA, 19 nt, Homo sapiens
  misc_RNA (1)...(19): siRNA sense strand
gccauuaggguccuugaug

SEQ ID NO: 660994 - RNA, 19 nt, Homo sapiens
  misc_RNA (1)...(19): siRNA sense strand
ggugaugggaacauuaaau

SEQ ID NO: 660995 - RNA, 19 nt, Homo sapiens
  misc_RNA (1)...(19): siRNA sense strand
uccaggacauuaaugacaa

SEQ ID NO: 660996 - RNA, 19 nt, Homo sapiens
  misc_RNA (1)...(19): siRNA sense strand
caacacccucaccaucaaa

SEQ ID NO: 660997 - RNA, 19 nt, Homo sapiens
  misc_RNA (1)...(19): siRNA sense strand
gcagaagcaggacuuguac

SEQ ID NO: 660998 - RNA, 19 nt, Homo sapiens
  misc_RNA (1)...(19): siRNA sense strand
ugggcaggcuucauucaga

SEQ ID NO: 660999 - RNA, 19 nt, Homo sapiens
  misc_RNA (1)...(19): siRNA sense strand
aaucacaacggacuaugaa

SEQ ID NO: 661000 - RNA, 19 nt, Homo sapiens
  misc_RNA (1)...(19): siRNA sense strand
ggcuuagucacauacaaua

SEQ ID NO: 661001 - RNA, 19 nt, Homo sapiens
  misc_RNA (1)...(19): siRNA sense strand
gaaguaggaagagugaaag

SEQ ID NO: 661002 - RNA, 19 nt, Homo sapiens
  misc_RNA (1)...(19): siRNA sense strand
ucagggacaaccaaaguga

SEQ ID NO: 661003 - RNA, 19 nt, Homo sapiens
  misc_RNA (1)...(19): siRNA sense strand
caaguuaguguacaguauc

SEQ ID NO: 661004 - RNA, 19 nt, Homo sapiens
  misc_RNA (1)...(19): siRNA sense strand
gcaggcuucauucagauau

SEQ ID NO: 661005 - RNA, 19 nt, Homo sapiens
  misc_RNA (1)...(19): siRNA sense strand
gaagcaggacuuguaccuu

SEQ ID NO: 661006 - RNA, 19 nt, Homo sapiens
  misc_RNA (1)...(19): siRNA sense strand
caaauuucacagucagaga

SEQ ID NO: 661007 - RNA, 19 nt, Homo sapiens
  misc_RNA (1)...(19): siRNA sense strand
caaguuugcugccccuuau

SEQ ID NO: 661008 - RNA, 19 nt, Homo sapiens
  misc_RNA (1)...(19): siRNA sense strand
caaagucccaguggccauu

SEQ ID NO: 661009 - RNA, 19 nt, Homo sapiens
  misc_RNA (1)...(19): siRNA sense strand
aguagaagaugcugaugag

SEQ ID NO: 661010 - RNA, 19 nt, Homo sapiens
  misc_RNA (1)...(19): siRNA sense strand
cgaaguuuaucagcaaugg

SEQ ID NO: 661011 - RNA, 19 nt, Homo sapiens
  misc_RNA (1)...(19): siRNA sense strand
ggacauaugggcggacucu

SEQ ID NO: 661012 - RNA, 19 nt, Homo sapiens
  misc_RNA (1)...(19): siRNA sense strand
gcagaugaccccacuuaug

SEQ ID NO: 661013 - RNA, 19 nt, Homo sapiens
  misc_RNA (1)...(19): siRNA sense strand
gcaccaacacccucaccau

SEQ ID NO: 661014 - RNA, 19 nt, Homo sapiens
  misc_RNA (1)...(19): siRNA sense strand
gagccaccgucggaauuca

SEQ ID NO: 661015 - RNA, 19 nt, Homo sapiens
  misc_RNA (1)...(19): siRNA sense strand
caguagaagaugcugauga

SEQ ID NO: 661016 - RNA, 19 nt, Homo sapiens
  misc_RNA (1)...(19): siRNA sense strand
gcuaaagauccagacauug

SEQ ID NO: 661017 - RNA, 19 nt, Homo sapiens
  misc_RNA (1)...(19): siRNA sense strand
cgucggaauucauugucaa

SEQ ID NO: 661018 - RNA, 19 nt, Homo sapiens
  misc_RNA (1)...(19): siRNA sense strand
agugaaagcuaaagaucca

SEQ ID NO: 661019 - RNA, 19 nt, Homo sapiens
  misc_RNA (1)...(19): siRNA sense strand
cgucaagaucucaguagaa

SEQ ID NO: 661020 - RNA, 19 nt, Homo sapiens
  misc_RNA (1)...(19): siRNA sense strand
agaccaagccacuuuccaa

SEQ ID NO: 661021 - RNA, 19 nt, Homo sapiens
  misc_RNA (1)...(19): siRNA sense strand
ggaaggagcuggaaccauu

SEQ ID NO: 661022 - RNA, 19 nt, Homo sapiens
  misc_RNA (1)...(19): siRNA sense strand
gugagaacaucauuacuua

SEQ ID NO: 661023 - RNA, 19 nt, Homo sapiens
  misc_RNA (1)...(19): siRNA sense strand
ggacauggguggacauaug

SEQ ID NO: 661024 - RNA, 19 nt, Homo sapiens
  misc_RNA (1)...(19): siRNA sense strand
gaaacuagcagauuuguau

SEQ ID NO: 661025 - RNA, 19 nt, Homo sapiens
  misc_RNA (1)...(19): siRNA sense strand
gaaggagaacuacuguuua

SEQ ID NO: 661026 - RNA, 19 nt, Homo sapiens
  misc_RNA (1)...(19): siRNA sense strand
gaacagcccuacccaacau

SEQ ID NO: 661027 - RNA, 19 nt, Homo sapiens
  misc_RNA (1)...(19): siRNA sense strand
ggaaauagcgccaaguuag

SEQ ID NO: 661028 - RNA, 19 nt, Homo sapiens
  misc_RNA (1)...(19): siRNA sense strand
caacaucacugucuuugca

SEQ ID NO: 661029 - RNA, 19 nt, Homo sapiens
  misc_RNA (1)...(19): siRNA sense strand
acacugaccucgacagauu

SEQ ID NO: 661030 - RNA, 19 nt, Homo sapiens
  misc_RNA (1)...(19): siRNA sense strand
cgauaaugcucccaaguuu

SEQ ID NO: 661031 - RNA, 19 nt, Homo sapiens
  misc_RNA (1)...(19): siRNA sense strand
gccaauggaccaagauuua

SEQ ID NO: 661032 - RNA, 19 nt, Homo sapiens
  misc_RNA (1)...(19): siRNA sense strand
gcacaucgacccgaaguuu

SEQ ID NO: 661033 - RNA, 19 nt, Homo sapiens
  misc_RNA (1)...(19): siRNA sense strand
gaucagaccaagccacuuu

SEQ ID NO: 661034 - RNA, 19 nt, Homo sapiens
  misc_RNA (1)...(19): siRNA sense strand
gauaagguauuccaucgau

SEQ ID NO: 661035 - RNA, 19 nt, Homo sapiens
  misc_RNA (1)...(19): siRNA sense strand
ggaaguaggaagagugaaa

SEQ ID NO: 661036 - RNA, 19 nt, Homo sapiens
  misc_RNA (1)...(19): siRNA sense strand
ccauucaaaucuacgguua

SEQ ID NO: 661037 - RNA, 19 nt, Homo sapiens
  misc_RNA (1)...(19): siRNA sense strand
gauauugacucuggugaug

SEQ ID NO: 661038 - RNA, 19 nt, Homo sapiens
  misc_RNA (1)...(19): siRNA sense strand
gaaagaaccacucauuguc

SEQ ID NO: 661039 - RNA, 19 nt, Homo sapiens
  misc_RNA (1)...(19): siRNA sense strand
gcacagacagguaucauca

SEQ ID NO: 661040 - RNA, 19 nt, Homo sapiens
  misc_RNA (1)...(19): siRNA sense strand
gagaacaucauuacuuaug

SEQ ID NO: 661041 - RNA, 19 nt, Homo sapiens
  misc_RNA (1)...(19): siRNA sense strand
caccacagauucagacuug

SEQ ID NO: 661042 - RNA, 19 nt, Homo sapiens
  misc_RNA (1)...(19): siRNA sense strand
gagaagagagagcccagua

SEQ ID NO: 661043 - RNA, 19 nt, Homo sapiens
  misc_RNA (1)...(19): siRNA sense strand
acagaagccuuugauauug

SEQ ID NO: 661044 - RNA, 19 nt, Homo sapiens
  misc_RNA (1)...(19): siRNA sense strand
caaguuacauccacgaagu

SEQ ID NO: 661045 - RNA, 19 nt, Homo sapiens
  misc_RNA (1)...(19): siRNA sense strand
cacagaagccuuugauauu

SEQ ID NO: 661046 - RNA, 19 nt, Homo sapiens
  misc_RNA (1)...(19): siRNA sense strand
ggagaacuacuguuuacaa

SEQ ID NO: 661047 - RNA, 19 nt, Homo sapiens
  misc_RNA (1)...(19): siRNA sense strand
aaagaaagaaccacucauu

SEQ ID NO: 661048 - RNA, 19 nt, Homo sapiens
  misc_RNA (1)...(19): siRNA sense strand
ggacuaugauuaucuacag

SEQ ID NO: 661049 - RNA, 19 nt, Homo sapiens
  misc_RNA (1)...(19): siRNA sense strand
ugacaacccaccaaaguuu

SEQ ID NO: 661050 - RNA, 19 nt, Homo sapiens
  misc_RNA (1)...(19): siRNA sense strand
ccacggcuccuccuuauga

SEQ ID NO: 661051 - RNA, 19 nt, Homo sapiens
  misc_RNA (1)...(19): siRNA sense strand
gugaugggaacauuaaaua

SEQ ID NO: 661052 - RNA, 19 nt, Homo sapiens
  misc_RNA (1)...(19): siRNA sense strand
ggagagugcaugccaaaga

SEQ ID NO: 661053 - RNA, 19 nt, Homo sapiens
  misc_RNA (1)...(19): siRNA sense strand
ggugacagcuucagaugca

SEQ ID NO: 661054 - RNA, 19 nt, Homo sapiens
  misc_RNA (1)...(19): siRNA sense strand
gagaacuacuguuuacaag

SEQ ID NO: 661055 - RNA, 19 nt, Homo sapiens
  misc_RNA (1)...(19): siRNA sense strand
gaugguaucaauggauuua

SEQ ID NO: 661056 - RNA, 19 nt, Homo sapiens
  misc_RNA (1)...(19): siRNA sense strand
ugauggagaugguauggaa

SEQ ID NO: 661057 - RNA, 19 nt, Homo sapiens
  misc_RNA (1)...(19): siRNA sense strand
gaagagagagcccaguaca

SEQ ID NO: 661058 - RNA, 19 nt, Homo sapiens
  misc_RNA (1)...(19): siRNA sense strand
uaggaagagugaaagcuaa

SEQ ID NO: 661059 - RNA, 19 nt, Homo sapiens
  misc_RNA (1)...(19): siRNA sense strand
ccaaguuaguguacaguau

SEQ ID NO: 661060 - RNA, 19 nt, Homo sapiens
  misc_RNA (1)...(19): siRNA sense strand
gaaauagcgccaaguuagu

SEQ ID NO: 661061 - RNA, 19 nt, Homo sapiens
  misc_RNA (1)...(19): siRNA sense strand
ccuuaugacuccauucaaa

SEQ ID NO: 661062 - RNA, 19 nt, Homo sapiens
  misc_RNA (1)...(19): siRNA sense strand
ggcagaagcaggacuugua

SEQ ID NO: 661063 - RNA, 19 nt, Homo sapiens
  misc_RNA (1)...(19): siRNA sense strand
cagcagaaauccacaaucg

SEQ ID NO: 661064 - RNA, 19 nt, Homo sapiens
  misc_RNA (1)...(19): siRNA sense strand
gaaaauggcuuagucacau

SEQ ID NO: 661065 - RNA, 19 nt, Homo sapiens
  misc_RNA (1)...(19): siRNA sense strand
guaggaagagugaaagcua

SEQ ID NO: 661066 - RNA, 19 nt, Homo sapiens
  misc_RNA (1)...(19): siRNA sense strand
acacagaagccuuugauau

SEQ ID NO: 661067 - RNA, 19 nt, Homo sapiens
  misc_RNA (1)...(19): siRNA sense strand
gaagagugaaagcuaaaga

SEQ ID NO: 661068 - RNA, 19 nt, Homo sapiens
  misc_RNA (1)...(19): siRNA sense strand
caacgcagaggccuacauu

SEQ ID NO: 661069 - RNA, 19 nt, Homo sapiens
  misc_RNA (1)...(19): siRNA sense strand
gaagauguccgugagaaca

SEQ ID NO: 661070 - RNA, 19 nt, Homo sapiens
  misc_RNA (1)...(19): siRNA sense strand
gaaggagcuggaaccauuu

SEQ ID NO: 661071 - RNA, 19 nt, Homo sapiens
  misc_RNA (1)...(19): siRNA sense strand
ugacaacccuccggaguuc

SEQ ID NO: 661072 - RNA, 19 nt, Homo sapiens
  misc_RNA (1)...(19): siRNA sense strand
ugacaaaucagggaacauu

SEQ ID NO: 661073 - RNA, 19 nt, Homo sapiens
  misc_RNA (1)...(19): siRNA sense strand
ccaacacccucaccaucaa

SEQ ID NO: 661074 - RNA, 19 nt, Homo sapiens
  misc_RNA (1)...(19): siRNA sense strand
ucaaaucuacgguuaugaa

SEQ ID NO: 661075 - RNA, 19 nt, Homo sapiens
  misc_RNA (1)...(19): siRNA sense strand
acagacagguaucaucaga

SEQ ID NO: 661076 - RNA, 19 nt, Homo sapiens
  misc_RNA (1)...(19): siRNA sense strand
gaugggaacauuaaauaca

SEQ ID NO: 661077 - RNA, 19 nt, Homo sapiens
  misc_RNA (1)...(19): siRNA sense strand
ccaacagcccgauaaggua

SEQ ID NO: 661078 - RNA, 19 nt, Homo sapiens
  misc_RNA (1)...(19): siRNA sense strand
agaaagaaccacucauugu

SEQ ID NO: 661079 - RNA, 19 nt, Homo sapiens
  misc_RNA (1)...(19): siRNA sense strand
uaagaaacuagcagauuug

SEQ ID NO: 661080 - RNA, 19 nt, Homo sapiens
  misc_RNA (1)...(19): siRNA sense strand
ccauuaggguccuugaugu

SEQ ID NO: 661081 - RNA, 19 nt, Homo sapiens
  misc_RNA (1)...(19): siRNA sense strand
agacuuggacuaugauuau

SEQ ID NO: 661082 - RNA, 19 nt, Homo sapiens
  misc_RNA (1)...(19): siRNA sense strand
gaauacaggaggcagacaa

SEQ ID NO: 661083 - RNA, 19 nt, Homo sapiens
  misc_RNA (1)...(19): siRNA sense strand
gaagaagauguccgugaga

SEQ ID NO: 661084 - RNA, 19 nt, Homo sapiens
  misc_RNA (1)...(19): siRNA sense strand
gggcacugcucuccugcaa

SEQ ID NO: 661085 - RNA, 19 nt, Homo sapiens
  misc_RNA (1)...(19): siRNA sense strand
gaaaucauucacaauccaa

SEQ ID NO: 661086 - RNA, 19 nt, Homo sapiens
  misc_RNA (1)...(19): siRNA sense strand
gauaaugcucccaaguuug

SEQ ID NO: 661087 - RNA, 19 nt, Homo sapiens
  misc_RNA (1)...(19): siRNA sense strand
caacagcccgauaagguau

SEQ ID NO: 661088 - RNA, 19 nt, Homo sapiens
  misc_RNA (1)...(19): siRNA sense strand
auucagacuuggacuauga

SEQ ID NO: 661089 - RNA, 19 nt, Homo sapiens
  misc_RNA (1)...(19): siRNA sense strand
gaggaaguaggaagaguga

SEQ ID NO: 661090 - RNA, 19 nt, Homo sapiens
  misc_RNA (1)...(19): siRNA sense strand
gaugacaaaucagggaaca

SEQ ID NO: 661091 - RNA, 19 nt, Homo sapiens
  misc_RNA (1)...(19): siRNA sense strand
caauauuguugauggagau

SEQ ID NO: 661092 - RNA, 19 nt, Homo sapiens
  misc_RNA (1)...(19): siRNA sense strand
ccagaauccugaugguauc

SEQ ID NO: 661093 - RNA, 19 nt, Homo sapiens
  misc_RNA (1)...(19): siRNA sense strand
aagaagauguccgugagaa

SEQ ID NO: 661094 - RNA, 19 nt, Homo sapiens
  misc_RNA (1)...(19): siRNA sense strand
gaaccacucauugucuuug

SEQ ID NO: 661095 - RNA, 19 nt, Homo sapiens
  misc_RNA (1)...(19): siRNA sense strand
gagagugcaugccaaagac

SEQ ID NO: 661096 - RNA, 19 nt, Homo sapiens
  misc_RNA (1)...(19): siRNA sense strand
uaucagcaauggcccuuuc

SEQ ID NO: 661097 - RNA, 19 nt, Homo sapiens
  misc_RNA (1)...(19): siRNA sense strand
gugcagaugacaaggauga

SEQ ID NO: 661098 - RNA, 19 nt, Homo sapiens
  misc_RNA (1)...(19): siRNA sense strand
gucaagaucucaguagaag

SEQ ID NO: 661099 - RNA, 19 nt, Homo sapiens
  misc_RNA (1)...(19): siRNA sense strand
gcucaacaucacugucuuu

SEQ ID NO: 661100 - RNA, 19 nt, Homo sapiens
  misc_RNA (1)...(19): siRNA sense strand
gggcaggcuucauucagau

SEQ ID NO: 661101 - RNA, 19 nt, Homo sapiens
  misc_RNA (1)...(19): siRNA sense strand
aaggagaacuacuguuuac

SEQ ID NO: 661102 - RNA, 19 nt, Homo sapiens
  misc_RNA (1)...(19): siRNA sense strand
gacguuggaucgagaagag

SEQ ID NO: 661103 - RNA, 19 nt, Homo sapiens
  misc_RNA (1)...(19): siRNA sense strand
ccaagccacuuuccaacca

SEQ ID NO: 661104 - RNA, 19 nt, Homo sapiens
  misc_RNA (1)...(19): siRNA sense strand
cuaaagauccagacauugg

SEQ ID NO: 661105 - RNA, 19 nt, Homo sapiens
  misc_RNA (1)...(19): siRNA sense strand
agacagguaucaucagaac

SEQ ID NO: 661106 - RNA, 19 nt, Homo sapiens
  misc_RNA (1)...(19): siRNA sense strand
agcuaaagauccagacauu

SEQ ID NO: 661107 - RNA, 19 nt, Homo sapiens
  misc_RNA (1)...(19): siRNA sense strand
agaagacacagaagccuuu

SEQ ID NO: 661108 - RNA, 19 nt, Homo sapiens
  misc_RNA (1)...(19): siRNA sense strand
cgugagaacaucauuacuu

SEQ ID NO: 661109 - RNA, 19 nt, Homo sapiens
  misc_RNA (1)...(19): siRNA sense strand
gccaacagcccgauaaggu

SEQ ID NO: 661110 - RNA, 19 nt, Homo sapiens
  misc_RNA (1)...(19): siRNA sense strand
uggaaauagcgccaaguua

SEQ ID NO: 661111 - RNA, 19 nt, Homo sapiens
  misc_RNA (1)...(19): siRNA sense strand
cagacuuggacuaugauua

SEQ ID NO: 661112 - RNA, 19 nt, Homo sapiens
  misc_RNA (1)...(19): siRNA sense strand
ucccugagcucccuagagu

SEQ ID NO: 661113 - RNA, 19 nt, Homo sapiens
  misc_RNA (1)...(19): siRNA sense strand
gcguggaugucgaugacuu

SEQ ID NO: 661114 - RNA, 19 nt, Homo sapiens
  misc_RNA (1)...(19): siRNA sense strand
aagaaagaaccacucauug

SEQ ID NO: 661115 - RNA, 19 nt, Homo sapiens
  misc_RNA (1)...(19): siRNA sense strand
cacaucgacccgaaguuua

SEQ ID NO: 661116 - RNA, 19 nt, Homo sapiens
  misc_RNA (1)...(19): siRNA sense strand
ucaaugacaacccaccaaa

SEQ ID NO: 661117 - RNA, 19 nt, Homo sapiens
  misc_RNA (1)...(19): siRNA sense strand
ucgaaggacaacccuauuu

SEQ ID NO: 661118 - RNA, 19 nt, Homo sapiens
  misc_RNA (1)...(19): siRNA sense strand
gacacagaagccuuugaua

SEQ ID NO: 661119 - RNA, 19 nt, Homo sapiens
  misc_RNA (1)...(19): siRNA sense strand
ucagagacaaccgagauaa

SEQ ID NO: 661120 - RNA, 19 nt, Homo sapiens
  misc_RNA (1)...(19): siRNA sense strand
gaacuggggaccucguuuu

SEQ ID NO: 661121 - RNA, 19 nt, Homo sapiens
  misc_RNA (1)...(19): siRNA sense strand
ggaaggagcuggaaccauu

SEQ ID NO: 661122 - RNA, 19 nt, Homo sapiens
  misc_RNA (1)...(19): siRNA sense strand
ggacauggguggacauaug

SEQ ID NO: 661123 - RNA, 19 nt, Homo sapiens
  misc_RNA (1)...(19): siRNA sense strand
gaaggagaacuacuguuua

SEQ ID NO: 661124 - RNA, 19 nt, Homo sapiens
  misc_RNA (1)...(19): siRNA sense strand
gaacagcccuacccaacau

SEQ ID NO: 661125 - RNA, 19 nt, Homo sapiens
  misc_RNA (1)...(19): siRNA sense strand
ggaaauagcgccaaguuag

SEQ ID NO: 661126 - RNA, 19 nt, Homo sapiens
  misc_RNA (1)...(19): siRNA sense strand
caacaucacugucuuugca

SEQ ID NO: 661127 - RNA, 19 nt, Homo sapiens
  misc_RNA (1)...(19): siRNA sense strand
acacugaccucgacagauu

SEQ ID NO: 661128 - RNA, 19 nt, Homo sapiens
  misc_RNA (1)...(19): siRNA sense strand
cgauaaugcucccaaguuu

SEQ ID NO: 661129 - RNA, 19 nt, Homo sapiens
  misc_RNA (1)...(19): siRNA sense strand
gccaauggaccaagauuua

SEQ ID NO: 661130 - RNA, 19 nt, Homo sapiens
  misc_RNA (1)...(19): siRNA sense strand
gcacaucgacccgaaguuu

SEQ ID NO: 661131 - RNA, 19 nt, Homo sapiens
  misc_RNA (1)...(19): siRNA sense strand
gaucagaccaagccacuuu

SEQ ID NO: 661132 - RNA, 19 nt, Homo sapiens
  misc_RNA (1)...(19): siRNA sense strand
gauaagguauuccaucgau

SEQ ID NO: 661133 - RNA, 19 nt, Homo sapiens
  misc_RNA (1)...(19): siRNA sense strand
ggaaguaggaagagugaaa

SEQ ID NO: 661134 - RNA, 19 nt, Homo sapiens
  misc_RNA (1)...(19): siRNA sense strand
gauauugacucuggugaug

SEQ ID NO: 661135 - RNA, 19 nt, Homo sapiens
  misc_RNA (1)...(19): siRNA sense strand
gcacagacagguaucauca

SEQ ID NO: 661136 - RNA, 19 nt, Homo sapiens
  misc_RNA (1)...(19): siRNA sense strand
gagaagagagagcccagua

SEQ ID NO: 661137 - RNA, 19 nt, Homo sapiens
  misc_RNA (1)...(19): siRNA sense strand
caaguuacauccacgaagu

SEQ ID NO: 661138 - RNA, 19 nt, Homo sapiens
  misc_RNA (1)...(19): siRNA sense strand
ggagaacuacuguuuacaa

SEQ ID NO: 661139 - RNA, 19 nt, Homo sapiens
  misc_RNA (1)...(19): siRNA sense strand
ugacaacccaccaaaguuu

SEQ ID NO: 661140 - RNA, 19 nt, Homo sapiens
  misc_RNA (1)...(19): siRNA sense strand
gugaugggaacauuaaaua

SEQ ID NO: 661141 - RNA, 19 nt, Homo sapiens
  misc_RNA (1)...(19): siRNA sense strand
ggagagugcaugccaaaga

SEQ ID NO: 661142 - RNA, 19 nt, Homo sapiens
  misc_RNA (1)...(19): siRNA sense strand
ggugacagcuucagaugca

SEQ ID NO: 661143 - RNA, 19 nt, Homo sapiens
  misc_RNA (1)...(19): siRNA sense strand
gagaacuacuguuuacaag

SEQ ID NO: 661144 - RNA, 19 nt, Homo sapiens
  misc_RNA (1)...(19): siRNA sense strand
ugauggagaugguauggaa

SEQ ID NO: 661145 - RNA, 19 nt, Homo sapiens
  misc_RNA (1)...(19): siRNA sense strand
gaagagagagcccaguaca

SEQ ID NO: 661146 - RNA, 19 nt, Homo sapiens
  misc_RNA (1)...(19): siRNA sense strand
uaggaagagugaaagcuaa

SEQ ID NO: 661147 - RNA, 19 nt, Homo sapiens
  misc_RNA (1)...(19): siRNA sense strand
ccaaguuaguguacaguau

SEQ ID NO: 661148 - RNA, 19 nt, Homo sapiens
  misc_RNA (1)...(19): siRNA sense strand
gaaauagcgccaaguuagu

SEQ ID NO: 661149 - RNA, 19 nt, Homo sapiens
  misc_RNA (1)...(19): siRNA sense strand
ggcagaagcaggacuugua

SEQ ID NO: 661150 - RNA, 19 nt, Homo sapiens
  misc_RNA (1)...(19): siRNA sense strand
cagcagaaauccacaaucg

SEQ ID NO: 661151 - RNA, 19 nt, Homo sapiens
  misc_RNA (1)...(19): siRNA sense strand
gaaaauggcuuagucacau

SEQ ID NO: 661152 - RNA, 19 nt, Homo sapiens
  misc_RNA (1)...(19): siRNA sense strand
guaggaagagugaaagcua

SEQ ID NO: 661153 - RNA, 19 nt, Homo sapiens
  misc_RNA (1)...(19): siRNA sense strand
gaagagugaaagcuaaaga

SEQ ID NO: 661154 - RNA, 19 nt, Homo sapiens
  misc_RNA (1)...(19): siRNA sense strand
caacgcagaggccuacauu

SEQ ID NO: 661155 - RNA, 19 nt, Homo sapiens
  misc_RNA (1)...(19): siRNA sense strand
gaaggagcuggaaccauuu

SEQ ID NO: 661156 - RNA, 19 nt, Homo sapiens
  misc_RNA (1)...(19): siRNA sense strand
ugacaacccuccggaguuc

SEQ ID NO: 661157 - RNA, 19 nt, Homo sapiens
  misc_RNA (1)...(19): siRNA sense strand
ugacaaaucagggaacauu

SEQ ID NO: 661158 - RNA, 19 nt, Homo sapiens
  misc_RNA (1)...(19): siRNA sense strand
ccaacacccucaccaucaa

SEQ ID NO: 661159 - RNA, 19 nt, Homo sapiens
  misc_RNA (1)...(19): siRNA sense strand
gaugggaacauuaaauaca

SEQ ID NO: 661160 - RNA, 19 nt, Homo sapiens
  misc_RNA (1)...(19): siRNA sense strand
ccaacagcccgauaaggua

SEQ ID NO: 661161 - RNA, 19 nt, Homo sapiens
  misc_RNA (1)...(19): siRNA sense strand
acagacagguaucaucaga

SEQ ID NO: 661162 - RNA, 19 nt, Homo sapiens
  misc_RNA (1)...(19): siRNA sense strand
ccauuaggguccuugaugu

SEQ ID NO: 661163 - RNA, 19 nt, Homo sapiens
  misc_RNA (1)...(19): siRNA sense strand
gggcacugcucuccugcaa

SEQ ID NO: 661164 - RNA, 19 nt, Homo sapiens
  misc_RNA (1)...(19): siRNA sense strand
gaaaucauucacaauccaa

SEQ ID NO: 661165 - RNA, 19 nt, Homo sapiens
  misc_RNA (1)...(19): siRNA sense strand
gauaaugcucccaaguuug

SEQ ID NO: 661166 - RNA, 19 nt, Homo sapiens
  misc_RNA (1)...(19): siRNA sense strand
caacagcccgauaagguau

SEQ ID NO: 661167 - RNA, 19 nt, Homo sapiens
  misc_RNA (1)...(19): siRNA sense strand
gaugacaaaucagggaaca

SEQ ID NO: 661168 - RNA, 19 nt, Homo sapiens
  misc_RNA (1)...(19): siRNA sense strand
gaggaaguaggaagaguga

SEQ ID NO: 661169 - RNA, 19 nt, Homo sapiens
  misc_RNA (1)...(19): siRNA sense strand
caauauuguugauggagau

SEQ ID NO: 661170 - RNA, 19 nt, Homo sapiens
  misc_RNA (1)...(19): siRNA sense strand
gagagugcaugccaaagac

SEQ ID NO: 661171 - RNA, 19 nt, Homo sapiens
  misc_RNA (1)...(19): siRNA sense strand
uaucagcaauggcccuuuc

SEQ ID NO: 661172 - RNA, 19 nt, Homo sapiens
  misc_RNA (1)...(19): siRNA sense strand
gugcagaugacaaggauga

SEQ ID NO: 661173 - RNA, 19 nt, Homo sapiens
  misc_RNA (1)...(19): siRNA sense strand
gucaagaucucaguagaag

SEQ ID NO: 661174 - RNA, 19 nt, Homo sapiens
  misc_RNA (1)...(19): siRNA sense strand
gacguuggaucgagaagag

SEQ ID NO: 661175 - RNA, 19 nt, Homo sapiens
  misc_RNA (1)...(19): siRNA sense strand
ccaagccacuuuccaacca

SEQ ID NO: 661176 - RNA, 19 nt, Homo sapiens
  misc_RNA (1)...(19): siRNA sense strand
gggcaggcuucauucagau

SEQ ID NO: 661177 - RNA, 19 nt, Homo sapiens
  misc_RNA (1)...(19): siRNA sense strand
gcucaacaucacugucuuu

SEQ ID NO: 661178 - RNA, 19 nt, Homo sapiens
  misc_RNA (1)...(19): siRNA sense strand
aaggagaacuacuguuuac

SEQ ID NO: 661179 - RNA, 19 nt, Homo sapiens
  misc_RNA (1)...(19): siRNA sense strand
cuaaagauccagacauugg

SEQ ID NO: 661180 - RNA, 19 nt, Homo sapiens
  misc_RNA (1)...(19): siRNA sense strand
agacagguaucaucagaac

SEQ ID NO: 661181 - RNA, 19 nt, Homo sapiens
  misc_RNA (1)...(19): siRNA sense strand
agcuaaagauccagacauu

SEQ ID NO: 661182 - RNA, 19 nt, Homo sapiens
  misc_RNA (1)...(19): siRNA sense strand
gccaacagcccgauaaggu

SEQ ID NO: 661183 - RNA, 19 nt, Homo sapiens
  misc_RNA (1)...(19): siRNA sense strand
uggaaauagcgccaaguua

SEQ ID NO: 661184 - RNA, 19 nt, Homo sapiens
  misc_RNA (1)...(19): siRNA sense strand
cacaucgacccgaaguuua

SEQ ID NO: 661185 - RNA, 19 nt, Homo sapiens
  misc_RNA (1)...(19): siRNA sense strand
ucaaugacaacccaccaaa

SEQ ID NO: 661186 - RNA, 19 nt, Homo sapiens
  misc_RNA (1)...(19): siRNA sense strand
ucgaaggacaacccuauuu

SEQ ID NO: 661187 - RNA, 19 nt, Homo sapiens
  misc_RNA (1)...(19): siRNA sense strand
ucagagacaaccgagauaa

SEQ ID NO: 661188 - RNA, 19 nt, Homo sapiens
  misc_RNA (1)...(19): siRNA sense strand
gaaaucacaacggacuaug

SEQ ID NO: 661189 - RNA, 19 nt, Homo sapiens
  misc_RNA (1)...(19): siRNA sense strand
ggccaauggaccaagauuu

SEQ ID NO: 661190 - RNA, 19 nt, Homo sapiens
  misc_RNA (1)...(19): siRNA sense strand
caacggacuaugaaacaca

SEQ ID NO: 661191 - RNA, 19 nt, Homo sapiens
  misc_RNA (1)...(19): siRNA sense strand
aauccaaauuucacaguca

SEQ ID NO: 661192 - RNA, 19 nt, Homo sapiens
  misc_RNA (1)...(19): siRNA sense strand
ccaauggaccaagauuuau

SEQ ID NO: 661193 - RNA, 19 nt, Homo sapiens
  misc_RNA (1)...(19): siRNA sense strand
gccauuaggguccuugaug

SEQ ID NO: 661194 - RNA, 19 nt, Homo sapiens
  misc_RNA (1)...(19): siRNA sense strand
ggugaugggaacauuaaau

SEQ ID NO: 661195 - RNA, 19 nt, Homo sapiens
  misc_RNA (1)...(19): siRNA sense strand
uccaggacauuaaugacaa

SEQ ID NO: 661196 - RNA, 19 nt, Homo sapiens
  misc_RNA (1)...(19): siRNA sense strand
caacacccucaccaucaaa

SEQ ID NO: 661197 - RNA, 19 nt, Homo sapiens
  misc_RNA (1)...(19): siRNA sense strand
gcagaagcaggacuuguac

SEQ ID NO: 661198 - RNA, 19 nt, Homo sapiens
  misc_RNA (1)...(19): siRNA sense strand
ugggcaggcuucauucaga

SEQ ID NO: 661199 - RNA, 19 nt, Homo sapiens
  misc_RNA (1)...(19): siRNA sense strand
aaucacaacggacuaugaa

SEQ ID NO: 661200 - RNA, 19 nt, Homo sapiens
  misc_RNA (1)...(19): siRNA sense strand
ggcuuagucacauacaaua

SEQ ID NO: 661201 - RNA, 19 nt, Homo sapiens
  misc_RNA (1)...(19): siRNA sense strand
gaaguaggaagagugaaag

SEQ ID NO: 661202 - RNA, 19 nt, Homo sapiens
  misc_RNA (1)...(19): siRNA sense strand
ucagggacaaccaaaguga

SEQ ID NO: 661203 - RNA, 19 nt, Homo sapiens
  misc_RNA (1)...(19): siRNA sense strand
caaguuaguguacaguauc

SEQ ID NO: 661204 - RNA, 19 nt, Homo sapiens
  misc_RNA (1)...(19): siRNA sense strand
gcaggcuucauucagauau

SEQ ID NO: 661205 - RNA, 19 nt, Homo sapiens
  misc_RNA (1)...(19): siRNA sense strand
gaagcaggacuuguaccuu

SEQ ID NO: 661206 - RNA, 19 nt, Homo sapiens
  misc_RNA (1)...(19): siRNA sense strand
caaauuucacagucagaga

SEQ ID NO: 661207 - RNA, 19 nt, Homo sapiens
  misc_RNA (1)...(19): siRNA sense strand
caaguuugcugccccuuau

SEQ ID NO: 661208 - RNA, 19 nt, Homo sapiens
  misc_RNA (1)...(19): siRNA sense strand
caaagucccaguggccauu

SEQ ID NO: 661209 - RNA, 19 nt, Homo sapiens
  misc_RNA (1)...(19): siRNA sense strand
aguagaagaugcugaugag

SEQ ID NO: 661210 - RNA, 19 nt, Homo sapiens
  misc_RNA (1)...(19): siRNA sense strand
cgaaguuuaucagcaaugg

SEQ ID NO: 661211 - RNA, 19 nt, Homo sapiens
  misc_RNA (1)...(19): siRNA sense strand
ggacauaugggcggacucu

SEQ ID NO: 661212 - RNA, 19 nt, Homo sapiens
  misc_RNA (1)...(19): siRNA sense strand
gcagaugaccccacuuaug

SEQ ID NO: 661213 - RNA, 19 nt, Homo sapiens
  misc_RNA (1)...(19): siRNA sense strand
gcaccaacacccucaccau

SEQ ID NO: 661214 - RNA, 19 nt, Homo sapiens
  misc_RNA (1)...(19): siRNA sense strand
gagccaccgucggaauuca

SEQ ID NO: 661215 - RNA, 19 nt, Homo sapiens
  misc_RNA (1)...(19): siRNA sense strand
caguagaagaugcugauga

SEQ ID NO: 661216 - RNA, 19 nt, Homo sapiens
  misc_RNA (1)...(19): siRNA sense strand
gcuaaagauccagacauug

SEQ ID NO: 661217 - RNA, 19 nt, Homo sapiens
  misc_RNA (1)...(19): siRNA sense strand
cgucggaauucauugucaa

SEQ ID NO: 661218 - RNA, 19 nt, Homo sapiens
  misc_RNA (1)...(19): siRNA sense strand
agugaaagcuaaagaucca

SEQ ID NO: 661219 - RNA, 19 nt, Homo sapiens
  misc_RNA (1)...(19): siRNA sense strand
cgucaagaucucaguagaa

SEQ ID NO: 661220 - RNA, 19 nt, Homo sapiens
  misc_RNA (1)...(19): siRNA sense strand
agaccaagccacuuuccaa

SEQ ID NO: 661221 - RNA, 19 nt, Homo sapiens
  misc_RNA (1)...(19): siRNA sense strand
ggaaggagcugaggaauga

SEQ ID NO: 661222 - RNA, 19 nt, Homo sapiens
  misc_RNA (1)...(19): siRNA sense strand
gaagcagccuccaaagaaa

SEQ ID NO: 661223 - RNA, 19 nt, Homo sapiens
  misc_RNA (1)...(19): siRNA sense strand
ucaaggaggugguugcuaa

SEQ ID NO: 661224 - RNA, 19 nt, Homo sapiens
  misc_RNA (1)...(19): siRNA sense strand
ggaagcagccuccaaagaa

SEQ ID NO: 661225 - RNA, 19 nt, Homo sapiens
  misc_RNA (1)...(19): siRNA sense strand
gaacaucacuugcauuacg

SEQ ID NO: 661226 - RNA, 19 nt, Homo sapiens
  misc_RNA (1)...(19): siRNA sense strand
uuaaagagcuccaucacuu

SEQ ID NO: 661227 - RNA, 19 nt, Homo sapiens
  misc_RNA (1)...(19): siRNA sense strand
caaagaaaccaucaagaaa

SEQ ID NO: 661228 - RNA, 19 nt, Homo sapiens
  misc_RNA (1)...(19): siRNA sense strand
guaaagaagcguaccauga

SEQ ID NO: 661229 - RNA, 19 nt, Homo sapiens
  misc_RNA (1)...(19): siRNA sense strand
ccaaagaaaccaucaagaa

SEQ ID NO: 661230 - RNA, 19 nt, Homo sapiens
  misc_RNA (1)...(19): siRNA sense strand
uaaagaagcguaccaugaa

SEQ ID NO: 661231 - RNA, 19 nt, Homo sapiens
  misc_RNA (1)...(19): siRNA sense strand
ggaaacaccaguagcuuug

SEQ ID NO: 661232 - RNA, 19 nt, Homo sapiens
  misc_RNA (1)...(19): siRNA sense strand
ugucccaacuccuugauua

SEQ ID NO: 661233 - RNA, 19 nt, Homo sapiens
  misc_RNA (1)...(19): siRNA sense strand
cuuagacuguuuccacuua

SEQ ID NO: 661234 - RNA, 19 nt, Homo sapiens
  misc_RNA (1)...(19): siRNA sense strand
caccugaucgcaacaaaua

SEQ ID NO: 661235 - RNA, 19 nt, Homo sapiens
  misc_RNA (1)...(19): siRNA sense strand
cggaacaucacuugcauua

SEQ ID NO: 661236 - RNA, 19 nt, Homo sapiens
  misc_RNA (1)...(19): siRNA sense strand
caguggaggucgauucuga

SEQ ID NO: 661237 - RNA, 19 nt, Homo sapiens
  misc_RNA (1)...(19): siRNA sense strand
ccaacuccuugauuaaaga

SEQ ID NO: 661238 - RNA, 19 nt, Homo sapiens
  misc_RNA (1)...(19): siRNA sense strand
acaaauagucggaacauca

SEQ ID NO: 661239 - RNA, 19 nt, Homo sapiens
  misc_RNA (1)...(19): siRNA sense strand
gcugaccaguugcguguga

SEQ ID NO: 661240 - RNA, 19 nt, Homo sapiens
  misc_RNA (1)...(19): siRNA sense strand
gcuacucccugccuugugu

SEQ ID NO: 661241 - RNA, 19 nt, Homo sapiens
  misc_RNA (1)...(19): siRNA sense strand
uagacuguuuccacuuaua

SEQ ID NO: 661242 - RNA, 19 nt, Homo sapiens
  misc_RNA (1)...(19): siRNA sense strand
gggaagcagccuccaaaga

SEQ ID NO: 661243 - RNA, 19 nt, Homo sapiens
  misc_RNA (1)...(19): siRNA sense strand
ugacaaggaaacaccagua

SEQ ID NO: 661244 - RNA, 19 nt, Homo sapiens
  misc_RNA (1)...(19): siRNA sense strand
ucaaugaucggcaguuugu

SEQ ID NO: 661245 - RNA, 19 nt, Homo sapiens
  misc_RNA (1)...(19): siRNA sense strand
ccacuuauacugugugaca

SEQ ID NO: 661246 - RNA, 19 nt, Homo sapiens
  misc_RNA (1)...(19): siRNA sense strand
gggaaggagcugaggaaug

SEQ ID NO: 661247 - RNA, 19 nt, Homo sapiens
  misc_RNA (1)...(19): siRNA sense strand
cuccaucacuucaggauuc

SEQ ID NO: 661248 - RNA, 19 nt, Homo sapiens
  misc_RNA (1)...(19): siRNA sense strand
guucacgacccucaacuug

SEQ ID NO: 661249 - RNA, 19 nt, Homo sapiens
  misc_RNA (1)...(19): siRNA sense strand
caacaaauagucggaacau

SEQ ID NO: 661250 - RNA, 19 nt, Homo sapiens
  misc_RNA (1)...(19): siRNA sense strand
caacucccgccacgugauu

SEQ ID NO: 661251 - RNA, 19 nt, Homo sapiens
  misc_RNA (1)...(19): siRNA sense strand
gugauuugcuuagacuguu

SEQ ID NO: 661252 - RNA, 19 nt, Homo sapiens
  misc_RNA (1)...(19): siRNA sense strand
ugauuugcuuagacuguuu

SEQ ID NO: 661253 - RNA, 19 nt, Homo sapiens
  misc_RNA (1)...(19): siRNA sense strand
aaagaagcguaccaugaag

SEQ ID NO: 661254 - RNA, 19 nt, Homo sapiens
  misc_RNA (1)...(19): siRNA sense strand
gguuccggcugaccaguug

SEQ ID NO: 661255 - RNA, 19 nt, Homo sapiens
  misc_RNA (1)...(19): siRNA sense strand
acucaaugaucggcaguuu

SEQ ID NO: 661256 - RNA, 19 nt, Homo sapiens
  misc_RNA (1)...(19): siRNA sense strand
uaaagagcuccaucacuuc

SEQ ID NO: 661257 - RNA, 19 nt, Homo sapiens
  misc_RNA (1)...(19): siRNA sense strand
gagcacaccccaccucuga

SEQ ID NO: 661258 - RNA, 19 nt, Homo sapiens
  misc_RNA (1)...(19): siRNA sense strand
ccacgugauuugcuuagac

SEQ ID NO: 661259 - RNA, 19 nt, Homo sapiens
  misc_RNA (1)...(19): siRNA sense strand
caaggaaacaccaguagcu

SEQ ID NO: 661260 - RNA, 19 nt, Homo sapiens
  misc_RNA (1)...(19): siRNA sense strand
gcaccugaucgcaacaaau

SEQ ID NO: 661261 - RNA, 19 nt, Homo sapiens
  misc_RNA (1)...(19): siRNA sense strand
gcaacaaauagucggaaca

SEQ ID NO: 661262 - RNA, 19 nt, Homo sapiens
  misc_RNA (1)...(19): siRNA sense strand
gacaaggaaacaccaguag

SEQ ID NO: 661263 - RNA, 19 nt, Homo sapiens
  misc_RNA (1)...(19): siRNA sense strand
aaagagcuccaucacuuca

SEQ ID NO: 661264 - RNA, 19 nt, Homo sapiens
  misc_RNA (1)...(19): siRNA sense strand
gugacaagacucaaugauc

SEQ ID NO: 661265 - RNA, 19 nt, Homo sapiens
  misc_RNA (1)...(19): siRNA sense strand
aaacaccaguagcuuugca

SEQ ID NO: 661266 - RNA, 19 nt, Homo sapiens
  misc_RNA (1)...(19): siRNA sense strand
caacuacucaggccuacag

SEQ ID NO: 661267 - RNA, 19 nt, Homo sapiens
  misc_RNA (1)...(19): siRNA sense strand
gaccaguugcgugugauuu

SEQ ID NO: 661268 - RNA, 19 nt, Homo sapiens
  misc_RNA (1)...(19): siRNA sense strand
aggaaacaccaguagcuuu

SEQ ID NO: 661269 - RNA, 19 nt, Homo sapiens
  misc_RNA (1)...(19): siRNA sense strand
caacuccagccaugguuuc

SEQ ID NO: 661270 - RNA, 19 nt, Homo sapiens
  misc_RNA (1)...(19): siRNA sense strand
gcuguggguuugccuucug

SEQ ID NO: 661271 - RNA, 19 nt, Homo sapiens
  misc_RNA (1)...(19): siRNA sense strand
cccaacuccuugauuaaag

SEQ ID NO: 661272 - RNA, 19 nt, Homo sapiens
  misc_RNA (1)...(19): siRNA sense strand
cagggaaggagcugaggaa

SEQ ID NO: 661273 - RNA, 19 nt, Homo sapiens
  misc_RNA (1)...(19): siRNA sense strand
gaagccucaggaacaacua

SEQ ID NO: 661274 - RNA, 19 nt, Homo sapiens
  misc_RNA (1)...(19): siRNA sense strand
uuagacuguuuccacuuau

SEQ ID NO: 661275 - RNA, 19 nt, Homo sapiens
  misc_RNA (1)...(19): siRNA sense strand
caaccgguaccagcaguau

SEQ ID NO: 661276 - RNA, 19 nt, Homo sapiens
  misc_RNA (1)...(19): siRNA sense strand
caaauagucggaacaucac

SEQ ID NO: 661277 - RNA, 19 nt, Homo sapiens
  misc_RNA (1)...(19): siRNA sense strand
uuugaagccucaggaacaa

SEQ ID NO: 661278 - RNA, 19 nt, Homo sapiens
  misc_RNA (1)...(19): siRNA sense strand
gucccaacuccuugauuaa

SEQ ID NO: 661279 - RNA, 19 nt, Homo sapiens
  misc_RNA (1)...(19): siRNA sense strand
cuuauacugugugacaaga

SEQ ID NO: 661280 - RNA, 19 nt, Homo sapiens
  misc_RNA (1)...(19): siRNA sense strand
ggaaggagcugaggaauga

SEQ ID NO: 661281 - RNA, 19 nt, Homo sapiens
  misc_RNA (1)...(19): siRNA sense strand
gaagcagccuccaaagaaa

SEQ ID NO: 661282 - RNA, 19 nt, Homo sapiens
  misc_RNA (1)...(19): siRNA sense strand
ucaaggaggugguugcuaa

SEQ ID NO: 661283 - RNA, 19 nt, Homo sapiens
  misc_RNA (1)...(19): siRNA sense strand
ggaagcagccuccaaagaa

SEQ ID NO: 661284 - RNA, 19 nt, Homo sapiens
  misc_RNA (1)...(19): siRNA sense strand
gaacaucacuugcauuacg

SEQ ID NO: 661285 - RNA, 19 nt, Homo sapiens
  misc_RNA (1)...(19): siRNA sense strand
uuaaagagcuccaucacuu

SEQ ID NO: 661286 - RNA, 19 nt, Homo sapiens
  misc_RNA (1)...(19): siRNA sense strand
caaagaaaccaucaagaaa

SEQ ID NO: 661287 - RNA, 19 nt, Homo sapiens
  misc_RNA (1)...(19): siRNA sense strand
guaaagaagcguaccauga

SEQ ID NO: 661288 - RNA, 19 nt, Homo sapiens
  misc_RNA (1)...(19): siRNA sense strand
ccaaagaaaccaucaagaa

SEQ ID NO: 661289 - RNA, 19 nt, Homo sapiens
  misc_RNA (1)...(19): siRNA sense strand
uaaagaagcguaccaugaa

SEQ ID NO: 661290 - RNA, 19 nt, Homo sapiens
  misc_RNA (1)...(19): siRNA sense strand
ggaaacaccaguagcuuug

SEQ ID NO: 661291 - RNA, 19 nt, Homo sapiens
  misc_RNA (1)...(19): siRNA sense strand
ugucccaacuccuugauua

SEQ ID NO: 661292 - RNA, 19 nt, Homo sapiens
  misc_RNA (1)...(19): siRNA sense strand
cuuagacuguuuccacuua

SEQ ID NO: 661293 - RNA, 19 nt, Homo sapiens
  misc_RNA (1)...(19): siRNA sense strand
caccugaucgcaacaaaua

SEQ ID NO: 661294 - RNA, 19 nt, Homo sapiens
  misc_RNA (1)...(19): siRNA sense strand
cggaacaucacuugcauua

SEQ ID NO: 661295 - RNA, 19 nt, Homo sapiens
  misc_RNA (1)...(19): siRNA sense strand
caguggaggucgauucuga

SEQ ID NO: 661296 - RNA, 19 nt, Homo sapiens
  misc_RNA (1)...(19): siRNA sense strand
ccaacuccuugauuaaaga

SEQ ID NO: 661297 - RNA, 19 nt, Homo sapiens
  misc_RNA (1)...(19): siRNA sense strand
acaaauagucggaacauca

SEQ ID NO: 661298 - RNA, 19 nt, Homo sapiens
  misc_RNA (1)...(19): siRNA sense strand
gcugaccaguugcguguga

SEQ ID NO: 661299 - RNA, 19 nt, Homo sapiens
  misc_RNA (1)...(19): siRNA sense strand
gcuacucccugccuugugu

SEQ ID NO: 661300 - RNA, 19 nt, Homo sapiens
  misc_RNA (1)...(19): siRNA sense strand
uagacuguuuccacuuaua

SEQ ID NO: 661301 - RNA, 19 nt, Homo sapiens
  misc_RNA (1)...(19): siRNA sense strand
gggaagcagccuccaaaga

SEQ ID NO: 661302 - RNA, 19 nt, Homo sapiens
  misc_RNA (1)...(19): siRNA sense strand
ugacaaggaaacaccagua

SEQ ID NO: 661303 - RNA, 19 nt, Homo sapiens
  misc_RNA (1)...(19): siRNA sense strand
ucaaugaucggcaguuugu

SEQ ID NO: 661304 - RNA, 19 nt, Homo sapiens
  misc_RNA (1)...(19): siRNA sense strand
ccacuuauacugugugaca

SEQ ID NO: 661305 - RNA, 19 nt, Homo sapiens
  misc_RNA (1)...(19): siRNA sense strand
gggaaggagcugaggaaug

SEQ ID NO: 661306 - RNA, 19 nt, Homo sapiens
  misc_RNA (1)...(19): siRNA sense strand
cuccaucacuucaggauuc

SEQ ID NO: 661307 - RNA, 19 nt, Homo sapiens
  misc_RNA (1)...(19): siRNA sense strand
guucacgacccucaacuug

SEQ ID NO: 661308 - RNA, 19 nt, Homo sapiens
  misc_RNA (1)...(19): siRNA sense strand
caacaaauagucggaacau

SEQ ID NO: 661309 - RNA, 19 nt, Homo sapiens
  misc_RNA (1)...(19): siRNA sense strand
caacucccgccacgugauu

SEQ ID NO: 661310 - RNA, 19 nt, Homo sapiens
  misc_RNA (1)...(19): siRNA sense strand
gugauuugcuuagacuguu

SEQ ID NO: 661311 - RNA, 19 nt, Homo sapiens
  misc_RNA (1)...(19): siRNA sense strand
ugauuugcuuagacuguuu

SEQ ID NO: 661312 - RNA, 19 nt, Homo sapiens
  misc_RNA (1)...(19): siRNA sense strand
aaagaagcguaccaugaag

SEQ ID NO: 661313 - RNA, 19 nt, Homo sapiens
  misc_RNA (1)...(19): siRNA sense strand
gguuccggcugaccaguug

SEQ ID NO: 661314 - RNA, 19 nt, Homo sapiens
  misc_RNA (1)...(19): siRNA sense strand
acucaaugaucggcaguuu

SEQ ID NO: 661315 - RNA, 19 nt, Homo sapiens
  misc_RNA (1)...(19): siRNA sense strand
uaaagagcuccaucacuuc

SEQ ID NO: 661316 - RNA, 19 nt, Homo sapiens
  misc_RNA (1)...(19): siRNA sense strand
gagcacaccccaccucuga

SEQ ID NO: 661317 - RNA, 19 nt, Homo sapiens
  misc_RNA (1)...(19): siRNA sense strand
ccacgugauuugcuuagac

SEQ ID NO: 661318 - RNA, 19 nt, Homo sapiens
  misc_RNA (1)...(19): siRNA sense strand
caaggaaacaccaguagcu

SEQ ID NO: 661319 - RNA, 19 nt, Homo sapiens
  misc_RNA (1)...(19): siRNA sense strand
gcaccugaucgcaacaaau

SEQ ID NO: 661320 - RNA, 19 nt, Homo sapiens
  misc_RNA (1)...(19): siRNA sense strand
gcaacaaauagucggaaca

SEQ ID NO: 661321 - RNA, 19 nt, Homo sapiens
  misc_RNA (1)...(19): siRNA sense strand
gacaaggaaacaccaguag

SEQ ID NO: 661322 - RNA, 19 nt, Homo sapiens
  misc_RNA (1)...(19): siRNA sense strand
aaagagcuccaucacuuca

SEQ ID NO: 661323 - RNA, 19 nt, Homo sapiens
  misc_RNA (1)...(19): siRNA sense strand
gugacaagacucaaugauc

SEQ ID NO: 661324 - RNA, 19 nt, Homo sapiens
  misc_RNA (1)...(19): siRNA sense strand
aaacaccaguagcuuugca

SEQ ID NO: 661325 - RNA, 19 nt, Homo sapiens
  misc_RNA (1)...(19): siRNA sense strand
caacuacucaggccuacag

SEQ ID NO: 661326 - RNA, 19 nt, Homo sapiens
  misc_RNA (1)...(19): siRNA sense strand
gaccaguugcgugugauuu

SEQ ID NO: 661327 - RNA, 19 nt, Homo sapiens
  misc_RNA (1)...(19): siRNA sense strand
aggaaacaccaguagcuuu

SEQ ID NO: 661328 - RNA, 19 nt, Homo sapiens
  misc_RNA (1)...(19): siRNA sense strand
caacuccagccaugguuuc

SEQ ID NO: 661329 - RNA, 19 nt, Homo sapiens
  misc_RNA (1)...(19): siRNA sense strand
gcuguggguuugccuucug

SEQ ID NO: 661330 - RNA, 19 nt, Homo sapiens
  misc_RNA (1)...(19): siRNA sense strand
cccaacuccuugauuaaag

SEQ ID NO: 661331 - RNA, 19 nt, Homo sapiens
  misc_RNA (1)...(19): siRNA sense strand
cagggaaggagcugaggaa

SEQ ID NO: 661332 - RNA, 19 nt, Homo sapiens
  misc_RNA (1)...(19): siRNA sense strand
gaagccucaggaacaacua

SEQ ID NO: 661333 - RNA, 19 nt, Homo sapiens
  misc_RNA (1)...(19): siRNA sense strand
uuagacuguuuccacuuau

SEQ ID NO: 661334 - RNA, 19 nt, Homo sapiens
  misc_RNA (1)...(19): siRNA sense strand
caaccgguaccagcaguau

SEQ ID NO: 661335 - RNA, 19 nt, Homo sapiens
  misc_RNA (1)...(19): siRNA sense strand
caaauagucggaacaucac

SEQ ID NO: 661336 - RNA, 19 nt, Homo sapiens
  misc_RNA (1)...(19): siRNA sense strand
uuugaagccucaggaacaa

SEQ ID NO: 661337 - RNA, 19 nt, Homo sapiens
  misc_RNA (1)...(19): siRNA sense strand
gucccaacuccuugauuaa

SEQ ID NO: 661338 - RNA, 19 nt, Homo sapiens
  misc_RNA (1)...(19): siRNA sense strand
cuuauacugugugacaaga

SEQ ID NO: 661339 - RNA, 19 nt, Homo sapiens
  misc_RNA (1)...(19): siRNA sense strand
ggaaggagcugaggaauga

SEQ ID NO: 661340 - RNA, 19 nt, Homo sapiens
  misc_RNA (1)...(19): siRNA sense strand
gaagcagccuccaaagaaa

SEQ ID NO: 661341 - RNA, 19 nt, Homo sapiens
  misc_RNA (1)...(19): siRNA sense strand
ucaaggaggugguugcuaa

SEQ ID NO: 661342 - RNA, 19 nt, Homo sapiens
  misc_RNA (1)...(19): siRNA sense strand
ggaagcagccuccaaagaa

SEQ ID NO: 661343 - RNA, 19 nt, Homo sapiens
  misc_RNA (1)...(19): siRNA sense strand
gaacaucacuugcauuacg

SEQ ID NO: 661344 - RNA, 19 nt, Homo sapiens
  misc_RNA (1)...(19): siRNA sense strand
uuaaagagcuccaucacuu

SEQ ID NO: 661345 - RNA, 19 nt, Homo sapiens
  misc_RNA (1)...(19): siRNA sense strand
caaagaaaccaucaagaaa

SEQ ID NO: 661346 - RNA, 19 nt, Homo sapiens
  misc_RNA (1)...(19): siRNA sense strand
guaaagaagcguaccauga

SEQ ID NO: 661347 - RNA, 19 nt, Homo sapiens
  misc_RNA (1)...(19): siRNA sense strand
ccaaagaaaccaucaagaa

SEQ ID NO: 661348 - RNA, 19 nt, Homo sapiens
  misc_RNA (1)...(19): siRNA sense strand
uaaagaagcguaccaugaa

SEQ ID NO: 661349 - RNA, 19 nt, Homo sapiens
  misc_RNA (1)...(19): siRNA sense strand
ggaaacaccaguagcuuug

SEQ ID NO: 661350 - RNA, 19 nt, Homo sapiens
  misc_RNA (1)...(19): siRNA sense strand
ugucccaacuccuugauua

SEQ ID NO: 661351 - RNA, 19 nt, Homo sapiens
  misc_RNA (1)...(19): siRNA sense strand
cuuagacuguuuccacuua

SEQ ID NO: 661352 - RNA, 19 nt, Homo sapiens
  misc_RNA (1)...(19): siRNA sense strand
caccugaucgcaacaaaua

SEQ ID NO: 661353 - RNA, 19 nt, Homo sapiens
  misc_RNA (1)...(19): siRNA sense strand
cggaacaucacuugcauua

SEQ ID NO: 661354 - RNA, 19 nt, Homo sapiens
  misc_RNA (1)...(19): siRNA sense strand
caguggaggucgauucuga

SEQ ID NO: 661355 - RNA, 19 nt, Homo sapiens
  misc_RNA (1)...(19): siRNA sense strand
ccaacuccuugauuaaaga

SEQ ID NO: 661356 - RNA, 19 nt, Homo sapiens
  misc_RNA (1)...(19): siRNA sense strand
acaaauagucggaacauca

SEQ ID NO: 661357 - RNA, 19 nt, Homo sapiens
  misc_RNA (1)...(19): siRNA sense strand
gcugaccaguugcguguga

SEQ ID NO: 661358 - RNA, 19 nt, Homo sapiens
  misc_RNA (1)...(19): siRNA sense strand
gcuacucccugccuugugu

SEQ ID NO: 661359 - RNA, 19 nt, Homo sapiens
  misc_RNA (1)...(19): siRNA sense strand
uagacuguuuccacuuaua

SEQ ID NO: 661360 - RNA, 19 nt, Homo sapiens
  misc_RNA (1)...(19): siRNA sense strand
gggaagcagccuccaaaga

SEQ ID NO: 661361 - RNA, 19 nt, Homo sapiens
  misc_RNA (1)...(19): siRNA sense strand
ugacaaggaaacaccagua

SEQ ID NO: 661362 - RNA, 19 nt, Homo sapiens
  misc_RNA (1)...(19): siRNA sense strand
ucaaugaucggcaguuugu

SEQ ID NO: 661363 - RNA, 19 nt, Homo sapiens
  misc_RNA (1)...(19): siRNA sense strand
ccacuuauacugugugaca

SEQ ID NO: 661364 - RNA, 19 nt, Homo sapiens
  misc_RNA (1)...(19): siRNA sense strand
gggaaggagcugaggaaug

SEQ ID NO: 661365 - RNA, 19 nt, Homo sapiens
  misc_RNA (1)...(19): siRNA sense strand
cuccaucacuucaggauuc

SEQ ID NO: 661366 - RNA, 19 nt, Homo sapiens
  misc_RNA (1)...(19): siRNA sense strand
guucacgacccucaacuug

SEQ ID NO: 661367 - RNA, 19 nt, Homo sapiens
  misc_RNA (1)...(19): siRNA sense strand
caacaaauagucggaacau

SEQ ID NO: 661368 - RNA, 19 nt, Homo sapiens
  misc_RNA (1)...(19): siRNA sense strand
caacucccgccacgugauu

SEQ ID NO: 661369 - RNA, 19 nt, Homo sapiens
  misc_RNA (1)...(19): siRNA sense strand
gugauuugcuuagacuguu

SEQ ID NO: 661370 - RNA, 19 nt, Homo sapiens
  misc_RNA (1)...(19): siRNA sense strand
ugauuugcuuagacuguuu

SEQ ID NO: 661371 - RNA, 19 nt, Homo sapiens
  misc_RNA (1)...(19): siRNA sense strand
aaagaagcguaccaugaag

SEQ ID NO: 661372 - RNA, 19 nt, Homo sapiens
  misc_RNA (1)...(19): siRNA sense strand
gguuccggcugaccaguug

SEQ ID NO: 661373 - RNA, 19 nt, Homo sapiens
  misc_RNA (1)...(19): siRNA sense strand
acucaaugaucggcaguuu

SEQ ID NO: 661374 - RNA, 19 nt, Homo sapiens
  misc_RNA (1)...(19): siRNA sense strand
uaaagagcuccaucacuuc

SEQ ID NO: 661375 - RNA, 19 nt, Homo sapiens
  misc_RNA (1)...(19): siRNA sense strand
gagcacaccccaccucuga

SEQ ID NO: 661376 - RNA, 19 nt, Homo sapiens
  misc_RNA (1)...(19): siRNA sense strand
ccacgugauuugcuuagac

SEQ ID NO: 661377 - RNA, 19 nt, Homo sapiens
  misc_RNA (1)...(19): siRNA sense strand
caaggaaacaccaguagcu

SEQ ID NO: 661378 - RNA, 19 nt, Homo sapiens
  misc_RNA (1)...(19): siRNA sense strand
gcaccugaucgcaacaaau

SEQ ID NO: 661379 - RNA, 19 nt, Homo sapiens
  misc_RNA (1)...(19): siRNA sense strand
gcaacaaauagucggaaca

SEQ ID NO: 661380 - RNA, 19 nt, Homo sapiens
  misc_RNA (1)...(19): siRNA sense strand
gacaaggaaacaccaguag

SEQ ID NO: 661381 - RNA, 19 nt, Homo sapiens
  misc_RNA (1)...(19): siRNA sense strand
aaagagcuccaucacuuca

SEQ ID NO: 661382 - RNA, 19 nt, Homo sapiens
  misc_RNA (1)...(19): siRNA sense strand
gugacaagacucaaugauc

SEQ ID NO: 661383 - RNA, 19 nt, Homo sapiens
  misc_RNA (1)...(19): siRNA sense strand
aaacaccaguagcuuugca

SEQ ID NO: 661384 - RNA, 19 nt, Homo sapiens
  misc_RNA (1)...(19): siRNA sense strand
caacuacucaggccuacag

SEQ ID NO: 661385 - RNA, 19 nt, Homo sapiens
  misc_RNA (1)...(19): siRNA sense strand
gaccaguugcgugugauuu

SEQ ID NO: 661386 - RNA, 19 nt, Homo sapiens
  misc_RNA (1)...(19): siRNA sense strand
aggaaacaccaguagcuuu

SEQ ID NO: 661387 - RNA, 19 nt, Homo sapiens
  misc_RNA (1)...(19): siRNA sense strand
caacuccagccaugguuuc

SEQ ID NO: 661388 - RNA, 19 nt, Homo sapiens
  misc_RNA (1)...(19): siRNA sense strand
gcuguggguuugccuucug

SEQ ID NO: 661389 - RNA, 19 nt, Homo sapiens
  misc_RNA (1)...(19): siRNA sense strand
cccaacuccuugauuaaag

SEQ ID NO: 661390 - RNA, 19 nt, Homo sapiens
  misc_RNA (1)...(19): siRNA sense strand
cagggaaggagcugaggaa

SEQ ID NO: 661391 - RNA, 19 nt, Homo sapiens
  misc_RNA (1)...(19): siRNA sense strand
gaagccucaggaacaacua

SEQ ID NO: 661392 - RNA, 19 nt, Homo sapiens
  misc_RNA (1)...(19): siRNA sense strand
uuagacuguuuccacuuau

SEQ ID NO: 661393 - RNA, 19 nt, Homo sapiens
  misc_RNA (1)...(19): siRNA sense strand
caaccgguaccagcaguau

SEQ ID NO: 661394 - RNA, 19 nt, Homo sapiens
  misc_RNA (1)...(19): siRNA sense strand
caaauagucggaacaucac

SEQ ID NO: 661395 - RNA, 19 nt, Homo sapiens
  misc_RNA (1)...(19): siRNA sense strand
uuugaagccucaggaacaa

SEQ ID NO: 661396 - RNA, 19 nt, Homo sapiens
  misc_RNA (1)...(19): siRNA sense strand
gucccaacuccuugauuaa

SEQ ID NO: 661397 - RNA, 19 nt, Homo sapiens
  misc_RNA (1)...(19): siRNA sense strand
cuuauacugugugacaaga

SEQ ID NO: 661398 - RNA, 19 nt, Homo sapiens
  misc_RNA (1)...(19): siRNA sense strand
ggaaggagcugaggaauga

SEQ ID NO: 661399 - RNA, 19 nt, Homo sapiens
  misc_RNA (1)...(19): siRNA sense strand
gaagcagccuccaaagaaa

SEQ ID NO: 661400 - RNA, 19 nt, Homo sapiens
  misc_RNA (1)...(19): siRNA sense strand
ucaaggaggugguugcuaa

SEQ ID NO: 661401 - RNA, 19 nt, Homo sapiens
  misc_RNA (1)...(19): siRNA sense strand
ggaagcagccuccaaagaa

SEQ ID NO: 661402 - RNA, 19 nt, Homo sapiens
  misc_RNA (1)...(19): siRNA sense strand
gaacaucacuugcauuacg

SEQ ID NO: 661403 - RNA, 19 nt, Homo sapiens
  misc_RNA (1)...(19): siRNA sense strand
uuaaagagcuccaucacuu

SEQ ID NO: 661404 - RNA, 19 nt, Homo sapiens
  misc_RNA (1)...(19): siRNA sense strand
caaagaaaccaucaagaaa

SEQ ID NO: 661405 - RNA, 19 nt, Homo sapiens
  misc_RNA (1)...(19): siRNA sense strand
guaaagaagcguaccauga

SEQ ID NO: 661406 - RNA, 19 nt, Homo sapiens
  misc_RNA (1)...(19): siRNA sense strand
ccaaagaaaccaucaagaa

SEQ ID NO: 661407 - RNA, 19 nt, Homo sapiens
  misc_RNA (1)...(19): siRNA sense strand
uaaagaagcguaccaugaa

SEQ ID NO: 661408 - RNA, 19 nt, Homo sapiens
  misc_RNA (1)...(19): siRNA sense strand
ggaaacaccaguagcuuug

SEQ ID NO: 661409 - RNA, 19 nt, Homo sapiens
  misc_RNA (1)...(19): siRNA sense strand
ugucccaacuccuugauua

SEQ ID NO: 661410 - RNA, 19 nt, Homo sapiens
  misc_RNA (1)...(19): siRNA sense strand
cuuagacuguuuccacuua

SEQ ID NO: 661411 - RNA, 19 nt, Homo sapiens
  misc_RNA (1)...(19): siRNA sense strand
caccugaucgcaacaaaua

SEQ ID NO: 661412 - RNA, 19 nt, Homo sapiens
  misc_RNA (1)...(19): siRNA sense strand
cggaacaucacuugcauua

SEQ ID NO: 661413 - RNA, 19 nt, Homo sapiens
  misc_RNA (1)...(19): siRNA sense strand
caguggaggucgauucuga

SEQ ID NO: 661414 - RNA, 19 nt, Homo sapiens
  misc_RNA (1)...(19): siRNA sense strand
ccaacuccuugauuaaaga

SEQ ID NO: 661415 - RNA, 19 nt, Homo sapiens
  misc_RNA (1)...(19): siRNA sense strand
acaaauagucggaacauca

SEQ ID NO: 661416 - RNA, 19 nt, Homo sapiens
  misc_RNA (1)...(19): siRNA sense strand
gcugaccaguugcguguga

SEQ ID NO: 661417 - RNA, 19 nt, Homo sapiens
  misc_RNA (1)...(19): siRNA sense strand
gcuacucccugccuugugu

SEQ ID NO: 661418 - RNA, 19 nt, Homo sapiens
  misc_RNA (1)...(19): siRNA sense strand
uagacuguuuccacuuaua

SEQ ID NO: 661419 - RNA, 19 nt, Homo sapiens
  misc_RNA (1)...(19): siRNA sense strand
gggaagcagccuccaaaga

SEQ ID NO: 661420 - RNA, 19 nt, Homo sapiens
  misc_RNA (1)...(19): siRNA sense strand
ugacaaggaaacaccagua

SEQ ID NO: 661421 - RNA, 19 nt, Homo sapiens
  misc_RNA (1)...(19): siRNA sense strand
ucaaugaucggcaguuugu

SEQ ID NO: 661422 - RNA, 19 nt, Homo sapiens
  misc_RNA (1)...(19): siRNA sense strand
ccacuuauacugugugaca

SEQ ID NO: 661423 - RNA, 19 nt, Homo sapiens
  misc_RNA (1)...(19): siRNA sense strand
gggaaggagcugaggaaug

SEQ ID NO: 661424 - RNA, 19 nt, Homo sapiens
  misc_RNA (1)...(19): siRNA sense strand
cuccaucacuucaggauuc

SEQ ID NO: 661425 - RNA, 19 nt, Homo sapiens
  misc_RNA (1)...(19): siRNA sense strand
guucacgacccucaacuug

SEQ ID NO: 661426 - RNA, 19 nt, Homo sapiens
  misc_RNA (1)...(19): siRNA sense strand
caacaaauagucggaacau

SEQ ID NO: 661427 - RNA, 19 nt, Homo sapiens
  misc_RNA (1)...(19): siRNA sense strand
caacucccgccacgugauu

SEQ ID NO: 661428 - RNA, 19 nt, Homo sapiens
  misc_RNA (1)...(19): siRNA sense strand
gugauuugcuuagacuguu

SEQ ID NO: 661429 - RNA, 19 nt, Homo sapiens
  misc_RNA (1)...(19): siRNA sense strand
ugauuugcuuagacuguuu

SEQ ID NO: 661430 - RNA, 19 nt, Homo sapiens
  misc_RNA (1)...(19): siRNA sense strand
aaagaagcguaccaugaag

SEQ ID NO: 661431 - RNA, 19 nt, Homo sapiens
  misc_RNA (1)...(19): siRNA sense strand
gguuccggcugaccaguug

SEQ ID NO: 661432 - RNA, 19 nt, Homo sapiens
  misc_RNA (1)...(19): siRNA sense strand
acucaaugaucggcaguuu

SEQ ID NO: 661433 - RNA, 19 nt, Homo sapiens
  misc_RNA (1)...(19): siRNA sense strand
uaaagagcuccaucacuuc

SEQ ID NO: 661434 - RNA, 19 nt, Homo sapiens
  misc_RNA (1)...(19): siRNA sense strand
gagcacaccccaccucuga

SEQ ID NO: 661435 - RNA, 19 nt, Homo sapiens
  misc_RNA (1)...(19): siRNA sense strand
ccacgugauuugcuuagac

SEQ ID NO: 661436 - RNA, 19 nt, Homo sapiens
  misc_RNA (1)...(19): siRNA sense strand
caaggaaacaccaguagcu

SEQ ID NO: 661437 - RNA, 19 nt, Homo sapiens
  misc_RNA (1)...(19): siRNA sense strand
gcaccugaucgcaacaaau

SEQ ID NO: 661438 - RNA, 19 nt, Homo sapiens
  misc_RNA (1)...(19): siRNA sense strand
gcaacaaauagucggaaca

SEQ ID NO: 661439 - RNA, 19 nt, Homo sapiens
  misc_RNA (1)...(19): siRNA sense strand
gacaaggaaacaccaguag

SEQ ID NO: 661440 - RNA, 19 nt, Homo sapiens
  misc_RNA (1)...(19): siRNA sense strand
aaagagcuccaucacuuca

SEQ ID NO: 661441 - RNA, 19 nt, Homo sapiens
  misc_RNA (1)...(19): siRNA sense strand
gugacaagacucaaugauc

SEQ ID NO: 661442 - RNA, 19 nt, Homo sapiens
  misc_RNA (1)...(19): siRNA sense strand
aaacaccaguagcuuugca

SEQ ID NO: 661443 - RNA, 19 nt, Homo sapiens
  misc_RNA (1)...(19): siRNA sense strand
caacuacucaggccuacag

SEQ ID NO: 661444 - RNA, 19 nt, Homo sapiens
  misc_RNA (1)...(19): siRNA sense strand
gaccaguugcgugugauuu

SEQ ID NO: 661445 - RNA, 19 nt, Homo sapiens
  misc_RNA (1)...(19): siRNA sense strand
aggaaacaccaguagcuuu

SEQ ID NO: 661446 - RNA, 19 nt, Homo sapiens
  misc_RNA (1)...(19): siRNA sense strand
caacuccagccaugguuuc

SEQ ID NO: 661447 - RNA, 19 nt, Homo sapiens
  misc_RNA (1)...(19): siRNA sense strand
gcuguggguuugccuucug

SEQ ID NO: 661448 - RNA, 19 nt, Homo sapiens
  misc_RNA (1)...(19): siRNA sense strand
cccaacuccuugauuaaag

SEQ ID NO: 661449 - RNA, 19 nt, Homo sapiens
  misc_RNA (1)...(19): siRNA sense strand
cagggaaggagcugaggaa

SEQ ID NO: 661450 - RNA, 19 nt, Homo sapiens
  misc_RNA (1)...(19): siRNA sense strand
gaagccucaggaacaacua

SEQ ID NO: 661451 - RNA, 19 nt, Homo sapiens
  misc_RNA (1)...(19): siRNA sense strand
uuagacuguuuccacuuau

SEQ ID NO: 661452 - RNA, 19 nt, Homo sapiens
  misc_RNA (1)...(19): siRNA sense strand
caaccgguaccagcaguau

SEQ ID NO: 661453 - RNA, 19 nt, Homo sapiens
  misc_RNA (1)...(19): siRNA sense strand
caaauagucggaacaucac

SEQ ID NO: 661454 - RNA, 19 nt, Homo sapiens
  misc_RNA (1)...(19): siRNA sense strand
uuugaagccucaggaacaa

SEQ ID NO: 661455 - RNA, 19 nt, Homo sapiens
  misc_RNA (1)...(19): siRNA sense strand
gucccaacuccuugauuaa

SEQ ID NO: 661456 - RNA, 19 nt, Homo sapiens
  misc_RNA (1)...(19): siRNA sense strand
cuuauacugugugacaaga

SEQ ID NO: 661457 - RNA, 19 nt, Homo sapiens
  misc_RNA (1)...(19): siRNA sense strand
ggaaggagcugaggaauga

SEQ ID NO: 661458 - RNA, 19 nt, Homo sapiens
  misc_RNA (1)...(19): siRNA sense strand
gaagcagccuccaaagaaa

SEQ ID NO: 661459 - RNA, 19 nt, Homo sapiens
  misc_RNA (1)...(19): siRNA sense strand
ucaaggaggugguugcuaa

SEQ ID NO: 661460 - RNA, 19 nt, Homo sapiens
  misc_RNA (1)...(19): siRNA sense strand
ggaagcagccuccaaagaa

SEQ ID NO: 661461 - RNA, 19 nt, Homo sapiens
  misc_RNA (1)...(19): siRNA sense strand
gaacaucacuugcauuacg

SEQ ID NO: 661462 - RNA, 19 nt, Homo sapiens
  misc_RNA (1)...(19): siRNA sense strand
uuaaagagcuccaucacuu

SEQ ID NO: 661463 - RNA, 19 nt, Homo sapiens
  misc_RNA (1)...(19): siRNA sense strand
caaagaaaccaucaagaaa

SEQ ID NO: 661464 - RNA, 19 nt, Homo sapiens
  misc_RNA (1)...(19): siRNA sense strand
guaaagaagcguaccauga

SEQ ID NO: 661465 - RNA, 19 nt, Homo sapiens
  misc_RNA (1)...(19): siRNA sense strand
ccaaagaaaccaucaagaa

SEQ ID NO: 661466 - RNA, 19 nt, Homo sapiens
  misc_RNA (1)...(19): siRNA sense strand
uaaagaagcguaccaugaa

SEQ ID NO: 661467 - RNA, 19 nt, Homo sapiens
  misc_RNA (1)...(19): siRNA sense strand
ggaaacaccaguagcuuug

SEQ ID NO: 661468 - RNA, 19 nt, Homo sapiens
  misc_RNA (1)...(19): siRNA sense strand
ugucccaacuccuugauua

SEQ ID NO: 661469 - RNA, 19 nt, Homo sapiens
  misc_RNA (1)...(19): siRNA sense strand
cuuagacuguuuccacuua

SEQ ID NO: 661470 - RNA, 19 nt, Homo sapiens
  misc_RNA (1)...(19): siRNA sense strand
caccugaucgcaacaaaua

SEQ ID NO: 661471 - RNA, 19 nt, Homo sapiens
  misc_RNA (1)...(19): siRNA sense strand
cggaacaucacuugcauua

SEQ ID NO: 661472 - RNA, 19 nt, Homo sapiens
  misc_RNA (1)...(19): siRNA sense strand
caguggaggucgauucuga

SEQ ID NO: 661473 - RNA, 19 nt, Homo sapiens
  misc_RNA (1)...(19): siRNA sense strand
ccaacuccuugauuaaaga

SEQ ID NO: 661474 - RNA, 19 nt, Homo sapiens
  misc_RNA (1)...(19): siRNA sense strand
acaaauagucggaacauca

SEQ ID NO: 661475 - RNA, 19 nt, Homo sapiens
  misc_RNA (1)...(19): siRNA sense strand
gcugaccaguugcguguga

SEQ ID NO: 661476 - RNA, 19 nt, Homo sapiens
  misc_RNA (1)...(19): siRNA sense strand
gcuacucccugccuugugu

SEQ ID NO: 661477 - RNA, 19 nt, Homo sapiens
  misc_RNA (1)...(19): siRNA sense strand
uagacuguuuccacuuaua

SEQ ID NO: 661478 - RNA, 19 nt, Homo sapiens
  misc_RNA (1)...(19): siRNA sense strand
gggaagcagccuccaaaga

SEQ ID NO: 661479 - RNA, 19 nt, Homo sapiens
  misc_RNA (1)...(19): siRNA sense strand
ugacaaggaaacaccagua

SEQ ID NO: 661480 - RNA, 19 nt, Homo sapiens
  misc_RNA (1)...(19): siRNA sense strand
ucaaugaucggcaguuugu

SEQ ID NO: 661481 - RNA, 19 nt, Homo sapiens
  misc_RNA (1)...(19): siRNA sense strand
ccacuuauacugugugaca

SEQ ID NO: 661482 - RNA, 19 nt, Homo sapiens
  misc_RNA (1)...(19): siRNA sense strand
gggaaggagcugaggaaug

SEQ ID NO: 661483 - RNA, 19 nt, Homo sapiens
  misc_RNA (1)...(19): siRNA sense strand
cuccaucacuucaggauuc

SEQ ID NO: 661484 - RNA, 19 nt, Homo sapiens
  misc_RNA (1)...(19): siRNA sense strand
guucacgacccucaacuug

SEQ ID NO: 661485 - RNA, 19 nt, Homo sapiens
  misc_RNA (1)...(19): siRNA sense strand
caacaaauagucggaacau

SEQ ID NO: 661486 - RNA, 19 nt, Homo sapiens
  misc_RNA (1)...(19): siRNA sense strand
caacucccgccacgugauu

SEQ ID NO: 661487 - RNA, 19 nt, Homo sapiens
  misc_RNA (1)...(19): siRNA sense strand
gugauuugcuuagacuguu

SEQ ID NO: 661488 - RNA, 19 nt, Homo sapiens
  misc_RNA (1)...(19): siRNA sense strand
ugauuugcuuagacuguuu

SEQ ID NO: 661489 - RNA, 19 nt, Homo sapiens
  misc_RNA (1)...(19): siRNA sense strand
aaagaagcguaccaugaag

SEQ ID NO: 661490 - RNA, 19 nt, Homo sapiens
  misc_RNA (1)...(19): siRNA sense strand
gguuccggcugaccaguug

SEQ ID NO: 661491 - RNA, 19 nt, Homo sapiens
  misc_RNA (1)...(19): siRNA sense strand
acucaaugaucggcaguuu

SEQ ID NO: 661492 - RNA, 19 nt, Homo sapiens
  misc_RNA (1)...(19): siRNA sense strand
uaaagagcuccaucacuuc

SEQ ID NO: 661493 - RNA, 19 nt, Homo sapiens
  misc_RNA (1)...(19): siRNA sense strand
gagcacaccccaccucuga

SEQ ID NO: 661494 - RNA, 19 nt, Homo sapiens
  misc_RNA (1)...(19): siRNA sense strand
ccacgugauuugcuuagac

SEQ ID NO: 661495 - RNA, 19 nt, Homo sapiens
  misc_RNA (1)...(19): siRNA sense strand
caaggaaacaccaguagcu

SEQ ID NO: 661496 - RNA, 19 nt, Homo sapiens
  misc_RNA (1)...(19): siRNA sense strand
gcaccugaucgcaacaaau

SEQ ID NO: 661497 - RNA, 19 nt, Homo sapiens
  misc_RNA (1)...(19): siRNA sense strand
gcaacaaauagucggaaca

SEQ ID NO: 661498 - RNA, 19 nt, Homo sapiens
  misc_RNA (1)...(19): siRNA sense strand
gacaaggaaacaccaguag

SEQ ID NO: 661499 - RNA, 19 nt, Homo sapiens
  misc_RNA (1)...(19): siRNA sense strand
aaagagcuccaucacuuca

SEQ ID NO: 661500 - RNA, 19 nt, Homo sapiens
  misc_RNA (1)...(19): siRNA sense strand
gugacaagacucaaugauc

SEQ ID NO: 661501 - RNA, 19 nt, Homo sapiens
  misc_RNA (1)...(19): siRNA sense strand
aaacaccaguagcuuugca

SEQ ID NO: 661502 - RNA, 19 nt, Homo sapiens
  misc_RNA (1)...(19): siRNA sense strand
caacuacucaggccuacag

SEQ ID NO: 661503 - RNA, 19 nt, Homo sapiens
  misc_RNA (1)...(19): siRNA sense strand
gaccaguugcgugugauuu

SEQ ID NO: 661504 - RNA, 19 nt, Homo sapiens
  misc_RNA (1)...(19): siRNA sense strand
aggaaacaccaguagcuuu

SEQ ID NO: 661505 - RNA, 19 nt, Homo sapiens
  misc_RNA (1)...(19): siRNA sense strand
caacuccagccaugguuuc

SEQ ID NO: 661506 - RNA, 19 nt, Homo sapiens
  misc_RNA (1)...(19): siRNA sense strand
gcuguggguuugccuucug

SEQ ID NO: 661507 - RNA, 19 nt, Homo sapiens
  misc_RNA (1)...(19): siRNA sense strand
cccaacuccuugauuaaag

SEQ ID NO: 661508 - RNA, 19 nt, Homo sapiens
  misc_RNA (1)...(19): siRNA sense strand
cagggaaggagcugaggaa

SEQ ID NO: 661509 - RNA, 19 nt, Homo sapiens
  misc_RNA (1)...(19): siRNA sense strand
gaagccucaggaacaacua

SEQ ID NO: 661510 - RNA, 19 nt, Homo sapiens
  misc_RNA (1)...(19): siRNA sense strand
uuagacuguuuccacuuau

SEQ ID NO: 661511 - RNA, 19 nt, Homo sapiens
  misc_RNA (1)...(19): siRNA sense strand
caaccgguaccagcaguau

SEQ ID NO: 661512 - RNA, 19 nt, Homo sapiens
  misc_RNA (1)...(19): siRNA sense strand
caaauagucggaacaucac

SEQ ID NO: 661513 - RNA, 19 nt, Homo sapiens
  misc_RNA (1)...(19): siRNA sense strand
uuugaagccucaggaacaa

SEQ ID NO: 661514 - RNA, 19 nt, Homo sapiens
  misc_RNA (1)...(19): siRNA sense strand
gucccaacuccuugauuaa

SEQ ID NO: 661515 - RNA, 19 nt, Homo sapiens
  misc_RNA (1)...(19): siRNA sense strand
cuuauacugugugacaaga

SEQ ID NO: 661516 - RNA, 19 nt, Homo sapiens
  misc_RNA (1)...(19): siRNA sense strand
ggaaggagcugaggaauga

SEQ ID NO: 661517 - RNA, 19 nt, Homo sapiens
  misc_RNA (1)...(19): siRNA sense strand
gaagcagccuccaaagaaa

SEQ ID NO: 661518 - RNA, 19 nt, Homo sapiens
  misc_RNA (1)...(19): siRNA sense strand
ucaaggaggugguugcuaa

SEQ ID NO: 661519 - RNA, 19 nt, Homo sapiens
  misc_RNA (1)...(19): siRNA sense strand
ggaagcagccuccaaagaa

SEQ ID NO: 661520 - RNA, 19 nt, Homo sapiens
  misc_RNA (1)...(19): siRNA sense strand
gaacaucacuugcauuacg

SEQ ID NO: 661521 - RNA, 19 nt, Homo sapiens
  misc_RNA (1)...(19): siRNA sense strand
uuaaagagcuccaucacuu

SEQ ID NO: 661522 - RNA, 19 nt, Homo sapiens
  misc_RNA (1)...(19): siRNA sense strand
caaagaaaccaucaagaaa

SEQ ID NO: 661523 - RNA, 19 nt, Homo sapiens
  misc_RNA (1)...(19): siRNA sense strand
guaaagaagcguaccauga

SEQ ID NO: 661524 - RNA, 19 nt, Homo sapiens
  misc_RNA (1)...(19): siRNA sense strand
ccaaagaaaccaucaagaa

SEQ ID NO: 661525 - RNA, 19 nt, Homo sapiens
  misc_RNA (1)...(19): siRNA sense strand
uaaagaagcguaccaugaa

SEQ ID NO: 661526 - RNA, 19 nt, Homo sapiens
  misc_RNA (1)...(19): siRNA sense strand
ggaaacaccaguagcuuug

SEQ ID NO: 661527 - RNA, 19 nt, Homo sapiens
  misc_RNA (1)...(19): siRNA sense strand
ugucccaacuccuugauua

SEQ ID NO: 661528 - RNA, 19 nt, Homo sapiens
  misc_RNA (1)...(19): siRNA sense strand
cuuagacuguuuccacuua

SEQ ID NO: 661529 - RNA, 19 nt, Homo sapiens
  misc_RNA (1)...(19): siRNA sense strand
caccugaucgcaacaaaua

SEQ ID NO: 661530 - RNA, 19 nt, Homo sapiens
  misc_RNA (1)...(19): siRNA sense strand
cggaacaucacuugcauua

SEQ ID NO: 661531 - RNA, 19 nt, Homo sapiens
  misc_RNA (1)...(19): siRNA sense strand
caguggaggucgauucuga

SEQ ID NO: 661532 - RNA, 19 nt, Homo sapiens
  misc_RNA (1)...(19): siRNA sense strand
ccaacuccuugauuaaaga

SEQ ID NO: 661533 - RNA, 19 nt, Homo sapiens
  misc_RNA (1)...(19): siRNA sense strand
acaaauagucggaacauca

SEQ ID NO: 661534 - RNA, 19 nt, Homo sapiens
  misc_RNA (1)...(19): siRNA sense strand
gcugaccaguugcguguga

SEQ ID NO: 661535 - RNA, 19 nt, Homo sapiens
  misc_RNA (1)...(19): siRNA sense strand
gcuacucccugccuugugu

SEQ ID NO: 661536 - RNA, 19 nt, Homo sapiens
  misc_RNA (1)...(19): siRNA sense strand
uagacuguuuccacuuaua

SEQ ID NO: 661537 - RNA, 19 nt, Homo sapiens
  misc_RNA (1)...(19): siRNA sense strand
gggaagcagccuccaaaga

SEQ ID NO: 661538 - RNA, 19 nt, Homo sapiens
  misc_RNA (1)...(19): siRNA sense strand
ugacaaggaaacaccagua

SEQ ID NO: 661539 - RNA, 19 nt, Homo sapiens
  misc_RNA (1)...(19): siRNA sense strand
ucaaugaucggcaguuugu

SEQ ID NO: 661540 - RNA, 19 nt, Homo sapiens
  misc_RNA (1)...(19): siRNA sense strand
ccacuuauacugugugaca

SEQ ID NO: 661541 - RNA, 19 nt, Homo sapiens
  misc_RNA (1)...(19): siRNA sense strand
gggaaggagcugaggaaug

SEQ ID NO: 661542 - RNA, 19 nt, Homo sapiens
  misc_RNA (1)...(19): siRNA sense strand
cuccaucacuucaggauuc

SEQ ID NO: 661543 - RNA, 19 nt, Homo sapiens
  misc_RNA (1)...(19): siRNA sense strand
guucacgacccucaacuug

SEQ ID NO: 661544 - RNA, 19 nt, Homo sapiens
  misc_RNA (1)...(19): siRNA sense strand
caacaaauagucggaacau

SEQ ID NO: 661545 - RNA, 19 nt, Homo sapiens
  misc_RNA (1)...(19): siRNA sense strand
caacucccgccacgugauu

SEQ ID NO: 661546 - RNA, 19 nt, Homo sapiens
  misc_RNA (1)...(19): siRNA sense strand
gugauuugcuuagacuguu

SEQ ID NO: 661547 - RNA, 19 nt, Homo sapiens
  misc_RNA (1)...(19): siRNA sense strand
ugauuugcuuagacuguuu

SEQ ID NO: 661548 - RNA, 19 nt, Homo sapiens
  misc_RNA (1)...(19): siRNA sense strand
aaagaagcguaccaugaag

SEQ ID NO: 661549 - RNA, 19 nt, Homo sapiens
  misc_RNA (1)...(19): siRNA sense strand
gguuccggcugaccaguug

SEQ ID NO: 661550 - RNA, 19 nt, Homo sapiens
  misc_RNA (1)...(19): siRNA sense strand
acucaaugaucggcaguuu

SEQ ID NO: 661551 - RNA, 19 nt, Homo sapiens
  misc_RNA (1)...(19): siRNA sense strand
uaaagagcuccaucacuuc

SEQ ID NO: 661552 - RNA, 19 nt, Homo sapiens
  misc_RNA (1)...(19): siRNA sense strand
gagcacaccccaccucuga

SEQ ID NO: 661553 - RNA, 19 nt, Homo sapiens
  misc_RNA (1)...(19): siRNA sense strand
ccacgugauuugcuuagac

SEQ ID NO: 661554 - RNA, 19 nt, Homo sapiens
  misc_RNA (1)...(19): siRNA sense strand
caaggaaacaccaguagcu

SEQ ID NO: 661555 - RNA, 19 nt, Homo sapiens
  misc_RNA (1)...(19): siRNA sense strand
gcaccugaucgcaacaaau

SEQ ID NO: 661556 - RNA, 19 nt, Homo sapiens
  misc_RNA (1)...(19): siRNA sense strand
gcaacaaauagucggaaca

SEQ ID NO: 661557 - RNA, 19 nt, Homo sapiens
  misc_RNA (1)...(19): siRNA sense strand
gacaaggaaacaccaguag

SEQ ID NO: 661558 - RNA, 19 nt, Homo sapiens
  misc_RNA (1)...(19): siRNA sense strand
aaagagcuccaucacuuca

SEQ ID NO: 661559 - RNA, 19 nt, Homo sapiens
  misc_RNA (1)...(19): siRNA sense strand
gugacaagacucaaugauc

SEQ ID NO: 661560 - RNA, 19 nt, Homo sapiens
  misc_RNA (1)...(19): siRNA sense strand
aaacaccaguagcuuugca

SEQ ID NO: 661561 - RNA, 19 nt, Homo sapiens
  misc_RNA (1)...(19): siRNA sense strand
caacuacucaggccuacag

SEQ ID NO: 661562 - RNA, 19 nt, Homo sapiens
  misc_RNA (1)...(19): siRNA sense strand
gaccaguugcgugugauuu

SEQ ID NO: 661563 - RNA, 19 nt, Homo sapiens
  misc_RNA (1)...(19): siRNA sense strand
aggaaacaccaguagcuuu

SEQ ID NO: 661564 - RNA, 19 nt, Homo sapiens
  misc_RNA (1)...(19): siRNA sense strand
caacuccagccaugguuuc

SEQ ID NO: 661565 - RNA, 19 nt, Homo sapiens
  misc_RNA (1)...(19): siRNA sense strand
gcuguggguuugccuucug

SEQ ID NO: 661566 - RNA, 19 nt, Homo sapiens
  misc_RNA (1)...(19): siRNA sense strand
cccaacuccuugauuaaag

SEQ ID NO: 661567 - RNA, 19 nt, Homo sapiens
  misc_RNA (1)...(19): siRNA sense strand
cagggaaggagcugaggaa

SEQ ID NO: 661568 - RNA, 19 nt, Homo sapiens
  misc_RNA (1)...(19): siRNA sense strand
gaagccucaggaacaacua

SEQ ID NO: 661569 - RNA, 19 nt, Homo sapiens
  misc_RNA (1)...(19): siRNA sense strand
uuagacuguuuccacuuau

SEQ ID NO: 661570 - RNA, 19 nt, Homo sapiens
  misc_RNA (1)...(19): siRNA sense strand
caaccgguaccagcaguau

SEQ ID NO: 661571 - RNA, 19 nt, Homo sapiens
  misc_RNA (1)...(19): siRNA sense strand
caaauagucggaacaucac

SEQ ID NO: 661572 - RNA, 19 nt, Homo sapiens
  misc_RNA (1)...(19): siRNA sense strand
uuugaagccucaggaacaa

SEQ ID NO: 661573 - RNA, 19 nt, Homo sapiens
  misc_RNA (1)...(19): siRNA sense strand
gucccaacuccuugauuaa

SEQ ID NO: 661574 - RNA, 19 nt, Homo sapiens
  misc_RNA (1)...(19): siRNA sense strand
cuuauacugugugacaaga

SEQ ID NO: 661575 - RNA, 19 nt, Homo sapiens
  misc_RNA (1)...(19): siRNA sense strand
caacgggacuauuaugaua

SEQ ID NO: 661576 - RNA, 19 nt, Homo sapiens
  misc_RNA (1)...(19): siRNA sense strand
gaagaaagaugagacuaau

SEQ ID NO: 661577 - RNA, 19 nt, Homo sapiens
  misc_RNA (1)...(19): siRNA sense strand
gaacucccguguauucauu

SEQ ID NO: 661578 - RNA, 19 nt, Homo sapiens
  misc_RNA (1)...(19): siRNA sense strand
caguagagaugaagaauga

SEQ ID NO: 661579 - RNA, 19 nt, Homo sapiens
  misc_RNA (1)...(19): siRNA sense strand
gaugaagaaugauaaguca

SEQ ID NO: 661580 - RNA, 19 nt, Homo sapiens
  misc_RNA (1)...(19): siRNA sense strand
gaagaaugauaagucagaa

SEQ ID NO: 661581 - RNA, 19 nt, Homo sapiens
  misc_RNA (1)...(19): siRNA sense strand
ggaaggagaggaugacaga

SEQ ID NO: 661582 - RNA, 19 nt, Homo sapiens
  misc_RNA (1)...(19): siRNA sense strand
gaggauggcagaaugauug

SEQ ID NO: 661583 - RNA, 19 nt, Homo sapiens
  misc_RNA (1)...(19): siRNA sense strand
agaaggagcugacccagau

SEQ ID NO: 661584 - RNA, 19 nt, Homo sapiens
  misc_RNA (1)...(19): siRNA sense strand
caaacaagcaguagagaug

SEQ ID NO: 661585 - RNA, 19 nt, Homo sapiens
  misc_RNA (1)...(19): siRNA sense strand
ggaugaugaugauaaugaa

SEQ ID NO: 661586 - RNA, 19 nt, Homo sapiens
  misc_RNA (1)...(19): siRNA sense strand
ugacuuggacuaugacuuu

SEQ ID NO: 661587 - RNA, 19 nt, Homo sapiens
  misc_RNA (1)...(19): siRNA sense strand
guagagaugaagaaugaua

SEQ ID NO: 661588 - RNA, 19 nt, Homo sapiens
  misc_RNA (1)...(19): siRNA sense strand
aaaguggcuucaauucuaa

SEQ ID NO: 661589 - RNA, 19 nt, Homo sapiens
  misc_RNA (1)...(19): siRNA sense strand
gcagcuccgugaagaaaga

SEQ ID NO: 661590 - RNA, 19 nt, Homo sapiens
  misc_RNA (1)...(19): siRNA sense strand
augauaggauguacaguua

SEQ ID NO: 661591 - RNA, 19 nt, Homo sapiens
  misc_RNA (1)...(19): siRNA sense strand
ugaagaaagaugagacuaa

SEQ ID NO: 661592 - RNA, 19 nt, Homo sapiens
  misc_RNA (1)...(19): siRNA sense strand
aaaaguggcuucaauucua

SEQ ID NO: 661593 - RNA, 19 nt, Homo sapiens
  misc_RNA (1)...(19): siRNA sense strand
agacuaaugugaagaugga

SEQ ID NO: 661594 - RNA, 19 nt, Homo sapiens
  misc_RNA (1)...(19): siRNA sense strand
gggcugcucuguucauaag

SEQ ID NO: 661595 - RNA, 19 nt, Homo sapiens
  misc_RNA (1)...(19): siRNA sense strand
gauccucgcuccaugaacu

SEQ ID NO: 661596 - RNA, 19 nt, Homo sapiens
  misc_RNA (1)...(19): siRNA sense strand
ccagcaacguuaccaacaa

SEQ ID NO: 661597 - RNA, 19 nt, Homo sapiens
  misc_RNA (1)...(19): siRNA sense strand
ggagaggauggcagaauga

SEQ ID NO: 661598 - RNA, 19 nt, Homo sapiens
  misc_RNA (1)...(19): siRNA sense strand
agaaagaugagacuaaugu

SEQ ID NO: 661599 - RNA, 19 nt, Homo sapiens
  misc_RNA (1)...(19): siRNA sense strand
uccaugaacucccguguau

SEQ ID NO: 661600 - RNA, 19 nt, Homo sapiens
  misc_RNA (1)...(19): siRNA sense strand
caugaacucccguguauuc

SEQ ID NO: 661601 - RNA, 19 nt, Homo sapiens
  misc_RNA (1)...(19): siRNA sense strand
gcaaacaagcaguagagau

SEQ ID NO: 661602 - RNA, 19 nt, Homo sapiens
  misc_RNA (1)...(19): siRNA sense strand
aaugauugcuggccagguu

SEQ ID NO: 661603 - RNA, 19 nt, Homo sapiens
  misc_RNA (1)...(19): siRNA sense strand
ugaagaaugauaagucaga

SEQ ID NO: 661604 - RNA, 19 nt, Homo sapiens
  misc_RNA (1)...(19): siRNA sense strand
gagcaaacaagcaguagag

SEQ ID NO: 661605 - RNA, 19 nt, Homo sapiens
  misc_RNA (1)...(19): siRNA sense strand
gggaaucucaacacucuug

SEQ ID NO: 661606 - RNA, 19 nt, Homo sapiens
  misc_RNA (1)...(19): siRNA sense strand
aaagaugagacuaauguga

SEQ ID NO: 661607 - RNA, 19 nt, Homo sapiens
  misc_RNA (1)...(19): siRNA sense strand
gggaugaccagcuggaguu

SEQ ID NO: 661608 - RNA, 19 nt, Homo sapiens
  misc_RNA (1)...(19): siRNA sense strand
ucaacacucuuguggucaa

SEQ ID NO: 661609 - RNA, 19 nt, Homo sapiens
  misc_RNA (1)...(19): siRNA sense strand
uaugauaggauguacaguu

SEQ ID NO: 661610 - RNA, 19 nt, Homo sapiens
  misc_RNA (1)...(19): siRNA sense strand
uggaguugaucaaggauga

SEQ ID NO: 661611 - RNA, 19 nt, Homo sapiens
  misc_RNA (1)...(19): siRNA sense strand
gaaggagcugacccagaua

SEQ ID NO: 661612 - RNA, 19 nt, Homo sapiens
  misc_RNA (1)...(19): siRNA sense strand
ucaggaaacacuucacgaa

SEQ ID NO: 661613 - RNA, 19 nt, Homo sapiens
  misc_RNA (1)...(19): siRNA sense strand
cagcgccaauggaggauga

SEQ ID NO: 661614 - RNA, 19 nt, Homo sapiens
  misc_RNA (1)...(19): siRNA sense strand
gaaagaugagacuaaugug

SEQ ID NO: 661615 - RNA, 19 nt, Homo sapiens
  misc_RNA (1)...(19): siRNA sense strand
gcaguagagaugaagaaug

SEQ ID NO: 661616 - RNA, 19 nt, Homo sapiens
  misc_RNA (1)...(19): siRNA sense strand
gaaaguugaaaggagauga

SEQ ID NO: 661617 - RNA, 19 nt, Homo sapiens
  misc_RNA (1)...(19): siRNA sense strand
gggcaaaaguggcuucaau

SEQ ID NO: 661618 - RNA, 19 nt, Homo sapiens
  misc_RNA (1)...(19): siRNA sense strand
gggaccuacuggaugauga

SEQ ID NO: 661619 - RNA, 19 nt, Homo sapiens
  misc_RNA (1)...(19): siRNA sense strand
cagcagcuccgugaagaaa

SEQ ID NO: 661620 - RNA, 19 nt, Homo sapiens
  misc_RNA (1)...(19): siRNA sense strand
aaucugauguggaggcaau

SEQ ID NO: 661621 - RNA, 19 nt, Homo sapiens
  misc_RNA (1)...(19): siRNA sense strand
uggaugaugaugauaauga

SEQ ID NO: 661622 - RNA, 19 nt, Homo sapiens
  misc_RNA (1)...(19): siRNA sense strand
aagaugagacuaaugugaa

SEQ ID NO: 661623 - RNA, 19 nt, Homo sapiens
  misc_RNA (1)...(19): siRNA sense strand
gaaacgucagcguguauca

SEQ ID NO: 661624 - RNA, 19 nt, Homo sapiens
  misc_RNA (1)...(19): siRNA sense strand
agaaugauaagucagaaga

SEQ ID NO: 661625 - RNA, 19 nt, Homo sapiens
  misc_RNA (1)...(19): siRNA sense strand
ggccagguuuuagauauua

SEQ ID NO: 661626 - RNA, 19 nt, Homo sapiens
  misc_RNA (1)...(19): siRNA sense strand
ugacagagacagcgccaau

SEQ ID NO: 661627 - RNA, 19 nt, Homo sapiens
  misc_RNA (1)...(19): siRNA sense strand
cagcaacguuaccaacaag

SEQ ID NO: 661628 - RNA, 19 nt, Homo sapiens
  misc_RNA (1)...(19): siRNA sense strand
gugggcugcucuguucaua

SEQ ID NO: 661629 - RNA, 19 nt, Homo sapiens
  misc_RNA (1)...(19): siRNA sense strand
aaacaagcaguagagauga

SEQ ID NO: 661630 - RNA, 19 nt, Homo sapiens
  misc_RNA (1)...(19): siRNA sense strand
aggagaggauggcagaaug

SEQ ID NO: 661631 - RNA, 19 nt, Homo sapiens
  misc_RNA (1)...(19): siRNA sense strand
gaccuucaggccauuaaga

SEQ ID NO: 661632 - RNA, 19 nt, Homo sapiens
  misc_RNA (1)...(19): siRNA sense strand
gcaaaaguggcuucaauuc

SEQ ID NO: 661633 - RNA, 19 nt, Homo sapiens
  misc_RNA (1)...(19): siRNA sense strand
gauaggauguacaguuacc

SEQ ID NO: 661634 - RNA, 19 nt, Homo sapiens
  misc_RNA (1)...(19): siRNA sense strand
cagcguguaucaggaaaca

SEQ ID NO: 661635 - RNA, 19 nt, Homo sapiens
  misc_RNA (1)...(19): siRNA sense strand
ucaguauguuaaugagaga

SEQ ID NO: 661636 - RNA, 19 nt, Homo sapiens
  misc_RNA (1)...(19): siRNA sense strand
ccuacuggaugaugaugau

SEQ ID NO: 661637 - RNA, 19 nt, Homo sapiens
  misc_RNA (1)...(19): siRNA sense strand
caacguuaccaacaagaca

SEQ ID NO: 661638 - RNA, 19 nt, Homo sapiens
  misc_RNA (1)...(19): siRNA sense strand
acagagcaaacaagcagua

SEQ ID NO: 661639 - RNA, 19 nt, Homo sapiens
  misc_RNA (1)...(19): siRNA sense strand
ugauguggaggcaaucuuu

SEQ ID NO: 661640 - RNA, 19 nt, Homo sapiens
  misc_RNA (1)...(19): siRNA sense strand
ggucaagaaaucugaugug

SEQ ID NO: 661641 - RNA, 19 nt, Homo sapiens
  misc_RNA (1)...(19): siRNA sense strand
aaaagaggcugaggaagga

SEQ ID NO: 661642 - RNA, 19 nt, Homo sapiens
  misc_RNA (1)...(19): siRNA sense strand
acuuucaacgggacuauua

SEQ ID NO: 661643 - RNA, 19 nt, Homo sapiens
  misc_RNA (1)...(19): siRNA sense strand
gaggcaaucuuuucgaagu

SEQ ID NO: 661644 - RNA, 19 nt, Homo sapiens
  misc_RNA (1)...(19): siRNA sense strand
aacaagcaguagagaugaa

SEQ ID NO: 661645 - RNA, 19 nt, Homo sapiens
  misc_RNA (1)...(19): siRNA sense strand
uggcuucaauucuaagagu

SEQ ID NO: 661646 - RNA, 19 nt, Homo sapiens
  misc_RNA (1)...(19): siRNA sense strand
gcagcagcuccgugaagaa

SEQ ID NO: 661647 - RNA, 19 nt, Homo sapiens
  misc_RNA (1)...(19): siRNA sense strand
augugaagauggagucuga

SEQ ID NO: 661648 - RNA, 19 nt, Homo sapiens
  misc_RNA (1)...(19): siRNA sense strand
aaggagaggaugacagaga

SEQ ID NO: 661649 - RNA, 19 nt, Homo sapiens
  misc_RNA (1)...(19): siRNA sense strand
ucaacgggacuauuaugau

SEQ ID NO: 661650 - RNA, 19 nt, Homo sapiens
  misc_RNA (1)...(19): siRNA sense strand
ggaccuacuggaugaugau

SEQ ID NO: 661651 - RNA, 19 nt, Homo sapiens
  misc_RNA (1)...(19): siRNA sense strand
gagaugaagaaugauaagu

SEQ ID NO: 661652 - RNA, 19 nt, Homo sapiens
  misc_RNA (1)...(19): siRNA sense strand
uugggaaucucaacacucu

SEQ ID NO: 661653 - RNA, 19 nt, Homo sapiens
  misc_RNA (1)...(19): siRNA sense strand
ggaacagagcaaacaagca

SEQ ID NO: 661654 - RNA, 19 nt, Homo sapiens
  misc_RNA (1)...(19): siRNA sense strand
ugacccagauaaaacaaaa

SEQ ID NO: 661655 - RNA, 19 nt, Homo sapiens
  misc_RNA (1)...(19): siRNA sense strand
gaugaccuucaggccauua

SEQ ID NO: 661656 - RNA, 19 nt, Homo sapiens
  misc_RNA (1)...(19): siRNA sense strand
auugugggcugcucuguuc

SEQ ID NO: 661657 - RNA, 19 nt, Homo sapiens
  misc_RNA (1)...(19): siRNA sense strand
ccaagucuggaaaguugaa

SEQ ID NO: 661658 - RNA, 19 nt, Homo sapiens
  misc_RNA (1)...(19): siRNA sense strand
agaugagacuaaugugaag

SEQ ID NO: 661659 - RNA, 19 nt, Homo sapiens
  misc_RNA (1)...(19): siRNA sense strand
aaaggaacagagcaaacaa

SEQ ID NO: 661660 - RNA, 19 nt, Homo sapiens
  misc_RNA (1)...(19): siRNA sense strand
uggauucucuccuggaaaa

SEQ ID NO: 661661 - RNA, 19 nt, Homo sapiens
  misc_RNA (1)...(19): siRNA sense strand
guaccuccuccuccuccua

SEQ ID NO: 661662 - RNA, 19 nt, Homo sapiens
  misc_RNA (1)...(19): siRNA sense strand
gcuccgugaagaaagauga

SEQ ID NO: 661663 - RNA, 19 nt, Homo sapiens
  misc_RNA (1)...(19): siRNA sense strand
acagauccucgcuccauga

SEQ ID NO: 661664 - RNA, 19 nt, Homo sapiens
  misc_RNA (1)...(19): siRNA sense strand
caacgggacuauuaugaua

SEQ ID NO: 661665 - RNA, 19 nt, Homo sapiens
  misc_RNA (1)...(19): siRNA sense strand
gaagaaagaugagacuaau

SEQ ID NO: 661666 - RNA, 19 nt, Homo sapiens
  misc_RNA (1)...(19): siRNA sense strand
gaacucccguguauucauu

SEQ ID NO: 661667 - RNA, 19 nt, Homo sapiens
  misc_RNA (1)...(19): siRNA sense strand
caguagagaugaagaauga

SEQ ID NO: 661668 - RNA, 19 nt, Homo sapiens
  misc_RNA (1)...(19): siRNA sense strand
gaugaagaaugauaaguca

SEQ ID NO: 661669 - RNA, 19 nt, Homo sapiens
  misc_RNA (1)...(19): siRNA sense strand
gaagaaugauaagucagaa

SEQ ID NO: 661670 - RNA, 19 nt, Homo sapiens
  misc_RNA (1)...(19): siRNA sense strand
ggaaggagaggaugacaga

SEQ ID NO: 661671 - RNA, 19 nt, Homo sapiens
  misc_RNA (1)...(19): siRNA sense strand
gaggauggcagaaugauug

SEQ ID NO: 661672 - RNA, 19 nt, Homo sapiens
  misc_RNA (1)...(19): siRNA sense strand
agaaggagcugacccagau

SEQ ID NO: 661673 - RNA, 19 nt, Homo sapiens
  misc_RNA (1)...(19): siRNA sense strand
caaacaagcaguagagaug

SEQ ID NO: 661674 - RNA, 19 nt, Homo sapiens
  misc_RNA (1)...(19): siRNA sense strand
ggaugaugaugauaaugaa

SEQ ID NO: 661675 - RNA, 19 nt, Homo sapiens
  misc_RNA (1)...(19): siRNA sense strand
ugacuuggacuaugacuuu

SEQ ID NO: 661676 - RNA, 19 nt, Homo sapiens
  misc_RNA (1)...(19): siRNA sense strand
guagagaugaagaaugaua

SEQ ID NO: 661677 - RNA, 19 nt, Homo sapiens
  misc_RNA (1)...(19): siRNA sense strand
aaaguggcuucaauucuaa

SEQ ID NO: 661678 - RNA, 19 nt, Homo sapiens
  misc_RNA (1)...(19): siRNA sense strand
gcagcuccgugaagaaaga

SEQ ID NO: 661679 - RNA, 19 nt, Homo sapiens
  misc_RNA (1)...(19): siRNA sense strand
augauaggauguacaguua

SEQ ID NO: 661680 - RNA, 19 nt, Homo sapiens
  misc_RNA (1)...(19): siRNA sense strand
ugaagaaagaugagacuaa

SEQ ID NO: 661681 - RNA, 19 nt, Homo sapiens
  misc_RNA (1)...(19): siRNA sense strand
aaaaguggcuucaauucua

SEQ ID NO: 661682 - RNA, 19 nt, Homo sapiens
  misc_RNA (1)...(19): siRNA sense strand
agacuaaugugaagaugga

SEQ ID NO: 661683 - RNA, 19 nt, Homo sapiens
  misc_RNA (1)...(19): siRNA sense strand
gggcugcucuguucauaag

SEQ ID NO: 661684 - RNA, 19 nt, Homo sapiens
  misc_RNA (1)...(19): siRNA sense strand
gauccucgcuccaugaacu

SEQ ID NO: 661685 - RNA, 19 nt, Homo sapiens
  misc_RNA (1)...(19): siRNA sense strand
ccagcaacguuaccaacaa

SEQ ID NO: 661686 - RNA, 19 nt, Homo sapiens
  misc_RNA (1)...(19): siRNA sense strand
ggagaggauggcagaauga

SEQ ID NO: 661687 - RNA, 19 nt, Homo sapiens
  misc_RNA (1)...(19): siRNA sense strand
agaaagaugagacuaaugu

SEQ ID NO: 661688 - RNA, 19 nt, Homo sapiens
  misc_RNA (1)...(19): siRNA sense strand
uccaugaacucccguguau

SEQ ID NO: 661689 - RNA, 19 nt, Homo sapiens
  misc_RNA (1)...(19): siRNA sense strand
caugaacucccguguauuc

SEQ ID NO: 661690 - RNA, 19 nt, Homo sapiens
  misc_RNA (1)...(19): siRNA sense strand
gcaaacaagcaguagagau

SEQ ID NO: 661691 - RNA, 19 nt, Homo sapiens
  misc_RNA (1)...(19): siRNA sense strand
aaugauugcuggccagguu

SEQ ID NO: 661692 - RNA, 19 nt, Homo sapiens
  misc_RNA (1)...(19): siRNA sense strand
ugaagaaugauaagucaga

SEQ ID NO: 661693 - RNA, 19 nt, Homo sapiens
  misc_RNA (1)...(19): siRNA sense strand
gagcaaacaagcaguagag

SEQ ID NO: 661694 - RNA, 19 nt, Homo sapiens
  misc_RNA (1)...(19): siRNA sense strand
gggaaucucaacacucuug

SEQ ID NO: 661695 - RNA, 19 nt, Homo sapiens
  misc_RNA (1)...(19): siRNA sense strand
aaagaugagacuaauguga

SEQ ID NO: 661696 - RNA, 19 nt, Homo sapiens
  misc_RNA (1)...(19): siRNA sense strand
gggaugaccagcuggaguu

SEQ ID NO: 661697 - RNA, 19 nt, Homo sapiens
  misc_RNA (1)...(19): siRNA sense strand
ucaacacucuuguggucaa

SEQ ID NO: 661698 - RNA, 19 nt, Homo sapiens
  misc_RNA (1)...(19): siRNA sense strand
uaugauaggauguacaguu

SEQ ID NO: 661699 - RNA, 19 nt, Homo sapiens
  misc_RNA (1)...(19): siRNA sense strand
uggaguugaucaaggauga

SEQ ID NO: 661700 - RNA, 19 nt, Homo sapiens
  misc_RNA (1)...(19): siRNA sense strand
gaaggagcugacccagaua

SEQ ID NO: 661701 - RNA, 19 nt, Homo sapiens
  misc_RNA (1)...(19): siRNA sense strand
ucaggaaacacuucacgaa

SEQ ID NO: 661702 - RNA, 19 nt, Homo sapiens
  misc_RNA (1)...(19): siRNA sense strand
cagcgccaauggaggauga

SEQ ID NO: 661703 - RNA, 19 nt, Homo sapiens
  misc_RNA (1)...(19): siRNA sense strand
gaaagaugagacuaaugug

SEQ ID NO: 661704 - RNA, 19 nt, Homo sapiens
  misc_RNA (1)...(19): siRNA sense strand
gcaguagagaugaagaaug

SEQ ID NO: 661705 - RNA, 19 nt, Homo sapiens
  misc_RNA (1)...(19): siRNA sense strand
gaaaguugaaaggagauga

SEQ ID NO: 661706 - RNA, 19 nt, Homo sapiens
  misc_RNA (1)...(19): siRNA sense strand
gggcaaaaguggcuucaau

SEQ ID NO: 661707 - RNA, 19 nt, Homo sapiens
  misc_RNA (1)...(19): siRNA sense strand
gggaccuacuggaugauga

SEQ ID NO: 661708 - RNA, 19 nt, Homo sapiens
  misc_RNA (1)...(19): siRNA sense strand
cagcagcuccgugaagaaa

SEQ ID NO: 661709 - RNA, 19 nt, Homo sapiens
  misc_RNA (1)...(19): siRNA sense strand
aaucugauguggaggcaau

SEQ ID NO: 661710 - RNA, 19 nt, Homo sapiens
  misc_RNA (1)...(19): siRNA sense strand
uggaugaugaugauaauga

SEQ ID NO: 661711 - RNA, 19 nt, Homo sapiens
  misc_RNA (1)...(19): siRNA sense strand
aagaugagacuaaugugaa

SEQ ID NO: 661712 - RNA, 19 nt, Homo sapiens
  misc_RNA (1)...(19): siRNA sense strand
gaaacgucagcguguauca

SEQ ID NO: 661713 - RNA, 19 nt, Homo sapiens
  misc_RNA (1)...(19): siRNA sense strand
agaaugauaagucagaaga

SEQ ID NO: 661714 - RNA, 19 nt, Homo sapiens
  misc_RNA (1)...(19): siRNA sense strand
ggccagguuuuagauauua

SEQ ID NO: 661715 - RNA, 19 nt, Homo sapiens
  misc_RNA (1)...(19): siRNA sense strand
ugacagagacagcgccaau

SEQ ID NO: 661716 - RNA, 19 nt, Homo sapiens
  misc_RNA (1)...(19): siRNA sense strand
cagcaacguuaccaacaag

SEQ ID NO: 661717 - RNA, 19 nt, Homo sapiens
  misc_RNA (1)...(19): siRNA sense strand
gugggcugcucuguucaua

SEQ ID NO: 661718 - RNA, 19 nt, Homo sapiens
  misc_RNA (1)...(19): siRNA sense strand
aaacaagcaguagagauga

SEQ ID NO: 661719 - RNA, 19 nt, Homo sapiens
  misc_RNA (1)...(19): siRNA sense strand
aggagaggauggcagaaug

SEQ ID NO: 661720 - RNA, 19 nt, Homo sapiens
  misc_RNA (1)...(19): siRNA sense strand
gaccuucaggccauuaaga

SEQ ID NO: 661721 - RNA, 19 nt, Homo sapiens
  misc_RNA (1)...(19): siRNA sense strand
gcaaaaguggcuucaauuc

SEQ ID NO: 661722 - RNA, 19 nt, Homo sapiens
  misc_RNA (1)...(19): siRNA sense strand
gauaggauguacaguuacc

SEQ ID NO: 661723 - RNA, 19 nt, Homo sapiens
  misc_RNA (1)...(19): siRNA sense strand
cagcguguaucaggaaaca

SEQ ID NO: 661724 - RNA, 19 nt, Homo sapiens
  misc_RNA (1)...(19): siRNA sense strand
ucaguauguuaaugagaga

SEQ ID NO: 661725 - RNA, 19 nt, Homo sapiens
  misc_RNA (1)...(19): siRNA sense strand
ccuacuggaugaugaugau

SEQ ID NO: 661726 - RNA, 19 nt, Homo sapiens
  misc_RNA (1)...(19): siRNA sense strand
caacguuaccaacaagaca

SEQ ID NO: 661727 - RNA, 19 nt, Homo sapiens
  misc_RNA (1)...(19): siRNA sense strand
acagagcaaacaagcagua

SEQ ID NO: 661728 - RNA, 19 nt, Homo sapiens
  misc_RNA (1)...(19): siRNA sense strand
ugauguggaggcaaucuuu

SEQ ID NO: 661729 - RNA, 19 nt, Homo sapiens
  misc_RNA (1)...(19): siRNA sense strand
ggucaagaaaucugaugug

SEQ ID NO: 661730 - RNA, 19 nt, Homo sapiens
  misc_RNA (1)...(19): siRNA sense strand
aaaagaggcugaggaagga

SEQ ID NO: 661731 - RNA, 19 nt, Homo sapiens
  misc_RNA (1)...(19): siRNA sense strand
acuuucaacgggacuauua

SEQ ID NO: 661732 - RNA, 19 nt, Homo sapiens
  misc_RNA (1)...(19): siRNA sense strand
gaggcaaucuuuucgaagu

SEQ ID NO: 661733 - RNA, 19 nt, Homo sapiens
  misc_RNA (1)...(19): siRNA sense strand
aacaagcaguagagaugaa

SEQ ID NO: 661734 - RNA, 19 nt, Homo sapiens
  misc_RNA (1)...(19): siRNA sense strand
uggcuucaauucuaagagu

SEQ ID NO: 661735 - RNA, 19 nt, Homo sapiens
  misc_RNA (1)...(19): siRNA sense strand
gcagcagcuccgugaagaa

SEQ ID NO: 661736 - RNA, 19 nt, Homo sapiens
  misc_RNA (1)...(19): siRNA sense strand
augugaagauggagucuga

SEQ ID NO: 661737 - RNA, 19 nt, Homo sapiens
  misc_RNA (1)...(19): siRNA sense strand
aaggagaggaugacagaga

SEQ ID NO: 661738 - RNA, 19 nt, Homo sapiens
  misc_RNA (1)...(19): siRNA sense strand
ucaacgggacuauuaugau

SEQ ID NO: 661739 - RNA, 19 nt, Homo sapiens
  misc_RNA (1)...(19): siRNA sense strand
ggaccuacuggaugaugau

SEQ ID NO: 661740 - RNA, 19 nt, Homo sapiens
  misc_RNA (1)...(19): siRNA sense strand
gagaugaagaaugauaagu

SEQ ID NO: 661741 - RNA, 19 nt, Homo sapiens
  misc_RNA (1)...(19): siRNA sense strand
uugggaaucucaacacucu

SEQ ID NO: 661742 - RNA, 19 nt, Homo sapiens
  misc_RNA (1)...(19): siRNA sense strand
ggaacagagcaaacaagca

SEQ ID NO: 661743 - RNA, 19 nt, Homo sapiens
  misc_RNA (1)...(19): siRNA sense strand
ugacccagauaaaacaaaa

SEQ ID NO: 661744 - RNA, 19 nt, Homo sapiens
  misc_RNA (1)...(19): siRNA sense strand
gaugaccuucaggccauua

SEQ ID NO: 661745 - RNA, 19 nt, Homo sapiens
  misc_RNA (1)...(19): siRNA sense strand
auugugggcugcucuguuc

SEQ ID NO: 661746 - RNA, 19 nt, Homo sapiens
  misc_RNA (1)...(19): siRNA sense strand
ccaagucuggaaaguugaa

SEQ ID NO: 661747 - RNA, 19 nt, Homo sapiens
  misc_RNA (1)...(19): siRNA sense strand
agaugagacuaaugugaag

SEQ ID NO: 661748 - RNA, 19 nt, Homo sapiens
  misc_RNA (1)...(19): siRNA sense strand
aaaggaacagagcaaacaa

SEQ ID NO: 661749 - RNA, 19 nt, Homo sapiens
  misc_RNA (1)...(19): siRNA sense strand
uggauucucuccuggaaaa

SEQ ID NO: 661750 - RNA, 19 nt, Homo sapiens
  misc_RNA (1)...(19): siRNA sense strand
guaccuccuccuccuccua

SEQ ID NO: 661751 - RNA, 19 nt, Homo sapiens
  misc_RNA (1)...(19): siRNA sense strand
gcuccgugaagaaagauga

SEQ ID NO: 661752 - RNA, 19 nt, Homo sapiens
  misc_RNA (1)...(19): siRNA sense strand
acagauccucgcuccauga

SEQ ID NO: 661753 - RNA, 19 nt, Homo sapiens
  misc_RNA (1)...(19): siRNA sense strand
gaacagcccucuucuucau

SEQ ID NO: 661754 - RNA, 19 nt, Homo sapiens
  misc_RNA (1)...(19): siRNA sense strand
ccaguaagcugcccaagag

SEQ ID NO: 661755 - RNA, 19 nt, Homo sapiens
  misc_RNA (1)...(19): siRNA sense strand
ggacaccuccuuccucaau

SEQ ID NO: 661756 - RNA, 19 nt, Homo sapiens
  misc_RNA (1)...(19): siRNA sense strand
caagacagccagacaagga

SEQ ID NO: 661757 - RNA, 19 nt, Homo sapiens
  misc_RNA (1)...(19): siRNA sense strand
gacaccuccuuccucaaua

SEQ ID NO: 661758 - RNA, 19 nt, Homo sapiens
  misc_RNA (1)...(19): siRNA sense strand
cccaugcucuggaggauga

SEQ ID NO: 661759 - RNA, 19 nt, Homo sapiens
  misc_RNA (1)...(19): siRNA sense strand
ggaggaggaggaugaaauc

SEQ ID NO: 661760 - RNA, 19 nt, Homo sapiens
  misc_RNA (1)...(19): siRNA sense strand
gcggagaagggcaccagua

SEQ ID NO: 661761 - RNA, 19 nt, Homo sapiens
  misc_RNA (1)...(19): siRNA sense strand
gagaagggcaccaguaagc

SEQ ID NO: 661762 - RNA, 19 nt, Homo sapiens
  misc_RNA (1)...(19): siRNA sense strand
cggagaagggcaccaguaa

SEQ ID NO: 661763 - RNA, 19 nt, Homo sapiens
  misc_RNA (1)...(19): siRNA sense strand
ccagcucggugcacuccaa

SEQ ID NO: 661764 - RNA, 19 nt, Homo sapiens
  misc_RNA (1)...(19): siRNA sense strand
acgaacagcccucuucuuc

SEQ ID NO: 661765 - RNA, 19 nt, Homo sapiens
  misc_RNA (1)...(19): siRNA sense strand
ggacgaacagcccucuucu

SEQ ID NO: 661766 - RNA, 19 nt, Homo sapiens
  misc_RNA (1)...(19): siRNA sense strand
ggagaagggcaccaguaag

SEQ ID NO: 661767 - RNA, 19 nt, Homo sapiens
  misc_RNA (1)...(19): siRNA sense strand
ggugacguccucagcauca

SEQ ID NO: 661768 - RNA, 19 nt, Homo sapiens
  misc_RNA (1)...(19): siRNA sense strand
cggaguccaucauguccuu

SEQ ID NO: 661769 - RNA, 19 nt, Homo sapiens
  misc_RNA (1)...(19): siRNA sense strand
cgaacagcccucuucuuca

SEQ ID NO: 661770 - RNA, 19 nt, Homo sapiens
  misc_RNA (1)...(19): siRNA sense strand
acaccuccuuccucaauag

SEQ ID NO: 661771 - RNA, 19 nt, Homo sapiens
  misc_RNA (1)...(19): siRNA sense strand
ggacucggcccuguuuguc

SEQ ID NO: 661772 - RNA, 19 nt, Homo sapiens
  misc_RNA (1)...(19): siRNA sense strand
ccgugaagaaggccaauga

SEQ ID NO: 661773 - RNA, 19 nt, Homo sapiens
  misc_RNA (1)...(19): siRNA sense strand
ccacguacgggcugaagca

SEQ ID NO: 661774 - RNA, 19 nt, Homo sapiens
  misc_RNA (1)...(19): siRNA sense strand
gacgaacagcccucuucuu

SEQ ID NO: 661775 - RNA, 19 nt, Homo sapiens
  misc_RNA (1)...(19): siRNA sense strand
ccuccuuccucaauagcaa

SEQ ID NO: 661776 - RNA, 19 nt, Homo sapiens
  misc_RNA (1)...(19): siRNA sense strand
gggacucggcccuguuugu

SEQ ID NO: 661777 - RNA, 19 nt, Homo sapiens
  misc_RNA (1)...(19): siRNA sense strand
ccgggcugcugucucaaga

SEQ ID NO: 661778 - RNA, 19 nt, Homo sapiens
  misc_RNA (1)...(19): siRNA sense strand
ucagcaucauggacaagga

SEQ ID NO: 661779 - RNA, 19 nt, Homo sapiens
  misc_RNA (1)...(19): siRNA sense strand
ggcccuguuugucaagaau

SEQ ID NO: 661780 - RNA, 19 nt, Homo sapiens
  misc_RNA (1)...(19): siRNA sense strand
acucggcccuguuugucaa

SEQ ID NO: 661781 - RNA, 19 nt, Homo sapiens
  misc_RNA (1)...(19): siRNA sense strand
gaagaugacuuuccuacaa

SEQ ID NO: 661782 - RNA, 19 nt, Homo sapiens
  misc_RNA (1)...(19): siRNA sense strand
gaaguuggcugaaauggaa

SEQ ID NO: 661783 - RNA, 19 nt, Homo sapiens
  misc_RNA (1)...(19): siRNA sense strand
gaacagaggaagcauauaa

SEQ ID NO: 661784 - RNA, 19 nt, Homo sapiens
  misc_RNA (1)...(19): siRNA sense strand
caagaaaggccacaguuua

SEQ ID NO: 661785 - RNA, 19 nt, Homo sapiens
  misc_RNA (1)...(19): siRNA sense strand
gacaugaagucugcaauua

SEQ ID NO: 661786 - RNA, 19 nt, Homo sapiens
  misc_RNA (1)...(19): siRNA sense strand
gauggugacuucuugcaua

SEQ ID NO: 661787 - RNA, 19 nt, Homo sapiens
  misc_RNA (1)...(19): siRNA sense strand
gcgagaguauccuaaauuu

SEQ ID NO: 661788 - RNA, 19 nt, Homo sapiens
  misc_RNA (1)...(19): siRNA sense strand
gaggacagcuggcagaaga

SEQ ID NO: 661789 - RNA, 19 nt, Homo sapiens
  misc_RNA (1)...(19): siRNA sense strand
gguagaagaugaugaagau

SEQ ID NO: 661790 - RNA, 19 nt, Homo sapiens
  misc_RNA (1)...(19): siRNA sense strand
ucaaagggauaaaguggua

SEQ ID NO: 661791 - RNA, 19 nt, Homo sapiens
  misc_RNA (1)...(19): siRNA sense strand
gcaguugguuguagaagaa

SEQ ID NO: 661792 - RNA, 19 nt, Homo sapiens
  misc_RNA (1)...(19): siRNA sense strand
gcaaguggcuacucugcaa

SEQ ID NO: 661793 - RNA, 19 nt, Homo sapiens
  misc_RNA (1)...(19): siRNA sense strand
gaaaugaagguauacagaa

SEQ ID NO: 661794 - RNA, 19 nt, Homo sapiens
  misc_RNA (1)...(19): siRNA sense strand
uaaggaaacugagaagaaa

SEQ ID NO: 661795 - RNA, 19 nt, Homo sapiens
  misc_RNA (1)...(19): siRNA sense strand
caugaagucugcaauuauu

SEQ ID NO: 661796 - RNA, 19 nt, Homo sapiens
  misc_RNA (1)...(19): siRNA sense strand
gcaauuauuucuggaaugu

SEQ ID NO: 661797 - RNA, 19 nt, Homo sapiens
  misc_RNA (1)...(19): siRNA sense strand
cuaacagucugauuaauga

SEQ ID NO: 661798 - RNA, 19 nt, Homo sapiens
  misc_RNA (1)...(19): siRNA sense strand
gcaacacuuucucauugua

SEQ ID NO: 661799 - RNA, 19 nt, Homo sapiens
  misc_RNA (1)...(19): siRNA sense strand
cgagacguauuauaucuuu

SEQ ID NO: 661800 - RNA, 19 nt, Homo sapiens
  misc_RNA (1)...(19): siRNA sense strand
gggauaaagugguagaaga

SEQ ID NO: 661801 - RNA, 19 nt, Homo sapiens
  misc_RNA (1)...(19): siRNA sense strand
gaagaacagaggaagcaua

SEQ ID NO: 661802 - RNA, 19 nt, Homo sapiens
  misc_RNA (1)...(19): siRNA sense strand
gaagagaaguagaagaaaa

SEQ ID NO: 661803 - RNA, 19 nt, Homo sapiens
  misc_RNA (1)...(19): siRNA sense strand
gagggaaaccaggaaauua

SEQ ID NO: 661804 - RNA, 19 nt, Homo sapiens
  misc_RNA (1)...(19): siRNA sense strand
caacauccaccucuucauu

SEQ ID NO: 661805 - RNA, 19 nt, Homo sapiens
  misc_RNA (1)...(19): siRNA sense strand
gcaccagccucaguguuaa

SEQ ID NO: 661806 - RNA, 19 nt, Homo sapiens
  misc_RNA (1)...(19): siRNA sense strand
gaaauuagcagggacaaca

SEQ ID NO: 661807 - RNA, 19 nt, Homo sapiens
  misc_RNA (1)...(19): siRNA sense strand
aaggagaaaugaagguaua

SEQ ID NO: 661808 - RNA, 19 nt, Homo sapiens
  misc_RNA (1)...(19): siRNA sense strand
ggugacuucuugcauagua

SEQ ID NO: 661809 - RNA, 19 nt, Homo sapiens
  misc_RNA (1)...(19): siRNA sense strand
caucuuauguagacaaguu

SEQ ID NO: 661810 - RNA, 19 nt, Homo sapiens
  misc_RNA (1)...(19): siRNA sense strand
guggaaacauuagcugaua

SEQ ID NO: 661811 - RNA, 19 nt, Homo sapiens
  misc_RNA (1)...(19): siRNA sense strand
ggacaugaagucugcaauu

SEQ ID NO: 661812 - RNA, 19 nt, Homo sapiens
  misc_RNA (1)...(19): siRNA sense strand
uagcaaggcugucaucaca

SEQ ID NO: 661813 - RNA, 19 nt, Homo sapiens
  misc_RNA (1)...(19): siRNA sense strand
gagaguauccuaaauuucu

SEQ ID NO: 661814 - RNA, 19 nt, Homo sapiens
  misc_RNA (1)...(19): siRNA sense strand
gaagguauacagaagagaa

SEQ ID NO: 661815 - RNA, 19 nt, Homo sapiens
  misc_RNA (1)...(19): siRNA sense strand
cuacagaaguacuuugaug

SEQ ID NO: 661816 - RNA, 19 nt, Homo sapiens
  misc_RNA (1)...(19): siRNA sense strand
ggaaacauuuagagacauc

SEQ ID NO: 661817 - RNA, 19 nt, Homo sapiens
  misc_RNA (1)...(19): siRNA sense strand
gaacagcacaagacugaau

SEQ ID NO: 661818 - RNA, 19 nt, Homo sapiens
  misc_RNA (1)...(19): siRNA sense strand
gaguauggcugcagaggau

SEQ ID NO: 661819 - RNA, 19 nt, Homo sapiens
  misc_RNA (1)...(19): siRNA sense strand
cagaagagaaguagaagaa

SEQ ID NO: 661820 - RNA, 19 nt, Homo sapiens
  misc_RNA (1)...(19): siRNA sense strand
agaagagacuggauaagga

SEQ ID NO: 661821 - RNA, 19 nt, Homo sapiens
  misc_RNA (1)...(19): siRNA sense strand
gaagagacuggauaaggaa

SEQ ID NO: 661822 - RNA, 19 nt, Homo sapiens
  misc_RNA (1)...(19): siRNA sense strand
gcaaugacagaacuuaaga

SEQ ID NO: 661823 - RNA, 19 nt, Homo sapiens
  misc_RNA (1)...(19): siRNA sense strand
gaugaaugucgauuugaua

SEQ ID NO: 661824 - RNA, 19 nt, Homo sapiens
  misc_RNA (1)...(19): siRNA sense strand
gaucauagacagcaaugga

SEQ ID NO: 661825 - RNA, 19 nt, Homo sapiens
  misc_RNA (1)...(19): siRNA sense strand
gcucugaguuacuacaaau

SEQ ID NO: 661826 - RNA, 19 nt, Homo sapiens
  misc_RNA (1)...(19): siRNA sense strand
gcaaagcgagaguauccua

SEQ ID NO: 661827 - RNA, 19 nt, Homo sapiens
  misc_RNA (1)...(19): siRNA sense strand
agacagcaauggauagaug

SEQ ID NO: 661828 - RNA, 19 nt, Homo sapiens
  misc_RNA (1)...(19): siRNA sense strand
ugacagugcuccucuaaac

SEQ ID NO: 661829 - RNA, 19 nt, Homo sapiens
  misc_RNA (1)...(19): siRNA sense strand
uugcaacacuuucucauug

SEQ ID NO: 661830 - RNA, 19 nt, Homo sapiens
  misc_RNA (1)...(19): siRNA sense strand
ggcaccagccucaguguua

SEQ ID NO: 661831 - RNA, 19 nt, Homo sapiens
  misc_RNA (1)...(19): siRNA sense strand
gacugaaucuggauaugga

SEQ ID NO: 661832 - RNA, 19 nt, Homo sapiens
  misc_RNA (1)...(19): siRNA sense strand
gaaagccuauuuuguucua

SEQ ID NO: 661833 - RNA, 19 nt, Homo sapiens
  misc_RNA (1)...(19): siRNA sense strand
uugaagagauggugcagaa

SEQ ID NO: 661834 - RNA, 19 nt, Homo sapiens
  misc_RNA (1)...(19): siRNA sense strand
gugagaaguuggcugaaau

SEQ ID NO: 661835 - RNA, 19 nt, Homo sapiens
  misc_RNA (1)...(19): siRNA sense strand
caucacaccucacgauuuu

SEQ ID NO: 661836 - RNA, 19 nt, Homo sapiens
  misc_RNA (1)...(19): siRNA sense strand
gggacaacauucuaugcaa

SEQ ID NO: 661837 - RNA, 19 nt, Homo sapiens
  misc_RNA (1)...(19): siRNA sense strand
ggcccuaacagucugauua

SEQ ID NO: 661838 - RNA, 19 nt, Homo sapiens
  misc_RNA (1)...(19): siRNA sense strand
ggccacaguuuacgugaga

SEQ ID NO: 661839 - RNA, 19 nt, Homo sapiens
  misc_RNA (1)...(19): siRNA sense strand
gggaagcgauaacuuuuaa

SEQ ID NO: 661840 - RNA, 19 nt, Homo sapiens
  misc_RNA (1)...(19): siRNA sense strand
ucaagaaaggccacaguuu

SEQ ID NO: 661841 - RNA, 19 nt, Homo sapiens
  misc_RNA (1)...(19): siRNA sense strand
ggaaacaacuauagaaaac

SEQ ID NO: 661842 - RNA, 19 nt, Homo sapiens
  misc_RNA (1)...(19): siRNA sense strand
ugaagcugcucuugacaga

SEQ ID NO: 661843 - RNA, 19 nt, Homo sapiens
  misc_RNA (1)...(19): siRNA sense strand
auaaugcucugaguuacua

SEQ ID NO: 661844 - RNA, 19 nt, Homo sapiens
  misc_RNA (1)...(19): siRNA sense strand
ggauagaugccauugaaca

SEQ ID NO: 661845 - RNA, 19 nt, Homo sapiens
  misc_RNA (1)...(19): siRNA sense strand
gugcugaugcugucucuaa

SEQ ID NO: 661846 - RNA, 19 nt, Homo sapiens
  misc_RNA (1)...(19): siRNA sense strand
ggauaaagugguagaagau

SEQ ID NO: 661847 - RNA, 19 nt, Homo sapiens
  misc_RNA (1)...(19): siRNA sense strand
ucagcgagacguauuauau

SEQ ID NO: 661848 - RNA, 19 nt, Homo sapiens
  misc_RNA (1)...(19): siRNA sense strand
gaaggagaaaugaagguau

SEQ ID NO: 661849 - RNA, 19 nt, Homo sapiens
  misc_RNA (1)...(19): siRNA sense strand
aaaguuauuuccacaugug

SEQ ID NO: 661850 - RNA, 19 nt, Homo sapiens
  misc_RNA (1)...(19): siRNA sense strand
ggauccaucugucuuagca

SEQ ID NO: 661851 - RNA, 19 nt, Homo sapiens
  misc_RNA (1)...(19): siRNA sense strand
uagaagaugaugaagauga

SEQ ID NO: 661852 - RNA, 19 nt, Homo sapiens
  misc_RNA (1)...(19): siRNA sense strand
guucuuugaugcuguugaa

SEQ ID NO: 661853 - RNA, 19 nt, Homo sapiens
  misc_RNA (1)...(19): siRNA sense strand
caggaucguuggguaguuu

SEQ ID NO: 661854 - RNA, 19 nt, Homo sapiens
  misc_RNA (1)...(19): siRNA sense strand
gagauuacauuggccuaca

SEQ ID NO: 661855 - RNA, 19 nt, Homo sapiens
  misc_RNA (1)...(19): siRNA sense strand
auaaagugguagaagauga

SEQ ID NO: 661856 - RNA, 19 nt, Homo sapiens
  misc_RNA (1)...(19): siRNA sense strand
gaaaaggugagauuacauu

SEQ ID NO: 661857 - RNA, 19 nt, Homo sapiens
  misc_RNA (1)...(19): siRNA sense strand
guaccaacggcaauaaaga

SEQ ID NO: 661858 - RNA, 19 nt, Homo sapiens
  misc_RNA (1)...(19): siRNA sense strand
auaccagccuugacugaaa

SEQ ID NO: 661859 - RNA, 19 nt, Homo sapiens
  misc_RNA (1)...(19): siRNA sense strand
uggaaacauuagcugauaa

SEQ ID NO: 661860 - RNA, 19 nt, Homo sapiens
  misc_RNA (1)...(19): siRNA sense strand
gcccuaacagucugauuaa

SEQ ID NO: 661861 - RNA, 19 nt, Homo sapiens
  misc_RNA (1)...(19): siRNA sense strand
cgaaagauaccagccuuga

SEQ ID NO: 661862 - RNA, 19 nt, Homo sapiens
  misc_RNA (1)...(19): siRNA sense strand
cgugagaaguuggcugaaa

SEQ ID NO: 661863 - RNA, 19 nt, Homo sapiens
  misc_RNA (1)...(19): siRNA sense strand
aaaugaagguauacagaag

SEQ ID NO: 661864 - RNA, 19 nt, Homo sapiens
  misc_RNA (1)...(19): siRNA sense strand
ggcaguugguuguagaaga

SEQ ID NO: 661865 - RNA, 19 nt, Homo sapiens
  misc_RNA (1)...(19): siRNA sense strand
ugcagaaccacaugacuua

SEQ ID NO: 661866 - RNA, 19 nt, Homo sapiens
  misc_RNA (1)...(19): siRNA sense strand
ggaauccuugcaacacuuu

SEQ ID NO: 661867 - RNA, 19 nt, Homo sapiens
  misc_RNA (1)...(19): siRNA sense strand
caaguugacacgcuacaga

SEQ ID NO: 661868 - RNA, 19 nt, Homo sapiens
  misc_RNA (1)...(19): siRNA sense strand
gcaggaucguuggguaguu

SEQ ID NO: 661869 - RNA, 19 nt, Homo sapiens
  misc_RNA (1)...(19): siRNA sense strand
gaaaaugacccugaaacuu

SEQ ID NO: 661870 - RNA, 19 nt, Homo sapiens
  misc_RNA (1)...(19): siRNA sense strand
ucaguaaguggacaaacua

SEQ ID NO: 661871 - RNA, 19 nt, Homo sapiens
  misc_RNA (1)...(19): siRNA sense strand
uugacacgcuacagaagua

SEQ ID NO: 661872 - RNA, 19 nt, Homo sapiens
  misc_RNA (1)...(19): siRNA sense strand
ucauagacagcaauggaua

SEQ ID NO: 661873 - RNA, 19 nt, Homo sapiens
  misc_RNA (1)...(19): siRNA sense strand
ugaugaaugucgauuugau

SEQ ID NO: 661874 - RNA, 19 nt, Homo sapiens
  misc_RNA (1)...(19): siRNA sense strand
guagaagaaggagaaauga

SEQ ID NO: 661875 - RNA, 19 nt, Homo sapiens
  misc_RNA (1)...(19): siRNA sense strand
ccuaacagucugauuaaug

SEQ ID NO: 661876 - RNA, 19 nt, Homo sapiens
  misc_RNA (1)...(19): siRNA sense strand
ugaagaaggcccuaacagu

SEQ ID NO: 661877 - RNA, 19 nt, Homo sapiens
  misc_RNA (1)...(19): siRNA sense strand
auaaggaaacugagaagaa

SEQ ID NO: 661878 - RNA, 19 nt, Homo sapiens
  misc_RNA (1)...(19): siRNA sense strand
ggcagaagagacuggauaa

SEQ ID NO: 661879 - RNA, 19 nt, Homo sapiens
  misc_RNA (1)...(19): siRNA sense strand
gaacuucaaagggauaaag

SEQ ID NO: 661880 - RNA, 19 nt, Homo sapiens
  misc_RNA (1)...(19): siRNA sense strand
caacauucuaugcaagauu

SEQ ID NO: 661881 - RNA, 19 nt, Homo sapiens
  misc_RNA (1)...(19): siRNA sense strand
gaagaugacuuuccuacaa

SEQ ID NO: 661882 - RNA, 19 nt, Homo sapiens
  misc_RNA (1)...(19): siRNA sense strand
gaaguuggcugaaauggaa

SEQ ID NO: 661883 - RNA, 19 nt, Homo sapiens
  misc_RNA (1)...(19): siRNA sense strand
gaacagaggaagcauauaa

SEQ ID NO: 661884 - RNA, 19 nt, Homo sapiens
  misc_RNA (1)...(19): siRNA sense strand
caagaaaggccacaguuua

SEQ ID NO: 661885 - RNA, 19 nt, Homo sapiens
  misc_RNA (1)...(19): siRNA sense strand
gacaugaagucugcaauua

SEQ ID NO: 661886 - RNA, 19 nt, Homo sapiens
  misc_RNA (1)...(19): siRNA sense strand
gauggugacuucuugcaua

SEQ ID NO: 661887 - RNA, 19 nt, Homo sapiens
  misc_RNA (1)...(19): siRNA sense strand
gcgagaguauccuaaauuu

SEQ ID NO: 661888 - RNA, 19 nt, Homo sapiens
  misc_RNA (1)...(19): siRNA sense strand
gaggacagcuggcagaaga

SEQ ID NO: 661889 - RNA, 19 nt, Homo sapiens
  misc_RNA (1)...(19): siRNA sense strand
gguagaagaugaugaagau

SEQ ID NO: 661890 - RNA, 19 nt, Homo sapiens
  misc_RNA (1)...(19): siRNA sense strand
ucaaagggauaaaguggua

SEQ ID NO: 661891 - RNA, 19 nt, Homo sapiens
  misc_RNA (1)...(19): siRNA sense strand
gcaguugguuguagaagaa

SEQ ID NO: 661892 - RNA, 19 nt, Homo sapiens
  misc_RNA (1)...(19): siRNA sense strand
gcaaguggcuacucugcaa

SEQ ID NO: 661893 - RNA, 19 nt, Homo sapiens
  misc_RNA (1)...(19): siRNA sense strand
gaaaugaagguauacagaa

SEQ ID NO: 661894 - RNA, 19 nt, Homo sapiens
  misc_RNA (1)...(19): siRNA sense strand
uaaggaaacugagaagaaa

SEQ ID NO: 661895 - RNA, 19 nt, Homo sapiens
  misc_RNA (1)...(19): siRNA sense strand
caugaagucugcaauuauu

SEQ ID NO: 661896 - RNA, 19 nt, Homo sapiens
  misc_RNA (1)...(19): siRNA sense strand
gcaauuauuucuggaaugu

SEQ ID NO: 661897 - RNA, 19 nt, Homo sapiens
  misc_RNA (1)...(19): siRNA sense strand
cuaacagucugauuaauga

SEQ ID NO: 661898 - RNA, 19 nt, Homo sapiens
  misc_RNA (1)...(19): siRNA sense strand
gcaacacuuucucauugua

SEQ ID NO: 661899 - RNA, 19 nt, Homo sapiens
  misc_RNA (1)...(19): siRNA sense strand
cgagacguauuauaucuuu

SEQ ID NO: 661900 - RNA, 19 nt, Homo sapiens
  misc_RNA (1)...(19): siRNA sense strand
gggauaaagugguagaaga

SEQ ID NO: 661901 - RNA, 19 nt, Homo sapiens
  misc_RNA (1)...(19): siRNA sense strand
gaagaacagaggaagcaua

SEQ ID NO: 661902 - RNA, 19 nt, Homo sapiens
  misc_RNA (1)...(19): siRNA sense strand
gaagagaaguagaagaaaa

SEQ ID NO: 661903 - RNA, 19 nt, Homo sapiens
  misc_RNA (1)...(19): siRNA sense strand
gagggaaaccaggaaauua

SEQ ID NO: 661904 - RNA, 19 nt, Homo sapiens
  misc_RNA (1)...(19): siRNA sense strand
caacauccaccucuucauu

SEQ ID NO: 661905 - RNA, 19 nt, Homo sapiens
  misc_RNA (1)...(19): siRNA sense strand
gcaccagccucaguguuaa

SEQ ID NO: 661906 - RNA, 19 nt, Homo sapiens
  misc_RNA (1)...(19): siRNA sense strand
gaaauuagcagggacaaca

SEQ ID NO: 661907 - RNA, 19 nt, Homo sapiens
  misc_RNA (1)...(19): siRNA sense strand
aaggagaaaugaagguaua

SEQ ID NO: 661908 - RNA, 19 nt, Homo sapiens
  misc_RNA (1)...(19): siRNA sense strand
ggugacuucuugcauagua

SEQ ID NO: 661909 - RNA, 19 nt, Homo sapiens
  misc_RNA (1)...(19): siRNA sense strand
caucuuauguagacaaguu

SEQ ID NO: 661910 - RNA, 19 nt, Homo sapiens
  misc_RNA (1)...(19): siRNA sense strand
guggaaacauuagcugaua

SEQ ID NO: 661911 - RNA, 19 nt, Homo sapiens
  misc_RNA (1)...(19): siRNA sense strand
ggacaugaagucugcaauu

SEQ ID NO: 661912 - RNA, 19 nt, Homo sapiens
  misc_RNA (1)...(19): siRNA sense strand
uagcaaggcugucaucaca

SEQ ID NO: 661913 - RNA, 19 nt, Homo sapiens
  misc_RNA (1)...(19): siRNA sense strand
gagaguauccuaaauuucu

SEQ ID NO: 661914 - RNA, 19 nt, Homo sapiens
  misc_RNA (1)...(19): siRNA sense strand
gaagguauacagaagagaa

SEQ ID NO: 661915 - RNA, 19 nt, Homo sapiens
  misc_RNA (1)...(19): siRNA sense strand
cuacagaaguacuuugaug

SEQ ID NO: 661916 - RNA, 19 nt, Homo sapiens
  misc_RNA (1)...(19): siRNA sense strand
ggaaacauuuagagacauc

SEQ ID NO: 661917 - RNA, 19 nt, Homo sapiens
  misc_RNA (1)...(19): siRNA sense strand
gaacagcacaagacugaau

SEQ ID NO: 661918 - RNA, 19 nt, Homo sapiens
  misc_RNA (1)...(19): siRNA sense strand
gaguauggcugcagaggau

SEQ ID NO: 661919 - RNA, 19 nt, Homo sapiens
  misc_RNA (1)...(19): siRNA sense strand
cagaagagaaguagaagaa

SEQ ID NO: 661920 - RNA, 19 nt, Homo sapiens
  misc_RNA (1)...(19): siRNA sense strand
agaagagacuggauaagga

SEQ ID NO: 661921 - RNA, 19 nt, Homo sapiens
  misc_RNA (1)...(19): siRNA sense strand
gaagagacuggauaaggaa

SEQ ID NO: 661922 - RNA, 19 nt, Homo sapiens
  misc_RNA (1)...(19): siRNA sense strand
gcaaugacagaacuuaaga

SEQ ID NO: 661923 - RNA, 19 nt, Homo sapiens
  misc_RNA (1)...(19): siRNA sense strand
gaugaaugucgauuugaua

SEQ ID NO: 661924 - RNA, 19 nt, Homo sapiens
  misc_RNA (1)...(19): siRNA sense strand
gaucauagacagcaaugga

SEQ ID NO: 661925 - RNA, 19 nt, Homo sapiens
  misc_RNA (1)...(19): siRNA sense strand
gcucugaguuacuacaaau

SEQ ID NO: 661926 - RNA, 19 nt, Homo sapiens
  misc_RNA (1)...(19): siRNA sense strand
gcaaagcgagaguauccua

SEQ ID NO: 661927 - RNA, 19 nt, Homo sapiens
  misc_RNA (1)...(19): siRNA sense strand
agacagcaauggauagaug

SEQ ID NO: 661928 - RNA, 19 nt, Homo sapiens
  misc_RNA (1)...(19): siRNA sense strand
ugacagugcuccucuaaac

SEQ ID NO: 661929 - RNA, 19 nt, Homo sapiens
  misc_RNA (1)...(19): siRNA sense strand
uugcaacacuuucucauug

SEQ ID NO: 661930 - RNA, 19 nt, Homo sapiens
  misc_RNA (1)...(19): siRNA sense strand
ggcaccagccucaguguua

SEQ ID NO: 661931 - RNA, 19 nt, Homo sapiens
  misc_RNA (1)...(19): siRNA sense strand
gacugaaucuggauaugga

SEQ ID NO: 661932 - RNA, 19 nt, Homo sapiens
  misc_RNA (1)...(19): siRNA sense strand
gaaagccuauuuuguucua

SEQ ID NO: 661933 - RNA, 19 nt, Homo sapiens
  misc_RNA (1)...(19): siRNA sense strand
uugaagagauggugcagaa

SEQ ID NO: 661934 - RNA, 19 nt, Homo sapiens
  misc_RNA (1)...(19): siRNA sense strand
gugagaaguuggcugaaau

SEQ ID NO: 661935 - RNA, 19 nt, Homo sapiens
  misc_RNA (1)...(19): siRNA sense strand
caucacaccucacgauuuu

SEQ ID NO: 661936 - RNA, 19 nt, Homo sapiens
  misc_RNA (1)...(19): siRNA sense strand
gggacaacauucuaugcaa

SEQ ID NO: 661937 - RNA, 19 nt, Homo sapiens
  misc_RNA (1)...(19): siRNA sense strand
ggcccuaacagucugauua

SEQ ID NO: 661938 - RNA, 19 nt, Homo sapiens
  misc_RNA (1)...(19): siRNA sense strand
ggccacaguuuacgugaga

SEQ ID NO: 661939 - RNA, 19 nt, Homo sapiens
  misc_RNA (1)...(19): siRNA sense strand
gggaagcgauaacuuuuaa

SEQ ID NO: 661940 - RNA, 19 nt, Homo sapiens
  misc_RNA (1)...(19): siRNA sense strand
ucaagaaaggccacaguuu

SEQ ID NO: 661941 - RNA, 19 nt, Homo sapiens
  misc_RNA (1)...(19): siRNA sense strand
ggaaacaacuauagaaaac

SEQ ID NO: 661942 - RNA, 19 nt, Homo sapiens
  misc_RNA (1)...(19): siRNA sense strand
ugaagcugcucuugacaga

SEQ ID NO: 661943 - RNA, 19 nt, Homo sapiens
  misc_RNA (1)...(19): siRNA sense strand
auaaugcucugaguuacua

SEQ ID NO: 661944 - RNA, 19 nt, Homo sapiens
  misc_RNA (1)...(19): siRNA sense strand
ggauagaugccauugaaca

SEQ ID NO: 661945 - RNA, 19 nt, Homo sapiens
  misc_RNA (1)...(19): siRNA sense strand
gugcugaugcugucucuaa

SEQ ID NO: 661946 - RNA, 19 nt, Homo sapiens
  misc_RNA (1)...(19): siRNA sense strand
ggauaaagugguagaagau

SEQ ID NO: 661947 - RNA, 19 nt, Homo sapiens
  misc_RNA (1)...(19): siRNA sense strand
ucagcgagacguauuauau

SEQ ID NO: 661948 - RNA, 19 nt, Homo sapiens
  misc_RNA (1)...(19): siRNA sense strand
gaaggagaaaugaagguau

SEQ ID NO: 661949 - RNA, 19 nt, Homo sapiens
  misc_RNA (1)...(19): siRNA sense strand
aaaguuauuuccacaugug

SEQ ID NO: 661950 - RNA, 19 nt, Homo sapiens
  misc_RNA (1)...(19): siRNA sense strand
ggauccaucugucuuagca

SEQ ID NO: 661951 - RNA, 19 nt, Homo sapiens
  misc_RNA (1)...(19): siRNA sense strand
uagaagaugaugaagauga

SEQ ID NO: 661952 - RNA, 19 nt, Homo sapiens
  misc_RNA (1)...(19): siRNA sense strand
guucuuugaugcuguugaa

SEQ ID NO: 661953 - RNA, 19 nt, Homo sapiens
  misc_RNA (1)...(19): siRNA sense strand
caggaucguuggguaguuu

SEQ ID NO: 661954 - RNA, 19 nt, Homo sapiens
  misc_RNA (1)...(19): siRNA sense strand
gagauuacauuggccuaca

SEQ ID NO: 661955 - RNA, 19 nt, Homo sapiens
  misc_RNA (1)...(19): siRNA sense strand
auaaagugguagaagauga

SEQ ID NO: 661956 - RNA, 19 nt, Homo sapiens
  misc_RNA (1)...(19): siRNA sense strand
gaaaaggugagauuacauu

SEQ ID NO: 661957 - RNA, 19 nt, Homo sapiens
  misc_RNA (1)...(19): siRNA sense strand
guaccaacggcaauaaaga

SEQ ID NO: 661958 - RNA, 19 nt, Homo sapiens
  misc_RNA (1)...(19): siRNA sense strand
auaccagccuugacugaaa

SEQ ID NO: 661959 - RNA, 19 nt, Homo sapiens
  misc_RNA (1)...(19): siRNA sense strand
uggaaacauuagcugauaa

SEQ ID NO: 661960 - RNA, 19 nt, Homo sapiens
  misc_RNA (1)...(19): siRNA sense strand
gcccuaacagucugauuaa

SEQ ID NO: 661961 - RNA, 19 nt, Homo sapiens
  misc_RNA (1)...(19): siRNA sense strand
cgaaagauaccagccuuga

SEQ ID NO: 661962 - RNA, 19 nt, Homo sapiens
  misc_RNA (1)...(19): siRNA sense strand
cgugagaaguuggcugaaa

SEQ ID NO: 661963 - RNA, 19 nt, Homo sapiens
  misc_RNA (1)...(19): siRNA sense strand
aaaugaagguauacagaag

SEQ ID NO: 661964 - RNA, 19 nt, Homo sapiens
  misc_RNA (1)...(19): siRNA sense strand
ggcaguugguuguagaaga

SEQ ID NO: 661965 - RNA, 19 nt, Homo sapiens
  misc_RNA (1)...(19): siRNA sense strand
ugcagaaccacaugacuua

SEQ ID NO: 661966 - RNA, 19 nt, Homo sapiens
  misc_RNA (1)...(19): siRNA sense strand
ggaauccuugcaacacuuu

SEQ ID NO: 661967 - RNA, 19 nt, Homo sapiens
  misc_RNA (1)...(19): siRNA sense strand
caaguugacacgcuacaga

SEQ ID NO: 661968 - RNA, 19 nt, Homo sapiens
  misc_RNA (1)...(19): siRNA sense strand
gcaggaucguuggguaguu

SEQ ID NO: 661969 - RNA, 19 nt, Homo sapiens
  misc_RNA (1)...(19): siRNA sense strand
gaaaaugacccugaaacuu

SEQ ID NO: 661970 - RNA, 19 nt, Homo sapiens
  misc_RNA (1)...(19): siRNA sense strand
ucaguaaguggacaaacua

SEQ ID NO: 661971 - RNA, 19 nt, Homo sapiens
  misc_RNA (1)...(19): siRNA sense strand
uugacacgcuacagaagua

SEQ ID NO: 661972 - RNA, 19 nt, Homo sapiens
  misc_RNA (1)...(19): siRNA sense strand
ucauagacagcaauggaua

SEQ ID NO: 661973 - RNA, 19 nt, Homo sapiens
  misc_RNA (1)...(19): siRNA sense strand
ugaugaaugucgauuugau

SEQ ID NO: 661974 - RNA, 19 nt, Homo sapiens
  misc_RNA (1)...(19): siRNA sense strand
guagaagaaggagaaauga

SEQ ID NO: 661975 - RNA, 19 nt, Homo sapiens
  misc_RNA (1)...(19): siRNA sense strand
ccuaacagucugauuaaug

SEQ ID NO: 661976 - RNA, 19 nt, Homo sapiens
  misc_RNA (1)...(19): siRNA sense strand
ugaagaaggcccuaacagu

SEQ ID NO: 661977 - RNA, 19 nt, Homo sapiens
  misc_RNA (1)...(19): siRNA sense strand
auaaggaaacugagaagaa

SEQ ID NO: 661978 - RNA, 19 nt, Homo sapiens
  misc_RNA (1)...(19): siRNA sense strand
ggcagaagagacuggauaa

SEQ ID NO: 661979 - RNA, 19 nt, Homo sapiens
  misc_RNA (1)...(19): siRNA sense strand
gaacuucaaagggauaaag

SEQ ID NO: 661980 - RNA, 19 nt, Homo sapiens
  misc_RNA (1)...(19): siRNA sense strand
caacauucuaugcaagauu

SEQ ID NO: 661981 - RNA, 19 nt, Homo sapiens
  misc_RNA (1)...(19): siRNA sense strand
caacaaagguucuaaagga

SEQ ID NO: 661982 - RNA, 19 nt, Homo sapiens
  misc_RNA (1)...(19): siRNA sense strand
gagaagauauagaacuuga

SEQ ID NO: 661983 - RNA, 19 nt, Homo sapiens
  misc_RNA (1)...(19): siRNA sense strand
caacaaggcagaagaggua

SEQ ID NO: 661984 - RNA, 19 nt, Homo sapiens
  misc_RNA (1)...(19): siRNA sense strand
agagauaucccacguaaua

SEQ ID NO: 661985 - RNA, 19 nt, Homo sapiens
  misc_RNA (1)...(19): siRNA sense strand
ccaaggacuuccaggcuua

SEQ ID NO: 661986 - RNA, 19 nt, Homo sapiens
  misc_RNA (1)...(19): siRNA sense strand
ccaaggacgugauggaauu

SEQ ID NO: 661987 - RNA, 19 nt, Homo sapiens
  misc_RNA (1)...(19): siRNA sense strand
gcagcuggcuugaaaggaa

SEQ ID NO: 661988 - RNA, 19 nt, Homo sapiens
  misc_RNA (1)...(19): siRNA sense strand
ucagagauaucccacguaa

SEQ ID NO: 661989 - RNA, 19 nt, Homo sapiens
  misc_RNA (1)...(19): siRNA sense strand
uauaagaggugaccaagga

SEQ ID NO: 661990 - RNA, 19 nt, Homo sapiens
  misc_RNA (1)...(19): siRNA sense strand
caaagaggauauccaggaa

SEQ ID NO: 661991 - RNA, 19 nt, Homo sapiens
  misc_RNA (1)...(19): siRNA sense strand
gaacaaggagauaaaggaa

SEQ ID NO: 661992 - RNA, 19 nt, Homo sapiens
  misc_RNA (1)...(19): siRNA sense strand
gaagauauagaacuugaug

SEQ ID NO: 661993 - RNA, 19 nt, Homo sapiens
  misc_RNA (1)...(19): siRNA sense strand
ccaccaggcucaagaggaa

SEQ ID NO: 661994 - RNA, 19 nt, Homo sapiens
  misc_RNA (1)...(19): siRNA sense strand
gaaagagugauaggacaua

SEQ ID NO: 661995 - RNA, 19 nt, Homo sapiens
  misc_RNA (1)...(19): siRNA sense strand
gaaagggcuuggauggaau

SEQ ID NO: 661996 - RNA, 19 nt, Homo sapiens
  misc_RNA (1)...(19): siRNA sense strand
agaaagggcuuggauggaa

SEQ ID NO: 661997 - RNA, 19 nt, Homo sapiens
  misc_RNA (1)...(19): siRNA sense strand
gaccaggccucccagguau

SEQ ID NO: 661998 - RNA, 19 nt, Homo sapiens
  misc_RNA (1)...(19): siRNA sense strand
guaaagggccagagaggaa

SEQ ID NO: 661999 - RNA, 19 nt, Homo sapiens
  misc_RNA (1)...(19): siRNA sense strand
cagcaaggguugugucugu

SEQ ID NO: 662000 - RNA, 19 nt, Homo sapiens
  misc_RNA (1)...(19): siRNA sense strand
acaaggagauaaaggaaau

SEQ ID NO: 662001 - RNA, 19 nt, Homo sapiens
  misc_RNA (1)...(19): siRNA sense strand
ggaacaaggagauaaagga

SEQ ID NO: 662002 - RNA, 19 nt, Homo sapiens
  misc_RNA (1)...(19): siRNA sense strand
ggaccaccaggaacaguua

SEQ ID NO: 662003 - RNA, 19 nt, Homo sapiens
  misc_RNA (1)...(19): siRNA sense strand
gaaagccuauuccaucaac

SEQ ID NO: 662004 - RNA, 19 nt, Homo sapiens
  misc_RNA (1)...(19): siRNA sense strand
caagggagaaccagcagua

SEQ ID NO: 662005 - RNA, 19 nt, Homo sapiens
  misc_RNA (1)...(19): siRNA sense strand
gagccuggguuaccuggaa

SEQ ID NO: 662006 - RNA, 19 nt, Homo sapiens
  misc_RNA (1)...(19): siRNA sense strand
auacaggucuuccaggauu

SEQ ID NO: 662007 - RNA, 19 nt, Homo sapiens
  misc_RNA (1)...(19): siRNA sense strand
ccacaggcauagaaggauu

SEQ ID NO: 662008 - RNA, 19 nt, Homo sapiens
  misc_RNA (1)...(19): siRNA sense strand
guacacagugcccuuauau

SEQ ID NO: 662009 - RNA, 19 nt, Homo sapiens
  misc_RNA (1)...(19): siRNA sense strand
ggaaaugaagggcuugaug

SEQ ID NO: 662010 - RNA, 19 nt, Homo sapiens
  misc_RNA (1)...(19): siRNA sense strand
ucaaaggauucgcaggaaa

SEQ ID NO: 662011 - RNA, 19 nt, Homo sapiens
  misc_RNA (1)...(19): siRNA sense strand
aaagggugcuccugcuaaa

SEQ ID NO: 662012 - RNA, 19 nt, Homo sapiens
  misc_RNA (1)...(19): siRNA sense strand
gaacccuggugcucaagga

SEQ ID NO: 662013 - RNA, 19 nt, Homo sapiens
  misc_RNA (1)...(19): siRNA sense strand
aggcuuaaauggauugaaa

SEQ ID NO: 662014 - RNA, 19 nt, Homo sapiens
  misc_RNA (1)...(19): siRNA sense strand
ggacuuccaggcuuaaaug

SEQ ID NO: 662015 - RNA, 19 nt, Homo sapiens
  misc_RNA (1)...(19): siRNA sense strand
ugugaaagcuggggaauua

SEQ ID NO: 662016 - RNA, 19 nt, Homo sapiens
  misc_RNA (1)...(19): siRNA sense strand
uaacagaacggaccucaag

SEQ ID NO: 662017 - RNA, 19 nt, Homo sapiens
  misc_RNA (1)...(19): siRNA sense strand
ccuauuccaucaacuguga

SEQ ID NO: 662018 - RNA, 19 nt, Homo sapiens
  misc_RNA (1)...(19): siRNA sense strand
gggauuuccuggagccauu

SEQ ID NO: 662019 - RNA, 19 nt, Homo sapiens
  misc_RNA (1)...(19): siRNA sense strand
aaagggagacccaggaauu

SEQ ID NO: 662020 - RNA, 19 nt, Homo sapiens
  misc_RNA (1)...(19): siRNA sense strand
gcaaggguugugucuguaa

SEQ ID NO: 662021 - RNA, 19 nt, Homo sapiens
  misc_RNA (1)...(19): siRNA sense strand
uaucuagggucuccaggaa

SEQ ID NO: 662022 - RNA, 19 nt, Homo sapiens
  misc_RNA (1)...(19): siRNA sense strand
cauuggcccuccaggauuu

SEQ ID NO: 662023 - RNA, 19 nt, Homo sapiens
  misc_RNA (1)...(19): siRNA sense strand
ggaaagaaaggagaaaugg

SEQ ID NO: 662024 - RNA, 19 nt, Homo sapiens
  misc_RNA (1)...(19): siRNA sense strand
aaagagugauaggacauaa

SEQ ID NO: 662025 - RNA, 19 nt, Homo sapiens
  misc_RNA (1)...(19): siRNA sense strand
uccagggagucauguaaua

SEQ ID NO: 662026 - RNA, 19 nt, Homo sapiens
  misc_RNA (1)...(19): siRNA sense strand
ggucugcccggugcaauua

SEQ ID NO: 662027 - RNA, 19 nt, Homo sapiens
  misc_RNA (1)...(19): siRNA sense strand
caaggguugugucuguaaa

SEQ ID NO: 662028 - RNA, 19 nt, Homo sapiens
  misc_RNA (1)...(19): siRNA sense strand
ucacuggguuguccuggaa

SEQ ID NO: 662029 - RNA, 19 nt, Homo sapiens
  misc_RNA (1)...(19): siRNA sense strand
agaaucauauggaucugaa

SEQ ID NO: 662030 - RNA, 19 nt, Homo sapiens
  misc_RNA (1)...(19): siRNA sense strand
ggaaagccagguccucaug

SEQ ID NO: 662031 - RNA, 19 nt, Homo sapiens
  misc_RNA (1)...(19): siRNA sense strand
aggcgcagcuggcuugaaa

SEQ ID NO: 662032 - RNA, 19 nt, Homo sapiens
  misc_RNA (1)...(19): siRNA sense strand
aagaggauauccaggaaau

SEQ ID NO: 662033 - RNA, 19 nt, Homo sapiens
  misc_RNA (1)...(19): siRNA sense strand
caaaggauucgcaggaaau

SEQ ID NO: 662034 - RNA, 19 nt, Homo sapiens
  misc_RNA (1)...(19): siRNA sense strand
aaccaggucucaaaggauu

SEQ ID NO: 662035 - RNA, 19 nt, Homo sapiens
  misc_RNA (1)...(19): siRNA sense strand
uuacggacuugucggugua

SEQ ID NO: 662036 - RNA, 19 nt, Homo sapiens
  misc_RNA (1)...(19): siRNA sense strand
ggagacccuggcacacuua

SEQ ID NO: 662037 - RNA, 19 nt, Homo sapiens
  misc_RNA (1)...(19): siRNA sense strand
agaaccaggucucaaagga

SEQ ID NO: 662038 - RNA, 19 nt, Homo sapiens
  misc_RNA (1)...(19): siRNA sense strand
ugauugggaugaugggauu

SEQ ID NO: 662039 - RNA, 19 nt, Homo sapiens
  misc_RNA (1)...(19): siRNA sense strand
gggugaagauggcauuaag

SEQ ID NO: 662040 - RNA, 19 nt, Homo sapiens
  misc_RNA (1)...(19): siRNA sense strand
uaaguggauugccaggauu

SEQ ID NO: 662041 - RNA, 19 nt, Homo sapiens
  misc_RNA (1)...(19): siRNA sense strand
aggagaagauauagaacuu

SEQ ID NO: 662042 - RNA, 19 nt, Homo sapiens
  misc_RNA (1)...(19): siRNA sense strand
gggaaagaaaggagaaaug

SEQ ID NO: 662043 - RNA, 19 nt, Homo sapiens
  misc_RNA (1)...(19): siRNA sense strand
ccaggaacaguuauuguga

SEQ ID NO: 662044 - RNA, 19 nt, Homo sapiens
  misc_RNA (1)...(19): siRNA sense strand
gggcaugccagguucuaaa

SEQ ID NO: 662045 - RNA, 19 nt, Homo sapiens
  misc_RNA (1)...(19): siRNA sense strand
ggaccuccaggaccaauug

SEQ ID NO: 662046 - RNA, 19 nt, Homo sapiens
  misc_RNA (1)...(19): siRNA sense strand
uguacacagugcccuuaua

SEQ ID NO: 662047 - RNA, 19 nt, Homo sapiens
  misc_RNA (1)...(19): siRNA sense strand
ugucaggugugcaugaaga

SEQ ID NO: 662048 - RNA, 19 nt, Homo sapiens
  misc_RNA (1)...(19): siRNA sense strand
gaaccaggucucaaaggau

SEQ ID NO: 662049 - RNA, 19 nt, Homo sapiens
  misc_RNA (1)...(19): siRNA sense strand
gaccaagguuuuccaggua

SEQ ID NO: 662050 - RNA, 19 nt, Homo sapiens
  misc_RNA (1)...(19): siRNA sense strand
uggccaggcuugaaaggaa

SEQ ID NO: 662051 - RNA, 19 nt, Homo sapiens
  misc_RNA (1)...(19): siRNA sense strand
gcagggacccaagggcuuu

SEQ ID NO: 662052 - RNA, 19 nt, Homo sapiens
  misc_RNA (1)...(19): siRNA sense strand
caugccagguucuaaagga

SEQ ID NO: 662053 - RNA, 19 nt, Homo sapiens
  misc_RNA (1)...(19): siRNA sense strand
ccuggcacacuuaagauua

SEQ ID NO: 662054 - RNA, 19 nt, Homo sapiens
  misc_RNA (1)...(19): siRNA sense strand
agagccagguuauucagaa

SEQ ID NO: 662055 - RNA, 19 nt, Homo sapiens
  misc_RNA (1)...(19): siRNA sense strand
gauaagggagagccagguu

SEQ ID NO: 662056 - RNA, 19 nt, Homo sapiens
  misc_RNA (1)...(19): siRNA sense strand
ggaccuagaggaccuaagg

SEQ ID NO: 662057 - RNA, 19 nt, Homo sapiens
  misc_RNA (1)...(19): siRNA sense strand
gcugucaggugugcaugaa

SEQ ID NO: 662058 - RNA, 19 nt, Homo sapiens
  misc_RNA (1)...(19): siRNA sense strand
gcaacaaagguucuaaagg

SEQ ID NO: 662059 - RNA, 19 nt, Homo sapiens
  misc_RNA (1)...(19): siRNA sense strand
gacccuggcacacuuaaga

SEQ ID NO: 662060 - RNA, 19 nt, Homo sapiens
  misc_RNA (1)...(19): siRNA sense strand
gggugcugcugguuugaaa

SEQ ID NO: 662061 - RNA, 19 nt, Homo sapiens
  misc_RNA (1)...(19): siRNA sense strand
uaagggagagccagguuau

SEQ ID NO: 662062 - RNA, 19 nt, Homo sapiens
  misc_RNA (1)...(19): siRNA sense strand
caagggcuuuccaggacuu

SEQ ID NO: 662063 - RNA, 19 nt, Homo sapiens
  misc_RNA (1)...(19): siRNA sense strand
ccaggaaucccaggaguug

SEQ ID NO: 662064 - RNA, 19 nt, Homo sapiens
  misc_RNA (1)...(19): siRNA sense strand
uggaaguccuggaucauca

SEQ ID NO: 662065 - RNA, 19 nt, Homo sapiens
  misc_RNA (1)...(19): siRNA sense strand
ccaacagaauauuaugaca

SEQ ID NO: 662066 - RNA, 19 nt, Homo sapiens
  misc_RNA (1)...(19): siRNA sense strand
gacauuggcccuccaggau

SEQ ID NO: 662067 - RNA, 19 nt, Homo sapiens
  misc_RNA (1)...(19): siRNA sense strand
agaccaggccucccaggua

SEQ ID NO: 662068 - RNA, 19 nt, Homo sapiens
  misc_RNA (1)...(19): siRNA sense strand
ggaccaggaacaccagguu

SEQ ID NO: 662069 - RNA, 19 nt, Homo sapiens
  misc_RNA (1)...(19): siRNA sense strand
gagaaagggcuuggaugga

SEQ ID NO: 662070 - RNA, 19 nt, Homo sapiens
  misc_RNA (1)...(19): siRNA sense strand
ggguuucccuggguuaaug

SEQ ID NO: 662071 - RNA, 19 nt, Homo sapiens
  misc_RNA (1)...(19): siRNA sense strand
gagguaagccaggcaagga

SEQ ID NO: 662072 - RNA, 19 nt, Homo sapiens
  misc_RNA (1)...(19): siRNA sense strand
ccagggaugccagguuuaa

SEQ ID NO: 662073 - RNA, 19 nt, Homo sapiens
  misc_RNA (1)...(19): siRNA sense strand
aggugaagauggagugauu

SEQ ID NO: 662074 - RNA, 19 nt, Homo sapiens
  misc_RNA (1)...(19): siRNA sense strand
ggacugccaggcuaucuag

SEQ ID NO: 662075 - RNA, 19 nt, Homo sapiens
  misc_RNA (1)...(19): siRNA sense strand
auaaguggauugccaggau

SEQ ID NO: 662076 - RNA, 19 nt, Homo sapiens
  misc_RNA (1)...(19): siRNA sense strand
ggaccaauggguauaagag

SEQ ID NO: 662077 - RNA, 19 nt, Homo sapiens
  misc_RNA (1)...(19): siRNA sense strand
ggaauuccaggucaucaag

SEQ ID NO: 662078 - RNA, 19 nt, Homo sapiens
  misc_RNA (1)...(19): siRNA sense strand
gaccaggaacaccagguuu

SEQ ID NO: 662079 - RNA, 19 nt, Homo sapiens
  misc_RNA (1)...(19): siRNA sense strand
cuccaggucuuccaggauu

SEQ ID NO: 662080 - RNA, 19 nt, Homo sapiens
  misc_RNA (1)...(19): siRNA sense strand
gaccaaggacgugauggaa

SEQ ID NO: 662081 - RNA, 19 nt, Homo sapiens
  misc_RNA (1)...(19): siRNA sense strand
caacaaagguucuaaagga

SEQ ID NO: 662082 - RNA, 19 nt, Homo sapiens
  misc_RNA (1)...(19): siRNA sense strand
gagaagauauagaacuuga

SEQ ID NO: 662083 - RNA, 19 nt, Homo sapiens
  misc_RNA (1)...(19): siRNA sense strand
caacaaggcagaagaggua

SEQ ID NO: 662084 - RNA, 19 nt, Homo sapiens
  misc_RNA (1)...(19): siRNA sense strand
agagauaucccacguaaua

SEQ ID NO: 662085 - RNA, 19 nt, Homo sapiens
  misc_RNA (1)...(19): siRNA sense strand
ccaaggacuuccaggcuua

SEQ ID NO: 662086 - RNA, 19 nt, Homo sapiens
  misc_RNA (1)...(19): siRNA sense strand
ccaaggacgugauggaauu

SEQ ID NO: 662087 - RNA, 19 nt, Homo sapiens
  misc_RNA (1)...(19): siRNA sense strand
gcagcuggcuugaaaggaa

SEQ ID NO: 662088 - RNA, 19 nt, Homo sapiens
  misc_RNA (1)...(19): siRNA sense strand
ucagagauaucccacguaa

SEQ ID NO: 662089 - RNA, 19 nt, Homo sapiens
  misc_RNA (1)...(19): siRNA sense strand
uauaagaggugaccaagga

SEQ ID NO: 662090 - RNA, 19 nt, Homo sapiens
  misc_RNA (1)...(19): siRNA sense strand
caaagaggauauccaggaa

SEQ ID NO: 662091 - RNA, 19 nt, Homo sapiens
  misc_RNA (1)...(19): siRNA sense strand
gaacaaggagauaaaggaa

SEQ ID NO: 662092 - RNA, 19 nt, Homo sapiens
  misc_RNA (1)...(19): siRNA sense strand
gaaaagacacugaagcuaa

SEQ ID NO: 662093 - RNA, 19 nt, Homo sapiens
  misc_RNA (1)...(19): siRNA sense strand
gaagauauagaacuugaug

SEQ ID NO: 662094 - RNA, 19 nt, Homo sapiens
  misc_RNA (1)...(19): siRNA sense strand
ccaccaggcucaagaggaa

SEQ ID NO: 662095 - RNA, 19 nt, Homo sapiens
  misc_RNA (1)...(19): siRNA sense strand
gaaagagugauaggacaua

SEQ ID NO: 662096 - RNA, 19 nt, Homo sapiens
  misc_RNA (1)...(19): siRNA sense strand
gaaagggcuuggauggaau

SEQ ID NO: 662097 - RNA, 19 nt, Homo sapiens
  misc_RNA (1)...(19): siRNA sense strand
agaaagggcuuggauggaa

SEQ ID NO: 662098 - RNA, 19 nt, Homo sapiens
  misc_RNA (1)...(19): siRNA sense strand
gaccaggccucccagguau

SEQ ID NO: 662099 - RNA, 19 nt, Homo sapiens
  misc_RNA (1)...(19): siRNA sense strand
guaaagggccagagaggaa

SEQ ID NO: 662100 - RNA, 19 nt, Homo sapiens
  misc_RNA (1)...(19): siRNA sense strand
cagcaaggguugugucugu

SEQ ID NO: 662101 - RNA, 19 nt, Homo sapiens
  misc_RNA (1)...(19): siRNA sense strand
acaaggagauaaaggaaau

SEQ ID NO: 662102 - RNA, 19 nt, Homo sapiens
  misc_RNA (1)...(19): siRNA sense strand
ggaacaaggagauaaagga

SEQ ID NO: 662103 - RNA, 19 nt, Homo sapiens
  misc_RNA (1)...(19): siRNA sense strand
ggaccaccaggaacaguua

SEQ ID NO: 662104 - RNA, 19 nt, Homo sapiens
  misc_RNA (1)...(19): siRNA sense strand
gaacaaaguaaugacagaa

SEQ ID NO: 662105 - RNA, 19 nt, Homo sapiens
  misc_RNA (1)...(19): siRNA sense strand
gaaagccuauuccaucaac

SEQ ID NO: 662106 - RNA, 19 nt, Homo sapiens
  misc_RNA (1)...(19): siRNA sense strand
caagggagaaccagcagua

SEQ ID NO: 662107 - RNA, 19 nt, Homo sapiens
  misc_RNA (1)...(19): siRNA sense strand
gagccuggguuaccuggaa

SEQ ID NO: 662108 - RNA, 19 nt, Homo sapiens
  misc_RNA (1)...(19): siRNA sense strand
auacaggucuuccaggauu

SEQ ID NO: 662109 - RNA, 19 nt, Homo sapiens
  misc_RNA (1)...(19): siRNA sense strand
ccacaggcauagaaggauu

SEQ ID NO: 662110 - RNA, 19 nt, Homo sapiens
  misc_RNA (1)...(19): siRNA sense strand
guacacagugcccuuauau

SEQ ID NO: 662111 - RNA, 19 nt, Homo sapiens
  misc_RNA (1)...(19): siRNA sense strand
ggaaaugaagggcuugaug

SEQ ID NO: 662112 - RNA, 19 nt, Homo sapiens
  misc_RNA (1)...(19): siRNA sense strand
ucaaaggauucgcaggaaa

SEQ ID NO: 662113 - RNA, 19 nt, Homo sapiens
  misc_RNA (1)...(19): siRNA sense strand
aaagggugcuccugcuaaa

SEQ ID NO: 662114 - RNA, 19 nt, Homo sapiens
  misc_RNA (1)...(19): siRNA sense strand
gaacccuggugcucaagga

SEQ ID NO: 662115 - RNA, 19 nt, Homo sapiens
  misc_RNA (1)...(19): siRNA sense strand
aggcuuaaauggauugaaa

SEQ ID NO: 662116 - RNA, 19 nt, Homo sapiens
  misc_RNA (1)...(19): siRNA sense strand
ggacuuccaggcuuaaaug

SEQ ID NO: 662117 - RNA, 19 nt, Homo sapiens
  misc_RNA (1)...(19): siRNA sense strand
ugugaaagcuggggaauua

SEQ ID NO: 662118 - RNA, 19 nt, Homo sapiens
  misc_RNA (1)...(19): siRNA sense strand
uaacagaacggaccucaag

SEQ ID NO: 662119 - RNA, 19 nt, Homo sapiens
  misc_RNA (1)...(19): siRNA sense strand
ccuauuccaucaacuguga

SEQ ID NO: 662120 - RNA, 19 nt, Homo sapiens
  misc_RNA (1)...(19): siRNA sense strand
gggauuuccuggagccauu

SEQ ID NO: 662121 - RNA, 19 nt, Homo sapiens
  misc_RNA (1)...(19): siRNA sense strand
aaagggagacccaggaauu

SEQ ID NO: 662122 - RNA, 19 nt, Homo sapiens
  misc_RNA (1)...(19): siRNA sense strand
gcaaggguugugucuguaa

SEQ ID NO: 662123 - RNA, 19 nt, Homo sapiens
  misc_RNA (1)...(19): siRNA sense strand
uaucuagggucuccaggaa

SEQ ID NO: 662124 - RNA, 19 nt, Homo sapiens
  misc_RNA (1)...(19): siRNA sense strand
cauuggcccuccaggauuu

SEQ ID NO: 662125 - RNA, 19 nt, Homo sapiens
  misc_RNA (1)...(19): siRNA sense strand
ggaaagaaaggagaaaugg

SEQ ID NO: 662126 - RNA, 19 nt, Homo sapiens
  misc_RNA (1)...(19): siRNA sense strand
aaagagugauaggacauaa

SEQ ID NO: 662127 - RNA, 19 nt, Homo sapiens
  misc_RNA (1)...(19): siRNA sense strand
uccagggagucauguaaua

SEQ ID NO: 662128 - RNA, 19 nt, Homo sapiens
  misc_RNA (1)...(19): siRNA sense strand
ggucugcccggugcaauua

SEQ ID NO: 662129 - RNA, 19 nt, Homo sapiens
  misc_RNA (1)...(19): siRNA sense strand
caaggguugugucuguaaa

SEQ ID NO: 662130 - RNA, 19 nt, Homo sapiens
  misc_RNA (1)...(19): siRNA sense strand
ucacuggguuguccuggaa

SEQ ID NO: 662131 - RNA, 19 nt, Homo sapiens
  misc_RNA (1)...(19): siRNA sense strand
agaaucauauggaucugaa

SEQ ID NO: 662132 - RNA, 19 nt, Homo sapiens
  misc_RNA (1)...(19): siRNA sense strand
ggaaagccagguccucaug

SEQ ID NO: 662133 - RNA, 19 nt, Homo sapiens
  misc_RNA (1)...(19): siRNA sense strand
aggcgcagcuggcuugaaa

SEQ ID NO: 662134 - RNA, 19 nt, Homo sapiens
  misc_RNA (1)...(19): siRNA sense strand
aagaggauauccaggaaau

SEQ ID NO: 662135 - RNA, 19 nt, Homo sapiens
  misc_RNA (1)...(19): siRNA sense strand
caaaggauucgcaggaaau

SEQ ID NO: 662136 - RNA, 19 nt, Homo sapiens
  misc_RNA (1)...(19): siRNA sense strand
aaccaggucucaaaggauu

SEQ ID NO: 662137 - RNA, 19 nt, Homo sapiens
  misc_RNA (1)...(19): siRNA sense strand
gggugaagauggcauuaag

SEQ ID NO: 662138 - RNA, 19 nt, Homo sapiens
  misc_RNA (1)...(19): siRNA sense strand
agaacaaaguaaugacaga

SEQ ID NO: 662139 - RNA, 19 nt, Homo sapiens
  misc_RNA (1)...(19): siRNA sense strand
ggagacccuggcacacuua

SEQ ID NO: 662140 - RNA, 19 nt, Homo sapiens
  misc_RNA (1)...(19): siRNA sense strand
uaaguggauugccaggauu

SEQ ID NO: 662141 - RNA, 19 nt, Homo sapiens
  misc_RNA (1)...(19): siRNA sense strand
agaaccaggucucaaagga

SEQ ID NO: 662142 - RNA, 19 nt, Homo sapiens
  misc_RNA (1)...(19): siRNA sense strand
ugauugggaugaugggauu

SEQ ID NO: 662143 - RNA, 19 nt, Homo sapiens
  misc_RNA (1)...(19): siRNA sense strand
uuacggacuugucggugua

SEQ ID NO: 662144 - RNA, 19 nt, Homo sapiens
  misc_RNA (1)...(19): siRNA sense strand
aggagaagauauagaacuu

SEQ ID NO: 662145 - RNA, 19 nt, Homo sapiens
  misc_RNA (1)...(19): siRNA sense strand
gggaaagaaaggagaaaug

SEQ ID NO: 662146 - RNA, 19 nt, Homo sapiens
  misc_RNA (1)...(19): siRNA sense strand
ccaggaacaguuauuguga

SEQ ID NO: 662147 - RNA, 19 nt, Homo sapiens
  misc_RNA (1)...(19): siRNA sense strand
gggcaugccagguucuaaa

SEQ ID NO: 662148 - RNA, 19 nt, Homo sapiens
  misc_RNA (1)...(19): siRNA sense strand
aaaagacacugaagcuaaa

SEQ ID NO: 662149 - RNA, 19 nt, Homo sapiens
  misc_RNA (1)...(19): siRNA sense strand
ggaccuccaggaccaauug

SEQ ID NO: 662150 - RNA, 19 nt, Homo sapiens
  misc_RNA (1)...(19): siRNA sense strand
uguacacagugcccuuaua

SEQ ID NO: 662151 - RNA, 19 nt, Homo sapiens
  misc_RNA (1)...(19): siRNA sense strand
acaaaguaaugacagaaca

SEQ ID NO: 662152 - RNA, 19 nt, Homo sapiens
  misc_RNA (1)...(19): siRNA sense strand
ugucaggugugcaugaaga

SEQ ID NO: 662153 - RNA, 19 nt, Homo sapiens
  misc_RNA (1)...(19): siRNA sense strand
gaaccaggucucaaaggau

SEQ ID NO: 662154 - RNA, 19 nt, Homo sapiens
  misc_RNA (1)...(19): siRNA sense strand
gaccaagguuuuccaggua

SEQ ID NO: 662155 - RNA, 19 nt, Homo sapiens
  misc_RNA (1)...(19): siRNA sense strand
uggccaggcuugaaaggaa

SEQ ID NO: 662156 - RNA, 19 nt, Homo sapiens
  misc_RNA (1)...(19): siRNA sense strand
gcagggacccaagggcuuu

SEQ ID NO: 662157 - RNA, 19 nt, Homo sapiens
  misc_RNA (1)...(19): siRNA sense strand
caugccagguucuaaagga

SEQ ID NO: 662158 - RNA, 19 nt, Homo sapiens
  misc_RNA (1)...(19): siRNA sense strand
ccuggcacacuuaagauua

SEQ ID NO: 662159 - RNA, 19 nt, Homo sapiens
  misc_RNA (1)...(19): siRNA sense strand
agagccagguuauucagaa

SEQ ID NO: 662160 - RNA, 19 nt, Homo sapiens
  misc_RNA (1)...(19): siRNA sense strand
gauaagggagagccagguu

SEQ ID NO: 662161 - RNA, 19 nt, Homo sapiens
  misc_RNA (1)...(19): siRNA sense strand
ggaccuagaggaccuaagg

SEQ ID NO: 662162 - RNA, 19 nt, Homo sapiens
  misc_RNA (1)...(19): siRNA sense strand
caagggcuuuccaggacuu

SEQ ID NO: 662163 - RNA, 19 nt, Homo sapiens
  misc_RNA (1)...(19): siRNA sense strand
gcugucaggugugcaugaa

SEQ ID NO: 662164 - RNA, 19 nt, Homo sapiens
  misc_RNA (1)...(19): siRNA sense strand
gcaacaaagguucuaaagg

SEQ ID NO: 662165 - RNA, 19 nt, Homo sapiens
  misc_RNA (1)...(19): siRNA sense strand
gacccuggcacacuuaaga

SEQ ID NO: 662166 - RNA, 19 nt, Homo sapiens
  misc_RNA (1)...(19): siRNA sense strand
gggugcugcugguuugaaa

SEQ ID NO: 662167 - RNA, 19 nt, Homo sapiens
  misc_RNA (1)...(19): siRNA sense strand
uaagggagagccagguuau

SEQ ID NO: 662168 - RNA, 19 nt, Homo sapiens
  misc_RNA (1)...(19): siRNA sense strand
ccaggaaucccaggaguug

SEQ ID NO: 662169 - RNA, 19 nt, Homo sapiens
  misc_RNA (1)...(19): siRNA sense strand
uggaaguccuggaucauca

SEQ ID NO: 662170 - RNA, 19 nt, Homo sapiens
  misc_RNA (1)...(19): siRNA sense strand
ccaacagaauauuaugaca

SEQ ID NO: 662171 - RNA, 19 nt, Homo sapiens
  misc_RNA (1)...(19): siRNA sense strand
gacauuggcccuccaggau

SEQ ID NO: 662172 - RNA, 19 nt, Homo sapiens
  misc_RNA (1)...(19): siRNA sense strand
agaccaggccucccaggua

SEQ ID NO: 662173 - RNA, 19 nt, Homo sapiens
  misc_RNA (1)...(19): siRNA sense strand
ggaccaggaacaccagguu

SEQ ID NO: 662174 - RNA, 19 nt, Homo sapiens
  misc_RNA (1)...(19): siRNA sense strand
gagaaagggcuuggaugga

SEQ ID NO: 662175 - RNA, 19 nt, Homo sapiens
  misc_RNA (1)...(19): siRNA sense strand
ggguuucccuggguuaaug

SEQ ID NO: 662176 - RNA, 19 nt, Homo sapiens
  misc_RNA (1)...(19): siRNA sense strand
cauccuaaagaacaaagua

SEQ ID NO: 662177 - RNA, 19 nt, Homo sapiens
  misc_RNA (1)...(19): siRNA sense strand
gagguaagccaggcaagga

SEQ ID NO: 662178 - RNA, 19 nt, Homo sapiens
  misc_RNA (1)...(19): siRNA sense strand
ccagggaugccagguuuaa

SEQ ID NO: 662179 - RNA, 19 nt, Homo sapiens
  misc_RNA (1)...(19): siRNA sense strand
aggugaagauggagugauu

SEQ ID NO: 662180 - RNA, 19 nt, Homo sapiens
  misc_RNA (1)...(19): siRNA sense strand
ggacugccaggcuaucuag

SEQ ID NO: 662181 - RNA, 19 nt, Homo sapiens
  misc_RNA (1)...(19): siRNA sense strand
caacaaagguucuaaagga

SEQ ID NO: 662182 - RNA, 19 nt, Homo sapiens
  misc_RNA (1)...(19): siRNA sense strand
gagaagauauagaacuuga

SEQ ID NO: 662183 - RNA, 19 nt, Homo sapiens
  misc_RNA (1)...(19): siRNA sense strand
caacaaggcagaagaggua

SEQ ID NO: 662184 - RNA, 19 nt, Homo sapiens
  misc_RNA (1)...(19): siRNA sense strand
agagauaucccacguaaua

SEQ ID NO: 662185 - RNA, 19 nt, Homo sapiens
  misc_RNA (1)...(19): siRNA sense strand
ccaaggacuuccaggcuua

SEQ ID NO: 662186 - RNA, 19 nt, Homo sapiens
  misc_RNA (1)...(19): siRNA sense strand
ccaaggacgugauggaauu

SEQ ID NO: 662187 - RNA, 19 nt, Homo sapiens
  misc_RNA (1)...(19): siRNA sense strand
gcagcuggcuugaaaggaa

SEQ ID NO: 662188 - RNA, 19 nt, Homo sapiens
  misc_RNA (1)...(19): siRNA sense strand
ucagagauaucccacguaa

SEQ ID NO: 662189 - RNA, 19 nt, Homo sapiens
  misc_RNA (1)...(19): siRNA sense strand
uauaagaggugaccaagga

SEQ ID NO: 662190 - RNA, 19 nt, Homo sapiens
  misc_RNA (1)...(19): siRNA sense strand
caaagaggauauccaggaa

SEQ ID NO: 662191 - RNA, 19 nt, Homo sapiens
  misc_RNA (1)...(19): siRNA sense strand
gaacaaggagauaaaggaa

SEQ ID NO: 662192 - RNA, 19 nt, Homo sapiens
  misc_RNA (1)...(19): siRNA sense strand
gaagauauagaacuugaug

SEQ ID NO: 662193 - RNA, 19 nt, Homo sapiens
  misc_RNA (1)...(19): siRNA sense strand
ccaccaggcucaagaggaa

SEQ ID NO: 662194 - RNA, 19 nt, Homo sapiens
  misc_RNA (1)...(19): siRNA sense strand
gaaagagugauaggacaua

SEQ ID NO: 662195 - RNA, 19 nt, Homo sapiens
  misc_RNA (1)...(19): siRNA sense strand
gaaagggcuuggauggaau

SEQ ID NO: 662196 - RNA, 19 nt, Homo sapiens
  misc_RNA (1)...(19): siRNA sense strand
agaaagggcuuggauggaa

SEQ ID NO: 662197 - RNA, 19 nt, Homo sapiens
  misc_RNA (1)...(19): siRNA sense strand
gaccaggccucccagguau

SEQ ID NO: 662198 - RNA, 19 nt, Homo sapiens
  misc_RNA (1)...(19): siRNA sense strand
guaaagggccagagaggaa

SEQ ID NO: 662199 - RNA, 19 nt, Homo sapiens
  misc_RNA (1)...(19): siRNA sense strand
cagcaaggguugugucugu

SEQ ID NO: 662200 - RNA, 19 nt, Homo sapiens
  misc_RNA (1)...(19): siRNA sense strand
acaaggagauaaaggaaau

SEQ ID NO: 662201 - RNA, 19 nt, Homo sapiens
  misc_RNA (1)...(19): siRNA sense strand
ggaacaaggagauaaagga

SEQ ID NO: 662202 - RNA, 19 nt, Homo sapiens
  misc_RNA (1)...(19): siRNA sense strand
ggaccaccaggaacaguua

SEQ ID NO: 662203 - RNA, 19 nt, Homo sapiens
  misc_RNA (1)...(19): siRNA sense strand
caagggagaaccagcagua

SEQ ID NO: 662204 - RNA, 19 nt, Homo sapiens
  misc_RNA (1)...(19): siRNA sense strand
gagccuggguuaccuggaa

SEQ ID NO: 662205 - RNA, 19 nt, Homo sapiens
  misc_RNA (1)...(19): siRNA sense strand
auacaggucuuccaggauu

SEQ ID NO: 662206 - RNA, 19 nt, Homo sapiens
  misc_RNA (1)...(19): siRNA sense strand
ccacaggcauagaaggauu

SEQ ID NO: 662207 - RNA, 19 nt, Homo sapiens
  misc_RNA (1)...(19): siRNA sense strand
guacacagugcccuuauau

SEQ ID NO: 662208 - RNA, 19 nt, Homo sapiens
  misc_RNA (1)...(19): siRNA sense strand
ggaaaugaagggcuugaug

SEQ ID NO: 662209 - RNA, 19 nt, Homo sapiens
  misc_RNA (1)...(19): siRNA sense strand
ucaaaggauucgcaggaaa

SEQ ID NO: 662210 - RNA, 19 nt, Homo sapiens
  misc_RNA (1)...(19): siRNA sense strand
aaagggugcuccugcuaaa

SEQ ID NO: 662211 - RNA, 19 nt, Homo sapiens
  misc_RNA (1)...(19): siRNA sense strand
gaacccuggugcucaagga

SEQ ID NO: 662212 - RNA, 19 nt, Homo sapiens
  misc_RNA (1)...(19): siRNA sense strand
aggcuuaaauggauugaaa

SEQ ID NO: 662213 - RNA, 19 nt, Homo sapiens
  misc_RNA (1)...(19): siRNA sense strand
ggacuuccaggcuuaaaug

SEQ ID NO: 662214 - RNA, 19 nt, Homo sapiens
  misc_RNA (1)...(19): siRNA sense strand
uaacagaacggaccucaag

SEQ ID NO: 662215 - RNA, 19 nt, Homo sapiens
  misc_RNA (1)...(19): siRNA sense strand
gggauuuccuggagccauu

SEQ ID NO: 662216 - RNA, 19 nt, Homo sapiens
  misc_RNA (1)...(19): siRNA sense strand
aaagggagacccaggaauu

SEQ ID NO: 662217 - RNA, 19 nt, Homo sapiens
  misc_RNA (1)...(19): siRNA sense strand
gcaaggguugugucuguaa

SEQ ID NO: 662218 - RNA, 19 nt, Homo sapiens
  misc_RNA (1)...(19): siRNA sense strand
uaucuagggucuccaggaa

SEQ ID NO: 662219 - RNA, 19 nt, Homo sapiens
  misc_RNA (1)...(19): siRNA sense strand
cauuggcccuccaggauuu

SEQ ID NO: 662220 - RNA, 19 nt, Homo sapiens
  misc_RNA (1)...(19): siRNA sense strand
ggaaagaaaggagaaaugg

SEQ ID NO: 662221 - RNA, 19 nt, Homo sapiens
  misc_RNA (1)...(19): siRNA sense strand
aaagagugauaggacauaa

SEQ ID NO: 662222 - RNA, 19 nt, Homo sapiens
  misc_RNA (1)...(19): siRNA sense strand
uccagggagucauguaaua

SEQ ID NO: 662223 - RNA, 19 nt, Homo sapiens
  misc_RNA (1)...(19): siRNA sense strand
ggucugcccggugcaauua

SEQ ID NO: 662224 - RNA, 19 nt, Homo sapiens
  misc_RNA (1)...(19): siRNA sense strand
caaggguugugucuguaaa

SEQ ID NO: 662225 - RNA, 19 nt, Homo sapiens
  misc_RNA (1)...(19): siRNA sense strand
ucacuggguuguccuggaa

SEQ ID NO: 662226 - RNA, 19 nt, Homo sapiens
  misc_RNA (1)...(19): siRNA sense strand
agaaucauauggaucugaa

SEQ ID NO: 662227 - RNA, 19 nt, Homo sapiens
  misc_RNA (1)...(19): siRNA sense strand
ggaaagccagguccucaug

SEQ ID NO: 662228 - RNA, 19 nt, Homo sapiens
  misc_RNA (1)...(19): siRNA sense strand
aggcgcagcuggcuugaaa

SEQ ID NO: 662229 - RNA, 19 nt, Homo sapiens
  misc_RNA (1)...(19): siRNA sense strand
aagaggauauccaggaaau

SEQ ID NO: 662230 - RNA, 19 nt, Homo sapiens
  misc_RNA (1)...(19): siRNA sense strand
caaaggauucgcaggaaau

SEQ ID NO: 662231 - RNA, 19 nt, Homo sapiens
  misc_RNA (1)...(19): siRNA sense strand
aaccaggucucaaaggauu

SEQ ID NO: 662232 - RNA, 19 nt, Homo sapiens
  misc_RNA (1)...(19): siRNA sense strand
uuacggacuugucggugua

SEQ ID NO: 662233 - RNA, 19 nt, Homo sapiens
  misc_RNA (1)...(19): siRNA sense strand
ggagacccuggcacacuua

SEQ ID NO: 662234 - RNA, 19 nt, Homo sapiens
  misc_RNA (1)...(19): siRNA sense strand
agaaccaggucucaaagga

SEQ ID NO: 662235 - RNA, 19 nt, Homo sapiens
  misc_RNA (1)...(19): siRNA sense strand
ugauugggaugaugggauu

SEQ ID NO: 662236 - RNA, 19 nt, Homo sapiens
  misc_RNA (1)...(19): siRNA sense strand
gggugaagauggcauuaag

SEQ ID NO: 662237 - RNA, 19 nt, Homo sapiens
  misc_RNA (1)...(19): siRNA sense strand
uaaguggauugccaggauu

SEQ ID NO: 662238 - RNA, 19 nt, Homo sapiens
  misc_RNA (1)...(19): siRNA sense strand
aggagaagauauagaacuu

SEQ ID NO: 662239 - RNA, 19 nt, Homo sapiens
  misc_RNA (1)...(19): siRNA sense strand
gggaaagaaaggagaaaug

SEQ ID NO: 662240 - RNA, 19 nt, Homo sapiens
  misc_RNA (1)...(19): siRNA sense strand
ccaggaacaguuauuguga

SEQ ID NO: 662241 - RNA, 19 nt, Homo sapiens
  misc_RNA (1)...(19): siRNA sense strand
gggcaugccagguucuaaa

SEQ ID NO: 662242 - RNA, 19 nt, Homo sapiens
  misc_RNA (1)...(19): siRNA sense strand
ggaccuccaggaccaauug

SEQ ID NO: 662243 - RNA, 19 nt, Homo sapiens
  misc_RNA (1)...(19): siRNA sense strand
uguacacagugcccuuaua

SEQ ID NO: 662244 - RNA, 19 nt, Homo sapiens
  misc_RNA (1)...(19): siRNA sense strand
gaaccaggucucaaaggau

SEQ ID NO: 662245 - RNA, 19 nt, Homo sapiens
  misc_RNA (1)...(19): siRNA sense strand
gaccaagguuuuccaggua

SEQ ID NO: 662246 - RNA, 19 nt, Homo sapiens
  misc_RNA (1)...(19): siRNA sense strand
uggccaggcuugaaaggaa

SEQ ID NO: 662247 - RNA, 19 nt, Homo sapiens
  misc_RNA (1)...(19): siRNA sense strand
gcagggacccaagggcuuu

SEQ ID NO: 662248 - RNA, 19 nt, Homo sapiens
  misc_RNA (1)...(19): siRNA sense strand
caugccagguucuaaagga

SEQ ID NO: 662249 - RNA, 19 nt, Homo sapiens
  misc_RNA (1)...(19): siRNA sense strand
ccuggcacacuuaagauua

SEQ ID NO: 662250 - RNA, 19 nt, Homo sapiens
  misc_RNA (1)...(19): siRNA sense strand
agagccagguuauucagaa

SEQ ID NO: 662251 - RNA, 19 nt, Homo sapiens
  misc_RNA (1)...(19): siRNA sense strand
gauaagggagagccagguu

SEQ ID NO: 662252 - RNA, 19 nt, Homo sapiens
  misc_RNA (1)...(19): siRNA sense strand
ggaccuagaggaccuaagg

SEQ ID NO: 662253 - RNA, 19 nt, Homo sapiens
  misc_RNA (1)...(19): siRNA sense strand
gcaacaaagguucuaaagg

SEQ ID NO: 662254 - RNA, 19 nt, Homo sapiens
  misc_RNA (1)...(19): siRNA sense strand
gacccuggcacacuuaaga

SEQ ID NO: 662255 - RNA, 19 nt, Homo sapiens
  misc_RNA (1)...(19): siRNA sense strand
uaagggagagccagguuau

SEQ ID NO: 662256 - RNA, 19 nt, Homo sapiens
  misc_RNA (1)...(19): siRNA sense strand
caagggcuuuccaggacuu

SEQ ID NO: 662257 - RNA, 19 nt, Homo sapiens
  misc_RNA (1)...(19): siRNA sense strand
ccaggaaucccaggaguug

SEQ ID NO: 662258 - RNA, 19 nt, Homo sapiens
  misc_RNA (1)...(19): siRNA sense strand
uggaaguccuggaucauca

SEQ ID NO: 662259 - RNA, 19 nt, Homo sapiens
  misc_RNA (1)...(19): siRNA sense strand
ccaacagaauauuaugaca

SEQ ID NO: 662260 - RNA, 19 nt, Homo sapiens
  misc_RNA (1)...(19): siRNA sense strand
gggugcugcugguuugaaa

SEQ ID NO: 662261 - RNA, 19 nt, Homo sapiens
  misc_RNA (1)...(19): siRNA sense strand
gacauuggcccuccaggau

SEQ ID NO: 662262 - RNA, 19 nt, Homo sapiens
  misc_RNA (1)...(19): siRNA sense strand
agaccaggccucccaggua

SEQ ID NO: 662263 - RNA, 19 nt, Homo sapiens
  misc_RNA (1)...(19): siRNA sense strand
ggaccaggaacaccagguu

SEQ ID NO: 662264 - RNA, 19 nt, Homo sapiens
  misc_RNA (1)...(19): siRNA sense strand
gagaaagggcuuggaugga

SEQ ID NO: 662265 - RNA, 19 nt, Homo sapiens
  misc_RNA (1)...(19): siRNA sense strand
ggguuucccuggguuaaug

SEQ ID NO: 662266 - RNA, 19 nt, Homo sapiens
  misc_RNA (1)...(19): siRNA sense strand
gagguaagccaggcaagga

SEQ ID NO: 662267 - RNA, 19 nt, Homo sapiens
  misc_RNA (1)...(19): siRNA sense strand
ccagggaugccagguuuaa

SEQ ID NO: 662268 - RNA, 19 nt, Homo sapiens
  misc_RNA (1)...(19): siRNA sense strand
aggugaagauggagugauu

SEQ ID NO: 662269 - RNA, 19 nt, Homo sapiens
  misc_RNA (1)...(19): siRNA sense strand
ggacugccaggcuaucuag

SEQ ID NO: 662270 - RNA, 19 nt, Homo sapiens
  misc_RNA (1)...(19): siRNA sense strand
auaaguggauugccaggau

SEQ ID NO: 662271 - RNA, 19 nt, Homo sapiens
  misc_RNA (1)...(19): siRNA sense strand
ggaccaauggguauaagag

SEQ ID NO: 662272 - RNA, 19 nt, Homo sapiens
  misc_RNA (1)...(19): siRNA sense strand
ggaauuccaggucaucaag

SEQ ID NO: 662273 - RNA, 19 nt, Homo sapiens
  misc_RNA (1)...(19): siRNA sense strand
gaccaggaacaccagguuu

SEQ ID NO: 662274 - RNA, 19 nt, Homo sapiens
  misc_RNA (1)...(19): siRNA sense strand
ggaaaacccggaaaagaug

SEQ ID NO: 662275 - RNA, 19 nt, Homo sapiens
  misc_RNA (1)...(19): siRNA sense strand
gaccaaggacgugauggaa

SEQ ID NO: 662276 - RNA, 19 nt, Homo sapiens
  misc_RNA (1)...(19): siRNA sense strand
cuccaggucuuccaggauu

SEQ ID NO: 662277 - RNA, 19 nt, Homo sapiens
  misc_RNA (1)...(19): siRNA sense strand
cgggugauaugggaaagaa

SEQ ID NO: 662278 - RNA, 19 nt, Homo sapiens
  misc_RNA (1)...(19): siRNA sense strand
ggagaagauauagaacuug

SEQ ID NO: 662279 - RNA, 19 nt, Homo sapiens
  misc_RNA (1)...(19): siRNA sense strand
ggagagcucaguguuucaa

SEQ ID NO: 662280 - RNA, 19 nt, Homo sapiens
  misc_RNA (1)...(19): siRNA sense strand
uggcccaccuggacauuug

SEQ ID NO: 662281 - RNA, 19 nt, Homo sapiens
  misc_RNA (1)...(19): siRNA sense strand
caacaaagguucuaaagga

SEQ ID NO: 662282 - RNA, 19 nt, Homo sapiens
  misc_RNA (1)...(19): siRNA sense strand
gagaagauauagaacuuga

SEQ ID NO: 662283 - RNA, 19 nt, Homo sapiens
  misc_RNA (1)...(19): siRNA sense strand
caacaaggcagaagaggua

SEQ ID NO: 662284 - RNA, 19 nt, Homo sapiens
  misc_RNA (1)...(19): siRNA sense strand
agagauaucccacguaaua

SEQ ID NO: 662285 - RNA, 19 nt, Homo sapiens
  misc_RNA (1)...(19): siRNA sense strand
ccaaggacuuccaggcuua

SEQ ID NO: 662286 - RNA, 19 nt, Homo sapiens
  misc_RNA (1)...(19): siRNA sense strand
ccaaggacgugauggaauu

SEQ ID NO: 662287 - RNA, 19 nt, Homo sapiens
  misc_RNA (1)...(19): siRNA sense strand
gcagcuggcuugaaaggaa

SEQ ID NO: 662288 - RNA, 19 nt, Homo sapiens
  misc_RNA (1)...(19): siRNA sense strand
ucagagauaucccacguaa

SEQ ID NO: 662289 - RNA, 19 nt, Homo sapiens
  misc_RNA (1)...(19): siRNA sense strand
uauaagaggugaccaagga

SEQ ID NO: 662290 - RNA, 19 nt, Homo sapiens
  misc_RNA (1)...(19): siRNA sense strand
caaagaggauauccaggaa

SEQ ID NO: 662291 - RNA, 19 nt, Homo sapiens
  misc_RNA (1)...(19): siRNA sense strand
gaacaaggagauaaaggaa

SEQ ID NO: 662292 - RNA, 19 nt, Homo sapiens
  misc_RNA (1)...(19): siRNA sense strand
gaagauauagaacuugaug

SEQ ID NO: 662293 - RNA, 19 nt, Homo sapiens
  misc_RNA (1)...(19): siRNA sense strand
ccaccaggcucaagaggaa

SEQ ID NO: 662294 - RNA, 19 nt, Homo sapiens
  misc_RNA (1)...(19): siRNA sense strand
gaaagagugauaggacaua

SEQ ID NO: 662295 - RNA, 19 nt, Homo sapiens
  misc_RNA (1)...(19): siRNA sense strand
gaaagggcuuggauggaau

SEQ ID NO: 662296 - RNA, 19 nt, Homo sapiens
  misc_RNA (1)...(19): siRNA sense strand
agaaagggcuuggauggaa

SEQ ID NO: 662297 - RNA, 19 nt, Homo sapiens
  misc_RNA (1)...(19): siRNA sense strand
gaccaggccucccagguau

SEQ ID NO: 662298 - RNA, 19 nt, Homo sapiens
  misc_RNA (1)...(19): siRNA sense strand
guaaagggccagagaggaa

SEQ ID NO: 662299 - RNA, 19 nt, Homo sapiens
  misc_RNA (1)...(19): siRNA sense strand
cagcaaggguugugucugu

SEQ ID NO: 662300 - RNA, 19 nt, Homo sapiens
  misc_RNA (1)...(19): siRNA sense strand
acaaggagauaaaggaaau

SEQ ID NO: 662301 - RNA, 19 nt, Homo sapiens
  misc_RNA (1)...(19): siRNA sense strand
ggaacaaggagauaaagga

SEQ ID NO: 662302 - RNA, 19 nt, Homo sapiens
  misc_RNA (1)...(19): siRNA sense strand
ggaccaccaggaacaguua

SEQ ID NO: 662303 - RNA, 19 nt, Homo sapiens
  misc_RNA (1)...(19): siRNA sense strand
caagggagaaccagcagua

SEQ ID NO: 662304 - RNA, 19 nt, Homo sapiens
  misc_RNA (1)...(19): siRNA sense strand
gagccuggguuaccuggaa

SEQ ID NO: 662305 - RNA, 19 nt, Homo sapiens
  misc_RNA (1)...(19): siRNA sense strand
auacaggucuuccaggauu

SEQ ID NO: 662306 - RNA, 19 nt, Homo sapiens
  misc_RNA (1)...(19): siRNA sense strand
ccacaggcauagaaggauu

SEQ ID NO: 662307 - RNA, 19 nt, Homo sapiens
  misc_RNA (1)...(19): siRNA sense strand
guacacagugcccuuauau

SEQ ID NO: 662308 - RNA, 19 nt, Homo sapiens
  misc_RNA (1)...(19): siRNA sense strand
ggaaaugaagggcuugaug

SEQ ID NO: 662309 - RNA, 19 nt, Homo sapiens
  misc_RNA (1)...(19): siRNA sense strand
ucaaaggauucgcaggaaa

SEQ ID NO: 662310 - RNA, 19 nt, Homo sapiens
  misc_RNA (1)...(19): siRNA sense strand
aaagggugcuccugcuaaa

SEQ ID NO: 662311 - RNA, 19 nt, Homo sapiens
  misc_RNA (1)...(19): siRNA sense strand
gaacccuggugcucaagga

SEQ ID NO: 662312 - RNA, 19 nt, Homo sapiens
  misc_RNA (1)...(19): siRNA sense strand
aggcuuaaauggauugaaa

SEQ ID NO: 662313 - RNA, 19 nt, Homo sapiens
  misc_RNA (1)...(19): siRNA sense strand
ggacuuccaggcuuaaaug

SEQ ID NO: 662314 - RNA, 19 nt, Homo sapiens
  misc_RNA (1)...(19): siRNA sense strand
uaacagaacggaccucaag

SEQ ID NO: 662315 - RNA, 19 nt, Homo sapiens
  misc_RNA (1)...(19): siRNA sense strand
gggauuuccuggagccauu

SEQ ID NO: 662316 - RNA, 19 nt, Homo sapiens
  misc_RNA (1)...(19): siRNA sense strand
aaagggagacccaggaauu

SEQ ID NO: 662317 - RNA, 19 nt, Homo sapiens
  misc_RNA (1)...(19): siRNA sense strand
gcaaggguugugucuguaa

SEQ ID NO: 662318 - RNA, 19 nt, Homo sapiens
  misc_RNA (1)...(19): siRNA sense strand
uaucuagggucuccaggaa

SEQ ID NO: 662319 - RNA, 19 nt, Homo sapiens
  misc_RNA (1)...(19): siRNA sense strand
cauuggcccuccaggauuu

SEQ ID NO: 662320 - RNA, 19 nt, Homo sapiens
  misc_RNA (1)...(19): siRNA sense strand
ggaaagaaaggagaaaugg

SEQ ID NO: 662321 - RNA, 19 nt, Homo sapiens
  misc_RNA (1)...(19): siRNA sense strand
aaagagugauaggacauaa

SEQ ID NO: 662322 - RNA, 19 nt, Homo sapiens
  misc_RNA (1)...(19): siRNA sense strand
uccagggagucauguaaua

SEQ ID NO: 662323 - RNA, 19 nt, Homo sapiens
  misc_RNA (1)...(19): siRNA sense strand
ggucugcccggugcaauua

SEQ ID NO: 662324 - RNA, 19 nt, Homo sapiens
  misc_RNA (1)...(19): siRNA sense strand
caaggguugugucuguaaa

SEQ ID NO: 662325 - RNA, 19 nt, Homo sapiens
  misc_RNA (1)...(19): siRNA sense strand
ucacuggguuguccuggaa

SEQ ID NO: 662326 - RNA, 19 nt, Homo sapiens
  misc_RNA (1)...(19): siRNA sense strand
agaaucauauggaucugaa

SEQ ID NO: 662327 - RNA, 19 nt, Homo sapiens
  misc_RNA (1)...(19): siRNA sense strand
ggaaagccagguccucaug

SEQ ID NO: 662328 - RNA, 19 nt, Homo sapiens
  misc_RNA (1)...(19): siRNA sense strand
aggcgcagcuggcuugaaa

SEQ ID NO: 662329 - RNA, 19 nt, Homo sapiens
  misc_RNA (1)...(19): siRNA sense strand
aagaggauauccaggaaau

SEQ ID NO: 662330 - RNA, 19 nt, Homo sapiens
  misc_RNA (1)...(19): siRNA sense strand
caaaggauucgcaggaaau

SEQ ID NO: 662331 - RNA, 19 nt, Homo sapiens
  misc_RNA (1)...(19): siRNA sense strand
aaccaggucucaaaggauu

SEQ ID NO: 662332 - RNA, 19 nt, Homo sapiens
  misc_RNA (1)...(19): siRNA sense strand
uuacggacuugucggugua

SEQ ID NO: 662333 - RNA, 19 nt, Homo sapiens
  misc_RNA (1)...(19): siRNA sense strand
ggagacccuggcacacuua

SEQ ID NO: 662334 - RNA, 19 nt, Homo sapiens
  misc_RNA (1)...(19): siRNA sense strand
agaaccaggucucaaagga

SEQ ID NO: 662335 - RNA, 19 nt, Homo sapiens
  misc_RNA (1)...(19): siRNA sense strand
ugauugggaugaugggauu

SEQ ID NO: 662336 - RNA, 19 nt, Homo sapiens
  misc_RNA (1)...(19): siRNA sense strand
gggugaagauggcauuaag

SEQ ID NO: 662337 - RNA, 19 nt, Homo sapiens
  misc_RNA (1)...(19): siRNA sense strand
uaaguggauugccaggauu

SEQ ID NO: 662338 - RNA, 19 nt, Homo sapiens
  misc_RNA (1)...(19): siRNA sense strand
aggagaagauauagaacuu

SEQ ID NO: 662339 - RNA, 19 nt, Homo sapiens
  misc_RNA (1)...(19): siRNA sense strand
gggaaagaaaggagaaaug

SEQ ID NO: 662340 - RNA, 19 nt, Homo sapiens
  misc_RNA (1)...(19): siRNA sense strand
ccaggaacaguuauuguga

SEQ ID NO: 662341 - RNA, 19 nt, Homo sapiens
  misc_RNA (1)...(19): siRNA sense strand
gggcaugccagguucuaaa

SEQ ID NO: 662342 - RNA, 19 nt, Homo sapiens
  misc_RNA (1)...(19): siRNA sense strand
ggaccuccaggaccaauug

SEQ ID NO: 662343 - RNA, 19 nt, Homo sapiens
  misc_RNA (1)...(19): siRNA sense strand
uguacacagugcccuuaua

SEQ ID NO: 662344 - RNA, 19 nt, Homo sapiens
  misc_RNA (1)...(19): siRNA sense strand
gaaccaggucucaaaggau

SEQ ID NO: 662345 - RNA, 19 nt, Homo sapiens
  misc_RNA (1)...(19): siRNA sense strand
gaccaagguuuuccaggua

SEQ ID NO: 662346 - RNA, 19 nt, Homo sapiens
  misc_RNA (1)...(19): siRNA sense strand
uggccaggcuugaaaggaa

SEQ ID NO: 662347 - RNA, 19 nt, Homo sapiens
  misc_RNA (1)...(19): siRNA sense strand
gcagggacccaagggcuuu

SEQ ID NO: 662348 - RNA, 19 nt, Homo sapiens
  misc_RNA (1)...(19): siRNA sense strand
caugccagguucuaaagga

SEQ ID NO: 662349 - RNA, 19 nt, Homo sapiens
  misc_RNA (1)...(19): siRNA sense strand
ccuggcacacuuaagauua

SEQ ID NO: 662350 - RNA, 19 nt, Homo sapiens
  misc_RNA (1)...(19): siRNA sense strand
agagccagguuauucagaa

SEQ ID NO: 662351 - RNA, 19 nt, Homo sapiens
  misc_RNA (1)...(19): siRNA sense strand
gauaagggagagccagguu

SEQ ID NO: 662352 - RNA, 19 nt, Homo sapiens
  misc_RNA (1)...(19): siRNA sense strand
ggaccuagaggaccuaagg

SEQ ID NO: 662353 - RNA, 19 nt, Homo sapiens
  misc_RNA (1)...(19): siRNA sense strand
gcaacaaagguucuaaagg

SEQ ID NO: 662354 - RNA, 19 nt, Homo sapiens
  misc_RNA (1)...(19): siRNA sense strand
gacccuggcacacuuaaga

SEQ ID NO: 662355 - RNA, 19 nt, Homo sapiens
  misc_RNA (1)...(19): siRNA sense strand
uaagggagagccagguuau

SEQ ID NO: 662356 - RNA, 19 nt, Homo sapiens
  misc_RNA (1)...(19): siRNA sense strand
caagggcuuuccaggacuu

SEQ ID NO: 662357 - RNA, 19 nt, Homo sapiens
  misc_RNA (1)...(19): siRNA sense strand
ccaggaaucccaggaguug

SEQ ID NO: 662358 - RNA, 19 nt, Homo sapiens
  misc_RNA (1)...(19): siRNA sense strand
uggaaguccuggaucauca

SEQ ID NO: 662359 - RNA, 19 nt, Homo sapiens
  misc_RNA (1)...(19): siRNA sense strand
ccaacagaauauuaugaca

SEQ ID NO: 662360 - RNA, 19 nt, Homo sapiens
  misc_RNA (1)...(19): siRNA sense strand
gggugcugcugguuugaaa

SEQ ID NO: 662361 - RNA, 19 nt, Homo sapiens
  misc_RNA (1)...(19): siRNA sense strand
gacauuggcccuccaggau

SEQ ID NO: 662362 - RNA, 19 nt, Homo sapiens
  misc_RNA (1)...(19): siRNA sense strand
agaccaggccucccaggua

SEQ ID NO: 662363 - RNA, 19 nt, Homo sapiens
  misc_RNA (1)...(19): siRNA sense strand
ggaccaggaacaccagguu

SEQ ID NO: 662364 - RNA, 19 nt, Homo sapiens
  misc_RNA (1)...(19): siRNA sense strand
gagaaagggcuuggaugga

SEQ ID NO: 662365 - RNA, 19 nt, Homo sapiens
  misc_RNA (1)...(19): siRNA sense strand
ggguuucccuggguuaaug

SEQ ID NO: 662366 - RNA, 19 nt, Homo sapiens
  misc_RNA (1)...(19): siRNA sense strand
gagguaagccaggcaagga

SEQ ID NO: 662367 - RNA, 19 nt, Homo sapiens
  misc_RNA (1)...(19): siRNA sense strand
ccagggaugccagguuuaa

SEQ ID NO: 662368 - RNA, 19 nt, Homo sapiens
  misc_RNA (1)...(19): siRNA sense strand
aggugaagauggagugauu

SEQ ID NO: 662369 - RNA, 19 nt, Homo sapiens
  misc_RNA (1)...(19): siRNA sense strand
ggacugccaggcuaucuag

SEQ ID NO: 662370 - RNA, 19 nt, Homo sapiens
  misc_RNA (1)...(19): siRNA sense strand
auaaguggauugccaggau

SEQ ID NO: 662371 - RNA, 19 nt, Homo sapiens
  misc_RNA (1)...(19): siRNA sense strand
ggaccaauggguauaagag

SEQ ID NO: 662372 - RNA, 19 nt, Homo sapiens
  misc_RNA (1)...(19): siRNA sense strand
ggaauuccaggucaucaag

SEQ ID NO: 662373 - RNA, 19 nt, Homo sapiens
  misc_RNA (1)...(19): siRNA sense strand
gaccaggaacaccagguuu

SEQ ID NO: 662374 - RNA, 19 nt, Homo sapiens
  misc_RNA (1)...(19): siRNA sense strand
ggaaaacccggaaaagaug

SEQ ID NO: 662375 - RNA, 19 nt, Homo sapiens
  misc_RNA (1)...(19): siRNA sense strand
gaccaaggacgugauggaa

SEQ ID NO: 662376 - RNA, 19 nt, Homo sapiens
  misc_RNA (1)...(19): siRNA sense strand
cuccaggucuuccaggauu

SEQ ID NO: 662377 - RNA, 19 nt, Homo sapiens
  misc_RNA (1)...(19): siRNA sense strand
cgggugauaugggaaagaa

SEQ ID NO: 662378 - RNA, 19 nt, Homo sapiens
  misc_RNA (1)...(19): siRNA sense strand
ggagaagauauagaacuug

SEQ ID NO: 662379 - RNA, 19 nt, Homo sapiens
  misc_RNA (1)...(19): siRNA sense strand
ggagagcucaguguuucaa

SEQ ID NO: 662380 - RNA, 19 nt, Homo sapiens
  misc_RNA (1)...(19): siRNA sense strand
uggcccaccuggacauuug

SEQ ID NO: 662381 - RNA, 19 nt, Homo sapiens
  misc_RNA (1)...(19): siRNA sense strand
caacaaagguucuaaagga

SEQ ID NO: 662382 - RNA, 19 nt, Homo sapiens
  misc_RNA (1)...(19): siRNA sense strand
gagaagauauagaacuuga

SEQ ID NO: 662383 - RNA, 19 nt, Homo sapiens
  misc_RNA (1)...(19): siRNA sense strand
caacaaggcagaagaggua

SEQ ID NO: 662384 - RNA, 19 nt, Homo sapiens
  misc_RNA (1)...(19): siRNA sense strand
agagauaucccacguaaua

SEQ ID NO: 662385 - RNA, 19 nt, Homo sapiens
  misc_RNA (1)...(19): siRNA sense strand
ccaaggacuuccaggcuua

SEQ ID NO: 662386 - RNA, 19 nt, Homo sapiens
  misc_RNA (1)...(19): siRNA sense strand
ccaaggacgugauggaauu

SEQ ID NO: 662387 - RNA, 19 nt, Homo sapiens
  misc_RNA (1)...(19): siRNA sense strand
gcagcuggcuugaaaggaa

SEQ ID NO: 662388 - RNA, 19 nt, Homo sapiens
  misc_RNA (1)...(19): siRNA sense strand
ucagagauaucccacguaa

SEQ ID NO: 662389 - RNA, 19 nt, Homo sapiens
  misc_RNA (1)...(19): siRNA sense strand
uauaagaggugaccaagga

SEQ ID NO: 662390 - RNA, 19 nt, Homo sapiens
  misc_RNA (1)...(19): siRNA sense strand
caaagaggauauccaggaa

SEQ ID NO: 662391 - RNA, 19 nt, Homo sapiens
  misc_RNA (1)...(19): siRNA sense strand
gaacaaggagauaaaggaa

SEQ ID NO: 662392 - RNA, 19 nt, Homo sapiens
  misc_RNA (1)...(19): siRNA sense strand
gaagauauagaacuugaug

SEQ ID NO: 662393 - RNA, 19 nt, Homo sapiens
  misc_RNA (1)...(19): siRNA sense strand
ccaccaggcucaagaggaa

SEQ ID NO: 662394 - RNA, 19 nt, Homo sapiens
  misc_RNA (1)...(19): siRNA sense strand
gaaagagugauaggacaua

SEQ ID NO: 662395 - RNA, 19 nt, Homo sapiens
  misc_RNA (1)...(19): siRNA sense strand
gaaagggcuuggauggaau

SEQ ID NO: 662396 - RNA, 19 nt, Homo sapiens
  misc_RNA (1)...(19): siRNA sense strand
agaaagggcuuggauggaa

SEQ ID NO: 662397 - RNA, 19 nt, Homo sapiens
  misc_RNA (1)...(19): siRNA sense strand
gaccaggccucccagguau

SEQ ID NO: 662398 - RNA, 19 nt, Homo sapiens
  misc_RNA (1)...(19): siRNA sense strand
guaaagggccagagaggaa

SEQ ID NO: 662399 - RNA, 19 nt, Homo sapiens
  misc_RNA (1)...(19): siRNA sense strand
cagcaaggguugugucugu

SEQ ID NO: 662400 - RNA, 19 nt, Homo sapiens
  misc_RNA (1)...(19): siRNA sense strand
acaaggagauaaaggaaau

SEQ ID NO: 662401 - RNA, 19 nt, Homo sapiens
  misc_RNA (1)...(19): siRNA sense strand
ggaacaaggagauaaagga

SEQ ID NO: 662402 - RNA, 19 nt, Homo sapiens
  misc_RNA (1)...(19): siRNA sense strand
ggaccaccaggaacaguua

SEQ ID NO: 662403 - RNA, 19 nt, Homo sapiens
  misc_RNA (1)...(19): siRNA sense strand
gaaagccuauuccaucaac

SEQ ID NO: 662404 - RNA, 19 nt, Homo sapiens
  misc_RNA (1)...(19): siRNA sense strand
caagggagaaccagcagua

SEQ ID NO: 662405 - RNA, 19 nt, Homo sapiens
  misc_RNA (1)...(19): siRNA sense strand
gagccuggguuaccuggaa

SEQ ID NO: 662406 - RNA, 19 nt, Homo sapiens
  misc_RNA (1)...(19): siRNA sense strand
auacaggucuuccaggauu

SEQ ID NO: 662407 - RNA, 19 nt, Homo sapiens
  misc_RNA (1)...(19): siRNA sense strand
ccacaggcauagaaggauu

SEQ ID NO: 662408 - RNA, 19 nt, Homo sapiens
  misc_RNA (1)...(19): siRNA sense strand
guacacagugcccuuauau

SEQ ID NO: 662409 - RNA, 19 nt, Homo sapiens
  misc_RNA (1)...(19): siRNA sense strand
ggaaaugaagggcuugaug

SEQ ID NO: 662410 - RNA, 19 nt, Homo sapiens
  misc_RNA (1)...(19): siRNA sense strand
ucaaaggauucgcaggaaa

SEQ ID NO: 662411 - RNA, 19 nt, Homo sapiens
  misc_RNA (1)...(19): siRNA sense strand
aaagggugcuccugcuaaa

SEQ ID NO: 662412 - RNA, 19 nt, Homo sapiens
  misc_RNA (1)...(19): siRNA sense strand
gaacccuggugcucaagga

SEQ ID NO: 662413 - RNA, 19 nt, Homo sapiens
  misc_RNA (1)...(19): siRNA sense strand
aggcuuaaauggauugaaa

SEQ ID NO: 662414 - RNA, 19 nt, Homo sapiens
  misc_RNA (1)...(19): siRNA sense strand
ggacuuccaggcuuaaaug

SEQ ID NO: 662415 - RNA, 19 nt, Homo sapiens
  misc_RNA (1)...(19): siRNA sense strand
uaacagaacggaccucaag

SEQ ID NO: 662416 - RNA, 19 nt, Homo sapiens
  misc_RNA (1)...(19): siRNA sense strand
ccuauuccaucaacuguga

SEQ ID NO: 662417 - RNA, 19 nt, Homo sapiens
  misc_RNA (1)...(19): siRNA sense strand
gggauuuccuggagccauu

SEQ ID NO: 662418 - RNA, 19 nt, Homo sapiens
  misc_RNA (1)...(19): siRNA sense strand
aaagggagacccaggaauu

SEQ ID NO: 662419 - RNA, 19 nt, Homo sapiens
  misc_RNA (1)...(19): siRNA sense strand
gcaaggguugugucuguaa

SEQ ID NO: 662420 - RNA, 19 nt, Homo sapiens
  misc_RNA (1)...(19): siRNA sense strand
uaucuagggucuccaggaa

SEQ ID NO: 662421 - RNA, 19 nt, Homo sapiens
  misc_RNA (1)...(19): siRNA sense strand
cauuggcccuccaggauuu

SEQ ID NO: 662422 - RNA, 19 nt, Homo sapiens
  misc_RNA (1)...(19): siRNA sense strand
ggaaagaaaggagaaaugg

SEQ ID NO: 662423 - RNA, 19 nt, Homo sapiens
  misc_RNA (1)...(19): siRNA sense strand
aaagagugauaggacauaa

SEQ ID NO: 662424 - RNA, 19 nt, Homo sapiens
  misc_RNA (1)...(19): siRNA sense strand
uccagggagucauguaaua

SEQ ID NO: 662425 - RNA, 19 nt, Homo sapiens
  misc_RNA (1)...(19): siRNA sense strand
ggucugcccggugcaauua

SEQ ID NO: 662426 - RNA, 19 nt, Homo sapiens
  misc_RNA (1)...(19): siRNA sense strand
caaggguugugucuguaaa

SEQ ID NO: 662427 - RNA, 19 nt, Homo sapiens
  misc_RNA (1)...(19): siRNA sense strand
ucacuggguuguccuggaa

SEQ ID NO: 662428 - RNA, 19 nt, Homo sapiens
  misc_RNA (1)...(19): siRNA sense strand
agaaucauauggaucugaa

SEQ ID NO: 662429 - RNA, 19 nt, Homo sapiens
  misc_RNA (1)...(19): siRNA sense strand
ggaaagccagguccucaug

SEQ ID NO: 662430 - RNA, 19 nt, Homo sapiens
  misc_RNA (1)...(19): siRNA sense strand
aggcgcagcuggcuugaaa

SEQ ID NO: 662431 - RNA, 19 nt, Homo sapiens
  misc_RNA (1)...(19): siRNA sense strand
aagaggauauccaggaaau

SEQ ID NO: 662432 - RNA, 19 nt, Homo sapiens
  misc_RNA (1)...(19): siRNA sense strand
caaaggauucgcaggaaau

SEQ ID NO: 662433 - RNA, 19 nt, Homo sapiens
  misc_RNA (1)...(19): siRNA sense strand
aaccaggucucaaaggauu

SEQ ID NO: 662434 - RNA, 19 nt, Homo sapiens
  misc_RNA (1)...(19): siRNA sense strand
uuacggacuugucggugua

SEQ ID NO: 662435 - RNA, 19 nt, Homo sapiens
  misc_RNA (1)...(19): siRNA sense strand
ggagacccuggcacacuua

SEQ ID NO: 662436 - RNA, 19 nt, Homo sapiens
  misc_RNA (1)...(19): siRNA sense strand
uaaguggauugccaggauu

SEQ ID NO: 662437 - RNA, 19 nt, Homo sapiens
  misc_RNA (1)...(19): siRNA sense strand
agaaccaggucucaaagga

SEQ ID NO: 662438 - RNA, 19 nt, Homo sapiens
  misc_RNA (1)...(19): siRNA sense strand
ugauugggaugaugggauu

SEQ ID NO: 662439 - RNA, 19 nt, Homo sapiens
  misc_RNA (1)...(19): siRNA sense strand
gggugaagauggcauuaag

SEQ ID NO: 662440 - RNA, 19 nt, Homo sapiens
  misc_RNA (1)...(19): siRNA sense strand
aggagaagauauagaacuu

SEQ ID NO: 662441 - RNA, 19 nt, Homo sapiens
  misc_RNA (1)...(19): siRNA sense strand
gggaaagaaaggagaaaug

SEQ ID NO: 662442 - RNA, 19 nt, Homo sapiens
  misc_RNA (1)...(19): siRNA sense strand
ccaggaacaguuauuguga

SEQ ID NO: 662443 - RNA, 19 nt, Homo sapiens
  misc_RNA (1)...(19): siRNA sense strand
gggcaugccagguucuaaa

SEQ ID NO: 662444 - RNA, 19 nt, Homo sapiens
  misc_RNA (1)...(19): siRNA sense strand
ggaccuccaggaccaauug

SEQ ID NO: 662445 - RNA, 19 nt, Homo sapiens
  misc_RNA (1)...(19): siRNA sense strand
uguacacagugcccuuaua

SEQ ID NO: 662446 - RNA, 19 nt, Homo sapiens
  misc_RNA (1)...(19): siRNA sense strand
gaaccaggucucaaaggau

SEQ ID NO: 662447 - RNA, 19 nt, Homo sapiens
  misc_RNA (1)...(19): siRNA sense strand
gaccaagguuuuccaggua

SEQ ID NO: 662448 - RNA, 19 nt, Homo sapiens
  misc_RNA (1)...(19): siRNA sense strand
uggccaggcuugaaaggaa

SEQ ID NO: 662449 - RNA, 19 nt, Homo sapiens
  misc_RNA (1)...(19): siRNA sense strand
gcagggacccaagggcuuu

SEQ ID NO: 662450 - RNA, 19 nt, Homo sapiens
  misc_RNA (1)...(19): siRNA sense strand
caugccagguucuaaagga

SEQ ID NO: 662451 - RNA, 19 nt, Homo sapiens
  misc_RNA (1)...(19): siRNA sense strand
ccuggcacacuuaagauua

SEQ ID NO: 662452 - RNA, 19 nt, Homo sapiens
  misc_RNA (1)...(19): siRNA sense strand
agagccagguuauucagaa

SEQ ID NO: 662453 - RNA, 19 nt, Homo sapiens
  misc_RNA (1)...(19): siRNA sense strand
gauaagggagagccagguu

SEQ ID NO: 662454 - RNA, 19 nt, Homo sapiens
  misc_RNA (1)...(19): siRNA sense strand
ggaccuagaggaccuaagg

SEQ ID NO: 662455 - RNA, 19 nt, Homo sapiens
  misc_RNA (1)...(19): siRNA sense strand
gcaacaaagguucuaaagg

SEQ ID NO: 662456 - RNA, 19 nt, Homo sapiens
  misc_RNA (1)...(19): siRNA sense strand
gacccuggcacacuuaaga

SEQ ID NO: 662457 - RNA, 19 nt, Homo sapiens
  misc_RNA (1)...(19): siRNA sense strand
uaagggagagccagguuau

SEQ ID NO: 662458 - RNA, 19 nt, Homo sapiens
  misc_RNA (1)...(19): siRNA sense strand
caagggcuuuccaggacuu

SEQ ID NO: 662459 - RNA, 19 nt, Homo sapiens
  misc_RNA (1)...(19): siRNA sense strand
ccaggaaucccaggaguug

SEQ ID NO: 662460 - RNA, 19 nt, Homo sapiens
  misc_RNA (1)...(19): siRNA sense strand
gggugcugcugguuugaaa

SEQ ID NO: 662461 - RNA, 19 nt, Homo sapiens
  misc_RNA (1)...(19): siRNA sense strand
uggaaguccuggaucauca

SEQ ID NO: 662462 - RNA, 19 nt, Homo sapiens
  misc_RNA (1)...(19): siRNA sense strand
ccaacagaauauuaugaca

SEQ ID NO: 662463 - RNA, 19 nt, Homo sapiens
  misc_RNA (1)...(19): siRNA sense strand
gacauuggcccuccaggau

SEQ ID NO: 662464 - RNA, 19 nt, Homo sapiens
  misc_RNA (1)...(19): siRNA sense strand
agaccaggccucccaggua

SEQ ID NO: 662465 - RNA, 19 nt, Homo sapiens
  misc_RNA (1)...(19): siRNA sense strand
ggaccaggaacaccagguu

SEQ ID NO: 662466 - RNA, 19 nt, Homo sapiens
  misc_RNA (1)...(19): siRNA sense strand
gagaaagggcuuggaugga

SEQ ID NO: 662467 - RNA, 19 nt, Homo sapiens
  misc_RNA (1)...(19): siRNA sense strand
ggguuucccuggguuaaug

SEQ ID NO: 662468 - RNA, 19 nt, Homo sapiens
  misc_RNA (1)...(19): siRNA sense strand
gagguaagccaggcaagga

SEQ ID NO: 662469 - RNA, 19 nt, Homo sapiens
  misc_RNA (1)...(19): siRNA sense strand
ccagggaugccagguuuaa

SEQ ID NO: 662470 - RNA, 19 nt, Homo sapiens
  misc_RNA (1)...(19): siRNA sense strand
aggugaagauggagugauu

SEQ ID NO: 662471 - RNA, 19 nt, Homo sapiens
  misc_RNA (1)...(19): siRNA sense strand
ggacugccaggcuaucuag

SEQ ID NO: 662472 - RNA, 19 nt, Homo sapiens
  misc_RNA (1)...(19): siRNA sense strand
auaaguggauugccaggau

SEQ ID NO: 662473 - RNA, 19 nt, Homo sapiens
  misc_RNA (1)...(19): siRNA sense strand
ggaccaauggguauaagag

SEQ ID NO: 662474 - RNA, 19 nt, Homo sapiens
  misc_RNA (1)...(19): siRNA sense strand
ggaauuccaggucaucaag

SEQ ID NO: 662475 - RNA, 19 nt, Homo sapiens
  misc_RNA (1)...(19): siRNA sense strand
gaccaggaacaccagguuu

SEQ ID NO: 662476 - RNA, 19 nt, Homo sapiens
  misc_RNA (1)...(19): siRNA sense strand
ggagagcucaguguuucaa

SEQ ID NO: 662477 - RNA, 19 nt, Homo sapiens
  misc_RNA (1)...(19): siRNA sense strand
gaccaaggacgugauggaa

SEQ ID NO: 662478 - RNA, 19 nt, Homo sapiens
  misc_RNA (1)...(19): siRNA sense strand
ggagaagauauagaacuug

SEQ ID NO: 662479 - RNA, 19 nt, Homo sapiens
  misc_RNA (1)...(19): siRNA sense strand
cuccaggucuuccaggauu

SEQ ID NO: 662480 - RNA, 19 nt, Homo sapiens
  misc_RNA (1)...(19): siRNA sense strand
cgggugauaugggaaagaa

SEQ ID NO: 662481 - RNA, 19 nt, Homo sapiens
  misc_RNA (1)...(19): siRNA sense strand
caacaaagguucuaaagga

SEQ ID NO: 662482 - RNA, 19 nt, Homo sapiens
  misc_RNA (1)...(19): siRNA sense strand
gagaagauauagaacuuga

SEQ ID NO: 662483 - RNA, 19 nt, Homo sapiens
  misc_RNA (1)...(19): siRNA sense strand
caacaaggcagaagaggua

SEQ ID NO: 662484 - RNA, 19 nt, Homo sapiens
  misc_RNA (1)...(19): siRNA sense strand
agagauaucccacguaaua

SEQ ID NO: 662485 - RNA, 19 nt, Homo sapiens
  misc_RNA (1)...(19): siRNA sense strand
ccaaggacuuccaggcuua

SEQ ID NO: 662486 - RNA, 19 nt, Homo sapiens
  misc_RNA (1)...(19): siRNA sense strand
ccaaggacgugauggaauu

SEQ ID NO: 662487 - RNA, 19 nt, Homo sapiens
  misc_RNA (1)...(19): siRNA sense strand
gcagcuggcuugaaaggaa

SEQ ID NO: 662488 - RNA, 19 nt, Homo sapiens
  misc_RNA (1)...(19): siRNA sense strand
ucagagauaucccacguaa

SEQ ID NO: 662489 - RNA, 19 nt, Homo sapiens
  misc_RNA (1)...(19): siRNA sense strand
uauaagaggugaccaagga

SEQ ID NO: 662490 - RNA, 19 nt, Homo sapiens
  misc_RNA (1)...(19): siRNA sense strand
caaagaggauauccaggaa

SEQ ID NO: 662491 - RNA, 19 nt, Homo sapiens
  misc_RNA (1)...(19): siRNA sense strand
gaacaaggagauaaaggaa

SEQ ID NO: 662492 - RNA, 19 nt, Homo sapiens
  misc_RNA (1)...(19): siRNA sense strand
gaagauauagaacuugaug

SEQ ID NO: 662493 - RNA, 19 nt, Homo sapiens
  misc_RNA (1)...(19): siRNA sense strand
ccaccaggcucaagaggaa

SEQ ID NO: 662494 - RNA, 19 nt, Homo sapiens
  misc_RNA (1)...(19): siRNA sense strand
gaaagagugauaggacaua

SEQ ID NO: 662495 - RNA, 19 nt, Homo sapiens
  misc_RNA (1)...(19): siRNA sense strand
gaaagggcuuggauggaau

SEQ ID NO: 662496 - RNA, 19 nt, Homo sapiens
  misc_RNA (1)...(19): siRNA sense strand
agaaagggcuuggauggaa

SEQ ID NO: 662497 - RNA, 19 nt, Homo sapiens
  misc_RNA (1)...(19): siRNA sense strand
gaccaggccucccagguau

SEQ ID NO: 662498 - RNA, 19 nt, Homo sapiens
  misc_RNA (1)...(19): siRNA sense strand
guaaagggccagagaggaa

SEQ ID NO: 662499 - RNA, 19 nt, Homo sapiens
  misc_RNA (1)...(19): siRNA sense strand
cagcaaggguugugucugu

SEQ ID NO: 662500 - RNA, 19 nt, Homo sapiens
  misc_RNA (1)...(19): siRNA sense strand
acaaggagauaaaggaaau

SEQ ID NO: 662501 - RNA, 19 nt, Homo sapiens
  misc_RNA (1)...(19): siRNA sense strand
ggaacaaggagauaaagga

SEQ ID NO: 662502 - RNA, 19 nt, Homo sapiens
  misc_RNA (1)...(19): siRNA sense strand
ggaccaccaggaacaguua

SEQ ID NO: 662503 - RNA, 19 nt, Homo sapiens
  misc_RNA (1)...(19): siRNA sense strand
gaaagccuauuccaucaac

SEQ ID NO: 662504 - RNA, 19 nt, Homo sapiens
  misc_RNA (1)...(19): siRNA sense strand
caagggagaaccagcagua

SEQ ID NO: 662505 - RNA, 19 nt, Homo sapiens
  misc_RNA (1)...(19): siRNA sense strand
gagccuggguuaccuggaa

SEQ ID NO: 662506 - RNA, 19 nt, Homo sapiens
  misc_RNA (1)...(19): siRNA sense strand
auacaggucuuccaggauu

SEQ ID NO: 662507 - RNA, 19 nt, Homo sapiens
  misc_RNA (1)...(19): siRNA sense strand
ccacaggcauagaaggauu

SEQ ID NO: 662508 - RNA, 19 nt, Homo sapiens
  misc_RNA (1)...(19): siRNA sense strand
guacacagugcccuuauau

SEQ ID NO: 662509 - RNA, 19 nt, Homo sapiens
  misc_RNA (1)...(19): siRNA sense strand
ggaaaugaagggcuugaug

SEQ ID NO: 662510 - RNA, 19 nt, Homo sapiens
  misc_RNA (1)...(19): siRNA sense strand
ucaaaggauucgcaggaaa

SEQ ID NO: 662511 - RNA, 19 nt, Homo sapiens
  misc_RNA (1)...(19): siRNA sense strand
aaagggugcuccugcuaaa

SEQ ID NO: 662512 - RNA, 19 nt, Homo sapiens
  misc_RNA (1)...(19): siRNA sense strand
gaacccuggugcucaagga

SEQ ID NO: 662513 - RNA, 19 nt, Homo sapiens
  misc_RNA (1)...(19): siRNA sense strand
aggcuuaaauggauugaaa

SEQ ID NO: 662514 - RNA, 19 nt, Homo sapiens
  misc_RNA (1)...(19): siRNA sense strand
ggacuuccaggcuuaaaug

SEQ ID NO: 662515 - RNA, 19 nt, Homo sapiens
  misc_RNA (1)...(19): siRNA sense strand
uaacagaacggaccucaag

SEQ ID NO: 662516 - RNA, 19 nt, Homo sapiens
  misc_RNA (1)...(19): siRNA sense strand
ccuauuccaucaacuguga

SEQ ID NO: 662517 - RNA, 19 nt, Homo sapiens
  misc_RNA (1)...(19): siRNA sense strand
gggauuuccuggagccauu

SEQ ID NO: 662518 - RNA, 19 nt, Homo sapiens
  misc_RNA (1)...(19): siRNA sense strand
aaagggagacccaggaauu

SEQ ID NO: 662519 - RNA, 19 nt, Homo sapiens
  misc_RNA (1)...(19): siRNA sense strand
gcaaggguugugucuguaa

SEQ ID NO: 662520 - RNA, 19 nt, Homo sapiens
  misc_RNA (1)...(19): siRNA sense strand
uaucuagggucuccaggaa

SEQ ID NO: 662521 - RNA, 19 nt, Homo sapiens
  misc_RNA (1)...(19): siRNA sense strand
cauuggcccuccaggauuu

SEQ ID NO: 662522 - RNA, 19 nt, Homo sapiens
  misc_RNA (1)...(19): siRNA sense strand
ggaaagaaaggagaaaugg

SEQ ID NO: 662523 - RNA, 19 nt, Homo sapiens
  misc_RNA (1)...(19): siRNA sense strand
aaagagugauaggacauaa

SEQ ID NO: 662524 - RNA, 19 nt, Homo sapiens
  misc_RNA (1)...(19): siRNA sense strand
uccagggagucauguaaua

SEQ ID NO: 662525 - RNA, 19 nt, Homo sapiens
  misc_RNA (1)...(19): siRNA sense strand
ggucugcccggugcaauua

SEQ ID NO: 662526 - RNA, 19 nt, Homo sapiens
  misc_RNA (1)...(19): siRNA sense strand
caaggguugugucuguaaa

SEQ ID NO: 662527 - RNA, 19 nt, Homo sapiens
  misc_RNA (1)...(19): siRNA sense strand
ucacuggguuguccuggaa

SEQ ID NO: 662528 - RNA, 19 nt, Homo sapiens
  misc_RNA (1)...(19): siRNA sense strand
agaaucauauggaucugaa

SEQ ID NO: 662529 - RNA, 19 nt, Homo sapiens
  misc_RNA (1)...(19): siRNA sense strand
ggaaagccagguccucaug

SEQ ID NO: 662530 - RNA, 19 nt, Homo sapiens
  misc_RNA (1)...(19): siRNA sense strand
aggcgcagcuggcuugaaa

SEQ ID NO: 662531 - RNA, 19 nt, Homo sapiens
  misc_RNA (1)...(19): siRNA sense strand
aagaggauauccaggaaau

SEQ ID NO: 662532 - RNA, 19 nt, Homo sapiens
  misc_RNA (1)...(19): siRNA sense strand
caaaggauucgcaggaaau

SEQ ID NO: 662533 - RNA, 19 nt, Homo sapiens
  misc_RNA (1)...(19): siRNA sense strand
aaccaggucucaaaggauu

SEQ ID NO: 662534 - RNA, 19 nt, Homo sapiens
  misc_RNA (1)...(19): siRNA sense strand
uuacggacuugucggugua

SEQ ID NO: 662535 - RNA, 19 nt, Homo sapiens
  misc_RNA (1)...(19): siRNA sense strand
ggagacccuggcacacuua

SEQ ID NO: 662536 - RNA, 19 nt, Homo sapiens
  misc_RNA (1)...(19): siRNA sense strand
uaaguggauugccaggauu

SEQ ID NO: 662537 - RNA, 19 nt, Homo sapiens
  misc_RNA (1)...(19): siRNA sense strand
agaaccaggucucaaagga

SEQ ID NO: 662538 - RNA, 19 nt, Homo sapiens
  misc_RNA (1)...(19): siRNA sense strand
ugauugggaugaugggauu

SEQ ID NO: 662539 - RNA, 19 nt, Homo sapiens
  misc_RNA (1)...(19): siRNA sense strand
gggugaagauggcauuaag

SEQ ID NO: 662540 - RNA, 19 nt, Homo sapiens
  misc_RNA (1)...(19): siRNA sense strand
aggagaagauauagaacuu

SEQ ID NO: 662541 - RNA, 19 nt, Homo sapiens
  misc_RNA (1)...(19): siRNA sense strand
gggaaagaaaggagaaaug

SEQ ID NO: 662542 - RNA, 19 nt, Homo sapiens
  misc_RNA (1)...(19): siRNA sense strand
ccaggaacaguuauuguga

SEQ ID NO: 662543 - RNA, 19 nt, Homo sapiens
  misc_RNA (1)...(19): siRNA sense strand
gggcaugccagguucuaaa

SEQ ID NO: 662544 - RNA, 19 nt, Homo sapiens
  misc_RNA (1)...(19): siRNA sense strand
ggaccuccaggaccaauug

SEQ ID NO: 662545 - RNA, 19 nt, Homo sapiens
  misc_RNA (1)...(19): siRNA sense strand
uguacacagugcccuuaua

SEQ ID NO: 662546 - RNA, 19 nt, Homo sapiens
  misc_RNA (1)...(19): siRNA sense strand
gaaccaggucucaaaggau

SEQ ID NO: 662547 - RNA, 19 nt, Homo sapiens
  misc_RNA (1)...(19): siRNA sense strand
gaccaagguuuuccaggua

SEQ ID NO: 662548 - RNA, 19 nt, Homo sapiens
  misc_RNA (1)...(19): siRNA sense strand
uggccaggcuugaaaggaa

SEQ ID NO: 662549 - RNA, 19 nt, Homo sapiens
  misc_RNA (1)...(19): siRNA sense strand
gcagggacccaagggcuuu

SEQ ID NO: 662550 - RNA, 19 nt, Homo sapiens
  misc_RNA (1)...(19): siRNA sense strand
caugccagguucuaaagga

SEQ ID NO: 662551 - RNA, 19 nt, Homo sapiens
  misc_RNA (1)...(19): siRNA sense strand
ccuggcacacuuaagauua

SEQ ID NO: 662552 - RNA, 19 nt, Homo sapiens
  misc_RNA (1)...(19): siRNA sense strand
agagccagguuauucagaa

SEQ ID NO: 662553 - RNA, 19 nt, Homo sapiens
  misc_RNA (1)...(19): siRNA sense strand
gauaagggagagccagguu

SEQ ID NO: 662554 - RNA, 19 nt, Homo sapiens
  misc_RNA (1)...(19): siRNA sense strand
ggaccuagaggaccuaagg

SEQ ID NO: 662555 - RNA, 19 nt, Homo sapiens
  misc_RNA (1)...(19): siRNA sense strand
gcaacaaagguucuaaagg

SEQ ID NO: 662556 - RNA, 19 nt, Homo sapiens
  misc_RNA (1)...(19): siRNA sense strand
gacccuggcacacuuaaga

SEQ ID NO: 662557 - RNA, 19 nt, Homo sapiens
  misc_RNA (1)...(19): siRNA sense strand
uaagggagagccagguuau

SEQ ID NO: 662558 - RNA, 19 nt, Homo sapiens
  misc_RNA (1)...(19): siRNA sense strand
caagggcuuuccaggacuu

SEQ ID NO: 662559 - RNA, 19 nt, Homo sapiens
  misc_RNA (1)...(19): siRNA sense strand
ccaggaaucccaggaguug

SEQ ID NO: 662560 - RNA, 19 nt, Homo sapiens
  misc_RNA (1)...(19): siRNA sense strand
gggugcugcugguuugaaa

SEQ ID NO: 662561 - RNA, 19 nt, Homo sapiens
  misc_RNA (1)...(19): siRNA sense strand
uggaaguccuggaucauca

SEQ ID NO: 662562 - RNA, 19 nt, Homo sapiens
  misc_RNA (1)...(19): siRNA sense strand
ccaacagaauauuaugaca

SEQ ID NO: 662563 - RNA, 19 nt, Homo sapiens
  misc_RNA (1)...(19): siRNA sense strand
gacauuggcccuccaggau

SEQ ID NO: 662564 - RNA, 19 nt, Homo sapiens
  misc_RNA (1)...(19): siRNA sense strand
agaccaggccucccaggua

SEQ ID NO: 662565 - RNA, 19 nt, Homo sapiens
  misc_RNA (1)...(19): siRNA sense strand
ggaccaggaacaccagguu

SEQ ID NO: 662566 - RNA, 19 nt, Homo sapiens
  misc_RNA (1)...(19): siRNA sense strand
gagaaagggcuuggaugga

SEQ ID NO: 662567 - RNA, 19 nt, Homo sapiens
  misc_RNA (1)...(19): siRNA sense strand
ggguuucccuggguuaaug

SEQ ID NO: 662568 - RNA, 19 nt, Homo sapiens
  misc_RNA (1)...(19): siRNA sense strand
gagguaagccaggcaagga

SEQ ID NO: 662569 - RNA, 19 nt, Homo sapiens
  misc_RNA (1)...(19): siRNA sense strand
ccagggaugccagguuuaa

SEQ ID NO: 662570 - RNA, 19 nt, Homo sapiens
  misc_RNA (1)...(19): siRNA sense strand
aggugaagauggagugauu

SEQ ID NO: 662571 - RNA, 19 nt, Homo sapiens
  misc_RNA (1)...(19): siRNA sense strand
ggacugccaggcuaucuag

SEQ ID NO: 662572 - RNA, 19 nt, Homo sapiens
  misc_RNA (1)...(19): siRNA sense strand
auaaguggauugccaggau

SEQ ID NO: 662573 - RNA, 19 nt, Homo sapiens
  misc_RNA (1)...(19): siRNA sense strand
ggaccaauggguauaagag

SEQ ID NO: 662574 - RNA, 19 nt, Homo sapiens
  misc_RNA (1)...(19): siRNA sense strand
ggaauuccaggucaucaag

SEQ ID NO: 662575 - RNA, 19 nt, Homo sapiens
  misc_RNA (1)...(19): siRNA sense strand
gaccaggaacaccagguuu

SEQ ID NO: 662576 - RNA, 19 nt, Homo sapiens
  misc_RNA (1)...(19): siRNA sense strand
ggagagcucaguguuucaa

SEQ ID NO: 662577 - RNA, 19 nt, Homo sapiens
  misc_RNA (1)...(19): siRNA sense strand
gaccaaggacgugauggaa

SEQ ID NO: 662578 - RNA, 19 nt, Homo sapiens
  misc_RNA (1)...(19): siRNA sense strand
ggagaagauauagaacuug

SEQ ID NO: 662579 - RNA, 19 nt, Homo sapiens
  misc_RNA (1)...(19): siRNA sense strand
cuccaggucuuccaggauu

SEQ ID NO: 662580 - RNA, 19 nt, Homo sapiens
  misc_RNA (1)...(19): siRNA sense strand
cgggugauaugggaaagaa

SEQ ID NO: 662581 - RNA, 19 nt, Homo sapiens
  misc_RNA (1)...(19): siRNA sense strand
caacggauuuggucguauu

SEQ ID NO: 662582 - RNA, 19 nt, Homo sapiens
  misc_RNA (1)...(19): siRNA sense strand
gaauuuggcuacagcaaca

SEQ ID NO: 662583 - RNA, 19 nt, Homo sapiens
  misc_RNA (1)...(19): siRNA sense strand
gaaaucccaucaccaucuu

SEQ ID NO: 662584 - RNA, 19 nt, Homo sapiens
  misc_RNA (1)...(19): siRNA sense strand
gaccucaacuacaugguuu

SEQ ID NO: 662585 - RNA, 19 nt, Homo sapiens
  misc_RNA (1)...(19): siRNA sense strand
gaccugaccugccgucuag

SEQ ID NO: 662586 - RNA, 19 nt, Homo sapiens
  misc_RNA (1)...(19): siRNA sense strand
ucaagaagguggugaagca

SEQ ID NO: 662587 - RNA, 19 nt, Homo sapiens
  misc_RNA (1)...(19): siRNA sense strand
gacaacagccucaagauca

SEQ ID NO: 662588 - RNA, 19 nt, Homo sapiens
  misc_RNA (1)...(19): siRNA sense strand
ggaguccacuggcgucuuc

SEQ ID NO: 662589 - RNA, 19 nt, Homo sapiens
  misc_RNA (1)...(19): siRNA sense strand
gggaaacuguggcgugaug

SEQ ID NO: 662590 - RNA, 19 nt, Homo sapiens
  misc_RNA (1)...(19): siRNA sense strand
caacuuugguaucguggaa

SEQ ID NO: 662591 - RNA, 19 nt, Homo sapiens
  misc_RNA (1)...(19): siRNA sense strand
ggaaaucccaucaccaucu

SEQ ID NO: 662592 - RNA, 19 nt, Homo sapiens
  misc_RNA (1)...(19): siRNA sense strand
ugguuuacauguuccaaua

SEQ ID NO: 662593 - RNA, 19 nt, Homo sapiens
  misc_RNA (1)...(19): siRNA sense strand
ucaacuacaugguuuacau

SEQ ID NO: 662594 - RNA, 19 nt, Homo sapiens
  misc_RNA (1)...(19): siRNA sense strand
ggaagcuugucaucaaugg

SEQ ID NO: 662595 - RNA, 19 nt, Homo sapiens
  misc_RNA (1)...(19): siRNA sense strand
ggucggagucaacggauuu

SEQ ID NO: 662596 - RNA, 19 nt, Homo sapiens
  misc_RNA (1)...(19): siRNA sense strand
gaacgggaagcuugucauc

SEQ ID NO: 662597 - RNA, 19 nt, Homo sapiens
  misc_RNA (1)...(19): siRNA sense strand
ggaccugaccugccgucua

SEQ ID NO: 662598 - RNA, 19 nt, Homo sapiens
  misc_RNA (1)...(19): siRNA sense strand
ucaagcucauuuccuggua

SEQ ID NO: 662599 - RNA, 19 nt, Homo sapiens
  misc_RNA (1)...(19): siRNA sense strand
guuuacauguuccaauaug

SEQ ID NO: 662600 - RNA, 19 nt, Homo sapiens
  misc_RNA (1)...(19): siRNA sense strand
acgggaagcuugucaucaa

SEQ ID NO: 662601 - RNA, 19 nt, Homo sapiens
  misc_RNA (1)...(19): siRNA sense strand
gguaaaguggauauuguug

SEQ ID NO: 662602 - RNA, 19 nt, Homo sapiens
  misc_RNA (1)...(19): siRNA sense strand
caagcucauuuccugguau

SEQ ID NO: 662603 - RNA, 19 nt, Homo sapiens
  misc_RNA (1)...(19): siRNA sense strand
gugugaaccaugagaagua

SEQ ID NO: 662604 - RNA, 19 nt, Homo sapiens
  misc_RNA (1)...(19): siRNA sense strand
gucaacggauuuggucgua

SEQ ID NO: 662605 - RNA, 19 nt, Homo sapiens
  misc_RNA (1)...(19): siRNA sense strand
caucaucccugccucuacu

SEQ ID NO: 662606 - RNA, 19 nt, Homo sapiens
  misc_RNA (1)...(19): siRNA sense strand
ggucaucccugagcugaac

SEQ ID NO: 662607 - RNA, 19 nt, Homo sapiens
  misc_RNA (1)...(19): siRNA sense strand
caacgaccacuuugucaag

SEQ ID NO: 662608 - RNA, 19 nt, Homo sapiens
  misc_RNA (1)...(19): siRNA sense strand
caugacaacuuugguaucg

SEQ ID NO: 662609 - RNA, 19 nt, Homo sapiens
  misc_RNA (1)...(19): siRNA sense strand
ugaaccaugagaaguauga

SEQ ID NO: 662610 - RNA, 19 nt, Homo sapiens
  misc_RNA (1)...(19): siRNA sense strand
cugguaaaguggauauugu

SEQ ID NO: 662611 - RNA, 19 nt, Homo sapiens
  misc_RNA (1)...(19): siRNA sense strand
ugacaacagccucaagauc

SEQ ID NO: 662612 - RNA, 19 nt, Homo sapiens
  misc_RNA (1)...(19): siRNA sense strand
caugagaaguaugacaaca

SEQ ID NO: 662613 - RNA, 19 nt, Homo sapiens
  misc_RNA (1)...(19): siRNA sense strand
uaacucugguaaaguggau

SEQ ID NO: 662614 - RNA, 19 nt, Homo sapiens
  misc_RNA (1)...(19): siRNA sense strand
acaacagccucaagaucau

SEQ ID NO: 662615 - RNA, 19 nt, Homo sapiens
  misc_RNA (1)...(19): siRNA sense strand
gcgaugcuggcgcugagua

SEQ ID NO: 662616 - RNA, 19 nt, Homo sapiens
  misc_RNA (1)...(19): siRNA sense strand
gguaugacaacgaauuugg

SEQ ID NO: 662617 - RNA, 19 nt, Homo sapiens
  misc_RNA (1)...(19): siRNA sense strand
gccucaagaucaucagcaa

SEQ ID NO: 662618 - RNA, 19 nt, Homo sapiens
  misc_RNA (1)...(19): siRNA sense strand
gagaacgggaagcuuguca

SEQ ID NO: 662619 - RNA, 19 nt, Homo sapiens
  misc_RNA (1)...(19): siRNA sense strand
uaugacaacagccucaaga

SEQ ID NO: 662620 - RNA, 19 nt, Homo sapiens
  misc_RNA (1)...(19): siRNA sense strand
ugugaaccaugagaaguau

SEQ ID NO: 662621 - RNA, 19 nt, Homo sapiens
  misc_RNA (1)...(19): siRNA sense strand
cgggaagcuugucaucaau

SEQ ID NO: 662622 - RNA, 19 nt, Homo sapiens
  misc_RNA (1)...(19): siRNA sense strand
gggaagcuugucaucaaug

SEQ ID NO: 662623 - RNA, 19 nt, Homo sapiens
  misc_RNA (1)...(19): siRNA sense strand
aagcuugucaucaauggaa

SEQ ID NO: 662624 - RNA, 19 nt, Homo sapiens
  misc_RNA (1)...(19): siRNA sense strand
gacaacgaauuuggcuaca

SEQ ID NO: 662625 - RNA, 19 nt, Homo sapiens
  misc_RNA (1)...(19): siRNA sense strand
ccaaggcugugggcaaggu

SEQ ID NO: 662626 - RNA, 19 nt, Homo sapiens
  misc_RNA (1)...(19): siRNA sense strand
ugaccucaacuacaugguu

SEQ ID NO: 662627 - RNA, 19 nt, Homo sapiens
  misc_RNA (1)...(19): siRNA sense strand
ccaaaagggucaucaucuc

SEQ ID NO: 662628 - RNA, 19 nt, Homo sapiens
  misc_RNA (1)...(19): siRNA sense strand
ucaacgaccacuuugucaa

SEQ ID NO: 662629 - RNA, 19 nt, Homo sapiens
  misc_RNA (1)...(19): siRNA sense strand
cugcaccaccaacugcuua

SEQ ID NO: 662630 - RNA, 19 nt, Homo sapiens
  misc_RNA (1)...(19): siRNA sense strand
cucaagaucaucagcaaug

SEQ ID NO: 662631 - RNA, 19 nt, Homo sapiens
  misc_RNA (1)...(19): siRNA sense strand
ccugguaugacaacgaauu

SEQ ID NO: 662632 - RNA, 19 nt, Homo sapiens
  misc_RNA (1)...(19): siRNA sense strand
uaucguggaaggacucaug

SEQ ID NO: 662633 - RNA, 19 nt, Homo sapiens
  misc_RNA (1)...(19): siRNA sense strand
aagcucauuuccugguaug

SEQ ID NO: 662634 - RNA, 19 nt, Homo sapiens
  misc_RNA (1)...(19): siRNA sense strand
ggaagaagccuccaaugaa

SEQ ID NO: 662635 - RNA, 19 nt, Homo sapiens
  misc_RNA (1)...(19): siRNA sense strand
cuacacagccgacuaguua

SEQ ID NO: 662636 - RNA, 19 nt, Homo sapiens
  misc_RNA (1)...(19): siRNA sense strand
guacaaggauuaaaugaca

SEQ ID NO: 662637 - RNA, 19 nt, Homo sapiens
  misc_RNA (1)...(19): siRNA sense strand
gaagaagccuccaaugaac

SEQ ID NO: 662638 - RNA, 19 nt, Homo sapiens
  misc_RNA (1)...(19): siRNA sense strand
gcagagaucggcccuacua

SEQ ID NO: 662639 - RNA, 19 nt, Homo sapiens
  misc_RNA (1)...(19): siRNA sense strand
ugacaacagugcaauuuau

SEQ ID NO: 662640 - RNA, 19 nt, Homo sapiens
  misc_RNA (1)...(19): siRNA sense strand
ggaaugguuugaugggaaa

SEQ ID NO: 662641 - RNA, 19 nt, Homo sapiens
  misc_RNA (1)...(19): siRNA sense strand
gaacagaugggaggaagaa

SEQ ID NO: 662642 - RNA, 19 nt, Homo sapiens
  misc_RNA (1)...(19): siRNA sense strand
caacagugcaauuuaugua

SEQ ID NO: 662643 - RNA, 19 nt, Homo sapiens
  misc_RNA (1)...(19): siRNA sense strand
ggaaacaagcccacugaga

SEQ ID NO: 662644 - RNA, 19 nt, Homo sapiens
  misc_RNA (1)...(19): siRNA sense strand
caacaaagcuauggaaccu

SEQ ID NO: 662645 - RNA, 19 nt, Homo sapiens
  misc_RNA (1)...(19): siRNA sense strand
gaacuucgccuggagaaca

SEQ ID NO: 662646 - RNA, 19 nt, Homo sapiens
  misc_RNA (1)...(19): siRNA sense strand
acaaagcuauggaaccuau

SEQ ID NO: 662647 - RNA, 19 nt, Homo sapiens
  misc_RNA (1)...(19): siRNA sense strand
ggaccgagguggcuuuggu

SEQ ID NO: 662648 - RNA, 19 nt, Homo sapiens
  misc_RNA (1)...(19): siRNA sense strand
gaguagcuauggucaacaa

SEQ ID NO: 662649 - RNA, 19 nt, Homo sapiens
  misc_RNA (1)...(19): siRNA sense strand
gaugaagacucugacaaca

SEQ ID NO: 662650 - RNA, 19 nt, Homo sapiens
  misc_RNA (1)...(19): siRNA sense strand
ugaagacucugacaacagu

SEQ ID NO: 662651 - RNA, 19 nt, Homo sapiens
  misc_RNA (1)...(19): siRNA sense strand
guuaugaucagagcaguua

SEQ ID NO: 662652 - RNA, 19 nt, Homo sapiens
  misc_RNA (1)...(19): siRNA sense strand
cagccaagcuccaagucaa

SEQ ID NO: 662653 - RNA, 19 nt, Homo sapiens
  misc_RNA (1)...(19): siRNA sense strand
cggaagaagccuccaauga

SEQ ID NO: 662654 - RNA, 19 nt, Homo sapiens
  misc_RNA (1)...(19): siRNA sense strand
ucagaccacugcaaccuau

SEQ ID NO: 662655 - RNA, 19 nt, Homo sapiens
  misc_RNA (1)...(19): siRNA sense strand
caagggagcaaacuuaaag

SEQ ID NO: 662656 - RNA, 19 nt, Homo sapiens
  misc_RNA (1)...(19): siRNA sense strand
gcacucagccugcuuaucc

SEQ ID NO: 662657 - RNA, 19 nt, Homo sapiens
  misc_RNA (1)...(19): siRNA sense strand
gauauggacagaguaacua

SEQ ID NO: 662658 - RNA, 19 nt, Homo sapiens
  misc_RNA (1)...(19): siRNA sense strand
gcaguuacucucagcagaa

SEQ ID NO: 662659 - RNA, 19 nt, Homo sapiens
  misc_RNA (1)...(19): siRNA sense strand
gacagccucccacugguua

SEQ ID NO: 662660 - RNA, 19 nt, Homo sapiens
  misc_RNA (1)...(19): siRNA sense strand
ggacguggaggaccuggaa

SEQ ID NO: 662661 - RNA, 19 nt, Homo sapiens
  misc_RNA (1)...(19): siRNA sense strand
caagaccgcaggauggaaa

SEQ ID NO: 662662 - RNA, 19 nt, Homo sapiens
  misc_RNA (1)...(19): siRNA sense strand
gaugaaggaccagaucuug

SEQ ID NO: 662663 - RNA, 19 nt, Homo sapiens
  misc_RNA (1)...(19): siRNA sense strand
ggacagccucccacugguu

SEQ ID NO: 662664 - RNA, 19 nt, Homo sapiens
  misc_RNA (1)...(19): siRNA sense strand
ucacugcaccuccauccua

SEQ ID NO: 662665 - RNA, 19 nt, Homo sapiens
  misc_RNA (1)...(19): siRNA sense strand
ggacagcagaguagcuaug

SEQ ID NO: 662666 - RNA, 19 nt, Homo sapiens
  misc_RNA (1)...(19): siRNA sense strand
gaccuuugauggaacagau

SEQ ID NO: 662667 - RNA, 19 nt, Homo sapiens
  misc_RNA (1)...(19): siRNA sense strand
ugccaaggcugccguggaa

SEQ ID NO: 662668 - RNA, 19 nt, Homo sapiens
  misc_RNA (1)...(19): siRNA sense strand
gggcagaccgccuaugcaa

SEQ ID NO: 662669 - RNA, 19 nt, Homo sapiens
  misc_RNA (1)...(19): siRNA sense strand
ggacaaggaaacaggaaag

SEQ ID NO: 662670 - RNA, 19 nt, Homo sapiens
  misc_RNA (1)...(19): siRNA sense strand
caagcuccaagucaauaua

SEQ ID NO: 662671 - RNA, 19 nt, Homo sapiens
  misc_RNA (1)...(19): siRNA sense strand
uaugauaccaccacugcua

SEQ ID NO: 662672 - RNA, 19 nt, Homo sapiens
  misc_RNA (1)...(19): siRNA sense strand
uuucaagggagcaaacuua

SEQ ID NO: 662673 - RNA, 19 nt, Homo sapiens
  misc_RNA (1)...(19): siRNA sense strand
ccagcccacucaaggauau

SEQ ID NO: 662674 - RNA, 19 nt, Homo sapiens
  misc_RNA (1)...(19): siRNA sense strand
cuaugcaacuucuuaugga

SEQ ID NO: 662675 - RNA, 19 nt, Homo sapiens
  misc_RNA (1)...(19): siRNA sense strand
gcagcagccucccacuagu

SEQ ID NO: 662676 - RNA, 19 nt, Homo sapiens
  misc_RNA (1)...(19): siRNA sense strand
ccuaggauauggacagagu

SEQ ID NO: 662677 - RNA, 19 nt, Homo sapiens
  misc_RNA (1)...(19): siRNA sense strand
gcagaccgccuaugcaacu

SEQ ID NO: 662678 - RNA, 19 nt, Homo sapiens
  misc_RNA (1)...(19): siRNA sense strand
gguuugaugggaaagauuu

SEQ ID NO: 662679 - RNA, 19 nt, Homo sapiens
  misc_RNA (1)...(19): siRNA sense strand
ggaaacaggaaagcccaaa

SEQ ID NO: 662680 - RNA, 19 nt, Homo sapiens
  misc_RNA (1)...(19): siRNA sense strand
acaucuaccuggacaagga

SEQ ID NO: 662681 - RNA, 19 nt, Homo sapiens
  misc_RNA (1)...(19): siRNA sense strand
gacaacagugcaauuuaug

SEQ ID NO: 662682 - RNA, 19 nt, Homo sapiens
  misc_RNA (1)...(19): siRNA sense strand
gccaagcuccaagucaaua

SEQ ID NO: 662683 - RNA, 19 nt, Homo sapiens
  misc_RNA (1)...(19): siRNA sense strand
ggaugaaggaccagaucuu

SEQ ID NO: 662684 - RNA, 19 nt, Homo sapiens
  misc_RNA (1)...(19): siRNA sense strand
cauaugggcaacaaagcua

SEQ ID NO: 662685 - RNA, 19 nt, Homo sapiens
  misc_RNA (1)...(19): siRNA sense strand
uggcagacuucuuuaagca

SEQ ID NO: 662686 - RNA, 19 nt, Homo sapiens
  misc_RNA (1)...(19): siRNA sense strand
cagaguagcuauggucaac

SEQ ID NO: 662687 - RNA, 19 nt, Homo sapiens
  misc_RNA (1)...(19): siRNA sense strand
ccuaccagcuauuccucua

SEQ ID NO: 662688 - RNA, 19 nt, Homo sapiens
  misc_RNA (1)...(19): siRNA sense strand
gggcaacaaagcuauggaa

SEQ ID NO: 662689 - RNA, 19 nt, Homo sapiens
  misc_RNA (1)...(19): siRNA sense strand
ccacaguguccuaugaaga

SEQ ID NO: 662690 - RNA, 19 nt, Homo sapiens
  misc_RNA (1)...(19): siRNA sense strand
uaaaugacagugugacucu

SEQ ID NO: 662691 - RNA, 19 nt, Homo sapiens
  misc_RNA (1)...(19): siRNA sense strand
ugaaggaccagaucuugau

SEQ ID NO: 662692 - RNA, 19 nt, Homo sapiens
  misc_RNA (1)...(19): siRNA sense strand
ccgccuaugcaacuucuua

SEQ ID NO: 662693 - RNA, 19 nt, Homo sapiens
  misc_RNA (1)...(19): siRNA sense strand
uaggauauggacagaguaa

SEQ ID NO: 662694 - RNA, 19 nt, Homo sapiens
  misc_RNA (1)...(19): siRNA sense strand
cagagugcaaccaguguaa

SEQ ID NO: 662695 - RNA, 19 nt, Homo sapiens
  misc_RNA (1)...(19): siRNA sense strand
ucaagggagcaaacuuaaa

SEQ ID NO: 662696 - RNA, 19 nt, Homo sapiens
  misc_RNA (1)...(19): siRNA sense strand
gccguggaaugguuugaug

SEQ ID NO: 662697 - RNA, 19 nt, Homo sapiens
  misc_RNA (1)...(19): siRNA sense strand
guuaagaugaacaagagaa

SEQ ID NO: 662698 - RNA, 19 nt, Homo sapiens
  misc_RNA (1)...(19): siRNA sense strand
gagacuagucaaccucaau

SEQ ID NO: 662699 - RNA, 19 nt, Homo sapiens
  misc_RNA (1)...(19): siRNA sense strand
ccaggcauaugggcaacaa

SEQ ID NO: 662700 - RNA, 19 nt, Homo sapiens
  misc_RNA (1)...(19): siRNA sense strand
cagugugacucuagaugau

SEQ ID NO: 662701 - RNA, 19 nt, Homo sapiens
  misc_RNA (1)...(19): siRNA sense strand
ggauuaaaugacaguguga

SEQ ID NO: 662702 - RNA, 19 nt, Homo sapiens
  misc_RNA (1)...(19): siRNA sense strand
ggauauggacagaguaacu

SEQ ID NO: 662703 - RNA, 19 nt, Homo sapiens
  misc_RNA (1)...(19): siRNA sense strand
gcuauggacagcagaguag

SEQ ID NO: 662704 - RNA, 19 nt, Homo sapiens
  misc_RNA (1)...(19): siRNA sense strand
gaaacaggaaagcccaaag

SEQ ID NO: 662705 - RNA, 19 nt, Homo sapiens
  misc_RNA (1)...(19): siRNA sense strand
cugacaacagugcaauuua

SEQ ID NO: 662706 - RNA, 19 nt, Homo sapiens
  misc_RNA (1)...(19): siRNA sense strand
acagugcaauuuauguaca

SEQ ID NO: 662707 - RNA, 19 nt, Homo sapiens
  misc_RNA (1)...(19): siRNA sense strand
caaccagcccagccuagga

SEQ ID NO: 662708 - RNA, 19 nt, Homo sapiens
  misc_RNA (1)...(19): siRNA sense strand
ccaaggcugccguggaaug

SEQ ID NO: 662709 - RNA, 19 nt, Homo sapiens
  misc_RNA (1)...(19): siRNA sense strand
cagugcaauuuauguacaa

SEQ ID NO: 662710 - RNA, 19 nt, Homo sapiens
  misc_RNA (1)...(19): siRNA sense strand
gcagaguagcuauggucaa

SEQ ID NO: 662711 - RNA, 19 nt, Homo sapiens
  misc_RNA (1)...(19): siRNA sense strand
cggauuacaguaccuauag

SEQ ID NO: 662712 - RNA, 19 nt, Homo sapiens
  misc_RNA (1)...(19): siRNA sense strand
ugcaauuuauguacaagga

SEQ ID NO: 662713 - RNA, 19 nt, Homo sapiens
  misc_RNA (1)...(19): siRNA sense strand
ggucaacaaagcagcuaug

SEQ ID NO: 662714 - RNA, 19 nt, Homo sapiens
  misc_RNA (1)...(19): siRNA sense strand
uggcuuugguggaggaaga

SEQ ID NO: 662715 - RNA, 19 nt, Homo sapiens
  misc_RNA (1)...(19): siRNA sense strand
cagcagccucccacuaguu

SEQ ID NO: 662716 - RNA, 19 nt, Homo sapiens
  misc_RNA (1)...(19): siRNA sense strand
uaccagcuauuccucuaca

SEQ ID NO: 662717 - RNA, 19 nt, Homo sapiens
  misc_RNA (1)...(19): siRNA sense strand
acagaugggaggaagaaga

SEQ ID NO: 662718 - RNA, 19 nt, Homo sapiens
  misc_RNA (1)...(19): siRNA sense strand
ucugacaacagugcaauuu

SEQ ID NO: 662719 - RNA, 19 nt, Homo sapiens
  misc_RNA (1)...(19): siRNA sense strand
acagugugacucuagauga

SEQ ID NO: 662720 - RNA, 19 nt, Homo sapiens
  misc_RNA (1)...(19): siRNA sense strand
ccuauggacagcccacuga

SEQ ID NO: 662721 - RNA, 19 nt, Homo sapiens
  misc_RNA (1)...(19): siRNA sense strand
ggaacagaugggaggaaga

SEQ ID NO: 662722 - RNA, 19 nt, Homo sapiens
  misc_RNA (1)...(19): siRNA sense strand
gacagugugacucuagaug

SEQ ID NO: 662723 - RNA, 19 nt, Homo sapiens
  misc_RNA (1)...(19): siRNA sense strand
aaacaagcccacugagacu

SEQ ID NO: 662724 - RNA, 19 nt, Homo sapiens
  misc_RNA (1)...(19): siRNA sense strand
acucaaggauaugcacaga

SEQ ID NO: 662725 - RNA, 19 nt, Homo sapiens
  misc_RNA (1)...(19): siRNA sense strand
gcgaugccacaguguccua

SEQ ID NO: 662726 - RNA, 19 nt, Homo sapiens
  misc_RNA (1)...(19): siRNA sense strand
aaaugacagugugacucua

SEQ ID NO: 662727 - RNA, 19 nt, Homo sapiens
  misc_RNA (1)...(19): siRNA sense strand
gcaauuuauguacaaggau

SEQ ID NO: 662728 - RNA, 19 nt, Homo sapiens
  misc_RNA (1)...(19): siRNA sense strand
ggauuacaguaccuauagc

SEQ ID NO: 662729 - RNA, 19 nt, Homo sapiens
  misc_RNA (1)...(19): siRNA sense strand
uagcuauggucaacaaagc

SEQ ID NO: 662730 - RNA, 19 nt, Homo sapiens
  misc_RNA (1)...(19): siRNA sense strand
acacagccgacuaguuaug

SEQ ID NO: 662731 - RNA, 19 nt, Homo sapiens
  misc_RNA (1)...(19): siRNA sense strand
gcauaugggcaacaaagcu

SEQ ID NO: 662732 - RNA, 19 nt, Homo sapiens
  misc_RNA (1)...(19): siRNA sense strand
cacagaccacccaggcaua

SEQ ID NO: 662733 - RNA, 19 nt, Homo sapiens
  misc_RNA (1)...(19): siRNA sense strand
cuacaguuauccccaggua

SEQ ID NO: 662734 - RNA, 19 nt, Homo sapiens
  misc_RNA (1)...(19): siRNA sense strand
ggaagaagccuccaaugaa

SEQ ID NO: 662735 - RNA, 19 nt, Homo sapiens
  misc_RNA (1)...(19): siRNA sense strand
cuacacagccgacuaguua

SEQ ID NO: 662736 - RNA, 19 nt, Homo sapiens
  misc_RNA (1)...(19): siRNA sense strand
guacaaggauuaaaugaca

SEQ ID NO: 662737 - RNA, 19 nt, Homo sapiens
  misc_RNA (1)...(19): siRNA sense strand
gaagaagccuccaaugaac

SEQ ID NO: 662738 - RNA, 19 nt, Homo sapiens
  misc_RNA (1)...(19): siRNA sense strand
gcagagaucggcccuacua

SEQ ID NO: 662739 - RNA, 19 nt, Homo sapiens
  misc_RNA (1)...(19): siRNA sense strand
ugacaacagugcaauuuau

SEQ ID NO: 662740 - RNA, 19 nt, Homo sapiens
  misc_RNA (1)...(19): siRNA sense strand
ggaaugguuugaugggaaa

SEQ ID NO: 662741 - RNA, 19 nt, Homo sapiens
  misc_RNA (1)...(19): siRNA sense strand
gaacagaugggaggaagaa

SEQ ID NO: 662742 - RNA, 19 nt, Homo sapiens
  misc_RNA (1)...(19): siRNA sense strand
caacagugcaauuuaugua

SEQ ID NO: 662743 - RNA, 19 nt, Homo sapiens
  misc_RNA (1)...(19): siRNA sense strand
ggaaacaagcccacugaga

SEQ ID NO: 662744 - RNA, 19 nt, Homo sapiens
  misc_RNA (1)...(19): siRNA sense strand
caacaaagcuauggaaccu

SEQ ID NO: 662745 - RNA, 19 nt, Homo sapiens
  misc_RNA (1)...(19): siRNA sense strand
gaacuucgccuggagaaca

SEQ ID NO: 662746 - RNA, 19 nt, Homo sapiens
  misc_RNA (1)...(19): siRNA sense strand
acaaagcuauggaaccuau

SEQ ID NO: 662747 - RNA, 19 nt, Homo sapiens
  misc_RNA (1)...(19): siRNA sense strand
ggaccgagguggcuuuggu

SEQ ID NO: 662748 - RNA, 19 nt, Homo sapiens
  misc_RNA (1)...(19): siRNA sense strand
gaguagcuauggucaacaa

SEQ ID NO: 662749 - RNA, 19 nt, Homo sapiens
  misc_RNA (1)...(19): siRNA sense strand
gaugaagacucugacaaca

SEQ ID NO: 662750 - RNA, 19 nt, Homo sapiens
  misc_RNA (1)...(19): siRNA sense strand
ugaagacucugacaacagu

SEQ ID NO: 662751 - RNA, 19 nt, Homo sapiens
  misc_RNA (1)...(19): siRNA sense strand
guuaugaucagagcaguua

SEQ ID NO: 662752 - RNA, 19 nt, Homo sapiens
  misc_RNA (1)...(19): siRNA sense strand
cagccaagcuccaagucaa

SEQ ID NO: 662753 - RNA, 19 nt, Homo sapiens
  misc_RNA (1)...(19): siRNA sense strand
cggaagaagccuccaauga

SEQ ID NO: 662754 - RNA, 19 nt, Homo sapiens
  misc_RNA (1)...(19): siRNA sense strand
ucagaccacugcaaccuau

SEQ ID NO: 662755 - RNA, 19 nt, Homo sapiens
  misc_RNA (1)...(19): siRNA sense strand
caagggagcaaacuuaaag

SEQ ID NO: 662756 - RNA, 19 nt, Homo sapiens
  misc_RNA (1)...(19): siRNA sense strand
gcacucagccugcuuaucc

SEQ ID NO: 662757 - RNA, 19 nt, Homo sapiens
  misc_RNA (1)...(19): siRNA sense strand
gauauggacagaguaacua

SEQ ID NO: 662758 - RNA, 19 nt, Homo sapiens
  misc_RNA (1)...(19): siRNA sense strand
gcaguuacucucagcagaa

SEQ ID NO: 662759 - RNA, 19 nt, Homo sapiens
  misc_RNA (1)...(19): siRNA sense strand
gacagccucccacugguua

SEQ ID NO: 662760 - RNA, 19 nt, Homo sapiens
  misc_RNA (1)...(19): siRNA sense strand
ggacguggaggaccuggaa

SEQ ID NO: 662761 - RNA, 19 nt, Homo sapiens
  misc_RNA (1)...(19): siRNA sense strand
caagaccgcaggauggaaa

SEQ ID NO: 662762 - RNA, 19 nt, Homo sapiens
  misc_RNA (1)...(19): siRNA sense strand
gaugaaggaccagaucuug

SEQ ID NO: 662763 - RNA, 19 nt, Homo sapiens
  misc_RNA (1)...(19): siRNA sense strand
ggacagccucccacugguu

SEQ ID NO: 662764 - RNA, 19 nt, Homo sapiens
  misc_RNA (1)...(19): siRNA sense strand
ucacugcaccuccauccua

SEQ ID NO: 662765 - RNA, 19 nt, Homo sapiens
  misc_RNA (1)...(19): siRNA sense strand
ggacagcagaguagcuaug

SEQ ID NO: 662766 - RNA, 19 nt, Homo sapiens
  misc_RNA (1)...(19): siRNA sense strand
gaccuuugauggaacagau

SEQ ID NO: 662767 - RNA, 19 nt, Homo sapiens
  misc_RNA (1)...(19): siRNA sense strand
ugccaaggcugccguggaa

SEQ ID NO: 662768 - RNA, 19 nt, Homo sapiens
  misc_RNA (1)...(19): siRNA sense strand
gggcagaccgccuaugcaa

SEQ ID NO: 662769 - RNA, 19 nt, Homo sapiens
  misc_RNA (1)...(19): siRNA sense strand
ggacaaggaaacaggaaag

SEQ ID NO: 662770 - RNA, 19 nt, Homo sapiens
  misc_RNA (1)...(19): siRNA sense strand
caagcuccaagucaauaua

SEQ ID NO: 662771 - RNA, 19 nt, Homo sapiens
  misc_RNA (1)...(19): siRNA sense strand
uaugauaccaccacugcua

SEQ ID NO: 662772 - RNA, 19 nt, Homo sapiens
  misc_RNA (1)...(19): siRNA sense strand
uuucaagggagcaaacuua

SEQ ID NO: 662773 - RNA, 19 nt, Homo sapiens
  misc_RNA (1)...(19): siRNA sense strand
ccagcccacucaaggauau

SEQ ID NO: 662774 - RNA, 19 nt, Homo sapiens
  misc_RNA (1)...(19): siRNA sense strand
cuaugcaacuucuuaugga

SEQ ID NO: 662775 - RNA, 19 nt, Homo sapiens
  misc_RNA (1)...(19): siRNA sense strand
gcagcagccucccacuagu

SEQ ID NO: 662776 - RNA, 19 nt, Homo sapiens
  misc_RNA (1)...(19): siRNA sense strand
ccuaggauauggacagagu

SEQ ID NO: 662777 - RNA, 19 nt, Homo sapiens
  misc_RNA (1)...(19): siRNA sense strand
gcagaccgccuaugcaacu

SEQ ID NO: 662778 - RNA, 19 nt, Homo sapiens
  misc_RNA (1)...(19): siRNA sense strand
gguuugaugggaaagauuu

SEQ ID NO: 662779 - RNA, 19 nt, Homo sapiens
  misc_RNA (1)...(19): siRNA sense strand
ggaaacaggaaagcccaaa

SEQ ID NO: 662780 - RNA, 19 nt, Homo sapiens
  misc_RNA (1)...(19): siRNA sense strand
acaucuaccuggacaagga

SEQ ID NO: 662781 - RNA, 19 nt, Homo sapiens
  misc_RNA (1)...(19): siRNA sense strand
gacaacagugcaauuuaug

SEQ ID NO: 662782 - RNA, 19 nt, Homo sapiens
  misc_RNA (1)...(19): siRNA sense strand
gccaagcuccaagucaaua

SEQ ID NO: 662783 - RNA, 19 nt, Homo sapiens
  misc_RNA (1)...(19): siRNA sense strand
ggaugaaggaccagaucuu

SEQ ID NO: 662784 - RNA, 19 nt, Homo sapiens
  misc_RNA (1)...(19): siRNA sense strand
cauaugggcaacaaagcua

SEQ ID NO: 662785 - RNA, 19 nt, Homo sapiens
  misc_RNA (1)...(19): siRNA sense strand
uggcagacuucuuuaagca

SEQ ID NO: 662786 - RNA, 19 nt, Homo sapiens
  misc_RNA (1)...(19): siRNA sense strand
cagaguagcuauggucaac

SEQ ID NO: 662787 - RNA, 19 nt, Homo sapiens
  misc_RNA (1)...(19): siRNA sense strand
ccuaccagcuauuccucua

SEQ ID NO: 662788 - RNA, 19 nt, Homo sapiens
  misc_RNA (1)...(19): siRNA sense strand
gggcaacaaagcuauggaa

SEQ ID NO: 662789 - RNA, 19 nt, Homo sapiens
  misc_RNA (1)...(19): siRNA sense strand
ccacaguguccuaugaaga

SEQ ID NO: 662790 - RNA, 19 nt, Homo sapiens
  misc_RNA (1)...(19): siRNA sense strand
uaaaugacagugugacucu

SEQ ID NO: 662791 - RNA, 19 nt, Homo sapiens
  misc_RNA (1)...(19): siRNA sense strand
ugaaggaccagaucuugau

SEQ ID NO: 662792 - RNA, 19 nt, Homo sapiens
  misc_RNA (1)...(19): siRNA sense strand
ccgccuaugcaacuucuua

SEQ ID NO: 662793 - RNA, 19 nt, Homo sapiens
  misc_RNA (1)...(19): siRNA sense strand
uaggauauggacagaguaa

SEQ ID NO: 662794 - RNA, 19 nt, Homo sapiens
  misc_RNA (1)...(19): siRNA sense strand
cagagugcaaccaguguaa

SEQ ID NO: 662795 - RNA, 19 nt, Homo sapiens
  misc_RNA (1)...(19): siRNA sense strand
ucaagggagcaaacuuaaa

SEQ ID NO: 662796 - RNA, 19 nt, Homo sapiens
  misc_RNA (1)...(19): siRNA sense strand
gccguggaaugguuugaug

SEQ ID NO: 662797 - RNA, 19 nt, Homo sapiens
  misc_RNA (1)...(19): siRNA sense strand
guuaagaugaacaagagaa

SEQ ID NO: 662798 - RNA, 19 nt, Homo sapiens
  misc_RNA (1)...(19): siRNA sense strand
gagacuagucaaccucaau

SEQ ID NO: 662799 - RNA, 19 nt, Homo sapiens
  misc_RNA (1)...(19): siRNA sense strand
ccaggcauaugggcaacaa

SEQ ID NO: 662800 - RNA, 19 nt, Homo sapiens
  misc_RNA (1)...(19): siRNA sense strand
cagugugacucuagaugau

SEQ ID NO: 662801 - RNA, 19 nt, Homo sapiens
  misc_RNA (1)...(19): siRNA sense strand
ggauuaaaugacaguguga

SEQ ID NO: 662802 - RNA, 19 nt, Homo sapiens
  misc_RNA (1)...(19): siRNA sense strand
ggauauggacagaguaacu

SEQ ID NO: 662803 - RNA, 19 nt, Homo sapiens
  misc_RNA (1)...(19): siRNA sense strand
gcuauggacagcagaguag

SEQ ID NO: 662804 - RNA, 19 nt, Homo sapiens
  misc_RNA (1)...(19): siRNA sense strand
gaaacaggaaagcccaaag

SEQ ID NO: 662805 - RNA, 19 nt, Homo sapiens
  misc_RNA (1)...(19): siRNA sense strand
cugacaacagugcaauuua

SEQ ID NO: 662806 - RNA, 19 nt, Homo sapiens
  misc_RNA (1)...(19): siRNA sense strand
acagugcaauuuauguaca

SEQ ID NO: 662807 - RNA, 19 nt, Homo sapiens
  misc_RNA (1)...(19): siRNA sense strand
caaccagcccagccuagga

SEQ ID NO: 662808 - RNA, 19 nt, Homo sapiens
  misc_RNA (1)...(19): siRNA sense strand
ccaaggcugccguggaaug

SEQ ID NO: 662809 - RNA, 19 nt, Homo sapiens
  misc_RNA (1)...(19): siRNA sense strand
cagugcaauuuauguacaa

SEQ ID NO: 662810 - RNA, 19 nt, Homo sapiens
  misc_RNA (1)...(19): siRNA sense strand
gcagaguagcuauggucaa

SEQ ID NO: 662811 - RNA, 19 nt, Homo sapiens
  misc_RNA (1)...(19): siRNA sense strand
cggauuacaguaccuauag

SEQ ID NO: 662812 - RNA, 19 nt, Homo sapiens
  misc_RNA (1)...(19): siRNA sense strand
ugcaauuuauguacaagga

SEQ ID NO: 662813 - RNA, 19 nt, Homo sapiens
  misc_RNA (1)...(19): siRNA sense strand
ggucaacaaagcagcuaug

SEQ ID NO: 662814 - RNA, 19 nt, Homo sapiens
  misc_RNA (1)...(19): siRNA sense strand
uggcuuugguggaggaaga

SEQ ID NO: 662815 - RNA, 19 nt, Homo sapiens
  misc_RNA (1)...(19): siRNA sense strand
cagcagccucccacuaguu

SEQ ID NO: 662816 - RNA, 19 nt, Homo sapiens
  misc_RNA (1)...(19): siRNA sense strand
uaccagcuauuccucuaca

SEQ ID NO: 662817 - RNA, 19 nt, Homo sapiens
  misc_RNA (1)...(19): siRNA sense strand
acagaugggaggaagaaga

SEQ ID NO: 662818 - RNA, 19 nt, Homo sapiens
  misc_RNA (1)...(19): siRNA sense strand
ucugacaacagugcaauuu

SEQ ID NO: 662819 - RNA, 19 nt, Homo sapiens
  misc_RNA (1)...(19): siRNA sense strand
acagugugacucuagauga

SEQ ID NO: 662820 - RNA, 19 nt, Homo sapiens
  misc_RNA (1)...(19): siRNA sense strand
ccuauggacagcccacuga

SEQ ID NO: 662821 - RNA, 19 nt, Homo sapiens
  misc_RNA (1)...(19): siRNA sense strand
ggaacagaugggaggaaga

SEQ ID NO: 662822 - RNA, 19 nt, Homo sapiens
  misc_RNA (1)...(19): siRNA sense strand
gacagugugacucuagaug

SEQ ID NO: 662823 - RNA, 19 nt, Homo sapiens
  misc_RNA (1)...(19): siRNA sense strand
aaacaagcccacugagacu

SEQ ID NO: 662824 - RNA, 19 nt, Homo sapiens
  misc_RNA (1)...(19): siRNA sense strand
acucaaggauaugcacaga

SEQ ID NO: 662825 - RNA, 19 nt, Homo sapiens
  misc_RNA (1)...(19): siRNA sense strand
gcgaugccacaguguccua

SEQ ID NO: 662826 - RNA, 19 nt, Homo sapiens
  misc_RNA (1)...(19): siRNA sense strand
aaaugacagugugacucua

SEQ ID NO: 662827 - RNA, 19 nt, Homo sapiens
  misc_RNA (1)...(19): siRNA sense strand
gcaauuuauguacaaggau

SEQ ID NO: 662828 - RNA, 19 nt, Homo sapiens
  misc_RNA (1)...(19): siRNA sense strand
ggauuacaguaccuauagc

SEQ ID NO: 662829 - RNA, 19 nt, Homo sapiens
  misc_RNA (1)...(19): siRNA sense strand
uagcuauggucaacaaagc

SEQ ID NO: 662830 - RNA, 19 nt, Homo sapiens
  misc_RNA (1)...(19): siRNA sense strand
acacagccgacuaguuaug

SEQ ID NO: 662831 - RNA, 19 nt, Homo sapiens
  misc_RNA (1)...(19): siRNA sense strand
gcauaugggcaacaaagcu

SEQ ID NO: 662832 - RNA, 19 nt, Homo sapiens
  misc_RNA (1)...(19): siRNA sense strand
cacagaccacccaggcaua

SEQ ID NO: 662833 - RNA, 19 nt, Homo sapiens
  misc_RNA (1)...(19): siRNA sense strand
cuacaguuauccccaggua

SEQ ID NO: 662834 - RNA, 19 nt, Homo sapiens
  misc_RNA (1)...(19): siRNA sense strand
caacaaagguucuaaagga

SEQ ID NO: 662835 - RNA, 19 nt, Homo sapiens
  misc_RNA (1)...(19): siRNA sense strand
gagaagauauagaacuuga

SEQ ID NO: 662836 - RNA, 19 nt, Homo sapiens
  misc_RNA (1)...(19): siRNA sense strand
caacaaggcagaagaggua

SEQ ID NO: 662837 - RNA, 19 nt, Homo sapiens
  misc_RNA (1)...(19): siRNA sense strand
agagauaucccacguaaua

SEQ ID NO: 662838 - RNA, 19 nt, Homo sapiens
  misc_RNA (1)...(19): siRNA sense strand
ccaaggacuuccaggcuua

SEQ ID NO: 662839 - RNA, 19 nt, Homo sapiens
  misc_RNA (1)...(19): siRNA sense strand
ccaaggacgugauggaauu

SEQ ID NO: 662840 - RNA, 19 nt, Homo sapiens
  misc_RNA (1)...(19): siRNA sense strand
gcagcuggcuugaaaggaa

SEQ ID NO: 662841 - RNA, 19 nt, Homo sapiens
  misc_RNA (1)...(19): siRNA sense strand
ucagagauaucccacguaa

SEQ ID NO: 662842 - RNA, 19 nt, Homo sapiens
  misc_RNA (1)...(19): siRNA sense strand
uauaagaggugaccaagga

SEQ ID NO: 662843 - RNA, 19 nt, Homo sapiens
  misc_RNA (1)...(19): siRNA sense strand
caaagaggauauccaggaa

SEQ ID NO: 662844 - RNA, 19 nt, Homo sapiens
  misc_RNA (1)...(19): siRNA sense strand
gaacaaggagauaaaggaa

SEQ ID NO: 662845 - RNA, 19 nt, Homo sapiens
  misc_RNA (1)...(19): siRNA sense strand
gaagauauagaacuugaug

SEQ ID NO: 662846 - RNA, 19 nt, Homo sapiens
  misc_RNA (1)...(19): siRNA sense strand
ccaccaggcucaagaggaa

SEQ ID NO: 662847 - RNA, 19 nt, Homo sapiens
  misc_RNA (1)...(19): siRNA sense strand
gaaagagugauaggacaua

SEQ ID NO: 662848 - RNA, 19 nt, Homo sapiens
  misc_RNA (1)...(19): siRNA sense strand
gaaagggcuuggauggaau

SEQ ID NO: 662849 - RNA, 19 nt, Homo sapiens
  misc_RNA (1)...(19): siRNA sense strand
agaaagggcuuggauggaa

SEQ ID NO: 662850 - RNA, 19 nt, Homo sapiens
  misc_RNA (1)...(19): siRNA sense strand
gaccaggccucccagguau

SEQ ID NO: 662851 - RNA, 19 nt, Homo sapiens
  misc_RNA (1)...(19): siRNA sense strand
guaaagggccagagaggaa

SEQ ID NO: 662852 - RNA, 19 nt, Homo sapiens
  misc_RNA (1)...(19): siRNA sense strand
cagcaaggguugugucugu

SEQ ID NO: 662853 - RNA, 19 nt, Homo sapiens
  misc_RNA (1)...(19): siRNA sense strand
acaaggagauaaaggaaau

SEQ ID NO: 662854 - RNA, 19 nt, Homo sapiens
  misc_RNA (1)...(19): siRNA sense strand
ggaacaaggagauaaagga

SEQ ID NO: 662855 - RNA, 19 nt, Homo sapiens
  misc_RNA (1)...(19): siRNA sense strand
ggaccaccaggaacaguua

SEQ ID NO: 662856 - RNA, 19 nt, Homo sapiens
  misc_RNA (1)...(19): siRNA sense strand
gaaagccuauuccaucaac

SEQ ID NO: 662857 - RNA, 19 nt, Homo sapiens
  misc_RNA (1)...(19): siRNA sense strand
caagggagaaccagcagua

SEQ ID NO: 662858 - RNA, 19 nt, Homo sapiens
  misc_RNA (1)...(19): siRNA sense strand
gagccuggguuaccuggaa

SEQ ID NO: 662859 - RNA, 19 nt, Homo sapiens
  misc_RNA (1)...(19): siRNA sense strand
auacaggucuuccaggauu

SEQ ID NO: 662860 - RNA, 19 nt, Homo sapiens
  misc_RNA (1)...(19): siRNA sense strand
ccacaggcauagaaggauu

SEQ ID NO: 662861 - RNA, 19 nt, Homo sapiens
  misc_RNA (1)...(19): siRNA sense strand
guacacagugcccuuauau

SEQ ID NO: 662862 - RNA, 19 nt, Homo sapiens
  misc_RNA (1)...(19): siRNA sense strand
ggaaaugaagggcuugaug

SEQ ID NO: 662863 - RNA, 19 nt, Homo sapiens
  misc_RNA (1)...(19): siRNA sense strand
ucaaaggauucgcaggaaa

SEQ ID NO: 662864 - RNA, 19 nt, Homo sapiens
  misc_RNA (1)...(19): siRNA sense strand
aaagggugcuccugcuaaa

SEQ ID NO: 662865 - RNA, 19 nt, Homo sapiens
  misc_RNA (1)...(19): siRNA sense strand
gaacccuggugcucaagga

SEQ ID NO: 662866 - RNA, 19 nt, Homo sapiens
  misc_RNA (1)...(19): siRNA sense strand
aggcuuaaauggauugaaa

SEQ ID NO: 662867 - RNA, 19 nt, Homo sapiens
  misc_RNA (1)...(19): siRNA sense strand
ggacuuccaggcuuaaaug

SEQ ID NO: 662868 - RNA, 19 nt, Homo sapiens
  misc_RNA (1)...(19): siRNA sense strand
ugugaaagcuggggaauua

SEQ ID NO: 662869 - RNA, 19 nt, Homo sapiens
  misc_RNA (1)...(19): siRNA sense strand
uaacagaacggaccucaag

SEQ ID NO: 662870 - RNA, 19 nt, Homo sapiens
  misc_RNA (1)...(19): siRNA sense strand
ccuauuccaucaacuguga

SEQ ID NO: 662871 - RNA, 19 nt, Homo sapiens
  misc_RNA (1)...(19): siRNA sense strand
gggauuuccuggagccauu

SEQ ID NO: 662872 - RNA, 19 nt, Homo sapiens
  misc_RNA (1)...(19): siRNA sense strand
aaagggagacccaggaauu

SEQ ID NO: 662873 - RNA, 19 nt, Homo sapiens
  misc_RNA (1)...(19): siRNA sense strand
gcaaggguugugucuguaa

SEQ ID NO: 662874 - RNA, 19 nt, Homo sapiens
  misc_RNA (1)...(19): siRNA sense strand
uaucuagggucuccaggaa

SEQ ID NO: 662875 - RNA, 19 nt, Homo sapiens
  misc_RNA (1)...(19): siRNA sense strand
cauuggcccuccaggauuu

SEQ ID NO: 662876 - RNA, 19 nt, Homo sapiens
  misc_RNA (1)...(19): siRNA sense strand
ggaaagaaaggagaaaugg

SEQ ID NO: 662877 - RNA, 19 nt, Homo sapiens
  misc_RNA (1)...(19): siRNA sense strand
aaagagugauaggacauaa

SEQ ID NO: 662878 - RNA, 19 nt, Homo sapiens
  misc_RNA (1)...(19): siRNA sense strand
uccagggagucauguaaua

SEQ ID NO: 662879 - RNA, 19 nt, Homo sapiens
  misc_RNA (1)...(19): siRNA sense strand
ggucugcccggugcaauua

SEQ ID NO: 662880 - RNA, 19 nt, Homo sapiens
  misc_RNA (1)...(19): siRNA sense strand
caaggguugugucuguaaa

SEQ ID NO: 662881 - RNA, 19 nt, Homo sapiens
  misc_RNA (1)...(19): siRNA sense strand
ucacuggguuguccuggaa

SEQ ID NO: 662882 - RNA, 19 nt, Homo sapiens
  misc_RNA (1)...(19): siRNA sense strand
agaaucauauggaucugaa

SEQ ID NO: 662883 - RNA, 19 nt, Homo sapiens
  misc_RNA (1)...(19): siRNA sense strand
ggaaagccagguccucaug

SEQ ID NO: 662884 - RNA, 19 nt, Homo sapiens
  misc_RNA (1)...(19): siRNA sense strand
aggcgcagcuggcuugaaa

SEQ ID NO: 662885 - RNA, 19 nt, Homo sapiens
  misc_RNA (1)...(19): siRNA sense strand
aagaggauauccaggaaau

SEQ ID NO: 662886 - RNA, 19 nt, Homo sapiens
  misc_RNA (1)...(19): siRNA sense strand
caaaggauucgcaggaaau

SEQ ID NO: 662887 - RNA, 19 nt, Homo sapiens
  misc_RNA (1)...(19): siRNA sense strand
aaccaggucucaaaggauu

SEQ ID NO: 662888 - RNA, 19 nt, Homo sapiens
  misc_RNA (1)...(19): siRNA sense strand
uuacggacuugucggugua

SEQ ID NO: 662889 - RNA, 19 nt, Homo sapiens
  misc_RNA (1)...(19): siRNA sense strand
ggagacccuggcacacuua

SEQ ID NO: 662890 - RNA, 19 nt, Homo sapiens
  misc_RNA (1)...(19): siRNA sense strand
agaaccaggucucaaagga

SEQ ID NO: 662891 - RNA, 19 nt, Homo sapiens
  misc_RNA (1)...(19): siRNA sense strand
ugauugggaugaugggauu

SEQ ID NO: 662892 - RNA, 19 nt, Homo sapiens
  misc_RNA (1)...(19): siRNA sense strand
gggugaagauggcauuaag

SEQ ID NO: 662893 - RNA, 19 nt, Homo sapiens
  misc_RNA (1)...(19): siRNA sense strand
uaaguggauugccaggauu

SEQ ID NO: 662894 - RNA, 19 nt, Homo sapiens
  misc_RNA (1)...(19): siRNA sense strand
aggagaagauauagaacuu

SEQ ID NO: 662895 - RNA, 19 nt, Homo sapiens
  misc_RNA (1)...(19): siRNA sense strand
gggaaagaaaggagaaaug

SEQ ID NO: 662896 - RNA, 19 nt, Homo sapiens
  misc_RNA (1)...(19): siRNA sense strand
ccaggaacaguuauuguga

SEQ ID NO: 662897 - RNA, 19 nt, Homo sapiens
  misc_RNA (1)...(19): siRNA sense strand
gggcaugccagguucuaaa

SEQ ID NO: 662898 - RNA, 19 nt, Homo sapiens
  misc_RNA (1)...(19): siRNA sense strand
ggaccuccaggaccaauug

SEQ ID NO: 662899 - RNA, 19 nt, Homo sapiens
  misc_RNA (1)...(19): siRNA sense strand
uguacacagugcccuuaua

SEQ ID NO: 662900 - RNA, 19 nt, Homo sapiens
  misc_RNA (1)...(19): siRNA sense strand
ugucaggugugcaugaaga

SEQ ID NO: 662901 - RNA, 19 nt, Homo sapiens
  misc_RNA (1)...(19): siRNA sense strand
gaaccaggucucaaaggau

SEQ ID NO: 662902 - RNA, 19 nt, Homo sapiens
  misc_RNA (1)...(19): siRNA sense strand
gaccaagguuuuccaggua

SEQ ID NO: 662903 - RNA, 19 nt, Homo sapiens
  misc_RNA (1)...(19): siRNA sense strand
uggccaggcuugaaaggaa

SEQ ID NO: 662904 - RNA, 19 nt, Homo sapiens
  misc_RNA (1)...(19): siRNA sense strand
gcagggacccaagggcuuu

SEQ ID NO: 662905 - RNA, 19 nt, Homo sapiens
  misc_RNA (1)...(19): siRNA sense strand
caugccagguucuaaagga

SEQ ID NO: 662906 - RNA, 19 nt, Homo sapiens
  misc_RNA (1)...(19): siRNA sense strand
ccuggcacacuuaagauua

SEQ ID NO: 662907 - RNA, 19 nt, Homo sapiens
  misc_RNA (1)...(19): siRNA sense strand
agagccagguuauucagaa

SEQ ID NO: 662908 - RNA, 19 nt, Homo sapiens
  misc_RNA (1)...(19): siRNA sense strand
gauaagggagagccagguu

SEQ ID NO: 662909 - RNA, 19 nt, Homo sapiens
  misc_RNA (1)...(19): siRNA sense strand
ggaccuagaggaccuaagg

SEQ ID NO: 662910 - RNA, 19 nt, Homo sapiens
  misc_RNA (1)...(19): siRNA sense strand
gcugucaggugugcaugaa

SEQ ID NO: 662911 - RNA, 19 nt, Homo sapiens
  misc_RNA (1)...(19): siRNA sense strand
gcaacaaagguucuaaagg

SEQ ID NO: 662912 - RNA, 19 nt, Homo sapiens
  misc_RNA (1)...(19): siRNA sense strand
gacccuggcacacuuaaga

SEQ ID NO: 662913 - RNA, 19 nt, Homo sapiens
  misc_RNA (1)...(19): siRNA sense strand
gggugcugcugguuugaaa

SEQ ID NO: 662914 - RNA, 19 nt, Homo sapiens
  misc_RNA (1)...(19): siRNA sense strand
uaagggagagccagguuau

SEQ ID NO: 662915 - RNA, 19 nt, Homo sapiens
  misc_RNA (1)...(19): siRNA sense strand
caagggcuuuccaggacuu

SEQ ID NO: 662916 - RNA, 19 nt, Homo sapiens
  misc_RNA (1)...(19): siRNA sense strand
ccaggaaucccaggaguug

SEQ ID NO: 662917 - RNA, 19 nt, Homo sapiens
  misc_RNA (1)...(19): siRNA sense strand
uggaaguccuggaucauca

SEQ ID NO: 662918 - RNA, 19 nt, Homo sapiens
  misc_RNA (1)...(19): siRNA sense strand
ccaacagaauauuaugaca

SEQ ID NO: 662919 - RNA, 19 nt, Homo sapiens
  misc_RNA (1)...(19): siRNA sense strand
gacauuggcccuccaggau

SEQ ID NO: 662920 - RNA, 19 nt, Homo sapiens
  misc_RNA (1)...(19): siRNA sense strand
agaccaggccucccaggua

SEQ ID NO: 662921 - RNA, 19 nt, Homo sapiens
  misc_RNA (1)...(19): siRNA sense strand
ggaccaggaacaccagguu

SEQ ID NO: 662922 - RNA, 19 nt, Homo sapiens
  misc_RNA (1)...(19): siRNA sense strand
gagaaagggcuuggaugga

SEQ ID NO: 662923 - RNA, 19 nt, Homo sapiens
  misc_RNA (1)...(19): siRNA sense strand
ggguuucccuggguuaaug

SEQ ID NO: 662924 - RNA, 19 nt, Homo sapiens
  misc_RNA (1)...(19): siRNA sense strand
gagguaagccaggcaagga

SEQ ID NO: 662925 - RNA, 19 nt, Homo sapiens
  misc_RNA (1)...(19): siRNA sense strand
ccagggaugccagguuuaa

SEQ ID NO: 662926 - RNA, 19 nt, Homo sapiens
  misc_RNA (1)...(19): siRNA sense strand
aggugaagauggagugauu

SEQ ID NO: 662927 - RNA, 19 nt, Homo sapiens
  misc_RNA (1)...(19): siRNA sense strand
ggacugccaggcuaucuag

SEQ ID NO: 662928 - RNA, 19 nt, Homo sapiens
  misc_RNA (1)...(19): siRNA sense strand
auaaguggauugccaggau

SEQ ID NO: 662929 - RNA, 19 nt, Homo sapiens
  misc_RNA (1)...(19): siRNA sense strand
ggaccaauggguauaagag

SEQ ID NO: 662930 - RNA, 19 nt, Homo sapiens
  misc_RNA (1)...(19): siRNA sense strand
ggaauuccaggucaucaag

SEQ ID NO: 662931 - RNA, 19 nt, Homo sapiens
  misc_RNA (1)...(19): siRNA sense strand
gaccaggaacaccagguuu

SEQ ID NO: 662932 - RNA, 19 nt, Homo sapiens
  misc_RNA (1)...(19): siRNA sense strand
cuccaggucuuccaggauu

SEQ ID NO: 662933 - RNA, 19 nt, Homo sapiens
  misc_RNA (1)...(19): siRNA sense strand
gaccaaggacgugauggaa

SEQ ID NO: 662934 - RNA, 19 nt, Homo sapiens
  misc_RNA (1)...(19): siRNA sense strand
caacaaagguucuaaagga

SEQ ID NO: 662935 - RNA, 19 nt, Homo sapiens
  misc_RNA (1)...(19): siRNA sense strand
gagaagauauagaacuuga

SEQ ID NO: 662936 - RNA, 19 nt, Homo sapiens
  misc_RNA (1)...(19): siRNA sense strand
caacaaggcagaagaggua

SEQ ID NO: 662937 - RNA, 19 nt, Homo sapiens
  misc_RNA (1)...(19): siRNA sense strand
agagauaucccacguaaua

SEQ ID NO: 662938 - RNA, 19 nt, Homo sapiens
  misc_RNA (1)...(19): siRNA sense strand
ccaaggacuuccaggcuua

SEQ ID NO: 662939 - RNA, 19 nt, Homo sapiens
  misc_RNA (1)...(19): siRNA sense strand
ccaaggacgugauggaauu

SEQ ID NO: 662940 - RNA, 19 nt, Homo sapiens
  misc_RNA (1)...(19): siRNA sense strand
gcagcuggcuugaaaggaa

SEQ ID NO: 662941 - RNA, 19 nt, Homo sapiens
  misc_RNA (1)...(19): siRNA sense strand
ucagagauaucccacguaa

SEQ ID NO: 662942 - RNA, 19 nt, Homo sapiens
  misc_RNA (1)...(19): siRNA sense strand
uauaagaggugaccaagga

SEQ ID NO: 662943 - RNA, 19 nt, Homo sapiens
  misc_RNA (1)...(19): siRNA sense strand
caaagaggauauccaggaa

SEQ ID NO: 662944 - RNA, 19 nt, Homo sapiens
  misc_RNA (1)...(19): siRNA sense strand
gaacaaggagauaaaggaa

SEQ ID NO: 662945 - RNA, 19 nt, Homo sapiens
  misc_RNA (1)...(19): siRNA sense strand
gaaaagacacugaagcuaa

SEQ ID NO: 662946 - RNA, 19 nt, Homo sapiens
  misc_RNA (1)...(19): siRNA sense strand
gaagauauagaacuugaug

SEQ ID NO: 662947 - RNA, 19 nt, Homo sapiens
  misc_RNA (1)...(19): siRNA sense strand
ccaccaggcucaagaggaa

SEQ ID NO: 662948 - RNA, 19 nt, Homo sapiens
  misc_RNA (1)...(19): siRNA sense strand
gaaagagugauaggacaua

SEQ ID NO: 662949 - RNA, 19 nt, Homo sapiens
  misc_RNA (1)...(19): siRNA sense strand
gaaagggcuuggauggaau

SEQ ID NO: 662950 - RNA, 19 nt, Homo sapiens
  misc_RNA (1)...(19): siRNA sense strand
agaaagggcuuggauggaa

SEQ ID NO: 662951 - RNA, 19 nt, Homo sapiens
  misc_RNA (1)...(19): siRNA sense strand
gaccaggccucccagguau

SEQ ID NO: 662952 - RNA, 19 nt, Homo sapiens
  misc_RNA (1)...(19): siRNA sense strand
guaaagggccagagaggaa

SEQ ID NO: 662953 - RNA, 19 nt, Homo sapiens
  misc_RNA (1)...(19): siRNA sense strand
cagcaaggguugugucugu

SEQ ID NO: 662954 - RNA, 19 nt, Homo sapiens
  misc_RNA (1)...(19): siRNA sense strand
acaaggagauaaaggaaau

SEQ ID NO: 662955 - RNA, 19 nt, Homo sapiens
  misc_RNA (1)...(19): siRNA sense strand
ggaacaaggagauaaagga

SEQ ID NO: 662956 - RNA, 19 nt, Homo sapiens
  misc_RNA (1)...(19): siRNA sense strand
ggaccaccaggaacaguua

SEQ ID NO: 662957 - RNA, 19 nt, Homo sapiens
  misc_RNA (1)...(19): siRNA sense strand
gaacaaaguaaugacagaa

SEQ ID NO: 662958 - RNA, 19 nt, Homo sapiens
  misc_RNA (1)...(19): siRNA sense strand
gaaagccuauuccaucaac

SEQ ID NO: 662959 - RNA, 19 nt, Homo sapiens
  misc_RNA (1)...(19): siRNA sense strand
caagggagaaccagcagua

SEQ ID NO: 662960 - RNA, 19 nt, Homo sapiens
  misc_RNA (1)...(19): siRNA sense strand
gagccuggguuaccuggaa

SEQ ID NO: 662961 - RNA, 19 nt, Homo sapiens
  misc_RNA (1)...(19): siRNA sense strand
auacaggucuuccaggauu

SEQ ID NO: 662962 - RNA, 19 nt, Homo sapiens
  misc_RNA (1)...(19): siRNA sense strand
ccacaggcauagaaggauu

SEQ ID NO: 662963 - RNA, 19 nt, Homo sapiens
  misc_RNA (1)...(19): siRNA sense strand
guacacagugcccuuauau

SEQ ID NO: 662964 - RNA, 19 nt, Homo sapiens
  misc_RNA (1)...(19): siRNA sense strand
ggaaaugaagggcuugaug

SEQ ID NO: 662965 - RNA, 19 nt, Homo sapiens
  misc_RNA (1)...(19): siRNA sense strand
ucaaaggauucgcaggaaa

SEQ ID NO: 662966 - RNA, 19 nt, Homo sapiens
  misc_RNA (1)...(19): siRNA sense strand
aaagggugcuccugcuaaa

SEQ ID NO: 662967 - RNA, 19 nt, Homo sapiens
  misc_RNA (1)...(19): siRNA sense strand
gaacccuggugcucaagga

SEQ ID NO: 662968 - RNA, 19 nt, Homo sapiens
  misc_RNA (1)...(19): siRNA sense strand
aggcuuaaauggauugaaa

SEQ ID NO: 662969 - RNA, 19 nt, Homo sapiens
  misc_RNA (1)...(19): siRNA sense strand
ggacuuccaggcuuaaaug

SEQ ID NO: 662970 - RNA, 19 nt, Homo sapiens
  misc_RNA (1)...(19): siRNA sense strand
ugugaaagcuggggaauua

SEQ ID NO: 662971 - RNA, 19 nt, Homo sapiens
  misc_RNA (1)...(19): siRNA sense strand
uaacagaacggaccucaag

SEQ ID NO: 662972 - RNA, 19 nt, Homo sapiens
  misc_RNA (1)...(19): siRNA sense strand
ccuauuccaucaacuguga

SEQ ID NO: 662973 - RNA, 19 nt, Homo sapiens
  misc_RNA (1)...(19): siRNA sense strand
gggauuuccuggagccauu

SEQ ID NO: 662974 - RNA, 19 nt, Homo sapiens
  misc_RNA (1)...(19): siRNA sense strand
aaagggagacccaggaauu

SEQ ID NO: 662975 - RNA, 19 nt, Homo sapiens
  misc_RNA (1)...(19): siRNA sense strand
gcaaggguugugucuguaa

SEQ ID NO: 662976 - RNA, 19 nt, Homo sapiens
  misc_RNA (1)...(19): siRNA sense strand
uaucuagggucuccaggaa

SEQ ID NO: 662977 - RNA, 19 nt, Homo sapiens
  misc_RNA (1)...(19): siRNA sense strand
cauuggcccuccaggauuu

SEQ ID NO: 662978 - RNA, 19 nt, Homo sapiens
  misc_RNA (1)...(19): siRNA sense strand
ggaaagaaaggagaaaugg

SEQ ID NO: 662979 - RNA, 19 nt, Homo sapiens
  misc_RNA (1)...(19): siRNA sense strand
aaagagugauaggacauaa

SEQ ID NO: 662980 - RNA, 19 nt, Homo sapiens
  misc_RNA (1)...(19): siRNA sense strand
uccagggagucauguaaua

SEQ ID NO: 662981 - RNA, 19 nt, Homo sapiens
  misc_RNA (1)...(19): siRNA sense strand
ggucugcccggugcaauua

SEQ ID NO: 662982 - RNA, 19 nt, Homo sapiens
  misc_RNA (1)...(19): siRNA sense strand
caaggguugugucuguaaa

SEQ ID NO: 662983 - RNA, 19 nt, Homo sapiens
  misc_RNA (1)...(19): siRNA sense strand
ucacuggguuguccuggaa

SEQ ID NO: 662984 - RNA, 19 nt, Homo sapiens
  misc_RNA (1)...(19): siRNA sense strand
agaaucauauggaucugaa

SEQ ID NO: 662985 - RNA, 19 nt, Homo sapiens
  misc_RNA (1)...(19): siRNA sense strand
ggaaagccagguccucaug

SEQ ID NO: 662986 - RNA, 19 nt, Homo sapiens
  misc_RNA (1)...(19): siRNA sense strand
aggcgcagcuggcuugaaa

SEQ ID NO: 662987 - RNA, 19 nt, Homo sapiens
  misc_RNA (1)...(19): siRNA sense strand
aagaggauauccaggaaau

SEQ ID NO: 662988 - RNA, 19 nt, Homo sapiens
  misc_RNA (1)...(19): siRNA sense strand
caaaggauucgcaggaaau

SEQ ID NO: 662989 - RNA, 19 nt, Homo sapiens
  misc_RNA (1)...(19): siRNA sense strand
aaccaggucucaaaggauu

SEQ ID NO: 662990 - RNA, 19 nt, Homo sapiens
  misc_RNA (1)...(19): siRNA sense strand
gggugaagauggcauuaag

SEQ ID NO: 662991 - RNA, 19 nt, Homo sapiens
  misc_RNA (1)...(19): siRNA sense strand
agaacaaaguaaugacaga

SEQ ID NO: 662992 - RNA, 19 nt, Homo sapiens
  misc_RNA (1)...(19): siRNA sense strand
ggagacccuggcacacuua

SEQ ID NO: 662993 - RNA, 19 nt, Homo sapiens
  misc_RNA (1)...(19): siRNA sense strand
uaaguggauugccaggauu

SEQ ID NO: 662994 - RNA, 19 nt, Homo sapiens
  misc_RNA (1)...(19): siRNA sense strand
agaaccaggucucaaagga

SEQ ID NO: 662995 - RNA, 19 nt, Homo sapiens
  misc_RNA (1)...(19): siRNA sense strand
ugauugggaugaugggauu

SEQ ID NO: 662996 - RNA, 19 nt, Homo sapiens
  misc_RNA (1)...(19): siRNA sense strand
uuacggacuugucggugua

SEQ ID NO: 662997 - RNA, 19 nt, Homo sapiens
  misc_RNA (1)...(19): siRNA sense strand
aggagaagauauagaacuu

SEQ ID NO: 662998 - RNA, 19 nt, Homo sapiens
  misc_RNA (1)...(19): siRNA sense strand
gggaaagaaaggagaaaug

SEQ ID NO: 662999 - RNA, 19 nt, Homo sapiens
  misc_RNA (1)...(19): siRNA sense strand
ccaggaacaguuauuguga

SEQ ID NO: 663000 - RNA, 19 nt, Homo sapiens
  misc_RNA (1)...(19): siRNA sense strand
gggcaugccagguucuaaa

SEQ ID NO: 663001 - RNA, 19 nt, Homo sapiens
  misc_RNA (1)...(19): siRNA sense strand
aaaagacacugaagcuaaa

SEQ ID NO: 663002 - RNA, 19 nt, Homo sapiens
  misc_RNA (1)...(19): siRNA sense strand
ggaccuccaggaccaauug

SEQ ID NO: 663003 - RNA, 19 nt, Homo sapiens
  misc_RNA (1)...(19): siRNA sense strand
uguacacagugcccuuaua

SEQ ID NO: 663004 - RNA, 19 nt, Homo sapiens
  misc_RNA (1)...(19): siRNA sense strand
acaaaguaaugacagaaca

SEQ ID NO: 663005 - RNA, 19 nt, Homo sapiens
  misc_RNA (1)...(19): siRNA sense strand
ugucaggugugcaugaaga

SEQ ID NO: 663006 - RNA, 19 nt, Homo sapiens
  misc_RNA (1)...(19): siRNA sense strand
gaaccaggucucaaaggau

SEQ ID NO: 663007 - RNA, 19 nt, Homo sapiens
  misc_RNA (1)...(19): siRNA sense strand
gaccaagguuuuccaggua

SEQ ID NO: 663008 - RNA, 19 nt, Homo sapiens
  misc_RNA (1)...(19): siRNA sense strand
uggccaggcuugaaaggaa

SEQ ID NO: 663009 - RNA, 19 nt, Homo sapiens
  misc_RNA (1)...(19): siRNA sense strand
gcagggacccaagggcuuu

SEQ ID NO: 663010 - RNA, 19 nt, Homo sapiens
  misc_RNA (1)...(19): siRNA sense strand
caugccagguucuaaagga

SEQ ID NO: 663011 - RNA, 19 nt, Homo sapiens
  misc_RNA (1)...(19): siRNA sense strand
ccuggcacacuuaagauua

SEQ ID NO: 663012 - RNA, 19 nt, Homo sapiens
  misc_RNA (1)...(19): siRNA sense strand
agagccagguuauucagaa

SEQ ID NO: 663013 - RNA, 19 nt, Homo sapiens
  misc_RNA (1)...(19): siRNA sense strand
gauaagggagagccagguu

SEQ ID NO: 663014 - RNA, 19 nt, Homo sapiens
  misc_RNA (1)...(19): siRNA sense strand
ggaccuagaggaccuaagg

SEQ ID NO: 663015 - RNA, 19 nt, Homo sapiens
  misc_RNA (1)...(19): siRNA sense strand
caagggcuuuccaggacuu

SEQ ID NO: 663016 - RNA, 19 nt, Homo sapiens
  misc_RNA (1)...(19): siRNA sense strand
gcugucaggugugcaugaa

SEQ ID NO: 663017 - RNA, 19 nt, Homo sapiens
  misc_RNA (1)...(19): siRNA sense strand
gcaacaaagguucuaaagg

SEQ ID NO: 663018 - RNA, 19 nt, Homo sapiens
  misc_RNA (1)...(19): siRNA sense strand
gacccuggcacacuuaaga

SEQ ID NO: 663019 - RNA, 19 nt, Homo sapiens
  misc_RNA (1)...(19): siRNA sense strand
gggugcugcugguuugaaa

SEQ ID NO: 663020 - RNA, 19 nt, Homo sapiens
  misc_RNA (1)...(19): siRNA sense strand
uaagggagagccagguuau

SEQ ID NO: 663021 - RNA, 19 nt, Homo sapiens
  misc_RNA (1)...(19): siRNA sense strand
ccaggaaucccaggaguug

SEQ ID NO: 663022 - RNA, 19 nt, Homo sapiens
  misc_RNA (1)...(19): siRNA sense strand
uggaaguccuggaucauca

SEQ ID NO: 663023 - RNA, 19 nt, Homo sapiens
  misc_RNA (1)...(19): siRNA sense strand
ccaacagaauauuaugaca

SEQ ID NO: 663024 - RNA, 19 nt, Homo sapiens
  misc_RNA (1)...(19): siRNA sense strand
gacauuggcccuccaggau

SEQ ID NO: 663025 - RNA, 19 nt, Homo sapiens
  misc_RNA (1)...(19): siRNA sense strand
agaccaggccucccaggua

SEQ ID NO: 663026 - RNA, 19 nt, Homo sapiens
  misc_RNA (1)...(19): siRNA sense strand
ggaccaggaacaccagguu

SEQ ID NO: 663027 - RNA, 19 nt, Homo sapiens
  misc_RNA (1)...(19): siRNA sense strand
gagaaagggcuuggaugga

SEQ ID NO: 663028 - RNA, 19 nt, Homo sapiens
  misc_RNA (1)...(19): siRNA sense strand
ggguuucccuggguuaaug

SEQ ID NO: 663029 - RNA, 19 nt, Homo sapiens
  misc_RNA (1)...(19): siRNA sense strand
cauccuaaagaacaaagua

SEQ ID NO: 663030 - RNA, 19 nt, Homo sapiens
  misc_RNA (1)...(19): siRNA sense strand
gagguaagccaggcaagga

SEQ ID NO: 663031 - RNA, 19 nt, Homo sapiens
  misc_RNA (1)...(19): siRNA sense strand
ccagggaugccagguuuaa

SEQ ID NO: 663032 - RNA, 19 nt, Homo sapiens
  misc_RNA (1)...(19): siRNA sense strand
aggugaagauggagugauu

SEQ ID NO: 663033 - RNA, 19 nt, Homo sapiens
  misc_RNA (1)...(19): siRNA sense strand
ggacugccaggcuaucuag

SEQ ID NO: 663034 - RNA, 19 nt, Homo sapiens
  misc_RNA (1)...(19): siRNA sense strand
caacaaagguucuaaagga

SEQ ID NO: 663035 - RNA, 19 nt, Homo sapiens
  misc_RNA (1)...(19): siRNA sense strand
gagaagauauagaacuuga

SEQ ID NO: 663036 - RNA, 19 nt, Homo sapiens
  misc_RNA (1)...(19): siRNA sense strand
caacaaggcagaagaggua

SEQ ID NO: 663037 - RNA, 19 nt, Homo sapiens
  misc_RNA (1)...(19): siRNA sense strand
agagauaucccacguaaua

SEQ ID NO: 663038 - RNA, 19 nt, Homo sapiens
  misc_RNA (1)...(19): siRNA sense strand
ccaaggacuuccaggcuua

SEQ ID NO: 663039 - RNA, 19 nt, Homo sapiens
  misc_RNA (1)...(19): siRNA sense strand
ccaaggacgugauggaauu

SEQ ID NO: 663040 - RNA, 19 nt, Homo sapiens
  misc_RNA (1)...(19): siRNA sense strand
gcagcuggcuugaaaggaa

SEQ ID NO: 663041 - RNA, 19 nt, Homo sapiens
  misc_RNA (1)...(19): siRNA sense strand
ucagagauaucccacguaa

SEQ ID NO: 663042 - RNA, 19 nt, Homo sapiens
  misc_RNA (1)...(19): siRNA sense strand
uauaagaggugaccaagga

SEQ ID NO: 663043 - RNA, 19 nt, Homo sapiens
  misc_RNA (1)...(19): siRNA sense strand
caaagaggauauccaggaa

SEQ ID NO: 663044 - RNA, 19 nt, Homo sapiens
  misc_RNA (1)...(19): siRNA sense strand
gaacaaggagauaaaggaa

SEQ ID NO: 663045 - RNA, 19 nt, Homo sapiens
  misc_RNA (1)...(19): siRNA sense strand
gaagauauagaacuugaug

SEQ ID NO: 663046 - RNA, 19 nt, Homo sapiens
  misc_RNA (1)...(19): siRNA sense strand
ccaccaggcucaagaggaa

SEQ ID NO: 663047 - RNA, 19 nt, Homo sapiens
  misc_RNA (1)...(19): siRNA sense strand
gaaagagugauaggacaua

SEQ ID NO: 663048 - RNA, 19 nt, Homo sapiens
  misc_RNA (1)...(19): siRNA sense strand
gaaagggcuuggauggaau

SEQ ID NO: 663049 - RNA, 19 nt, Homo sapiens
  misc_RNA (1)...(19): siRNA sense strand
agaaagggcuuggauggaa

SEQ ID NO: 663050 - RNA, 19 nt, Homo sapiens
  misc_RNA (1)...(19): siRNA sense strand
gaccaggccucccagguau

SEQ ID NO: 663051 - RNA, 19 nt, Homo sapiens
  misc_RNA (1)...(19): siRNA sense strand
guaaagggccagagaggaa

SEQ ID NO: 663052 - RNA, 19 nt, Homo sapiens
  misc_RNA (1)...(19): siRNA sense strand
cagcaaggguugugucugu

SEQ ID NO: 663053 - RNA, 19 nt, Homo sapiens
  misc_RNA (1)...(19): siRNA sense strand
acaaggagauaaaggaaau

SEQ ID NO: 663054 - RNA, 19 nt, Homo sapiens
  misc_RNA (1)...(19): siRNA sense strand
ggaacaaggagauaaagga

SEQ ID NO: 663055 - RNA, 19 nt, Homo sapiens
  misc_RNA (1)...(19): siRNA sense strand
ggaccaccaggaacaguua

SEQ ID NO: 663056 - RNA, 19 nt, Homo sapiens
  misc_RNA (1)...(19): siRNA sense strand
caagggagaaccagcagua

SEQ ID NO: 663057 - RNA, 19 nt, Homo sapiens
  misc_RNA (1)...(19): siRNA sense strand
gagccuggguuaccuggaa

SEQ ID NO: 663058 - RNA, 19 nt, Homo sapiens
  misc_RNA (1)...(19): siRNA sense strand
auacaggucuuccaggauu

SEQ ID NO: 663059 - RNA, 19 nt, Homo sapiens
  misc_RNA (1)...(19): siRNA sense strand
ccacaggcauagaaggauu

SEQ ID NO: 663060 - RNA, 19 nt, Homo sapiens
  misc_RNA (1)...(19): siRNA sense strand
guacacagugcccuuauau

SEQ ID NO: 663061 - RNA, 19 nt, Homo sapiens
  misc_RNA (1)...(19): siRNA sense strand
ggaaaugaagggcuugaug

SEQ ID NO: 663062 - RNA, 19 nt, Homo sapiens
  misc_RNA (1)...(19): siRNA sense strand
ucaaaggauucgcaggaaa

SEQ ID NO: 663063 - RNA, 19 nt, Homo sapiens
  misc_RNA (1)...(19): siRNA sense strand
aaagggugcuccugcuaaa

SEQ ID NO: 663064 - RNA, 19 nt, Homo sapiens
  misc_RNA (1)...(19): siRNA sense strand
gaacccuggugcucaagga

SEQ ID NO: 663065 - RNA, 19 nt, Homo sapiens
  misc_RNA (1)...(19): siRNA sense strand
aggcuuaaauggauugaaa

SEQ ID NO: 663066 - RNA, 19 nt, Homo sapiens
  misc_RNA (1)...(19): siRNA sense strand
ggacuuccaggcuuaaaug

SEQ ID NO: 663067 - RNA, 19 nt, Homo sapiens
  misc_RNA (1)...(19): siRNA sense strand
uaacagaacggaccucaag

SEQ ID NO: 663068 - RNA, 19 nt, Homo sapiens
  misc_RNA (1)...(19): siRNA sense strand
gggauuuccuggagccauu

SEQ ID NO: 663069 - RNA, 19 nt, Homo sapiens
  misc_RNA (1)...(19): siRNA sense strand
aaagggagacccaggaauu

SEQ ID NO: 663070 - RNA, 19 nt, Homo sapiens
  misc_RNA (1)...(19): siRNA sense strand
gcaaggguugugucuguaa

SEQ ID NO: 663071 - RNA, 19 nt, Homo sapiens
  misc_RNA (1)...(19): siRNA sense strand
uaucuagggucuccaggaa

SEQ ID NO: 663072 - RNA, 19 nt, Homo sapiens
  misc_RNA (1)...(19): siRNA sense strand
cauuggcccuccaggauuu

SEQ ID NO: 663073 - RNA, 19 nt, Homo sapiens
  misc_RNA (1)...(19): siRNA sense strand
ggaaagaaaggagaaaugg

SEQ ID NO: 663074 - RNA, 19 nt, Homo sapiens
  misc_RNA (1)...(19): siRNA sense strand
aaagagugauaggacauaa

SEQ ID NO: 663075 - RNA, 19 nt, Homo sapiens
  misc_RNA (1)...(19): siRNA sense strand
uccagggagucauguaaua

SEQ ID NO: 663076 - RNA, 19 nt, Homo sapiens
  misc_RNA (1)...(19): siRNA sense strand
ggucugcccggugcaauua

SEQ ID NO: 663077 - RNA, 19 nt, Homo sapiens
  misc_RNA (1)...(19): siRNA sense strand
caaggguugugucuguaaa

SEQ ID NO: 663078 - RNA, 19 nt, Homo sapiens
  misc_RNA (1)...(19): siRNA sense strand
ucacuggguuguccuggaa

SEQ ID NO: 663079 - RNA, 19 nt, Homo sapiens
  misc_RNA (1)...(19): siRNA sense strand
agaaucauauggaucugaa

SEQ ID NO: 663080 - RNA, 19 nt, Homo sapiens
  misc_RNA (1)...(19): siRNA sense strand
ggaaagccagguccucaug

SEQ ID NO: 663081 - RNA, 19 nt, Homo sapiens
  misc_RNA (1)...(19): siRNA sense strand
aggcgcagcuggcuugaaa

SEQ ID NO: 663082 - RNA, 19 nt, Homo sapiens
  misc_RNA (1)...(19): siRNA sense strand
aagaggauauccaggaaau

SEQ ID NO: 663083 - RNA, 19 nt, Homo sapiens
  misc_RNA (1)...(19): siRNA sense strand
caaaggauucgcaggaaau

SEQ ID NO: 663084 - RNA, 19 nt, Homo sapiens
  misc_RNA (1)...(19): siRNA sense strand
aaccaggucucaaaggauu

SEQ ID NO: 663085 - RNA, 19 nt, Homo sapiens
  misc_RNA (1)...(19): siRNA sense strand
uuacggacuugucggugua

SEQ ID NO: 663086 - RNA, 19 nt, Homo sapiens
  misc_RNA (1)...(19): siRNA sense strand
ggagacccuggcacacuua

SEQ ID NO: 663087 - RNA, 19 nt, Homo sapiens
  misc_RNA (1)...(19): siRNA sense strand
agaaccaggucucaaagga

SEQ ID NO: 663088 - RNA, 19 nt, Homo sapiens
  misc_RNA (1)...(19): siRNA sense strand
ugauugggaugaugggauu

SEQ ID NO: 663089 - RNA, 19 nt, Homo sapiens
  misc_RNA (1)...(19): siRNA sense strand
gggugaagauggcauuaag

SEQ ID NO: 663090 - RNA, 19 nt, Homo sapiens
  misc_RNA (1)...(19): siRNA sense strand
uaaguggauugccaggauu

SEQ ID NO: 663091 - RNA, 19 nt, Homo sapiens
  misc_RNA (1)...(19): siRNA sense strand
aggagaagauauagaacuu

SEQ ID NO: 663092 - RNA, 19 nt, Homo sapiens
  misc_RNA (1)...(19): siRNA sense strand
gggaaagaaaggagaaaug

SEQ ID NO: 663093 - RNA, 19 nt, Homo sapiens
  misc_RNA (1)...(19): siRNA sense strand
ccaggaacaguuauuguga

SEQ ID NO: 663094 - RNA, 19 nt, Homo sapiens
  misc_RNA (1)...(19): siRNA sense strand
gggcaugccagguucuaaa

SEQ ID NO: 663095 - RNA, 19 nt, Homo sapiens
  misc_RNA (1)...(19): siRNA sense strand
ggaccuccaggaccaauug

SEQ ID NO: 663096 - RNA, 19 nt, Homo sapiens
  misc_RNA (1)...(19): siRNA sense strand
uguacacagugcccuuaua

SEQ ID NO: 663097 - RNA, 19 nt, Homo sapiens
  misc_RNA (1)...(19): siRNA sense strand
gaaccaggucucaaaggau

SEQ ID NO: 663098 - RNA, 19 nt, Homo sapiens
  misc_RNA (1)...(19): siRNA sense strand
gaccaagguuuuccaggua

SEQ ID NO: 663099 - RNA, 19 nt, Homo sapiens
  misc_RNA (1)...(19): siRNA sense strand
uggccaggcuugaaaggaa

SEQ ID NO: 663100 - RNA, 19 nt, Homo sapiens
  misc_RNA (1)...(19): siRNA sense strand
gcagggacccaagggcuuu

SEQ ID NO: 663101 - RNA, 19 nt, Homo sapiens
  misc_RNA (1)...(19): siRNA sense strand
caugccagguucuaaagga

SEQ ID NO: 663102 - RNA, 19 nt, Homo sapiens
  misc_RNA (1)...(19): siRNA sense strand
ccuggcacacuuaagauua

SEQ ID NO: 663103 - RNA, 19 nt, Homo sapiens
  misc_RNA (1)...(19): siRNA sense strand
agagccagguuauucagaa

SEQ ID NO: 663104 - RNA, 19 nt, Homo sapiens
  misc_RNA (1)...(19): siRNA sense strand
gauaagggagagccagguu

SEQ ID NO: 663105 - RNA, 19 nt, Homo sapiens
  misc_RNA (1)...(19): siRNA sense strand
ggaccuagaggaccuaagg

SEQ ID NO: 663106 - RNA, 19 nt, Homo sapiens
  misc_RNA (1)...(19): siRNA sense strand
gcaacaaagguucuaaagg

SEQ ID NO: 663107 - RNA, 19 nt, Homo sapiens
  misc_RNA (1)...(19): siRNA sense strand
gacccuggcacacuuaaga

SEQ ID NO: 663108 - RNA, 19 nt, Homo sapiens
  misc_RNA (1)...(19): siRNA sense strand
uaagggagagccagguuau

SEQ ID NO: 663109 - RNA, 19 nt, Homo sapiens
  misc_RNA (1)...(19): siRNA sense strand
caagggcuuuccaggacuu

SEQ ID NO: 663110 - RNA, 19 nt, Homo sapiens
  misc_RNA (1)...(19): siRNA sense strand
ccaggaaucccaggaguug

SEQ ID NO: 663111 - RNA, 19 nt, Homo sapiens
  misc_RNA (1)...(19): siRNA sense strand
uggaaguccuggaucauca

SEQ ID NO: 663112 - RNA, 19 nt, Homo sapiens
  misc_RNA (1)...(19): siRNA sense strand
ccaacagaauauuaugaca

SEQ ID NO: 663113 - RNA, 19 nt, Homo sapiens
  misc_RNA (1)...(19): siRNA sense strand
gggugcugcugguuugaaa

SEQ ID NO: 663114 - RNA, 19 nt, Homo sapiens
  misc_RNA (1)...(19): siRNA sense strand
gacauuggcccuccaggau

SEQ ID NO: 663115 - RNA, 19 nt, Homo sapiens
  misc_RNA (1)...(19): siRNA sense strand
agaccaggccucccaggua

SEQ ID NO: 663116 - RNA, 19 nt, Homo sapiens
  misc_RNA (1)...(19): siRNA sense strand
ggaccaggaacaccagguu

SEQ ID NO: 663117 - RNA, 19 nt, Homo sapiens
  misc_RNA (1)...(19): siRNA sense strand
gagaaagggcuuggaugga

SEQ ID NO: 663118 - RNA, 19 nt, Homo sapiens
  misc_RNA (1)...(19): siRNA sense strand
ggguuucccuggguuaaug

SEQ ID NO: 663119 - RNA, 19 nt, Homo sapiens
  misc_RNA (1)...(19): siRNA sense strand
gagguaagccaggcaagga

SEQ ID NO: 663120 - RNA, 19 nt, Homo sapiens
  misc_RNA (1)...(19): siRNA sense strand
ccagggaugccagguuuaa

SEQ ID NO: 663121 - RNA, 19 nt, Homo sapiens
  misc_RNA (1)...(19): siRNA sense strand
aggugaagauggagugauu

SEQ ID NO: 663122 - RNA, 19 nt, Homo sapiens
  misc_RNA (1)...(19): siRNA sense strand
ggacugccaggcuaucuag

SEQ ID NO: 663123 - RNA, 19 nt, Homo sapiens
  misc_RNA (1)...(19): siRNA sense strand
auaaguggauugccaggau

SEQ ID NO: 663124 - RNA, 19 nt, Homo sapiens
  misc_RNA (1)...(19): siRNA sense strand
ggaccaauggguauaagag

SEQ ID NO: 663125 - RNA, 19 nt, Homo sapiens
  misc_RNA (1)...(19): siRNA sense strand
ggaauuccaggucaucaag

SEQ ID NO: 663126 - RNA, 19 nt, Homo sapiens
  misc_RNA (1)...(19): siRNA sense strand
gaccaggaacaccagguuu

SEQ ID NO: 663127 - RNA, 19 nt, Homo sapiens
  misc_RNA (1)...(19): siRNA sense strand
ggaaaacccggaaaagaug

SEQ ID NO: 663128 - RNA, 19 nt, Homo sapiens
  misc_RNA (1)...(19): siRNA sense strand
gaccaaggacgugauggaa

SEQ ID NO: 663129 - RNA, 19 nt, Homo sapiens
  misc_RNA (1)...(19): siRNA sense strand
cuccaggucuuccaggauu

SEQ ID NO: 663130 - RNA, 19 nt, Homo sapiens
  misc_RNA (1)...(19): siRNA sense strand
cgggugauaugggaaagaa

SEQ ID NO: 663131 - RNA, 19 nt, Homo sapiens
  misc_RNA (1)...(19): siRNA sense strand
ggagaagauauagaacuug

SEQ ID NO: 663132 - RNA, 19 nt, Homo sapiens
  misc_RNA (1)...(19): siRNA sense strand
ggagagcucaguguuucaa

SEQ ID NO: 663133 - RNA, 19 nt, Homo sapiens
  misc_RNA (1)...(19): siRNA sense strand
uggcccaccuggacauuug

SEQ ID NO: 663134 - RNA, 19 nt, Homo sapiens
  misc_RNA (1)...(19): siRNA sense strand
caacaaagguucuaaagga

SEQ ID NO: 663135 - RNA, 19 nt, Homo sapiens
  misc_RNA (1)...(19): siRNA sense strand
gagaagauauagaacuuga

SEQ ID NO: 663136 - RNA, 19 nt, Homo sapiens
  misc_RNA (1)...(19): siRNA sense strand
caacaaggcagaagaggua

SEQ ID NO: 663137 - RNA, 19 nt, Homo sapiens
  misc_RNA (1)...(19): siRNA sense strand
agagauaucccacguaaua

SEQ ID NO: 663138 - RNA, 19 nt, Homo sapiens
  misc_RNA (1)...(19): siRNA sense strand
ccaaggacuuccaggcuua

SEQ ID NO: 663139 - RNA, 19 nt, Homo sapiens
  misc_RNA (1)...(19): siRNA sense strand
ccaaggacgugauggaauu

SEQ ID NO: 663140 - RNA, 19 nt, Homo sapiens
  misc_RNA (1)...(19): siRNA sense strand
gcagcuggcuugaaaggaa

SEQ ID NO: 663141 - RNA, 19 nt, Homo sapiens
  misc_RNA (1)...(19): siRNA sense strand
ucagagauaucccacguaa

SEQ ID NO: 663142 - RNA, 19 nt, Homo sapiens
  misc_RNA (1)...(19): siRNA sense strand
uauaagaggugaccaagga

SEQ ID NO: 663143 - RNA, 19 nt, Homo sapiens
  misc_RNA (1)...(19): siRNA sense strand
caaagaggauauccaggaa

SEQ ID NO: 663144 - RNA, 19 nt, Homo sapiens
  misc_RNA (1)...(19): siRNA sense strand
gaacaaggagauaaaggaa

SEQ ID NO: 663145 - RNA, 19 nt, Homo sapiens
  misc_RNA (1)...(19): siRNA sense strand
gaagauauagaacuugaug

SEQ ID NO: 663146 - RNA, 19 nt, Homo sapiens
  misc_RNA (1)...(19): siRNA sense strand
ccaccaggcucaagaggaa

SEQ ID NO: 663147 - RNA, 19 nt, Homo sapiens
  misc_RNA (1)...(19): siRNA sense strand
gaaagagugauaggacaua

SEQ ID NO: 663148 - RNA, 19 nt, Homo sapiens
  misc_RNA (1)...(19): siRNA sense strand
gaaagggcuuggauggaau

SEQ ID NO: 663149 - RNA, 19 nt, Homo sapiens
  misc_RNA (1)...(19): siRNA sense strand
agaaagggcuuggauggaa

SEQ ID NO: 663150 - RNA, 19 nt, Homo sapiens
  misc_RNA (1)...(19): siRNA sense strand
gaccaggccucccagguau

SEQ ID NO: 663151 - RNA, 19 nt, Homo sapiens
  misc_RNA (1)...(19): siRNA sense strand
guaaagggccagagaggaa

SEQ ID NO: 663152 - RNA, 19 nt, Homo sapiens
  misc_RNA (1)...(19): siRNA sense strand
cagcaaggguugugucugu

SEQ ID NO: 663153 - RNA, 19 nt, Homo sapiens
  misc_RNA (1)...(19): siRNA sense strand
acaaggagauaaaggaaau

SEQ ID NO: 663154 - RNA, 19 nt, Homo sapiens
  misc_RNA (1)...(19): siRNA sense strand
ggaacaaggagauaaagga

SEQ ID NO: 663155 - RNA, 19 nt, Homo sapiens
  misc_RNA (1)...(19): siRNA sense strand
ggaccaccaggaacaguua

SEQ ID NO: 663156 - RNA, 19 nt, Homo sapiens
  misc_RNA (1)...(19): siRNA sense strand
caagggagaaccagcagua

SEQ ID NO: 663157 - RNA, 19 nt, Homo sapiens
  misc_RNA (1)...(19): siRNA sense strand
gagccuggguuaccuggaa

SEQ ID NO: 663158 - RNA, 19 nt, Homo sapiens
  misc_RNA (1)...(19): siRNA sense strand
auacaggucuuccaggauu

SEQ ID NO: 663159 - RNA, 19 nt, Homo sapiens
  misc_RNA (1)...(19): siRNA sense strand
ccacaggcauagaaggauu

SEQ ID NO: 663160 - RNA, 19 nt, Homo sapiens
  misc_RNA (1)...(19): siRNA sense strand
guacacagugcccuuauau

SEQ ID NO: 663161 - RNA, 19 nt, Homo sapiens
  misc_RNA (1)...(19): siRNA sense strand
ggaaaugaagggcuugaug

SEQ ID NO: 663162 - RNA, 19 nt, Homo sapiens
  misc_RNA (1)...(19): siRNA sense strand
ucaaaggauucgcaggaaa

SEQ ID NO: 663163 - RNA, 19 nt, Homo sapiens
  misc_RNA (1)...(19): siRNA sense strand
aaagggugcuccugcuaaa

SEQ ID NO: 663164 - RNA, 19 nt, Homo sapiens
  misc_RNA (1)...(19): siRNA sense strand
gaacccuggugcucaagga

SEQ ID NO: 663165 - RNA, 19 nt, Homo sapiens
  misc_RNA (1)...(19): siRNA sense strand
aggcuuaaauggauugaaa

SEQ ID NO: 663166 - RNA, 19 nt, Homo sapiens
  misc_RNA (1)...(19): siRNA sense strand
ggacuuccaggcuuaaaug

SEQ ID NO: 663167 - RNA, 19 nt, Homo sapiens
  misc_RNA (1)...(19): siRNA sense strand
uaacagaacggaccucaag

SEQ ID NO: 663168 - RNA, 19 nt, Homo sapiens
  misc_RNA (1)...(19): siRNA sense strand
gggauuuccuggagccauu

SEQ ID NO: 663169 - RNA, 19 nt, Homo sapiens
  misc_RNA (1)...(19): siRNA sense strand
aaagggagacccaggaauu

SEQ ID NO: 663170 - RNA, 19 nt, Homo sapiens
  misc_RNA (1)...(19): siRNA sense strand
gcaaggguugugucuguaa

SEQ ID NO: 663171 - RNA, 19 nt, Homo sapiens
  misc_RNA (1)...(19): siRNA sense strand
uaucuagggucuccaggaa

SEQ ID NO: 663172 - RNA, 19 nt, Homo sapiens
  misc_RNA (1)...(19): siRNA sense strand
cauuggcccuccaggauuu

SEQ ID NO: 663173 - RNA, 19 nt, Homo sapiens
  misc_RNA (1)...(19): siRNA sense strand
ggaaagaaaggagaaaugg

SEQ ID NO: 663174 - RNA, 19 nt, Homo sapiens
  misc_RNA (1)...(19): siRNA sense strand
aaagagugauaggacauaa

SEQ ID NO: 663175 - RNA, 19 nt, Homo sapiens
  misc_RNA (1)...(19): siRNA sense strand
uccagggagucauguaaua

SEQ ID NO: 663176 - RNA, 19 nt, Homo sapiens
  misc_RNA (1)...(19): siRNA sense strand
ggucugcccggugcaauua

SEQ ID NO: 663177 - RNA, 19 nt, Homo sapiens
  misc_RNA (1)...(19): siRNA sense strand
caaggguugugucuguaaa

SEQ ID NO: 663178 - RNA, 19 nt, Homo sapiens
  misc_RNA (1)...(19): siRNA sense strand
ucacuggguuguccuggaa

SEQ ID NO: 663179 - RNA, 19 nt, Homo sapiens
  misc_RNA (1)...(19): siRNA sense strand
agaaucauauggaucugaa

SEQ ID NO: 663180 - RNA, 19 nt, Homo sapiens
  misc_RNA (1)...(19): siRNA sense strand
ggaaagccagguccucaug

SEQ ID NO: 663181 - RNA, 19 nt, Homo sapiens
  misc_RNA (1)...(19): siRNA sense strand
aggcgcagcuggcuugaaa

SEQ ID NO: 663182 - RNA, 19 nt, Homo sapiens
  misc_RNA (1)...(19): siRNA sense strand
aagaggauauccaggaaau

SEQ ID NO: 663183 - RNA, 19 nt, Homo sapiens
  misc_RNA (1)...(19): siRNA sense strand
caaaggauucgcaggaaau

SEQ ID NO: 663184 - RNA, 19 nt, Homo sapiens
  misc_RNA (1)...(19): siRNA sense strand
aaccaggucucaaaggauu

SEQ ID NO: 663185 - RNA, 19 nt, Homo sapiens
  misc_RNA (1)...(19): siRNA sense strand
uuacggacuugucggugua

SEQ ID NO: 663186 - RNA, 19 nt, Homo sapiens
  misc_RNA (1)...(19): siRNA sense strand
ggagacccuggcacacuua

SEQ ID NO: 663187 - RNA, 19 nt, Homo sapiens
  misc_RNA (1)...(19): siRNA sense strand
agaaccaggucucaaagga

SEQ ID NO: 663188 - RNA, 19 nt, Homo sapiens
  misc_RNA (1)...(19): siRNA sense strand
ugauugggaugaugggauu

SEQ ID NO: 663189 - RNA, 19 nt, Homo sapiens
  misc_RNA (1)...(19): siRNA sense strand
gggugaagauggcauuaag

SEQ ID NO: 663190 - RNA, 19 nt, Homo sapiens
  misc_RNA (1)...(19): siRNA sense strand
uaaguggauugccaggauu

SEQ ID NO: 663191 - RNA, 19 nt, Homo sapiens
  misc_RNA (1)...(19): siRNA sense strand
aggagaagauauagaacuu

SEQ ID NO: 663192 - RNA, 19 nt, Homo sapiens
  misc_RNA (1)...(19): siRNA sense strand
gggaaagaaaggagaaaug

SEQ ID NO: 663193 - RNA, 19 nt, Homo sapiens
  misc_RNA (1)...(19): siRNA sense strand
ccaggaacaguuauuguga

SEQ ID NO: 663194 - RNA, 19 nt, Homo sapiens
  misc_RNA (1)...(19): siRNA sense strand
gggcaugccagguucuaaa

SEQ ID NO: 663195 - RNA, 19 nt, Homo sapiens
  misc_RNA (1)...(19): siRNA sense strand
ggaccuccaggaccaauug

SEQ ID NO: 663196 - RNA, 19 nt, Homo sapiens
  misc_RNA (1)...(19): siRNA sense strand
uguacacagugcccuuaua

SEQ ID NO: 663197 - RNA, 19 nt, Homo sapiens
  misc_RNA (1)...(19): siRNA sense strand
gaaccaggucucaaaggau

SEQ ID NO: 663198 - RNA, 19 nt, Homo sapiens
  misc_RNA (1)...(19): siRNA sense strand
gaccaagguuuuccaggua

SEQ ID NO: 663199 - RNA, 19 nt, Homo sapiens
  misc_RNA (1)...(19): siRNA sense strand
uggccaggcuugaaaggaa

SEQ ID NO: 663200 - RNA, 19 nt, Homo sapiens
  misc_RNA (1)...(19): siRNA sense strand
gcagggacccaagggcuuu

SEQ ID NO: 663201 - RNA, 19 nt, Homo sapiens
  misc_RNA (1)...(19): siRNA sense strand
caugccagguucuaaagga

SEQ ID NO: 663202 - RNA, 19 nt, Homo sapiens
  misc_RNA (1)...(19): siRNA sense strand
ccuggcacacuuaagauua

SEQ ID NO: 663203 - RNA, 19 nt, Homo sapiens
  misc_RNA (1)...(19): siRNA sense strand
agagccagguuauucagaa

SEQ ID NO: 663204 - RNA, 19 nt, Homo sapiens
  misc_RNA (1)...(19): siRNA sense strand
gauaagggagagccagguu

SEQ ID NO: 663205 - RNA, 19 nt, Homo sapiens
  misc_RNA (1)...(19): siRNA sense strand
ggaccuagaggaccuaagg

SEQ ID NO: 663206 - RNA, 19 nt, Homo sapiens
  misc_RNA (1)...(19): siRNA sense strand
gcaacaaagguucuaaagg

SEQ ID NO: 663207 - RNA, 19 nt, Homo sapiens
  misc_RNA (1)...(19): siRNA sense strand
gacccuggcacacuuaaga

SEQ ID NO: 663208 - RNA, 19 nt, Homo sapiens
  misc_RNA (1)...(19): siRNA sense strand
uaagggagagccagguuau

SEQ ID NO: 663209 - RNA, 19 nt, Homo sapiens
  misc_RNA (1)...(19): siRNA sense strand
caagggcuuuccaggacuu

SEQ ID NO: 663210 - RNA, 19 nt, Homo sapiens
  misc_RNA (1)...(19): siRNA sense strand
ccaggaaucccaggaguug

SEQ ID NO: 663211 - RNA, 19 nt, Homo sapiens
  misc_RNA (1)...(19): siRNA sense strand
uggaaguccuggaucauca

SEQ ID NO: 663212 - RNA, 19 nt, Homo sapiens
  misc_RNA (1)...(19): siRNA sense strand
ccaacagaauauuaugaca

SEQ ID NO: 663213 - RNA, 19 nt, Homo sapiens
  misc_RNA (1)...(19): siRNA sense strand
gggugcugcugguuugaaa

SEQ ID NO: 663214 - RNA, 19 nt, Homo sapiens
  misc_RNA (1)...(19): siRNA sense strand
gacauuggcccuccaggau

SEQ ID NO: 663215 - RNA, 19 nt, Homo sapiens
  misc_RNA (1)...(19): siRNA sense strand
agaccaggccucccaggua

SEQ ID NO: 663216 - RNA, 19 nt, Homo sapiens
  misc_RNA (1)...(19): siRNA sense strand
ggaccaggaacaccagguu

SEQ ID NO: 663217 - RNA, 19 nt, Homo sapiens
  misc_RNA (1)...(19): siRNA sense strand
gagaaagggcuuggaugga

SEQ ID NO: 663218 - RNA, 19 nt, Homo sapiens
  misc_RNA (1)...(19): siRNA sense strand
ggguuucccuggguuaaug

SEQ ID NO: 663219 - RNA, 19 nt, Homo sapiens
  misc_RNA (1)...(19): siRNA sense strand
gagguaagccaggcaagga

SEQ ID NO: 663220 - RNA, 19 nt, Homo sapiens
  misc_RNA (1)...(19): siRNA sense strand
ccagggaugccagguuuaa

SEQ ID NO: 663221 - RNA, 19 nt, Homo sapiens
  misc_RNA (1)...(19): siRNA sense strand
aggugaagauggagugauu

SEQ ID NO: 663222 - RNA, 19 nt, Homo sapiens
  misc_RNA (1)...(19): siRNA sense strand
ggacugccaggcuaucuag

SEQ ID NO: 663223 - RNA, 19 nt, Homo sapiens
  misc_RNA (1)...(19): siRNA sense strand
auaaguggauugccaggau

SEQ ID NO: 663224 - RNA, 19 nt, Homo sapiens
  misc_RNA (1)...(19): siRNA sense strand
ggaccaauggguauaagag

SEQ ID NO: 663225 - RNA, 19 nt, Homo sapiens
  misc_RNA (1)...(19): siRNA sense strand
ggaauuccaggucaucaag

SEQ ID NO: 663226 - RNA, 19 nt, Homo sapiens
  misc_RNA (1)...(19): siRNA sense strand
gaccaggaacaccagguuu

SEQ ID NO: 663227 - RNA, 19 nt, Homo sapiens
  misc_RNA (1)...(19): siRNA sense strand
ggaaaacccggaaaagaug

SEQ ID NO: 663228 - RNA, 19 nt, Homo sapiens
  misc_RNA (1)...(19): siRNA sense strand
gaccaaggacgugauggaa

SEQ ID NO: 663229 - RNA, 19 nt, Homo sapiens
  misc_RNA (1)...(19): siRNA sense strand
cuccaggucuuccaggauu

SEQ ID NO: 663230 - RNA, 19 nt, Homo sapiens
  misc_RNA (1)...(19): siRNA sense strand
cgggugauaugggaaagaa

SEQ ID NO: 663231 - RNA, 19 nt, Homo sapiens
  misc_RNA (1)...(19): siRNA sense strand
ggagaagauauagaacuug

SEQ ID NO: 663232 - RNA, 19 nt, Homo sapiens
  misc_RNA (1)...(19): siRNA sense strand
ggagagcucaguguuucaa

SEQ ID NO: 663233 - RNA, 19 nt, Homo sapiens
  misc_RNA (1)...(19): siRNA sense strand
uggcccaccuggacauuug

SEQ ID NO: 663234 - RNA, 19 nt, Homo sapiens
  misc_RNA (1)...(19): siRNA sense strand
caacaaagguucuaaagga

SEQ ID NO: 663235 - RNA, 19 nt, Homo sapiens
  misc_RNA (1)...(19): siRNA sense strand
gagaagauauagaacuuga

SEQ ID NO: 663236 - RNA, 19 nt, Homo sapiens
  misc_RNA (1)...(19): siRNA sense strand
caacaaggcagaagaggua

SEQ ID NO: 663237 - RNA, 19 nt, Homo sapiens
  misc_RNA (1)...(19): siRNA sense strand
agagauaucccacguaaua

SEQ ID NO: 663238 - RNA, 19 nt, Homo sapiens
  misc_RNA (1)...(19): siRNA sense strand
ccaaggacuuccaggcuua

SEQ ID NO: 663239 - RNA, 19 nt, Homo sapiens
  misc_RNA (1)...(19): siRNA sense strand
ccaaggacgugauggaauu

SEQ ID NO: 663240 - RNA, 19 nt, Homo sapiens
  misc_RNA (1)...(19): siRNA sense strand
gcagcuggcuugaaaggaa

SEQ ID NO: 663241 - RNA, 19 nt, Homo sapiens
  misc_RNA (1)...(19): siRNA sense strand
ucagagauaucccacguaa

SEQ ID NO: 663242 - RNA, 19 nt, Homo sapiens
  misc_RNA (1)...(19): siRNA sense strand
uauaagaggugaccaagga

SEQ ID NO: 663243 - RNA, 19 nt, Homo sapiens
  misc_RNA (1)...(19): siRNA sense strand
caaagaggauauccaggaa

SEQ ID NO: 663244 - RNA, 19 nt, Homo sapiens
  misc_RNA (1)...(19): siRNA sense strand
gaacaaggagauaaaggaa

SEQ ID NO: 663245 - RNA, 19 nt, Homo sapiens
  misc_RNA (1)...(19): siRNA sense strand
gaagauauagaacuugaug

SEQ ID NO: 663246 - RNA, 19 nt, Homo sapiens
  misc_RNA (1)...(19): siRNA sense strand
ccaccaggcucaagaggaa

SEQ ID NO: 663247 - RNA, 19 nt, Homo sapiens
  misc_RNA (1)...(19): siRNA sense strand
gaaagagugauaggacaua

SEQ ID NO: 663248 - RNA, 19 nt, Homo sapiens
  misc_RNA (1)...(19): siRNA sense strand
gaaagggcuuggauggaau

SEQ ID NO: 663249 - RNA, 19 nt, Homo sapiens
  misc_RNA (1)...(19): siRNA sense strand
agaaagggcuuggauggaa

SEQ ID NO: 663250 - RNA, 19 nt, Homo sapiens
  misc_RNA (1)...(19): siRNA sense strand
gaccaggccucccagguau

SEQ ID NO: 663251 - RNA, 19 nt, Homo sapiens
  misc_RNA (1)...(19): siRNA sense strand
guaaagggccagagaggaa

SEQ ID NO: 663252 - RNA, 19 nt, Homo sapiens
  misc_RNA (1)...(19): siRNA sense strand
cagcaaggguugugucugu

SEQ ID NO: 663253 - RNA, 19 nt, Homo sapiens
  misc_RNA (1)...(19): siRNA sense strand
acaaggagauaaaggaaau

SEQ ID NO: 663254 - RNA, 19 nt, Homo sapiens
  misc_RNA (1)...(19): siRNA sense strand
ggaacaaggagauaaagga

SEQ ID NO: 663255 - RNA, 19 nt, Homo sapiens
  misc_RNA (1)...(19): siRNA sense strand
ggaccaccaggaacaguua

SEQ ID NO: 663256 - RNA, 19 nt, Homo sapiens
  misc_RNA (1)...(19): siRNA sense strand
gaaagccuauuccaucaac

SEQ ID NO: 663257 - RNA, 19 nt, Homo sapiens
  misc_RNA (1)...(19): siRNA sense strand
caagggagaaccagcagua

SEQ ID NO: 663258 - RNA, 19 nt, Homo sapiens
  misc_RNA (1)...(19): siRNA sense strand
gagccuggguuaccuggaa

SEQ ID NO: 663259 - RNA, 19 nt, Homo sapiens
  misc_RNA (1)...(19): siRNA sense strand
auacaggucuuccaggauu

SEQ ID NO: 663260 - RNA, 19 nt, Homo sapiens
  misc_RNA (1)...(19): siRNA sense strand
ccacaggcauagaaggauu

SEQ ID NO: 663261 - RNA, 19 nt, Homo sapiens
  misc_RNA (1)...(19): siRNA sense strand
guacacagugcccuuauau

SEQ ID NO: 663262 - RNA, 19 nt, Homo sapiens
  misc_RNA (1)...(19): siRNA sense strand
ggaaaugaagggcuugaug

SEQ ID NO: 663263 - RNA, 19 nt, Homo sapiens
  misc_RNA (1)...(19): siRNA sense strand
ucaaaggauucgcaggaaa

SEQ ID NO: 663264 - RNA, 19 nt, Homo sapiens
  misc_RNA (1)...(19): siRNA sense strand
aaagggugcuccugcuaaa

SEQ ID NO: 663265 - RNA, 19 nt, Homo sapiens
  misc_RNA (1)...(19): siRNA sense strand
gaacccuggugcucaagga

SEQ ID NO: 663266 - RNA, 19 nt, Homo sapiens
  misc_RNA (1)...(19): siRNA sense strand
aggcuuaaauggauugaaa

SEQ ID NO: 663267 - RNA, 19 nt, Homo sapiens
  misc_RNA (1)...(19): siRNA sense strand
ggacuuccaggcuuaaaug

SEQ ID NO: 663268 - RNA, 19 nt, Homo sapiens
  misc_RNA (1)...(19): siRNA sense strand
uaacagaacggaccucaag

SEQ ID NO: 663269 - RNA, 19 nt, Homo sapiens
  misc_RNA (1)...(19): siRNA sense strand
ccuauuccaucaacuguga

SEQ ID NO: 663270 - RNA, 19 nt, Homo sapiens
  misc_RNA (1)...(19): siRNA sense strand
gggauuuccuggagccauu

SEQ ID NO: 663271 - RNA, 19 nt, Homo sapiens
  misc_RNA (1)...(19): siRNA sense strand
aaagggagacccaggaauu

SEQ ID NO: 663272 - RNA, 19 nt, Homo sapiens
  misc_RNA (1)...(19): siRNA sense strand
gcaaggguugugucuguaa

SEQ ID NO: 663273 - RNA, 19 nt, Homo sapiens
  misc_RNA (1)...(19): siRNA sense strand
uaucuagggucuccaggaa

SEQ ID NO: 663274 - RNA, 19 nt, Homo sapiens
  misc_RNA (1)...(19): siRNA sense strand
cauuggcccuccaggauuu

SEQ ID NO: 663275 - RNA, 19 nt, Homo sapiens
  misc_RNA (1)...(19): siRNA sense strand
ggaaagaaaggagaaaugg

SEQ ID NO: 663276 - RNA, 19 nt, Homo sapiens
  misc_RNA (1)...(19): siRNA sense strand
aaagagugauaggacauaa

SEQ ID NO: 663277 - RNA, 19 nt, Homo sapiens
  misc_RNA (1)...(19): siRNA sense strand
uccagggagucauguaaua

SEQ ID NO: 663278 - RNA, 19 nt, Homo sapiens
  misc_RNA (1)...(19): siRNA sense strand
ggucugcccggugcaauua

SEQ ID NO: 663279 - RNA, 19 nt, Homo sapiens
  misc_RNA (1)...(19): siRNA sense strand
caaggguugugucuguaaa

SEQ ID NO: 663280 - RNA, 19 nt, Homo sapiens
  misc_RNA (1)...(19): siRNA sense strand
ucacuggguuguccuggaa

SEQ ID NO: 663281 - RNA, 19 nt, Homo sapiens
  misc_RNA (1)...(19): siRNA sense strand
agaaucauauggaucugaa

SEQ ID NO: 663282 - RNA, 19 nt, Homo sapiens
  misc_RNA (1)...(19): siRNA sense strand
ggaaagccagguccucaug

SEQ ID NO: 663283 - RNA, 19 nt, Homo sapiens
  misc_RNA (1)...(19): siRNA sense strand
aggcgcagcuggcuugaaa

SEQ ID NO: 663284 - RNA, 19 nt, Homo sapiens
  misc_RNA (1)...(19): siRNA sense strand
aagaggauauccaggaaau

SEQ ID NO: 663285 - RNA, 19 nt, Homo sapiens
  misc_RNA (1)...(19): siRNA sense strand
caaaggauucgcaggaaau

SEQ ID NO: 663286 - RNA, 19 nt, Homo sapiens
  misc_RNA (1)...(19): siRNA sense strand
aaccaggucucaaaggauu

SEQ ID NO: 663287 - RNA, 19 nt, Homo sapiens
  misc_RNA (1)...(19): siRNA sense strand
uuacggacuugucggugua

SEQ ID NO: 663288 - RNA, 19 nt, Homo sapiens
  misc_RNA (1)...(19): siRNA sense strand
ggagacccuggcacacuua

SEQ ID NO: 663289 - RNA, 19 nt, Homo sapiens
  misc_RNA (1)...(19): siRNA sense strand
uaaguggauugccaggauu

SEQ ID NO: 663290 - RNA, 19 nt, Homo sapiens
  misc_RNA (1)...(19): siRNA sense strand
agaaccaggucucaaagga

SEQ ID NO: 663291 - RNA, 19 nt, Homo sapiens
  misc_RNA (1)...(19): siRNA sense strand
ugauugggaugaugggauu

SEQ ID NO: 663292 - RNA, 19 nt, Homo sapiens
  misc_RNA (1)...(19): siRNA sense strand
gggugaagauggcauuaag

SEQ ID NO: 663293 - RNA, 19 nt, Homo sapiens
  misc_RNA (1)...(19): siRNA sense strand
aggagaagauauagaacuu

SEQ ID NO: 663294 - RNA, 19 nt, Homo sapiens
  misc_RNA (1)...(19): siRNA sense strand
gggaaagaaaggagaaaug

SEQ ID NO: 663295 - RNA, 19 nt, Homo sapiens
  misc_RNA (1)...(19): siRNA sense strand
ccaggaacaguuauuguga

SEQ ID NO: 663296 - RNA, 19 nt, Homo sapiens
  misc_RNA (1)...(19): siRNA sense strand
gggcaugccagguucuaaa

SEQ ID NO: 663297 - RNA, 19 nt, Homo sapiens
  misc_RNA (1)...(19): siRNA sense strand
ggaccuccaggaccaauug

SEQ ID NO: 663298 - RNA, 19 nt, Homo sapiens
  misc_RNA (1)...(19): siRNA sense strand
uguacacagugcccuuaua

SEQ ID NO: 663299 - RNA, 19 nt, Homo sapiens
  misc_RNA (1)...(19): siRNA sense strand
gaaccaggucucaaaggau

SEQ ID NO: 663300 - RNA, 19 nt, Homo sapiens
  misc_RNA (1)...(19): siRNA sense strand
gaccaagguuuuccaggua

SEQ ID NO: 663301 - RNA, 19 nt, Homo sapiens
  misc_RNA (1)...(19): siRNA sense strand
uggccaggcuugaaaggaa

SEQ ID NO: 663302 - RNA, 19 nt, Homo sapiens
  misc_RNA (1)...(19): siRNA sense strand
gcagggacccaagggcuuu

SEQ ID NO: 663303 - RNA, 19 nt, Homo sapiens
  misc_RNA (1)...(19): siRNA sense strand
caugccagguucuaaagga

SEQ ID NO: 663304 - RNA, 19 nt, Homo sapiens
  misc_RNA (1)...(19): siRNA sense strand
ccuggcacacuuaagauua

SEQ ID NO: 663305 - RNA, 19 nt, Homo sapiens
  misc_RNA (1)...(19): siRNA sense strand
agagccagguuauucagaa

SEQ ID NO: 663306 - RNA, 19 nt, Homo sapiens
  misc_RNA (1)...(19): siRNA sense strand
gauaagggagagccagguu

SEQ ID NO: 663307 - RNA, 19 nt, Homo sapiens
  misc_RNA (1)...(19): siRNA sense strand
ggaccuagaggaccuaagg

SEQ ID NO: 663308 - RNA, 19 nt, Homo sapiens
  misc_RNA (1)...(19): siRNA sense strand
gcaacaaagguucuaaagg

SEQ ID NO: 663309 - RNA, 19 nt, Homo sapiens
  misc_RNA (1)...(19): siRNA sense strand
gacccuggcacacuuaaga

SEQ ID NO: 663310 - RNA, 19 nt, Homo sapiens
  misc_RNA (1)...(19): siRNA sense strand
uaagggagagccagguuau

SEQ ID NO: 663311 - RNA, 19 nt, Homo sapiens
  misc_RNA (1)...(19): siRNA sense strand
caagggcuuuccaggacuu

SEQ ID NO: 663312 - RNA, 19 nt, Homo sapiens
  misc_RNA (1)...(19): siRNA sense strand
ccaggaaucccaggaguug

SEQ ID NO: 663313 - RNA, 19 nt, Homo sapiens
  misc_RNA (1)...(19): siRNA sense strand
gggugcugcugguuugaaa

SEQ ID NO: 663314 - RNA, 19 nt, Homo sapiens
  misc_RNA (1)...(19): siRNA sense strand
uggaaguccuggaucauca

SEQ ID NO: 663315 - RNA, 19 nt, Homo sapiens
  misc_RNA (1)...(19): siRNA sense strand
ccaacagaauauuaugaca

SEQ ID NO: 663316 - RNA, 19 nt, Homo sapiens
  misc_RNA (1)...(19): siRNA sense strand
gacauuggcccuccaggau

SEQ ID NO: 663317 - RNA, 19 nt, Homo sapiens
  misc_RNA (1)...(19): siRNA sense strand
agaccaggccucccaggua

SEQ ID NO: 663318 - RNA, 19 nt, Homo sapiens
  misc_RNA (1)...(19): siRNA sense strand
ggaccaggaacaccagguu

SEQ ID NO: 663319 - RNA, 19 nt, Homo sapiens
  misc_RNA (1)...(19): siRNA sense strand
gagaaagggcuuggaugga

SEQ ID NO: 663320 - RNA, 19 nt, Homo sapiens
  misc_RNA (1)...(19): siRNA sense strand
ggguuucccuggguuaaug

SEQ ID NO: 663321 - RNA, 19 nt, Homo sapiens
  misc_RNA (1)...(19): siRNA sense strand
gagguaagccaggcaagga

SEQ ID NO: 663322 - RNA, 19 nt, Homo sapiens
  misc_RNA (1)...(19): siRNA sense strand
ccagggaugccagguuuaa

SEQ ID NO: 663323 - RNA, 19 nt, Homo sapiens
  misc_RNA (1)...(19): siRNA sense strand
aggugaagauggagugauu

SEQ ID NO: 663324 - RNA, 19 nt, Homo sapiens
  misc_RNA (1)...(19): siRNA sense strand
ggacugccaggcuaucuag

SEQ ID NO: 663325 - RNA, 19 nt, Homo sapiens
  misc_RNA (1)...(19): siRNA sense strand
auaaguggauugccaggau

SEQ ID NO: 663326 - RNA, 19 nt, Homo sapiens
  misc_RNA (1)...(19): siRNA sense strand
ggaccaauggguauaagag

SEQ ID NO: 663327 - RNA, 19 nt, Homo sapiens
  misc_RNA (1)...(19): siRNA sense strand
ggaauuccaggucaucaag

SEQ ID NO: 663328 - RNA, 19 nt, Homo sapiens
  misc_RNA (1)...(19): siRNA sense strand
gaccaggaacaccagguuu

SEQ ID NO: 663329 - RNA, 19 nt, Homo sapiens
  misc_RNA (1)...(19): siRNA sense strand
ggagagcucaguguuucaa

SEQ ID NO: 663330 - RNA, 19 nt, Homo sapiens
  misc_RNA (1)...(19): siRNA sense strand
gaccaaggacgugauggaa

SEQ ID NO: 663331 - RNA, 19 nt, Homo sapiens
  misc_RNA (1)...(19): siRNA sense strand
ggagaagauauagaacuug

SEQ ID NO: 663332 - RNA, 19 nt, Homo sapiens
  misc_RNA (1)...(19): siRNA sense strand
cuccaggucuuccaggauu

SEQ ID NO: 663333 - RNA, 19 nt, Homo sapiens
  misc_RNA (1)...(19): siRNA sense strand
cgggugauaugggaaagaa

SEQ ID NO: 663334 - RNA, 19 nt, Homo sapiens
  misc_RNA (1)...(19): siRNA sense strand
caacaaagguucuaaagga

SEQ ID NO: 663335 - RNA, 19 nt, Homo sapiens
  misc_RNA (1)...(19): siRNA sense strand
gagaagauauagaacuuga

SEQ ID NO: 663336 - RNA, 19 nt, Homo sapiens
  misc_RNA (1)...(19): siRNA sense strand
caacaaggcagaagaggua

SEQ ID NO: 663337 - RNA, 19 nt, Homo sapiens
  misc_RNA (1)...(19): siRNA sense strand
agagauaucccacguaaua

SEQ ID NO: 663338 - RNA, 19 nt, Homo sapiens
  misc_RNA (1)...(19): siRNA sense strand
ccaaggacuuccaggcuua

SEQ ID NO: 663339 - RNA, 19 nt, Homo sapiens
  misc_RNA (1)...(19): siRNA sense strand
ccaaggacgugauggaauu

SEQ ID NO: 663340 - RNA, 19 nt, Homo sapiens
  misc_RNA (1)...(19): siRNA sense strand
gcagcuggcuugaaaggaa

SEQ ID NO: 663341 - RNA, 19 nt, Homo sapiens
  misc_RNA (1)...(19): siRNA sense strand
ucagagauaucccacguaa

SEQ ID NO: 663342 - RNA, 19 nt, Homo sapiens
  misc_RNA (1)...(19): siRNA sense strand
uauaagaggugaccaagga

SEQ ID NO: 663343 - RNA, 19 nt, Homo sapiens
  misc_RNA (1)...(19): siRNA sense strand
caaagaggauauccaggaa

SEQ ID NO: 663344 - RNA, 19 nt, Homo sapiens
  misc_RNA (1)...(19): siRNA sense strand
gaacaaggagauaaaggaa

SEQ ID NO: 663345 - RNA, 19 nt, Homo sapiens
  misc_RNA (1)...(19): siRNA sense strand
gaagauauagaacuugaug

SEQ ID NO: 663346 - RNA, 19 nt, Homo sapiens
  misc_RNA (1)...(19): siRNA sense strand
ccaccaggcucaagaggaa

SEQ ID NO: 663347 - RNA, 19 nt, Homo sapiens
  misc_RNA (1)...(19): siRNA sense strand
gaaagagugauaggacaua

SEQ ID NO: 663348 - RNA, 19 nt, Homo sapiens
  misc_RNA (1)...(19): siRNA sense strand
gaaagggcuuggauggaau

SEQ ID NO: 663349 - RNA, 19 nt, Homo sapiens
  misc_RNA (1)...(19): siRNA sense strand
agaaagggcuuggauggaa

SEQ ID NO: 663350 - RNA, 19 nt, Homo sapiens
  misc_RNA (1)...(19): siRNA sense strand
gaccaggccucccagguau

SEQ ID NO: 663351 - RNA, 19 nt, Homo sapiens
  misc_RNA (1)...(19): siRNA sense strand
guaaagggccagagaggaa

SEQ ID NO: 663352 - RNA, 19 nt, Homo sapiens
  misc_RNA (1)...(19): siRNA sense strand
cagcaaggguugugucugu

SEQ ID NO: 663353 - RNA, 19 nt, Homo sapiens
  misc_RNA (1)...(19): siRNA sense strand
acaaggagauaaaggaaau

SEQ ID NO: 663354 - RNA, 19 nt, Homo sapiens
  misc_RNA (1)...(19): siRNA sense strand
ggaacaaggagauaaagga

SEQ ID NO: 663355 - RNA, 19 nt, Homo sapiens
  misc_RNA (1)...(19): siRNA sense strand
ggaccaccaggaacaguua

SEQ ID NO: 663356 - RNA, 19 nt, Homo sapiens
  misc_RNA (1)...(19): siRNA sense strand
gaaagccuauuccaucaac

SEQ ID NO: 663357 - RNA, 19 nt, Homo sapiens
  misc_RNA (1)...(19): siRNA sense strand
caagggagaaccagcagua

SEQ ID NO: 663358 - RNA, 19 nt, Homo sapiens
  misc_RNA (1)...(19): siRNA sense strand
gagccuggguuaccuggaa

SEQ ID NO: 663359 - RNA, 19 nt, Homo sapiens
  misc_RNA (1)...(19): siRNA sense strand
auacaggucuuccaggauu

SEQ ID NO: 663360 - RNA, 19 nt, Homo sapiens
  misc_RNA (1)...(19): siRNA sense strand
ccacaggcauagaaggauu

SEQ ID NO: 663361 - RNA, 19 nt, Homo sapiens
  misc_RNA (1)...(19): siRNA sense strand
guacacagugcccuuauau

SEQ ID NO: 663362 - RNA, 19 nt, Homo sapiens
  misc_RNA (1)...(19): siRNA sense strand
ggaaaugaagggcuugaug

SEQ ID NO: 663363 - RNA, 19 nt, Homo sapiens
  misc_RNA (1)...(19): siRNA sense strand
ucaaaggauucgcaggaaa

SEQ ID NO: 663364 - RNA, 19 nt, Homo sapiens
  misc_RNA (1)...(19): siRNA sense strand
aaagggugcuccugcuaaa

SEQ ID NO: 663365 - RNA, 19 nt, Homo sapiens
  misc_RNA (1)...(19): siRNA sense strand
gaacccuggugcucaagga

SEQ ID NO: 663366 - RNA, 19 nt, Homo sapiens
  misc_RNA (1)...(19): siRNA sense strand
aggcuuaaauggauugaaa

SEQ ID NO: 663367 - RNA, 19 nt, Homo sapiens
  misc_RNA (1)...(19): siRNA sense strand
ggacuuccaggcuuaaaug

SEQ ID NO: 663368 - RNA, 19 nt, Homo sapiens
  misc_RNA (1)...(19): siRNA sense strand
uaacagaacggaccucaag

SEQ ID NO: 663369 - RNA, 19 nt, Homo sapiens
  misc_RNA (1)...(19): siRNA sense strand
ccuauuccaucaacuguga

SEQ ID NO: 663370 - RNA, 19 nt, Homo sapiens
  misc_RNA (1)...(19): siRNA sense strand
gggauuuccuggagccauu

SEQ ID NO: 663371 - RNA, 19 nt, Homo sapiens
  misc_RNA (1)...(19): siRNA sense strand
aaagggagacccaggaauu

SEQ ID NO: 663372 - RNA, 19 nt, Homo sapiens
  misc_RNA (1)...(19): siRNA sense strand
gcaaggguugugucuguaa

SEQ ID NO: 663373 - RNA, 19 nt, Homo sapiens
  misc_RNA (1)...(19): siRNA sense strand
uaucuagggucuccaggaa

SEQ ID NO: 663374 - RNA, 19 nt, Homo sapiens
  misc_RNA (1)...(19): siRNA sense strand
cauuggcccuccaggauuu

SEQ ID NO: 663375 - RNA, 19 nt, Homo sapiens
  misc_RNA (1)...(19): siRNA sense strand
ggaaagaaaggagaaaugg

SEQ ID NO: 663376 - RNA, 19 nt, Homo sapiens
  misc_RNA (1)...(19): siRNA sense strand
aaagagugauaggacauaa

SEQ ID NO: 663377 - RNA, 19 nt, Homo sapiens
  misc_RNA (1)...(19): siRNA sense strand
uccagggagucauguaaua

SEQ ID NO: 663378 - RNA, 19 nt, Homo sapiens
  misc_RNA (1)...(19): siRNA sense strand
ggucugcccggugcaauua

SEQ ID NO: 663379 - RNA, 19 nt, Homo sapiens
  misc_RNA (1)...(19): siRNA sense strand
caaggguugugucuguaaa

SEQ ID NO: 663380 - RNA, 19 nt, Homo sapiens
  misc_RNA (1)...(19): siRNA sense strand
ucacuggguuguccuggaa

SEQ ID NO: 663381 - RNA, 19 nt, Homo sapiens
  misc_RNA (1)...(19): siRNA sense strand
agaaucauauggaucugaa

SEQ ID NO: 663382 - RNA, 19 nt, Homo sapiens
  misc_RNA (1)...(19): siRNA sense strand
ggaaagccagguccucaug

SEQ ID NO: 663383 - RNA, 19 nt, Homo sapiens
  misc_RNA (1)...(19): siRNA sense strand
aggcgcagcuggcuugaaa

SEQ ID NO: 663384 - RNA, 19 nt, Homo sapiens
  misc_RNA (1)...(19): siRNA sense strand
aagaggauauccaggaaau

SEQ ID NO: 663385 - RNA, 19 nt, Homo sapiens
  misc_RNA (1)...(19): siRNA sense strand
caaaggauucgcaggaaau

SEQ ID NO: 663386 - RNA, 19 nt, Homo sapiens
  misc_RNA (1)...(19): siRNA sense strand
aaccaggucucaaaggauu

SEQ ID NO: 663387 - RNA, 19 nt, Homo sapiens
  misc_RNA (1)...(19): siRNA sense strand
uuacggacuugucggugua

SEQ ID NO: 663388 - RNA, 19 nt, Homo sapiens
  misc_RNA (1)...(19): siRNA sense strand
ggagacccuggcacacuua

SEQ ID NO: 663389 - RNA, 19 nt, Homo sapiens
  misc_RNA (1)...(19): siRNA sense strand
uaaguggauugccaggauu

SEQ ID NO: 663390 - RNA, 19 nt, Homo sapiens
  misc_RNA (1)...(19): siRNA sense strand
agaaccaggucucaaagga

SEQ ID NO: 663391 - RNA, 19 nt, Homo sapiens
  misc_RNA (1)...(19): siRNA sense strand
ugauugggaugaugggauu

SEQ ID NO: 663392 - RNA, 19 nt, Homo sapiens
  misc_RNA (1)...(19): siRNA sense strand
gggugaagauggcauuaag

SEQ ID NO: 663393 - RNA, 19 nt, Homo sapiens
  misc_RNA (1)...(19): siRNA sense strand
aggagaagauauagaacuu

SEQ ID NO: 663394 - RNA, 19 nt, Homo sapiens
  misc_RNA (1)...(19): siRNA sense strand
gggaaagaaaggagaaaug

SEQ ID NO: 663395 - RNA, 19 nt, Homo sapiens
  misc_RNA (1)...(19): siRNA sense strand
ccaggaacaguuauuguga

SEQ ID NO: 663396 - RNA, 19 nt, Homo sapiens
  misc_RNA (1)...(19): siRNA sense strand
gggcaugccagguucuaaa

SEQ ID NO: 663397 - RNA, 19 nt, Homo sapiens
  misc_RNA (1)...(19): siRNA sense strand
ggaccuccaggaccaauug

SEQ ID NO: 663398 - RNA, 19 nt, Homo sapiens
  misc_RNA (1)...(19): siRNA sense strand
uguacacagugcccuuaua

SEQ ID NO: 663399 - RNA, 19 nt, Homo sapiens
  misc_RNA (1)...(19): siRNA sense strand
gaaccaggucucaaaggau

SEQ ID NO: 663400 - RNA, 19 nt, Homo sapiens
  misc_RNA (1)...(19): siRNA sense strand
gaccaagguuuuccaggua

SEQ ID NO: 663401 - RNA, 19 nt, Homo sapiens
  misc_RNA (1)...(19): siRNA sense strand
uggccaggcuugaaaggaa

SEQ ID NO: 663402 - RNA, 19 nt, Homo sapiens
  misc_RNA (1)...(19): siRNA sense strand
gcagggacccaagggcuuu

SEQ ID NO: 663403 - RNA, 19 nt, Homo sapiens
  misc_RNA (1)...(19): siRNA sense strand
caugccagguucuaaagga

SEQ ID NO: 663404 - RNA, 19 nt, Homo sapiens
  misc_RNA (1)...(19): siRNA sense strand
ccuggcacacuuaagauua

SEQ ID NO: 663405 - RNA, 19 nt, Homo sapiens
  misc_RNA (1)...(19): siRNA sense strand
agagccagguuauucagaa

SEQ ID NO: 663406 - RNA, 19 nt, Homo sapiens
  misc_RNA (1)...(19): siRNA sense strand
gauaagggagagccagguu

SEQ ID NO: 663407 - RNA, 19 nt, Homo sapiens
  misc_RNA (1)...(19): siRNA sense strand
ggaccuagaggaccuaagg

SEQ ID NO: 663408 - RNA, 19 nt, Homo sapiens
  misc_RNA (1)...(19): siRNA sense strand
gcaacaaagguucuaaagg

SEQ ID NO: 663409 - RNA, 19 nt, Homo sapiens
  misc_RNA (1)...(19): siRNA sense strand
gacccuggcacacuuaaga

SEQ ID NO: 663410 - RNA, 19 nt, Homo sapiens
  misc_RNA (1)...(19): siRNA sense strand
uaagggagagccagguuau

SEQ ID NO: 663411 - RNA, 19 nt, Homo sapiens
  misc_RNA (1)...(19): siRNA sense strand
caagggcuuuccaggacuu

SEQ ID NO: 663412 - RNA, 19 nt, Homo sapiens
  misc_RNA (1)...(19): siRNA sense strand
ccaggaaucccaggaguug

SEQ ID NO: 663413 - RNA, 19 nt, Homo sapiens
  misc_RNA (1)...(19): siRNA sense strand
gggugcugcugguuugaaa

SEQ ID NO: 663414 - RNA, 19 nt, Homo sapiens
  misc_RNA (1)...(19): siRNA sense strand
uggaaguccuggaucauca

SEQ ID NO: 663415 - RNA, 19 nt, Homo sapiens
  misc_RNA (1)...(19): siRNA sense strand
ccaacagaauauuaugaca

SEQ ID NO: 663416 - RNA, 19 nt, Homo sapiens
  misc_RNA (1)...(19): siRNA sense strand
gacauuggcccuccaggau

SEQ ID NO: 663417 - RNA, 19 nt, Homo sapiens
  misc_RNA (1)...(19): siRNA sense strand
agaccaggccucccaggua

SEQ ID NO: 663418 - RNA, 19 nt, Homo sapiens
  misc_RNA (1)...(19): siRNA sense strand
ggaccaggaacaccagguu

SEQ ID NO: 663419 - RNA, 19 nt, Homo sapiens
  misc_RNA (1)...(19): siRNA sense strand
gagaaagggcuuggaugga

SEQ ID NO: 663420 - RNA, 19 nt, Homo sapiens
  misc_RNA (1)...(19): siRNA sense strand
ggguuucccuggguuaaug

SEQ ID NO: 663421 - RNA, 19 nt, Homo sapiens
  misc_RNA (1)...(19): siRNA sense strand
gagguaagccaggcaagga

SEQ ID NO: 663422 - RNA, 19 nt, Homo sapiens
  misc_RNA (1)...(19): siRNA sense strand
ccagggaugccagguuuaa

SEQ ID NO: 663423 - RNA, 19 nt, Homo sapiens
  misc_RNA (1)...(19): siRNA sense strand
aggugaagauggagugauu

SEQ ID NO: 663424 - RNA, 19 nt, Homo sapiens
  misc_RNA (1)...(19): siRNA sense strand
ggacugccaggcuaucuag

SEQ ID NO: 663425 - RNA, 19 nt, Homo sapiens
  misc_RNA (1)...(19): siRNA sense strand
auaaguggauugccaggau

SEQ ID NO: 663426 - RNA, 19 nt, Homo sapiens
  misc_RNA (1)...(19): siRNA sense strand
ggaccaauggguauaagag

SEQ ID NO: 663427 - RNA, 19 nt, Homo sapiens
  misc_RNA (1)...(19): siRNA sense strand
ggaauuccaggucaucaag

SEQ ID NO: 663428 - RNA, 19 nt, Homo sapiens
  misc_RNA (1)...(19): siRNA sense strand
gaccaggaacaccagguuu

SEQ ID NO: 663429 - RNA, 19 nt, Homo sapiens
  misc_RNA (1)...(19): siRNA sense strand
ggagagcucaguguuucaa

SEQ ID NO: 663430 - RNA, 19 nt, Homo sapiens
  misc_RNA (1)...(19): siRNA sense strand
gaccaaggacgugauggaa

SEQ ID NO: 663431 - RNA, 19 nt, Homo sapiens
  misc_RNA (1)...(19): siRNA sense strand
ggagaagauauagaacuug

SEQ ID NO: 663432 - RNA, 19 nt, Homo sapiens
  misc_RNA (1)...(19): siRNA sense strand
cuccaggucuuccaggauu

SEQ ID NO: 663433 - RNA, 19 nt, Homo sapiens
  misc_RNA (1)...(19): siRNA sense strand
cgggugauaugggaaagaa

SEQ ID NO: 663434 - RNA, 19 nt, Homo sapiens
  misc_RNA (1)...(19): siRNA sense strand
caacaaagguucuaaagga

SEQ ID NO: 663435 - RNA, 19 nt, Homo sapiens
  misc_RNA (1)...(19): siRNA sense strand
gagaagauauagaacuuga

SEQ ID NO: 663436 - RNA, 19 nt, Homo sapiens
  misc_RNA (1)...(19): siRNA sense strand
caacaaggcagaagaggua

SEQ ID NO: 663437 - RNA, 19 nt, Homo sapiens
  misc_RNA (1)...(19): siRNA sense strand
agagauaucccacguaaua

SEQ ID NO: 663438 - RNA, 19 nt, Homo sapiens
  misc_RNA (1)...(19): siRNA sense strand
ccaaggacuuccaggcuua

SEQ ID NO: 663439 - RNA, 19 nt, Homo sapiens
  misc_RNA (1)...(19): siRNA sense strand
ccaaggacgugauggaauu

SEQ ID NO: 663440 - RNA, 19 nt, Homo sapiens
  misc_RNA (1)...(19): siRNA sense strand
gcagcuggcuugaaaggaa

SEQ ID NO: 663441 - RNA, 19 nt, Homo sapiens
  misc_RNA (1)...(19): siRNA sense strand
ucagagauaucccacguaa

SEQ ID NO: 663442 - RNA, 19 nt, Homo sapiens
  misc_RNA (1)...(19): siRNA sense strand
uauaagaggugaccaagga

SEQ ID NO: 663443 - RNA, 19 nt, Homo sapiens
  misc_RNA (1)...(19): siRNA sense strand
caaagaggauauccaggaa

SEQ ID NO: 663444 - RNA, 19 nt, Homo sapiens
  misc_RNA (1)...(19): siRNA sense strand
gaacaaggagauaaaggaa

SEQ ID NO: 663445 - RNA, 19 nt, Homo sapiens
  misc_RNA (1)...(19): siRNA sense strand
gaagauauagaacuugaug

SEQ ID NO: 663446 - RNA, 19 nt, Homo sapiens
  misc_RNA (1)...(19): siRNA sense strand
ccaccaggcucaagaggaa

SEQ ID NO: 663447 - RNA, 19 nt, Homo sapiens
  misc_RNA (1)...(19): siRNA sense strand
gaaagagugauaggacaua

SEQ ID NO: 663448 - RNA, 19 nt, Homo sapiens
  misc_RNA (1)...(19): siRNA sense strand
gaaagggcuuggauggaau

SEQ ID NO: 663449 - RNA, 19 nt, Homo sapiens
  misc_RNA (1)...(19): siRNA sense strand
agaaagggcuuggauggaa

SEQ ID NO: 663450 - RNA, 19 nt, Homo sapiens
  misc_RNA (1)...(19): siRNA sense strand
gaccaggccucccagguau

SEQ ID NO: 663451 - RNA, 19 nt, Homo sapiens
  misc_RNA (1)...(19): siRNA sense strand
guaaagggccagagaggaa

SEQ ID NO: 663452 - RNA, 19 nt, Homo sapiens
  misc_RNA (1)...(19): siRNA sense strand
cagcaaggguugugucugu

SEQ ID NO: 663453 - RNA, 19 nt, Homo sapiens
  misc_RNA (1)...(19): siRNA sense strand
acaaggagauaaaggaaau

SEQ ID NO: 663454 - RNA, 19 nt, Homo sapiens
  misc_RNA (1)...(19): siRNA sense strand
ggaacaaggagauaaagga

SEQ ID NO: 663455 - RNA, 19 nt, Homo sapiens
  misc_RNA (1)...(19): siRNA sense strand
ggaccaccaggaacaguua

SEQ ID NO: 663456 - RNA, 19 nt, Homo sapiens
  misc_RNA (1)...(19): siRNA sense strand
gaaagccuauuccaucaac

SEQ ID NO: 663457 - RNA, 19 nt, Homo sapiens
  misc_RNA (1)...(19): siRNA sense strand
caagggagaaccagcagua

SEQ ID NO: 663458 - RNA, 19 nt, Homo sapiens
  misc_RNA (1)...(19): siRNA sense strand
gagccuggguuaccuggaa

SEQ ID NO: 663459 - RNA, 19 nt, Homo sapiens
  misc_RNA (1)...(19): siRNA sense strand
auacaggucuuccaggauu

SEQ ID NO: 663460 - RNA, 19 nt, Homo sapiens
  misc_RNA (1)...(19): siRNA sense strand
ccacaggcauagaaggauu

SEQ ID NO: 663461 - RNA, 19 nt, Homo sapiens
  misc_RNA (1)...(19): siRNA sense strand
guacacagugcccuuauau

SEQ ID NO: 663462 - RNA, 19 nt, Homo sapiens
  misc_RNA (1)...(19): siRNA sense strand
ggaaaugaagggcuugaug

SEQ ID NO: 663463 - RNA, 19 nt, Homo sapiens
  misc_RNA (1)...(19): siRNA sense strand
ucaaaggauucgcaggaaa

SEQ ID NO: 663464 - RNA, 19 nt, Homo sapiens
  misc_RNA (1)...(19): siRNA sense strand
aaagggugcuccugcuaaa

SEQ ID NO: 663465 - RNA, 19 nt, Homo sapiens
  misc_RNA (1)...(19): siRNA sense strand
gaacccuggugcucaagga

SEQ ID NO: 663466 - RNA, 19 nt, Homo sapiens
  misc_RNA (1)...(19): siRNA sense strand
aggcuuaaauggauugaaa

SEQ ID NO: 663467 - RNA, 19 nt, Homo sapiens
  misc_RNA (1)...(19): siRNA sense strand
ggacuuccaggcuuaaaug

SEQ ID NO: 663468 - RNA, 19 nt, Homo sapiens
  misc_RNA (1)...(19): siRNA sense strand
ugugaaagcuggggaauua

SEQ ID NO: 663469 - RNA, 19 nt, Homo sapiens
  misc_RNA (1)...(19): siRNA sense strand
uaacagaacggaccucaag

SEQ ID NO: 663470 - RNA, 19 nt, Homo sapiens
  misc_RNA (1)...(19): siRNA sense strand
ccuauuccaucaacuguga

SEQ ID NO: 663471 - RNA, 19 nt, Homo sapiens
  misc_RNA (1)...(19): siRNA sense strand
gggauuuccuggagccauu

SEQ ID NO: 663472 - RNA, 19 nt, Homo sapiens
  misc_RNA (1)...(19): siRNA sense strand
aaagggagacccaggaauu

SEQ ID NO: 663473 - RNA, 19 nt, Homo sapiens
  misc_RNA (1)...(19): siRNA sense strand
gcaaggguugugucuguaa

SEQ ID NO: 663474 - RNA, 19 nt, Homo sapiens
  misc_RNA (1)...(19): siRNA sense strand
uaucuagggucuccaggaa

SEQ ID NO: 663475 - RNA, 19 nt, Homo sapiens
  misc_RNA (1)...(19): siRNA sense strand
cauuggcccuccaggauuu

SEQ ID NO: 663476 - RNA, 19 nt, Homo sapiens
  misc_RNA (1)...(19): siRNA sense strand
ggaaagaaaggagaaaugg

SEQ ID NO: 663477 - RNA, 19 nt, Homo sapiens
  misc_RNA (1)...(19): siRNA sense strand
aaagagugauaggacauaa

SEQ ID NO: 663478 - RNA, 19 nt, Homo sapiens
  misc_RNA (1)...(19): siRNA sense strand
uccagggagucauguaaua

SEQ ID NO: 663479 - RNA, 19 nt, Homo sapiens
  misc_RNA (1)...(19): siRNA sense strand
ggucugcccggugcaauua

SEQ ID NO: 663480 - RNA, 19 nt, Homo sapiens
  misc_RNA (1)...(19): siRNA sense strand
caaggguugugucuguaaa

SEQ ID NO: 663481 - RNA, 19 nt, Homo sapiens
  misc_RNA (1)...(19): siRNA sense strand
ucacuggguuguccuggaa

SEQ ID NO: 663482 - RNA, 19 nt, Homo sapiens
  misc_RNA (1)...(19): siRNA sense strand
agaaucauauggaucugaa

SEQ ID NO: 663483 - RNA, 19 nt, Homo sapiens
  misc_RNA (1)...(19): siRNA sense strand
ggaaagccagguccucaug

SEQ ID NO: 663484 - RNA, 19 nt, Homo sapiens
  misc_RNA (1)...(19): siRNA sense strand
aggcgcagcuggcuugaaa

SEQ ID NO: 663485 - RNA, 19 nt, Homo sapiens
  misc_RNA (1)...(19): siRNA sense strand
aagaggauauccaggaaau

SEQ ID NO: 663486 - RNA, 19 nt, Homo sapiens
  misc_RNA (1)...(19): siRNA sense strand
caaaggauucgcaggaaau

SEQ ID NO: 663487 - RNA, 19 nt, Homo sapiens
  misc_RNA (1)...(19): siRNA sense strand
aaccaggucucaaaggauu

SEQ ID NO: 663488 - RNA, 19 nt, Homo sapiens
  misc_RNA (1)...(19): siRNA sense strand
uuacggacuugucggugua

SEQ ID NO: 663489 - RNA, 19 nt, Homo sapiens
  misc_RNA (1)...(19): siRNA sense strand
ggagacccuggcacacuua

SEQ ID NO: 663490 - RNA, 19 nt, Homo sapiens
  misc_RNA (1)...(19): siRNA sense strand
agaaccaggucucaaagga

SEQ ID NO: 663491 - RNA, 19 nt, Homo sapiens
  misc_RNA (1)...(19): siRNA sense strand
ugauugggaugaugggauu

SEQ ID NO: 663492 - RNA, 19 nt, Homo sapiens
  misc_RNA (1)...(19): siRNA sense strand
gggugaagauggcauuaag

SEQ ID NO: 663493 - RNA, 19 nt, Homo sapiens
  misc_RNA (1)...(19): siRNA sense strand
uaaguggauugccaggauu

SEQ ID NO: 663494 - RNA, 19 nt, Homo sapiens
  misc_RNA (1)...(19): siRNA sense strand
aggagaagauauagaacuu

SEQ ID NO: 663495 - RNA, 19 nt, Homo sapiens
  misc_RNA (1)...(19): siRNA sense strand
gggaaagaaaggagaaaug

SEQ ID NO: 663496 - RNA, 19 nt, Homo sapiens
  misc_RNA (1)...(19): siRNA sense strand
ccaggaacaguuauuguga

SEQ ID NO: 663497 - RNA, 19 nt, Homo sapiens
  misc_RNA (1)...(19): siRNA sense strand
gggcaugccagguucuaaa

SEQ ID NO: 663498 - RNA, 19 nt, Homo sapiens
  misc_RNA (1)...(19): siRNA sense strand
ggaccuccaggaccaauug

SEQ ID NO: 663499 - RNA, 19 nt, Homo sapiens
  misc_RNA (1)...(19): siRNA sense strand
uguacacagugcccuuaua

SEQ ID NO: 663500 - RNA, 19 nt, Homo sapiens
  misc_RNA (1)...(19): siRNA sense strand
ugucaggugugcaugaaga

SEQ ID NO: 663501 - RNA, 19 nt, Homo sapiens
  misc_RNA (1)...(19): siRNA sense strand
gaaccaggucucaaaggau

SEQ ID NO: 663502 - RNA, 19 nt, Homo sapiens
  misc_RNA (1)...(19): siRNA sense strand
gaccaagguuuuccaggua

SEQ ID NO: 663503 - RNA, 19 nt, Homo sapiens
  misc_RNA (1)...(19): siRNA sense strand
uggccaggcuugaaaggaa

SEQ ID NO: 663504 - RNA, 19 nt, Homo sapiens
  misc_RNA (1)...(19): siRNA sense strand
gcagggacccaagggcuuu

SEQ ID NO: 663505 - RNA, 19 nt, Homo sapiens
  misc_RNA (1)...(19): siRNA sense strand
caugccagguucuaaagga

SEQ ID NO: 663506 - RNA, 19 nt, Homo sapiens
  misc_RNA (1)...(19): siRNA sense strand
ccuggcacacuuaagauua

SEQ ID NO: 663507 - RNA, 19 nt, Homo sapiens
  misc_RNA (1)...(19): siRNA sense strand
agagccagguuauucagaa

SEQ ID NO: 663508 - RNA, 19 nt, Homo sapiens
  misc_RNA (1)...(19): siRNA sense strand
gauaagggagagccagguu

SEQ ID NO: 663509 - RNA, 19 nt, Homo sapiens
  misc_RNA (1)...(19): siRNA sense strand
ggaccuagaggaccuaagg

SEQ ID NO: 663510 - RNA, 19 nt, Homo sapiens
  misc_RNA (1)...(19): siRNA sense strand
gcugucaggugugcaugaa

SEQ ID NO: 663511 - RNA, 19 nt, Homo sapiens
  misc_RNA (1)...(19): siRNA sense strand
gcaacaaagguucuaaagg

SEQ ID NO: 663512 - RNA, 19 nt, Homo sapiens
  misc_RNA (1)...(19): siRNA sense strand
gacccuggcacacuuaaga

SEQ ID NO: 663513 - RNA, 19 nt, Homo sapiens
  misc_RNA (1)...(19): siRNA sense strand
gggugcugcugguuugaaa

SEQ ID NO: 663514 - RNA, 19 nt, Homo sapiens
  misc_RNA (1)...(19): siRNA sense strand
uaagggagagccagguuau

SEQ ID NO: 663515 - RNA, 19 nt, Homo sapiens
  misc_RNA (1)...(19): siRNA sense strand
caagggcuuuccaggacuu

SEQ ID NO: 663516 - RNA, 19 nt, Homo sapiens
  misc_RNA (1)...(19): siRNA sense strand
ccaggaaucccaggaguug

SEQ ID NO: 663517 - RNA, 19 nt, Homo sapiens
  misc_RNA (1)...(19): siRNA sense strand
uggaaguccuggaucauca

SEQ ID NO: 663518 - RNA, 19 nt, Homo sapiens
  misc_RNA (1)...(19): siRNA sense strand
ccaacagaauauuaugaca

SEQ ID NO: 663519 - RNA, 19 nt, Homo sapiens
  misc_RNA (1)...(19): siRNA sense strand
gacauuggcccuccaggau

SEQ ID NO: 663520 - RNA, 19 nt, Homo sapiens
  misc_RNA (1)...(19): siRNA sense strand
agaccaggccucccaggua

SEQ ID NO: 663521 - RNA, 19 nt, Homo sapiens
  misc_RNA (1)...(19): siRNA sense strand
ggaccaggaacaccagguu

SEQ ID NO: 663522 - RNA, 19 nt, Homo sapiens
  misc_RNA (1)...(19): siRNA sense strand
gagaaagggcuuggaugga

SEQ ID NO: 663523 - RNA, 19 nt, Homo sapiens
  misc_RNA (1)...(19): siRNA sense strand
ggguuucccuggguuaaug

SEQ ID NO: 663524 - RNA, 19 nt, Homo sapiens
  misc_RNA (1)...(19): siRNA sense strand
gagguaagccaggcaagga

SEQ ID NO: 663525 - RNA, 19 nt, Homo sapiens
  misc_RNA (1)...(19): siRNA sense strand
ccagggaugccagguuuaa

SEQ ID NO: 663526 - RNA, 19 nt, Homo sapiens
  misc_RNA (1)...(19): siRNA sense strand
aggugaagauggagugauu

SEQ ID NO: 663527 - RNA, 19 nt, Homo sapiens
  misc_RNA (1)...(19): siRNA sense strand
ggacugccaggcuaucuag

SEQ ID NO: 663528 - RNA, 19 nt, Homo sapiens
  misc_RNA (1)...(19): siRNA sense strand
auaaguggauugccaggau

SEQ ID NO: 663529 - RNA, 19 nt, Homo sapiens
  misc_RNA (1)...(19): siRNA sense strand
ggaccaauggguauaagag

SEQ ID NO: 663530 - RNA, 19 nt, Homo sapiens
  misc_RNA (1)...(19): siRNA sense strand
ggaauuccaggucaucaag

SEQ ID NO: 663531 - RNA, 19 nt, Homo sapiens
  misc_RNA (1)...(19): siRNA sense strand
gaccaggaacaccagguuu

SEQ ID NO: 663532 - RNA, 19 nt, Homo sapiens
  misc_RNA (1)...(19): siRNA sense strand
cuccaggucuuccaggauu

SEQ ID NO: 663533 - RNA, 19 nt, Homo sapiens
  misc_RNA (1)...(19): siRNA sense strand
gaccaaggacgugauggaa

SEQ ID NO: 663534 - RNA, 19 nt, Homo sapiens
  misc_RNA (1)...(19): siRNA sense strand
caacaaagguucuaaagga

SEQ ID NO: 663535 - RNA, 19 nt, Homo sapiens
  misc_RNA (1)...(19): siRNA sense strand
gagaagauauagaacuuga

SEQ ID NO: 663536 - RNA, 19 nt, Homo sapiens
  misc_RNA (1)...(19): siRNA sense strand
caacaaggcagaagaggua

SEQ ID NO: 663537 - RNA, 19 nt, Homo sapiens
  misc_RNA (1)...(19): siRNA sense strand
agagauaucccacguaaua

SEQ ID NO: 663538 - RNA, 19 nt, Homo sapiens
  misc_RNA (1)...(19): siRNA sense strand
ccaaggacuuccaggcuua

SEQ ID NO: 663539 - RNA, 19 nt, Homo sapiens
  misc_RNA (1)...(19): siRNA sense strand
ccaaggacgugauggaauu

SEQ ID NO: 663540 - RNA, 19 nt, Homo sapiens
  misc_RNA (1)...(19): siRNA sense strand
gcagcuggcuugaaaggaa

SEQ ID NO: 663541 - RNA, 19 nt, Homo sapiens
  misc_RNA (1)...(19): siRNA sense strand
ucagagauaucccacguaa

SEQ ID NO: 663542 - RNA, 19 nt, Homo sapiens
  misc_RNA (1)...(19): siRNA sense strand
uauaagaggugaccaagga

SEQ ID NO: 663543 - RNA, 19 nt, Homo sapiens
  misc_RNA (1)...(19): siRNA sense strand
caaagaggauauccaggaa

SEQ ID NO: 663544 - RNA, 19 nt, Homo sapiens
  misc_RNA (1)...(19): siRNA sense strand
gaacaaggagauaaaggaa

SEQ ID NO: 663545 - RNA, 19 nt, Homo sapiens
  misc_RNA (1)...(19): siRNA sense strand
gaaaagacacugaagcuaa

SEQ ID NO: 663546 - RNA, 19 nt, Homo sapiens
  misc_RNA (1)...(19): siRNA sense strand
gaagauauagaacuugaug

SEQ ID NO: 663547 - RNA, 19 nt, Homo sapiens
  misc_RNA (1)...(19): siRNA sense strand
ccaccaggcucaagaggaa

SEQ ID NO: 663548 - RNA, 19 nt, Homo sapiens
  misc_RNA (1)...(19): siRNA sense strand
gaaagagugauaggacaua

SEQ ID NO: 663549 - RNA, 19 nt, Homo sapiens
  misc_RNA (1)...(19): siRNA sense strand
gaaagggcuuggauggaau

SEQ ID NO: 663550 - RNA, 19 nt, Homo sapiens
  misc_RNA (1)...(19): siRNA sense strand
agaaagggcuuggauggaa

SEQ ID NO: 663551 - RNA, 19 nt, Homo sapiens
  misc_RNA (1)...(19): siRNA sense strand
gaccaggccucccagguau

SEQ ID NO: 663552 - RNA, 19 nt, Homo sapiens
  misc_RNA (1)...(19): siRNA sense strand
guaaagggccagagaggaa

SEQ ID NO: 663553 - RNA, 19 nt, Homo sapiens
  misc_RNA (1)...(19): siRNA sense strand
cagcaaggguugugucugu

SEQ ID NO: 663554 - RNA, 19 nt, Homo sapiens
  misc_RNA (1)...(19): siRNA sense strand
acaaggagauaaaggaaau

SEQ ID NO: 663555 - RNA, 19 nt, Homo sapiens
  misc_RNA (1)...(19): siRNA sense strand
ggaacaaggagauaaagga

SEQ ID NO: 663556 - RNA, 19 nt, Homo sapiens
  misc_RNA (1)...(19): siRNA sense strand
ggaccaccaggaacaguua

SEQ ID NO: 663557 - RNA, 19 nt, Homo sapiens
  misc_RNA (1)...(19): siRNA sense strand
gaacaaaguaaugacagaa

SEQ ID NO: 663558 - RNA, 19 nt, Homo sapiens
  misc_RNA (1)...(19): siRNA sense strand
gaaagccuauuccaucaac

SEQ ID NO: 663559 - RNA, 19 nt, Homo sapiens
  misc_RNA (1)...(19): siRNA sense strand
caagggagaaccagcagua

SEQ ID NO: 663560 - RNA, 19 nt, Homo sapiens
  misc_RNA (1)...(19): siRNA sense strand
gagccuggguuaccuggaa

SEQ ID NO: 663561 - RNA, 19 nt, Homo sapiens
  misc_RNA (1)...(19): siRNA sense strand
auacaggucuuccaggauu

SEQ ID NO: 663562 - RNA, 19 nt, Homo sapiens
  misc_RNA (1)...(19): siRNA sense strand
ccacaggcauagaaggauu

SEQ ID NO: 663563 - RNA, 19 nt, Homo sapiens
  misc_RNA (1)...(19): siRNA sense strand
guacacagugcccuuauau

SEQ ID NO: 663564 - RNA, 19 nt, Homo sapiens
  misc_RNA (1)...(19): siRNA sense strand
ggaaaugaagggcuugaug

SEQ ID NO: 663565 - RNA, 19 nt, Homo sapiens
  misc_RNA (1)...(19): siRNA sense strand
ucaaaggauucgcaggaaa

SEQ ID NO: 663566 - RNA, 19 nt, Homo sapiens
  misc_RNA (1)...(19): siRNA sense strand
aaagggugcuccugcuaaa

SEQ ID NO: 663567 - RNA, 19 nt, Homo sapiens
  misc_RNA (1)...(19): siRNA sense strand
gaacccuggugcucaagga

SEQ ID NO: 663568 - RNA, 19 nt, Homo sapiens
  misc_RNA (1)...(19): siRNA sense strand
aggcuuaaauggauugaaa

SEQ ID NO: 663569 - RNA, 19 nt, Homo sapiens
  misc_RNA (1)...(19): siRNA sense strand
ggacuuccaggcuuaaaug

SEQ ID NO: 663570 - RNA, 19 nt, Homo sapiens
  misc_RNA (1)...(19): siRNA sense strand
ugugaaagcuggggaauua

SEQ ID NO: 663571 - RNA, 19 nt, Homo sapiens
  misc_RNA (1)...(19): siRNA sense strand
uaacagaacggaccucaag

SEQ ID NO: 663572 - RNA, 19 nt, Homo sapiens
  misc_RNA (1)...(19): siRNA sense strand
ccuauuccaucaacuguga

SEQ ID NO: 663573 - RNA, 19 nt, Homo sapiens
  misc_RNA (1)...(19): siRNA sense strand
gggauuuccuggagccauu

SEQ ID NO: 663574 - RNA, 19 nt, Homo sapiens
  misc_RNA (1)...(19): siRNA sense strand
aaagggagacccaggaauu

SEQ ID NO: 663575 - RNA, 19 nt, Homo sapiens
  misc_RNA (1)...(19): siRNA sense strand
gcaaggguugugucuguaa

SEQ ID NO: 663576 - RNA, 19 nt, Homo sapiens
  misc_RNA (1)...(19): siRNA sense strand
uaucuagggucuccaggaa

SEQ ID NO: 663577 - RNA, 19 nt, Homo sapiens
  misc_RNA (1)...(19): siRNA sense strand
cauuggcccuccaggauuu

SEQ ID NO: 663578 - RNA, 19 nt, Homo sapiens
  misc_RNA (1)...(19): siRNA sense strand
ggaaagaaaggagaaaugg

SEQ ID NO: 663579 - RNA, 19 nt, Homo sapiens
  misc_RNA (1)...(19): siRNA sense strand
aaagagugauaggacauaa

SEQ ID NO: 663580 - RNA, 19 nt, Homo sapiens
  misc_RNA (1)...(19): siRNA sense strand
uccagggagucauguaaua

SEQ ID NO: 663581 - RNA, 19 nt, Homo sapiens
  misc_RNA (1)...(19): siRNA sense strand
ggucugcccggugcaauua

SEQ ID NO: 663582 - RNA, 19 nt, Homo sapiens
  misc_RNA (1)...(19): siRNA sense strand
caaggguugugucuguaaa

SEQ ID NO: 663583 - RNA, 19 nt, Homo sapiens
  misc_RNA (1)...(19): siRNA sense strand
ucacuggguuguccuggaa

SEQ ID NO: 663584 - RNA, 19 nt, Homo sapiens
  misc_RNA (1)...(19): siRNA sense strand
agaaucauauggaucugaa

SEQ ID NO: 663585 - RNA, 19 nt, Homo sapiens
  misc_RNA (1)...(19): siRNA sense strand
ggaaagccagguccucaug

SEQ ID NO: 663586 - RNA, 19 nt, Homo sapiens
  misc_RNA (1)...(19): siRNA sense strand
aggcgcagcuggcuugaaa

SEQ ID NO: 663587 - RNA, 19 nt, Homo sapiens
  misc_RNA (1)...(19): siRNA sense strand
aagaggauauccaggaaau

SEQ ID NO: 663588 - RNA, 19 nt, Homo sapiens
  misc_RNA (1)...(19): siRNA sense strand
caaaggauucgcaggaaau

SEQ ID NO: 663589 - RNA, 19 nt, Homo sapiens
  misc_RNA (1)...(19): siRNA sense strand
aaccaggucucaaaggauu

SEQ ID NO: 663590 - RNA, 19 nt, Homo sapiens
  misc_RNA (1)...(19): siRNA sense strand
gggugaagauggcauuaag

SEQ ID NO: 663591 - RNA, 19 nt, Homo sapiens
  misc_RNA (1)...(19): siRNA sense strand
agaacaaaguaaugacaga

SEQ ID NO: 663592 - RNA, 19 nt, Homo sapiens
  misc_RNA (1)...(19): siRNA sense strand
ggagacccuggcacacuua

SEQ ID NO: 663593 - RNA, 19 nt, Homo sapiens
  misc_RNA (1)...(19): siRNA sense strand
uaaguggauugccaggauu

SEQ ID NO: 663594 - RNA, 19 nt, Homo sapiens
  misc_RNA (1)...(19): siRNA sense strand
agaaccaggucucaaagga

SEQ ID NO: 663595 - RNA, 19 nt, Homo sapiens
  misc_RNA (1)...(19): siRNA sense strand
ugauugggaugaugggauu

SEQ ID NO: 663596 - RNA, 19 nt, Homo sapiens
  misc_RNA (1)...(19): siRNA sense strand
uuacggacuugucggugua

SEQ ID NO: 663597 - RNA, 19 nt, Homo sapiens
  misc_RNA (1)...(19): siRNA sense strand
aggagaagauauagaacuu

SEQ ID NO: 663598 - RNA, 19 nt, Homo sapiens
  misc_RNA (1)...(19): siRNA sense strand
gggaaagaaaggagaaaug

SEQ ID NO: 663599 - RNA, 19 nt, Homo sapiens
  misc_RNA (1)...(19): siRNA sense strand
ccaggaacaguuauuguga

SEQ ID NO: 663600 - RNA, 19 nt, Homo sapiens
  misc_RNA (1)...(19): siRNA sense strand
gggcaugccagguucuaaa

SEQ ID NO: 663601 - RNA, 19 nt, Homo sapiens
  misc_RNA (1)...(19): siRNA sense strand
aaaagacacugaagcuaaa

SEQ ID NO: 663602 - RNA, 19 nt, Homo sapiens
  misc_RNA (1)...(19): siRNA sense strand
ggaccuccaggaccaauug

SEQ ID NO: 663603 - RNA, 19 nt, Homo sapiens
  misc_RNA (1)...(19): siRNA sense strand
uguacacagugcccuuaua

SEQ ID NO: 663604 - RNA, 19 nt, Homo sapiens
  misc_RNA (1)...(19): siRNA sense strand
acaaaguaaugacagaaca

SEQ ID NO: 663605 - RNA, 19 nt, Homo sapiens
  misc_RNA (1)...(19): siRNA sense strand
ugucaggugugcaugaaga

SEQ ID NO: 663606 - RNA, 19 nt, Homo sapiens
  misc_RNA (1)...(19): siRNA sense strand
gaaccaggucucaaaggau

SEQ ID NO: 663607 - RNA, 19 nt, Homo sapiens
  misc_RNA (1)...(19): siRNA sense strand
gaccaagguuuuccaggua

SEQ ID NO: 663608 - RNA, 19 nt, Homo sapiens
  misc_RNA (1)...(19): siRNA sense strand
uggccaggcuugaaaggaa

SEQ ID NO: 663609 - RNA, 19 nt, Homo sapiens
  misc_RNA (1)...(19): siRNA sense strand
gcagggacccaagggcuuu

SEQ ID NO: 663610 - RNA, 19 nt, Homo sapiens
  misc_RNA (1)...(19): siRNA sense strand
caugccagguucuaaagga

SEQ ID NO: 663611 - RNA, 19 nt, Homo sapiens
  misc_RNA (1)...(19): siRNA sense strand
ccuggcacacuuaagauua

SEQ ID NO: 663612 - RNA, 19 nt, Homo sapiens
  misc_RNA (1)...(19): siRNA sense strand
agagccagguuauucagaa

SEQ ID NO: 663613 - RNA, 19 nt, Homo sapiens
  misc_RNA (1)...(19): siRNA sense strand
gauaagggagagccagguu

SEQ ID NO: 663614 - RNA, 19 nt, Homo sapiens
  misc_RNA (1)...(19): siRNA sense strand
ggaccuagaggaccuaagg

SEQ ID NO: 663615 - RNA, 19 nt, Homo sapiens
  misc_RNA (1)...(19): siRNA sense strand
caagggcuuuccaggacuu

SEQ ID NO: 663616 - RNA, 19 nt, Homo sapiens
  misc_RNA (1)...(19): siRNA sense strand
gcugucaggugugcaugaa

SEQ ID NO: 663617 - RNA, 19 nt, Homo sapiens
  misc_RNA (1)...(19): siRNA sense strand
gcaacaaagguucuaaagg

SEQ ID NO: 663618 - RNA, 19 nt, Homo sapiens
  misc_RNA (1)...(19): siRNA sense strand
gacccuggcacacuuaaga

SEQ ID NO: 663619 - RNA, 19 nt, Homo sapiens
  misc_RNA (1)...(19): siRNA sense strand
gggugcugcugguuugaaa

SEQ ID NO: 663620 - RNA, 19 nt, Homo sapiens
  misc_RNA (1)...(19): siRNA sense strand
uaagggagagccagguuau

SEQ ID NO: 663621 - RNA, 19 nt, Homo sapiens
  misc_RNA (1)...(19): siRNA sense strand
ccaggaaucccaggaguug

SEQ ID NO: 663622 - RNA, 19 nt, Homo sapiens
  misc_RNA (1)...(19): siRNA sense strand
uggaaguccuggaucauca

SEQ ID NO: 663623 - RNA, 19 nt, Homo sapiens
  misc_RNA (1)...(19): siRNA sense strand
ccaacagaauauuaugaca

SEQ ID NO: 663624 - RNA, 19 nt, Homo sapiens
  misc_RNA (1)...(19): siRNA sense strand
gacauuggcccuccaggau

SEQ ID NO: 663625 - RNA, 19 nt, Homo sapiens
  misc_RNA (1)...(19): siRNA sense strand
agaccaggccucccaggua

SEQ ID NO: 663626 - RNA, 19 nt, Homo sapiens
  misc_RNA (1)...(19): siRNA sense strand
ggaccaggaacaccagguu

SEQ ID NO: 663627 - RNA, 19 nt, Homo sapiens
  misc_RNA (1)...(19): siRNA sense strand
gagaaagggcuuggaugga

SEQ ID NO: 663628 - RNA, 19 nt, Homo sapiens
  misc_RNA (1)...(19): siRNA sense strand
ggguuucccuggguuaaug

SEQ ID NO: 663629 - RNA, 19 nt, Homo sapiens
  misc_RNA (1)...(19): siRNA sense strand
cauccuaaagaacaaagua

SEQ ID NO: 663630 - RNA, 19 nt, Homo sapiens
  misc_RNA (1)...(19): siRNA sense strand
gagguaagccaggcaagga

SEQ ID NO: 663631 - RNA, 19 nt, Homo sapiens
  misc_RNA (1)...(19): siRNA sense strand
ccagggaugccagguuuaa

SEQ ID NO: 663632 - RNA, 19 nt, Homo sapiens
  misc_RNA (1)...(19): siRNA sense strand
aggugaagauggagugauu

SEQ ID NO: 663633 - RNA, 19 nt, Homo sapiens
  misc_RNA (1)...(19): siRNA sense strand
ggacugccaggcuaucuag

SEQ ID NO: 663634 - RNA, 19 nt, Homo sapiens
  misc_RNA (1)...(19): siRNA sense strand
caacaaagguucuaaagga

SEQ ID NO: 663635 - RNA, 19 nt, Homo sapiens
  misc_RNA (1)...(19): siRNA sense strand
gagaagauauagaacuuga

SEQ ID NO: 663636 - RNA, 19 nt, Homo sapiens
  misc_RNA (1)...(19): siRNA sense strand
caacaaggcagaagaggua

SEQ ID NO: 663637 - RNA, 19 nt, Homo sapiens
  misc_RNA (1)...(19): siRNA sense strand
agagauaucccacguaaua

SEQ ID NO: 663638 - RNA, 19 nt, Homo sapiens
  misc_RNA (1)...(19): siRNA sense strand
ccaaggacuuccaggcuua

SEQ ID NO: 663639 - RNA, 19 nt, Homo sapiens
  misc_RNA (1)...(19): siRNA sense strand
ccaaggacgugauggaauu

SEQ ID NO: 663640 - RNA, 19 nt, Homo sapiens
  misc_RNA (1)...(19): siRNA sense strand
gcagcuggcuugaaaggaa

SEQ ID NO: 663641 - RNA, 19 nt, Homo sapiens
  misc_RNA (1)...(19): siRNA sense strand
ucagagauaucccacguaa

SEQ ID NO: 663642 - RNA, 19 nt, Homo sapiens
  misc_RNA (1)...(19): siRNA sense strand
uauaagaggugaccaagga

SEQ ID NO: 663643 - RNA, 19 nt, Homo sapiens
  misc_RNA (1)...(19): siRNA sense strand
caaagaggauauccaggaa

SEQ ID NO: 663644 - RNA, 19 nt, Homo sapiens
  misc_RNA (1)...(19): siRNA sense strand
gaacaaggagauaaaggaa

SEQ ID NO: 663645 - RNA, 19 nt, Homo sapiens
  misc_RNA (1)...(19): siRNA sense strand
gaagauauagaacuugaug

SEQ ID NO: 663646 - RNA, 19 nt, Homo sapiens
  misc_RNA (1)...(19): siRNA sense strand
ccaccaggcucaagaggaa

SEQ ID NO: 663647 - RNA, 19 nt, Homo sapiens
  misc_RNA (1)...(19): siRNA sense strand
gaaagagugauaggacaua

SEQ ID NO: 663648 - RNA, 19 nt, Homo sapiens
  misc_RNA (1)...(19): siRNA sense strand
gaaagggcuuggauggaau

SEQ ID NO: 663649 - RNA, 19 nt, Homo sapiens
  misc_RNA (1)...(19): siRNA sense strand
agaaagggcuuggauggaa

SEQ ID NO: 663650 - RNA, 19 nt, Homo sapiens
  misc_RNA (1)...(19): siRNA sense strand
gaccaggccucccagguau

SEQ ID NO: 663651 - RNA, 19 nt, Homo sapiens
  misc_RNA (1)...(19): siRNA sense strand
guaaagggccagagaggaa

SEQ ID NO: 663652 - RNA, 19 nt, Homo sapiens
  misc_RNA (1)...(19): siRNA sense strand
cagcaaggguugugucugu

SEQ ID NO: 663653 - RNA, 19 nt, Homo sapiens
  misc_RNA (1)...(19): siRNA sense strand
acaaggagauaaaggaaau

SEQ ID NO: 663654 - RNA, 19 nt, Homo sapiens
  misc_RNA (1)...(19): siRNA sense strand
ggaacaaggagauaaagga

SEQ ID NO: 663655 - RNA, 19 nt, Homo sapiens
  misc_RNA (1)...(19): siRNA sense strand
ggaccaccaggaacaguua

SEQ ID NO: 663656 - RNA, 19 nt, Homo sapiens
  misc_RNA (1)...(19): siRNA sense strand
caagggagaaccagcagua

SEQ ID NO: 663657 - RNA, 19 nt, Homo sapiens
  misc_RNA (1)...(19): siRNA sense strand
gagccuggguuaccuggaa

SEQ ID NO: 663658 - RNA, 19 nt, Homo sapiens
  misc_RNA (1)...(19): siRNA sense strand
auacaggucuuccaggauu

SEQ ID NO: 663659 - RNA, 19 nt, Homo sapiens
  misc_RNA (1)...(19): siRNA sense strand
ccacaggcauagaaggauu

SEQ ID NO: 663660 - RNA, 19 nt, Homo sapiens
  misc_RNA (1)...(19): siRNA sense strand
guacacagugcccuuauau

SEQ ID NO: 663661 - RNA, 19 nt, Homo sapiens
  misc_RNA (1)...(19): siRNA sense strand
ggaaaugaagggcuugaug

SEQ ID NO: 663662 - RNA, 19 nt, Homo sapiens
  misc_RNA (1)...(19): siRNA sense strand
ucaaaggauucgcaggaaa

SEQ ID NO: 663663 - RNA, 19 nt, Homo sapiens
  misc_RNA (1)...(19): siRNA sense strand
aaagggugcuccugcuaaa

SEQ ID NO: 663664 - RNA, 19 nt, Homo sapiens
  misc_RNA (1)...(19): siRNA sense strand
gaacccuggugcucaagga

SEQ ID NO: 663665 - RNA, 19 nt, Homo sapiens
  misc_RNA (1)...(19): siRNA sense strand
aggcuuaaauggauugaaa

SEQ ID NO: 663666 - RNA, 19 nt, Homo sapiens
  misc_RNA (1)...(19): siRNA sense strand
ggacuuccaggcuuaaaug

SEQ ID NO: 663667 - RNA, 19 nt, Homo sapiens
  misc_RNA (1)...(19): siRNA sense strand
uaacagaacggaccucaag

SEQ ID NO: 663668 - RNA, 19 nt, Homo sapiens
  misc_RNA (1)...(19): siRNA sense strand
gggauuuccuggagccauu

SEQ ID NO: 663669 - RNA, 19 nt, Homo sapiens
  misc_RNA (1)...(19): siRNA sense strand
aaagggagacccaggaauu

SEQ ID NO: 663670 - RNA, 19 nt, Homo sapiens
  misc_RNA (1)...(19): siRNA sense strand
gcaaggguugugucuguaa

SEQ ID NO: 663671 - RNA, 19 nt, Homo sapiens
  misc_RNA (1)...(19): siRNA sense strand
uaucuagggucuccaggaa

SEQ ID NO: 663672 - RNA, 19 nt, Homo sapiens
  misc_RNA (1)...(19): siRNA sense strand
cauuggcccuccaggauuu

SEQ ID NO: 663673 - RNA, 19 nt, Homo sapiens
  misc_RNA (1)...(19): siRNA sense strand
ggaaagaaaggagaaaugg

SEQ ID NO: 663674 - RNA, 19 nt, Homo sapiens
  misc_RNA (1)...(19): siRNA sense strand
aaagagugauaggacauaa

SEQ ID NO: 663675 - RNA, 19 nt, Homo sapiens
  misc_RNA (1)...(19): siRNA sense strand
uccagggagucauguaaua

SEQ ID NO: 663676 - RNA, 19 nt, Homo sapiens
  misc_RNA (1)...(19): siRNA sense strand
ggucugcccggugcaauua

SEQ ID NO: 663677 - RNA, 19 nt, Homo sapiens
  misc_RNA (1)...(19): siRNA sense strand
caaggguugugucuguaaa

SEQ ID NO: 663678 - RNA, 19 nt, Homo sapiens
  misc_RNA (1)...(19): siRNA sense strand
ucacuggguuguccuggaa

SEQ ID NO: 663679 - RNA, 19 nt, Homo sapiens
  misc_RNA (1)...(19): siRNA sense strand
agaaucauauggaucugaa

SEQ ID NO: 663680 - RNA, 19 nt, Homo sapiens
  misc_RNA (1)...(19): siRNA sense strand
ggaaagccagguccucaug

SEQ ID NO: 663681 - RNA, 19 nt, Homo sapiens
  misc_RNA (1)...(19): siRNA sense strand
aggcgcagcuggcuugaaa

SEQ ID NO: 663682 - RNA, 19 nt, Homo sapiens
  misc_RNA (1)...(19): siRNA sense strand
aagaggauauccaggaaau

SEQ ID NO: 663683 - RNA, 19 nt, Homo sapiens
  misc_RNA (1)...(19): siRNA sense strand
caaaggauucgcaggaaau

SEQ ID NO: 663684 - RNA, 19 nt, Homo sapiens
  misc_RNA (1)...(19): siRNA sense strand
aaccaggucucaaaggauu

SEQ ID NO: 663685 - RNA, 19 nt, Homo sapiens
  misc_RNA (1)...(19): siRNA sense strand
uuacggacuugucggugua

SEQ ID NO: 663686 - RNA, 19 nt, Homo sapiens
  misc_RNA (1)...(19): siRNA sense strand
ggagacccuggcacacuua

SEQ ID NO: 663687 - RNA, 19 nt, Homo sapiens
  misc_RNA (1)...(19): siRNA sense strand
agaaccaggucucaaagga

SEQ ID NO: 663688 - RNA, 19 nt, Homo sapiens
  misc_RNA (1)...(19): siRNA sense strand
ugauugggaugaugggauu

SEQ ID NO: 663689 - RNA, 19 nt, Homo sapiens
  misc_RNA (1)...(19): siRNA sense strand
gggugaagauggcauuaag

SEQ ID NO: 663690 - RNA, 19 nt, Homo sapiens
  misc_RNA (1)...(19): siRNA sense strand
uaaguggauugccaggauu

SEQ ID NO: 663691 - RNA, 19 nt, Homo sapiens
  misc_RNA (1)...(19): siRNA sense strand
aggagaagauauagaacuu

SEQ ID NO: 663692 - RNA, 19 nt, Homo sapiens
  misc_RNA (1)...(19): siRNA sense strand
gggaaagaaaggagaaaug

SEQ ID NO: 663693 - RNA, 19 nt, Homo sapiens
  misc_RNA (1)...(19): siRNA sense strand
ccaggaacaguuauuguga

SEQ ID NO: 663694 - RNA, 19 nt, Homo sapiens
  misc_RNA (1)...(19): siRNA sense strand
gggcaugccagguucuaaa

SEQ ID NO: 663695 - RNA, 19 nt, Homo sapiens
  misc_RNA (1)...(19): siRNA sense strand
ggaccuccaggaccaauug

SEQ ID NO: 663696 - RNA, 19 nt, Homo sapiens
  misc_RNA (1)...(19): siRNA sense strand
uguacacagugcccuuaua

SEQ ID NO: 663697 - RNA, 19 nt, Homo sapiens
  misc_RNA (1)...(19): siRNA sense strand
gaaccaggucucaaaggau

SEQ ID NO: 663698 - RNA, 19 nt, Homo sapiens
  misc_RNA (1)...(19): siRNA sense strand
gaccaagguuuuccaggua

SEQ ID NO: 663699 - RNA, 19 nt, Homo sapiens
  misc_RNA (1)...(19): siRNA sense strand
uggccaggcuugaaaggaa

SEQ ID NO: 663700 - RNA, 19 nt, Homo sapiens
  misc_RNA (1)...(19): siRNA sense strand
gcagggacccaagggcuuu

SEQ ID NO: 663701 - RNA, 19 nt, Homo sapiens
  misc_RNA (1)...(19): siRNA sense strand
caugccagguucuaaagga

SEQ ID NO: 663702 - RNA, 19 nt, Homo sapiens
  misc_RNA (1)...(19): siRNA sense strand
ccuggcacacuuaagauua

SEQ ID NO: 663703 - RNA, 19 nt, Homo sapiens
  misc_RNA (1)...(19): siRNA sense strand
agagccagguuauucagaa

SEQ ID NO: 663704 - RNA, 19 nt, Homo sapiens
  misc_RNA (1)...(19): siRNA sense strand
gauaagggagagccagguu

SEQ ID NO: 663705 - RNA, 19 nt, Homo sapiens
  misc_RNA (1)...(19): siRNA sense strand
ggaccuagaggaccuaagg

SEQ ID NO: 663706 - RNA, 19 nt, Homo sapiens
  misc_RNA (1)...(19): siRNA sense strand
gcaacaaagguucuaaagg

SEQ ID NO: 663707 - RNA, 19 nt, Homo sapiens
  misc_RNA (1)...(19): siRNA sense strand
gacccuggcacacuuaaga

SEQ ID NO: 663708 - RNA, 19 nt, Homo sapiens
  misc_RNA (1)...(19): siRNA sense strand
uaagggagagccagguuau

SEQ ID NO: 663709 - RNA, 19 nt, Homo sapiens
  misc_RNA (1)...(19): siRNA sense strand
caagggcuuuccaggacuu

SEQ ID NO: 663710 - RNA, 19 nt, Homo sapiens
  misc_RNA (1)...(19): siRNA sense strand
ccaggaaucccaggaguug

SEQ ID NO: 663711 - RNA, 19 nt, Homo sapiens
  misc_RNA (1)...(19): siRNA sense strand
uggaaguccuggaucauca

SEQ ID NO: 663712 - RNA, 19 nt, Homo sapiens
  misc_RNA (1)...(19): siRNA sense strand
ccaacagaauauuaugaca

SEQ ID NO: 663713 - RNA, 19 nt, Homo sapiens
  misc_RNA (1)...(19): siRNA sense strand
gggugcugcugguuugaaa

SEQ ID NO: 663714 - RNA, 19 nt, Homo sapiens
  misc_RNA (1)...(19): siRNA sense strand
gacauuggcccuccaggau

SEQ ID NO: 663715 - RNA, 19 nt, Homo sapiens
  misc_RNA (1)...(19): siRNA sense strand
agaccaggccucccaggua

SEQ ID NO: 663716 - RNA, 19 nt, Homo sapiens
  misc_RNA (1)...(19): siRNA sense strand
ggaccaggaacaccagguu

SEQ ID NO: 663717 - RNA, 19 nt, Homo sapiens
  misc_RNA (1)...(19): siRNA sense strand
gagaaagggcuuggaugga

SEQ ID NO: 663718 - RNA, 19 nt, Homo sapiens
  misc_RNA (1)...(19): siRNA sense strand
ggguuucccuggguuaaug

SEQ ID NO: 663719 - RNA, 19 nt, Homo sapiens
  misc_RNA (1)...(19): siRNA sense strand
gagguaagccaggcaagga

SEQ ID NO: 663720 - RNA, 19 nt, Homo sapiens
  misc_RNA (1)...(19): siRNA sense strand
ccagggaugccagguuuaa

SEQ ID NO: 663721 - RNA, 19 nt, Homo sapiens
  misc_RNA (1)...(19): siRNA sense strand
aggugaagauggagugauu

SEQ ID NO: 663722 - RNA, 19 nt, Homo sapiens
  misc_RNA (1)...(19): siRNA sense strand
ggacugccaggcuaucuag

SEQ ID NO: 663723 - RNA, 19 nt, Homo sapiens
  misc_RNA (1)...(19): siRNA sense strand
auaaguggauugccaggau

SEQ ID NO: 663724 - RNA, 19 nt, Homo sapiens
  misc_RNA (1)...(19): siRNA sense strand
ggaccaauggguauaagag

SEQ ID NO: 663725 - RNA, 19 nt, Homo sapiens
  misc_RNA (1)...(19): siRNA sense strand
ggaauuccaggucaucaag

SEQ ID NO: 663726 - RNA, 19 nt, Homo sapiens
  misc_RNA (1)...(19): siRNA sense strand
gaccaggaacaccagguuu

SEQ ID NO: 663727 - RNA, 19 nt, Homo sapiens
  misc_RNA (1)...(19): siRNA sense strand
ggaaaacccggaaaagaug

SEQ ID NO: 663728 - RNA, 19 nt, Homo sapiens
  misc_RNA (1)...(19): siRNA sense strand
gaccaaggacgugauggaa

SEQ ID NO: 663729 - RNA, 19 nt, Homo sapiens
  misc_RNA (1)...(19): siRNA sense strand
cuccaggucuuccaggauu

SEQ ID NO: 663730 - RNA, 19 nt, Homo sapiens
  misc_RNA (1)...(19): siRNA sense strand
cgggugauaugggaaagaa

SEQ ID NO: 663731 - RNA, 19 nt, Homo sapiens
  misc_RNA (1)...(19): siRNA sense strand
ggagaagauauagaacuug

SEQ ID NO: 663732 - RNA, 19 nt, Homo sapiens
  misc_RNA (1)...(19): siRNA sense strand
ggagagcucaguguuucaa

SEQ ID NO: 663733 - RNA, 19 nt, Homo sapiens
  misc_RNA (1)...(19): siRNA sense strand
uggcccaccuggacauuug

SEQ ID NO: 663734 - RNA, 19 nt, Homo sapiens
  misc_RNA (1)...(19): siRNA sense strand
caacaaagguucuaaagga

SEQ ID NO: 663735 - RNA, 19 nt, Homo sapiens
  misc_RNA (1)...(19): siRNA sense strand
gagaagauauagaacuuga

SEQ ID NO: 663736 - RNA, 19 nt, Homo sapiens
  misc_RNA (1)...(19): siRNA sense strand
caacaaggcagaagaggua

SEQ ID NO: 663737 - RNA, 19 nt, Homo sapiens
  misc_RNA (1)...(19): siRNA sense strand
agagauaucccacguaaua

SEQ ID NO: 663738 - RNA, 19 nt, Homo sapiens
  misc_RNA (1)...(19): siRNA sense strand
ccaaggacuuccaggcuua

SEQ ID NO: 663739 - RNA, 19 nt, Homo sapiens
  misc_RNA (1)...(19): siRNA sense strand
ccaaggacgugauggaauu

SEQ ID NO: 663740 - RNA, 19 nt, Homo sapiens
  misc_RNA (1)...(19): siRNA sense strand
gcagcuggcuugaaaggaa

SEQ ID NO: 663741 - RNA, 19 nt, Homo sapiens
  misc_RNA (1)...(19): siRNA sense strand
ucagagauaucccacguaa

SEQ ID NO: 663742 - RNA, 19 nt, Homo sapiens
  misc_RNA (1)...(19): siRNA sense strand
uauaagaggugaccaagga

SEQ ID NO: 663743 - RNA, 19 nt, Homo sapiens
  misc_RNA (1)...(19): siRNA sense strand
caaagaggauauccaggaa

SEQ ID NO: 663744 - RNA, 19 nt, Homo sapiens
  misc_RNA (1)...(19): siRNA sense strand
gaacaaggagauaaaggaa

SEQ ID NO: 663745 - RNA, 19 nt, Homo sapiens
  misc_RNA (1)...(19): siRNA sense strand
gaagauauagaacuugaug

SEQ ID NO: 663746 - RNA, 19 nt, Homo sapiens
  misc_RNA (1)...(19): siRNA sense strand
ccaccaggcucaagaggaa

SEQ ID NO: 663747 - RNA, 19 nt, Homo sapiens
  misc_RNA (1)...(19): siRNA sense strand
gaaagagugauaggacaua

SEQ ID NO: 663748 - RNA, 19 nt, Homo sapiens
  misc_RNA (1)...(19): siRNA sense strand
gaaagggcuuggauggaau

SEQ ID NO: 663749 - RNA, 19 nt, Homo sapiens
  misc_RNA (1)...(19): siRNA sense strand
agaaagggcuuggauggaa

SEQ ID NO: 663750 - RNA, 19 nt, Homo sapiens
  misc_RNA (1)...(19): siRNA sense strand
gaccaggccucccagguau

SEQ ID NO: 663751 - RNA, 19 nt, Homo sapiens
  misc_RNA (1)...(19): siRNA sense strand
guaaagggccagagaggaa

SEQ ID NO: 663752 - RNA, 19 nt, Homo sapiens
  misc_RNA (1)...(19): siRNA sense strand
cagcaaggguugugucugu

SEQ ID NO: 663753 - RNA, 19 nt, Homo sapiens
  misc_RNA (1)...(19): siRNA sense strand
acaaggagauaaaggaaau

SEQ ID NO: 663754 - RNA, 19 nt, Homo sapiens
  misc_RNA (1)...(19): siRNA sense strand
ggaacaaggagauaaagga

SEQ ID NO: 663755 - RNA, 19 nt, Homo sapiens
  misc_RNA (1)...(19): siRNA sense strand
ggaccaccaggaacaguua

SEQ ID NO: 663756 - RNA, 19 nt, Homo sapiens
  misc_RNA (1)...(19): siRNA sense strand
caagggagaaccagcagua

SEQ ID NO: 663757 - RNA, 19 nt, Homo sapiens
  misc_RNA (1)...(19): siRNA sense strand
gagccuggguuaccuggaa

SEQ ID NO: 663758 - RNA, 19 nt, Homo sapiens
  misc_RNA (1)...(19): siRNA sense strand
auacaggucuuccaggauu

SEQ ID NO: 663759 - RNA, 19 nt, Homo sapiens
  misc_RNA (1)...(19): siRNA sense strand
ccacaggcauagaaggauu

SEQ ID NO: 663760 - RNA, 19 nt, Homo sapiens
  misc_RNA (1)...(19): siRNA sense strand
guacacagugcccuuauau

SEQ ID NO: 663761 - RNA, 19 nt, Homo sapiens
  misc_RNA (1)...(19): siRNA sense strand
ggaaaugaagggcuugaug

SEQ ID NO: 663762 - RNA, 19 nt, Homo sapiens
  misc_RNA (1)...(19): siRNA sense strand
ucaaaggauucgcaggaaa

SEQ ID NO: 663763 - RNA, 19 nt, Homo sapiens
  misc_RNA (1)...(19): siRNA sense strand
aaagggugcuccugcuaaa

SEQ ID NO: 663764 - RNA, 19 nt, Homo sapiens
  misc_RNA (1)...(19): siRNA sense strand
gaacccuggugcucaagga

SEQ ID NO: 663765 - RNA, 19 nt, Homo sapiens
  misc_RNA (1)...(19): siRNA sense strand
aggcuuaaauggauugaaa

SEQ ID NO: 663766 - RNA, 19 nt, Homo sapiens
  misc_RNA (1)...(19): siRNA sense strand
ggacuuccaggcuuaaaug

SEQ ID NO: 663767 - RNA, 19 nt, Homo sapiens
  misc_RNA (1)...(19): siRNA sense strand
uaacagaacggaccucaag

SEQ ID NO: 663768 - RNA, 19 nt, Homo sapiens
  misc_RNA (1)...(19): siRNA sense strand
gggauuuccuggagccauu

SEQ ID NO: 663769 - RNA, 19 nt, Homo sapiens
  misc_RNA (1)...(19): siRNA sense strand
aaagggagacccaggaauu

SEQ ID NO: 663770 - RNA, 19 nt, Homo sapiens
  misc_RNA (1)...(19): siRNA sense strand
gcaaggguugugucuguaa

SEQ ID NO: 663771 - RNA, 19 nt, Homo sapiens
  misc_RNA (1)...(19): siRNA sense strand
uaucuagggucuccaggaa

SEQ ID NO: 663772 - RNA, 19 nt, Homo sapiens
  misc_RNA (1)...(19): siRNA sense strand
cauuggcccuccaggauuu

SEQ ID NO: 663773 - RNA, 19 nt, Homo sapiens
  misc_RNA (1)...(19): siRNA sense strand
ggaaagaaaggagaaaugg

SEQ ID NO: 663774 - RNA, 19 nt, Homo sapiens
  misc_RNA (1)...(19): siRNA sense strand
aaagagugauaggacauaa

SEQ ID NO: 663775 - RNA, 19 nt, Homo sapiens
  misc_RNA (1)...(19): siRNA sense strand
uccagggagucauguaaua

SEQ ID NO: 663776 - RNA, 19 nt, Homo sapiens
  misc_RNA (1)...(19): siRNA sense strand
ggucugcccggugcaauua

SEQ ID NO: 663777 - RNA, 19 nt, Homo sapiens
  misc_RNA (1)...(19): siRNA sense strand
caaggguugugucuguaaa

SEQ ID NO: 663778 - RNA, 19 nt, Homo sapiens
  misc_RNA (1)...(19): siRNA sense strand
ucacuggguuguccuggaa

SEQ ID NO: 663779 - RNA, 19 nt, Homo sapiens
  misc_RNA (1)...(19): siRNA sense strand
agaaucauauggaucugaa

SEQ ID NO: 663780 - RNA, 19 nt, Homo sapiens
  misc_RNA (1)...(19): siRNA sense strand
ggaaagccagguccucaug

SEQ ID NO: 663781 - RNA, 19 nt, Homo sapiens
  misc_RNA (1)...(19): siRNA sense strand
aggcgcagcuggcuugaaa

SEQ ID NO: 663782 - RNA, 19 nt, Homo sapiens
  misc_RNA (1)...(19): siRNA sense strand
aagaggauauccaggaaau

SEQ ID NO: 663783 - RNA, 19 nt, Homo sapiens
  misc_RNA (1)...(19): siRNA sense strand
caaaggauucgcaggaaau

SEQ ID NO: 663784 - RNA, 19 nt, Homo sapiens
  misc_RNA (1)...(19): siRNA sense strand
aaccaggucucaaaggauu

SEQ ID NO: 663785 - RNA, 19 nt, Homo sapiens
  misc_RNA (1)...(19): siRNA sense strand
uuacggacuugucggugua

SEQ ID NO: 663786 - RNA, 19 nt, Homo sapiens
  misc_RNA (1)...(19): siRNA sense strand
ggagacccuggcacacuua

SEQ ID NO: 663787 - RNA, 19 nt, Homo sapiens
  misc_RNA (1)...(19): siRNA sense strand
agaaccaggucucaaagga

SEQ ID NO: 663788 - RNA, 19 nt, Homo sapiens
  misc_RNA (1)...(19): siRNA sense strand
ugauugggaugaugggauu

SEQ ID NO: 663789 - RNA, 19 nt, Homo sapiens
  misc_RNA (1)...(19): siRNA sense strand
gggugaagauggcauuaag

SEQ ID NO: 663790 - RNA, 19 nt, Homo sapiens
  misc_RNA (1)...(19): siRNA sense strand
uaaguggauugccaggauu

SEQ ID NO: 663791 - RNA, 19 nt, Homo sapiens
  misc_RNA (1)...(19): siRNA sense strand
aggagaagauauagaacuu

SEQ ID NO: 663792 - RNA, 19 nt, Homo sapiens
  misc_RNA (1)...(19): siRNA sense strand
gggaaagaaaggagaaaug

SEQ ID NO: 663793 - RNA, 19 nt, Homo sapiens
  misc_RNA (1)...(19): siRNA sense strand
ccaggaacaguuauuguga

SEQ ID NO: 663794 - RNA, 19 nt, Homo sapiens
  misc_RNA (1)...(19): siRNA sense strand
gggcaugccagguucuaaa

SEQ ID NO: 663795 - RNA, 19 nt, Homo sapiens
  misc_RNA (1)...(19): siRNA sense strand
ggaccuccaggaccaauug

SEQ ID NO: 663796 - RNA, 19 nt, Homo sapiens
  misc_RNA (1)...(19): siRNA sense strand
uguacacagugcccuuaua

SEQ ID NO: 663797 - RNA, 19 nt, Homo sapiens
  misc_RNA (1)...(19): siRNA sense strand
gaaccaggucucaaaggau

SEQ ID NO: 663798 - RNA, 19 nt, Homo sapiens
  misc_RNA (1)...(19): siRNA sense strand
gaccaagguuuuccaggua

SEQ ID NO: 663799 - RNA, 19 nt, Homo sapiens
  misc_RNA (1)...(19): siRNA sense strand
uggccaggcuugaaaggaa

SEQ ID NO: 663800 - RNA, 19 nt, Homo sapiens
  misc_RNA (1)...(19): siRNA sense strand
gcagggacccaagggcuuu

SEQ ID NO: 663801 - RNA, 19 nt, Homo sapiens
  misc_RNA (1)...(19): siRNA sense strand
caugccagguucuaaagga

SEQ ID NO: 663802 - RNA, 19 nt, Homo sapiens
  misc_RNA (1)...(19): siRNA sense strand
ccuggcacacuuaagauua

SEQ ID NO: 663803 - RNA, 19 nt, Homo sapiens
  misc_RNA (1)...(19): siRNA sense strand
agagccagguuauucagaa

SEQ ID NO: 663804 - RNA, 19 nt, Homo sapiens
  misc_RNA (1)...(19): siRNA sense strand
gauaagggagagccagguu

SEQ ID NO: 663805 - RNA, 19 nt, Homo sapiens
  misc_RNA (1)...(19): siRNA sense strand
ggaccuagaggaccuaagg

SEQ ID NO: 663806 - RNA, 19 nt, Homo sapiens
  misc_RNA (1)...(19): siRNA sense strand
gcaacaaagguucuaaagg

SEQ ID NO: 663807 - RNA, 19 nt, Homo sapiens
  misc_RNA (1)...(19): siRNA sense strand
gacccuggcacacuuaaga

SEQ ID NO: 663808 - RNA, 19 nt, Homo sapiens
  misc_RNA (1)...(19): siRNA sense strand
uaagggagagccagguuau

SEQ ID NO: 663809 - RNA, 19 nt, Homo sapiens
  misc_RNA (1)...(19): siRNA sense strand
caagggcuuuccaggacuu

SEQ ID NO: 663810 - RNA, 19 nt, Homo sapiens
  misc_RNA (1)...(19): siRNA sense strand
ccaggaaucccaggaguug

SEQ ID NO: 663811 - RNA, 19 nt, Homo sapiens
  misc_RNA (1)...(19): siRNA sense strand
uggaaguccuggaucauca

SEQ ID NO: 663812 - RNA, 19 nt, Homo sapiens
  misc_RNA (1)...(19): siRNA sense strand
ccaacagaauauuaugaca

SEQ ID NO: 663813 - RNA, 19 nt, Homo sapiens
  misc_RNA (1)...(19): siRNA sense strand
gggugcugcugguuugaaa

SEQ ID NO: 663814 - RNA, 19 nt, Homo sapiens
  misc_RNA (1)...(19): siRNA sense strand
gacauuggcccuccaggau

SEQ ID NO: 663815 - RNA, 19 nt, Homo sapiens
  misc_RNA (1)...(19): siRNA sense strand
agaccaggccucccaggua

SEQ ID NO: 663816 - RNA, 19 nt, Homo sapiens
  misc_RNA (1)...(19): siRNA sense strand
ggaccaggaacaccagguu

SEQ ID NO: 663817 - RNA, 19 nt, Homo sapiens
  misc_RNA (1)...(19): siRNA sense strand
gagaaagggcuuggaugga

SEQ ID NO: 663818 - RNA, 19 nt, Homo sapiens
  misc_RNA (1)...(19): siRNA sense strand
ggguuucccuggguuaaug

SEQ ID NO: 663819 - RNA, 19 nt, Homo sapiens
  misc_RNA (1)...(19): siRNA sense strand
gagguaagccaggcaagga

SEQ ID NO: 663820 - RNA, 19 nt, Homo sapiens
  misc_RNA (1)...(19): siRNA sense strand
ccagggaugccagguuuaa

SEQ ID NO: 663821 - RNA, 19 nt, Homo sapiens
  misc_RNA (1)...(19): siRNA sense strand
aggugaagauggagugauu

SEQ ID NO: 663822 - RNA, 19 nt, Homo sapiens
  misc_RNA (1)...(19): siRNA sense strand
ggacugccaggcuaucuag

SEQ ID NO: 663823 - RNA, 19 nt, Homo sapiens
  misc_RNA (1)...(19): siRNA sense strand
auaaguggauugccaggau

SEQ ID NO: 663824 - RNA, 19 nt, Homo sapiens
  misc_RNA (1)...(19): siRNA sense strand
ggaccaauggguauaagag

SEQ ID NO: 663825 - RNA, 19 nt, Homo sapiens
  misc_RNA (1)...(19): siRNA sense strand
ggaauuccaggucaucaag

SEQ ID NO: 663826 - RNA, 19 nt, Homo sapiens
  misc_RNA (1)...(19): siRNA sense strand
gaccaggaacaccagguuu

SEQ ID NO: 663827 - RNA, 19 nt, Homo sapiens
  misc_RNA (1)...(19): siRNA sense strand
ggaaaacccggaaaagaug

SEQ ID NO: 663828 - RNA, 19 nt, Homo sapiens
  misc_RNA (1)...(19): siRNA sense strand
gaccaaggacgugauggaa

SEQ ID NO: 663829 - RNA, 19 nt, Homo sapiens
  misc_RNA (1)...(19): siRNA sense strand
cuccaggucuuccaggauu

SEQ ID NO: 663830 - RNA, 19 nt, Homo sapiens
  misc_RNA (1)...(19): siRNA sense strand
cgggugauaugggaaagaa

SEQ ID NO: 663831 - RNA, 19 nt, Homo sapiens
  misc_RNA (1)...(19): siRNA sense strand
ggagaagauauagaacuug

SEQ ID NO: 663832 - RNA, 19 nt, Homo sapiens
  misc_RNA (1)...(19): siRNA sense strand
ggagagcucaguguuucaa

SEQ ID NO: 663833 - RNA, 19 nt, Homo sapiens
  misc_RNA (1)...(19): siRNA sense strand
uggcccaccuggacauuug

SEQ ID NO: 663834 - RNA, 19 nt, Homo sapiens
  misc_RNA (1)...(19): siRNA sense strand
caacaaagguucuaaagga

SEQ ID NO: 663835 - RNA, 19 nt, Homo sapiens
  misc_RNA (1)...(19): siRNA sense strand
gagaagauauagaacuuga

SEQ ID NO: 663836 - RNA, 19 nt, Homo sapiens
  misc_RNA (1)...(19): siRNA sense strand
caacaaggcagaagaggua

SEQ ID NO: 663837 - RNA, 19 nt, Homo sapiens
  misc_RNA (1)...(19): siRNA sense strand
agagauaucccacguaaua

SEQ ID NO: 663838 - RNA, 19 nt, Homo sapiens
  misc_RNA (1)...(19): siRNA sense strand
ccaaggacuuccaggcuua

SEQ ID NO: 663839 - RNA, 19 nt, Homo sapiens
  misc_RNA (1)...(19): siRNA sense strand
ccaaggacgugauggaauu

SEQ ID NO: 663840 - RNA, 19 nt, Homo sapiens
  misc_RNA (1)...(19): siRNA sense strand
gcagcuggcuugaaaggaa

SEQ ID NO: 663841 - RNA, 19 nt, Homo sapiens
  misc_RNA (1)...(19): siRNA sense strand
ucagagauaucccacguaa

SEQ ID NO: 663842 - RNA, 19 nt, Homo sapiens
  misc_RNA (1)...(19): siRNA sense strand
uauaagaggugaccaagga

SEQ ID NO: 663843 - RNA, 19 nt, Homo sapiens
  misc_RNA (1)...(19): siRNA sense strand
caaagaggauauccaggaa

SEQ ID NO: 663844 - RNA, 19 nt, Homo sapiens
  misc_RNA (1)...(19): siRNA sense strand
gaacaaggagauaaaggaa

SEQ ID NO: 663845 - RNA, 19 nt, Homo sapiens
  misc_RNA (1)...(19): siRNA sense strand
gaagauauagaacuugaug

SEQ ID NO: 663846 - RNA, 19 nt, Homo sapiens
  misc_RNA (1)...(19): siRNA sense strand
ccaccaggcucaagaggaa

SEQ ID NO: 663847 - RNA, 19 nt, Homo sapiens
  misc_RNA (1)...(19): siRNA sense strand
gaaagagugauaggacaua

SEQ ID NO: 663848 - RNA, 19 nt, Homo sapiens
  misc_RNA (1)...(19): siRNA sense strand
gaaagggcuuggauggaau

SEQ ID NO: 663849 - RNA, 19 nt, Homo sapiens
  misc_RNA (1)...(19): siRNA sense strand
agaaagggcuuggauggaa

SEQ ID NO: 663850 - RNA, 19 nt, Homo sapiens
  misc_RNA (1)...(19): siRNA sense strand
gaccaggccucccagguau

SEQ ID NO: 663851 - RNA, 19 nt, Homo sapiens
  misc_RNA (1)...(19): siRNA sense strand
guaaagggccagagaggaa

SEQ ID NO: 663852 - RNA, 19 nt, Homo sapiens
  misc_RNA (1)...(19): siRNA sense strand
cagcaaggguugugucugu

SEQ ID NO: 663853 - RNA, 19 nt, Homo sapiens
  misc_RNA (1)...(19): siRNA sense strand
acaaggagauaaaggaaau

SEQ ID NO: 663854 - RNA, 19 nt, Homo sapiens
  misc_RNA (1)...(19): siRNA sense strand
ggaacaaggagauaaagga

SEQ ID NO: 663855 - RNA, 19 nt, Homo sapiens
  misc_RNA (1)...(19): siRNA sense strand
ggaccaccaggaacaguua

SEQ ID NO: 663856 - RNA, 19 nt, Homo sapiens
  misc_RNA (1)...(19): siRNA sense strand
gaaagccuauuccaucaac

SEQ ID NO: 663857 - RNA, 19 nt, Homo sapiens
  misc_RNA (1)...(19): siRNA sense strand
caagggagaaccagcagua

SEQ ID NO: 663858 - RNA, 19 nt, Homo sapiens
  misc_RNA (1)...(19): siRNA sense strand
gagccuggguuaccuggaa

SEQ ID NO: 663859 - RNA, 19 nt, Homo sapiens
  misc_RNA (1)...(19): siRNA sense strand
auacaggucuuccaggauu

SEQ ID NO: 663860 - RNA, 19 nt, Homo sapiens
  misc_RNA (1)...(19): siRNA sense strand
ccacaggcauagaaggauu

SEQ ID NO: 663861 - RNA, 19 nt, Homo sapiens
  misc_RNA (1)...(19): siRNA sense strand
guacacagugcccuuauau

SEQ ID NO: 663862 - RNA, 19 nt, Homo sapiens
  misc_RNA (1)...(19): siRNA sense strand
ggaaaugaagggcuugaug

SEQ ID NO: 663863 - RNA, 19 nt, Homo sapiens
  misc_RNA (1)...(19): siRNA sense strand
ucaaaggauucgcaggaaa

SEQ ID NO: 663864 - RNA, 19 nt, Homo sapiens
  misc_RNA (1)...(19): siRNA sense strand
aaagggugcuccugcuaaa

SEQ ID NO: 663865 - RNA, 19 nt, Homo sapiens
  misc_RNA (1)...(19): siRNA sense strand
gaacccuggugcucaagga

SEQ ID NO: 663866 - RNA, 19 nt, Homo sapiens
  misc_RNA (1)...(19): siRNA sense strand
aggcuuaaauggauugaaa

SEQ ID NO: 663867 - RNA, 19 nt, Homo sapiens
  misc_RNA (1)...(19): siRNA sense strand
ggacuuccaggcuuaaaug

SEQ ID NO: 663868 - RNA, 19 nt, Homo sapiens
  misc_RNA (1)...(19): siRNA sense strand
uaacagaacggaccucaag

SEQ ID NO: 663869 - RNA, 19 nt, Homo sapiens
  misc_RNA (1)...(19): siRNA sense strand
ccuauuccaucaacuguga

SEQ ID NO: 663870 - RNA, 19 nt, Homo sapiens
  misc_RNA (1)...(19): siRNA sense strand
gggauuuccuggagccauu

SEQ ID NO: 663871 - RNA, 19 nt, Homo sapiens
  misc_RNA (1)...(19): siRNA sense strand
aaagggagacccaggaauu

SEQ ID NO: 663872 - RNA, 19 nt, Homo sapiens
  misc_RNA (1)...(19): siRNA sense strand
gcaaggguugugucuguaa

SEQ ID NO: 663873 - RNA, 19 nt, Homo sapiens
  misc_RNA (1)...(19): siRNA sense strand
uaucuagggucuccaggaa

SEQ ID NO: 663874 - RNA, 19 nt, Homo sapiens
  misc_RNA (1)...(19): siRNA sense strand
cauuggcccuccaggauuu

SEQ ID NO: 663875 - RNA, 19 nt, Homo sapiens
  misc_RNA (1)...(19): siRNA sense strand
ggaaagaaaggagaaaugg

SEQ ID NO: 663876 - RNA, 19 nt, Homo sapiens
  misc_RNA (1)...(19): siRNA sense strand
aaagagugauaggacauaa

SEQ ID NO: 663877 - RNA, 19 nt, Homo sapiens
  misc_RNA (1)...(19): siRNA sense strand
uccagggagucauguaaua

SEQ ID NO: 663878 - RNA, 19 nt, Homo sapiens
  misc_RNA (1)...(19): siRNA sense strand
ggucugcccggugcaauua

SEQ ID NO: 663879 - RNA, 19 nt, Homo sapiens
  misc_RNA (1)...(19): siRNA sense strand
caaggguugugucuguaaa

SEQ ID NO: 663880 - RNA, 19 nt, Homo sapiens
  misc_RNA (1)...(19): siRNA sense strand
ucacuggguuguccuggaa

SEQ ID NO: 663881 - RNA, 19 nt, Homo sapiens
  misc_RNA (1)...(19): siRNA sense strand
agaaucauauggaucugaa

SEQ ID NO: 663882 - RNA, 19 nt, Homo sapiens
  misc_RNA (1)...(19): siRNA sense strand
ggaaagccagguccucaug

SEQ ID NO: 663883 - RNA, 19 nt, Homo sapiens
  misc_RNA (1)...(19): siRNA sense strand
aggcgcagcuggcuugaaa

SEQ ID NO: 663884 - RNA, 19 nt, Homo sapiens
  misc_RNA (1)...(19): siRNA sense strand
aagaggauauccaggaaau

SEQ ID NO: 663885 - RNA, 19 nt, Homo sapiens
  misc_RNA (1)...(19): siRNA sense strand
caaaggauucgcaggaaau

SEQ ID NO: 663886 - RNA, 19 nt, Homo sapiens
  misc_RNA (1)...(19): siRNA sense strand
aaccaggucucaaaggauu

SEQ ID NO: 663887 - RNA, 19 nt, Homo sapiens
  misc_RNA (1)...(19): siRNA sense strand
uuacggacuugucggugua

SEQ ID NO: 663888 - RNA, 19 nt, Homo sapiens
  misc_RNA (1)...(19): siRNA sense strand
ggagacccuggcacacuua

SEQ ID NO: 663889 - RNA, 19 nt, Homo sapiens
  misc_RNA (1)...(19): siRNA sense strand
uaaguggauugccaggauu

SEQ ID NO: 663890 - RNA, 19 nt, Homo sapiens
  misc_RNA (1)...(19): siRNA sense strand
agaaccaggucucaaagga

SEQ ID NO: 663891 - RNA, 19 nt, Homo sapiens
  misc_RNA (1)...(19): siRNA sense strand
ugauugggaugaugggauu

SEQ ID NO: 663892 - RNA, 19 nt, Homo sapiens
  misc_RNA (1)...(19): siRNA sense strand
gggugaagauggcauuaag

SEQ ID NO: 663893 - RNA, 19 nt, Homo sapiens
  misc_RNA (1)...(19): siRNA sense strand
aggagaagauauagaacuu

SEQ ID NO: 663894 - RNA, 19 nt, Homo sapiens
  misc_RNA (1)...(19): siRNA sense strand
gggaaagaaaggagaaaug

SEQ ID NO: 663895 - RNA, 19 nt, Homo sapiens
  misc_RNA (1)...(19): siRNA sense strand
ccaggaacaguuauuguga

SEQ ID NO: 663896 - RNA, 19 nt, Homo sapiens
  misc_RNA (1)...(19): siRNA sense strand
gggcaugccagguucuaaa

SEQ ID NO: 663897 - RNA, 19 nt, Homo sapiens
  misc_RNA (1)...(19): siRNA sense strand
ggaccuccaggaccaauug

SEQ ID NO: 663898 - RNA, 19 nt, Homo sapiens
  misc_RNA (1)...(19): siRNA sense strand
uguacacagugcccuuaua

SEQ ID NO: 663899 - RNA, 19 nt, Homo sapiens
  misc_RNA (1)...(19): siRNA sense strand
gaaccaggucucaaaggau

SEQ ID NO: 663900 - RNA, 19 nt, Homo sapiens
  misc_RNA (1)...(19): siRNA sense strand
gaccaagguuuuccaggua

SEQ ID NO: 663901 - RNA, 19 nt, Homo sapiens
  misc_RNA (1)...(19): siRNA sense strand
uggccaggcuugaaaggaa

SEQ ID NO: 663902 - RNA, 19 nt, Homo sapiens
  misc_RNA (1)...(19): siRNA sense strand
gcagggacccaagggcuuu

SEQ ID NO: 663903 - RNA, 19 nt, Homo sapiens
  misc_RNA (1)...(19): siRNA sense strand
caugccagguucuaaagga

SEQ ID NO: 663904 - RNA, 19 nt, Homo sapiens
  misc_RNA (1)...(19): siRNA sense strand
ccuggcacacuuaagauua

SEQ ID NO: 663905 - RNA, 19 nt, Homo sapiens
  misc_RNA (1)...(19): siRNA sense strand
agagccagguuauucagaa

SEQ ID NO: 663906 - RNA, 19 nt, Homo sapiens
  misc_RNA (1)...(19): siRNA sense strand
gauaagggagagccagguu

SEQ ID NO: 663907 - RNA, 19 nt, Homo sapiens
  misc_RNA (1)...(19): siRNA sense strand
ggaccuagaggaccuaagg

SEQ ID NO: 663908 - RNA, 19 nt, Homo sapiens
  misc_RNA (1)...(19): siRNA sense strand
gcaacaaagguucuaaagg

SEQ ID NO: 663909 - RNA, 19 nt, Homo sapiens
  misc_RNA (1)...(19): siRNA sense strand
gacccuggcacacuuaaga

SEQ ID NO: 663910 - RNA, 19 nt, Homo sapiens
  misc_RNA (1)...(19): siRNA sense strand
uaagggagagccagguuau

SEQ ID NO: 663911 - RNA, 19 nt, Homo sapiens
  misc_RNA (1)...(19): siRNA sense strand
caagggcuuuccaggacuu

SEQ ID NO: 663912 - RNA, 19 nt, Homo sapiens
  misc_RNA (1)...(19): siRNA sense strand
ccaggaaucccaggaguug

SEQ ID NO: 663913 - RNA, 19 nt, Homo sapiens
  misc_RNA (1)...(19): siRNA sense strand
gggugcugcugguuugaaa

SEQ ID NO: 663914 - RNA, 19 nt, Homo sapiens
  misc_RNA (1)...(19): siRNA sense strand
uggaaguccuggaucauca

SEQ ID NO: 663915 - RNA, 19 nt, Homo sapiens
  misc_RNA (1)...(19): siRNA sense strand
ccaacagaauauuaugaca

SEQ ID NO: 663916 - RNA, 19 nt, Homo sapiens
  misc_RNA (1)...(19): siRNA sense strand
gacauuggcccuccaggau

SEQ ID NO: 663917 - RNA, 19 nt, Homo sapiens
  misc_RNA (1)...(19): siRNA sense strand
agaccaggccucccaggua

SEQ ID NO: 663918 - RNA, 19 nt, Homo sapiens
  misc_RNA (1)...(19): siRNA sense strand
ggaccaggaacaccagguu

SEQ ID NO: 663919 - RNA, 19 nt, Homo sapiens
  misc_RNA (1)...(19): siRNA sense strand
gagaaagggcuuggaugga

SEQ ID NO: 663920 - RNA, 19 nt, Homo sapiens
  misc_RNA (1)...(19): siRNA sense strand
ggguuucccuggguuaaug

SEQ ID NO: 663921 - RNA, 19 nt, Homo sapiens
  misc_RNA (1)...(19): siRNA sense strand
gagguaagccaggcaagga

SEQ ID NO: 663922 - RNA, 19 nt, Homo sapiens
  misc_RNA (1)...(19): siRNA sense strand
ccagggaugccagguuuaa

SEQ ID NO: 663923 - RNA, 19 nt, Homo sapiens
  misc_RNA (1)...(19): siRNA sense strand
aggugaagauggagugauu

SEQ ID NO: 663924 - RNA, 19 nt, Homo sapiens
  misc_RNA (1)...(19): siRNA sense strand
ggacugccaggcuaucuag

SEQ ID NO: 663925 - RNA, 19 nt, Homo sapiens
  misc_RNA (1)...(19): siRNA sense strand
auaaguggauugccaggau

SEQ ID NO: 663926 - RNA, 19 nt, Homo sapiens
  misc_RNA (1)...(19): siRNA sense strand
ggaccaauggguauaagag

SEQ ID NO: 663927 - RNA, 19 nt, Homo sapiens
  misc_RNA (1)...(19): siRNA sense strand
ggaauuccaggucaucaag

SEQ ID NO: 663928 - RNA, 19 nt, Homo sapiens
  misc_RNA (1)...(19): siRNA sense strand
gaccaggaacaccagguuu

SEQ ID NO: 663929 - RNA, 19 nt, Homo sapiens
  misc_RNA (1)...(19): siRNA sense strand
ggagagcucaguguuucaa

SEQ ID NO: 663930 - RNA, 19 nt, Homo sapiens
  misc_RNA (1)...(19): siRNA sense strand
gaccaaggacgugauggaa

SEQ ID NO: 663931 - RNA, 19 nt, Homo sapiens
  misc_RNA (1)...(19): siRNA sense strand
ggagaagauauagaacuug

SEQ ID NO: 663932 - RNA, 19 nt, Homo sapiens
  misc_RNA (1)...(19): siRNA sense strand
cuccaggucuuccaggauu

SEQ ID NO: 663933 - RNA, 19 nt, Homo sapiens
  misc_RNA (1)...(19): siRNA sense strand
cgggugauaugggaaagaa

SEQ ID NO: 663934 - RNA, 19 nt, Homo sapiens
  misc_RNA (1)...(19): siRNA sense strand
caacaaagguucuaaagga

SEQ ID NO: 663935 - RNA, 19 nt, Homo sapiens
  misc_RNA (1)...(19): siRNA sense strand
gagaagauauagaacuuga

SEQ ID NO: 663936 - RNA, 19 nt, Homo sapiens
  misc_RNA (1)...(19): siRNA sense strand
caacaaggcagaagaggua

SEQ ID NO: 663937 - RNA, 19 nt, Homo sapiens
  misc_RNA (1)...(19): siRNA sense strand
agagauaucccacguaaua

SEQ ID NO: 663938 - RNA, 19 nt, Homo sapiens
  misc_RNA (1)...(19): siRNA sense strand
ccaaggacuuccaggcuua

SEQ ID NO: 663939 - RNA, 19 nt, Homo sapiens
  misc_RNA (1)...(19): siRNA sense strand
ccaaggacgugauggaauu

SEQ ID NO: 663940 - RNA, 19 nt, Homo sapiens
  misc_RNA (1)...(19): siRNA sense strand
gcagcuggcuugaaaggaa

SEQ ID NO: 663941 - RNA, 19 nt, Homo sapiens
  misc_RNA (1)...(19): siRNA sense strand
ucagagauaucccacguaa

SEQ ID NO: 663942 - RNA, 19 nt, Homo sapiens
  misc_RNA (1)...(19): siRNA sense strand
uauaagaggugaccaagga

SEQ ID NO: 663943 - RNA, 19 nt, Homo sapiens
  misc_RNA (1)...(19): siRNA sense strand
caaagaggauauccaggaa

SEQ ID NO: 663944 - RNA, 19 nt, Homo sapiens
  misc_RNA (1)...(19): siRNA sense strand
gaacaaggagauaaaggaa

SEQ ID NO: 663945 - RNA, 19 nt, Homo sapiens
  misc_RNA (1)...(19): siRNA sense strand
gaagauauagaacuugaug

SEQ ID NO: 663946 - RNA, 19 nt, Homo sapiens
  misc_RNA (1)...(19): siRNA sense strand
ccaccaggcucaagaggaa

SEQ ID NO: 663947 - RNA, 19 nt, Homo sapiens
  misc_RNA (1)...(19): siRNA sense strand
gaaagagugauaggacaua

SEQ ID NO: 663948 - RNA, 19 nt, Homo sapiens
  misc_RNA (1)...(19): siRNA sense strand
gaaagggcuuggauggaau

SEQ ID NO: 663949 - RNA, 19 nt, Homo sapiens
  misc_RNA (1)...(19): siRNA sense strand
agaaagggcuuggauggaa

SEQ ID NO: 663950 - RNA, 19 nt, Homo sapiens
  misc_RNA (1)...(19): siRNA sense strand
gaccaggccucccagguau

SEQ ID NO: 663951 - RNA, 19 nt, Homo sapiens
  misc_RNA (1)...(19): siRNA sense strand
guaaagggccagagaggaa

SEQ ID NO: 663952 - RNA, 19 nt, Homo sapiens
  misc_RNA (1)...(19): siRNA sense strand
cagcaaggguugugucugu

SEQ ID NO: 663953 - RNA, 19 nt, Homo sapiens
  misc_RNA (1)...(19): siRNA sense strand
acaaggagauaaaggaaau

SEQ ID NO: 663954 - RNA, 19 nt, Homo sapiens
  misc_RNA (1)...(19): siRNA sense strand
ggaacaaggagauaaagga

SEQ ID NO: 663955 - RNA, 19 nt, Homo sapiens
  misc_RNA (1)...(19): siRNA sense strand
ggaccaccaggaacaguua

SEQ ID NO: 663956 - RNA, 19 nt, Homo sapiens
  misc_RNA (1)...(19): siRNA sense strand
gaaagccuauuccaucaac

SEQ ID NO: 663957 - RNA, 19 nt, Homo sapiens
  misc_RNA (1)...(19): siRNA sense strand
caagggagaaccagcagua

SEQ ID NO: 663958 - RNA, 19 nt, Homo sapiens
  misc_RNA (1)...(19): siRNA sense strand
gagccuggguuaccuggaa

SEQ ID NO: 663959 - RNA, 19 nt, Homo sapiens
  misc_RNA (1)...(19): siRNA sense strand
auacaggucuuccaggauu

SEQ ID NO: 663960 - RNA, 19 nt, Homo sapiens
  misc_RNA (1)...(19): siRNA sense strand
ccacaggcauagaaggauu

SEQ ID NO: 663961 - RNA, 19 nt, Homo sapiens
  misc_RNA (1)...(19): siRNA sense strand
guacacagugcccuuauau

SEQ ID NO: 663962 - RNA, 19 nt, Homo sapiens
  misc_RNA (1)...(19): siRNA sense strand
ggaaaugaagggcuugaug

SEQ ID NO: 663963 - RNA, 19 nt, Homo sapiens
  misc_RNA (1)...(19): siRNA sense strand
ucaaaggauucgcaggaaa

SEQ ID NO: 663964 - RNA, 19 nt, Homo sapiens
  misc_RNA (1)...(19): siRNA sense strand
aaagggugcuccugcuaaa

SEQ ID NO: 663965 - RNA, 19 nt, Homo sapiens
  misc_RNA (1)...(19): siRNA sense strand
gaacccuggugcucaagga

SEQ ID NO: 663966 - RNA, 19 nt, Homo sapiens
  misc_RNA (1)...(19): siRNA sense strand
aggcuuaaauggauugaaa

SEQ ID NO: 663967 - RNA, 19 nt, Homo sapiens
  misc_RNA (1)...(19): siRNA sense strand
ggacuuccaggcuuaaaug

SEQ ID NO: 663968 - RNA, 19 nt, Homo sapiens
  misc_RNA (1)...(19): siRNA sense strand
uaacagaacggaccucaag

SEQ ID NO: 663969 - RNA, 19 nt, Homo sapiens
  misc_RNA (1)...(19): siRNA sense strand
ccuauuccaucaacuguga

SEQ ID NO: 663970 - RNA, 19 nt, Homo sapiens
  misc_RNA (1)...(19): siRNA sense strand
gggauuuccuggagccauu

SEQ ID NO: 663971 - RNA, 19 nt, Homo sapiens
  misc_RNA (1)...(19): siRNA sense strand
aaagggagacccaggaauu

SEQ ID NO: 663972 - RNA, 19 nt, Homo sapiens
  misc_RNA (1)...(19): siRNA sense strand
gcaaggguugugucuguaa

SEQ ID NO: 663973 - RNA, 19 nt, Homo sapiens
  misc_RNA (1)...(19): siRNA sense strand
uaucuagggucuccaggaa

SEQ ID NO: 663974 - RNA, 19 nt, Homo sapiens
  misc_RNA (1)...(19): siRNA sense strand
cauuggcccuccaggauuu

SEQ ID NO: 663975 - RNA, 19 nt, Homo sapiens
  misc_RNA (1)...(19): siRNA sense strand
ggaaagaaaggagaaaugg

SEQ ID NO: 663976 - RNA, 19 nt, Homo sapiens
  misc_RNA (1)...(19): siRNA sense strand
aaagagugauaggacauaa

SEQ ID NO: 663977 - RNA, 19 nt, Homo sapiens
  misc_RNA (1)...(19): siRNA sense strand
uccagggagucauguaaua

SEQ ID NO: 663978 - RNA, 19 nt, Homo sapiens
  misc_RNA (1)...(19): siRNA sense strand
ggucugcccggugcaauua

SEQ ID NO: 663979 - RNA, 19 nt, Homo sapiens
  misc_RNA (1)...(19): siRNA sense strand
caaggguugugucuguaaa

SEQ ID NO: 663980 - RNA, 19 nt, Homo sapiens
  misc_RNA (1)...(19): siRNA sense strand
ucacuggguuguccuggaa

SEQ ID NO: 663981 - RNA, 19 nt, Homo sapiens
  misc_RNA (1)...(19): siRNA sense strand
agaaucauauggaucugaa

SEQ ID NO: 663982 - RNA, 19 nt, Homo sapiens
  misc_RNA (1)...(19): siRNA sense strand
ggaaagccagguccucaug

SEQ ID NO: 663983 - RNA, 19 nt, Homo sapiens
  misc_RNA (1)...(19): siRNA sense strand
aggcgcagcuggcuugaaa

SEQ ID NO: 663984 - RNA, 19 nt, Homo sapiens
  misc_RNA (1)...(19): siRNA sense strand
aagaggauauccaggaaau

SEQ ID NO: 663985 - RNA, 19 nt, Homo sapiens
  misc_RNA (1)...(19): siRNA sense strand
caaaggauucgcaggaaau

SEQ ID NO: 663986 - RNA, 19 nt, Homo sapiens
  misc_RNA (1)...(19): siRNA sense strand
aaccaggucucaaaggauu

SEQ ID NO: 663987 - RNA, 19 nt, Homo sapiens
  misc_RNA (1)...(19): siRNA sense strand
uuacggacuugucggugua

SEQ ID NO: 663988 - RNA, 19 nt, Homo sapiens
  misc_RNA (1)...(19): siRNA sense strand
ggagacccuggcacacuua

SEQ ID NO: 663989 - RNA, 19 nt, Homo sapiens
  misc_RNA (1)...(19): siRNA sense strand
uaaguggauugccaggauu

SEQ ID NO: 663990 - RNA, 19 nt, Homo sapiens
  misc_RNA (1)...(19): siRNA sense strand
agaaccaggucucaaagga

SEQ ID NO: 663991 - RNA, 19 nt, Homo sapiens
  misc_RNA (1)...(19): siRNA sense strand
ugauugggaugaugggauu

SEQ ID NO: 663992 - RNA, 19 nt, Homo sapiens
  misc_RNA (1)...(19): siRNA sense strand
gggugaagauggcauuaag

SEQ ID NO: 663993 - RNA, 19 nt, Homo sapiens
  misc_RNA (1)...(19): siRNA sense strand
aggagaagauauagaacuu

SEQ ID NO: 663994 - RNA, 19 nt, Homo sapiens
  misc_RNA (1)...(19): siRNA sense strand
gggaaagaaaggagaaaug

SEQ ID NO: 663995 - RNA, 19 nt, Homo sapiens
  misc_RNA (1)...(19): siRNA sense strand
ccaggaacaguuauuguga

SEQ ID NO: 663996 - RNA, 19 nt, Homo sapiens
  misc_RNA (1)...(19): siRNA sense strand
gggcaugccagguucuaaa

SEQ ID NO: 663997 - RNA, 19 nt, Homo sapiens
  misc_RNA (1)...(19): siRNA sense strand
ggaccuccaggaccaauug

SEQ ID NO: 663998 - RNA, 19 nt, Homo sapiens
  misc_RNA (1)...(19): siRNA sense strand
uguacacagugcccuuaua

SEQ ID NO: 663999 - RNA, 19 nt, Homo sapiens
  misc_RNA (1)...(19): siRNA sense strand
gaaccaggucucaaaggau

SEQ ID NO: 664000 - RNA, 19 nt, Homo sapiens
  misc_RNA (1)...(19): siRNA sense strand
gaccaagguuuuccaggua

SEQ ID NO: 664001 - RNA, 19 nt, Homo sapiens
  misc_RNA (1)...(19): siRNA sense strand
uggccaggcuugaaaggaa

SEQ ID NO: 664002 - RNA, 19 nt, Homo sapiens
  misc_RNA (1)...(19): siRNA sense strand
gcagggacccaagggcuuu

SEQ ID NO: 664003 - RNA, 19 nt, Homo sapiens
  misc_RNA (1)...(19): siRNA sense strand
caugccagguucuaaagga

SEQ ID NO: 664004 - RNA, 19 nt, Homo sapiens
  misc_RNA (1)...(19): siRNA sense strand
ccuggcacacuuaagauua

SEQ ID NO: 664005 - RNA, 19 nt, Homo sapiens
  misc_RNA (1)...(19): siRNA sense strand
agagccagguuauucagaa

SEQ ID NO: 664006 - RNA, 19 nt, Homo sapiens
  misc_RNA (1)...(19): siRNA sense strand
gauaagggagagccagguu

SEQ ID NO: 664007 - RNA, 19 nt, Homo sapiens
  misc_RNA (1)...(19): siRNA sense strand
ggaccuagaggaccuaagg

SEQ ID NO: 664008 - RNA, 19 nt, Homo sapiens
  misc_RNA (1)...(19): siRNA sense strand
gcaacaaagguucuaaagg

SEQ ID NO: 664009 - RNA, 19 nt, Homo sapiens
  misc_RNA (1)...(19): siRNA sense strand
gacccuggcacacuuaaga

SEQ ID NO: 664010 - RNA, 19 nt, Homo sapiens
  misc_RNA (1)...(19): siRNA sense strand
uaagggagagccagguuau

SEQ ID NO: 664011 - RNA, 19 nt, Homo sapiens
  misc_RNA (1)...(19): siRNA sense strand
caagggcuuuccaggacuu

SEQ ID NO: 664012 - RNA, 19 nt, Homo sapiens
  misc_RNA (1)...(19): siRNA sense strand
ccaggaaucccaggaguug

SEQ ID NO: 664013 - RNA, 19 nt, Homo sapiens
  misc_RNA (1)...(19): siRNA sense strand
gggugcugcugguuugaaa

SEQ ID NO: 664014 - RNA, 19 nt, Homo sapiens
  misc_RNA (1)...(19): siRNA sense strand
uggaaguccuggaucauca

SEQ ID NO: 664015 - RNA, 19 nt, Homo sapiens
  misc_RNA (1)...(19): siRNA sense strand
ccaacagaauauuaugaca

SEQ ID NO: 664016 - RNA, 19 nt, Homo sapiens
  misc_RNA (1)...(19): siRNA sense strand
gacauuggcccuccaggau

SEQ ID NO: 664017 - RNA, 19 nt, Homo sapiens
  misc_RNA (1)...(19): siRNA sense strand
agaccaggccucccaggua

SEQ ID NO: 664018 - RNA, 19 nt, Homo sapiens
  misc_RNA (1)...(19): siRNA sense strand
ggaccaggaacaccagguu

SEQ ID NO: 664019 - RNA, 19 nt, Homo sapiens
  misc_RNA (1)...(19): siRNA sense strand
gagaaagggcuuggaugga

SEQ ID NO: 664020 - RNA, 19 nt, Homo sapiens
  misc_RNA (1)...(19): siRNA sense strand
ggguuucccuggguuaaug

SEQ ID NO: 664021 - RNA, 19 nt, Homo sapiens
  misc_RNA (1)...(19): siRNA sense strand
gagguaagccaggcaagga

SEQ ID NO: 664022 - RNA, 19 nt, Homo sapiens
  misc_RNA (1)...(19): siRNA sense strand
ccagggaugccagguuuaa

SEQ ID NO: 664023 - RNA, 19 nt, Homo sapiens
  misc_RNA (1)...(19): siRNA sense strand
aggugaagauggagugauu

SEQ ID NO: 664024 - RNA, 19 nt, Homo sapiens
  misc_RNA (1)...(19): siRNA sense strand
ggacugccaggcuaucuag

SEQ ID NO: 664025 - RNA, 19 nt, Homo sapiens
  misc_RNA (1)...(19): siRNA sense strand
auaaguggauugccaggau

SEQ ID NO: 664026 - RNA, 19 nt, Homo sapiens
  misc_RNA (1)...(19): siRNA sense strand
ggaccaauggguauaagag

SEQ ID NO: 664027 - RNA, 19 nt, Homo sapiens
  misc_RNA (1)...(19): siRNA sense strand
ggaauuccaggucaucaag

SEQ ID NO: 664028 - RNA, 19 nt, Homo sapiens
  misc_RNA (1)...(19): siRNA sense strand
gaccaggaacaccagguuu

SEQ ID NO: 664029 - RNA, 19 nt, Homo sapiens
  misc_RNA (1)...(19): siRNA sense strand
ggagagcucaguguuucaa

SEQ ID NO: 664030 - RNA, 19 nt, Homo sapiens
  misc_RNA (1)...(19): siRNA sense strand
gaccaaggacgugauggaa

SEQ ID NO: 664031 - RNA, 19 nt, Homo sapiens
  misc_RNA (1)...(19): siRNA sense strand
ggagaagauauagaacuug

SEQ ID NO: 664032 - RNA, 19 nt, Homo sapiens
  misc_RNA (1)...(19): siRNA sense strand
cuccaggucuuccaggauu

SEQ ID NO: 664033 - RNA, 19 nt, Homo sapiens
  misc_RNA (1)...(19): siRNA sense strand
cgggugauaugggaaagaa

SEQ ID NO: 664034 - RNA, 19 nt, Homo sapiens
  misc_RNA (1)...(19): siRNA sense strand
caacaaagguucuaaagga

SEQ ID NO: 664035 - RNA, 19 nt, Homo sapiens
  misc_RNA (1)...(19): siRNA sense strand
gagaagauauagaacuuga

SEQ ID NO: 664036 - RNA, 19 nt, Homo sapiens
  misc_RNA (1)...(19): siRNA sense strand
caacaaggcagaagaggua

SEQ ID NO: 664037 - RNA, 19 nt, Homo sapiens
  misc_RNA (1)...(19): siRNA sense strand
agagauaucccacguaaua

SEQ ID NO: 664038 - RNA, 19 nt, Homo sapiens
  misc_RNA (1)...(19): siRNA sense strand
ccaaggacuuccaggcuua

SEQ ID NO: 664039 - RNA, 19 nt, Homo sapiens
  misc_RNA (1)...(19): siRNA sense strand
ccaaggacgugauggaauu

SEQ ID NO: 664040 - RNA, 19 nt, Homo sapiens
  misc_RNA (1)...(19): siRNA sense strand
gcagcuggcuugaaaggaa

SEQ ID NO: 664041 - RNA, 19 nt, Homo sapiens
  misc_RNA (1)...(19): siRNA sense strand
ucagagauaucccacguaa

SEQ ID NO: 664042 - RNA, 19 nt, Homo sapiens
  misc_RNA (1)...(19): siRNA sense strand
uauaagaggugaccaagga

SEQ ID NO: 664043 - RNA, 19 nt, Homo sapiens
  misc_RNA (1)...(19): siRNA sense strand
caaagaggauauccaggaa

SEQ ID NO: 664044 - RNA, 19 nt, Homo sapiens
  misc_RNA (1)...(19): siRNA sense strand
gaacaaggagauaaaggaa

SEQ ID NO: 664045 - RNA, 19 nt, Homo sapiens
  misc_RNA (1)...(19): siRNA sense strand
gaagauauagaacuugaug

SEQ ID NO: 664046 - RNA, 19 nt, Homo sapiens
  misc_RNA (1)...(19): siRNA sense strand
ccaccaggcucaagaggaa

SEQ ID NO: 664047 - RNA, 19 nt, Homo sapiens
  misc_RNA (1)...(19): siRNA sense strand
gaaagagugauaggacaua

SEQ ID NO: 664048 - RNA, 19 nt, Homo sapiens
  misc_RNA (1)...(19): siRNA sense strand
gaaagggcuuggauggaau

SEQ ID NO: 664049 - RNA, 19 nt, Homo sapiens
  misc_RNA (1)...(19): siRNA sense strand
agaaagggcuuggauggaa

SEQ ID NO: 664050 - RNA, 19 nt, Homo sapiens
  misc_RNA (1)...(19): siRNA sense strand
gaccaggccucccagguau

SEQ ID NO: 664051 - RNA, 19 nt, Homo sapiens
  misc_RNA (1)...(19): siRNA sense strand
guaaagggccagagaggaa

SEQ ID NO: 664052 - RNA, 19 nt, Homo sapiens
  misc_RNA (1)...(19): siRNA sense strand
cagcaaggguugugucugu

SEQ ID NO: 664053 - RNA, 19 nt, Homo sapiens
  misc_RNA (1)...(19): siRNA sense strand
acaaggagauaaaggaaau

SEQ ID NO: 664054 - RNA, 19 nt, Homo sapiens
  misc_RNA (1)...(19): siRNA sense strand
ggaacaaggagauaaagga

SEQ ID NO: 664055 - RNA, 19 nt, Homo sapiens
  misc_RNA (1)...(19): siRNA sense strand
ggaccaccaggaacaguua

SEQ ID NO: 664056 - RNA, 19 nt, Homo sapiens
  misc_RNA (1)...(19): siRNA sense strand
gaaagccuauuccaucaac

SEQ ID NO: 664057 - RNA, 19 nt, Homo sapiens
  misc_RNA (1)...(19): siRNA sense strand
caagggagaaccagcagua

SEQ ID NO: 664058 - RNA, 19 nt, Homo sapiens
  misc_RNA (1)...(19): siRNA sense strand
gagccuggguuaccuggaa

SEQ ID NO: 664059 - RNA, 19 nt, Homo sapiens
  misc_RNA (1)...(19): siRNA sense strand
auacaggucuuccaggauu

SEQ ID NO: 664060 - RNA, 19 nt, Homo sapiens
  misc_RNA (1)...(19): siRNA sense strand
ccacaggcauagaaggauu

SEQ ID NO: 664061 - RNA, 19 nt, Homo sapiens
  misc_RNA (1)...(19): siRNA sense strand
guacacagugcccuuauau

SEQ ID NO: 664062 - RNA, 19 nt, Homo sapiens
  misc_RNA (1)...(19): siRNA sense strand
ggaaaugaagggcuugaug

SEQ ID NO: 664063 - RNA, 19 nt, Homo sapiens
  misc_RNA (1)...(19): siRNA sense strand
ucaaaggauucgcaggaaa

SEQ ID NO: 664064 - RNA, 19 nt, Homo sapiens
  misc_RNA (1)...(19): siRNA sense strand
aaagggugcuccugcuaaa

SEQ ID NO: 664065 - RNA, 19 nt, Homo sapiens
  misc_RNA (1)...(19): siRNA sense strand
gaacccuggugcucaagga

SEQ ID NO: 664066 - RNA, 19 nt, Homo sapiens
  misc_RNA (1)...(19): siRNA sense strand
aggcuuaaauggauugaaa

SEQ ID NO: 664067 - RNA, 19 nt, Homo sapiens
  misc_RNA (1)...(19): siRNA sense strand
ggacuuccaggcuuaaaug

SEQ ID NO: 664068 - RNA, 19 nt, Homo sapiens
  misc_RNA (1)...(19): siRNA sense strand
ugugaaagcuggggaauua

SEQ ID NO: 664069 - RNA, 19 nt, Homo sapiens
  misc_RNA (1)...(19): siRNA sense strand
uaacagaacggaccucaag

SEQ ID NO: 664070 - RNA, 19 nt, Homo sapiens
  misc_RNA (1)...(19): siRNA sense strand
ccuauuccaucaacuguga

SEQ ID NO: 664071 - RNA, 19 nt, Homo sapiens
  misc_RNA (1)...(19): siRNA sense strand
gggauuuccuggagccauu

SEQ ID NO: 664072 - RNA, 19 nt, Homo sapiens
  misc_RNA (1)...(19): siRNA sense strand
aaagggagacccaggaauu

SEQ ID NO: 664073 - RNA, 19 nt, Homo sapiens
  misc_RNA (1)...(19): siRNA sense strand
gcaaggguugugucuguaa

SEQ ID NO: 664074 - RNA, 19 nt, Homo sapiens
  misc_RNA (1)...(19): siRNA sense strand
uaucuagggucuccaggaa

SEQ ID NO: 664075 - RNA, 19 nt, Homo sapiens
  misc_RNA (1)...(19): siRNA sense strand
cauuggcccuccaggauuu

SEQ ID NO: 664076 - RNA, 19 nt, Homo sapiens
  misc_RNA (1)...(19): siRNA sense strand
ggaaagaaaggagaaaugg

SEQ ID NO: 664077 - RNA, 19 nt, Homo sapiens
  misc_RNA (1)...(19): siRNA sense strand
aaagagugauaggacauaa

SEQ ID NO: 664078 - RNA, 19 nt, Homo sapiens
  misc_RNA (1)...(19): siRNA sense strand
uccagggagucauguaaua

SEQ ID NO: 664079 - RNA, 19 nt, Homo sapiens
  misc_RNA (1)...(19): siRNA sense strand
ggucugcccggugcaauua

SEQ ID NO: 664080 - RNA, 19 nt, Homo sapiens
  misc_RNA (1)...(19): siRNA sense strand
caaggguugugucuguaaa

SEQ ID NO: 664081 - RNA, 19 nt, Homo sapiens
  misc_RNA (1)...(19): siRNA sense strand
ucacuggguuguccuggaa

SEQ ID NO: 664082 - RNA, 19 nt, Homo sapiens
  misc_RNA (1)...(19): siRNA sense strand
agaaucauauggaucugaa

SEQ ID NO: 664083 - RNA, 19 nt, Homo sapiens
  misc_RNA (1)...(19): siRNA sense strand
ggaaagccagguccucaug

SEQ ID NO: 664084 - RNA, 19 nt, Homo sapiens
  misc_RNA (1)...(19): siRNA sense strand
aggcgcagcuggcuugaaa

SEQ ID NO: 664085 - RNA, 19 nt, Homo sapiens
  misc_RNA (1)...(19): siRNA sense strand
aagaggauauccaggaaau

SEQ ID NO: 664086 - RNA, 19 nt, Homo sapiens
  misc_RNA (1)...(19): siRNA sense strand
caaaggauucgcaggaaau

SEQ ID NO: 664087 - RNA, 19 nt, Homo sapiens
  misc_RNA (1)...(19): siRNA sense strand
aaccaggucucaaaggauu

SEQ ID NO: 664088 - RNA, 19 nt, Homo sapiens
  misc_RNA (1)...(19): siRNA sense strand
uuacggacuugucggugua

SEQ ID NO: 664089 - RNA, 19 nt, Homo sapiens
  misc_RNA (1)...(19): siRNA sense strand
ggagacccuggcacacuua

SEQ ID NO: 664090 - RNA, 19 nt, Homo sapiens
  misc_RNA (1)...(19): siRNA sense strand
agaaccaggucucaaagga

SEQ ID NO: 664091 - RNA, 19 nt, Homo sapiens
  misc_RNA (1)...(19): siRNA sense strand
ugauugggaugaugggauu

SEQ ID NO: 664092 - RNA, 19 nt, Homo sapiens
  misc_RNA (1)...(19): siRNA sense strand
gggugaagauggcauuaag

SEQ ID NO: 664093 - RNA, 19 nt, Homo sapiens
  misc_RNA (1)...(19): siRNA sense strand
uaaguggauugccaggauu

SEQ ID NO: 664094 - RNA, 19 nt, Homo sapiens
  misc_RNA (1)...(19): siRNA sense strand
aggagaagauauagaacuu

SEQ ID NO: 664095 - RNA, 19 nt, Homo sapiens
  misc_RNA (1)...(19): siRNA sense strand
gggaaagaaaggagaaaug

SEQ ID NO: 664096 - RNA, 19 nt, Homo sapiens
  misc_RNA (1)...(19): siRNA sense strand
ccaggaacaguuauuguga

SEQ ID NO: 664097 - RNA, 19 nt, Homo sapiens
  misc_RNA (1)...(19): siRNA sense strand
gggcaugccagguucuaaa

SEQ ID NO: 664098 - RNA, 19 nt, Homo sapiens
  misc_RNA (1)...(19): siRNA sense strand
ggaccuccaggaccaauug

SEQ ID NO: 664099 - RNA, 19 nt, Homo sapiens
  misc_RNA (1)...(19): siRNA sense strand
uguacacagugcccuuaua

SEQ ID NO: 664100 - RNA, 19 nt, Homo sapiens
  misc_RNA (1)...(19): siRNA sense strand
ugucaggugugcaugaaga

SEQ ID NO: 664101 - RNA, 19 nt, Homo sapiens
  misc_RNA (1)...(19): siRNA sense strand
gaaccaggucucaaaggau

SEQ ID NO: 664102 - RNA, 19 nt, Homo sapiens
  misc_RNA (1)...(19): siRNA sense strand
gaccaagguuuuccaggua

SEQ ID NO: 664103 - RNA, 19 nt, Homo sapiens
  misc_RNA (1)...(19): siRNA sense strand
uggccaggcuugaaaggaa

SEQ ID NO: 664104 - RNA, 19 nt, Homo sapiens
  misc_RNA (1)...(19): siRNA sense strand
gcagggacccaagggcuuu

SEQ ID NO: 664105 - RNA, 19 nt, Homo sapiens
  misc_RNA (1)...(19): siRNA sense strand
caugccagguucuaaagga

SEQ ID NO: 664106 - RNA, 19 nt, Homo sapiens
  misc_RNA (1)...(19): siRNA sense strand
ccuggcacacuuaagauua

SEQ ID NO: 664107 - RNA, 19 nt, Homo sapiens
  misc_RNA (1)...(19): siRNA sense strand
agagccagguuauucagaa

SEQ ID NO: 664108 - RNA, 19 nt, Homo sapiens
  misc_RNA (1)...(19): siRNA sense strand
gauaagggagagccagguu

SEQ ID NO: 664109 - RNA, 19 nt, Homo sapiens
  misc_RNA (1)...(19): siRNA sense strand
ggaccuagaggaccuaagg

SEQ ID NO: 664110 - RNA, 19 nt, Homo sapiens
  misc_RNA (1)...(19): siRNA sense strand
gcugucaggugugcaugaa

SEQ ID NO: 664111 - RNA, 19 nt, Homo sapiens
  misc_RNA (1)...(19): siRNA sense strand
gcaacaaagguucuaaagg

SEQ ID NO: 664112 - RNA, 19 nt, Homo sapiens
  misc_RNA (1)...(19): siRNA sense strand
gacccuggcacacuuaaga

SEQ ID NO: 664113 - RNA, 19 nt, Homo sapiens
  misc_RNA (1)...(19): siRNA sense strand
gggugcugcugguuugaaa

SEQ ID NO: 664114 - RNA, 19 nt, Homo sapiens
  misc_RNA (1)...(19): siRNA sense strand
uaagggagagccagguuau

SEQ ID NO: 664115 - RNA, 19 nt, Homo sapiens
  misc_RNA (1)...(19): siRNA sense strand
caagggcuuuccaggacuu

SEQ ID NO: 664116 - RNA, 19 nt, Homo sapiens
  misc_RNA (1)...(19): siRNA sense strand
ccaggaaucccaggaguug

SEQ ID NO: 664117 - RNA, 19 nt, Homo sapiens
  misc_RNA (1)...(19): siRNA sense strand
uggaaguccuggaucauca

SEQ ID NO: 664118 - RNA, 19 nt, Homo sapiens
  misc_RNA (1)...(19): siRNA sense strand
ccaacagaauauuaugaca

SEQ ID NO: 664119 - RNA, 19 nt, Homo sapiens
  misc_RNA (1)...(19): siRNA sense strand
gacauuggcccuccaggau

SEQ ID NO: 664120 - RNA, 19 nt, Homo sapiens
  misc_RNA (1)...(19): siRNA sense strand
agaccaggccucccaggua

SEQ ID NO: 664121 - RNA, 19 nt, Homo sapiens
  misc_RNA (1)...(19): siRNA sense strand
ggaccaggaacaccagguu

SEQ ID NO: 664122 - RNA, 19 nt, Homo sapiens
  misc_RNA (1)...(19): siRNA sense strand
gagaaagggcuuggaugga

SEQ ID NO: 664123 - RNA, 19 nt, Homo sapiens
  misc_RNA (1)...(19): siRNA sense strand
ggguuucccuggguuaaug

SEQ ID NO: 664124 - RNA, 19 nt, Homo sapiens
  misc_RNA (1)...(19): siRNA sense strand
gagguaagccaggcaagga

SEQ ID NO: 664125 - RNA, 19 nt, Homo sapiens
  misc_RNA (1)...(19): siRNA sense strand
ccagggaugccagguuuaa

SEQ ID NO: 664126 - RNA, 19 nt, Homo sapiens
  misc_RNA (1)...(19): siRNA sense strand
aggugaagauggagugauu

SEQ ID NO: 664127 - RNA, 19 nt, Homo sapiens
  misc_RNA (1)...(19): siRNA sense strand
ggacugccaggcuaucuag

SEQ ID NO: 664128 - RNA, 19 nt, Homo sapiens
  misc_RNA (1)...(19): siRNA sense strand
auaaguggauugccaggau

SEQ ID NO: 664129 - RNA, 19 nt, Homo sapiens
  misc_RNA (1)...(19): siRNA sense strand
ggaccaauggguauaagag

SEQ ID NO: 664130 - RNA, 19 nt, Homo sapiens
  misc_RNA (1)...(19): siRNA sense strand
ggaauuccaggucaucaag

SEQ ID NO: 664131 - RNA, 19 nt, Homo sapiens
  misc_RNA (1)...(19): siRNA sense strand
gaccaggaacaccagguuu

SEQ ID NO: 664132 - RNA, 19 nt, Homo sapiens
  misc_RNA (1)...(19): siRNA sense strand
cuccaggucuuccaggauu

SEQ ID NO: 664133 - RNA, 19 nt, Homo sapiens
  misc_RNA (1)...(19): siRNA sense strand
gaccaaggacgugauggaa

SEQ ID NO: 664134 - RNA, 19 nt, Homo sapiens
  misc_RNA (1)...(19): siRNA sense strand
caacaaagguucuaaagga

SEQ ID NO: 664135 - RNA, 19 nt, Homo sapiens
  misc_RNA (1)...(19): siRNA sense strand
gagaagauauagaacuuga

SEQ ID NO: 664136 - RNA, 19 nt, Homo sapiens
  misc_RNA (1)...(19): siRNA sense strand
caacaaggcagaagaggua

SEQ ID NO: 664137 - RNA, 19 nt, Homo sapiens
  misc_RNA (1)...(19): siRNA sense strand
agagauaucccacguaaua

SEQ ID NO: 664138 - RNA, 19 nt, Homo sapiens
  misc_RNA (1)...(19): siRNA sense strand
ccaaggacuuccaggcuua

SEQ ID NO: 664139 - RNA, 19 nt, Homo sapiens
  misc_RNA (1)...(19): siRNA sense strand
ccaaggacgugauggaauu

SEQ ID NO: 664140 - RNA, 19 nt, Homo sapiens
  misc_RNA (1)...(19): siRNA sense strand
gcagcuggcuugaaaggaa

SEQ ID NO: 664141 - RNA, 19 nt, Homo sapiens
  misc_RNA (1)...(19): siRNA sense strand
ucagagauaucccacguaa

SEQ ID NO: 664142 - RNA, 19 nt, Homo sapiens
  misc_RNA (1)...(19): siRNA sense strand
uauaagaggugaccaagga

SEQ ID NO: 664143 - RNA, 19 nt, Homo sapiens
  misc_RNA (1)...(19): siRNA sense strand
caaagaggauauccaggaa

SEQ ID NO: 664144 - RNA, 19 nt, Homo sapiens
  misc_RNA (1)...(19): siRNA sense strand
gaacaaggagauaaaggaa

SEQ ID NO: 664145 - RNA, 19 nt, Homo sapiens
  misc_RNA (1)...(19): siRNA sense strand
gaaaagacacugaagcuaa

SEQ ID NO: 664146 - RNA, 19 nt, Homo sapiens
  misc_RNA (1)...(19): siRNA sense strand
gaagauauagaacuugaug

SEQ ID NO: 664147 - RNA, 19 nt, Homo sapiens
  misc_RNA (1)...(19): siRNA sense strand
ccaccaggcucaagaggaa

SEQ ID NO: 664148 - RNA, 19 nt, Homo sapiens
  misc_RNA (1)...(19): siRNA sense strand
gaaagagugauaggacaua

SEQ ID NO: 664149 - RNA, 19 nt, Homo sapiens
  misc_RNA (1)...(19): siRNA sense strand
gaaagggcuuggauggaau

SEQ ID NO: 664150 - RNA, 19 nt, Homo sapiens
  misc_RNA (1)...(19): siRNA sense strand
agaaagggcuuggauggaa

SEQ ID NO: 664151 - RNA, 19 nt, Homo sapiens
  misc_RNA (1)...(19): siRNA sense strand
gaccaggccucccagguau

SEQ ID NO: 664152 - RNA, 19 nt, Homo sapiens
  misc_RNA (1)...(19): siRNA sense strand
guaaagggccagagaggaa

SEQ ID NO: 664153 - RNA, 19 nt, Homo sapiens
  misc_RNA (1)...(19): siRNA sense strand
cagcaaggguugugucugu

SEQ ID NO: 664154 - RNA, 19 nt, Homo sapiens
  misc_RNA (1)...(19): siRNA sense strand
acaaggagauaaaggaaau

SEQ ID NO: 664155 - RNA, 19 nt, Homo sapiens
  misc_RNA (1)...(19): siRNA sense strand
ggaacaaggagauaaagga

SEQ ID NO: 664156 - RNA, 19 nt, Homo sapiens
  misc_RNA (1)...(19): siRNA sense strand
ggaccaccaggaacaguua

SEQ ID NO: 664157 - RNA, 19 nt, Homo sapiens
  misc_RNA (1)...(19): siRNA sense strand
gaacaaaguaaugacagaa

SEQ ID NO: 664158 - RNA, 19 nt, Homo sapiens
  misc_RNA (1)...(19): siRNA sense strand
gaaagccuauuccaucaac

SEQ ID NO: 664159 - RNA, 19 nt, Homo sapiens
  misc_RNA (1)...(19): siRNA sense strand
caagggagaaccagcagua

SEQ ID NO: 664160 - RNA, 19 nt, Homo sapiens
  misc_RNA (1)...(19): siRNA sense strand
gagccuggguuaccuggaa

SEQ ID NO: 664161 - RNA, 19 nt, Homo sapiens
  misc_RNA (1)...(19): siRNA sense strand
auacaggucuuccaggauu

SEQ ID NO: 664162 - RNA, 19 nt, Homo sapiens
  misc_RNA (1)...(19): siRNA sense strand
ccacaggcauagaaggauu

SEQ ID NO: 664163 - RNA, 19 nt, Homo sapiens
  misc_RNA (1)...(19): siRNA sense strand
guacacagugcccuuauau

SEQ ID NO: 664164 - RNA, 19 nt, Homo sapiens
  misc_RNA (1)...(19): siRNA sense strand
ggaaaugaagggcuugaug

SEQ ID NO: 664165 - RNA, 19 nt, Homo sapiens
  misc_RNA (1)...(19): siRNA sense strand
ucaaaggauucgcaggaaa

SEQ ID NO: 664166 - RNA, 19 nt, Homo sapiens
  misc_RNA (1)...(19): siRNA sense strand
aaagggugcuccugcuaaa

SEQ ID NO: 664167 - RNA, 19 nt, Homo sapiens
  misc_RNA (1)...(19): siRNA sense strand
gaacccuggugcucaagga

SEQ ID NO: 664168 - RNA, 19 nt, Homo sapiens
  misc_RNA (1)...(19): siRNA sense strand
aggcuuaaauggauugaaa

SEQ ID NO: 664169 - RNA, 19 nt, Homo sapiens
  misc_RNA (1)...(19): siRNA sense strand
ggacuuccaggcuuaaaug

SEQ ID NO: 664170 - RNA, 19 nt, Homo sapiens
  misc_RNA (1)...(19): siRNA sense strand
ugugaaagcuggggaauua

SEQ ID NO: 664171 - RNA, 19 nt, Homo sapiens
  misc_RNA (1)...(19): siRNA sense strand
uaacagaacggaccucaag

SEQ ID NO: 664172 - RNA, 19 nt, Homo sapiens
  misc_RNA (1)...(19): siRNA sense strand
ccuauuccaucaacuguga

SEQ ID NO: 664173 - RNA, 19 nt, Homo sapiens
  misc_RNA (1)...(19): siRNA sense strand
gggauuuccuggagccauu

SEQ ID NO: 664174 - RNA, 19 nt, Homo sapiens
  misc_RNA (1)...(19): siRNA sense strand
aaagggagacccaggaauu

SEQ ID NO: 664175 - RNA, 19 nt, Homo sapiens
  misc_RNA (1)...(19): siRNA sense strand
gcaaggguugugucuguaa

SEQ ID NO: 664176 - RNA, 19 nt, Homo sapiens
  misc_RNA (1)...(19): siRNA sense strand
uaucuagggucuccaggaa

SEQ ID NO: 664177 - RNA, 19 nt, Homo sapiens
  misc_RNA (1)...(19): siRNA sense strand
cauuggcccuccaggauuu

SEQ ID NO: 664178 - RNA, 19 nt, Homo sapiens
  misc_RNA (1)...(19): siRNA sense strand
ggaaagaaaggagaaaugg

SEQ ID NO: 664179 - RNA, 19 nt, Homo sapiens
  misc_RNA (1)...(19): siRNA sense strand
aaagagugauaggacauaa

SEQ ID NO: 664180 - RNA, 19 nt, Homo sapiens
  misc_RNA (1)...(19): siRNA sense strand
uccagggagucauguaaua

SEQ ID NO: 664181 - RNA, 19 nt, Homo sapiens
  misc_RNA (1)...(19): siRNA sense strand
ggucugcccggugcaauua

SEQ ID NO: 664182 - RNA, 19 nt, Homo sapiens
  misc_RNA (1)...(19): siRNA sense strand
caaggguugugucuguaaa

SEQ ID NO: 664183 - RNA, 19 nt, Homo sapiens
  misc_RNA (1)...(19): siRNA sense strand
ucacuggguuguccuggaa

SEQ ID NO: 664184 - RNA, 19 nt, Homo sapiens
  misc_RNA (1)...(19): siRNA sense strand
agaaucauauggaucugaa

SEQ ID NO: 664185 - RNA, 19 nt, Homo sapiens
  misc_RNA (1)...(19): siRNA sense strand
ggaaagccagguccucaug

SEQ ID NO: 664186 - RNA, 19 nt, Homo sapiens
  misc_RNA (1)...(19): siRNA sense strand
aggcgcagcuggcuugaaa

SEQ ID NO: 664187 - RNA, 19 nt, Homo sapiens
  misc_RNA (1)...(19): siRNA sense strand
aagaggauauccaggaaau

SEQ ID NO: 664188 - RNA, 19 nt, Homo sapiens
  misc_RNA (1)...(19): siRNA sense strand
caaaggauucgcaggaaau

SEQ ID NO: 664189 - RNA, 19 nt, Homo sapiens
  misc_RNA (1)...(19): siRNA sense strand
aaccaggucucaaaggauu

SEQ ID NO: 664190 - RNA, 19 nt, Homo sapiens
  misc_RNA (1)...(19): siRNA sense strand
gggugaagauggcauuaag

SEQ ID NO: 664191 - RNA, 19 nt, Homo sapiens
  misc_RNA (1)...(19): siRNA sense strand
agaacaaaguaaugacaga

SEQ ID NO: 664192 - RNA, 19 nt, Homo sapiens
  misc_RNA (1)...(19): siRNA sense strand
ggagacccuggcacacuua

SEQ ID NO: 664193 - RNA, 19 nt, Homo sapiens
  misc_RNA (1)...(19): siRNA sense strand
uaaguggauugccaggauu

SEQ ID NO: 664194 - RNA, 19 nt, Homo sapiens
  misc_RNA (1)...(19): siRNA sense strand
agaaccaggucucaaagga

SEQ ID NO: 664195 - RNA, 19 nt, Homo sapiens
  misc_RNA (1)...(19): siRNA sense strand
ugauugggaugaugggauu

SEQ ID NO: 664196 - RNA, 19 nt, Homo sapiens
  misc_RNA (1)...(19): siRNA sense strand
uuacggacuugucggugua

SEQ ID NO: 664197 - RNA, 19 nt, Homo sapiens
  misc_RNA (1)...(19): siRNA sense strand
aggagaagauauagaacuu

SEQ ID NO: 664198 - RNA, 19 nt, Homo sapiens
  misc_RNA (1)...(19): siRNA sense strand
gggaaagaaaggagaaaug

SEQ ID NO: 664199 - RNA, 19 nt, Homo sapiens
  misc_RNA (1)...(19): siRNA sense strand
ccaggaacaguuauuguga

SEQ ID NO: 664200 - RNA, 19 nt, Homo sapiens
  misc_RNA (1)...(19): siRNA sense strand
gggcaugccagguucuaaa

SEQ ID NO: 664201 - RNA, 19 nt, Homo sapiens
  misc_RNA (1)...(19): siRNA sense strand
aaaagacacugaagcuaaa

SEQ ID NO: 664202 - RNA, 19 nt, Homo sapiens
  misc_RNA (1)...(19): siRNA sense strand
ggaccuccaggaccaauug

SEQ ID NO: 664203 - RNA, 19 nt, Homo sapiens
  misc_RNA (1)...(19): siRNA sense strand
uguacacagugcccuuaua

SEQ ID NO: 664204 - RNA, 19 nt, Homo sapiens
  misc_RNA (1)...(19): siRNA sense strand
acaaaguaaugacagaaca

SEQ ID NO: 664205 - RNA, 19 nt, Homo sapiens
  misc_RNA (1)...(19): siRNA sense strand
ugucaggugugcaugaaga

SEQ ID NO: 664206 - RNA, 19 nt, Homo sapiens
  misc_RNA (1)...(19): siRNA sense strand
gaaccaggucucaaaggau

SEQ ID NO: 664207 - RNA, 19 nt, Homo sapiens
  misc_RNA (1)...(19): siRNA sense strand
gaccaagguuuuccaggua

SEQ ID NO: 664208 - RNA, 19 nt, Homo sapiens
  misc_RNA (1)...(19): siRNA sense strand
uggccaggcuugaaaggaa

SEQ ID NO: 664209 - RNA, 19 nt, Homo sapiens
  misc_RNA (1)...(19): siRNA sense strand
gcagggacccaagggcuuu

SEQ ID NO: 664210 - RNA, 19 nt, Homo sapiens
  misc_RNA (1)...(19): siRNA sense strand
caugccagguucuaaagga

SEQ ID NO: 664211 - RNA, 19 nt, Homo sapiens
  misc_RNA (1)...(19): siRNA sense strand
ccuggcacacuuaagauua

SEQ ID NO: 664212 - RNA, 19 nt, Homo sapiens
  misc_RNA (1)...(19): siRNA sense strand
agagccagguuauucagaa

SEQ ID NO: 664213 - RNA, 19 nt, Homo sapiens
  misc_RNA (1)...(19): siRNA sense strand
gauaagggagagccagguu

SEQ ID NO: 664214 - RNA, 19 nt, Homo sapiens
  misc_RNA (1)...(19): siRNA sense strand
ggaccuagaggaccuaagg

SEQ ID NO: 664215 - RNA, 19 nt, Homo sapiens
  misc_RNA (1)...(19): siRNA sense strand
caagggcuuuccaggacuu

SEQ ID NO: 664216 - RNA, 19 nt, Homo sapiens
  misc_RNA (1)...(19): siRNA sense strand
gcugucaggugugcaugaa

SEQ ID NO: 664217 - RNA, 19 nt, Homo sapiens
  misc_RNA (1)...(19): siRNA sense strand
gcaacaaagguucuaaagg

SEQ ID NO: 664218 - RNA, 19 nt, Homo sapiens
  misc_RNA (1)...(19): siRNA sense strand
gacccuggcacacuuaaga

SEQ ID NO: 664219 - RNA, 19 nt, Homo sapiens
  misc_RNA (1)...(19): siRNA sense strand
gggugcugcugguuugaaa

SEQ ID NO: 664220 - RNA, 19 nt, Homo sapiens
  misc_RNA (1)...(19): siRNA sense strand
uaagggagagccagguuau

SEQ ID NO: 664221 - RNA, 19 nt, Homo sapiens
  misc_RNA (1)...(19): siRNA sense strand
ccaggaaucccaggaguug

SEQ ID NO: 664222 - RNA, 19 nt, Homo sapiens
  misc_RNA (1)...(19): siRNA sense strand
uggaaguccuggaucauca

SEQ ID NO: 664223 - RNA, 19 nt, Homo sapiens
  misc_RNA (1)...(19): siRNA sense strand
ccaacagaauauuaugaca

SEQ ID NO: 664224 - RNA, 19 nt, Homo sapiens
  misc_RNA (1)...(19): siRNA sense strand
gacauuggcccuccaggau

SEQ ID NO: 664225 - RNA, 19 nt, Homo sapiens
  misc_RNA (1)...(19): siRNA sense strand
agaccaggccucccaggua

SEQ ID NO: 664226 - RNA, 19 nt, Homo sapiens
  misc_RNA (1)...(19): siRNA sense strand
ggaccaggaacaccagguu

SEQ ID NO: 664227 - RNA, 19 nt, Homo sapiens
  misc_RNA (1)...(19): siRNA sense strand
gagaaagggcuuggaugga

SEQ ID NO: 664228 - RNA, 19 nt, Homo sapiens
  misc_RNA (1)...(19): siRNA sense strand
ggguuucccuggguuaaug

SEQ ID NO: 664229 - RNA, 19 nt, Homo sapiens
  misc_RNA (1)...(19): siRNA sense strand
cauccuaaagaacaaagua

SEQ ID NO: 664230 - RNA, 19 nt, Homo sapiens
  misc_RNA (1)...(19): siRNA sense strand
gagguaagccaggcaagga

SEQ ID NO: 664231 - RNA, 19 nt, Homo sapiens
  misc_RNA (1)...(19): siRNA sense strand
ccagggaugccagguuuaa

SEQ ID NO: 664232 - RNA, 19 nt, Homo sapiens
  misc_RNA (1)...(19): siRNA sense strand
aggugaagauggagugauu

SEQ ID NO: 664233 - RNA, 19 nt, Homo sapiens
  misc_RNA (1)...(19): siRNA sense strand
ggacugccaggcuaucuag

SEQ ID NO: 664234 - RNA, 19 nt, Homo sapiens
  misc_RNA (1)...(19): siRNA sense strand
caacaaagguucuaaagga

SEQ ID NO: 664235 - RNA, 19 nt, Homo sapiens
  misc_RNA (1)...(19): siRNA sense strand
gagaagauauagaacuuga

SEQ ID NO: 664236 - RNA, 19 nt, Homo sapiens
  misc_RNA (1)...(19): siRNA sense strand
caacaaggcagaagaggua

SEQ ID NO: 664237 - RNA, 19 nt, Homo sapiens
  misc_RNA (1)...(19): siRNA sense strand
agagauaucccacguaaua

SEQ ID NO: 664238 - RNA, 19 nt, Homo sapiens
  misc_RNA (1)...(19): siRNA sense strand
ccaaggacuuccaggcuua

SEQ ID NO: 664239 - RNA, 19 nt, Homo sapiens
  misc_RNA (1)...(19): siRNA sense strand
ccaaggacgugauggaauu

SEQ ID NO: 664240 - RNA, 19 nt, Homo sapiens
  misc_RNA (1)...(19): siRNA sense strand
gcagcuggcuugaaaggaa

SEQ ID NO: 664241 - RNA, 19 nt, Homo sapiens
  misc_RNA (1)...(19): siRNA sense strand
ucagagauaucccacguaa

SEQ ID NO: 664242 - RNA, 19 nt, Homo sapiens
  misc_RNA (1)...(19): siRNA sense strand
uauaagaggugaccaagga

SEQ ID NO: 664243 - RNA, 19 nt, Homo sapiens
  misc_RNA (1)...(19): siRNA sense strand
caaagaggauauccaggaa

SEQ ID NO: 664244 - RNA, 19 nt, Homo sapiens
  misc_RNA (1)...(19): siRNA sense strand
gaacaaggagauaaaggaa

SEQ ID NO: 664245 - RNA, 19 nt, Homo sapiens
  misc_RNA (1)...(19): siRNA sense strand
gaagauauagaacuugaug

SEQ ID NO: 664246 - RNA, 19 nt, Homo sapiens
  misc_RNA (1)...(19): siRNA sense strand
ccaccaggcucaagaggaa

SEQ ID NO: 664247 - RNA, 19 nt, Homo sapiens
  misc_RNA (1)...(19): siRNA sense strand
gaaagagugauaggacaua

SEQ ID NO: 664248 - RNA, 19 nt, Homo sapiens
  misc_RNA (1)...(19): siRNA sense strand
gaaagggcuuggauggaau

SEQ ID NO: 664249 - RNA, 19 nt, Homo sapiens
  misc_RNA (1)...(19): siRNA sense strand
agaaagggcuuggauggaa

SEQ ID NO: 664250 - RNA, 19 nt, Homo sapiens
  misc_RNA (1)...(19): siRNA sense strand
gaccaggccucccagguau

SEQ ID NO: 664251 - RNA, 19 nt, Homo sapiens
  misc_RNA (1)...(19): siRNA sense strand
guaaagggccagagaggaa

SEQ ID NO: 664252 - RNA, 19 nt, Homo sapiens
  misc_RNA (1)...(19): siRNA sense strand
cagcaaggguugugucugu

SEQ ID NO: 664253 - RNA, 19 nt, Homo sapiens
  misc_RNA (1)...(19): siRNA sense strand
acaaggagauaaaggaaau

SEQ ID NO: 664254 - RNA, 19 nt, Homo sapiens
  misc_RNA (1)...(19): siRNA sense strand
ggaacaaggagauaaagga

SEQ ID NO: 664255 - RNA, 19 nt, Homo sapiens
  misc_RNA (1)...(19): siRNA sense strand
ggaccaccaggaacaguua

SEQ ID NO: 664256 - RNA, 19 nt, Homo sapiens
  misc_RNA (1)...(19): siRNA sense strand
caagggagaaccagcagua

SEQ ID NO: 664257 - RNA, 19 nt, Homo sapiens
  misc_RNA (1)...(19): siRNA sense strand
gagccuggguuaccuggaa

SEQ ID NO: 664258 - RNA, 19 nt, Homo sapiens
  misc_RNA (1)...(19): siRNA sense strand
auacaggucuuccaggauu

SEQ ID NO: 664259 - RNA, 19 nt, Homo sapiens
  misc_RNA (1)...(19): siRNA sense strand
ccacaggcauagaaggauu

SEQ ID NO: 664260 - RNA, 19 nt, Homo sapiens
  misc_RNA (1)...(19): siRNA sense strand
guacacagugcccuuauau

SEQ ID NO: 664261 - RNA, 19 nt, Homo sapiens
  misc_RNA (1)...(19): siRNA sense strand
ggaaaugaagggcuugaug

SEQ ID NO: 664262 - RNA, 19 nt, Homo sapiens
  misc_RNA (1)...(19): siRNA sense strand
ucaaaggauucgcaggaaa

SEQ ID NO: 664263 - RNA, 19 nt, Homo sapiens
  misc_RNA (1)...(19): siRNA sense strand
aaagggugcuccugcuaaa

SEQ ID NO: 664264 - RNA, 19 nt, Homo sapiens
  misc_RNA (1)...(19): siRNA sense strand
gaacccuggugcucaagga

SEQ ID NO: 664265 - RNA, 19 nt, Homo sapiens
  misc_RNA (1)...(19): siRNA sense strand
aggcuuaaauggauugaaa

SEQ ID NO: 664266 - RNA, 19 nt, Homo sapiens
  misc_RNA (1)...(19): siRNA sense strand
ggacuuccaggcuuaaaug

SEQ ID NO: 664267 - RNA, 19 nt, Homo sapiens
  misc_RNA (1)...(19): siRNA sense strand
uaacagaacggaccucaag

SEQ ID NO: 664268 - RNA, 19 nt, Homo sapiens
  misc_RNA (1)...(19): siRNA sense strand
gggauuuccuggagccauu

SEQ ID NO: 664269 - RNA, 19 nt, Homo sapiens
  misc_RNA (1)...(19): siRNA sense strand
aaagggagacccaggaauu

SEQ ID NO: 664270 - RNA, 19 nt, Homo sapiens
  misc_RNA (1)...(19): siRNA sense strand
gcaaggguugugucuguaa

SEQ ID NO: 664271 - RNA, 19 nt, Homo sapiens
  misc_RNA (1)...(19): siRNA sense strand
uaucuagggucuccaggaa

SEQ ID NO: 664272 - RNA, 19 nt, Homo sapiens
  misc_RNA (1)...(19): siRNA sense strand
cauuggcccuccaggauuu

SEQ ID NO: 664273 - RNA, 19 nt, Homo sapiens
  misc_RNA (1)...(19): siRNA sense strand
ggaaagaaaggagaaaugg

SEQ ID NO: 664274 - RNA, 19 nt, Homo sapiens
  misc_RNA (1)...(19): siRNA sense strand
aaagagugauaggacauaa

SEQ ID NO: 664275 - RNA, 19 nt, Homo sapiens
  misc_RNA (1)...(19): siRNA sense strand
uccagggagucauguaaua

SEQ ID NO: 664276 - RNA, 19 nt, Homo sapiens
  misc_RNA (1)...(19): siRNA sense strand
ggucugcccggugcaauua

SEQ ID NO: 664277 - RNA, 19 nt, Homo sapiens
  misc_RNA (1)...(19): siRNA sense strand
caaggguugugucuguaaa

SEQ ID NO: 664278 - RNA, 19 nt, Homo sapiens
  misc_RNA (1)...(19): siRNA sense strand
ucacuggguuguccuggaa

SEQ ID NO: 664279 - RNA, 19 nt, Homo sapiens
  misc_RNA (1)...(19): siRNA sense strand
agaaucauauggaucugaa

SEQ ID NO: 664280 - RNA, 19 nt, Homo sapiens
  misc_RNA (1)...(19): siRNA sense strand
ggaaagccagguccucaug

SEQ ID NO: 664281 - RNA, 19 nt, Homo sapiens
  misc_RNA (1)...(19): siRNA sense strand
aggcgcagcuggcuugaaa

SEQ ID NO: 664282 - RNA, 19 nt, Homo sapiens
  misc_RNA (1)...(19): siRNA sense strand
aagaggauauccaggaaau

SEQ ID NO: 664283 - RNA, 19 nt, Homo sapiens
  misc_RNA (1)...(19): siRNA sense strand
caaaggauucgcaggaaau

SEQ ID NO: 664284 - RNA, 19 nt, Homo sapiens
  misc_RNA (1)...(19): siRNA sense strand
aaccaggucucaaaggauu

SEQ ID NO: 664285 - RNA, 19 nt, Homo sapiens
  misc_RNA (1)...(19): siRNA sense strand
uuacggacuugucggugua

SEQ ID NO: 664286 - RNA, 19 nt, Homo sapiens
  misc_RNA (1)...(19): siRNA sense strand
ggagacccuggcacacuua

SEQ ID NO: 664287 - RNA, 19 nt, Homo sapiens
  misc_RNA (1)...(19): siRNA sense strand
agaaccaggucucaaagga

SEQ ID NO: 664288 - RNA, 19 nt, Homo sapiens
  misc_RNA (1)...(19): siRNA sense strand
ugauugggaugaugggauu

SEQ ID NO: 664289 - RNA, 19 nt, Homo sapiens
  misc_RNA (1)...(19): siRNA sense strand
gggugaagauggcauuaag

SEQ ID NO: 664290 - RNA, 19 nt, Homo sapiens
  misc_RNA (1)...(19): siRNA sense strand
uaaguggauugccaggauu

SEQ ID NO: 664291 - RNA, 19 nt, Homo sapiens
  misc_RNA (1)...(19): siRNA sense strand
aggagaagauauagaacuu

SEQ ID NO: 664292 - RNA, 19 nt, Homo sapiens
  misc_RNA (1)...(19): siRNA sense strand
gggaaagaaaggagaaaug

SEQ ID NO: 664293 - RNA, 19 nt, Homo sapiens
  misc_RNA (1)...(19): siRNA sense strand
ccaggaacaguuauuguga

SEQ ID NO: 664294 - RNA, 19 nt, Homo sapiens
  misc_RNA (1)...(19): siRNA sense strand
gggcaugccagguucuaaa

SEQ ID NO: 664295 - RNA, 19 nt, Homo sapiens
  misc_RNA (1)...(19): siRNA sense strand
ggaccuccaggaccaauug

SEQ ID NO: 664296 - RNA, 19 nt, Homo sapiens
  misc_RNA (1)...(19): siRNA sense strand
uguacacagugcccuuaua

SEQ ID NO: 664297 - RNA, 19 nt, Homo sapiens
  misc_RNA (1)...(19): siRNA sense strand
gaaccaggucucaaaggau

SEQ ID NO: 664298 - RNA, 19 nt, Homo sapiens
  misc_RNA (1)...(19): siRNA sense strand
gaccaagguuuuccaggua

SEQ ID NO: 664299 - RNA, 19 nt, Homo sapiens
  misc_RNA (1)...(19): siRNA sense strand
uggccaggcuugaaaggaa

SEQ ID NO: 664300 - RNA, 19 nt, Homo sapiens
  misc_RNA (1)...(19): siRNA sense strand
gcagggacccaagggcuuu

SEQ ID NO: 664301 - RNA, 19 nt, Homo sapiens
  misc_RNA (1)...(19): siRNA sense strand
caugccagguucuaaagga

SEQ ID NO: 664302 - RNA, 19 nt, Homo sapiens
  misc_RNA (1)...(19): siRNA sense strand
ccuggcacacuuaagauua

SEQ ID NO: 664303 - RNA, 19 nt, Homo sapiens
  misc_RNA (1)...(19): siRNA sense strand
agagccagguuauucagaa

SEQ ID NO: 664304 - RNA, 19 nt, Homo sapiens
  misc_RNA (1)...(19): siRNA sense strand
gauaagggagagccagguu

SEQ ID NO: 664305 - RNA, 19 nt, Homo sapiens
  misc_RNA (1)...(19): siRNA sense strand
ggaccuagaggaccuaagg

SEQ ID NO: 664306 - RNA, 19 nt, Homo sapiens
  misc_RNA (1)...(19): siRNA sense strand
gcaacaaagguucuaaagg

SEQ ID NO: 664307 - RNA, 19 nt, Homo sapiens
  misc_RNA (1)...(19): siRNA sense strand
gacccuggcacacuuaaga

SEQ ID NO: 664308 - RNA, 19 nt, Homo sapiens
  misc_RNA (1)...(19): siRNA sense strand
uaagggagagccagguuau

SEQ ID NO: 664309 - RNA, 19 nt, Homo sapiens
  misc_RNA (1)...(19): siRNA sense strand
caagggcuuuccaggacuu

SEQ ID NO: 664310 - RNA, 19 nt, Homo sapiens
  misc_RNA (1)...(19): siRNA sense strand
ccaggaaucccaggaguug

SEQ ID NO: 664311 - RNA, 19 nt, Homo sapiens
  misc_RNA (1)...(19): siRNA sense strand
uggaaguccuggaucauca

SEQ ID NO: 664312 - RNA, 19 nt, Homo sapiens
  misc_RNA (1)...(19): siRNA sense strand
ccaacagaauauuaugaca

SEQ ID NO: 664313 - RNA, 19 nt, Homo sapiens
  misc_RNA (1)...(19): siRNA sense strand
gggugcugcugguuugaaa

SEQ ID NO: 664314 - RNA, 19 nt, Homo sapiens
  misc_RNA (1)...(19): siRNA sense strand
gacauuggcccuccaggau

SEQ ID NO: 664315 - RNA, 19 nt, Homo sapiens
  misc_RNA (1)...(19): siRNA sense strand
agaccaggccucccaggua

SEQ ID NO: 664316 - RNA, 19 nt, Homo sapiens
  misc_RNA (1)...(19): siRNA sense strand
ggaccaggaacaccagguu

SEQ ID NO: 664317 - RNA, 19 nt, Homo sapiens
  misc_RNA (1)...(19): siRNA sense strand
gagaaagggcuuggaugga

SEQ ID NO: 664318 - RNA, 19 nt, Homo sapiens
  misc_RNA (1)...(19): siRNA sense strand
ggguuucccuggguuaaug

SEQ ID NO: 664319 - RNA, 19 nt, Homo sapiens
  misc_RNA (1)...(19): siRNA sense strand
gagguaagccaggcaagga

SEQ ID NO: 664320 - RNA, 19 nt, Homo sapiens
  misc_RNA (1)...(19): siRNA sense strand
ccagggaugccagguuuaa

SEQ ID NO: 664321 - RNA, 19 nt, Homo sapiens
  misc_RNA (1)...(19): siRNA sense strand
aggugaagauggagugauu

SEQ ID NO: 664322 - RNA, 19 nt, Homo sapiens
  misc_RNA (1)...(19): siRNA sense strand
ggacugccaggcuaucuag

SEQ ID NO: 664323 - RNA, 19 nt, Homo sapiens
  misc_RNA (1)...(19): siRNA sense strand
auaaguggauugccaggau

SEQ ID NO: 664324 - RNA, 19 nt, Homo sapiens
  misc_RNA (1)...(19): siRNA sense strand
ggaccaauggguauaagag

SEQ ID NO: 664325 - RNA, 19 nt, Homo sapiens
  misc_RNA (1)...(19): siRNA sense strand
ggaauuccaggucaucaag

SEQ ID NO: 664326 - RNA, 19 nt, Homo sapiens
  misc_RNA (1)...(19): siRNA sense strand
gaccaggaacaccagguuu

SEQ ID NO: 664327 - RNA, 19 nt, Homo sapiens
  misc_RNA (1)...(19): siRNA sense strand
ggaaaacccggaaaagaug

SEQ ID NO: 664328 - RNA, 19 nt, Homo sapiens
  misc_RNA (1)...(19): siRNA sense strand
gaccaaggacgugauggaa

SEQ ID NO: 664329 - RNA, 19 nt, Homo sapiens
  misc_RNA (1)...(19): siRNA sense strand
cuccaggucuuccaggauu

SEQ ID NO: 664330 - RNA, 19 nt, Homo sapiens
  misc_RNA (1)...(19): siRNA sense strand
cgggugauaugggaaagaa

SEQ ID NO: 664331 - RNA, 19 nt, Homo sapiens
  misc_RNA (1)...(19): siRNA sense strand
ggagaagauauagaacuug

SEQ ID NO: 664332 - RNA, 19 nt, Homo sapiens
  misc_RNA (1)...(19): siRNA sense strand
ggagagcucaguguuucaa

SEQ ID NO: 664333 - RNA, 19 nt, Homo sapiens
  misc_RNA (1)...(19): siRNA sense strand
uggcccaccuggacauuug

SEQ ID NO: 664334 - RNA, 19 nt, Homo sapiens
  misc_RNA (1)...(19): siRNA sense strand
caacaaagguucuaaagga

SEQ ID NO: 664335 - RNA, 19 nt, Homo sapiens
  misc_RNA (1)...(19): siRNA sense strand
gagaagauauagaacuuga

SEQ ID NO: 664336 - RNA, 19 nt, Homo sapiens
  misc_RNA (1)...(19): siRNA sense strand
caacaaggcagaagaggua

SEQ ID NO: 664337 - RNA, 19 nt, Homo sapiens
  misc_RNA (1)...(19): siRNA sense strand
agagauaucccacguaaua

SEQ ID NO: 664338 - RNA, 19 nt, Homo sapiens
  misc_RNA (1)...(19): siRNA sense strand
ccaaggacuuccaggcuua

SEQ ID NO: 664339 - RNA, 19 nt, Homo sapiens
  misc_RNA (1)...(19): siRNA sense strand
ccaaggacgugauggaauu

SEQ ID NO: 664340 - RNA, 19 nt, Homo sapiens
  misc_RNA (1)...(19): siRNA sense strand
gcagcuggcuugaaaggaa

SEQ ID NO: 664341 - RNA, 19 nt, Homo sapiens
  misc_RNA (1)...(19): siRNA sense strand
ucagagauaucccacguaa

SEQ ID NO: 664342 - RNA, 19 nt, Homo sapiens
  misc_RNA (1)...(19): siRNA sense strand
uauaagaggugaccaagga

SEQ ID NO: 664343 - RNA, 19 nt, Homo sapiens
  misc_RNA (1)...(19): siRNA sense strand
caaagaggauauccaggaa

SEQ ID NO: 664344 - RNA, 19 nt, Homo sapiens
  misc_RNA (1)...(19): siRNA sense strand
gaacaaggagauaaaggaa

SEQ ID NO: 664345 - RNA, 19 nt, Homo sapiens
  misc_RNA (1)...(19): siRNA sense strand
gaagauauagaacuugaug

SEQ ID NO: 664346 - RNA, 19 nt, Homo sapiens
  misc_RNA (1)...(19): siRNA sense strand
ccaccaggcucaagaggaa

SEQ ID NO: 664347 - RNA, 19 nt, Homo sapiens
  misc_RNA (1)...(19): siRNA sense strand
gaaagagugauaggacaua

SEQ ID NO: 664348 - RNA, 19 nt, Homo sapiens
  misc_RNA (1)...(19): siRNA sense strand
gaaagggcuuggauggaau

SEQ ID NO: 664349 - RNA, 19 nt, Homo sapiens
  misc_RNA (1)...(19): siRNA sense strand
agaaagggcuuggauggaa

SEQ ID NO: 664350 - RNA, 19 nt, Homo sapiens
  misc_RNA (1)...(19): siRNA sense strand
gaccaggccucccagguau

SEQ ID NO: 664351 - RNA, 19 nt, Homo sapiens
  misc_RNA (1)...(19): siRNA sense strand
guaaagggccagagaggaa

SEQ ID NO: 664352 - RNA, 19 nt, Homo sapiens
  misc_RNA (1)...(19): siRNA sense strand
cagcaaggguugugucugu

SEQ ID NO: 664353 - RNA, 19 nt, Homo sapiens
  misc_RNA (1)...(19): siRNA sense strand
acaaggagauaaaggaaau

SEQ ID NO: 664354 - RNA, 19 nt, Homo sapiens
  misc_RNA (1)...(19): siRNA sense strand
ggaacaaggagauaaagga

SEQ ID NO: 664355 - RNA, 19 nt, Homo sapiens
  misc_RNA (1)...(19): siRNA sense strand
ggaccaccaggaacaguua

SEQ ID NO: 664356 - RNA, 19 nt, Homo sapiens
  misc_RNA (1)...(19): siRNA sense strand
caagggagaaccagcagua

SEQ ID NO: 664357 - RNA, 19 nt, Homo sapiens
  misc_RNA (1)...(19): siRNA sense strand
gagccuggguuaccuggaa

SEQ ID NO: 664358 - RNA, 19 nt, Homo sapiens
  misc_RNA (1)...(19): siRNA sense strand
auacaggucuuccaggauu

SEQ ID NO: 664359 - RNA, 19 nt, Homo sapiens
  misc_RNA (1)...(19): siRNA sense strand
ccacaggcauagaaggauu

SEQ ID NO: 664360 - RNA, 19 nt, Homo sapiens
  misc_RNA (1)...(19): siRNA sense strand
guacacagugcccuuauau

SEQ ID NO: 664361 - RNA, 19 nt, Homo sapiens
  misc_RNA (1)...(19): siRNA sense strand
ggaaaugaagggcuugaug

SEQ ID NO: 664362 - RNA, 19 nt, Homo sapiens
  misc_RNA (1)...(19): siRNA sense strand
ucaaaggauucgcaggaaa

SEQ ID NO: 664363 - RNA, 19 nt, Homo sapiens
  misc_RNA (1)...(19): siRNA sense strand
aaagggugcuccugcuaaa

SEQ ID NO: 664364 - RNA, 19 nt, Homo sapiens
  misc_RNA (1)...(19): siRNA sense strand
gaacccuggugcucaagga

SEQ ID NO: 664365 - RNA, 19 nt, Homo sapiens
  misc_RNA (1)...(19): siRNA sense strand
aggcuuaaauggauugaaa

SEQ ID NO: 664366 - RNA, 19 nt, Homo sapiens
  misc_RNA (1)...(19): siRNA sense strand
ggacuuccaggcuuaaaug

SEQ ID NO: 664367 - RNA, 19 nt, Homo sapiens
  misc_RNA (1)...(19): siRNA sense strand
uaacagaacggaccucaag

SEQ ID NO: 664368 - RNA, 19 nt, Homo sapiens
  misc_RNA (1)...(19): siRNA sense strand
gggauuuccuggagccauu

SEQ ID NO: 664369 - RNA, 19 nt, Homo sapiens
  misc_RNA (1)...(19): siRNA sense strand
aaagggagacccaggaauu

SEQ ID NO: 664370 - RNA, 19 nt, Homo sapiens
  misc_RNA (1)...(19): siRNA sense strand
gcaaggguugugucuguaa

SEQ ID NO: 664371 - RNA, 19 nt, Homo sapiens
  misc_RNA (1)...(19): siRNA sense strand
uaucuagggucuccaggaa

SEQ ID NO: 664372 - RNA, 19 nt, Homo sapiens
  misc_RNA (1)...(19): siRNA sense strand
cauuggcccuccaggauuu

SEQ ID NO: 664373 - RNA, 19 nt, Homo sapiens
  misc_RNA (1)...(19): siRNA sense strand
ggaaagaaaggagaaaugg

SEQ ID NO: 664374 - RNA, 19 nt, Homo sapiens
  misc_RNA (1)...(19): siRNA sense strand
aaagagugauaggacauaa

SEQ ID NO: 664375 - RNA, 19 nt, Homo sapiens
  misc_RNA (1)...(19): siRNA sense strand
uccagggagucauguaaua

SEQ ID NO: 664376 - RNA, 19 nt, Homo sapiens
  misc_RNA (1)...(19): siRNA sense strand
ggucugcccggugcaauua

SEQ ID NO: 664377 - RNA, 19 nt, Homo sapiens
  misc_RNA (1)...(19): siRNA sense strand
caaggguugugucuguaaa

SEQ ID NO: 664378 - RNA, 19 nt, Homo sapiens
  misc_RNA (1)...(19): siRNA sense strand
ucacuggguuguccuggaa

SEQ ID NO: 664379 - RNA, 19 nt, Homo sapiens
  misc_RNA (1)...(19): siRNA sense strand
agaaucauauggaucugaa

SEQ ID NO: 664380 - RNA, 19 nt, Homo sapiens
  misc_RNA (1)...(19): siRNA sense strand
ggaaagccagguccucaug

SEQ ID NO: 664381 - RNA, 19 nt, Homo sapiens
  misc_RNA (1)...(19): siRNA sense strand
aggcgcagcuggcuugaaa

SEQ ID NO: 664382 - RNA, 19 nt, Homo sapiens
  misc_RNA (1)...(19): siRNA sense strand
aagaggauauccaggaaau

SEQ ID NO: 664383 - RNA, 19 nt, Homo sapiens
  misc_RNA (1)...(19): siRNA sense strand
caaaggauucgcaggaaau

SEQ ID NO: 664384 - RNA, 19 nt, Homo sapiens
  misc_RNA (1)...(19): siRNA sense strand
aaccaggucucaaaggauu

SEQ ID NO: 664385 - RNA, 19 nt, Homo sapiens
  misc_RNA (1)...(19): siRNA sense strand
uuacggacuugucggugua

SEQ ID NO: 664386 - RNA, 19 nt, Homo sapiens
  misc_RNA (1)...(19): siRNA sense strand
ggagacccuggcacacuua

SEQ ID NO: 664387 - RNA, 19 nt, Homo sapiens
  misc_RNA (1)...(19): siRNA sense strand
agaaccaggucucaaagga

SEQ ID NO: 664388 - RNA, 19 nt, Homo sapiens
  misc_RNA (1)...(19): siRNA sense strand
ugauugggaugaugggauu

SEQ ID NO: 664389 - RNA, 19 nt, Homo sapiens
  misc_RNA (1)...(19): siRNA sense strand
gggugaagauggcauuaag

SEQ ID NO: 664390 - RNA, 19 nt, Homo sapiens
  misc_RNA (1)...(19): siRNA sense strand
uaaguggauugccaggauu

SEQ ID NO: 664391 - RNA, 19 nt, Homo sapiens
  misc_RNA (1)...(19): siRNA sense strand
aggagaagauauagaacuu

SEQ ID NO: 664392 - RNA, 19 nt, Homo sapiens
  misc_RNA (1)...(19): siRNA sense strand
gggaaagaaaggagaaaug

SEQ ID NO: 664393 - RNA, 19 nt, Homo sapiens
  misc_RNA (1)...(19): siRNA sense strand
ccaggaacaguuauuguga

SEQ ID NO: 664394 - RNA, 19 nt, Homo sapiens
  misc_RNA (1)...(19): siRNA sense strand
gggcaugccagguucuaaa

SEQ ID NO: 664395 - RNA, 19 nt, Homo sapiens
  misc_RNA (1)...(19): siRNA sense strand
ggaccuccaggaccaauug

SEQ ID NO: 664396 - RNA, 19 nt, Homo sapiens
  misc_RNA (1)...(19): siRNA sense strand
uguacacagugcccuuaua

SEQ ID NO: 664397 - RNA, 19 nt, Homo sapiens
  misc_RNA (1)...(19): siRNA sense strand
gaaccaggucucaaaggau

SEQ ID NO: 664398 - RNA, 19 nt, Homo sapiens
  misc_RNA (1)...(19): siRNA sense strand
gaccaagguuuuccaggua

SEQ ID NO: 664399 - RNA, 19 nt, Homo sapiens
  misc_RNA (1)...(19): siRNA sense strand
uggccaggcuugaaaggaa

SEQ ID NO: 664400 - RNA, 19 nt, Homo sapiens
  misc_RNA (1)...(19): siRNA sense strand
gcagggacccaagggcuuu

SEQ ID NO: 664401 - RNA, 19 nt, Homo sapiens
  misc_RNA (1)...(19): siRNA sense strand
caugccagguucuaaagga

SEQ ID NO: 664402 - RNA, 19 nt, Homo sapiens
  misc_RNA (1)...(19): siRNA sense strand
ccuggcacacuuaagauua

SEQ ID NO: 664403 - RNA, 19 nt, Homo sapiens
  misc_RNA (1)...(19): siRNA sense strand
agagccagguuauucagaa

SEQ ID NO: 664404 - RNA, 19 nt, Homo sapiens
  misc_RNA (1)...(19): siRNA sense strand
gauaagggagagccagguu

SEQ ID NO: 664405 - RNA, 19 nt, Homo sapiens
  misc_RNA (1)...(19): siRNA sense strand
ggaccuagaggaccuaagg

SEQ ID NO: 664406 - RNA, 19 nt, Homo sapiens
  misc_RNA (1)...(19): siRNA sense strand
gcaacaaagguucuaaagg

SEQ ID NO: 664407 - RNA, 19 nt, Homo sapiens
  misc_RNA (1)...(19): siRNA sense strand
gacccuggcacacuuaaga

SEQ ID NO: 664408 - RNA, 19 nt, Homo sapiens
  misc_RNA (1)...(19): siRNA sense strand
uaagggagagccagguuau

SEQ ID NO: 664409 - RNA, 19 nt, Homo sapiens
  misc_RNA (1)...(19): siRNA sense strand
caagggcuuuccaggacuu

SEQ ID NO: 664410 - RNA, 19 nt, Homo sapiens
  misc_RNA (1)...(19): siRNA sense strand
ccaggaaucccaggaguug

SEQ ID NO: 664411 - RNA, 19 nt, Homo sapiens
  misc_RNA (1)...(19): siRNA sense strand
uggaaguccuggaucauca

SEQ ID NO: 664412 - RNA, 19 nt, Homo sapiens
  misc_RNA (1)...(19): siRNA sense strand
ccaacagaauauuaugaca

SEQ ID NO: 664413 - RNA, 19 nt, Homo sapiens
  misc_RNA (1)...(19): siRNA sense strand
gggugcugcugguuugaaa

SEQ ID NO: 664414 - RNA, 19 nt, Homo sapiens
  misc_RNA (1)...(19): siRNA sense strand
gacauuggcccuccaggau

SEQ ID NO: 664415 - RNA, 19 nt, Homo sapiens
  misc_RNA (1)...(19): siRNA sense strand
agaccaggccucccaggua

SEQ ID NO: 664416 - RNA, 19 nt, Homo sapiens
  misc_RNA (1)...(19): siRNA sense strand
ggaccaggaacaccagguu

SEQ ID NO: 664417 - RNA, 19 nt, Homo sapiens
  misc_RNA (1)...(19): siRNA sense strand
gagaaagggcuuggaugga

SEQ ID NO: 664418 - RNA, 19 nt, Homo sapiens
  misc_RNA (1)...(19): siRNA sense strand
ggguuucccuggguuaaug

SEQ ID NO: 664419 - RNA, 19 nt, Homo sapiens
  misc_RNA (1)...(19): siRNA sense strand
gagguaagccaggcaagga

SEQ ID NO: 664420 - RNA, 19 nt, Homo sapiens
  misc_RNA (1)...(19): siRNA sense strand
ccagggaugccagguuuaa

SEQ ID NO: 664421 - RNA, 19 nt, Homo sapiens
  misc_RNA (1)...(19): siRNA sense strand
aggugaagauggagugauu

SEQ ID NO: 664422 - RNA, 19 nt, Homo sapiens
  misc_RNA (1)...(19): siRNA sense strand
ggacugccaggcuaucuag

SEQ ID NO: 664423 - RNA, 19 nt, Homo sapiens
  misc_RNA (1)...(19): siRNA sense strand
auaaguggauugccaggau

SEQ ID NO: 664424 - RNA, 19 nt, Homo sapiens
  misc_RNA (1)...(19): siRNA sense strand
ggaccaauggguauaagag

SEQ ID NO: 664425 - RNA, 19 nt, Homo sapiens
  misc_RNA (1)...(19): siRNA sense strand
ggaauuccaggucaucaag

SEQ ID NO: 664426 - RNA, 19 nt, Homo sapiens
  misc_RNA (1)...(19): siRNA sense strand
gaccaggaacaccagguuu

SEQ ID NO: 664427 - RNA, 19 nt, Homo sapiens
  misc_RNA (1)...(19): siRNA sense strand
ggaaaacccggaaaagaug

SEQ ID NO: 664428 - RNA, 19 nt, Homo sapiens
  misc_RNA (1)...(19): siRNA sense strand
gaccaaggacgugauggaa

SEQ ID NO: 664429 - RNA, 19 nt, Homo sapiens
  misc_RNA (1)...(19): siRNA sense strand
cuccaggucuuccaggauu

SEQ ID NO: 664430 - RNA, 19 nt, Homo sapiens
  misc_RNA (1)...(19): siRNA sense strand
cgggugauaugggaaagaa

SEQ ID NO: 664431 - RNA, 19 nt, Homo sapiens
  misc_RNA (1)...(19): siRNA sense strand
ggagaagauauagaacuug

SEQ ID NO: 664432 - RNA, 19 nt, Homo sapiens
  misc_RNA (1)...(19): siRNA sense strand
ggagagcucaguguuucaa

SEQ ID NO: 664433 - RNA, 19 nt, Homo sapiens
  misc_RNA (1)...(19): siRNA sense strand
uggcccaccuggacauuug

SEQ ID NO: 664434 - RNA, 19 nt, Homo sapiens
  misc_RNA (1)...(19): siRNA sense strand
caacaaagguucuaaagga

SEQ ID NO: 664435 - RNA, 19 nt, Homo sapiens
  misc_RNA (1)...(19): siRNA sense strand
gagaagauauagaacuuga

SEQ ID NO: 664436 - RNA, 19 nt, Homo sapiens
  misc_RNA (1)...(19): siRNA sense strand
caacaaggcagaagaggua

SEQ ID NO: 664437 - RNA, 19 nt, Homo sapiens
  misc_RNA (1)...(19): siRNA sense strand
agagauaucccacguaaua

SEQ ID NO: 664438 - RNA, 19 nt, Homo sapiens
  misc_RNA (1)...(19): siRNA sense strand
ccaaggacuuccaggcuua

SEQ ID NO: 664439 - RNA, 19 nt, Homo sapiens
  misc_RNA (1)...(19): siRNA sense strand
ccaaggacgugauggaauu

SEQ ID NO: 664440 - RNA, 19 nt, Homo sapiens
  misc_RNA (1)...(19): siRNA sense strand
gcagcuggcuugaaaggaa

SEQ ID NO: 664441 - RNA, 19 nt, Homo sapiens
  misc_RNA (1)...(19): siRNA sense strand
ucagagauaucccacguaa

SEQ ID NO: 664442 - RNA, 19 nt, Homo sapiens
  misc_RNA (1)...(19): siRNA sense strand
uauaagaggugaccaagga

SEQ ID NO: 664443 - RNA, 19 nt, Homo sapiens
  misc_RNA (1)...(19): siRNA sense strand
caaagaggauauccaggaa

SEQ ID NO: 664444 - RNA, 19 nt, Homo sapiens
  misc_RNA (1)...(19): siRNA sense strand
gaacaaggagauaaaggaa

SEQ ID NO: 664445 - RNA, 19 nt, Homo sapiens
  misc_RNA (1)...(19): siRNA sense strand
gaagauauagaacuugaug

SEQ ID NO: 664446 - RNA, 19 nt, Homo sapiens
  misc_RNA (1)...(19): siRNA sense strand
ccaccaggcucaagaggaa

SEQ ID NO: 664447 - RNA, 19 nt, Homo sapiens
  misc_RNA (1)...(19): siRNA sense strand
gaaagagugauaggacaua

SEQ ID NO: 664448 - RNA, 19 nt, Homo sapiens
  misc_RNA (1)...(19): siRNA sense strand
gaaagggcuuggauggaau

SEQ ID NO: 664449 - RNA, 19 nt, Homo sapiens
  misc_RNA (1)...(19): siRNA sense strand
agaaagggcuuggauggaa

SEQ ID NO: 664450 - RNA, 19 nt, Homo sapiens
  misc_RNA (1)...(19): siRNA sense strand
gaccaggccucccagguau

SEQ ID NO: 664451 - RNA, 19 nt, Homo sapiens
  misc_RNA (1)...(19): siRNA sense strand
guaaagggccagagaggaa

SEQ ID NO: 664452 - RNA, 19 nt, Homo sapiens
  misc_RNA (1)...(19): siRNA sense strand
cagcaaggguugugucugu

SEQ ID NO: 664453 - RNA, 19 nt, Homo sapiens
  misc_RNA (1)...(19): siRNA sense strand
acaaggagauaaaggaaau

SEQ ID NO: 664454 - RNA, 19 nt, Homo sapiens
  misc_RNA (1)...(19): siRNA sense strand
ggaacaaggagauaaagga

SEQ ID NO: 664455 - RNA, 19 nt, Homo sapiens
  misc_RNA (1)...(19): siRNA sense strand
ggaccaccaggaacaguua

SEQ ID NO: 664456 - RNA, 19 nt, Homo sapiens
  misc_RNA (1)...(19): siRNA sense strand
gaaagccuauuccaucaac

SEQ ID NO: 664457 - RNA, 19 nt, Homo sapiens
  misc_RNA (1)...(19): siRNA sense strand
caagggagaaccagcagua

SEQ ID NO: 664458 - RNA, 19 nt, Homo sapiens
  misc_RNA (1)...(19): siRNA sense strand
gagccuggguuaccuggaa

SEQ ID NO: 664459 - RNA, 19 nt, Homo sapiens
  misc_RNA (1)...(19): siRNA sense strand
auacaggucuuccaggauu

SEQ ID NO: 664460 - RNA, 19 nt, Homo sapiens
  misc_RNA (1)...(19): siRNA sense strand
ccacaggcauagaaggauu

SEQ ID NO: 664461 - RNA, 19 nt, Homo sapiens
  misc_RNA (1)...(19): siRNA sense strand
guacacagugcccuuauau

SEQ ID NO: 664462 - RNA, 19 nt, Homo sapiens
  misc_RNA (1)...(19): siRNA sense strand
ggaaaugaagggcuugaug

SEQ ID NO: 664463 - RNA, 19 nt, Homo sapiens
  misc_RNA (1)...(19): siRNA sense strand
ucaaaggauucgcaggaaa

SEQ ID NO: 664464 - RNA, 19 nt, Homo sapiens
  misc_RNA (1)...(19): siRNA sense strand
aaagggugcuccugcuaaa

SEQ ID NO: 664465 - RNA, 19 nt, Homo sapiens
  misc_RNA (1)...(19): siRNA sense strand
gaacccuggugcucaagga

SEQ ID NO: 664466 - RNA, 19 nt, Homo sapiens
  misc_RNA (1)...(19): siRNA sense strand
aggcuuaaauggauugaaa

SEQ ID NO: 664467 - RNA, 19 nt, Homo sapiens
  misc_RNA (1)...(19): siRNA sense strand
ggacuuccaggcuuaaaug

SEQ ID NO: 664468 - RNA, 19 nt, Homo sapiens
  misc_RNA (1)...(19): siRNA sense strand
uaacagaacggaccucaag

SEQ ID NO: 664469 - RNA, 19 nt, Homo sapiens
  misc_RNA (1)...(19): siRNA sense strand
ccuauuccaucaacuguga

SEQ ID NO: 664470 - RNA, 19 nt, Homo sapiens
  misc_RNA (1)...(19): siRNA sense strand
gggauuuccuggagccauu

SEQ ID NO: 664471 - RNA, 19 nt, Homo sapiens
  misc_RNA (1)...(19): siRNA sense strand
aaagggagacccaggaauu

SEQ ID NO: 664472 - RNA, 19 nt, Homo sapiens
  misc_RNA (1)...(19): siRNA sense strand
gcaaggguugugucuguaa

SEQ ID NO: 664473 - RNA, 19 nt, Homo sapiens
  misc_RNA (1)...(19): siRNA sense strand
uaucuagggucuccaggaa

SEQ ID NO: 664474 - RNA, 19 nt, Homo sapiens
  misc_RNA (1)...(19): siRNA sense strand
cauuggcccuccaggauuu

SEQ ID NO: 664475 - RNA, 19 nt, Homo sapiens
  misc_RNA (1)...(19): siRNA sense strand
ggaaagaaaggagaaaugg

SEQ ID NO: 664476 - RNA, 19 nt, Homo sapiens
  misc_RNA (1)...(19): siRNA sense strand
aaagagugauaggacauaa

SEQ ID NO: 664477 - RNA, 19 nt, Homo sapiens
  misc_RNA (1)...(19): siRNA sense strand
uccagggagucauguaaua

SEQ ID NO: 664478 - RNA, 19 nt, Homo sapiens
  misc_RNA (1)...(19): siRNA sense strand
ggucugcccggugcaauua

SEQ ID NO: 664479 - RNA, 19 nt, Homo sapiens
  misc_RNA (1)...(19): siRNA sense strand
caaggguugugucuguaaa

SEQ ID NO: 664480 - RNA, 19 nt, Homo sapiens
  misc_RNA (1)...(19): siRNA sense strand
ucacuggguuguccuggaa

SEQ ID NO: 664481 - RNA, 19 nt, Homo sapiens
  misc_RNA (1)...(19): siRNA sense strand
agaaucauauggaucugaa

SEQ ID NO: 664482 - RNA, 19 nt, Homo sapiens
  misc_RNA (1)...(19): siRNA sense strand
ggaaagccagguccucaug

SEQ ID NO: 664483 - RNA, 19 nt, Homo sapiens
  misc_RNA (1)...(19): siRNA sense strand
aggcgcagcuggcuugaaa

SEQ ID NO: 664484 - RNA, 19 nt, Homo sapiens
  misc_RNA (1)...(19): siRNA sense strand
aagaggauauccaggaaau

SEQ ID NO: 664485 - RNA, 19 nt, Homo sapiens
  misc_RNA (1)...(19): siRNA sense strand
caaaggauucgcaggaaau

SEQ ID NO: 664486 - RNA, 19 nt, Homo sapiens
  misc_RNA (1)...(19): siRNA sense strand
aaccaggucucaaaggauu

SEQ ID NO: 664487 - RNA, 19 nt, Homo sapiens
  misc_RNA (1)...(19): siRNA sense strand
uuacggacuugucggugua

SEQ ID NO: 664488 - RNA, 19 nt, Homo sapiens
  misc_RNA (1)...(19): siRNA sense strand
ggagacccuggcacacuua

SEQ ID NO: 664489 - RNA, 19 nt, Homo sapiens
  misc_RNA (1)...(19): siRNA sense strand
uaaguggauugccaggauu

SEQ ID NO: 664490 - RNA, 19 nt, Homo sapiens
  misc_RNA (1)...(19): siRNA sense strand
agaaccaggucucaaagga

SEQ ID NO: 664491 - RNA, 19 nt, Homo sapiens
  misc_RNA (1)...(19): siRNA sense strand
ugauugggaugaugggauu

SEQ ID NO: 664492 - RNA, 19 nt, Homo sapiens
  misc_RNA (1)...(19): siRNA sense strand
gggugaagauggcauuaag

SEQ ID NO: 664493 - RNA, 19 nt, Homo sapiens
  misc_RNA (1)...(19): siRNA sense strand
aggagaagauauagaacuu

SEQ ID NO: 664494 - RNA, 19 nt, Homo sapiens
  misc_RNA (1)...(19): siRNA sense strand
gggaaagaaaggagaaaug

SEQ ID NO: 664495 - RNA, 19 nt, Homo sapiens
  misc_RNA (1)...(19): siRNA sense strand
ccaggaacaguuauuguga

SEQ ID NO: 664496 - RNA, 19 nt, Homo sapiens
  misc_RNA (1)...(19): siRNA sense strand
gggcaugccagguucuaaa

SEQ ID NO: 664497 - RNA, 19 nt, Homo sapiens
  misc_RNA (1)...(19): siRNA sense strand
ggaccuccaggaccaauug

SEQ ID NO: 664498 - RNA, 19 nt, Homo sapiens
  misc_RNA (1)...(19): siRNA sense strand
uguacacagugcccuuaua

SEQ ID NO: 664499 - RNA, 19 nt, Homo sapiens
  misc_RNA (1)...(19): siRNA sense strand
gaaccaggucucaaaggau

SEQ ID NO: 664500 - RNA, 19 nt, Homo sapiens
  misc_RNA (1)...(19): siRNA sense strand
gaccaagguuuuccaggua

SEQ ID NO: 664501 - RNA, 19 nt, Homo sapiens
  misc_RNA (1)...(19): siRNA sense strand
uggccaggcuugaaaggaa

SEQ ID NO: 664502 - RNA, 19 nt, Homo sapiens
  misc_RNA (1)...(19): siRNA sense strand
gcagggacccaagggcuuu

SEQ ID NO: 664503 - RNA, 19 nt, Homo sapiens
  misc_RNA (1)...(19): siRNA sense strand
caugccagguucuaaagga

SEQ ID NO: 664504 - RNA, 19 nt, Homo sapiens
  misc_RNA (1)...(19): siRNA sense strand
ccuggcacacuuaagauua

SEQ ID NO: 664505 - RNA, 19 nt, Homo sapiens
  misc_RNA (1)...(19): siRNA sense strand
agagccagguuauucagaa

SEQ ID NO: 664506 - RNA, 19 nt, Homo sapiens
  misc_RNA (1)...(19): siRNA sense strand
gauaagggagagccagguu

SEQ ID NO: 664507 - RNA, 19 nt, Homo sapiens
  misc_RNA (1)...(19): siRNA sense strand
ggaccuagaggaccuaagg

SEQ ID NO: 664508 - RNA, 19 nt, Homo sapiens
  misc_RNA (1)...(19): siRNA sense strand
gcaacaaagguucuaaagg

SEQ ID NO: 664509 - RNA, 19 nt, Homo sapiens
  misc_RNA (1)...(19): siRNA sense strand
gacccuggcacacuuaaga

SEQ ID NO: 664510 - RNA, 19 nt, Homo sapiens
  misc_RNA (1)...(19): siRNA sense strand
uaagggagagccagguuau

SEQ ID NO: 664511 - RNA, 19 nt, Homo sapiens
  misc_RNA (1)...(19): siRNA sense strand
caagggcuuuccaggacuu

SEQ ID NO: 664512 - RNA, 19 nt, Homo sapiens
  misc_RNA (1)...(19): siRNA sense strand
ccaggaaucccaggaguug

SEQ ID NO: 664513 - RNA, 19 nt, Homo sapiens
  misc_RNA (1)...(19): siRNA sense strand
gggugcugcugguuugaaa

SEQ ID NO: 664514 - RNA, 19 nt, Homo sapiens
  misc_RNA (1)...(19): siRNA sense strand
uggaaguccuggaucauca

SEQ ID NO: 664515 - RNA, 19 nt, Homo sapiens
  misc_RNA (1)...(19): siRNA sense strand
ccaacagaauauuaugaca

SEQ ID NO: 664516 - RNA, 19 nt, Homo sapiens
  misc_RNA (1)...(19): siRNA sense strand
gacauuggcccuccaggau

SEQ ID NO: 664517 - RNA, 19 nt, Homo sapiens
  misc_RNA (1)...(19): siRNA sense strand
agaccaggccucccaggua

SEQ ID NO: 664518 - RNA, 19 nt, Homo sapiens
  misc_RNA (1)...(19): siRNA sense strand
ggaccaggaacaccagguu

SEQ ID NO: 664519 - RNA, 19 nt, Homo sapiens
  misc_RNA (1)...(19): siRNA sense strand
gagaaagggcuuggaugga

SEQ ID NO: 664520 - RNA, 19 nt, Homo sapiens
  misc_RNA (1)...(19): siRNA sense strand
ggguuucccuggguuaaug

SEQ ID NO: 664521 - RNA, 19 nt, Homo sapiens
  misc_RNA (1)...(19): siRNA sense strand
gagguaagccaggcaagga

SEQ ID NO: 664522 - RNA, 19 nt, Homo sapiens
  misc_RNA (1)...(19): siRNA sense strand
ccagggaugccagguuuaa

SEQ ID NO: 664523 - RNA, 19 nt, Homo sapiens
  misc_RNA (1)...(19): siRNA sense strand
aggugaagauggagugauu

SEQ ID NO: 664524 - RNA, 19 nt, Homo sapiens
  misc_RNA (1)...(19): siRNA sense strand
ggacugccaggcuaucuag

SEQ ID NO: 664525 - RNA, 19 nt, Homo sapiens
  misc_RNA (1)...(19): siRNA sense strand
auaaguggauugccaggau

SEQ ID NO: 664526 - RNA, 19 nt, Homo sapiens
  misc_RNA (1)...(19): siRNA sense strand
ggaccaauggguauaagag

SEQ ID NO: 664527 - RNA, 19 nt, Homo sapiens
  misc_RNA (1)...(19): siRNA sense strand
ggaauuccaggucaucaag

SEQ ID NO: 664528 - RNA, 19 nt, Homo sapiens
  misc_RNA (1)...(19): siRNA sense strand
gaccaggaacaccagguuu

SEQ ID NO: 664529 - RNA, 19 nt, Homo sapiens
  misc_RNA (1)...(19): siRNA sense strand
ggagagcucaguguuucaa

SEQ ID NO: 664530 - RNA, 19 nt, Homo sapiens
  misc_RNA (1)...(19): siRNA sense strand
gaccaaggacgugauggaa

SEQ ID NO: 664531 - RNA, 19 nt, Homo sapiens
  misc_RNA (1)...(19): siRNA sense strand
ggagaagauauagaacuug

SEQ ID NO: 664532 - RNA, 19 nt, Homo sapiens
  misc_RNA (1)...(19): siRNA sense strand
cuccaggucuuccaggauu

SEQ ID NO: 664533 - RNA, 19 nt, Homo sapiens
  misc_RNA (1)...(19): siRNA sense strand
cgggugauaugggaaagaa

SEQ ID NO: 664534 - RNA, 19 nt, Homo sapiens
  misc_RNA (1)...(19): siRNA sense strand
caacaaagguucuaaagga

SEQ ID NO: 664535 - RNA, 19 nt, Homo sapiens
  misc_RNA (1)...(19): siRNA sense strand
gagaagauauagaacuuga

SEQ ID NO: 664536 - RNA, 19 nt, Homo sapiens
  misc_RNA (1)...(19): siRNA sense strand
caacaaggcagaagaggua

SEQ ID NO: 664537 - RNA, 19 nt, Homo sapiens
  misc_RNA (1)...(19): siRNA sense strand
agagauaucccacguaaua

SEQ ID NO: 664538 - RNA, 19 nt, Homo sapiens
  misc_RNA (1)...(19): siRNA sense strand
ccaaggacuuccaggcuua

SEQ ID NO: 664539 - RNA, 19 nt, Homo sapiens
  misc_RNA (1)...(19): siRNA sense strand
ccaaggacgugauggaauu

SEQ ID NO: 664540 - RNA, 19 nt, Homo sapiens
  misc_RNA (1)...(19): siRNA sense strand
gcagcuggcuugaaaggaa

SEQ ID NO: 664541 - RNA, 19 nt, Homo sapiens
  misc_RNA (1)...(19): siRNA sense strand
ucagagauaucccacguaa

SEQ ID NO: 664542 - RNA, 19 nt, Homo sapiens
  misc_RNA (1)...(19): siRNA sense strand
uauaagaggugaccaagga

SEQ ID NO: 664543 - RNA, 19 nt, Homo sapiens
  misc_RNA (1)...(19): siRNA sense strand
caaagaggauauccaggaa

SEQ ID NO: 664544 - RNA, 19 nt, Homo sapiens
  misc_RNA (1)...(19): siRNA sense strand
gaacaaggagauaaaggaa

SEQ ID NO: 664545 - RNA, 19 nt, Homo sapiens
  misc_RNA (1)...(19): siRNA sense strand
gaagauauagaacuugaug

SEQ ID NO: 664546 - RNA, 19 nt, Homo sapiens
  misc_RNA (1)...(19): siRNA sense strand
ccaccaggcucaagaggaa

SEQ ID NO: 664547 - RNA, 19 nt, Homo sapiens
  misc_RNA (1)...(19): siRNA sense strand
gaaagagugauaggacaua

SEQ ID NO: 664548 - RNA, 19 nt, Homo sapiens
  misc_RNA (1)...(19): siRNA sense strand
gaaagggcuuggauggaau

SEQ ID NO: 664549 - RNA, 19 nt, Homo sapiens
  misc_RNA (1)...(19): siRNA sense strand
agaaagggcuuggauggaa

SEQ ID NO: 664550 - RNA, 19 nt, Homo sapiens
  misc_RNA (1)...(19): siRNA sense strand
gaccaggccucccagguau

SEQ ID NO: 664551 - RNA, 19 nt, Homo sapiens
  misc_RNA (1)...(19): siRNA sense strand
guaaagggccagagaggaa

SEQ ID NO: 664552 - RNA, 19 nt, Homo sapiens
  misc_RNA (1)...(19): siRNA sense strand
cagcaaggguugugucugu

SEQ ID NO: 664553 - RNA, 19 nt, Homo sapiens
  misc_RNA (1)...(19): siRNA sense strand
acaaggagauaaaggaaau

SEQ ID NO: 664554 - RNA, 19 nt, Homo sapiens
  misc_RNA (1)...(19): siRNA sense strand
ggaacaaggagauaaagga

SEQ ID NO: 664555 - RNA, 19 nt, Homo sapiens
  misc_RNA (1)...(19): siRNA sense strand
ggaccaccaggaacaguua

SEQ ID NO: 664556 - RNA, 19 nt, Homo sapiens
  misc_RNA (1)...(19): siRNA sense strand
gaaagccuauuccaucaac

SEQ ID NO: 664557 - RNA, 19 nt, Homo sapiens
  misc_RNA (1)...(19): siRNA sense strand
caagggagaaccagcagua

SEQ ID NO: 664558 - RNA, 19 nt, Homo sapiens
  misc_RNA (1)...(19): siRNA sense strand
gagccuggguuaccuggaa

SEQ ID NO: 664559 - RNA, 19 nt, Homo sapiens
  misc_RNA (1)...(19): siRNA sense strand
auacaggucuuccaggauu

SEQ ID NO: 664560 - RNA, 19 nt, Homo sapiens
  misc_RNA (1)...(19): siRNA sense strand
ccacaggcauagaaggauu

SEQ ID NO: 664561 - RNA, 19 nt, Homo sapiens
  misc_RNA (1)...(19): siRNA sense strand
guacacagugcccuuauau

SEQ ID NO: 664562 - RNA, 19 nt, Homo sapiens
  misc_RNA (1)...(19): siRNA sense strand
ggaaaugaagggcuugaug

SEQ ID NO: 664563 - RNA, 19 nt, Homo sapiens
  misc_RNA (1)...(19): siRNA sense strand
ucaaaggauucgcaggaaa

SEQ ID NO: 664564 - RNA, 19 nt, Homo sapiens
  misc_RNA (1)...(19): siRNA sense strand
aaagggugcuccugcuaaa

SEQ ID NO: 664565 - RNA, 19 nt, Homo sapiens
  misc_RNA (1)...(19): siRNA sense strand
gaacccuggugcucaagga

SEQ ID NO: 664566 - RNA, 19 nt, Homo sapiens
  misc_RNA (1)...(19): siRNA sense strand
aggcuuaaauggauugaaa

SEQ ID NO: 664567 - RNA, 19 nt, Homo sapiens
  misc_RNA (1)...(19): siRNA sense strand
ggacuuccaggcuuaaaug

SEQ ID NO: 664568 - RNA, 19 nt, Homo sapiens
  misc_RNA (1)...(19): siRNA sense strand
uaacagaacggaccucaag

SEQ ID NO: 664569 - RNA, 19 nt, Homo sapiens
  misc_RNA (1)...(19): siRNA sense strand
ccuauuccaucaacuguga

SEQ ID NO: 664570 - RNA, 19 nt, Homo sapiens
  misc_RNA (1)...(19): siRNA sense strand
gggauuuccuggagccauu

SEQ ID NO: 664571 - RNA, 19 nt, Homo sapiens
  misc_RNA (1)...(19): siRNA sense strand
aaagggagacccaggaauu

SEQ ID NO: 664572 - RNA, 19 nt, Homo sapiens
  misc_RNA (1)...(19): siRNA sense strand
gcaaggguugugucuguaa

SEQ ID NO: 664573 - RNA, 19 nt, Homo sapiens
  misc_RNA (1)...(19): siRNA sense strand
uaucuagggucuccaggaa

SEQ ID NO: 664574 - RNA, 19 nt, Homo sapiens
  misc_RNA (1)...(19): siRNA sense strand
cauuggcccuccaggauuu

SEQ ID NO: 664575 - RNA, 19 nt, Homo sapiens
  misc_RNA (1)...(19): siRNA sense strand
ggaaagaaaggagaaaugg

SEQ ID NO: 664576 - RNA, 19 nt, Homo sapiens
  misc_RNA (1)...(19): siRNA sense strand
aaagagugauaggacauaa

SEQ ID NO: 664577 - RNA, 19 nt, Homo sapiens
  misc_RNA (1)...(19): siRNA sense strand
uccagggagucauguaaua

SEQ ID NO: 664578 - RNA, 19 nt, Homo sapiens
  misc_RNA (1)...(19): siRNA sense strand
ggucugcccggugcaauua

SEQ ID NO: 664579 - RNA, 19 nt, Homo sapiens
  misc_RNA (1)...(19): siRNA sense strand
caaggguugugucuguaaa

SEQ ID NO: 664580 - RNA, 19 nt, Homo sapiens
  misc_RNA (1)...(19): siRNA sense strand
ucacuggguuguccuggaa

SEQ ID NO: 664581 - RNA, 19 nt, Homo sapiens
  misc_RNA (1)...(19): siRNA sense strand
agaaucauauggaucugaa

SEQ ID NO: 664582 - RNA, 19 nt, Homo sapiens
  misc_RNA (1)...(19): siRNA sense strand
ggaaagccagguccucaug

SEQ ID NO: 664583 - RNA, 19 nt, Homo sapiens
  misc_RNA (1)...(19): siRNA sense strand
aggcgcagcuggcuugaaa

SEQ ID NO: 664584 - RNA, 19 nt, Homo sapiens
  misc_RNA (1)...(19): siRNA sense strand
aagaggauauccaggaaau

SEQ ID NO: 664585 - RNA, 19 nt, Homo sapiens
  misc_RNA (1)...(19): siRNA sense strand
caaaggauucgcaggaaau

SEQ ID NO: 664586 - RNA, 19 nt, Homo sapiens
  misc_RNA (1)...(19): siRNA sense strand
aaccaggucucaaaggauu

SEQ ID NO: 664587 - RNA, 19 nt, Homo sapiens
  misc_RNA (1)...(19): siRNA sense strand
uuacggacuugucggugua

SEQ ID NO: 664588 - RNA, 19 nt, Homo sapiens
  misc_RNA (1)...(19): siRNA sense strand
ggagacccuggcacacuua

SEQ ID NO: 664589 - RNA, 19 nt, Homo sapiens
  misc_RNA (1)...(19): siRNA sense strand
uaaguggauugccaggauu

SEQ ID NO: 664590 - RNA, 19 nt, Homo sapiens
  misc_RNA (1)...(19): siRNA sense strand
agaaccaggucucaaagga

SEQ ID NO: 664591 - RNA, 19 nt, Homo sapiens
  misc_RNA (1)...(19): siRNA sense strand
ugauugggaugaugggauu

SEQ ID NO: 664592 - RNA, 19 nt, Homo sapiens
  misc_RNA (1)...(19): siRNA sense strand
gggugaagauggcauuaag

SEQ ID NO: 664593 - RNA, 19 nt, Homo sapiens
  misc_RNA (1)...(19): siRNA sense strand
aggagaagauauagaacuu

SEQ ID NO: 664594 - RNA, 19 nt, Homo sapiens
  misc_RNA (1)...(19): siRNA sense strand
gggaaagaaaggagaaaug

SEQ ID NO: 664595 - RNA, 19 nt, Homo sapiens
  misc_RNA (1)...(19): siRNA sense strand
ccaggaacaguuauuguga

SEQ ID NO: 664596 - RNA, 19 nt, Homo sapiens
  misc_RNA (1)...(19): siRNA sense strand
gggcaugccagguucuaaa

SEQ ID NO: 664597 - RNA, 19 nt, Homo sapiens
  misc_RNA (1)...(19): siRNA sense strand
ggaccuccaggaccaauug

SEQ ID NO: 664598 - RNA, 19 nt, Homo sapiens
  misc_RNA (1)...(19): siRNA sense strand
uguacacagugcccuuaua

SEQ ID NO: 664599 - RNA, 19 nt, Homo sapiens
  misc_RNA (1)...(19): siRNA sense strand
gaaccaggucucaaaggau

SEQ ID NO: 664600 - RNA, 19 nt, Homo sapiens
  misc_RNA (1)...(19): siRNA sense strand
gaccaagguuuuccaggua

SEQ ID NO: 664601 - RNA, 19 nt, Homo sapiens
  misc_RNA (1)...(19): siRNA sense strand
uggccaggcuugaaaggaa

SEQ ID NO: 664602 - RNA, 19 nt, Homo sapiens
  misc_RNA (1)...(19): siRNA sense strand
gcagggacccaagggcuuu

SEQ ID NO: 664603 - RNA, 19 nt, Homo sapiens
  misc_RNA (1)...(19): siRNA sense strand
caugccagguucuaaagga

SEQ ID NO: 664604 - RNA, 19 nt, Homo sapiens
  misc_RNA (1)...(19): siRNA sense strand
ccuggcacacuuaagauua

SEQ ID NO: 664605 - RNA, 19 nt, Homo sapiens
  misc_RNA (1)...(19): siRNA sense strand
agagccagguuauucagaa

SEQ ID NO: 664606 - RNA, 19 nt, Homo sapiens
  misc_RNA (1)...(19): siRNA sense strand
gauaagggagagccagguu

SEQ ID NO: 664607 - RNA, 19 nt, Homo sapiens
  misc_RNA (1)...(19): siRNA sense strand
ggaccuagaggaccuaagg

SEQ ID NO: 664608 - RNA, 19 nt, Homo sapiens
  misc_RNA (1)...(19): siRNA sense strand
gcaacaaagguucuaaagg

SEQ ID NO: 664609 - RNA, 19 nt, Homo sapiens
  misc_RNA (1)...(19): siRNA sense strand
gacccuggcacacuuaaga

SEQ ID NO: 664610 - RNA, 19 nt, Homo sapiens
  misc_RNA (1)...(19): siRNA sense strand
uaagggagagccagguuau

SEQ ID NO: 664611 - RNA, 19 nt, Homo sapiens
  misc_RNA (1)...(19): siRNA sense strand
caagggcuuuccaggacuu

SEQ ID NO: 664612 - RNA, 19 nt, Homo sapiens
  misc_RNA (1)...(19): siRNA sense strand
ccaggaaucccaggaguug

SEQ ID NO: 664613 - RNA, 19 nt, Homo sapiens
  misc_RNA (1)...(19): siRNA sense strand
gggugcugcugguuugaaa

SEQ ID NO: 664614 - RNA, 19 nt, Homo sapiens
  misc_RNA (1)...(19): siRNA sense strand
uggaaguccuggaucauca

SEQ ID NO: 664615 - RNA, 19 nt, Homo sapiens
  misc_RNA (1)...(19): siRNA sense strand
ccaacagaauauuaugaca

SEQ ID NO: 664616 - RNA, 19 nt, Homo sapiens
  misc_RNA (1)...(19): siRNA sense strand
gacauuggcccuccaggau

SEQ ID NO: 664617 - RNA, 19 nt, Homo sapiens
  misc_RNA (1)...(19): siRNA sense strand
agaccaggccucccaggua

SEQ ID NO: 664618 - RNA, 19 nt, Homo sapiens
  misc_RNA (1)...(19): siRNA sense strand
ggaccaggaacaccagguu

SEQ ID NO: 664619 - RNA, 19 nt, Homo sapiens
  misc_RNA (1)...(19): siRNA sense strand
gagaaagggcuuggaugga

SEQ ID NO: 664620 - RNA, 19 nt, Homo sapiens
  misc_RNA (1)...(19): siRNA sense strand
ggguuucccuggguuaaug

SEQ ID NO: 664621 - RNA, 19 nt, Homo sapiens
  misc_RNA (1)...(19): siRNA sense strand
gagguaagccaggcaagga

SEQ ID NO: 664622 - RNA, 19 nt, Homo sapiens
  misc_RNA (1)...(19): siRNA sense strand
ccagggaugccagguuuaa

SEQ ID NO: 664623 - RNA, 19 nt, Homo sapiens
  misc_RNA (1)...(19): siRNA sense strand
aggugaagauggagugauu

SEQ ID NO: 664624 - RNA, 19 nt, Homo sapiens
  misc_RNA (1)...(19): siRNA sense strand
ggacugccaggcuaucuag

SEQ ID NO: 664625 - RNA, 19 nt, Homo sapiens
  misc_RNA (1)...(19): siRNA sense strand
auaaguggauugccaggau

SEQ ID NO: 664626 - RNA, 19 nt, Homo sapiens
  misc_RNA (1)...(19): siRNA sense strand
ggaccaauggguauaagag

SEQ ID NO: 664627 - RNA, 19 nt, Homo sapiens
  misc_RNA (1)...(19): siRNA sense strand
ggaauuccaggucaucaag

SEQ ID NO: 664628 - RNA, 19 nt, Homo sapiens
  misc_RNA (1)...(19): siRNA sense strand
gaccaggaacaccagguuu

SEQ ID NO: 664629 - RNA, 19 nt, Homo sapiens
  misc_RNA (1)...(19): siRNA sense strand
ggagagcucaguguuucaa

SEQ ID NO: 664630 - RNA, 19 nt, Homo sapiens
  misc_RNA (1)...(19): siRNA sense strand
gaccaaggacgugauggaa

SEQ ID NO: 664631 - RNA, 19 nt, Homo sapiens
  misc_RNA (1)...(19): siRNA sense strand
ggagaagauauagaacuug

SEQ ID NO: 664632 - RNA, 19 nt, Homo sapiens
  misc_RNA (1)...(19): siRNA sense strand
cuccaggucuuccaggauu

SEQ ID NO: 664633 - RNA, 19 nt, Homo sapiens
  misc_RNA (1)...(19): siRNA sense strand
cgggugauaugggaaagaa

SEQ ID NO: 664634 - RNA, 19 nt, Homo sapiens
  misc_RNA (1)...(19): siRNA sense strand
caacaaagguucuaaagga

SEQ ID NO: 664635 - RNA, 19 nt, Homo sapiens
  misc_RNA (1)...(19): siRNA sense strand
gagaagauauagaacuuga

SEQ ID NO: 664636 - RNA, 19 nt, Homo sapiens
  misc_RNA (1)...(19): siRNA sense strand
caacaaggcagaagaggua

SEQ ID NO: 664637 - RNA, 19 nt, Homo sapiens
  misc_RNA (1)...(19): siRNA sense strand
agagauaucccacguaaua

SEQ ID NO: 664638 - RNA, 19 nt, Homo sapiens
  misc_RNA (1)...(19): siRNA sense strand
ccaaggacuuccaggcuua

SEQ ID NO: 664639 - RNA, 19 nt, Homo sapiens
  misc_RNA (1)...(19): siRNA sense strand
ccaaggacgugauggaauu

SEQ ID NO: 664640 - RNA, 19 nt, Homo sapiens
  misc_RNA (1)...(19): siRNA sense strand
gcagcuggcuugaaaggaa

SEQ ID NO: 664641 - RNA, 19 nt, Homo sapiens
  misc_RNA (1)...(19): siRNA sense strand
ucagagauaucccacguaa

SEQ ID NO: 664642 - RNA, 19 nt, Homo sapiens
  misc_RNA (1)...(19): siRNA sense strand
uauaagaggugaccaagga

SEQ ID NO: 664643 - RNA, 19 nt, Homo sapiens
  misc_RNA (1)...(19): siRNA sense strand
caaagaggauauccaggaa

SEQ ID NO: 664644 - RNA, 19 nt, Homo sapiens
  misc_RNA (1)...(19): siRNA sense strand
gaacaaggagauaaaggaa

SEQ ID NO: 664645 - RNA, 19 nt, Homo sapiens
  misc_RNA (1)...(19): siRNA sense strand
gaagauauagaacuugaug

SEQ ID NO: 664646 - RNA, 19 nt, Homo sapiens
  misc_RNA (1)...(19): siRNA sense strand
ccaccaggcucaagaggaa

SEQ ID NO: 664647 - RNA, 19 nt, Homo sapiens
  misc_RNA (1)...(19): siRNA sense strand
gaaagagugauaggacaua

SEQ ID NO: 664648 - RNA, 19 nt, Homo sapiens
  misc_RNA (1)...(19): siRNA sense strand
gaaagggcuuggauggaau

SEQ ID NO: 664649 - RNA, 19 nt, Homo sapiens
  misc_RNA (1)...(19): siRNA sense strand
agaaagggcuuggauggaa

SEQ ID NO: 664650 - RNA, 19 nt, Homo sapiens
  misc_RNA (1)...(19): siRNA sense strand
gaccaggccucccagguau

SEQ ID NO: 664651 - RNA, 19 nt, Homo sapiens
  misc_RNA (1)...(19): siRNA sense strand
guaaagggccagagaggaa

SEQ ID NO: 664652 - RNA, 19 nt, Homo sapiens
  misc_RNA (1)...(19): siRNA sense strand
cagcaaggguugugucugu

SEQ ID NO: 664653 - RNA, 19 nt, Homo sapiens
  misc_RNA (1)...(19): siRNA sense strand
acaaggagauaaaggaaau

SEQ ID NO: 664654 - RNA, 19 nt, Homo sapiens
  misc_RNA (1)...(19): siRNA sense strand
ggaacaaggagauaaagga

SEQ ID NO: 664655 - RNA, 19 nt, Homo sapiens
  misc_RNA (1)...(19): siRNA sense strand
ggaccaccaggaacaguua

SEQ ID NO: 664656 - RNA, 19 nt, Homo sapiens
  misc_RNA (1)...(19): siRNA sense strand
gaaagccuauuccaucaac

SEQ ID NO: 664657 - RNA, 19 nt, Homo sapiens
  misc_RNA (1)...(19): siRNA sense strand
caagggagaaccagcagua

SEQ ID NO: 664658 - RNA, 19 nt, Homo sapiens
  misc_RNA (1)...(19): siRNA sense strand
gagccuggguuaccuggaa

SEQ ID NO: 664659 - RNA, 19 nt, Homo sapiens
  misc_RNA (1)...(19): siRNA sense strand
auacaggucuuccaggauu

SEQ ID NO: 664660 - RNA, 19 nt, Homo sapiens
  misc_RNA (1)...(19): siRNA sense strand
ccacaggcauagaaggauu

SEQ ID NO: 664661 - RNA, 19 nt, Homo sapiens
  misc_RNA (1)...(19): siRNA sense strand
guacacagugcccuuauau

SEQ ID NO: 664662 - RNA, 19 nt, Homo sapiens
  misc_RNA (1)...(19): siRNA sense strand
ggaaaugaagggcuugaug

SEQ ID NO: 664663 - RNA, 19 nt, Homo sapiens
  misc_RNA (1)...(19): siRNA sense strand
ucaaaggauucgcaggaaa

SEQ ID NO: 664664 - RNA, 19 nt, Homo sapiens
  misc_RNA (1)...(19): siRNA sense strand
aaagggugcuccugcuaaa

SEQ ID NO: 664665 - RNA, 19 nt, Homo sapiens
  misc_RNA (1)...(19): siRNA sense strand
gaacccuggugcucaagga

SEQ ID NO: 664666 - RNA, 19 nt, Homo sapiens
  misc_RNA (1)...(19): siRNA sense strand
aggcuuaaauggauugaaa

SEQ ID NO: 664667 - RNA, 19 nt, Homo sapiens
  misc_RNA (1)...(19): siRNA sense strand
ggacuuccaggcuuaaaug

SEQ ID NO: 664668 - RNA, 19 nt, Homo sapiens
  misc_RNA (1)...(19): siRNA sense strand
ugugaaagcuggggaauua

SEQ ID NO: 664669 - RNA, 19 nt, Homo sapiens
  misc_RNA (1)...(19): siRNA sense strand
uaacagaacggaccucaag

SEQ ID NO: 664670 - RNA, 19 nt, Homo sapiens
  misc_RNA (1)...(19): siRNA sense strand
ccuauuccaucaacuguga

SEQ ID NO: 664671 - RNA, 19 nt, Homo sapiens
  misc_RNA (1)...(19): siRNA sense strand
gggauuuccuggagccauu

SEQ ID NO: 664672 - RNA, 19 nt, Homo sapiens
  misc_RNA (1)...(19): siRNA sense strand
aaagggagacccaggaauu

SEQ ID NO: 664673 - RNA, 19 nt, Homo sapiens
  misc_RNA (1)...(19): siRNA sense strand
gcaaggguugugucuguaa

SEQ ID NO: 664674 - RNA, 19 nt, Homo sapiens
  misc_RNA (1)...(19): siRNA sense strand
uaucuagggucuccaggaa

SEQ ID NO: 664675 - RNA, 19 nt, Homo sapiens
  misc_RNA (1)...(19): siRNA sense strand
cauuggcccuccaggauuu

SEQ ID NO: 664676 - RNA, 19 nt, Homo sapiens
  misc_RNA (1)...(19): siRNA sense strand
ggaaagaaaggagaaaugg

SEQ ID NO: 664677 - RNA, 19 nt, Homo sapiens
  misc_RNA (1)...(19): siRNA sense strand
aaagagugauaggacauaa

SEQ ID NO: 664678 - RNA, 19 nt, Homo sapiens
  misc_RNA (1)...(19): siRNA sense strand
uccagggagucauguaaua

SEQ ID NO: 664679 - RNA, 19 nt, Homo sapiens
  misc_RNA (1)...(19): siRNA sense strand
ggucugcccggugcaauua

SEQ ID NO: 664680 - RNA, 19 nt, Homo sapiens
  misc_RNA (1)...(19): siRNA sense strand
caaggguugugucuguaaa

SEQ ID NO: 664681 - RNA, 19 nt, Homo sapiens
  misc_RNA (1)...(19): siRNA sense strand
ucacuggguuguccuggaa

SEQ ID NO: 664682 - RNA, 19 nt, Homo sapiens
  misc_RNA (1)...(19): siRNA sense strand
agaaucauauggaucugaa

SEQ ID NO: 664683 - RNA, 19 nt, Homo sapiens
  misc_RNA (1)...(19): siRNA sense strand
ggaaagccagguccucaug

SEQ ID NO: 664684 - RNA, 19 nt, Homo sapiens
  misc_RNA (1)...(19): siRNA sense strand
aggcgcagcuggcuugaaa

SEQ ID NO: 664685 - RNA, 19 nt, Homo sapiens
  misc_RNA (1)...(19): siRNA sense strand
aagaggauauccaggaaau

SEQ ID NO: 664686 - RNA, 19 nt, Homo sapiens
  misc_RNA (1)...(19): siRNA sense strand
caaaggauucgcaggaaau

SEQ ID NO: 664687 - RNA, 19 nt, Homo sapiens
  misc_RNA (1)...(19): siRNA sense strand
aaccaggucucaaaggauu

SEQ ID NO: 664688 - RNA, 19 nt, Homo sapiens
  misc_RNA (1)...(19): siRNA sense strand
uuacggacuugucggugua

SEQ ID NO: 664689 - RNA, 19 nt, Homo sapiens
  misc_RNA (1)...(19): siRNA sense strand
ggagacccuggcacacuua

SEQ ID NO: 664690 - RNA, 19 nt, Homo sapiens
  misc_RNA (1)...(19): siRNA sense strand
agaaccaggucucaaagga

SEQ ID NO: 664691 - RNA, 19 nt, Homo sapiens
  misc_RNA (1)...(19): siRNA sense strand
ugauugggaugaugggauu

SEQ ID NO: 664692 - RNA, 19 nt, Homo sapiens
  misc_RNA (1)...(19): siRNA sense strand
gggugaagauggcauuaag

SEQ ID NO: 664693 - RNA, 19 nt, Homo sapiens
  misc_RNA (1)...(19): siRNA sense strand
uaaguggauugccaggauu

SEQ ID NO: 664694 - RNA, 19 nt, Homo sapiens
  misc_RNA (1)...(19): siRNA sense strand
aggagaagauauagaacuu

SEQ ID NO: 664695 - RNA, 19 nt, Homo sapiens
  misc_RNA (1)...(19): siRNA sense strand
gggaaagaaaggagaaaug

SEQ ID NO: 664696 - RNA, 19 nt, Homo sapiens
  misc_RNA (1)...(19): siRNA sense strand
ccaggaacaguuauuguga

SEQ ID NO: 664697 - RNA, 19 nt, Homo sapiens
  misc_RNA (1)...(19): siRNA sense strand
gggcaugccagguucuaaa

SEQ ID NO: 664698 - RNA, 19 nt, Homo sapiens
  misc_RNA (1)...(19): siRNA sense strand
ggaccuccaggaccaauug

SEQ ID NO: 664699 - RNA, 19 nt, Homo sapiens
  misc_RNA (1)...(19): siRNA sense strand
uguacacagugcccuuaua

SEQ ID NO: 664700 - RNA, 19 nt, Homo sapiens
  misc_RNA (1)...(19): siRNA sense strand
ugucaggugugcaugaaga

SEQ ID NO: 664701 - RNA, 19 nt, Homo sapiens
  misc_RNA (1)...(19): siRNA sense strand
gaaccaggucucaaaggau

SEQ ID NO: 664702 - RNA, 19 nt, Homo sapiens
  misc_RNA (1)...(19): siRNA sense strand
gaccaagguuuuccaggua

SEQ ID NO: 664703 - RNA, 19 nt, Homo sapiens
  misc_RNA (1)...(19): siRNA sense strand
uggccaggcuugaaaggaa

SEQ ID NO: 664704 - RNA, 19 nt, Homo sapiens
  misc_RNA (1)...(19): siRNA sense strand
gcagggacccaagggcuuu

SEQ ID NO: 664705 - RNA, 19 nt, Homo sapiens
  misc_RNA (1)...(19): siRNA sense strand
caugccagguucuaaagga

SEQ ID NO: 664706 - RNA, 19 nt, Homo sapiens
  misc_RNA (1)...(19): siRNA sense strand
ccuggcacacuuaagauua

SEQ ID NO: 664707 - RNA, 19 nt, Homo sapiens
  misc_RNA (1)...(19): siRNA sense strand
agagccagguuauucagaa

SEQ ID NO: 664708 - RNA, 19 nt, Homo sapiens
  misc_RNA (1)...(19): siRNA sense strand
gauaagggagagccagguu

SEQ ID NO: 664709 - RNA, 19 nt, Homo sapiens
  misc_RNA (1)...(19): siRNA sense strand
ggaccuagaggaccuaagg

SEQ ID NO: 664710 - RNA, 19 nt, Homo sapiens
  misc_RNA (1)...(19): siRNA sense strand
gcugucaggugugcaugaa

SEQ ID NO: 664711 - RNA, 19 nt, Homo sapiens
  misc_RNA (1)...(19): siRNA sense strand
gcaacaaagguucuaaagg

SEQ ID NO: 664712 - RNA, 19 nt, Homo sapiens
  misc_RNA (1)...(19): siRNA sense strand
gacccuggcacacuuaaga

SEQ ID NO: 664713 - RNA, 19 nt, Homo sapiens
  misc_RNA (1)...(19): siRNA sense strand
gggugcugcugguuugaaa

SEQ ID NO: 664714 - RNA, 19 nt, Homo sapiens
  misc_RNA (1)...(19): siRNA sense strand
uaagggagagccagguuau

SEQ ID NO: 664715 - RNA, 19 nt, Homo sapiens
  misc_RNA (1)...(19): siRNA sense strand
caagggcuuuccaggacuu

SEQ ID NO: 664716 - RNA, 19 nt, Homo sapiens
  misc_RNA (1)...(19): siRNA sense strand
ccaggaaucccaggaguug

SEQ ID NO: 664717 - RNA, 19 nt, Homo sapiens
  misc_RNA (1)...(19): siRNA sense strand
uggaaguccuggaucauca

SEQ ID NO: 664718 - RNA, 19 nt, Homo sapiens
  misc_RNA (1)...(19): siRNA sense strand
ccaacagaauauuaugaca

SEQ ID NO: 664719 - RNA, 19 nt, Homo sapiens
  misc_RNA (1)...(19): siRNA sense strand
gacauuggcccuccaggau

SEQ ID NO: 664720 - RNA, 19 nt, Homo sapiens
  misc_RNA (1)...(19): siRNA sense strand
agaccaggccucccaggua

SEQ ID NO: 664721 - RNA, 19 nt, Homo sapiens
  misc_RNA (1)...(19): siRNA sense strand
ggaccaggaacaccagguu

SEQ ID NO: 664722 - RNA, 19 nt, Homo sapiens
  misc_RNA (1)...(19): siRNA sense strand
gagaaagggcuuggaugga

SEQ ID NO: 664723 - RNA, 19 nt, Homo sapiens
  misc_RNA (1)...(19): siRNA sense strand
ggguuucccuggguuaaug

SEQ ID NO: 664724 - RNA, 19 nt, Homo sapiens
  misc_RNA (1)...(19): siRNA sense strand
gagguaagccaggcaagga

SEQ ID NO: 664725 - RNA, 19 nt, Homo sapiens
  misc_RNA (1)...(19): siRNA sense strand
ccagggaugccagguuuaa

SEQ ID NO: 664726 - RNA, 19 nt, Homo sapiens
  misc_RNA (1)...(19): siRNA sense strand
aggugaagauggagugauu

SEQ ID NO: 664727 - RNA, 19 nt, Homo sapiens
  misc_RNA (1)...(19): siRNA sense strand
ggacugccaggcuaucuag

SEQ ID NO: 664728 - RNA, 19 nt, Homo sapiens
  misc_RNA (1)...(19): siRNA sense strand
auaaguggauugccaggau

SEQ ID NO: 664729 - RNA, 19 nt, Homo sapiens
  misc_RNA (1)...(19): siRNA sense strand
ggaccaauggguauaagag

SEQ ID NO: 664730 - RNA, 19 nt, Homo sapiens
  misc_RNA (1)...(19): siRNA sense strand
ggaauuccaggucaucaag

SEQ ID NO: 664731 - RNA, 19 nt, Homo sapiens
  misc_RNA (1)...(19): siRNA sense strand
gaccaggaacaccagguuu

SEQ ID NO: 664732 - RNA, 19 nt, Homo sapiens
  misc_RNA (1)...(19): siRNA sense strand
cuccaggucuuccaggauu

SEQ ID NO: 664733 - RNA, 19 nt, Homo sapiens
  misc_RNA (1)...(19): siRNA sense strand
gaccaaggacgugauggaa

SEQ ID NO: 664734 - RNA, 19 nt, Homo sapiens
  misc_RNA (1)...(19): siRNA sense strand
caacaaagguucuaaagga

SEQ ID NO: 664735 - RNA, 19 nt, Homo sapiens
  misc_RNA (1)...(19): siRNA sense strand
gagaagauauagaacuuga

SEQ ID NO: 664736 - RNA, 19 nt, Homo sapiens
  misc_RNA (1)...(19): siRNA sense strand
caacaaggcagaagaggua

SEQ ID NO: 664737 - RNA, 19 nt, Homo sapiens
  misc_RNA (1)...(19): siRNA sense strand
agagauaucccacguaaua

SEQ ID NO: 664738 - RNA, 19 nt, Homo sapiens
  misc_RNA (1)...(19): siRNA sense strand
ccaaggacuuccaggcuua

SEQ ID NO: 664739 - RNA, 19 nt, Homo sapiens
  misc_RNA (1)...(19): siRNA sense strand
ccaaggacgugauggaauu

SEQ ID NO: 664740 - RNA, 19 nt, Homo sapiens
  misc_RNA (1)...(19): siRNA sense strand
gcagcuggcuugaaaggaa

SEQ ID NO: 664741 - RNA, 19 nt, Homo sapiens
  misc_RNA (1)...(19): siRNA sense strand
ucagagauaucccacguaa

SEQ ID NO: 664742 - RNA, 19 nt, Homo sapiens
  misc_RNA (1)...(19): siRNA sense strand
uauaagaggugaccaagga

SEQ ID NO: 664743 - RNA, 19 nt, Homo sapiens
  misc_RNA (1)...(19): siRNA sense strand
caaagaggauauccaggaa

SEQ ID NO: 664744 - RNA, 19 nt, Homo sapiens
  misc_RNA (1)...(19): siRNA sense strand
gaacaaggagauaaaggaa

SEQ ID NO: 664745 - RNA, 19 nt, Homo sapiens
  misc_RNA (1)...(19): siRNA sense strand
gaaaagacacugaagcuaa

SEQ ID NO: 664746 - RNA, 19 nt, Homo sapiens
  misc_RNA (1)...(19): siRNA sense strand
gaagauauagaacuugaug

SEQ ID NO: 664747 - RNA, 19 nt, Homo sapiens
  misc_RNA (1)...(19): siRNA sense strand
ccaccaggcucaagaggaa

SEQ ID NO: 664748 - RNA, 19 nt, Homo sapiens
  misc_RNA (1)...(19): siRNA sense strand
gaaagagugauaggacaua

SEQ ID NO: 664749 - RNA, 19 nt, Homo sapiens
  misc_RNA (1)...(19): siRNA sense strand
gaaagggcuuggauggaau

SEQ ID NO: 664750 - RNA, 19 nt, Homo sapiens
  misc_RNA (1)...(19): siRNA sense strand
agaaagggcuuggauggaa

SEQ ID NO: 664751 - RNA, 19 nt, Homo sapiens
  misc_RNA (1)...(19): siRNA sense strand
gaccaggccucccagguau

SEQ ID NO: 664752 - RNA, 19 nt, Homo sapiens
  misc_RNA (1)...(19): siRNA sense strand
guaaagggccagagaggaa

SEQ ID NO: 664753 - RNA, 19 nt, Homo sapiens
  misc_RNA (1)...(19): siRNA sense strand
cagcaaggguugugucugu

SEQ ID NO: 664754 - RNA, 19 nt, Homo sapiens
  misc_RNA (1)...(19): siRNA sense strand
acaaggagauaaaggaaau

SEQ ID NO: 664755 - RNA, 19 nt, Homo sapiens
  misc_RNA (1)...(19): siRNA sense strand
ggaacaaggagauaaagga

SEQ ID NO: 664756 - RNA, 19 nt, Homo sapiens
  misc_RNA (1)...(19): siRNA sense strand
ggaccaccaggaacaguua

SEQ ID NO: 664757 - RNA, 19 nt, Homo sapiens
  misc_RNA (1)...(19): siRNA sense strand
gaacaaaguaaugacagaa

SEQ ID NO: 664758 - RNA, 19 nt, Homo sapiens
  misc_RNA (1)...(19): siRNA sense strand
gaaagccuauuccaucaac

SEQ ID NO: 664759 - RNA, 19 nt, Homo sapiens
  misc_RNA (1)...(19): siRNA sense strand
caagggagaaccagcagua

SEQ ID NO: 664760 - RNA, 19 nt, Homo sapiens
  misc_RNA (1)...(19): siRNA sense strand
gagccuggguuaccuggaa

SEQ ID NO: 664761 - RNA, 19 nt, Homo sapiens
  misc_RNA (1)...(19): siRNA sense strand
auacaggucuuccaggauu

SEQ ID NO: 664762 - RNA, 19 nt, Homo sapiens
  misc_RNA (1)...(19): siRNA sense strand
ccacaggcauagaaggauu

SEQ ID NO: 664763 - RNA, 19 nt, Homo sapiens
  misc_RNA (1)...(19): siRNA sense strand
guacacagugcccuuauau

SEQ ID NO: 664764 - RNA, 19 nt, Homo sapiens
  misc_RNA (1)...(19): siRNA sense strand
ggaaaugaagggcuugaug

SEQ ID NO: 664765 - RNA, 19 nt, Homo sapiens
  misc_RNA (1)...(19): siRNA sense strand
ucaaaggauucgcaggaaa

SEQ ID NO: 664766 - RNA, 19 nt, Homo sapiens
  misc_RNA (1)...(19): siRNA sense strand
aaagggugcuccugcuaaa

SEQ ID NO: 664767 - RNA, 19 nt, Homo sapiens
  misc_RNA (1)...(19): siRNA sense strand
gaacccuggugcucaagga

SEQ ID NO: 664768 - RNA, 19 nt, Homo sapiens
  misc_RNA (1)...(19): siRNA sense strand
aggcuuaaauggauugaaa

SEQ ID NO: 664769 - RNA, 19 nt, Homo sapiens
  misc_RNA (1)...(19): siRNA sense strand
ggacuuccaggcuuaaaug

SEQ ID NO: 664770 - RNA, 19 nt, Homo sapiens
  misc_RNA (1)...(19): siRNA sense strand
ugugaaagcuggggaauua

SEQ ID NO: 664771 - RNA, 19 nt, Homo sapiens
  misc_RNA (1)...(19): siRNA sense strand
uaacagaacggaccucaag

SEQ ID NO: 664772 - RNA, 19 nt, Homo sapiens
  misc_RNA (1)...(19): siRNA sense strand
ccuauuccaucaacuguga

SEQ ID NO: 664773 - RNA, 19 nt, Homo sapiens
  misc_RNA (1)...(19): siRNA sense strand
gggauuuccuggagccauu

SEQ ID NO: 664774 - RNA, 19 nt, Homo sapiens
  misc_RNA (1)...(19): siRNA sense strand
aaagggagacccaggaauu

SEQ ID NO: 664775 - RNA, 19 nt, Homo sapiens
  misc_RNA (1)...(19): siRNA sense strand
gcaaggguugugucuguaa

SEQ ID NO: 664776 - RNA, 19 nt, Homo sapiens
  misc_RNA (1)...(19): siRNA sense strand
uaucuagggucuccaggaa

SEQ ID NO: 664777 - RNA, 19 nt, Homo sapiens
  misc_RNA (1)...(19): siRNA sense strand
cauuggcccuccaggauuu

SEQ ID NO: 664778 - RNA, 19 nt, Homo sapiens
  misc_RNA (1)...(19): siRNA sense strand
ggaaagaaaggagaaaugg

SEQ ID NO: 664779 - RNA, 19 nt, Homo sapiens
  misc_RNA (1)...(19): siRNA sense strand
aaagagugauaggacauaa

SEQ ID NO: 664780 - RNA, 19 nt, Homo sapiens
  misc_RNA (1)...(19): siRNA sense strand
uccagggagucauguaaua

SEQ ID NO: 664781 - RNA, 19 nt, Homo sapiens
  misc_RNA (1)...(19): siRNA sense strand
ggucugcccggugcaauua

SEQ ID NO: 664782 - RNA, 19 nt, Homo sapiens
  misc_RNA (1)...(19): siRNA sense strand
caaggguugugucuguaaa

SEQ ID NO: 664783 - RNA, 19 nt, Homo sapiens
  misc_RNA (1)...(19): siRNA sense strand
ucacuggguuguccuggaa

SEQ ID NO: 664784 - RNA, 19 nt, Homo sapiens
  misc_RNA (1)...(19): siRNA sense strand
agaaucauauggaucugaa

SEQ ID NO: 664785 - RNA, 19 nt, Homo sapiens
  misc_RNA (1)...(19): siRNA sense strand
ggaaagccagguccucaug

SEQ ID NO: 664786 - RNA, 19 nt, Homo sapiens
  misc_RNA (1)...(19): siRNA sense strand
aggcgcagcuggcuugaaa

SEQ ID NO: 664787 - RNA, 19 nt, Homo sapiens
  misc_RNA (1)...(19): siRNA sense strand
aagaggauauccaggaaau

SEQ ID NO: 664788 - RNA, 19 nt, Homo sapiens
  misc_RNA (1)...(19): siRNA sense strand
caaaggauucgcaggaaau

SEQ ID NO: 664789 - RNA, 19 nt, Homo sapiens
  misc_RNA (1)...(19): siRNA sense strand
aaccaggucucaaaggauu

SEQ ID NO: 664790 - RNA, 19 nt, Homo sapiens
  misc_RNA (1)...(19): siRNA sense strand
gggugaagauggcauuaag

SEQ ID NO: 664791 - RNA, 19 nt, Homo sapiens
  misc_RNA (1)...(19): siRNA sense strand
agaacaaaguaaugacaga

SEQ ID NO: 664792 - RNA, 19 nt, Homo sapiens
  misc_RNA (1)...(19): siRNA sense strand
ggagacccuggcacacuua

SEQ ID NO: 664793 - RNA, 19 nt, Homo sapiens
  misc_RNA (1)...(19): siRNA sense strand
uaaguggauugccaggauu

SEQ ID NO: 664794 - RNA, 19 nt, Homo sapiens
  misc_RNA (1)...(19): siRNA sense strand
agaaccaggucucaaagga

SEQ ID NO: 664795 - RNA, 19 nt, Homo sapiens
  misc_RNA (1)...(19): siRNA sense strand
ugauugggaugaugggauu

SEQ ID NO: 664796 - RNA, 19 nt, Homo sapiens
  misc_RNA (1)...(19): siRNA sense strand
uuacggacuugucggugua

SEQ ID NO: 664797 - RNA, 19 nt, Homo sapiens
  misc_RNA (1)...(19): siRNA sense strand
aggagaagauauagaacuu

SEQ ID NO: 664798 - RNA, 19 nt, Homo sapiens
  misc_RNA (1)...(19): siRNA sense strand
gggaaagaaaggagaaaug

SEQ ID NO: 664799 - RNA, 19 nt, Homo sapiens
  misc_RNA (1)...(19): siRNA sense strand
ccaggaacaguuauuguga

SEQ ID NO: 664800 - RNA, 19 nt, Homo sapiens
  misc_RNA (1)...(19): siRNA sense strand
gggcaugccagguucuaaa

SEQ ID NO: 664801 - RNA, 19 nt, Homo sapiens
  misc_RNA (1)...(19): siRNA sense strand
aaaagacacugaagcuaaa

SEQ ID NO: 664802 - RNA, 19 nt, Homo sapiens
  misc_RNA (1)...(19): siRNA sense strand
ggaccuccaggaccaauug

SEQ ID NO: 664803 - RNA, 19 nt, Homo sapiens
  misc_RNA (1)...(19): siRNA sense strand
uguacacagugcccuuaua

SEQ ID NO: 664804 - RNA, 19 nt, Homo sapiens
  misc_RNA (1)...(19): siRNA sense strand
acaaaguaaugacagaaca

SEQ ID NO: 664805 - RNA, 19 nt, Homo sapiens
  misc_RNA (1)...(19): siRNA sense strand
ugucaggugugcaugaaga

SEQ ID NO: 664806 - RNA, 19 nt, Homo sapiens
  misc_RNA (1)...(19): siRNA sense strand
gaaccaggucucaaaggau

SEQ ID NO: 664807 - RNA, 19 nt, Homo sapiens
  misc_RNA (1)...(19): siRNA sense strand
gaccaagguuuuccaggua

SEQ ID NO: 664808 - RNA, 19 nt, Homo sapiens
  misc_RNA (1)...(19): siRNA sense strand
uggccaggcuugaaaggaa

SEQ ID NO: 664809 - RNA, 19 nt, Homo sapiens
  misc_RNA (1)...(19): siRNA sense strand
gcagggacccaagggcuuu

SEQ ID NO: 664810 - RNA, 19 nt, Homo sapiens
  misc_RNA (1)...(19): siRNA sense strand
caugccagguucuaaagga

SEQ ID NO: 664811 - RNA, 19 nt, Homo sapiens
  misc_RNA (1)...(19): siRNA sense strand
ccuggcacacuuaagauua

SEQ ID NO: 664812 - RNA, 19 nt, Homo sapiens
  misc_RNA (1)...(19): siRNA sense strand
agagccagguuauucagaa

SEQ ID NO: 664813 - RNA, 19 nt, Homo sapiens
  misc_RNA (1)...(19): siRNA sense strand
gauaagggagagccagguu

SEQ ID NO: 664814 - RNA, 19 nt, Homo sapiens
  misc_RNA (1)...(19): siRNA sense strand
ggaccuagaggaccuaagg

SEQ ID NO: 664815 - RNA, 19 nt, Homo sapiens
  misc_RNA (1)...(19): siRNA sense strand
caagggcuuuccaggacuu

SEQ ID NO: 664816 - RNA, 19 nt, Homo sapiens
  misc_RNA (1)...(19): siRNA sense strand
gcugucaggugugcaugaa

SEQ ID NO: 664817 - RNA, 19 nt, Homo sapiens
  misc_RNA (1)...(19): siRNA sense strand
gcaacaaagguucuaaagg

SEQ ID NO: 664818 - RNA, 19 nt, Homo sapiens
  misc_RNA (1)...(19): siRNA sense strand
gacccuggcacacuuaaga

SEQ ID NO: 664819 - RNA, 19 nt, Homo sapiens
  misc_RNA (1)...(19): siRNA sense strand
gggugcugcugguuugaaa

SEQ ID NO: 664820 - RNA, 19 nt, Homo sapiens
  misc_RNA (1)...(19): siRNA sense strand
uaagggagagccagguuau

SEQ ID NO: 664821 - RNA, 19 nt, Homo sapiens
  misc_RNA (1)...(19): siRNA sense strand
ccaggaaucccaggaguug

SEQ ID NO: 664822 - RNA, 19 nt, Homo sapiens
  misc_RNA (1)...(19): siRNA sense strand
uggaaguccuggaucauca

SEQ ID NO: 664823 - RNA, 19 nt, Homo sapiens
  misc_RNA (1)...(19): siRNA sense strand
ccaacagaauauuaugaca

SEQ ID NO: 664824 - RNA, 19 nt, Homo sapiens
  misc_RNA (1)...(19): siRNA sense strand
gacauuggcccuccaggau

SEQ ID NO: 664825 - RNA, 19 nt, Homo sapiens
  misc_RNA (1)...(19): siRNA sense strand
agaccaggccucccaggua

SEQ ID NO: 664826 - RNA, 19 nt, Homo sapiens
  misc_RNA (1)...(19): siRNA sense strand
ggaccaggaacaccagguu

SEQ ID NO: 664827 - RNA, 19 nt, Homo sapiens
  misc_RNA (1)...(19): siRNA sense strand
gagaaagggcuuggaugga

SEQ ID NO: 664828 - RNA, 19 nt, Homo sapiens
  misc_RNA (1)...(19): siRNA sense strand
ggguuucccuggguuaaug

SEQ ID NO: 664829 - RNA, 19 nt, Homo sapiens
  misc_RNA (1)...(19): siRNA sense strand
cauccuaaagaacaaagua

SEQ ID NO: 664830 - RNA, 19 nt, Homo sapiens
  misc_RNA (1)...(19): siRNA sense strand
gagguaagccaggcaagga

SEQ ID NO: 664831 - RNA, 19 nt, Homo sapiens
  misc_RNA (1)...(19): siRNA sense strand
ccagggaugccagguuuaa

SEQ ID NO: 664832 - RNA, 19 nt, Homo sapiens
  misc_RNA (1)...(19): siRNA sense strand
aggugaagauggagugauu

SEQ ID NO: 664833 - RNA, 19 nt, Homo sapiens
  misc_RNA (1)...(19): siRNA sense strand
ggacugccaggcuaucuag

SEQ ID NO: 664834 - RNA, 19 nt, Homo sapiens
  misc_RNA (1)...(19): siRNA sense strand
caacaaagguucuaaagga

SEQ ID NO: 664835 - RNA, 19 nt, Homo sapiens
  misc_RNA (1)...(19): siRNA sense strand
gagaagauauagaacuuga

SEQ ID NO: 664836 - RNA, 19 nt, Homo sapiens
  misc_RNA (1)...(19): siRNA sense strand
caacaaggcagaagaggua

SEQ ID NO: 664837 - RNA, 19 nt, Homo sapiens
  misc_RNA (1)...(19): siRNA sense strand
agagauaucccacguaaua

SEQ ID NO: 664838 - RNA, 19 nt, Homo sapiens
  misc_RNA (1)...(19): siRNA sense strand
ccaaggacuuccaggcuua

SEQ ID NO: 664839 - RNA, 19 nt, Homo sapiens
  misc_RNA (1)...(19): siRNA sense strand
ccaaggacgugauggaauu

SEQ ID NO: 664840 - RNA, 19 nt, Homo sapiens
  misc_RNA (1)...(19): siRNA sense strand
gcagcuggcuugaaaggaa

SEQ ID NO: 664841 - RNA, 19 nt, Homo sapiens
  misc_RNA (1)...(19): siRNA sense strand
ucagagauaucccacguaa

SEQ ID NO: 664842 - RNA, 19 nt, Homo sapiens
  misc_RNA (1)...(19): siRNA sense strand
uauaagaggugaccaagga

SEQ ID NO: 664843 - RNA, 19 nt, Homo sapiens
  misc_RNA (1)...(19): siRNA sense strand
caaagaggauauccaggaa

SEQ ID NO: 664844 - RNA, 19 nt, Homo sapiens
  misc_RNA (1)...(19): siRNA sense strand
gaacaaggagauaaaggaa

SEQ ID NO: 664845 - RNA, 19 nt, Homo sapiens
  misc_RNA (1)...(19): siRNA sense strand
gaagauauagaacuugaug

SEQ ID NO: 664846 - RNA, 19 nt, Homo sapiens
  misc_RNA (1)...(19): siRNA sense strand
ccaccaggcucaagaggaa

SEQ ID NO: 664847 - RNA, 19 nt, Homo sapiens
  misc_RNA (1)...(19): siRNA sense strand
gaaagagugauaggacaua

SEQ ID NO: 664848 - RNA, 19 nt, Homo sapiens
  misc_RNA (1)...(19): siRNA sense strand
gaaagggcuuggauggaau

SEQ ID NO: 664849 - RNA, 19 nt, Homo sapiens
  misc_RNA (1)...(19): siRNA sense strand
agaaagggcuuggauggaa

SEQ ID NO: 664850 - RNA, 19 nt, Homo sapiens
  misc_RNA (1)...(19): siRNA sense strand
gaccaggccucccagguau

SEQ ID NO: 664851 - RNA, 19 nt, Homo sapiens
  misc_RNA (1)...(19): siRNA sense strand
guaaagggccagagaggaa

SEQ ID NO: 664852 - RNA, 19 nt, Homo sapiens
  misc_RNA (1)...(19): siRNA sense strand
cagcaaggguugugucugu

SEQ ID NO: 664853 - RNA, 19 nt, Homo sapiens
  misc_RNA (1)...(19): siRNA sense strand
acaaggagauaaaggaaau

SEQ ID NO: 664854 - RNA, 19 nt, Homo sapiens
  misc_RNA (1)...(19): siRNA sense strand
ggaacaaggagauaaagga

SEQ ID NO: 664855 - RNA, 19 nt, Homo sapiens
  misc_RNA (1)...(19): siRNA sense strand
ggaccaccaggaacaguua

SEQ ID NO: 664856 - RNA, 19 nt, Homo sapiens
  misc_RNA (1)...(19): siRNA sense strand
caagggagaaccagcagua

SEQ ID NO: 664857 - RNA, 19 nt, Homo sapiens
  misc_RNA (1)...(19): siRNA sense strand
gagccuggguuaccuggaa

SEQ ID NO: 664858 - RNA, 19 nt, Homo sapiens
  misc_RNA (1)...(19): siRNA sense strand
auacaggucuuccaggauu

SEQ ID NO: 664859 - RNA, 19 nt, Homo sapiens
  misc_RNA (1)...(19): siRNA sense strand
ccacaggcauagaaggauu

SEQ ID NO: 664860 - RNA, 19 nt, Homo sapiens
  misc_RNA (1)...(19): siRNA sense strand
guacacagugcccuuauau

SEQ ID NO: 664861 - RNA, 19 nt, Homo sapiens
  misc_RNA (1)...(19): siRNA sense strand
ggaaaugaagggcuugaug

SEQ ID NO: 664862 - RNA, 19 nt, Homo sapiens
  misc_RNA (1)...(19): siRNA sense strand
ucaaaggauucgcaggaaa

SEQ ID NO: 664863 - RNA, 19 nt, Homo sapiens
  misc_RNA (1)...(19): siRNA sense strand
aaagggugcuccugcuaaa

SEQ ID NO: 664864 - RNA, 19 nt, Homo sapiens
  misc_RNA (1)...(19): siRNA sense strand
gaacccuggugcucaagga

SEQ ID NO: 664865 - RNA, 19 nt, Homo sapiens
  misc_RNA (1)...(19): siRNA sense strand
aggcuuaaauggauugaaa

SEQ ID NO: 664866 - RNA, 19 nt, Homo sapiens
  misc_RNA (1)...(19): siRNA sense strand
ggacuuccaggcuuaaaug

SEQ ID NO: 664867 - RNA, 19 nt, Homo sapiens
  misc_RNA (1)...(19): siRNA sense strand
uaacagaacggaccucaag

SEQ ID NO: 664868 - RNA, 19 nt, Homo sapiens
  misc_RNA (1)...(19): siRNA sense strand
gggauuuccuggagccauu

SEQ ID NO: 664869 - RNA, 19 nt, Homo sapiens
  misc_RNA (1)...(19): siRNA sense strand
aaagggagacccaggaauu

SEQ ID NO: 664870 - RNA, 19 nt, Homo sapiens
  misc_RNA (1)...(19): siRNA sense strand
gcaaggguugugucuguaa

SEQ ID NO: 664871 - RNA, 19 nt, Homo sapiens
  misc_RNA (1)...(19): siRNA sense strand
uaucuagggucuccaggaa

SEQ ID NO: 664872 - RNA, 19 nt, Homo sapiens
  misc_RNA (1)...(19): siRNA sense strand
cauuggcccuccaggauuu

SEQ ID NO: 664873 - RNA, 19 nt, Homo sapiens
  misc_RNA (1)...(19): siRNA sense strand
ggaaagaaaggagaaaugg

SEQ ID NO: 664874 - RNA, 19 nt, Homo sapiens
  misc_RNA (1)...(19): siRNA sense strand
aaagagugauaggacauaa

SEQ ID NO: 664875 - RNA, 19 nt, Homo sapiens
  misc_RNA (1)...(19): siRNA sense strand
uccagggagucauguaaua

SEQ ID NO: 664876 - RNA, 19 nt, Homo sapiens
  misc_RNA (1)...(19): siRNA sense strand
ggucugcccggugcaauua

SEQ ID NO: 664877 - RNA, 19 nt, Homo sapiens
  misc_RNA (1)...(19): siRNA sense strand
caaggguugugucuguaaa

SEQ ID NO: 664878 - RNA, 19 nt, Homo sapiens
  misc_RNA (1)...(19): siRNA sense strand
ucacuggguuguccuggaa

SEQ ID NO: 664879 - RNA, 19 nt, Homo sapiens
  misc_RNA (1)...(19): siRNA sense strand
agaaucauauggaucugaa

SEQ ID NO: 664880 - RNA, 19 nt, Homo sapiens
  misc_RNA (1)...(19): siRNA sense strand
ggaaagccagguccucaug

SEQ ID NO: 664881 - RNA, 19 nt, Homo sapiens
  misc_RNA (1)...(19): siRNA sense strand
aggcgcagcuggcuugaaa

SEQ ID NO: 664882 - RNA, 19 nt, Homo sapiens
  misc_RNA (1)...(19): siRNA sense strand
aagaggauauccaggaaau

SEQ ID NO: 664883 - RNA, 19 nt, Homo sapiens
  misc_RNA (1)...(19): siRNA sense strand
caaaggauucgcaggaaau

SEQ ID NO: 664884 - RNA, 19 nt, Homo sapiens
  misc_RNA (1)...(19): siRNA sense strand
aaccaggucucaaaggauu

SEQ ID NO: 664885 - RNA, 19 nt, Homo sapiens
  misc_RNA (1)...(19): siRNA sense strand
uuacggacuugucggugua

SEQ ID NO: 664886 - RNA, 19 nt, Homo sapiens
  misc_RNA (1)...(19): siRNA sense strand
ggagacccuggcacacuua

SEQ ID NO: 664887 - RNA, 19 nt, Homo sapiens
  misc_RNA (1)...(19): siRNA sense strand
agaaccaggucucaaagga

SEQ ID NO: 664888 - RNA, 19 nt, Homo sapiens
  misc_RNA (1)...(19): siRNA sense strand
ugauugggaugaugggauu

SEQ ID NO: 664889 - RNA, 19 nt, Homo sapiens
  misc_RNA (1)...(19): siRNA sense strand
gggugaagauggcauuaag

SEQ ID NO: 664890 - RNA, 19 nt, Homo sapiens
  misc_RNA (1)...(19): siRNA sense strand
uaaguggauugccaggauu

SEQ ID NO: 664891 - RNA, 19 nt, Homo sapiens
  misc_RNA (1)...(19): siRNA sense strand
aggagaagauauagaacuu

SEQ ID NO: 664892 - RNA, 19 nt, Homo sapiens
  misc_RNA (1)...(19): siRNA sense strand
gggaaagaaaggagaaaug

SEQ ID NO: 664893 - RNA, 19 nt, Homo sapiens
  misc_RNA (1)...(19): siRNA sense strand
ccaggaacaguuauuguga

SEQ ID NO: 664894 - RNA, 19 nt, Homo sapiens
  misc_RNA (1)...(19): siRNA sense strand
gggcaugccagguucuaaa

SEQ ID NO: 664895 - RNA, 19 nt, Homo sapiens
  misc_RNA (1)...(19): siRNA sense strand
ggaccuccaggaccaauug

SEQ ID NO: 664896 - RNA, 19 nt, Homo sapiens
  misc_RNA (1)...(19): siRNA sense strand
uguacacagugcccuuaua

SEQ ID NO: 664897 - RNA, 19 nt, Homo sapiens
  misc_RNA (1)...(19): siRNA sense strand
gaaccaggucucaaaggau

SEQ ID NO: 664898 - RNA, 19 nt, Homo sapiens
  misc_RNA (1)...(19): siRNA sense strand
gaccaagguuuuccaggua

SEQ ID NO: 664899 - RNA, 19 nt, Homo sapiens
  misc_RNA (1)...(19): siRNA sense strand
uggccaggcuugaaaggaa

SEQ ID NO: 664900 - RNA, 19 nt, Homo sapiens
  misc_RNA (1)...(19): siRNA sense strand
gcagggacccaagggcuuu

SEQ ID NO: 664901 - RNA, 19 nt, Homo sapiens
  misc_RNA (1)...(19): siRNA sense strand
caugccagguucuaaagga

SEQ ID NO: 664902 - RNA, 19 nt, Homo sapiens
  misc_RNA (1)...(19): siRNA sense strand
ccuggcacacuuaagauua

SEQ ID NO: 664903 - RNA, 19 nt, Homo sapiens
  misc_RNA (1)...(19): siRNA sense strand
agagccagguuauucagaa

SEQ ID NO: 664904 - RNA, 19 nt, Homo sapiens
  misc_RNA (1)...(19): siRNA sense strand
gauaagggagagccagguu

SEQ ID NO: 664905 - RNA, 19 nt, Homo sapiens
  misc_RNA (1)...(19): siRNA sense strand
ggaccuagaggaccuaagg

SEQ ID NO: 664906 - RNA, 19 nt, Homo sapiens
  misc_RNA (1)...(19): siRNA sense strand
gcaacaaagguucuaaagg

SEQ ID NO: 664907 - RNA, 19 nt, Homo sapiens
  misc_RNA (1)...(19): siRNA sense strand
gacccuggcacacuuaaga

SEQ ID NO: 664908 - RNA, 19 nt, Homo sapiens
  misc_RNA (1)...(19): siRNA sense strand
uaagggagagccagguuau

SEQ ID NO: 664909 - RNA, 19 nt, Homo sapiens
  misc_RNA (1)...(19): siRNA sense strand
caagggcuuuccaggacuu

SEQ ID NO: 664910 - RNA, 19 nt, Homo sapiens
  misc_RNA (1)...(19): siRNA sense strand
ccaggaaucccaggaguug

SEQ ID NO: 664911 - RNA, 19 nt, Homo sapiens
  misc_RNA (1)...(19): siRNA sense strand
uggaaguccuggaucauca

SEQ ID NO: 664912 - RNA, 19 nt, Homo sapiens
  misc_RNA (1)...(19): siRNA sense strand
ccaacagaauauuaugaca

SEQ ID NO: 664913 - RNA, 19 nt, Homo sapiens
  misc_RNA (1)...(19): siRNA sense strand
gggugcugcugguuugaaa

SEQ ID NO: 664914 - RNA, 19 nt, Homo sapiens
  misc_RNA (1)...(19): siRNA sense strand
gacauuggcccuccaggau

SEQ ID NO: 664915 - RNA, 19 nt, Homo sapiens
  misc_RNA (1)...(19): siRNA sense strand
agaccaggccucccaggua

SEQ ID NO: 664916 - RNA, 19 nt, Homo sapiens
  misc_RNA (1)...(19): siRNA sense strand
ggaccaggaacaccagguu

SEQ ID NO: 664917 - RNA, 19 nt, Homo sapiens
  misc_RNA (1)...(19): siRNA sense strand
gagaaagggcuuggaugga

SEQ ID NO: 664918 - RNA, 19 nt, Homo sapiens
  misc_RNA (1)...(19): siRNA sense strand
ggguuucccuggguuaaug

SEQ ID NO: 664919 - RNA, 19 nt, Homo sapiens
  misc_RNA (1)...(19): siRNA sense strand
gagguaagccaggcaagga

SEQ ID NO: 664920 - RNA, 19 nt, Homo sapiens
  misc_RNA (1)...(19): siRNA sense strand
ccagggaugccagguuuaa

SEQ ID NO: 664921 - RNA, 19 nt, Homo sapiens
  misc_RNA (1)...(19): siRNA sense strand
aggugaagauggagugauu

SEQ ID NO: 664922 - RNA, 19 nt, Homo sapiens
  misc_RNA (1)...(19): siRNA sense strand
ggacugccaggcuaucuag

SEQ ID NO: 664923 - RNA, 19 nt, Homo sapiens
  misc_RNA (1)...(19): siRNA sense strand
auaaguggauugccaggau

SEQ ID NO: 664924 - RNA, 19 nt, Homo sapiens
  misc_RNA (1)...(19): siRNA sense strand
ggaccaauggguauaagag

SEQ ID NO: 664925 - RNA, 19 nt, Homo sapiens
  misc_RNA (1)...(19): siRNA sense strand
ggaauuccaggucaucaag

SEQ ID NO: 664926 - RNA, 19 nt, Homo sapiens
  misc_RNA (1)...(19): siRNA sense strand
gaccaggaacaccagguuu

SEQ ID NO: 664927 - RNA, 19 nt, Homo sapiens
  misc_RNA (1)...(19): siRNA sense strand
ggaaaacccggaaaagaug

SEQ ID NO: 664928 - RNA, 19 nt, Homo sapiens
  misc_RNA (1)...(19): siRNA sense strand
gaccaaggacgugauggaa

SEQ ID NO: 664929 - RNA, 19 nt, Homo sapiens
  misc_RNA (1)...(19): siRNA sense strand
cuccaggucuuccaggauu

SEQ ID NO: 664930 - RNA, 19 nt, Homo sapiens
  misc_RNA (1)...(19): siRNA sense strand
cgggugauaugggaaagaa

SEQ ID NO: 664931 - RNA, 19 nt, Homo sapiens
  misc_RNA (1)...(19): siRNA sense strand
ggagaagauauagaacuug

SEQ ID NO: 664932 - RNA, 19 nt, Homo sapiens
  misc_RNA (1)...(19): siRNA sense strand
ggagagcucaguguuucaa

SEQ ID NO: 664933 - RNA, 19 nt, Homo sapiens
  misc_RNA (1)...(19): siRNA sense strand
uggcccaccuggacauuug

SEQ ID NO: 664934 - RNA, 19 nt, Homo sapiens
  misc_RNA (1)...(19): siRNA sense strand
caacaaagguucuaaagga

SEQ ID NO: 664935 - RNA, 19 nt, Homo sapiens
  misc_RNA (1)...(19): siRNA sense strand
gagaagauauagaacuuga

SEQ ID NO: 664936 - RNA, 19 nt, Homo sapiens
  misc_RNA (1)...(19): siRNA sense strand
caacaaggcagaagaggua

SEQ ID NO: 664937 - RNA, 19 nt, Homo sapiens
  misc_RNA (1)...(19): siRNA sense strand
agagauaucccacguaaua

SEQ ID NO: 664938 - RNA, 19 nt, Homo sapiens
  misc_RNA (1)...(19): siRNA sense strand
ccaaggacuuccaggcuua

SEQ ID NO: 664939 - RNA, 19 nt, Homo sapiens
  misc_RNA (1)...(19): siRNA sense strand
ccaaggacgugauggaauu

SEQ ID NO: 664940 - RNA, 19 nt, Homo sapiens
  misc_RNA (1)...(19): siRNA sense strand
gcagcuggcuugaaaggaa

SEQ ID NO: 664941 - RNA, 19 nt, Homo sapiens
  misc_RNA (1)...(19): siRNA sense strand
ucagagauaucccacguaa

SEQ ID NO: 664942 - RNA, 19 nt, Homo sapiens
  misc_RNA (1)...(19): siRNA sense strand
uauaagaggugaccaagga

SEQ ID NO: 664943 - RNA, 19 nt, Homo sapiens
  misc_RNA (1)...(19): siRNA sense strand
caaagaggauauccaggaa

SEQ ID NO: 664944 - RNA, 19 nt, Homo sapiens
  misc_RNA (1)...(19): siRNA sense strand
gaacaaggagauaaaggaa

SEQ ID NO: 664945 - RNA, 19 nt, Homo sapiens
  misc_RNA (1)...(19): siRNA sense strand
gaagauauagaacuugaug

SEQ ID NO: 664946 - RNA, 19 nt, Homo sapiens
  misc_RNA (1)...(19): siRNA sense strand
ccaccaggcucaagaggaa

SEQ ID NO: 664947 - RNA, 19 nt, Homo sapiens
  misc_RNA (1)...(19): siRNA sense strand
gaaagagugauaggacaua

SEQ ID NO: 664948 - RNA, 19 nt, Homo sapiens
  misc_RNA (1)...(19): siRNA sense strand
gaaagggcuuggauggaau

SEQ ID NO: 664949 - RNA, 19 nt, Homo sapiens
  misc_RNA (1)...(19): siRNA sense strand
agaaagggcuuggauggaa

SEQ ID NO: 664950 - RNA, 19 nt, Homo sapiens
  misc_RNA (1)...(19): siRNA sense strand
gaccaggccucccagguau

SEQ ID NO: 664951 - RNA, 19 nt, Homo sapiens
  misc_RNA (1)...(19): siRNA sense strand
guaaagggccagagaggaa

SEQ ID NO: 664952 - RNA, 19 nt, Homo sapiens
  misc_RNA (1)...(19): siRNA sense strand
cagcaaggguugugucugu

SEQ ID NO: 664953 - RNA, 19 nt, Homo sapiens
  misc_RNA (1)...(19): siRNA sense strand
acaaggagauaaaggaaau

SEQ ID NO: 664954 - RNA, 19 nt, Homo sapiens
  misc_RNA (1)...(19): siRNA sense strand
ggaacaaggagauaaagga

SEQ ID NO: 664955 - RNA, 19 nt, Homo sapiens
  misc_RNA (1)...(19): siRNA sense strand
ggaccaccaggaacaguua

SEQ ID NO: 664956 - RNA, 19 nt, Homo sapiens
  misc_RNA (1)...(19): siRNA sense strand
caagggagaaccagcagua

SEQ ID NO: 664957 - RNA, 19 nt, Homo sapiens
  misc_RNA (1)...(19): siRNA sense strand
gagccuggguuaccuggaa

SEQ ID NO: 664958 - RNA, 19 nt, Homo sapiens
  misc_RNA (1)...(19): siRNA sense strand
auacaggucuuccaggauu

SEQ ID NO: 664959 - RNA, 19 nt, Homo sapiens
  misc_RNA (1)...(19): siRNA sense strand
ccacaggcauagaaggauu

SEQ ID NO: 664960 - RNA, 19 nt, Homo sapiens
  misc_RNA (1)...(19): siRNA sense strand
guacacagugcccuuauau

SEQ ID NO: 664961 - RNA, 19 nt, Homo sapiens
  misc_RNA (1)...(19): siRNA sense strand
ggaaaugaagggcuugaug

SEQ ID NO: 664962 - RNA, 19 nt, Homo sapiens
  misc_RNA (1)...(19): siRNA sense strand
ucaaaggauucgcaggaaa

SEQ ID NO: 664963 - RNA, 19 nt, Homo sapiens
  misc_RNA (1)...(19): siRNA sense strand
aaagggugcuccugcuaaa

SEQ ID NO: 664964 - RNA, 19 nt, Homo sapiens
  misc_RNA (1)...(19): siRNA sense strand
gaacccuggugcucaagga

SEQ ID NO: 664965 - RNA, 19 nt, Homo sapiens
  misc_RNA (1)...(19): siRNA sense strand
aggcuuaaauggauugaaa

SEQ ID NO: 664966 - RNA, 19 nt, Homo sapiens
  misc_RNA (1)...(19): siRNA sense strand
ggacuuccaggcuuaaaug

SEQ ID NO: 664967 - RNA, 19 nt, Homo sapiens
  misc_RNA (1)...(19): siRNA sense strand
uaacagaacggaccucaag

SEQ ID NO: 664968 - RNA, 19 nt, Homo sapiens
  misc_RNA (1)...(19): siRNA sense strand
gggauuuccuggagccauu

SEQ ID NO: 664969 - RNA, 19 nt, Homo sapiens
  misc_RNA (1)...(19): siRNA sense strand
aaagggagacccaggaauu

SEQ ID NO: 664970 - RNA, 19 nt, Homo sapiens
  misc_RNA (1)...(19): siRNA sense strand
gcaaggguugugucuguaa

SEQ ID NO: 664971 - RNA, 19 nt, Homo sapiens
  misc_RNA (1)...(19): siRNA sense strand
uaucuagggucuccaggaa

SEQ ID NO: 664972 - RNA, 19 nt, Homo sapiens
  misc_RNA (1)...(19): siRNA sense strand
cauuggcccuccaggauuu

SEQ ID NO: 664973 - RNA, 19 nt, Homo sapiens
  misc_RNA (1)...(19): siRNA sense strand
ggaaagaaaggagaaaugg

SEQ ID NO: 664974 - RNA, 19 nt, Homo sapiens
  misc_RNA (1)...(19): siRNA sense strand
aaagagugauaggacauaa

SEQ ID NO: 664975 - RNA, 19 nt, Homo sapiens
  misc_RNA (1)...(19): siRNA sense strand
uccagggagucauguaaua

SEQ ID NO: 664976 - RNA, 19 nt, Homo sapiens
  misc_RNA (1)...(19): siRNA sense strand
ggucugcccggugcaauua

SEQ ID NO: 664977 - RNA, 19 nt, Homo sapiens
  misc_RNA (1)...(19): siRNA sense strand
caaggguugugucuguaaa

SEQ ID NO: 664978 - RNA, 19 nt, Homo sapiens
  misc_RNA (1)...(19): siRNA sense strand
ucacuggguuguccuggaa

SEQ ID NO: 664979 - RNA, 19 nt, Homo sapiens
  misc_RNA (1)...(19): siRNA sense strand
agaaucauauggaucugaa

SEQ ID NO: 664980 - RNA, 19 nt, Homo sapiens
  misc_RNA (1)...(19): siRNA sense strand
ggaaagccagguccucaug

SEQ ID NO: 664981 - RNA, 19 nt, Homo sapiens
  misc_RNA (1)...(19): siRNA sense strand
aggcgcagcuggcuugaaa

SEQ ID NO: 664982 - RNA, 19 nt, Homo sapiens
  misc_RNA (1)...(19): siRNA sense strand
aagaggauauccaggaaau

SEQ ID NO: 664983 - RNA, 19 nt, Homo sapiens
  misc_RNA (1)...(19): siRNA sense strand
caaaggauucgcaggaaau

SEQ ID NO: 664984 - RNA, 19 nt, Homo sapiens
  misc_RNA (1)...(19): siRNA sense strand
aaccaggucucaaaggauu

SEQ ID NO: 664985 - RNA, 19 nt, Homo sapiens
  misc_RNA (1)...(19): siRNA sense strand
uuacggacuugucggugua

SEQ ID NO: 664986 - RNA, 19 nt, Homo sapiens
  misc_RNA (1)...(19): siRNA sense strand
ggagacccuggcacacuua

SEQ ID NO: 664987 - RNA, 19 nt, Homo sapiens
  misc_RNA (1)...(19): siRNA sense strand
agaaccaggucucaaagga

SEQ ID NO: 664988 - RNA, 19 nt, Homo sapiens
  misc_RNA (1)...(19): siRNA sense strand
ugauugggaugaugggauu

SEQ ID NO: 664989 - RNA, 19 nt, Homo sapiens
  misc_RNA (1)...(19): siRNA sense strand
gggugaagauggcauuaag

SEQ ID NO: 664990 - RNA, 19 nt, Homo sapiens
  misc_RNA (1)...(19): siRNA sense strand
uaaguggauugccaggauu

SEQ ID NO: 664991 - RNA, 19 nt, Homo sapiens
  misc_RNA (1)...(19): siRNA sense strand
aggagaagauauagaacuu

SEQ ID NO: 664992 - RNA, 19 nt, Homo sapiens
  misc_RNA (1)...(19): siRNA sense strand
gggaaagaaaggagaaaug

SEQ ID NO: 664993 - RNA, 19 nt, Homo sapiens
  misc_RNA (1)...(19): siRNA sense strand
ccaggaacaguuauuguga

SEQ ID NO: 664994 - RNA, 19 nt, Homo sapiens
  misc_RNA (1)...(19): siRNA sense strand
gggcaugccagguucuaaa

SEQ ID NO: 664995 - RNA, 19 nt, Homo sapiens
  misc_RNA (1)...(19): siRNA sense strand
ggaccuccaggaccaauug

SEQ ID NO: 664996 - RNA, 19 nt, Homo sapiens
  misc_RNA (1)...(19): siRNA sense strand
uguacacagugcccuuaua

SEQ ID NO: 664997 - RNA, 19 nt, Homo sapiens
  misc_RNA (1)...(19): siRNA sense strand
gaaccaggucucaaaggau

SEQ ID NO: 664998 - RNA, 19 nt, Homo sapiens
  misc_RNA (1)...(19): siRNA sense strand
gaccaagguuuuccaggua

SEQ ID NO: 664999 - RNA, 19 nt, Homo sapiens
  misc_RNA (1)...(19): siRNA sense strand
uggccaggcuugaaaggaa

SEQ ID NO: 665000 - RNA, 19 nt, Homo sapiens
  misc_RNA (1)...(19): siRNA sense strand
gcagggacccaagggcuuu

SEQ ID NO: 665001 - RNA, 19 nt, Homo sapiens
  misc_RNA (1)...(19): siRNA sense strand
caugccagguucuaaagga

SEQ ID NO: 665002 - RNA, 19 nt, Homo sapiens
  misc_RNA (1)...(19): siRNA sense strand
ccuggcacacuuaagauua

SEQ ID NO: 665003 - RNA, 19 nt, Homo sapiens
  misc_RNA (1)...(19): siRNA sense strand
agagccagguuauucagaa

SEQ ID NO: 665004 - RNA, 19 nt, Homo sapiens
  misc_RNA (1)...(19): siRNA sense strand
gauaagggagagccagguu

SEQ ID NO: 665005 - RNA, 19 nt, Homo sapiens
  misc_RNA (1)...(19): siRNA sense strand
ggaccuagaggaccuaagg

SEQ ID NO: 665006 - RNA, 19 nt, Homo sapiens
  misc_RNA (1)...(19): siRNA sense strand
gcaacaaagguucuaaagg

SEQ ID NO: 665007 - RNA, 19 nt, Homo sapiens
  misc_RNA (1)...(19): siRNA sense strand
gacccuggcacacuuaaga

SEQ ID NO: 665008 - RNA, 19 nt, Homo sapiens
  misc_RNA (1)...(19): siRNA sense strand
uaagggagagccagguuau

SEQ ID NO: 665009 - RNA, 19 nt, Homo sapiens
  misc_RNA (1)...(19): siRNA sense strand
caagggcuuuccaggacuu

SEQ ID NO: 665010 - RNA, 19 nt, Homo sapiens
  misc_RNA (1)...(19): siRNA sense strand
ccaggaaucccaggaguug

SEQ ID NO: 665011 - RNA, 19 nt, Homo sapiens
  misc_RNA (1)...(19): siRNA sense strand
uggaaguccuggaucauca

SEQ ID NO: 665012 - RNA, 19 nt, Homo sapiens
  misc_RNA (1)...(19): siRNA sense strand
ccaacagaauauuaugaca

SEQ ID NO: 665013 - RNA, 19 nt, Homo sapiens
  misc_RNA (1)...(19): siRNA sense strand
gggugcugcugguuugaaa

SEQ ID NO: 665014 - RNA, 19 nt, Homo sapiens
  misc_RNA (1)...(19): siRNA sense strand
gacauuggcccuccaggau

SEQ ID NO: 665015 - RNA, 19 nt, Homo sapiens
  misc_RNA (1)...(19): siRNA sense strand
agaccaggccucccaggua

SEQ ID NO: 665016 - RNA, 19 nt, Homo sapiens
  misc_RNA (1)...(19): siRNA sense strand
ggaccaggaacaccagguu

SEQ ID NO: 665017 - RNA, 19 nt, Homo sapiens
  misc_RNA (1)...(19): siRNA sense strand
gagaaagggcuuggaugga

SEQ ID NO: 665018 - RNA, 19 nt, Homo sapiens
  misc_RNA (1)...(19): siRNA sense strand
ggguuucccuggguuaaug

SEQ ID NO: 665019 - RNA, 19 nt, Homo sapiens
  misc_RNA (1)...(19): siRNA sense strand
gagguaagccaggcaagga

SEQ ID NO: 665020 - RNA, 19 nt, Homo sapiens
  misc_RNA (1)...(19): siRNA sense strand
ccagggaugccagguuuaa

SEQ ID NO: 665021 - RNA, 19 nt, Homo sapiens
  misc_RNA (1)...(19): siRNA sense strand
aggugaagauggagugauu

SEQ ID NO: 665022 - RNA, 19 nt, Homo sapiens
  misc_RNA (1)...(19): siRNA sense strand
ggacugccaggcuaucuag

SEQ ID NO: 665023 - RNA, 19 nt, Homo sapiens
  misc_RNA (1)...(19): siRNA sense strand
auaaguggauugccaggau

SEQ ID NO: 665024 - RNA, 19 nt, Homo sapiens
  misc_RNA (1)...(19): siRNA sense strand
ggaccaauggguauaagag

SEQ ID NO: 665025 - RNA, 19 nt, Homo sapiens
  misc_RNA (1)...(19): siRNA sense strand
ggaauuccaggucaucaag

SEQ ID NO: 665026 - RNA, 19 nt, Homo sapiens
  misc_RNA (1)...(19): siRNA sense strand
gaccaggaacaccagguuu

SEQ ID NO: 665027 - RNA, 19 nt, Homo sapiens
  misc_RNA (1)...(19): siRNA sense strand
ggaaaacccggaaaagaug

SEQ ID NO: 665028 - RNA, 19 nt, Homo sapiens
  misc_RNA (1)...(19): siRNA sense strand
gaccaaggacgugauggaa

SEQ ID NO: 665029 - RNA, 19 nt, Homo sapiens
  misc_RNA (1)...(19): siRNA sense strand
cuccaggucuuccaggauu

SEQ ID NO: 665030 - RNA, 19 nt, Homo sapiens
  misc_RNA (1)...(19): siRNA sense strand
cgggugauaugggaaagaa

SEQ ID NO: 665031 - RNA, 19 nt, Homo sapiens
  misc_RNA (1)...(19): siRNA sense strand
ggagaagauauagaacuug

SEQ ID NO: 665032 - RNA, 19 nt, Homo sapiens
  misc_RNA (1)...(19): siRNA sense strand
ggagagcucaguguuucaa

SEQ ID NO: 665033 - RNA, 19 nt, Homo sapiens
  misc_RNA (1)...(19): siRNA sense strand
uggcccaccuggacauuug

SEQ ID NO: 665034 - RNA, 19 nt, Homo sapiens
  misc_RNA (1)...(19): siRNA sense strand
caacaaagguucuaaagga

SEQ ID NO: 665035 - RNA, 19 nt, Homo sapiens
  misc_RNA (1)...(19): siRNA sense strand
gagaagauauagaacuuga

SEQ ID NO: 665036 - RNA, 19 nt, Homo sapiens
  misc_RNA (1)...(19): siRNA sense strand
caacaaggcagaagaggua

SEQ ID NO: 665037 - RNA, 19 nt, Homo sapiens
  misc_RNA (1)...(19): siRNA sense strand
agagauaucccacguaaua

SEQ ID NO: 665038 - RNA, 19 nt, Homo sapiens
  misc_RNA (1)...(19): siRNA sense strand
ccaaggacuuccaggcuua

SEQ ID NO: 665039 - RNA, 19 nt, Homo sapiens
  misc_RNA (1)...(19): siRNA sense strand
ccaaggacgugauggaauu

SEQ ID NO: 665040 - RNA, 19 nt, Homo sapiens
  misc_RNA (1)...(19): siRNA sense strand
gcagcuggcuugaaaggaa

SEQ ID NO: 665041 - RNA, 19 nt, Homo sapiens
  misc_RNA (1)...(19): siRNA sense strand
ucagagauaucccacguaa

SEQ ID NO: 665042 - RNA, 19 nt, Homo sapiens
  misc_RNA (1)...(19): siRNA sense strand
uauaagaggugaccaagga

SEQ ID NO: 665043 - RNA, 19 nt, Homo sapiens
  misc_RNA (1)...(19): siRNA sense strand
caaagaggauauccaggaa

SEQ ID NO: 665044 - RNA, 19 nt, Homo sapiens
  misc_RNA (1)...(19): siRNA sense strand
gaacaaggagauaaaggaa

SEQ ID NO: 665045 - RNA, 19 nt, Homo sapiens
  misc_RNA (1)...(19): siRNA sense strand
gaagauauagaacuugaug

SEQ ID NO: 665046 - RNA, 19 nt, Homo sapiens
  misc_RNA (1)...(19): siRNA sense strand
ccaccaggcucaagaggaa

SEQ ID NO: 665047 - RNA, 19 nt, Homo sapiens
  misc_RNA (1)...(19): siRNA sense strand
gaaagagugauaggacaua

SEQ ID NO: 665048 - RNA, 19 nt, Homo sapiens
  misc_RNA (1)...(19): siRNA sense strand
gaaagggcuuggauggaau

SEQ ID NO: 665049 - RNA, 19 nt, Homo sapiens
  misc_RNA (1)...(19): siRNA sense strand
agaaagggcuuggauggaa

SEQ ID NO: 665050 - RNA, 19 nt, Homo sapiens
  misc_RNA (1)...(19): siRNA sense strand
gaccaggccucccagguau

SEQ ID NO: 665051 - RNA, 19 nt, Homo sapiens
  misc_RNA (1)...(19): siRNA sense strand
guaaagggccagagaggaa

SEQ ID NO: 665052 - RNA, 19 nt, Homo sapiens
  misc_RNA (1)...(19): siRNA sense strand
cagcaaggguugugucugu

SEQ ID NO: 665053 - RNA, 19 nt, Homo sapiens
  misc_RNA (1)...(19): siRNA sense strand
acaaggagauaaaggaaau

SEQ ID NO: 665054 - RNA, 19 nt, Homo sapiens
  misc_RNA (1)...(19): siRNA sense strand
ggaacaaggagauaaagga

SEQ ID NO: 665055 - RNA, 19 nt, Homo sapiens
  misc_RNA (1)...(19): siRNA sense strand
ggaccaccaggaacaguua

SEQ ID NO: 665056 - RNA, 19 nt, Homo sapiens
  misc_RNA (1)...(19): siRNA sense strand
gaaagccuauuccaucaac

SEQ ID NO: 665057 - RNA, 19 nt, Homo sapiens
  misc_RNA (1)...(19): siRNA sense strand
caagggagaaccagcagua

SEQ ID NO: 665058 - RNA, 19 nt, Homo sapiens
  misc_RNA (1)...(19): siRNA sense strand
gagccuggguuaccuggaa

SEQ ID NO: 665059 - RNA, 19 nt, Homo sapiens
  misc_RNA (1)...(19): siRNA sense strand
auacaggucuuccaggauu

SEQ ID NO: 665060 - RNA, 19 nt, Homo sapiens
  misc_RNA (1)...(19): siRNA sense strand
ccacaggcauagaaggauu

SEQ ID NO: 665061 - RNA, 19 nt, Homo sapiens
  misc_RNA (1)...(19): siRNA sense strand
guacacagugcccuuauau

SEQ ID NO: 665062 - RNA, 19 nt, Homo sapiens
  misc_RNA (1)...(19): siRNA sense strand
ggaaaugaagggcuugaug

SEQ ID NO: 665063 - RNA, 19 nt, Homo sapiens
  misc_RNA (1)...(19): siRNA sense strand
ucaaaggauucgcaggaaa

SEQ ID NO: 665064 - RNA, 19 nt, Homo sapiens
  misc_RNA (1)...(19): siRNA sense strand
aaagggugcuccugcuaaa

SEQ ID NO: 665065 - RNA, 19 nt, Homo sapiens
  misc_RNA (1)...(19): siRNA sense strand
gaacccuggugcucaagga

SEQ ID NO: 665066 - RNA, 19 nt, Homo sapiens
  misc_RNA (1)...(19): siRNA sense strand
aggcuuaaauggauugaaa

SEQ ID NO: 665067 - RNA, 19 nt, Homo sapiens
  misc_RNA (1)...(19): siRNA sense strand
ggacuuccaggcuuaaaug

SEQ ID NO: 665068 - RNA, 19 nt, Homo sapiens
  misc_RNA (1)...(19): siRNA sense strand
uaacagaacggaccucaag

SEQ ID NO: 665069 - RNA, 19 nt, Homo sapiens
  misc_RNA (1)...(19): siRNA sense strand
ccuauuccaucaacuguga

SEQ ID NO: 665070 - RNA, 19 nt, Homo sapiens
  misc_RNA (1)...(19): siRNA sense strand
gggauuuccuggagccauu

SEQ ID NO: 665071 - RNA, 19 nt, Homo sapiens
  misc_RNA (1)...(19): siRNA sense strand
aaagggagacccaggaauu

SEQ ID NO: 665072 - RNA, 19 nt, Homo sapiens
  misc_RNA (1)...(19): siRNA sense strand
gcaaggguugugucuguaa

SEQ ID NO: 665073 - RNA, 19 nt, Homo sapiens
  misc_RNA (1)...(19): siRNA sense strand
uaucuagggucuccaggaa

SEQ ID NO: 665074 - RNA, 19 nt, Homo sapiens
  misc_RNA (1)...(19): siRNA sense strand
cauuggcccuccaggauuu

SEQ ID NO: 665075 - RNA, 19 nt, Homo sapiens
  misc_RNA (1)...(19): siRNA sense strand
ggaaagaaaggagaaaugg

SEQ ID NO: 665076 - RNA, 19 nt, Homo sapiens
  misc_RNA (1)...(19): siRNA sense strand
aaagagugauaggacauaa

SEQ ID NO: 665077 - RNA, 19 nt, Homo sapiens
  misc_RNA (1)...(19): siRNA sense strand
uccagggagucauguaaua

SEQ ID NO: 665078 - RNA, 19 nt, Homo sapiens
  misc_RNA (1)...(19): siRNA sense strand
ggucugcccggugcaauua

SEQ ID NO: 665079 - RNA, 19 nt, Homo sapiens
  misc_RNA (1)...(19): siRNA sense strand
caaggguugugucuguaaa

SEQ ID NO: 665080 - RNA, 19 nt, Homo sapiens
  misc_RNA (1)...(19): siRNA sense strand
ucacuggguuguccuggaa

SEQ ID NO: 665081 - RNA, 19 nt, Homo sapiens
  misc_RNA (1)...(19): siRNA sense strand
agaaucauauggaucugaa

SEQ ID NO: 665082 - RNA, 19 nt, Homo sapiens
  misc_RNA (1)...(19): siRNA sense strand
ggaaagccagguccucaug

SEQ ID NO: 665083 - RNA, 19 nt, Homo sapiens
  misc_RNA (1)...(19): siRNA sense strand
aggcgcagcuggcuugaaa

SEQ ID NO: 665084 - RNA, 19 nt, Homo sapiens
  misc_RNA (1)...(19): siRNA sense strand
aagaggauauccaggaaau

SEQ ID NO: 665085 - RNA, 19 nt, Homo sapiens
  misc_RNA (1)...(19): siRNA sense strand
caaaggauucgcaggaaau

SEQ ID NO: 665086 - RNA, 19 nt, Homo sapiens
  misc_RNA (1)...(19): siRNA sense strand
aaccaggucucaaaggauu

SEQ ID NO: 665087 - RNA, 19 nt, Homo sapiens
  misc_RNA (1)...(19): siRNA sense strand
uuacggacuugucggugua

SEQ ID NO: 665088 - RNA, 19 nt, Homo sapiens
  misc_RNA (1)...(19): siRNA sense strand
ggagacccuggcacacuua

SEQ ID NO: 665089 - RNA, 19 nt, Homo sapiens
  misc_RNA (1)...(19): siRNA sense strand
uaaguggauugccaggauu

SEQ ID NO: 665090 - RNA, 19 nt, Homo sapiens
  misc_RNA (1)...(19): siRNA sense strand
agaaccaggucucaaagga

SEQ ID NO: 665091 - RNA, 19 nt, Homo sapiens
  misc_RNA (1)...(19): siRNA sense strand
ugauugggaugaugggauu

SEQ ID NO: 665092 - RNA, 19 nt, Homo sapiens
  misc_RNA (1)...(19): siRNA sense strand
gggugaagauggcauuaag

SEQ ID NO: 665093 - RNA, 19 nt, Homo sapiens
  misc_RNA (1)...(19): siRNA sense strand
aggagaagauauagaacuu

SEQ ID NO: 665094 - RNA, 19 nt, Homo sapiens
  misc_RNA (1)...(19): siRNA sense strand
gggaaagaaaggagaaaug

SEQ ID NO: 665095 - RNA, 19 nt, Homo sapiens
  misc_RNA (1)...(19): siRNA sense strand
ccaggaacaguuauuguga

SEQ ID NO: 665096 - RNA, 19 nt, Homo sapiens
  misc_RNA (1)...(19): siRNA sense strand
gggcaugccagguucuaaa

SEQ ID NO: 665097 - RNA, 19 nt, Homo sapiens
  misc_RNA (1)...(19): siRNA sense strand
ggaccuccaggaccaauug

SEQ ID NO: 665098 - RNA, 19 nt, Homo sapiens
  misc_RNA (1)...(19): siRNA sense strand
uguacacagugcccuuaua

SEQ ID NO: 665099 - RNA, 19 nt, Homo sapiens
  misc_RNA (1)...(19): siRNA sense strand
gaaccaggucucaaaggau

SEQ ID NO: 665100 - RNA, 19 nt, Homo sapiens
  misc_RNA (1)...(19): siRNA sense strand
gaccaagguuuuccaggua

SEQ ID NO: 665101 - RNA, 19 nt, Homo sapiens
  misc_RNA (1)...(19): siRNA sense strand
uggccaggcuugaaaggaa

SEQ ID NO: 665102 - RNA, 19 nt, Homo sapiens
  misc_RNA (1)...(19): siRNA sense strand
gcagggacccaagggcuuu

SEQ ID NO: 665103 - RNA, 19 nt, Homo sapiens
  misc_RNA (1)...(19): siRNA sense strand
caugccagguucuaaagga

SEQ ID NO: 665104 - RNA, 19 nt, Homo sapiens
  misc_RNA (1)...(19): siRNA sense strand
ccuggcacacuuaagauua

SEQ ID NO: 665105 - RNA, 19 nt, Homo sapiens
  misc_RNA (1)...(19): siRNA sense strand
agagccagguuauucagaa

SEQ ID NO: 665106 - RNA, 19 nt, Homo sapiens
  misc_RNA (1)...(19): siRNA sense strand
gauaagggagagccagguu

SEQ ID NO: 665107 - RNA, 19 nt, Homo sapiens
  misc_RNA (1)...(19): siRNA sense strand
ggaccuagaggaccuaagg

SEQ ID NO: 665108 - RNA, 19 nt, Homo sapiens
  misc_RNA (1)...(19): siRNA sense strand
gcaacaaagguucuaaagg

SEQ ID NO: 665109 - RNA, 19 nt, Homo sapiens
  misc_RNA (1)...(19): siRNA sense strand
gacccuggcacacuuaaga

SEQ ID NO: 665110 - RNA, 19 nt, Homo sapiens
  misc_RNA (1)...(19): siRNA sense strand
uaagggagagccagguuau

SEQ ID NO: 665111 - RNA, 19 nt, Homo sapiens
  misc_RNA (1)...(19): siRNA sense strand
caagggcuuuccaggacuu

SEQ ID NO: 665112 - RNA, 19 nt, Homo sapiens
  misc_RNA (1)...(19): siRNA sense strand
ccaggaaucccaggaguug

SEQ ID NO: 665113 - RNA, 19 nt, Homo sapiens
  misc_RNA (1)...(19): siRNA sense strand
gggugcugcugguuugaaa

SEQ ID NO: 665114 - RNA, 19 nt, Homo sapiens
  misc_RNA (1)...(19): siRNA sense strand
uggaaguccuggaucauca

SEQ ID NO: 665115 - RNA, 19 nt, Homo sapiens
  misc_RNA (1)...(19): siRNA sense strand
ccaacagaauauuaugaca

SEQ ID NO: 665116 - RNA, 19 nt, Homo sapiens
  misc_RNA (1)...(19): siRNA sense strand
gacauuggcccuccaggau

SEQ ID NO: 665117 - RNA, 19 nt, Homo sapiens
  misc_RNA (1)...(19): siRNA sense strand
agaccaggccucccaggua

SEQ ID NO: 665118 - RNA, 19 nt, Homo sapiens
  misc_RNA (1)...(19): siRNA sense strand
ggaccaggaacaccagguu

SEQ ID NO: 665119 - RNA, 19 nt, Homo sapiens
  misc_RNA (1)...(19): siRNA sense strand
gagaaagggcuuggaugga

SEQ ID NO: 665120 - RNA, 19 nt, Homo sapiens
  misc_RNA (1)...(19): siRNA sense strand
ggguuucccuggguuaaug

SEQ ID NO: 665121 - RNA, 19 nt, Homo sapiens
  misc_RNA (1)...(19): siRNA sense strand
gagguaagccaggcaagga

SEQ ID NO: 665122 - RNA, 19 nt, Homo sapiens
  misc_RNA (1)...(19): siRNA sense strand
ccagggaugccagguuuaa

SEQ ID NO: 665123 - RNA, 19 nt, Homo sapiens
  misc_RNA (1)...(19): siRNA sense strand
aggugaagauggagugauu

SEQ ID NO: 665124 - RNA, 19 nt, Homo sapiens
  misc_RNA (1)...(19): siRNA sense strand
ggacugccaggcuaucuag

SEQ ID NO: 665125 - RNA, 19 nt, Homo sapiens
  misc_RNA (1)...(19): siRNA sense strand
auaaguggauugccaggau

SEQ ID NO: 665126 - RNA, 19 nt, Homo sapiens
  misc_RNA (1)...(19): siRNA sense strand
ggaccaauggguauaagag

SEQ ID NO: 665127 - RNA, 19 nt, Homo sapiens
  misc_RNA (1)...(19): siRNA sense strand
ggaauuccaggucaucaag

SEQ ID NO: 665128 - RNA, 19 nt, Homo sapiens
  misc_RNA (1)...(19): siRNA sense strand
gaccaggaacaccagguuu

SEQ ID NO: 665129 - RNA, 19 nt, Homo sapiens
  misc_RNA (1)...(19): siRNA sense strand
ggagagcucaguguuucaa

SEQ ID NO: 665130 - RNA, 19 nt, Homo sapiens
  misc_RNA (1)...(19): siRNA sense strand
gaccaaggacgugauggaa

SEQ ID NO: 665131 - RNA, 19 nt, Homo sapiens
  misc_RNA (1)...(19): siRNA sense strand
ggagaagauauagaacuug

SEQ ID NO: 665132 - RNA, 19 nt, Homo sapiens
  misc_RNA (1)...(19): siRNA sense strand
cuccaggucuuccaggauu

SEQ ID NO: 665133 - RNA, 19 nt, Homo sapiens
  misc_RNA (1)...(19): siRNA sense strand
cgggugauaugggaaagaa

SEQ ID NO: 665134 - RNA, 19 nt, Homo sapiens
  misc_RNA (1)...(19): siRNA sense strand
caacaaagguucuaaagga

SEQ ID NO: 665135 - RNA, 19 nt, Homo sapiens
  misc_RNA (1)...(19): siRNA sense strand
gagaagauauagaacuuga

SEQ ID NO: 665136 - RNA, 19 nt, Homo sapiens
  misc_RNA (1)...(19): siRNA sense strand
caacaaggcagaagaggua

SEQ ID NO: 665137 - RNA, 19 nt, Homo sapiens
  misc_RNA (1)...(19): siRNA sense strand
agagauaucccacguaaua

SEQ ID NO: 665138 - RNA, 19 nt, Homo sapiens
  misc_RNA (1)...(19): siRNA sense strand
ccaaggacuuccaggcuua

SEQ ID NO: 665139 - RNA, 19 nt, Homo sapiens
  misc_RNA (1)...(19): siRNA sense strand
ccaaggacgugauggaauu

SEQ ID NO: 665140 - RNA, 19 nt, Homo sapiens
  misc_RNA (1)...(19): siRNA sense strand
gcagcuggcuugaaaggaa

SEQ ID NO: 665141 - RNA, 19 nt, Homo sapiens
  misc_RNA (1)...(19): siRNA sense strand
ucagagauaucccacguaa

SEQ ID NO: 665142 - RNA, 19 nt, Homo sapiens
  misc_RNA (1)...(19): siRNA sense strand
uauaagaggugaccaagga

SEQ ID NO: 665143 - RNA, 19 nt, Homo sapiens
  misc_RNA (1)...(19): siRNA sense strand
caaagaggauauccaggaa

SEQ ID NO: 665144 - RNA, 19 nt, Homo sapiens
  misc_RNA (1)...(19): siRNA sense strand
gaacaaggagauaaaggaa

SEQ ID NO: 665145 - RNA, 19 nt, Homo sapiens
  misc_RNA (1)...(19): siRNA sense strand
gaagauauagaacuugaug

SEQ ID NO: 665146 - RNA, 19 nt, Homo sapiens
  misc_RNA (1)...(19): siRNA sense strand
ccaccaggcucaagaggaa

SEQ ID NO: 665147 - RNA, 19 nt, Homo sapiens
  misc_RNA (1)...(19): siRNA sense strand
gaaagagugauaggacaua

SEQ ID NO: 665148 - RNA, 19 nt, Homo sapiens
  misc_RNA (1)...(19): siRNA sense strand
gaaagggcuuggauggaau

SEQ ID NO: 665149 - RNA, 19 nt, Homo sapiens
  misc_RNA (1)...(19): siRNA sense strand
agaaagggcuuggauggaa

SEQ ID NO: 665150 - RNA, 19 nt, Homo sapiens
  misc_RNA (1)...(19): siRNA sense strand
gaccaggccucccagguau

SEQ ID NO: 665151 - RNA, 19 nt, Homo sapiens
  misc_RNA (1)...(19): siRNA sense strand
guaaagggccagagaggaa

SEQ ID NO: 665152 - RNA, 19 nt, Homo sapiens
  misc_RNA (1)...(19): siRNA sense strand
cagcaaggguugugucugu

SEQ ID NO: 665153 - RNA, 19 nt, Homo sapiens
  misc_RNA (1)...(19): siRNA sense strand
acaaggagauaaaggaaau

SEQ ID NO: 665154 - RNA, 19 nt, Homo sapiens
  misc_RNA (1)...(19): siRNA sense strand
ggaacaaggagauaaagga

SEQ ID NO: 665155 - RNA, 19 nt, Homo sapiens
  misc_RNA (1)...(19): siRNA sense strand
ggaccaccaggaacaguua

SEQ ID NO: 665156 - RNA, 19 nt, Homo sapiens
  misc_RNA (1)...(19): siRNA sense strand
gaaagccuauuccaucaac

SEQ ID NO: 665157 - RNA, 19 nt, Homo sapiens
  misc_RNA (1)...(19): siRNA sense strand
caagggagaaccagcagua

SEQ ID NO: 665158 - RNA, 19 nt, Homo sapiens
  misc_RNA (1)...(19): siRNA sense strand
gagccuggguuaccuggaa

SEQ ID NO: 665159 - RNA, 19 nt, Homo sapiens
  misc_RNA (1)...(19): siRNA sense strand
auacaggucuuccaggauu

SEQ ID NO: 665160 - RNA, 19 nt, Homo sapiens
  misc_RNA (1)...(19): siRNA sense strand
ccacaggcauagaaggauu

SEQ ID NO: 665161 - RNA, 19 nt, Homo sapiens
  misc_RNA (1)...(19): siRNA sense strand
guacacagugcccuuauau

SEQ ID NO: 665162 - RNA, 19 nt, Homo sapiens
  misc_RNA (1)...(19): siRNA sense strand
ggaaaugaagggcuugaug

SEQ ID NO: 665163 - RNA, 19 nt, Homo sapiens
  misc_RNA (1)...(19): siRNA sense strand
ucaaaggauucgcaggaaa

SEQ ID NO: 665164 - RNA, 19 nt, Homo sapiens
  misc_RNA (1)...(19): siRNA sense strand
aaagggugcuccugcuaaa

SEQ ID NO: 665165 - RNA, 19 nt, Homo sapiens
  misc_RNA (1)...(19): siRNA sense strand
gaacccuggugcucaagga

SEQ ID NO: 665166 - RNA, 19 nt, Homo sapiens
  misc_RNA (1)...(19): siRNA sense strand
aggcuuaaauggauugaaa

SEQ ID NO: 665167 - RNA, 19 nt, Homo sapiens
  misc_RNA (1)...(19): siRNA sense strand
ggacuuccaggcuuaaaug

SEQ ID NO: 665168 - RNA, 19 nt, Homo sapiens
  misc_RNA (1)...(19): siRNA sense strand
uaacagaacggaccucaag

SEQ ID NO: 665169 - RNA, 19 nt, Homo sapiens
  misc_RNA (1)...(19): siRNA sense strand
ccuauuccaucaacuguga

SEQ ID NO: 665170 - RNA, 19 nt, Homo sapiens
  misc_RNA (1)...(19): siRNA sense strand
gggauuuccuggagccauu

SEQ ID NO: 665171 - RNA, 19 nt, Homo sapiens
  misc_RNA (1)...(19): siRNA sense strand
aaagggagacccaggaauu

SEQ ID NO: 665172 - RNA, 19 nt, Homo sapiens
  misc_RNA (1)...(19): siRNA sense strand
gcaaggguugugucuguaa

SEQ ID NO: 665173 - RNA, 19 nt, Homo sapiens
  misc_RNA (1)...(19): siRNA sense strand
uaucuagggucuccaggaa

SEQ ID NO: 665174 - RNA, 19 nt, Homo sapiens
  misc_RNA (1)...(19): siRNA sense strand
cauuggcccuccaggauuu

SEQ ID NO: 665175 - RNA, 19 nt, Homo sapiens
  misc_RNA (1)...(19): siRNA sense strand
ggaaagaaaggagaaaugg

SEQ ID NO: 665176 - RNA, 19 nt, Homo sapiens
  misc_RNA (1)...(19): siRNA sense strand
aaagagugauaggacauaa

SEQ ID NO: 665177 - RNA, 19 nt, Homo sapiens
  misc_RNA (1)...(19): siRNA sense strand
uccagggagucauguaaua

SEQ ID NO: 665178 - RNA, 19 nt, Homo sapiens
  misc_RNA (1)...(19): siRNA sense strand
ggucugcccggugcaauua

SEQ ID NO: 665179 - RNA, 19 nt, Homo sapiens
  misc_RNA (1)...(19): siRNA sense strand
caaggguugugucuguaaa

SEQ ID NO: 665180 - RNA, 19 nt, Homo sapiens
  misc_RNA (1)...(19): siRNA sense strand
ucacuggguuguccuggaa

SEQ ID NO: 665181 - RNA, 19 nt, Homo sapiens
  misc_RNA (1)...(19): siRNA sense strand
agaaucauauggaucugaa

SEQ ID NO: 665182 - RNA, 19 nt, Homo sapiens
  misc_RNA (1)...(19): siRNA sense strand
ggaaagccagguccucaug

SEQ ID NO: 665183 - RNA, 19 nt, Homo sapiens
  misc_RNA (1)...(19): siRNA sense strand
aggcgcagcuggcuugaaa

SEQ ID NO: 665184 - RNA, 19 nt, Homo sapiens
  misc_RNA (1)...(19): siRNA sense strand
aagaggauauccaggaaau

SEQ ID NO: 665185 - RNA, 19 nt, Homo sapiens
  misc_RNA (1)...(19): siRNA sense strand
caaaggauucgcaggaaau

SEQ ID NO: 665186 - RNA, 19 nt, Homo sapiens
  misc_RNA (1)...(19): siRNA sense strand
aaccaggucucaaaggauu

SEQ ID NO: 665187 - RNA, 19 nt, Homo sapiens
  misc_RNA (1)...(19): siRNA sense strand
uuacggacuugucggugua

SEQ ID NO: 665188 - RNA, 19 nt, Homo sapiens
  misc_RNA (1)...(19): siRNA sense strand
ggagacccuggcacacuua

SEQ ID NO: 665189 - RNA, 19 nt, Homo sapiens
  misc_RNA (1)...(19): siRNA sense strand
uaaguggauugccaggauu

SEQ ID NO: 665190 - RNA, 19 nt, Homo sapiens
  misc_RNA (1)...(19): siRNA sense strand
agaaccaggucucaaagga

SEQ ID NO: 665191 - RNA, 19 nt, Homo sapiens
  misc_RNA (1)...(19): siRNA sense strand
ugauugggaugaugggauu

SEQ ID NO: 665192 - RNA, 19 nt, Homo sapiens
  misc_RNA (1)...(19): siRNA sense strand
gggugaagauggcauuaag

SEQ ID NO: 665193 - RNA, 19 nt, Homo sapiens
  misc_RNA (1)...(19): siRNA sense strand
aggagaagauauagaacuu

SEQ ID NO: 665194 - RNA, 19 nt, Homo sapiens
  misc_RNA (1)...(19): siRNA sense strand
gggaaagaaaggagaaaug

SEQ ID NO: 665195 - RNA, 19 nt, Homo sapiens
  misc_RNA (1)...(19): siRNA sense strand
ccaggaacaguuauuguga

SEQ ID NO: 665196 - RNA, 19 nt, Homo sapiens
  misc_RNA (1)...(19): siRNA sense strand
gggcaugccagguucuaaa

SEQ ID NO: 665197 - RNA, 19 nt, Homo sapiens
  misc_RNA (1)...(19): siRNA sense strand
ggaccuccaggaccaauug

SEQ ID NO: 665198 - RNA, 19 nt, Homo sapiens
  misc_RNA (1)...(19): siRNA sense strand
uguacacagugcccuuaua

SEQ ID NO: 665199 - RNA, 19 nt, Homo sapiens
  misc_RNA (1)...(19): siRNA sense strand
gaaccaggucucaaaggau

SEQ ID NO: 665200 - RNA, 19 nt, Homo sapiens
  misc_RNA (1)...(19): siRNA sense strand
gaccaagguuuuccaggua

SEQ ID NO: 665201 - RNA, 19 nt, Homo sapiens
  misc_RNA (1)...(19): siRNA sense strand
uggccaggcuugaaaggaa

SEQ ID NO: 665202 - RNA, 19 nt, Homo sapiens
  misc_RNA (1)...(19): siRNA sense strand
gcagggacccaagggcuuu

SEQ ID NO: 665203 - RNA, 19 nt, Homo sapiens
  misc_RNA (1)...(19): siRNA sense strand
caugccagguucuaaagga

SEQ ID NO: 665204 - RNA, 19 nt, Homo sapiens
  misc_RNA (1)...(19): siRNA sense strand
ccuggcacacuuaagauua

SEQ ID NO: 665205 - RNA, 19 nt, Homo sapiens
  misc_RNA (1)...(19): siRNA sense strand
agagccagguuauucagaa

SEQ ID NO: 665206 - RNA, 19 nt, Homo sapiens
  misc_RNA (1)...(19): siRNA sense strand
gauaagggagagccagguu

SEQ ID NO: 665207 - RNA, 19 nt, Homo sapiens
  misc_RNA (1)...(19): siRNA sense strand
ggaccuagaggaccuaagg

SEQ ID NO: 665208 - RNA, 19 nt, Homo sapiens
  misc_RNA (1)...(19): siRNA sense strand
gcaacaaagguucuaaagg

SEQ ID NO: 665209 - RNA, 19 nt, Homo sapiens
  misc_RNA (1)...(19): siRNA sense strand
gacccuggcacacuuaaga

SEQ ID NO: 665210 - RNA, 19 nt, Homo sapiens
  misc_RNA (1)...(19): siRNA sense strand
uaagggagagccagguuau

SEQ ID NO: 665211 - RNA, 19 nt, Homo sapiens
  misc_RNA (1)...(19): siRNA sense strand
caagggcuuuccaggacuu

SEQ ID NO: 665212 - RNA, 19 nt, Homo sapiens
  misc_RNA (1)...(19): siRNA sense strand
ccaggaaucccaggaguug

SEQ ID NO: 665213 - RNA, 19 nt, Homo sapiens
  misc_RNA (1)...(19): siRNA sense strand
gggugcugcugguuugaaa

SEQ ID NO: 665214 - RNA, 19 nt, Homo sapiens
  misc_RNA (1)...(19): siRNA sense strand
uggaaguccuggaucauca

SEQ ID NO: 665215 - RNA, 19 nt, Homo sapiens
  misc_RNA (1)...(19): siRNA sense strand
ccaacagaauauuaugaca

SEQ ID NO: 665216 - RNA, 19 nt, Homo sapiens
  misc_RNA (1)...(19): siRNA sense strand
gacauuggcccuccaggau

SEQ ID NO: 665217 - RNA, 19 nt, Homo sapiens
  misc_RNA (1)...(19): siRNA sense strand
agaccaggccucccaggua

SEQ ID NO: 665218 - RNA, 19 nt, Homo sapiens
  misc_RNA (1)...(19): siRNA sense strand
ggaccaggaacaccagguu

SEQ ID NO: 665219 - RNA, 19 nt, Homo sapiens
  misc_RNA (1)...(19): siRNA sense strand
gagaaagggcuuggaugga

SEQ ID NO: 665220 - RNA, 19 nt, Homo sapiens
  misc_RNA (1)...(19): siRNA sense strand
ggguuucccuggguuaaug

SEQ ID NO: 665221 - RNA, 19 nt, Homo sapiens
  misc_RNA (1)...(19): siRNA sense strand
gagguaagccaggcaagga

SEQ ID NO: 665222 - RNA, 19 nt, Homo sapiens
  misc_RNA (1)...(19): siRNA sense strand
ccagggaugccagguuuaa

SEQ ID NO: 665223 - RNA, 19 nt, Homo sapiens
  misc_RNA (1)...(19): siRNA sense strand
aggugaagauggagugauu

SEQ ID NO: 665224 - RNA, 19 nt, Homo sapiens
  misc_RNA (1)...(19): siRNA sense strand
ggacugccaggcuaucuag

SEQ ID NO: 665225 - RNA, 19 nt, Homo sapiens
  misc_RNA (1)...(19): siRNA sense strand
auaaguggauugccaggau

SEQ ID NO: 665226 - RNA, 19 nt, Homo sapiens
  misc_RNA (1)...(19): siRNA sense strand
ggaccaauggguauaagag

SEQ ID NO: 665227 - RNA, 19 nt, Homo sapiens
  misc_RNA (1)...(19): siRNA sense strand
ggaauuccaggucaucaag

SEQ ID NO: 665228 - RNA, 19 nt, Homo sapiens
  misc_RNA (1)...(19): siRNA sense strand
gaccaggaacaccagguuu

SEQ ID NO: 665229 - RNA, 19 nt, Homo sapiens
  misc_RNA (1)...(19): siRNA sense strand
ggagagcucaguguuucaa

SEQ ID NO: 665230 - RNA, 19 nt, Homo sapiens
  misc_RNA (1)...(19): siRNA sense strand
gaccaaggacgugauggaa

SEQ ID NO: 665231 - RNA, 19 nt, Homo sapiens
  misc_RNA (1)...(19): siRNA sense strand
ggagaagauauagaacuug

SEQ ID NO: 665232 - RNA, 19 nt, Homo sapiens
  misc_RNA (1)...(19): siRNA sense strand
cuccaggucuuccaggauu

SEQ ID NO: 665233 - RNA, 19 nt, Homo sapiens
  misc_RNA (1)...(19): siRNA sense strand
cgggugauaugggaaagaa

SEQ ID NO: 665234 - RNA, 19 nt, Homo sapiens
  misc_RNA (1)...(19): siRNA sense strand
gaaguuagauccuaucaca

SEQ ID NO: 665235 - RNA, 19 nt, Homo sapiens
  misc_RNA (1)...(19): siRNA sense strand
agaaagaucugaaggacua

SEQ ID NO: 665236 - RNA, 19 nt, Homo sapiens
  misc_RNA (1)...(19): siRNA sense strand
caaauuuggugaaguugua

SEQ ID NO: 665237 - RNA, 19 nt, Homo sapiens
  misc_RNA (1)...(19): siRNA sense strand
ggaaggugauugauccuaa

SEQ ID NO: 665238 - RNA, 19 nt, Homo sapiens
  misc_RNA (1)...(19): siRNA sense strand
gaaggugauugauccuaaa

SEQ ID NO: 665239 - RNA, 19 nt, Homo sapiens
  misc_RNA (1)...(19): siRNA sense strand
agacugcacucugaaguua

SEQ ID NO: 665240 - RNA, 19 nt, Homo sapiens
  misc_RNA (1)...(19): siRNA sense strand
gaaaagaaauaccacaaug

SEQ ID NO: 665241 - RNA, 19 nt, Homo sapiens
  misc_RNA (1)...(19): siRNA sense strand
uagauaaggucauggauca

SEQ ID NO: 665242 - RNA, 19 nt, Homo sapiens
  misc_RNA (1)...(19): siRNA sense strand
cguggguucugcuuuauua

SEQ ID NO: 665243 - RNA, 19 nt, Homo sapiens
  misc_RNA (1)...(19): siRNA sense strand
aggaagagcucguggaaga

SEQ ID NO: 665244 - RNA, 19 nt, Homo sapiens
  misc_RNA (1)...(19): siRNA sense strand
ggacuacuuuuccaaauuu

SEQ ID NO: 665245 - RNA, 19 nt, Homo sapiens
  misc_RNA (1)...(19): siRNA sense strand
ggccuuagcugggacacua

SEQ ID NO: 665246 - RNA, 19 nt, Homo sapiens
  misc_RNA (1)...(19): siRNA sense strand
agauacaccugaagagaaa

SEQ ID NO: 665247 - RNA, 19 nt, Homo sapiens
  misc_RNA (1)...(19): siRNA sense strand
gaagaaccagugaagaaga

SEQ ID NO: 665248 - RNA, 19 nt, Homo sapiens
  misc_RNA (1)...(19): siRNA sense strand
caaaauagcuacaaaccau

SEQ ID NO: 665249 - RNA, 19 nt, Homo sapiens
  misc_RNA (1)...(19): siRNA sense strand
caaagaaagaucugaagga

SEQ ID NO: 665250 - RNA, 19 nt, Homo sapiens
  misc_RNA (1)...(19): siRNA sense strand
gaaggaacaauaucagcaa

SEQ ID NO: 665251 - RNA, 19 nt, Homo sapiens
  misc_RNA (1)...(19): siRNA sense strand
guuguagacugcacucuga

SEQ ID NO: 665252 - RNA, 19 nt, Homo sapiens
  misc_RNA (1)...(19): siRNA sense strand
ggaagaagaaccagugaag

SEQ ID NO: 665253 - RNA, 19 nt, Homo sapiens
  misc_RNA (1)...(19): siRNA sense strand
caauguuggucuuaguaaa

SEQ ID NO: 665254 - RNA, 19 nt, Homo sapiens
  misc_RNA (1)...(19): siRNA sense strand
gauaaggucauggaucaaa

SEQ ID NO: 665255 - RNA, 19 nt, Homo sapiens
  misc_RNA (1)...(19): siRNA sense strand
gaaccagugaagaagauaa

SEQ ID NO: 665256 - RNA, 19 nt, Homo sapiens
  misc_RNA (1)...(19): siRNA sense strand
gaagaagaaccagugaaga

SEQ ID NO: 665257 - RNA, 19 nt, Homo sapiens
  misc_RNA (1)...(19): siRNA sense strand
guaagaacgaggaggauga

SEQ ID NO: 665258 - RNA, 19 nt, Homo sapiens
  misc_RNA (1)...(19): siRNA sense strand
gcaggaagagcucguggaa

SEQ ID NO: 665259 - RNA, 19 nt, Homo sapiens
  misc_RNA (1)...(19): siRNA sense strand
gaaaauaagggaguacuuu

SEQ ID NO: 665260 - RNA, 19 nt, Homo sapiens
  misc_RNA (1)...(19): siRNA sense strand
aggcguggguucugcuuua

SEQ ID NO: 665261 - RNA, 19 nt, Homo sapiens
  misc_RNA (1)...(19): siRNA sense strand
uaaagaaucggagagugua

SEQ ID NO: 665262 - RNA, 19 nt, Homo sapiens
  misc_RNA (1)...(19): siRNA sense strand
gggaguacuuuggugguuu

SEQ ID NO: 665263 - RNA, 19 nt, Homo sapiens
  misc_RNA (1)...(19): siRNA sense strand
ccaaagccaugaaaacaaa

SEQ ID NO: 665264 - RNA, 19 nt, Homo sapiens
  misc_RNA (1)...(19): siRNA sense strand
aagaagaaccagugaagaa

SEQ ID NO: 665265 - RNA, 19 nt, Homo sapiens
  misc_RNA (1)...(19): siRNA sense strand
aaucggagaguguagauaa

SEQ ID NO: 665266 - RNA, 19 nt, Homo sapiens
  misc_RNA (1)...(19): siRNA sense strand
gacaacaagaccaauaaga

SEQ ID NO: 665267 - RNA, 19 nt, Homo sapiens
  misc_RNA (1)...(19): siRNA sense strand
ccacaauguuggucuuagu

SEQ ID NO: 665268 - RNA, 19 nt, Homo sapiens
  misc_RNA (1)...(19): siRNA sense strand
gcugggacacuacaaagaa

SEQ ID NO: 665269 - RNA, 19 nt, Homo sapiens
  misc_RNA (1)...(19): siRNA sense strand
ggaacaauaucagcaacag

SEQ ID NO: 665270 - RNA, 19 nt, Homo sapiens
  misc_RNA (1)...(19): siRNA sense strand
cagauacaccugaagagaa

SEQ ID NO: 665271 - RNA, 19 nt, Homo sapiens
  misc_RNA (1)...(19): siRNA sense strand
gugaagaagauaauggaaa

SEQ ID NO: 665272 - RNA, 19 nt, Homo sapiens
  misc_RNA (1)...(19): siRNA sense strand
gaguguagauaaggucaug

SEQ ID NO: 665273 - RNA, 19 nt, Homo sapiens
  misc_RNA (1)...(19): siRNA sense strand
ggucuuaguaaaugugaaa

SEQ ID NO: 665274 - RNA, 19 nt, Homo sapiens
  misc_RNA (1)...(19): siRNA sense strand
ugaaugggaaggugauuga

SEQ ID NO: 665275 - RNA, 19 nt, Homo sapiens
  misc_RNA (1)...(19): siRNA sense strand
gguggccuuucuccagaua

SEQ ID NO: 665276 - RNA, 19 nt, Homo sapiens
  misc_RNA (1)...(19): siRNA sense strand
gaagauugacgccaguaag

SEQ ID NO: 665277 - RNA, 19 nt, Homo sapiens
  misc_RNA (1)...(19): siRNA sense strand
guucugcuuuauuaccuuu

SEQ ID NO: 665278 - RNA, 19 nt, Homo sapiens
  misc_RNA (1)...(19): siRNA sense strand
ccaugucgaaggaacaaua

SEQ ID NO: 665279 - RNA, 19 nt, Homo sapiens
  misc_RNA (1)...(19): siRNA sense strand
cuacaaagaaagaucugaa

SEQ ID NO: 665280 - RNA, 19 nt, Homo sapiens
  misc_RNA (1)...(19): siRNA sense strand
ccagauacaccugaagaga

SEQ ID NO: 665281 - RNA, 19 nt, Homo sapiens
  misc_RNA (1)...(19): siRNA sense strand
uagcuacaaaccauacuaa

SEQ ID NO: 665282 - RNA, 19 nt, Homo sapiens
  misc_RNA (1)...(19): siRNA sense strand
caggcgagguggucaucaa

SEQ ID NO: 665283 - RNA, 19 nt, Homo sapiens
  misc_RNA (1)...(19): siRNA sense strand
ggacaacaagaccaauaag

SEQ ID NO: 665284 - RNA, 19 nt, Homo sapiens
  misc_RNA (1)...(19): siRNA sense strand
ggaguacuuuggugguuuu

SEQ ID NO: 665285 - RNA, 19 nt, Homo sapiens
  misc_RNA (1)...(19): siRNA sense strand
aagaaccagugaagaagau

SEQ ID NO: 665286 - RNA, 19 nt, Homo sapiens
  misc_RNA (1)...(19): siRNA sense strand
acucugaaguuagauccua

SEQ ID NO: 665287 - RNA, 19 nt, Homo sapiens
  misc_RNA (1)...(19): siRNA sense strand
agaggaggauuugcaggaa

SEQ ID NO: 665288 - RNA, 19 nt, Homo sapiens
  misc_RNA (1)...(19): siRNA sense strand
cacaauguuggucuuagua

SEQ ID NO: 665289 - RNA, 19 nt, Homo sapiens
  misc_RNA (1)...(19): siRNA sense strand
uuaaagaaucggagagugu

SEQ ID NO: 665290 - RNA, 19 nt, Homo sapiens
  misc_RNA (1)...(19): siRNA sense strand
cgaagauugacgccaguaa

SEQ ID NO: 665291 - RNA, 19 nt, Homo sapiens
  misc_RNA (1)...(19): siRNA sense strand
cugggacacuacaaagaaa

SEQ ID NO: 665292 - RNA, 19 nt, Homo sapiens
  misc_RNA (1)...(19): siRNA sense strand
gaaucggagaguguagaua

SEQ ID NO: 665293 - RNA, 19 nt, Homo sapiens
  misc_RNA (1)...(19): siRNA sense strand
gaaggacuacuuuuccaaa

SEQ ID NO: 665294 - RNA, 19 nt, Homo sapiens
  misc_RNA (1)...(19): siRNA sense strand
acaacaagaccaauaagag

SEQ ID NO: 665295 - RNA, 19 nt, Homo sapiens
  misc_RNA (1)...(19): siRNA sense strand
uggacaacaagaccaauaa

SEQ ID NO: 665296 - RNA, 19 nt, Homo sapiens
  misc_RNA (1)...(19): siRNA sense strand
uaagaacgaggaggaugaa

SEQ ID NO: 665297 - RNA, 19 nt, Homo sapiens
  misc_RNA (1)...(19): siRNA sense strand
gagugguuaugggaaggua

SEQ ID NO: 665298 - RNA, 19 nt, Homo sapiens
  misc_RNA (1)...(19): siRNA sense strand
aagauugacgccaguaaga

SEQ ID NO: 665299 - RNA, 19 nt, Homo sapiens
  misc_RNA (1)...(19): siRNA sense strand
aggaggauuugcaggaaga

SEQ ID NO: 665300 - RNA, 19 nt, Homo sapiens
  misc_RNA (1)...(19): siRNA sense strand
ggaucuagaggaggauuug

SEQ ID NO: 665301 - RNA, 19 nt, Homo sapiens
  misc_RNA (1)...(19): siRNA sense strand
acaauguuggucuuaguaa

SEQ ID NO: 665302 - RNA, 19 nt, Homo sapiens
  misc_RNA (1)...(19): siRNA sense strand
aagaaauaccacaauguug

SEQ ID NO: 665303 - RNA, 19 nt, Homo sapiens
  misc_RNA (1)...(19): siRNA sense strand
ggaaaagaaauaccacaau

SEQ ID NO: 665304 - RNA, 19 nt, Homo sapiens
  misc_RNA (1)...(19): siRNA sense strand
aaacaaaagagccgguuaa

SEQ ID NO: 665305 - RNA, 19 nt, Homo sapiens
  misc_RNA (1)...(19): siRNA sense strand
aaguagccaugucgaagga

SEQ ID NO: 665306 - RNA, 19 nt, Homo sapiens
  misc_RNA (1)...(19): siRNA sense strand
gaaauaaaaguagccaugu

SEQ ID NO: 665307 - RNA, 19 nt, Homo sapiens
  misc_RNA (1)...(19): siRNA sense strand
gggacacuacaaagaaaga

SEQ ID NO: 665308 - RNA, 19 nt, Homo sapiens
  misc_RNA (1)...(19): siRNA sense strand
gggaaggugauugauccua

SEQ ID NO: 665309 - RNA, 19 nt, Homo sapiens
  misc_RNA (1)...(19): siRNA sense strand
ugucgaaggaacaauauca

SEQ ID NO: 665310 - RNA, 19 nt, Homo sapiens
  misc_RNA (1)...(19): siRNA sense strand
gcgagguggucaucaaaau

SEQ ID NO: 665311 - RNA, 19 nt, Homo sapiens
  misc_RNA (1)...(19): siRNA sense strand
acugcacucugaaguuaga

SEQ ID NO: 665312 - RNA, 19 nt, Homo sapiens
  misc_RNA (1)...(19): siRNA sense strand
guagacugcacucugaagu

SEQ ID NO: 665313 - RNA, 19 nt, Homo sapiens
  misc_RNA (1)...(19): siRNA sense strand
ccagugaagaagauaaugg

SEQ ID NO: 665314 - RNA, 19 nt, Homo sapiens
  misc_RNA (1)...(19): siRNA sense strand
ggcguggguucugcuuuau

SEQ ID NO: 665315 - RNA, 19 nt, Homo sapiens
  misc_RNA (1)...(19): siRNA sense strand
gaaguuagauccuaucaca

SEQ ID NO: 665316 - RNA, 19 nt, Homo sapiens
  misc_RNA (1)...(19): siRNA sense strand
agaaagaucugaaggacua

SEQ ID NO: 665317 - RNA, 19 nt, Homo sapiens
  misc_RNA (1)...(19): siRNA sense strand
caaauuuggugaaguugua

SEQ ID NO: 665318 - RNA, 19 nt, Homo sapiens
  misc_RNA (1)...(19): siRNA sense strand
ggaaggugauugauccuaa

SEQ ID NO: 665319 - RNA, 19 nt, Homo sapiens
  misc_RNA (1)...(19): siRNA sense strand
gaaggugauugauccuaaa

SEQ ID NO: 665320 - RNA, 19 nt, Homo sapiens
  misc_RNA (1)...(19): siRNA sense strand
agacugcacucugaaguua

SEQ ID NO: 665321 - RNA, 19 nt, Homo sapiens
  misc_RNA (1)...(19): siRNA sense strand
gaaaagaaauaccacaaug

SEQ ID NO: 665322 - RNA, 19 nt, Homo sapiens
  misc_RNA (1)...(19): siRNA sense strand
uagauaaggucauggauca

SEQ ID NO: 665323 - RNA, 19 nt, Homo sapiens
  misc_RNA (1)...(19): siRNA sense strand
cguggguucugcuuuauua

SEQ ID NO: 665324 - RNA, 19 nt, Homo sapiens
  misc_RNA (1)...(19): siRNA sense strand
aggaagagcucguggaaga

SEQ ID NO: 665325 - RNA, 19 nt, Homo sapiens
  misc_RNA (1)...(19): siRNA sense strand
ggacuacuuuuccaaauuu

SEQ ID NO: 665326 - RNA, 19 nt, Homo sapiens
  misc_RNA (1)...(19): siRNA sense strand
ggccuuagcugggacacua

SEQ ID NO: 665327 - RNA, 19 nt, Homo sapiens
  misc_RNA (1)...(19): siRNA sense strand
agauacaccugaagagaaa

SEQ ID NO: 665328 - RNA, 19 nt, Homo sapiens
  misc_RNA (1)...(19): siRNA sense strand
gaagaaccagugaagaaga

SEQ ID NO: 665329 - RNA, 19 nt, Homo sapiens
  misc_RNA (1)...(19): siRNA sense strand
caaaauagcuacaaaccau

SEQ ID NO: 665330 - RNA, 19 nt, Homo sapiens
  misc_RNA (1)...(19): siRNA sense strand
caaagaaagaucugaagga

SEQ ID NO: 665331 - RNA, 19 nt, Homo sapiens
  misc_RNA (1)...(19): siRNA sense strand
gaaggaacaauaucagcaa

SEQ ID NO: 665332 - RNA, 19 nt, Homo sapiens
  misc_RNA (1)...(19): siRNA sense strand
guuguagacugcacucuga

SEQ ID NO: 665333 - RNA, 19 nt, Homo sapiens
  misc_RNA (1)...(19): siRNA sense strand
ggaagaagaaccagugaag

SEQ ID NO: 665334 - RNA, 19 nt, Homo sapiens
  misc_RNA (1)...(19): siRNA sense strand
caauguuggucuuaguaaa

SEQ ID NO: 665335 - RNA, 19 nt, Homo sapiens
  misc_RNA (1)...(19): siRNA sense strand
gauaaggucauggaucaaa

SEQ ID NO: 665336 - RNA, 19 nt, Homo sapiens
  misc_RNA (1)...(19): siRNA sense strand
gaaccagugaagaagauaa

SEQ ID NO: 665337 - RNA, 19 nt, Homo sapiens
  misc_RNA (1)...(19): siRNA sense strand
gaagaagaaccagugaaga

SEQ ID NO: 665338 - RNA, 19 nt, Homo sapiens
  misc_RNA (1)...(19): siRNA sense strand
guaagaacgaggaggauga

SEQ ID NO: 665339 - RNA, 19 nt, Homo sapiens
  misc_RNA (1)...(19): siRNA sense strand
gcaggaagagcucguggaa

SEQ ID NO: 665340 - RNA, 19 nt, Homo sapiens
  misc_RNA (1)...(19): siRNA sense strand
gaaaauaagggaguacuuu

SEQ ID NO: 665341 - RNA, 19 nt, Homo sapiens
  misc_RNA (1)...(19): siRNA sense strand
aggcguggguucugcuuua

SEQ ID NO: 665342 - RNA, 19 nt, Homo sapiens
  misc_RNA (1)...(19): siRNA sense strand
uaaagaaucggagagugua

SEQ ID NO: 665343 - RNA, 19 nt, Homo sapiens
  misc_RNA (1)...(19): siRNA sense strand
gggaguacuuuggugguuu

SEQ ID NO: 665344 - RNA, 19 nt, Homo sapiens
  misc_RNA (1)...(19): siRNA sense strand
ccaaagccaugaaaacaaa

SEQ ID NO: 665345 - RNA, 19 nt, Homo sapiens
  misc_RNA (1)...(19): siRNA sense strand
aagaagaaccagugaagaa

SEQ ID NO: 665346 - RNA, 19 nt, Homo sapiens
  misc_RNA (1)...(19): siRNA sense strand
aaucggagaguguagauaa

SEQ ID NO: 665347 - RNA, 19 nt, Homo sapiens
  misc_RNA (1)...(19): siRNA sense strand
gacaacaagaccaauaaga

SEQ ID NO: 665348 - RNA, 19 nt, Homo sapiens
  misc_RNA (1)...(19): siRNA sense strand
ccacaauguuggucuuagu

SEQ ID NO: 665349 - RNA, 19 nt, Homo sapiens
  misc_RNA (1)...(19): siRNA sense strand
gcugggacacuacaaagaa

SEQ ID NO: 665350 - RNA, 19 nt, Homo sapiens
  misc_RNA (1)...(19): siRNA sense strand
ggaacaauaucagcaacag

SEQ ID NO: 665351 - RNA, 19 nt, Homo sapiens
  misc_RNA (1)...(19): siRNA sense strand
cagauacaccugaagagaa

SEQ ID NO: 665352 - RNA, 19 nt, Homo sapiens
  misc_RNA (1)...(19): siRNA sense strand
gugaagaagauaauggaaa

SEQ ID NO: 665353 - RNA, 19 nt, Homo sapiens
  misc_RNA (1)...(19): siRNA sense strand
gaguguagauaaggucaug

SEQ ID NO: 665354 - RNA, 19 nt, Homo sapiens
  misc_RNA (1)...(19): siRNA sense strand
ggucuuaguaaaugugaaa

SEQ ID NO: 665355 - RNA, 19 nt, Homo sapiens
  misc_RNA (1)...(19): siRNA sense strand
ugaaugggaaggugauuga

SEQ ID NO: 665356 - RNA, 19 nt, Homo sapiens
  misc_RNA (1)...(19): siRNA sense strand
gguggccuuucuccagaua

SEQ ID NO: 665357 - RNA, 19 nt, Homo sapiens
  misc_RNA (1)...(19): siRNA sense strand
gaagauugacgccaguaag

SEQ ID NO: 665358 - RNA, 19 nt, Homo sapiens
  misc_RNA (1)...(19): siRNA sense strand
guucugcuuuauuaccuuu

SEQ ID NO: 665359 - RNA, 19 nt, Homo sapiens
  misc_RNA (1)...(19): siRNA sense strand
ccaugucgaaggaacaaua

SEQ ID NO: 665360 - RNA, 19 nt, Homo sapiens
  misc_RNA (1)...(19): siRNA sense strand
cuacaaagaaagaucugaa

SEQ ID NO: 665361 - RNA, 19 nt, Homo sapiens
  misc_RNA (1)...(19): siRNA sense strand
ccagauacaccugaagaga

SEQ ID NO: 665362 - RNA, 19 nt, Homo sapiens
  misc_RNA (1)...(19): siRNA sense strand
uagcuacaaaccauacuaa

SEQ ID NO: 665363 - RNA, 19 nt, Homo sapiens
  misc_RNA (1)...(19): siRNA sense strand
caggcgagguggucaucaa

SEQ ID NO: 665364 - RNA, 19 nt, Homo sapiens
  misc_RNA (1)...(19): siRNA sense strand
ggacaacaagaccaauaag

SEQ ID NO: 665365 - RNA, 19 nt, Homo sapiens
  misc_RNA (1)...(19): siRNA sense strand
ggaguacuuuggugguuuu

SEQ ID NO: 665366 - RNA, 19 nt, Homo sapiens
  misc_RNA (1)...(19): siRNA sense strand
aagaaccagugaagaagau

SEQ ID NO: 665367 - RNA, 19 nt, Homo sapiens
  misc_RNA (1)...(19): siRNA sense strand
acucugaaguuagauccua

SEQ ID NO: 665368 - RNA, 19 nt, Homo sapiens
  misc_RNA (1)...(19): siRNA sense strand
agaggaggauuugcaggaa

SEQ ID NO: 665369 - RNA, 19 nt, Homo sapiens
  misc_RNA (1)...(19): siRNA sense strand
cacaauguuggucuuagua

SEQ ID NO: 665370 - RNA, 19 nt, Homo sapiens
  misc_RNA (1)...(19): siRNA sense strand
uuaaagaaucggagagugu

SEQ ID NO: 665371 - RNA, 19 nt, Homo sapiens
  misc_RNA (1)...(19): siRNA sense strand
cgaagauugacgccaguaa

SEQ ID NO: 665372 - RNA, 19 nt, Homo sapiens
  misc_RNA (1)...(19): siRNA sense strand
cugggacacuacaaagaaa

SEQ ID NO: 665373 - RNA, 19 nt, Homo sapiens
  misc_RNA (1)...(19): siRNA sense strand
gaaucggagaguguagaua

SEQ ID NO: 665374 - RNA, 19 nt, Homo sapiens
  misc_RNA (1)...(19): siRNA sense strand
gaaggacuacuuuuccaaa

SEQ ID NO: 665375 - RNA, 19 nt, Homo sapiens
  misc_RNA (1)...(19): siRNA sense strand
acaacaagaccaauaagag

SEQ ID NO: 665376 - RNA, 19 nt, Homo sapiens
  misc_RNA (1)...(19): siRNA sense strand
uggacaacaagaccaauaa

SEQ ID NO: 665377 - RNA, 19 nt, Homo sapiens
  misc_RNA (1)...(19): siRNA sense strand
uaagaacgaggaggaugaa

SEQ ID NO: 665378 - RNA, 19 nt, Homo sapiens
  misc_RNA (1)...(19): siRNA sense strand
gagugguuaugggaaggua

SEQ ID NO: 665379 - RNA, 19 nt, Homo sapiens
  misc_RNA (1)...(19): siRNA sense strand
aagauugacgccaguaaga

SEQ ID NO: 665380 - RNA, 19 nt, Homo sapiens
  misc_RNA (1)...(19): siRNA sense strand
aggaggauuugcaggaaga

SEQ ID NO: 665381 - RNA, 19 nt, Homo sapiens
  misc_RNA (1)...(19): siRNA sense strand
ggaucuagaggaggauuug

SEQ ID NO: 665382 - RNA, 19 nt, Homo sapiens
  misc_RNA (1)...(19): siRNA sense strand
acaauguuggucuuaguaa

SEQ ID NO: 665383 - RNA, 19 nt, Homo sapiens
  misc_RNA (1)...(19): siRNA sense strand
aagaaauaccacaauguug

SEQ ID NO: 665384 - RNA, 19 nt, Homo sapiens
  misc_RNA (1)...(19): siRNA sense strand
ggaaaagaaauaccacaau

SEQ ID NO: 665385 - RNA, 19 nt, Homo sapiens
  misc_RNA (1)...(19): siRNA sense strand
aaacaaaagagccgguuaa

SEQ ID NO: 665386 - RNA, 19 nt, Homo sapiens
  misc_RNA (1)...(19): siRNA sense strand
aaguagccaugucgaagga

SEQ ID NO: 665387 - RNA, 19 nt, Homo sapiens
  misc_RNA (1)...(19): siRNA sense strand
gaaauaaaaguagccaugu

SEQ ID NO: 665388 - RNA, 19 nt, Homo sapiens
  misc_RNA (1)...(19): siRNA sense strand
gggacacuacaaagaaaga

SEQ ID NO: 665389 - RNA, 19 nt, Homo sapiens
  misc_RNA (1)...(19): siRNA sense strand
gggaaggugauugauccua

SEQ ID NO: 665390 - RNA, 19 nt, Homo sapiens
  misc_RNA (1)...(19): siRNA sense strand
ugucgaaggaacaauauca

SEQ ID NO: 665391 - RNA, 19 nt, Homo sapiens
  misc_RNA (1)...(19): siRNA sense strand
gcgagguggucaucaaaau

SEQ ID NO: 665392 - RNA, 19 nt, Homo sapiens
  misc_RNA (1)...(19): siRNA sense strand
acugcacucugaaguuaga

SEQ ID NO: 665393 - RNA, 19 nt, Homo sapiens
  misc_RNA (1)...(19): siRNA sense strand
guagacugcacucugaagu

SEQ ID NO: 665394 - RNA, 19 nt, Homo sapiens
  misc_RNA (1)...(19): siRNA sense strand
ccagugaagaagauaaugg

SEQ ID NO: 665395 - RNA, 19 nt, Homo sapiens
  misc_RNA (1)...(19): siRNA sense strand
ggcguggguucugcuuuau

SEQ ID NO: 665396 - RNA, 19 nt, Homo sapiens
  misc_RNA (1)...(19): siRNA sense strand
gaaguuagauccuaucaca

SEQ ID NO: 665397 - RNA, 19 nt, Homo sapiens
  misc_RNA (1)...(19): siRNA sense strand
agaaagaucugaaggacua

SEQ ID NO: 665398 - RNA, 19 nt, Homo sapiens
  misc_RNA (1)...(19): siRNA sense strand
caaauuuggugaaguugua

SEQ ID NO: 665399 - RNA, 19 nt, Homo sapiens
  misc_RNA (1)...(19): siRNA sense strand
ggaaggugauugauccuaa

SEQ ID NO: 665400 - RNA, 19 nt, Homo sapiens
  misc_RNA (1)...(19): siRNA sense strand
gaaggugauugauccuaaa

SEQ ID NO: 665401 - RNA, 19 nt, Homo sapiens
  misc_RNA (1)...(19): siRNA sense strand
agacugcacucugaaguua

SEQ ID NO: 665402 - RNA, 19 nt, Homo sapiens
  misc_RNA (1)...(19): siRNA sense strand
gaaaagaaauaccacaaug

SEQ ID NO: 665403 - RNA, 19 nt, Homo sapiens
  misc_RNA (1)...(19): siRNA sense strand
uagauaaggucauggauca

SEQ ID NO: 665404 - RNA, 19 nt, Homo sapiens
  misc_RNA (1)...(19): siRNA sense strand
cguggguucugcuuuauua

SEQ ID NO: 665405 - RNA, 19 nt, Homo sapiens
  misc_RNA (1)...(19): siRNA sense strand
aggaagagcucguggaaga

SEQ ID NO: 665406 - RNA, 19 nt, Homo sapiens
  misc_RNA (1)...(19): siRNA sense strand
ggacuacuuuuccaaauuu

SEQ ID NO: 665407 - RNA, 19 nt, Homo sapiens
  misc_RNA (1)...(19): siRNA sense strand
ggccuuagcugggacacua

SEQ ID NO: 665408 - RNA, 19 nt, Homo sapiens
  misc_RNA (1)...(19): siRNA sense strand
agauacaccugaagagaaa

SEQ ID NO: 665409 - RNA, 19 nt, Homo sapiens
  misc_RNA (1)...(19): siRNA sense strand
gaagaaccagugaagaaga

SEQ ID NO: 665410 - RNA, 19 nt, Homo sapiens
  misc_RNA (1)...(19): siRNA sense strand
caaaauagcuacaaaccau

SEQ ID NO: 665411 - RNA, 19 nt, Homo sapiens
  misc_RNA (1)...(19): siRNA sense strand
caaagaaagaucugaagga

SEQ ID NO: 665412 - RNA, 19 nt, Homo sapiens
  misc_RNA (1)...(19): siRNA sense strand
gaaggaacaauaucagcaa

SEQ ID NO: 665413 - RNA, 19 nt, Homo sapiens
  misc_RNA (1)...(19): siRNA sense strand
guuguagacugcacucuga

SEQ ID NO: 665414 - RNA, 19 nt, Homo sapiens
  misc_RNA (1)...(19): siRNA sense strand
ggaagaagaaccagugaag

SEQ ID NO: 665415 - RNA, 19 nt, Homo sapiens
  misc_RNA (1)...(19): siRNA sense strand
caauguuggucuuaguaaa

SEQ ID NO: 665416 - RNA, 19 nt, Homo sapiens
  misc_RNA (1)...(19): siRNA sense strand
gauaaggucauggaucaaa

SEQ ID NO: 665417 - RNA, 19 nt, Homo sapiens
  misc_RNA (1)...(19): siRNA sense strand
gaaccagugaagaagauaa

SEQ ID NO: 665418 - RNA, 19 nt, Homo sapiens
  misc_RNA (1)...(19): siRNA sense strand
gaagaagaaccagugaaga

SEQ ID NO: 665419 - RNA, 19 nt, Homo sapiens
  misc_RNA (1)...(19): siRNA sense strand
guaagaacgaggaggauga

SEQ ID NO: 665420 - RNA, 19 nt, Homo sapiens
  misc_RNA (1)...(19): siRNA sense strand
gcaggaagagcucguggaa

SEQ ID NO: 665421 - RNA, 19 nt, Homo sapiens
  misc_RNA (1)...(19): siRNA sense strand
gaaaauaagggaguacuuu

SEQ ID NO: 665422 - RNA, 19 nt, Homo sapiens
  misc_RNA (1)...(19): siRNA sense strand
aggcguggguucugcuuua

SEQ ID NO: 665423 - RNA, 19 nt, Homo sapiens
  misc_RNA (1)...(19): siRNA sense strand
uaaagaaucggagagugua

SEQ ID NO: 665424 - RNA, 19 nt, Homo sapiens
  misc_RNA (1)...(19): siRNA sense strand
gggaguacuuuggugguuu

SEQ ID NO: 665425 - RNA, 19 nt, Homo sapiens
  misc_RNA (1)...(19): siRNA sense strand
ccaaagccaugaaaacaaa

SEQ ID NO: 665426 - RNA, 19 nt, Homo sapiens
  misc_RNA (1)...(19): siRNA sense strand
aagaagaaccagugaagaa

SEQ ID NO: 665427 - RNA, 19 nt, Homo sapiens
  misc_RNA (1)...(19): siRNA sense strand
aaucggagaguguagauaa

SEQ ID NO: 665428 - RNA, 19 nt, Homo sapiens
  misc_RNA (1)...(19): siRNA sense strand
gacaacaagaccaauaaga

SEQ ID NO: 665429 - RNA, 19 nt, Homo sapiens
  misc_RNA (1)...(19): siRNA sense strand
ccacaauguuggucuuagu

SEQ ID NO: 665430 - RNA, 19 nt, Homo sapiens
  misc_RNA (1)...(19): siRNA sense strand
gcugggacacuacaaagaa

SEQ ID NO: 665431 - RNA, 19 nt, Homo sapiens
  misc_RNA (1)...(19): siRNA sense strand
ggaacaauaucagcaacag

SEQ ID NO: 665432 - RNA, 19 nt, Homo sapiens
  misc_RNA (1)...(19): siRNA sense strand
cagauacaccugaagagaa

SEQ ID NO: 665433 - RNA, 19 nt, Homo sapiens
  misc_RNA (1)...(19): siRNA sense strand
gugaagaagauaauggaaa

SEQ ID NO: 665434 - RNA, 19 nt, Homo sapiens
  misc_RNA (1)...(19): siRNA sense strand
gaguguagauaaggucaug

SEQ ID NO: 665435 - RNA, 19 nt, Homo sapiens
  misc_RNA (1)...(19): siRNA sense strand
ggucuuaguaaaugugaaa

SEQ ID NO: 665436 - RNA, 19 nt, Homo sapiens
  misc_RNA (1)...(19): siRNA sense strand
ugaaugggaaggugauuga

SEQ ID NO: 665437 - RNA, 19 nt, Homo sapiens
  misc_RNA (1)...(19): siRNA sense strand
gguggccuuucuccagaua

SEQ ID NO: 665438 - RNA, 19 nt, Homo sapiens
  misc_RNA (1)...(19): siRNA sense strand
gaagauugacgccaguaag

SEQ ID NO: 665439 - RNA, 19 nt, Homo sapiens
  misc_RNA (1)...(19): siRNA sense strand
guucugcuuuauuaccuuu

SEQ ID NO: 665440 - RNA, 19 nt, Homo sapiens
  misc_RNA (1)...(19): siRNA sense strand
ccaugucgaaggaacaaua

SEQ ID NO: 665441 - RNA, 19 nt, Homo sapiens
  misc_RNA (1)...(19): siRNA sense strand
cuacaaagaaagaucugaa

SEQ ID NO: 665442 - RNA, 19 nt, Homo sapiens
  misc_RNA (1)...(19): siRNA sense strand
ccagauacaccugaagaga

SEQ ID NO: 665443 - RNA, 19 nt, Homo sapiens
  misc_RNA (1)...(19): siRNA sense strand
uagcuacaaaccauacuaa

SEQ ID NO: 665444 - RNA, 19 nt, Homo sapiens
  misc_RNA (1)...(19): siRNA sense strand
caggcgagguggucaucaa

SEQ ID NO: 665445 - RNA, 19 nt, Homo sapiens
  misc_RNA (1)...(19): siRNA sense strand
ggacaacaagaccaauaag

SEQ ID NO: 665446 - RNA, 19 nt, Homo sapiens
  misc_RNA (1)...(19): siRNA sense strand
ggaguacuuuggugguuuu

SEQ ID NO: 665447 - RNA, 19 nt, Homo sapiens
  misc_RNA (1)...(19): siRNA sense strand
aagaaccagugaagaagau

SEQ ID NO: 665448 - RNA, 19 nt, Homo sapiens
  misc_RNA (1)...(19): siRNA sense strand
acucugaaguuagauccua

SEQ ID NO: 665449 - RNA, 19 nt, Homo sapiens
  misc_RNA (1)...(19): siRNA sense strand
agaggaggauuugcaggaa

SEQ ID NO: 665450 - RNA, 19 nt, Homo sapiens
  misc_RNA (1)...(19): siRNA sense strand
cacaauguuggucuuagua

SEQ ID NO: 665451 - RNA, 19 nt, Homo sapiens
  misc_RNA (1)...(19): siRNA sense strand
uuaaagaaucggagagugu

SEQ ID NO: 665452 - RNA, 19 nt, Homo sapiens
  misc_RNA (1)...(19): siRNA sense strand
cgaagauugacgccaguaa

SEQ ID NO: 665453 - RNA, 19 nt, Homo sapiens
  misc_RNA (1)...(19): siRNA sense strand
cugggacacuacaaagaaa

SEQ ID NO: 665454 - RNA, 19 nt, Homo sapiens
  misc_RNA (1)...(19): siRNA sense strand
gaaucggagaguguagaua

SEQ ID NO: 665455 - RNA, 19 nt, Homo sapiens
  misc_RNA (1)...(19): siRNA sense strand
gaaggacuacuuuuccaaa

SEQ ID NO: 665456 - RNA, 19 nt, Homo sapiens
  misc_RNA (1)...(19): siRNA sense strand
acaacaagaccaauaagag

SEQ ID NO: 665457 - RNA, 19 nt, Homo sapiens
  misc_RNA (1)...(19): siRNA sense strand
uggacaacaagaccaauaa

SEQ ID NO: 665458 - RNA, 19 nt, Homo sapiens
  misc_RNA (1)...(19): siRNA sense strand
uaagaacgaggaggaugaa

SEQ ID NO: 665459 - RNA, 19 nt, Homo sapiens
  misc_RNA (1)...(19): siRNA sense strand
gagugguuaugggaaggua

SEQ ID NO: 665460 - RNA, 19 nt, Homo sapiens
  misc_RNA (1)...(19): siRNA sense strand
aagauugacgccaguaaga

SEQ ID NO: 665461 - RNA, 19 nt, Homo sapiens
  misc_RNA (1)...(19): siRNA sense strand
aggaggauuugcaggaaga

SEQ ID NO: 665462 - RNA, 19 nt, Homo sapiens
  misc_RNA (1)...(19): siRNA sense strand
ggaucuagaggaggauuug

SEQ ID NO: 665463 - RNA, 19 nt, Homo sapiens
  misc_RNA (1)...(19): siRNA sense strand
acaauguuggucuuaguaa

SEQ ID NO: 665464 - RNA, 19 nt, Homo sapiens
  misc_RNA (1)...(19): siRNA sense strand
aagaaauaccacaauguug

SEQ ID NO: 665465 - RNA, 19 nt, Homo sapiens
  misc_RNA (1)...(19): siRNA sense strand
ggaaaagaaauaccacaau

SEQ ID NO: 665466 - RNA, 19 nt, Homo sapiens
  misc_RNA (1)...(19): siRNA sense strand
aaacaaaagagccgguuaa

SEQ ID NO: 665467 - RNA, 19 nt, Homo sapiens
  misc_RNA (1)...(19): siRNA sense strand
aaguagccaugucgaagga

SEQ ID NO: 665468 - RNA, 19 nt, Homo sapiens
  misc_RNA (1)...(19): siRNA sense strand
gaaauaaaaguagccaugu

SEQ ID NO: 665469 - RNA, 19 nt, Homo sapiens
  misc_RNA (1)...(19): siRNA sense strand
gggacacuacaaagaaaga

SEQ ID NO: 665470 - RNA, 19 nt, Homo sapiens
  misc_RNA (1)...(19): siRNA sense strand
gggaaggugauugauccua

SEQ ID NO: 665471 - RNA, 19 nt, Homo sapiens
  misc_RNA (1)...(19): siRNA sense strand
ugucgaaggaacaauauca

SEQ ID NO: 665472 - RNA, 19 nt, Homo sapiens
  misc_RNA (1)...(19): siRNA sense strand
gcgagguggucaucaaaau

SEQ ID NO: 665473 - RNA, 19 nt, Homo sapiens
  misc_RNA (1)...(19): siRNA sense strand
acugcacucugaaguuaga

SEQ ID NO: 665474 - RNA, 19 nt, Homo sapiens
  misc_RNA (1)...(19): siRNA sense strand
guagacugcacucugaagu

SEQ ID NO: 665475 - RNA, 19 nt, Homo sapiens
  misc_RNA (1)...(19): siRNA sense strand
ccagugaagaagauaaugg

SEQ ID NO: 665476 - RNA, 19 nt, Homo sapiens
  misc_RNA (1)...(19): siRNA sense strand
ggcguggguucugcuuuau

SEQ ID NO: 665477 - RNA, 19 nt, Homo sapiens
  misc_RNA (1)...(19): siRNA sense strand
gaaguuagauccuaucaca

SEQ ID NO: 665478 - RNA, 19 nt, Homo sapiens
  misc_RNA (1)...(19): siRNA sense strand
agaaagaucugaaggacua

SEQ ID NO: 665479 - RNA, 19 nt, Homo sapiens
  misc_RNA (1)...(19): siRNA sense strand
caaauuuggugaaguugua

SEQ ID NO: 665480 - RNA, 19 nt, Homo sapiens
  misc_RNA (1)...(19): siRNA sense strand
ggaaggugauugauccuaa

SEQ ID NO: 665481 - RNA, 19 nt, Homo sapiens
  misc_RNA (1)...(19): siRNA sense strand
gaaggugauugauccuaaa

SEQ ID NO: 665482 - RNA, 19 nt, Homo sapiens
  misc_RNA (1)...(19): siRNA sense strand
agacugcacucugaaguua

SEQ ID NO: 665483 - RNA, 19 nt, Homo sapiens
  misc_RNA (1)...(19): siRNA sense strand
gaaaagaaauaccacaaug

SEQ ID NO: 665484 - RNA, 19 nt, Homo sapiens
  misc_RNA (1)...(19): siRNA sense strand
uagauaaggucauggauca

SEQ ID NO: 665485 - RNA, 19 nt, Homo sapiens
  misc_RNA (1)...(19): siRNA sense strand
cguggguucugcuuuauua

SEQ ID NO: 665486 - RNA, 19 nt, Homo sapiens
  misc_RNA (1)...(19): siRNA sense strand
aggaagagcucguggaaga

SEQ ID NO: 665487 - RNA, 19 nt, Homo sapiens
  misc_RNA (1)...(19): siRNA sense strand
ggacuacuuuuccaaauuu

SEQ ID NO: 665488 - RNA, 19 nt, Homo sapiens
  misc_RNA (1)...(19): siRNA sense strand
ggccuuagcugggacacua

SEQ ID NO: 665489 - RNA, 19 nt, Homo sapiens
  misc_RNA (1)...(19): siRNA sense strand
agauacaccugaagagaaa

SEQ ID NO: 665490 - RNA, 19 nt, Homo sapiens
  misc_RNA (1)...(19): siRNA sense strand
gaagaaccagugaagaaga

SEQ ID NO: 665491 - RNA, 19 nt, Homo sapiens
  misc_RNA (1)...(19): siRNA sense strand
caaaauagcuacaaaccau

SEQ ID NO: 665492 - RNA, 19 nt, Homo sapiens
  misc_RNA (1)...(19): siRNA sense strand
caaagaaagaucugaagga

SEQ ID NO: 665493 - RNA, 19 nt, Homo sapiens
  misc_RNA (1)...(19): siRNA sense strand
gaaggaacaauaucagcaa

SEQ ID NO: 665494 - RNA, 19 nt, Homo sapiens
  misc_RNA (1)...(19): siRNA sense strand
guuguagacugcacucuga

SEQ ID NO: 665495 - RNA, 19 nt, Homo sapiens
  misc_RNA (1)...(19): siRNA sense strand
ggaagaagaaccagugaag

SEQ ID NO: 665496 - RNA, 19 nt, Homo sapiens
  misc_RNA (1)...(19): siRNA sense strand
caauguuggucuuaguaaa

SEQ ID NO: 665497 - RNA, 19 nt, Homo sapiens
  misc_RNA (1)...(19): siRNA sense strand
gauaaggucauggaucaaa

SEQ ID NO: 665498 - RNA, 19 nt, Homo sapiens
  misc_RNA (1)...(19): siRNA sense strand
gaaccagugaagaagauaa

SEQ ID NO: 665499 - RNA, 19 nt, Homo sapiens
  misc_RNA (1)...(19): siRNA sense strand
gaagaagaaccagugaaga

SEQ ID NO: 665500 - RNA, 19 nt, Homo sapiens
  misc_RNA (1)...(19): siRNA sense strand
guaagaacgaggaggauga

SEQ ID NO: 665501 - RNA, 19 nt, Homo sapiens
  misc_RNA (1)...(19): siRNA sense strand
gcaggaagagcucguggaa

SEQ ID NO: 665502 - RNA, 19 nt, Homo sapiens
  misc_RNA (1)...(19): siRNA sense strand
gaaaauaagggaguacuuu

SEQ ID NO: 665503 - RNA, 19 nt, Homo sapiens
  misc_RNA (1)...(19): siRNA sense strand
aggcguggguucugcuuua

SEQ ID NO: 665504 - RNA, 19 nt, Homo sapiens
  misc_RNA (1)...(19): siRNA sense strand
uaaagaaucggagagugua

SEQ ID NO: 665505 - RNA, 19 nt, Homo sapiens
  misc_RNA (1)...(19): siRNA sense strand
gggaguacuuuggugguuu

SEQ ID NO: 665506 - RNA, 19 nt, Homo sapiens
  misc_RNA (1)...(19): siRNA sense strand
ccaaagccaugaaaacaaa

SEQ ID NO: 665507 - RNA, 19 nt, Homo sapiens
  misc_RNA (1)...(19): siRNA sense strand
aagaagaaccagugaagaa

SEQ ID NO: 665508 - RNA, 19 nt, Homo sapiens
  misc_RNA (1)...(19): siRNA sense strand
aaucggagaguguagauaa

SEQ ID NO: 665509 - RNA, 19 nt, Homo sapiens
  misc_RNA (1)...(19): siRNA sense strand
gacaacaagaccaauaaga

SEQ ID NO: 665510 - RNA, 19 nt, Homo sapiens
  misc_RNA (1)...(19): siRNA sense strand
ccacaauguuggucuuagu

SEQ ID NO: 665511 - RNA, 19 nt, Homo sapiens
  misc_RNA (1)...(19): siRNA sense strand
gcugggacacuacaaagaa

SEQ ID NO: 665512 - RNA, 19 nt, Homo sapiens
  misc_RNA (1)...(19): siRNA sense strand
ggaacaauaucagcaacag

SEQ ID NO: 665513 - RNA, 19 nt, Homo sapiens
  misc_RNA (1)...(19): siRNA sense strand
cagauacaccugaagagaa

SEQ ID NO: 665514 - RNA, 19 nt, Homo sapiens
  misc_RNA (1)...(19): siRNA sense strand
gugaagaagauaauggaaa

SEQ ID NO: 665515 - RNA, 19 nt, Homo sapiens
  misc_RNA (1)...(19): siRNA sense strand
gaguguagauaaggucaug

SEQ ID NO: 665516 - RNA, 19 nt, Homo sapiens
  misc_RNA (1)...(19): siRNA sense strand
ggucuuaguaaaugugaaa

SEQ ID NO: 665517 - RNA, 19 nt, Homo sapiens
  misc_RNA (1)...(19): siRNA sense strand
ugaaugggaaggugauuga

SEQ ID NO: 665518 - RNA, 19 nt, Homo sapiens
  misc_RNA (1)...(19): siRNA sense strand
gguggccuuucuccagaua

SEQ ID NO: 665519 - RNA, 19 nt, Homo sapiens
  misc_RNA (1)...(19): siRNA sense strand
gaagauugacgccaguaag

SEQ ID NO: 665520 - RNA, 19 nt, Homo sapiens
  misc_RNA (1)...(19): siRNA sense strand
guucugcuuuauuaccuuu

SEQ ID NO: 665521 - RNA, 19 nt, Homo sapiens
  misc_RNA (1)...(19): siRNA sense strand
ccaugucgaaggaacaaua

SEQ ID NO: 665522 - RNA, 19 nt, Homo sapiens
  misc_RNA (1)...(19): siRNA sense strand
cuacaaagaaagaucugaa

SEQ ID NO: 665523 - RNA, 19 nt, Homo sapiens
  misc_RNA (1)...(19): siRNA sense strand
ccagauacaccugaagaga

SEQ ID NO: 665524 - RNA, 19 nt, Homo sapiens
  misc_RNA (1)...(19): siRNA sense strand
uagcuacaaaccauacuaa

SEQ ID NO: 665525 - RNA, 19 nt, Homo sapiens
  misc_RNA (1)...(19): siRNA sense strand
caggcgagguggucaucaa

SEQ ID NO: 665526 - RNA, 19 nt, Homo sapiens
  misc_RNA (1)...(19): siRNA sense strand
ggacaacaagaccaauaag

SEQ ID NO: 665527 - RNA, 19 nt, Homo sapiens
  misc_RNA (1)...(19): siRNA sense strand
ggaguacuuuggugguuuu

SEQ ID NO: 665528 - RNA, 19 nt, Homo sapiens
  misc_RNA (1)...(19): siRNA sense strand
aagaaccagugaagaagau

SEQ ID NO: 665529 - RNA, 19 nt, Homo sapiens
  misc_RNA (1)...(19): siRNA sense strand
acucugaaguuagauccua

SEQ ID NO: 665530 - RNA, 19 nt, Homo sapiens
  misc_RNA (1)...(19): siRNA sense strand
agaggaggauuugcaggaa

SEQ ID NO: 665531 - RNA, 19 nt, Homo sapiens
  misc_RNA (1)...(19): siRNA sense strand
cacaauguuggucuuagua

SEQ ID NO: 665532 - RNA, 19 nt, Homo sapiens
  misc_RNA (1)...(19): siRNA sense strand
uuaaagaaucggagagugu

SEQ ID NO: 665533 - RNA, 19 nt, Homo sapiens
  misc_RNA (1)...(19): siRNA sense strand
cgaagauugacgccaguaa

SEQ ID NO: 665534 - RNA, 19 nt, Homo sapiens
  misc_RNA (1)...(19): siRNA sense strand
cugggacacuacaaagaaa

SEQ ID NO: 665535 - RNA, 19 nt, Homo sapiens
  misc_RNA (1)...(19): siRNA sense strand
gaaucggagaguguagaua

SEQ ID NO: 665536 - RNA, 19 nt, Homo sapiens
  misc_RNA (1)...(19): siRNA sense strand
gaaggacuacuuuuccaaa

SEQ ID NO: 665537 - RNA, 19 nt, Homo sapiens
  misc_RNA (1)...(19): siRNA sense strand
acaacaagaccaauaagag

SEQ ID NO: 665538 - RNA, 19 nt, Homo sapiens
  misc_RNA (1)...(19): siRNA sense strand
uggacaacaagaccaauaa

SEQ ID NO: 665539 - RNA, 19 nt, Homo sapiens
  misc_RNA (1)...(19): siRNA sense strand
uaagaacgaggaggaugaa

SEQ ID NO: 665540 - RNA, 19 nt, Homo sapiens
  misc_RNA (1)...(19): siRNA sense strand
gagugguuaugggaaggua

SEQ ID NO: 665541 - RNA, 19 nt, Homo sapiens
  misc_RNA (1)...(19): siRNA sense strand
aagauugacgccaguaaga

SEQ ID NO: 665542 - RNA, 19 nt, Homo sapiens
  misc_RNA (1)...(19): siRNA sense strand
aggaggauuugcaggaaga

SEQ ID NO: 665543 - RNA, 19 nt, Homo sapiens
  misc_RNA (1)...(19): siRNA sense strand
ggaucuagaggaggauuug

SEQ ID NO: 665544 - RNA, 19 nt, Homo sapiens
  misc_RNA (1)...(19): siRNA sense strand
acaauguuggucuuaguaa

SEQ ID NO: 665545 - RNA, 19 nt, Homo sapiens
  misc_RNA (1)...(19): siRNA sense strand
aagaaauaccacaauguug

SEQ ID NO: 665546 - RNA, 19 nt, Homo sapiens
  misc_RNA (1)...(19): siRNA sense strand
ggaaaagaaauaccacaau

SEQ ID NO: 665547 - RNA, 19 nt, Homo sapiens
  misc_RNA (1)...(19): siRNA sense strand
aaacaaaagagccgguuaa

SEQ ID NO: 665548 - RNA, 19 nt, Homo sapiens
  misc_RNA (1)...(19): siRNA sense strand
aaguagccaugucgaagga

SEQ ID NO: 665549 - RNA, 19 nt, Homo sapiens
  misc_RNA (1)...(19): siRNA sense strand
gaaauaaaaguagccaugu

SEQ ID NO: 665550 - RNA, 19 nt, Homo sapiens
  misc_RNA (1)...(19): siRNA sense strand
gggacacuacaaagaaaga

SEQ ID NO: 665551 - RNA, 19 nt, Homo sapiens
  misc_RNA (1)...(19): siRNA sense strand
gggaaggugauugauccua

SEQ ID NO: 665552 - RNA, 19 nt, Homo sapiens
  misc_RNA (1)...(19): siRNA sense strand
ugucgaaggaacaauauca

SEQ ID NO: 665553 - RNA, 19 nt, Homo sapiens
  misc_RNA (1)...(19): siRNA sense strand
gcgagguggucaucaaaau

SEQ ID NO: 665554 - RNA, 19 nt, Homo sapiens
  misc_RNA (1)...(19): siRNA sense strand
acugcacucugaaguuaga

SEQ ID NO: 665555 - RNA, 19 nt, Homo sapiens
  misc_RNA (1)...(19): siRNA sense strand
guagacugcacucugaagu

SEQ ID NO: 665556 - RNA, 19 nt, Homo sapiens
  misc_RNA (1)...(19): siRNA sense strand
ccagugaagaagauaaugg

SEQ ID NO: 665557 - RNA, 19 nt, Homo sapiens
  misc_RNA (1)...(19): siRNA sense strand
ggcguggguucugcuuuau

SEQ ID NO: 665558 - RNA, 19 nt, Homo sapiens
  misc_RNA (1)...(19): siRNA sense strand
gaaguuagauccuaucaca

SEQ ID NO: 665559 - RNA, 19 nt, Homo sapiens
  misc_RNA (1)...(19): siRNA sense strand
agaaagaucugaaggacua

SEQ ID NO: 665560 - RNA, 19 nt, Homo sapiens
  misc_RNA (1)...(19): siRNA sense strand
caaauuuggugaaguugua

SEQ ID NO: 665561 - RNA, 19 nt, Homo sapiens
  misc_RNA (1)...(19): siRNA sense strand
ggaaggugauugauccuaa

SEQ ID NO: 665562 - RNA, 19 nt, Homo sapiens
  misc_RNA (1)...(19): siRNA sense strand
gaaggugauugauccuaaa

SEQ ID NO: 665563 - RNA, 19 nt, Homo sapiens
  misc_RNA (1)...(19): siRNA sense strand
agacugcacucugaaguua

SEQ ID NO: 665564 - RNA, 19 nt, Homo sapiens
  misc_RNA (1)...(19): siRNA sense strand
gaaaagaaauaccacaaug

SEQ ID NO: 665565 - RNA, 19 nt, Homo sapiens
  misc_RNA (1)...(19): siRNA sense strand
uagauaaggucauggauca

SEQ ID NO: 665566 - RNA, 19 nt, Homo sapiens
  misc_RNA (1)...(19): siRNA sense strand
cguggguucugcuuuauua

SEQ ID NO: 665567 - RNA, 19 nt, Homo sapiens
  misc_RNA (1)...(19): siRNA sense strand
aggaagagcucguggaaga

SEQ ID NO: 665568 - RNA, 19 nt, Homo sapiens
  misc_RNA (1)...(19): siRNA sense strand
ggacuacuuuuccaaauuu

SEQ ID NO: 665569 - RNA, 19 nt, Homo sapiens
  misc_RNA (1)...(19): siRNA sense strand
ggccuuagcugggacacua

SEQ ID NO: 665570 - RNA, 19 nt, Homo sapiens
  misc_RNA (1)...(19): siRNA sense strand
agauacaccugaagagaaa

SEQ ID NO: 665571 - RNA, 19 nt, Homo sapiens
  misc_RNA (1)...(19): siRNA sense strand
gaagaaccagugaagaaga

SEQ ID NO: 665572 - RNA, 19 nt, Homo sapiens
  misc_RNA (1)...(19): siRNA sense strand
caaaauagcuacaaaccau

SEQ ID NO: 665573 - RNA, 19 nt, Homo sapiens
  misc_RNA (1)...(19): siRNA sense strand
caaagaaagaucugaagga

SEQ ID NO: 665574 - RNA, 19 nt, Homo sapiens
  misc_RNA (1)...(19): siRNA sense strand
gaaggaacaauaucagcaa

SEQ ID NO: 665575 - RNA, 19 nt, Homo sapiens
  misc_RNA (1)...(19): siRNA sense strand
guuguagacugcacucuga

SEQ ID NO: 665576 - RNA, 19 nt, Homo sapiens
  misc_RNA (1)...(19): siRNA sense strand
ggaagaagaaccagugaag

SEQ ID NO: 665577 - RNA, 19 nt, Homo sapiens
  misc_RNA (1)...(19): siRNA sense strand
caauguuggucuuaguaaa

SEQ ID NO: 665578 - RNA, 19 nt, Homo sapiens
  misc_RNA (1)...(19): siRNA sense strand
gauaaggucauggaucaaa

SEQ ID NO: 665579 - RNA, 19 nt, Homo sapiens
  misc_RNA (1)...(19): siRNA sense strand
gaaccagugaagaagauaa

SEQ ID NO: 665580 - RNA, 19 nt, Homo sapiens
  misc_RNA (1)...(19): siRNA sense strand
gaagaagaaccagugaaga

SEQ ID NO: 665581 - RNA, 19 nt, Homo sapiens
  misc_RNA (1)...(19): siRNA sense strand
guaagaacgaggaggauga

SEQ ID NO: 665582 - RNA, 19 nt, Homo sapiens
  misc_RNA (1)...(19): siRNA sense strand
gcaggaagagcucguggaa

SEQ ID NO: 665583 - RNA, 19 nt, Homo sapiens
  misc_RNA (1)...(19): siRNA sense strand
gaaaauaagggaguacuuu

SEQ ID NO: 665584 - RNA, 19 nt, Homo sapiens
  misc_RNA (1)...(19): siRNA sense strand
aggcguggguucugcuuua

SEQ ID NO: 665585 - RNA, 19 nt, Homo sapiens
  misc_RNA (1)...(19): siRNA sense strand
uaaagaaucggagagugua

SEQ ID NO: 665586 - RNA, 19 nt, Homo sapiens
  misc_RNA (1)...(19): siRNA sense strand
gggaguacuuuggugguuu

SEQ ID NO: 665587 - RNA, 19 nt, Homo sapiens
  misc_RNA (1)...(19): siRNA sense strand
ccaaagccaugaaaacaaa

SEQ ID NO: 665588 - RNA, 19 nt, Homo sapiens
  misc_RNA (1)...(19): siRNA sense strand
aagaagaaccagugaagaa

SEQ ID NO: 665589 - RNA, 19 nt, Homo sapiens
  misc_RNA (1)...(19): siRNA sense strand
aaucggagaguguagauaa

SEQ ID NO: 665590 - RNA, 19 nt, Homo sapiens
  misc_RNA (1)...(19): siRNA sense strand
gacaacaagaccaauaaga

SEQ ID NO: 665591 - RNA, 19 nt, Homo sapiens
  misc_RNA (1)...(19): siRNA sense strand
ccacaauguuggucuuagu

SEQ ID NO: 665592 - RNA, 19 nt, Homo sapiens
  misc_RNA (1)...(19): siRNA sense strand
gcugggacacuacaaagaa

SEQ ID NO: 665593 - RNA, 19 nt, Homo sapiens
  misc_RNA (1)...(19): siRNA sense strand
ggaacaauaucagcaacag

SEQ ID NO: 665594 - RNA, 19 nt, Homo sapiens
  misc_RNA (1)...(19): siRNA sense strand
cagauacaccugaagagaa

SEQ ID NO: 665595 - RNA, 19 nt, Homo sapiens
  misc_RNA (1)...(19): siRNA sense strand
gugaagaagauaauggaaa

SEQ ID NO: 665596 - RNA, 19 nt, Homo sapiens
  misc_RNA (1)...(19): siRNA sense strand
gaguguagauaaggucaug

SEQ ID NO: 665597 - RNA, 19 nt, Homo sapiens
  misc_RNA (1)...(19): siRNA sense strand
ggucuuaguaaaugugaaa

SEQ ID NO: 665598 - RNA, 19 nt, Homo sapiens
  misc_RNA (1)...(19): siRNA sense strand
ugaaugggaaggugauuga

SEQ ID NO: 665599 - RNA, 19 nt, Homo sapiens
  misc_RNA (1)...(19): siRNA sense strand
gguggccuuucuccagaua

SEQ ID NO: 665600 - RNA, 19 nt, Homo sapiens
  misc_RNA (1)...(19): siRNA sense strand
gaagauugacgccaguaag

SEQ ID NO: 665601 - RNA, 19 nt, Homo sapiens
  misc_RNA (1)...(19): siRNA sense strand
guucugcuuuauuaccuuu

SEQ ID NO: 665602 - RNA, 19 nt, Homo sapiens
  misc_RNA (1)...(19): siRNA sense strand
ccaugucgaaggaacaaua

SEQ ID NO: 665603 - RNA, 19 nt, Homo sapiens
  misc_RNA (1)...(19): siRNA sense strand
cuacaaagaaagaucugaa

SEQ ID NO: 665604 - RNA, 19 nt, Homo sapiens
  misc_RNA (1)...(19): siRNA sense strand
ccagauacaccugaagaga

SEQ ID NO: 665605 - RNA, 19 nt, Homo sapiens
  misc_RNA (1)...(19): siRNA sense strand
uagcuacaaaccauacuaa

SEQ ID NO: 665606 - RNA, 19 nt, Homo sapiens
  misc_RNA (1)...(19): siRNA sense strand
caggcgagguggucaucaa

SEQ ID NO: 665607 - RNA, 19 nt, Homo sapiens
  misc_RNA (1)...(19): siRNA sense strand
ggacaacaagaccaauaag

SEQ ID NO: 665608 - RNA, 19 nt, Homo sapiens
  misc_RNA (1)...(19): siRNA sense strand
ggaguacuuuggugguuuu

SEQ ID NO: 665609 - RNA, 19 nt, Homo sapiens
  misc_RNA (1)...(19): siRNA sense strand
aagaaccagugaagaagau

SEQ ID NO: 665610 - RNA, 19 nt, Homo sapiens
  misc_RNA (1)...(19): siRNA sense strand
acucugaaguuagauccua

SEQ ID NO: 665611 - RNA, 19 nt, Homo sapiens
  misc_RNA (1)...(19): siRNA sense strand
agaggaggauuugcaggaa

SEQ ID NO: 665612 - RNA, 19 nt, Homo sapiens
  misc_RNA (1)...(19): siRNA sense strand
cacaauguuggucuuagua

SEQ ID NO: 665613 - RNA, 19 nt, Homo sapiens
  misc_RNA (1)...(19): siRNA sense strand
uuaaagaaucggagagugu

SEQ ID NO: 665614 - RNA, 19 nt, Homo sapiens
  misc_RNA (1)...(19): siRNA sense strand
cgaagauugacgccaguaa

SEQ ID NO: 665615 - RNA, 19 nt, Homo sapiens
  misc_RNA (1)...(19): siRNA sense strand
cugggacacuacaaagaaa

SEQ ID NO: 665616 - RNA, 19 nt, Homo sapiens
  misc_RNA (1)...(19): siRNA sense strand
gaaucggagaguguagaua

SEQ ID NO: 665617 - RNA, 19 nt, Homo sapiens
  misc_RNA (1)...(19): siRNA sense strand
gaaggacuacuuuuccaaa

SEQ ID NO: 665618 - RNA, 19 nt, Homo sapiens
  misc_RNA (1)...(19): siRNA sense strand
acaacaagaccaauaagag

SEQ ID NO: 665619 - RNA, 19 nt, Homo sapiens
  misc_RNA (1)...(19): siRNA sense strand
uggacaacaagaccaauaa

SEQ ID NO: 665620 - RNA, 19 nt, Homo sapiens
  misc_RNA (1)...(19): siRNA sense strand
uaagaacgaggaggaugaa

SEQ ID NO: 665621 - RNA, 19 nt, Homo sapiens
  misc_RNA (1)...(19): siRNA sense strand
gagugguuaugggaaggua

SEQ ID NO: 665622 - RNA, 19 nt, Homo sapiens
  misc_RNA (1)...(19): siRNA sense strand
aagauugacgccaguaaga

SEQ ID NO: 665623 - RNA, 19 nt, Homo sapiens
  misc_RNA (1)...(19): siRNA sense strand
aggaggauuugcaggaaga

SEQ ID NO: 665624 - RNA, 19 nt, Homo sapiens
  misc_RNA (1)...(19): siRNA sense strand
ggaucuagaggaggauuug

SEQ ID NO: 665625 - RNA, 19 nt, Homo sapiens
  misc_RNA (1)...(19): siRNA sense strand
acaauguuggucuuaguaa

SEQ ID NO: 665626 - RNA, 19 nt, Homo sapiens
  misc_RNA (1)...(19): siRNA sense strand
aagaaauaccacaauguug

SEQ ID NO: 665627 - RNA, 19 nt, Homo sapiens
  misc_RNA (1)...(19): siRNA sense strand
ggaaaagaaauaccacaau

SEQ ID NO: 665628 - RNA, 19 nt, Homo sapiens
  misc_RNA (1)...(19): siRNA sense strand
aaacaaaagagccgguuaa

SEQ ID NO: 665629 - RNA, 19 nt, Homo sapiens
  misc_RNA (1)...(19): siRNA sense strand
aaguagccaugucgaagga

SEQ ID NO: 665630 - RNA, 19 nt, Homo sapiens
  misc_RNA (1)...(19): siRNA sense strand
gaaauaaaaguagccaugu

SEQ ID NO: 665631 - RNA, 19 nt, Homo sapiens
  misc_RNA (1)...(19): siRNA sense strand
gggacacuacaaagaaaga

SEQ ID NO: 665632 - RNA, 19 nt, Homo sapiens
  misc_RNA (1)...(19): siRNA sense strand
gggaaggugauugauccua

SEQ ID NO: 665633 - RNA, 19 nt, Homo sapiens
  misc_RNA (1)...(19): siRNA sense strand
ugucgaaggaacaauauca

SEQ ID NO: 665634 - RNA, 19 nt, Homo sapiens
  misc_RNA (1)...(19): siRNA sense strand
gcgagguggucaucaaaau

SEQ ID NO: 665635 - RNA, 19 nt, Homo sapiens
  misc_RNA (1)...(19): siRNA sense strand
acugcacucugaaguuaga

SEQ ID NO: 665636 - RNA, 19 nt, Homo sapiens
  misc_RNA (1)...(19): siRNA sense strand
guagacugcacucugaagu

SEQ ID NO: 665637 - RNA, 19 nt, Homo sapiens
  misc_RNA (1)...(19): siRNA sense strand
ccagugaagaagauaaugg

SEQ ID NO: 665638 - RNA, 19 nt, Homo sapiens
  misc_RNA (1)...(19): siRNA sense strand
ggcguggguucugcuuuau

SEQ ID NO: 665639 - RNA, 19 nt, Homo sapiens
  misc_RNA (1)...(19): siRNA sense strand
gaaguuagauccuaucaca

SEQ ID NO: 665640 - RNA, 19 nt, Homo sapiens
  misc_RNA (1)...(19): siRNA sense strand
agaaagaucugaaggacua

SEQ ID NO: 665641 - RNA, 19 nt, Homo sapiens
  misc_RNA (1)...(19): siRNA sense strand
caaauuuggugaaguugua

SEQ ID NO: 665642 - RNA, 19 nt, Homo sapiens
  misc_RNA (1)...(19): siRNA sense strand
ggaaggugauugauccuaa

SEQ ID NO: 665643 - RNA, 19 nt, Homo sapiens
  misc_RNA (1)...(19): siRNA sense strand
gaaggugauugauccuaaa

SEQ ID NO: 665644 - RNA, 19 nt, Homo sapiens
  misc_RNA (1)...(19): siRNA sense strand
agacugcacucugaaguua

SEQ ID NO: 665645 - RNA, 19 nt, Homo sapiens
  misc_RNA (1)...(19): siRNA sense strand
gaaaagaaauaccacaaug

SEQ ID NO: 665646 - RNA, 19 nt, Homo sapiens
  misc_RNA (1)...(19): siRNA sense strand
uagauaaggucauggauca

SEQ ID NO: 665647 - RNA, 19 nt, Homo sapiens
  misc_RNA (1)...(19): siRNA sense strand
cguggguucugcuuuauua

SEQ ID NO: 665648 - RNA, 19 nt, Homo sapiens
  misc_RNA (1)...(19): siRNA sense strand
aggaagagcucguggaaga

SEQ ID NO: 665649 - RNA, 19 nt, Homo sapiens
  misc_RNA (1)...(19): siRNA sense strand
ggacuacuuuuccaaauuu

SEQ ID NO: 665650 - RNA, 19 nt, Homo sapiens
  misc_RNA (1)...(19): siRNA sense strand
ggccuuagcugggacacua

SEQ ID NO: 665651 - RNA, 19 nt, Homo sapiens
  misc_RNA (1)...(19): siRNA sense strand
agauacaccugaagagaaa

SEQ ID NO: 665652 - RNA, 19 nt, Homo sapiens
  misc_RNA (1)...(19): siRNA sense strand
gaagaaccagugaagaaga

SEQ ID NO: 665653 - RNA, 19 nt, Homo sapiens
  misc_RNA (1)...(19): siRNA sense strand
caaaauagcuacaaaccau

SEQ ID NO: 665654 - RNA, 19 nt, Homo sapiens
  misc_RNA (1)...(19): siRNA sense strand
caaagaaagaucugaagga

SEQ ID NO: 665655 - RNA, 19 nt, Homo sapiens
  misc_RNA (1)...(19): siRNA sense strand
gaaggaacaauaucagcaa

SEQ ID NO: 665656 - RNA, 19 nt, Homo sapiens
  misc_RNA (1)...(19): siRNA sense strand
guuguagacugcacucuga

SEQ ID NO: 665657 - RNA, 19 nt, Homo sapiens
  misc_RNA (1)...(19): siRNA sense strand
ggaagaagaaccagugaag

SEQ ID NO: 665658 - RNA, 19 nt, Homo sapiens
  misc_RNA (1)...(19): siRNA sense strand
caauguuggucuuaguaaa

SEQ ID NO: 665659 - RNA, 19 nt, Homo sapiens
  misc_RNA (1)...(19): siRNA sense strand
gauaaggucauggaucaaa

SEQ ID NO: 665660 - RNA, 19 nt, Homo sapiens
  misc_RNA (1)...(19): siRNA sense strand
gaaccagugaagaagauaa

SEQ ID NO: 665661 - RNA, 19 nt, Homo sapiens
  misc_RNA (1)...(19): siRNA sense strand
gaagaagaaccagugaaga

SEQ ID NO: 665662 - RNA, 19 nt, Homo sapiens
  misc_RNA (1)...(19): siRNA sense strand
guaagaacgaggaggauga

SEQ ID NO: 665663 - RNA, 19 nt, Homo sapiens
  misc_RNA (1)...(19): siRNA sense strand
gcaggaagagcucguggaa

SEQ ID NO: 665664 - RNA, 19 nt, Homo sapiens
  misc_RNA (1)...(19): siRNA sense strand
gaaaauaagggaguacuuu

SEQ ID NO: 665665 - RNA, 19 nt, Homo sapiens
  misc_RNA (1)...(19): siRNA sense strand
aggcguggguucugcuuua

SEQ ID NO: 665666 - RNA, 19 nt, Homo sapiens
  misc_RNA (1)...(19): siRNA sense strand
uaaagaaucggagagugua

SEQ ID NO: 665667 - RNA, 19 nt, Homo sapiens
  misc_RNA (1)...(19): siRNA sense strand
gggaguacuuuggugguuu

SEQ ID NO: 665668 - RNA, 19 nt, Homo sapiens
  misc_RNA (1)...(19): siRNA sense strand
ccaaagccaugaaaacaaa

SEQ ID NO: 665669 - RNA, 19 nt, Homo sapiens
  misc_RNA (1)...(19): siRNA sense strand
aagaagaaccagugaagaa

SEQ ID NO: 665670 - RNA, 19 nt, Homo sapiens
  misc_RNA (1)...(19): siRNA sense strand
aaucggagaguguagauaa

SEQ ID NO: 665671 - RNA, 19 nt, Homo sapiens
  misc_RNA (1)...(19): siRNA sense strand
gacaacaagaccaauaaga

SEQ ID NO: 665672 - RNA, 19 nt, Homo sapiens
  misc_RNA (1)...(19): siRNA sense strand
ccacaauguuggucuuagu

SEQ ID NO: 665673 - RNA, 19 nt, Homo sapiens
  misc_RNA (1)...(19): siRNA sense strand
gcugggacacuacaaagaa

SEQ ID NO: 665674 - RNA, 19 nt, Homo sapiens
  misc_RNA (1)...(19): siRNA sense strand
ggaacaauaucagcaacag

SEQ ID NO: 665675 - RNA, 19 nt, Homo sapiens
  misc_RNA (1)...(19): siRNA sense strand
cagauacaccugaagagaa

SEQ ID NO: 665676 - RNA, 19 nt, Homo sapiens
  misc_RNA (1)...(19): siRNA sense strand
gugaagaagauaauggaaa

SEQ ID NO: 665677 - RNA, 19 nt, Homo sapiens
  misc_RNA (1)...(19): siRNA sense strand
gaguguagauaaggucaug

SEQ ID NO: 665678 - RNA, 19 nt, Homo sapiens
  misc_RNA (1)...(19): siRNA sense strand
ggucuuaguaaaugugaaa

SEQ ID NO: 665679 - RNA, 19 nt, Homo sapiens
  misc_RNA (1)...(19): siRNA sense strand
ugaaugggaaggugauuga

SEQ ID NO: 665680 - RNA, 19 nt, Homo sapiens
  misc_RNA (1)...(19): siRNA sense strand
gguggccuuucuccagaua

SEQ ID NO: 665681 - RNA, 19 nt, Homo sapiens
  misc_RNA (1)...(19): siRNA sense strand
gaagauugacgccaguaag

SEQ ID NO: 665682 - RNA, 19 nt, Homo sapiens
  misc_RNA (1)...(19): siRNA sense strand
guucugcuuuauuaccuuu

SEQ ID NO: 665683 - RNA, 19 nt, Homo sapiens
  misc_RNA (1)...(19): siRNA sense strand
ccaugucgaaggaacaaua

SEQ ID NO: 665684 - RNA, 19 nt, Homo sapiens
  misc_RNA (1)...(19): siRNA sense strand
cuacaaagaaagaucugaa

SEQ ID NO: 665685 - RNA, 19 nt, Homo sapiens
  misc_RNA (1)...(19): siRNA sense strand
ccagauacaccugaagaga

SEQ ID NO: 665686 - RNA, 19 nt, Homo sapiens
  misc_RNA (1)...(19): siRNA sense strand
uagcuacaaaccauacuaa

SEQ ID NO: 665687 - RNA, 19 nt, Homo sapiens
  misc_RNA (1)...(19): siRNA sense strand
caggcgagguggucaucaa

SEQ ID NO: 665688 - RNA, 19 nt, Homo sapiens
  misc_RNA (1)...(19): siRNA sense strand
ggacaacaagaccaauaag

SEQ ID NO: 665689 - RNA, 19 nt, Homo sapiens
  misc_RNA (1)...(19): siRNA sense strand
ggaguacuuuggugguuuu

SEQ ID NO: 665690 - RNA, 19 nt, Homo sapiens
  misc_RNA (1)...(19): siRNA sense strand
aagaaccagugaagaagau

SEQ ID NO: 665691 - RNA, 19 nt, Homo sapiens
  misc_RNA (1)...(19): siRNA sense strand
acucugaaguuagauccua

SEQ ID NO: 665692 - RNA, 19 nt, Homo sapiens
  misc_RNA (1)...(19): siRNA sense strand
agaggaggauuugcaggaa

SEQ ID NO: 665693 - RNA, 19 nt, Homo sapiens
  misc_RNA (1)...(19): siRNA sense strand
cacaauguuggucuuagua

SEQ ID NO: 665694 - RNA, 19 nt, Homo sapiens
  misc_RNA (1)...(19): siRNA sense strand
uuaaagaaucggagagugu

SEQ ID NO: 665695 - RNA, 19 nt, Homo sapiens
  misc_RNA (1)...(19): siRNA sense strand
cgaagauugacgccaguaa

SEQ ID NO: 665696 - RNA, 19 nt, Homo sapiens
  misc_RNA (1)...(19): siRNA sense strand
cugggacacuacaaagaaa

SEQ ID NO: 665697 - RNA, 19 nt, Homo sapiens
  misc_RNA (1)...(19): siRNA sense strand
gaaucggagaguguagaua

SEQ ID NO: 665698 - RNA, 19 nt, Homo sapiens
  misc_RNA (1)...(19): siRNA sense strand
gaaggacuacuuuuccaaa

SEQ ID NO: 665699 - RNA, 19 nt, Homo sapiens
  misc_RNA (1)...(19): siRNA sense strand
acaacaagaccaauaagag

SEQ ID NO: 665700 - RNA, 19 nt, Homo sapiens
  misc_RNA (1)...(19): siRNA sense strand
uggacaacaagaccaauaa

SEQ ID NO: 665701 - RNA, 19 nt, Homo sapiens
  misc_RNA (1)...(19): siRNA sense strand
uaagaacgaggaggaugaa

SEQ ID NO: 665702 - RNA, 19 nt, Homo sapiens
  misc_RNA (1)...(19): siRNA sense strand
gagugguuaugggaaggua

SEQ ID NO: 665703 - RNA, 19 nt, Homo sapiens
  misc_RNA (1)...(19): siRNA sense strand
aagauugacgccaguaaga

SEQ ID NO: 665704 - RNA, 19 nt, Homo sapiens
  misc_RNA (1)...(19): siRNA sense strand
aggaggauuugcaggaaga

SEQ ID NO: 665705 - RNA, 19 nt, Homo sapiens
  misc_RNA (1)...(19): siRNA sense strand
ggaucuagaggaggauuug

SEQ ID NO: 665706 - RNA, 19 nt, Homo sapiens
  misc_RNA (1)...(19): siRNA sense strand
acaauguuggucuuaguaa

SEQ ID NO: 665707 - RNA, 19 nt, Homo sapiens
  misc_RNA (1)...(19): siRNA sense strand
aagaaauaccacaauguug

SEQ ID NO: 665708 - RNA, 19 nt, Homo sapiens
  misc_RNA (1)...(19): siRNA sense strand
ggaaaagaaauaccacaau

SEQ ID NO: 665709 - RNA, 19 nt, Homo sapiens
  misc_RNA (1)...(19): siRNA sense strand
aaacaaaagagccgguuaa

SEQ ID NO: 665710 - RNA, 19 nt, Homo sapiens
  misc_RNA (1)...(19): siRNA sense strand
aaguagccaugucgaagga

SEQ ID NO: 665711 - RNA, 19 nt, Homo sapiens
  misc_RNA (1)...(19): siRNA sense strand
gaaauaaaaguagccaugu

SEQ ID NO: 665712 - RNA, 19 nt, Homo sapiens
  misc_RNA (1)...(19): siRNA sense strand
gggacacuacaaagaaaga

SEQ ID NO: 665713 - RNA, 19 nt, Homo sapiens
  misc_RNA (1)...(19): siRNA sense strand
gggaaggugauugauccua

SEQ ID NO: 665714 - RNA, 19 nt, Homo sapiens
  misc_RNA (1)...(19): siRNA sense strand
ugucgaaggaacaauauca

SEQ ID NO: 665715 - RNA, 19 nt, Homo sapiens
  misc_RNA (1)...(19): siRNA sense strand
gcgagguggucaucaaaau

SEQ ID NO: 665716 - RNA, 19 nt, Homo sapiens
  misc_RNA (1)...(19): siRNA sense strand
acugcacucugaaguuaga

SEQ ID NO: 665717 - RNA, 19 nt, Homo sapiens
  misc_RNA (1)...(19): siRNA sense strand
guagacugcacucugaagu

SEQ ID NO: 665718 - RNA, 19 nt, Homo sapiens
  misc_RNA (1)...(19): siRNA sense strand
ccagugaagaagauaaugg

SEQ ID NO: 665719 - RNA, 19 nt, Homo sapiens
  misc_RNA (1)...(19): siRNA sense strand
ggcguggguucugcuuuau

SEQ ID NO: 665720 - RNA, 19 nt, Homo sapiens
  misc_RNA (1)...(19): siRNA sense strand
gaaguuagauccuaucaca

SEQ ID NO: 665721 - RNA, 19 nt, Homo sapiens
  misc_RNA (1)...(19): siRNA sense strand
agaaagaucugaaggacua

SEQ ID NO: 665722 - RNA, 19 nt, Homo sapiens
  misc_RNA (1)...(19): siRNA sense strand
caaauuuggugaaguugua

SEQ ID NO: 665723 - RNA, 19 nt, Homo sapiens
  misc_RNA (1)...(19): siRNA sense strand
ggaaggugauugauccuaa

SEQ ID NO: 665724 - RNA, 19 nt, Homo sapiens
  misc_RNA (1)...(19): siRNA sense strand
gaaggugauugauccuaaa

SEQ ID NO: 665725 - RNA, 19 nt, Homo sapiens
  misc_RNA (1)...(19): siRNA sense strand
agacugcacucugaaguua

SEQ ID NO: 665726 - RNA, 19 nt, Homo sapiens
  misc_RNA (1)...(19): siRNA sense strand
gaaaagaaauaccacaaug

SEQ ID NO: 665727 - RNA, 19 nt, Homo sapiens
  misc_RNA (1)...(19): siRNA sense strand
uagauaaggucauggauca

SEQ ID NO: 665728 - RNA, 19 nt, Homo sapiens
  misc_RNA (1)...(19): siRNA sense strand
cguggguucugcuuuauua

SEQ ID NO: 665729 - RNA, 19 nt, Homo sapiens
  misc_RNA (1)...(19): siRNA sense strand
aggaagagcucguggaaga

SEQ ID NO: 665730 - RNA, 19 nt, Homo sapiens
  misc_RNA (1)...(19): siRNA sense strand
ggacuacuuuuccaaauuu

SEQ ID NO: 665731 - RNA, 19 nt, Homo sapiens
  misc_RNA (1)...(19): siRNA sense strand
ggccuuagcugggacacua

SEQ ID NO: 665732 - RNA, 19 nt, Homo sapiens
  misc_RNA (1)...(19): siRNA sense strand
agauacaccugaagagaaa

SEQ ID NO: 665733 - RNA, 19 nt, Homo sapiens
  misc_RNA (1)...(19): siRNA sense strand
gaagaaccagugaagaaga

SEQ ID NO: 665734 - RNA, 19 nt, Homo sapiens
  misc_RNA (1)...(19): siRNA sense strand
caaaauagcuacaaaccau

SEQ ID NO: 665735 - RNA, 19 nt, Homo sapiens
  misc_RNA (1)...(19): siRNA sense strand
caaagaaagaucugaagga

SEQ ID NO: 665736 - RNA, 19 nt, Homo sapiens
  misc_RNA (1)...(19): siRNA sense strand
gaaggaacaauaucagcaa

SEQ ID NO: 665737 - RNA, 19 nt, Homo sapiens
  misc_RNA (1)...(19): siRNA sense strand
guuguagacugcacucuga

SEQ ID NO: 665738 - RNA, 19 nt, Homo sapiens
  misc_RNA (1)...(19): siRNA sense strand
ggaagaagaaccagugaag

SEQ ID NO: 665739 - RNA, 19 nt, Homo sapiens
  misc_RNA (1)...(19): siRNA sense strand
caauguuggucuuaguaaa

SEQ ID NO: 665740 - RNA, 19 nt, Homo sapiens
  misc_RNA (1)...(19): siRNA sense strand
gauaaggucauggaucaaa

SEQ ID NO: 665741 - RNA, 19 nt, Homo sapiens
  misc_RNA (1)...(19): siRNA sense strand
gaaccagugaagaagauaa

SEQ ID NO: 665742 - RNA, 19 nt, Homo sapiens
  misc_RNA (1)...(19): siRNA sense strand
gaagaagaaccagugaaga

SEQ ID NO: 665743 - RNA, 19 nt, Homo sapiens
  misc_RNA (1)...(19): siRNA sense strand
guaagaacgaggaggauga

SEQ ID NO: 665744 - RNA, 19 nt, Homo sapiens
  misc_RNA (1)...(19): siRNA sense strand
gcaggaagagcucguggaa

SEQ ID NO: 665745 - RNA, 19 nt, Homo sapiens
  misc_RNA (1)...(19): siRNA sense strand
gaaaauaagggaguacuuu

SEQ ID NO: 665746 - RNA, 19 nt, Homo sapiens
  misc_RNA (1)...(19): siRNA sense strand
aggcguggguucugcuuua

SEQ ID NO: 665747 - RNA, 19 nt, Homo sapiens
  misc_RNA (1)...(19): siRNA sense strand
uaaagaaucggagagugua

SEQ ID NO: 665748 - RNA, 19 nt, Homo sapiens
  misc_RNA (1)...(19): siRNA sense strand
gggaguacuuuggugguuu

SEQ ID NO: 665749 - RNA, 19 nt, Homo sapiens
  misc_RNA (1)...(19): siRNA sense strand
ccaaagccaugaaaacaaa

SEQ ID NO: 665750 - RNA, 19 nt, Homo sapiens
  misc_RNA (1)...(19): siRNA sense strand
aagaagaaccagugaagaa

SEQ ID NO: 665751 - RNA, 19 nt, Homo sapiens
  misc_RNA (1)...(19): siRNA sense strand
aaucggagaguguagauaa

SEQ ID NO: 665752 - RNA, 19 nt, Homo sapiens
  misc_RNA (1)...(19): siRNA sense strand
gacaacaagaccaauaaga

SEQ ID NO: 665753 - RNA, 19 nt, Homo sapiens
  misc_RNA (1)...(19): siRNA sense strand
ccacaauguuggucuuagu

SEQ ID NO: 665754 - RNA, 19 nt, Homo sapiens
  misc_RNA (1)...(19): siRNA sense strand
gcugggacacuacaaagaa

SEQ ID NO: 665755 - RNA, 19 nt, Homo sapiens
  misc_RNA (1)...(19): siRNA sense strand
ggaacaauaucagcaacag

SEQ ID NO: 665756 - RNA, 19 nt, Homo sapiens
  misc_RNA (1)...(19): siRNA sense strand
cagauacaccugaagagaa

SEQ ID NO: 665757 - RNA, 19 nt, Homo sapiens
  misc_RNA (1)...(19): siRNA sense strand
gugaagaagauaauggaaa

SEQ ID NO: 665758 - RNA, 19 nt, Homo sapiens
  misc_RNA (1)...(19): siRNA sense strand
gaguguagauaaggucaug

SEQ ID NO: 665759 - RNA, 19 nt, Homo sapiens
  misc_RNA (1)...(19): siRNA sense strand
ggucuuaguaaaugugaaa

SEQ ID NO: 665760 - RNA, 19 nt, Homo sapiens
  misc_RNA (1)...(19): siRNA sense strand
ugaaugggaaggugauuga

SEQ ID NO: 665761 - RNA, 19 nt, Homo sapiens
  misc_RNA (1)...(19): siRNA sense strand
gguggccuuucuccagaua

SEQ ID NO: 665762 - RNA, 19 nt, Homo sapiens
  misc_RNA (1)...(19): siRNA sense strand
gaagauugacgccaguaag

SEQ ID NO: 665763 - RNA, 19 nt, Homo sapiens
  misc_RNA (1)...(19): siRNA sense strand
guucugcuuuauuaccuuu

SEQ ID NO: 665764 - RNA, 19 nt, Homo sapiens
  misc_RNA (1)...(19): siRNA sense strand
ccaugucgaaggaacaaua

SEQ ID NO: 665765 - RNA, 19 nt, Homo sapiens
  misc_RNA (1)...(19): siRNA sense strand
cuacaaagaaagaucugaa

SEQ ID NO: 665766 - RNA, 19 nt, Homo sapiens
  misc_RNA (1)...(19): siRNA sense strand
ccagauacaccugaagaga

SEQ ID NO: 665767 - RNA, 19 nt, Homo sapiens
  misc_RNA (1)...(19): siRNA sense strand
uagcuacaaaccauacuaa

SEQ ID NO: 665768 - RNA, 19 nt, Homo sapiens
  misc_RNA (1)...(19): siRNA sense strand
caggcgagguggucaucaa

SEQ ID NO: 665769 - RNA, 19 nt, Homo sapiens
  misc_RNA (1)...(19): siRNA sense strand
ggacaacaagaccaauaag

SEQ ID NO: 665770 - RNA, 19 nt, Homo sapiens
  misc_RNA (1)...(19): siRNA sense strand
ggaguacuuuggugguuuu

SEQ ID NO: 665771 - RNA, 19 nt, Homo sapiens
  misc_RNA (1)...(19): siRNA sense strand
aagaaccagugaagaagau

SEQ ID NO: 665772 - RNA, 19 nt, Homo sapiens
  misc_RNA (1)...(19): siRNA sense strand
acucugaaguuagauccua

SEQ ID NO: 665773 - RNA, 19 nt, Homo sapiens
  misc_RNA (1)...(19): siRNA sense strand
agaggaggauuugcaggaa

SEQ ID NO: 665774 - RNA, 19 nt, Homo sapiens
  misc_RNA (1)...(19): siRNA sense strand
cacaauguuggucuuagua

SEQ ID NO: 665775 - RNA, 19 nt, Homo sapiens
  misc_RNA (1)...(19): siRNA sense strand
uuaaagaaucggagagugu

SEQ ID NO: 665776 - RNA, 19 nt, Homo sapiens
  misc_RNA (1)...(19): siRNA sense strand
cgaagauugacgccaguaa

SEQ ID NO: 665777 - RNA, 19 nt, Homo sapiens
  misc_RNA (1)...(19): siRNA sense strand
cugggacacuacaaagaaa

SEQ ID NO: 665778 - RNA, 19 nt, Homo sapiens
  misc_RNA (1)...(19): siRNA sense strand
gaaucggagaguguagaua

SEQ ID NO: 665779 - RNA, 19 nt, Homo sapiens
  misc_RNA (1)...(19): siRNA sense strand
gaaggacuacuuuuccaaa

SEQ ID NO: 665780 - RNA, 19 nt, Homo sapiens
  misc_RNA (1)...(19): siRNA sense strand
acaacaagaccaauaagag

SEQ ID NO: 665781 - RNA, 19 nt, Homo sapiens
  misc_RNA (1)...(19): siRNA sense strand
uggacaacaagaccaauaa

SEQ ID NO: 665782 - RNA, 19 nt, Homo sapiens
  misc_RNA (1)...(19): siRNA sense strand
uaagaacgaggaggaugaa

SEQ ID NO: 665783 - RNA, 19 nt, Homo sapiens
  misc_RNA (1)...(19): siRNA sense strand
gagugguuaugggaaggua

SEQ ID NO: 665784 - RNA, 19 nt, Homo sapiens
  misc_RNA (1)...(19): siRNA sense strand
aagauugacgccaguaaga

SEQ ID NO: 665785 - RNA, 19 nt, Homo sapiens
  misc_RNA (1)...(19): siRNA sense strand
aggaggauuugcaggaaga

SEQ ID NO: 665786 - RNA, 19 nt, Homo sapiens
  misc_RNA (1)...(19): siRNA sense strand
ggaucuagaggaggauuug

SEQ ID NO: 665787 - RNA, 19 nt, Homo sapiens
  misc_RNA (1)...(19): siRNA sense strand
acaauguuggucuuaguaa

SEQ ID NO: 665788 - RNA, 19 nt, Homo sapiens
  misc_RNA (1)...(19): siRNA sense strand
aagaaauaccacaauguug

SEQ ID NO: 665789 - RNA, 19 nt, Homo sapiens
  misc_RNA (1)...(19): siRNA sense strand
ggaaaagaaauaccacaau

SEQ ID NO: 665790 - RNA, 19 nt, Homo sapiens
  misc_RNA (1)...(19): siRNA sense strand
aaacaaaagagccgguuaa

SEQ ID NO: 665791 - RNA, 19 nt, Homo sapiens
  misc_RNA (1)...(19): siRNA sense strand
aaguagccaugucgaagga

SEQ ID NO: 665792 - RNA, 19 nt, Homo sapiens
  misc_RNA (1)...(19): siRNA sense strand
gaaauaaaaguagccaugu

SEQ ID NO: 665793 - RNA, 19 nt, Homo sapiens
  misc_RNA (1)...(19): siRNA sense strand
gggacacuacaaagaaaga

SEQ ID NO: 665794 - RNA, 19 nt, Homo sapiens
  misc_RNA (1)...(19): siRNA sense strand
gggaaggugauugauccua

SEQ ID NO: 665795 - RNA, 19 nt, Homo sapiens
  misc_RNA (1)...(19): siRNA sense strand
ugucgaaggaacaauauca

SEQ ID NO: 665796 - RNA, 19 nt, Homo sapiens
  misc_RNA (1)...(19): siRNA sense strand
gcgagguggucaucaaaau

SEQ ID NO: 665797 - RNA, 19 nt, Homo sapiens
  misc_RNA (1)...(19): siRNA sense strand
acugcacucugaaguuaga

SEQ ID NO: 665798 - RNA, 19 nt, Homo sapiens
  misc_RNA (1)...(19): siRNA sense strand
guagacugcacucugaagu

SEQ ID NO: 665799 - RNA, 19 nt, Homo sapiens
  misc_RNA (1)...(19): siRNA sense strand
ccagugaagaagauaaugg

SEQ ID NO: 665800 - RNA, 19 nt, Homo sapiens
  misc_RNA (1)...(19): siRNA sense strand
ggcguggguucugcuuuau

SEQ ID NO: 665801 - RNA, 19 nt, Homo sapiens
  misc_RNA (1)...(19): siRNA sense strand
gaaguuagauccuaucaca

SEQ ID NO: 665802 - RNA, 19 nt, Homo sapiens
  misc_RNA (1)...(19): siRNA sense strand
agaaagaucugaaggacua

SEQ ID NO: 665803 - RNA, 19 nt, Homo sapiens
  misc_RNA (1)...(19): siRNA sense strand
caaauuuggugaaguugua

SEQ ID NO: 665804 - RNA, 19 nt, Homo sapiens
  misc_RNA (1)...(19): siRNA sense strand
ggaaggugauugauccuaa

SEQ ID NO: 665805 - RNA, 19 nt, Homo sapiens
  misc_RNA (1)...(19): siRNA sense strand
gaaggugauugauccuaaa

SEQ ID NO: 665806 - RNA, 19 nt, Homo sapiens
  misc_RNA (1)...(19): siRNA sense strand
agacugcacucugaaguua

SEQ ID NO: 665807 - RNA, 19 nt, Homo sapiens
  misc_RNA (1)...(19): siRNA sense strand
gaaaagaaauaccacaaug

SEQ ID NO: 665808 - RNA, 19 nt, Homo sapiens
  misc_RNA (1)...(19): siRNA sense strand
uagauaaggucauggauca

SEQ ID NO: 665809 - RNA, 19 nt, Homo sapiens
  misc_RNA (1)...(19): siRNA sense strand
cguggguucugcuuuauua

SEQ ID NO: 665810 - RNA, 19 nt, Homo sapiens
  misc_RNA (1)...(19): siRNA sense strand
aggaagagcucguggaaga

SEQ ID NO: 665811 - RNA, 19 nt, Homo sapiens
  misc_RNA (1)...(19): siRNA sense strand
ggacuacuuuuccaaauuu

SEQ ID NO: 665812 - RNA, 19 nt, Homo sapiens
  misc_RNA (1)...(19): siRNA sense strand
ggccuuagcugggacacua

SEQ ID NO: 665813 - RNA, 19 nt, Homo sapiens
  misc_RNA (1)...(19): siRNA sense strand
agauacaccugaagagaaa

SEQ ID NO: 665814 - RNA, 19 nt, Homo sapiens
  misc_RNA (1)...(19): siRNA sense strand
gaagaaccagugaagaaga

SEQ ID NO: 665815 - RNA, 19 nt, Homo sapiens
  misc_RNA (1)...(19): siRNA sense strand
caaaauagcuacaaaccau

SEQ ID NO: 665816 - RNA, 19 nt, Homo sapiens
  misc_RNA (1)...(19): siRNA sense strand
caaagaaagaucugaagga

SEQ ID NO: 665817 - RNA, 19 nt, Homo sapiens
  misc_RNA (1)...(19): siRNA sense strand
gaaggaacaauaucagcaa

SEQ ID NO: 665818 - RNA, 19 nt, Homo sapiens
  misc_RNA (1)...(19): siRNA sense strand
guuguagacugcacucuga

SEQ ID NO: 665819 - RNA, 19 nt, Homo sapiens
  misc_RNA (1)...(19): siRNA sense strand
ggaagaagaaccagugaag

SEQ ID NO: 665820 - RNA, 19 nt, Homo sapiens
  misc_RNA (1)...(19): siRNA sense strand
caauguuggucuuaguaaa

SEQ ID NO: 665821 - RNA, 19 nt, Homo sapiens
  misc_RNA (1)...(19): siRNA sense strand
gauaaggucauggaucaaa

SEQ ID NO: 665822 - RNA, 19 nt, Homo sapiens
  misc_RNA (1)...(19): siRNA sense strand
gaaccagugaagaagauaa

SEQ ID NO: 665823 - RNA, 19 nt, Homo sapiens
  misc_RNA (1)...(19): siRNA sense strand
gaagaagaaccagugaaga

SEQ ID NO: 665824 - RNA, 19 nt, Homo sapiens
  misc_RNA (1)...(19): siRNA sense strand
guaagaacgaggaggauga

SEQ ID NO: 665825 - RNA, 19 nt, Homo sapiens
  misc_RNA (1)...(19): siRNA sense strand
gcaggaagagcucguggaa

SEQ ID NO: 665826 - RNA, 19 nt, Homo sapiens
  misc_RNA (1)...(19): siRNA sense strand
gaaaauaagggaguacuuu

SEQ ID NO: 665827 - RNA, 19 nt, Homo sapiens
  misc_RNA (1)...(19): siRNA sense strand
aggcguggguucugcuuua

SEQ ID NO: 665828 - RNA, 19 nt, Homo sapiens
  misc_RNA (1)...(19): siRNA sense strand
uaaagaaucggagagugua

SEQ ID NO: 665829 - RNA, 19 nt, Homo sapiens
  misc_RNA (1)...(19): siRNA sense strand
gggaguacuuuggugguuu

SEQ ID NO: 665830 - RNA, 19 nt, Homo sapiens
  misc_RNA (1)...(19): siRNA sense strand
ccaaagccaugaaaacaaa

SEQ ID NO: 665831 - RNA, 19 nt, Homo sapiens
  misc_RNA (1)...(19): siRNA sense strand
aagaagaaccagugaagaa

SEQ ID NO: 665832 - RNA, 19 nt, Homo sapiens
  misc_RNA (1)...(19): siRNA sense strand
aaucggagaguguagauaa

SEQ ID NO: 665833 - RNA, 19 nt, Homo sapiens
  misc_RNA (1)...(19): siRNA sense strand
gacaacaagaccaauaaga

SEQ ID NO: 665834 - RNA, 19 nt, Homo sapiens
  misc_RNA (1)...(19): siRNA sense strand
ccacaauguuggucuuagu

SEQ ID NO: 665835 - RNA, 19 nt, Homo sapiens
  misc_RNA (1)...(19): siRNA sense strand
gcugggacacuacaaagaa

SEQ ID NO: 665836 - RNA, 19 nt, Homo sapiens
  misc_RNA (1)...(19): siRNA sense strand
ggaacaauaucagcaacag

SEQ ID NO: 665837 - RNA, 19 nt, Homo sapiens
  misc_RNA (1)...(19): siRNA sense strand
cagauacaccugaagagaa

SEQ ID NO: 665838 - RNA, 19 nt, Homo sapiens
  misc_RNA (1)...(19): siRNA sense strand
gugaagaagauaauggaaa

SEQ ID NO: 665839 - RNA, 19 nt, Homo sapiens
  misc_RNA (1)...(19): siRNA sense strand
gaguguagauaaggucaug

SEQ ID NO: 665840 - RNA, 19 nt, Homo sapiens
  misc_RNA (1)...(19): siRNA sense strand
ggucuuaguaaaugugaaa

SEQ ID NO: 665841 - RNA, 19 nt, Homo sapiens
  misc_RNA (1)...(19): siRNA sense strand
ugaaugggaaggugauuga

SEQ ID NO: 665842 - RNA, 19 nt, Homo sapiens
  misc_RNA (1)...(19): siRNA sense strand
gguggccuuucuccagaua

SEQ ID NO: 665843 - RNA, 19 nt, Homo sapiens
  misc_RNA (1)...(19): siRNA sense strand
gaagauugacgccaguaag

SEQ ID NO: 665844 - RNA, 19 nt, Homo sapiens
  misc_RNA (1)...(19): siRNA sense strand
guucugcuuuauuaccuuu

SEQ ID NO: 665845 - RNA, 19 nt, Homo sapiens
  misc_RNA (1)...(19): siRNA sense strand
ccaugucgaaggaacaaua

SEQ ID NO: 665846 - RNA, 19 nt, Homo sapiens
  misc_RNA (1)...(19): siRNA sense strand
cuacaaagaaagaucugaa

SEQ ID NO: 665847 - RNA, 19 nt, Homo sapiens
  misc_RNA (1)...(19): siRNA sense strand
ccagauacaccugaagaga

SEQ ID NO: 665848 - RNA, 19 nt, Homo sapiens
  misc_RNA (1)...(19): siRNA sense strand
uagcuacaaaccauacuaa

SEQ ID NO: 665849 - RNA, 19 nt, Homo sapiens
  misc_RNA (1)...(19): siRNA sense strand
caggcgagguggucaucaa

SEQ ID NO: 665850 - RNA, 19 nt, Homo sapiens
  misc_RNA (1)...(19): siRNA sense strand
ggacaacaagaccaauaag

SEQ ID NO: 665851 - RNA, 19 nt, Homo sapiens
  misc_RNA (1)...(19): siRNA sense strand
ggaguacuuuggugguuuu

SEQ ID NO: 665852 - RNA, 19 nt, Homo sapiens
  misc_RNA (1)...(19): siRNA sense strand
aagaaccagugaagaagau

SEQ ID NO: 665853 - RNA, 19 nt, Homo sapiens
  misc_RNA (1)...(19): siRNA sense strand
acucugaaguuagauccua

SEQ ID NO: 665854 - RNA, 19 nt, Homo sapiens
  misc_RNA (1)...(19): siRNA sense strand
agaggaggauuugcaggaa

SEQ ID NO: 665855 - RNA, 19 nt, Homo sapiens
  misc_RNA (1)...(19): siRNA sense strand
cacaauguuggucuuagua

SEQ ID NO: 665856 - RNA, 19 nt, Homo sapiens
  misc_RNA (1)...(19): siRNA sense strand
uuaaagaaucggagagugu

SEQ ID NO: 665857 - RNA, 19 nt, Homo sapiens
  misc_RNA (1)...(19): siRNA sense strand
cgaagauugacgccaguaa

SEQ ID NO: 665858 - RNA, 19 nt, Homo sapiens
  misc_RNA (1)...(19): siRNA sense strand
cugggacacuacaaagaaa

SEQ ID NO: 665859 - RNA, 19 nt, Homo sapiens
  misc_RNA (1)...(19): siRNA sense strand
gaaucggagaguguagaua

SEQ ID NO: 665860 - RNA, 19 nt, Homo sapiens
  misc_RNA (1)...(19): siRNA sense strand
gaaggacuacuuuuccaaa

SEQ ID NO: 665861 - RNA, 19 nt, Homo sapiens
  misc_RNA (1)...(19): siRNA sense strand
acaacaagaccaauaagag

SEQ ID NO: 665862 - RNA, 19 nt, Homo sapiens
  misc_RNA (1)...(19): siRNA sense strand
uggacaacaagaccaauaa

SEQ ID NO: 665863 - RNA, 19 nt, Homo sapiens
  misc_RNA (1)...(19): siRNA sense strand
uaagaacgaggaggaugaa

SEQ ID NO: 665864 - RNA, 19 nt, Homo sapiens
  misc_RNA (1)...(19): siRNA sense strand
gagugguuaugggaaggua

SEQ ID NO: 665865 - RNA, 19 nt, Homo sapiens
  misc_RNA (1)...(19): siRNA sense strand
aagauugacgccaguaaga

SEQ ID NO: 665866 - RNA, 19 nt, Homo sapiens
  misc_RNA (1)...(19): siRNA sense strand
aggaggauuugcaggaaga

SEQ ID NO: 665867 - RNA, 19 nt, Homo sapiens
  misc_RNA (1)...(19): siRNA sense strand
ggaucuagaggaggauuug

SEQ ID NO: 665868 - RNA, 19 nt, Homo sapiens
  misc_RNA (1)...(19): siRNA sense strand
acaauguuggucuuaguaa

SEQ ID NO: 665869 - RNA, 19 nt, Homo sapiens
  misc_RNA (1)...(19): siRNA sense strand
aagaaauaccacaauguug

SEQ ID NO: 665870 - RNA, 19 nt, Homo sapiens
  misc_RNA (1)...(19): siRNA sense strand
ggaaaagaaauaccacaau

SEQ ID NO: 665871 - RNA, 19 nt, Homo sapiens
  misc_RNA (1)...(19): siRNA sense strand
aaacaaaagagccgguuaa

SEQ ID NO: 665872 - RNA, 19 nt, Homo sapiens
  misc_RNA (1)...(19): siRNA sense strand
aaguagccaugucgaagga

SEQ ID NO: 665873 - RNA, 19 nt, Homo sapiens
  misc_RNA (1)...(19): siRNA sense strand
gaaauaaaaguagccaugu

SEQ ID NO: 665874 - RNA, 19 nt, Homo sapiens
  misc_RNA (1)...(19): siRNA sense strand
gggacacuacaaagaaaga

SEQ ID NO: 665875 - RNA, 19 nt, Homo sapiens
  misc_RNA (1)...(19): siRNA sense strand
gggaaggugauugauccua

SEQ ID NO: 665876 - RNA, 19 nt, Homo sapiens
  misc_RNA (1)...(19): siRNA sense strand
ugucgaaggaacaauauca

SEQ ID NO: 665877 - RNA, 19 nt, Homo sapiens
  misc_RNA (1)...(19): siRNA sense strand
gcgagguggucaucaaaau

SEQ ID NO: 665878 - RNA, 19 nt, Homo sapiens
  misc_RNA (1)...(19): siRNA sense strand
acugcacucugaaguuaga

SEQ ID NO: 665879 - RNA, 19 nt, Homo sapiens
  misc_RNA (1)...(19): siRNA sense strand
guagacugcacucugaagu

SEQ ID NO: 665880 - RNA, 19 nt, Homo sapiens
  misc_RNA (1)...(19): siRNA sense strand
ccagugaagaagauaaugg

SEQ ID NO: 665881 - RNA, 19 nt, Homo sapiens
  misc_RNA (1)...(19): siRNA sense strand
ggcguggguucugcuuuau

SEQ ID NO: 665882 - RNA, 19 nt, Homo sapiens
  misc_RNA (1)...(19): siRNA sense strand
gaaguuagauccuaucaca

SEQ ID NO: 665883 - RNA, 19 nt, Homo sapiens
  misc_RNA (1)...(19): siRNA sense strand
agaaagaucugaaggacua

SEQ ID NO: 665884 - RNA, 19 nt, Homo sapiens
  misc_RNA (1)...(19): siRNA sense strand
caaauuuggugaaguugua

SEQ ID NO: 665885 - RNA, 19 nt, Homo sapiens
  misc_RNA (1)...(19): siRNA sense strand
ggaaggugauugauccuaa

SEQ ID NO: 665886 - RNA, 19 nt, Homo sapiens
  misc_RNA (1)...(19): siRNA sense strand
gaaggugauugauccuaaa

SEQ ID NO: 665887 - RNA, 19 nt, Homo sapiens
  misc_RNA (1)...(19): siRNA sense strand
agacugcacucugaaguua

SEQ ID NO: 665888 - RNA, 19 nt, Homo sapiens
  misc_RNA (1)...(19): siRNA sense strand
gaaaagaaauaccacaaug

SEQ ID NO: 665889 - RNA, 19 nt, Homo sapiens
  misc_RNA (1)...(19): siRNA sense strand
uagauaaggucauggauca

SEQ ID NO: 665890 - RNA, 19 nt, Homo sapiens
  misc_RNA (1)...(19): siRNA sense strand
cguggguucugcuuuauua

SEQ ID NO: 665891 - RNA, 19 nt, Homo sapiens
  misc_RNA (1)...(19): siRNA sense strand
aggaagagcucguggaaga

SEQ ID NO: 665892 - RNA, 19 nt, Homo sapiens
  misc_RNA (1)...(19): siRNA sense strand
ggacuacuuuuccaaauuu

SEQ ID NO: 665893 - RNA, 19 nt, Homo sapiens
  misc_RNA (1)...(19): siRNA sense strand
ggccuuagcugggacacua

SEQ ID NO: 665894 - RNA, 19 nt, Homo sapiens
  misc_RNA (1)...(19): siRNA sense strand
agauacaccugaagagaaa

SEQ ID NO: 665895 - RNA, 19 nt, Homo sapiens
  misc_RNA (1)...(19): siRNA sense strand
gaagaaccagugaagaaga

SEQ ID NO: 665896 - RNA, 19 nt, Homo sapiens
  misc_RNA (1)...(19): siRNA sense strand
caaaauagcuacaaaccau

SEQ ID NO: 665897 - RNA, 19 nt, Homo sapiens
  misc_RNA (1)...(19): siRNA sense strand
caaagaaagaucugaagga

SEQ ID NO: 665898 - RNA, 19 nt, Homo sapiens
  misc_RNA (1)...(19): siRNA sense strand
gaaggaacaauaucagcaa

SEQ ID NO: 665899 - RNA, 19 nt, Homo sapiens
  misc_RNA (1)...(19): siRNA sense strand
guuguagacugcacucuga

SEQ ID NO: 665900 - RNA, 19 nt, Homo sapiens
  misc_RNA (1)...(19): siRNA sense strand
ggaagaagaaccagugaag

SEQ ID NO: 665901 - RNA, 19 nt, Homo sapiens
  misc_RNA (1)...(19): siRNA sense strand
caauguuggucuuaguaaa

SEQ ID NO: 665902 - RNA, 19 nt, Homo sapiens
  misc_RNA (1)...(19): siRNA sense strand
gauaaggucauggaucaaa

SEQ ID NO: 665903 - RNA, 19 nt, Homo sapiens
  misc_RNA (1)...(19): siRNA sense strand
gaaccagugaagaagauaa

SEQ ID NO: 665904 - RNA, 19 nt, Homo sapiens
  misc_RNA (1)...(19): siRNA sense strand
gaagaagaaccagugaaga

SEQ ID NO: 665905 - RNA, 19 nt, Homo sapiens
  misc_RNA (1)...(19): siRNA sense strand
guaagaacgaggaggauga

SEQ ID NO: 665906 - RNA, 19 nt, Homo sapiens
  misc_RNA (1)...(19): siRNA sense strand
gcaggaagagcucguggaa

SEQ ID NO: 665907 - RNA, 19 nt, Homo sapiens
  misc_RNA (1)...(19): siRNA sense strand
gaaaauaagggaguacuuu

SEQ ID NO: 665908 - RNA, 19 nt, Homo sapiens
  misc_RNA (1)...(19): siRNA sense strand
aggcguggguucugcuuua

SEQ ID NO: 665909 - RNA, 19 nt, Homo sapiens
  misc_RNA (1)...(19): siRNA sense strand
uaaagaaucggagagugua

SEQ ID NO: 665910 - RNA, 19 nt, Homo sapiens
  misc_RNA (1)...(19): siRNA sense strand
gggaguacuuuggugguuu

SEQ ID NO: 665911 - RNA, 19 nt, Homo sapiens
  misc_RNA (1)...(19): siRNA sense strand
ccaaagccaugaaaacaaa

SEQ ID NO: 665912 - RNA, 19 nt, Homo sapiens
  misc_RNA (1)...(19): siRNA sense strand
aagaagaaccagugaagaa

SEQ ID NO: 665913 - RNA, 19 nt, Homo sapiens
  misc_RNA (1)...(19): siRNA sense strand
aaucggagaguguagauaa

SEQ ID NO: 665914 - RNA, 19 nt, Homo sapiens
  misc_RNA (1)...(19): siRNA sense strand
gacaacaagaccaauaaga

SEQ ID NO: 665915 - RNA, 19 nt, Homo sapiens
  misc_RNA (1)...(19): siRNA sense strand
ccacaauguuggucuuagu

SEQ ID NO: 665916 - RNA, 19 nt, Homo sapiens
  misc_RNA (1)...(19): siRNA sense strand
gcugggacacuacaaagaa

SEQ ID NO: 665917 - RNA, 19 nt, Homo sapiens
  misc_RNA (1)...(19): siRNA sense strand
ggaacaauaucagcaacag

SEQ ID NO: 665918 - RNA, 19 nt, Homo sapiens
  misc_RNA (1)...(19): siRNA sense strand
cagauacaccugaagagaa

SEQ ID NO: 665919 - RNA, 19 nt, Homo sapiens
  misc_RNA (1)...(19): siRNA sense strand
gugaagaagauaauggaaa

SEQ ID NO: 665920 - RNA, 19 nt, Homo sapiens
  misc_RNA (1)...(19): siRNA sense strand
gaguguagauaaggucaug

SEQ ID NO: 665921 - RNA, 19 nt, Homo sapiens
  misc_RNA (1)...(19): siRNA sense strand
ggucuuaguaaaugugaaa

SEQ ID NO: 665922 - RNA, 19 nt, Homo sapiens
  misc_RNA (1)...(19): siRNA sense strand
ugaaugggaaggugauuga

SEQ ID NO: 665923 - RNA, 19 nt, Homo sapiens
  misc_RNA (1)...(19): siRNA sense strand
gguggccuuucuccagaua

SEQ ID NO: 665924 - RNA, 19 nt, Homo sapiens
  misc_RNA (1)...(19): siRNA sense strand
gaagauugacgccaguaag

SEQ ID NO: 665925 - RNA, 19 nt, Homo sapiens
  misc_RNA (1)...(19): siRNA sense strand
guucugcuuuauuaccuuu

SEQ ID NO: 665926 - RNA, 19 nt, Homo sapiens
  misc_RNA (1)...(19): siRNA sense strand
ccaugucgaaggaacaaua

SEQ ID NO: 665927 - RNA, 19 nt, Homo sapiens
  misc_RNA (1)...(19): siRNA sense strand
cuacaaagaaagaucugaa

SEQ ID NO: 665928 - RNA, 19 nt, Homo sapiens
  misc_RNA (1)...(19): siRNA sense strand
ccagauacaccugaagaga

SEQ ID NO: 665929 - RNA, 19 nt, Homo sapiens
  misc_RNA (1)...(19): siRNA sense strand
uagcuacaaaccauacuaa

SEQ ID NO: 665930 - RNA, 19 nt, Homo sapiens
  misc_RNA (1)...(19): siRNA sense strand
caggcgagguggucaucaa

SEQ ID NO: 665931 - RNA, 19 nt, Homo sapiens
  misc_RNA (1)...(19): siRNA sense strand
ggacaacaagaccaauaag

SEQ ID NO: 665932 - RNA, 19 nt, Homo sapiens
  misc_RNA (1)...(19): siRNA sense strand
ggaguacuuuggugguuuu

SEQ ID NO: 665933 - RNA, 19 nt, Homo sapiens
  misc_RNA (1)...(19): siRNA sense strand
aagaaccagugaagaagau

SEQ ID NO: 665934 - RNA, 19 nt, Homo sapiens
  misc_RNA (1)...(19): siRNA sense strand
acucugaaguuagauccua

SEQ ID NO: 665935 - RNA, 19 nt, Homo sapiens
  misc_RNA (1)...(19): siRNA sense strand
agaggaggauuugcaggaa

SEQ ID NO: 665936 - RNA, 19 nt, Homo sapiens
  misc_RNA (1)...(19): siRNA sense strand
cacaauguuggucuuagua

SEQ ID NO: 665937 - RNA, 19 nt, Homo sapiens
  misc_RNA (1)...(19): siRNA sense strand
uuaaagaaucggagagugu

SEQ ID NO: 665938 - RNA, 19 nt, Homo sapiens
  misc_RNA (1)...(19): siRNA sense strand
cgaagauugacgccaguaa

SEQ ID NO: 665939 - RNA, 19 nt, Homo sapiens
  misc_RNA (1)...(19): siRNA sense strand
cugggacacuacaaagaaa

SEQ ID NO: 665940 - RNA, 19 nt, Homo sapiens
  misc_RNA (1)...(19): siRNA sense strand
gaaucggagaguguagaua

SEQ ID NO: 665941 - RNA, 19 nt, Homo sapiens
  misc_RNA (1)...(19): siRNA sense strand
gaaggacuacuuuuccaaa

SEQ ID NO: 665942 - RNA, 19 nt, Homo sapiens
  misc_RNA (1)...(19): siRNA sense strand
acaacaagaccaauaagag

SEQ ID NO: 665943 - RNA, 19 nt, Homo sapiens
  misc_RNA (1)...(19): siRNA sense strand
uggacaacaagaccaauaa

SEQ ID NO: 665944 - RNA, 19 nt, Homo sapiens
  misc_RNA (1)...(19): siRNA sense strand
uaagaacgaggaggaugaa

SEQ ID NO: 665945 - RNA, 19 nt, Homo sapiens
  misc_RNA (1)...(19): siRNA sense strand
gagugguuaugggaaggua

SEQ ID NO: 665946 - RNA, 19 nt, Homo sapiens
  misc_RNA (1)...(19): siRNA sense strand
aagauugacgccaguaaga

SEQ ID NO: 665947 - RNA, 19 nt, Homo sapiens
  misc_RNA (1)...(19): siRNA sense strand
aggaggauuugcaggaaga

SEQ ID NO: 665948 - RNA, 19 nt, Homo sapiens
  misc_RNA (1)...(19): siRNA sense strand
ggaucuagaggaggauuug

SEQ ID NO: 665949 - RNA, 19 nt, Homo sapiens
  misc_RNA (1)...(19): siRNA sense strand
acaauguuggucuuaguaa

SEQ ID NO: 665950 - RNA, 19 nt, Homo sapiens
  misc_RNA (1)...(19): siRNA sense strand
aagaaauaccacaauguug

SEQ ID NO: 665951 - RNA, 19 nt, Homo sapiens
  misc_RNA (1)...(19): siRNA sense strand
ggaaaagaaauaccacaau

SEQ ID NO: 665952 - RNA, 19 nt, Homo sapiens
  misc_RNA (1)...(19): siRNA sense strand
aaacaaaagagccgguuaa

SEQ ID NO: 665953 - RNA, 19 nt, Homo sapiens
  misc_RNA (1)...(19): siRNA sense strand
aaguagccaugucgaagga

SEQ ID NO: 665954 - RNA, 19 nt, Homo sapiens
  misc_RNA (1)...(19): siRNA sense strand
gaaauaaaaguagccaugu

SEQ ID NO: 665955 - RNA, 19 nt, Homo sapiens
  misc_RNA (1)...(19): siRNA sense strand
gggacacuacaaagaaaga

SEQ ID NO: 665956 - RNA, 19 nt, Homo sapiens
  misc_RNA (1)...(19): siRNA sense strand
gggaaggugauugauccua

SEQ ID NO: 665957 - RNA, 19 nt, Homo sapiens
  misc_RNA (1)...(19): siRNA sense strand
ugucgaaggaacaauauca

SEQ ID NO: 665958 - RNA, 19 nt, Homo sapiens
  misc_RNA (1)...(19): siRNA sense strand
gcgagguggucaucaaaau

SEQ ID NO: 665959 - RNA, 19 nt, Homo sapiens
  misc_RNA (1)...(19): siRNA sense strand
acugcacucugaaguuaga

SEQ ID NO: 665960 - RNA, 19 nt, Homo sapiens
  misc_RNA (1)...(19): siRNA sense strand
guagacugcacucugaagu

SEQ ID NO: 665961 - RNA, 19 nt, Homo sapiens
  misc_RNA (1)...(19): siRNA sense strand
ccagugaagaagauaaugg

SEQ ID NO: 665962 - RNA, 19 nt, Homo sapiens
  misc_RNA (1)...(19): siRNA sense strand
ggcguggguucugcuuuau

SEQ ID NO: 665963 - RNA, 19 nt, Homo sapiens
  misc_RNA (1)...(19): siRNA sense strand
ggaagaagaucuaaucaua

SEQ ID NO: 665964 - RNA, 19 nt, Homo sapiens
  misc_RNA (1)...(19): siRNA sense strand
gaaauuacuucgauccuua

SEQ ID NO: 665965 - RNA, 19 nt, Homo sapiens
  misc_RNA (1)...(19): siRNA sense strand
gaaaggaugucaagaagga

SEQ ID NO: 665966 - RNA, 19 nt, Homo sapiens
  misc_RNA (1)...(19): siRNA sense strand
ggagaaagcguuuaaagaa

SEQ ID NO: 665967 - RNA, 19 nt, Homo sapiens
  misc_RNA (1)...(19): siRNA sense strand
aaagaugucuggucaagua

SEQ ID NO: 665968 - RNA, 19 nt, Homo sapiens
  misc_RNA (1)...(19): siRNA sense strand
ggaaacaagucuaccaaga

SEQ ID NO: 665969 - RNA, 19 nt, Homo sapiens
  misc_RNA (1)...(19): siRNA sense strand
guacuuggauaucgaaauu

SEQ ID NO: 665970 - RNA, 19 nt, Homo sapiens
  misc_RNA (1)...(19): siRNA sense strand
gguagaagcugaggaagaa

SEQ ID NO: 665971 - RNA, 19 nt, Homo sapiens
  misc_RNA (1)...(19): siRNA sense strand
gguaggagcuauuguggaa

SEQ ID NO: 665972 - RNA, 19 nt, Homo sapiens
  misc_RNA (1)...(19): siRNA sense strand
gcaaagaugacaccaacua

SEQ ID NO: 665973 - RNA, 19 nt, Homo sapiens
  misc_RNA (1)...(19): siRNA sense strand
ugacaaagaugaugacaca

SEQ ID NO: 665974 - RNA, 19 nt, Homo sapiens
  misc_RNA (1)...(19): siRNA sense strand
guagaacuauuccugcuaa

SEQ ID NO: 665975 - RNA, 19 nt, Homo sapiens
  misc_RNA (1)...(19): siRNA sense strand
ucaggaagcuguuaucaau

SEQ ID NO: 665976 - RNA, 19 nt, Homo sapiens
  misc_RNA (1)...(19): siRNA sense strand
gaaaagauguccaugaaau

SEQ ID NO: 665977 - RNA, 19 nt, Homo sapiens
  misc_RNA (1)...(19): siRNA sense strand
acacaaacuuggaggauuu

SEQ ID NO: 665978 - RNA, 19 nt, Homo sapiens
  misc_RNA (1)...(19): siRNA sense strand
gagaaaggaugucaagaag

SEQ ID NO: 665979 - RNA, 19 nt, Homo sapiens
  misc_RNA (1)...(19): siRNA sense strand
ccagaaagauuaaggaaag

SEQ ID NO: 665980 - RNA, 19 nt, Homo sapiens
  misc_RNA (1)...(19): siRNA sense strand
gaaacagauugaugagcua

SEQ ID NO: 665981 - RNA, 19 nt, Homo sapiens
  misc_RNA (1)...(19): siRNA sense strand
caaacgaccuguacuugga

SEQ ID NO: 665982 - RNA, 19 nt, Homo sapiens
  misc_RNA (1)...(19): siRNA sense strand
gaaagaauggugauaagga

SEQ ID NO: 665983 - RNA, 19 nt, Homo sapiens
  misc_RNA (1)...(19): siRNA sense strand
aaacaaaguucaugcagau

SEQ ID NO: 665984 - RNA, 19 nt, Homo sapiens
  misc_RNA (1)...(19): siRNA sense strand
gugaugagauugcuguaaa

SEQ ID NO: 665985 - RNA, 19 nt, Homo sapiens
  misc_RNA (1)...(19): siRNA sense strand
aguaagaccugcugauaaa

SEQ ID NO: 665986 - RNA, 19 nt, Homo sapiens
  misc_RNA (1)...(19): siRNA sense strand
gaaagcguuuaaagaagaa

SEQ ID NO: 665987 - RNA, 19 nt, Homo sapiens
  misc_RNA (1)...(19): siRNA sense strand
ugaagaagaugaagucaca

SEQ ID NO: 665988 - RNA, 19 nt, Homo sapiens
  misc_RNA (1)...(19): siRNA sense strand
gagaggugcucaagacaug

SEQ ID NO: 665989 - RNA, 19 nt, Homo sapiens
  misc_RNA (1)...(19): siRNA sense strand
guaauucagugcuaaauac

SEQ ID NO: 665990 - RNA, 19 nt, Homo sapiens
  misc_RNA (1)...(19): siRNA sense strand
gagaaagcguuuaaagaag

SEQ ID NO: 665991 - RNA, 19 nt, Homo sapiens
  misc_RNA (1)...(19): siRNA sense strand
gaacgcaucacaauucuuc

SEQ ID NO: 665992 - RNA, 19 nt, Homo sapiens
  misc_RNA (1)...(19): siRNA sense strand
caacagugguaaacaacaa

SEQ ID NO: 665993 - RNA, 19 nt, Homo sapiens
  misc_RNA (1)...(19): siRNA sense strand
caauugagguggauagugu

SEQ ID NO: 665994 - RNA, 19 nt, Homo sapiens
  misc_RNA (1)...(19): siRNA sense strand
acaaauccaucuccugaaa

SEQ ID NO: 665995 - RNA, 19 nt, Homo sapiens
  misc_RNA (1)...(19): siRNA sense strand
ggaaaaggcacaaauagua

SEQ ID NO: 665996 - RNA, 19 nt, Homo sapiens
  misc_RNA (1)...(19): siRNA sense strand
cgaagauacugauuaugaa

SEQ ID NO: 665997 - RNA, 19 nt, Homo sapiens
  misc_RNA (1)...(19): siRNA sense strand
cucaagacauggauaauaa

SEQ ID NO: 665998 - RNA, 19 nt, Homo sapiens
  misc_RNA (1)...(19): siRNA sense strand
uaauagcagugaagaagaa

SEQ ID NO: 665999 - RNA, 19 nt, Homo sapiens
  misc_RNA (1)...(19): siRNA sense strand
gaagaaagagagagaaagu

SEQ ID NO: 666000 - RNA, 19 nt, Homo sapiens
  misc_RNA (1)...(19): siRNA sense strand
gaacuuucuucagcaauug

SEQ ID NO: 666001 - RNA, 19 nt, Homo sapiens
  misc_RNA (1)...(19): siRNA sense strand
gcacuccagucauaggaaa

SEQ ID NO: 666002 - RNA, 19 nt, Homo sapiens
  misc_RNA (1)...(19): siRNA sense strand
gcagcagucuucuguaaca

SEQ ID NO: 666003 - RNA, 19 nt, Homo sapiens
  misc_RNA (1)...(19): siRNA sense strand
gaaacaagucuaccaagau

SEQ ID NO: 666004 - RNA, 19 nt, Homo sapiens
  misc_RNA (1)...(19): siRNA sense strand
gcugcaggauacaauguua

SEQ ID NO: 666005 - RNA, 19 nt, Homo sapiens
  misc_RNA (1)...(19): siRNA sense strand
agaaagcguuuaaagaaga

SEQ ID NO: 666006 - RNA, 19 nt, Homo sapiens
  misc_RNA (1)...(19): siRNA sense strand
ggacaacugguuucuauuc

SEQ ID NO: 666007 - RNA, 19 nt, Homo sapiens
  misc_RNA (1)...(19): siRNA sense strand
gaugaaucccucaacauaa

SEQ ID NO: 666008 - RNA, 19 nt, Homo sapiens
  misc_RNA (1)...(19): siRNA sense strand
agaugaagaugaagaagaa

SEQ ID NO: 666009 - RNA, 19 nt, Homo sapiens
  misc_RNA (1)...(19): siRNA sense strand
ugacaccaacuaagaaaua

SEQ ID NO: 666010 - RNA, 19 nt, Homo sapiens
  misc_RNA (1)...(19): siRNA sense strand
aaacuuggaggauuugaua

SEQ ID NO: 666011 - RNA, 19 nt, Homo sapiens
  misc_RNA (1)...(19): siRNA sense strand
gaagagguucgaaguauca

SEQ ID NO: 666012 - RNA, 19 nt, Homo sapiens
  misc_RNA (1)...(19): siRNA sense strand
aaagcagaauuuccaagua

SEQ ID NO: 666013 - RNA, 19 nt, Homo sapiens
  misc_RNA (1)...(19): siRNA sense strand
gcucaagacauggauaaua

SEQ ID NO: 666014 - RNA, 19 nt, Homo sapiens
  misc_RNA (1)...(19): siRNA sense strand
caacuaggguagaugaauc

SEQ ID NO: 666015 - RNA, 19 nt, Homo sapiens
  misc_RNA (1)...(19): siRNA sense strand
ggaauauaauaccaagaga

SEQ ID NO: 666016 - RNA, 19 nt, Homo sapiens
  misc_RNA (1)...(19): siRNA sense strand
aaacaagucuaccaagauc

SEQ ID NO: 666017 - RNA, 19 nt, Homo sapiens
  misc_RNA (1)...(19): siRNA sense strand
uggaaucccugucuuaaau

SEQ ID NO: 666018 - RNA, 19 nt, Homo sapiens
  misc_RNA (1)...(19): siRNA sense strand
agugugagcucaagcagua

SEQ ID NO: 666019 - RNA, 19 nt, Homo sapiens
  misc_RNA (1)...(19): siRNA sense strand
ucaugcagauuugguaaua

SEQ ID NO: 666020 - RNA, 19 nt, Homo sapiens
  misc_RNA (1)...(19): siRNA sense strand
gaaucuugauggugcauau

SEQ ID NO: 666021 - RNA, 19 nt, Homo sapiens
  misc_RNA (1)...(19): siRNA sense strand
caagaagagguucgaagua

SEQ ID NO: 666022 - RNA, 19 nt, Homo sapiens
  misc_RNA (1)...(19): siRNA sense strand
cggcagcagucuucuguaa

SEQ ID NO: 666023 - RNA, 19 nt, Homo sapiens
  misc_RNA (1)...(19): siRNA sense strand
ccgaagauacugauuauga

SEQ ID NO: 666024 - RNA, 19 nt, Homo sapiens
  misc_RNA (1)...(19): siRNA sense strand
gaaucuauaccuacacauu

SEQ ID NO: 666025 - RNA, 19 nt, Homo sapiens
  misc_RNA (1)...(19): siRNA sense strand
gaaacagagaucaaagaaa

SEQ ID NO: 666026 - RNA, 19 nt, Homo sapiens
  misc_RNA (1)...(19): siRNA sense strand
gaaaacaaauagaggaaga

SEQ ID NO: 666027 - RNA, 19 nt, Homo sapiens
  misc_RNA (1)...(19): siRNA sense strand
uaacagaugcgaguuggua

SEQ ID NO: 666028 - RNA, 19 nt, Homo sapiens
  misc_RNA (1)...(19): siRNA sense strand
gagagaaagugcugcuaca

SEQ ID NO: 666029 - RNA, 19 nt, Homo sapiens
  misc_RNA (1)...(19): siRNA sense strand
gaaggacacaacagauaaa

SEQ ID NO: 666030 - RNA, 19 nt, Homo sapiens
  misc_RNA (1)...(19): siRNA sense strand
gaggaggagaggaauauaa

SEQ ID NO: 666031 - RNA, 19 nt, Homo sapiens
  misc_RNA (1)...(19): siRNA sense strand
gaacaggcacuugaauuuc

SEQ ID NO: 666032 - RNA, 19 nt, Homo sapiens
  misc_RNA (1)...(19): siRNA sense strand
ugaacaggcacuugaauuu

SEQ ID NO: 666033 - RNA, 19 nt, Homo sapiens
  misc_RNA (1)...(19): siRNA sense strand
gaugauaggaaacagauug

SEQ ID NO: 666034 - RNA, 19 nt, Homo sapiens
  misc_RNA (1)...(19): siRNA sense strand
ccacuggaaugaagucuca

SEQ ID NO: 666035 - RNA, 19 nt, Homo sapiens
  misc_RNA (1)...(19): siRNA sense strand
aagaagagguucgaaguau

SEQ ID NO: 666036 - RNA, 19 nt, Homo sapiens
  misc_RNA (1)...(19): siRNA sense strand
ccauagaaauuacuucgau

SEQ ID NO: 666037 - RNA, 19 nt, Homo sapiens
  misc_RNA (1)...(19): siRNA sense strand
ggaucucacugaugccaaa

SEQ ID NO: 666038 - RNA, 19 nt, Homo sapiens
  misc_RNA (1)...(19): siRNA sense strand
guagaugaaucccucaaca

SEQ ID NO: 666039 - RNA, 19 nt, Homo sapiens
  misc_RNA (1)...(19): siRNA sense strand
ggaggagaggaauauaaua

SEQ ID NO: 666040 - RNA, 19 nt, Homo sapiens
  misc_RNA (1)...(19): siRNA sense strand
uaaauucagcugcaggaua

SEQ ID NO: 666041 - RNA, 19 nt, Homo sapiens
  misc_RNA (1)...(19): siRNA sense strand
gaacuauuccugcuaacug

SEQ ID NO: 666042 - RNA, 19 nt, Homo sapiens
  misc_RNA (1)...(19): siRNA sense strand
ucaccaacccugagcauuu

SEQ ID NO: 666043 - RNA, 19 nt, Homo sapiens
  misc_RNA (1)...(19): siRNA sense strand
caaauaguagugauaguga

SEQ ID NO: 666044 - RNA, 19 nt, Homo sapiens
  misc_RNA (1)...(19): siRNA sense strand
ccaaguaguggcaguaauu

SEQ ID NO: 666045 - RNA, 19 nt, Homo sapiens
  misc_RNA (1)...(19): siRNA sense strand
gaagagaaggccaagaaca

SEQ ID NO: 666046 - RNA, 19 nt, Homo sapiens
  misc_RNA (1)...(19): siRNA sense strand
agacugaauugaaagaaga

SEQ ID NO: 666047 - RNA, 19 nt, Homo sapiens
  misc_RNA (1)...(19): siRNA sense strand
uuacuucaguuccaagaaa

SEQ ID NO: 666048 - RNA, 19 nt, Homo sapiens
  misc_RNA (1)...(19): siRNA sense strand
aggcaaaguuguaugugua

SEQ ID NO: 666049 - RNA, 19 nt, Homo sapiens
  misc_RNA (1)...(19): siRNA sense strand
cagaaccacuggcuccaaa

SEQ ID NO: 666050 - RNA, 19 nt, Homo sapiens
  misc_RNA (1)...(19): siRNA sense strand
uugaugagccucccuauuu

SEQ ID NO: 666051 - RNA, 19 nt, Homo sapiens
  misc_RNA (1)...(19): siRNA sense strand
gaucagccaacauugaauu

SEQ ID NO: 666052 - RNA, 19 nt, Homo sapiens
  misc_RNA (1)...(19): siRNA sense strand
gauaauagcagugaagaag

SEQ ID NO: 666053 - RNA, 19 nt, Homo sapiens
  misc_RNA (1)...(19): siRNA sense strand
aaagaaagcacugugguuu

SEQ ID NO: 666054 - RNA, 19 nt, Homo sapiens
  misc_RNA (1)...(19): siRNA sense strand
ccauaaagcaacaguggua

SEQ ID NO: 666055 - RNA, 19 nt, Homo sapiens
  misc_RNA (1)...(19): siRNA sense strand
cgaaguaucaagagugaaa

SEQ ID NO: 666056 - RNA, 19 nt, Homo sapiens
  misc_RNA (1)...(19): siRNA sense strand
caaagaugacaccaacuaa

SEQ ID NO: 666057 - RNA, 19 nt, Homo sapiens
  misc_RNA (1)...(19): siRNA sense strand
ggagaggaauauaauacca

SEQ ID NO: 666058 - RNA, 19 nt, Homo sapiens
  misc_RNA (1)...(19): siRNA sense strand
uaacaaacgaccuguacuu

SEQ ID NO: 666059 - RNA, 19 nt, Homo sapiens
  misc_RNA (1)...(19): siRNA sense strand
caacuaagaaauacaaugg

SEQ ID NO: 666060 - RNA, 19 nt, Homo sapiens
  misc_RNA (1)...(19): siRNA sense strand
ggugaaaguauaacuaaga

SEQ ID NO: 666061 - RNA, 19 nt, Homo sapiens
  misc_RNA (1)...(19): siRNA sense strand
gcacaaauaguagugauag

SEQ ID NO: 666062 - RNA, 19 nt, Homo sapiens
  misc_RNA (1)...(19): siRNA sense strand
gaaacugauagcacaauug

SEQ ID NO: 666063 - RNA, 19 nt, Homo sapiens
  misc_RNA (1)...(19): siRNA sense strand
ggaagaagaucuaaucaua

SEQ ID NO: 666064 - RNA, 19 nt, Homo sapiens
  misc_RNA (1)...(19): siRNA sense strand
gaaauuacuucgauccuua

SEQ ID NO: 666065 - RNA, 19 nt, Homo sapiens
  misc_RNA (1)...(19): siRNA sense strand
gaaaggaugucaagaagga

SEQ ID NO: 666066 - RNA, 19 nt, Homo sapiens
  misc_RNA (1)...(19): siRNA sense strand
ggagaaagcguuuaaagaa

SEQ ID NO: 666067 - RNA, 19 nt, Homo sapiens
  misc_RNA (1)...(19): siRNA sense strand
aaagaugucuggucaagua

SEQ ID NO: 666068 - RNA, 19 nt, Homo sapiens
  misc_RNA (1)...(19): siRNA sense strand
ggaaacaagucuaccaaga

SEQ ID NO: 666069 - RNA, 19 nt, Homo sapiens
  misc_RNA (1)...(19): siRNA sense strand
guacuuggauaucgaaauu

SEQ ID NO: 666070 - RNA, 19 nt, Homo sapiens
  misc_RNA (1)...(19): siRNA sense strand
gguagaagcugaggaagaa

SEQ ID NO: 666071 - RNA, 19 nt, Homo sapiens
  misc_RNA (1)...(19): siRNA sense strand
gguaggagcuauuguggaa

SEQ ID NO: 666072 - RNA, 19 nt, Homo sapiens
  misc_RNA (1)...(19): siRNA sense strand
gcaaagaugacaccaacua

SEQ ID NO: 666073 - RNA, 19 nt, Homo sapiens
  misc_RNA (1)...(19): siRNA sense strand
ugacaaagaugaugacaca

SEQ ID NO: 666074 - RNA, 19 nt, Homo sapiens
  misc_RNA (1)...(19): siRNA sense strand
guagaacuauuccugcuaa

SEQ ID NO: 666075 - RNA, 19 nt, Homo sapiens
  misc_RNA (1)...(19): siRNA sense strand
ucaggaagcuguuaucaau

SEQ ID NO: 666076 - RNA, 19 nt, Homo sapiens
  misc_RNA (1)...(19): siRNA sense strand
gaaaagauguccaugaaau

SEQ ID NO: 666077 - RNA, 19 nt, Homo sapiens
  misc_RNA (1)...(19): siRNA sense strand
acacaaacuuggaggauuu

SEQ ID NO: 666078 - RNA, 19 nt, Homo sapiens
  misc_RNA (1)...(19): siRNA sense strand
gagaaaggaugucaagaag

SEQ ID NO: 666079 - RNA, 19 nt, Homo sapiens
  misc_RNA (1)...(19): siRNA sense strand
ccagaaagauuaaggaaag

SEQ ID NO: 666080 - RNA, 19 nt, Homo sapiens
  misc_RNA (1)...(19): siRNA sense strand
gaaacagauugaugagcua

SEQ ID NO: 666081 - RNA, 19 nt, Homo sapiens
  misc_RNA (1)...(19): siRNA sense strand
caaacgaccuguacuugga

SEQ ID NO: 666082 - RNA, 19 nt, Homo sapiens
  misc_RNA (1)...(19): siRNA sense strand
gaaagaauggugauaagga

SEQ ID NO: 666083 - RNA, 19 nt, Homo sapiens
  misc_RNA (1)...(19): siRNA sense strand
aaacaaaguucaugcagau

SEQ ID NO: 666084 - RNA, 19 nt, Homo sapiens
  misc_RNA (1)...(19): siRNA sense strand
gugaugagauugcuguaaa

SEQ ID NO: 666085 - RNA, 19 nt, Homo sapiens
  misc_RNA (1)...(19): siRNA sense strand
aguaagaccugcugauaaa

SEQ ID NO: 666086 - RNA, 19 nt, Homo sapiens
  misc_RNA (1)...(19): siRNA sense strand
gaaagcguuuaaagaagaa

SEQ ID NO: 666087 - RNA, 19 nt, Homo sapiens
  misc_RNA (1)...(19): siRNA sense strand
ugaagaagaugaagucaca

SEQ ID NO: 666088 - RNA, 19 nt, Homo sapiens
  misc_RNA (1)...(19): siRNA sense strand
gagaggugcucaagacaug

SEQ ID NO: 666089 - RNA, 19 nt, Homo sapiens
  misc_RNA (1)...(19): siRNA sense strand
guaauucagugcuaaauac

SEQ ID NO: 666090 - RNA, 19 nt, Homo sapiens
  misc_RNA (1)...(19): siRNA sense strand
gagaaagcguuuaaagaag

SEQ ID NO: 666091 - RNA, 19 nt, Homo sapiens
  misc_RNA (1)...(19): siRNA sense strand
gaacgcaucacaauucuuc

SEQ ID NO: 666092 - RNA, 19 nt, Homo sapiens
  misc_RNA (1)...(19): siRNA sense strand
caacagugguaaacaacaa

SEQ ID NO: 666093 - RNA, 19 nt, Homo sapiens
  misc_RNA (1)...(19): siRNA sense strand
caauugagguggauagugu

SEQ ID NO: 666094 - RNA, 19 nt, Homo sapiens
  misc_RNA (1)...(19): siRNA sense strand
acaaauccaucuccugaaa

SEQ ID NO: 666095 - RNA, 19 nt, Homo sapiens
  misc_RNA (1)...(19): siRNA sense strand
ggaaaaggcacaaauagua

SEQ ID NO: 666096 - RNA, 19 nt, Homo sapiens
  misc_RNA (1)...(19): siRNA sense strand
cgaagauacugauuaugaa

SEQ ID NO: 666097 - RNA, 19 nt, Homo sapiens
  misc_RNA (1)...(19): siRNA sense strand
cucaagacauggauaauaa

SEQ ID NO: 666098 - RNA, 19 nt, Homo sapiens
  misc_RNA (1)...(19): siRNA sense strand
uaauagcagugaagaagaa

SEQ ID NO: 666099 - RNA, 19 nt, Homo sapiens
  misc_RNA (1)...(19): siRNA sense strand
gaagaaagagagagaaagu

SEQ ID NO: 666100 - RNA, 19 nt, Homo sapiens
  misc_RNA (1)...(19): siRNA sense strand
gaacuuucuucagcaauug

SEQ ID NO: 666101 - RNA, 19 nt, Homo sapiens
  misc_RNA (1)...(19): siRNA sense strand
gcacuccagucauaggaaa

SEQ ID NO: 666102 - RNA, 19 nt, Homo sapiens
  misc_RNA (1)...(19): siRNA sense strand
gcagcagucuucuguaaca

SEQ ID NO: 666103 - RNA, 19 nt, Homo sapiens
  misc_RNA (1)...(19): siRNA sense strand
gaaacaagucuaccaagau

SEQ ID NO: 666104 - RNA, 19 nt, Homo sapiens
  misc_RNA (1)...(19): siRNA sense strand
gcugcaggauacaauguua

SEQ ID NO: 666105 - RNA, 19 nt, Homo sapiens
  misc_RNA (1)...(19): siRNA sense strand
agaaagcguuuaaagaaga

SEQ ID NO: 666106 - RNA, 19 nt, Homo sapiens
  misc_RNA (1)...(19): siRNA sense strand
ggacaacugguuucuauuc

SEQ ID NO: 666107 - RNA, 19 nt, Homo sapiens
  misc_RNA (1)...(19): siRNA sense strand
gaugaaucccucaacauaa

SEQ ID NO: 666108 - RNA, 19 nt, Homo sapiens
  misc_RNA (1)...(19): siRNA sense strand
agaugaagaugaagaagaa

SEQ ID NO: 666109 - RNA, 19 nt, Homo sapiens
  misc_RNA (1)...(19): siRNA sense strand
ugacaccaacuaagaaaua

SEQ ID NO: 666110 - RNA, 19 nt, Homo sapiens
  misc_RNA (1)...(19): siRNA sense strand
aaacuuggaggauuugaua

SEQ ID NO: 666111 - RNA, 19 nt, Homo sapiens
  misc_RNA (1)...(19): siRNA sense strand
gaagagguucgaaguauca

SEQ ID NO: 666112 - RNA, 19 nt, Homo sapiens
  misc_RNA (1)...(19): siRNA sense strand
aaagcagaauuuccaagua

SEQ ID NO: 666113 - RNA, 19 nt, Homo sapiens
  misc_RNA (1)...(19): siRNA sense strand
gcucaagacauggauaaua

SEQ ID NO: 666114 - RNA, 19 nt, Homo sapiens
  misc_RNA (1)...(19): siRNA sense strand
caacuaggguagaugaauc

SEQ ID NO: 666115 - RNA, 19 nt, Homo sapiens
  misc_RNA (1)...(19): siRNA sense strand
ggaauauaauaccaagaga

SEQ ID NO: 666116 - RNA, 19 nt, Homo sapiens
  misc_RNA (1)...(19): siRNA sense strand
aaacaagucuaccaagauc

SEQ ID NO: 666117 - RNA, 19 nt, Homo sapiens
  misc_RNA (1)...(19): siRNA sense strand
uggaaucccugucuuaaau

SEQ ID NO: 666118 - RNA, 19 nt, Homo sapiens
  misc_RNA (1)...(19): siRNA sense strand
agugugagcucaagcagua

SEQ ID NO: 666119 - RNA, 19 nt, Homo sapiens
  misc_RNA (1)...(19): siRNA sense strand
ucaugcagauuugguaaua

SEQ ID NO: 666120 - RNA, 19 nt, Homo sapiens
  misc_RNA (1)...(19): siRNA sense strand
gaaucuugauggugcauau

SEQ ID NO: 666121 - RNA, 19 nt, Homo sapiens
  misc_RNA (1)...(19): siRNA sense strand
caagaagagguucgaagua

SEQ ID NO: 666122 - RNA, 19 nt, Homo sapiens
  misc_RNA (1)...(19): siRNA sense strand
cggcagcagucuucuguaa

SEQ ID NO: 666123 - RNA, 19 nt, Homo sapiens
  misc_RNA (1)...(19): siRNA sense strand
ccgaagauacugauuauga

SEQ ID NO: 666124 - RNA, 19 nt, Homo sapiens
  misc_RNA (1)...(19): siRNA sense strand
gaaucuauaccuacacauu

SEQ ID NO: 666125 - RNA, 19 nt, Homo sapiens
  misc_RNA (1)...(19): siRNA sense strand
gaaacagagaucaaagaaa

SEQ ID NO: 666126 - RNA, 19 nt, Homo sapiens
  misc_RNA (1)...(19): siRNA sense strand
gaaaacaaauagaggaaga

SEQ ID NO: 666127 - RNA, 19 nt, Homo sapiens
  misc_RNA (1)...(19): siRNA sense strand
uaacagaugcgaguuggua

SEQ ID NO: 666128 - RNA, 19 nt, Homo sapiens
  misc_RNA (1)...(19): siRNA sense strand
gagagaaagugcugcuaca

SEQ ID NO: 666129 - RNA, 19 nt, Homo sapiens
  misc_RNA (1)...(19): siRNA sense strand
gaaggacacaacagauaaa

SEQ ID NO: 666130 - RNA, 19 nt, Homo sapiens
  misc_RNA (1)...(19): siRNA sense strand
gaggaggagaggaauauaa

SEQ ID NO: 666131 - RNA, 19 nt, Homo sapiens
  misc_RNA (1)...(19): siRNA sense strand
gaacaggcacuugaauuuc

SEQ ID NO: 666132 - RNA, 19 nt, Homo sapiens
  misc_RNA (1)...(19): siRNA sense strand
ugaacaggcacuugaauuu

SEQ ID NO: 666133 - RNA, 19 nt, Homo sapiens
  misc_RNA (1)...(19): siRNA sense strand
gaugauaggaaacagauug

SEQ ID NO: 666134 - RNA, 19 nt, Homo sapiens
  misc_RNA (1)...(19): siRNA sense strand
ccacuggaaugaagucuca

SEQ ID NO: 666135 - RNA, 19 nt, Homo sapiens
  misc_RNA (1)...(19): siRNA sense strand
aagaagagguucgaaguau

SEQ ID NO: 666136 - RNA, 19 nt, Homo sapiens
  misc_RNA (1)...(19): siRNA sense strand
ccauagaaauuacuucgau

SEQ ID NO: 666137 - RNA, 19 nt, Homo sapiens
  misc_RNA (1)...(19): siRNA sense strand
ggaucucacugaugccaaa

SEQ ID NO: 666138 - RNA, 19 nt, Homo sapiens
  misc_RNA (1)...(19): siRNA sense strand
guagaugaaucccucaaca

SEQ ID NO: 666139 - RNA, 19 nt, Homo sapiens
  misc_RNA (1)...(19): siRNA sense strand
ggaggagaggaauauaaua

SEQ ID NO: 666140 - RNA, 19 nt, Homo sapiens
  misc_RNA (1)...(19): siRNA sense strand
uaaauucagcugcaggaua

SEQ ID NO: 666141 - RNA, 19 nt, Homo sapiens
  misc_RNA (1)...(19): siRNA sense strand
gaacuauuccugcuaacug

SEQ ID NO: 666142 - RNA, 19 nt, Homo sapiens
  misc_RNA (1)...(19): siRNA sense strand
ucaccaacccugagcauuu

SEQ ID NO: 666143 - RNA, 19 nt, Homo sapiens
  misc_RNA (1)...(19): siRNA sense strand
caaauaguagugauaguga

SEQ ID NO: 666144 - RNA, 19 nt, Homo sapiens
  misc_RNA (1)...(19): siRNA sense strand
ccaaguaguggcaguaauu

SEQ ID NO: 666145 - RNA, 19 nt, Homo sapiens
  misc_RNA (1)...(19): siRNA sense strand
gaagagaaggccaagaaca

SEQ ID NO: 666146 - RNA, 19 nt, Homo sapiens
  misc_RNA (1)...(19): siRNA sense strand
agacugaauugaaagaaga

SEQ ID NO: 666147 - RNA, 19 nt, Homo sapiens
  misc_RNA (1)...(19): siRNA sense strand
uuacuucaguuccaagaaa

SEQ ID NO: 666148 - RNA, 19 nt, Homo sapiens
  misc_RNA (1)...(19): siRNA sense strand
aggcaaaguuguaugugua

SEQ ID NO: 666149 - RNA, 19 nt, Homo sapiens
  misc_RNA (1)...(19): siRNA sense strand
cagaaccacuggcuccaaa

SEQ ID NO: 666150 - RNA, 19 nt, Homo sapiens
  misc_RNA (1)...(19): siRNA sense strand
uugaugagccucccuauuu

SEQ ID NO: 666151 - RNA, 19 nt, Homo sapiens
  misc_RNA (1)...(19): siRNA sense strand
gaucagccaacauugaauu

SEQ ID NO: 666152 - RNA, 19 nt, Homo sapiens
  misc_RNA (1)...(19): siRNA sense strand
gauaauagcagugaagaag

SEQ ID NO: 666153 - RNA, 19 nt, Homo sapiens
  misc_RNA (1)...(19): siRNA sense strand
aaagaaagcacugugguuu

SEQ ID NO: 666154 - RNA, 19 nt, Homo sapiens
  misc_RNA (1)...(19): siRNA sense strand
ccauaaagcaacaguggua

SEQ ID NO: 666155 - RNA, 19 nt, Homo sapiens
  misc_RNA (1)...(19): siRNA sense strand
cgaaguaucaagagugaaa

SEQ ID NO: 666156 - RNA, 19 nt, Homo sapiens
  misc_RNA (1)...(19): siRNA sense strand
caaagaugacaccaacuaa

SEQ ID NO: 666157 - RNA, 19 nt, Homo sapiens
  misc_RNA (1)...(19): siRNA sense strand
ggagaggaauauaauacca

SEQ ID NO: 666158 - RNA, 19 nt, Homo sapiens
  misc_RNA (1)...(19): siRNA sense strand
uaacaaacgaccuguacuu

SEQ ID NO: 666159 - RNA, 19 nt, Homo sapiens
  misc_RNA (1)...(19): siRNA sense strand
caacuaagaaauacaaugg

SEQ ID NO: 666160 - RNA, 19 nt, Homo sapiens
  misc_RNA (1)...(19): siRNA sense strand
ggugaaaguauaacuaaga

SEQ ID NO: 666161 - RNA, 19 nt, Homo sapiens
  misc_RNA (1)...(19): siRNA sense strand
gcacaaauaguagugauag

SEQ ID NO: 666162 - RNA, 19 nt, Homo sapiens
  misc_RNA (1)...(19): siRNA sense strand
gaaacugauagcacaauug

SEQ ID NO: 666163 - RNA, 19 nt, Homo sapiens
  misc_RNA (1)...(19): siRNA sense strand
gaaagcagauaccaucaaa

SEQ ID NO: 666164 - RNA, 19 nt, Homo sapiens
  misc_RNA (1)...(19): siRNA sense strand
caaacuggauggcaaauug

SEQ ID NO: 666165 - RNA, 19 nt, Homo sapiens
  misc_RNA (1)...(19): siRNA sense strand
gaucaaggauauggaaauu

SEQ ID NO: 666166 - RNA, 19 nt, Homo sapiens
  misc_RNA (1)...(19): siRNA sense strand
gaacgaguacagcaauaua

SEQ ID NO: 666167 - RNA, 19 nt, Homo sapiens
  misc_RNA (1)...(19): siRNA sense strand
gcaagaaucagcaggauga

SEQ ID NO: 666168 - RNA, 19 nt, Homo sapiens
  misc_RNA (1)...(19): siRNA sense strand
caaagaugcugcuaguguu

SEQ ID NO: 666169 - RNA, 19 nt, Homo sapiens
  misc_RNA (1)...(19): siRNA sense strand
guacagcaauauagaggaa

SEQ ID NO: 666170 - RNA, 19 nt, Homo sapiens
  misc_RNA (1)...(19): siRNA sense strand
gagcugggauacaagcaaa

SEQ ID NO: 666171 - RNA, 19 nt, Homo sapiens
  misc_RNA (1)...(19): siRNA sense strand
ggauuuggauuugugcuuu

SEQ ID NO: 666172 - RNA, 19 nt, Homo sapiens
  misc_RNA (1)...(19): siRNA sense strand
ucacauauacugaugaaga

SEQ ID NO: 666173 - RNA, 19 nt, Homo sapiens
  misc_RNA (1)...(19): siRNA sense strand
gcagauaccaucaaauugg

SEQ ID NO: 666174 - RNA, 19 nt, Homo sapiens
  misc_RNA (1)...(19): siRNA sense strand
ucaaggauauggaaauuac

SEQ ID NO: 666175 - RNA, 19 nt, Homo sapiens
  misc_RNA (1)...(19): siRNA sense strand
ucaagaggauuuggauuug

SEQ ID NO: 666176 - RNA, 19 nt, Homo sapiens
  misc_RNA (1)...(19): siRNA sense strand
gaaagaacacaaacuggau

SEQ ID NO: 666177 - RNA, 19 nt, Homo sapiens
  misc_RNA (1)...(19): siRNA sense strand
uggaggauaugaacgagua

SEQ ID NO: 666178 - RNA, 19 nt, Homo sapiens
  misc_RNA (1)...(19): siRNA sense strand
aagcagauaccaucaaauu

SEQ ID NO: 666179 - RNA, 19 nt, Homo sapiens
  misc_RNA (1)...(19): siRNA sense strand
gcaaucaccaaaacaauua

SEQ ID NO: 666180 - RNA, 19 nt, Homo sapiens
  misc_RNA (1)...(19): siRNA sense strand
gauggcaaauugauagauc

SEQ ID NO: 666181 - RNA, 19 nt, Homo sapiens
  misc_RNA (1)...(19): siRNA sense strand
acaauuaccagccauacua

SEQ ID NO: 666182 - RNA, 19 nt, Homo sapiens
  misc_RNA (1)...(19): siRNA sense strand
gaacuucccauggauacaa

SEQ ID NO: 666183 - RNA, 19 nt, Homo sapiens
  misc_RNA (1)...(19): siRNA sense strand
aaacuggaaccaaggauuu

SEQ ID NO: 666184 - RNA, 19 nt, Homo sapiens
  misc_RNA (1)...(19): siRNA sense strand
cagaguacuugucucgauu

SEQ ID NO: 666185 - RNA, 19 nt, Homo sapiens
  misc_RNA (1)...(19): siRNA sense strand
gaaagaagaggauuuuguu

SEQ ID NO: 666186 - RNA, 19 nt, Homo sapiens
  misc_RNA (1)...(19): siRNA sense strand
gaucaacgcgagcaagaau

SEQ ID NO: 666187 - RNA, 19 nt, Homo sapiens
  misc_RNA (1)...(19): siRNA sense strand
guauaacuaugggaacuau

SEQ ID NO: 666188 - RNA, 19 nt, Homo sapiens
  misc_RNA (1)...(19): siRNA sense strand
ucaaagaugcugcuagugu

SEQ ID NO: 666189 - RNA, 19 nt, Homo sapiens
  misc_RNA (1)...(19): siRNA sense strand
ggaacugaaagaacacaaa

SEQ ID NO: 666190 - RNA, 19 nt, Homo sapiens
  misc_RNA (1)...(19): siRNA sense strand
ggauugagcccggauacuu

SEQ ID NO: 666191 - RNA, 19 nt, Homo sapiens
  misc_RNA (1)...(19): siRNA sense strand
gagcaagaaucagcaggau

SEQ ID NO: 666192 - RNA, 19 nt, Homo sapiens
  misc_RNA (1)...(19): siRNA sense strand
gaagugugaaaucaaaguu

SEQ ID NO: 666193 - RNA, 19 nt, Homo sapiens
  misc_RNA (1)...(19): siRNA sense strand
gccgacagcuccgucacua

SEQ ID NO: 666194 - RNA, 19 nt, Homo sapiens
  misc_RNA (1)...(19): siRNA sense strand
ugggaagugugaaaucaaa

SEQ ID NO: 666195 - RNA, 19 nt, Homo sapiens
  misc_RNA (1)...(19): siRNA sense strand
caagaggauuuggauuugu

SEQ ID NO: 666196 - RNA, 19 nt, Homo sapiens
  misc_RNA (1)...(19): siRNA sense strand
gcuauggcggauaugauua

SEQ ID NO: 666197 - RNA, 19 nt, Homo sapiens
  misc_RNA (1)...(19): siRNA sense strand
caaauugguucugggaagu

SEQ ID NO: 666198 - RNA, 19 nt, Homo sapiens
  misc_RNA (1)...(19): siRNA sense strand
cgacagcuccgucacuaug

SEQ ID NO: 666199 - RNA, 19 nt, Homo sapiens
  misc_RNA (1)...(19): siRNA sense strand
ggacagggauaugcagacu

SEQ ID NO: 666200 - RNA, 19 nt, Homo sapiens
  misc_RNA (1)...(19): siRNA sense strand
ggaugacgguaaaauguuu

SEQ ID NO: 666201 - RNA, 19 nt, Homo sapiens
  misc_RNA (1)...(19): siRNA sense strand
gaacugaaagaacacaaac

SEQ ID NO: 666202 - RNA, 19 nt, Homo sapiens
  misc_RNA (1)...(19): siRNA sense strand
ucagcaggaugacgguaaa

SEQ ID NO: 666203 - RNA, 19 nt, Homo sapiens
  misc_RNA (1)...(19): siRNA sense strand
acagcaauauagaggaauu

SEQ ID NO: 666204 - RNA, 19 nt, Homo sapiens
  misc_RNA (1)...(19): siRNA sense strand
caauuaccagccauacuaa

SEQ ID NO: 666205 - RNA, 19 nt, Homo sapiens
  misc_RNA (1)...(19): siRNA sense strand
ggcuugagcugggauacaa

SEQ ID NO: 666206 - RNA, 19 nt, Homo sapiens
  misc_RNA (1)...(19): siRNA sense strand
gaucaagaggauuuggauu

SEQ ID NO: 666207 - RNA, 19 nt, Homo sapiens
  misc_RNA (1)...(19): siRNA sense strand
gaguacuugucucgauuug

SEQ ID NO: 666208 - RNA, 19 nt, Homo sapiens
  misc_RNA (1)...(19): siRNA sense strand
caaauugauagaucccaaa

SEQ ID NO: 666209 - RNA, 19 nt, Homo sapiens
  misc_RNA (1)...(19): siRNA sense strand
uuucaaagaugcugcuagu

SEQ ID NO: 666210 - RNA, 19 nt, Homo sapiens
  misc_RNA (1)...(19): siRNA sense strand
gcagcaacagcaacaacaa

SEQ ID NO: 666211 - RNA, 19 nt, Homo sapiens
  misc_RNA (1)...(19): siRNA sense strand
acagaguacuugucucgau

SEQ ID NO: 666212 - RNA, 19 nt, Homo sapiens
  misc_RNA (1)...(19): siRNA sense strand
acagggauaugcagacuac

SEQ ID NO: 666213 - RNA, 19 nt, Homo sapiens
  misc_RNA (1)...(19): siRNA sense strand
cagcaacagcaacaacaaa

SEQ ID NO: 666214 - RNA, 19 nt, Homo sapiens
  misc_RNA (1)...(19): siRNA sense strand
gcacaacccaaagagguau

SEQ ID NO: 666215 - RNA, 19 nt, Homo sapiens
  misc_RNA (1)...(19): siRNA sense strand
ggaagugugaaaucaaagu

SEQ ID NO: 666216 - RNA, 19 nt, Homo sapiens
  misc_RNA (1)...(19): siRNA sense strand
auauugaacuucccaugga

SEQ ID NO: 666217 - RNA, 19 nt, Homo sapiens
  misc_RNA (1)...(19): siRNA sense strand
uaaauccagcuccauacaa

SEQ ID NO: 666218 - RNA, 19 nt, Homo sapiens
  misc_RNA (1)...(19): siRNA sense strand
aagaggauuuggauuugug

SEQ ID NO: 666219 - RNA, 19 nt, Homo sapiens
  misc_RNA (1)...(19): siRNA sense strand
uaugggaacuauggauaug

SEQ ID NO: 666220 - RNA, 19 nt, Homo sapiens
  misc_RNA (1)...(19): siRNA sense strand
gauugagcccggauacuuc

SEQ ID NO: 666221 - RNA, 19 nt, Homo sapiens
  misc_RNA (1)...(19): siRNA sense strand
ggcuauggcggauaugauu

SEQ ID NO: 666222 - RNA, 19 nt, Homo sapiens
  misc_RNA (1)...(19): siRNA sense strand
ugaaaucaaaguugcacaa

SEQ ID NO: 666223 - RNA, 19 nt, Homo sapiens
  misc_RNA (1)...(19): siRNA sense strand
caaaugaaagaagaggauu

SEQ ID NO: 666224 - RNA, 19 nt, Homo sapiens
  misc_RNA (1)...(19): siRNA sense strand
uaaaacagauccagucacu

SEQ ID NO: 666225 - RNA, 19 nt, Homo sapiens
  misc_RNA (1)...(19): siRNA sense strand
uauggcggauaugauuaua

SEQ ID NO: 666226 - RNA, 19 nt, Homo sapiens
  misc_RNA (1)...(19): siRNA sense strand
cacauauacugaugaagag

SEQ ID NO: 666227 - RNA, 19 nt, Homo sapiens
  misc_RNA (1)...(19): siRNA sense strand
gagcccggauacuucugaa

SEQ ID NO: 666228 - RNA, 19 nt, Homo sapiens
  misc_RNA (1)...(19): siRNA sense strand
ugggagaucaagaggauuu

SEQ ID NO: 666229 - RNA, 19 nt, Homo sapiens
  misc_RNA (1)...(19): siRNA sense strand
gauaagguuuuggaacuga

SEQ ID NO: 666230 - RNA, 19 nt, Homo sapiens
  misc_RNA (1)...(19): siRNA sense strand
gagaucaagaggauuugga

SEQ ID NO: 666231 - RNA, 19 nt, Homo sapiens
  misc_RNA (1)...(19): siRNA sense strand
acacaaacuggauggcaaa

SEQ ID NO: 666232 - RNA, 19 nt, Homo sapiens
  misc_RNA (1)...(19): siRNA sense strand
aaauccagcuccauacaac

SEQ ID NO: 666233 - RNA, 19 nt, Homo sapiens
  misc_RNA (1)...(19): siRNA sense strand
aaacuggauggcaaauuga

SEQ ID NO: 666234 - RNA, 19 nt, Homo sapiens
  misc_RNA (1)...(19): siRNA sense strand
ugggaacuauggauaugga

SEQ ID NO: 666235 - RNA, 19 nt, Homo sapiens
  misc_RNA (1)...(19): siRNA sense strand
gguauaacuaugggaacua

SEQ ID NO: 666236 - RNA, 19 nt, Homo sapiens
  misc_RNA (1)...(19): siRNA sense strand
ggagagauugaaaauauug

SEQ ID NO: 666237 - RNA, 19 nt, Homo sapiens
  misc_RNA (1)...(19): siRNA sense strand
gccaacagagcacuuaugg

SEQ ID NO: 666238 - RNA, 19 nt, Homo sapiens
  misc_RNA (1)...(19): siRNA sense strand
uggcggauaugauuauacu

SEQ ID NO: 666239 - RNA, 19 nt, Homo sapiens
  misc_RNA (1)...(19): siRNA sense strand
ucugggaagugugaaauca

SEQ ID NO: 666240 - RNA, 19 nt, Homo sapiens
  misc_RNA (1)...(19): siRNA sense strand
acugggagaucaagaggau

SEQ ID NO: 666241 - RNA, 19 nt, Homo sapiens
  misc_RNA (1)...(19): siRNA sense strand
ucaacgcgagcaagaauca

SEQ ID NO: 666242 - RNA, 19 nt, Homo sapiens
  misc_RNA (1)...(19): siRNA sense strand
cgcccaggcuuucccaugu

SEQ ID NO: 666243 - RNA, 19 nt, Homo sapiens
  misc_RNA (1)...(19): siRNA sense strand
gcccaggcuuucccaugug

SEQ ID NO: 666244 - RNA, 19 nt, Homo sapiens
  misc_RNA (1)...(19): siRNA sense strand
aucaagaggauuuggauuu

SEQ ID NO: 666245 - RNA, 19 nt, Homo sapiens
  misc_RNA (1)...(19): siRNA sense strand
caacccaaagagguauaua

SEQ ID NO: 666246 - RNA, 19 nt, Homo sapiens
  misc_RNA (1)...(19): siRNA sense strand
augaacgaguacagcaaua

SEQ ID NO: 666247 - RNA, 19 nt, Homo sapiens
  misc_RNA (1)...(19): siRNA sense strand
aaagaugcugcuaguguug

SEQ ID NO: 666248 - RNA, 19 nt, Homo sapiens
  misc_RNA (1)...(19): siRNA sense strand
ccuccgcucccgcuacuuu

SEQ ID NO: 666249 - RNA, 19 nt, Homo sapiens
  misc_RNA (1)...(19): siRNA sense strand
ggguauaacuaugggaacu

SEQ ID NO: 666250 - RNA, 19 nt, Homo sapiens
  misc_RNA (1)...(19): siRNA sense strand
ucacuauggaggauaugaa

SEQ ID NO: 666251 - RNA, 19 nt, Homo sapiens
  misc_RNA (1)...(19): siRNA sense strand
uaguggcuauggcggauau

SEQ ID NO: 666252 - RNA, 19 nt, Homo sapiens
  misc_RNA (1)...(19): siRNA sense strand
gcugguggacgagguggua

SEQ ID NO: 666253 - RNA, 19 nt, Homo sapiens
  misc_RNA (1)...(19): siRNA sense strand
agacuacaguggccaacag

SEQ ID NO: 666254 - RNA, 19 nt, Homo sapiens
  misc_RNA (1)...(19): siRNA sense strand
gggauaugcagacuacagu

SEQ ID NO: 666255 - RNA, 19 nt, Homo sapiens
  misc_RNA (1)...(19): siRNA sense strand
acuaugggaacuauggaua

SEQ ID NO: 666256 - RNA, 19 nt, Homo sapiens
  misc_RNA (1)...(19): siRNA sense strand
ugaacgaguacagcaauau

SEQ ID NO: 666257 - RNA, 19 nt, Homo sapiens
  misc_RNA (1)...(19): siRNA sense strand
guagacugcacaauuaaaa

SEQ ID NO: 666258 - RNA, 19 nt, Homo sapiens
  misc_RNA (1)...(19): siRNA sense strand
uaugaucaaggauauggaa

SEQ ID NO: 666259 - RNA, 19 nt, Homo sapiens
  misc_RNA (1)...(19): siRNA sense strand
agaaagcagauaccaucaa

SEQ ID NO: 666260 - RNA, 19 nt, Homo sapiens
  misc_RNA (1)...(19): siRNA sense strand
acaaaugaaagaagaggau

SEQ ID NO: 666261 - RNA, 19 nt, Homo sapiens
  misc_RNA (1)...(19): siRNA sense strand
cugcuaguguugauaaggu

SEQ ID NO: 666262 - RNA, 19 nt, Homo sapiens
  misc_RNA (1)...(19): siRNA sense strand
gcuaguguugauaagguuu

SEQ ID NO: 666263 - RNA, 19 nt, Homo sapiens
  misc_RNA (1)...(19): siRNA sense strand
gaaagcagauaccaucaaa

SEQ ID NO: 666264 - RNA, 19 nt, Homo sapiens
  misc_RNA (1)...(19): siRNA sense strand
caaacuggauggcaaauug

SEQ ID NO: 666265 - RNA, 19 nt, Homo sapiens
  misc_RNA (1)...(19): siRNA sense strand
gaucaaggauauggaaauu

SEQ ID NO: 666266 - RNA, 19 nt, Homo sapiens
  misc_RNA (1)...(19): siRNA sense strand
gaacgaguacagcaauaua

SEQ ID NO: 666267 - RNA, 19 nt, Homo sapiens
  misc_RNA (1)...(19): siRNA sense strand
gcaagaaucagcaggauga

SEQ ID NO: 666268 - RNA, 19 nt, Homo sapiens
  misc_RNA (1)...(19): siRNA sense strand
caaagaugcugcuaguguu

SEQ ID NO: 666269 - RNA, 19 nt, Homo sapiens
  misc_RNA (1)...(19): siRNA sense strand
guacagcaauauagaggaa

SEQ ID NO: 666270 - RNA, 19 nt, Homo sapiens
  misc_RNA (1)...(19): siRNA sense strand
gagcugggauacaagcaaa

SEQ ID NO: 666271 - RNA, 19 nt, Homo sapiens
  misc_RNA (1)...(19): siRNA sense strand
ggauuuggauuugugcuuu

SEQ ID NO: 666272 - RNA, 19 nt, Homo sapiens
  misc_RNA (1)...(19): siRNA sense strand
ucacauauacugaugaaga

SEQ ID NO: 666273 - RNA, 19 nt, Homo sapiens
  misc_RNA (1)...(19): siRNA sense strand
gcagauaccaucaaauugg

SEQ ID NO: 666274 - RNA, 19 nt, Homo sapiens
  misc_RNA (1)...(19): siRNA sense strand
ucaaggauauggaaauuac

SEQ ID NO: 666275 - RNA, 19 nt, Homo sapiens
  misc_RNA (1)...(19): siRNA sense strand
ucaagaggauuuggauuug

SEQ ID NO: 666276 - RNA, 19 nt, Homo sapiens
  misc_RNA (1)...(19): siRNA sense strand
gaaagaacacaaacuggau

SEQ ID NO: 666277 - RNA, 19 nt, Homo sapiens
  misc_RNA (1)...(19): siRNA sense strand
uggaggauaugaacgagua

SEQ ID NO: 666278 - RNA, 19 nt, Homo sapiens
  misc_RNA (1)...(19): siRNA sense strand
aagcagauaccaucaaauu

SEQ ID NO: 666279 - RNA, 19 nt, Homo sapiens
  misc_RNA (1)...(19): siRNA sense strand
gcaaucaccaaaacaauua

SEQ ID NO: 666280 - RNA, 19 nt, Homo sapiens
  misc_RNA (1)...(19): siRNA sense strand
gauggcaaauugauagauc

SEQ ID NO: 666281 - RNA, 19 nt, Homo sapiens
  misc_RNA (1)...(19): siRNA sense strand
acaauuaccagccauacua

SEQ ID NO: 666282 - RNA, 19 nt, Homo sapiens
  misc_RNA (1)...(19): siRNA sense strand
gaacuucccauggauacaa

SEQ ID NO: 666283 - RNA, 19 nt, Homo sapiens
  misc_RNA (1)...(19): siRNA sense strand
aaacuggaaccaaggauuu

SEQ ID NO: 666284 - RNA, 19 nt, Homo sapiens
  misc_RNA (1)...(19): siRNA sense strand
cagaguacuugucucgauu

SEQ ID NO: 666285 - RNA, 19 nt, Homo sapiens
  misc_RNA (1)...(19): siRNA sense strand
gaaagaagaggauuuuguu

SEQ ID NO: 666286 - RNA, 19 nt, Homo sapiens
  misc_RNA (1)...(19): siRNA sense strand
gaucaacgcgagcaagaau

SEQ ID NO: 666287 - RNA, 19 nt, Homo sapiens
  misc_RNA (1)...(19): siRNA sense strand
guauaacuaugggaacuau

SEQ ID NO: 666288 - RNA, 19 nt, Homo sapiens
  misc_RNA (1)...(19): siRNA sense strand
ucaaagaugcugcuagugu

SEQ ID NO: 666289 - RNA, 19 nt, Homo sapiens
  misc_RNA (1)...(19): siRNA sense strand
ggaacugaaagaacacaaa

SEQ ID NO: 666290 - RNA, 19 nt, Homo sapiens
  misc_RNA (1)...(19): siRNA sense strand
ggauugagcccggauacuu

SEQ ID NO: 666291 - RNA, 19 nt, Homo sapiens
  misc_RNA (1)...(19): siRNA sense strand
gagcaagaaucagcaggau

SEQ ID NO: 666292 - RNA, 19 nt, Homo sapiens
  misc_RNA (1)...(19): siRNA sense strand
gaagugugaaaucaaaguu

SEQ ID NO: 666293 - RNA, 19 nt, Homo sapiens
  misc_RNA (1)...(19): siRNA sense strand
gccgacagcuccgucacua

SEQ ID NO: 666294 - RNA, 19 nt, Homo sapiens
  misc_RNA (1)...(19): siRNA sense strand
ugggaagugugaaaucaaa

SEQ ID NO: 666295 - RNA, 19 nt, Homo sapiens
  misc_RNA (1)...(19): siRNA sense strand
caagaggauuuggauuugu

SEQ ID NO: 666296 - RNA, 19 nt, Homo sapiens
  misc_RNA (1)...(19): siRNA sense strand
gcuauggcggauaugauua

SEQ ID NO: 666297 - RNA, 19 nt, Homo sapiens
  misc_RNA (1)...(19): siRNA sense strand
caaauugguucugggaagu

SEQ ID NO: 666298 - RNA, 19 nt, Homo sapiens
  misc_RNA (1)...(19): siRNA sense strand
cgacagcuccgucacuaug

SEQ ID NO: 666299 - RNA, 19 nt, Homo sapiens
  misc_RNA (1)...(19): siRNA sense strand
ggacagggauaugcagacu

SEQ ID NO: 666300 - RNA, 19 nt, Homo sapiens
  misc_RNA (1)...(19): siRNA sense strand
ggaugacgguaaaauguuu

SEQ ID NO: 666301 - RNA, 19 nt, Homo sapiens
  misc_RNA (1)...(19): siRNA sense strand
gaacugaaagaacacaaac

SEQ ID NO: 666302 - RNA, 19 nt, Homo sapiens
  misc_RNA (1)...(19): siRNA sense strand
ucagcaggaugacgguaaa

SEQ ID NO: 666303 - RNA, 19 nt, Homo sapiens
  misc_RNA (1)...(19): siRNA sense strand
acagcaauauagaggaauu

SEQ ID NO: 666304 - RNA, 19 nt, Homo sapiens
  misc_RNA (1)...(19): siRNA sense strand
caauuaccagccauacuaa

SEQ ID NO: 666305 - RNA, 19 nt, Homo sapiens
  misc_RNA (1)...(19): siRNA sense strand
ggcuugagcugggauacaa

SEQ ID NO: 666306 - RNA, 19 nt, Homo sapiens
  misc_RNA (1)...(19): siRNA sense strand
gaucaagaggauuuggauu

SEQ ID NO: 666307 - RNA, 19 nt, Homo sapiens
  misc_RNA (1)...(19): siRNA sense strand
gaguacuugucucgauuug

SEQ ID NO: 666308 - RNA, 19 nt, Homo sapiens
  misc_RNA (1)...(19): siRNA sense strand
caaauugauagaucccaaa

SEQ ID NO: 666309 - RNA, 19 nt, Homo sapiens
  misc_RNA (1)...(19): siRNA sense strand
uuucaaagaugcugcuagu

SEQ ID NO: 666310 - RNA, 19 nt, Homo sapiens
  misc_RNA (1)...(19): siRNA sense strand
gcagcaacagcaacaacaa

SEQ ID NO: 666311 - RNA, 19 nt, Homo sapiens
  misc_RNA (1)...(19): siRNA sense strand
acagaguacuugucucgau

SEQ ID NO: 666312 - RNA, 19 nt, Homo sapiens
  misc_RNA (1)...(19): siRNA sense strand
acagggauaugcagacuac

SEQ ID NO: 666313 - RNA, 19 nt, Homo sapiens
  misc_RNA (1)...(19): siRNA sense strand
cagcaacagcaacaacaaa

SEQ ID NO: 666314 - RNA, 19 nt, Homo sapiens
  misc_RNA (1)...(19): siRNA sense strand
gcacaacccaaagagguau

SEQ ID NO: 666315 - RNA, 19 nt, Homo sapiens
  misc_RNA (1)...(19): siRNA sense strand
ggaagugugaaaucaaagu

SEQ ID NO: 666316 - RNA, 19 nt, Homo sapiens
  misc_RNA (1)...(19): siRNA sense strand
auauugaacuucccaugga

SEQ ID NO: 666317 - RNA, 19 nt, Homo sapiens
  misc_RNA (1)...(19): siRNA sense strand
uaaauccagcuccauacaa

SEQ ID NO: 666318 - RNA, 19 nt, Homo sapiens
  misc_RNA (1)...(19): siRNA sense strand
aagaggauuuggauuugug

SEQ ID NO: 666319 - RNA, 19 nt, Homo sapiens
  misc_RNA (1)...(19): siRNA sense strand
uaugggaacuauggauaug

SEQ ID NO: 666320 - RNA, 19 nt, Homo sapiens
  misc_RNA (1)...(19): siRNA sense strand
gauugagcccggauacuuc

SEQ ID NO: 666321 - RNA, 19 nt, Homo sapiens
  misc_RNA (1)...(19): siRNA sense strand
ggcuauggcggauaugauu

SEQ ID NO: 666322 - RNA, 19 nt, Homo sapiens
  misc_RNA (1)...(19): siRNA sense strand
ugaaaucaaaguugcacaa

SEQ ID NO: 666323 - RNA, 19 nt, Homo sapiens
  misc_RNA (1)...(19): siRNA sense strand
caaaugaaagaagaggauu

SEQ ID NO: 666324 - RNA, 19 nt, Homo sapiens
  misc_RNA (1)...(19): siRNA sense strand
uaaaacagauccagucacu

SEQ ID NO: 666325 - RNA, 19 nt, Homo sapiens
  misc_RNA (1)...(19): siRNA sense strand
uauggcggauaugauuaua

SEQ ID NO: 666326 - RNA, 19 nt, Homo sapiens
  misc_RNA (1)...(19): siRNA sense strand
cacauauacugaugaagag

SEQ ID NO: 666327 - RNA, 19 nt, Homo sapiens
  misc_RNA (1)...(19): siRNA sense strand
gagcccggauacuucugaa

SEQ ID NO: 666328 - RNA, 19 nt, Homo sapiens
  misc_RNA (1)...(19): siRNA sense strand
ugggagaucaagaggauuu

SEQ ID NO: 666329 - RNA, 19 nt, Homo sapiens
  misc_RNA (1)...(19): siRNA sense strand
gauaagguuuuggaacuga

SEQ ID NO: 666330 - RNA, 19 nt, Homo sapiens
  misc_RNA (1)...(19): siRNA sense strand
gagaucaagaggauuugga

SEQ ID NO: 666331 - RNA, 19 nt, Homo sapiens
  misc_RNA (1)...(19): siRNA sense strand
acacaaacuggauggcaaa

SEQ ID NO: 666332 - RNA, 19 nt, Homo sapiens
  misc_RNA (1)...(19): siRNA sense strand
aaauccagcuccauacaac

SEQ ID NO: 666333 - RNA, 19 nt, Homo sapiens
  misc_RNA (1)...(19): siRNA sense strand
aaacuggauggcaaauuga

SEQ ID NO: 666334 - RNA, 19 nt, Homo sapiens
  misc_RNA (1)...(19): siRNA sense strand
ugggaacuauggauaugga

SEQ ID NO: 666335 - RNA, 19 nt, Homo sapiens
  misc_RNA (1)...(19): siRNA sense strand
gguauaacuaugggaacua

SEQ ID NO: 666336 - RNA, 19 nt, Homo sapiens
  misc_RNA (1)...(19): siRNA sense strand
ggagagauugaaaauauug

SEQ ID NO: 666337 - RNA, 19 nt, Homo sapiens
  misc_RNA (1)...(19): siRNA sense strand
gccaacagagcacuuaugg

SEQ ID NO: 666338 - RNA, 19 nt, Homo sapiens
  misc_RNA (1)...(19): siRNA sense strand
uggcggauaugauuauacu

SEQ ID NO: 666339 - RNA, 19 nt, Homo sapiens
  misc_RNA (1)...(19): siRNA sense strand
ucugggaagugugaaauca

SEQ ID NO: 666340 - RNA, 19 nt, Homo sapiens
  misc_RNA (1)...(19): siRNA sense strand
acugggagaucaagaggau

SEQ ID NO: 666341 - RNA, 19 nt, Homo sapiens
  misc_RNA (1)...(19): siRNA sense strand
ucaacgcgagcaagaauca

SEQ ID NO: 666342 - RNA, 19 nt, Homo sapiens
  misc_RNA (1)...(19): siRNA sense strand
cgcccaggcuuucccaugu

SEQ ID NO: 666343 - RNA, 19 nt, Homo sapiens
  misc_RNA (1)...(19): siRNA sense strand
gcccaggcuuucccaugug

SEQ ID NO: 666344 - RNA, 19 nt, Homo sapiens
  misc_RNA (1)...(19): siRNA sense strand
aucaagaggauuuggauuu

SEQ ID NO: 666345 - RNA, 19 nt, Homo sapiens
  misc_RNA (1)...(19): siRNA sense strand
caacccaaagagguauaua

SEQ ID NO: 666346 - RNA, 19 nt, Homo sapiens
  misc_RNA (1)...(19): siRNA sense strand
augaacgaguacagcaaua

SEQ ID NO: 666347 - RNA, 19 nt, Homo sapiens
  misc_RNA (1)...(19): siRNA sense strand
aaagaugcugcuaguguug

SEQ ID NO: 666348 - RNA, 19 nt, Homo sapiens
  misc_RNA (1)...(19): siRNA sense strand
ccuccgcucccgcuacuuu

SEQ ID NO: 666349 - RNA, 19 nt, Homo sapiens
  misc_RNA (1)...(19): siRNA sense strand
ggguauaacuaugggaacu

SEQ ID NO: 666350 - RNA, 19 nt, Homo sapiens
  misc_RNA (1)...(19): siRNA sense strand
ucacuauggaggauaugaa

SEQ ID NO: 666351 - RNA, 19 nt, Homo sapiens
  misc_RNA (1)...(19): siRNA sense strand
uaguggcuauggcggauau

SEQ ID NO: 666352 - RNA, 19 nt, Homo sapiens
  misc_RNA (1)...(19): siRNA sense strand
gcugguggacgagguggua

SEQ ID NO: 666353 - RNA, 19 nt, Homo sapiens
  misc_RNA (1)...(19): siRNA sense strand
agacuacaguggccaacag

SEQ ID NO: 666354 - RNA, 19 nt, Homo sapiens
  misc_RNA (1)...(19): siRNA sense strand
gggauaugcagacuacagu

SEQ ID NO: 666355 - RNA, 19 nt, Homo sapiens
  misc_RNA (1)...(19): siRNA sense strand
acuaugggaacuauggaua

SEQ ID NO: 666356 - RNA, 19 nt, Homo sapiens
  misc_RNA (1)...(19): siRNA sense strand
ugaacgaguacagcaauau

SEQ ID NO: 666357 - RNA, 19 nt, Homo sapiens
  misc_RNA (1)...(19): siRNA sense strand
guagacugcacaauuaaaa

SEQ ID NO: 666358 - RNA, 19 nt, Homo sapiens
  misc_RNA (1)...(19): siRNA sense strand
uaugaucaaggauauggaa

SEQ ID NO: 666359 - RNA, 19 nt, Homo sapiens
  misc_RNA (1)...(19): siRNA sense strand
agaaagcagauaccaucaa

SEQ ID NO: 666360 - RNA, 19 nt, Homo sapiens
  misc_RNA (1)...(19): siRNA sense strand
acaaaugaaagaagaggau

SEQ ID NO: 666361 - RNA, 19 nt, Homo sapiens
  misc_RNA (1)...(19): siRNA sense strand
cugcuaguguugauaaggu

SEQ ID NO: 666362 - RNA, 19 nt, Homo sapiens
  misc_RNA (1)...(19): siRNA sense strand
gcuaguguugauaagguuu

SEQ ID NO: 666363 - RNA, 19 nt, Homo sapiens
  misc_RNA (1)...(19): siRNA sense strand
ggaaagugaucgcaacuau

SEQ ID NO: 666364 - RNA, 19 nt, Homo sapiens
  misc_RNA (1)...(19): siRNA sense strand
gaaagacucccuuccauga

SEQ ID NO: 666365 - RNA, 19 nt, Homo sapiens
  misc_RNA (1)...(19): siRNA sense strand
aaagugaucgcaacuauua

SEQ ID NO: 666366 - RNA, 19 nt, Homo sapiens
  misc_RNA (1)...(19): siRNA sense strand
gauugggacuguuugauuu

SEQ ID NO: 666367 - RNA, 19 nt, Homo sapiens
  misc_RNA (1)...(19): siRNA sense strand
gaacuacuuugcaaacauc

SEQ ID NO: 666368 - RNA, 19 nt, Homo sapiens
  misc_RNA (1)...(19): siRNA sense strand
gaacagcaguguaaaugac

SEQ ID NO: 666369 - RNA, 19 nt, Homo sapiens
  misc_RNA (1)...(19): siRNA sense strand
guaaaugacucagauuauc

SEQ ID NO: 666370 - RNA, 19 nt, Homo sapiens
  misc_RNA (1)...(19): siRNA sense strand
ucaacaaccugaacuacuu

SEQ ID NO: 666371 - RNA, 19 nt, Homo sapiens
  misc_RNA (1)...(19): siRNA sense strand
aaacaugagugaaauugga

SEQ ID NO: 666372 - RNA, 19 nt, Homo sapiens
  misc_RNA (1)...(19): siRNA sense strand
gguaugcucugcugaggaa

SEQ ID NO: 666373 - RNA, 19 nt, Homo sapiens
  misc_RNA (1)...(19): siRNA sense strand
auauguaucugcuuccuua

SEQ ID NO: 666374 - RNA, 19 nt, Homo sapiens
  misc_RNA (1)...(19): siRNA sense strand
gaagggcccaauagacaua

SEQ ID NO: 666375 - RNA, 19 nt, Homo sapiens
  misc_RNA (1)...(19): siRNA sense strand
gacauaaacaugagugaaa

SEQ ID NO: 666376 - RNA, 19 nt, Homo sapiens
  misc_RNA (1)...(19): siRNA sense strand
aaccauaccugcccugaaa

SEQ ID NO: 666377 - RNA, 19 nt, Homo sapiens
  misc_RNA (1)...(19): siRNA sense strand
gaacaccuaccucuucaug

SEQ ID NO: 666378 - RNA, 19 nt, Homo sapiens
  misc_RNA (1)...(19): siRNA sense strand
gaucgcaacuauuauggau

SEQ ID NO: 666379 - RNA, 19 nt, Homo sapiens
  misc_RNA (1)...(19): siRNA sense strand
ccaauagacauaaacauga

SEQ ID NO: 666380 - RNA, 19 nt, Homo sapiens
  misc_RNA (1)...(19): siRNA sense strand
gaaagugaucgcaacuauu

SEQ ID NO: 666381 - RNA, 19 nt, Homo sapiens
  misc_RNA (1)...(19): siRNA sense strand
gcuuaacaguggaacaauu

SEQ ID NO: 666382 - RNA, 19 nt, Homo sapiens
  misc_RNA (1)...(19): siRNA sense strand
gaaaccuuccugcaaacua

SEQ ID NO: 666383 - RNA, 19 nt, Homo sapiens
  misc_RNA (1)...(19): siRNA sense strand
ggauugggacuguuugauu

SEQ ID NO: 666384 - RNA, 19 nt, Homo sapiens
  misc_RNA (1)...(19): siRNA sense strand
ggaacagcaguguaaauga

SEQ ID NO: 666385 - RNA, 19 nt, Homo sapiens
  misc_RNA (1)...(19): siRNA sense strand
ugacucagauuauccucuu

SEQ ID NO: 666386 - RNA, 19 nt, Homo sapiens
  misc_RNA (1)...(19): siRNA sense strand
gcaaugaaagacuuggauu

SEQ ID NO: 666387 - RNA, 19 nt, Homo sapiens
  misc_RNA (1)...(19): siRNA sense strand
caugaacucuucuccaaag

SEQ ID NO: 666388 - RNA, 19 nt, Homo sapiens
  misc_RNA (1)...(19): siRNA sense strand
ccugcaaacuacaacauuu

SEQ ID NO: 666389 - RNA, 19 nt, Homo sapiens
  misc_RNA (1)...(19): siRNA sense strand
agugaaaccuuccugcaaa

SEQ ID NO: 666390 - RNA, 19 nt, Homo sapiens
  misc_RNA (1)...(19): siRNA sense strand
ccaaagacccaaccaucaa

SEQ ID NO: 666391 - RNA, 19 nt, Homo sapiens
  misc_RNA (1)...(19): siRNA sense strand
ucacauacgacgccuugua

SEQ ID NO: 666392 - RNA, 19 nt, Homo sapiens
  misc_RNA (1)...(19): siRNA sense strand
uggcucaggugaacgagua

SEQ ID NO: 666393 - RNA, 19 nt, Homo sapiens
  misc_RNA (1)...(19): siRNA sense strand
guguaaaugacucagauua

SEQ ID NO: 666394 - RNA, 19 nt, Homo sapiens
  misc_RNA (1)...(19): siRNA sense strand
guagaucacauaccggaaa

SEQ ID NO: 666395 - RNA, 19 nt, Homo sapiens
  misc_RNA (1)...(19): siRNA sense strand
cgccagcgcuugcaguuug

SEQ ID NO: 666396 - RNA, 19 nt, Homo sapiens
  misc_RNA (1)...(19): siRNA sense strand
cagauuauccucuugacuu

SEQ ID NO: 666397 - RNA, 19 nt, Homo sapiens
  misc_RNA (1)...(19): siRNA sense strand
caauagacauaaacaugag

SEQ ID NO: 666398 - RNA, 19 nt, Homo sapiens
  misc_RNA (1)...(19): siRNA sense strand
acaccuaccucuucaugau

SEQ ID NO: 666399 - RNA, 19 nt, Homo sapiens
  misc_RNA (1)...(19): siRNA sense strand
gaaauuggaauggauuaca

SEQ ID NO: 666400 - RNA, 19 nt, Homo sapiens
  misc_RNA (1)...(19): siRNA sense strand
caaacuacaacauuucuuc

SEQ ID NO: 666401 - RNA, 19 nt, Homo sapiens
  misc_RNA (1)...(19): siRNA sense strand
caacaaccugaacuacuuu

SEQ ID NO: 666402 - RNA, 19 nt, Homo sapiens
  misc_RNA (1)...(19): siRNA sense strand
acaaguccauuccucauca

SEQ ID NO: 666403 - RNA, 19 nt, Homo sapiens
  misc_RNA (1)...(19): siRNA sense strand
aucaauggcuuuccuaaug

SEQ ID NO: 666404 - RNA, 19 nt, Homo sapiens
  misc_RNA (1)...(19): siRNA sense strand
aagaggaacagcaguguaa

SEQ ID NO: 666405 - RNA, 19 nt, Homo sapiens
  misc_RNA (1)...(19): siRNA sense strand
ggaaaguacaaguccauuc

SEQ ID NO: 666406 - RNA, 19 nt, Homo sapiens
  misc_RNA (1)...(19): siRNA sense strand
gaacagaguacagaaugca

SEQ ID NO: 666407 - RNA, 19 nt, Homo sapiens
  misc_RNA (1)...(19): siRNA sense strand
uuacauucaugaacucuuc

SEQ ID NO: 666408 - RNA, 19 nt, Homo sapiens
  misc_RNA (1)...(19): siRNA sense strand
ucgcaacuauuauggaugu

SEQ ID NO: 666409 - RNA, 19 nt, Homo sapiens
  misc_RNA (1)...(19): siRNA sense strand
ggaacagaguacagaaugc

SEQ ID NO: 666410 - RNA, 19 nt, Homo sapiens
  misc_RNA (1)...(19): siRNA sense strand
cguccucgcugcuguacuu

SEQ ID NO: 666411 - RNA, 19 nt, Homo sapiens
  misc_RNA (1)...(19): siRNA sense strand
gagugaaauuggaauggau

SEQ ID NO: 666412 - RNA, 19 nt, Homo sapiens
  misc_RNA (1)...(19): siRNA sense strand
aacaaucggugcucagguu

SEQ ID NO: 666413 - RNA, 19 nt, Homo sapiens
  misc_RNA (1)...(19): siRNA sense strand
gaaaguacaaguccauucc

SEQ ID NO: 666414 - RNA, 19 nt, Homo sapiens
  misc_RNA (1)...(19): siRNA sense strand
uugcaaacaucacauacga

SEQ ID NO: 666415 - RNA, 19 nt, Homo sapiens
  misc_RNA (1)...(19): siRNA sense strand
ugaacuacuuugcaaacau

SEQ ID NO: 666416 - RNA, 19 nt, Homo sapiens
  misc_RNA (1)...(19): siRNA sense strand
gaggaacagcaguguaaau

SEQ ID NO: 666417 - RNA, 19 nt, Homo sapiens
  misc_RNA (1)...(19): siRNA sense strand
ugagugaaauuggaaugga

SEQ ID NO: 666418 - RNA, 19 nt, Homo sapiens
  misc_RNA (1)...(19): siRNA sense strand
agauuauccucuugacuug

SEQ ID NO: 666419 - RNA, 19 nt, Homo sapiens
  misc_RNA (1)...(19): siRNA sense strand
ggauuacauucaugaacuc

SEQ ID NO: 666420 - RNA, 19 nt, Homo sapiens
  misc_RNA (1)...(19): siRNA sense strand
aaugcaggcuauucuguga

SEQ ID NO: 666421 - RNA, 19 nt, Homo sapiens
  misc_RNA (1)...(19): siRNA sense strand
cuuaacaguggaacaauuu

SEQ ID NO: 666422 - RNA, 19 nt, Homo sapiens
  misc_RNA (1)...(19): siRNA sense strand
gaucacauaccggaaagug

SEQ ID NO: 666423 - RNA, 19 nt, Homo sapiens
  misc_RNA (1)...(19): siRNA sense strand
gacuugaaccacagugaaa

SEQ ID NO: 666424 - RNA, 19 nt, Homo sapiens
  misc_RNA (1)...(19): siRNA sense strand
ucgaggagaaguccaguuu

SEQ ID NO: 666425 - RNA, 19 nt, Homo sapiens
  misc_RNA (1)...(19): siRNA sense strand
ggacaacgugagaacaauc

SEQ ID NO: 666426 - RNA, 19 nt, Homo sapiens
  misc_RNA (1)...(19): siRNA sense strand
agacuuggauugggacugu

SEQ ID NO: 666427 - RNA, 19 nt, Homo sapiens
  misc_RNA (1)...(19): siRNA sense strand
uuaugugguugaacaaguu

SEQ ID NO: 666428 - RNA, 19 nt, Homo sapiens
  misc_RNA (1)...(19): siRNA sense strand
gcaccucccaguccuguuc

SEQ ID NO: 666429 - RNA, 19 nt, Homo sapiens
  misc_RNA (1)...(19): siRNA sense strand
gggacaacgugagaacaau

SEQ ID NO: 666430 - RNA, 19 nt, Homo sapiens
  misc_RNA (1)...(19): siRNA sense strand
caaucggugcucagguuua

SEQ ID NO: 666431 - RNA, 19 nt, Homo sapiens
  misc_RNA (1)...(19): siRNA sense strand
aaccugaacuacuuugcaa

SEQ ID NO: 666432 - RNA, 19 nt, Homo sapiens
  misc_RNA (1)...(19): siRNA sense strand
caguguaaaugacucagau

SEQ ID NO: 666433 - RNA, 19 nt, Homo sapiens
  misc_RNA (1)...(19): siRNA sense strand
gugaaauuggaauggauua

SEQ ID NO: 666434 - RNA, 19 nt, Homo sapiens
  misc_RNA (1)...(19): siRNA sense strand
aaaccuuccugcaaacuac

SEQ ID NO: 666435 - RNA, 19 nt, Homo sapiens
  misc_RNA (1)...(19): siRNA sense strand
ucaauggcuuuccuaaugc

SEQ ID NO: 666436 - RNA, 19 nt, Homo sapiens
  misc_RNA (1)...(19): siRNA sense strand
cggagugaguggcuuaaca

SEQ ID NO: 666437 - RNA, 19 nt, Homo sapiens
  misc_RNA (1)...(19): siRNA sense strand
uuauggauguggacagaug

SEQ ID NO: 666438 - RNA, 19 nt, Homo sapiens
  misc_RNA (1)...(19): siRNA sense strand
cccaauagacauaaacaug

SEQ ID NO: 666439 - RNA, 19 nt, Homo sapiens
  misc_RNA (1)...(19): siRNA sense strand
gaugacgaccucuggaaca

SEQ ID NO: 666440 - RNA, 19 nt, Homo sapiens
  misc_RNA (1)...(19): siRNA sense strand
aaucggugcucagguuuau

SEQ ID NO: 666441 - RNA, 19 nt, Homo sapiens
  misc_RNA (1)...(19): siRNA sense strand
aagaggcaaugaaagacuu

SEQ ID NO: 666442 - RNA, 19 nt, Homo sapiens
  misc_RNA (1)...(19): siRNA sense strand
caacguuggcuuucaagag

SEQ ID NO: 666443 - RNA, 19 nt, Homo sapiens
  misc_RNA (1)...(19): siRNA sense strand
gcaaacuacaacauuucuu

SEQ ID NO: 666444 - RNA, 19 nt, Homo sapiens
  misc_RNA (1)...(19): siRNA sense strand
uauuauggauguggacaga

SEQ ID NO: 666445 - RNA, 19 nt, Homo sapiens
  misc_RNA (1)...(19): siRNA sense strand
uucaugaacucuucuccaa

SEQ ID NO: 666446 - RNA, 19 nt, Homo sapiens
  misc_RNA (1)...(19): siRNA sense strand
uggauuacauucaugaacu

SEQ ID NO: 666447 - RNA, 19 nt, Homo sapiens
  misc_RNA (1)...(19): siRNA sense strand
gacuucaccuacuuugcaa

SEQ ID NO: 666448 - RNA, 19 nt, Homo sapiens
  misc_RNA (1)...(19): siRNA sense strand
uacaacauuucuuccugaa

SEQ ID NO: 666449 - RNA, 19 nt, Homo sapiens
  misc_RNA (1)...(19): siRNA sense strand
guacccaacccuuuaaucg

SEQ ID NO: 666450 - RNA, 19 nt, Homo sapiens
  misc_RNA (1)...(19): siRNA sense strand
guacagaaugcaggcuauu

SEQ ID NO: 666451 - RNA, 19 nt, Homo sapiens
  misc_RNA (1)...(19): siRNA sense strand
cugaaagacucccuuccau

SEQ ID NO: 666452 - RNA, 19 nt, Homo sapiens
  misc_RNA (1)...(19): siRNA sense strand
guacaaguccauuccucau

SEQ ID NO: 666453 - RNA, 19 nt, Homo sapiens
  misc_RNA (1)...(19): siRNA sense strand
ucaccuacuuugcaaacca

SEQ ID NO: 666454 - RNA, 19 nt, Homo sapiens
  misc_RNA (1)...(19): siRNA sense strand
ccaugaagggcccaauaga

SEQ ID NO: 666455 - RNA, 19 nt, Homo sapiens
  misc_RNA (1)...(19): siRNA sense strand
ccaguuucuuggaagguau

SEQ ID NO: 666456 - RNA, 19 nt, Homo sapiens
  misc_RNA (1)...(19): siRNA sense strand
gcaguguaaaugacucaga

SEQ ID NO: 666457 - RNA, 19 nt, Homo sapiens
  misc_RNA (1)...(19): siRNA sense strand
uuucaacguuggcuuucaa

SEQ ID NO: 666458 - RNA, 19 nt, Homo sapiens
  misc_RNA (1)...(19): siRNA sense strand
caaagacccaaccaucaag

SEQ ID NO: 666459 - RNA, 19 nt, Homo sapiens
  misc_RNA (1)...(19): siRNA sense strand
ugacuugaaccacagugaa

SEQ ID NO: 666460 - RNA, 19 nt, Homo sapiens
  misc_RNA (1)...(19): siRNA sense strand
gauccgggacaacgugaga

SEQ ID NO: 666461 - RNA, 19 nt, Homo sapiens
  misc_RNA (1)...(19): siRNA sense strand
ggagugaguggcuuaacag

SEQ ID NO: 666462 - RNA, 19 nt, Homo sapiens
  misc_RNA (1)...(19): siRNA sense strand
cagugaaaccuuccugcaa

SEQ ID NO: 666463 - RNA, 19 nt, Homo sapiens
  misc_RNA (1)...(19): siRNA sense strand
gaagagacauccucacaag

SEQ ID NO: 666464 - RNA, 19 nt, Homo sapiens
  misc_RNA (1)...(19): siRNA sense strand
ggaggaaacugaagagaca

SEQ ID NO: 666465 - RNA, 19 nt, Homo sapiens
  misc_RNA (1)...(19): siRNA sense strand
gaaauggccacaacaaguu

SEQ ID NO: 666466 - RNA, 19 nt, Homo sapiens
  misc_RNA (1)...(19): siRNA sense strand
ggugagcccucuccuaaga

SEQ ID NO: 666467 - RNA, 19 nt, Homo sapiens
  misc_RNA (1)...(19): siRNA sense strand
uaaagcagcucaaaagaaa

SEQ ID NO: 666468 - RNA, 19 nt, Homo sapiens
  misc_RNA (1)...(19): siRNA sense strand
ggaaauggccacaacaagu

SEQ ID NO: 666469 - RNA, 19 nt, Homo sapiens
  misc_RNA (1)...(19): siRNA sense strand
ccaggaagcagcagcaaga

SEQ ID NO: 666470 - RNA, 19 nt, Homo sapiens
  misc_RNA (1)...(19): siRNA sense strand
gcagaagccacuggagaaa

SEQ ID NO: 666471 - RNA, 19 nt, Homo sapiens
  misc_RNA (1)...(19): siRNA sense strand
ccaagaggcagaccuagga

SEQ ID NO: 666472 - RNA, 19 nt, Homo sapiens
  misc_RNA (1)...(19): siRNA sense strand
acaagagucugccgaagag

SEQ ID NO: 666473 - RNA, 19 nt, Homo sapiens
  misc_RNA (1)...(19): siRNA sense strand
ccggugagcccucuccuaa

SEQ ID NO: 666474 - RNA, 19 nt, Homo sapiens
  misc_RNA (1)...(19): siRNA sense strand
gagacauccucacaagagu

SEQ ID NO: 666475 - RNA, 19 nt, Homo sapiens
  misc_RNA (1)...(19): siRNA sense strand
cacaagagucugccgaaga

SEQ ID NO: 666476 - RNA, 19 nt, Homo sapiens
  misc_RNA (1)...(19): siRNA sense strand
ugaagagacauccucacaa

SEQ ID NO: 666477 - RNA, 19 nt, Homo sapiens
  misc_RNA (1)...(19): siRNA sense strand
ccuaggaaauggccacaac

SEQ ID NO: 666478 - RNA, 19 nt, Homo sapiens
  misc_RNA (1)...(19): siRNA sense strand
caagaggcagaccuaggaa

SEQ ID NO: 666479 - RNA, 19 nt, Homo sapiens
  misc_RNA (1)...(19): siRNA sense strand
agagacauccucacaagag

SEQ ID NO: 666480 - RNA, 19 nt, Homo sapiens
  misc_RNA (1)...(19): siRNA sense strand
uaggaaauggccacaacaa

SEQ ID NO: 666481 - RNA, 19 nt, Homo sapiens
  misc_RNA (1)...(19): siRNA sense strand
gaggcagaccuaggaaaug

SEQ ID NO: 666482 - RNA, 19 nt, Homo sapiens
  misc_RNA (1)...(19): siRNA sense strand
aggcagaccuaggaaaugg

SEQ ID NO: 666483 - RNA, 19 nt, Homo sapiens
  misc_RNA (1)...(19): siRNA sense strand
agaggcagaccuaggaaau

SEQ ID NO: 666484 - RNA, 19 nt, Homo sapiens
  misc_RNA (1)...(19): siRNA sense strand
gcaaaggagucgaguauaa

SEQ ID NO: 666485 - RNA, 19 nt, Homo sapiens
  misc_RNA (1)...(19): siRNA sense strand
gaugagagcuguuagaguu

SEQ ID NO: 666486 - RNA, 19 nt, Homo sapiens
  misc_RNA (1)...(19): siRNA sense strand
caagaaaggugacagaguu

SEQ ID NO: 666487 - RNA, 19 nt, Homo sapiens
  misc_RNA (1)...(19): siRNA sense strand
gcuuauggcuuaaagauuu

SEQ ID NO: 666488 - RNA, 19 nt, Homo sapiens
  misc_RNA (1)...(19): siRNA sense strand
gaaauuggcugguugaaac

SEQ ID NO: 666489 - RNA, 19 nt, Homo sapiens
  misc_RNA (1)...(19): siRNA sense strand
gauagaagcuguuggagau

SEQ ID NO: 666490 - RNA, 19 nt, Homo sapiens
  misc_RNA (1)...(19): siRNA sense strand
gaaauaaacccacgagaca

SEQ ID NO: 666491 - RNA, 19 nt, Homo sapiens
  misc_RNA (1)...(19): siRNA sense strand
gaaguauguuggugagaaa

SEQ ID NO: 666492 - RNA, 19 nt, Homo sapiens
  misc_RNA (1)...(19): siRNA sense strand
aaaccacucuuacccuaua

SEQ ID NO: 666493 - RNA, 19 nt, Homo sapiens
  misc_RNA (1)...(19): siRNA sense strand
ugugauagguucucaauau

SEQ ID NO: 666494 - RNA, 19 nt, Homo sapiens
  misc_RNA (1)...(19): siRNA sense strand
gcgaucagauauugcagua

SEQ ID NO: 666495 - RNA, 19 nt, Homo sapiens
  misc_RNA (1)...(19): siRNA sense strand
cagcagagguacuauugaa

SEQ ID NO: 666496 - RNA, 19 nt, Homo sapiens
  misc_RNA (1)...(19): siRNA sense strand
gaaauugcgaucagauauu

SEQ ID NO: 666497 - RNA, 19 nt, Homo sapiens
  misc_RNA (1)...(19): siRNA sense strand
ggaggaauuucagcaauau

SEQ ID NO: 666498 - RNA, 19 nt, Homo sapiens
  misc_RNA (1)...(19): siRNA sense strand
cagcagaccacacuguuua

SEQ ID NO: 666499 - RNA, 19 nt, Homo sapiens
  misc_RNA (1)...(19): siRNA sense strand
ccaaauugcuagagcuuau

SEQ ID NO: 666500 - RNA, 19 nt, Homo sapiens
  misc_RNA (1)...(19): siRNA sense strand
ugcuagagcuuauggcuua

SEQ ID NO: 666501 - RNA, 19 nt, Homo sapiens
  misc_RNA (1)...(19): siRNA sense strand
aaacuggacuuuaaacaag

SEQ ID NO: 666502 - RNA, 19 nt, Homo sapiens
  misc_RNA (1)...(19): siRNA sense strand
gaauggaaauuggcugguu

SEQ ID NO: 666503 - RNA, 19 nt, Homo sapiens
  misc_RNA (1)...(19): siRNA sense strand
gauaaugcaucugcuuuca

SEQ ID NO: 666504 - RNA, 19 nt, Homo sapiens
  misc_RNA (1)...(19): siRNA sense strand
ggugagaaaggaauugaua

SEQ ID NO: 666505 - RNA, 19 nt, Homo sapiens
  misc_RNA (1)...(19): siRNA sense strand
agaccacacuguuuacaaa

SEQ ID NO: 666506 - RNA, 19 nt, Homo sapiens
  misc_RNA (1)...(19): siRNA sense strand
gagaagugaauuacauuga

SEQ ID NO: 666507 - RNA, 19 nt, Homo sapiens
  misc_RNA (1)...(19): siRNA sense strand
gcagagguacuauugaaau

SEQ ID NO: 666508 - RNA, 19 nt, Homo sapiens
  misc_RNA (1)...(19): siRNA sense strand
uagaagcuguuggagauaa

SEQ ID NO: 666509 - RNA, 19 nt, Homo sapiens
  misc_RNA (1)...(19): siRNA sense strand
ggaaauuggcugguugaaa

SEQ ID NO: 666510 - RNA, 19 nt, Homo sapiens
  misc_RNA (1)...(19): siRNA sense strand
gagagaguguucugguuca

SEQ ID NO: 666511 - RNA, 19 nt, Homo sapiens
  misc_RNA (1)...(19): siRNA sense strand
ugugaaagcuggagagagu

SEQ ID NO: 666512 - RNA, 19 nt, Homo sapiens
  misc_RNA (1)...(19): siRNA sense strand
acagagaagugaauuacau

SEQ ID NO: 666513 - RNA, 19 nt, Homo sapiens
  misc_RNA (1)...(19): siRNA sense strand
aaauugcgaucagauauug

SEQ ID NO: 666514 - RNA, 19 nt, Homo sapiens
  misc_RNA (1)...(19): siRNA sense strand
ccaucggcauuccauauuu

SEQ ID NO: 666515 - RNA, 19 nt, Homo sapiens
  misc_RNA (1)...(19): siRNA sense strand
ggaggacgagugauaguug

SEQ ID NO: 666516 - RNA, 19 nt, Homo sapiens
  misc_RNA (1)...(19): siRNA sense strand
aggaggaauuucagcaaua

SEQ ID NO: 666517 - RNA, 19 nt, Homo sapiens
  misc_RNA (1)...(19): siRNA sense strand
gagacaccauggcaaagga

SEQ ID NO: 666518 - RNA, 19 nt, Homo sapiens
  misc_RNA (1)...(19): siRNA sense strand
uaaugcaucugcuuucaag

SEQ ID NO: 666519 - RNA, 19 nt, Homo sapiens
  misc_RNA (1)...(19): siRNA sense strand
caaccaaggaggaauuuca

SEQ ID NO: 666520 - RNA, 19 nt, Homo sapiens
  misc_RNA (1)...(19): siRNA sense strand
agaaguauguuggugagaa

SEQ ID NO: 666521 - RNA, 19 nt, Homo sapiens
  misc_RNA (1)...(19): siRNA sense strand
gagcuuauggcuuaaagau

SEQ ID NO: 666522 - RNA, 19 nt, Homo sapiens
  misc_RNA (1)...(19): siRNA sense strand
gcagcagaccacacuguuu

SEQ ID NO: 666523 - RNA, 19 nt, Homo sapiens
  misc_RNA (1)...(19): siRNA sense strand
caaaggagucgaguauaau

SEQ ID NO: 666524 - RNA, 19 nt, Homo sapiens
  misc_RNA (1)...(19): siRNA sense strand
ggaguuggauuagcagcau

SEQ ID NO: 666525 - RNA, 19 nt, Homo sapiens
  misc_RNA (1)...(19): siRNA sense strand
ccuucaagcuggaauggaa

SEQ ID NO: 666526 - RNA, 19 nt, Homo sapiens
  misc_RNA (1)...(19): siRNA sense strand
gaggacgagugauaguugu

SEQ ID NO: 666527 - RNA, 19 nt, Homo sapiens
  misc_RNA (1)...(19): siRNA sense strand
gaccaucagguucuaauca

SEQ ID NO: 666528 - RNA, 19 nt, Homo sapiens
  misc_RNA (1)...(19): siRNA sense strand
ugaaauugcgaucagauau

SEQ ID NO: 666529 - RNA, 19 nt, Homo sapiens
  misc_RNA (1)...(19): siRNA sense strand
ggagucgaguauaauugga

SEQ ID NO: 666530 - RNA, 19 nt, Homo sapiens
  misc_RNA (1)...(19): siRNA sense strand
ggugauagaagcuguugga

SEQ ID NO: 666531 - RNA, 19 nt, Homo sapiens
  misc_RNA (1)...(19): siRNA sense strand
aaaggagucgaguauaauu

SEQ ID NO: 666532 - RNA, 19 nt, Homo sapiens
  misc_RNA (1)...(19): siRNA sense strand
uacauucgcucugguacuu

SEQ ID NO: 666533 - RNA, 19 nt, Homo sapiens
  misc_RNA (1)...(19): siRNA sense strand
gauauugcaguaccgauuc

SEQ ID NO: 666534 - RNA, 19 nt, Homo sapiens
  misc_RNA (1)...(19): siRNA sense strand
uuagcagcaugccaaauug

SEQ ID NO: 666535 - RNA, 19 nt, Homo sapiens
  misc_RNA (1)...(19): siRNA sense strand
ggacgagugauaguuguug

SEQ ID NO: 666536 - RNA, 19 nt, Homo sapiens
  misc_RNA (1)...(19): siRNA sense strand
ggcagcagagguacuauug

SEQ ID NO: 666537 - RNA, 19 nt, Homo sapiens
  misc_RNA (1)...(19): siRNA sense strand
cagagaagugaauuacauu

SEQ ID NO: 666538 - RNA, 19 nt, Homo sapiens
  misc_RNA (1)...(19): siRNA sense strand
caaggaggaauuucagcaa

SEQ ID NO: 666539 - RNA, 19 nt, Homo sapiens
  misc_RNA (1)...(19): siRNA sense strand
guuguuggcagcagaggua

SEQ ID NO: 666540 - RNA, 19 nt, Homo sapiens
  misc_RNA (1)...(19): siRNA sense strand
aaguggaggaguuggauua

SEQ ID NO: 666541 - RNA, 19 nt, Homo sapiens
  misc_RNA (1)...(19): siRNA sense strand
uggcaaaggagucgaguau

SEQ ID NO: 666542 - RNA, 19 nt, Homo sapiens
  misc_RNA (1)...(19): siRNA sense strand
gcagcagagguacuauuga

SEQ ID NO: 666543 - RNA, 19 nt, Homo sapiens
  misc_RNA (1)...(19): siRNA sense strand
acauggaggacgagugaua

SEQ ID NO: 666544 - RNA, 19 nt, Homo sapiens
  misc_RNA (1)...(19): siRNA sense strand
uggaggaguuggauuagca

SEQ ID NO: 666545 - RNA, 19 nt, Homo sapiens
  misc_RNA (1)...(19): siRNA sense strand
ucgaguauaauuggaguua

SEQ ID NO: 666546 - RNA, 19 nt, Homo sapiens
  misc_RNA (1)...(19): siRNA sense strand
ggccgaggcucaugaaaau

SEQ ID NO: 666547 - RNA, 19 nt, Homo sapiens
  misc_RNA (1)...(19): siRNA sense strand
uggagagaguguucugguu

SEQ ID NO: 666548 - RNA, 19 nt, Homo sapiens
  misc_RNA (1)...(19): siRNA sense strand
ccagaaguccugaaauugc

SEQ ID NO: 666549 - RNA, 19 nt, Homo sapiens
  misc_RNA (1)...(19): siRNA sense strand
gccaucggcauuccauauu

SEQ ID NO: 666550 - RNA, 19 nt, Homo sapiens
  misc_RNA (1)...(19): siRNA sense strand
gcuagagcuuauggcuuaa

SEQ ID NO: 666551 - RNA, 19 nt, Homo sapiens
  misc_RNA (1)...(19): siRNA sense strand
guauguuggugagaaagga

SEQ ID NO: 666552 - RNA, 19 nt, Homo sapiens
  misc_RNA (1)...(19): siRNA sense strand
caagcuggaauggaaauug

SEQ ID NO: 666553 - RNA, 19 nt, Homo sapiens
  misc_RNA (1)...(19): siRNA sense strand
aaggaggaauuucagcaau

SEQ ID NO: 666554 - RNA, 19 nt, Homo sapiens
  misc_RNA (1)...(19): siRNA sense strand
ggcaaaggagucgaguaua

SEQ ID NO: 666555 - RNA, 19 nt, Homo sapiens
  misc_RNA (1)...(19): siRNA sense strand
cgacuggacagaaguugau

SEQ ID NO: 666556 - RNA, 19 nt, Homo sapiens
  misc_RNA (1)...(19): siRNA sense strand
cauucgcucugguacuuau

SEQ ID NO: 666557 - RNA, 19 nt, Homo sapiens
  misc_RNA (1)...(19): siRNA sense strand
ggauuagcagcaugccaaa

SEQ ID NO: 666558 - RNA, 19 nt, Homo sapiens
  misc_RNA (1)...(19): siRNA sense strand
gugagaaaggaauugauau

SEQ ID NO: 666559 - RNA, 19 nt, Homo sapiens
  misc_RNA (1)...(19): siRNA sense strand
gccaaauugcuagagcuua

SEQ ID NO: 666560 - RNA, 19 nt, Homo sapiens
  misc_RNA (1)...(19): siRNA sense strand
gcaaguggaggaguuggau

SEQ ID NO: 666561 - RNA, 19 nt, Homo sapiens
  misc_RNA (1)...(19): siRNA sense strand
aagcuggaauggaaauugg

SEQ ID NO: 666562 - RNA, 19 nt, Homo sapiens
  misc_RNA (1)...(19): siRNA sense strand
ucaagaaaggugacagagu

SEQ ID NO: 666563 - RNA, 19 nt, Homo sapiens
  misc_RNA (1)...(19): siRNA sense strand
gaagguggccgaggcucau

SEQ ID NO: 666564 - RNA, 19 nt, Homo sapiens
  misc_RNA (1)...(19): siRNA sense strand
cacgagacaccauggcaaa

SEQ ID NO: 666565 - RNA, 19 nt, Homo sapiens
  misc_RNA (1)...(19): siRNA sense strand
caucggcauuccauauuuu

SEQ ID NO: 666566 - RNA, 19 nt, Homo sapiens
  misc_RNA (1)...(19): siRNA sense strand
auuagcagcaugccaaauu

SEQ ID NO: 666567 - RNA, 19 nt, Homo sapiens
  misc_RNA (1)...(19): siRNA sense strand
aguguucaaucacagagaa

SEQ ID NO: 666568 - RNA, 19 nt, Homo sapiens
  misc_RNA (1)...(19): siRNA sense strand
aagaaaggugacagaguuu

SEQ ID NO: 666569 - RNA, 19 nt, Homo sapiens
  misc_RNA (1)...(19): siRNA sense strand
ggaauuucagcaauaugca

SEQ ID NO: 666570 - RNA, 19 nt, Homo sapiens
  misc_RNA (1)...(19): siRNA sense strand
accaucagguucuaaucaa

SEQ ID NO: 666571 - RNA, 19 nt, Homo sapiens
  misc_RNA (1)...(19): siRNA sense strand
agaagcuguuggagauaau

SEQ ID NO: 666572 - RNA, 19 nt, Homo sapiens
  misc_RNA (1)...(19): siRNA sense strand
guccaugcaugugguguca

SEQ ID NO: 666573 - RNA, 19 nt, Homo sapiens
  misc_RNA (1)...(19): siRNA sense strand
aaucaagguccaugcaugu

SEQ ID NO: 666574 - RNA, 19 nt, Homo sapiens
  misc_RNA (1)...(19): siRNA sense strand
gcagaccacacuguuuaca

SEQ ID NO: 666575 - RNA, 19 nt, Homo sapiens
  misc_RNA (1)...(19): siRNA sense strand
ccaucagguucuaaucaag

SEQ ID NO: 666576 - RNA, 19 nt, Homo sapiens
  misc_RNA (1)...(19): siRNA sense strand
gcgacuggacagaaguuga

SEQ ID NO: 666577 - RNA, 19 nt, Homo sapiens
  misc_RNA (1)...(19): siRNA sense strand
gaaguugaugagagcuguu

SEQ ID NO: 666578 - RNA, 19 nt, Homo sapiens
  misc_RNA (1)...(19): siRNA sense strand
agagaagugaauuacauug

SEQ ID NO: 666579 - RNA, 19 nt, Homo sapiens
  misc_RNA (1)...(19): siRNA sense strand
gaggaaggacaaaagauug

SEQ ID NO: 666580 - RNA, 19 nt, Homo sapiens
  misc_RNA (1)...(19): siRNA sense strand
gaagcuguuggagauaaug

SEQ ID NO: 666581 - RNA, 19 nt, Homo sapiens
  misc_RNA (1)...(19): siRNA sense strand
cagaccacacuguuuacaa

SEQ ID NO: 666582 - RNA, 19 nt, Homo sapiens
  misc_RNA (1)...(19): siRNA sense strand
gaacuucacuuauuacuga

SEQ ID NO: 666583 - RNA, 19 nt, Homo sapiens
  misc_RNA (1)...(19): siRNA sense strand
gcaggugacuugcuccuua

SEQ ID NO: 666584 - RNA, 19 nt, Homo sapiens
  misc_RNA (1)...(19): siRNA sense strand
gaacauuagugaccacauu

SEQ ID NO: 666585 - RNA, 19 nt, Homo sapiens
  misc_RNA (1)...(19): siRNA sense strand
ucaaaucacuguaagguuu

SEQ ID NO: 666586 - RNA, 19 nt, Homo sapiens
  misc_RNA (1)...(19): siRNA sense strand
gggcagagaacaaauaaua

SEQ ID NO: 666587 - RNA, 19 nt, Homo sapiens
  misc_RNA (1)...(19): siRNA sense strand
caccagaacuucacuuauu

SEQ ID NO: 666588 - RNA, 19 nt, Homo sapiens
  misc_RNA (1)...(19): siRNA sense strand
gaacugaguaaaucucuuu

SEQ ID NO: 666589 - RNA, 19 nt, Homo sapiens
  misc_RNA (1)...(19): siRNA sense strand
guaaaucucuuuggcuuga

SEQ ID NO: 666590 - RNA, 19 nt, Homo sapiens
  misc_RNA (1)...(19): siRNA sense strand
ugaaagugcuggauguaaa

SEQ ID NO: 666591 - RNA, 19 nt, Homo sapiens
  misc_RNA (1)...(19): siRNA sense strand
gaaucuagacuccugaauu

SEQ ID NO: 666592 - RNA, 19 nt, Homo sapiens
  misc_RNA (1)...(19): siRNA sense strand
auacagaguccacuuguua

SEQ ID NO: 666593 - RNA, 19 nt, Homo sapiens
  misc_RNA (1)...(19): siRNA sense strand
cuaacgcucuucuaacgua

SEQ ID NO: 666594 - RNA, 19 nt, Homo sapiens
  misc_RNA (1)...(19): siRNA sense strand
gaaguccuccgaugucaaa

SEQ ID NO: 666595 - RNA, 19 nt, Homo sapiens
  misc_RNA (1)...(19): siRNA sense strand
gaaacaaaauccuacgaaa

SEQ ID NO: 666596 - RNA, 19 nt, Homo sapiens
  misc_RNA (1)...(19): siRNA sense strand
ggagguaaaucugcagaau

SEQ ID NO: 666597 - RNA, 19 nt, Homo sapiens
  misc_RNA (1)...(19): siRNA sense strand
aaucuagacuccugaauuc

SEQ ID NO: 666598 - RNA, 19 nt, Homo sapiens
  misc_RNA (1)...(19): siRNA sense strand
agaaggagcugcugaugca

SEQ ID NO: 666599 - RNA, 19 nt, Homo sapiens
  misc_RNA (1)...(19): siRNA sense strand
accagaacuucacuuauua

SEQ ID NO: 666600 - RNA, 19 nt, Homo sapiens
  misc_RNA (1)...(19): siRNA sense strand
gugaugaacugaguaaauc

SEQ ID NO: 666601 - RNA, 19 nt, Homo sapiens
  misc_RNA (1)...(19): siRNA sense strand
ugacgaagguguaaauggu

SEQ ID NO: 666602 - RNA, 19 nt, Homo sapiens
  misc_RNA (1)...(19): siRNA sense strand
gugaaagacauuaacgaua

SEQ ID NO: 666603 - RNA, 19 nt, Homo sapiens
  misc_RNA (1)...(19): siRNA sense strand
uaaaggcaguugauaaagg

SEQ ID NO: 666604 - RNA, 19 nt, Homo sapiens
  misc_RNA (1)...(19): siRNA sense strand
gcgagagccugucggucua

SEQ ID NO: 666605 - RNA, 19 nt, Homo sapiens
  misc_RNA (1)...(19): siRNA sense strand
cuacgaaauucaaguaaag

SEQ ID NO: 666606 - RNA, 19 nt, Homo sapiens
  misc_RNA (1)...(19): siRNA sense strand
agaacgcgcugguguccua

SEQ ID NO: 666607 - RNA, 19 nt, Homo sapiens
  misc_RNA (1)...(19): siRNA sense strand
ggagguggccgacgugaau

SEQ ID NO: 666608 - RNA, 19 nt, Homo sapiens
  misc_RNA (1)...(19): siRNA sense strand
gaaagugcuggauguaaau

SEQ ID NO: 666609 - RNA, 19 nt, Homo sapiens
  misc_RNA (1)...(19): siRNA sense strand
aaaggcaguugauaaagga

SEQ ID NO: 666610 - RNA, 19 nt, Homo sapiens
  misc_RNA (1)...(19): siRNA sense strand
ggcggucacuucauuguau

SEQ ID NO: 666611 - RNA, 19 nt, Homo sapiens
  misc_RNA (1)...(19): siRNA sense strand
caagugaugaacugaguaa

SEQ ID NO: 666612 - RNA, 19 nt, Homo sapiens
  misc_RNA (1)...(19): siRNA sense strand
uguccaccuucaagaauua

SEQ ID NO: 666613 - RNA, 19 nt, Homo sapiens
  misc_RNA (1)...(19): siRNA sense strand
caaguaaaggcaguugaua

SEQ ID NO: 666614 - RNA, 19 nt, Homo sapiens
  misc_RNA (1)...(19): siRNA sense strand
ccuacgaaauucaaguaaa

SEQ ID NO: 666615 - RNA, 19 nt, Homo sapiens
  misc_RNA (1)...(19): siRNA sense strand
gugauuauuucucuuugga

SEQ ID NO: 666616 - RNA, 19 nt, Homo sapiens
  misc_RNA (1)...(19): siRNA sense strand
caggugacuugcuccuuaa

SEQ ID NO: 666617 - RNA, 19 nt, Homo sapiens
  misc_RNA (1)...(19): siRNA sense strand
ggauguaaaugauaaugcu

SEQ ID NO: 666618 - RNA, 19 nt, Homo sapiens
  misc_RNA (1)...(19): siRNA sense strand
gauuccagcucaggagaaa

SEQ ID NO: 666619 - RNA, 19 nt, Homo sapiens
  misc_RNA (1)...(19): siRNA sense strand
guuagagacuacagcaaau

SEQ ID NO: 666620 - RNA, 19 nt, Homo sapiens
  misc_RNA (1)...(19): siRNA sense strand
gaagucgucuuuuccuuug

SEQ ID NO: 666621 - RNA, 19 nt, Homo sapiens
  misc_RNA (1)...(19): siRNA sense strand
ggugcuaacgcucuucuaa

SEQ ID NO: 666622 - RNA, 19 nt, Homo sapiens
  misc_RNA (1)...(19): siRNA sense strand
ugauaaugcuccagaacug

SEQ ID NO: 666623 - RNA, 19 nt, Homo sapiens
  misc_RNA (1)...(19): siRNA sense strand
cgagugauuauuucucuuu

SEQ ID NO: 666624 - RNA, 19 nt, Homo sapiens
  misc_RNA (1)...(19): siRNA sense strand
gaugucaaaucacuguaag

SEQ ID NO: 666625 - RNA, 19 nt, Homo sapiens
  misc_RNA (1)...(19): siRNA sense strand
agaagaaacaccagaacuu

SEQ ID NO: 666626 - RNA, 19 nt, Homo sapiens
  misc_RNA (1)...(19): siRNA sense strand
gagugauuauuucucuuug

SEQ ID NO: 666627 - RNA, 19 nt, Homo sapiens
  misc_RNA (1)...(19): siRNA sense strand
aguaaaggcaguugauaaa

SEQ ID NO: 666628 - RNA, 19 nt, Homo sapiens
  misc_RNA (1)...(19): siRNA sense strand
agaguccacuuguuagaga

SEQ ID NO: 666629 - RNA, 19 nt, Homo sapiens
  misc_RNA (1)...(19): siRNA sense strand
ggugaaagacauuaacgau

SEQ ID NO: 666630 - RNA, 19 nt, Homo sapiens
  misc_RNA (1)...(19): siRNA sense strand
gcaagugaugaacugagua

SEQ ID NO: 666631 - RNA, 19 nt, Homo sapiens
  misc_RNA (1)...(19): siRNA sense strand
ggcaagugaugaacugagu

SEQ ID NO: 666632 - RNA, 19 nt, Homo sapiens
  misc_RNA (1)...(19): siRNA sense strand
gagguaaaucugcagaaug

SEQ ID NO: 666633 - RNA, 19 nt, Homo sapiens
  misc_RNA (1)...(19): siRNA sense strand
gcggucacuucauuguauu

SEQ ID NO: 666634 - RNA, 19 nt, Homo sapiens
  misc_RNA (1)...(19): siRNA sense strand
gagacuacagcaaauggaa

SEQ ID NO: 666635 - RNA, 19 nt, Homo sapiens
  misc_RNA (1)...(19): siRNA sense strand
ugaccaggccguauacaga

SEQ ID NO: 666636 - RNA, 19 nt, Homo sapiens
  misc_RNA (1)...(19): siRNA sense strand
gagcugcaagguacaguug

SEQ ID NO: 666637 - RNA, 19 nt, Homo sapiens
  misc_RNA (1)...(19): siRNA sense strand
agguaaaucugcagaaugg

SEQ ID NO: 666638 - RNA, 19 nt, Homo sapiens
  misc_RNA (1)...(19): siRNA sense strand
ccaacgggcaggugacuug

SEQ ID NO: 666639 - RNA, 19 nt, Homo sapiens
  misc_RNA (1)...(19): siRNA sense strand
guccuccgaugucaaauca

SEQ ID NO: 666640 - RNA, 19 nt, Homo sapiens
  misc_RNA (1)...(19): siRNA sense strand
aaguaaaggcaguugauaa

SEQ ID NO: 666641 - RNA, 19 nt, Homo sapiens
  misc_RNA (1)...(19): siRNA sense strand
gaauucgcguuuuccgaua

SEQ ID NO: 666642 - RNA, 19 nt, Homo sapiens
  misc_RNA (1)...(19): siRNA sense strand
cccgggaucugcuucuuug

SEQ ID NO: 666643 - RNA, 19 nt, Homo sapiens
  misc_RNA (1)...(19): siRNA sense strand
gauagaaggagcugcugau

SEQ ID NO: 666644 - RNA, 19 nt, Homo sapiens
  misc_RNA (1)...(19): siRNA sense strand
gcucagcccgagugauuau

SEQ ID NO: 666645 - RNA, 19 nt, Homo sapiens
  misc_RNA (1)...(19): siRNA sense strand
acacaguauucgugaagga

SEQ ID NO: 666646 - RNA, 19 nt, Homo sapiens
  misc_RNA (1)...(19): siRNA sense strand
guguccaccuucaagaauu

SEQ ID NO: 666647 - RNA, 19 nt, Homo sapiens
  misc_RNA (1)...(19): siRNA sense strand
gugaaagugcuggauguaa

SEQ ID NO: 666648 - RNA, 19 nt, Homo sapiens
  misc_RNA (1)...(19): siRNA sense strand
uauacagaguccacuuguu

SEQ ID NO: 666649 - RNA, 19 nt, Homo sapiens
  misc_RNA (1)...(19): siRNA sense strand
gagaagaaacaccagaacu

SEQ ID NO: 666650 - RNA, 19 nt, Homo sapiens
  misc_RNA (1)...(19): siRNA sense strand
guacacaguauucgugaag

SEQ ID NO: 666651 - RNA, 19 nt, Homo sapiens
  misc_RNA (1)...(19): siRNA sense strand
ggcagagaacaaauaauau

SEQ ID NO: 666652 - RNA, 19 nt, Homo sapiens
  misc_RNA (1)...(19): siRNA sense strand
ggugaaagugcuggaugua

SEQ ID NO: 666653 - RNA, 19 nt, Homo sapiens
  misc_RNA (1)...(19): siRNA sense strand
ugguauuucucgugacauu

SEQ ID NO: 666654 - RNA, 19 nt, Homo sapiens
  misc_RNA (1)...(19): siRNA sense strand
caaacacggcaccuucguu

SEQ ID NO: 666655 - RNA, 19 nt, Homo sapiens
  misc_RNA (1)...(19): siRNA sense strand
ucaagaauuacuacucguu

SEQ ID NO: 666656 - RNA, 19 nt, Homo sapiens
  misc_RNA (1)...(19): siRNA sense strand
gaaggugaaagacauuaac

SEQ ID NO: 666657 - RNA, 19 nt, Homo sapiens
  misc_RNA (1)...(19): siRNA sense strand
gaacuggcggucacuucau

SEQ ID NO: 666658 - RNA, 19 nt, Homo sapiens
  misc_RNA (1)...(19): siRNA sense strand
aaaugauaaugcuccagaa

SEQ ID NO: 666659 - RNA, 19 nt, Homo sapiens
  misc_RNA (1)...(19): siRNA sense strand
ugaaggugaaagacauuaa

SEQ ID NO: 666660 - RNA, 19 nt, Homo sapiens
  misc_RNA (1)...(19): siRNA sense strand
gcagcccgaguacacagua

SEQ ID NO: 666661 - RNA, 19 nt, Homo sapiens
  misc_RNA (1)...(19): siRNA sense strand
gugacuugcuccuuaaugc

SEQ ID NO: 666662 - RNA, 19 nt, Homo sapiens
  misc_RNA (1)...(19): siRNA sense strand
cgaugucaaaucacuguaa

SEQ ID NO: 666663 - RNA, 19 nt, Homo sapiens
  misc_RNA (1)...(19): siRNA sense strand
guauuucucgugacauuca

SEQ ID NO: 666664 - RNA, 19 nt, Homo sapiens
  misc_RNA (1)...(19): siRNA sense strand
gacaggccgcugcagguuu

SEQ ID NO: 666665 - RNA, 19 nt, Homo sapiens
  misc_RNA (1)...(19): siRNA sense strand
aaaccggagcugcaaggua

SEQ ID NO: 666666 - RNA, 19 nt, Homo sapiens
  misc_RNA (1)...(19): siRNA sense strand
augcagacauuggugcuaa

SEQ ID NO: 666667 - RNA, 19 nt, Homo sapiens
  misc_RNA (1)...(19): siRNA sense strand
gugcuggauguaaaugaua

SEQ ID NO: 666668 - RNA, 19 nt, Homo sapiens
  misc_RNA (1)...(19): siRNA sense strand
guaaaggcaguugauaaag

SEQ ID NO: 666669 - RNA, 19 nt, Homo sapiens
  misc_RNA (1)...(19): siRNA sense strand
ucaggagaaauuagguuaa

SEQ ID NO: 666670 - RNA, 19 nt, Homo sapiens
  misc_RNA (1)...(19): siRNA sense strand
cauuagugaccacauuaaa

SEQ ID NO: 666671 - RNA, 19 nt, Homo sapiens
  misc_RNA (1)...(19): siRNA sense strand
aacauuagugaccacauua

SEQ ID NO: 666672 - RNA, 19 nt, Homo sapiens
  misc_RNA (1)...(19): siRNA sense strand
ggauguagaggcaagugau

SEQ ID NO: 666673 - RNA, 19 nt, Homo sapiens
  misc_RNA (1)...(19): siRNA sense strand
caguauucgugaaggagaa

SEQ ID NO: 666674 - RNA, 19 nt, Homo sapiens
  misc_RNA (1)...(19): siRNA sense strand
gauaauccacccgucuuca

SEQ ID NO: 666675 - RNA, 19 nt, Homo sapiens
  misc_RNA (1)...(19): siRNA sense strand
gaggugaaggugaaagaca

SEQ ID NO: 666676 - RNA, 19 nt, Homo sapiens
  misc_RNA (1)...(19): siRNA sense strand
uguuagagacuacagcaaa

SEQ ID NO: 666677 - RNA, 19 nt, Homo sapiens
  misc_RNA (1)...(19): siRNA sense strand
gugaaggugaaagacauua

SEQ ID NO: 666678 - RNA, 19 nt, Homo sapiens
  misc_RNA (1)...(19): siRNA sense strand
agaggcaagugaugaacug

SEQ ID NO: 666679 - RNA, 19 nt, Homo sapiens
  misc_RNA (1)...(19): siRNA sense strand
ucucgugacauucaagaaa

SEQ ID NO: 666680 - RNA, 19 nt, Homo sapiens
  misc_RNA (1)...(19): siRNA sense strand
uguauuugccuaucagaga

SEQ ID NO: 666681 - RNA, 19 nt, Homo sapiens
  misc_RNA (1)...(19): siRNA sense strand
ggaaguccuccgaugucaa

SEQ ID NO: 666682 - RNA, 19 nt, Homo sapiens
  misc_RNA (1)...(19): siRNA sense strand
gaacuucacuuauuacuga

SEQ ID NO: 666683 - RNA, 19 nt, Homo sapiens
  misc_RNA (1)...(19): siRNA sense strand
gcaggugacuugcuccuua

SEQ ID NO: 666684 - RNA, 19 nt, Homo sapiens
  misc_RNA (1)...(19): siRNA sense strand
gaacauuagugaccacauu

SEQ ID NO: 666685 - RNA, 19 nt, Homo sapiens
  misc_RNA (1)...(19): siRNA sense strand
ucaaaucacuguaagguuu

SEQ ID NO: 666686 - RNA, 19 nt, Homo sapiens
  misc_RNA (1)...(19): siRNA sense strand
gggcagagaacaaauaaua

SEQ ID NO: 666687 - RNA, 19 nt, Homo sapiens
  misc_RNA (1)...(19): siRNA sense strand
caccagaacuucacuuauu

SEQ ID NO: 666688 - RNA, 19 nt, Homo sapiens
  misc_RNA (1)...(19): siRNA sense strand
gaacugaguaaaucucuuu

SEQ ID NO: 666689 - RNA, 19 nt, Homo sapiens
  misc_RNA (1)...(19): siRNA sense strand
guaaaucucuuuggcuuga

SEQ ID NO: 666690 - RNA, 19 nt, Homo sapiens
  misc_RNA (1)...(19): siRNA sense strand
ugaaagugcuggauguaaa

SEQ ID NO: 666691 - RNA, 19 nt, Homo sapiens
  misc_RNA (1)...(19): siRNA sense strand
gaaucuagacuccugaauu

SEQ ID NO: 666692 - RNA, 19 nt, Homo sapiens
  misc_RNA (1)...(19): siRNA sense strand
auacagaguccacuuguua

SEQ ID NO: 666693 - RNA, 19 nt, Homo sapiens
  misc_RNA (1)...(19): siRNA sense strand
cuaacgcucuucuaacgua

SEQ ID NO: 666694 - RNA, 19 nt, Homo sapiens
  misc_RNA (1)...(19): siRNA sense strand
gaaguccuccgaugucaaa

SEQ ID NO: 666695 - RNA, 19 nt, Homo sapiens
  misc_RNA (1)...(19): siRNA sense strand
gaaacaaaauccuacgaaa

SEQ ID NO: 666696 - RNA, 19 nt, Homo sapiens
  misc_RNA (1)...(19): siRNA sense strand
ggagguaaaucugcagaau

SEQ ID NO: 666697 - RNA, 19 nt, Homo sapiens
  misc_RNA (1)...(19): siRNA sense strand
aaucuagacuccugaauuc

SEQ ID NO: 666698 - RNA, 19 nt, Homo sapiens
  misc_RNA (1)...(19): siRNA sense strand
agaaggagcugcugaugca

SEQ ID NO: 666699 - RNA, 19 nt, Homo sapiens
  misc_RNA (1)...(19): siRNA sense strand
accagaacuucacuuauua

SEQ ID NO: 666700 - RNA, 19 nt, Homo sapiens
  misc_RNA (1)...(19): siRNA sense strand
gugaugaacugaguaaauc

SEQ ID NO: 666701 - RNA, 19 nt, Homo sapiens
  misc_RNA (1)...(19): siRNA sense strand
ugacgaagguguaaauggu

SEQ ID NO: 666702 - RNA, 19 nt, Homo sapiens
  misc_RNA (1)...(19): siRNA sense strand
gugaaagacauuaacgaua

SEQ ID NO: 666703 - RNA, 19 nt, Homo sapiens
  misc_RNA (1)...(19): siRNA sense strand
uaaaggcaguugauaaagg

SEQ ID NO: 666704 - RNA, 19 nt, Homo sapiens
  misc_RNA (1)...(19): siRNA sense strand
gcgagagccugucggucua

SEQ ID NO: 666705 - RNA, 19 nt, Homo sapiens
  misc_RNA (1)...(19): siRNA sense strand
cuacgaaauucaaguaaag

SEQ ID NO: 666706 - RNA, 19 nt, Homo sapiens
  misc_RNA (1)...(19): siRNA sense strand
agaacgcgcugguguccua

SEQ ID NO: 666707 - RNA, 19 nt, Homo sapiens
  misc_RNA (1)...(19): siRNA sense strand
ggagguggccgacgugaau

SEQ ID NO: 666708 - RNA, 19 nt, Homo sapiens
  misc_RNA (1)...(19): siRNA sense strand
gaaagugcuggauguaaau

SEQ ID NO: 666709 - RNA, 19 nt, Homo sapiens
  misc_RNA (1)...(19): siRNA sense strand
aaaggcaguugauaaagga

SEQ ID NO: 666710 - RNA, 19 nt, Homo sapiens
  misc_RNA (1)...(19): siRNA sense strand
ggcggucacuucauuguau

SEQ ID NO: 666711 - RNA, 19 nt, Homo sapiens
  misc_RNA (1)...(19): siRNA sense strand
caagugaugaacugaguaa

SEQ ID NO: 666712 - RNA, 19 nt, Homo sapiens
  misc_RNA (1)...(19): siRNA sense strand
uguccaccuucaagaauua

SEQ ID NO: 666713 - RNA, 19 nt, Homo sapiens
  misc_RNA (1)...(19): siRNA sense strand
caaguaaaggcaguugaua

SEQ ID NO: 666714 - RNA, 19 nt, Homo sapiens
  misc_RNA (1)...(19): siRNA sense strand
ccuacgaaauucaaguaaa

SEQ ID NO: 666715 - RNA, 19 nt, Homo sapiens
  misc_RNA (1)...(19): siRNA sense strand
gugauuauuucucuuugga

SEQ ID NO: 666716 - RNA, 19 nt, Homo sapiens
  misc_RNA (1)...(19): siRNA sense strand
caggugacuugcuccuuaa

SEQ ID NO: 666717 - RNA, 19 nt, Homo sapiens
  misc_RNA (1)...(19): siRNA sense strand
ggauguaaaugauaaugcu

SEQ ID NO: 666718 - RNA, 19 nt, Homo sapiens
  misc_RNA (1)...(19): siRNA sense strand
gauuccagcucaggagaaa

SEQ ID NO: 666719 - RNA, 19 nt, Homo sapiens
  misc_RNA (1)...(19): siRNA sense strand
guuagagacuacagcaaau

SEQ ID NO: 666720 - RNA, 19 nt, Homo sapiens
  misc_RNA (1)...(19): siRNA sense strand
gaagucgucuuuuccuuug

SEQ ID NO: 666721 - RNA, 19 nt, Homo sapiens
  misc_RNA (1)...(19): siRNA sense strand
ggugcuaacgcucuucuaa

SEQ ID NO: 666722 - RNA, 19 nt, Homo sapiens
  misc_RNA (1)...(19): siRNA sense strand
ugauaaugcuccagaacug

SEQ ID NO: 666723 - RNA, 19 nt, Homo sapiens
  misc_RNA (1)...(19): siRNA sense strand
cgagugauuauuucucuuu

SEQ ID NO: 666724 - RNA, 19 nt, Homo sapiens
  misc_RNA (1)...(19): siRNA sense strand
gaugucaaaucacuguaag

SEQ ID NO: 666725 - RNA, 19 nt, Homo sapiens
  misc_RNA (1)...(19): siRNA sense strand
agaagaaacaccagaacuu

SEQ ID NO: 666726 - RNA, 19 nt, Homo sapiens
  misc_RNA (1)...(19): siRNA sense strand
gagugauuauuucucuuug

SEQ ID NO: 666727 - RNA, 19 nt, Homo sapiens
  misc_RNA (1)...(19): siRNA sense strand
aguaaaggcaguugauaaa

SEQ ID NO: 666728 - RNA, 19 nt, Homo sapiens
  misc_RNA (1)...(19): siRNA sense strand
agaguccacuuguuagaga

SEQ ID NO: 666729 - RNA, 19 nt, Homo sapiens
  misc_RNA (1)...(19): siRNA sense strand
ggugaaagacauuaacgau

SEQ ID NO: 666730 - RNA, 19 nt, Homo sapiens
  misc_RNA (1)...(19): siRNA sense strand
gcaagugaugaacugagua

SEQ ID NO: 666731 - RNA, 19 nt, Homo sapiens
  misc_RNA (1)...(19): siRNA sense strand
ggcaagugaugaacugagu

SEQ ID NO: 666732 - RNA, 19 nt, Homo sapiens
  misc_RNA (1)...(19): siRNA sense strand
gagguaaaucugcagaaug

SEQ ID NO: 666733 - RNA, 19 nt, Homo sapiens
  misc_RNA (1)...(19): siRNA sense strand
gcggucacuucauuguauu

SEQ ID NO: 666734 - RNA, 19 nt, Homo sapiens
  misc_RNA (1)...(19): siRNA sense strand
gagacuacagcaaauggaa

SEQ ID NO: 666735 - RNA, 19 nt, Homo sapiens
  misc_RNA (1)...(19): siRNA sense strand
ugaccaggccguauacaga

SEQ ID NO: 666736 - RNA, 19 nt, Homo sapiens
  misc_RNA (1)...(19): siRNA sense strand
gagcugcaagguacaguug

SEQ ID NO: 666737 - RNA, 19 nt, Homo sapiens
  misc_RNA (1)...(19): siRNA sense strand
agguaaaucugcagaaugg

SEQ ID NO: 666738 - RNA, 19 nt, Homo sapiens
  misc_RNA (1)...(19): siRNA sense strand
ccaacgggcaggugacuug

SEQ ID NO: 666739 - RNA, 19 nt, Homo sapiens
  misc_RNA (1)...(19): siRNA sense strand
guccuccgaugucaaauca

SEQ ID NO: 666740 - RNA, 19 nt, Homo sapiens
  misc_RNA (1)...(19): siRNA sense strand
aaguaaaggcaguugauaa

SEQ ID NO: 666741 - RNA, 19 nt, Homo sapiens
  misc_RNA (1)...(19): siRNA sense strand
gaauucgcguuuuccgaua

SEQ ID NO: 666742 - RNA, 19 nt, Homo sapiens
  misc_RNA (1)...(19): siRNA sense strand
cccgggaucugcuucuuug

SEQ ID NO: 666743 - RNA, 19 nt, Homo sapiens
  misc_RNA (1)...(19): siRNA sense strand
gauagaaggagcugcugau

SEQ ID NO: 666744 - RNA, 19 nt, Homo sapiens
  misc_RNA (1)...(19): siRNA sense strand
gcucagcccgagugauuau

SEQ ID NO: 666745 - RNA, 19 nt, Homo sapiens
  misc_RNA (1)...(19): siRNA sense strand
acacaguauucgugaagga

SEQ ID NO: 666746 - RNA, 19 nt, Homo sapiens
  misc_RNA (1)...(19): siRNA sense strand
guguccaccuucaagaauu

SEQ ID NO: 666747 - RNA, 19 nt, Homo sapiens
  misc_RNA (1)...(19): siRNA sense strand
gugaaagugcuggauguaa

SEQ ID NO: 666748 - RNA, 19 nt, Homo sapiens
  misc_RNA (1)...(19): siRNA sense strand
uauacagaguccacuuguu

SEQ ID NO: 666749 - RNA, 19 nt, Homo sapiens
  misc_RNA (1)...(19): siRNA sense strand
gagaagaaacaccagaacu

SEQ ID NO: 666750 - RNA, 19 nt, Homo sapiens
  misc_RNA (1)...(19): siRNA sense strand
guacacaguauucgugaag

SEQ ID NO: 666751 - RNA, 19 nt, Homo sapiens
  misc_RNA (1)...(19): siRNA sense strand
ggcagagaacaaauaauau

SEQ ID NO: 666752 - RNA, 19 nt, Homo sapiens
  misc_RNA (1)...(19): siRNA sense strand
ggugaaagugcuggaugua

SEQ ID NO: 666753 - RNA, 19 nt, Homo sapiens
  misc_RNA (1)...(19): siRNA sense strand
ugguauuucucgugacauu

SEQ ID NO: 666754 - RNA, 19 nt, Homo sapiens
  misc_RNA (1)...(19): siRNA sense strand
caaacacggcaccuucguu

SEQ ID NO: 666755 - RNA, 19 nt, Homo sapiens
  misc_RNA (1)...(19): siRNA sense strand
ucaagaauuacuacucguu

SEQ ID NO: 666756 - RNA, 19 nt, Homo sapiens
  misc_RNA (1)...(19): siRNA sense strand
gaaggugaaagacauuaac

SEQ ID NO: 666757 - RNA, 19 nt, Homo sapiens
  misc_RNA (1)...(19): siRNA sense strand
gaacuggcggucacuucau

SEQ ID NO: 666758 - RNA, 19 nt, Homo sapiens
  misc_RNA (1)...(19): siRNA sense strand
aaaugauaaugcuccagaa

SEQ ID NO: 666759 - RNA, 19 nt, Homo sapiens
  misc_RNA (1)...(19): siRNA sense strand
ugaaggugaaagacauuaa

SEQ ID NO: 666760 - RNA, 19 nt, Homo sapiens
  misc_RNA (1)...(19): siRNA sense strand
gcagcccgaguacacagua

SEQ ID NO: 666761 - RNA, 19 nt, Homo sapiens
  misc_RNA (1)...(19): siRNA sense strand
gugacuugcuccuuaaugc

SEQ ID NO: 666762 - RNA, 19 nt, Homo sapiens
  misc_RNA (1)...(19): siRNA sense strand
cgaugucaaaucacuguaa

SEQ ID NO: 666763 - RNA, 19 nt, Homo sapiens
  misc_RNA (1)...(19): siRNA sense strand
guauuucucgugacauuca

SEQ ID NO: 666764 - RNA, 19 nt, Homo sapiens
  misc_RNA (1)...(19): siRNA sense strand
gacaggccgcugcagguuu

SEQ ID NO: 666765 - RNA, 19 nt, Homo sapiens
  misc_RNA (1)...(19): siRNA sense strand
aaaccggagcugcaaggua

SEQ ID NO: 666766 - RNA, 19 nt, Homo sapiens
  misc_RNA (1)...(19): siRNA sense strand
augcagacauuggugcuaa

SEQ ID NO: 666767 - RNA, 19 nt, Homo sapiens
  misc_RNA (1)...(19): siRNA sense strand
gugcuggauguaaaugaua

SEQ ID NO: 666768 - RNA, 19 nt, Homo sapiens
  misc_RNA (1)...(19): siRNA sense strand
guaaaggcaguugauaaag

SEQ ID NO: 666769 - RNA, 19 nt, Homo sapiens
  misc_RNA (1)...(19): siRNA sense strand
ucaggagaaauuagguuaa

SEQ ID NO: 666770 - RNA, 19 nt, Homo sapiens
  misc_RNA (1)...(19): siRNA sense strand
cauuagugaccacauuaaa

SEQ ID NO: 666771 - RNA, 19 nt, Homo sapiens
  misc_RNA (1)...(19): siRNA sense strand
aacauuagugaccacauua

SEQ ID NO: 666772 - RNA, 19 nt, Homo sapiens
  misc_RNA (1)...(19): siRNA sense strand
ggauguagaggcaagugau

SEQ ID NO: 666773 - RNA, 19 nt, Homo sapiens
  misc_RNA (1)...(19): siRNA sense strand
caguauucgugaaggagaa

SEQ ID NO: 666774 - RNA, 19 nt, Homo sapiens
  misc_RNA (1)...(19): siRNA sense strand
gauaauccacccgucuuca

SEQ ID NO: 666775 - RNA, 19 nt, Homo sapiens
  misc_RNA (1)...(19): siRNA sense strand
gaggugaaggugaaagaca

SEQ ID NO: 666776 - RNA, 19 nt, Homo sapiens
  misc_RNA (1)...(19): siRNA sense strand
uguuagagacuacagcaaa

SEQ ID NO: 666777 - RNA, 19 nt, Homo sapiens
  misc_RNA (1)...(19): siRNA sense strand
gugaaggugaaagacauua

SEQ ID NO: 666778 - RNA, 19 nt, Homo sapiens
  misc_RNA (1)...(19): siRNA sense strand
agaggcaagugaugaacug

SEQ ID NO: 666779 - RNA, 19 nt, Homo sapiens
  misc_RNA (1)...(19): siRNA sense strand
ucucgugacauucaagaaa

SEQ ID NO: 666780 - RNA, 19 nt, Homo sapiens
  misc_RNA (1)...(19): siRNA sense strand
uguauuugccuaucagaga

SEQ ID NO: 666781 - RNA, 19 nt, Homo sapiens
  misc_RNA (1)...(19): siRNA sense strand
ggaaguccuccgaugucaa

SEQ ID NO: 666782 - RNA, 19 nt, Homo sapiens
  misc_RNA (1)...(19): siRNA sense strand
gaacuucacuuauuacuga

SEQ ID NO: 666783 - RNA, 19 nt, Homo sapiens
  misc_RNA (1)...(19): siRNA sense strand
gcaggugacuugcuccuua

SEQ ID NO: 666784 - RNA, 19 nt, Homo sapiens
  misc_RNA (1)...(19): siRNA sense strand
gaacauuagugaccacauu

SEQ ID NO: 666785 - RNA, 19 nt, Homo sapiens
  misc_RNA (1)...(19): siRNA sense strand
ucaaaucacuguaagguuu

SEQ ID NO: 666786 - RNA, 19 nt, Homo sapiens
  misc_RNA (1)...(19): siRNA sense strand
gggcagagaacaaauaaua

SEQ ID NO: 666787 - RNA, 19 nt, Homo sapiens
  misc_RNA (1)...(19): siRNA sense strand
caccagaacuucacuuauu

SEQ ID NO: 666788 - RNA, 19 nt, Homo sapiens
  misc_RNA (1)...(19): siRNA sense strand
gaacugaguaaaucucuuu

SEQ ID NO: 666789 - RNA, 19 nt, Homo sapiens
  misc_RNA (1)...(19): siRNA sense strand
guaaaucucuuuggcuuga

SEQ ID NO: 666790 - RNA, 19 nt, Homo sapiens
  misc_RNA (1)...(19): siRNA sense strand
ugaaagugcuggauguaaa

SEQ ID NO: 666791 - RNA, 19 nt, Homo sapiens
  misc_RNA (1)...(19): siRNA sense strand
gaaucuagacuccugaauu

SEQ ID NO: 666792 - RNA, 19 nt, Homo sapiens
  misc_RNA (1)...(19): siRNA sense strand
auacagaguccacuuguua

SEQ ID NO: 666793 - RNA, 19 nt, Homo sapiens
  misc_RNA (1)...(19): siRNA sense strand
cuaacgcucuucuaacgua

SEQ ID NO: 666794 - RNA, 19 nt, Homo sapiens
  misc_RNA (1)...(19): siRNA sense strand
gaaguccuccgaugucaaa

SEQ ID NO: 666795 - RNA, 19 nt, Homo sapiens
  misc_RNA (1)...(19): siRNA sense strand
gaaacaaaauccuacgaaa

SEQ ID NO: 666796 - RNA, 19 nt, Homo sapiens
  misc_RNA (1)...(19): siRNA sense strand
ggagguaaaucugcagaau

SEQ ID NO: 666797 - RNA, 19 nt, Homo sapiens
  misc_RNA (1)...(19): siRNA sense strand
aaucuagacuccugaauuc

SEQ ID NO: 666798 - RNA, 19 nt, Homo sapiens
  misc_RNA (1)...(19): siRNA sense strand
agaaggagcugcugaugca

SEQ ID NO: 666799 - RNA, 19 nt, Homo sapiens
  misc_RNA (1)...(19): siRNA sense strand
accagaacuucacuuauua

SEQ ID NO: 666800 - RNA, 19 nt, Homo sapiens
  misc_RNA (1)...(19): siRNA sense strand
gugaugaacugaguaaauc

SEQ ID NO: 666801 - RNA, 19 nt, Homo sapiens
  misc_RNA (1)...(19): siRNA sense strand
ugacgaagguguaaauggu

SEQ ID NO: 666802 - RNA, 19 nt, Homo sapiens
  misc_RNA (1)...(19): siRNA sense strand
gugaaagacauuaacgaua

SEQ ID NO: 666803 - RNA, 19 nt, Homo sapiens
  misc_RNA (1)...(19): siRNA sense strand
uaaaggcaguugauaaagg

SEQ ID NO: 666804 - RNA, 19 nt, Homo sapiens
  misc_RNA (1)...(19): siRNA sense strand
gcgagagccugucggucua

SEQ ID NO: 666805 - RNA, 19 nt, Homo sapiens
  misc_RNA (1)...(19): siRNA sense strand
cuacgaaauucaaguaaag

SEQ ID NO: 666806 - RNA, 19 nt, Homo sapiens
  misc_RNA (1)...(19): siRNA sense strand
agaacgcgcugguguccua

SEQ ID NO: 666807 - RNA, 19 nt, Homo sapiens
  misc_RNA (1)...(19): siRNA sense strand
ggagguggccgacgugaau

SEQ ID NO: 666808 - RNA, 19 nt, Homo sapiens
  misc_RNA (1)...(19): siRNA sense strand
gaaagugcuggauguaaau

SEQ ID NO: 666809 - RNA, 19 nt, Homo sapiens
  misc_RNA (1)...(19): siRNA sense strand
aaaggcaguugauaaagga

SEQ ID NO: 666810 - RNA, 19 nt, Homo sapiens
  misc_RNA (1)...(19): siRNA sense strand
ggcggucacuucauuguau

SEQ ID NO: 666811 - RNA, 19 nt, Homo sapiens
  misc_RNA (1)...(19): siRNA sense strand
caagugaugaacugaguaa

SEQ ID NO: 666812 - RNA, 19 nt, Homo sapiens
  misc_RNA (1)...(19): siRNA sense strand
uguccaccuucaagaauua

SEQ ID NO: 666813 - RNA, 19 nt, Homo sapiens
  misc_RNA (1)...(19): siRNA sense strand
caaguaaaggcaguugaua

SEQ ID NO: 666814 - RNA, 19 nt, Homo sapiens
  misc_RNA (1)...(19): siRNA sense strand
ccuacgaaauucaaguaaa

SEQ ID NO: 666815 - RNA, 19 nt, Homo sapiens
  misc_RNA (1)...(19): siRNA sense strand
gugauuauuucucuuugga

SEQ ID NO: 666816 - RNA, 19 nt, Homo sapiens
  misc_RNA (1)...(19): siRNA sense strand
caggugacuugcuccuuaa

SEQ ID NO: 666817 - RNA, 19 nt, Homo sapiens
  misc_RNA (1)...(19): siRNA sense strand
ggauguaaaugauaaugcu

SEQ ID NO: 666818 - RNA, 19 nt, Homo sapiens
  misc_RNA (1)...(19): siRNA sense strand
gauuccagcucaggagaaa

SEQ ID NO: 666819 - RNA, 19 nt, Homo sapiens
  misc_RNA (1)...(19): siRNA sense strand
guuagagacuacagcaaau

SEQ ID NO: 666820 - RNA, 19 nt, Homo sapiens
  misc_RNA (1)...(19): siRNA sense strand
gaagucgucuuuuccuuug

SEQ ID NO: 666821 - RNA, 19 nt, Homo sapiens
  misc_RNA (1)...(19): siRNA sense strand
ggugcuaacgcucuucuaa

SEQ ID NO: 666822 - RNA, 19 nt, Homo sapiens
  misc_RNA (1)...(19): siRNA sense strand
ugauaaugcuccagaacug

SEQ ID NO: 666823 - RNA, 19 nt, Homo sapiens
  misc_RNA (1)...(19): siRNA sense strand
cgagugauuauuucucuuu

SEQ ID NO: 666824 - RNA, 19 nt, Homo sapiens
  misc_RNA (1)...(19): siRNA sense strand
gaugucaaaucacuguaag

SEQ ID NO: 666825 - RNA, 19 nt, Homo sapiens
  misc_RNA (1)...(19): siRNA sense strand
agaagaaacaccagaacuu

SEQ ID NO: 666826 - RNA, 19 nt, Homo sapiens
  misc_RNA (1)...(19): siRNA sense strand
gagugauuauuucucuuug

SEQ ID NO: 666827 - RNA, 19 nt, Homo sapiens
  misc_RNA (1)...(19): siRNA sense strand
aguaaaggcaguugauaaa

SEQ ID NO: 666828 - RNA, 19 nt, Homo sapiens
  misc_RNA (1)...(19): siRNA sense strand
agaguccacuuguuagaga

SEQ ID NO: 666829 - RNA, 19 nt, Homo sapiens
  misc_RNA (1)...(19): siRNA sense strand
ggugaaagacauuaacgau

SEQ ID NO: 666830 - RNA, 19 nt, Homo sapiens
  misc_RNA (1)...(19): siRNA sense strand
gcaagugaugaacugagua

SEQ ID NO: 666831 - RNA, 19 nt, Homo sapiens
  misc_RNA (1)...(19): siRNA sense strand
ggcaagugaugaacugagu

SEQ ID NO: 666832 - RNA, 19 nt, Homo sapiens
  misc_RNA (1)...(19): siRNA sense strand
gagguaaaucugcagaaug

SEQ ID NO: 666833 - RNA, 19 nt, Homo sapiens
  misc_RNA (1)...(19): siRNA sense strand
gcggucacuucauuguauu

SEQ ID NO: 666834 - RNA, 19 nt, Homo sapiens
  misc_RNA (1)...(19): siRNA sense strand
gagacuacagcaaauggaa

SEQ ID NO: 666835 - RNA, 19 nt, Homo sapiens
  misc_RNA (1)...(19): siRNA sense strand
ugaccaggccguauacaga

SEQ ID NO: 666836 - RNA, 19 nt, Homo sapiens
  misc_RNA (1)...(19): siRNA sense strand
gagcugcaagguacaguug

SEQ ID NO: 666837 - RNA, 19 nt, Homo sapiens
  misc_RNA (1)...(19): siRNA sense strand
agguaaaucugcagaaugg

SEQ ID NO: 666838 - RNA, 19 nt, Homo sapiens
  misc_RNA (1)...(19): siRNA sense strand
ccaacgggcaggugacuug

SEQ ID NO: 666839 - RNA, 19 nt, Homo sapiens
  misc_RNA (1)...(19): siRNA sense strand
guccuccgaugucaaauca

SEQ ID NO: 666840 - RNA, 19 nt, Homo sapiens
  misc_RNA (1)...(19): siRNA sense strand
aaguaaaggcaguugauaa

SEQ ID NO: 666841 - RNA, 19 nt, Homo sapiens
  misc_RNA (1)...(19): siRNA sense strand
gaauucgcguuuuccgaua

SEQ ID NO: 666842 - RNA, 19 nt, Homo sapiens
  misc_RNA (1)...(19): siRNA sense strand
cccgggaucugcuucuuug

SEQ ID NO: 666843 - RNA, 19 nt, Homo sapiens
  misc_RNA (1)...(19): siRNA sense strand
gauagaaggagcugcugau

SEQ ID NO: 666844 - RNA, 19 nt, Homo sapiens
  misc_RNA (1)...(19): siRNA sense strand
gcucagcccgagugauuau

SEQ ID NO: 666845 - RNA, 19 nt, Homo sapiens
  misc_RNA (1)...(19): siRNA sense strand
acacaguauucgugaagga

SEQ ID NO: 666846 - RNA, 19 nt, Homo sapiens
  misc_RNA (1)...(19): siRNA sense strand
guguccaccuucaagaauu

SEQ ID NO: 666847 - RNA, 19 nt, Homo sapiens
  misc_RNA (1)...(19): siRNA sense strand
gugaaagugcuggauguaa

SEQ ID NO: 666848 - RNA, 19 nt, Homo sapiens
  misc_RNA (1)...(19): siRNA sense strand
uauacagaguccacuuguu

SEQ ID NO: 666849 - RNA, 19 nt, Homo sapiens
  misc_RNA (1)...(19): siRNA sense strand
gagaagaaacaccagaacu

SEQ ID NO: 666850 - RNA, 19 nt, Homo sapiens
  misc_RNA (1)...(19): siRNA sense strand
guacacaguauucgugaag

SEQ ID NO: 666851 - RNA, 19 nt, Homo sapiens
  misc_RNA (1)...(19): siRNA sense strand
ggcagagaacaaauaauau

SEQ ID NO: 666852 - RNA, 19 nt, Homo sapiens
  misc_RNA (1)...(19): siRNA sense strand
ggugaaagugcuggaugua

SEQ ID NO: 666853 - RNA, 19 nt, Homo sapiens
  misc_RNA (1)...(19): siRNA sense strand
ugguauuucucgugacauu

SEQ ID NO: 666854 - RNA, 19 nt, Homo sapiens
  misc_RNA (1)...(19): siRNA sense strand
caaacacggcaccuucguu

SEQ ID NO: 666855 - RNA, 19 nt, Homo sapiens
  misc_RNA (1)...(19): siRNA sense strand
ucaagaauuacuacucguu

SEQ ID NO: 666856 - RNA, 19 nt, Homo sapiens
  misc_RNA (1)...(19): siRNA sense strand
gaaggugaaagacauuaac

SEQ ID NO: 666857 - RNA, 19 nt, Homo sapiens
  misc_RNA (1)...(19): siRNA sense strand
gaacuggcggucacuucau

SEQ ID NO: 666858 - RNA, 19 nt, Homo sapiens
  misc_RNA (1)...(19): siRNA sense strand
aaaugauaaugcuccagaa

SEQ ID NO: 666859 - RNA, 19 nt, Homo sapiens
  misc_RNA (1)...(19): siRNA sense strand
ugaaggugaaagacauuaa

SEQ ID NO: 666860 - RNA, 19 nt, Homo sapiens
  misc_RNA (1)...(19): siRNA sense strand
gcagcccgaguacacagua

SEQ ID NO: 666861 - RNA, 19 nt, Homo sapiens
  misc_RNA (1)...(19): siRNA sense strand
gugacuugcuccuuaaugc

SEQ ID NO: 666862 - RNA, 19 nt, Homo sapiens
  misc_RNA (1)...(19): siRNA sense strand
cgaugucaaaucacuguaa

SEQ ID NO: 666863 - RNA, 19 nt, Homo sapiens
  misc_RNA (1)...(19): siRNA sense strand
guauuucucgugacauuca

SEQ ID NO: 666864 - RNA, 19 nt, Homo sapiens
  misc_RNA (1)...(19): siRNA sense strand
gacaggccgcugcagguuu

SEQ ID NO: 666865 - RNA, 19 nt, Homo sapiens
  misc_RNA (1)...(19): siRNA sense strand
aaaccggagcugcaaggua

SEQ ID NO: 666866 - RNA, 19 nt, Homo sapiens
  misc_RNA (1)...(19): siRNA sense strand
augcagacauuggugcuaa

SEQ ID NO: 666867 - RNA, 19 nt, Homo sapiens
  misc_RNA (1)...(19): siRNA sense strand
gugcuggauguaaaugaua

SEQ ID NO: 666868 - RNA, 19 nt, Homo sapiens
  misc_RNA (1)...(19): siRNA sense strand
guaaaggcaguugauaaag

SEQ ID NO: 666869 - RNA, 19 nt, Homo sapiens
  misc_RNA (1)...(19): siRNA sense strand
ucaggagaaauuagguuaa

SEQ ID NO: 666870 - RNA, 19 nt, Homo sapiens
  misc_RNA (1)...(19): siRNA sense strand
cauuagugaccacauuaaa

SEQ ID NO: 666871 - RNA, 19 nt, Homo sapiens
  misc_RNA (1)...(19): siRNA sense strand
aacauuagugaccacauua

SEQ ID NO: 666872 - RNA, 19 nt, Homo sapiens
  misc_RNA (1)...(19): siRNA sense strand
ggauguagaggcaagugau

SEQ ID NO: 666873 - RNA, 19 nt, Homo sapiens
  misc_RNA (1)...(19): siRNA sense strand
caguauucgugaaggagaa

SEQ ID NO: 666874 - RNA, 19 nt, Homo sapiens
  misc_RNA (1)...(19): siRNA sense strand
gauaauccacccgucuuca

SEQ ID NO: 666875 - RNA, 19 nt, Homo sapiens
  misc_RNA (1)...(19): siRNA sense strand
gaggugaaggugaaagaca

SEQ ID NO: 666876 - RNA, 19 nt, Homo sapiens
  misc_RNA (1)...(19): siRNA sense strand
uguuagagacuacagcaaa

SEQ ID NO: 666877 - RNA, 19 nt, Homo sapiens
  misc_RNA (1)...(19): siRNA sense strand
gugaaggugaaagacauua

SEQ ID NO: 666878 - RNA, 19 nt, Homo sapiens
  misc_RNA (1)...(19): siRNA sense strand
agaggcaagugaugaacug

SEQ ID NO: 666879 - RNA, 19 nt, Homo sapiens
  misc_RNA (1)...(19): siRNA sense strand
ucucgugacauucaagaaa

SEQ ID NO: 666880 - RNA, 19 nt, Homo sapiens
  misc_RNA (1)...(19): siRNA sense strand
uguauuugccuaucagaga

SEQ ID NO: 666881 - RNA, 19 nt, Homo sapiens
  misc_RNA (1)...(19): siRNA sense strand
ggaaguccuccgaugucaa

SEQ ID NO: 666882 - RNA, 19 nt, Homo sapiens
  misc_RNA (1)...(19): siRNA sense strand
gaacuucacuuauuacuga

SEQ ID NO: 666883 - RNA, 19 nt, Homo sapiens
  misc_RNA (1)...(19): siRNA sense strand
gcaggugacuugcuccuua

SEQ ID NO: 666884 - RNA, 19 nt, Homo sapiens
  misc_RNA (1)...(19): siRNA sense strand
gaacauuagugaccacauu

SEQ ID NO: 666885 - RNA, 19 nt, Homo sapiens
  misc_RNA (1)...(19): siRNA sense strand
ucaaaucacuguaagguuu

SEQ ID NO: 666886 - RNA, 19 nt, Homo sapiens
  misc_RNA (1)...(19): siRNA sense strand
gggcagagaacaaauaaua

SEQ ID NO: 666887 - RNA, 19 nt, Homo sapiens
  misc_RNA (1)...(19): siRNA sense strand
caccagaacuucacuuauu

SEQ ID NO: 666888 - RNA, 19 nt, Homo sapiens
  misc_RNA (1)...(19): siRNA sense strand
gaacugaguaaaucucuuu

SEQ ID NO: 666889 - RNA, 19 nt, Homo sapiens
  misc_RNA (1)...(19): siRNA sense strand
guaaaucucuuuggcuuga

SEQ ID NO: 666890 - RNA, 19 nt, Homo sapiens
  misc_RNA (1)...(19): siRNA sense strand
ugaaagugcuggauguaaa

SEQ ID NO: 666891 - RNA, 19 nt, Homo sapiens
  misc_RNA (1)...(19): siRNA sense strand
gaaucuagacuccugaauu

SEQ ID NO: 666892 - RNA, 19 nt, Homo sapiens
  misc_RNA (1)...(19): siRNA sense strand
auacagaguccacuuguua

SEQ ID NO: 666893 - RNA, 19 nt, Homo sapiens
  misc_RNA (1)...(19): siRNA sense strand
cuaacgcucuucuaacgua

SEQ ID NO: 666894 - RNA, 19 nt, Homo sapiens
  misc_RNA (1)...(19): siRNA sense strand
gaaguccuccgaugucaaa

SEQ ID NO: 666895 - RNA, 19 nt, Homo sapiens
  misc_RNA (1)...(19): siRNA sense strand
gaaacaaaauccuacgaaa

SEQ ID NO: 666896 - RNA, 19 nt, Homo sapiens
  misc_RNA (1)...(19): siRNA sense strand
ggagguaaaucugcagaau

SEQ ID NO: 666897 - RNA, 19 nt, Homo sapiens
  misc_RNA (1)...(19): siRNA sense strand
aaucuagacuccugaauuc

SEQ ID NO: 666898 - RNA, 19 nt, Homo sapiens
  misc_RNA (1)...(19): siRNA sense strand
agaaggagcugcugaugca

SEQ ID NO: 666899 - RNA, 19 nt, Homo sapiens
  misc_RNA (1)...(19): siRNA sense strand
accagaacuucacuuauua

SEQ ID NO: 666900 - RNA, 19 nt, Homo sapiens
  misc_RNA (1)...(19): siRNA sense strand
gugaugaacugaguaaauc

SEQ ID NO: 666901 - RNA, 19 nt, Homo sapiens
  misc_RNA (1)...(19): siRNA sense strand
ugacgaagguguaaauggu

SEQ ID NO: 666902 - RNA, 19 nt, Homo sapiens
  misc_RNA (1)...(19): siRNA sense strand
gugaaagacauuaacgaua

SEQ ID NO: 666903 - RNA, 19 nt, Homo sapiens
  misc_RNA (1)...(19): siRNA sense strand
uaaaggcaguugauaaagg

SEQ ID NO: 666904 - RNA, 19 nt, Homo sapiens
  misc_RNA (1)...(19): siRNA sense strand
gcgagagccugucggucua

SEQ ID NO: 666905 - RNA, 19 nt, Homo sapiens
  misc_RNA (1)...(19): siRNA sense strand
cuacgaaauucaaguaaag

SEQ ID NO: 666906 - RNA, 19 nt, Homo sapiens
  misc_RNA (1)...(19): siRNA sense strand
agaacgcgcugguguccua

SEQ ID NO: 666907 - RNA, 19 nt, Homo sapiens
  misc_RNA (1)...(19): siRNA sense strand
ggagguggccgacgugaau

SEQ ID NO: 666908 - RNA, 19 nt, Homo sapiens
  misc_RNA (1)...(19): siRNA sense strand
gaaagugcuggauguaaau

SEQ ID NO: 666909 - RNA, 19 nt, Homo sapiens
  misc_RNA (1)...(19): siRNA sense strand
aaaggcaguugauaaagga

SEQ ID NO: 666910 - RNA, 19 nt, Homo sapiens
  misc_RNA (1)...(19): siRNA sense strand
ggcggucacuucauuguau

SEQ ID NO: 666911 - RNA, 19 nt, Homo sapiens
  misc_RNA (1)...(19): siRNA sense strand
caagugaugaacugaguaa

SEQ ID NO: 666912 - RNA, 19 nt, Homo sapiens
  misc_RNA (1)...(19): siRNA sense strand
uguccaccuucaagaauua

SEQ ID NO: 666913 - RNA, 19 nt, Homo sapiens
  misc_RNA (1)...(19): siRNA sense strand
caaguaaaggcaguugaua

SEQ ID NO: 666914 - RNA, 19 nt, Homo sapiens
  misc_RNA (1)...(19): siRNA sense strand
ccuacgaaauucaaguaaa

SEQ ID NO: 666915 - RNA, 19 nt, Homo sapiens
  misc_RNA (1)...(19): siRNA sense strand
gugauuauuucucuuugga

SEQ ID NO: 666916 - RNA, 19 nt, Homo sapiens
  misc_RNA (1)...(19): siRNA sense strand
caggugacuugcuccuuaa

SEQ ID NO: 666917 - RNA, 19 nt, Homo sapiens
  misc_RNA (1)...(19): siRNA sense strand
ggauguaaaugauaaugcu

SEQ ID NO: 666918 - RNA, 19 nt, Homo sapiens
  misc_RNA (1)...(19): siRNA sense strand
gauuccagcucaggagaaa

SEQ ID NO: 666919 - RNA, 19 nt, Homo sapiens
  misc_RNA (1)...(19): siRNA sense strand
guuagagacuacagcaaau

SEQ ID NO: 666920 - RNA, 19 nt, Homo sapiens
  misc_RNA (1)...(19): siRNA sense strand
gaagucgucuuuuccuuug

SEQ ID NO: 666921 - RNA, 19 nt, Homo sapiens
  misc_RNA (1)...(19): siRNA sense strand
ggugcuaacgcucuucuaa

SEQ ID NO: 666922 - RNA, 19 nt, Homo sapiens
  misc_RNA (1)...(19): siRNA sense strand
ugauaaugcuccagaacug

SEQ ID NO: 666923 - RNA, 19 nt, Homo sapiens
  misc_RNA (1)...(19): siRNA sense strand
cgagugauuauuucucuuu

SEQ ID NO: 666924 - RNA, 19 nt, Homo sapiens
  misc_RNA (1)...(19): siRNA sense strand
gaugucaaaucacuguaag

SEQ ID NO: 666925 - RNA, 19 nt, Homo sapiens
  misc_RNA (1)...(19): siRNA sense strand
agaagaaacaccagaacuu

SEQ ID NO: 666926 - RNA, 19 nt, Homo sapiens
  misc_RNA (1)...(19): siRNA sense strand
gagugauuauuucucuuug

SEQ ID NO: 666927 - RNA, 19 nt, Homo sapiens
  misc_RNA (1)...(19): siRNA sense strand
aguaaaggcaguugauaaa

SEQ ID NO: 666928 - RNA, 19 nt, Homo sapiens
  misc_RNA (1)...(19): siRNA sense strand
agaguccacuuguuagaga

SEQ ID NO: 666929 - RNA, 19 nt, Homo sapiens
  misc_RNA (1)...(19): siRNA sense strand
ggugaaagacauuaacgau

SEQ ID NO: 666930 - RNA, 19 nt, Homo sapiens
  misc_RNA (1)...(19): siRNA sense strand
gcaagugaugaacugagua

SEQ ID NO: 666931 - RNA, 19 nt, Homo sapiens
  misc_RNA (1)...(19): siRNA sense strand
ggcaagugaugaacugagu

SEQ ID NO: 666932 - RNA, 19 nt, Homo sapiens
  misc_RNA (1)...(19): siRNA sense strand
gagguaaaucugcagaaug

SEQ ID NO: 666933 - RNA, 19 nt, Homo sapiens
  misc_RNA (1)...(19): siRNA sense strand
gcggucacuucauuguauu

SEQ ID NO: 666934 - RNA, 19 nt, Homo sapiens
  misc_RNA (1)...(19): siRNA sense strand
gagacuacagcaaauggaa

SEQ ID NO: 666935 - RNA, 19 nt, Homo sapiens
  misc_RNA (1)...(19): siRNA sense strand
ugaccaggccguauacaga

SEQ ID NO: 666936 - RNA, 19 nt, Homo sapiens
  misc_RNA (1)...(19): siRNA sense strand
gagcugcaagguacaguug

SEQ ID NO: 666937 - RNA, 19 nt, Homo sapiens
  misc_RNA (1)...(19): siRNA sense strand
agguaaaucugcagaaugg

SEQ ID NO: 666938 - RNA, 19 nt, Homo sapiens
  misc_RNA (1)...(19): siRNA sense strand
ccaacgggcaggugacuug

SEQ ID NO: 666939 - RNA, 19 nt, Homo sapiens
  misc_RNA (1)...(19): siRNA sense strand
guccuccgaugucaaauca

SEQ ID NO: 666940 - RNA, 19 nt, Homo sapiens
  misc_RNA (1)...(19): siRNA sense strand
aaguaaaggcaguugauaa

SEQ ID NO: 666941 - RNA, 19 nt, Homo sapiens
  misc_RNA (1)...(19): siRNA sense strand
gaauucgcguuuuccgaua

SEQ ID NO: 666942 - RNA, 19 nt, Homo sapiens
  misc_RNA (1)...(19): siRNA sense strand
cccgggaucugcuucuuug

SEQ ID NO: 666943 - RNA, 19 nt, Homo sapiens
  misc_RNA (1)...(19): siRNA sense strand
gauagaaggagcugcugau

SEQ ID NO: 666944 - RNA, 19 nt, Homo sapiens
  misc_RNA (1)...(19): siRNA sense strand
gcucagcccgagugauuau

SEQ ID NO: 666945 - RNA, 19 nt, Homo sapiens
  misc_RNA (1)...(19): siRNA sense strand
acacaguauucgugaagga

SEQ ID NO: 666946 - RNA, 19 nt, Homo sapiens
  misc_RNA (1)...(19): siRNA sense strand
guguccaccuucaagaauu

SEQ ID NO: 666947 - RNA, 19 nt, Homo sapiens
  misc_RNA (1)...(19): siRNA sense strand
gugaaagugcuggauguaa

SEQ ID NO: 666948 - RNA, 19 nt, Homo sapiens
  misc_RNA (1)...(19): siRNA sense strand
uauacagaguccacuuguu

SEQ ID NO: 666949 - RNA, 19 nt, Homo sapiens
  misc_RNA (1)...(19): siRNA sense strand
gagaagaaacaccagaacu

SEQ ID NO: 666950 - RNA, 19 nt, Homo sapiens
  misc_RNA (1)...(19): siRNA sense strand
guacacaguauucgugaag

SEQ ID NO: 666951 - RNA, 19 nt, Homo sapiens
  misc_RNA (1)...(19): siRNA sense strand
ggcagagaacaaauaauau

SEQ ID NO: 666952 - RNA, 19 nt, Homo sapiens
  misc_RNA (1)...(19): siRNA sense strand
ggugaaagugcuggaugua

SEQ ID NO: 666953 - RNA, 19 nt, Homo sapiens
  misc_RNA (1)...(19): siRNA sense strand
ugguauuucucgugacauu

SEQ ID NO: 666954 - RNA, 19 nt, Homo sapiens
  misc_RNA (1)...(19): siRNA sense strand
caaacacggcaccuucguu

SEQ ID NO: 666955 - RNA, 19 nt, Homo sapiens
  misc_RNA (1)...(19): siRNA sense strand
ucaagaauuacuacucguu

SEQ ID NO: 666956 - RNA, 19 nt, Homo sapiens
  misc_RNA (1)...(19): siRNA sense strand
gaaggugaaagacauuaac

SEQ ID NO: 666957 - RNA, 19 nt, Homo sapiens
  misc_RNA (1)...(19): siRNA sense strand
gaacuggcggucacuucau

SEQ ID NO: 666958 - RNA, 19 nt, Homo sapiens
  misc_RNA (1)...(19): siRNA sense strand
aaaugauaaugcuccagaa

SEQ ID NO: 666959 - RNA, 19 nt, Homo sapiens
  misc_RNA (1)...(19): siRNA sense strand
ugaaggugaaagacauuaa

SEQ ID NO: 666960 - RNA, 19 nt, Homo sapiens
  misc_RNA (1)...(19): siRNA sense strand
gcagcccgaguacacagua

SEQ ID NO: 666961 - RNA, 19 nt, Homo sapiens
  misc_RNA (1)...(19): siRNA sense strand
gugacuugcuccuuaaugc

SEQ ID NO: 666962 - RNA, 19 nt, Homo sapiens
  misc_RNA (1)...(19): siRNA sense strand
cgaugucaaaucacuguaa

SEQ ID NO: 666963 - RNA, 19 nt, Homo sapiens
  misc_RNA (1)...(19): siRNA sense strand
guauuucucgugacauuca

SEQ ID NO: 666964 - RNA, 19 nt, Homo sapiens
  misc_RNA (1)...(19): siRNA sense strand
gacaggccgcugcagguuu

SEQ ID NO: 666965 - RNA, 19 nt, Homo sapiens
  misc_RNA (1)...(19): siRNA sense strand
aaaccggagcugcaaggua

SEQ ID NO: 666966 - RNA, 19 nt, Homo sapiens
  misc_RNA (1)...(19): siRNA sense strand
augcagacauuggugcuaa

SEQ ID NO: 666967 - RNA, 19 nt, Homo sapiens
  misc_RNA (1)...(19): siRNA sense strand
gugcuggauguaaaugaua

SEQ ID NO: 666968 - RNA, 19 nt, Homo sapiens
  misc_RNA (1)...(19): siRNA sense strand
guaaaggcaguugauaaag

SEQ ID NO: 666969 - RNA, 19 nt, Homo sapiens
  misc_RNA (1)...(19): siRNA sense strand
ucaggagaaauuagguuaa

SEQ ID NO: 666970 - RNA, 19 nt, Homo sapiens
  misc_RNA (1)...(19): siRNA sense strand
cauuagugaccacauuaaa

SEQ ID NO: 666971 - RNA, 19 nt, Homo sapiens
  misc_RNA (1)...(19): siRNA sense strand
aacauuagugaccacauua

SEQ ID NO: 666972 - RNA, 19 nt, Homo sapiens
  misc_RNA (1)...(19): siRNA sense strand
ggauguagaggcaagugau

SEQ ID NO: 666973 - RNA, 19 nt, Homo sapiens
  misc_RNA (1)...(19): siRNA sense strand
caguauucgugaaggagaa

SEQ ID NO: 666974 - RNA, 19 nt, Homo sapiens
  misc_RNA (1)...(19): siRNA sense strand
gauaauccacccgucuuca

SEQ ID NO: 666975 - RNA, 19 nt, Homo sapiens
  misc_RNA (1)...(19): siRNA sense strand
gaggugaaggugaaagaca

SEQ ID NO: 666976 - RNA, 19 nt, Homo sapiens
  misc_RNA (1)...(19): siRNA sense strand
uguuagagacuacagcaaa

SEQ ID NO: 666977 - RNA, 19 nt, Homo sapiens
  misc_RNA (1)...(19): siRNA sense strand
gugaaggugaaagacauua

SEQ ID NO: 666978 - RNA, 19 nt, Homo sapiens
  misc_RNA (1)...(19): siRNA sense strand
agaggcaagugaugaacug

SEQ ID NO: 666979 - RNA, 19 nt, Homo sapiens
  misc_RNA (1)...(19): siRNA sense strand
ucucgugacauucaagaaa

SEQ ID NO: 666980 - RNA, 19 nt, Homo sapiens
  misc_RNA (1)...(19): siRNA sense strand
uguauuugccuaucagaga

SEQ ID NO: 666981 - RNA, 19 nt, Homo sapiens
  misc_RNA (1)...(19): siRNA sense strand
ggaaguccuccgaugucaa

SEQ ID NO: 666982 - RNA, 19 nt, Homo sapiens
  misc_RNA (1)...(19): siRNA sense strand
gaacuucacuuauuacuga

SEQ ID NO: 666983 - RNA, 19 nt, Homo sapiens
  misc_RNA (1)...(19): siRNA sense strand
gcaggugacuugcuccuua

SEQ ID NO: 666984 - RNA, 19 nt, Homo sapiens
  misc_RNA (1)...(19): siRNA sense strand
gaacauuagugaccacauu

SEQ ID NO: 666985 - RNA, 19 nt, Homo sapiens
  misc_RNA (1)...(19): siRNA sense strand
ucaaaucacuguaagguuu

SEQ ID NO: 666986 - RNA, 19 nt, Homo sapiens
  misc_RNA (1)...(19): siRNA sense strand
gggcagagaacaaauaaua

SEQ ID NO: 666987 - RNA, 19 nt, Homo sapiens
  misc_RNA (1)...(19): siRNA sense strand
caccagaacuucacuuauu

SEQ ID NO: 666988 - RNA, 19 nt, Homo sapiens
  misc_RNA (1)...(19): siRNA sense strand
gaacugaguaaaucucuuu

SEQ ID NO: 666989 - RNA, 19 nt, Homo sapiens
  misc_RNA (1)...(19): siRNA sense strand
guaaaucucuuuggcuuga

SEQ ID NO: 666990 - RNA, 19 nt, Homo sapiens
  misc_RNA (1)...(19): siRNA sense strand
ugaaagugcuggauguaaa

SEQ ID NO: 666991 - RNA, 19 nt, Homo sapiens
  misc_RNA (1)...(19): siRNA sense strand
gaaucuagacuccugaauu

SEQ ID NO: 666992 - RNA, 19 nt, Homo sapiens
  misc_RNA (1)...(19): siRNA sense strand
auacagaguccacuuguua

SEQ ID NO: 666993 - RNA, 19 nt, Homo sapiens
  misc_RNA (1)...(19): siRNA sense strand
cuaacgcucuucuaacgua

SEQ ID NO: 666994 - RNA, 19 nt, Homo sapiens
  misc_RNA (1)...(19): siRNA sense strand
gaaguccuccgaugucaaa

SEQ ID NO: 666995 - RNA, 19 nt, Homo sapiens
  misc_RNA (1)...(19): siRNA sense strand
gaaacaaaauccuacgaaa

SEQ ID NO: 666996 - RNA, 19 nt, Homo sapiens
  misc_RNA (1)...(19): siRNA sense strand
ggagguaaaucugcagaau

SEQ ID NO: 666997 - RNA, 19 nt, Homo sapiens
  misc_RNA (1)...(19): siRNA sense strand
aaucuagacuccugaauuc

SEQ ID NO: 666998 - RNA, 19 nt, Homo sapiens
  misc_RNA (1)...(19): siRNA sense strand
agaaggagcugcugaugca

SEQ ID NO: 666999 - RNA, 19 nt, Homo sapiens
  misc_RNA (1)...(19): siRNA sense strand
accagaacuucacuuauua

SEQ ID NO: 667000 - RNA, 19 nt, Homo sapiens
  misc_RNA (1)...(19): siRNA sense strand
gugaugaacugaguaaauc

SEQ ID NO: 667001 - RNA, 19 nt, Homo sapiens
  misc_RNA (1)...(19): siRNA sense strand
ugacgaagguguaaauggu

SEQ ID NO: 667002 - RNA, 19 nt, Homo sapiens
  misc_RNA (1)...(19): siRNA sense strand
gugaaagacauuaacgaua

SEQ ID NO: 667003 - RNA, 19 nt, Homo sapiens
  misc_RNA (1)...(19): siRNA sense strand
uaaaggcaguugauaaagg

SEQ ID NO: 667004 - RNA, 19 nt, Homo sapiens
  misc_RNA (1)...(19): siRNA sense strand
gcgagagccugucggucua

SEQ ID NO: 667005 - RNA, 19 nt, Homo sapiens
  misc_RNA (1)...(19): siRNA sense strand
cuacgaaauucaaguaaag

SEQ ID NO: 667006 - RNA, 19 nt, Homo sapiens
  misc_RNA (1)...(19): siRNA sense strand
agaacgcgcugguguccua

SEQ ID NO: 667007 - RNA, 19 nt, Homo sapiens
  misc_RNA (1)...(19): siRNA sense strand
ggagguggccgacgugaau

SEQ ID NO: 667008 - RNA, 19 nt, Homo sapiens
  misc_RNA (1)...(19): siRNA sense strand
gaaagugcuggauguaaau

SEQ ID NO: 667009 - RNA, 19 nt, Homo sapiens
  misc_RNA (1)...(19): siRNA sense strand
aaaggcaguugauaaagga

SEQ ID NO: 667010 - RNA, 19 nt, Homo sapiens
  misc_RNA (1)...(19): siRNA sense strand
ggcggucacuucauuguau

SEQ ID NO: 667011 - RNA, 19 nt, Homo sapiens
  misc_RNA (1)...(19): siRNA sense strand
caagugaugaacugaguaa

SEQ ID NO: 667012 - RNA, 19 nt, Homo sapiens
  misc_RNA (1)...(19): siRNA sense strand
uguccaccuucaagaauua

SEQ ID NO: 667013 - RNA, 19 nt, Homo sapiens
  misc_RNA (1)...(19): siRNA sense strand
caaguaaaggcaguugaua

SEQ ID NO: 667014 - RNA, 19 nt, Homo sapiens
  misc_RNA (1)...(19): siRNA sense strand
ccuacgaaauucaaguaaa

SEQ ID NO: 667015 - RNA, 19 nt, Homo sapiens
  misc_RNA (1)...(19): siRNA sense strand
gugauuauuucucuuugga

SEQ ID NO: 667016 - RNA, 19 nt, Homo sapiens
  misc_RNA (1)...(19): siRNA sense strand
caggugacuugcuccuuaa

SEQ ID NO: 667017 - RNA, 19 nt, Homo sapiens
  misc_RNA (1)...(19): siRNA sense strand
ggauguaaaugauaaugcu

SEQ ID NO: 667018 - RNA, 19 nt, Homo sapiens
  misc_RNA (1)...(19): siRNA sense strand
gauuccagcucaggagaaa

SEQ ID NO: 667019 - RNA, 19 nt, Homo sapiens
  misc_RNA (1)...(19): siRNA sense strand
guuagagacuacagcaaau

SEQ ID NO: 667020 - RNA, 19 nt, Homo sapiens
  misc_RNA (1)...(19): siRNA sense strand
gaagucgucuuuuccuuug

SEQ ID NO: 667021 - RNA, 19 nt, Homo sapiens
  misc_RNA (1)...(19): siRNA sense strand
ggugcuaacgcucuucuaa

SEQ ID NO: 667022 - RNA, 19 nt, Homo sapiens
  misc_RNA (1)...(19): siRNA sense strand
ugauaaugcuccagaacug

SEQ ID NO: 667023 - RNA, 19 nt, Homo sapiens
  misc_RNA (1)...(19): siRNA sense strand
cgagugauuauuucucuuu

SEQ ID NO: 667024 - RNA, 19 nt, Homo sapiens
  misc_RNA (1)...(19): siRNA sense strand
gaugucaaaucacuguaag

SEQ ID NO: 667025 - RNA, 19 nt, Homo sapiens
  misc_RNA (1)...(19): siRNA sense strand
agaagaaacaccagaacuu

SEQ ID NO: 667026 - RNA, 19 nt, Homo sapiens
  misc_RNA (1)...(19): siRNA sense strand
gagugauuauuucucuuug

SEQ ID NO: 667027 - RNA, 19 nt, Homo sapiens
  misc_RNA (1)...(19): siRNA sense strand
aguaaaggcaguugauaaa

SEQ ID NO: 667028 - RNA, 19 nt, Homo sapiens
  misc_RNA (1)...(19): siRNA sense strand
agaguccacuuguuagaga

SEQ ID NO: 667029 - RNA, 19 nt, Homo sapiens
  misc_RNA (1)...(19): siRNA sense strand
ggugaaagacauuaacgau

SEQ ID NO: 667030 - RNA, 19 nt, Homo sapiens
  misc_RNA (1)...(19): siRNA sense strand
gcaagugaugaacugagua

SEQ ID NO: 667031 - RNA, 19 nt, Homo sapiens
  misc_RNA (1)...(19): siRNA sense strand
ggcaagugaugaacugagu

SEQ ID NO: 667032 - RNA, 19 nt, Homo sapiens
  misc_RNA (1)...(19): siRNA sense strand
gagguaaaucugcagaaug

SEQ ID NO: 667033 - RNA, 19 nt, Homo sapiens
  misc_RNA (1)...(19): siRNA sense strand
gcggucacuucauuguauu

SEQ ID NO: 667034 - RNA, 19 nt, Homo sapiens
  misc_RNA (1)...(19): siRNA sense strand
gagacuacagcaaauggaa

SEQ ID NO: 667035 - RNA, 19 nt, Homo sapiens
  misc_RNA (1)...(19): siRNA sense strand
ugaccaggccguauacaga

SEQ ID NO: 667036 - RNA, 19 nt, Homo sapiens
  misc_RNA (1)...(19): siRNA sense strand
gagcugcaagguacaguug

SEQ ID NO: 667037 - RNA, 19 nt, Homo sapiens
  misc_RNA (1)...(19): siRNA sense strand
agguaaaucugcagaaugg

SEQ ID NO: 667038 - RNA, 19 nt, Homo sapiens
  misc_RNA (1)...(19): siRNA sense strand
ccaacgggcaggugacuug

SEQ ID NO: 667039 - RNA, 19 nt, Homo sapiens
  misc_RNA (1)...(19): siRNA sense strand
guccuccgaugucaaauca

SEQ ID NO: 667040 - RNA, 19 nt, Homo sapiens
  misc_RNA (1)...(19): siRNA sense strand
aaguaaaggcaguugauaa

SEQ ID NO: 667041 - RNA, 19 nt, Homo sapiens
  misc_RNA (1)...(19): siRNA sense strand
gaauucgcguuuuccgaua

SEQ ID NO: 667042 - RNA, 19 nt, Homo sapiens
  misc_RNA (1)...(19): siRNA sense strand
cccgggaucugcuucuuug

SEQ ID NO: 667043 - RNA, 19 nt, Homo sapiens
  misc_RNA (1)...(19): siRNA sense strand
gauagaaggagcugcugau

SEQ ID NO: 667044 - RNA, 19 nt, Homo sapiens
  misc_RNA (1)...(19): siRNA sense strand
gcucagcccgagugauuau

SEQ ID NO: 667045 - RNA, 19 nt, Homo sapiens
  misc_RNA (1)...(19): siRNA sense strand
acacaguauucgugaagga

SEQ ID NO: 667046 - RNA, 19 nt, Homo sapiens
  misc_RNA (1)...(19): siRNA sense strand
guguccaccuucaagaauu

SEQ ID NO: 667047 - RNA, 19 nt, Homo sapiens
  misc_RNA (1)...(19): siRNA sense strand
gugaaagugcuggauguaa

SEQ ID NO: 667048 - RNA, 19 nt, Homo sapiens
  misc_RNA (1)...(19): siRNA sense strand
uauacagaguccacuuguu

SEQ ID NO: 667049 - RNA, 19 nt, Homo sapiens
  misc_RNA (1)...(19): siRNA sense strand
gagaagaaacaccagaacu

SEQ ID NO: 667050 - RNA, 19 nt, Homo sapiens
  misc_RNA (1)...(19): siRNA sense strand
guacacaguauucgugaag

SEQ ID NO: 667051 - RNA, 19 nt, Homo sapiens
  misc_RNA (1)...(19): siRNA sense strand
ggcagagaacaaauaauau

SEQ ID NO: 667052 - RNA, 19 nt, Homo sapiens
  misc_RNA (1)...(19): siRNA sense strand
ggugaaagugcuggaugua

SEQ ID NO: 667053 - RNA, 19 nt, Homo sapiens
  misc_RNA (1)...(19): siRNA sense strand
ugguauuucucgugacauu

SEQ ID NO: 667054 - RNA, 19 nt, Homo sapiens
  misc_RNA (1)...(19): siRNA sense strand
caaacacggcaccuucguu

SEQ ID NO: 667055 - RNA, 19 nt, Homo sapiens
  misc_RNA (1)...(19): siRNA sense strand
ucaagaauuacuacucguu

SEQ ID NO: 667056 - RNA, 19 nt, Homo sapiens
  misc_RNA (1)...(19): siRNA sense strand
gaaggugaaagacauuaac

SEQ ID NO: 667057 - RNA, 19 nt, Homo sapiens
  misc_RNA (1)...(19): siRNA sense strand
gaacuggcggucacuucau

SEQ ID NO: 667058 - RNA, 19 nt, Homo sapiens
  misc_RNA (1)...(19): siRNA sense strand
aaaugauaaugcuccagaa

SEQ ID NO: 667059 - RNA, 19 nt, Homo sapiens
  misc_RNA (1)...(19): siRNA sense strand
ugaaggugaaagacauuaa

SEQ ID NO: 667060 - RNA, 19 nt, Homo sapiens
  misc_RNA (1)...(19): siRNA sense strand
gcagcccgaguacacagua

SEQ ID NO: 667061 - RNA, 19 nt, Homo sapiens
  misc_RNA (1)...(19): siRNA sense strand
gugacuugcuccuuaaugc

SEQ ID NO: 667062 - RNA, 19 nt, Homo sapiens
  misc_RNA (1)...(19): siRNA sense strand
cgaugucaaaucacuguaa

SEQ ID NO: 667063 - RNA, 19 nt, Homo sapiens
  misc_RNA (1)...(19): siRNA sense strand
guauuucucgugacauuca

SEQ ID NO: 667064 - RNA, 19 nt, Homo sapiens
  misc_RNA (1)...(19): siRNA sense strand
gacaggccgcugcagguuu

SEQ ID NO: 667065 - RNA, 19 nt, Homo sapiens
  misc_RNA (1)...(19): siRNA sense strand
aaaccggagcugcaaggua

SEQ ID NO: 667066 - RNA, 19 nt, Homo sapiens
  misc_RNA (1)...(19): siRNA sense strand
augcagacauuggugcuaa

SEQ ID NO: 667067 - RNA, 19 nt, Homo sapiens
  misc_RNA (1)...(19): siRNA sense strand
gugcuggauguaaaugaua

SEQ ID NO: 667068 - RNA, 19 nt, Homo sapiens
  misc_RNA (1)...(19): siRNA sense strand
guaaaggcaguugauaaag

SEQ ID NO: 667069 - RNA, 19 nt, Homo sapiens
  misc_RNA (1)...(19): siRNA sense strand
ucaggagaaauuagguuaa

SEQ ID NO: 667070 - RNA, 19 nt, Homo sapiens
  misc_RNA (1)...(19): siRNA sense strand
cauuagugaccacauuaaa

SEQ ID NO: 667071 - RNA, 19 nt, Homo sapiens
  misc_RNA (1)...(19): siRNA sense strand
aacauuagugaccacauua

SEQ ID NO: 667072 - RNA, 19 nt, Homo sapiens
  misc_RNA (1)...(19): siRNA sense strand
ggauguagaggcaagugau

SEQ ID NO: 667073 - RNA, 19 nt, Homo sapiens
  misc_RNA (1)...(19): siRNA sense strand
caguauucgugaaggagaa

SEQ ID NO: 667074 - RNA, 19 nt, Homo sapiens
  misc_RNA (1)...(19): siRNA sense strand
gauaauccacccgucuuca

SEQ ID NO: 667075 - RNA, 19 nt, Homo sapiens
  misc_RNA (1)...(19): siRNA sense strand
gaggugaaggugaaagaca

SEQ ID NO: 667076 - RNA, 19 nt, Homo sapiens
  misc_RNA (1)...(19): siRNA sense strand
uguuagagacuacagcaaa

SEQ ID NO: 667077 - RNA, 19 nt, Homo sapiens
  misc_RNA (1)...(19): siRNA sense strand
gugaaggugaaagacauua

SEQ ID NO: 667078 - RNA, 19 nt, Homo sapiens
  misc_RNA (1)...(19): siRNA sense strand
agaggcaagugaugaacug

SEQ ID NO: 667079 - RNA, 19 nt, Homo sapiens
  misc_RNA (1)...(19): siRNA sense strand
ucucgugacauucaagaaa

SEQ ID NO: 667080 - RNA, 19 nt, Homo sapiens
  misc_RNA (1)...(19): siRNA sense strand
uguauuugccuaucagaga

SEQ ID NO: 667081 - RNA, 19 nt, Homo sapiens
  misc_RNA (1)...(19): siRNA sense strand
ggaaguccuccgaugucaa

SEQ ID NO: 667082 - RNA, 19 nt, Homo sapiens
  misc_RNA (1)...(19): siRNA sense strand
gaacuucacuuauuacuga

SEQ ID NO: 667083 - RNA, 19 nt, Homo sapiens
  misc_RNA (1)...(19): siRNA sense strand
gcaggugacuugcuccuua

SEQ ID NO: 667084 - RNA, 19 nt, Homo sapiens
  misc_RNA (1)...(19): siRNA sense strand
gaacauuagugaccacauu

SEQ ID NO: 667085 - RNA, 19 nt, Homo sapiens
  misc_RNA (1)...(19): siRNA sense strand
ucaaaucacuguaagguuu

SEQ ID NO: 667086 - RNA, 19 nt, Homo sapiens
  misc_RNA (1)...(19): siRNA sense strand
gggcagagaacaaauaaua

SEQ ID NO: 667087 - RNA, 19 nt, Homo sapiens
  misc_RNA (1)...(19): siRNA sense strand
caccagaacuucacuuauu

SEQ ID NO: 667088 - RNA, 19 nt, Homo sapiens
  misc_RNA (1)...(19): siRNA sense strand
gaacugaguaaaucucuuu

SEQ ID NO: 667089 - RNA, 19 nt, Homo sapiens
  misc_RNA (1)...(19): siRNA sense strand
guaaaucucuuuggcuuga

SEQ ID NO: 667090 - RNA, 19 nt, Homo sapiens
  misc_RNA (1)...(19): siRNA sense strand
ugaaagugcuggauguaaa

SEQ ID NO: 667091 - RNA, 19 nt, Homo sapiens
  misc_RNA (1)...(19): siRNA sense strand
gaaucuagacuccugaauu

SEQ ID NO: 667092 - RNA, 19 nt, Homo sapiens
  misc_RNA (1)...(19): siRNA sense strand
auacagaguccacuuguua

SEQ ID NO: 667093 - RNA, 19 nt, Homo sapiens
  misc_RNA (1)...(19): siRNA sense strand
cuaacgcucuucuaacgua

SEQ ID NO: 667094 - RNA, 19 nt, Homo sapiens
  misc_RNA (1)...(19): siRNA sense strand
gaaguccuccgaugucaaa

SEQ ID NO: 667095 - RNA, 19 nt, Homo sapiens
  misc_RNA (1)...(19): siRNA sense strand
gaaacaaaauccuacgaaa

SEQ ID NO: 667096 - RNA, 19 nt, Homo sapiens
  misc_RNA (1)...(19): siRNA sense strand
ggagguaaaucugcagaau

SEQ ID NO: 667097 - RNA, 19 nt, Homo sapiens
  misc_RNA (1)...(19): siRNA sense strand
aaucuagacuccugaauuc

SEQ ID NO: 667098 - RNA, 19 nt, Homo sapiens
  misc_RNA (1)...(19): siRNA sense strand
agaaggagcugcugaugca

SEQ ID NO: 667099 - RNA, 19 nt, Homo sapiens
  misc_RNA (1)...(19): siRNA sense strand
accagaacuucacuuauua

SEQ ID NO: 667100 - RNA, 19 nt, Homo sapiens
  misc_RNA (1)...(19): siRNA sense strand
gugaugaacugaguaaauc

SEQ ID NO: 667101 - RNA, 19 nt, Homo sapiens
  misc_RNA (1)...(19): siRNA sense strand
ugacgaagguguaaauggu

SEQ ID NO: 667102 - RNA, 19 nt, Homo sapiens
  misc_RNA (1)...(19): siRNA sense strand
gugaaagacauuaacgaua

SEQ ID NO: 667103 - RNA, 19 nt, Homo sapiens
  misc_RNA (1)...(19): siRNA sense strand
uaaaggcaguugauaaagg

SEQ ID NO: 667104 - RNA, 19 nt, Homo sapiens
  misc_RNA (1)...(19): siRNA sense strand
gcgagagccugucggucua

SEQ ID NO: 667105 - RNA, 19 nt, Homo sapiens
  misc_RNA (1)...(19): siRNA sense strand
cuacgaaauucaaguaaag

SEQ ID NO: 667106 - RNA, 19 nt, Homo sapiens
  misc_RNA (1)...(19): siRNA sense strand
agaacgcgcugguguccua

SEQ ID NO: 667107 - RNA, 19 nt, Homo sapiens
  misc_RNA (1)...(19): siRNA sense strand
ggagguggccgacgugaau

SEQ ID NO: 667108 - RNA, 19 nt, Homo sapiens
  misc_RNA (1)...(19): siRNA sense strand
gaaagugcuggauguaaau

SEQ ID NO: 667109 - RNA, 19 nt, Homo sapiens
  misc_RNA (1)...(19): siRNA sense strand
aaaggcaguugauaaagga

SEQ ID NO: 667110 - RNA, 19 nt, Homo sapiens
  misc_RNA (1)...(19): siRNA sense strand
ggcggucacuucauuguau

SEQ ID NO: 667111 - RNA, 19 nt, Homo sapiens
  misc_RNA (1)...(19): siRNA sense strand
caagugaugaacugaguaa

SEQ ID NO: 667112 - RNA, 19 nt, Homo sapiens
  misc_RNA (1)...(19): siRNA sense strand
uguccaccuucaagaauua

SEQ ID NO: 667113 - RNA, 19 nt, Homo sapiens
  misc_RNA (1)...(19): siRNA sense strand
caaguaaaggcaguugaua

SEQ ID NO: 667114 - RNA, 19 nt, Homo sapiens
  misc_RNA (1)...(19): siRNA sense strand
ccuacgaaauucaaguaaa

SEQ ID NO: 667115 - RNA, 19 nt, Homo sapiens
  misc_RNA (1)...(19): siRNA sense strand
gugauuauuucucuuugga

SEQ ID NO: 667116 - RNA, 19 nt, Homo sapiens
  misc_RNA (1)...(19): siRNA sense strand
caggugacuugcuccuuaa

SEQ ID NO: 667117 - RNA, 19 nt, Homo sapiens
  misc_RNA (1)...(19): siRNA sense strand
ggauguaaaugauaaugcu

SEQ ID NO: 667118 - RNA, 19 nt, Homo sapiens
  misc_RNA (1)...(19): siRNA sense strand
gauuccagcucaggagaaa

SEQ ID NO: 667119 - RNA, 19 nt, Homo sapiens
  misc_RNA (1)...(19): siRNA sense strand
guuagagacuacagcaaau

SEQ ID NO: 667120 - RNA, 19 nt, Homo sapiens
  misc_RNA (1)...(19): siRNA sense strand
gaagucgucuuuuccuuug

SEQ ID NO: 667121 - RNA, 19 nt, Homo sapiens
  misc_RNA (1)...(19): siRNA sense strand
ggugcuaacgcucuucuaa

SEQ ID NO: 667122 - RNA, 19 nt, Homo sapiens
  misc_RNA (1)...(19): siRNA sense strand
ugauaaugcuccagaacug

SEQ ID NO: 667123 - RNA, 19 nt, Homo sapiens
  misc_RNA (1)...(19): siRNA sense strand
cgagugauuauuucucuuu

SEQ ID NO: 667124 - RNA, 19 nt, Homo sapiens
  misc_RNA (1)...(19): siRNA sense strand
gaugucaaaucacuguaag

SEQ ID NO: 667125 - RNA, 19 nt, Homo sapiens
  misc_RNA (1)...(19): siRNA sense strand
agaagaaacaccagaacuu

SEQ ID NO: 667126 - RNA, 19 nt, Homo sapiens
  misc_RNA (1)...(19): siRNA sense strand
gagugauuauuucucuuug

SEQ ID NO: 667127 - RNA, 19 nt, Homo sapiens
  misc_RNA (1)...(19): siRNA sense strand
aguaaaggcaguugauaaa

SEQ ID NO: 667128 - RNA, 19 nt, Homo sapiens
  misc_RNA (1)...(19): siRNA sense strand
agaguccacuuguuagaga

SEQ ID NO: 667129 - RNA, 19 nt, Homo sapiens
  misc_RNA (1)...(19): siRNA sense strand
ggugaaagacauuaacgau

SEQ ID NO: 667130 - RNA, 19 nt, Homo sapiens
  misc_RNA (1)...(19): siRNA sense strand
gcaagugaugaacugagua

SEQ ID NO: 667131 - RNA, 19 nt, Homo sapiens
  misc_RNA (1)...(19): siRNA sense strand
ggcaagugaugaacugagu

SEQ ID NO: 667132 - RNA, 19 nt, Homo sapiens
  misc_RNA (1)...(19): siRNA sense strand
gagguaaaucugcagaaug

SEQ ID NO: 667133 - RNA, 19 nt, Homo sapiens
  misc_RNA (1)...(19): siRNA sense strand
gcggucacuucauuguauu

SEQ ID NO: 667134 - RNA, 19 nt, Homo sapiens
  misc_RNA (1)...(19): siRNA sense strand
gagacuacagcaaauggaa

SEQ ID NO: 667135 - RNA, 19 nt, Homo sapiens
  misc_RNA (1)...(19): siRNA sense strand
ugaccaggccguauacaga

SEQ ID NO: 667136 - RNA, 19 nt, Homo sapiens
  misc_RNA (1)...(19): siRNA sense strand
gagcugcaagguacaguug

SEQ ID NO: 667137 - RNA, 19 nt, Homo sapiens
  misc_RNA (1)...(19): siRNA sense strand
agguaaaucugcagaaugg

SEQ ID NO: 667138 - RNA, 19 nt, Homo sapiens
  misc_RNA (1)...(19): siRNA sense strand
ccaacgggcaggugacuug

SEQ ID NO: 667139 - RNA, 19 nt, Homo sapiens
  misc_RNA (1)...(19): siRNA sense strand
guccuccgaugucaaauca

SEQ ID NO: 667140 - RNA, 19 nt, Homo sapiens
  misc_RNA (1)...(19): siRNA sense strand
aaguaaaggcaguugauaa

SEQ ID NO: 667141 - RNA, 19 nt, Homo sapiens
  misc_RNA (1)...(19): siRNA sense strand
gaauucgcguuuuccgaua

SEQ ID NO: 667142 - RNA, 19 nt, Homo sapiens
  misc_RNA (1)...(19): siRNA sense strand
cccgggaucugcuucuuug

SEQ ID NO: 667143 - RNA, 19 nt, Homo sapiens
  misc_RNA (1)...(19): siRNA sense strand
gauagaaggagcugcugau

SEQ ID NO: 667144 - RNA, 19 nt, Homo sapiens
  misc_RNA (1)...(19): siRNA sense strand
gcucagcccgagugauuau

SEQ ID NO: 667145 - RNA, 19 nt, Homo sapiens
  misc_RNA (1)...(19): siRNA sense strand
acacaguauucgugaagga

SEQ ID NO: 667146 - RNA, 19 nt, Homo sapiens
  misc_RNA (1)...(19): siRNA sense strand
guguccaccuucaagaauu

SEQ ID NO: 667147 - RNA, 19 nt, Homo sapiens
  misc_RNA (1)...(19): siRNA sense strand
gugaaagugcuggauguaa

SEQ ID NO: 667148 - RNA, 19 nt, Homo sapiens
  misc_RNA (1)...(19): siRNA sense strand
uauacagaguccacuuguu

SEQ ID NO: 667149 - RNA, 19 nt, Homo sapiens
  misc_RNA (1)...(19): siRNA sense strand
gagaagaaacaccagaacu

SEQ ID NO: 667150 - RNA, 19 nt, Homo sapiens
  misc_RNA (1)...(19): siRNA sense strand
guacacaguauucgugaag

SEQ ID NO: 667151 - RNA, 19 nt, Homo sapiens
  misc_RNA (1)...(19): siRNA sense strand
ggcagagaacaaauaauau

SEQ ID NO: 667152 - RNA, 19 nt, Homo sapiens
  misc_RNA (1)...(19): siRNA sense strand
ggugaaagugcuggaugua

SEQ ID NO: 667153 - RNA, 19 nt, Homo sapiens
  misc_RNA (1)...(19): siRNA sense strand
ugguauuucucgugacauu

SEQ ID NO: 667154 - RNA, 19 nt, Homo sapiens
  misc_RNA (1)...(19): siRNA sense strand
caaacacggcaccuucguu

SEQ ID NO: 667155 - RNA, 19 nt, Homo sapiens
  misc_RNA (1)...(19): siRNA sense strand
ucaagaauuacuacucguu

SEQ ID NO: 667156 - RNA, 19 nt, Homo sapiens
  misc_RNA (1)...(19): siRNA sense strand
gaaggugaaagacauuaac

SEQ ID NO: 667157 - RNA, 19 nt, Homo sapiens
  misc_RNA (1)...(19): siRNA sense strand
gaacuggcggucacuucau

SEQ ID NO: 667158 - RNA, 19 nt, Homo sapiens
  misc_RNA (1)...(19): siRNA sense strand
aaaugauaaugcuccagaa

SEQ ID NO: 667159 - RNA, 19 nt, Homo sapiens
  misc_RNA (1)...(19): siRNA sense strand
ugaaggugaaagacauuaa

SEQ ID NO: 667160 - RNA, 19 nt, Homo sapiens
  misc_RNA (1)...(19): siRNA sense strand
gcagcccgaguacacagua

SEQ ID NO: 667161 - RNA, 19 nt, Homo sapiens
  misc_RNA (1)...(19): siRNA sense strand
gugacuugcuccuuaaugc

SEQ ID NO: 667162 - RNA, 19 nt, Homo sapiens
  misc_RNA (1)...(19): siRNA sense strand
cgaugucaaaucacuguaa

SEQ ID NO: 667163 - RNA, 19 nt, Homo sapiens
  misc_RNA (1)...(19): siRNA sense strand
guauuucucgugacauuca

SEQ ID NO: 667164 - RNA, 19 nt, Homo sapiens
  misc_RNA (1)...(19): siRNA sense strand
gacaggccgcugcagguuu

SEQ ID NO: 667165 - RNA, 19 nt, Homo sapiens
  misc_RNA (1)...(19): siRNA sense strand
aaaccggagcugcaaggua

SEQ ID NO: 667166 - RNA, 19 nt, Homo sapiens
  misc_RNA (1)...(19): siRNA sense strand
augcagacauuggugcuaa

SEQ ID NO: 667167 - RNA, 19 nt, Homo sapiens
  misc_RNA (1)...(19): siRNA sense strand
gugcuggauguaaaugaua

SEQ ID NO: 667168 - RNA, 19 nt, Homo sapiens
  misc_RNA (1)...(19): siRNA sense strand
guaaaggcaguugauaaag

SEQ ID NO: 667169 - RNA, 19 nt, Homo sapiens
  misc_RNA (1)...(19): siRNA sense strand
ucaggagaaauuagguuaa

SEQ ID NO: 667170 - RNA, 19 nt, Homo sapiens
  misc_RNA (1)...(19): siRNA sense strand
cauuagugaccacauuaaa

SEQ ID NO: 667171 - RNA, 19 nt, Homo sapiens
  misc_RNA (1)...(19): siRNA sense strand
aacauuagugaccacauua

SEQ ID NO: 667172 - RNA, 19 nt, Homo sapiens
  misc_RNA (1)...(19): siRNA sense strand
ggauguagaggcaagugau

SEQ ID NO: 667173 - RNA, 19 nt, Homo sapiens
  misc_RNA (1)...(19): siRNA sense strand
caguauucgugaaggagaa

SEQ ID NO: 667174 - RNA, 19 nt, Homo sapiens
  misc_RNA (1)...(19): siRNA sense strand
gauaauccacccgucuuca

SEQ ID NO: 667175 - RNA, 19 nt, Homo sapiens
  misc_RNA (1)...(19): siRNA sense strand
gaggugaaggugaaagaca

SEQ ID NO: 667176 - RNA, 19 nt, Homo sapiens
  misc_RNA (1)...(19): siRNA sense strand
uguuagagacuacagcaaa

SEQ ID NO: 667177 - RNA, 19 nt, Homo sapiens
  misc_RNA (1)...(19): siRNA sense strand
gugaaggugaaagacauua

SEQ ID NO: 667178 - RNA, 19 nt, Homo sapiens
  misc_RNA (1)...(19): siRNA sense strand
agaggcaagugaugaacug

SEQ ID NO: 667179 - RNA, 19 nt, Homo sapiens
  misc_RNA (1)...(19): siRNA sense strand
ucucgugacauucaagaaa

SEQ ID NO: 667180 - RNA, 19 nt, Homo sapiens
  misc_RNA (1)...(19): siRNA sense strand
uguauuugccuaucagaga

SEQ ID NO: 667181 - RNA, 19 nt, Homo sapiens
  misc_RNA (1)...(19): siRNA sense strand
ggaaguccuccgaugucaa

SEQ ID NO: 667182 - RNA, 19 nt, Homo sapiens
  misc_RNA (1)...(19): siRNA sense strand
gaacagcccuuagucuuua

SEQ ID NO: 667183 - RNA, 19 nt, Homo sapiens
  misc_RNA (1)...(19): siRNA sense strand
ggaacagcccuuagucuuu

SEQ ID NO: 667184 - RNA, 19 nt, Homo sapiens
  misc_RNA (1)...(19): siRNA sense strand
uaaaggugcuggacaagug

SEQ ID NO: 667185 - RNA, 19 nt, Homo sapiens
  misc_RNA (1)...(19): siRNA sense strand
agaaagaacucacgacuac

SEQ ID NO: 667186 - RNA, 19 nt, Homo sapiens
  misc_RNA (1)...(19): siRNA sense strand
gaaccagcgcuacaucuuu

SEQ ID NO: 667187 - RNA, 19 nt, Homo sapiens
  misc_RNA (1)...(19): siRNA sense strand
gcaagauccugugcacuga

SEQ ID NO: 667188 - RNA, 19 nt, Homo sapiens
  misc_RNA (1)...(19): siRNA sense strand
gagaagcaaucgcugaagu

SEQ ID NO: 667189 - RNA, 19 nt, Homo sapiens
  misc_RNA (1)...(19): siRNA sense strand
gaaaggaaccagcgcuaca

SEQ ID NO: 667190 - RNA, 19 nt, Homo sapiens
  misc_RNA (1)...(19): siRNA sense strand
agaaagaggugggcaagau

SEQ ID NO: 667191 - RNA, 19 nt, Homo sapiens
  misc_RNA (1)...(19): siRNA sense strand
gagacauucgcaucaaaua

SEQ ID NO: 667192 - RNA, 19 nt, Homo sapiens
  misc_RNA (1)...(19): siRNA sense strand
agcaaucgcugaaguguga

SEQ ID NO: 667193 - RNA, 19 nt, Homo sapiens
  misc_RNA (1)...(19): siRNA sense strand
ucaaccagcucuccugcaa

SEQ ID NO: 667194 - RNA, 19 nt, Homo sapiens
  misc_RNA (1)...(19): siRNA sense strand
gacauucgcaucaaauaug

SEQ ID NO: 667195 - RNA, 19 nt, Homo sapiens
  misc_RNA (1)...(19): siRNA sense strand
ggaaccagcgcuacaucuu

SEQ ID NO: 667196 - RNA, 19 nt, Homo sapiens
  misc_RNA (1)...(19): siRNA sense strand
ggaggcgucugcuacuaca

SEQ ID NO: 667197 - RNA, 19 nt, Homo sapiens
  misc_RNA (1)...(19): siRNA sense strand
gaaagaggugggcaagauc

SEQ ID NO: 667198 - RNA, 19 nt, Homo sapiens
  misc_RNA (1)...(19): siRNA sense strand
cagaaagaacucacgacua

SEQ ID NO: 667199 - RNA, 19 nt, Homo sapiens
  misc_RNA (1)...(19): siRNA sense strand
gugugucgcucgccugcua

SEQ ID NO: 667200 - RNA, 19 nt, Homo sapiens
  misc_RNA (1)...(19): siRNA sense strand
ggcccaaguugaagaagau

SEQ ID NO: 667201 - RNA, 19 nt, Homo sapiens
  misc_RNA (1)...(19): siRNA sense strand
gaagcaaucgcugaagugu

SEQ ID NO: 667202 - RNA, 19 nt, Homo sapiens
  misc_RNA (1)...(19): siRNA sense strand
gcaacgagacagccaaguc

SEQ ID NO: 667203 - RNA, 19 nt, Homo sapiens
  misc_RNA (1)...(19): siRNA sense strand
ccgagacauucgcaucaaa

SEQ ID NO: 667204 - RNA, 19 nt, Homo sapiens
  misc_RNA (1)...(19): siRNA sense strand
agacagccaaguccuauug

SEQ ID NO: 667205 - RNA, 19 nt, Homo sapiens
  misc_RNA (1)...(19): siRNA sense strand
caaccgcagccgagacauu

SEQ ID NO: 667206 - RNA, 19 nt, Homo sapiens
  misc_RNA (1)...(19): siRNA sense strand
ugguaaaggugcuggacaa

SEQ ID NO: 667207 - RNA, 19 nt, Homo sapiens
  misc_RNA (1)...(19): siRNA sense strand
gacuacaguucaacaaggu

SEQ ID NO: 667208 - RNA, 19 nt, Homo sapiens
  misc_RNA (1)...(19): siRNA sense strand
ggaggacgcuggggaguau

SEQ ID NO: 667209 - RNA, 19 nt, Homo sapiens
  misc_RNA (1)...(19): siRNA sense strand
ccacggaacagcccuuagu

SEQ ID NO: 667210 - RNA, 19 nt, Homo sapiens
  misc_RNA (1)...(19): siRNA sense strand
ccaaguugaagaagaugaa

SEQ ID NO: 667211 - RNA, 19 nt, Homo sapiens
  misc_RNA (1)...(19): siRNA sense strand
caacaacagcagcaucucu

SEQ ID NO: 667212 - RNA, 19 nt, Homo sapiens
  misc_RNA (1)...(19): siRNA sense strand
cggaacagcccuuagucuu

SEQ ID NO: 667213 - RNA, 19 nt, Homo sapiens
  misc_RNA (1)...(19): siRNA sense strand
gugugccgcucgaaaggaa

SEQ ID NO: 667214 - RNA, 19 nt, Homo sapiens
  misc_RNA (1)...(19): siRNA sense strand
gccgagacauucgcaucaa

SEQ ID NO: 667215 - RNA, 19 nt, Homo sapiens
  misc_RNA (1)...(19): siRNA sense strand
ggugguggagggcaaggua

SEQ ID NO: 667216 - RNA, 19 nt, Homo sapiens
  misc_RNA (1)...(19): siRNA sense strand
gugagaagcaaucgcugaa

SEQ ID NO: 667217 - RNA, 19 nt, Homo sapiens
  misc_RNA (1)...(19): siRNA sense strand
agacauucgcaucaaauau

SEQ ID NO: 667218 - RNA, 19 nt, Homo sapiens
  misc_RNA (1)...(19): siRNA sense strand
cgagacauucgcaucaaau

SEQ ID NO: 667219 - RNA, 19 nt, Homo sapiens
  misc_RNA (1)...(19): siRNA sense strand
cgagacagccaaguccuau

SEQ ID NO: 667220 - RNA, 19 nt, Homo sapiens
  misc_RNA (1)...(19): siRNA sense strand
cggcccaaguugaagaaga

SEQ ID NO: 667221 - RNA, 19 nt, Homo sapiens
  misc_RNA (1)...(19): siRNA sense strand
ggucggguggcguugguaa

SEQ ID NO: 667222 - RNA, 19 nt, Homo sapiens
  misc_RNA (1)...(19): siRNA sense strand
gaaagaacucacgacuaca

SEQ ID NO: 667223 - RNA, 19 nt, Homo sapiens
  misc_RNA (1)...(19): siRNA sense strand
guaaaggugcuggacaagu

SEQ ID NO: 667224 - RNA, 19 nt, Homo sapiens
  misc_RNA (1)...(19): siRNA sense strand
cgggacaggugggugagaa

SEQ ID NO: 667225 - RNA, 19 nt, Homo sapiens
  misc_RNA (1)...(19): siRNA sense strand
gagacagccaaguccuauu

SEQ ID NO: 667226 - RNA, 19 nt, Homo sapiens
  misc_RNA (1)...(19): siRNA sense strand
ucaauggaggcgucugcua

SEQ ID NO: 667227 - RNA, 19 nt, Homo sapiens
  misc_RNA (1)...(19): siRNA sense strand
uauggcaacggcagaaaga

SEQ ID NO: 667228 - RNA, 19 nt, Homo sapiens
  misc_RNA (1)...(19): siRNA sense strand
acaggugggugagaagcaa

SEQ ID NO: 667229 - RNA, 19 nt, Homo sapiens
  misc_RNA (1)...(19): siRNA sense strand
aaccagcgcuacaucuuuu

SEQ ID NO: 667230 - RNA, 19 nt, Homo sapiens
  misc_RNA (1)...(19): siRNA sense strand
acucacgacuacaguucaa

SEQ ID NO: 667231 - RNA, 19 nt, Homo sapiens
  misc_RNA (1)...(19): siRNA sense strand
aaagaacucacgacuacag

SEQ ID NO: 667232 - RNA, 19 nt, Homo sapiens
  misc_RNA (1)...(19): siRNA sense strand
gaacagcccuuagucuuua

SEQ ID NO: 667233 - RNA, 19 nt, Homo sapiens
  misc_RNA (1)...(19): siRNA sense strand
ggaacagcccuuagucuuu

SEQ ID NO: 667234 - RNA, 19 nt, Homo sapiens
  misc_RNA (1)...(19): siRNA sense strand
uaaaggugcuggacaagug

SEQ ID NO: 667235 - RNA, 19 nt, Homo sapiens
  misc_RNA (1)...(19): siRNA sense strand
agaaagaacucacgacuac

SEQ ID NO: 667236 - RNA, 19 nt, Homo sapiens
  misc_RNA (1)...(19): siRNA sense strand
gaaccagcgcuacaucuuu

SEQ ID NO: 667237 - RNA, 19 nt, Homo sapiens
  misc_RNA (1)...(19): siRNA sense strand
gcaagauccugugcacuga

SEQ ID NO: 667238 - RNA, 19 nt, Homo sapiens
  misc_RNA (1)...(19): siRNA sense strand
gagaagcaaucgcugaagu

SEQ ID NO: 667239 - RNA, 19 nt, Homo sapiens
  misc_RNA (1)...(19): siRNA sense strand
gaaaggaaccagcgcuaca

SEQ ID NO: 667240 - RNA, 19 nt, Homo sapiens
  misc_RNA (1)...(19): siRNA sense strand
agaaagaggugggcaagau

SEQ ID NO: 667241 - RNA, 19 nt, Homo sapiens
  misc_RNA (1)...(19): siRNA sense strand
gagacauucgcaucaaaua

SEQ ID NO: 667242 - RNA, 19 nt, Homo sapiens
  misc_RNA (1)...(19): siRNA sense strand
agcaaucgcugaaguguga

SEQ ID NO: 667243 - RNA, 19 nt, Homo sapiens
  misc_RNA (1)...(19): siRNA sense strand
ucaaccagcucuccugcaa

SEQ ID NO: 667244 - RNA, 19 nt, Homo sapiens
  misc_RNA (1)...(19): siRNA sense strand
gacauucgcaucaaauaug

SEQ ID NO: 667245 - RNA, 19 nt, Homo sapiens
  misc_RNA (1)...(19): siRNA sense strand
ggaaccagcgcuacaucuu

SEQ ID NO: 667246 - RNA, 19 nt, Homo sapiens
  misc_RNA (1)...(19): siRNA sense strand
ggaggcgucugcuacuaca

SEQ ID NO: 667247 - RNA, 19 nt, Homo sapiens
  misc_RNA (1)...(19): siRNA sense strand
gaaagaggugggcaagauc

SEQ ID NO: 667248 - RNA, 19 nt, Homo sapiens
  misc_RNA (1)...(19): siRNA sense strand
cagaaagaacucacgacua

SEQ ID NO: 667249 - RNA, 19 nt, Homo sapiens
  misc_RNA (1)...(19): siRNA sense strand
gugugucgcucgccugcua

SEQ ID NO: 667250 - RNA, 19 nt, Homo sapiens
  misc_RNA (1)...(19): siRNA sense strand
ggcccaaguugaagaagau

SEQ ID NO: 667251 - RNA, 19 nt, Homo sapiens
  misc_RNA (1)...(19): siRNA sense strand
gaagcaaucgcugaagugu

SEQ ID NO: 667252 - RNA, 19 nt, Homo sapiens
  misc_RNA (1)...(19): siRNA sense strand
gcaacgagacagccaaguc

SEQ ID NO: 667253 - RNA, 19 nt, Homo sapiens
  misc_RNA (1)...(19): siRNA sense strand
ccgagacauucgcaucaaa

SEQ ID NO: 667254 - RNA, 19 nt, Homo sapiens
  misc_RNA (1)...(19): siRNA sense strand
agacagccaaguccuauug

SEQ ID NO: 667255 - RNA, 19 nt, Homo sapiens
  misc_RNA (1)...(19): siRNA sense strand
caaccgcagccgagacauu

SEQ ID NO: 667256 - RNA, 19 nt, Homo sapiens
  misc_RNA (1)...(19): siRNA sense strand
ugguaaaggugcuggacaa

SEQ ID NO: 667257 - RNA, 19 nt, Homo sapiens
  misc_RNA (1)...(19): siRNA sense strand
gacuacaguucaacaaggu

SEQ ID NO: 667258 - RNA, 19 nt, Homo sapiens
  misc_RNA (1)...(19): siRNA sense strand
ggaggacgcuggggaguau

SEQ ID NO: 667259 - RNA, 19 nt, Homo sapiens
  misc_RNA (1)...(19): siRNA sense strand
ccacggaacagcccuuagu

SEQ ID NO: 667260 - RNA, 19 nt, Homo sapiens
  misc_RNA (1)...(19): siRNA sense strand
ccaaguugaagaagaugaa

SEQ ID NO: 667261 - RNA, 19 nt, Homo sapiens
  misc_RNA (1)...(19): siRNA sense strand
caacaacagcagcaucucu

SEQ ID NO: 667262 - RNA, 19 nt, Homo sapiens
  misc_RNA (1)...(19): siRNA sense strand
cggaacagcccuuagucuu

SEQ ID NO: 667263 - RNA, 19 nt, Homo sapiens
  misc_RNA (1)...(19): siRNA sense strand
gugugccgcucgaaaggaa

SEQ ID NO: 667264 - RNA, 19 nt, Homo sapiens
  misc_RNA (1)...(19): siRNA sense strand
gccgagacauucgcaucaa

SEQ ID NO: 667265 - RNA, 19 nt, Homo sapiens
  misc_RNA (1)...(19): siRNA sense strand
ggugguggagggcaaggua

SEQ ID NO: 667266 - RNA, 19 nt, Homo sapiens
  misc_RNA (1)...(19): siRNA sense strand
gugagaagcaaucgcugaa

SEQ ID NO: 667267 - RNA, 19 nt, Homo sapiens
  misc_RNA (1)...(19): siRNA sense strand
agacauucgcaucaaauau

SEQ ID NO: 667268 - RNA, 19 nt, Homo sapiens
  misc_RNA (1)...(19): siRNA sense strand
cgagacauucgcaucaaau

SEQ ID NO: 667269 - RNA, 19 nt, Homo sapiens
  misc_RNA (1)...(19): siRNA sense strand
cgagacagccaaguccuau

SEQ ID NO: 667270 - RNA, 19 nt, Homo sapiens
  misc_RNA (1)...(19): siRNA sense strand
cggcccaaguugaagaaga

SEQ ID NO: 667271 - RNA, 19 nt, Homo sapiens
  misc_RNA (1)...(19): siRNA sense strand
ggucggguggcguugguaa

SEQ ID NO: 667272 - RNA, 19 nt, Homo sapiens
  misc_RNA (1)...(19): siRNA sense strand
gaaagaacucacgacuaca

SEQ ID NO: 667273 - RNA, 19 nt, Homo sapiens
  misc_RNA (1)...(19): siRNA sense strand
guaaaggugcuggacaagu

SEQ ID NO: 667274 - RNA, 19 nt, Homo sapiens
  misc_RNA (1)...(19): siRNA sense strand
cgggacaggugggugagaa

SEQ ID NO: 667275 - RNA, 19 nt, Homo sapiens
  misc_RNA (1)...(19): siRNA sense strand
gagacagccaaguccuauu

SEQ ID NO: 667276 - RNA, 19 nt, Homo sapiens
  misc_RNA (1)...(19): siRNA sense strand
ucaauggaggcgucugcua

SEQ ID NO: 667277 - RNA, 19 nt, Homo sapiens
  misc_RNA (1)...(19): siRNA sense strand
uauggcaacggcagaaaga

SEQ ID NO: 667278 - RNA, 19 nt, Homo sapiens
  misc_RNA (1)...(19): siRNA sense strand
acaggugggugagaagcaa

SEQ ID NO: 667279 - RNA, 19 nt, Homo sapiens
  misc_RNA (1)...(19): siRNA sense strand
aaccagcgcuacaucuuuu

SEQ ID NO: 667280 - RNA, 19 nt, Homo sapiens
  misc_RNA (1)...(19): siRNA sense strand
acucacgacuacaguucaa

SEQ ID NO: 667281 - RNA, 19 nt, Homo sapiens
  misc_RNA (1)...(19): siRNA sense strand
aaagaacucacgacuacag

SEQ ID NO: 667282 - RNA, 19 nt, Homo sapiens
  misc_RNA (1)...(19): siRNA sense strand
gaacagcccuuagucuuua

SEQ ID NO: 667283 - RNA, 19 nt, Homo sapiens
  misc_RNA (1)...(19): siRNA sense strand
ggaacagcccuuagucuuu

SEQ ID NO: 667284 - RNA, 19 nt, Homo sapiens
  misc_RNA (1)...(19): siRNA sense strand
uaaaggugcuggacaagug

SEQ ID NO: 667285 - RNA, 19 nt, Homo sapiens
  misc_RNA (1)...(19): siRNA sense strand
agaaagaacucacgacuac

SEQ ID NO: 667286 - RNA, 19 nt, Homo sapiens
  misc_RNA (1)...(19): siRNA sense strand
gaaccagcgcuacaucuuu

SEQ ID NO: 667287 - RNA, 19 nt, Homo sapiens
  misc_RNA (1)...(19): siRNA sense strand
gcaagauccugugcacuga

SEQ ID NO: 667288 - RNA, 19 nt, Homo sapiens
  misc_RNA (1)...(19): siRNA sense strand
gagaagcaaucgcugaagu

SEQ ID NO: 667289 - RNA, 19 nt, Homo sapiens
  misc_RNA (1)...(19): siRNA sense strand
gaaaggaaccagcgcuaca

SEQ ID NO: 667290 - RNA, 19 nt, Homo sapiens
  misc_RNA (1)...(19): siRNA sense strand
agaaagaggugggcaagau

SEQ ID NO: 667291 - RNA, 19 nt, Homo sapiens
  misc_RNA (1)...(19): siRNA sense strand
gagacauucgcaucaaaua

SEQ ID NO: 667292 - RNA, 19 nt, Homo sapiens
  misc_RNA (1)...(19): siRNA sense strand
agcaaucgcugaaguguga

SEQ ID NO: 667293 - RNA, 19 nt, Homo sapiens
  misc_RNA (1)...(19): siRNA sense strand
ucaaccagcucuccugcaa

SEQ ID NO: 667294 - RNA, 19 nt, Homo sapiens
  misc_RNA (1)...(19): siRNA sense strand
gacauucgcaucaaauaug

SEQ ID NO: 667295 - RNA, 19 nt, Homo sapiens
  misc_RNA (1)...(19): siRNA sense strand
ggaaccagcgcuacaucuu

SEQ ID NO: 667296 - RNA, 19 nt, Homo sapiens
  misc_RNA (1)...(19): siRNA sense strand
ggaggcgucugcuacuaca

SEQ ID NO: 667297 - RNA, 19 nt, Homo sapiens
  misc_RNA (1)...(19): siRNA sense strand
gaaagaggugggcaagauc

SEQ ID NO: 667298 - RNA, 19 nt, Homo sapiens
  misc_RNA (1)...(19): siRNA sense strand
cagaaagaacucacgacua

SEQ ID NO: 667299 - RNA, 19 nt, Homo sapiens
  misc_RNA (1)...(19): siRNA sense strand
gugugucgcucgccugcua

SEQ ID NO: 667300 - RNA, 19 nt, Homo sapiens
  misc_RNA (1)...(19): siRNA sense strand
ggcccaaguugaagaagau

SEQ ID NO: 667301 - RNA, 19 nt, Homo sapiens
  misc_RNA (1)...(19): siRNA sense strand
gaagcaaucgcugaagugu

SEQ ID NO: 667302 - RNA, 19 nt, Homo sapiens
  misc_RNA (1)...(19): siRNA sense strand
gcaacgagacagccaaguc

SEQ ID NO: 667303 - RNA, 19 nt, Homo sapiens
  misc_RNA (1)...(19): siRNA sense strand
ccgagacauucgcaucaaa

SEQ ID NO: 667304 - RNA, 19 nt, Homo sapiens
  misc_RNA (1)...(19): siRNA sense strand
agacagccaaguccuauug

SEQ ID NO: 667305 - RNA, 19 nt, Homo sapiens
  misc_RNA (1)...(19): siRNA sense strand
caaccgcagccgagacauu

SEQ ID NO: 667306 - RNA, 19 nt, Homo sapiens
  misc_RNA (1)...(19): siRNA sense strand
ugguaaaggugcuggacaa

SEQ ID NO: 667307 - RNA, 19 nt, Homo sapiens
  misc_RNA (1)...(19): siRNA sense strand
gacuacaguucaacaaggu

SEQ ID NO: 667308 - RNA, 19 nt, Homo sapiens
  misc_RNA (1)...(19): siRNA sense strand
ggaggacgcuggggaguau

SEQ ID NO: 667309 - RNA, 19 nt, Homo sapiens
  misc_RNA (1)...(19): siRNA sense strand
ccacggaacagcccuuagu

SEQ ID NO: 667310 - RNA, 19 nt, Homo sapiens
  misc_RNA (1)...(19): siRNA sense strand
ccaaguugaagaagaugaa

SEQ ID NO: 667311 - RNA, 19 nt, Homo sapiens
  misc_RNA (1)...(19): siRNA sense strand
caacaacagcagcaucucu

SEQ ID NO: 667312 - RNA, 19 nt, Homo sapiens
  misc_RNA (1)...(19): siRNA sense strand
cggaacagcccuuagucuu

SEQ ID NO: 667313 - RNA, 19 nt, Homo sapiens
  misc_RNA (1)...(19): siRNA sense strand
gugugccgcucgaaaggaa

SEQ ID NO: 667314 - RNA, 19 nt, Homo sapiens
  misc_RNA (1)...(19): siRNA sense strand
gccgagacauucgcaucaa

SEQ ID NO: 667315 - RNA, 19 nt, Homo sapiens
  misc_RNA (1)...(19): siRNA sense strand
ggugguggagggcaaggua

SEQ ID NO: 667316 - RNA, 19 nt, Homo sapiens
  misc_RNA (1)...(19): siRNA sense strand
gugagaagcaaucgcugaa

SEQ ID NO: 667317 - RNA, 19 nt, Homo sapiens
  misc_RNA (1)...(19): siRNA sense strand
agacauucgcaucaaauau

SEQ ID NO: 667318 - RNA, 19 nt, Homo sapiens
  misc_RNA (1)...(19): siRNA sense strand
cgagacauucgcaucaaau

SEQ ID NO: 667319 - RNA, 19 nt, Homo sapiens
  misc_RNA (1)...(19): siRNA sense strand
cgagacagccaaguccuau

SEQ ID NO: 667320 - RNA, 19 nt, Homo sapiens
  misc_RNA (1)...(19): siRNA sense strand
cggcccaaguugaagaaga

SEQ ID NO: 667321 - RNA, 19 nt, Homo sapiens
  misc_RNA (1)...(19): siRNA sense strand
ggucggguggcguugguaa

SEQ ID NO: 667322 - RNA, 19 nt, Homo sapiens
  misc_RNA (1)...(19): siRNA sense strand
gaaagaacucacgacuaca

SEQ ID NO: 667323 - RNA, 19 nt, Homo sapiens
  misc_RNA (1)...(19): siRNA sense strand
guaaaggugcuggacaagu

SEQ ID NO: 667324 - RNA, 19 nt, Homo sapiens
  misc_RNA (1)...(19): siRNA sense strand
cgggacaggugggugagaa

SEQ ID NO: 667325 - RNA, 19 nt, Homo sapiens
  misc_RNA (1)...(19): siRNA sense strand
gagacagccaaguccuauu

SEQ ID NO: 667326 - RNA, 19 nt, Homo sapiens
  misc_RNA (1)...(19): siRNA sense strand
ucaauggaggcgucugcua

SEQ ID NO: 667327 - RNA, 19 nt, Homo sapiens
  misc_RNA (1)...(19): siRNA sense strand
uauggcaacggcagaaaga

SEQ ID NO: 667328 - RNA, 19 nt, Homo sapiens
  misc_RNA (1)...(19): siRNA sense strand
acaggugggugagaagcaa

SEQ ID NO: 667329 - RNA, 19 nt, Homo sapiens
  misc_RNA (1)...(19): siRNA sense strand
aaccagcgcuacaucuuuu

SEQ ID NO: 667330 - RNA, 19 nt, Homo sapiens
  misc_RNA (1)...(19): siRNA sense strand
acucacgacuacaguucaa

SEQ ID NO: 667331 - RNA, 19 nt, Homo sapiens
  misc_RNA (1)...(19): siRNA sense strand
aaagaacucacgacuacag

SEQ ID NO: 667332 - RNA, 19 nt, Homo sapiens
  misc_RNA (1)...(19): siRNA sense strand
gaacagcccuuagucuuua

SEQ ID NO: 667333 - RNA, 19 nt, Homo sapiens
  misc_RNA (1)...(19): siRNA sense strand
ggaacagcccuuagucuuu

SEQ ID NO: 667334 - RNA, 19 nt, Homo sapiens
  misc_RNA (1)...(19): siRNA sense strand
uaaaggugcuggacaagug

SEQ ID NO: 667335 - RNA, 19 nt, Homo sapiens
  misc_RNA (1)...(19): siRNA sense strand
agaaagaacucacgacuac

SEQ ID NO: 667336 - RNA, 19 nt, Homo sapiens
  misc_RNA (1)...(19): siRNA sense strand
gaaccagcgcuacaucuuu

SEQ ID NO: 667337 - RNA, 19 nt, Homo sapiens
  misc_RNA (1)...(19): siRNA sense strand
gcaagauccugugcacuga

SEQ ID NO: 667338 - RNA, 19 nt, Homo sapiens
  misc_RNA (1)...(19): siRNA sense strand
gagaagcaaucgcugaagu

SEQ ID NO: 667339 - RNA, 19 nt, Homo sapiens
  misc_RNA (1)...(19): siRNA sense strand
gaaaggaaccagcgcuaca

SEQ ID NO: 667340 - RNA, 19 nt, Homo sapiens
  misc_RNA (1)...(19): siRNA sense strand
agaaagaggugggcaagau

SEQ ID NO: 667341 - RNA, 19 nt, Homo sapiens
  misc_RNA (1)...(19): siRNA sense strand
gagacauucgcaucaaaua

SEQ ID NO: 667342 - RNA, 19 nt, Homo sapiens
  misc_RNA (1)...(19): siRNA sense strand
agcaaucgcugaaguguga

SEQ ID NO: 667343 - RNA, 19 nt, Homo sapiens
  misc_RNA (1)...(19): siRNA sense strand
ucaaccagcucuccugcaa

SEQ ID NO: 667344 - RNA, 19 nt, Homo sapiens
  misc_RNA (1)...(19): siRNA sense strand
gacauucgcaucaaauaug

SEQ ID NO: 667345 - RNA, 19 nt, Homo sapiens
  misc_RNA (1)...(19): siRNA sense strand
ggaaccagcgcuacaucuu

SEQ ID NO: 667346 - RNA, 19 nt, Homo sapiens
  misc_RNA (1)...(19): siRNA sense strand
ggaggcgucugcuacuaca

SEQ ID NO: 667347 - RNA, 19 nt, Homo sapiens
  misc_RNA (1)...(19): siRNA sense strand
gaaagaggugggcaagauc

SEQ ID NO: 667348 - RNA, 19 nt, Homo sapiens
  misc_RNA (1)...(19): siRNA sense strand
cagaaagaacucacgacua

SEQ ID NO: 667349 - RNA, 19 nt, Homo sapiens
  misc_RNA (1)...(19): siRNA sense strand
gugugucgcucgccugcua

SEQ ID NO: 667350 - RNA, 19 nt, Homo sapiens
  misc_RNA (1)...(19): siRNA sense strand
ggcccaaguugaagaagau

SEQ ID NO: 667351 - RNA, 19 nt, Homo sapiens
  misc_RNA (1)...(19): siRNA sense strand
gaagcaaucgcugaagugu

SEQ ID NO: 667352 - RNA, 19 nt, Homo sapiens
  misc_RNA (1)...(19): siRNA sense strand
gcaacgagacagccaaguc

SEQ ID NO: 667353 - RNA, 19 nt, Homo sapiens
  misc_RNA (1)...(19): siRNA sense strand
ccgagacauucgcaucaaa

SEQ ID NO: 667354 - RNA, 19 nt, Homo sapiens
  misc_RNA (1)...(19): siRNA sense strand
agacagccaaguccuauug

SEQ ID NO: 667355 - RNA, 19 nt, Homo sapiens
  misc_RNA (1)...(19): siRNA sense strand
caaccgcagccgagacauu

SEQ ID NO: 667356 - RNA, 19 nt, Homo sapiens
  misc_RNA (1)...(19): siRNA sense strand
ugguaaaggugcuggacaa

SEQ ID NO: 667357 - RNA, 19 nt, Homo sapiens
  misc_RNA (1)...(19): siRNA sense strand
gacuacaguucaacaaggu

SEQ ID NO: 667358 - RNA, 19 nt, Homo sapiens
  misc_RNA (1)...(19): siRNA sense strand
ggaggacgcuggggaguau

SEQ ID NO: 667359 - RNA, 19 nt, Homo sapiens
  misc_RNA (1)...(19): siRNA sense strand
ccacggaacagcccuuagu

SEQ ID NO: 667360 - RNA, 19 nt, Homo sapiens
  misc_RNA (1)...(19): siRNA sense strand
ccaaguugaagaagaugaa

SEQ ID NO: 667361 - RNA, 19 nt, Homo sapiens
  misc_RNA (1)...(19): siRNA sense strand
caacaacagcagcaucucu

SEQ ID NO: 667362 - RNA, 19 nt, Homo sapiens
  misc_RNA (1)...(19): siRNA sense strand
cggaacagcccuuagucuu

SEQ ID NO: 667363 - RNA, 19 nt, Homo sapiens
  misc_RNA (1)...(19): siRNA sense strand
gugugccgcucgaaaggaa

SEQ ID NO: 667364 - RNA, 19 nt, Homo sapiens
  misc_RNA (1)...(19): siRNA sense strand
gccgagacauucgcaucaa

SEQ ID NO: 667365 - RNA, 19 nt, Homo sapiens
  misc_RNA (1)...(19): siRNA sense strand
ggugguggagggcaaggua

SEQ ID NO: 667366 - RNA, 19 nt, Homo sapiens
  misc_RNA (1)...(19): siRNA sense strand
gugagaagcaaucgcugaa

SEQ ID NO: 667367 - RNA, 19 nt, Homo sapiens
  misc_RNA (1)...(19): siRNA sense strand
agacauucgcaucaaauau

SEQ ID NO: 667368 - RNA, 19 nt, Homo sapiens
  misc_RNA (1)...(19): siRNA sense strand
cgagacauucgcaucaaau

SEQ ID NO: 667369 - RNA, 19 nt, Homo sapiens
  misc_RNA (1)...(19): siRNA sense strand
cgagacagccaaguccuau

SEQ ID NO: 667370 - RNA, 19 nt, Homo sapiens
  misc_RNA (1)...(19): siRNA sense strand
cggcccaaguugaagaaga

SEQ ID NO: 667371 - RNA, 19 nt, Homo sapiens
  misc_RNA (1)...(19): siRNA sense strand
ggucggguggcguugguaa

SEQ ID NO: 667372 - RNA, 19 nt, Homo sapiens
  misc_RNA (1)...(19): siRNA sense strand
gaaagaacucacgacuaca

SEQ ID NO: 667373 - RNA, 19 nt, Homo sapiens
  misc_RNA (1)...(19): siRNA sense strand
guaaaggugcuggacaagu

SEQ ID NO: 667374 - RNA, 19 nt, Homo sapiens
  misc_RNA (1)...(19): siRNA sense strand
cgggacaggugggugagaa

SEQ ID NO: 667375 - RNA, 19 nt, Homo sapiens
  misc_RNA (1)...(19): siRNA sense strand
gagacagccaaguccuauu

SEQ ID NO: 667376 - RNA, 19 nt, Homo sapiens
  misc_RNA (1)...(19): siRNA sense strand
ucaauggaggcgucugcua

SEQ ID NO: 667377 - RNA, 19 nt, Homo sapiens
  misc_RNA (1)...(19): siRNA sense strand
uauggcaacggcagaaaga

SEQ ID NO: 667378 - RNA, 19 nt, Homo sapiens
  misc_RNA (1)...(19): siRNA sense strand
acaggugggugagaagcaa

SEQ ID NO: 667379 - RNA, 19 nt, Homo sapiens
  misc_RNA (1)...(19): siRNA sense strand
aaccagcgcuacaucuuuu

SEQ ID NO: 667380 - RNA, 19 nt, Homo sapiens
  misc_RNA (1)...(19): siRNA sense strand
acucacgacuacaguucaa

SEQ ID NO: 667381 - RNA, 19 nt, Homo sapiens
  misc_RNA (1)...(19): siRNA sense strand
aaagaacucacgacuacag

SEQ ID NO: 667382 - RNA, 19 nt, Homo sapiens
  misc_RNA (1)...(19): siRNA sense strand
gaacagcccuuagucuuua

SEQ ID NO: 667383 - RNA, 19 nt, Homo sapiens
  misc_RNA (1)...(19): siRNA sense strand
ggaacagcccuuagucuuu

SEQ ID NO: 667384 - RNA, 19 nt, Homo sapiens
  misc_RNA (1)...(19): siRNA sense strand
uaaaggugcuggacaagug

SEQ ID NO: 667385 - RNA, 19 nt, Homo sapiens
  misc_RNA (1)...(19): siRNA sense strand
agaaagaacucacgacuac

SEQ ID NO: 667386 - RNA, 19 nt, Homo sapiens
  misc_RNA (1)...(19): siRNA sense strand
gaaccagcgcuacaucuuu

SEQ ID NO: 667387 - RNA, 19 nt, Homo sapiens
  misc_RNA (1)...(19): siRNA sense strand
gcaagauccugugcacuga

SEQ ID NO: 667388 - RNA, 19 nt, Homo sapiens
  misc_RNA (1)...(19): siRNA sense strand
gagaagcaaucgcugaagu

SEQ ID NO: 667389 - RNA, 19 nt, Homo sapiens
  misc_RNA (1)...(19): siRNA sense strand
gaaaggaaccagcgcuaca

SEQ ID NO: 667390 - RNA, 19 nt, Homo sapiens
  misc_RNA (1)...(19): siRNA sense strand
agaaagaggugggcaagau

SEQ ID NO: 667391 - RNA, 19 nt, Homo sapiens
  misc_RNA (1)...(19): siRNA sense strand
gagacauucgcaucaaaua

SEQ ID NO: 667392 - RNA, 19 nt, Homo sapiens
  misc_RNA (1)...(19): siRNA sense strand
agcaaucgcugaaguguga

SEQ ID NO: 667393 - RNA, 19 nt, Homo sapiens
  misc_RNA (1)...(19): siRNA sense strand
ucaaccagcucuccugcaa

SEQ ID NO: 667394 - RNA, 19 nt, Homo sapiens
  misc_RNA (1)...(19): siRNA sense strand
gacauucgcaucaaauaug

SEQ ID NO: 667395 - RNA, 19 nt, Homo sapiens
  misc_RNA (1)...(19): siRNA sense strand
ggaaccagcgcuacaucuu

SEQ ID NO: 667396 - RNA, 19 nt, Homo sapiens
  misc_RNA (1)...(19): siRNA sense strand
ggaggcgucugcuacuaca

SEQ ID NO: 667397 - RNA, 19 nt, Homo sapiens
  misc_RNA (1)...(19): siRNA sense strand
gaaagaggugggcaagauc

SEQ ID NO: 667398 - RNA, 19 nt, Homo sapiens
  misc_RNA (1)...(19): siRNA sense strand
cagaaagaacucacgacua

SEQ ID NO: 667399 - RNA, 19 nt, Homo sapiens
  misc_RNA (1)...(19): siRNA sense strand
gugugucgcucgccugcua

SEQ ID NO: 667400 - RNA, 19 nt, Homo sapiens
  misc_RNA (1)...(19): siRNA sense strand
ggcccaaguugaagaagau

SEQ ID NO: 667401 - RNA, 19 nt, Homo sapiens
  misc_RNA (1)...(19): siRNA sense strand
gaagcaaucgcugaagugu

SEQ ID NO: 667402 - RNA, 19 nt, Homo sapiens
  misc_RNA (1)...(19): siRNA sense strand
gcaacgagacagccaaguc

SEQ ID NO: 667403 - RNA, 19 nt, Homo sapiens
  misc_RNA (1)...(19): siRNA sense strand
ccgagacauucgcaucaaa

SEQ ID NO: 667404 - RNA, 19 nt, Homo sapiens
  misc_RNA (1)...(19): siRNA sense strand
agacagccaaguccuauug

SEQ ID NO: 667405 - RNA, 19 nt, Homo sapiens
  misc_RNA (1)...(19): siRNA sense strand
caaccgcagccgagacauu

SEQ ID NO: 667406 - RNA, 19 nt, Homo sapiens
  misc_RNA (1)...(19): siRNA sense strand
ugguaaaggugcuggacaa

SEQ ID NO: 667407 - RNA, 19 nt, Homo sapiens
  misc_RNA (1)...(19): siRNA sense strand
gacuacaguucaacaaggu

SEQ ID NO: 667408 - RNA, 19 nt, Homo sapiens
  misc_RNA (1)...(19): siRNA sense strand
ggaggacgcuggggaguau

SEQ ID NO: 667409 - RNA, 19 nt, Homo sapiens
  misc_RNA (1)...(19): siRNA sense strand
ccacggaacagcccuuagu

SEQ ID NO: 667410 - RNA, 19 nt, Homo sapiens
  misc_RNA (1)...(19): siRNA sense strand
ccaaguugaagaagaugaa

SEQ ID NO: 667411 - RNA, 19 nt, Homo sapiens
  misc_RNA (1)...(19): siRNA sense strand
caacaacagcagcaucucu

SEQ ID NO: 667412 - RNA, 19 nt, Homo sapiens
  misc_RNA (1)...(19): siRNA sense strand
cggaacagcccuuagucuu

SEQ ID NO: 667413 - RNA, 19 nt, Homo sapiens
  misc_RNA (1)...(19): siRNA sense strand
gugugccgcucgaaaggaa

SEQ ID NO: 667414 - RNA, 19 nt, Homo sapiens
  misc_RNA (1)...(19): siRNA sense strand
gccgagacauucgcaucaa

SEQ ID NO: 667415 - RNA, 19 nt, Homo sapiens
  misc_RNA (1)...(19): siRNA sense strand
ggugguggagggcaaggua

SEQ ID NO: 667416 - RNA, 19 nt, Homo sapiens
  misc_RNA (1)...(19): siRNA sense strand
gugagaagcaaucgcugaa

SEQ ID NO: 667417 - RNA, 19 nt, Homo sapiens
  misc_RNA (1)...(19): siRNA sense strand
agacauucgcaucaaauau

SEQ ID NO: 667418 - RNA, 19 nt, Homo sapiens
  misc_RNA (1)...(19): siRNA sense strand
cgagacauucgcaucaaau

SEQ ID NO: 667419 - RNA, 19 nt, Homo sapiens
  misc_RNA (1)...(19): siRNA sense strand
cgagacagccaaguccuau

SEQ ID NO: 667420 - RNA, 19 nt, Homo sapiens
  misc_RNA (1)...(19): siRNA sense strand
cggcccaaguugaagaaga

SEQ ID NO: 667421 - RNA, 19 nt, Homo sapiens
  misc_RNA (1)...(19): siRNA sense strand
ggucggguggcguugguaa

SEQ ID NO: 667422 - RNA, 19 nt, Homo sapiens
  misc_RNA (1)...(19): siRNA sense strand
gaaagaacucacgacuaca

SEQ ID NO: 667423 - RNA, 19 nt, Homo sapiens
  misc_RNA (1)...(19): siRNA sense strand
guaaaggugcuggacaagu

SEQ ID NO: 667424 - RNA, 19 nt, Homo sapiens
  misc_RNA (1)...(19): siRNA sense strand
cgggacaggugggugagaa

SEQ ID NO: 667425 - RNA, 19 nt, Homo sapiens
  misc_RNA (1)...(19): siRNA sense strand
gagacagccaaguccuauu

SEQ ID NO: 667426 - RNA, 19 nt, Homo sapiens
  misc_RNA (1)...(19): siRNA sense strand
ucaauggaggcgucugcua

SEQ ID NO: 667427 - RNA, 19 nt, Homo sapiens
  misc_RNA (1)...(19): siRNA sense strand
uauggcaacggcagaaaga

SEQ ID NO: 667428 - RNA, 19 nt, Homo sapiens
  misc_RNA (1)...(19): siRNA sense strand
acaggugggugagaagcaa

SEQ ID NO: 667429 - RNA, 19 nt, Homo sapiens
  misc_RNA (1)...(19): siRNA sense strand
aaccagcgcuacaucuuuu

SEQ ID NO: 667430 - RNA, 19 nt, Homo sapiens
  misc_RNA (1)...(19): siRNA sense strand
acucacgacuacaguucaa

SEQ ID NO: 667431 - RNA, 19 nt, Homo sapiens
  misc_RNA (1)...(19): siRNA sense strand
aaagaacucacgacuacag

SEQ ID NO: 667432 - RNA, 19 nt, Homo sapiens
  misc_RNA (1)...(19): siRNA sense strand
gaacagcccuuagucuuua

SEQ ID NO: 667433 - RNA, 19 nt, Homo sapiens
  misc_RNA (1)...(19): siRNA sense strand
ggaacagcccuuagucuuu

SEQ ID NO: 667434 - RNA, 19 nt, Homo sapiens
  misc_RNA (1)...(19): siRNA sense strand
uaaaggugcuggacaagug

SEQ ID NO: 667435 - RNA, 19 nt, Homo sapiens
  misc_RNA (1)...(19): siRNA sense strand
agaaagaacucacgacuac

SEQ ID NO: 667436 - RNA, 19 nt, Homo sapiens
  misc_RNA (1)...(19): siRNA sense strand
gaaccagcgcuacaucuuu

SEQ ID NO: 667437 - RNA, 19 nt, Homo sapiens
  misc_RNA (1)...(19): siRNA sense strand
gcaagauccugugcacuga

SEQ ID NO: 667438 - RNA, 19 nt, Homo sapiens
  misc_RNA (1)...(19): siRNA sense strand
gagaagcaaucgcugaagu

SEQ ID NO: 667439 - RNA, 19 nt, Homo sapiens
  misc_RNA (1)...(19): siRNA sense strand
gaaaggaaccagcgcuaca

SEQ ID NO: 667440 - RNA, 19 nt, Homo sapiens
  misc_RNA (1)...(19): siRNA sense strand
agaaagaggugggcaagau

SEQ ID NO: 667441 - RNA, 19 nt, Homo sapiens
  misc_RNA (1)...(19): siRNA sense strand
gagacauucgcaucaaaua

SEQ ID NO: 667442 - RNA, 19 nt, Homo sapiens
  misc_RNA (1)...(19): siRNA sense strand
agcaaucgcugaaguguga

SEQ ID NO: 667443 - RNA, 19 nt, Homo sapiens
  misc_RNA (1)...(19): siRNA sense strand
ucaaccagcucuccugcaa

SEQ ID NO: 667444 - RNA, 19 nt, Homo sapiens
  misc_RNA (1)...(19): siRNA sense strand
gacauucgcaucaaauaug

SEQ ID NO: 667445 - RNA, 19 nt, Homo sapiens
  misc_RNA (1)...(19): siRNA sense strand
ggaaccagcgcuacaucuu

SEQ ID NO: 667446 - RNA, 19 nt, Homo sapiens
  misc_RNA (1)...(19): siRNA sense strand
ggaggcgucugcuacuaca

SEQ ID NO: 667447 - RNA, 19 nt, Homo sapiens
  misc_RNA (1)...(19): siRNA sense strand
gaaagaggugggcaagauc

SEQ ID NO: 667448 - RNA, 19 nt, Homo sapiens
  misc_RNA (1)...(19): siRNA sense strand
cagaaagaacucacgacua

SEQ ID NO: 667449 - RNA, 19 nt, Homo sapiens
  misc_RNA (1)...(19): siRNA sense strand
gugugucgcucgccugcua

SEQ ID NO: 667450 - RNA, 19 nt, Homo sapiens
  misc_RNA (1)...(19): siRNA sense strand
ggcccaaguugaagaagau

SEQ ID NO: 667451 - RNA, 19 nt, Homo sapiens
  misc_RNA (1)...(19): siRNA sense strand
gaagcaaucgcugaagugu

SEQ ID NO: 667452 - RNA, 19 nt, Homo sapiens
  misc_RNA (1)...(19): siRNA sense strand
gcaacgagacagccaaguc

SEQ ID NO: 667453 - RNA, 19 nt, Homo sapiens
  misc_RNA (1)...(19): siRNA sense strand
ccgagacauucgcaucaaa

SEQ ID NO: 667454 - RNA, 19 nt, Homo sapiens
  misc_RNA (1)...(19): siRNA sense strand
agacagccaaguccuauug

SEQ ID NO: 667455 - RNA, 19 nt, Homo sapiens
  misc_RNA (1)...(19): siRNA sense strand
caaccgcagccgagacauu

SEQ ID NO: 667456 - RNA, 19 nt, Homo sapiens
  misc_RNA (1)...(19): siRNA sense strand
ugguaaaggugcuggacaa

SEQ ID NO: 667457 - RNA, 19 nt, Homo sapiens
  misc_RNA (1)...(19): siRNA sense strand
gacuacaguucaacaaggu

SEQ ID NO: 667458 - RNA, 19 nt, Homo sapiens
  misc_RNA (1)...(19): siRNA sense strand
ggaggacgcuggggaguau

SEQ ID NO: 667459 - RNA, 19 nt, Homo sapiens
  misc_RNA (1)...(19): siRNA sense strand
ccacggaacagcccuuagu

SEQ ID NO: 667460 - RNA, 19 nt, Homo sapiens
  misc_RNA (1)...(19): siRNA sense strand
ccaaguugaagaagaugaa

SEQ ID NO: 667461 - RNA, 19 nt, Homo sapiens
  misc_RNA (1)...(19): siRNA sense strand
caacaacagcagcaucucu

SEQ ID NO: 667462 - RNA, 19 nt, Homo sapiens
  misc_RNA (1)...(19): siRNA sense strand
cggaacagcccuuagucuu

SEQ ID NO: 667463 - RNA, 19 nt, Homo sapiens
  misc_RNA (1)...(19): siRNA sense strand
gugugccgcucgaaaggaa

SEQ ID NO: 667464 - RNA, 19 nt, Homo sapiens
  misc_RNA (1)...(19): siRNA sense strand
gccgagacauucgcaucaa

SEQ ID NO: 667465 - RNA, 19 nt, Homo sapiens
  misc_RNA (1)...(19): siRNA sense strand
ggugguggagggcaaggua

SEQ ID NO: 667466 - RNA, 19 nt, Homo sapiens
  misc_RNA (1)...(19): siRNA sense strand
gugagaagcaaucgcugaa

SEQ ID NO: 667467 - RNA, 19 nt, Homo sapiens
  misc_RNA (1)...(19): siRNA sense strand
agacauucgcaucaaauau

SEQ ID NO: 667468 - RNA, 19 nt, Homo sapiens
  misc_RNA (1)...(19): siRNA sense strand
cgagacauucgcaucaaau

SEQ ID NO: 667469 - RNA, 19 nt, Homo sapiens
  misc_RNA (1)...(19): siRNA sense strand
cgagacagccaaguccuau

SEQ ID NO: 667470 - RNA, 19 nt, Homo sapiens
  misc_RNA (1)...(19): siRNA sense strand
cggcccaaguugaagaaga

SEQ ID NO: 667471 - RNA, 19 nt, Homo sapiens
  misc_RNA (1)...(19): siRNA sense strand
ggucggguggcguugguaa

SEQ ID NO: 667472 - RNA, 19 nt, Homo sapiens
  misc_RNA (1)...(19): siRNA sense strand
gaaagaacucacgacuaca

SEQ ID NO: 667473 - RNA, 19 nt, Homo sapiens
  misc_RNA (1)...(19): siRNA sense strand
guaaaggugcuggacaagu

SEQ ID NO: 667474 - RNA, 19 nt, Homo sapiens
  misc_RNA (1)...(19): siRNA sense strand
cgggacaggugggugagaa

SEQ ID NO: 667475 - RNA, 19 nt, Homo sapiens
  misc_RNA (1)...(19): siRNA sense strand
gagacagccaaguccuauu

SEQ ID NO: 667476 - RNA, 19 nt, Homo sapiens
  misc_RNA (1)...(19): siRNA sense strand
ucaauggaggcgucugcua

SEQ ID NO: 667477 - RNA, 19 nt, Homo sapiens
  misc_RNA (1)...(19): siRNA sense strand
uauggcaacggcagaaaga

SEQ ID NO: 667478 - RNA, 19 nt, Homo sapiens
  misc_RNA (1)...(19): siRNA sense strand
acaggugggugagaagcaa

SEQ ID NO: 667479 - RNA, 19 nt, Homo sapiens
  misc_RNA (1)...(19): siRNA sense strand
aaccagcgcuacaucuuuu

SEQ ID NO: 667480 - RNA, 19 nt, Homo sapiens
  misc_RNA (1)...(19): siRNA sense strand
acucacgacuacaguucaa

SEQ ID NO: 667481 - RNA, 19 nt, Homo sapiens
  misc_RNA (1)...(19): siRNA sense strand
aaagaacucacgacuacag

SEQ ID NO: 667482 - RNA, 19 nt, Homo sapiens
  misc_RNA (1)...(19): siRNA sense strand
gaacagcccuuagucuuua

SEQ ID NO: 667483 - RNA, 19 nt, Homo sapiens
  misc_RNA (1)...(19): siRNA sense strand
ggaacagcccuuagucuuu

SEQ ID NO: 667484 - RNA, 19 nt, Homo sapiens
  misc_RNA (1)...(19): siRNA sense strand
uaaaggugcuggacaagug

SEQ ID NO: 667485 - RNA, 19 nt, Homo sapiens
  misc_RNA (1)...(19): siRNA sense strand
agaaagaacucacgacuac

SEQ ID NO: 667486 - RNA, 19 nt, Homo sapiens
  misc_RNA (1)...(19): siRNA sense strand
gaaccagcgcuacaucuuu

SEQ ID NO: 667487 - RNA, 19 nt, Homo sapiens
  misc_RNA (1)...(19): siRNA sense strand
gcaagauccugugcacuga

SEQ ID NO: 667488 - RNA, 19 nt, Homo sapiens
  misc_RNA (1)...(19): siRNA sense strand
gagaagcaaucgcugaagu

SEQ ID NO: 667489 - RNA, 19 nt, Homo sapiens
  misc_RNA (1)...(19): siRNA sense strand
gaaaggaaccagcgcuaca

SEQ ID NO: 667490 - RNA, 19 nt, Homo sapiens
  misc_RNA (1)...(19): siRNA sense strand
agaaagaggugggcaagau

SEQ ID NO: 667491 - RNA, 19 nt, Homo sapiens
  misc_RNA (1)...(19): siRNA sense strand
gagacauucgcaucaaaua

SEQ ID NO: 667492 - RNA, 19 nt, Homo sapiens
  misc_RNA (1)...(19): siRNA sense strand
agcaaucgcugaaguguga

SEQ ID NO: 667493 - RNA, 19 nt, Homo sapiens
  misc_RNA (1)...(19): siRNA sense strand
ucaaccagcucuccugcaa

SEQ ID NO: 667494 - RNA, 19 nt, Homo sapiens
  misc_RNA (1)...(19): siRNA sense strand
gacauucgcaucaaauaug

SEQ ID NO: 667495 - RNA, 19 nt, Homo sapiens
  misc_RNA (1)...(19): siRNA sense strand
ggaaccagcgcuacaucuu

SEQ ID NO: 667496 - RNA, 19 nt, Homo sapiens
  misc_RNA (1)...(19): siRNA sense strand
ggaggcgucugcuacuaca

SEQ ID NO: 667497 - RNA, 19 nt, Homo sapiens
  misc_RNA (1)...(19): siRNA sense strand
gaaagaggugggcaagauc

SEQ ID NO: 667498 - RNA, 19 nt, Homo sapiens
  misc_RNA (1)...(19): siRNA sense strand
cagaaagaacucacgacua

SEQ ID NO: 667499 - RNA, 19 nt, Homo sapiens
  misc_RNA (1)...(19): siRNA sense strand
gugugucgcucgccugcua

SEQ ID NO: 667500 - RNA, 19 nt, Homo sapiens
  misc_RNA (1)...(19): siRNA sense strand
ggcccaaguugaagaagau

SEQ ID NO: 667501 - RNA, 19 nt, Homo sapiens
  misc_RNA (1)...(19): siRNA sense strand
gaagcaaucgcugaagugu

SEQ ID NO: 667502 - RNA, 19 nt, Homo sapiens
  misc_RNA (1)...(19): siRNA sense strand
gcaacgagacagccaaguc

SEQ ID NO: 667503 - RNA, 19 nt, Homo sapiens
  misc_RNA (1)...(19): siRNA sense strand
ccgagacauucgcaucaaa

SEQ ID NO: 667504 - RNA, 19 nt, Homo sapiens
  misc_RNA (1)...(19): siRNA sense strand
agacagccaaguccuauug

SEQ ID NO: 667505 - RNA, 19 nt, Homo sapiens
  misc_RNA (1)...(19): siRNA sense strand
caaccgcagccgagacauu

SEQ ID NO: 667506 - RNA, 19 nt, Homo sapiens
  misc_RNA (1)...(19): siRNA sense strand
ugguaaaggugcuggacaa

SEQ ID NO: 667507 - RNA, 19 nt, Homo sapiens
  misc_RNA (1)...(19): siRNA sense strand
gacuacaguucaacaaggu

SEQ ID NO: 667508 - RNA, 19 nt, Homo sapiens
  misc_RNA (1)...(19): siRNA sense strand
ggaggacgcuggggaguau

SEQ ID NO: 667509 - RNA, 19 nt, Homo sapiens
  misc_RNA (1)...(19): siRNA sense strand
ccacggaacagcccuuagu

SEQ ID NO: 667510 - RNA, 19 nt, Homo sapiens
  misc_RNA (1)...(19): siRNA sense strand
ccaaguugaagaagaugaa

SEQ ID NO: 667511 - RNA, 19 nt, Homo sapiens
  misc_RNA (1)...(19): siRNA sense strand
caacaacagcagcaucucu

SEQ ID NO: 667512 - RNA, 19 nt, Homo sapiens
  misc_RNA (1)...(19): siRNA sense strand
cggaacagcccuuagucuu

SEQ ID NO: 667513 - RNA, 19 nt, Homo sapiens
  misc_RNA (1)...(19): siRNA sense strand
gugugccgcucgaaaggaa

SEQ ID NO: 667514 - RNA, 19 nt, Homo sapiens
  misc_RNA (1)...(19): siRNA sense strand
gccgagacauucgcaucaa

SEQ ID NO: 667515 - RNA, 19 nt, Homo sapiens
  misc_RNA (1)...(19): siRNA sense strand
ggugguggagggcaaggua

SEQ ID NO: 667516 - RNA, 19 nt, Homo sapiens
  misc_RNA (1)...(19): siRNA sense strand
gugagaagcaaucgcugaa

SEQ ID NO: 667517 - RNA, 19 nt, Homo sapiens
  misc_RNA (1)...(19): siRNA sense strand
agacauucgcaucaaauau

SEQ ID NO: 667518 - RNA, 19 nt, Homo sapiens
  misc_RNA (1)...(19): siRNA sense strand
cgagacauucgcaucaaau

SEQ ID NO: 667519 - RNA, 19 nt, Homo sapiens
  misc_RNA (1)...(19): siRNA sense strand
cgagacagccaaguccuau

SEQ ID NO: 667520 - RNA, 19 nt, Homo sapiens
  misc_RNA (1)...(19): siRNA sense strand
cggcccaaguugaagaaga

SEQ ID NO: 667521 - RNA, 19 nt, Homo sapiens
  misc_RNA (1)...(19): siRNA sense strand
ggucggguggcguugguaa

SEQ ID NO: 667522 - RNA, 19 nt, Homo sapiens
  misc_RNA (1)...(19): siRNA sense strand
gaaagaacucacgacuaca

SEQ ID NO: 667523 - RNA, 19 nt, Homo sapiens
  misc_RNA (1)...(19): siRNA sense strand
guaaaggugcuggacaagu

SEQ ID NO: 667524 - RNA, 19 nt, Homo sapiens
  misc_RNA (1)...(19): siRNA sense strand
cgggacaggugggugagaa

SEQ ID NO: 667525 - RNA, 19 nt, Homo sapiens
  misc_RNA (1)...(19): siRNA sense strand
gagacagccaaguccuauu

SEQ ID NO: 667526 - RNA, 19 nt, Homo sapiens
  misc_RNA (1)...(19): siRNA sense strand
ucaauggaggcgucugcua

SEQ ID NO: 667527 - RNA, 19 nt, Homo sapiens
  misc_RNA (1)...(19): siRNA sense strand
uauggcaacggcagaaaga

SEQ ID NO: 667528 - RNA, 19 nt, Homo sapiens
  misc_RNA (1)...(19): siRNA sense strand
acaggugggugagaagcaa

SEQ ID NO: 667529 - RNA, 19 nt, Homo sapiens
  misc_RNA (1)...(19): siRNA sense strand
aaccagcgcuacaucuuuu

SEQ ID NO: 667530 - RNA, 19 nt, Homo sapiens
  misc_RNA (1)...(19): siRNA sense strand
acucacgacuacaguucaa

SEQ ID NO: 667531 - RNA, 19 nt, Homo sapiens
  misc_RNA (1)...(19): siRNA sense strand
aaagaacucacgacuacag

SEQ ID NO: 667532 - RNA, 19 nt, Homo sapiens
  misc_RNA (1)...(19): siRNA sense strand
gaacagcccuuagucuuua

SEQ ID NO: 667533 - RNA, 19 nt, Homo sapiens
  misc_RNA (1)...(19): siRNA sense strand
ggaacagcccuuagucuuu

SEQ ID NO: 667534 - RNA, 19 nt, Homo sapiens
  misc_RNA (1)...(19): siRNA sense strand
uaaaggugcuggacaagug

SEQ ID NO: 667535 - RNA, 19 nt, Homo sapiens
  misc_RNA (1)...(19): siRNA sense strand
agaaagaacucacgacuac

SEQ ID NO: 667536 - RNA, 19 nt, Homo sapiens
  misc_RNA (1)...(19): siRNA sense strand
gaaccagcgcuacaucuuu

SEQ ID NO: 667537 - RNA, 19 nt, Homo sapiens
  misc_RNA (1)...(19): siRNA sense strand
gcaagauccugugcacuga

SEQ ID NO: 667538 - RNA, 19 nt, Homo sapiens
  misc_RNA (1)...(19): siRNA sense strand
gagaagcaaucgcugaagu

SEQ ID NO: 667539 - RNA, 19 nt, Homo sapiens
  misc_RNA (1)...(19): siRNA sense strand
gaaaggaaccagcgcuaca

SEQ ID NO: 667540 - RNA, 19 nt, Homo sapiens
  misc_RNA (1)...(19): siRNA sense strand
agaaagaggugggcaagau

SEQ ID NO: 667541 - RNA, 19 nt, Homo sapiens
  misc_RNA (1)...(19): siRNA sense strand
gagacauucgcaucaaaua

SEQ ID NO: 667542 - RNA, 19 nt, Homo sapiens
  misc_RNA (1)...(19): siRNA sense strand
agcaaucgcugaaguguga

SEQ ID NO: 667543 - RNA, 19 nt, Homo sapiens
  misc_RNA (1)...(19): siRNA sense strand
ucaaccagcucuccugcaa

SEQ ID NO: 667544 - RNA, 19 nt, Homo sapiens
  misc_RNA (1)...(19): siRNA sense strand
gacauucgcaucaaauaug

SEQ ID NO: 667545 - RNA, 19 nt, Homo sapiens
  misc_RNA (1)...(19): siRNA sense strand
ggaaccagcgcuacaucuu

SEQ ID NO: 667546 - RNA, 19 nt, Homo sapiens
  misc_RNA (1)...(19): siRNA sense strand
ggaggcgucugcuacuaca

SEQ ID NO: 667547 - RNA, 19 nt, Homo sapiens
  misc_RNA (1)...(19): siRNA sense strand
gaaagaggugggcaagauc

SEQ ID NO: 667548 - RNA, 19 nt, Homo sapiens
  misc_RNA (1)...(19): siRNA sense strand
cagaaagaacucacgacua

SEQ ID NO: 667549 - RNA, 19 nt, Homo sapiens
  misc_RNA (1)...(19): siRNA sense strand
gugugucgcucgccugcua

SEQ ID NO: 667550 - RNA, 19 nt, Homo sapiens
  misc_RNA (1)...(19): siRNA sense strand
ggcccaaguugaagaagau

SEQ ID NO: 667551 - RNA, 19 nt, Homo sapiens
  misc_RNA (1)...(19): siRNA sense strand
gaagcaaucgcugaagugu

SEQ ID NO: 667552 - RNA, 19 nt, Homo sapiens
  misc_RNA (1)...(19): siRNA sense strand
gcaacgagacagccaaguc

SEQ ID NO: 667553 - RNA, 19 nt, Homo sapiens
  misc_RNA (1)...(19): siRNA sense strand
ccgagacauucgcaucaaa

SEQ ID NO: 667554 - RNA, 19 nt, Homo sapiens
  misc_RNA (1)...(19): siRNA sense strand
agacagccaaguccuauug

SEQ ID NO: 667555 - RNA, 19 nt, Homo sapiens
  misc_RNA (1)...(19): siRNA sense strand
caaccgcagccgagacauu

SEQ ID NO: 667556 - RNA, 19 nt, Homo sapiens
  misc_RNA (1)...(19): siRNA sense strand
ugguaaaggugcuggacaa

SEQ ID NO: 667557 - RNA, 19 nt, Homo sapiens
  misc_RNA (1)...(19): siRNA sense strand
gacuacaguucaacaaggu

SEQ ID NO: 667558 - RNA, 19 nt, Homo sapiens
  misc_RNA (1)...(19): siRNA sense strand
ggaggacgcuggggaguau

SEQ ID NO: 667559 - RNA, 19 nt, Homo sapiens
  misc_RNA (1)...(19): siRNA sense strand
ccacggaacagcccuuagu

SEQ ID NO: 667560 - RNA, 19 nt, Homo sapiens
  misc_RNA (1)...(19): siRNA sense strand
ccaaguugaagaagaugaa

SEQ ID NO: 667561 - RNA, 19 nt, Homo sapiens
  misc_RNA (1)...(19): siRNA sense strand
caacaacagcagcaucucu

SEQ ID NO: 667562 - RNA, 19 nt, Homo sapiens
  misc_RNA (1)...(19): siRNA sense strand
cggaacagcccuuagucuu

SEQ ID NO: 667563 - RNA, 19 nt, Homo sapiens
  misc_RNA (1)...(19): siRNA sense strand
gugugccgcucgaaaggaa

SEQ ID NO: 667564 - RNA, 19 nt, Homo sapiens
  misc_RNA (1)...(19): siRNA sense strand
gccgagacauucgcaucaa

SEQ ID NO: 667565 - RNA, 19 nt, Homo sapiens
  misc_RNA (1)...(19): siRNA sense strand
ggugguggagggcaaggua

SEQ ID NO: 667566 - RNA, 19 nt, Homo sapiens
  misc_RNA (1)...(19): siRNA sense strand
gugagaagcaaucgcugaa

SEQ ID NO: 667567 - RNA, 19 nt, Homo sapiens
  misc_RNA (1)...(19): siRNA sense strand
agacauucgcaucaaauau

SEQ ID NO: 667568 - RNA, 19 nt, Homo sapiens
  misc_RNA (1)...(19): siRNA sense strand
cgagacauucgcaucaaau

SEQ ID NO: 667569 - RNA, 19 nt, Homo sapiens
  misc_RNA (1)...(19): siRNA sense strand
cgagacagccaaguccuau

SEQ ID NO: 667570 - RNA, 19 nt, Homo sapiens
  misc_RNA (1)...(19): siRNA sense strand
cggcccaaguugaagaaga

SEQ ID NO: 667571 - RNA, 19 nt, Homo sapiens
  misc_RNA (1)...(19): siRNA sense strand
ggucggguggcguugguaa

SEQ ID NO: 667572 - RNA, 19 nt, Homo sapiens
  misc_RNA (1)...(19): siRNA sense strand
gaaagaacucacgacuaca

SEQ ID NO: 667573 - RNA, 19 nt, Homo sapiens
  misc_RNA (1)...(19): siRNA sense strand
guaaaggugcuggacaagu

SEQ ID NO: 667574 - RNA, 19 nt, Homo sapiens
  misc_RNA (1)...(19): siRNA sense strand
cgggacaggugggugagaa

SEQ ID NO: 667575 - RNA, 19 nt, Homo sapiens
  misc_RNA (1)...(19): siRNA sense strand
gagacagccaaguccuauu

SEQ ID NO: 667576 - RNA, 19 nt, Homo sapiens
  misc_RNA (1)...(19): siRNA sense strand
ucaauggaggcgucugcua

SEQ ID NO: 667577 - RNA, 19 nt, Homo sapiens
  misc_RNA (1)...(19): siRNA sense strand
uauggcaacggcagaaaga

SEQ ID NO: 667578 - RNA, 19 nt, Homo sapiens
  misc_RNA (1)...(19): siRNA sense strand
acaggugggugagaagcaa

SEQ ID NO: 667579 - RNA, 19 nt, Homo sapiens
  misc_RNA (1)...(19): siRNA sense strand
aaccagcgcuacaucuuuu

SEQ ID NO: 667580 - RNA, 19 nt, Homo sapiens
  misc_RNA (1)...(19): siRNA sense strand
acucacgacuacaguucaa

SEQ ID NO: 667581 - RNA, 19 nt, Homo sapiens
  misc_RNA (1)...(19): siRNA sense strand
aaagaacucacgacuacag

SEQ ID NO: 667582 - RNA, 19 nt, Homo sapiens
  misc_RNA (1)...(19): siRNA sense strand
gaacagcccuuagucuuua

SEQ ID NO: 667583 - RNA, 19 nt, Homo sapiens
  misc_RNA (1)...(19): siRNA sense strand
ggaacagcccuuagucuuu

SEQ ID NO: 667584 - RNA, 19 nt, Homo sapiens
  misc_RNA (1)...(19): siRNA sense strand
uaaaggugcuggacaagug

SEQ ID NO: 667585 - RNA, 19 nt, Homo sapiens
  misc_RNA (1)...(19): siRNA sense strand
agaaagaacucacgacuac

SEQ ID NO: 667586 - RNA, 19 nt, Homo sapiens
  misc_RNA (1)...(19): siRNA sense strand
gaaccagcgcuacaucuuu

SEQ ID NO: 667587 - RNA, 19 nt, Homo sapiens
  misc_RNA (1)...(19): siRNA sense strand
gcaagauccugugcacuga

SEQ ID NO: 667588 - RNA, 19 nt, Homo sapiens
  misc_RNA (1)...(19): siRNA sense strand
gagaagcaaucgcugaagu

SEQ ID NO: 667589 - RNA, 19 nt, Homo sapiens
  misc_RNA (1)...(19): siRNA sense strand
gaaaggaaccagcgcuaca

SEQ ID NO: 667590 - RNA, 19 nt, Homo sapiens
  misc_RNA (1)...(19): siRNA sense strand
agaaagaggugggcaagau

SEQ ID NO: 667591 - RNA, 19 nt, Homo sapiens
  misc_RNA (1)...(19): siRNA sense strand
gagacauucgcaucaaaua

SEQ ID NO: 667592 - RNA, 19 nt, Homo sapiens
  misc_RNA (1)...(19): siRNA sense strand
agcaaucgcugaaguguga

SEQ ID NO: 667593 - RNA, 19 nt, Homo sapiens
  misc_RNA (1)...(19): siRNA sense strand
ucaaccagcucuccugcaa

SEQ ID NO: 667594 - RNA, 19 nt, Homo sapiens
  misc_RNA (1)...(19): siRNA sense strand
gacauucgcaucaaauaug

SEQ ID NO: 667595 - RNA, 19 nt, Homo sapiens
  misc_RNA (1)...(19): siRNA sense strand
ggaaccagcgcuacaucuu

SEQ ID NO: 667596 - RNA, 19 nt, Homo sapiens
  misc_RNA (1)...(19): siRNA sense strand
ggaggcgucugcuacuaca

SEQ ID NO: 667597 - RNA, 19 nt, Homo sapiens
  misc_RNA (1)...(19): siRNA sense strand
gaaagaggugggcaagauc

SEQ ID NO: 667598 - RNA, 19 nt, Homo sapiens
  misc_RNA (1)...(19): siRNA sense strand
cagaaagaacucacgacua

SEQ ID NO: 667599 - RNA, 19 nt, Homo sapiens
  misc_RNA (1)...(19): siRNA sense strand
gugugucgcucgccugcua

SEQ ID NO: 667600 - RNA, 19 nt, Homo sapiens
  misc_RNA (1)...(19): siRNA sense strand
ggcccaaguugaagaagau

SEQ ID NO: 667601 - RNA, 19 nt, Homo sapiens
  misc_RNA (1)...(19): siRNA sense strand
gaagcaaucgcugaagugu

SEQ ID NO: 667602 - RNA, 19 nt, Homo sapiens
  misc_RNA (1)...(19): siRNA sense strand
gcaacgagacagccaaguc

SEQ ID NO: 667603 - RNA, 19 nt, Homo sapiens
  misc_RNA (1)...(19): siRNA sense strand
ccgagacauucgcaucaaa

SEQ ID NO: 667604 - RNA, 19 nt, Homo sapiens
  misc_RNA (1)...(19): siRNA sense strand
agacagccaaguccuauug

SEQ ID NO: 667605 - RNA, 19 nt, Homo sapiens
  misc_RNA (1)...(19): siRNA sense strand
caaccgcagccgagacauu

SEQ ID NO: 667606 - RNA, 19 nt, Homo sapiens
  misc_RNA (1)...(19): siRNA sense strand
ugguaaaggugcuggacaa

SEQ ID NO: 667607 - RNA, 19 nt, Homo sapiens
  misc_RNA (1)...(19): siRNA sense strand
gacuacaguucaacaaggu

SEQ ID NO: 667608 - RNA, 19 nt, Homo sapiens
  misc_RNA (1)...(19): siRNA sense strand
ggaggacgcuggggaguau

SEQ ID NO: 667609 - RNA, 19 nt, Homo sapiens
  misc_RNA (1)...(19): siRNA sense strand
ccacggaacagcccuuagu

SEQ ID NO: 667610 - RNA, 19 nt, Homo sapiens
  misc_RNA (1)...(19): siRNA sense strand
ccaaguugaagaagaugaa

SEQ ID NO: 667611 - RNA, 19 nt, Homo sapiens
  misc_RNA (1)...(19): siRNA sense strand
caacaacagcagcaucucu

SEQ ID NO: 667612 - RNA, 19 nt, Homo sapiens
  misc_RNA (1)...(19): siRNA sense strand
cggaacagcccuuagucuu

SEQ ID NO: 667613 - RNA, 19 nt, Homo sapiens
  misc_RNA (1)...(19): siRNA sense strand
gugugccgcucgaaaggaa

SEQ ID NO: 667614 - RNA, 19 nt, Homo sapiens
  misc_RNA (1)...(19): siRNA sense strand
gccgagacauucgcaucaa

SEQ ID NO: 667615 - RNA, 19 nt, Homo sapiens
  misc_RNA (1)...(19): siRNA sense strand
ggugguggagggcaaggua

SEQ ID NO: 667616 - RNA, 19 nt, Homo sapiens
  misc_RNA (1)...(19): siRNA sense strand
gugagaagcaaucgcugaa

SEQ ID NO: 667617 - RNA, 19 nt, Homo sapiens
  misc_RNA (1)...(19): siRNA sense strand
agacauucgcaucaaauau

SEQ ID NO: 667618 - RNA, 19 nt, Homo sapiens
  misc_RNA (1)...(19): siRNA sense strand
cgagacauucgcaucaaau

SEQ ID NO: 667619 - RNA, 19 nt, Homo sapiens
  misc_RNA (1)...(19): siRNA sense strand
cgagacagccaaguccuau

SEQ ID NO: 667620 - RNA, 19 nt, Homo sapiens
  misc_RNA (1)...(19): siRNA sense strand
cggcccaaguugaagaaga

SEQ ID NO: 667621 - RNA, 19 nt, Homo sapiens
  misc_RNA (1)...(19): siRNA sense strand
ggucggguggcguugguaa

SEQ ID NO: 667622 - RNA, 19 nt, Homo sapiens
  misc_RNA (1)...(19): siRNA sense strand
gaaagaacucacgacuaca

SEQ ID NO: 667623 - RNA, 19 nt, Homo sapiens
  misc_RNA (1)...(19): siRNA sense strand
guaaaggugcuggacaagu

SEQ ID NO: 667624 - RNA, 19 nt, Homo sapiens
  misc_RNA (1)...(19): siRNA sense strand
cgggacaggugggugagaa

SEQ ID NO: 667625 - RNA, 19 nt, Homo sapiens
  misc_RNA (1)...(19): siRNA sense strand
gagacagccaaguccuauu

SEQ ID NO: 667626 - RNA, 19 nt, Homo sapiens
  misc_RNA (1)...(19): siRNA sense strand
ucaauggaggcgucugcua

SEQ ID NO: 667627 - RNA, 19 nt, Homo sapiens
  misc_RNA (1)...(19): siRNA sense strand
uauggcaacggcagaaaga

SEQ ID NO: 667628 - RNA, 19 nt, Homo sapiens
  misc_RNA (1)...(19): siRNA sense strand
acaggugggugagaagcaa

SEQ ID NO: 667629 - RNA, 19 nt, Homo sapiens
  misc_RNA (1)...(19): siRNA sense strand
aaccagcgcuacaucuuuu

SEQ ID NO: 667630 - RNA, 19 nt, Homo sapiens
  misc_RNA (1)...(19): siRNA sense strand
acucacgacuacaguucaa

SEQ ID NO: 667631 - RNA, 19 nt, Homo sapiens
  misc_RNA (1)...(19): siRNA sense strand
aaagaacucacgacuacag

SEQ ID NO: 667632 - RNA, 19 nt, Homo sapiens
  misc_RNA (1)...(19): siRNA sense strand
gaacagcccuuagucuuua

SEQ ID NO: 667633 - RNA, 19 nt, Homo sapiens
  misc_RNA (1)...(19): siRNA sense strand
ggaacagcccuuagucuuu

SEQ ID NO: 667634 - RNA, 19 nt, Homo sapiens
  misc_RNA (1)...(19): siRNA sense strand
uaaaggugcuggacaagug

SEQ ID NO: 667635 - RNA, 19 nt, Homo sapiens
  misc_RNA (1)...(19): siRNA sense strand
agaaagaacucacgacuac

SEQ ID NO: 667636 - RNA, 19 nt, Homo sapiens
  misc_RNA (1)...(19): siRNA sense strand
gaaccagcgcuacaucuuu

SEQ ID NO: 667637 - RNA, 19 nt, Homo sapiens
  misc_RNA (1)...(19): siRNA sense strand
gcaagauccugugcacuga

SEQ ID NO: 667638 - RNA, 19 nt, Homo sapiens
  misc_RNA (1)...(19): siRNA sense strand
gagaagcaaucgcugaagu

SEQ ID NO: 667639 - RNA, 19 nt, Homo sapiens
  misc_RNA (1)...(19): siRNA sense strand
gaaaggaaccagcgcuaca

SEQ ID NO: 667640 - RNA, 19 nt, Homo sapiens
  misc_RNA (1)...(19): siRNA sense strand
agaaagaggugggcaagau

SEQ ID NO: 667641 - RNA, 19 nt, Homo sapiens
  misc_RNA (1)...(19): siRNA sense strand
gagacauucgcaucaaaua

SEQ ID NO: 667642 - RNA, 19 nt, Homo sapiens
  misc_RNA (1)...(19): siRNA sense strand
agcaaucgcugaaguguga

SEQ ID NO: 667643 - RNA, 19 nt, Homo sapiens
  misc_RNA (1)...(19): siRNA sense strand
ucaaccagcucuccugcaa

SEQ ID NO: 667644 - RNA, 19 nt, Homo sapiens
  misc_RNA (1)...(19): siRNA sense strand
gacauucgcaucaaauaug

SEQ ID NO: 667645 - RNA, 19 nt, Homo sapiens
  misc_RNA (1)...(19): siRNA sense strand
ggaaccagcgcuacaucuu

SEQ ID NO: 667646 - RNA, 19 nt, Homo sapiens
  misc_RNA (1)...(19): siRNA sense strand
ggaggcgucugcuacuaca

SEQ ID NO: 667647 - RNA, 19 nt, Homo sapiens
  misc_RNA (1)...(19): siRNA sense strand
gaaagaggugggcaagauc

SEQ ID NO: 667648 - RNA, 19 nt, Homo sapiens
  misc_RNA (1)...(19): siRNA sense strand
cagaaagaacucacgacua

SEQ ID NO: 667649 - RNA, 19 nt, Homo sapiens
  misc_RNA (1)...(19): siRNA sense strand
gugugucgcucgccugcua

SEQ ID NO: 667650 - RNA, 19 nt, Homo sapiens
  misc_RNA (1)...(19): siRNA sense strand
ggcccaaguugaagaagau

SEQ ID NO: 667651 - RNA, 19 nt, Homo sapiens
  misc_RNA (1)...(19): siRNA sense strand
gaagcaaucgcugaagugu

SEQ ID NO: 667652 - RNA, 19 nt, Homo sapiens
  misc_RNA (1)...(19): siRNA sense strand
gcaacgagacagccaaguc

SEQ ID NO: 667653 - RNA, 19 nt, Homo sapiens
  misc_RNA (1)...(19): siRNA sense strand
ccgagacauucgcaucaaa

SEQ ID NO: 667654 - RNA, 19 nt, Homo sapiens
  misc_RNA (1)...(19): siRNA sense strand
agacagccaaguccuauug

SEQ ID NO: 667655 - RNA, 19 nt, Homo sapiens
  misc_RNA (1)...(19): siRNA sense strand
caaccgcagccgagacauu

SEQ ID NO: 667656 - RNA, 19 nt, Homo sapiens
  misc_RNA (1)...(19): siRNA sense strand
ugguaaaggugcuggacaa

SEQ ID NO: 667657 - RNA, 19 nt, Homo sapiens
  misc_RNA (1)...(19): siRNA sense strand
gacuacaguucaacaaggu

SEQ ID NO: 667658 - RNA, 19 nt, Homo sapiens
  misc_RNA (1)...(19): siRNA sense strand
ggaggacgcuggggaguau

SEQ ID NO: 667659 - RNA, 19 nt, Homo sapiens
  misc_RNA (1)...(19): siRNA sense strand
ccacggaacagcccuuagu

SEQ ID NO: 667660 - RNA, 19 nt, Homo sapiens
  misc_RNA (1)...(19): siRNA sense strand
ccaaguugaagaagaugaa

SEQ ID NO: 667661 - RNA, 19 nt, Homo sapiens
  misc_RNA (1)...(19): siRNA sense strand
caacaacagcagcaucucu

SEQ ID NO: 667662 - RNA, 19 nt, Homo sapiens
  misc_RNA (1)...(19): siRNA sense strand
cggaacagcccuuagucuu

SEQ ID NO: 667663 - RNA, 19 nt, Homo sapiens
  misc_RNA (1)...(19): siRNA sense strand
gugugccgcucgaaaggaa

SEQ ID NO: 667664 - RNA, 19 nt, Homo sapiens
  misc_RNA (1)...(19): siRNA sense strand
gccgagacauucgcaucaa

SEQ ID NO: 667665 - RNA, 19 nt, Homo sapiens
  misc_RNA (1)...(19): siRNA sense strand
ggugguggagggcaaggua

SEQ ID NO: 667666 - RNA, 19 nt, Homo sapiens
  misc_RNA (1)...(19): siRNA sense strand
gugagaagcaaucgcugaa

SEQ ID NO: 667667 - RNA, 19 nt, Homo sapiens
  misc_RNA (1)...(19): siRNA sense strand
agacauucgcaucaaauau

SEQ ID NO: 667668 - RNA, 19 nt, Homo sapiens
  misc_RNA (1)...(19): siRNA sense strand
cgagacauucgcaucaaau

SEQ ID NO: 667669 - RNA, 19 nt, Homo sapiens
  misc_RNA (1)...(19): siRNA sense strand
cgagacagccaaguccuau

SEQ ID NO: 667670 - RNA, 19 nt, Homo sapiens
  misc_RNA (1)...(19): siRNA sense strand
cggcccaaguugaagaaga

SEQ ID NO: 667671 - RNA, 19 nt, Homo sapiens
  misc_RNA (1)...(19): siRNA sense strand
ggucggguggcguugguaa

SEQ ID NO: 667672 - RNA, 19 nt, Homo sapiens
  misc_RNA (1)...(19): siRNA sense strand
gaaagaacucacgacuaca

SEQ ID NO: 667673 - RNA, 19 nt, Homo sapiens
  misc_RNA (1)...(19): siRNA sense strand
guaaaggugcuggacaagu

SEQ ID NO: 667674 - RNA, 19 nt, Homo sapiens
  misc_RNA (1)...(19): siRNA sense strand
cgggacaggugggugagaa

SEQ ID NO: 667675 - RNA, 19 nt, Homo sapiens
  misc_RNA (1)...(19): siRNA sense strand
gagacagccaaguccuauu

SEQ ID NO: 667676 - RNA, 19 nt, Homo sapiens
  misc_RNA (1)...(19): siRNA sense strand
ucaauggaggcgucugcua

SEQ ID NO: 667677 - RNA, 19 nt, Homo sapiens
  misc_RNA (1)...(19): siRNA sense strand
uauggcaacggcagaaaga

SEQ ID NO: 667678 - RNA, 19 nt, Homo sapiens
  misc_RNA (1)...(19): siRNA sense strand
acaggugggugagaagcaa

SEQ ID NO: 667679 - RNA, 19 nt, Homo sapiens
  misc_RNA (1)...(19): siRNA sense strand
aaccagcgcuacaucuuuu

SEQ ID NO: 667680 - RNA, 19 nt, Homo sapiens
  misc_RNA (1)...(19): siRNA sense strand
acucacgacuacaguucaa

SEQ ID NO: 667681 - RNA, 19 nt, Homo sapiens
  misc_RNA (1)...(19): siRNA sense strand
aaagaacucacgacuacag

SEQ ID NO: 667682 - RNA, 19 nt, Homo sapiens
  misc_RNA (1)...(19): siRNA sense strand
gaacagcccuuagucuuua

SEQ ID NO: 667683 - RNA, 19 nt, Homo sapiens
  misc_RNA (1)...(19): siRNA sense strand
ggaacagcccuuagucuuu

SEQ ID NO: 667684 - RNA, 19 nt, Homo sapiens
  misc_RNA (1)...(19): siRNA sense strand
uaaaggugcuggacaagug

SEQ ID NO: 667685 - RNA, 19 nt, Homo sapiens
  misc_RNA (1)...(19): siRNA sense strand
agaaagaacucacgacuac

SEQ ID NO: 667686 - RNA, 19 nt, Homo sapiens
  misc_RNA (1)...(19): siRNA sense strand
gaaccagcgcuacaucuuu

SEQ ID NO: 667687 - RNA, 19 nt, Homo sapiens
  misc_RNA (1)...(19): siRNA sense strand
gcaagauccugugcacuga

SEQ ID NO: 667688 - RNA, 19 nt, Homo sapiens
  misc_RNA (1)...(19): siRNA sense strand
gagaagcaaucgcugaagu

SEQ ID NO: 667689 - RNA, 19 nt, Homo sapiens
  misc_RNA (1)...(19): siRNA sense strand
gaaaggaaccagcgcuaca

SEQ ID NO: 667690 - RNA, 19 nt, Homo sapiens
  misc_RNA (1)...(19): siRNA sense strand
agaaagaggugggcaagau

SEQ ID NO: 667691 - RNA, 19 nt, Homo sapiens
  misc_RNA (1)...(19): siRNA sense strand
gagacauucgcaucaaaua

SEQ ID NO: 667692 - RNA, 19 nt, Homo sapiens
  misc_RNA (1)...(19): siRNA sense strand
agcaaucgcugaaguguga

SEQ ID NO: 667693 - RNA, 19 nt, Homo sapiens
  misc_RNA (1)...(19): siRNA sense strand
ucaaccagcucuccugcaa

SEQ ID NO: 667694 - RNA, 19 nt, Homo sapiens
  misc_RNA (1)...(19): siRNA sense strand
gacauucgcaucaaauaug

SEQ ID NO: 667695 - RNA, 19 nt, Homo sapiens
  misc_RNA (1)...(19): siRNA sense strand
ggaaccagcgcuacaucuu

SEQ ID NO: 667696 - RNA, 19 nt, Homo sapiens
  misc_RNA (1)...(19): siRNA sense strand
ggaggcgucugcuacuaca

SEQ ID NO: 667697 - RNA, 19 nt, Homo sapiens
  misc_RNA (1)...(19): siRNA sense strand
gaaagaggugggcaagauc

SEQ ID NO: 667698 - RNA, 19 nt, Homo sapiens
  misc_RNA (1)...(19): siRNA sense strand
cagaaagaacucacgacua

SEQ ID NO: 667699 - RNA, 19 nt, Homo sapiens
  misc_RNA (1)...(19): siRNA sense strand
gugugucgcucgccugcua

SEQ ID NO: 667700 - RNA, 19 nt, Homo sapiens
  misc_RNA (1)...(19): siRNA sense strand
ggcccaaguugaagaagau

SEQ ID NO: 667701 - RNA, 19 nt, Homo sapiens
  misc_RNA (1)...(19): siRNA sense strand
gaagcaaucgcugaagugu

SEQ ID NO: 667702 - RNA, 19 nt, Homo sapiens
  misc_RNA (1)...(19): siRNA sense strand
gcaacgagacagccaaguc

SEQ ID NO: 667703 - RNA, 19 nt, Homo sapiens
  misc_RNA (1)...(19): siRNA sense strand
ccgagacauucgcaucaaa

SEQ ID NO: 667704 - RNA, 19 nt, Homo sapiens
  misc_RNA (1)...(19): siRNA sense strand
agacagccaaguccuauug

SEQ ID NO: 667705 - RNA, 19 nt, Homo sapiens
  misc_RNA (1)...(19): siRNA sense strand
caaccgcagccgagacauu

SEQ ID NO: 667706 - RNA, 19 nt, Homo sapiens
  misc_RNA (1)...(19): siRNA sense strand
ugguaaaggugcuggacaa

SEQ ID NO: 667707 - RNA, 19 nt, Homo sapiens
  misc_RNA (1)...(19): siRNA sense strand
gacuacaguucaacaaggu

SEQ ID NO: 667708 - RNA, 19 nt, Homo sapiens
  misc_RNA (1)...(19): siRNA sense strand
ggaggacgcuggggaguau

SEQ ID NO: 667709 - RNA, 19 nt, Homo sapiens
  misc_RNA (1)...(19): siRNA sense strand
ccacggaacagcccuuagu

SEQ ID NO: 667710 - RNA, 19 nt, Homo sapiens
  misc_RNA (1)...(19): siRNA sense strand
ccaaguugaagaagaugaa

SEQ ID NO: 667711 - RNA, 19 nt, Homo sapiens
  misc_RNA (1)...(19): siRNA sense strand
caacaacagcagcaucucu

SEQ ID NO: 667712 - RNA, 19 nt, Homo sapiens
  misc_RNA (1)...(19): siRNA sense strand
cggaacagcccuuagucuu

SEQ ID NO: 667713 - RNA, 19 nt, Homo sapiens
  misc_RNA (1)...(19): siRNA sense strand
gugugccgcucgaaaggaa

SEQ ID NO: 667714 - RNA, 19 nt, Homo sapiens
  misc_RNA (1)...(19): siRNA sense strand
gccgagacauucgcaucaa

SEQ ID NO: 667715 - RNA, 19 nt, Homo sapiens
  misc_RNA (1)...(19): siRNA sense strand
ggugguggagggcaaggua

SEQ ID NO: 667716 - RNA, 19 nt, Homo sapiens
  misc_RNA (1)...(19): siRNA sense strand
gugagaagcaaucgcugaa

SEQ ID NO: 667717 - RNA, 19 nt, Homo sapiens
  misc_RNA (1)...(19): siRNA sense strand
agacauucgcaucaaauau

SEQ ID NO: 667718 - RNA, 19 nt, Homo sapiens
  misc_RNA (1)...(19): siRNA sense strand
cgagacauucgcaucaaau

SEQ ID NO: 667719 - RNA, 19 nt, Homo sapiens
  misc_RNA (1)...(19): siRNA sense strand
cgagacagccaaguccuau

SEQ ID NO: 667720 - RNA, 19 nt, Homo sapiens
  misc_RNA (1)...(19): siRNA sense strand
cggcccaaguugaagaaga

SEQ ID NO: 667721 - RNA, 19 nt, Homo sapiens
  misc_RNA (1)...(19): siRNA sense strand
ggucggguggcguugguaa

SEQ ID NO: 667722 - RNA, 19 nt, Homo sapiens
  misc_RNA (1)...(19): siRNA sense strand
gaaagaacucacgacuaca

SEQ ID NO: 667723 - RNA, 19 nt, Homo sapiens
  misc_RNA (1)...(19): siRNA sense strand
guaaaggugcuggacaagu

SEQ ID NO: 667724 - RNA, 19 nt, Homo sapiens
  misc_RNA (1)...(19): siRNA sense strand
cgggacaggugggugagaa

SEQ ID NO: 667725 - RNA, 19 nt, Homo sapiens
  misc_RNA (1)...(19): siRNA sense strand
gagacagccaaguccuauu

SEQ ID NO: 667726 - RNA, 19 nt, Homo sapiens
  misc_RNA (1)...(19): siRNA sense strand
ucaauggaggcgucugcua

SEQ ID NO: 667727 - RNA, 19 nt, Homo sapiens
  misc_RNA (1)...(19): siRNA sense strand
uauggcaacggcagaaaga

SEQ ID NO: 667728 - RNA, 19 nt, Homo sapiens
  misc_RNA (1)...(19): siRNA sense strand
acaggugggugagaagcaa

SEQ ID NO: 667729 - RNA, 19 nt, Homo sapiens
  misc_RNA (1)...(19): siRNA sense strand
aaccagcgcuacaucuuuu

SEQ ID NO: 667730 - RNA, 19 nt, Homo sapiens
  misc_RNA (1)...(19): siRNA sense strand
acucacgacuacaguucaa

SEQ ID NO: 667731 - RNA, 19 nt, Homo sapiens
  misc_RNA (1)...(19): siRNA sense strand
aaagaacucacgacuacag

SEQ ID NO: 667732 - RNA, 19 nt, Homo sapiens
  misc_RNA (1)...(19): siRNA sense strand
gaacagcccuuagucuuua

SEQ ID NO: 667733 - RNA, 19 nt, Homo sapiens
  misc_RNA (1)...(19): siRNA sense strand
ggaacagcccuuagucuuu

SEQ ID NO: 667734 - RNA, 19 nt, Homo sapiens
  misc_RNA (1)...(19): siRNA sense strand
uaaaggugcuggacaagug

SEQ ID NO: 667735 - RNA, 19 nt, Homo sapiens
  misc_RNA (1)...(19): siRNA sense strand
agaaagaacucacgacuac

SEQ ID NO: 667736 - RNA, 19 nt, Homo sapiens
  misc_RNA (1)...(19): siRNA sense strand
gaaccagcgcuacaucuuu

SEQ ID NO: 667737 - RNA, 19 nt, Homo sapiens
  misc_RNA (1)...(19): siRNA sense strand
gcaagauccugugcacuga

SEQ ID NO: 667738 - RNA, 19 nt, Homo sapiens
  misc_RNA (1)...(19): siRNA sense strand
gagaagcaaucgcugaagu

SEQ ID NO: 667739 - RNA, 19 nt, Homo sapiens
  misc_RNA (1)...(19): siRNA sense strand
gaaaggaaccagcgcuaca

SEQ ID NO: 667740 - RNA, 19 nt, Homo sapiens
  misc_RNA (1)...(19): siRNA sense strand
agaaagaggugggcaagau

SEQ ID NO: 667741 - RNA, 19 nt, Homo sapiens
  misc_RNA (1)...(19): siRNA sense strand
gagacauucgcaucaaaua

SEQ ID NO: 667742 - RNA, 19 nt, Homo sapiens
  misc_RNA (1)...(19): siRNA sense strand
agcaaucgcugaaguguga

SEQ ID NO: 667743 - RNA, 19 nt, Homo sapiens
  misc_RNA (1)...(19): siRNA sense strand
ucaaccagcucuccugcaa

SEQ ID NO: 667744 - RNA, 19 nt, Homo sapiens
  misc_RNA (1)...(19): siRNA sense strand
gacauucgcaucaaauaug

SEQ ID NO: 667745 - RNA, 19 nt, Homo sapiens
  misc_RNA (1)...(19): siRNA sense strand
ggaaccagcgcuacaucuu

SEQ ID NO: 667746 - RNA, 19 nt, Homo sapiens
  misc_RNA (1)...(19): siRNA sense strand
ggaggcgucugcuacuaca

SEQ ID NO: 667747 - RNA, 19 nt, Homo sapiens
  misc_RNA (1)...(19): siRNA sense strand
gaaagaggugggcaagauc

SEQ ID NO: 667748 - RNA, 19 nt, Homo sapiens
  misc_RNA (1)...(19): siRNA sense strand
cagaaagaacucacgacua

SEQ ID NO: 667749 - RNA, 19 nt, Homo sapiens
  misc_RNA (1)...(19): siRNA sense strand
gugugucgcucgccugcua

SEQ ID NO: 667750 - RNA, 19 nt, Homo sapiens
  misc_RNA (1)...(19): siRNA sense strand
ggcccaaguugaagaagau

SEQ ID NO: 667751 - RNA, 19 nt, Homo sapiens
  misc_RNA (1)...(19): siRNA sense strand
gaagcaaucgcugaagugu

SEQ ID NO: 667752 - RNA, 19 nt, Homo sapiens
  misc_RNA (1)...(19): siRNA sense strand
gcaacgagacagccaaguc

SEQ ID NO: 667753 - RNA, 19 nt, Homo sapiens
  misc_RNA (1)...(19): siRNA sense strand
ccgagacauucgcaucaaa

SEQ ID NO: 667754 - RNA, 19 nt, Homo sapiens
  misc_RNA (1)...(19): siRNA sense strand
agacagccaaguccuauug

SEQ ID NO: 667755 - RNA, 19 nt, Homo sapiens
  misc_RNA (1)...(19): siRNA sense strand
caaccgcagccgagacauu

SEQ ID NO: 667756 - RNA, 19 nt, Homo sapiens
  misc_RNA (1)...(19): siRNA sense strand
ugguaaaggugcuggacaa

SEQ ID NO: 667757 - RNA, 19 nt, Homo sapiens
  misc_RNA (1)...(19): siRNA sense strand
gacuacaguucaacaaggu

SEQ ID NO: 667758 - RNA, 19 nt, Homo sapiens
  misc_RNA (1)...(19): siRNA sense strand
ggaggacgcuggggaguau

SEQ ID NO: 667759 - RNA, 19 nt, Homo sapiens
  misc_RNA (1)...(19): siRNA sense strand
ccacggaacagcccuuagu

SEQ ID NO: 667760 - RNA, 19 nt, Homo sapiens
  misc_RNA (1)...(19): siRNA sense strand
ccaaguugaagaagaugaa

SEQ ID NO: 667761 - RNA, 19 nt, Homo sapiens
  misc_RNA (1)...(19): siRNA sense strand
caacaacagcagcaucucu

SEQ ID NO: 667762 - RNA, 19 nt, Homo sapiens
  misc_RNA (1)...(19): siRNA sense strand
cggaacagcccuuagucuu

SEQ ID NO: 667763 - RNA, 19 nt, Homo sapiens
  misc_RNA (1)...(19): siRNA sense strand
gugugccgcucgaaaggaa

SEQ ID NO: 667764 - RNA, 19 nt, Homo sapiens
  misc_RNA (1)...(19): siRNA sense strand
gccgagacauucgcaucaa

SEQ ID NO: 667765 - RNA, 19 nt, Homo sapiens
  misc_RNA (1)...(19): siRNA sense strand
ggugguggagggcaaggua

SEQ ID NO: 667766 - RNA, 19 nt, Homo sapiens
  misc_RNA (1)...(19): siRNA sense strand
gugagaagcaaucgcugaa

SEQ ID NO: 667767 - RNA, 19 nt, Homo sapiens
  misc_RNA (1)...(19): siRNA sense strand
agacauucgcaucaaauau

SEQ ID NO: 667768 - RNA, 19 nt, Homo sapiens
  misc_RNA (1)...(19): siRNA sense strand
cgagacauucgcaucaaau

SEQ ID NO: 667769 - RNA, 19 nt, Homo sapiens
  misc_RNA (1)...(19): siRNA sense strand
cgagacagccaaguccuau

SEQ ID NO: 667770 - RNA, 19 nt, Homo sapiens
  misc_RNA (1)...(19): siRNA sense strand
cggcccaaguugaagaaga

SEQ ID NO: 667771 - RNA, 19 nt, Homo sapiens
  misc_RNA (1)...(19): siRNA sense strand
ggucggguggcguugguaa

SEQ ID NO: 667772 - RNA, 19 nt, Homo sapiens
  misc_RNA (1)...(19): siRNA sense strand
gaaagaacucacgacuaca

SEQ ID NO: 667773 - RNA, 19 nt, Homo sapiens
  misc_RNA (1)...(19): siRNA sense strand
guaaaggugcuggacaagu

SEQ ID NO: 667774 - RNA, 19 nt, Homo sapiens
  misc_RNA (1)...(19): siRNA sense strand
cgggacaggugggugagaa

SEQ ID NO: 667775 - RNA, 19 nt, Homo sapiens
  misc_RNA (1)...(19): siRNA sense strand
gagacagccaaguccuauu

SEQ ID NO: 667776 - RNA, 19 nt, Homo sapiens
  misc_RNA (1)...(19): siRNA sense strand
ucaauggaggcgucugcua

SEQ ID NO: 667777 - RNA, 19 nt, Homo sapiens
  misc_RNA (1)...(19): siRNA sense strand
uauggcaacggcagaaaga

SEQ ID NO: 667778 - RNA, 19 nt, Homo sapiens
  misc_RNA (1)...(19): siRNA sense strand
acaggugggugagaagcaa

SEQ ID NO: 667779 - RNA, 19 nt, Homo sapiens
  misc_RNA (1)...(19): siRNA sense strand
aaccagcgcuacaucuuuu

SEQ ID NO: 667780 - RNA, 19 nt, Homo sapiens
  misc_RNA (1)...(19): siRNA sense strand
acucacgacuacaguucaa

SEQ ID NO: 667781 - RNA, 19 nt, Homo sapiens
  misc_RNA (1)...(19): siRNA sense strand
aaagaacucacgacuacag

SEQ ID NO: 667782 - RNA, 19 nt, Homo sapiens
  misc_RNA (1)...(19): siRNA sense strand
gaaagcaaauuggcaaaua

SEQ ID NO: 667783 - RNA, 19 nt, Homo sapiens
  misc_RNA (1)...(19): siRNA sense strand
gcagagagcuccaccguau

SEQ ID NO: 667784 - RNA, 19 nt, Homo sapiens
  misc_RNA (1)...(19): siRNA sense strand
gaagggcacuuuccuaugu

SEQ ID NO: 667785 - RNA, 19 nt, Homo sapiens
  misc_RNA (1)...(19): siRNA sense strand
caaagggaaucugagaaua

SEQ ID NO: 667786 - RNA, 19 nt, Homo sapiens
  misc_RNA (1)...(19): siRNA sense strand
ggugacacguuccuucaua

SEQ ID NO: 667787 - RNA, 19 nt, Homo sapiens
  misc_RNA (1)...(19): siRNA sense strand
gaagaacaccucugcaugu

SEQ ID NO: 667788 - RNA, 19 nt, Homo sapiens
  misc_RNA (1)...(19): siRNA sense strand
gaacagauccgacguaucc

SEQ ID NO: 667789 - RNA, 19 nt, Homo sapiens
  misc_RNA (1)...(19): siRNA sense strand
gcacuucacaugcuggaua

SEQ ID NO: 667790 - RNA, 19 nt, Homo sapiens
  misc_RNA (1)...(19): siRNA sense strand
ggaacucauucgccucuuu

SEQ ID NO: 667791 - RNA, 19 nt, Homo sapiens
  misc_RNA (1)...(19): siRNA sense strand
gaaaucaacagccucauuc

SEQ ID NO: 667792 - RNA, 19 nt, Homo sapiens
  misc_RNA (1)...(19): siRNA sense strand
gccaagcuguggaugauuu

SEQ ID NO: 667793 - RNA, 19 nt, Homo sapiens
  misc_RNA (1)...(19): siRNA sense strand
gagaacagauccgacguau

SEQ ID NO: 667794 - RNA, 19 nt, Homo sapiens
  misc_RNA (1)...(19): siRNA sense strand
gcaggaagaaagcaaauug

SEQ ID NO: 667795 - RNA, 19 nt, Homo sapiens
  misc_RNA (1)...(19): siRNA sense strand
gagaagggcacuuuccuau

SEQ ID NO: 667796 - RNA, 19 nt, Homo sapiens
  misc_RNA (1)...(19): siRNA sense strand
gaagggagcagacccaagu

SEQ ID NO: 667797 - RNA, 19 nt, Homo sapiens
  misc_RNA (1)...(19): siRNA sense strand
ugaagaacacaguaucaua

SEQ ID NO: 667798 - RNA, 19 nt, Homo sapiens
  misc_RNA (1)...(19): siRNA sense strand
gcacuuuccuauguucuug

SEQ ID NO: 667799 - RNA, 19 nt, Homo sapiens
  misc_RNA (1)...(19): siRNA sense strand
uggcaaauauuucccaaga

SEQ ID NO: 667800 - RNA, 19 nt, Homo sapiens
  misc_RNA (1)...(19): siRNA sense strand
uugcacagcuucagcauga

SEQ ID NO: 667801 - RNA, 19 nt, Homo sapiens
  misc_RNA (1)...(19): siRNA sense strand
gcaaaaugaugcucacuug

SEQ ID NO: 667802 - RNA, 19 nt, Homo sapiens
  misc_RNA (1)...(19): siRNA sense strand
ggccagcucuguugcauuc

SEQ ID NO: 667803 - RNA, 19 nt, Homo sapiens
  misc_RNA (1)...(19): siRNA sense strand
gaucaaagggaaucugaga

SEQ ID NO: 667804 - RNA, 19 nt, Homo sapiens
  misc_RNA (1)...(19): siRNA sense strand
agagagcuccaccguauua

SEQ ID NO: 667805 - RNA, 19 nt, Homo sapiens
  misc_RNA (1)...(19): siRNA sense strand
guaaucaguuuguggaucu

SEQ ID NO: 667806 - RNA, 19 nt, Homo sapiens
  misc_RNA (1)...(19): siRNA sense strand
ugauggaccugcuugcaaa

SEQ ID NO: 667807 - RNA, 19 nt, Homo sapiens
  misc_RNA (1)...(19): siRNA sense strand
ggagaagggcacuuuccua

SEQ ID NO: 667808 - RNA, 19 nt, Homo sapiens
  misc_RNA (1)...(19): siRNA sense strand
gcauuuggcagcugaagaa

SEQ ID NO: 667809 - RNA, 19 nt, Homo sapiens
  misc_RNA (1)...(19): siRNA sense strand
uccaugaacuccagagaaa

SEQ ID NO: 667810 - RNA, 19 nt, Homo sapiens
  misc_RNA (1)...(19): siRNA sense strand
ggcacgagauggccucuga

SEQ ID NO: 667811 - RNA, 19 nt, Homo sapiens
  misc_RNA (1)...(19): siRNA sense strand
ggagaacagauccgacgua

SEQ ID NO: 667812 - RNA, 19 nt, Homo sapiens
  misc_RNA (1)...(19): siRNA sense strand
acaaugcugugguccauga

SEQ ID NO: 667813 - RNA, 19 nt, Homo sapiens
  misc_RNA (1)...(19): siRNA sense strand
gcacauccgaagucauaaa

SEQ ID NO: 667814 - RNA, 19 nt, Homo sapiens
  misc_RNA (1)...(19): siRNA sense strand
gaauaagagucugguugau

SEQ ID NO: 667815 - RNA, 19 nt, Homo sapiens
  misc_RNA (1)...(19): siRNA sense strand
ucacugccauucucaaaca

SEQ ID NO: 667816 - RNA, 19 nt, Homo sapiens
  misc_RNA (1)...(19): siRNA sense strand
caaaccaacucuggaauac

SEQ ID NO: 667817 - RNA, 19 nt, Homo sapiens
  misc_RNA (1)...(19): siRNA sense strand
ccacagaaccagcauguag

SEQ ID NO: 667818 - RNA, 19 nt, Homo sapiens
  misc_RNA (1)...(19): siRNA sense strand
ucuguugcauucccaauuu

SEQ ID NO: 667819 - RNA, 19 nt, Homo sapiens
  misc_RNA (1)...(19): siRNA sense strand
ugaagaagcaaaucuggaa

SEQ ID NO: 667820 - RNA, 19 nt, Homo sapiens
  misc_RNA (1)...(19): siRNA sense strand
ccacaaaccaacucuggaa

SEQ ID NO: 667821 - RNA, 19 nt, Homo sapiens
  misc_RNA (1)...(19): siRNA sense strand
gggagagcauggaagaugu

SEQ ID NO: 667822 - RNA, 19 nt, Homo sapiens
  misc_RNA (1)...(19): siRNA sense strand
gaacagccagugcauuugg

SEQ ID NO: 667823 - RNA, 19 nt, Homo sapiens
  misc_RNA (1)...(19): siRNA sense strand
aagggaaucugagaauauu

SEQ ID NO: 667824 - RNA, 19 nt, Homo sapiens
  misc_RNA (1)...(19): siRNA sense strand
gaauugaagaacacaguau

SEQ ID NO: 667825 - RNA, 19 nt, Homo sapiens
  misc_RNA (1)...(19): siRNA sense strand
gcaaaucuggaacucauuc

SEQ ID NO: 667826 - RNA, 19 nt, Homo sapiens
  misc_RNA (1)...(19): siRNA sense strand
aaugaacaccacacaguua

SEQ ID NO: 667827 - RNA, 19 nt, Homo sapiens
  misc_RNA (1)...(19): siRNA sense strand
acaaaccaacucuggaaua

SEQ ID NO: 667828 - RNA, 19 nt, Homo sapiens
  misc_RNA (1)...(19): siRNA sense strand
aggcuucccuguaccagua

SEQ ID NO: 667829 - RNA, 19 nt, Homo sapiens
  misc_RNA (1)...(19): siRNA sense strand
caguaucgguugacacaau

SEQ ID NO: 667830 - RNA, 19 nt, Homo sapiens
  misc_RNA (1)...(19): siRNA sense strand
aagcaaaucuggaacucau

SEQ ID NO: 667831 - RNA, 19 nt, Homo sapiens
  misc_RNA (1)...(19): siRNA sense strand
aauaagagucugguugaua

SEQ ID NO: 667832 - RNA, 19 nt, Homo sapiens
  misc_RNA (1)...(19): siRNA sense strand
aaagggaaucugagaauau

SEQ ID NO: 667833 - RNA, 19 nt, Homo sapiens
  misc_RNA (1)...(19): siRNA sense strand
gacguauccugaagggaaa

SEQ ID NO: 667834 - RNA, 19 nt, Homo sapiens
  misc_RNA (1)...(19): siRNA sense strand
gaagggagcagugggaagu

SEQ ID NO: 667835 - RNA, 19 nt, Homo sapiens
  misc_RNA (1)...(19): siRNA sense strand
gauauuaaagagcacaaug

SEQ ID NO: 667836 - RNA, 19 nt, Homo sapiens
  misc_RNA (1)...(19): siRNA sense strand
caagggagaagggcacuuu

SEQ ID NO: 667837 - RNA, 19 nt, Homo sapiens
  misc_RNA (1)...(19): siRNA sense strand
gauggccucugacucuuca

SEQ ID NO: 667838 - RNA, 19 nt, Homo sapiens
  misc_RNA (1)...(19): siRNA sense strand
agaauaagagucugguuga

SEQ ID NO: 667839 - RNA, 19 nt, Homo sapiens
  misc_RNA (1)...(19): siRNA sense strand
gaacgaacagccagugcau

SEQ ID NO: 667840 - RNA, 19 nt, Homo sapiens
  misc_RNA (1)...(19): siRNA sense strand
aagcuuaguuucccuucuu

SEQ ID NO: 667841 - RNA, 19 nt, Homo sapiens
  misc_RNA (1)...(19): siRNA sense strand
gagauggccucugacucuu

SEQ ID NO: 667842 - RNA, 19 nt, Homo sapiens
  misc_RNA (1)...(19): siRNA sense strand
uugcacauccgaagucaua

SEQ ID NO: 667843 - RNA, 19 nt, Homo sapiens
  misc_RNA (1)...(19): siRNA sense strand
gcaugugugugcugagaag

SEQ ID NO: 667844 - RNA, 19 nt, Homo sapiens
  misc_RNA (1)...(19): siRNA sense strand
caaugaacaccacacaguu

SEQ ID NO: 667845 - RNA, 19 nt, Homo sapiens
  misc_RNA (1)...(19): siRNA sense strand
ucaaagggaaucugagaau

SEQ ID NO: 667846 - RNA, 19 nt, Homo sapiens
  misc_RNA (1)...(19): siRNA sense strand
ccucagaaaugccaaccau

SEQ ID NO: 667847 - RNA, 19 nt, Homo sapiens
  misc_RNA (1)...(19): siRNA sense strand
auaagagucugguugauac

SEQ ID NO: 667848 - RNA, 19 nt, Homo sapiens
  misc_RNA (1)...(19): siRNA sense strand
ccacacaguuagggaaauc

SEQ ID NO: 667849 - RNA, 19 nt, Homo sapiens
  misc_RNA (1)...(19): siRNA sense strand
ccaaugaacaccacacagu

SEQ ID NO: 667850 - RNA, 19 nt, Homo sapiens
  misc_RNA (1)...(19): siRNA sense strand
cgagauggccucugacucu

SEQ ID NO: 667851 - RNA, 19 nt, Homo sapiens
  misc_RNA (1)...(19): siRNA sense strand
gcacagcuucagcaugaug

SEQ ID NO: 667852 - RNA, 19 nt, Homo sapiens
  misc_RNA (1)...(19): siRNA sense strand
gauccgacguauccugaag

SEQ ID NO: 667853 - RNA, 19 nt, Homo sapiens
  misc_RNA (1)...(19): siRNA sense strand
gcuguccgccuguugauga

SEQ ID NO: 667854 - RNA, 19 nt, Homo sapiens
  misc_RNA (1)...(19): siRNA sense strand
uaacuaugauggccugacu

SEQ ID NO: 667855 - RNA, 19 nt, Homo sapiens
  misc_RNA (1)...(19): siRNA sense strand
cuucacaugcuggauauua

SEQ ID NO: 667856 - RNA, 19 nt, Homo sapiens
  misc_RNA (1)...(19): siRNA sense strand
gugacacguuccuucauau

SEQ ID NO: 667857 - RNA, 19 nt, Homo sapiens
  misc_RNA (1)...(19): siRNA sense strand
gcuaaucccaugcagacuu

SEQ ID NO: 667858 - RNA, 19 nt, Homo sapiens
  misc_RNA (1)...(19): siRNA sense strand
acgaacagccagugcauuu

SEQ ID NO: 667859 - RNA, 19 nt, Homo sapiens
  misc_RNA (1)...(19): siRNA sense strand
ugaggcaacuaacuaugau

SEQ ID NO: 667860 - RNA, 19 nt, Homo sapiens
  misc_RNA (1)...(19): siRNA sense strand
gacacguuccuucauauug

SEQ ID NO: 667861 - RNA, 19 nt, Homo sapiens
  misc_RNA (1)...(19): siRNA sense strand
ccucuuugaugguccagaa

SEQ ID NO: 667862 - RNA, 19 nt, Homo sapiens
  misc_RNA (1)...(19): siRNA sense strand
gaaugcaaaggcuuacaau

SEQ ID NO: 667863 - RNA, 19 nt, Homo sapiens
  misc_RNA (1)...(19): siRNA sense strand
gaagaauaagagucugguu

SEQ ID NO: 667864 - RNA, 19 nt, Homo sapiens
  misc_RNA (1)...(19): siRNA sense strand
uaaagaacucagugaagga

SEQ ID NO: 667865 - RNA, 19 nt, Homo sapiens
  misc_RNA (1)...(19): siRNA sense strand
agugggaaguaaucaguuu

SEQ ID NO: 667866 - RNA, 19 nt, Homo sapiens
  misc_RNA (1)...(19): siRNA sense strand
ucacaugcuggauauuaaa

SEQ ID NO: 667867 - RNA, 19 nt, Homo sapiens
  misc_RNA (1)...(19): siRNA sense strand
aaacaugggaaauccaaug

SEQ ID NO: 667868 - RNA, 19 nt, Homo sapiens
  misc_RNA (1)...(19): siRNA sense strand
gagcauggaagauguucau

SEQ ID NO: 667869 - RNA, 19 nt, Homo sapiens
  misc_RNA (1)...(19): siRNA sense strand
gguaaagaacucagugaag

SEQ ID NO: 667870 - RNA, 19 nt, Homo sapiens
  misc_RNA (1)...(19): siRNA sense strand
ggagcaggaagaaagcaaa

SEQ ID NO: 667871 - RNA, 19 nt, Homo sapiens
  misc_RNA (1)...(19): siRNA sense strand
cuaaucccaugcagacuuc

SEQ ID NO: 667872 - RNA, 19 nt, Homo sapiens
  misc_RNA (1)...(19): siRNA sense strand
ggagagcauggaagauguu

SEQ ID NO: 667873 - RNA, 19 nt, Homo sapiens
  misc_RNA (1)...(19): siRNA sense strand
gaacuuggagaacgaacag

SEQ ID NO: 667874 - RNA, 19 nt, Homo sapiens
  misc_RNA (1)...(19): siRNA sense strand
agaaaucaacagccucauu

SEQ ID NO: 667875 - RNA, 19 nt, Homo sapiens
  misc_RNA (1)...(19): siRNA sense strand
gagaauugaagaacacagu

SEQ ID NO: 667876 - RNA, 19 nt, Homo sapiens
  misc_RNA (1)...(19): siRNA sense strand
gcagugggaaguaaucagu

SEQ ID NO: 667877 - RNA, 19 nt, Homo sapiens
  misc_RNA (1)...(19): siRNA sense strand
gggaagaacaccucugcau

SEQ ID NO: 667878 - RNA, 19 nt, Homo sapiens
  misc_RNA (1)...(19): siRNA sense strand
caugggaaauccaaugaac

SEQ ID NO: 667879 - RNA, 19 nt, Homo sapiens
  misc_RNA (1)...(19): siRNA sense strand
acacuucacugccauucuc

SEQ ID NO: 667880 - RNA, 19 nt, Homo sapiens
  misc_RNA (1)...(19): siRNA sense strand
gcaacacugcccuccaugu

SEQ ID NO: 667881 - RNA, 19 nt, Homo sapiens
  misc_RNA (1)...(19): siRNA sense strand
gcagucauagcccacaaug

SEQ ID NO: 667882 - RNA, 19 nt, Homo sapiens
  misc_RNA (1)...(19): siRNA sense strand
gaagaacaaugucaaaugg

SEQ ID NO: 667883 - RNA, 19 nt, Homo sapiens
  misc_RNA (1)...(19): siRNA sense strand
acaagaagcuguuugaaga

SEQ ID NO: 667884 - RNA, 19 nt, Homo sapiens
  misc_RNA (1)...(19): siRNA sense strand
uaaaugggcuugauacugu

SEQ ID NO: 667885 - RNA, 19 nt, Homo sapiens
  misc_RNA (1)...(19): siRNA sense strand
gcugaacccugaaauaguu

SEQ ID NO: 667886 - RNA, 19 nt, Homo sapiens
  misc_RNA (1)...(19): siRNA sense strand
ccacauacauuaaaguuac

SEQ ID NO: 667887 - RNA, 19 nt, Homo sapiens
  misc_RNA (1)...(19): siRNA sense strand
ggugugaggugacgguaaa

SEQ ID NO: 667888 - RNA, 19 nt, Homo sapiens
  misc_RNA (1)...(19): siRNA sense strand
ggagcugaacccugaaaua

SEQ ID NO: 667889 - RNA, 19 nt, Homo sapiens
  misc_RNA (1)...(19): siRNA sense strand
uagagaagauccagaccaa

SEQ ID NO: 667890 - RNA, 19 nt, Homo sapiens
  misc_RNA (1)...(19): siRNA sense strand
agaaauugcugagacaaga

SEQ ID NO: 667891 - RNA, 19 nt, Homo sapiens
  misc_RNA (1)...(19): siRNA sense strand
gagcugaacccugaaauag

SEQ ID NO: 667892 - RNA, 19 nt, Homo sapiens
  misc_RNA (1)...(19): siRNA sense strand
gagacaagaaggaaaauua

SEQ ID NO: 667893 - RNA, 19 nt, Homo sapiens
  misc_RNA (1)...(19): siRNA sense strand
gaaucuugguguugugguu

SEQ ID NO: 667894 - RNA, 19 nt, Homo sapiens
  misc_RNA (1)...(19): siRNA sense strand
gaugaagaacaaugucaaa

SEQ ID NO: 667895 - RNA, 19 nt, Homo sapiens
  misc_RNA (1)...(19): siRNA sense strand
gaccuggccugcaacuuca

SEQ ID NO: 667896 - RNA, 19 nt, Homo sapiens
  misc_RNA (1)...(19): siRNA sense strand
gaaggaaaauuagagaaga

SEQ ID NO: 667897 - RNA, 19 nt, Homo sapiens
  misc_RNA (1)...(19): siRNA sense strand
gaaauugcugagacaagaa

SEQ ID NO: 667898 - RNA, 19 nt, Homo sapiens
  misc_RNA (1)...(19): siRNA sense strand
ugaagaacaaugucaaaug

SEQ ID NO: 667899 - RNA, 19 nt, Homo sapiens
  misc_RNA (1)...(19): siRNA sense strand
gggacuggcuguauaugca

SEQ ID NO: 667900 - RNA, 19 nt, Homo sapiens
  misc_RNA (1)...(19): siRNA sense strand
cgaagcaucggcccaaaga

SEQ ID NO: 667901 - RNA, 19 nt, Homo sapiens
  misc_RNA (1)...(19): siRNA sense strand
gccugcaacuucagccuuu

SEQ ID NO: 667902 - RNA, 19 nt, Homo sapiens
  misc_RNA (1)...(19): siRNA sense strand
guaaaugggcuugauacug

SEQ ID NO: 667903 - RNA, 19 nt, Homo sapiens
  misc_RNA (1)...(19): siRNA sense strand
aagcaucggcccaaagaaa

SEQ ID NO: 667904 - RNA, 19 nt, Homo sapiens
  misc_RNA (1)...(19): siRNA sense strand
cgacaucgcgucuauaagc

SEQ ID NO: 667905 - RNA, 19 nt, Homo sapiens
  misc_RNA (1)...(19): siRNA sense strand
ggaugaagaacaaugucaa

SEQ ID NO: 667906 - RNA, 19 nt, Homo sapiens
  misc_RNA (1)...(19): siRNA sense strand
cucagggacuggcuguaua

SEQ ID NO: 667907 - RNA, 19 nt, Homo sapiens
  misc_RNA (1)...(19): siRNA sense strand
ugagagugccuaugucugu

SEQ ID NO: 667908 - RNA, 19 nt, Homo sapiens
  misc_RNA (1)...(19): siRNA sense strand
caacuucagccuuucucaa

SEQ ID NO: 667909 - RNA, 19 nt, Homo sapiens
  misc_RNA (1)...(19): siRNA sense strand
gcaggugaggcgacaguga

SEQ ID NO: 667910 - RNA, 19 nt, Homo sapiens
  misc_RNA (1)...(19): siRNA sense strand
cgcagucgguggagaaugu

SEQ ID NO: 667911 - RNA, 19 nt, Homo sapiens
  misc_RNA (1)...(19): siRNA sense strand
ugaccuggccugcaacuuc

SEQ ID NO: 667912 - RNA, 19 nt, Homo sapiens
  misc_RNA (1)...(19): siRNA sense strand
gugaggcgacagugaaauu

SEQ ID NO: 667913 - RNA, 19 nt, Homo sapiens
  misc_RNA (1)...(19): siRNA sense strand
cgacagugaaauuucuaaa

SEQ ID NO: 667914 - RNA, 19 nt, Homo sapiens
  misc_RNA (1)...(19): siRNA sense strand
agauauaaguacugguuag

SEQ ID NO: 667915 - RNA, 19 nt, Homo sapiens
  misc_RNA (1)...(19): siRNA sense strand
gagaaauugcugagacaag

SEQ ID NO: 667916 - RNA, 19 nt, Homo sapiens
  misc_RNA (1)...(19): siRNA sense strand
guauaugcauccccugaaa

SEQ ID NO: 667917 - RNA, 19 nt, Homo sapiens
  misc_RNA (1)...(19): siRNA sense strand
cuaugucugucgugaacuu

SEQ ID NO: 667918 - RNA, 19 nt, Homo sapiens
  misc_RNA (1)...(19): siRNA sense strand
ugucugucgugaacuuuga

SEQ ID NO: 667919 - RNA, 19 nt, Homo sapiens
  misc_RNA (1)...(19): siRNA sense strand
ggagaaauugcugagacaa

SEQ ID NO: 667920 - RNA, 19 nt, Homo sapiens
  misc_RNA (1)...(19): siRNA sense strand
gacgguaaaugggcuugau

SEQ ID NO: 667921 - RNA, 19 nt, Homo sapiens
  misc_RNA (1)...(19): siRNA sense strand
agguagggaugaagaacaa

SEQ ID NO: 667922 - RNA, 19 nt, Homo sapiens
  misc_RNA (1)...(19): siRNA sense strand
gggaugaagaacaauguca

SEQ ID NO: 667923 - RNA, 19 nt, Homo sapiens
  misc_RNA (1)...(19): siRNA sense strand
guagggaugaagaacaaug

SEQ ID NO: 667924 - RNA, 19 nt, Homo sapiens
  misc_RNA (1)...(19): siRNA sense strand
caggugaggcgacagugaa

SEQ ID NO: 667925 - RNA, 19 nt, Homo sapiens
  misc_RNA (1)...(19): siRNA sense strand
gagguagggaugaagaaca

SEQ ID NO: 667926 - RNA, 19 nt, Homo sapiens
  misc_RNA (1)...(19): siRNA sense strand
gaagcaucggcccaaagaa

SEQ ID NO: 667927 - RNA, 19 nt, Homo sapiens
  misc_RNA (1)...(19): siRNA sense strand
gaggcgacagugaaauuuc

SEQ ID NO: 667928 - RNA, 19 nt, Homo sapiens
  misc_RNA (1)...(19): siRNA sense strand
uugagaagcccaagaccaa

SEQ ID NO: 667929 - RNA, 19 nt, Homo sapiens
  misc_RNA (1)...(19): siRNA sense strand
ugacgcagucgguggagaa

SEQ ID NO: 667930 - RNA, 19 nt, Homo sapiens
  misc_RNA (1)...(19): siRNA sense strand
gcgacagugaaauuucuaa

SEQ ID NO: 667931 - RNA, 19 nt, Homo sapiens
  misc_RNA (1)...(19): siRNA sense strand
ucagggacuggcuguauau

SEQ ID NO: 667932 - RNA, 19 nt, Homo sapiens
  misc_RNA (1)...(19): siRNA sense strand
gccuaugucugucgugaac

SEQ ID NO: 667933 - RNA, 19 nt, Homo sapiens
  misc_RNA (1)...(19): siRNA sense strand
ugaggcgacagugaaauuu

SEQ ID NO: 667934 - RNA, 19 nt, Homo sapiens
  misc_RNA (1)...(19): siRNA sense strand
gacaucgcgucuauaagcu

SEQ ID NO: 667935 - RNA, 19 nt, Homo sapiens
  misc_RNA (1)...(19): siRNA sense strand
cccacauacauuaaaguua

SEQ ID NO: 667936 - RNA, 19 nt, Homo sapiens
  misc_RNA (1)...(19): siRNA sense strand
caagaagcuguuugaagag

SEQ ID NO: 667937 - RNA, 19 nt, Homo sapiens
  misc_RNA (1)...(19): siRNA sense strand
gcaacuucagccuuucuca

SEQ ID NO: 667938 - RNA, 19 nt, Homo sapiens
  misc_RNA (1)...(19): siRNA sense strand
aggagaaauugcugagaca

SEQ ID NO: 667939 - RNA, 19 nt, Homo sapiens
  misc_RNA (1)...(19): siRNA sense strand
guuugaagaggagaaauug

SEQ ID NO: 667940 - RNA, 19 nt, Homo sapiens
  misc_RNA (1)...(19): siRNA sense strand
gaagacagcugaacugaag

SEQ ID NO: 667941 - RNA, 19 nt, Homo sapiens
  misc_RNA (1)...(19): siRNA sense strand
gaagugcaguuauaucaaa

SEQ ID NO: 667942 - RNA, 19 nt, Homo sapiens
  misc_RNA (1)...(19): siRNA sense strand
gaacgaguaaccacaauua

SEQ ID NO: 667943 - RNA, 19 nt, Homo sapiens
  misc_RNA (1)...(19): siRNA sense strand
caugagagccuuacaaaua

SEQ ID NO: 667944 - RNA, 19 nt, Homo sapiens
  misc_RNA (1)...(19): siRNA sense strand
gaauucgacuggaacauuu

SEQ ID NO: 667945 - RNA, 19 nt, Homo sapiens
  misc_RNA (1)...(19): siRNA sense strand
ggacuccuaugcuaagaua

SEQ ID NO: 667946 - RNA, 19 nt, Homo sapiens
  misc_RNA (1)...(19): siRNA sense strand
ccagagaaguuaaagaauu

SEQ ID NO: 667947 - RNA, 19 nt, Homo sapiens
  misc_RNA (1)...(19): siRNA sense strand
gcacaguaauugaggauug

SEQ ID NO: 667948 - RNA, 19 nt, Homo sapiens
  misc_RNA (1)...(19): siRNA sense strand
aaacugcuuuggagaaaua

SEQ ID NO: 667949 - RNA, 19 nt, Homo sapiens
  misc_RNA (1)...(19): siRNA sense strand
gcaugaagauguuaagcaa

SEQ ID NO: 667950 - RNA, 19 nt, Homo sapiens
  misc_RNA (1)...(19): siRNA sense strand
gacaagaagugguggagaa

SEQ ID NO: 667951 - RNA, 19 nt, Homo sapiens
  misc_RNA (1)...(19): siRNA sense strand
uacaggaccuuucagauaa

SEQ ID NO: 667952 - RNA, 19 nt, Homo sapiens
  misc_RNA (1)...(19): siRNA sense strand
ggagagacuugauucuguu

SEQ ID NO: 667953 - RNA, 19 nt, Homo sapiens
  misc_RNA (1)...(19): siRNA sense strand
cagcugaacugaagaggaa

SEQ ID NO: 667954 - RNA, 19 nt, Homo sapiens
  misc_RNA (1)...(19): siRNA sense strand
aagaagugguggagaaaua

SEQ ID NO: 667955 - RNA, 19 nt, Homo sapiens
  misc_RNA (1)...(19): siRNA sense strand
ugaagaaauugaagacuga

SEQ ID NO: 667956 - RNA, 19 nt, Homo sapiens
  misc_RNA (1)...(19): siRNA sense strand
uaagaagcaugaagauguu

SEQ ID NO: 667957 - RNA, 19 nt, Homo sapiens
  misc_RNA (1)...(19): siRNA sense strand
aaacugaagucccaggaaa

SEQ ID NO: 667958 - RNA, 19 nt, Homo sapiens
  misc_RNA (1)...(19): siRNA sense strand
uaagauagaugagaagaca

SEQ ID NO: 667959 - RNA, 19 nt, Homo sapiens
  misc_RNA (1)...(19): siRNA sense strand
uagcugagauugugauuca

SEQ ID NO: 667960 - RNA, 19 nt, Homo sapiens
  misc_RNA (1)...(19): siRNA sense strand
ugaaaucuauggagacuca

SEQ ID NO: 667961 - RNA, 19 nt, Homo sapiens
  misc_RNA (1)...(19): siRNA sense strand
uuacucaucuggacucauu

SEQ ID NO: 667962 - RNA, 19 nt, Homo sapiens
  misc_RNA (1)...(19): siRNA sense strand
gaacugaagaggaagaugu

SEQ ID NO: 667963 - RNA, 19 nt, Homo sapiens
  misc_RNA (1)...(19): siRNA sense strand
gaacugaagaaauugaaga

SEQ ID NO: 667964 - RNA, 19 nt, Homo sapiens
  misc_RNA (1)...(19): siRNA sense strand
cuacaacaaucacuaaauc

SEQ ID NO: 667965 - RNA, 19 nt, Homo sapiens
  misc_RNA (1)...(19): siRNA sense strand
gauauaauguagcugagau

SEQ ID NO: 667966 - RNA, 19 nt, Homo sapiens
  misc_RNA (1)...(19): siRNA sense strand
gaagucccaggaaauauuu

SEQ ID NO: 667967 - RNA, 19 nt, Homo sapiens
  misc_RNA (1)...(19): siRNA sense strand
gaaauacaagagaguuuga

SEQ ID NO: 667968 - RNA, 19 nt, Homo sapiens
  misc_RNA (1)...(19): siRNA sense strand
gaaauugaagacugaagaa

SEQ ID NO: 667969 - RNA, 19 nt, Homo sapiens
  misc_RNA (1)...(19): siRNA sense strand
uaacaggagcugaugguaa

SEQ ID NO: 667970 - RNA, 19 nt, Homo sapiens
  misc_RNA (1)...(19): siRNA sense strand
gcaauacaaacgcacagua

SEQ ID NO: 667971 - RNA, 19 nt, Homo sapiens
  misc_RNA (1)...(19): siRNA sense strand
ccugaagucuugcacauga

SEQ ID NO: 667972 - RNA, 19 nt, Homo sapiens
  misc_RNA (1)...(19): siRNA sense strand
ggaauucgacuggaacauu

SEQ ID NO: 667973 - RNA, 19 nt, Homo sapiens
  misc_RNA (1)...(19): siRNA sense strand
ugagacugcugauauucua

SEQ ID NO: 667974 - RNA, 19 nt, Homo sapiens
  misc_RNA (1)...(19): siRNA sense strand
aacaggagcugaugguaaa

SEQ ID NO: 667975 - RNA, 19 nt, Homo sapiens
  misc_RNA (1)...(19): siRNA sense strand
gcaauuuaguuacucaucu

SEQ ID NO: 667976 - RNA, 19 nt, Homo sapiens
  misc_RNA (1)...(19): siRNA sense strand
auacaggaccuuucagaua

SEQ ID NO: 667977 - RNA, 19 nt, Homo sapiens
  misc_RNA (1)...(19): siRNA sense strand
caauacaaacgcacaguaa

SEQ ID NO: 667978 - RNA, 19 nt, Homo sapiens
  misc_RNA (1)...(19): siRNA sense strand
ccagugaacucugaaguca

SEQ ID NO: 667979 - RNA, 19 nt, Homo sapiens
  misc_RNA (1)...(19): siRNA sense strand
gaaaacugcuuuggagaaa

SEQ ID NO: 667980 - RNA, 19 nt, Homo sapiens
  misc_RNA (1)...(19): siRNA sense strand
uaauguagcugagauugug

SEQ ID NO: 667981 - RNA, 19 nt, Homo sapiens
  misc_RNA (1)...(19): siRNA sense strand
uaaauccucugcggacaaa

SEQ ID NO: 667982 - RNA, 19 nt, Homo sapiens
  misc_RNA (1)...(19): siRNA sense strand
ggaauuucuuuggcaauau

SEQ ID NO: 667983 - RNA, 19 nt, Homo sapiens
  misc_RNA (1)...(19): siRNA sense strand
ccauucagcaauuuaguua

SEQ ID NO: 667984 - RNA, 19 nt, Homo sapiens
  misc_RNA (1)...(19): siRNA sense strand
ggacaaaaugcaacaguua

SEQ ID NO: 667985 - RNA, 19 nt, Homo sapiens
  misc_RNA (1)...(19): siRNA sense strand
caacuuuauucacuucaga

SEQ ID NO: 667986 - RNA, 19 nt, Homo sapiens
  misc_RNA (1)...(19): siRNA sense strand
gagcuacaacaaucacuaa

SEQ ID NO: 667987 - RNA, 19 nt, Homo sapiens
  misc_RNA (1)...(19): siRNA sense strand
ugaaagauacgguccagaa

SEQ ID NO: 667988 - RNA, 19 nt, Homo sapiens
  misc_RNA (1)...(19): siRNA sense strand
gaaagaaauacaagagagu

SEQ ID NO: 667989 - RNA, 19 nt, Homo sapiens
  misc_RNA (1)...(19): siRNA sense strand
uaaaggagagccugaacuu

SEQ ID NO: 667990 - RNA, 19 nt, Homo sapiens
  misc_RNA (1)...(19): siRNA sense strand
gauacgguccagaagcuua

SEQ ID NO: 667991 - RNA, 19 nt, Homo sapiens
  misc_RNA (1)...(19): siRNA sense strand
agagaagcaugccgugaaa

SEQ ID NO: 667992 - RNA, 19 nt, Homo sapiens
  misc_RNA (1)...(19): siRNA sense strand
gcugagauugugauucaua

SEQ ID NO: 667993 - RNA, 19 nt, Homo sapiens
  misc_RNA (1)...(19): siRNA sense strand
ccaggaggcauuaaugaaa

SEQ ID NO: 667994 - RNA, 19 nt, Homo sapiens
  misc_RNA (1)...(19): siRNA sense strand
uggaauuucuuuggcaaua

SEQ ID NO: 667995 - RNA, 19 nt, Homo sapiens
  misc_RNA (1)...(19): siRNA sense strand
aaagaggugcugucuauga

SEQ ID NO: 667996 - RNA, 19 nt, Homo sapiens
  misc_RNA (1)...(19): siRNA sense strand
gagauugugauucauauuc

SEQ ID NO: 667997 - RNA, 19 nt, Homo sapiens
  misc_RNA (1)...(19): siRNA sense strand
gaacucugaagucauguau

SEQ ID NO: 667998 - RNA, 19 nt, Homo sapiens
  misc_RNA (1)...(19): siRNA sense strand
uccaaagccugaagucuug

SEQ ID NO: 667999 - RNA, 19 nt, Homo sapiens
  misc_RNA (1)...(19): siRNA sense strand
uaaugaaacuggagagacu

SEQ ID NO: 668000 - RNA, 19 nt, Homo sapiens
  misc_RNA (1)...(19): siRNA sense strand
cgaguaaccacaauuaauc

SEQ ID NO: 668001 - RNA, 19 nt, Homo sapiens
  misc_RNA (1)...(19): siRNA sense strand
gagaagacagcugaacuga

SEQ ID NO: 668002 - RNA, 19 nt, Homo sapiens
  misc_RNA (1)...(19): siRNA sense strand
ggauugcaauaaaguucaa

SEQ ID NO: 668003 - RNA, 19 nt, Homo sapiens
  misc_RNA (1)...(19): siRNA sense strand
aagaggugcugucuaugaa

SEQ ID NO: 668004 - RNA, 19 nt, Homo sapiens
  misc_RNA (1)...(19): siRNA sense strand
aaacgauagugcugcaaga

SEQ ID NO: 668005 - RNA, 19 nt, Homo sapiens
  misc_RNA (1)...(19): siRNA sense strand
ugaagucccaggaaauauu

SEQ ID NO: 668006 - RNA, 19 nt, Homo sapiens
  misc_RNA (1)...(19): siRNA sense strand
gaaacugaagucccaggaa

SEQ ID NO: 668007 - RNA, 19 nt, Homo sapiens
  misc_RNA (1)...(19): siRNA sense strand
gcugaaagggagaaacuga

SEQ ID NO: 668008 - RNA, 19 nt, Homo sapiens
  misc_RNA (1)...(19): siRNA sense strand
gacugaugauugugaagaa

SEQ ID NO: 668009 - RNA, 19 nt, Homo sapiens
  misc_RNA (1)...(19): siRNA sense strand
ucaaaagacugaugauugu

SEQ ID NO: 668010 - RNA, 19 nt, Homo sapiens
  misc_RNA (1)...(19): siRNA sense strand
ggaagugcaguuauaucaa

SEQ ID NO: 668011 - RNA, 19 nt, Homo sapiens
  misc_RNA (1)...(19): siRNA sense strand
uggagagacuugauucugu

SEQ ID NO: 668012 - RNA, 19 nt, Homo sapiens
  misc_RNA (1)...(19): siRNA sense strand
auacaaacgcacaguaauu

SEQ ID NO: 668013 - RNA, 19 nt, Homo sapiens
  misc_RNA (1)...(19): siRNA sense strand
caggaccuuucagauaaua

SEQ ID NO: 668014 - RNA, 19 nt, Homo sapiens
  misc_RNA (1)...(19): siRNA sense strand
ggagcuacaacaaucacua

SEQ ID NO: 668015 - RNA, 19 nt, Homo sapiens
  misc_RNA (1)...(19): siRNA sense strand
caauuuaguuacucaucug

SEQ ID NO: 668016 - RNA, 19 nt, Homo sapiens
  misc_RNA (1)...(19): siRNA sense strand
gaagaggaagauguucaaa

SEQ ID NO: 668017 - RNA, 19 nt, Homo sapiens
  misc_RNA (1)...(19): siRNA sense strand
aaagacugaugauugugaa

SEQ ID NO: 668018 - RNA, 19 nt, Homo sapiens
  misc_RNA (1)...(19): siRNA sense strand
gaaagauacgguccagaag

SEQ ID NO: 668019 - RNA, 19 nt, Homo sapiens
  misc_RNA (1)...(19): siRNA sense strand
ggcauuaucaacuuuauuc

SEQ ID NO: 668020 - RNA, 19 nt, Homo sapiens
  misc_RNA (1)...(19): siRNA sense strand
gaucuuaacaggagcugau

SEQ ID NO: 668021 - RNA, 19 nt, Homo sapiens
  misc_RNA (1)...(19): siRNA sense strand
auaagaagcaugaagaugu

SEQ ID NO: 668022 - RNA, 19 nt, Homo sapiens
  misc_RNA (1)...(19): siRNA sense strand
agugaacucugaagucaug

SEQ ID NO: 668023 - RNA, 19 nt, Homo sapiens
  misc_RNA (1)...(19): siRNA sense strand
aguuggaagugcaguuaua

SEQ ID NO: 668024 - RNA, 19 nt, Homo sapiens
  misc_RNA (1)...(19): siRNA sense strand
cagagaagcaugccgugaa

SEQ ID NO: 668025 - RNA, 19 nt, Homo sapiens
  misc_RNA (1)...(19): siRNA sense strand
gugaaacguauauggaauu

SEQ ID NO: 668026 - RNA, 19 nt, Homo sapiens
  misc_RNA (1)...(19): siRNA sense strand
gaggauugcaauaaaguuc

SEQ ID NO: 668027 - RNA, 19 nt, Homo sapiens
  misc_RNA (1)...(19): siRNA sense strand
gaaaauucguucaaaagac

SEQ ID NO: 668028 - RNA, 19 nt, Homo sapiens
  misc_RNA (1)...(19): siRNA sense strand
gauauucuauguccaaaag

SEQ ID NO: 668029 - RNA, 19 nt, Homo sapiens
  misc_RNA (1)...(19): siRNA sense strand
gaguaaccacaauuaauca

SEQ ID NO: 668030 - RNA, 19 nt, Homo sapiens
  misc_RNA (1)...(19): siRNA sense strand
ugagagugaugagucagaa

SEQ ID NO: 668031 - RNA, 19 nt, Homo sapiens
  misc_RNA (1)...(19): siRNA sense strand
gaucuacaugagagccuua

SEQ ID NO: 668032 - RNA, 19 nt, Homo sapiens
  misc_RNA (1)...(19): siRNA sense strand
uagccaguaucuuaaagga

SEQ ID NO: 668033 - RNA, 19 nt, Homo sapiens
  misc_RNA (1)...(19): siRNA sense strand
gaagugguggagaaauaug

SEQ ID NO: 668034 - RNA, 19 nt, Homo sapiens
  misc_RNA (1)...(19): siRNA sense strand
gcuacaacaaucacuaaau

SEQ ID NO: 668035 - RNA, 19 nt, Homo sapiens
  misc_RNA (1)...(19): siRNA sense strand
aagcaugccgugaaacgua

SEQ ID NO: 668036 - RNA, 19 nt, Homo sapiens
  misc_RNA (1)...(19): siRNA sense strand
gcugauauucuauguccaa

SEQ ID NO: 668037 - RNA, 19 nt, Homo sapiens
  misc_RNA (1)...(19): siRNA sense strand
agaggaagauguucaaaau

SEQ ID NO: 668038 - RNA, 19 nt, Homo sapiens
  misc_RNA (1)...(19): siRNA sense strand
ucaguuggaagugcaguua

SEQ ID NO: 668039 - RNA, 19 nt, Homo sapiens
  misc_RNA (1)...(19): siRNA sense strand
aaacuggagagacuugauu

SEQ ID NO: 668040 - RNA, 19 nt, Homo sapiens
  misc_RNA (1)...(19): siRNA sense strand
gaagacagcugaacugaag

SEQ ID NO: 668041 - RNA, 19 nt, Homo sapiens
  misc_RNA (1)...(19): siRNA sense strand
gaagugcaguuauaucaaa

SEQ ID NO: 668042 - RNA, 19 nt, Homo sapiens
  misc_RNA (1)...(19): siRNA sense strand
gaacgaguaaccacaauua

SEQ ID NO: 668043 - RNA, 19 nt, Homo sapiens
  misc_RNA (1)...(19): siRNA sense strand
caugagagccuuacaaaua

SEQ ID NO: 668044 - RNA, 19 nt, Homo sapiens
  misc_RNA (1)...(19): siRNA sense strand
gaauucgacuggaacauuu

SEQ ID NO: 668045 - RNA, 19 nt, Homo sapiens
  misc_RNA (1)...(19): siRNA sense strand
ggacuccuaugcuaagaua

SEQ ID NO: 668046 - RNA, 19 nt, Homo sapiens
  misc_RNA (1)...(19): siRNA sense strand
ccagagaaguuaaagaauu

SEQ ID NO: 668047 - RNA, 19 nt, Homo sapiens
  misc_RNA (1)...(19): siRNA sense strand
gcacaguaauugaggauug

SEQ ID NO: 668048 - RNA, 19 nt, Homo sapiens
  misc_RNA (1)...(19): siRNA sense strand
aaacugcuuuggagaaaua

SEQ ID NO: 668049 - RNA, 19 nt, Homo sapiens
  misc_RNA (1)...(19): siRNA sense strand
gcaugaagauguuaagcaa

SEQ ID NO: 668050 - RNA, 19 nt, Homo sapiens
  misc_RNA (1)...(19): siRNA sense strand
gacaagaagugguggagaa

SEQ ID NO: 668051 - RNA, 19 nt, Homo sapiens
  misc_RNA (1)...(19): siRNA sense strand
uacaggaccuuucagauaa

SEQ ID NO: 668052 - RNA, 19 nt, Homo sapiens
  misc_RNA (1)...(19): siRNA sense strand
ggagagacuugauucuguu

SEQ ID NO: 668053 - RNA, 19 nt, Homo sapiens
  misc_RNA (1)...(19): siRNA sense strand
cagcugaacugaagaggaa

SEQ ID NO: 668054 - RNA, 19 nt, Homo sapiens
  misc_RNA (1)...(19): siRNA sense strand
aagaagugguggagaaaua

SEQ ID NO: 668055 - RNA, 19 nt, Homo sapiens
  misc_RNA (1)...(19): siRNA sense strand
ugaagaaauugaagacuga

SEQ ID NO: 668056 - RNA, 19 nt, Homo sapiens
  misc_RNA (1)...(19): siRNA sense strand
uaagaagcaugaagauguu

SEQ ID NO: 668057 - RNA, 19 nt, Homo sapiens
  misc_RNA (1)...(19): siRNA sense strand
aaacugaagucccaggaaa

SEQ ID NO: 668058 - RNA, 19 nt, Homo sapiens
  misc_RNA (1)...(19): siRNA sense strand
uaagauagaugagaagaca

SEQ ID NO: 668059 - RNA, 19 nt, Homo sapiens
  misc_RNA (1)...(19): siRNA sense strand
uagcugagauugugauuca

SEQ ID NO: 668060 - RNA, 19 nt, Homo sapiens
  misc_RNA (1)...(19): siRNA sense strand
ugaaaucuauggagacuca

SEQ ID NO: 668061 - RNA, 19 nt, Homo sapiens
  misc_RNA (1)...(19): siRNA sense strand
uuacucaucuggacucauu

SEQ ID NO: 668062 - RNA, 19 nt, Homo sapiens
  misc_RNA (1)...(19): siRNA sense strand
gaacugaagaggaagaugu

SEQ ID NO: 668063 - RNA, 19 nt, Homo sapiens
  misc_RNA (1)...(19): siRNA sense strand
gaacugaagaaauugaaga

SEQ ID NO: 668064 - RNA, 19 nt, Homo sapiens
  misc_RNA (1)...(19): siRNA sense strand
cuacaacaaucacuaaauc

SEQ ID NO: 668065 - RNA, 19 nt, Homo sapiens
  misc_RNA (1)...(19): siRNA sense strand
gauauaauguagcugagau

SEQ ID NO: 668066 - RNA, 19 nt, Homo sapiens
  misc_RNA (1)...(19): siRNA sense strand
gaagucccaggaaauauuu

SEQ ID NO: 668067 - RNA, 19 nt, Homo sapiens
  misc_RNA (1)...(19): siRNA sense strand
gaaauacaagagaguuuga

SEQ ID NO: 668068 - RNA, 19 nt, Homo sapiens
  misc_RNA (1)...(19): siRNA sense strand
gaaauugaagacugaagaa

SEQ ID NO: 668069 - RNA, 19 nt, Homo sapiens
  misc_RNA (1)...(19): siRNA sense strand
uaacaggagcugaugguaa

SEQ ID NO: 668070 - RNA, 19 nt, Homo sapiens
  misc_RNA (1)...(19): siRNA sense strand
gcaauacaaacgcacagua

SEQ ID NO: 668071 - RNA, 19 nt, Homo sapiens
  misc_RNA (1)...(19): siRNA sense strand
ccugaagucuugcacauga

SEQ ID NO: 668072 - RNA, 19 nt, Homo sapiens
  misc_RNA (1)...(19): siRNA sense strand
ggaauucgacuggaacauu

SEQ ID NO: 668073 - RNA, 19 nt, Homo sapiens
  misc_RNA (1)...(19): siRNA sense strand
ugagacugcugauauucua

SEQ ID NO: 668074 - RNA, 19 nt, Homo sapiens
  misc_RNA (1)...(19): siRNA sense strand
aacaggagcugaugguaaa

SEQ ID NO: 668075 - RNA, 19 nt, Homo sapiens
  misc_RNA (1)...(19): siRNA sense strand
gcaauuuaguuacucaucu

SEQ ID NO: 668076 - RNA, 19 nt, Homo sapiens
  misc_RNA (1)...(19): siRNA sense strand
auacaggaccuuucagaua

SEQ ID NO: 668077 - RNA, 19 nt, Homo sapiens
  misc_RNA (1)...(19): siRNA sense strand
caauacaaacgcacaguaa

SEQ ID NO: 668078 - RNA, 19 nt, Homo sapiens
  misc_RNA (1)...(19): siRNA sense strand
ccagugaacucugaaguca

SEQ ID NO: 668079 - RNA, 19 nt, Homo sapiens
  misc_RNA (1)...(19): siRNA sense strand
gaaaacugcuuuggagaaa

SEQ ID NO: 668080 - RNA, 19 nt, Homo sapiens
  misc_RNA (1)...(19): siRNA sense strand
uaauguagcugagauugug

SEQ ID NO: 668081 - RNA, 19 nt, Homo sapiens
  misc_RNA (1)...(19): siRNA sense strand
uaaauccucugcggacaaa

SEQ ID NO: 668082 - RNA, 19 nt, Homo sapiens
  misc_RNA (1)...(19): siRNA sense strand
ggaauuucuuuggcaauau

SEQ ID NO: 668083 - RNA, 19 nt, Homo sapiens
  misc_RNA (1)...(19): siRNA sense strand
ccauucagcaauuuaguua

SEQ ID NO: 668084 - RNA, 19 nt, Homo sapiens
  misc_RNA (1)...(19): siRNA sense strand
ggacaaaaugcaacaguua

SEQ ID NO: 668085 - RNA, 19 nt, Homo sapiens
  misc_RNA (1)...(19): siRNA sense strand
caacuuuauucacuucaga

SEQ ID NO: 668086 - RNA, 19 nt, Homo sapiens
  misc_RNA (1)...(19): siRNA sense strand
gagcuacaacaaucacuaa

SEQ ID NO: 668087 - RNA, 19 nt, Homo sapiens
  misc_RNA (1)...(19): siRNA sense strand
ugaaagauacgguccagaa

SEQ ID NO: 668088 - RNA, 19 nt, Homo sapiens
  misc_RNA (1)...(19): siRNA sense strand
gaaagaaauacaagagagu

SEQ ID NO: 668089 - RNA, 19 nt, Homo sapiens
  misc_RNA (1)...(19): siRNA sense strand
uaaaggagagccugaacuu

SEQ ID NO: 668090 - RNA, 19 nt, Homo sapiens
  misc_RNA (1)...(19): siRNA sense strand
gauacgguccagaagcuua

SEQ ID NO: 668091 - RNA, 19 nt, Homo sapiens
  misc_RNA (1)...(19): siRNA sense strand
agagaagcaugccgugaaa

SEQ ID NO: 668092 - RNA, 19 nt, Homo sapiens
  misc_RNA (1)...(19): siRNA sense strand
gcugagauugugauucaua

SEQ ID NO: 668093 - RNA, 19 nt, Homo sapiens
  misc_RNA (1)...(19): siRNA sense strand
ccaggaggcauuaaugaaa

SEQ ID NO: 668094 - RNA, 19 nt, Homo sapiens
  misc_RNA (1)...(19): siRNA sense strand
uggaauuucuuuggcaaua

SEQ ID NO: 668095 - RNA, 19 nt, Homo sapiens
  misc_RNA (1)...(19): siRNA sense strand
aaagaggugcugucuauga

SEQ ID NO: 668096 - RNA, 19 nt, Homo sapiens
  misc_RNA (1)...(19): siRNA sense strand
gagauugugauucauauuc

SEQ ID NO: 668097 - RNA, 19 nt, Homo sapiens
  misc_RNA (1)...(19): siRNA sense strand
gaacucugaagucauguau

SEQ ID NO: 668098 - RNA, 19 nt, Homo sapiens
  misc_RNA (1)...(19): siRNA sense strand
uccaaagccugaagucuug

SEQ ID NO: 668099 - RNA, 19 nt, Homo sapiens
  misc_RNA (1)...(19): siRNA sense strand
uaaugaaacuggagagacu

SEQ ID NO: 668100 - RNA, 19 nt, Homo sapiens
  misc_RNA (1)...(19): siRNA sense strand
cgaguaaccacaauuaauc

SEQ ID NO: 668101 - RNA, 19 nt, Homo sapiens
  misc_RNA (1)...(19): siRNA sense strand
gagaagacagcugaacuga

SEQ ID NO: 668102 - RNA, 19 nt, Homo sapiens
  misc_RNA (1)...(19): siRNA sense strand
ggauugcaauaaaguucaa

SEQ ID NO: 668103 - RNA, 19 nt, Homo sapiens
  misc_RNA (1)...(19): siRNA sense strand
aagaggugcugucuaugaa

SEQ ID NO: 668104 - RNA, 19 nt, Homo sapiens
  misc_RNA (1)...(19): siRNA sense strand
aaacgauagugcugcaaga

SEQ ID NO: 668105 - RNA, 19 nt, Homo sapiens
  misc_RNA (1)...(19): siRNA sense strand
ugaagucccaggaaauauu

SEQ ID NO: 668106 - RNA, 19 nt, Homo sapiens
  misc_RNA (1)...(19): siRNA sense strand
gaaacugaagucccaggaa

SEQ ID NO: 668107 - RNA, 19 nt, Homo sapiens
  misc_RNA (1)...(19): siRNA sense strand
gcugaaagggagaaacuga

SEQ ID NO: 668108 - RNA, 19 nt, Homo sapiens
  misc_RNA (1)...(19): siRNA sense strand
gacugaugauugugaagaa

SEQ ID NO: 668109 - RNA, 19 nt, Homo sapiens
  misc_RNA (1)...(19): siRNA sense strand
ucaaaagacugaugauugu

SEQ ID NO: 668110 - RNA, 19 nt, Homo sapiens
  misc_RNA (1)...(19): siRNA sense strand
ggaagugcaguuauaucaa

SEQ ID NO: 668111 - RNA, 19 nt, Homo sapiens
  misc_RNA (1)...(19): siRNA sense strand
uggagagacuugauucugu

SEQ ID NO: 668112 - RNA, 19 nt, Homo sapiens
  misc_RNA (1)...(19): siRNA sense strand
auacaaacgcacaguaauu

SEQ ID NO: 668113 - RNA, 19 nt, Homo sapiens
  misc_RNA (1)...(19): siRNA sense strand
caggaccuuucagauaaua

SEQ ID NO: 668114 - RNA, 19 nt, Homo sapiens
  misc_RNA (1)...(19): siRNA sense strand
ggagcuacaacaaucacua

SEQ ID NO: 668115 - RNA, 19 nt, Homo sapiens
  misc_RNA (1)...(19): siRNA sense strand
caauuuaguuacucaucug

SEQ ID NO: 668116 - RNA, 19 nt, Homo sapiens
  misc_RNA (1)...(19): siRNA sense strand
gaagaggaagauguucaaa

SEQ ID NO: 668117 - RNA, 19 nt, Homo sapiens
  misc_RNA (1)...(19): siRNA sense strand
aaagacugaugauugugaa

SEQ ID NO: 668118 - RNA, 19 nt, Homo sapiens
  misc_RNA (1)...(19): siRNA sense strand
gaaagauacgguccagaag

SEQ ID NO: 668119 - RNA, 19 nt, Homo sapiens
  misc_RNA (1)...(19): siRNA sense strand
ggcauuaucaacuuuauuc

SEQ ID NO: 668120 - RNA, 19 nt, Homo sapiens
  misc_RNA (1)...(19): siRNA sense strand
gaucuuaacaggagcugau

SEQ ID NO: 668121 - RNA, 19 nt, Homo sapiens
  misc_RNA (1)...(19): siRNA sense strand
auaagaagcaugaagaugu

SEQ ID NO: 668122 - RNA, 19 nt, Homo sapiens
  misc_RNA (1)...(19): siRNA sense strand
agugaacucugaagucaug

SEQ ID NO: 668123 - RNA, 19 nt, Homo sapiens
  misc_RNA (1)...(19): siRNA sense strand
aguuggaagugcaguuaua

SEQ ID NO: 668124 - RNA, 19 nt, Homo sapiens
  misc_RNA (1)...(19): siRNA sense strand
cagagaagcaugccgugaa

SEQ ID NO: 668125 - RNA, 19 nt, Homo sapiens
  misc_RNA (1)...(19): siRNA sense strand
gugaaacguauauggaauu

SEQ ID NO: 668126 - RNA, 19 nt, Homo sapiens
  misc_RNA (1)...(19): siRNA sense strand
gaggauugcaauaaaguuc

SEQ ID NO: 668127 - RNA, 19 nt, Homo sapiens
  misc_RNA (1)...(19): siRNA sense strand
gaaaauucguucaaaagac

SEQ ID NO: 668128 - RNA, 19 nt, Homo sapiens
  misc_RNA (1)...(19): siRNA sense strand
gauauucuauguccaaaag

SEQ ID NO: 668129 - RNA, 19 nt, Homo sapiens
  misc_RNA (1)...(19): siRNA sense strand
gaguaaccacaauuaauca

SEQ ID NO: 668130 - RNA, 19 nt, Homo sapiens
  misc_RNA (1)...(19): siRNA sense strand
ugagagugaugagucagaa

SEQ ID NO: 668131 - RNA, 19 nt, Homo sapiens
  misc_RNA (1)...(19): siRNA sense strand
gaucuacaugagagccuua

SEQ ID NO: 668132 - RNA, 19 nt, Homo sapiens
  misc_RNA (1)...(19): siRNA sense strand
uagccaguaucuuaaagga

SEQ ID NO: 668133 - RNA, 19 nt, Homo sapiens
  misc_RNA (1)...(19): siRNA sense strand
gaagugguggagaaauaug

SEQ ID NO: 668134 - RNA, 19 nt, Homo sapiens
  misc_RNA (1)...(19): siRNA sense strand
gcuacaacaaucacuaaau

SEQ ID NO: 668135 - RNA, 19 nt, Homo sapiens
  misc_RNA (1)...(19): siRNA sense strand
aagcaugccgugaaacgua

SEQ ID NO: 668136 - RNA, 19 nt, Homo sapiens
  misc_RNA (1)...(19): siRNA sense strand
gcugauauucuauguccaa

SEQ ID NO: 668137 - RNA, 19 nt, Homo sapiens
  misc_RNA (1)...(19): siRNA sense strand
agaggaagauguucaaaau

SEQ ID NO: 668138 - RNA, 19 nt, Homo sapiens
  misc_RNA (1)...(19): siRNA sense strand
ucaguuggaagugcaguua

SEQ ID NO: 668139 - RNA, 19 nt, Homo sapiens
  misc_RNA (1)...(19): siRNA sense strand
aaacuggagagacuugauu

SEQ ID NO: 668140 - RNA, 19 nt, Homo sapiens
  misc_RNA (1)...(19): siRNA sense strand
gcacagaguuugaaagaug

SEQ ID NO: 668141 - RNA, 19 nt, Homo sapiens
  misc_RNA (1)...(19): siRNA sense strand
gacaaagguuucagcguua

SEQ ID NO: 668142 - RNA, 19 nt, Homo sapiens
  misc_RNA (1)...(19): siRNA sense strand
caacaacugcuaaaugaua

SEQ ID NO: 668143 - RNA, 19 nt, Homo sapiens
  misc_RNA (1)...(19): siRNA sense strand
gaagacuugugcaguuuaa

SEQ ID NO: 668144 - RNA, 19 nt, Homo sapiens
  misc_RNA (1)...(19): siRNA sense strand
gaaguuccacgcucuguua

SEQ ID NO: 668145 - RNA, 19 nt, Homo sapiens
  misc_RNA (1)...(19): siRNA sense strand
gcagugugaugcuauauug

SEQ ID NO: 668146 - RNA, 19 nt, Homo sapiens
  misc_RNA (1)...(19): siRNA sense strand
gcugucaguuucuaaauaa

SEQ ID NO: 668147 - RNA, 19 nt, Homo sapiens
  misc_RNA (1)...(19): siRNA sense strand
gaacccacaucuauauuca

SEQ ID NO: 668148 - RNA, 19 nt, Homo sapiens
  misc_RNA (1)...(19): siRNA sense strand
gaauagugacggauuuaua

SEQ ID NO: 668149 - RNA, 19 nt, Homo sapiens
  misc_RNA (1)...(19): siRNA sense strand
ggaacuaaauauagacaga

SEQ ID NO: 668150 - RNA, 19 nt, Homo sapiens
  misc_RNA (1)...(19): siRNA sense strand
gaagacauccagaucauug

SEQ ID NO: 668151 - RNA, 19 nt, Homo sapiens
  misc_RNA (1)...(19): siRNA sense strand
gaacuuugugggauucuua

SEQ ID NO: 668152 - RNA, 19 nt, Homo sapiens
  misc_RNA (1)...(19): siRNA sense strand
uagcaacaaugccuugaua

SEQ ID NO: 668153 - RNA, 19 nt, Homo sapiens
  misc_RNA (1)...(19): siRNA sense strand
ggacaucacgggcuauaaa

SEQ ID NO: 668154 - RNA, 19 nt, Homo sapiens
  misc_RNA (1)...(19): siRNA sense strand
caauaaagauaccgaguuc

SEQ ID NO: 668155 - RNA, 19 nt, Homo sapiens
  misc_RNA (1)...(19): siRNA sense strand
cagcagaucuucauggaau

SEQ ID NO: 668156 - RNA, 19 nt, Homo sapiens
  misc_RNA (1)...(19): siRNA sense strand
aaacucagauggaucaaga

SEQ ID NO: 668157 - RNA, 19 nt, Homo sapiens
  misc_RNA (1)...(19): siRNA sense strand
uagaacagcuggaggaguu

SEQ ID NO: 668158 - RNA, 19 nt, Homo sapiens
  misc_RNA (1)...(19): siRNA sense strand
acacugaauucaccauuaa

SEQ ID NO: 668159 - RNA, 19 nt, Homo sapiens
  misc_RNA (1)...(19): siRNA sense strand
gaaacugugugugucauug

SEQ ID NO: 668160 - RNA, 19 nt, Homo sapiens
  misc_RNA (1)...(19): siRNA sense strand
ugagaaguauguccuugua

SEQ ID NO: 668161 - RNA, 19 nt, Homo sapiens
  misc_RNA (1)...(19): siRNA sense strand
ucaagcagauguuagaaga

SEQ ID NO: 668162 - RNA, 19 nt, Homo sapiens
  misc_RNA (1)...(19): siRNA sense strand
ucagauggaucaagaugaa

SEQ ID NO: 668163 - RNA, 19 nt, Homo sapiens
  misc_RNA (1)...(19): siRNA sense strand
ccauugaucauucauguua

SEQ ID NO: 668164 - RNA, 19 nt, Homo sapiens
  misc_RNA (1)...(19): siRNA sense strand
gaacaccaacuuuacaaug

SEQ ID NO: 668165 - RNA, 19 nt, Homo sapiens
  misc_RNA (1)...(19): siRNA sense strand
agucagaacucuuauugaa

SEQ ID NO: 668166 - RNA, 19 nt, Homo sapiens
  misc_RNA (1)...(19): siRNA sense strand
gaugcuauauugaaugaug

SEQ ID NO: 668167 - RNA, 19 nt, Homo sapiens
  misc_RNA (1)...(19): siRNA sense strand
ccauauauuugcugaaguu

SEQ ID NO: 668168 - RNA, 19 nt, Homo sapiens
  misc_RNA (1)...(19): siRNA sense strand
ggaagaagaaagaauugaa

SEQ ID NO: 668169 - RNA, 19 nt, Homo sapiens
  misc_RNA (1)...(19): siRNA sense strand
ucagaacucuuauugaaca

SEQ ID NO: 668170 - RNA, 19 nt, Homo sapiens
  misc_RNA (1)...(19): siRNA sense strand
gaugagggauuacuugucu

SEQ ID NO: 668171 - RNA, 19 nt, Homo sapiens
  misc_RNA (1)...(19): siRNA sense strand
gauacuucgugaacaaauu

SEQ ID NO: 668172 - RNA, 19 nt, Homo sapiens
  misc_RNA (1)...(19): siRNA sense strand
ccugugacauugagaagua

SEQ ID NO: 668173 - RNA, 19 nt, Homo sapiens
  misc_RNA (1)...(19): siRNA sense strand
agaccaagcuguuuguaga

SEQ ID NO: 668174 - RNA, 19 nt, Homo sapiens
  misc_RNA (1)...(19): siRNA sense strand
aaauagaacugcggucuga

SEQ ID NO: 668175 - RNA, 19 nt, Homo sapiens
  misc_RNA (1)...(19): siRNA sense strand
gaagacauauacugugaac

SEQ ID NO: 668176 - RNA, 19 nt, Homo sapiens
  misc_RNA (1)...(19): siRNA sense strand
auagacagaugagggauua

SEQ ID NO: 668177 - RNA, 19 nt, Homo sapiens
  misc_RNA (1)...(19): siRNA sense strand
ccuuguaccuauccaauaa

SEQ ID NO: 668178 - RNA, 19 nt, Homo sapiens
  misc_RNA (1)...(19): siRNA sense strand
ggugaauagugacggauuu

SEQ ID NO: 668179 - RNA, 19 nt, Homo sapiens
  misc_RNA (1)...(19): siRNA sense strand
acauauaucucaucucauc

SEQ ID NO: 668180 - RNA, 19 nt, Homo sapiens
  misc_RNA (1)...(19): siRNA sense strand
cacacugaauucaccauua

SEQ ID NO: 668181 - RNA, 19 nt, Homo sapiens
  misc_RNA (1)...(19): siRNA sense strand
gugaacaaauugcuccauu

SEQ ID NO: 668182 - RNA, 19 nt, Homo sapiens
  misc_RNA (1)...(19): siRNA sense strand
gugaugcuauauugaauga

SEQ ID NO: 668183 - RNA, 19 nt, Homo sapiens
  misc_RNA (1)...(19): siRNA sense strand
gcaacaaugccuugauaga

SEQ ID NO: 668184 - RNA, 19 nt, Homo sapiens
  misc_RNA (1)...(19): siRNA sense strand
cauggaaugugguauccua

SEQ ID NO: 668185 - RNA, 19 nt, Homo sapiens
  misc_RNA (1)...(19): siRNA sense strand
accaacaacugcuaaauga

SEQ ID NO: 668186 - RNA, 19 nt, Homo sapiens
  misc_RNA (1)...(19): siRNA sense strand
gaauucaccauuaaggaaa

SEQ ID NO: 668187 - RNA, 19 nt, Homo sapiens
  misc_RNA (1)...(19): siRNA sense strand
aaacaagacucagauugau

SEQ ID NO: 668188 - RNA, 19 nt, Homo sapiens
  misc_RNA (1)...(19): siRNA sense strand
gacaggaacccuacaugaa

SEQ ID NO: 668189 - RNA, 19 nt, Homo sapiens
  misc_RNA (1)...(19): siRNA sense strand
gaagaaggagagucuaaca

SEQ ID NO: 668190 - RNA, 19 nt, Homo sapiens
  misc_RNA (1)...(19): siRNA sense strand
gaguucaucuuguuuaaac

SEQ ID NO: 668191 - RNA, 19 nt, Homo sapiens
  misc_RNA (1)...(19): siRNA sense strand
gcaaagcugcaaacucaga

SEQ ID NO: 668192 - RNA, 19 nt, Homo sapiens
  misc_RNA (1)...(19): siRNA sense strand
uuaaaccugugaggaauaa

SEQ ID NO: 668193 - RNA, 19 nt, Homo sapiens
  misc_RNA (1)...(19): siRNA sense strand
gcaacugcauauaagacaa

SEQ ID NO: 668194 - RNA, 19 nt, Homo sapiens
  misc_RNA (1)...(19): siRNA sense strand
uggaggaguucaugacaaa

SEQ ID NO: 668195 - RNA, 19 nt, Homo sapiens
  misc_RNA (1)...(19): siRNA sense strand
ucagauugauggacaacuu

SEQ ID NO: 668196 - RNA, 19 nt, Homo sapiens
  misc_RNA (1)...(19): siRNA sense strand
gugaacagcuccuaaaaga

SEQ ID NO: 668197 - RNA, 19 nt, Homo sapiens
  misc_RNA (1)...(19): siRNA sense strand
gcagauguuagaagaugua

SEQ ID NO: 668198 - RNA, 19 nt, Homo sapiens
  misc_RNA (1)...(19): siRNA sense strand
gagacucugucggaacuuu

SEQ ID NO: 668199 - RNA, 19 nt, Homo sapiens
  misc_RNA (1)...(19): siRNA sense strand
ucucaucucauccuaauuu

SEQ ID NO: 668200 - RNA, 19 nt, Homo sapiens
  misc_RNA (1)...(19): siRNA sense strand
ugauagaguucuuguugga

SEQ ID NO: 668201 - RNA, 19 nt, Homo sapiens
  misc_RNA (1)...(19): siRNA sense strand
caaagcugccugugacauu

SEQ ID NO: 668202 - RNA, 19 nt, Homo sapiens
  misc_RNA (1)...(19): siRNA sense strand
caagaugaaggaacuaaau

SEQ ID NO: 668203 - RNA, 19 nt, Homo sapiens
  misc_RNA (1)...(19): siRNA sense strand
gaccacagaccacaauuuc

SEQ ID NO: 668204 - RNA, 19 nt, Homo sapiens
  misc_RNA (1)...(19): siRNA sense strand
gacaaaaucugguucaaca

SEQ ID NO: 668205 - RNA, 19 nt, Homo sapiens
  misc_RNA (1)...(19): siRNA sense strand
ggccauugaucauucaugu

SEQ ID NO: 668206 - RNA, 19 nt, Homo sapiens
  misc_RNA (1)...(19): siRNA sense strand
uaucucaucucauccuaau

SEQ ID NO: 668207 - RNA, 19 nt, Homo sapiens
  misc_RNA (1)...(19): siRNA sense strand
cauugucggugaauaguga

SEQ ID NO: 668208 - RNA, 19 nt, Homo sapiens
  misc_RNA (1)...(19): siRNA sense strand
aaagaacagucggaacuug

SEQ ID NO: 668209 - RNA, 19 nt, Homo sapiens
  misc_RNA (1)...(19): siRNA sense strand
guaccuauccaauaaagau

SEQ ID NO: 668210 - RNA, 19 nt, Homo sapiens
  misc_RNA (1)...(19): siRNA sense strand
uuucagauguucacuuaga

SEQ ID NO: 668211 - RNA, 19 nt, Homo sapiens
  misc_RNA (1)...(19): siRNA sense strand
aacaccaacuuuacaauga

SEQ ID NO: 668212 - RNA, 19 nt, Homo sapiens
  misc_RNA (1)...(19): siRNA sense strand
cccaaagucagaacucuua

SEQ ID NO: 668213 - RNA, 19 nt, Homo sapiens
  misc_RNA (1)...(19): siRNA sense strand
gaucauugccuguccaucu

SEQ ID NO: 668214 - RNA, 19 nt, Homo sapiens
  misc_RNA (1)...(19): siRNA sense strand
gggcaguguuccaaggauu

SEQ ID NO: 668215 - RNA, 19 nt, Homo sapiens
  misc_RNA (1)...(19): siRNA sense strand
ggaucaagaugaaggaacu

SEQ ID NO: 668216 - RNA, 19 nt, Homo sapiens
  misc_RNA (1)...(19): siRNA sense strand
gauguucacuuagaagaag

SEQ ID NO: 668217 - RNA, 19 nt, Homo sapiens
  misc_RNA (1)...(19): siRNA sense strand
uagaugagcuuuuggagaa

SEQ ID NO: 668218 - RNA, 19 nt, Homo sapiens
  misc_RNA (1)...(19): siRNA sense strand
aaagucagaacucuuauug

SEQ ID NO: 668219 - RNA, 19 nt, Homo sapiens
  misc_RNA (1)...(19): siRNA sense strand
cuacagacccucacaaguc

SEQ ID NO: 668220 - RNA, 19 nt, Homo sapiens
  misc_RNA (1)...(19): siRNA sense strand
aaaccugugaggaauaaua

SEQ ID NO: 668221 - RNA, 19 nt, Homo sapiens
  misc_RNA (1)...(19): siRNA sense strand
ccgaguucaucuuguuuaa

SEQ ID NO: 668222 - RNA, 19 nt, Homo sapiens
  misc_RNA (1)...(19): siRNA sense strand
cguagaccgucaucugaaa

SEQ ID NO: 668223 - RNA, 19 nt, Homo sapiens
  misc_RNA (1)...(19): siRNA sense strand
ugaaagaugaacagaagaa

SEQ ID NO: 668224 - RNA, 19 nt, Homo sapiens
  misc_RNA (1)...(19): siRNA sense strand
gaauaccaacaacugcuaa

SEQ ID NO: 668225 - RNA, 19 nt, Homo sapiens
  misc_RNA (1)...(19): siRNA sense strand
gcagacggacucgguauug

SEQ ID NO: 668226 - RNA, 19 nt, Homo sapiens
  misc_RNA (1)...(19): siRNA sense strand
ccaauaaagauaccgaguu

SEQ ID NO: 668227 - RNA, 19 nt, Homo sapiens
  misc_RNA (1)...(19): siRNA sense strand
ggagaaacuguguguguca

SEQ ID NO: 668228 - RNA, 19 nt, Homo sapiens
  misc_RNA (1)...(19): siRNA sense strand
uaccuaugcuggccaaguu

SEQ ID NO: 668229 - RNA, 19 nt, Homo sapiens
  misc_RNA (1)...(19): siRNA sense strand
aagcagauguuagaagaug

SEQ ID NO: 668230 - RNA, 19 nt, Homo sapiens
  misc_RNA (1)...(19): siRNA sense strand
gaucaugugcagaacaaug

SEQ ID NO: 668231 - RNA, 19 nt, Homo sapiens
  misc_RNA (1)...(19): siRNA sense strand
acaccaacuuuacaaugaa

SEQ ID NO: 668232 - RNA, 19 nt, Homo sapiens
  misc_RNA (1)...(19): siRNA sense strand
gaucagcgggagcuccuuu

SEQ ID NO: 668233 - RNA, 19 nt, Homo sapiens
  misc_RNA (1)...(19): siRNA sense strand
ccaaguauacucucucaca

SEQ ID NO: 668234 - RNA, 19 nt, Homo sapiens
  misc_RNA (1)...(19): siRNA sense strand
caacaaaagcuuuccuauu

SEQ ID NO: 668235 - RNA, 19 nt, Homo sapiens
  misc_RNA (1)...(19): siRNA sense strand
acaaagguuucagcguuaa

SEQ ID NO: 668236 - RNA, 19 nt, Homo sapiens
  misc_RNA (1)...(19): siRNA sense strand
ugaauucaccauuaaggaa

SEQ ID NO: 668237 - RNA, 19 nt, Homo sapiens
  misc_RNA (1)...(19): siRNA sense strand
cacagaguuugaaagauga

SEQ ID NO: 668238 - RNA, 19 nt, Homo sapiens
  misc_RNA (1)...(19): siRNA sense strand
aaaaugaagugcuugaaga

SEQ ID NO: 668239 - RNA, 19 nt, Homo sapiens
  misc_RNA (1)...(19): siRNA sense strand
aggaugaacaccaacuuua

SEQ ID NO: 668240 - RNA, 19 nt, Homo sapiens
  misc_RNA (1)...(19): siRNA sense strand
caucacagaucuaaguauu

SEQ ID NO: 668241 - RNA, 19 nt, Homo sapiens
  misc_RNA (1)...(19): siRNA sense strand
ccagugagauccaagcaaa

SEQ ID NO: 668242 - RNA, 19 nt, Homo sapiens
  misc_RNA (1)...(19): siRNA sense strand
gauccaagcaaauaaguaa

SEQ ID NO: 668243 - RNA, 19 nt, Homo sapiens
  misc_RNA (1)...(19): siRNA sense strand
caaugugagugucaucuau

SEQ ID NO: 668244 - RNA, 19 nt, Homo sapiens
  misc_RNA (1)...(19): siRNA sense strand
gaacaucgucagugcaauc

SEQ ID NO: 668245 - RNA, 19 nt, Homo sapiens
  misc_RNA (1)...(19): siRNA sense strand
ccaaacaucuaugcagcaa

SEQ ID NO: 668246 - RNA, 19 nt, Homo sapiens
  misc_RNA (1)...(19): siRNA sense strand
aaacaucuaugcagcaaac

SEQ ID NO: 668247 - RNA, 19 nt, Homo sapiens
  misc_RNA (1)...(19): siRNA sense strand
gcaaugugagugucaucua

SEQ ID NO: 668248 - RNA, 19 nt, Homo sapiens
  misc_RNA (1)...(19): siRNA sense strand
ggaggcuugugguuuauca

SEQ ID NO: 668249 - RNA, 19 nt, Homo sapiens
  misc_RNA (1)...(19): siRNA sense strand
ugaccucaccaccaaguua

SEQ ID NO: 668250 - RNA, 19 nt, Homo sapiens
  misc_RNA (1)...(19): siRNA sense strand
ggcuugugguuuaucauuu

SEQ ID NO: 668251 - RNA, 19 nt, Homo sapiens
  misc_RNA (1)...(19): siRNA sense strand
cuaguuuggugucgaaugu

SEQ ID NO: 668252 - RNA, 19 nt, Homo sapiens
  misc_RNA (1)...(19): siRNA sense strand
gcuugugguuuaucauuuc

SEQ ID NO: 668253 - RNA, 19 nt, Homo sapiens
  misc_RNA (1)...(19): siRNA sense strand
gguggccaauucuguguug

SEQ ID NO: 668254 - RNA, 19 nt, Homo sapiens
  misc_RNA (1)...(19): siRNA sense strand
ccaaguuauuccagugaga

SEQ ID NO: 668255 - RNA, 19 nt, Homo sapiens
  misc_RNA (1)...(19): siRNA sense strand
gaaaaucagccauauucuu

SEQ ID NO: 668256 - RNA, 19 nt, Homo sapiens
  misc_RNA (1)...(19): siRNA sense strand
augcgcaucuucccacuuu

SEQ ID NO: 668257 - RNA, 19 nt, Homo sapiens
  misc_RNA (1)...(19): siRNA sense strand
ugucaucuauccaaacauc

SEQ ID NO: 668258 - RNA, 19 nt, Homo sapiens
  misc_RNA (1)...(19): siRNA sense strand
gcagcaaacccagugauca

SEQ ID NO: 668259 - RNA, 19 nt, Homo sapiens
  misc_RNA (1)...(19): siRNA sense strand
ugagugucaucuauccaaa

SEQ ID NO: 668260 - RNA, 19 nt, Homo sapiens
  misc_RNA (1)...(19): siRNA sense strand
caguuggucugcugucaau

SEQ ID NO: 668261 - RNA, 19 nt, Homo sapiens
  misc_RNA (1)...(19): siRNA sense strand
ucacagaucuaaguauucc

SEQ ID NO: 668262 - RNA, 19 nt, Homo sapiens
  misc_RNA (1)...(19): siRNA sense strand
auaccugucuauuucauuc

SEQ ID NO: 668263 - RNA, 19 nt, Homo sapiens
  misc_RNA (1)...(19): siRNA sense strand
agugagauccaagcaaaua

SEQ ID NO: 668264 - RNA, 19 nt, Homo sapiens
  misc_RNA (1)...(19): siRNA sense strand
gaccucaccaccaaguuau

SEQ ID NO: 668265 - RNA, 19 nt, Homo sapiens
  misc_RNA (1)...(19): siRNA sense strand
cagaaaaucagccauauuc

SEQ ID NO: 668266 - RNA, 19 nt, Homo sapiens
  misc_RNA (1)...(19): siRNA sense strand
gugagauccaagcaaauaa

SEQ ID NO: 668267 - RNA, 19 nt, Homo sapiens
  misc_RNA (1)...(19): siRNA sense strand
ccauccagaucaucauugg

SEQ ID NO: 668268 - RNA, 19 nt, Homo sapiens
  misc_RNA (1)...(19): siRNA sense strand
caguuccgguggccaauuc

SEQ ID NO: 668269 - RNA, 19 nt, Homo sapiens
  misc_RNA (1)...(19): siRNA sense strand
uggggaggcuugugguuua

SEQ ID NO: 668270 - RNA, 19 nt, Homo sapiens
  misc_RNA (1)...(19): siRNA sense strand
gagauccaagcaaauaagu

SEQ ID NO: 668271 - RNA, 19 nt, Homo sapiens
  misc_RNA (1)...(19): siRNA sense strand
ucaucuauccaaacaucua

SEQ ID NO: 668272 - RNA, 19 nt, Homo sapiens
  misc_RNA (1)...(19): siRNA sense strand
gcagaaaaucagccauauu

SEQ ID NO: 668273 - RNA, 19 nt, Homo sapiens
  misc_RNA (1)...(19): siRNA sense strand
ggugugaacccuggaaugg

SEQ ID NO: 668274 - RNA, 19 nt, Homo sapiens
  misc_RNA (1)...(19): siRNA sense strand
uucgaugacuucagcaguu

SEQ ID NO: 668275 - RNA, 19 nt, Homo sapiens
  misc_RNA (1)...(19): siRNA sense strand
ucauuggccuggcucacau

SEQ ID NO: 668276 - RNA, 19 nt, Homo sapiens
  misc_RNA (1)...(19): siRNA sense strand
agugucaucuauccaaaca

SEQ ID NO: 668277 - RNA, 19 nt, Homo sapiens
  misc_RNA (1)...(19): siRNA sense strand
gugagugucaucuauccaa

SEQ ID NO: 668278 - RNA, 19 nt, Homo sapiens
  misc_RNA (1)...(19): siRNA sense strand
ccgcaaguccaccuaguuc

SEQ ID NO: 668279 - RNA, 19 nt, Homo sapiens
  misc_RNA (1)...(19): siRNA sense strand
gcaguuccgguggccaauu

SEQ ID NO: 668280 - RNA, 19 nt, Homo sapiens
  misc_RNA (1)...(19): siRNA sense strand
gcaguuugggcuugaacau

SEQ ID NO: 668281 - RNA, 19 nt, Homo sapiens
  misc_RNA (1)...(19): siRNA sense strand
caagcaaugugagugucau

SEQ ID NO: 668282 - RNA, 19 nt, Homo sapiens
  misc_RNA (1)...(19): siRNA sense strand
caaacagccagccgcaagu

SEQ ID NO: 668283 - RNA, 19 nt, Homo sapiens
  misc_RNA (1)...(19): siRNA sense strand
ggccauccagaucaucauu

SEQ ID NO: 668284 - RNA, 19 nt, Homo sapiens
  misc_RNA (1)...(19): siRNA sense strand
caaguuauuccagugagau

SEQ ID NO: 668285 - RNA, 19 nt, Homo sapiens
  misc_RNA (1)...(19): siRNA sense strand
guuggucugcugucaauca

SEQ ID NO: 668286 - RNA, 19 nt, Homo sapiens
  misc_RNA (1)...(19): siRNA sense strand
cuucaucacagaucuaagu

SEQ ID NO: 668287 - RNA, 19 nt, Homo sapiens
  misc_RNA (1)...(19): siRNA sense strand
ucagccauauucuuauugc

SEQ ID NO: 668288 - RNA, 19 nt, Homo sapiens
  misc_RNA (1)...(19): siRNA sense strand
cagcagaaaaucagccaua

SEQ ID NO: 668289 - RNA, 19 nt, Homo sapiens
  misc_RNA (1)...(19): siRNA sense strand
guuuaucauuucaggaucu

SEQ ID NO: 668290 - RNA, 19 nt, Homo sapiens
  misc_RNA (1)...(19): siRNA sense strand
gggaugucguccaagcaua

SEQ ID NO: 668291 - RNA, 19 nt, Homo sapiens
  misc_RNA (1)...(19): siRNA sense strand
gagccagccuccucagcaa

SEQ ID NO: 668292 - RNA, 19 nt, Homo sapiens
  misc_RNA (1)...(19): siRNA sense strand
agugggagcuguugcagaa

SEQ ID NO: 668293 - RNA, 19 nt, Homo sapiens
  misc_RNA (1)...(19): siRNA sense strand
gcgacuacgugauuggaau

SEQ ID NO: 668294 - RNA, 19 nt, Homo sapiens
  misc_RNA (1)...(19): siRNA sense strand
acacagagggcuucuacuu

SEQ ID NO: 668295 - RNA, 19 nt, Homo sapiens
  misc_RNA (1)...(19): siRNA sense strand
uggcauggcuggccuugau

SEQ ID NO: 668296 - RNA, 19 nt, Homo sapiens
  misc_RNA (1)...(19): siRNA sense strand
gcucgugggcuccuucuuc

SEQ ID NO: 668297 - RNA, 19 nt, Homo sapiens
  misc_RNA (1)...(19): siRNA sense strand
cgugggcuccuucuucuuu

SEQ ID NO: 668298 - RNA, 19 nt, Homo sapiens
  misc_RNA (1)...(19): siRNA sense strand
ccacagcucuaaggaagac

SEQ ID NO: 668299 - RNA, 19 nt, Homo sapiens
  misc_RNA (1)...(19): siRNA sense strand
aaucauacagcaucuggaa

SEQ ID NO: 668300 - RNA, 19 nt, Homo sapiens
  misc_RNA (1)...(19): siRNA sense strand
caucuucuuugcccuugug

SEQ ID NO: 668301 - RNA, 19 nt, Homo sapiens
  misc_RNA (1)...(19): siRNA sense strand
ucccagagguacccacugu

SEQ ID NO: 668302 - RNA, 19 nt, Homo sapiens
  misc_RNA (1)...(19): siRNA sense strand
gggagcuguugcagaacuu

SEQ ID NO: 668303 - RNA, 19 nt, Homo sapiens
  misc_RNA (1)...(19): siRNA sense strand
ccucuucugcaucuucuuu

SEQ ID NO: 668304 - RNA, 19 nt, Homo sapiens
  misc_RNA (1)...(19): siRNA sense strand
ccaccacagcucuaaggaa

SEQ ID NO: 668305 - RNA, 19 nt, Homo sapiens
  misc_RNA (1)...(19): siRNA sense strand
cgacaagugggagcuguug

SEQ ID NO: 668306 - RNA, 19 nt, Homo sapiens
  misc_RNA (1)...(19): siRNA sense strand
caucaccaccauuggcuau

SEQ ID NO: 668307 - RNA, 19 nt, Homo sapiens
  misc_RNA (1)...(19): siRNA sense strand
cacagagggcuucuacuuc

SEQ ID NO: 668308 - RNA, 19 nt, Homo sapiens
  misc_RNA (1)...(19): siRNA sense strand
cuacacagagggcuucuac

SEQ ID NO: 668309 - RNA, 19 nt, Homo sapiens
  misc_RNA (1)...(19): siRNA sense strand
cagagggacccaugggaau

SEQ ID NO: 668310 - RNA, 19 nt, Homo sapiens
  misc_RNA (1)...(19): siRNA sense strand
cuacgugauuggaaugaac

SEQ ID NO: 668311 - RNA, 19 nt, Homo sapiens
  misc_RNA (1)...(19): siRNA sense strand
ggaugucguccaagcauac

SEQ ID NO: 668312 - RNA, 19 nt, Homo sapiens
  misc_RNA (1)...(19): siRNA sense strand
ggacccaugggaaucauac

SEQ ID NO: 668313 - RNA, 19 nt, Homo sapiens
  misc_RNA (1)...(19): siRNA sense strand
gagggacccaugggaauca

SEQ ID NO: 668314 - RNA, 19 nt, Homo sapiens
  misc_RNA (1)...(19): siRNA sense strand
cuucggcgacuacgugauu

SEQ ID NO: 668315 - RNA, 19 nt, Homo sapiens
  misc_RNA (1)...(19): siRNA sense strand
cagaccaccugcuguagga

SEQ ID NO: 668316 - RNA, 19 nt, Homo sapiens
  misc_RNA (1)...(19): siRNA sense strand
gcuguggccuggagaacug

SEQ ID NO: 668317 - RNA, 19 nt, Homo sapiens
  misc_RNA (1)...(19): siRNA sense strand
ugucagaccaccugcugua

SEQ ID NO: 668318 - RNA, 19 nt, Homo sapiens
  misc_RNA (1)...(19): siRNA sense strand
ugccuccucuugcugcuaa

SEQ ID NO: 668319 - RNA, 19 nt, Homo sapiens
  misc_RNA (1)...(19): siRNA sense strand
ggaaaucgcuggacagaga

SEQ ID NO: 668320 - RNA, 19 nt, Homo sapiens
  misc_RNA (1)...(19): siRNA sense strand
ccaaucaguuuacaaagua

SEQ ID NO: 668321 - RNA, 19 nt, Homo sapiens
  misc_RNA (1)...(19): siRNA sense strand
uaaaugcucuucucuccua

SEQ ID NO: 668322 - RNA, 19 nt, Homo sapiens
  misc_RNA (1)...(19): siRNA sense strand
gaacuaagcgaaucuuugu

SEQ ID NO: 668323 - RNA, 19 nt, Homo sapiens
  misc_RNA (1)...(19): siRNA sense strand
cgacaacccgccaauauuu

SEQ ID NO: 668324 - RNA, 19 nt, Homo sapiens
  misc_RNA (1)...(19): siRNA sense strand
agaaacagcucucagaauc

SEQ ID NO: 668325 - RNA, 19 nt, Homo sapiens
  misc_RNA (1)...(19): siRNA sense strand
gaacagcgagauuguguau

SEQ ID NO: 668326 - RNA, 19 nt, Homo sapiens
  misc_RNA (1)...(19): siRNA sense strand
agacuaaguuuaccauaga

SEQ ID NO: 668327 - RNA, 19 nt, Homo sapiens
  misc_RNA (1)...(19): siRNA sense strand
ggaaacugcugagguuaau

SEQ ID NO: 668328 - RNA, 19 nt, Homo sapiens
  misc_RNA (1)...(19): siRNA sense strand
ugaaggacauuaacgacaa

SEQ ID NO: 668329 - RNA, 19 nt, Homo sapiens
  misc_RNA (1)...(19): siRNA sense strand
ggagguaaaucugcagaau

SEQ ID NO: 668330 - RNA, 19 nt, Homo sapiens
  misc_RNA (1)...(19): siRNA sense strand
guuaaacgcuucugaugca

SEQ ID NO: 668331 - RNA, 19 nt, Homo sapiens
  misc_RNA (1)...(19): siRNA sense strand
gguauuagauguaaaugac

SEQ ID NO: 668332 - RNA, 19 nt, Homo sapiens
  misc_RNA (1)...(19): siRNA sense strand
agaggaaacugcugagguu

SEQ ID NO: 668333 - RNA, 19 nt, Homo sapiens
  misc_RNA (1)...(19): siRNA sense strand
ccgccaauauuuccaauga

SEQ ID NO: 668334 - RNA, 19 nt, Homo sapiens
  misc_RNA (1)...(19): siRNA sense strand
gcaaaguccuacgagauuc

SEQ ID NO: 668335 - RNA, 19 nt, Homo sapiens
  misc_RNA (1)...(19): siRNA sense strand
aaugggaccuuagugguua

SEQ ID NO: 668336 - RNA, 19 nt, Homo sapiens
  misc_RNA (1)...(19): siRNA sense strand
ccagaagucucaauaacgu

SEQ ID NO: 668337 - RNA, 19 nt, Homo sapiens
  misc_RNA (1)...(19): siRNA sense strand
acagcgagauuguguauuc

SEQ ID NO: 668338 - RNA, 19 nt, Homo sapiens
  misc_RNA (1)...(19): siRNA sense strand
gcagauauaggaguaaaug

SEQ ID NO: 668339 - RNA, 19 nt, Homo sapiens
  misc_RNA (1)...(19): siRNA sense strand
acaggcaaaugaugaacua

SEQ ID NO: 668340 - RNA, 19 nt, Homo sapiens
  misc_RNA (1)...(19): siRNA sense strand
agaacgcgcugguguccua

SEQ ID NO: 668341 - RNA, 19 nt, Homo sapiens
  misc_RNA (1)...(19): siRNA sense strand
cugcugagguuaauuuguu

SEQ ID NO: 668342 - RNA, 19 nt, Homo sapiens
  misc_RNA (1)...(19): siRNA sense strand
aaacugcugagguuaauuu

SEQ ID NO: 668343 - RNA, 19 nt, Homo sapiens
  misc_RNA (1)...(19): siRNA sense strand
gccaauauuuccaaugaca

SEQ ID NO: 668344 - RNA, 19 nt, Homo sapiens
  misc_RNA (1)...(19): siRNA sense strand
uaacacaccagaagucuca

SEQ ID NO: 668345 - RNA, 19 nt, Homo sapiens
  misc_RNA (1)...(19): siRNA sense strand
gggcaccguucaaauacuu

SEQ ID NO: 668346 - RNA, 19 nt, Homo sapiens
  misc_RNA (1)...(19): siRNA sense strand
ccaaugacaguaaagacua

SEQ ID NO: 668347 - RNA, 19 nt, Homo sapiens
  misc_RNA (1)...(19): siRNA sense strand
gaaacagcucucagaauca

SEQ ID NO: 668348 - RNA, 19 nt, Homo sapiens
  misc_RNA (1)...(19): siRNA sense strand
cagacuaaguuuaccauag

SEQ ID NO: 668349 - RNA, 19 nt, Homo sapiens
  misc_RNA (1)...(19): siRNA sense strand
caaugacaguaaagacuau

SEQ ID NO: 668350 - RNA, 19 nt, Homo sapiens
  misc_RNA (1)...(19): siRNA sense strand
uguccaccuucaagaauua

SEQ ID NO: 668351 - RNA, 19 nt, Homo sapiens
  misc_RNA (1)...(19): siRNA sense strand
gauguguccuccacuauac

SEQ ID NO: 668352 - RNA, 19 nt, Homo sapiens
  misc_RNA (1)...(19): siRNA sense strand
aguaaagacuauccgguuu

SEQ ID NO: 668353 - RNA, 19 nt, Homo sapiens
  misc_RNA (1)...(19): siRNA sense strand
ugaugcagauauaggagua

SEQ ID NO: 668354 - RNA, 19 nt, Homo sapiens
  misc_RNA (1)...(19): siRNA sense strand
uaacgacaacccgccaaua

SEQ ID NO: 668355 - RNA, 19 nt, Homo sapiens
  misc_RNA (1)...(19): siRNA sense strand
aauaacgucucucucacuu

SEQ ID NO: 668356 - RNA, 19 nt, Homo sapiens
  misc_RNA (1)...(19): siRNA sense strand
ggaccgaacagcgagauug

SEQ ID NO: 668357 - RNA, 19 nt, Homo sapiens
  misc_RNA (1)...(19): siRNA sense strand
gauauacaggcaaaugaug

SEQ ID NO: 668358 - RNA, 19 nt, Homo sapiens
  misc_RNA (1)...(19): siRNA sense strand
gcugcuugauucucgguuu

SEQ ID NO: 668359 - RNA, 19 nt, Homo sapiens
  misc_RNA (1)...(19): siRNA sense strand
caccagaagucucaauaac

SEQ ID NO: 668360 - RNA, 19 nt, Homo sapiens
  misc_RNA (1)...(19): siRNA sense strand
ccacuauacagacuaaguu

SEQ ID NO: 668361 - RNA, 19 nt, Homo sapiens
  misc_RNA (1)...(19): siRNA sense strand
gaggaaacugcugagguua

SEQ ID NO: 668362 - RNA, 19 nt, Homo sapiens
  misc_RNA (1)...(19): siRNA sense strand
gauucucgguuuccucuag

SEQ ID NO: 668363 - RNA, 19 nt, Homo sapiens
  misc_RNA (1)...(19): siRNA sense strand
gaaggacauuaacgacaac

SEQ ID NO: 668364 - RNA, 19 nt, Homo sapiens
  misc_RNA (1)...(19): siRNA sense strand
gagguaaaucugcagaaug

SEQ ID NO: 668365 - RNA, 19 nt, Homo sapiens
  misc_RNA (1)...(19): siRNA sense strand
cccaaucaguuuacaaagu

SEQ ID NO: 668366 - RNA, 19 nt, Homo sapiens
  misc_RNA (1)...(19): siRNA sense strand
guaaagacuauccgguuuc

SEQ ID NO: 668367 - RNA, 19 nt, Homo sapiens
  misc_RNA (1)...(19): siRNA sense strand
agguaaaucugcagaaugg

SEQ ID NO: 668368 - RNA, 19 nt, Homo sapiens
  misc_RNA (1)...(19): siRNA sense strand
ggccuucagcccuagcuua

SEQ ID NO: 668369 - RNA, 19 nt, Homo sapiens
  misc_RNA (1)...(19): siRNA sense strand
aggcuacgcugguggaugu

SEQ ID NO: 668370 - RNA, 19 nt, Homo sapiens
  misc_RNA (1)...(19): siRNA sense strand
gaucgcgacucugguacga

SEQ ID NO: 668371 - RNA, 19 nt, Homo sapiens
  misc_RNA (1)...(19): siRNA sense strand
ugauguguccuccacuaua

SEQ ID NO: 668372 - RNA, 19 nt, Homo sapiens
  misc_RNA (1)...(19): siRNA sense strand
ugaacuaagcgaaucuuug

SEQ ID NO: 668373 - RNA, 19 nt, Homo sapiens
  misc_RNA (1)...(19): siRNA sense strand
ccuccacuauacagacuaa

SEQ ID NO: 668374 - RNA, 19 nt, Homo sapiens
  misc_RNA (1)...(19): siRNA sense strand
aaacagcucucagaaucag

SEQ ID NO: 668375 - RNA, 19 nt, Homo sapiens
  misc_RNA (1)...(19): siRNA sense strand
gcacugucauugcucucau

SEQ ID NO: 668376 - RNA, 19 nt, Homo sapiens
  misc_RNA (1)...(19): siRNA sense strand
ggcaaaugaugaacuaagc

SEQ ID NO: 668377 - RNA, 19 nt, Homo sapiens
  misc_RNA (1)...(19): siRNA sense strand
gaaucagaauacguaggaa

SEQ ID NO: 668378 - RNA, 19 nt, Homo sapiens
  misc_RNA (1)...(19): siRNA sense strand
acacaguauucgugaagga

SEQ ID NO: 668379 - RNA, 19 nt, Homo sapiens
  misc_RNA (1)...(19): siRNA sense strand
guguccaccuucaagaauu

SEQ ID NO: 668380 - RNA, 19 nt, Homo sapiens
  misc_RNA (1)...(19): siRNA sense strand
uagauauacaggcaaauga

SEQ ID NO: 668381 - RNA, 19 nt, Homo sapiens
  misc_RNA (1)...(19): siRNA sense strand
gcucucagaaucagaauac

SEQ ID NO: 668382 - RNA, 19 nt, Homo sapiens
  misc_RNA (1)...(19): siRNA sense strand
acgcguggcuuucguacga

SEQ ID NO: 668383 - RNA, 19 nt, Homo sapiens
  misc_RNA (1)...(19): siRNA sense strand
guacacaguauucgugaag

SEQ ID NO: 668384 - RNA, 19 nt, Homo sapiens
  misc_RNA (1)...(19): siRNA sense strand
gucaggacauuguaaaauu

SEQ ID NO: 668385 - RNA, 19 nt, Homo sapiens
  misc_RNA (1)...(19): siRNA sense strand
gcagaugaaggaccgaaca

SEQ ID NO: 668386 - RNA, 19 nt, Homo sapiens
  misc_RNA (1)...(19): siRNA sense strand
uaaguuaaacgcuucugau

SEQ ID NO: 668387 - RNA, 19 nt, Homo sapiens
  misc_RNA (1)...(19): siRNA sense strand
agacuccgcagaagagaaa

SEQ ID NO: 668388 - RNA, 19 nt, Homo sapiens
  misc_RNA (1)...(19): siRNA sense strand
acaccagaagucucaauaa

SEQ ID NO: 668389 - RNA, 19 nt, Homo sapiens
  misc_RNA (1)...(19): siRNA sense strand
ucaagaauuacuacucguu

SEQ ID NO: 668390 - RNA, 19 nt, Homo sapiens
  misc_RNA (1)...(19): siRNA sense strand
agaaucagaauacguagga

SEQ ID NO: 668391 - RNA, 19 nt, Homo sapiens
  misc_RNA (1)...(19): siRNA sense strand
guaaaugacaaugaaccaa

SEQ ID NO: 668392 - RNA, 19 nt, Homo sapiens
  misc_RNA (1)...(19): siRNA sense strand
cuucagcccuagcuuaucu

SEQ ID NO: 668393 - RNA, 19 nt, Homo sapiens
  misc_RNA (1)...(19): siRNA sense strand
cacugcaacugacaaagga

SEQ ID NO: 668394 - RNA, 19 nt, Homo sapiens
  misc_RNA (1)...(19): siRNA sense strand
uagagaauacggcaaaugg

SEQ ID NO: 668395 - RNA, 19 nt, Homo sapiens
  misc_RNA (1)...(19): siRNA sense strand
gacaacccgccaauauuuc

SEQ ID NO: 668396 - RNA, 19 nt, Homo sapiens
  misc_RNA (1)...(19): siRNA sense strand
cagccugaguacacaguau

SEQ ID NO: 668397 - RNA, 19 nt, Homo sapiens
  misc_RNA (1)...(19): siRNA sense strand
ucgcgacucugguacgaau

SEQ ID NO: 668398 - RNA, 19 nt, Homo sapiens
  misc_RNA (1)...(19): siRNA sense strand
ggaguaaaugcucuucucu

SEQ ID NO: 668399 - RNA, 19 nt, Homo sapiens
  misc_RNA (1)...(19): siRNA sense strand
gaaggaccacggcgaacca

SEQ ID NO: 668400 - RNA, 19 nt, Homo sapiens
  misc_RNA (1)...(19): siRNA sense strand
caguauucgugaaggagaa

SEQ ID NO: 668401 - RNA, 19 nt, Homo sapiens
  misc_RNA (1)...(19): siRNA sense strand
gagauucaggucacugcaa

SEQ ID NO: 668402 - RNA, 19 nt, Homo sapiens
  misc_RNA (1)...(19): siRNA sense strand
caaaguccuacgagauuca

SEQ ID NO: 668403 - RNA, 19 nt, Homo sapiens
  misc_RNA (1)...(19): siRNA sense strand
aaaugggaccuuagugguu

SEQ ID NO: 668404 - RNA, 19 nt, Homo sapiens
  misc_RNA (1)...(19): siRNA sense strand
gaaacugcugagguuaauu

SEQ ID NO: 668405 - RNA, 19 nt, Homo sapiens
  misc_RNA (1)...(19): siRNA sense strand
cucagaaucagaauacgua

SEQ ID NO: 668406 - RNA, 19 nt, Homo sapiens
  misc_RNA (1)...(19): siRNA sense strand
ucacggugcugcuguacac

SEQ ID NO: 668407 - RNA, 19 nt, Homo sapiens
  misc_RNA (1)...(19): siRNA sense strand
ugguggaugucaacgugua

SEQ ID NO: 668408 - RNA, 19 nt, Homo sapiens
  misc_RNA (1)...(19): siRNA sense strand
gcuauacacgggugagauc

SEQ ID NO: 668409 - RNA, 19 nt, Homo sapiens
  misc_RNA (1)...(19): siRNA sense strand
cacaccagaagucucaaua

SEQ ID NO: 668410 - RNA, 19 nt, Homo sapiens
  misc_RNA (1)...(19): siRNA sense strand
gauaacacaccagaagucu

SEQ ID NO: 668411 - RNA, 19 nt, Homo sapiens
  misc_RNA (1)...(19): siRNA sense strand
gacuaaguuuaccauagau

SEQ ID NO: 668412 - RNA, 19 nt, Homo sapiens
  misc_RNA (1)...(19): siRNA sense strand
gaccgaacagcgagauugu

SEQ ID NO: 668413 - RNA, 19 nt, Homo sapiens
  misc_RNA (1)...(19): siRNA sense strand
gcauuuuguuugugaauuc

SEQ ID NO: 668414 - RNA, 19 nt, Homo sapiens
  misc_RNA (1)...(19): siRNA sense strand
ugcugagguuaauuuguua

SEQ ID NO: 668415 - RNA, 19 nt, Homo sapiens
  misc_RNA (1)...(19): siRNA sense strand
gcgagauuguguauucacu

SEQ ID NO: 668416 - RNA, 19 nt, Homo sapiens
  misc_RNA (1)...(19): siRNA sense strand
uauccgguuucccgaauca

SEQ ID NO: 668417 - RNA, 19 nt, Homo sapiens
  misc_RNA (1)...(19): siRNA sense strand
agcccuagcuuaucucaag

SEQ ID NO: 668418 - RNA, 19 nt, Homo sapiens
  misc_RNA (1)...(19): siRNA sense strand
aagcaaaguccuacgagau

SEQ ID NO: 668419 - RNA, 19 nt, Homo sapiens
  misc_RNA (1)...(19): siRNA sense strand
ggaaaucgcuggacagaga

SEQ ID NO: 668420 - RNA, 19 nt, Homo sapiens
  misc_RNA (1)...(19): siRNA sense strand
ccaaucaguuuacaaagua

SEQ ID NO: 668421 - RNA, 19 nt, Homo sapiens
  misc_RNA (1)...(19): siRNA sense strand
uaaaugcucuucucuccua

SEQ ID NO: 668422 - RNA, 19 nt, Homo sapiens
  misc_RNA (1)...(19): siRNA sense strand
gaacuaagcgaaucuuugu

SEQ ID NO: 668423 - RNA, 19 nt, Homo sapiens
  misc_RNA (1)...(19): siRNA sense strand
cgacaacccgccaauauuu

SEQ ID NO: 668424 - RNA, 19 nt, Homo sapiens
  misc_RNA (1)...(19): siRNA sense strand
agaaacagcucucagaauc

SEQ ID NO: 668425 - RNA, 19 nt, Homo sapiens
  misc_RNA (1)...(19): siRNA sense strand
gaacagcgagauuguguau

SEQ ID NO: 668426 - RNA, 19 nt, Homo sapiens
  misc_RNA (1)...(19): siRNA sense strand
agacuaaguuuaccauaga

SEQ ID NO: 668427 - RNA, 19 nt, Homo sapiens
  misc_RNA (1)...(19): siRNA sense strand
ggaaacugcugagguuaau

SEQ ID NO: 668428 - RNA, 19 nt, Homo sapiens
  misc_RNA (1)...(19): siRNA sense strand
ugaaggacauuaacgacaa

SEQ ID NO: 668429 - RNA, 19 nt, Homo sapiens
  misc_RNA (1)...(19): siRNA sense strand
ggagguaaaucugcagaau

SEQ ID NO: 668430 - RNA, 19 nt, Homo sapiens
  misc_RNA (1)...(19): siRNA sense strand
guuaaacgcuucugaugca

SEQ ID NO: 668431 - RNA, 19 nt, Homo sapiens
  misc_RNA (1)...(19): siRNA sense strand
gguauuagauguaaaugac

SEQ ID NO: 668432 - RNA, 19 nt, Homo sapiens
  misc_RNA (1)...(19): siRNA sense strand
agaggaaacugcugagguu

SEQ ID NO: 668433 - RNA, 19 nt, Homo sapiens
  misc_RNA (1)...(19): siRNA sense strand
ccgccaauauuuccaauga

SEQ ID NO: 668434 - RNA, 19 nt, Homo sapiens
  misc_RNA (1)...(19): siRNA sense strand
gcaaaguccuacgagauuc

SEQ ID NO: 668435 - RNA, 19 nt, Homo sapiens
  misc_RNA (1)...(19): siRNA sense strand
aaugggaccuuagugguua

SEQ ID NO: 668436 - RNA, 19 nt, Homo sapiens
  misc_RNA (1)...(19): siRNA sense strand
ccagaagucucaauaacgu

SEQ ID NO: 668437 - RNA, 19 nt, Homo sapiens
  misc_RNA (1)...(19): siRNA sense strand
acagcgagauuguguauuc

SEQ ID NO: 668438 - RNA, 19 nt, Homo sapiens
  misc_RNA (1)...(19): siRNA sense strand
gcagauauaggaguaaaug

SEQ ID NO: 668439 - RNA, 19 nt, Homo sapiens
  misc_RNA (1)...(19): siRNA sense strand
acaggcaaaugaugaacua

SEQ ID NO: 668440 - RNA, 19 nt, Homo sapiens
  misc_RNA (1)...(19): siRNA sense strand
agaacgcgcugguguccua

SEQ ID NO: 668441 - RNA, 19 nt, Homo sapiens
  misc_RNA (1)...(19): siRNA sense strand
cugcugagguuaauuuguu

SEQ ID NO: 668442 - RNA, 19 nt, Homo sapiens
  misc_RNA (1)...(19): siRNA sense strand
aaacugcugagguuaauuu

SEQ ID NO: 668443 - RNA, 19 nt, Homo sapiens
  misc_RNA (1)...(19): siRNA sense strand
gccaauauuuccaaugaca

SEQ ID NO: 668444 - RNA, 19 nt, Homo sapiens
  misc_RNA (1)...(19): siRNA sense strand
uaacacaccagaagucuca

SEQ ID NO: 668445 - RNA, 19 nt, Homo sapiens
  misc_RNA (1)...(19): siRNA sense strand
gggcaccguucaaauacuu

SEQ ID NO: 668446 - RNA, 19 nt, Homo sapiens
  misc_RNA (1)...(19): siRNA sense strand
ccaaugacaguaaagacua

SEQ ID NO: 668447 - RNA, 19 nt, Homo sapiens
  misc_RNA (1)...(19): siRNA sense strand
gaaacagcucucagaauca

SEQ ID NO: 668448 - RNA, 19 nt, Homo sapiens
  misc_RNA (1)...(19): siRNA sense strand
cagacuaaguuuaccauag

SEQ ID NO: 668449 - RNA, 19 nt, Homo sapiens
  misc_RNA (1)...(19): siRNA sense strand
caaugacaguaaagacuau

SEQ ID NO: 668450 - RNA, 19 nt, Homo sapiens
  misc_RNA (1)...(19): siRNA sense strand
uguccaccuucaagaauua

SEQ ID NO: 668451 - RNA, 19 nt, Homo sapiens
  misc_RNA (1)...(19): siRNA sense strand
gauguguccuccacuauac

SEQ ID NO: 668452 - RNA, 19 nt, Homo sapiens
  misc_RNA (1)...(19): siRNA sense strand
aguaaagacuauccgguuu

SEQ ID NO: 668453 - RNA, 19 nt, Homo sapiens
  misc_RNA (1)...(19): siRNA sense strand
ugaugcagauauaggagua

SEQ ID NO: 668454 - RNA, 19 nt, Homo sapiens
  misc_RNA (1)...(19): siRNA sense strand
uaacgacaacccgccaaua

SEQ ID NO: 668455 - RNA, 19 nt, Homo sapiens
  misc_RNA (1)...(19): siRNA sense strand
aauaacgucucucucacuu

SEQ ID NO: 668456 - RNA, 19 nt, Homo sapiens
  misc_RNA (1)...(19): siRNA sense strand
ggaccgaacagcgagauug

SEQ ID NO: 668457 - RNA, 19 nt, Homo sapiens
  misc_RNA (1)...(19): siRNA sense strand
gauauacaggcaaaugaug

SEQ ID NO: 668458 - RNA, 19 nt, Homo sapiens
  misc_RNA (1)...(19): siRNA sense strand
gcugcuugauucucgguuu

SEQ ID NO: 668459 - RNA, 19 nt, Homo sapiens
  misc_RNA (1)...(19): siRNA sense strand
caccagaagucucaauaac

SEQ ID NO: 668460 - RNA, 19 nt, Homo sapiens
  misc_RNA (1)...(19): siRNA sense strand
ccacuauacagacuaaguu

SEQ ID NO: 668461 - RNA, 19 nt, Homo sapiens
  misc_RNA (1)...(19): siRNA sense strand
gaggaaacugcugagguua

SEQ ID NO: 668462 - RNA, 19 nt, Homo sapiens
  misc_RNA (1)...(19): siRNA sense strand
gauucucgguuuccucuag

SEQ ID NO: 668463 - RNA, 19 nt, Homo sapiens
  misc_RNA (1)...(19): siRNA sense strand
gaaggacauuaacgacaac

SEQ ID NO: 668464 - RNA, 19 nt, Homo sapiens
  misc_RNA (1)...(19): siRNA sense strand
gagguaaaucugcagaaug

SEQ ID NO: 668465 - RNA, 19 nt, Homo sapiens
  misc_RNA (1)...(19): siRNA sense strand
cccaaucaguuuacaaagu

SEQ ID NO: 668466 - RNA, 19 nt, Homo sapiens
  misc_RNA (1)...(19): siRNA sense strand
guaaagacuauccgguuuc

SEQ ID NO: 668467 - RNA, 19 nt, Homo sapiens
  misc_RNA (1)...(19): siRNA sense strand
agguaaaucugcagaaugg

SEQ ID NO: 668468 - RNA, 19 nt, Homo sapiens
  misc_RNA (1)...(19): siRNA sense strand
ggccuucagcccuagcuua

SEQ ID NO: 668469 - RNA, 19 nt, Homo sapiens
  misc_RNA (1)...(19): siRNA sense strand
aggcuacgcugguggaugu

SEQ ID NO: 668470 - RNA, 19 nt, Homo sapiens
  misc_RNA (1)...(19): siRNA sense strand
gaucgcgacucugguacga

SEQ ID NO: 668471 - RNA, 19 nt, Homo sapiens
  misc_RNA (1)...(19): siRNA sense strand
ugauguguccuccacuaua

SEQ ID NO: 668472 - RNA, 19 nt, Homo sapiens
  misc_RNA (1)...(19): siRNA sense strand
ugaacuaagcgaaucuuug

SEQ ID NO: 668473 - RNA, 19 nt, Homo sapiens
  misc_RNA (1)...(19): siRNA sense strand
ccuccacuauacagacuaa

SEQ ID NO: 668474 - RNA, 19 nt, Homo sapiens
  misc_RNA (1)...(19): siRNA sense strand
aaacagcucucagaaucag

SEQ ID NO: 668475 - RNA, 19 nt, Homo sapiens
  misc_RNA (1)...(19): siRNA sense strand
gcacugucauugcucucau

SEQ ID NO: 668476 - RNA, 19 nt, Homo sapiens
  misc_RNA (1)...(19): siRNA sense strand
ggcaaaugaugaacuaagc

SEQ ID NO: 668477 - RNA, 19 nt, Homo sapiens
  misc_RNA (1)...(19): siRNA sense strand
gaaucagaauacguaggaa

SEQ ID NO: 668478 - RNA, 19 nt, Homo sapiens
  misc_RNA (1)...(19): siRNA sense strand
acacaguauucgugaagga

SEQ ID NO: 668479 - RNA, 19 nt, Homo sapiens
  misc_RNA (1)...(19): siRNA sense strand
guguccaccuucaagaauu

SEQ ID NO: 668480 - RNA, 19 nt, Homo sapiens
  misc_RNA (1)...(19): siRNA sense strand
uagauauacaggcaaauga

SEQ ID NO: 668481 - RNA, 19 nt, Homo sapiens
  misc_RNA (1)...(19): siRNA sense strand
gcucucagaaucagaauac

SEQ ID NO: 668482 - RNA, 19 nt, Homo sapiens
  misc_RNA (1)...(19): siRNA sense strand
acgcguggcuuucguacga

SEQ ID NO: 668483 - RNA, 19 nt, Homo sapiens
  misc_RNA (1)...(19): siRNA sense strand
guacacaguauucgugaag

SEQ ID NO: 668484 - RNA, 19 nt, Homo sapiens
  misc_RNA (1)...(19): siRNA sense strand
gucaggacauuguaaaauu

SEQ ID NO: 668485 - RNA, 19 nt, Homo sapiens
  misc_RNA (1)...(19): siRNA sense strand
gcagaugaaggaccgaaca

SEQ ID NO: 668486 - RNA, 19 nt, Homo sapiens
  misc_RNA (1)...(19): siRNA sense strand
uaaguuaaacgcuucugau

SEQ ID NO: 668487 - RNA, 19 nt, Homo sapiens
  misc_RNA (1)...(19): siRNA sense strand
agacuccgcagaagagaaa

SEQ ID NO: 668488 - RNA, 19 nt, Homo sapiens
  misc_RNA (1)...(19): siRNA sense strand
acaccagaagucucaauaa

SEQ ID NO: 668489 - RNA, 19 nt, Homo sapiens
  misc_RNA (1)...(19): siRNA sense strand
ucaagaauuacuacucguu

SEQ ID NO: 668490 - RNA, 19 nt, Homo sapiens
  misc_RNA (1)...(19): siRNA sense strand
agaaucagaauacguagga

SEQ ID NO: 668491 - RNA, 19 nt, Homo sapiens
  misc_RNA (1)...(19): siRNA sense strand
guaaaugacaaugaaccaa

SEQ ID NO: 668492 - RNA, 19 nt, Homo sapiens
  misc_RNA (1)...(19): siRNA sense strand
cuucagcccuagcuuaucu

SEQ ID NO: 668493 - RNA, 19 nt, Homo sapiens
  misc_RNA (1)...(19): siRNA sense strand
cacugcaacugacaaagga

SEQ ID NO: 668494 - RNA, 19 nt, Homo sapiens
  misc_RNA (1)...(19): siRNA sense strand
uagagaauacggcaaaugg

SEQ ID NO: 668495 - RNA, 19 nt, Homo sapiens
  misc_RNA (1)...(19): siRNA sense strand
gacaacccgccaauauuuc

SEQ ID NO: 668496 - RNA, 19 nt, Homo sapiens
  misc_RNA (1)...(19): siRNA sense strand
cagccugaguacacaguau

SEQ ID NO: 668497 - RNA, 19 nt, Homo sapiens
  misc_RNA (1)...(19): siRNA sense strand
ucgcgacucugguacgaau

SEQ ID NO: 668498 - RNA, 19 nt, Homo sapiens
  misc_RNA (1)...(19): siRNA sense strand
ggaguaaaugcucuucucu

SEQ ID NO: 668499 - RNA, 19 nt, Homo sapiens
  misc_RNA (1)...(19): siRNA sense strand
gaaggaccacggcgaacca

SEQ ID NO: 668500 - RNA, 19 nt, Homo sapiens
  misc_RNA (1)...(19): siRNA sense strand
caguauucgugaaggagaa

SEQ ID NO: 668501 - RNA, 19 nt, Homo sapiens
  misc_RNA (1)...(19): siRNA sense strand
gagauucaggucacugcaa

SEQ ID NO: 668502 - RNA, 19 nt, Homo sapiens
  misc_RNA (1)...(19): siRNA sense strand
caaaguccuacgagauuca

SEQ ID NO: 668503 - RNA, 19 nt, Homo sapiens
  misc_RNA (1)...(19): siRNA sense strand
aaaugggaccuuagugguu

SEQ ID NO: 668504 - RNA, 19 nt, Homo sapiens
  misc_RNA (1)...(19): siRNA sense strand
gaaacugcugagguuaauu

SEQ ID NO: 668505 - RNA, 19 nt, Homo sapiens
  misc_RNA (1)...(19): siRNA sense strand
cucagaaucagaauacgua

SEQ ID NO: 668506 - RNA, 19 nt, Homo sapiens
  misc_RNA (1)...(19): siRNA sense strand
ucacggugcugcuguacac

SEQ ID NO: 668507 - RNA, 19 nt, Homo sapiens
  misc_RNA (1)...(19): siRNA sense strand
ugguggaugucaacgugua

SEQ ID NO: 668508 - RNA, 19 nt, Homo sapiens
  misc_RNA (1)...(19): siRNA sense strand
gcuauacacgggugagauc

SEQ ID NO: 668509 - RNA, 19 nt, Homo sapiens
  misc_RNA (1)...(19): siRNA sense strand
cacaccagaagucucaaua

SEQ ID NO: 668510 - RNA, 19 nt, Homo sapiens
  misc_RNA (1)...(19): siRNA sense strand
gauaacacaccagaagucu

SEQ ID NO: 668511 - RNA, 19 nt, Homo sapiens
  misc_RNA (1)...(19): siRNA sense strand
gacuaaguuuaccauagau

SEQ ID NO: 668512 - RNA, 19 nt, Homo sapiens
  misc_RNA (1)...(19): siRNA sense strand
gaccgaacagcgagauugu

SEQ ID NO: 668513 - RNA, 19 nt, Homo sapiens
  misc_RNA (1)...(19): siRNA sense strand
gcauuuuguuugugaauuc

SEQ ID NO: 668514 - RNA, 19 nt, Homo sapiens
  misc_RNA (1)...(19): siRNA sense strand
ugcugagguuaauuuguua

SEQ ID NO: 668515 - RNA, 19 nt, Homo sapiens
  misc_RNA (1)...(19): siRNA sense strand
gcgagauuguguauucacu

SEQ ID NO: 668516 - RNA, 19 nt, Homo sapiens
  misc_RNA (1)...(19): siRNA sense strand
uauccgguuucccgaauca

SEQ ID NO: 668517 - RNA, 19 nt, Homo sapiens
  misc_RNA (1)...(19): siRNA sense strand
agcccuagcuuaucucaag

SEQ ID NO: 668518 - RNA, 19 nt, Homo sapiens
  misc_RNA (1)...(19): siRNA sense strand
aagcaaaguccuacgagau

SEQ ID NO: 668519 - RNA, 19 nt, Homo sapiens
  misc_RNA (1)...(19): siRNA sense strand
ggaaaucgcuggacagaga

SEQ ID NO: 668520 - RNA, 19 nt, Homo sapiens
  misc_RNA (1)...(19): siRNA sense strand
ccaaucaguuuacaaagua

SEQ ID NO: 668521 - RNA, 19 nt, Homo sapiens
  misc_RNA (1)...(19): siRNA sense strand
uaaaugcucuucucuccua

SEQ ID NO: 668522 - RNA, 19 nt, Homo sapiens
  misc_RNA (1)...(19): siRNA sense strand
gaacuaagcgaaucuuugu

SEQ ID NO: 668523 - RNA, 19 nt, Homo sapiens
  misc_RNA (1)...(19): siRNA sense strand
cgacaacccgccaauauuu

SEQ ID NO: 668524 - RNA, 19 nt, Homo sapiens
  misc_RNA (1)...(19): siRNA sense strand
agaaacagcucucagaauc

SEQ ID NO: 668525 - RNA, 19 nt, Homo sapiens
  misc_RNA (1)...(19): siRNA sense strand
gaacagcgagauuguguau

SEQ ID NO: 668526 - RNA, 19 nt, Homo sapiens
  misc_RNA (1)...(19): siRNA sense strand
agacuaaguuuaccauaga

SEQ ID NO: 668527 - RNA, 19 nt, Homo sapiens
  misc_RNA (1)...(19): siRNA sense strand
ggaaacugcugagguuaau

SEQ ID NO: 668528 - RNA, 19 nt, Homo sapiens
  misc_RNA (1)...(19): siRNA sense strand
ugaaggacauuaacgacaa

SEQ ID NO: 668529 - RNA, 19 nt, Homo sapiens
  misc_RNA (1)...(19): siRNA sense strand
ggagguaaaucugcagaau

SEQ ID NO: 668530 - RNA, 19 nt, Homo sapiens
  misc_RNA (1)...(19): siRNA sense strand
guuaaacgcuucugaugca

SEQ ID NO: 668531 - RNA, 19 nt, Homo sapiens
  misc_RNA (1)...(19): siRNA sense strand
gguauuagauguaaaugac

SEQ ID NO: 668532 - RNA, 19 nt, Homo sapiens
  misc_RNA (1)...(19): siRNA sense strand
agaggaaacugcugagguu

SEQ ID NO: 668533 - RNA, 19 nt, Homo sapiens
  misc_RNA (1)...(19): siRNA sense strand
ccgccaauauuuccaauga

SEQ ID NO: 668534 - RNA, 19 nt, Homo sapiens
  misc_RNA (1)...(19): siRNA sense strand
gcaaaguccuacgagauuc

SEQ ID NO: 668535 - RNA, 19 nt, Homo sapiens
  misc_RNA (1)...(19): siRNA sense strand
aaugggaccuuagugguua

SEQ ID NO: 668536 - RNA, 19 nt, Homo sapiens
  misc_RNA (1)...(19): siRNA sense strand
ccagaagucucaauaacgu

SEQ ID NO: 668537 - RNA, 19 nt, Homo sapiens
  misc_RNA (1)...(19): siRNA sense strand
acagcgagauuguguauuc

SEQ ID NO: 668538 - RNA, 19 nt, Homo sapiens
  misc_RNA (1)...(19): siRNA sense strand
gcagauauaggaguaaaug

SEQ ID NO: 668539 - RNA, 19 nt, Homo sapiens
  misc_RNA (1)...(19): siRNA sense strand
acaggcaaaugaugaacua

SEQ ID NO: 668540 - RNA, 19 nt, Homo sapiens
  misc_RNA (1)...(19): siRNA sense strand
agaacgcgcugguguccua

SEQ ID NO: 668541 - RNA, 19 nt, Homo sapiens
  misc_RNA (1)...(19): siRNA sense strand
cugcugagguuaauuuguu

SEQ ID NO: 668542 - RNA, 19 nt, Homo sapiens
  misc_RNA (1)...(19): siRNA sense strand
aaacugcugagguuaauuu

SEQ ID NO: 668543 - RNA, 19 nt, Homo sapiens
  misc_RNA (1)...(19): siRNA sense strand
gccaauauuuccaaugaca

SEQ ID NO: 668544 - RNA, 19 nt, Homo sapiens
  misc_RNA (1)...(19): siRNA sense strand
uaacacaccagaagucuca

SEQ ID NO: 668545 - RNA, 19 nt, Homo sapiens
  misc_RNA (1)...(19): siRNA sense strand
gggcaccguucaaauacuu

SEQ ID NO: 668546 - RNA, 19 nt, Homo sapiens
  misc_RNA (1)...(19): siRNA sense strand
ccaaugacaguaaagacua

SEQ ID NO: 668547 - RNA, 19 nt, Homo sapiens
  misc_RNA (1)...(19): siRNA sense strand
gaaacagcucucagaauca

SEQ ID NO: 668548 - RNA, 19 nt, Homo sapiens
  misc_RNA (1)...(19): siRNA sense strand
cagacuaaguuuaccauag

SEQ ID NO: 668549 - RNA, 19 nt, Homo sapiens
  misc_RNA (1)...(19): siRNA sense strand
caaugacaguaaagacuau

SEQ ID NO: 668550 - RNA, 19 nt, Homo sapiens
  misc_RNA (1)...(19): siRNA sense strand
uguccaccuucaagaauua

SEQ ID NO: 668551 - RNA, 19 nt, Homo sapiens
  misc_RNA (1)...(19): siRNA sense strand
gauguguccuccacuauac

SEQ ID NO: 668552 - RNA, 19 nt, Homo sapiens
  misc_RNA (1)...(19): siRNA sense strand
aguaaagacuauccgguuu

SEQ ID NO: 668553 - RNA, 19 nt, Homo sapiens
  misc_RNA (1)...(19): siRNA sense strand
ugaugcagauauaggagua

SEQ ID NO: 668554 - RNA, 19 nt, Homo sapiens
  misc_RNA (1)...(19): siRNA sense strand
uaacgacaacccgccaaua

SEQ ID NO: 668555 - RNA, 19 nt, Homo sapiens
  misc_RNA (1)...(19): siRNA sense strand
aauaacgucucucucacuu

SEQ ID NO: 668556 - RNA, 19 nt, Homo sapiens
  misc_RNA (1)...(19): siRNA sense strand
ggaccgaacagcgagauug

SEQ ID NO: 668557 - RNA, 19 nt, Homo sapiens
  misc_RNA (1)...(19): siRNA sense strand
gauauacaggcaaaugaug

SEQ ID NO: 668558 - RNA, 19 nt, Homo sapiens
  misc_RNA (1)...(19): siRNA sense strand
gcugcuugauucucgguuu

SEQ ID NO: 668559 - RNA, 19 nt, Homo sapiens
  misc_RNA (1)...(19): siRNA sense strand
caccagaagucucaauaac

SEQ ID NO: 668560 - RNA, 19 nt, Homo sapiens
  misc_RNA (1)...(19): siRNA sense strand
ccacuauacagacuaaguu

SEQ ID NO: 668561 - RNA, 19 nt, Homo sapiens
  misc_RNA (1)...(19): siRNA sense strand
gaggaaacugcugagguua

SEQ ID NO: 668562 - RNA, 19 nt, Homo sapiens
  misc_RNA (1)...(19): siRNA sense strand
gauucucgguuuccucuag

SEQ ID NO: 668563 - RNA, 19 nt, Homo sapiens
  misc_RNA (1)...(19): siRNA sense strand
gaaggacauuaacgacaac

SEQ ID NO: 668564 - RNA, 19 nt, Homo sapiens
  misc_RNA (1)...(19): siRNA sense strand
gagguaaaucugcagaaug

SEQ ID NO: 668565 - RNA, 19 nt, Homo sapiens
  misc_RNA (1)...(19): siRNA sense strand
cccaaucaguuuacaaagu

SEQ ID NO: 668566 - RNA, 19 nt, Homo sapiens
  misc_RNA (1)...(19): siRNA sense strand
guaaagacuauccgguuuc

SEQ ID NO: 668567 - RNA, 19 nt, Homo sapiens
  misc_RNA (1)...(19): siRNA sense strand
agguaaaucugcagaaugg

SEQ ID NO: 668568 - RNA, 19 nt, Homo sapiens
  misc_RNA (1)...(19): siRNA sense strand
ggccuucagcccuagcuua

SEQ ID NO: 668569 - RNA, 19 nt, Homo sapiens
  misc_RNA (1)...(19): siRNA sense strand
aggcuacgcugguggaugu

SEQ ID NO: 668570 - RNA, 19 nt, Homo sapiens
  misc_RNA (1)...(19): siRNA sense strand
gaucgcgacucugguacga

SEQ ID NO: 668571 - RNA, 19 nt, Homo sapiens
  misc_RNA (1)...(19): siRNA sense strand
ugauguguccuccacuaua

SEQ ID NO: 668572 - RNA, 19 nt, Homo sapiens
  misc_RNA (1)...(19): siRNA sense strand
ugaacuaagcgaaucuuug

SEQ ID NO: 668573 - RNA, 19 nt, Homo sapiens
  misc_RNA (1)...(19): siRNA sense strand
ccuccacuauacagacuaa

SEQ ID NO: 668574 - RNA, 19 nt, Homo sapiens
  misc_RNA (1)...(19): siRNA sense strand
aaacagcucucagaaucag

SEQ ID NO: 668575 - RNA, 19 nt, Homo sapiens
  misc_RNA (1)...(19): siRNA sense strand
gcacugucauugcucucau

SEQ ID NO: 668576 - RNA, 19 nt, Homo sapiens
  misc_RNA (1)...(19): siRNA sense strand
ggcaaaugaugaacuaagc

SEQ ID NO: 668577 - RNA, 19 nt, Homo sapiens
  misc_RNA (1)...(19): siRNA sense strand
gaaucagaauacguaggaa

SEQ ID NO: 668578 - RNA, 19 nt, Homo sapiens
  misc_RNA (1)...(19): siRNA sense strand
acacaguauucgugaagga

SEQ ID NO: 668579 - RNA, 19 nt, Homo sapiens
  misc_RNA (1)...(19): siRNA sense strand
guguccaccuucaagaauu

SEQ ID NO: 668580 - RNA, 19 nt, Homo sapiens
  misc_RNA (1)...(19): siRNA sense strand
uagauauacaggcaaauga

SEQ ID NO: 668581 - RNA, 19 nt, Homo sapiens
  misc_RNA (1)...(19): siRNA sense strand
gcucucagaaucagaauac

SEQ ID NO: 668582 - RNA, 19 nt, Homo sapiens
  misc_RNA (1)...(19): siRNA sense strand
acgcguggcuuucguacga

SEQ ID NO: 668583 - RNA, 19 nt, Homo sapiens
  misc_RNA (1)...(19): siRNA sense strand
guacacaguauucgugaag

SEQ ID NO: 668584 - RNA, 19 nt, Homo sapiens
  misc_RNA (1)...(19): siRNA sense strand
gucaggacauuguaaaauu

SEQ ID NO: 668585 - RNA, 19 nt, Homo sapiens
  misc_RNA (1)...(19): siRNA sense strand
gcagaugaaggaccgaaca

SEQ ID NO: 668586 - RNA, 19 nt, Homo sapiens
  misc_RNA (1)...(19): siRNA sense strand
uaaguuaaacgcuucugau

SEQ ID NO: 668587 - RNA, 19 nt, Homo sapiens
  misc_RNA (1)...(19): siRNA sense strand
agacuccgcagaagagaaa

SEQ ID NO: 668588 - RNA, 19 nt, Homo sapiens
  misc_RNA (1)...(19): siRNA sense strand
acaccagaagucucaauaa

SEQ ID NO: 668589 - RNA, 19 nt, Homo sapiens
  misc_RNA (1)...(19): siRNA sense strand
ucaagaauuacuacucguu

SEQ ID NO: 668590 - RNA, 19 nt, Homo sapiens
  misc_RNA (1)...(19): siRNA sense strand
agaaucagaauacguagga

SEQ ID NO: 668591 - RNA, 19 nt, Homo sapiens
  misc_RNA (1)...(19): siRNA sense strand
guaaaugacaaugaaccaa

SEQ ID NO: 668592 - RNA, 19 nt, Homo sapiens
  misc_RNA (1)...(19): siRNA sense strand
cuucagcccuagcuuaucu

SEQ ID NO: 668593 - RNA, 19 nt, Homo sapiens
  misc_RNA (1)...(19): siRNA sense strand
cacugcaacugacaaagga

SEQ ID NO: 668594 - RNA, 19 nt, Homo sapiens
  misc_RNA (1)...(19): siRNA sense strand
uagagaauacggcaaaugg

SEQ ID NO: 668595 - RNA, 19 nt, Homo sapiens
  misc_RNA (1)...(19): siRNA sense strand
gacaacccgccaauauuuc

SEQ ID NO: 668596 - RNA, 19 nt, Homo sapiens
  misc_RNA (1)...(19): siRNA sense strand
cagccugaguacacaguau

SEQ ID NO: 668597 - RNA, 19 nt, Homo sapiens
  misc_RNA (1)...(19): siRNA sense strand
ucgcgacucugguacgaau

SEQ ID NO: 668598 - RNA, 19 nt, Homo sapiens
  misc_RNA (1)...(19): siRNA sense strand
ggaguaaaugcucuucucu

SEQ ID NO: 668599 - RNA, 19 nt, Homo sapiens
  misc_RNA (1)...(19): siRNA sense strand
gaaggaccacggcgaacca

SEQ ID NO: 668600 - RNA, 19 nt, Homo sapiens
  misc_RNA (1)...(19): siRNA sense strand
caguauucgugaaggagaa

SEQ ID NO: 668601 - RNA, 19 nt, Homo sapiens
  misc_RNA (1)...(19): siRNA sense strand
gagauucaggucacugcaa

SEQ ID NO: 668602 - RNA, 19 nt, Homo sapiens
  misc_RNA (1)...(19): siRNA sense strand
caaaguccuacgagauuca

SEQ ID NO: 668603 - RNA, 19 nt, Homo sapiens
  misc_RNA (1)...(19): siRNA sense strand
aaaugggaccuuagugguu

SEQ ID NO: 668604 - RNA, 19 nt, Homo sapiens
  misc_RNA (1)...(19): siRNA sense strand
gaaacugcugagguuaauu

SEQ ID NO: 668605 - RNA, 19 nt, Homo sapiens
  misc_RNA (1)...(19): siRNA sense strand
cucagaaucagaauacgua

SEQ ID NO: 668606 - RNA, 19 nt, Homo sapiens
  misc_RNA (1)...(19): siRNA sense strand
ucacggugcugcuguacac

SEQ ID NO: 668607 - RNA, 19 nt, Homo sapiens
  misc_RNA (1)...(19): siRNA sense strand
ugguggaugucaacgugua

SEQ ID NO: 668608 - RNA, 19 nt, Homo sapiens
  misc_RNA (1)...(19): siRNA sense strand
gcuauacacgggugagauc

SEQ ID NO: 668609 - RNA, 19 nt, Homo sapiens
  misc_RNA (1)...(19): siRNA sense strand
cacaccagaagucucaaua

SEQ ID NO: 668610 - RNA, 19 nt, Homo sapiens
  misc_RNA (1)...(19): siRNA sense strand
gauaacacaccagaagucu

SEQ ID NO: 668611 - RNA, 19 nt, Homo sapiens
  misc_RNA (1)...(19): siRNA sense strand
gacuaaguuuaccauagau

SEQ ID NO: 668612 - RNA, 19 nt, Homo sapiens
  misc_RNA (1)...(19): siRNA sense strand
gaccgaacagcgagauugu

SEQ ID NO: 668613 - RNA, 19 nt, Homo sapiens
  misc_RNA (1)...(19): siRNA sense strand
gcauuuuguuugugaauuc

SEQ ID NO: 668614 - RNA, 19 nt, Homo sapiens
  misc_RNA (1)...(19): siRNA sense strand
ugcugagguuaauuuguua

SEQ ID NO: 668615 - RNA, 19 nt, Homo sapiens
  misc_RNA (1)...(19): siRNA sense strand
gcgagauuguguauucacu

SEQ ID NO: 668616 - RNA, 19 nt, Homo sapiens
  misc_RNA (1)...(19): siRNA sense strand
uauccgguuucccgaauca

SEQ ID NO: 668617 - RNA, 19 nt, Homo sapiens
  misc_RNA (1)...(19): siRNA sense strand
agcccuagcuuaucucaag

SEQ ID NO: 668618 - RNA, 19 nt, Homo sapiens
  misc_RNA (1)...(19): siRNA sense strand
aagcaaaguccuacgagau

SEQ ID NO: 668619 - RNA, 19 nt, Homo sapiens
  misc_RNA (1)...(19): siRNA sense strand
gaagaaggcaacccaaaug

SEQ ID NO: 668620 - RNA, 19 nt, Homo sapiens
  misc_RNA (1)...(19): siRNA sense strand
gcaauggccuggugugcau

SEQ ID NO: 668621 - RNA, 19 nt, Homo sapiens
  misc_RNA (1)...(19): siRNA sense strand
gguggagucuggaauuuca

SEQ ID NO: 668622 - RNA, 19 nt, Homo sapiens
  misc_RNA (1)...(19): siRNA sense strand
guccugcccucuucuguuu

SEQ ID NO: 668623 - RNA, 19 nt, Homo sapiens
  misc_RNA (1)...(19): siRNA sense strand
gagaagaaggcaacccaaa

SEQ ID NO: 668624 - RNA, 19 nt, Homo sapiens
  misc_RNA (1)...(19): siRNA sense strand
guacuggccuuugcugugu

SEQ ID NO: 668625 - RNA, 19 nt, Homo sapiens
  misc_RNA (1)...(19): siRNA sense strand
gcauggcugugcugaagga

SEQ ID NO: 668626 - RNA, 19 nt, Homo sapiens
  misc_RNA (1)...(19): siRNA sense strand
guacagccagcauccuuaa

SEQ ID NO: 668627 - RNA, 19 nt, Homo sapiens
  misc_RNA (1)...(19): siRNA sense strand
ccucuucuguuuggcuuua

SEQ ID NO: 668628 - RNA, 19 nt, Homo sapiens
  misc_RNA (1)...(19): siRNA sense strand
cgacauggcugggcuacgu

SEQ ID NO: 668629 - RNA, 19 nt, Homo sapiens
  misc_RNA (1)...(19): siRNA sense strand
cagguggagucuggaauuu

SEQ ID NO: 668630 - RNA, 19 nt, Homo sapiens
  misc_RNA (1)...(19): siRNA sense strand
uggcugggcuacgugaaua

SEQ ID NO: 668631 - RNA, 19 nt, Homo sapiens
  misc_RNA (1)...(19): siRNA sense strand
gugcauggcugugcugaag

SEQ ID NO: 668632 - RNA, 19 nt, Homo sapiens
  misc_RNA (1)...(19): siRNA sense strand
uggcugcccuucuucuuga

SEQ ID NO: 668633 - RNA, 19 nt, Homo sapiens
  misc_RNA (1)...(19): siRNA sense strand
gacuaccaccaacuacuua

SEQ ID NO: 668634 - RNA, 19 nt, Homo sapiens
  misc_RNA (1)...(19): siRNA sense strand
cgcauuugcugugauguuu

SEQ ID NO: 668635 - RNA, 19 nt, Homo sapiens
  misc_RNA (1)...(19): siRNA sense strand
ugacccauguucucaauac

SEQ ID NO: 668636 - RNA, 19 nt, Homo sapiens
  misc_RNA (1)...(19): siRNA sense strand
ggucaugcccguucacuac

SEQ ID NO: 668637 - RNA, 19 nt, Homo sapiens
  misc_RNA (1)...(19): siRNA sense strand
cagcauccuuaaucucugu

SEQ ID NO: 668638 - RNA, 19 nt, Homo sapiens
  misc_RNA (1)...(19): siRNA sense strand
gcuguguccugcccucuuc

SEQ ID NO: 668639 - RNA, 19 nt, Homo sapiens
  misc_RNA (1)...(19): siRNA sense strand
cuuaaucucugugccauca

SEQ ID NO: 668640 - RNA, 19 nt, Homo sapiens
  misc_RNA (1)...(19): siRNA sense strand
ugaguagccaccugaacua

SEQ ID NO: 668641 - RNA, 19 nt, Homo sapiens
  misc_RNA (1)...(19): siRNA sense strand
ggugaugcccuggguggua

SEQ ID NO: 668642 - RNA, 19 nt, Homo sapiens
  misc_RNA (1)...(19): siRNA sense strand
cacccuggaugucaugaug

SEQ ID NO: 668643 - RNA, 19 nt, Homo sapiens
  misc_RNA (1)...(19): siRNA sense strand
agaagaaggcaacccaaau

SEQ ID NO: 668644 - RNA, 19 nt, Homo sapiens
  misc_RNA (1)...(19): siRNA sense strand
gugaugcccugggugguau

SEQ ID NO: 668645 - RNA, 19 nt, Homo sapiens
  misc_RNA (1)...(19): siRNA sense strand
cagccagcauccuuaaucu

SEQ ID NO: 668646 - RNA, 19 nt, Homo sapiens
  misc_RNA (1)...(19): siRNA sense strand
ccaucagcauagacaggua

SEQ ID NO: 668647 - RNA, 19 nt, Homo sapiens
  misc_RNA (1)...(19): siRNA sense strand
uggaauuucagccgcauuu

SEQ ID NO: 668648 - RNA, 19 nt, Homo sapiens
  misc_RNA (1)...(19): siRNA sense strand
acuaugcccucuccuacug

SEQ ID NO: 668649 - RNA, 19 nt, Homo sapiens
  misc_RNA (1)...(19): siRNA sense strand
agacuaccaccaacuacuu

SEQ ID NO: 668650 - RNA, 19 nt, Homo sapiens
  misc_RNA (1)...(19): siRNA sense strand
gaauuucagccgcauuugc

SEQ ID NO: 668651 - RNA, 19 nt, Homo sapiens
  misc_RNA (1)...(19): siRNA sense strand
ccgcccacaugccuacuau

SEQ ID NO: 668652 - RNA, 19 nt, Homo sapiens
  misc_RNA (1)...(19): siRNA sense strand
ggaauuucagccgcauuug

SEQ ID NO: 668653 - RNA, 19 nt, Homo sapiens
  misc_RNA (1)...(19): siRNA sense strand
cagcauggcacgggacaga

SEQ ID NO: 668654 - RNA, 19 nt, Homo sapiens
  misc_RNA (1)...(19): siRNA sense strand
gccaucgucuucggcaaug

SEQ ID NO: 668655 - RNA, 19 nt, Homo sapiens
  misc_RNA (1)...(19): siRNA sense strand
acagguggagucuggaauu

SEQ ID NO: 668656 - RNA, 19 nt, Homo sapiens
  misc_RNA (1)...(19): siRNA sense strand
gccagcauccuuaaucucu

SEQ ID NO: 668657 - RNA, 19 nt, Homo sapiens
  misc_RNA (1)...(19): siRNA sense strand
uguacagccagcauccuua

SEQ ID NO: 668658 - RNA, 19 nt, Homo sapiens
  misc_RNA (1)...(19): siRNA sense strand
ucucugugccaucagcaua

SEQ ID NO: 668659 - RNA, 19 nt, Homo sapiens
  misc_RNA (1)...(19): siRNA sense strand
cauccuggccaucgucuuc

SEQ ID NO: 668660 - RNA, 19 nt, Homo sapiens
  misc_RNA (1)...(19): siRNA sense strand
ccuacuaugcccucuccua

SEQ ID NO: 668661 - RNA, 19 nt, Homo sapiens
  misc_RNA (1)...(19): siRNA sense strand
cuguuuggcuuuaauacca

SEQ ID NO: 668662 - RNA, 19 nt, Homo sapiens
  misc_RNA (1)...(19): siRNA sense strand
gcaauggccuggugugcau

SEQ ID NO: 668663 - RNA, 19 nt, Homo sapiens
  misc_RNA (1)...(19): siRNA sense strand
gguggagucuggaauuuca

SEQ ID NO: 668664 - RNA, 19 nt, Homo sapiens
  misc_RNA (1)...(19): siRNA sense strand
guccugcccucuucuguuu

SEQ ID NO: 668665 - RNA, 19 nt, Homo sapiens
  misc_RNA (1)...(19): siRNA sense strand
guacuggccuuugcugugu

SEQ ID NO: 668666 - RNA, 19 nt, Homo sapiens
  misc_RNA (1)...(19): siRNA sense strand
gcauggcugugcugaagga

SEQ ID NO: 668667 - RNA, 19 nt, Homo sapiens
  misc_RNA (1)...(19): siRNA sense strand
guacagccagcauccuuaa

SEQ ID NO: 668668 - RNA, 19 nt, Homo sapiens
  misc_RNA (1)...(19): siRNA sense strand
ccucuucuguuuggcuuua

SEQ ID NO: 668669 - RNA, 19 nt, Homo sapiens
  misc_RNA (1)...(19): siRNA sense strand
cagguggagucuggaauuu

SEQ ID NO: 668670 - RNA, 19 nt, Homo sapiens
  misc_RNA (1)...(19): siRNA sense strand
gugcauggcugugcugaag

SEQ ID NO: 668671 - RNA, 19 nt, Homo sapiens
  misc_RNA (1)...(19): siRNA sense strand
gacuaccaccaacuacuua

SEQ ID NO: 668672 - RNA, 19 nt, Homo sapiens
  misc_RNA (1)...(19): siRNA sense strand
cgcauuugcugugauguuu

SEQ ID NO: 668673 - RNA, 19 nt, Homo sapiens
  misc_RNA (1)...(19): siRNA sense strand
ggucaugcccguucacuac

SEQ ID NO: 668674 - RNA, 19 nt, Homo sapiens
  misc_RNA (1)...(19): siRNA sense strand
cagcauccuuaaucucugu

SEQ ID NO: 668675 - RNA, 19 nt, Homo sapiens
  misc_RNA (1)...(19): siRNA sense strand
gcuguguccugcccucuuc

SEQ ID NO: 668676 - RNA, 19 nt, Homo sapiens
  misc_RNA (1)...(19): siRNA sense strand
cuuaaucucugugccauca

SEQ ID NO: 668677 - RNA, 19 nt, Homo sapiens
  misc_RNA (1)...(19): siRNA sense strand
ugaguagccaccugaacua

SEQ ID NO: 668678 - RNA, 19 nt, Homo sapiens
  misc_RNA (1)...(19): siRNA sense strand
ggugaugcccuggguggua

SEQ ID NO: 668679 - RNA, 19 nt, Homo sapiens
  misc_RNA (1)...(19): siRNA sense strand
cacccuggaugucaugaug

SEQ ID NO: 668680 - RNA, 19 nt, Homo sapiens
  misc_RNA (1)...(19): siRNA sense strand
gugaugcccugggugguau

SEQ ID NO: 668681 - RNA, 19 nt, Homo sapiens
  misc_RNA (1)...(19): siRNA sense strand
cagccagcauccuuaaucu

SEQ ID NO: 668682 - RNA, 19 nt, Homo sapiens
  misc_RNA (1)...(19): siRNA sense strand
ccaucagcauagacaggua

SEQ ID NO: 668683 - RNA, 19 nt, Homo sapiens
  misc_RNA (1)...(19): siRNA sense strand
agacuaccaccaacuacuu

SEQ ID NO: 668684 - RNA, 19 nt, Homo sapiens
  misc_RNA (1)...(19): siRNA sense strand
acuaugcccucuccuacug

SEQ ID NO: 668685 - RNA, 19 nt, Homo sapiens
  misc_RNA (1)...(19): siRNA sense strand
uggaauuucagccgcauuu

SEQ ID NO: 668686 - RNA, 19 nt, Homo sapiens
  misc_RNA (1)...(19): siRNA sense strand
gaauuucagccgcauuugc

SEQ ID NO: 668687 - RNA, 19 nt, Homo sapiens
  misc_RNA (1)...(19): siRNA sense strand
ccgcccacaugccuacuau

SEQ ID NO: 668688 - RNA, 19 nt, Homo sapiens
  misc_RNA (1)...(19): siRNA sense strand
ggaauuucagccgcauuug

SEQ ID NO: 668689 - RNA, 19 nt, Homo sapiens
  misc_RNA (1)...(19): siRNA sense strand
cagcauggcacgggacaga

SEQ ID NO: 668690 - RNA, 19 nt, Homo sapiens
  misc_RNA (1)...(19): siRNA sense strand
gccaucgucuucggcaaug

SEQ ID NO: 668691 - RNA, 19 nt, Homo sapiens
  misc_RNA (1)...(19): siRNA sense strand
acagguggagucuggaauu

SEQ ID NO: 668692 - RNA, 19 nt, Homo sapiens
  misc_RNA (1)...(19): siRNA sense strand
gccagcauccuuaaucucu

SEQ ID NO: 668693 - RNA, 19 nt, Homo sapiens
  misc_RNA (1)...(19): siRNA sense strand
uguacagccagcauccuua

SEQ ID NO: 668694 - RNA, 19 nt, Homo sapiens
  misc_RNA (1)...(19): siRNA sense strand
cauccuggccaucgucuuc

SEQ ID NO: 668695 - RNA, 19 nt, Homo sapiens
  misc_RNA (1)...(19): siRNA sense strand
ucucugugccaucagcaua

SEQ ID NO: 668696 - RNA, 19 nt, Homo sapiens
  misc_RNA (1)...(19): siRNA sense strand
ccuacuaugcccucuccua

SEQ ID NO: 668697 - RNA, 19 nt, Homo sapiens
  misc_RNA (1)...(19): siRNA sense strand
cuguuuggcuuuaauacca

SEQ ID NO: 668698 - RNA, 19 nt, Homo sapiens
  misc_RNA (1)...(19): siRNA sense strand
gaagaaggcaacccaaaug

SEQ ID NO: 668699 - RNA, 19 nt, Homo sapiens
  misc_RNA (1)...(19): siRNA sense strand
gcaauggccuggugugcau

SEQ ID NO: 668700 - RNA, 19 nt, Homo sapiens
  misc_RNA (1)...(19): siRNA sense strand
gguggagucuggaauuuca

SEQ ID NO: 668701 - RNA, 19 nt, Homo sapiens
  misc_RNA (1)...(19): siRNA sense strand
guccugcccucuucuguuu

SEQ ID NO: 668702 - RNA, 19 nt, Homo sapiens
  misc_RNA (1)...(19): siRNA sense strand
gagaagaaggcaacccaaa

SEQ ID NO: 668703 - RNA, 19 nt, Homo sapiens
  misc_RNA (1)...(19): siRNA sense strand
guacuggccuuugcugugu

SEQ ID NO: 668704 - RNA, 19 nt, Homo sapiens
  misc_RNA (1)...(19): siRNA sense strand
gcauggcugugcugaagga

SEQ ID NO: 668705 - RNA, 19 nt, Homo sapiens
  misc_RNA (1)...(19): siRNA sense strand
guacagccagcauccuuaa

SEQ ID NO: 668706 - RNA, 19 nt, Homo sapiens
  misc_RNA (1)...(19): siRNA sense strand
ccucuucuguuuggcuuua

SEQ ID NO: 668707 - RNA, 19 nt, Homo sapiens
  misc_RNA (1)...(19): siRNA sense strand
cgacauggcugggcuacgu

SEQ ID NO: 668708 - RNA, 19 nt, Homo sapiens
  misc_RNA (1)...(19): siRNA sense strand
cagguggagucuggaauuu

SEQ ID NO: 668709 - RNA, 19 nt, Homo sapiens
  misc_RNA (1)...(19): siRNA sense strand
uggcugggcuacgugaaua

SEQ ID NO: 668710 - RNA, 19 nt, Homo sapiens
  misc_RNA (1)...(19): siRNA sense strand
gugcauggcugugcugaag

SEQ ID NO: 668711 - RNA, 19 nt, Homo sapiens
  misc_RNA (1)...(19): siRNA sense strand
uggcugcccuucuucuuga

SEQ ID NO: 668712 - RNA, 19 nt, Homo sapiens
  misc_RNA (1)...(19): siRNA sense strand
gacuaccaccaacuacuua

SEQ ID NO: 668713 - RNA, 19 nt, Homo sapiens
  misc_RNA (1)...(19): siRNA sense strand
cgcauuugcugugauguuu

SEQ ID NO: 668714 - RNA, 19 nt, Homo sapiens
  misc_RNA (1)...(19): siRNA sense strand
ugacccauguucucaauac

SEQ ID NO: 668715 - RNA, 19 nt, Homo sapiens
  misc_RNA (1)...(19): siRNA sense strand
ggucaugcccguucacuac

SEQ ID NO: 668716 - RNA, 19 nt, Homo sapiens
  misc_RNA (1)...(19): siRNA sense strand
cagcauccuuaaucucugu

SEQ ID NO: 668717 - RNA, 19 nt, Homo sapiens
  misc_RNA (1)...(19): siRNA sense strand
gcuguguccugcccucuuc

SEQ ID NO: 668718 - RNA, 19 nt, Homo sapiens
  misc_RNA (1)...(19): siRNA sense strand
cuuaaucucugugccauca

SEQ ID NO: 668719 - RNA, 19 nt, Homo sapiens
  misc_RNA (1)...(19): siRNA sense strand
ugaguagccaccugaacua

SEQ ID NO: 668720 - RNA, 19 nt, Homo sapiens
  misc_RNA (1)...(19): siRNA sense strand
ggugaugcccuggguggua

SEQ ID NO: 668721 - RNA, 19 nt, Homo sapiens
  misc_RNA (1)...(19): siRNA sense strand
cacccuggaugucaugaug

SEQ ID NO: 668722 - RNA, 19 nt, Homo sapiens
  misc_RNA (1)...(19): siRNA sense strand
agaagaaggcaacccaaau

SEQ ID NO: 668723 - RNA, 19 nt, Homo sapiens
  misc_RNA (1)...(19): siRNA sense strand
gugaugcccugggugguau

SEQ ID NO: 668724 - RNA, 19 nt, Homo sapiens
  misc_RNA (1)...(19): siRNA sense strand
cagccagcauccuuaaucu

SEQ ID NO: 668725 - RNA, 19 nt, Homo sapiens
  misc_RNA (1)...(19): siRNA sense strand
ccaucagcauagacaggua

SEQ ID NO: 668726 - RNA, 19 nt, Homo sapiens
  misc_RNA (1)...(19): siRNA sense strand
uggaauuucagccgcauuu

SEQ ID NO: 668727 - RNA, 19 nt, Homo sapiens
  misc_RNA (1)...(19): siRNA sense strand
acuaugcccucuccuacug

SEQ ID NO: 668728 - RNA, 19 nt, Homo sapiens
  misc_RNA (1)...(19): siRNA sense strand
agacuaccaccaacuacuu

SEQ ID NO: 668729 - RNA, 19 nt, Homo sapiens
  misc_RNA (1)...(19): siRNA sense strand
gaauuucagccgcauuugc

SEQ ID NO: 668730 - RNA, 19 nt, Homo sapiens
  misc_RNA (1)...(19): siRNA sense strand
ccgcccacaugccuacuau

SEQ ID NO: 668731 - RNA, 19 nt, Homo sapiens
  misc_RNA (1)...(19): siRNA sense strand
ggaauuucagccgcauuug

SEQ ID NO: 668732 - RNA, 19 nt, Homo sapiens
  misc_RNA (1)...(19): siRNA sense strand
cagcauggcacgggacaga

SEQ ID NO: 668733 - RNA, 19 nt, Homo sapiens
  misc_RNA (1)...(19): siRNA sense strand
gccaucgucuucggcaaug

SEQ ID NO: 668734 - RNA, 19 nt, Homo sapiens
  misc_RNA (1)...(19): siRNA sense strand
acagguggagucuggaauu

SEQ ID NO: 668735 - RNA, 19 nt, Homo sapiens
  misc_RNA (1)...(19): siRNA sense strand
gccagcauccuuaaucucu

SEQ ID NO: 668736 - RNA, 19 nt, Homo sapiens
  misc_RNA (1)...(19): siRNA sense strand
uguacagccagcauccuua

SEQ ID NO: 668737 - RNA, 19 nt, Homo sapiens
  misc_RNA (1)...(19): siRNA sense strand
ucucugugccaucagcaua

SEQ ID NO: 668738 - RNA, 19 nt, Homo sapiens
  misc_RNA (1)...(19): siRNA sense strand
cauccuggccaucgucuuc

SEQ ID NO: 668739 - RNA, 19 nt, Homo sapiens
  misc_RNA (1)...(19): siRNA sense strand
ccuacuaugcccucuccua

SEQ ID NO: 668740 - RNA, 19 nt, Homo sapiens
  misc_RNA (1)...(19): siRNA sense strand
cuguuuggcuuuaauacca

SEQ ID NO: 668741 - RNA, 19 nt, Homo sapiens
  misc_RNA (1)...(19): siRNA sense strand
gaagaaggcaacccaaaug

SEQ ID NO: 668742 - RNA, 19 nt, Homo sapiens
  misc_RNA (1)...(19): siRNA sense strand
gcaauggccuggugugcau

SEQ ID NO: 668743 - RNA, 19 nt, Homo sapiens
  misc_RNA (1)...(19): siRNA sense strand
gguggagucuggaauuuca

SEQ ID NO: 668744 - RNA, 19 nt, Homo sapiens
  misc_RNA (1)...(19): siRNA sense strand
guccugcccucuucuguuu

SEQ ID NO: 668745 - RNA, 19 nt, Homo sapiens
  misc_RNA (1)...(19): siRNA sense strand
gagaagaaggcaacccaaa

SEQ ID NO: 668746 - RNA, 19 nt, Homo sapiens
  misc_RNA (1)...(19): siRNA sense strand
guacuggccuuugcugugu

SEQ ID NO: 668747 - RNA, 19 nt, Homo sapiens
  misc_RNA (1)...(19): siRNA sense strand
gcauggcugugcugaagga

SEQ ID NO: 668748 - RNA, 19 nt, Homo sapiens
  misc_RNA (1)...(19): siRNA sense strand
guacagccagcauccuuaa

SEQ ID NO: 668749 - RNA, 19 nt, Homo sapiens
  misc_RNA (1)...(19): siRNA sense strand
ccucuucuguuuggcuuua

SEQ ID NO: 668750 - RNA, 19 nt, Homo sapiens
  misc_RNA (1)...(19): siRNA sense strand
cgacauggcugggcuacgu

SEQ ID NO: 668751 - RNA, 19 nt, Homo sapiens
  misc_RNA (1)...(19): siRNA sense strand
cagguggagucuggaauuu

SEQ ID NO: 668752 - RNA, 19 nt, Homo sapiens
  misc_RNA (1)...(19): siRNA sense strand
uggcugggcuacgugaaua

SEQ ID NO: 668753 - RNA, 19 nt, Homo sapiens
  misc_RNA (1)...(19): siRNA sense strand
gugcauggcugugcugaag

SEQ ID NO: 668754 - RNA, 19 nt, Homo sapiens
  misc_RNA (1)...(19): siRNA sense strand
uggcugcccuucuucuuga

SEQ ID NO: 668755 - RNA, 19 nt, Homo sapiens
  misc_RNA (1)...(19): siRNA sense strand
gacuaccaccaacuacuua

SEQ ID NO: 668756 - RNA, 19 nt, Homo sapiens
  misc_RNA (1)...(19): siRNA sense strand
cgcauuugcugugauguuu

SEQ ID NO: 668757 - RNA, 19 nt, Homo sapiens
  misc_RNA (1)...(19): siRNA sense strand
ugacccauguucucaauac

SEQ ID NO: 668758 - RNA, 19 nt, Homo sapiens
  misc_RNA (1)...(19): siRNA sense strand
ggucaugcccguucacuac

SEQ ID NO: 668759 - RNA, 19 nt, Homo sapiens
  misc_RNA (1)...(19): siRNA sense strand
cagcauccuuaaucucugu

SEQ ID NO: 668760 - RNA, 19 nt, Homo sapiens
  misc_RNA (1)...(19): siRNA sense strand
gcuguguccugcccucuuc

SEQ ID NO: 668761 - RNA, 19 nt, Homo sapiens
  misc_RNA (1)...(19): siRNA sense strand
cuuaaucucugugccauca

SEQ ID NO: 668762 - RNA, 19 nt, Homo sapiens
  misc_RNA (1)...(19): siRNA sense strand
ugaguagccaccugaacua

SEQ ID NO: 668763 - RNA, 19 nt, Homo sapiens
  misc_RNA (1)...(19): siRNA sense strand
ggugaugcccuggguggua

SEQ ID NO: 668764 - RNA, 19 nt, Homo sapiens
  misc_RNA (1)...(19): siRNA sense strand
cacccuggaugucaugaug

SEQ ID NO: 668765 - RNA, 19 nt, Homo sapiens
  misc_RNA (1)...(19): siRNA sense strand
agaagaaggcaacccaaau

SEQ ID NO: 668766 - RNA, 19 nt, Homo sapiens
  misc_RNA (1)...(19): siRNA sense strand
gugaugcccugggugguau

SEQ ID NO: 668767 - RNA, 19 nt, Homo sapiens
  misc_RNA (1)...(19): siRNA sense strand
cagccagcauccuuaaucu

SEQ ID NO: 668768 - RNA, 19 nt, Homo sapiens
  misc_RNA (1)...(19): siRNA sense strand
ccaucagcauagacaggua

SEQ ID NO: 668769 - RNA, 19 nt, Homo sapiens
  misc_RNA (1)...(19): siRNA sense strand
uggaauuucagccgcauuu

SEQ ID NO: 668770 - RNA, 19 nt, Homo sapiens
  misc_RNA (1)...(19): siRNA sense strand
acuaugcccucuccuacug

SEQ ID NO: 668771 - RNA, 19 nt, Homo sapiens
  misc_RNA (1)...(19): siRNA sense strand
agacuaccaccaacuacuu

SEQ ID NO: 668772 - RNA, 19 nt, Homo sapiens
  misc_RNA (1)...(19): siRNA sense strand
gaauuucagccgcauuugc

SEQ ID NO: 668773 - RNA, 19 nt, Homo sapiens
  misc_RNA (1)...(19): siRNA sense strand
ccgcccacaugccuacuau

SEQ ID NO: 668774 - RNA, 19 nt, Homo sapiens
  misc_RNA (1)...(19): siRNA sense strand
ggaauuucagccgcauuug

SEQ ID NO: 668775 - RNA, 19 nt, Homo sapiens
  misc_RNA (1)...(19): siRNA sense strand
cagcauggcacgggacaga

SEQ ID NO: 668776 - RNA, 19 nt, Homo sapiens
  misc_RNA (1)...(19): siRNA sense strand
gccaucgucuucggcaaug

SEQ ID NO: 668777 - RNA, 19 nt, Homo sapiens
  misc_RNA (1)...(19): siRNA sense strand
acagguggagucuggaauu

SEQ ID NO: 668778 - RNA, 19 nt, Homo sapiens
  misc_RNA (1)...(19): siRNA sense strand
gccagcauccuuaaucucu

SEQ ID NO: 668779 - RNA, 19 nt, Homo sapiens
  misc_RNA (1)...(19): siRNA sense strand
uguacagccagcauccuua

SEQ ID NO: 668780 - RNA, 19 nt, Homo sapiens
  misc_RNA (1)...(19): siRNA sense strand
ucucugugccaucagcaua

SEQ ID NO: 668781 - RNA, 19 nt, Homo sapiens
  misc_RNA (1)...(19): siRNA sense strand
cauccuggccaucgucuuc

SEQ ID NO: 668782 - RNA, 19 nt, Homo sapiens
  misc_RNA (1)...(19): siRNA sense strand
ccuacuaugcccucuccua

SEQ ID NO: 668783 - RNA, 19 nt, Homo sapiens
  misc_RNA (1)...(19): siRNA sense strand
cuguuuggcuuuaauacca

SEQ ID NO: 668784 - RNA, 19 nt, Homo sapiens
  misc_RNA (1)...(19): siRNA sense strand
gaagaaggcaacccaaaug

SEQ ID NO: 668785 - RNA, 19 nt, Homo sapiens
  misc_RNA (1)...(19): siRNA sense strand
gcaauggccuggugugcau

SEQ ID NO: 668786 - RNA, 19 nt, Homo sapiens
  misc_RNA (1)...(19): siRNA sense strand
gguggagucuggaauuuca

SEQ ID NO: 668787 - RNA, 19 nt, Homo sapiens
  misc_RNA (1)...(19): siRNA sense strand
guccugcccucuucuguuu

SEQ ID NO: 668788 - RNA, 19 nt, Homo sapiens
  misc_RNA (1)...(19): siRNA sense strand
gagaagaaggcaacccaaa

SEQ ID NO: 668789 - RNA, 19 nt, Homo sapiens
  misc_RNA (1)...(19): siRNA sense strand
guacuggccuuugcugugu

SEQ ID NO: 668790 - RNA, 19 nt, Homo sapiens
  misc_RNA (1)...(19): siRNA sense strand
gcauggcugugcugaagga

SEQ ID NO: 668791 - RNA, 19 nt, Homo sapiens
  misc_RNA (1)...(19): siRNA sense strand
guacagccagcauccuuaa

SEQ ID NO: 668792 - RNA, 19 nt, Homo sapiens
  misc_RNA (1)...(19): siRNA sense strand
ccucuucuguuuggcuuua

SEQ ID NO: 668793 - RNA, 19 nt, Homo sapiens
  misc_RNA (1)...(19): siRNA sense strand
cgacauggcugggcuacgu

SEQ ID NO: 668794 - RNA, 19 nt, Homo sapiens
  misc_RNA (1)...(19): siRNA sense strand
cagguggagucuggaauuu

SEQ ID NO: 668795 - RNA, 19 nt, Homo sapiens
  misc_RNA (1)...(19): siRNA sense strand
uggcugggcuacgugaaua

SEQ ID NO: 668796 - RNA, 19 nt, Homo sapiens
  misc_RNA (1)...(19): siRNA sense strand
gugcauggcugugcugaag

SEQ ID NO: 668797 - RNA, 19 nt, Homo sapiens
  misc_RNA (1)...(19): siRNA sense strand
uggcugcccuucuucuuga

SEQ ID NO: 668798 - RNA, 19 nt, Homo sapiens
  misc_RNA (1)...(19): siRNA sense strand
gacuaccaccaacuacuua

SEQ ID NO: 668799 - RNA, 19 nt, Homo sapiens
  misc_RNA (1)...(19): siRNA sense strand
cgcauuugcugugauguuu

SEQ ID NO: 668800 - RNA, 19 nt, Homo sapiens
  misc_RNA (1)...(19): siRNA sense strand
ugacccauguucucaauac

SEQ ID NO: 668801 - RNA, 19 nt, Homo sapiens
  misc_RNA (1)...(19): siRNA sense strand
ggucaugcccguucacuac

SEQ ID NO: 668802 - RNA, 19 nt, Homo sapiens
  misc_RNA (1)...(19): siRNA sense strand
cagcauccuuaaucucugu

SEQ ID NO: 668803 - RNA, 19 nt, Homo sapiens
  misc_RNA (1)...(19): siRNA sense strand
gcuguguccugcccucuuc

SEQ ID NO: 668804 - RNA, 19 nt, Homo sapiens
  misc_RNA (1)...(19): siRNA sense strand
cuuaaucucugugccauca

SEQ ID NO: 668805 - RNA, 19 nt, Homo sapiens
  misc_RNA (1)...(19): siRNA sense strand
ugaguagccaccugaacua

SEQ ID NO: 668806 - RNA, 19 nt, Homo sapiens
  misc_RNA (1)...(19): siRNA sense strand
ggugaugcccuggguggua

SEQ ID NO: 668807 - RNA, 19 nt, Homo sapiens
  misc_RNA (1)...(19): siRNA sense strand
cacccuggaugucaugaug

SEQ ID NO: 668808 - RNA, 19 nt, Homo sapiens
  misc_RNA (1)...(19): siRNA sense strand
agaagaaggcaacccaaau

SEQ ID NO: 668809 - RNA, 19 nt, Homo sapiens
  misc_RNA (1)...(19): siRNA sense strand
gugaugcccugggugguau

SEQ ID NO: 668810 - RNA, 19 nt, Homo sapiens
  misc_RNA (1)...(19): siRNA sense strand
cagccagcauccuuaaucu

SEQ ID NO: 668811 - RNA, 19 nt, Homo sapiens
  misc_RNA (1)...(19): siRNA sense strand
ccaucagcauagacaggua

SEQ ID NO: 668812 - RNA, 19 nt, Homo sapiens
  misc_RNA (1)...(19): siRNA sense strand
uggaauuucagccgcauuu

SEQ ID NO: 668813 - RNA, 19 nt, Homo sapiens
  misc_RNA (1)...(19): siRNA sense strand
acuaugcccucuccuacug

SEQ ID NO: 668814 - RNA, 19 nt, Homo sapiens
  misc_RNA (1)...(19): siRNA sense strand
agacuaccaccaacuacuu

SEQ ID NO: 668815 - RNA, 19 nt, Homo sapiens
  misc_RNA (1)...(19): siRNA sense strand
gaauuucagccgcauuugc

SEQ ID NO: 668816 - RNA, 19 nt, Homo sapiens
  misc_RNA (1)...(19): siRNA sense strand
ccgcccacaugccuacuau

SEQ ID NO: 668817 - RNA, 19 nt, Homo sapiens
  misc_RNA (1)...(19): siRNA sense strand
ggaauuucagccgcauuug

SEQ ID NO: 668818 - RNA, 19 nt, Homo sapiens
  misc_RNA (1)...(19): siRNA sense strand
cagcauggcacgggacaga

SEQ ID NO: 668819 - RNA, 19 nt, Homo sapiens
  misc_RNA (1)...(19): siRNA sense strand
gccaucgucuucggcaaug

SEQ ID NO: 668820 - RNA, 19 nt, Homo sapiens
  misc_RNA (1)...(19): siRNA sense strand
acagguggagucuggaauu

SEQ ID NO: 668821 - RNA, 19 nt, Homo sapiens
  misc_RNA (1)...(19): siRNA sense strand
gccagcauccuuaaucucu

SEQ ID NO: 668822 - RNA, 19 nt, Homo sapiens
  misc_RNA (1)...(19): siRNA sense strand
uguacagccagcauccuua

SEQ ID NO: 668823 - RNA, 19 nt, Homo sapiens
  misc_RNA (1)...(19): siRNA sense strand
ucucugugccaucagcaua

SEQ ID NO: 668824 - RNA, 19 nt, Homo sapiens
  misc_RNA (1)...(19): siRNA sense strand
cauccuggccaucgucuuc

SEQ ID NO: 668825 - RNA, 19 nt, Homo sapiens
  misc_RNA (1)...(19): siRNA sense strand
ccuacuaugcccucuccua

SEQ ID NO: 668826 - RNA, 19 nt, Homo sapiens
  misc_RNA (1)...(19): siRNA sense strand
cuguuuggcuuuaauacca

SEQ ID NO: 668827 - RNA, 19 nt, Homo sapiens
  misc_RNA (1)...(19): siRNA sense strand
gaagaaggcaacccaaaug

SEQ ID NO: 668828 - RNA, 19 nt, Homo sapiens
  misc_RNA (1)...(19): siRNA sense strand
gcaauggccuggugugcau

SEQ ID NO: 668829 - RNA, 19 nt, Homo sapiens
  misc_RNA (1)...(19): siRNA sense strand
gguggagucuggaauuuca

SEQ ID NO: 668830 - RNA, 19 nt, Homo sapiens
  misc_RNA (1)...(19): siRNA sense strand
guccugcccucuucuguuu

SEQ ID NO: 668831 - RNA, 19 nt, Homo sapiens
  misc_RNA (1)...(19): siRNA sense strand
gagaagaaggcaacccaaa

SEQ ID NO: 668832 - RNA, 19 nt, Homo sapiens
  misc_RNA (1)...(19): siRNA sense strand
guacuggccuuugcugugu

SEQ ID NO: 668833 - RNA, 19 nt, Homo sapiens
  misc_RNA (1)...(19): siRNA sense strand
gcauggcugugcugaagga

SEQ ID NO: 668834 - RNA, 19 nt, Homo sapiens
  misc_RNA (1)...(19): siRNA sense strand
guacagccagcauccuuaa

SEQ ID NO: 668835 - RNA, 19 nt, Homo sapiens
  misc_RNA (1)...(19): siRNA sense strand
ccucuucuguuuggcuuua

SEQ ID NO: 668836 - RNA, 19 nt, Homo sapiens
  misc_RNA (1)...(19): siRNA sense strand
cgacauggcugggcuacgu

SEQ ID NO: 668837 - RNA, 19 nt, Homo sapiens
  misc_RNA (1)...(19): siRNA sense strand
cagguggagucuggaauuu

SEQ ID NO: 668838 - RNA, 19 nt, Homo sapiens
  misc_RNA (1)...(19): siRNA sense strand
uggcugggcuacgugaaua

SEQ ID NO: 668839 - RNA, 19 nt, Homo sapiens
  misc_RNA (1)...(19): siRNA sense strand
gugcauggcugugcugaag

SEQ ID NO: 668840 - RNA, 19 nt, Homo sapiens
  misc_RNA (1)...(19): siRNA sense strand
uggcugcccuucuucuuga

SEQ ID NO: 668841 - RNA, 19 nt, Homo sapiens
  misc_RNA (1)...(19): siRNA sense strand
gacuaccaccaacuacuua

SEQ ID NO: 668842 - RNA, 19 nt, Homo sapiens
  misc_RNA (1)...(19): siRNA sense strand
cgcauuugcugugauguuu

SEQ ID NO: 668843 - RNA, 19 nt, Homo sapiens
  misc_RNA (1)...(19): siRNA sense strand
ugacccauguucucaauac

SEQ ID NO: 668844 - RNA, 19 nt, Homo sapiens
  misc_RNA (1)...(19): siRNA sense strand
ggucaugcccguucacuac

SEQ ID NO: 668845 - RNA, 19 nt, Homo sapiens
  misc_RNA (1)...(19): siRNA sense strand
cagcauccuuaaucucugu

SEQ ID NO: 668846 - RNA, 19 nt, Homo sapiens
  misc_RNA (1)...(19): siRNA sense strand
gcuguguccugcccucuuc

SEQ ID NO: 668847 - RNA, 19 nt, Homo sapiens
  misc_RNA (1)...(19): siRNA sense strand
cuuaaucucugugccauca

SEQ ID NO: 668848 - RNA, 19 nt, Homo sapiens
  misc_RNA (1)...(19): siRNA sense strand
ugaguagccaccugaacua

SEQ ID NO: 668849 - RNA, 19 nt, Homo sapiens
  misc_RNA (1)...(19): siRNA sense strand
ggugaugcccuggguggua

SEQ ID NO: 668850 - RNA, 19 nt, Homo sapiens
  misc_RNA (1)...(19): siRNA sense strand
cacccuggaugucaugaug

SEQ ID NO: 668851 - RNA, 19 nt, Homo sapiens
  misc_RNA (1)...(19): siRNA sense strand
agaagaaggcaacccaaau

SEQ ID NO: 668852 - RNA, 19 nt, Homo sapiens
  misc_RNA (1)...(19): siRNA sense strand
gugaugcccugggugguau

SEQ ID NO: 668853 - RNA, 19 nt, Homo sapiens
  misc_RNA (1)...(19): siRNA sense strand
cagccagcauccuuaaucu

SEQ ID NO: 668854 - RNA, 19 nt, Homo sapiens
  misc_RNA (1)...(19): siRNA sense strand
ccaucagcauagacaggua

SEQ ID NO: 668855 - RNA, 19 nt, Homo sapiens
  misc_RNA (1)...(19): siRNA sense strand
uggaauuucagccgcauuu

SEQ ID NO: 668856 - RNA, 19 nt, Homo sapiens
  misc_RNA (1)...(19): siRNA sense strand
acuaugcccucuccuacug

SEQ ID NO: 668857 - RNA, 19 nt, Homo sapiens
  misc_RNA (1)...(19): siRNA sense strand
agacuaccaccaacuacuu

SEQ ID NO: 668858 - RNA, 19 nt, Homo sapiens
  misc_RNA (1)...(19): siRNA sense strand
gaauuucagccgcauuugc

SEQ ID NO: 668859 - RNA, 19 nt, Homo sapiens
  misc_RNA (1)...(19): siRNA sense strand
ccgcccacaugccuacuau

SEQ ID NO: 668860 - RNA, 19 nt, Homo sapiens
  misc_RNA (1)...(19): siRNA sense strand
ggaauuucagccgcauuug

SEQ ID NO: 668861 - RNA, 19 nt, Homo sapiens
  misc_RNA (1)...(19): siRNA sense strand
cagcauggcacgggacaga

SEQ ID NO: 668862 - RNA, 19 nt, Homo sapiens
  misc_RNA (1)...(19): siRNA sense strand
gccaucgucuucggcaaug

SEQ ID NO: 668863 - RNA, 19 nt, Homo sapiens
  misc_RNA (1)...(19): siRNA sense strand
acagguggagucuggaauu

SEQ ID NO: 668864 - RNA, 19 nt, Homo sapiens
  misc_RNA (1)...(19): siRNA sense strand
gccagcauccuuaaucucu

SEQ ID NO: 668865 - RNA, 19 nt, Homo sapiens
  misc_RNA (1)...(19): siRNA sense strand
uguacagccagcauccuua

SEQ ID NO: 668866 - RNA, 19 nt, Homo sapiens
  misc_RNA (1)...(19): siRNA sense strand
ucucugugccaucagcaua

SEQ ID NO: 668867 - RNA, 19 nt, Homo sapiens
  misc_RNA (1)...(19): siRNA sense strand
cauccuggccaucgucuuc

SEQ ID NO: 668868 - RNA, 19 nt, Homo sapiens
  misc_RNA (1)...(19): siRNA sense strand
ccuacuaugcccucuccua

SEQ ID NO: 668869 - RNA, 19 nt, Homo sapiens
  misc_RNA (1)...(19): siRNA sense strand
cuguuuggcuuuaauacca

SEQ ID NO: 668870 - RNA, 19 nt, Homo sapiens
  misc_RNA (1)...(19): siRNA sense strand
gcaauggccuggugugcau

SEQ ID NO: 668871 - RNA, 19 nt, Homo sapiens
  misc_RNA (1)...(19): siRNA sense strand
gguggagucuggaauuuca

SEQ ID NO: 668872 - RNA, 19 nt, Homo sapiens
  misc_RNA (1)...(19): siRNA sense strand
guccugcccucuucuguuu

SEQ ID NO: 668873 - RNA, 19 nt, Homo sapiens
  misc_RNA (1)...(19): siRNA sense strand
guacuggccuuugcugugu

SEQ ID NO: 668874 - RNA, 19 nt, Homo sapiens
  misc_RNA (1)...(19): siRNA sense strand
gcauggcugugcugaagga

SEQ ID NO: 668875 - RNA, 19 nt, Homo sapiens
  misc_RNA (1)...(19): siRNA sense strand
guacagccagcauccuuaa

SEQ ID NO: 668876 - RNA, 19 nt, Homo sapiens
  misc_RNA (1)...(19): siRNA sense strand
ccucuucuguuuggcuuua

SEQ ID NO: 668877 - RNA, 19 nt, Homo sapiens
  misc_RNA (1)...(19): siRNA sense strand
cagguggagucuggaauuu

SEQ ID NO: 668878 - RNA, 19 nt, Homo sapiens
  misc_RNA (1)...(19): siRNA sense strand
gugcauggcugugcugaag

SEQ ID NO: 668879 - RNA, 19 nt, Homo sapiens
  misc_RNA (1)...(19): siRNA sense strand
gacuaccaccaacuacuua

SEQ ID NO: 668880 - RNA, 19 nt, Homo sapiens
  misc_RNA (1)...(19): siRNA sense strand
cgcauuugcugugauguuu

SEQ ID NO: 668881 - RNA, 19 nt, Homo sapiens
  misc_RNA (1)...(19): siRNA sense strand
ggucaugcccguucacuac

SEQ ID NO: 668882 - RNA, 19 nt, Homo sapiens
  misc_RNA (1)...(19): siRNA sense strand
cagcauccuuaaucucugu

SEQ ID NO: 668883 - RNA, 19 nt, Homo sapiens
  misc_RNA (1)...(19): siRNA sense strand
gcuguguccugcccucuuc

SEQ ID NO: 668884 - RNA, 19 nt, Homo sapiens
  misc_RNA (1)...(19): siRNA sense strand
cuuaaucucugugccauca

SEQ ID NO: 668885 - RNA, 19 nt, Homo sapiens
  misc_RNA (1)...(19): siRNA sense strand
ugaguagccaccugaacua

SEQ ID NO: 668886 - RNA, 19 nt, Homo sapiens
  misc_RNA (1)...(19): siRNA sense strand
ggugaugcccuggguggua

SEQ ID NO: 668887 - RNA, 19 nt, Homo sapiens
  misc_RNA (1)...(19): siRNA sense strand
cacccuggaugucaugaug

SEQ ID NO: 668888 - RNA, 19 nt, Homo sapiens
  misc_RNA (1)...(19): siRNA sense strand
gugaugcccugggugguau

SEQ ID NO: 668889 - RNA, 19 nt, Homo sapiens
  misc_RNA (1)...(19): siRNA sense strand
cagccagcauccuuaaucu

SEQ ID NO: 668890 - RNA, 19 nt, Homo sapiens
  misc_RNA (1)...(19): siRNA sense strand
ccaucagcauagacaggua

SEQ ID NO: 668891 - RNA, 19 nt, Homo sapiens
  misc_RNA (1)...(19): siRNA sense strand
agacuaccaccaacuacuu

SEQ ID NO: 668892 - RNA, 19 nt, Homo sapiens
  misc_RNA (1)...(19): siRNA sense strand
acuaugcccucuccuacug

SEQ ID NO: 668893 - RNA, 19 nt, Homo sapiens
  misc_RNA (1)...(19): siRNA sense strand
uggaauuucagccgcauuu

SEQ ID NO: 668894 - RNA, 19 nt, Homo sapiens
  misc_RNA (1)...(19): siRNA sense strand
gaauuucagccgcauuugc

SEQ ID NO: 668895 - RNA, 19 nt, Homo sapiens
  misc_RNA (1)...(19): siRNA sense strand
ccgcccacaugccuacuau

SEQ ID NO: 668896 - RNA, 19 nt, Homo sapiens
  misc_RNA (1)...(19): siRNA sense strand
ggaauuucagccgcauuug

SEQ ID NO: 668897 - RNA, 19 nt, Homo sapiens
  misc_RNA (1)...(19): siRNA sense strand
cagcauggcacgggacaga

SEQ ID NO: 668898 - RNA, 19 nt, Homo sapiens
  misc_RNA (1)...(19): siRNA sense strand
gccaucgucuucggcaaug

SEQ ID NO: 668899 - RNA, 19 nt, Homo sapiens
  misc_RNA (1)...(19): siRNA sense strand
acagguggagucuggaauu

SEQ ID NO: 668900 - RNA, 19 nt, Homo sapiens
  misc_RNA (1)...(19): siRNA sense strand
gccagcauccuuaaucucu

SEQ ID NO: 668901 - RNA, 19 nt, Homo sapiens
  misc_RNA (1)...(19): siRNA sense strand
uguacagccagcauccuua

SEQ ID NO: 668902 - RNA, 19 nt, Homo sapiens
  misc_RNA (1)...(19): siRNA sense strand
cauccuggccaucgucuuc

SEQ ID NO: 668903 - RNA, 19 nt, Homo sapiens
  misc_RNA (1)...(19): siRNA sense strand
ucucugugccaucagcaua

SEQ ID NO: 668904 - RNA, 19 nt, Homo sapiens
  misc_RNA (1)...(19): siRNA sense strand
ccuacuaugcccucuccua

SEQ ID NO: 668905 - RNA, 19 nt, Homo sapiens
  misc_RNA (1)...(19): siRNA sense strand
cuguuuggcuuuaauacca

SEQ ID NO: 668906 - RNA, 19 nt, Homo sapiens
  misc_RNA (1)...(19): siRNA sense strand
gaagaaggcaacccaaaug

SEQ ID NO: 668907 - RNA, 19 nt, Homo sapiens
  misc_RNA (1)...(19): siRNA sense strand
gcaauggccuggugugcau

SEQ ID NO: 668908 - RNA, 19 nt, Homo sapiens
  misc_RNA (1)...(19): siRNA sense strand
gguggagucuggaauuuca

SEQ ID NO: 668909 - RNA, 19 nt, Homo sapiens
  misc_RNA (1)...(19): siRNA sense strand
guccugcccucuucuguuu

SEQ ID NO: 668910 - RNA, 19 nt, Homo sapiens
  misc_RNA (1)...(19): siRNA sense strand
gagaagaaggcaacccaaa

SEQ ID NO: 668911 - RNA, 19 nt, Homo sapiens
  misc_RNA (1)...(19): siRNA sense strand
guacuggccuuugcugugu

SEQ ID NO: 668912 - RNA, 19 nt, Homo sapiens
  misc_RNA (1)...(19): siRNA sense strand
gcauggcugugcugaagga

SEQ ID NO: 668913 - RNA, 19 nt, Homo sapiens
  misc_RNA (1)...(19): siRNA sense strand
guacagccagcauccuuaa

SEQ ID NO: 668914 - RNA, 19 nt, Homo sapiens
  misc_RNA (1)...(19): siRNA sense strand
ccucuucuguuuggcuuua

SEQ ID NO: 668915 - RNA, 19 nt, Homo sapiens
  misc_RNA (1)...(19): siRNA sense strand
cgacauggcugggcuacgu

SEQ ID NO: 668916 - RNA, 19 nt, Homo sapiens
  misc_RNA (1)...(19): siRNA sense strand
cagguggagucuggaauuu

SEQ ID NO: 668917 - RNA, 19 nt, Homo sapiens
  misc_RNA (1)...(19): siRNA sense strand
uggcugggcuacgugaaua

SEQ ID NO: 668918 - RNA, 19 nt, Homo sapiens
  misc_RNA (1)...(19): siRNA sense strand
gugcauggcugugcugaag

SEQ ID NO: 668919 - RNA, 19 nt, Homo sapiens
  misc_RNA (1)...(19): siRNA sense strand
uggcugcccuucuucuuga

SEQ ID NO: 668920 - RNA, 19 nt, Homo sapiens
  misc_RNA (1)...(19): siRNA sense strand
gacuaccaccaacuacuua

SEQ ID NO: 668921 - RNA, 19 nt, Homo sapiens
  misc_RNA (1)...(19): siRNA sense strand
cgcauuugcugugauguuu

SEQ ID NO: 668922 - RNA, 19 nt, Homo sapiens
  misc_RNA (1)...(19): siRNA sense strand
ugacccauguucucaauac

SEQ ID NO: 668923 - RNA, 19 nt, Homo sapiens
  misc_RNA (1)...(19): siRNA sense strand
ggucaugcccguucacuac

SEQ ID NO: 668924 - RNA, 19 nt, Homo sapiens
  misc_RNA (1)...(19): siRNA sense strand
cagcauccuuaaucucugu

SEQ ID NO: 668925 - RNA, 19 nt, Homo sapiens
  misc_RNA (1)...(19): siRNA sense strand
gcuguguccugcccucuuc

SEQ ID NO: 668926 - RNA, 19 nt, Homo sapiens
  misc_RNA (1)...(19): siRNA sense strand
cuuaaucucugugccauca

SEQ ID NO: 668927 - RNA, 19 nt, Homo sapiens
  misc_RNA (1)...(19): siRNA sense strand
ugaguagccaccugaacua

SEQ ID NO: 668928 - RNA, 19 nt, Homo sapiens
  misc_RNA (1)...(19): siRNA sense strand
ggugaugcccuggguggua

SEQ ID NO: 668929 - RNA, 19 nt, Homo sapiens
  misc_RNA (1)...(19): siRNA sense strand
cacccuggaugucaugaug

SEQ ID NO: 668930 - RNA, 19 nt, Homo sapiens
  misc_RNA (1)...(19): siRNA sense strand
agaagaaggcaacccaaau

SEQ ID NO: 668931 - RNA, 19 nt, Homo sapiens
  misc_RNA (1)...(19): siRNA sense strand
gugaugcccugggugguau

SEQ ID NO: 668932 - RNA, 19 nt, Homo sapiens
  misc_RNA (1)...(19): siRNA sense strand
cagccagcauccuuaaucu

SEQ ID NO: 668933 - RNA, 19 nt, Homo sapiens
  misc_RNA (1)...(19): siRNA sense strand
ccaucagcauagacaggua

SEQ ID NO: 668934 - RNA, 19 nt, Homo sapiens
  misc_RNA (1)...(19): siRNA sense strand
uggaauuucagccgcauuu

SEQ ID NO: 668935 - RNA, 19 nt, Homo sapiens
  misc_RNA (1)...(19): siRNA sense strand
acuaugcccucuccuacug

SEQ ID NO: 668936 - RNA, 19 nt, Homo sapiens
  misc_RNA (1)...(19): siRNA sense strand
agacuaccaccaacuacuu

SEQ ID NO: 668937 - RNA, 19 nt, Homo sapiens
  misc_RNA (1)...(19): siRNA sense strand
gaauuucagccgcauuugc

SEQ ID NO: 668938 - RNA, 19 nt, Homo sapiens
  misc_RNA (1)...(19): siRNA sense strand
ccgcccacaugccuacuau

SEQ ID NO: 668939 - RNA, 19 nt, Homo sapiens
  misc_RNA (1)...(19): siRNA sense strand
ggaauuucagccgcauuug

SEQ ID NO: 668940 - RNA, 19 nt, Homo sapiens
  misc_RNA (1)...(19): siRNA sense strand
cagcauggcacgggacaga

SEQ ID NO: 668941 - RNA, 19 nt, Homo sapiens
  misc_RNA (1)...(19): siRNA sense strand
gccaucgucuucggcaaug

SEQ ID NO: 668942 - RNA, 19 nt, Homo sapiens
  misc_RNA (1)...(19): siRNA sense strand
acagguggagucuggaauu

SEQ ID NO: 668943 - RNA, 19 nt, Homo sapiens
  misc_RNA (1)...(19): siRNA sense strand
gccagcauccuuaaucucu

SEQ ID NO: 668944 - RNA, 19 nt, Homo sapiens
  misc_RNA (1)...(19): siRNA sense strand
uguacagccagcauccuua

SEQ ID NO: 668945 - RNA, 19 nt, Homo sapiens
  misc_RNA (1)...(19): siRNA sense strand
ucucugugccaucagcaua

SEQ ID NO: 668946 - RNA, 19 nt, Homo sapiens
  misc_RNA (1)...(19): siRNA sense strand
cauccuggccaucgucuuc

SEQ ID NO: 668947 - RNA, 19 nt, Homo sapiens
  misc_RNA (1)...(19): siRNA sense strand
ccuacuaugcccucuccua

SEQ ID NO: 668948 - RNA, 19 nt, Homo sapiens
  misc_RNA (1)...(19): siRNA sense strand
cuguuuggcuuuaauacca

SEQ ID NO: 668949 - RNA, 19 nt, Homo sapiens
  misc_RNA (1)...(19): siRNA sense strand
gaagaaggcaacccaaaug

SEQ ID NO: 668950 - RNA, 19 nt, Homo sapiens
  misc_RNA (1)...(19): siRNA sense strand
gcaauggccuggugugcau

SEQ ID NO: 668951 - RNA, 19 nt, Homo sapiens
  misc_RNA (1)...(19): siRNA sense strand
gguggagucuggaauuuca

SEQ ID NO: 668952 - RNA, 19 nt, Homo sapiens
  misc_RNA (1)...(19): siRNA sense strand
guccugcccucuucuguuu

SEQ ID NO: 668953 - RNA, 19 nt, Homo sapiens
  misc_RNA (1)...(19): siRNA sense strand
gagaagaaggcaacccaaa

SEQ ID NO: 668954 - RNA, 19 nt, Homo sapiens
  misc_RNA (1)...(19): siRNA sense strand
guacuggccuuugcugugu

SEQ ID NO: 668955 - RNA, 19 nt, Homo sapiens
  misc_RNA (1)...(19): siRNA sense strand
gcauggcugugcugaagga

SEQ ID NO: 668956 - RNA, 19 nt, Homo sapiens
  misc_RNA (1)...(19): siRNA sense strand
guacagccagcauccuuaa

SEQ ID NO: 668957 - RNA, 19 nt, Homo sapiens
  misc_RNA (1)...(19): siRNA sense strand
ccucuucuguuuggcuuua

SEQ ID NO: 668958 - RNA, 19 nt, Homo sapiens
  misc_RNA (1)...(19): siRNA sense strand
cgacauggcugggcuacgu

SEQ ID NO: 668959 - RNA, 19 nt, Homo sapiens
  misc_RNA (1)...(19): siRNA sense strand
cagguggagucuggaauuu

SEQ ID NO: 668960 - RNA, 19 nt, Homo sapiens
  misc_RNA (1)...(19): siRNA sense strand
uggcugggcuacgugaaua

SEQ ID NO: 668961 - RNA, 19 nt, Homo sapiens
  misc_RNA (1)...(19): siRNA sense strand
gugcauggcugugcugaag

SEQ ID NO: 668962 - RNA, 19 nt, Homo sapiens
  misc_RNA (1)...(19): siRNA sense strand
uggcugcccuucuucuuga

SEQ ID NO: 668963 - RNA, 19 nt, Homo sapiens
  misc_RNA (1)...(19): siRNA sense strand
gacuaccaccaacuacuua

SEQ ID NO: 668964 - RNA, 19 nt, Homo sapiens
  misc_RNA (1)...(19): siRNA sense strand
cgcauuugcugugauguuu

SEQ ID NO: 668965 - RNA, 19 nt, Homo sapiens
  misc_RNA (1)...(19): siRNA sense strand
ugacccauguucucaauac

SEQ ID NO: 668966 - RNA, 19 nt, Homo sapiens
  misc_RNA (1)...(19): siRNA sense strand
ggucaugcccguucacuac

SEQ ID NO: 668967 - RNA, 19 nt, Homo sapiens
  misc_RNA (1)...(19): siRNA sense strand
cagcauccuuaaucucugu

SEQ ID NO: 668968 - RNA, 19 nt, Homo sapiens
  misc_RNA (1)...(19): siRNA sense strand
gcuguguccugcccucuuc

SEQ ID NO: 668969 - RNA, 19 nt, Homo sapiens
  misc_RNA (1)...(19): siRNA sense strand
cuuaaucucugugccauca

SEQ ID NO: 668970 - RNA, 19 nt, Homo sapiens
  misc_RNA (1)...(19): siRNA sense strand
ugaguagccaccugaacua

SEQ ID NO: 668971 - RNA, 19 nt, Homo sapiens
  misc_RNA (1)...(19): siRNA sense strand
ggugaugcccuggguggua

SEQ ID NO: 668972 - RNA, 19 nt, Homo sapiens
  misc_RNA (1)...(19): siRNA sense strand
cacccuggaugucaugaug

SEQ ID NO: 668973 - RNA, 19 nt, Homo sapiens
  misc_RNA (1)...(19): siRNA sense strand
agaagaaggcaacccaaau

SEQ ID NO: 668974 - RNA, 19 nt, Homo sapiens
  misc_RNA (1)...(19): siRNA sense strand
gugaugcccugggugguau

SEQ ID NO: 668975 - RNA, 19 nt, Homo sapiens
  misc_RNA (1)...(19): siRNA sense strand
cagccagcauccuuaaucu

SEQ ID NO: 668976 - RNA, 19 nt, Homo sapiens
  misc_RNA (1)...(19): siRNA sense strand
ccaucagcauagacaggua

SEQ ID NO: 668977 - RNA, 19 nt, Homo sapiens
  misc_RNA (1)...(19): siRNA sense strand
uggaauuucagccgcauuu

SEQ ID NO: 668978 - RNA, 19 nt, Homo sapiens
  misc_RNA (1)...(19): siRNA sense strand
acuaugcccucuccuacug

SEQ ID NO: 668979 - RNA, 19 nt, Homo sapiens
  misc_RNA (1)...(19): siRNA sense strand
agacuaccaccaacuacuu

SEQ ID NO: 668980 - RNA, 19 nt, Homo sapiens
  misc_RNA (1)...(19): siRNA sense strand
gaauuucagccgcauuugc

SEQ ID NO: 668981 - RNA, 19 nt, Homo sapiens
  misc_RNA (1)...(19): siRNA sense strand
ccgcccacaugccuacuau

SEQ ID NO: 668982 - RNA, 19 nt, Homo sapiens
  misc_RNA (1)...(19): siRNA sense strand
ggaauuucagccgcauuug

SEQ ID NO: 668983 - RNA, 19 nt, Homo sapiens
  misc_RNA (1)...(19): siRNA sense strand
cagcauggcacgggacaga

SEQ ID NO: 668984 - RNA, 19 nt, Homo sapiens
  misc_RNA (1)...(19): siRNA sense strand
gccaucgucuucggcaaug

SEQ ID NO: 668985 - RNA, 19 nt, Homo sapiens
  misc_RNA (1)...(19): siRNA sense strand
acagguggagucuggaauu

SEQ ID NO: 668986 - RNA, 19 nt, Homo sapiens
  misc_RNA (1)...(19): siRNA sense strand
gccagcauccuuaaucucu

SEQ ID NO: 668987 - RNA, 19 nt, Homo sapiens
  misc_RNA (1)...(19): siRNA sense strand
uguacagccagcauccuua

SEQ ID NO: 668988 - RNA, 19 nt, Homo sapiens
  misc_RNA (1)...(19): siRNA sense strand
ucucugugccaucagcaua

SEQ ID NO: 668989 - RNA, 19 nt, Homo sapiens
  misc_RNA (1)...(19): siRNA sense strand
cauccuggccaucgucuuc

SEQ ID NO: 668990 - RNA, 19 nt, Homo sapiens
  misc_RNA (1)...(19): siRNA sense strand
ccuacuaugcccucuccua

SEQ ID NO: 668991 - RNA, 19 nt, Homo sapiens
  misc_RNA (1)...(19): siRNA sense strand
cuguuuggcuuuaauacca

SEQ ID NO: 668992 - RNA, 19 nt, Homo sapiens
  misc_RNA (1)...(19): siRNA sense strand
gaagaaggcaacccaaaug

SEQ ID NO: 668993 - RNA, 19 nt, Homo sapiens
  misc_RNA (1)...(19): siRNA sense strand
gcaauggccuggugugcau

SEQ ID NO: 668994 - RNA, 19 nt, Homo sapiens
  misc_RNA (1)...(19): siRNA sense strand
gguggagucuggaauuuca

SEQ ID NO: 668995 - RNA, 19 nt, Homo sapiens
  misc_RNA (1)...(19): siRNA sense strand
guccugcccucuucuguuu

SEQ ID NO: 668996 - RNA, 19 nt, Homo sapiens
  misc_RNA (1)...(19): siRNA sense strand
gagaagaaggcaacccaaa

SEQ ID NO: 668997 - RNA, 19 nt, Homo sapiens
  misc_RNA (1)...(19): siRNA sense strand
guacuggccuuugcugugu

SEQ ID NO: 668998 - RNA, 19 nt, Homo sapiens
  misc_RNA (1)...(19): siRNA sense strand
gcauggcugugcugaagga

SEQ ID NO: 668999 - RNA, 19 nt, Homo sapiens
  misc_RNA (1)...(19): siRNA sense strand
guacagccagcauccuuaa

SEQ ID NO: 669000 - RNA, 19 nt, Homo sapiens
  misc_RNA (1)...(19): siRNA sense strand
ccucuucuguuuggcuuua

SEQ ID NO: 669001 - RNA, 19 nt, Homo sapiens
  misc_RNA (1)...(19): siRNA sense strand
cgacauggcugggcuacgu

SEQ ID NO: 669002 - RNA, 19 nt, Homo sapiens
  misc_RNA (1)...(19): siRNA sense strand
cagguggagucuggaauuu

SEQ ID NO: 669003 - RNA, 19 nt, Homo sapiens
  misc_RNA (1)...(19): siRNA sense strand
uggcugggcuacgugaaua

SEQ ID NO: 669004 - RNA, 19 nt, Homo sapiens
  misc_RNA (1)...(19): siRNA sense strand
gugcauggcugugcugaag

SEQ ID NO: 669005 - RNA, 19 nt, Homo sapiens
  misc_RNA (1)...(19): siRNA sense strand
uggcugcccuucuucuuga

SEQ ID NO: 669006 - RNA, 19 nt, Homo sapiens
  misc_RNA (1)...(19): siRNA sense strand
gacuaccaccaacuacuua

SEQ ID NO: 669007 - RNA, 19 nt, Homo sapiens
  misc_RNA (1)...(19): siRNA sense strand
cgcauuugcugugauguuu

SEQ ID NO: 669008 - RNA, 19 nt, Homo sapiens
  misc_RNA (1)...(19): siRNA sense strand
ugacccauguucucaauac

SEQ ID NO: 669009 - RNA, 19 nt, Homo sapiens
  misc_RNA (1)...(19): siRNA sense strand
ggucaugcccguucacuac

SEQ ID NO: 669010 - RNA, 19 nt, Homo sapiens
  misc_RNA (1)...(19): siRNA sense strand
cagcauccuuaaucucugu

SEQ ID NO: 669011 - RNA, 19 nt, Homo sapiens
  misc_RNA (1)...(19): siRNA sense strand
gcuguguccugcccucuuc

SEQ ID NO: 669012 - RNA, 19 nt, Homo sapiens
  misc_RNA (1)...(19): siRNA sense strand
cuuaaucucugugccauca

SEQ ID NO: 669013 - RNA, 19 nt, Homo sapiens
  misc_RNA (1)...(19): siRNA sense strand
ugaguagccaccugaacua

SEQ ID NO: 669014 - RNA, 19 nt, Homo sapiens
  misc_RNA (1)...(19): siRNA sense strand
ggugaugcccuggguggua

SEQ ID NO: 669015 - RNA, 19 nt, Homo sapiens
  misc_RNA (1)...(19): siRNA sense strand
cacccuggaugucaugaug

SEQ ID NO: 669016 - RNA, 19 nt, Homo sapiens
  misc_RNA (1)...(19): siRNA sense strand
agaagaaggcaacccaaau

SEQ ID NO: 669017 - RNA, 19 nt, Homo sapiens
  misc_RNA (1)...(19): siRNA sense strand
gugaugcccugggugguau

SEQ ID NO: 669018 - RNA, 19 nt, Homo sapiens
  misc_RNA (1)...(19): siRNA sense strand
cagccagcauccuuaaucu

SEQ ID NO: 669019 - RNA, 19 nt, Homo sapiens
  misc_RNA (1)...(19): siRNA sense strand
ccaucagcauagacaggua

SEQ ID NO: 669020 - RNA, 19 nt, Homo sapiens
  misc_RNA (1)...(19): siRNA sense strand
uggaauuucagccgcauuu

SEQ ID NO: 669021 - RNA, 19 nt, Homo sapiens
  misc_RNA (1)...(19): siRNA sense strand
acuaugcccucuccuacug

SEQ ID NO: 669022 - RNA, 19 nt, Homo sapiens
  misc_RNA (1)...(19): siRNA sense strand
agacuaccaccaacuacuu

SEQ ID NO: 669023 - RNA, 19 nt, Homo sapiens
  misc_RNA (1)...(19): siRNA sense strand
gaauuucagccgcauuugc

SEQ ID NO: 669024 - RNA, 19 nt, Homo sapiens
  misc_RNA (1)...(19): siRNA sense strand
ccgcccacaugccuacuau

SEQ ID NO: 669025 - RNA, 19 nt, Homo sapiens
  misc_RNA (1)...(19): siRNA sense strand
ggaauuucagccgcauuug

SEQ ID NO: 669026 - RNA, 19 nt, Homo sapiens
  misc_RNA (1)...(19): siRNA sense strand
cagcauggcacgggacaga

SEQ ID NO: 669027 - RNA, 19 nt, Homo sapiens
  misc_RNA (1)...(19): siRNA sense strand
gccaucgucuucggcaaug

SEQ ID NO: 669028 - RNA, 19 nt, Homo sapiens
  misc_RNA (1)...(19): siRNA sense strand
acagguggagucuggaauu

SEQ ID NO: 669029 - RNA, 19 nt, Homo sapiens
  misc_RNA (1)...(19): siRNA sense strand
gccagcauccuuaaucucu

SEQ ID NO: 669030 - RNA, 19 nt, Homo sapiens
  misc_RNA (1)...(19): siRNA sense strand
uguacagccagcauccuua

SEQ ID NO: 669031 - RNA, 19 nt, Homo sapiens
  misc_RNA (1)...(19): siRNA sense strand
ucucugugccaucagcaua

SEQ ID NO: 669032 - RNA, 19 nt, Homo sapiens
  misc_RNA (1)...(19): siRNA sense strand
cauccuggccaucgucuuc

SEQ ID NO: 669033 - RNA, 19 nt, Homo sapiens
  misc_RNA (1)...(19): siRNA sense strand
ccuacuaugcccucuccua

SEQ ID NO: 669034 - RNA, 19 nt, Homo sapiens
  misc_RNA (1)...(19): siRNA sense strand
cuguuuggcuuuaauacca

SEQ ID NO: 669035 - RNA, 19 nt, Homo sapiens
  misc_RNA (1)...(19): siRNA sense strand
gaagaaggcaacccaaaug

SEQ ID NO: 669036 - RNA, 19 nt, Homo sapiens
  misc_RNA (1)...(19): siRNA sense strand
gcaauggccuggugugcau

SEQ ID NO: 669037 - RNA, 19 nt, Homo sapiens
  misc_RNA (1)...(19): siRNA sense strand
gguggagucuggaauuuca

SEQ ID NO: 669038 - RNA, 19 nt, Homo sapiens
  misc_RNA (1)...(19): siRNA sense strand
guccugcccucuucuguuu

SEQ ID NO: 669039 - RNA, 19 nt, Homo sapiens
  misc_RNA (1)...(19): siRNA sense strand
gagaagaaggcaacccaaa

SEQ ID NO: 669040 - RNA, 19 nt, Homo sapiens
  misc_RNA (1)...(19): siRNA sense strand
guacuggccuuugcugugu

SEQ ID NO: 669041 - RNA, 19 nt, Homo sapiens
  misc_RNA (1)...(19): siRNA sense strand
gcauggcugugcugaagga

SEQ ID NO: 669042 - RNA, 19 nt, Homo sapiens
  misc_RNA (1)...(19): siRNA sense strand
guacagccagcauccuuaa

SEQ ID NO: 669043 - RNA, 19 nt, Homo sapiens
  misc_RNA (1)...(19): siRNA sense strand
ccucuucuguuuggcuuua

SEQ ID NO: 669044 - RNA, 19 nt, Homo sapiens
  misc_RNA (1)...(19): siRNA sense strand
cgacauggcugggcuacgu

SEQ ID NO: 669045 - RNA, 19 nt, Homo sapiens
  misc_RNA (1)...(19): siRNA sense strand
cagguggagucuggaauuu

SEQ ID NO: 669046 - RNA, 19 nt, Homo sapiens
  misc_RNA (1)...(19): siRNA sense strand
uggcugggcuacgugaaua

SEQ ID NO: 669047 - RNA, 19 nt, Homo sapiens
  misc_RNA (1)...(19): siRNA sense strand
gugcauggcugugcugaag

SEQ ID NO: 669048 - RNA, 19 nt, Homo sapiens
  misc_RNA (1)...(19): siRNA sense strand
uggcugcccuucuucuuga

SEQ ID NO: 669049 - RNA, 19 nt, Homo sapiens
  misc_RNA (1)...(19): siRNA sense strand
gacuaccaccaacuacuua

SEQ ID NO: 669050 - RNA, 19 nt, Homo sapiens
  misc_RNA (1)...(19): siRNA sense strand
cgcauuugcugugauguuu

SEQ ID NO: 669051 - RNA, 19 nt, Homo sapiens
  misc_RNA (1)...(19): siRNA sense strand
ugacccauguucucaauac

SEQ ID NO: 669052 - RNA, 19 nt, Homo sapiens
  misc_RNA (1)...(19): siRNA sense strand
ggucaugcccguucacuac

SEQ ID NO: 669053 - RNA, 19 nt, Homo sapiens
  misc_RNA (1)...(19): siRNA sense strand
cagcauccuuaaucucugu

SEQ ID NO: 669054 - RNA, 19 nt, Homo sapiens
  misc_RNA (1)...(19): siRNA sense strand
gcuguguccugcccucuuc

SEQ ID NO: 669055 - RNA, 19 nt, Homo sapiens
  misc_RNA (1)...(19): siRNA sense strand
cuuaaucucugugccauca

SEQ ID NO: 669056 - RNA, 19 nt, Homo sapiens
  misc_RNA (1)...(19): siRNA sense strand
ugaguagccaccugaacua

SEQ ID NO: 669057 - RNA, 19 nt, Homo sapiens
  misc_RNA (1)...(19): siRNA sense strand
ggugaugcccuggguggua

SEQ ID NO: 669058 - RNA, 19 nt, Homo sapiens
  misc_RNA (1)...(19): siRNA sense strand
cacccuggaugucaugaug

SEQ ID NO: 669059 - RNA, 19 nt, Homo sapiens
  misc_RNA (1)...(19): siRNA sense strand
agaagaaggcaacccaaau

SEQ ID NO: 669060 - RNA, 19 nt, Homo sapiens
  misc_RNA (1)...(19): siRNA sense strand
gugaugcccugggugguau

SEQ ID NO: 669061 - RNA, 19 nt, Homo sapiens
  misc_RNA (1)...(19): siRNA sense strand
cagccagcauccuuaaucu

SEQ ID NO: 669062 - RNA, 19 nt, Homo sapiens
  misc_RNA (1)...(19): siRNA sense strand
ccaucagcauagacaggua

SEQ ID NO: 669063 - RNA, 19 nt, Homo sapiens
  misc_RNA (1)...(19): siRNA sense strand
uggaauuucagccgcauuu

SEQ ID NO: 669064 - RNA, 19 nt, Homo sapiens
  misc_RNA (1)...(19): siRNA sense strand
acuaugcccucuccuacug

SEQ ID NO: 669065 - RNA, 19 nt, Homo sapiens
  misc_RNA (1)...(19): siRNA sense strand
agacuaccaccaacuacuu

SEQ ID NO: 669066 - RNA, 19 nt, Homo sapiens
  misc_RNA (1)...(19): siRNA sense strand
gaauuucagccgcauuugc

SEQ ID NO: 669067 - RNA, 19 nt, Homo sapiens
  misc_RNA (1)...(19): siRNA sense strand
ccgcccacaugccuacuau

SEQ ID NO: 669068 - RNA, 19 nt, Homo sapiens
  misc_RNA (1)...(19): siRNA sense strand
ggaauuucagccgcauuug

SEQ ID NO: 669069 - RNA, 19 nt, Homo sapiens
  misc_RNA (1)...(19): siRNA sense strand
cagcauggcacgggacaga

SEQ ID NO: 669070 - RNA, 19 nt, Homo sapiens
  misc_RNA (1)...(19): siRNA sense strand
gccaucgucuucggcaaug

SEQ ID NO: 669071 - RNA, 19 nt, Homo sapiens
  misc_RNA (1)...(19): siRNA sense strand
acagguggagucuggaauu

SEQ ID NO: 669072 - RNA, 19 nt, Homo sapiens
  misc_RNA (1)...(19): siRNA sense strand
gccagcauccuuaaucucu

SEQ ID NO: 669073 - RNA, 19 nt, Homo sapiens
  misc_RNA (1)...(19): siRNA sense strand
uguacagccagcauccuua

SEQ ID NO: 669074 - RNA, 19 nt, Homo sapiens
  misc_RNA (1)...(19): siRNA sense strand
ucucugugccaucagcaua

SEQ ID NO: 669075 - RNA, 19 nt, Homo sapiens
  misc_RNA (1)...(19): siRNA sense strand
cauccuggccaucgucuuc

SEQ ID NO: 669076 - RNA, 19 nt, Homo sapiens
  misc_RNA (1)...(19): siRNA sense strand
ccuacuaugcccucuccua

SEQ ID NO: 669077 - RNA, 19 nt, Homo sapiens
  misc_RNA (1)...(19): siRNA sense strand
cuguuuggcuuuaauacca

SEQ ID NO: 669078 - RNA, 19 nt, Homo sapiens
  misc_RNA (1)...(19): siRNA sense strand
gcaauggccuggugugcau

SEQ ID NO: 669079 - RNA, 19 nt, Homo sapiens
  misc_RNA (1)...(19): siRNA sense strand
gguggagucuggaauuuca

SEQ ID NO: 669080 - RNA, 19 nt, Homo sapiens
  misc_RNA (1)...(19): siRNA sense strand
guccugcccucuucuguuu

SEQ ID NO: 669081 - RNA, 19 nt, Homo sapiens
  misc_RNA (1)...(19): siRNA sense strand
guacuggccuuugcugugu

SEQ ID NO: 669082 - RNA, 19 nt, Homo sapiens
  misc_RNA (1)...(19): siRNA sense strand
gcauggcugugcugaagga

SEQ ID NO: 669083 - RNA, 19 nt, Homo sapiens
  misc_RNA (1)...(19): siRNA sense strand
guacagccagcauccuuaa

SEQ ID NO: 669084 - RNA, 19 nt, Homo sapiens
  misc_RNA (1)...(19): siRNA sense strand
ccucuucuguuuggcuuua

SEQ ID NO: 669085 - RNA, 19 nt, Homo sapiens
  misc_RNA (1)...(19): siRNA sense strand
cagguggagucuggaauuu

SEQ ID NO: 669086 - RNA, 19 nt, Homo sapiens
  misc_RNA (1)...(19): siRNA sense strand
gugcauggcugugcugaag

SEQ ID NO: 669087 - RNA, 19 nt, Homo sapiens
  misc_RNA (1)...(19): siRNA sense strand
gacuaccaccaacuacuua

SEQ ID NO: 669088 - RNA, 19 nt, Homo sapiens
  misc_RNA (1)...(19): siRNA sense strand
cgcauuugcugugauguuu

SEQ ID NO: 669089 - RNA, 19 nt, Homo sapiens
  misc_RNA (1)...(19): siRNA sense strand
ggucaugcccguucacuac

SEQ ID NO: 669090 - RNA, 19 nt, Homo sapiens
  misc_RNA (1)...(19): siRNA sense strand
cagcauccuuaaucucugu

SEQ ID NO: 669091 - RNA, 19 nt, Homo sapiens
  misc_RNA (1)...(19): siRNA sense strand
gcuguguccugcccucuuc

SEQ ID NO: 669092 - RNA, 19 nt, Homo sapiens
  misc_RNA (1)...(19): siRNA sense strand
cuuaaucucugugccauca

SEQ ID NO: 669093 - RNA, 19 nt, Homo sapiens
  misc_RNA (1)...(19): siRNA sense strand
ugaguagccaccugaacua

SEQ ID NO: 669094 - RNA, 19 nt, Homo sapiens
  misc_RNA (1)...(19): siRNA sense strand
ggugaugcccuggguggua

SEQ ID NO: 669095 - RNA, 19 nt, Homo sapiens
  misc_RNA (1)...(19): siRNA sense strand
cacccuggaugucaugaug

SEQ ID NO: 669096 - RNA, 19 nt, Homo sapiens
  misc_RNA (1)...(19): siRNA sense strand
gugaugcccugggugguau

SEQ ID NO: 669097 - RNA, 19 nt, Homo sapiens
  misc_RNA (1)...(19): siRNA sense strand
cagccagcauccuuaaucu

SEQ ID NO: 669098 - RNA, 19 nt, Homo sapiens
  misc_RNA (1)...(19): siRNA sense strand
ccaucagcauagacaggua

SEQ ID NO: 669099 - RNA, 19 nt, Homo sapiens
  misc_RNA (1)...(19): siRNA sense strand
agacuaccaccaacuacuu

SEQ ID NO: 669100 - RNA, 19 nt, Homo sapiens
  misc_RNA (1)...(19): siRNA sense strand
acuaugcccucuccuacug

SEQ ID NO: 669101 - RNA, 19 nt, Homo sapiens
  misc_RNA (1)...(19): siRNA sense strand
uggaauuucagccgcauuu

SEQ ID NO: 669102 - RNA, 19 nt, Homo sapiens
  misc_RNA (1)...(19): siRNA sense strand
gaauuucagccgcauuugc

SEQ ID NO: 669103 - RNA, 19 nt, Homo sapiens
  misc_RNA (1)...(19): siRNA sense strand
ccgcccacaugccuacuau

SEQ ID NO: 669104 - RNA, 19 nt, Homo sapiens
  misc_RNA (1)...(19): siRNA sense strand
ggaauuucagccgcauuug

SEQ ID NO: 669105 - RNA, 19 nt, Homo sapiens
  misc_RNA (1)...(19): siRNA sense strand
cagcauggcacgggacaga

SEQ ID NO: 669106 - RNA, 19 nt, Homo sapiens
  misc_RNA (1)...(19): siRNA sense strand
gccaucgucuucggcaaug

SEQ ID NO: 669107 - RNA, 19 nt, Homo sapiens
  misc_RNA (1)...(19): siRNA sense strand
acagguggagucuggaauu

SEQ ID NO: 669108 - RNA, 19 nt, Homo sapiens
  misc_RNA (1)...(19): siRNA sense strand
gccagcauccuuaaucucu

SEQ ID NO: 669109 - RNA, 19 nt, Homo sapiens
  misc_RNA (1)...(19): siRNA sense strand
uguacagccagcauccuua

SEQ ID NO: 669110 - RNA, 19 nt, Homo sapiens
  misc_RNA (1)...(19): siRNA sense strand
cauccuggccaucgucuuc

SEQ ID NO: 669111 - RNA, 19 nt, Homo sapiens
  misc_RNA (1)...(19): siRNA sense strand
ucucugugccaucagcaua

SEQ ID NO: 669112 - RNA, 19 nt, Homo sapiens
  misc_RNA (1)...(19): siRNA sense strand
ccuacuaugcccucuccua

SEQ ID NO: 669113 - RNA, 19 nt, Homo sapiens
  misc_RNA (1)...(19): siRNA sense strand
cuguuuggcuuuaauacca

SEQ ID NO: 669114 - RNA, 19 nt, Homo sapiens
  misc_RNA (1)...(19): siRNA sense strand
gaagaaggcaacccaaaug

SEQ ID NO: 669115 - RNA, 19 nt, Homo sapiens
  misc_RNA (1)...(19): siRNA sense strand
gcaauggccuggugugcau

SEQ ID NO: 669116 - RNA, 19 nt, Homo sapiens
  misc_RNA (1)...(19): siRNA sense strand
gguggagucuggaauuuca

SEQ ID NO: 669117 - RNA, 19 nt, Homo sapiens
  misc_RNA (1)...(19): siRNA sense strand
guccugcccucuucuguuu

SEQ ID NO: 669118 - RNA, 19 nt, Homo sapiens
  misc_RNA (1)...(19): siRNA sense strand
gagaagaaggcaacccaaa

SEQ ID NO: 669119 - RNA, 19 nt, Homo sapiens
  misc_RNA (1)...(19): siRNA sense strand
guacuggccuuugcugugu

SEQ ID NO: 669120 - RNA, 19 nt, Homo sapiens
  misc_RNA (1)...(19): siRNA sense strand
gcauggcugugcugaagga

SEQ ID NO: 669121 - RNA, 19 nt, Homo sapiens
  misc_RNA (1)...(19): siRNA sense strand
guacagccagcauccuuaa

SEQ ID NO: 669122 - RNA, 19 nt, Homo sapiens
  misc_RNA (1)...(19): siRNA sense strand
ccucuucuguuuggcuuua

SEQ ID NO: 669123 - RNA, 19 nt, Homo sapiens
  misc_RNA (1)...(19): siRNA sense strand
cgacauggcugggcuacgu

SEQ ID NO: 669124 - RNA, 19 nt, Homo sapiens
  misc_RNA (1)...(19): siRNA sense strand
cagguggagucuggaauuu

SEQ ID NO: 669125 - RNA, 19 nt, Homo sapiens
  misc_RNA (1)...(19): siRNA sense strand
uggcugggcuacgugaaua

SEQ ID NO: 669126 - RNA, 19 nt, Homo sapiens
  misc_RNA (1)...(19): siRNA sense strand
gugcauggcugugcugaag

SEQ ID NO: 669127 - RNA, 19 nt, Homo sapiens
  misc_RNA (1)...(19): siRNA sense strand
uggcugcccuucuucuuga

SEQ ID NO: 669128 - RNA, 19 nt, Homo sapiens
  misc_RNA (1)...(19): siRNA sense strand
gacuaccaccaacuacuua

SEQ ID NO: 669129 - RNA, 19 nt, Homo sapiens
  misc_RNA (1)...(19): siRNA sense strand
cgcauuugcugugauguuu

SEQ ID NO: 669130 - RNA, 19 nt, Homo sapiens
  misc_RNA (1)...(19): siRNA sense strand
ugacccauguucucaauac

SEQ ID NO: 669131 - RNA, 19 nt, Homo sapiens
  misc_RNA (1)...(19): siRNA sense strand
ggucaugcccguucacuac

SEQ ID NO: 669132 - RNA, 19 nt, Homo sapiens
  misc_RNA (1)...(19): siRNA sense strand
cagcauccuuaaucucugu

SEQ ID NO: 669133 - RNA, 19 nt, Homo sapiens
  misc_RNA (1)...(19): siRNA sense strand
gcuguguccugcccucuuc

SEQ ID NO: 669134 - RNA, 19 nt, Homo sapiens
  misc_RNA (1)...(19): siRNA sense strand
cuuaaucucugugccauca

SEQ ID NO: 669135 - RNA, 19 nt, Homo sapiens
  misc_RNA (1)...(19): siRNA sense strand
ugaguagccaccugaacua

SEQ ID NO: 669136 - RNA, 19 nt, Homo sapiens
  misc_RNA (1)...(19): siRNA sense strand
ggugaugcccuggguggua

SEQ ID NO: 669137 - RNA, 19 nt, Homo sapiens
  misc_RNA (1)...(19): siRNA sense strand
cacccuggaugucaugaug

SEQ ID NO: 669138 - RNA, 19 nt, Homo sapiens
  misc_RNA (1)...(19): siRNA sense strand
agaagaaggcaacccaaau

SEQ ID NO: 669139 - RNA, 19 nt, Homo sapiens
  misc_RNA (1)...(19): siRNA sense strand
gugaugcccugggugguau

SEQ ID NO: 669140 - RNA, 19 nt, Homo sapiens
  misc_RNA (1)...(19): siRNA sense strand
cagccagcauccuuaaucu

SEQ ID NO: 669141 - RNA, 19 nt, Homo sapiens
  misc_RNA (1)...(19): siRNA sense strand
ccaucagcauagacaggua

SEQ ID NO: 669142 - RNA, 19 nt, Homo sapiens
  misc_RNA (1)...(19): siRNA sense strand
uggaauuucagccgcauuu

SEQ ID NO: 669143 - RNA, 19 nt, Homo sapiens
  misc_RNA (1)...(19): siRNA sense strand
acuaugcccucuccuacug

SEQ ID NO: 669144 - RNA, 19 nt, Homo sapiens
  misc_RNA (1)...(19): siRNA sense strand
agacuaccaccaacuacuu

SEQ ID NO: 669145 - RNA, 19 nt, Homo sapiens
  misc_RNA (1)...(19): siRNA sense strand
gaauuucagccgcauuugc

SEQ ID NO: 669146 - RNA, 19 nt, Homo sapiens
  misc_RNA (1)...(19): siRNA sense strand
ccgcccacaugccuacuau

SEQ ID NO: 669147 - RNA, 19 nt, Homo sapiens
  misc_RNA (1)...(19): siRNA sense strand
ggaauuucagccgcauuug

SEQ ID NO: 669148 - RNA, 19 nt, Homo sapiens
  misc_RNA (1)...(19): siRNA sense strand
cagcauggcacgggacaga

SEQ ID NO: 669149 - RNA, 19 nt, Homo sapiens
  misc_RNA (1)...(19): siRNA sense strand
gccaucgucuucggcaaug

SEQ ID NO: 669150 - RNA, 19 nt, Homo sapiens
  misc_RNA (1)...(19): siRNA sense strand
acagguggagucuggaauu

SEQ ID NO: 669151 - RNA, 19 nt, Homo sapiens
  misc_RNA (1)...(19): siRNA sense strand
gccagcauccuuaaucucu

SEQ ID NO: 669152 - RNA, 19 nt, Homo sapiens
  misc_RNA (1)...(19): siRNA sense strand
uguacagccagcauccuua

SEQ ID NO: 669153 - RNA, 19 nt, Homo sapiens
  misc_RNA (1)...(19): siRNA sense strand
ucucugugccaucagcaua

SEQ ID NO: 669154 - RNA, 19 nt, Homo sapiens
  misc_RNA (1)...(19): siRNA sense strand
cauccuggccaucgucuuc

SEQ ID NO: 669155 - RNA, 19 nt, Homo sapiens
  misc_RNA (1)...(19): siRNA sense strand
ccuacuaugcccucuccua

SEQ ID NO: 669156 - RNA, 19 nt, Homo sapiens
  misc_RNA (1)...(19): siRNA sense strand
cuguuuggcuuuaauacca

SEQ ID NO: 669157 - RNA, 19 nt, Homo sapiens
  misc_RNA (1)...(19): siRNA sense strand
gaagaaggcaacccaaaug

SEQ ID NO: 669158 - RNA, 19 nt, Homo sapiens
  misc_RNA (1)...(19): siRNA sense strand
gcaauggccuggugugcau

SEQ ID NO: 669159 - RNA, 19 nt, Homo sapiens
  misc_RNA (1)...(19): siRNA sense strand
gguggagucuggaauuuca

SEQ ID NO: 669160 - RNA, 19 nt, Homo sapiens
  misc_RNA (1)...(19): siRNA sense strand
guccugcccucuucuguuu

SEQ ID NO: 669161 - RNA, 19 nt, Homo sapiens
  misc_RNA (1)...(19): siRNA sense strand
gagaagaaggcaacccaaa

SEQ ID NO: 669162 - RNA, 19 nt, Homo sapiens
  misc_RNA (1)...(19): siRNA sense strand
guacuggccuuugcugugu

SEQ ID NO: 669163 - RNA, 19 nt, Homo sapiens
  misc_RNA (1)...(19): siRNA sense strand
gcauggcugugcugaagga

SEQ ID NO: 669164 - RNA, 19 nt, Homo sapiens
  misc_RNA (1)...(19): siRNA sense strand
guacagccagcauccuuaa

SEQ ID NO: 669165 - RNA, 19 nt, Homo sapiens
  misc_RNA (1)...(19): siRNA sense strand
ccucuucuguuuggcuuua

SEQ ID NO: 669166 - RNA, 19 nt, Homo sapiens
  misc_RNA (1)...(19): siRNA sense strand
cgacauggcugggcuacgu

SEQ ID NO: 669167 - RNA, 19 nt, Homo sapiens
  misc_RNA (1)...(19): siRNA sense strand
cagguggagucuggaauuu

SEQ ID NO: 669168 - RNA, 19 nt, Homo sapiens
  misc_RNA (1)...(19): siRNA sense strand
uggcugggcuacgugaaua

SEQ ID NO: 669169 - RNA, 19 nt, Homo sapiens
  misc_RNA (1)...(19): siRNA sense strand
gugcauggcugugcugaag

SEQ ID NO: 669170 - RNA, 19 nt, Homo sapiens
  misc_RNA (1)...(19): siRNA sense strand
uggcugcccuucuucuuga

SEQ ID NO: 669171 - RNA, 19 nt, Homo sapiens
  misc_RNA (1)...(19): siRNA sense strand
gacuaccaccaacuacuua

SEQ ID NO: 669172 - RNA, 19 nt, Homo sapiens
  misc_RNA (1)...(19): siRNA sense strand
cgcauuugcugugauguuu

SEQ ID NO: 669173 - RNA, 19 nt, Homo sapiens
  misc_RNA (1)...(19): siRNA sense strand
ugacccauguucucaauac

SEQ ID NO: 669174 - RNA, 19 nt, Homo sapiens
  misc_RNA (1)...(19): siRNA sense strand
ggucaugcccguucacuac

SEQ ID NO: 669175 - RNA, 19 nt, Homo sapiens
  misc_RNA (1)...(19): siRNA sense strand
cagcauccuuaaucucugu

SEQ ID NO: 669176 - RNA, 19 nt, Homo sapiens
  misc_RNA (1)...(19): siRNA sense strand
gcuguguccugcccucuuc

SEQ ID NO: 669177 - RNA, 19 nt, Homo sapiens
  misc_RNA (1)...(19): siRNA sense strand
cuuaaucucugugccauca

SEQ ID NO: 669178 - RNA, 19 nt, Homo sapiens
  misc_RNA (1)...(19): siRNA sense strand
ugaguagccaccugaacua

SEQ ID NO: 669179 - RNA, 19 nt, Homo sapiens
  misc_RNA (1)...(19): siRNA sense strand
ggugaugcccuggguggua

SEQ ID NO: 669180 - RNA, 19 nt, Homo sapiens
  misc_RNA (1)...(19): siRNA sense strand
cacccuggaugucaugaug

SEQ ID NO: 669181 - RNA, 19 nt, Homo sapiens
  misc_RNA (1)...(19): siRNA sense strand
agaagaaggcaacccaaau

SEQ ID NO: 669182 - RNA, 19 nt, Homo sapiens
  misc_RNA (1)...(19): siRNA sense strand
gugaugcccugggugguau

SEQ ID NO: 669183 - RNA, 19 nt, Homo sapiens
  misc_RNA (1)...(19): siRNA sense strand
cagccagcauccuuaaucu

SEQ ID NO: 669184 - RNA, 19 nt, Homo sapiens
  misc_RNA (1)...(19): siRNA sense strand
ccaucagcauagacaggua

SEQ ID NO: 669185 - RNA, 19 nt, Homo sapiens
  misc_RNA (1)...(19): siRNA sense strand
uggaauuucagccgcauuu

SEQ ID NO: 669186 - RNA, 19 nt, Homo sapiens
  misc_RNA (1)...(19): siRNA sense strand
acuaugcccucuccuacug

SEQ ID NO: 669187 - RNA, 19 nt, Homo sapiens
  misc_RNA (1)...(19): siRNA sense strand
agacuaccaccaacuacuu

SEQ ID NO: 669188 - RNA, 19 nt, Homo sapiens
  misc_RNA (1)...(19): siRNA sense strand
gaauuucagccgcauuugc

SEQ ID NO: 669189 - RNA, 19 nt, Homo sapiens
  misc_RNA (1)...(19): siRNA sense strand
ccgcccacaugccuacuau

SEQ ID NO: 669190 - RNA, 19 nt, Homo sapiens
  misc_RNA (1)...(19): siRNA sense strand
ggaauuucagccgcauuug

SEQ ID NO: 669191 - RNA, 19 nt, Homo sapiens
  misc_RNA (1)...(19): siRNA sense strand
cagcauggcacgggacaga

SEQ ID NO: 669192 - RNA, 19 nt, Homo sapiens
  misc_RNA (1)...(19): siRNA sense strand
gccaucgucuucggcaaug

SEQ ID NO: 669193 - RNA, 19 nt, Homo sapiens
  misc_RNA (1)...(19): siRNA sense strand
acagguggagucuggaauu

SEQ ID NO: 669194 - RNA, 19 nt, Homo sapiens
  misc_RNA (1)...(19): siRNA sense strand
gccagcauccuuaaucucu

SEQ ID NO: 669195 - RNA, 19 nt, Homo sapiens
  misc_RNA (1)...(19): siRNA sense strand
uguacagccagcauccuua

SEQ ID NO: 669196 - RNA, 19 nt, Homo sapiens
  misc_RNA (1)...(19): siRNA sense strand
ucucugugccaucagcaua

SEQ ID NO: 669197 - RNA, 19 nt, Homo sapiens
  misc_RNA (1)...(19): siRNA sense strand
cauccuggccaucgucuuc

SEQ ID NO: 669198 - RNA, 19 nt, Homo sapiens
  misc_RNA (1)...(19): siRNA sense strand
ccuacuaugcccucuccua

SEQ ID NO: 669199 - RNA, 19 nt, Homo sapiens
  misc_RNA (1)...(19): siRNA sense strand
cuguuuggcuuuaauacca

SEQ ID NO: 669200 - RNA, 19 nt, Homo sapiens
  misc_RNA (1)...(19): siRNA sense strand
gaagaaggcaacccaaaug

SEQ ID NO: 669201 - RNA, 19 nt, Homo sapiens
  misc_RNA (1)...(19): siRNA sense strand
gcaauggccuggugugcau

SEQ ID NO: 669202 - RNA, 19 nt, Homo sapiens
  misc_RNA (1)...(19): siRNA sense strand
gguggagucuggaauuuca

SEQ ID NO: 669203 - RNA, 19 nt, Homo sapiens
  misc_RNA (1)...(19): siRNA sense strand
guccugcccucuucuguuu

SEQ ID NO: 669204 - RNA, 19 nt, Homo sapiens
  misc_RNA (1)...(19): siRNA sense strand
gagaagaaggcaacccaaa

SEQ ID NO: 669205 - RNA, 19 nt, Homo sapiens
  misc_RNA (1)...(19): siRNA sense strand
guacuggccuuugcugugu

SEQ ID NO: 669206 - RNA, 19 nt, Homo sapiens
  misc_RNA (1)...(19): siRNA sense strand
gcauggcugugcugaagga

SEQ ID NO: 669207 - RNA, 19 nt, Homo sapiens
  misc_RNA (1)...(19): siRNA sense strand
guacagccagcauccuuaa

SEQ ID NO: 669208 - RNA, 19 nt, Homo sapiens
  misc_RNA (1)...(19): siRNA sense strand
ccucuucuguuuggcuuua

SEQ ID NO: 669209 - RNA, 19 nt, Homo sapiens
  misc_RNA (1)...(19): siRNA sense strand
cgacauggcugggcuacgu

SEQ ID NO: 669210 - RNA, 19 nt, Homo sapiens
  misc_RNA (1)...(19): siRNA sense strand
cagguggagucuggaauuu

SEQ ID NO: 669211 - RNA, 19 nt, Homo sapiens
  misc_RNA (1)...(19): siRNA sense strand
uggcugggcuacgugaaua

SEQ ID NO: 669212 - RNA, 19 nt, Homo sapiens
  misc_RNA (1)...(19): siRNA sense strand
gugcauggcugugcugaag

SEQ ID NO: 669213 - RNA, 19 nt, Homo sapiens
  misc_RNA (1)...(19): siRNA sense strand
uggcugcccuucuucuuga

SEQ ID NO: 669214 - RNA, 19 nt, Homo sapiens
  misc_RNA (1)...(19): siRNA sense strand
gacuaccaccaacuacuua

SEQ ID NO: 669215 - RNA, 19 nt, Homo sapiens
  misc_RNA (1)...(19): siRNA sense strand
cgcauuugcugugauguuu

SEQ ID NO: 669216 - RNA, 19 nt, Homo sapiens
  misc_RNA (1)...(19): siRNA sense strand
ugacccauguucucaauac

SEQ ID NO: 669217 - RNA, 19 nt, Homo sapiens
  misc_RNA (1)...(19): siRNA sense strand
ggucaugcccguucacuac

SEQ ID NO: 669218 - RNA, 19 nt, Homo sapiens
  misc_RNA (1)...(19): siRNA sense strand
cagcauccuuaaucucugu

SEQ ID NO: 669219 - RNA, 19 nt, Homo sapiens
  misc_RNA (1)...(19): siRNA sense strand
gcuguguccugcccucuuc

SEQ ID NO: 669220 - RNA, 19 nt, Homo sapiens
  misc_RNA (1)...(19): siRNA sense strand
cuuaaucucugugccauca

SEQ ID NO: 669221 - RNA, 19 nt, Homo sapiens
  misc_RNA (1)...(19): siRNA sense strand
ugaguagccaccugaacua

SEQ ID NO: 669222 - RNA, 19 nt, Homo sapiens
  misc_RNA (1)...(19): siRNA sense strand
ggugaugcccuggguggua

SEQ ID NO: 669223 - RNA, 19 nt, Homo sapiens
  misc_RNA (1)...(19): siRNA sense strand
cacccuggaugucaugaug

SEQ ID NO: 669224 - RNA, 19 nt, Homo sapiens
  misc_RNA (1)...(19): siRNA sense strand
agaagaaggcaacccaaau

SEQ ID NO: 669225 - RNA, 19 nt, Homo sapiens
  misc_RNA (1)...(19): siRNA sense strand
gugaugcccugggugguau

SEQ ID NO: 669226 - RNA, 19 nt, Homo sapiens
  misc_RNA (1)...(19): siRNA sense strand
cagccagcauccuuaaucu

SEQ ID NO: 669227 - RNA, 19 nt, Homo sapiens
  misc_RNA (1)...(19): siRNA sense strand
ccaucagcauagacaggua

SEQ ID NO: 669228 - RNA, 19 nt, Homo sapiens
  misc_RNA (1)...(19): siRNA sense strand
uggaauuucagccgcauuu

SEQ ID NO: 669229 - RNA, 19 nt, Homo sapiens
  misc_RNA (1)...(19): siRNA sense strand
acuaugcccucuccuacug

SEQ ID NO: 669230 - RNA, 19 nt, Homo sapiens
  misc_RNA (1)...(19): siRNA sense strand
agacuaccaccaacuacuu

SEQ ID NO: 669231 - RNA, 19 nt, Homo sapiens
  misc_RNA (1)...(19): siRNA sense strand
gaauuucagccgcauuugc

SEQ ID NO: 669232 - RNA, 19 nt, Homo sapiens
  misc_RNA (1)...(19): siRNA sense strand
ccgcccacaugccuacuau

SEQ ID NO: 669233 - RNA, 19 nt, Homo sapiens
  misc_RNA (1)...(19): siRNA sense strand
ggaauuucagccgcauuug

SEQ ID NO: 669234 - RNA, 19 nt, Homo sapiens
  misc_RNA (1)...(19): siRNA sense strand
cagcauggcacgggacaga

SEQ ID NO: 669235 - RNA, 19 nt, Homo sapiens
  misc_RNA (1)...(19): siRNA sense strand
gccaucgucuucggcaaug

SEQ ID NO: 669236 - RNA, 19 nt, Homo sapiens
  misc_RNA (1)...(19): siRNA sense strand
acagguggagucuggaauu

SEQ ID NO: 669237 - RNA, 19 nt, Homo sapiens
  misc_RNA (1)...(19): siRNA sense strand
gccagcauccuuaaucucu

SEQ ID NO: 669238 - RNA, 19 nt, Homo sapiens
  misc_RNA (1)...(19): siRNA sense strand
uguacagccagcauccuua

SEQ ID NO: 669239 - RNA, 19 nt, Homo sapiens
  misc_RNA (1)...(19): siRNA sense strand
ucucugugccaucagcaua

SEQ ID NO: 669240 - RNA, 19 nt, Homo sapiens
  misc_RNA (1)...(19): siRNA sense strand
cauccuggccaucgucuuc

SEQ ID NO: 669241 - RNA, 19 nt, Homo sapiens
  misc_RNA (1)...(19): siRNA sense strand
ccuacuaugcccucuccua

SEQ ID NO: 669242 - RNA, 19 nt, Homo sapiens
  misc_RNA (1)...(19): siRNA sense strand
cuguuuggcuuuaauacca

SEQ ID NO: 669243 - RNA, 19 nt, Homo sapiens
  misc_RNA (1)...(19): siRNA sense strand
gaaagucucugguguucuu

SEQ ID NO: 669244 - RNA, 19 nt, Homo sapiens
  misc_RNA (1)...(19): siRNA sense strand
gaaaagaagucacaagaaa

SEQ ID NO: 669245 - RNA, 19 nt, Homo sapiens
  misc_RNA (1)...(19): siRNA sense strand
gcaccugucuaugcuguua

SEQ ID NO: 669246 - RNA, 19 nt, Homo sapiens
  misc_RNA (1)...(19): siRNA sense strand
gcagacagcaguuggugua

SEQ ID NO: 669247 - RNA, 19 nt, Homo sapiens
  misc_RNA (1)...(19): siRNA sense strand
guacagcccugacuuucau

SEQ ID NO: 669248 - RNA, 19 nt, Homo sapiens
  misc_RNA (1)...(19): siRNA sense strand
ccuccuaccugaagaagaa

SEQ ID NO: 669249 - RNA, 19 nt, Homo sapiens
  misc_RNA (1)...(19): siRNA sense strand
gagagcaccguguuaaaga

SEQ ID NO: 669250 - RNA, 19 nt, Homo sapiens
  misc_RNA (1)...(19): siRNA sense strand
gaacugggccaugcuggaa

SEQ ID NO: 669251 - RNA, 19 nt, Homo sapiens
  misc_RNA (1)...(19): siRNA sense strand
gcacuccuguggucuacau

SEQ ID NO: 669252 - RNA, 19 nt, Homo sapiens
  misc_RNA (1)...(19): siRNA sense strand
gacagccucuucaucuaug

SEQ ID NO: 669253 - RNA, 19 nt, Homo sapiens
  misc_RNA (1)...(19): siRNA sense strand
gagcaccguguuaaagaaa

SEQ ID NO: 669254 - RNA, 19 nt, Homo sapiens
  misc_RNA (1)...(19): siRNA sense strand
aaagaaagucucugguguu

SEQ ID NO: 669255 - RNA, 19 nt, Homo sapiens
  misc_RNA (1)...(19): siRNA sense strand
gggaggcgacgcuaaguug

SEQ ID NO: 669256 - RNA, 19 nt, Homo sapiens
  misc_RNA (1)...(19): siRNA sense strand
gaagaagaaagaggagaga

SEQ ID NO: 669257 - RNA, 19 nt, Homo sapiens
  misc_RNA (1)...(19): siRNA sense strand
aagaaagucucugguguuc

SEQ ID NO: 669258 - RNA, 19 nt, Homo sapiens
  misc_RNA (1)...(19): siRNA sense strand
gggcaugccaagaagauga

SEQ ID NO: 669259 - RNA, 19 nt, Homo sapiens
  misc_RNA (1)...(19): siRNA sense strand
gcaccguguuaaagaaagu

SEQ ID NO: 669260 - RNA, 19 nt, Homo sapiens
  misc_RNA (1)...(19): siRNA sense strand
cgacgggcaugccaagaag

SEQ ID NO: 669261 - RNA, 19 nt, Homo sapiens
  misc_RNA (1)...(19): siRNA sense strand
gguguacagcccugacuuu

SEQ ID NO: 669262 - RNA, 19 nt, Homo sapiens
  misc_RNA (1)...(19): siRNA sense strand
gaugaugacagccucuuca

SEQ ID NO: 669263 - RNA, 19 nt, Homo sapiens
  misc_RNA (1)...(19): siRNA sense strand
gcugucaccuggccagucu

SEQ ID NO: 669264 - RNA, 19 nt, Homo sapiens
  misc_RNA (1)...(19): siRNA sense strand
agagcaccguguuaaagaa

SEQ ID NO: 669265 - RNA, 19 nt, Homo sapiens
  misc_RNA (1)...(19): siRNA sense strand
ugacagccucuucaucuau

SEQ ID NO: 669266 - RNA, 19 nt, Homo sapiens
  misc_RNA (1)...(19): siRNA sense strand
ccaagucuggcagcuauuu

SEQ ID NO: 669267 - RNA, 19 nt, Homo sapiens
  misc_RNA (1)...(19): siRNA sense strand
uggcagcuauuuugcuuua

SEQ ID NO: 669268 - RNA, 19 nt, Homo sapiens
  misc_RNA (1)...(19): siRNA sense strand
agcagcagcuagagaagaa

SEQ ID NO: 669269 - RNA, 19 nt, Homo sapiens
  misc_RNA (1)...(19): siRNA sense strand
ucgacaacgugaccuccua

SEQ ID NO: 669270 - RNA, 19 nt, Homo sapiens
  misc_RNA (1)...(19): siRNA sense strand
gacagcaguugguguacag

SEQ ID NO: 669271 - RNA, 19 nt, Homo sapiens
  misc_RNA (1)...(19): siRNA sense strand
ccugagagcaccguguuaa

SEQ ID NO: 669272 - RNA, 19 nt, Homo sapiens
  misc_RNA (1)...(19): siRNA sense strand
cuccaagucuggcagcuau

SEQ ID NO: 669273 - RNA, 19 nt, Homo sapiens
  misc_RNA (1)...(19): siRNA sense strand
gacgagaagauccgaguca

SEQ ID NO: 669274 - RNA, 19 nt, Homo sapiens
  misc_RNA (1)...(19): siRNA sense strand
gcuccaggacugccaggaa

SEQ ID NO: 669275 - RNA, 19 nt, Homo sapiens
  misc_RNA (1)...(19): siRNA sense strand
cuucagcagucucuacaag

SEQ ID NO: 669276 - RNA, 19 nt, Homo sapiens
  misc_RNA (1)...(19): siRNA sense strand
gcaucgaguccuucugcuu

SEQ ID NO: 669277 - RNA, 19 nt, Homo sapiens
  misc_RNA (1)...(19): siRNA sense strand
ugagagcaccguguuaaag

SEQ ID NO: 669278 - RNA, 19 nt, Homo sapiens
  misc_RNA (1)...(19): siRNA sense strand
agacagcaguugguguaca

SEQ ID NO: 669279 - RNA, 19 nt, Homo sapiens
  misc_RNA (1)...(19): siRNA sense strand
cagaaaagaagucacaaga

SEQ ID NO: 669280 - RNA, 19 nt, Homo sapiens
  misc_RNA (1)...(19): siRNA sense strand
gaccaguggcagucuguuc

SEQ ID NO: 669281 - RNA, 19 nt, Homo sapiens
  misc_RNA (1)...(19): siRNA sense strand
cguccaggauugcauucug

SEQ ID NO: 669282 - RNA, 19 nt, Homo sapiens
  misc_RNA (1)...(19): siRNA sense strand
gcguccaccuucuccaagu

SEQ ID NO: 669283 - RNA, 19 nt, Homo sapiens
  misc_RNA (1)...(19): siRNA sense strand
gaaagucucugguguucuu

SEQ ID NO: 669284 - RNA, 19 nt, Homo sapiens
  misc_RNA (1)...(19): siRNA sense strand
gaaaagaagucacaagaaa

SEQ ID NO: 669285 - RNA, 19 nt, Homo sapiens
  misc_RNA (1)...(19): siRNA sense strand
gcaccugucuaugcuguua

SEQ ID NO: 669286 - RNA, 19 nt, Homo sapiens
  misc_RNA (1)...(19): siRNA sense strand
gcagacagcaguuggugua

SEQ ID NO: 669287 - RNA, 19 nt, Homo sapiens
  misc_RNA (1)...(19): siRNA sense strand
guacagcccugacuuucau

SEQ ID NO: 669288 - RNA, 19 nt, Homo sapiens
  misc_RNA (1)...(19): siRNA sense strand
ccuccuaccugaagaagaa

SEQ ID NO: 669289 - RNA, 19 nt, Homo sapiens
  misc_RNA (1)...(19): siRNA sense strand
gagagcaccguguuaaaga

SEQ ID NO: 669290 - RNA, 19 nt, Homo sapiens
  misc_RNA (1)...(19): siRNA sense strand
gaacugggccaugcuggaa

SEQ ID NO: 669291 - RNA, 19 nt, Homo sapiens
  misc_RNA (1)...(19): siRNA sense strand
gcacuccuguggucuacau

SEQ ID NO: 669292 - RNA, 19 nt, Homo sapiens
  misc_RNA (1)...(19): siRNA sense strand
gacagccucuucaucuaug

SEQ ID NO: 669293 - RNA, 19 nt, Homo sapiens
  misc_RNA (1)...(19): siRNA sense strand
gagcaccguguuaaagaaa

SEQ ID NO: 669294 - RNA, 19 nt, Homo sapiens
  misc_RNA (1)...(19): siRNA sense strand
aaagaaagucucugguguu

SEQ ID NO: 669295 - RNA, 19 nt, Homo sapiens
  misc_RNA (1)...(19): siRNA sense strand
gggaggcgacgcuaaguug

SEQ ID NO: 669296 - RNA, 19 nt, Homo sapiens
  misc_RNA (1)...(19): siRNA sense strand
gaagaagaaagaggagaga

SEQ ID NO: 669297 - RNA, 19 nt, Homo sapiens
  misc_RNA (1)...(19): siRNA sense strand
aagaaagucucugguguuc

SEQ ID NO: 669298 - RNA, 19 nt, Homo sapiens
  misc_RNA (1)...(19): siRNA sense strand
gggcaugccaagaagauga

SEQ ID NO: 669299 - RNA, 19 nt, Homo sapiens
  misc_RNA (1)...(19): siRNA sense strand
gcaccguguuaaagaaagu

SEQ ID NO: 669300 - RNA, 19 nt, Homo sapiens
  misc_RNA (1)...(19): siRNA sense strand
cgacgggcaugccaagaag

SEQ ID NO: 669301 - RNA, 19 nt, Homo sapiens
  misc_RNA (1)...(19): siRNA sense strand
gguguacagcccugacuuu

SEQ ID NO: 669302 - RNA, 19 nt, Homo sapiens
  misc_RNA (1)...(19): siRNA sense strand
gaugaugacagccucuuca

SEQ ID NO: 669303 - RNA, 19 nt, Homo sapiens
  misc_RNA (1)...(19): siRNA sense strand
gcugucaccuggccagucu

SEQ ID NO: 669304 - RNA, 19 nt, Homo sapiens
  misc_RNA (1)...(19): siRNA sense strand
agagcaccguguuaaagaa

SEQ ID NO: 669305 - RNA, 19 nt, Homo sapiens
  misc_RNA (1)...(19): siRNA sense strand
ugacagccucuucaucuau

SEQ ID NO: 669306 - RNA, 19 nt, Homo sapiens
  misc_RNA (1)...(19): siRNA sense strand
ccaagucuggcagcuauuu

SEQ ID NO: 669307 - RNA, 19 nt, Homo sapiens
  misc_RNA (1)...(19): siRNA sense strand
uggcagcuauuuugcuuua

SEQ ID NO: 669308 - RNA, 19 nt, Homo sapiens
  misc_RNA (1)...(19): siRNA sense strand
agcagcagcuagagaagaa

SEQ ID NO: 669309 - RNA, 19 nt, Homo sapiens
  misc_RNA (1)...(19): siRNA sense strand
ucgacaacgugaccuccua

SEQ ID NO: 669310 - RNA, 19 nt, Homo sapiens
  misc_RNA (1)...(19): siRNA sense strand
gacagcaguugguguacag

SEQ ID NO: 669311 - RNA, 19 nt, Homo sapiens
  misc_RNA (1)...(19): siRNA sense strand
ccugagagcaccguguuaa

SEQ ID NO: 669312 - RNA, 19 nt, Homo sapiens
  misc_RNA (1)...(19): siRNA sense strand
cuccaagucuggcagcuau

SEQ ID NO: 669313 - RNA, 19 nt, Homo sapiens
  misc_RNA (1)...(19): siRNA sense strand
gacgagaagauccgaguca

SEQ ID NO: 669314 - RNA, 19 nt, Homo sapiens
  misc_RNA (1)...(19): siRNA sense strand
gcuccaggacugccaggaa

SEQ ID NO: 669315 - RNA, 19 nt, Homo sapiens
  misc_RNA (1)...(19): siRNA sense strand
cuucagcagucucuacaag

SEQ ID NO: 669316 - RNA, 19 nt, Homo sapiens
  misc_RNA (1)...(19): siRNA sense strand
gcaucgaguccuucugcuu

SEQ ID NO: 669317 - RNA, 19 nt, Homo sapiens
  misc_RNA (1)...(19): siRNA sense strand
ugagagcaccguguuaaag

SEQ ID NO: 669318 - RNA, 19 nt, Homo sapiens
  misc_RNA (1)...(19): siRNA sense strand
agacagcaguugguguaca

SEQ ID NO: 669319 - RNA, 19 nt, Homo sapiens
  misc_RNA (1)...(19): siRNA sense strand
cagaaaagaagucacaaga

SEQ ID NO: 669320 - RNA, 19 nt, Homo sapiens
  misc_RNA (1)...(19): siRNA sense strand
gaccaguggcagucuguuc

SEQ ID NO: 669321 - RNA, 19 nt, Homo sapiens
  misc_RNA (1)...(19): siRNA sense strand
cguccaggauugcauucug

SEQ ID NO: 669322 - RNA, 19 nt, Homo sapiens
  misc_RNA (1)...(19): siRNA sense strand
gcguccaccuucuccaagu

SEQ ID NO: 669323 - RNA, 19 nt, Homo sapiens
  misc_RNA (1)...(19): siRNA sense strand
gaaagucucugguguucuu

SEQ ID NO: 669324 - RNA, 19 nt, Homo sapiens
  misc_RNA (1)...(19): siRNA sense strand
gcagacagcaguuggugua

SEQ ID NO: 669325 - RNA, 19 nt, Homo sapiens
  misc_RNA (1)...(19): siRNA sense strand
ccuccuaccugaagaagaa

SEQ ID NO: 669326 - RNA, 19 nt, Homo sapiens
  misc_RNA (1)...(19): siRNA sense strand
gagagcaccguguuaaaga

SEQ ID NO: 669327 - RNA, 19 nt, Homo sapiens
  misc_RNA (1)...(19): siRNA sense strand
gaacugggccaugcuggaa

SEQ ID NO: 669328 - RNA, 19 nt, Homo sapiens
  misc_RNA (1)...(19): siRNA sense strand
gagcaccguguuaaagaaa

SEQ ID NO: 669329 - RNA, 19 nt, Homo sapiens
  misc_RNA (1)...(19): siRNA sense strand
aaagaaagucucugguguu

SEQ ID NO: 669330 - RNA, 19 nt, Homo sapiens
  misc_RNA (1)...(19): siRNA sense strand
gggaggcgacgcuaaguug

SEQ ID NO: 669331 - RNA, 19 nt, Homo sapiens
  misc_RNA (1)...(19): siRNA sense strand
gaagaagaaagaggagaga

SEQ ID NO: 669332 - RNA, 19 nt, Homo sapiens
  misc_RNA (1)...(19): siRNA sense strand
aagaaagucucugguguuc

SEQ ID NO: 669333 - RNA, 19 nt, Homo sapiens
  misc_RNA (1)...(19): siRNA sense strand
gggcaugccaagaagauga

SEQ ID NO: 669334 - RNA, 19 nt, Homo sapiens
  misc_RNA (1)...(19): siRNA sense strand
gcaccguguuaaagaaagu

SEQ ID NO: 669335 - RNA, 19 nt, Homo sapiens
  misc_RNA (1)...(19): siRNA sense strand
cgacgggcaugccaagaag

SEQ ID NO: 669336 - RNA, 19 nt, Homo sapiens
  misc_RNA (1)...(19): siRNA sense strand
gcugucaccuggccagucu

SEQ ID NO: 669337 - RNA, 19 nt, Homo sapiens
  misc_RNA (1)...(19): siRNA sense strand
agagcaccguguuaaagaa

SEQ ID NO: 669338 - RNA, 19 nt, Homo sapiens
  misc_RNA (1)...(19): siRNA sense strand
ucgacaacgugaccuccua

SEQ ID NO: 669339 - RNA, 19 nt, Homo sapiens
  misc_RNA (1)...(19): siRNA sense strand
agcagcagcuagagaagaa

SEQ ID NO: 669340 - RNA, 19 nt, Homo sapiens
  misc_RNA (1)...(19): siRNA sense strand
gacagcaguugguguacag

SEQ ID NO: 669341 - RNA, 19 nt, Homo sapiens
  misc_RNA (1)...(19): siRNA sense strand
ccugagagcaccguguuaa

SEQ ID NO: 669342 - RNA, 19 nt, Homo sapiens
  misc_RNA (1)...(19): siRNA sense strand
gacgagaagauccgaguca

SEQ ID NO: 669343 - RNA, 19 nt, Homo sapiens
  misc_RNA (1)...(19): siRNA sense strand
gcuccaggacugccaggaa

SEQ ID NO: 669344 - RNA, 19 nt, Homo sapiens
  misc_RNA (1)...(19): siRNA sense strand
cuucagcagucucuacaag

SEQ ID NO: 669345 - RNA, 19 nt, Homo sapiens
  misc_RNA (1)...(19): siRNA sense strand
gcaucgaguccuucugcuu

SEQ ID NO: 669346 - RNA, 19 nt, Homo sapiens
  misc_RNA (1)...(19): siRNA sense strand
ugagagcaccguguuaaag

SEQ ID NO: 669347 - RNA, 19 nt, Homo sapiens
  misc_RNA (1)...(19): siRNA sense strand
agacagcaguugguguaca

SEQ ID NO: 669348 - RNA, 19 nt, Homo sapiens
  misc_RNA (1)...(19): siRNA sense strand
gaccaguggcagucuguuc

SEQ ID NO: 669349 - RNA, 19 nt, Homo sapiens
  misc_RNA (1)...(19): siRNA sense strand
cguccaggauugcauucug

SEQ ID NO: 669350 - RNA, 19 nt, Homo sapiens
  misc_RNA (1)...(19): siRNA sense strand
gaaagucucugguguucuu

SEQ ID NO: 669351 - RNA, 19 nt, Homo sapiens
  misc_RNA (1)...(19): siRNA sense strand
gaaaagaagucacaagaaa

SEQ ID NO: 669352 - RNA, 19 nt, Homo sapiens
  misc_RNA (1)...(19): siRNA sense strand
gcaccugucuaugcuguua

SEQ ID NO: 669353 - RNA, 19 nt, Homo sapiens
  misc_RNA (1)...(19): siRNA sense strand
gcagacagcaguuggugua

SEQ ID NO: 669354 - RNA, 19 nt, Homo sapiens
  misc_RNA (1)...(19): siRNA sense strand
guacagcccugacuuucau

SEQ ID NO: 669355 - RNA, 19 nt, Homo sapiens
  misc_RNA (1)...(19): siRNA sense strand
ccuccuaccugaagaagaa

SEQ ID NO: 669356 - RNA, 19 nt, Homo sapiens
  misc_RNA (1)...(19): siRNA sense strand
gagagcaccguguuaaaga

SEQ ID NO: 669357 - RNA, 19 nt, Homo sapiens
  misc_RNA (1)...(19): siRNA sense strand
gaacugggccaugcuggaa

SEQ ID NO: 669358 - RNA, 19 nt, Homo sapiens
  misc_RNA (1)...(19): siRNA sense strand
gcacuccuguggucuacau

SEQ ID NO: 669359 - RNA, 19 nt, Homo sapiens
  misc_RNA (1)...(19): siRNA sense strand
gacagccucuucaucuaug

SEQ ID NO: 669360 - RNA, 19 nt, Homo sapiens
  misc_RNA (1)...(19): siRNA sense strand
gagcaccguguuaaagaaa

SEQ ID NO: 669361 - RNA, 19 nt, Homo sapiens
  misc_RNA (1)...(19): siRNA sense strand
aaagaaagucucugguguu

SEQ ID NO: 669362 - RNA, 19 nt, Homo sapiens
  misc_RNA (1)...(19): siRNA sense strand
gggaggcgacgcuaaguug

SEQ ID NO: 669363 - RNA, 19 nt, Homo sapiens
  misc_RNA (1)...(19): siRNA sense strand
gaagaagaaagaggagaga

SEQ ID NO: 669364 - RNA, 19 nt, Homo sapiens
  misc_RNA (1)...(19): siRNA sense strand
aagaaagucucugguguuc

SEQ ID NO: 669365 - RNA, 19 nt, Homo sapiens
  misc_RNA (1)...(19): siRNA sense strand
gggcaugccaagaagauga

SEQ ID NO: 669366 - RNA, 19 nt, Homo sapiens
  misc_RNA (1)...(19): siRNA sense strand
gcaccguguuaaagaaagu

SEQ ID NO: 669367 - RNA, 19 nt, Homo sapiens
  misc_RNA (1)...(19): siRNA sense strand
cgacgggcaugccaagaag

SEQ ID NO: 669368 - RNA, 19 nt, Homo sapiens
  misc_RNA (1)...(19): siRNA sense strand
gguguacagcccugacuuu

SEQ ID NO: 669369 - RNA, 19 nt, Homo sapiens
  misc_RNA (1)...(19): siRNA sense strand
gaugaugacagccucuuca

SEQ ID NO: 669370 - RNA, 19 nt, Homo sapiens
  misc_RNA (1)...(19): siRNA sense strand
gcugucaccuggccagucu

SEQ ID NO: 669371 - RNA, 19 nt, Homo sapiens
  misc_RNA (1)...(19): siRNA sense strand
agagcaccguguuaaagaa

SEQ ID NO: 669372 - RNA, 19 nt, Homo sapiens
  misc_RNA (1)...(19): siRNA sense strand
ugacagccucuucaucuau

SEQ ID NO: 669373 - RNA, 19 nt, Homo sapiens
  misc_RNA (1)...(19): siRNA sense strand
ccaagucuggcagcuauuu

SEQ ID NO: 669374 - RNA, 19 nt, Homo sapiens
  misc_RNA (1)...(19): siRNA sense strand
uggcagcuauuuugcuuua

SEQ ID NO: 669375 - RNA, 19 nt, Homo sapiens
  misc_RNA (1)...(19): siRNA sense strand
agcagcagcuagagaagaa

SEQ ID NO: 669376 - RNA, 19 nt, Homo sapiens
  misc_RNA (1)...(19): siRNA sense strand
ucgacaacgugaccuccua

SEQ ID NO: 669377 - RNA, 19 nt, Homo sapiens
  misc_RNA (1)...(19): siRNA sense strand
gacagcaguugguguacag

SEQ ID NO: 669378 - RNA, 19 nt, Homo sapiens
  misc_RNA (1)...(19): siRNA sense strand
ccugagagcaccguguuaa

SEQ ID NO: 669379 - RNA, 19 nt, Homo sapiens
  misc_RNA (1)...(19): siRNA sense strand
cuccaagucuggcagcuau

SEQ ID NO: 669380 - RNA, 19 nt, Homo sapiens
  misc_RNA (1)...(19): siRNA sense strand
gacgagaagauccgaguca

SEQ ID NO: 669381 - RNA, 19 nt, Homo sapiens
  misc_RNA (1)...(19): siRNA sense strand
gcuccaggacugccaggaa

SEQ ID NO: 669382 - RNA, 19 nt, Homo sapiens
  misc_RNA (1)...(19): siRNA sense strand
cuucagcagucucuacaag

SEQ ID NO: 669383 - RNA, 19 nt, Homo sapiens
  misc_RNA (1)...(19): siRNA sense strand
gcaucgaguccuucugcuu

SEQ ID NO: 669384 - RNA, 19 nt, Homo sapiens
  misc_RNA (1)...(19): siRNA sense strand
ugagagcaccguguuaaag

SEQ ID NO: 669385 - RNA, 19 nt, Homo sapiens
  misc_RNA (1)...(19): siRNA sense strand
agacagcaguugguguaca

SEQ ID NO: 669386 - RNA, 19 nt, Homo sapiens
  misc_RNA (1)...(19): siRNA sense strand
cagaaaagaagucacaaga

SEQ ID NO: 669387 - RNA, 19 nt, Homo sapiens
  misc_RNA (1)...(19): siRNA sense strand
gaccaguggcagucuguuc

SEQ ID NO: 669388 - RNA, 19 nt, Homo sapiens
  misc_RNA (1)...(19): siRNA sense strand
cguccaggauugcauucug

SEQ ID NO: 669389 - RNA, 19 nt, Homo sapiens
  misc_RNA (1)...(19): siRNA sense strand
gcguccaccuucuccaagu

SEQ ID NO: 669390 - RNA, 19 nt, Homo sapiens
  misc_RNA (1)...(19): siRNA sense strand
gaaagucucugguguucuu

SEQ ID NO: 669391 - RNA, 19 nt, Homo sapiens
  misc_RNA (1)...(19): siRNA sense strand
gaaaagaagucacaagaaa

SEQ ID NO: 669392 - RNA, 19 nt, Homo sapiens
  misc_RNA (1)...(19): siRNA sense strand
gcaccugucuaugcuguua

SEQ ID NO: 669393 - RNA, 19 nt, Homo sapiens
  misc_RNA (1)...(19): siRNA sense strand
gcagacagcaguuggugua

SEQ ID NO: 669394 - RNA, 19 nt, Homo sapiens
  misc_RNA (1)...(19): siRNA sense strand
guacagcccugacuuucau

SEQ ID NO: 669395 - RNA, 19 nt, Homo sapiens
  misc_RNA (1)...(19): siRNA sense strand
ccuccuaccugaagaagaa

SEQ ID NO: 669396 - RNA, 19 nt, Homo sapiens
  misc_RNA (1)...(19): siRNA sense strand
gagagcaccguguuaaaga

SEQ ID NO: 669397 - RNA, 19 nt, Homo sapiens
  misc_RNA (1)...(19): siRNA sense strand
gaacugggccaugcuggaa

SEQ ID NO: 669398 - RNA, 19 nt, Homo sapiens
  misc_RNA (1)...(19): siRNA sense strand
gcacuccuguggucuacau

SEQ ID NO: 669399 - RNA, 19 nt, Homo sapiens
  misc_RNA (1)...(19): siRNA sense strand
gacagccucuucaucuaug

SEQ ID NO: 669400 - RNA, 19 nt, Homo sapiens
  misc_RNA (1)...(19): siRNA sense strand
gagcaccguguuaaagaaa

SEQ ID NO: 669401 - RNA, 19 nt, Homo sapiens
  misc_RNA (1)...(19): siRNA sense strand
aaagaaagucucugguguu

SEQ ID NO: 669402 - RNA, 19 nt, Homo sapiens
  misc_RNA (1)...(19): siRNA sense strand
gggaggcgacgcuaaguug

SEQ ID NO: 669403 - RNA, 19 nt, Homo sapiens
  misc_RNA (1)...(19): siRNA sense strand
gaagaagaaagaggagaga

SEQ ID NO: 669404 - RNA, 19 nt, Homo sapiens
  misc_RNA (1)...(19): siRNA sense strand
aagaaagucucugguguuc

SEQ ID NO: 669405 - RNA, 19 nt, Homo sapiens
  misc_RNA (1)...(19): siRNA sense strand
gggcaugccaagaagauga

SEQ ID NO: 669406 - RNA, 19 nt, Homo sapiens
  misc_RNA (1)...(19): siRNA sense strand
gcaccguguuaaagaaagu

SEQ ID NO: 669407 - RNA, 19 nt, Homo sapiens
  misc_RNA (1)...(19): siRNA sense strand
cgacgggcaugccaagaag

SEQ ID NO: 669408 - RNA, 19 nt, Homo sapiens
  misc_RNA (1)...(19): siRNA sense strand
gguguacagcccugacuuu

SEQ ID NO: 669409 - RNA, 19 nt, Homo sapiens
  misc_RNA (1)...(19): siRNA sense strand
gaugaugacagccucuuca

SEQ ID NO: 669410 - RNA, 19 nt, Homo sapiens
  misc_RNA (1)...(19): siRNA sense strand
gcugucaccuggccagucu

SEQ ID NO: 669411 - RNA, 19 nt, Homo sapiens
  misc_RNA (1)...(19): siRNA sense strand
agagcaccguguuaaagaa

SEQ ID NO: 669412 - RNA, 19 nt, Homo sapiens
  misc_RNA (1)...(19): siRNA sense strand
ugacagccucuucaucuau

SEQ ID NO: 669413 - RNA, 19 nt, Homo sapiens
  misc_RNA (1)...(19): siRNA sense strand
ccaagucuggcagcuauuu

SEQ ID NO: 669414 - RNA, 19 nt, Homo sapiens
  misc_RNA (1)...(19): siRNA sense strand
uggcagcuauuuugcuuua

SEQ ID NO: 669415 - RNA, 19 nt, Homo sapiens
  misc_RNA (1)...(19): siRNA sense strand
agcagcagcuagagaagaa

SEQ ID NO: 669416 - RNA, 19 nt, Homo sapiens
  misc_RNA (1)...(19): siRNA sense strand
ucgacaacgugaccuccua

SEQ ID NO: 669417 - RNA, 19 nt, Homo sapiens
  misc_RNA (1)...(19): siRNA sense strand
gacagcaguugguguacag

SEQ ID NO: 669418 - RNA, 19 nt, Homo sapiens
  misc_RNA (1)...(19): siRNA sense strand
ccugagagcaccguguuaa

SEQ ID NO: 669419 - RNA, 19 nt, Homo sapiens
  misc_RNA (1)...(19): siRNA sense strand
cuccaagucuggcagcuau

SEQ ID NO: 669420 - RNA, 19 nt, Homo sapiens
  misc_RNA (1)...(19): siRNA sense strand
gacgagaagauccgaguca

SEQ ID NO: 669421 - RNA, 19 nt, Homo sapiens
  misc_RNA (1)...(19): siRNA sense strand
gcuccaggacugccaggaa

SEQ ID NO: 669422 - RNA, 19 nt, Homo sapiens
  misc_RNA (1)...(19): siRNA sense strand
cuucagcagucucuacaag

SEQ ID NO: 669423 - RNA, 19 nt, Homo sapiens
  misc_RNA (1)...(19): siRNA sense strand
gcaucgaguccuucugcuu

SEQ ID NO: 669424 - RNA, 19 nt, Homo sapiens
  misc_RNA (1)...(19): siRNA sense strand
ugagagcaccguguuaaag

SEQ ID NO: 669425 - RNA, 19 nt, Homo sapiens
  misc_RNA (1)...(19): siRNA sense strand
agacagcaguugguguaca

SEQ ID NO: 669426 - RNA, 19 nt, Homo sapiens
  misc_RNA (1)...(19): siRNA sense strand
cagaaaagaagucacaaga

SEQ ID NO: 669427 - RNA, 19 nt, Homo sapiens
  misc_RNA (1)...(19): siRNA sense strand
gaccaguggcagucuguuc

SEQ ID NO: 669428 - RNA, 19 nt, Homo sapiens
  misc_RNA (1)...(19): siRNA sense strand
cguccaggauugcauucug

SEQ ID NO: 669429 - RNA, 19 nt, Homo sapiens
  misc_RNA (1)...(19): siRNA sense strand
gcguccaccuucuccaagu

SEQ ID NO: 669430 - RNA, 19 nt, Homo sapiens
  misc_RNA (1)...(19): siRNA sense strand
gaaagucucugguguucuu

SEQ ID NO: 669431 - RNA, 19 nt, Homo sapiens
  misc_RNA (1)...(19): siRNA sense strand
gcagacagcaguuggugua

SEQ ID NO: 669432 - RNA, 19 nt, Homo sapiens
  misc_RNA (1)...(19): siRNA sense strand
ccuccuaccugaagaagaa

SEQ ID NO: 669433 - RNA, 19 nt, Homo sapiens
  misc_RNA (1)...(19): siRNA sense strand
gagagcaccguguuaaaga

SEQ ID NO: 669434 - RNA, 19 nt, Homo sapiens
  misc_RNA (1)...(19): siRNA sense strand
gaacugggccaugcuggaa

SEQ ID NO: 669435 - RNA, 19 nt, Homo sapiens
  misc_RNA (1)...(19): siRNA sense strand
gagcaccguguuaaagaaa

SEQ ID NO: 669436 - RNA, 19 nt, Homo sapiens
  misc_RNA (1)...(19): siRNA sense strand
aaagaaagucucugguguu

SEQ ID NO: 669437 - RNA, 19 nt, Homo sapiens
  misc_RNA (1)...(19): siRNA sense strand
gggaggcgacgcuaaguug

SEQ ID NO: 669438 - RNA, 19 nt, Homo sapiens
  misc_RNA (1)...(19): siRNA sense strand
gaagaagaaagaggagaga

SEQ ID NO: 669439 - RNA, 19 nt, Homo sapiens
  misc_RNA (1)...(19): siRNA sense strand
aagaaagucucugguguuc

SEQ ID NO: 669440 - RNA, 19 nt, Homo sapiens
  misc_RNA (1)...(19): siRNA sense strand
gggcaugccaagaagauga

SEQ ID NO: 669441 - RNA, 19 nt, Homo sapiens
  misc_RNA (1)...(19): siRNA sense strand
gcaccguguuaaagaaagu

SEQ ID NO: 669442 - RNA, 19 nt, Homo sapiens
  misc_RNA (1)...(19): siRNA sense strand
cgacgggcaugccaagaag

SEQ ID NO: 669443 - RNA, 19 nt, Homo sapiens
  misc_RNA (1)...(19): siRNA sense strand
gcugucaccuggccagucu

SEQ ID NO: 669444 - RNA, 19 nt, Homo sapiens
  misc_RNA (1)...(19): siRNA sense strand
agagcaccguguuaaagaa

SEQ ID NO: 669445 - RNA, 19 nt, Homo sapiens
  misc_RNA (1)...(19): siRNA sense strand
ucgacaacgugaccuccua

SEQ ID NO: 669446 - RNA, 19 nt, Homo sapiens
  misc_RNA (1)...(19): siRNA sense strand
agcagcagcuagagaagaa

SEQ ID NO: 669447 - RNA, 19 nt, Homo sapiens
  misc_RNA (1)...(19): siRNA sense strand
gacagcaguugguguacag

SEQ ID NO: 669448 - RNA, 19 nt, Homo sapiens
  misc_RNA (1)...(19): siRNA sense strand
ccugagagcaccguguuaa

SEQ ID NO: 669449 - RNA, 19 nt, Homo sapiens
  misc_RNA (1)...(19): siRNA sense strand
gacgagaagauccgaguca

SEQ ID NO: 669450 - RNA, 19 nt, Homo sapiens
  misc_RNA (1)...(19): siRNA sense strand
gcuccaggacugccaggaa

SEQ ID NO: 669451 - RNA, 19 nt, Homo sapiens
  misc_RNA (1)...(19): siRNA sense strand
cuucagcagucucuacaag

SEQ ID NO: 669452 - RNA, 19 nt, Homo sapiens
  misc_RNA (1)...(19): siRNA sense strand
gcaucgaguccuucugcuu

SEQ ID NO: 669453 - RNA, 19 nt, Homo sapiens
  misc_RNA (1)...(19): siRNA sense strand
ugagagcaccguguuaaag

SEQ ID NO: 669454 - RNA, 19 nt, Homo sapiens
  misc_RNA (1)...(19): siRNA sense strand
agacagcaguugguguaca

SEQ ID NO: 669455 - RNA, 19 nt, Homo sapiens
  misc_RNA (1)...(19): siRNA sense strand
gaccaguggcagucuguuc

SEQ ID NO: 669456 - RNA, 19 nt, Homo sapiens
  misc_RNA (1)...(19): siRNA sense strand
cguccaggauugcauucug

SEQ ID NO: 669457 - RNA, 19 nt, Homo sapiens
  misc_RNA (1)...(19): siRNA sense strand
gaacagcccuuagucuuua

SEQ ID NO: 669458 - RNA, 19 nt, Homo sapiens
  misc_RNA (1)...(19): siRNA sense strand
ggaacagcccuuagucuuu

SEQ ID NO: 669459 - RNA, 19 nt, Homo sapiens
  misc_RNA (1)...(19): siRNA sense strand
uaaaggugcuggacaagug

SEQ ID NO: 669460 - RNA, 19 nt, Homo sapiens
  misc_RNA (1)...(19): siRNA sense strand
agaaagaacucacgacuac

SEQ ID NO: 669461 - RNA, 19 nt, Homo sapiens
  misc_RNA (1)...(19): siRNA sense strand
gaaccagcgcuacaucuuu

SEQ ID NO: 669462 - RNA, 19 nt, Homo sapiens
  misc_RNA (1)...(19): siRNA sense strand
gcaagauccugugcacuga

SEQ ID NO: 669463 - RNA, 19 nt, Homo sapiens
  misc_RNA (1)...(19): siRNA sense strand
gagaagcaaucgcugaagu

SEQ ID NO: 669464 - RNA, 19 nt, Homo sapiens
  misc_RNA (1)...(19): siRNA sense strand
gaaaggaaccagcgcuaca

SEQ ID NO: 669465 - RNA, 19 nt, Homo sapiens
  misc_RNA (1)...(19): siRNA sense strand
agaaagaggugggcaagau

SEQ ID NO: 669466 - RNA, 19 nt, Homo sapiens
  misc_RNA (1)...(19): siRNA sense strand
gagacauucgcaucaaaua

SEQ ID NO: 669467 - RNA, 19 nt, Homo sapiens
  misc_RNA (1)...(19): siRNA sense strand
agcaaucgcugaaguguga

SEQ ID NO: 669468 - RNA, 19 nt, Homo sapiens
  misc_RNA (1)...(19): siRNA sense strand
ucaaccagcucuccugcaa

SEQ ID NO: 669469 - RNA, 19 nt, Homo sapiens
  misc_RNA (1)...(19): siRNA sense strand
gacauucgcaucaaauaug

SEQ ID NO: 669470 - RNA, 19 nt, Homo sapiens
  misc_RNA (1)...(19): siRNA sense strand
ggaaccagcgcuacaucuu

SEQ ID NO: 669471 - RNA, 19 nt, Homo sapiens
  misc_RNA (1)...(19): siRNA sense strand
ggaggcgucugcuacuaca

SEQ ID NO: 669472 - RNA, 19 nt, Homo sapiens
  misc_RNA (1)...(19): siRNA sense strand
gaaagaggugggcaagauc

SEQ ID NO: 669473 - RNA, 19 nt, Homo sapiens
  misc_RNA (1)...(19): siRNA sense strand
cagaaagaacucacgacua

SEQ ID NO: 669474 - RNA, 19 nt, Homo sapiens
  misc_RNA (1)...(19): siRNA sense strand
gugugucgcucgccugcua

SEQ ID NO: 669475 - RNA, 19 nt, Homo sapiens
  misc_RNA (1)...(19): siRNA sense strand
ggcccaaguugaagaagau

SEQ ID NO: 669476 - RNA, 19 nt, Homo sapiens
  misc_RNA (1)...(19): siRNA sense strand
gaagcaaucgcugaagugu

SEQ ID NO: 669477 - RNA, 19 nt, Homo sapiens
  misc_RNA (1)...(19): siRNA sense strand
gcaacgagacagccaaguc

SEQ ID NO: 669478 - RNA, 19 nt, Homo sapiens
  misc_RNA (1)...(19): siRNA sense strand
ccgagacauucgcaucaaa

SEQ ID NO: 669479 - RNA, 19 nt, Homo sapiens
  misc_RNA (1)...(19): siRNA sense strand
agacagccaaguccuauug

SEQ ID NO: 669480 - RNA, 19 nt, Homo sapiens
  misc_RNA (1)...(19): siRNA sense strand
caaccgcagccgagacauu

SEQ ID NO: 669481 - RNA, 19 nt, Homo sapiens
  misc_RNA (1)...(19): siRNA sense strand
ugguaaaggugcuggacaa

SEQ ID NO: 669482 - RNA, 19 nt, Homo sapiens
  misc_RNA (1)...(19): siRNA sense strand
gacuacaguucaacaaggu

SEQ ID NO: 669483 - RNA, 19 nt, Homo sapiens
  misc_RNA (1)...(19): siRNA sense strand
ggaggacgcuggggaguau

SEQ ID NO: 669484 - RNA, 19 nt, Homo sapiens
  misc_RNA (1)...(19): siRNA sense strand
ccacggaacagcccuuagu

SEQ ID NO: 669485 - RNA, 19 nt, Homo sapiens
  misc_RNA (1)...(19): siRNA sense strand
ccaaguugaagaagaugaa

SEQ ID NO: 669486 - RNA, 19 nt, Homo sapiens
  misc_RNA (1)...(19): siRNA sense strand
caacaacagcagcaucucu

SEQ ID NO: 669487 - RNA, 19 nt, Homo sapiens
  misc_RNA (1)...(19): siRNA sense strand
cggaacagcccuuagucuu

SEQ ID NO: 669488 - RNA, 19 nt, Homo sapiens
  misc_RNA (1)...(19): siRNA sense strand
gugugccgcucgaaaggaa

SEQ ID NO: 669489 - RNA, 19 nt, Homo sapiens
  misc_RNA (1)...(19): siRNA sense strand
gccgagacauucgcaucaa

SEQ ID NO: 669490 - RNA, 19 nt, Homo sapiens
  misc_RNA (1)...(19): siRNA sense strand
ggugguggagggcaaggua

SEQ ID NO: 669491 - RNA, 19 nt, Homo sapiens
  misc_RNA (1)...(19): siRNA sense strand
gugagaagcaaucgcugaa

SEQ ID NO: 669492 - RNA, 19 nt, Homo sapiens
  misc_RNA (1)...(19): siRNA sense strand
agacauucgcaucaaauau

SEQ ID NO: 669493 - RNA, 19 nt, Homo sapiens
  misc_RNA (1)...(19): siRNA sense strand
cgagacauucgcaucaaau

SEQ ID NO: 669494 - RNA, 19 nt, Homo sapiens
  misc_RNA (1)...(19): siRNA sense strand
cgagacagccaaguccuau

SEQ ID NO: 669495 - RNA, 19 nt, Homo sapiens
  misc_RNA (1)...(19): siRNA sense strand
cggcccaaguugaagaaga

SEQ ID NO: 669496 - RNA, 19 nt, Homo sapiens
  misc_RNA (1)...(19): siRNA sense strand
ggucggguggcguugguaa

SEQ ID NO: 669497 - RNA, 19 nt, Homo sapiens
  misc_RNA (1)...(19): siRNA sense strand
gaaagaacucacgacuaca

SEQ ID NO: 669498 - RNA, 19 nt, Homo sapiens
  misc_RNA (1)...(19): siRNA sense strand
guaaaggugcuggacaagu

SEQ ID NO: 669499 - RNA, 19 nt, Homo sapiens
  misc_RNA (1)...(19): siRNA sense strand
cgggacaggugggugagaa

SEQ ID NO: 669500 - RNA, 19 nt, Homo sapiens
  misc_RNA (1)...(19): siRNA sense strand
gagacagccaaguccuauu

SEQ ID NO: 669501 - RNA, 19 nt, Homo sapiens
  misc_RNA (1)...(19): siRNA sense strand
ucaauggaggcgucugcua

SEQ ID NO: 669502 - RNA, 19 nt, Homo sapiens
  misc_RNA (1)...(19): siRNA sense strand
uauggcaacggcagaaaga

SEQ ID NO: 669503 - RNA, 19 nt, Homo sapiens
  misc_RNA (1)...(19): siRNA sense strand
acaggugggugagaagcaa

SEQ ID NO: 669504 - RNA, 19 nt, Homo sapiens
  misc_RNA (1)...(19): siRNA sense strand
aaccagcgcuacaucuuuu

SEQ ID NO: 669505 - RNA, 19 nt, Homo sapiens
  misc_RNA (1)...(19): siRNA sense strand
acucacgacuacaguucaa

SEQ ID NO: 669506 - RNA, 19 nt, Homo sapiens
  misc_RNA (1)...(19): siRNA sense strand
aaagaacucacgacuacag

SEQ ID NO: 669507 - RNA, 19 nt, Homo sapiens
  misc_RNA (1)...(19): siRNA sense strand
gaacagcccuuagucuuua

SEQ ID NO: 669508 - RNA, 19 nt, Homo sapiens
  misc_RNA (1)...(19): siRNA sense strand
ggaacagcccuuagucuuu

SEQ ID NO: 669509 - RNA, 19 nt, Homo sapiens
  misc_RNA (1)...(19): siRNA sense strand
uaaaggugcuggacaagug

SEQ ID NO: 669510 - RNA, 19 nt, Homo sapiens
  misc_RNA (1)...(19): siRNA sense strand
agaaagaacucacgacuac

SEQ ID NO: 669511 - RNA, 19 nt, Homo sapiens
  misc_RNA (1)...(19): siRNA sense strand
gaaccagcgcuacaucuuu

SEQ ID NO: 669512 - RNA, 19 nt, Homo sapiens
  misc_RNA (1)...(19): siRNA sense strand
gcaagauccugugcacuga

SEQ ID NO: 669513 - RNA, 19 nt, Homo sapiens
  misc_RNA (1)...(19): siRNA sense strand
gagaagcaaucgcugaagu

SEQ ID NO: 669514 - RNA, 19 nt, Homo sapiens
  misc_RNA (1)...(19): siRNA sense strand
gaaaggaaccagcgcuaca

SEQ ID NO: 669515 - RNA, 19 nt, Homo sapiens
  misc_RNA (1)...(19): siRNA sense strand
agaaagaggugggcaagau

SEQ ID NO: 669516 - RNA, 19 nt, Homo sapiens
  misc_RNA (1)...(19): siRNA sense strand
gagacauucgcaucaaaua

SEQ ID NO: 669517 - RNA, 19 nt, Homo sapiens
  misc_RNA (1)...(19): siRNA sense strand
agcaaucgcugaaguguga

SEQ ID NO: 669518 - RNA, 19 nt, Homo sapiens
  misc_RNA (1)...(19): siRNA sense strand
ucaaccagcucuccugcaa

SEQ ID NO: 669519 - RNA, 19 nt, Homo sapiens
  misc_RNA (1)...(19): siRNA sense strand
gacauucgcaucaaauaug

SEQ ID NO: 669520 - RNA, 19 nt, Homo sapiens
  misc_RNA (1)...(19): siRNA sense strand
ggaaccagcgcuacaucuu

SEQ ID NO: 669521 - RNA, 19 nt, Homo sapiens
  misc_RNA (1)...(19): siRNA sense strand
ggaggcgucugcuacuaca

SEQ ID NO: 669522 - RNA, 19 nt, Homo sapiens
  misc_RNA (1)...(19): siRNA sense strand
gaaagaggugggcaagauc

SEQ ID NO: 669523 - RNA, 19 nt, Homo sapiens
  misc_RNA (1)...(19): siRNA sense strand
cagaaagaacucacgacua

SEQ ID NO: 669524 - RNA, 19 nt, Homo sapiens
  misc_RNA (1)...(19): siRNA sense strand
gugugucgcucgccugcua

SEQ ID NO: 669525 - RNA, 19 nt, Homo sapiens
  misc_RNA (1)...(19): siRNA sense strand
ggcccaaguugaagaagau

SEQ ID NO: 669526 - RNA, 19 nt, Homo sapiens
  misc_RNA (1)...(19): siRNA sense strand
gaagcaaucgcugaagugu

SEQ ID NO: 669527 - RNA, 19 nt, Homo sapiens
  misc_RNA (1)...(19): siRNA sense strand
gcaacgagacagccaaguc

SEQ ID NO: 669528 - RNA, 19 nt, Homo sapiens
  misc_RNA (1)...(19): siRNA sense strand
ccgagacauucgcaucaaa

SEQ ID NO: 669529 - RNA, 19 nt, Homo sapiens
  misc_RNA (1)...(19): siRNA sense strand
agacagccaaguccuauug

SEQ ID NO: 669530 - RNA, 19 nt, Homo sapiens
  misc_RNA (1)...(19): siRNA sense strand
caaccgcagccgagacauu

SEQ ID NO: 669531 - RNA, 19 nt, Homo sapiens
  misc_RNA (1)...(19): siRNA sense strand
ugguaaaggugcuggacaa

SEQ ID NO: 669532 - RNA, 19 nt, Homo sapiens
  misc_RNA (1)...(19): siRNA sense strand
gacuacaguucaacaaggu

SEQ ID NO: 669533 - RNA, 19 nt, Homo sapiens
  misc_RNA (1)...(19): siRNA sense strand
ggaggacgcuggggaguau

SEQ ID NO: 669534 - RNA, 19 nt, Homo sapiens
  misc_RNA (1)...(19): siRNA sense strand
ccacggaacagcccuuagu

SEQ ID NO: 669535 - RNA, 19 nt, Homo sapiens
  misc_RNA (1)...(19): siRNA sense strand
ccaaguugaagaagaugaa

SEQ ID NO: 669536 - RNA, 19 nt, Homo sapiens
  misc_RNA (1)...(19): siRNA sense strand
caacaacagcagcaucucu

SEQ ID NO: 669537 - RNA, 19 nt, Homo sapiens
  misc_RNA (1)...(19): siRNA sense strand
cggaacagcccuuagucuu

SEQ ID NO: 669538 - RNA, 19 nt, Homo sapiens
  misc_RNA (1)...(19): siRNA sense strand
gugugccgcucgaaaggaa

SEQ ID NO: 669539 - RNA, 19 nt, Homo sapiens
  misc_RNA (1)...(19): siRNA sense strand
gccgagacauucgcaucaa

SEQ ID NO: 669540 - RNA, 19 nt, Homo sapiens
  misc_RNA (1)...(19): siRNA sense strand
ggugguggagggcaaggua

SEQ ID NO: 669541 - RNA, 19 nt, Homo sapiens
  misc_RNA (1)...(19): siRNA sense strand
gugagaagcaaucgcugaa

SEQ ID NO: 669542 - RNA, 19 nt, Homo sapiens
  misc_RNA (1)...(19): siRNA sense strand
agacauucgcaucaaauau

SEQ ID NO: 669543 - RNA, 19 nt, Homo sapiens
  misc_RNA (1)...(19): siRNA sense strand
cgagacauucgcaucaaau

SEQ ID NO: 669544 - RNA, 19 nt, Homo sapiens
  misc_RNA (1)...(19): siRNA sense strand
cgagacagccaaguccuau

SEQ ID NO: 669545 - RNA, 19 nt, Homo sapiens
  misc_RNA (1)...(19): siRNA sense strand
cggcccaaguugaagaaga

SEQ ID NO: 669546 - RNA, 19 nt, Homo sapiens
  misc_RNA (1)...(19): siRNA sense strand
ggucggguggcguugguaa

SEQ ID NO: 669547 - RNA, 19 nt, Homo sapiens
  misc_RNA (1)...(19): siRNA sense strand
gaaagaacucacgacuaca

SEQ ID NO: 669548 - RNA, 19 nt, Homo sapiens
  misc_RNA (1)...(19): siRNA sense strand
guaaaggugcuggacaagu

SEQ ID NO: 669549 - RNA, 19 nt, Homo sapiens
  misc_RNA (1)...(19): siRNA sense strand
cgggacaggugggugagaa

SEQ ID NO: 669550 - RNA, 19 nt, Homo sapiens
  misc_RNA (1)...(19): siRNA sense strand
gagacagccaaguccuauu

SEQ ID NO: 669551 - RNA, 19 nt, Homo sapiens
  misc_RNA (1)...(19): siRNA sense strand
ucaauggaggcgucugcua

SEQ ID NO: 669552 - RNA, 19 nt, Homo sapiens
  misc_RNA (1)...(19): siRNA sense strand
uauggcaacggcagaaaga

SEQ ID NO: 669553 - RNA, 19 nt, Homo sapiens
  misc_RNA (1)...(19): siRNA sense strand
acaggugggugagaagcaa

SEQ ID NO: 669554 - RNA, 19 nt, Homo sapiens
  misc_RNA (1)...(19): siRNA sense strand
aaccagcgcuacaucuuuu

SEQ ID NO: 669555 - RNA, 19 nt, Homo sapiens
  misc_RNA (1)...(19): siRNA sense strand
acucacgacuacaguucaa

SEQ ID NO: 669556 - RNA, 19 nt, Homo sapiens
  misc_RNA (1)...(19): siRNA sense strand
aaagaacucacgacuacag

SEQ ID NO: 669557 - RNA, 19 nt, Homo sapiens
  misc_RNA (1)...(19): siRNA sense strand
gaacagcccuuagucuuua

SEQ ID NO: 669558 - RNA, 19 nt, Homo sapiens
  misc_RNA (1)...(19): siRNA sense strand
ggaacagcccuuagucuuu

SEQ ID NO: 669559 - RNA, 19 nt, Homo sapiens
  misc_RNA (1)...(19): siRNA sense strand
uaaaggugcuggacaagug

SEQ ID NO: 669560 - RNA, 19 nt, Homo sapiens
  misc_RNA (1)...(19): siRNA sense strand
agaaagaacucacgacuac

SEQ ID NO: 669561 - RNA, 19 nt, Homo sapiens
  misc_RNA (1)...(19): siRNA sense strand
gaaccagcgcuacaucuuu

SEQ ID NO: 669562 - RNA, 19 nt, Homo sapiens
  misc_RNA (1)...(19): siRNA sense strand
gcaagauccugugcacuga

SEQ ID NO: 669563 - RNA, 19 nt, Homo sapiens
  misc_RNA (1)...(19): siRNA sense strand
gagaagcaaucgcugaagu

SEQ ID NO: 669564 - RNA, 19 nt, Homo sapiens
  misc_RNA (1)...(19): siRNA sense strand
gaaaggaaccagcgcuaca

SEQ ID NO: 669565 - RNA, 19 nt, Homo sapiens
  misc_RNA (1)...(19): siRNA sense strand
agaaagaggugggcaagau

SEQ ID NO: 669566 - RNA, 19 nt, Homo sapiens
  misc_RNA (1)...(19): siRNA sense strand
gagacauucgcaucaaaua

SEQ ID NO: 669567 - RNA, 19 nt, Homo sapiens
  misc_RNA (1)...(19): siRNA sense strand
agcaaucgcugaaguguga

SEQ ID NO: 669568 - RNA, 19 nt, Homo sapiens
  misc_RNA (1)...(19): siRNA sense strand
ucaaccagcucuccugcaa

SEQ ID NO: 669569 - RNA, 19 nt, Homo sapiens
  misc_RNA (1)...(19): siRNA sense strand
gacauucgcaucaaauaug

SEQ ID NO: 669570 - RNA, 19 nt, Homo sapiens
  misc_RNA (1)...(19): siRNA sense strand
ggaaccagcgcuacaucuu

SEQ ID NO: 669571 - RNA, 19 nt, Homo sapiens
  misc_RNA (1)...(19): siRNA sense strand
ggaggcgucugcuacuaca

SEQ ID NO: 669572 - RNA, 19 nt, Homo sapiens
  misc_RNA (1)...(19): siRNA sense strand
gaaagaggugggcaagauc

SEQ ID NO: 669573 - RNA, 19 nt, Homo sapiens
  misc_RNA (1)...(19): siRNA sense strand
cagaaagaacucacgacua

SEQ ID NO: 669574 - RNA, 19 nt, Homo sapiens
  misc_RNA (1)...(19): siRNA sense strand
gugugucgcucgccugcua

SEQ ID NO: 669575 - RNA, 19 nt, Homo sapiens
  misc_RNA (1)...(19): siRNA sense strand
ggcccaaguugaagaagau

SEQ ID NO: 669576 - RNA, 19 nt, Homo sapiens
  misc_RNA (1)...(19): siRNA sense strand
gaagcaaucgcugaagugu

SEQ ID NO: 669577 - RNA, 19 nt, Homo sapiens
  misc_RNA (1)...(19): siRNA sense strand
gcaacgagacagccaaguc

SEQ ID NO: 669578 - RNA, 19 nt, Homo sapiens
  misc_RNA (1)...(19): siRNA sense strand
ccgagacauucgcaucaaa

SEQ ID NO: 669579 - RNA, 19 nt, Homo sapiens
  misc_RNA (1)...(19): siRNA sense strand
agacagccaaguccuauug

SEQ ID NO: 669580 - RNA, 19 nt, Homo sapiens
  misc_RNA (1)...(19): siRNA sense strand
caaccgcagccgagacauu

SEQ ID NO: 669581 - RNA, 19 nt, Homo sapiens
  misc_RNA (1)...(19): siRNA sense strand
ugguaaaggugcuggacaa

SEQ ID NO: 669582 - RNA, 19 nt, Homo sapiens
  misc_RNA (1)...(19): siRNA sense strand
gacuacaguucaacaaggu

SEQ ID NO: 669583 - RNA, 19 nt, Homo sapiens
  misc_RNA (1)...(19): siRNA sense strand
ggaggacgcuggggaguau

SEQ ID NO: 669584 - RNA, 19 nt, Homo sapiens
  misc_RNA (1)...(19): siRNA sense strand
ccacggaacagcccuuagu

SEQ ID NO: 669585 - RNA, 19 nt, Homo sapiens
  misc_RNA (1)...(19): siRNA sense strand
ccaaguugaagaagaugaa

SEQ ID NO: 669586 - RNA, 19 nt, Homo sapiens
  misc_RNA (1)...(19): siRNA sense strand
caacaacagcagcaucucu

SEQ ID NO: 669587 - RNA, 19 nt, Homo sapiens
  misc_RNA (1)...(19): siRNA sense strand
cggaacagcccuuagucuu

SEQ ID NO: 669588 - RNA, 19 nt, Homo sapiens
  misc_RNA (1)...(19): siRNA sense strand
gugugccgcucgaaaggaa

SEQ ID NO: 669589 - RNA, 19 nt, Homo sapiens
  misc_RNA (1)...(19): siRNA sense strand
gccgagacauucgcaucaa

SEQ ID NO: 669590 - RNA, 19 nt, Homo sapiens
  misc_RNA (1)...(19): siRNA sense strand
ggugguggagggcaaggua

SEQ ID NO: 669591 - RNA, 19 nt, Homo sapiens
  misc_RNA (1)...(19): siRNA sense strand
gugagaagcaaucgcugaa

SEQ ID NO: 669592 - RNA, 19 nt, Homo sapiens
  misc_RNA (1)...(19): siRNA sense strand
agacauucgcaucaaauau

SEQ ID NO: 669593 - RNA, 19 nt, Homo sapiens
  misc_RNA (1)...(19): siRNA sense strand
cgagacauucgcaucaaau

SEQ ID NO: 669594 - RNA, 19 nt, Homo sapiens
  misc_RNA (1)...(19): siRNA sense strand
cgagacagccaaguccuau

SEQ ID NO: 669595 - RNA, 19 nt, Homo sapiens
  misc_RNA (1)...(19): siRNA sense strand
cggcccaaguugaagaaga

SEQ ID NO: 669596 - RNA, 19 nt, Homo sapiens
  misc_RNA (1)...(19): siRNA sense strand
ggucggguggcguugguaa

SEQ ID NO: 669597 - RNA, 19 nt, Homo sapiens
  misc_RNA (1)...(19): siRNA sense strand
gaaagaacucacgacuaca

SEQ ID NO: 669598 - RNA, 19 nt, Homo sapiens
  misc_RNA (1)...(19): siRNA sense strand
guaaaggugcuggacaagu

SEQ ID NO: 669599 - RNA, 19 nt, Homo sapiens
  misc_RNA (1)...(19): siRNA sense strand
cgggacaggugggugagaa

SEQ ID NO: 669600 - RNA, 19 nt, Homo sapiens
  misc_RNA (1)...(19): siRNA sense strand
gagacagccaaguccuauu

SEQ ID NO: 669601 - RNA, 19 nt, Homo sapiens
  misc_RNA (1)...(19): siRNA sense strand
ucaauggaggcgucugcua

SEQ ID NO: 669602 - RNA, 19 nt, Homo sapiens
  misc_RNA (1)...(19): siRNA sense strand
uauggcaacggcagaaaga

SEQ ID NO: 669603 - RNA, 19 nt, Homo sapiens
  misc_RNA (1)...(19): siRNA sense strand
acaggugggugagaagcaa

SEQ ID NO: 669604 - RNA, 19 nt, Homo sapiens
  misc_RNA (1)...(19): siRNA sense strand
aaccagcgcuacaucuuuu

SEQ ID NO: 669605 - RNA, 19 nt, Homo sapiens
  misc_RNA (1)...(19): siRNA sense strand
acucacgacuacaguucaa

SEQ ID NO: 669606 - RNA, 19 nt, Homo sapiens
  misc_RNA (1)...(19): siRNA sense strand
aaagaacucacgacuacag

SEQ ID NO: 669607 - RNA, 19 nt, Homo sapiens
  misc_RNA (1)...(19): siRNA sense strand
gaacagcccuuagucuuua

SEQ ID NO: 669608 - RNA, 19 nt, Homo sapiens
  misc_RNA (1)...(19): siRNA sense strand
ggaacagcccuuagucuuu

SEQ ID NO: 669609 - RNA, 19 nt, Homo sapiens
  misc_RNA (1)...(19): siRNA sense strand
uaaaggugcuggacaagug

SEQ ID NO: 669610 - RNA, 19 nt, Homo sapiens
  misc_RNA (1)...(19): siRNA sense strand
agaaagaacucacgacuac

SEQ ID NO: 669611 - RNA, 19 nt, Homo sapiens
  misc_RNA (1)...(19): siRNA sense strand
gaaccagcgcuacaucuuu

SEQ ID NO: 669612 - RNA, 19 nt, Homo sapiens
  misc_RNA (1)...(19): siRNA sense strand
gcaagauccugugcacuga

SEQ ID NO: 669613 - RNA, 19 nt, Homo sapiens
  misc_RNA (1)...(19): siRNA sense strand
gagaagcaaucgcugaagu

SEQ ID NO: 669614 - RNA, 19 nt, Homo sapiens
  misc_RNA (1)...(19): siRNA sense strand
gaaaggaaccagcgcuaca

SEQ ID NO: 669615 - RNA, 19 nt, Homo sapiens
  misc_RNA (1)...(19): siRNA sense strand
agaaagaggugggcaagau

SEQ ID NO: 669616 - RNA, 19 nt, Homo sapiens
  misc_RNA (1)...(19): siRNA sense strand
gagacauucgcaucaaaua

SEQ ID NO: 669617 - RNA, 19 nt, Homo sapiens
  misc_RNA (1)...(19): siRNA sense strand
agcaaucgcugaaguguga

SEQ ID NO: 669618 - RNA, 19 nt, Homo sapiens
  misc_RNA (1)...(19): siRNA sense strand
ucaaccagcucuccugcaa

SEQ ID NO: 669619 - RNA, 19 nt, Homo sapiens
  misc_RNA (1)...(19): siRNA sense strand
gacauucgcaucaaauaug

SEQ ID NO: 669620 - RNA, 19 nt, Homo sapiens
  misc_RNA (1)...(19): siRNA sense strand
ggaaccagcgcuacaucuu

SEQ ID NO: 669621 - RNA, 19 nt, Homo sapiens
  misc_RNA (1)...(19): siRNA sense strand
ggaggcgucugcuacuaca

SEQ ID NO: 669622 - RNA, 19 nt, Homo sapiens
  misc_RNA (1)...(19): siRNA sense strand
gaaagaggugggcaagauc

SEQ ID NO: 669623 - RNA, 19 nt, Homo sapiens
  misc_RNA (1)...(19): siRNA sense strand
cagaaagaacucacgacua

SEQ ID NO: 669624 - RNA, 19 nt, Homo sapiens
  misc_RNA (1)...(19): siRNA sense strand
gugugucgcucgccugcua

SEQ ID NO: 669625 - RNA, 19 nt, Homo sapiens
  misc_RNA (1)...(19): siRNA sense strand
ggcccaaguugaagaagau

SEQ ID NO: 669626 - RNA, 19 nt, Homo sapiens
  misc_RNA (1)...(19): siRNA sense strand
gaagcaaucgcugaagugu

SEQ ID NO: 669627 - RNA, 19 nt, Homo sapiens
  misc_RNA (1)...(19): siRNA sense strand
gcaacgagacagccaaguc

SEQ ID NO: 669628 - RNA, 19 nt, Homo sapiens
  misc_RNA (1)...(19): siRNA sense strand
ccgagacauucgcaucaaa

SEQ ID NO: 669629 - RNA, 19 nt, Homo sapiens
  misc_RNA (1)...(19): siRNA sense strand
agacagccaaguccuauug

SEQ ID NO: 669630 - RNA, 19 nt, Homo sapiens
  misc_RNA (1)...(19): siRNA sense strand
caaccgcagccgagacauu

SEQ ID NO: 669631 - RNA, 19 nt, Homo sapiens
  misc_RNA (1)...(19): siRNA sense strand
ugguaaaggugcuggacaa

SEQ ID NO: 669632 - RNA, 19 nt, Homo sapiens
  misc_RNA (1)...(19): siRNA sense strand
gacuacaguucaacaaggu

SEQ ID NO: 669633 - RNA, 19 nt, Homo sapiens
  misc_RNA (1)...(19): siRNA sense strand
ggaggacgcuggggaguau

SEQ ID NO: 669634 - RNA, 19 nt, Homo sapiens
  misc_RNA (1)...(19): siRNA sense strand
ccacggaacagcccuuagu

SEQ ID NO: 669635 - RNA, 19 nt, Homo sapiens
  misc_RNA (1)...(19): siRNA sense strand
ccaaguugaagaagaugaa

SEQ ID NO: 669636 - RNA, 19 nt, Homo sapiens
  misc_RNA (1)...(19): siRNA sense strand
caacaacagcagcaucucu

SEQ ID NO: 669637 - RNA, 19 nt, Homo sapiens
  misc_RNA (1)...(19): siRNA sense strand
cggaacagcccuuagucuu

SEQ ID NO: 669638 - RNA, 19 nt, Homo sapiens
  misc_RNA (1)...(19): siRNA sense strand
gugugccgcucgaaaggaa

SEQ ID NO: 669639 - RNA, 19 nt, Homo sapiens
  misc_RNA (1)...(19): siRNA sense strand
gccgagacauucgcaucaa

SEQ ID NO: 669640 - RNA, 19 nt, Homo sapiens
  misc_RNA (1)...(19): siRNA sense strand
ggugguggagggcaaggua

SEQ ID NO: 669641 - RNA, 19 nt, Homo sapiens
  misc_RNA (1)...(19): siRNA sense strand
gugagaagcaaucgcugaa

SEQ ID NO: 669642 - RNA, 19 nt, Homo sapiens
  misc_RNA (1)...(19): siRNA sense strand
agacauucgcaucaaauau

SEQ ID NO: 669643 - RNA, 19 nt, Homo sapiens
  misc_RNA (1)...(19): siRNA sense strand
cgagacauucgcaucaaau

SEQ ID NO: 669644 - RNA, 19 nt, Homo sapiens
  misc_RNA (1)...(19): siRNA sense strand
cgagacagccaaguccuau

SEQ ID NO: 669645 - RNA, 19 nt, Homo sapiens
  misc_RNA (1)...(19): siRNA sense strand
cggcccaaguugaagaaga

SEQ ID NO: 669646 - RNA, 19 nt, Homo sapiens
  misc_RNA (1)...(19): siRNA sense strand
ggucggguggcguugguaa

SEQ ID NO: 669647 - RNA, 19 nt, Homo sapiens
  misc_RNA (1)...(19): siRNA sense strand
gaaagaacucacgacuaca

SEQ ID NO: 669648 - RNA, 19 nt, Homo sapiens
  misc_RNA (1)...(19): siRNA sense strand
guaaaggugcuggacaagu

SEQ ID NO: 669649 - RNA, 19 nt, Homo sapiens
  misc_RNA (1)...(19): siRNA sense strand
cgggacaggugggugagaa

SEQ ID NO: 669650 - RNA, 19 nt, Homo sapiens
  misc_RNA (1)...(19): siRNA sense strand
gagacagccaaguccuauu

SEQ ID NO: 669651 - RNA, 19 nt, Homo sapiens
  misc_RNA (1)...(19): siRNA sense strand
ucaauggaggcgucugcua

SEQ ID NO: 669652 - RNA, 19 nt, Homo sapiens
  misc_RNA (1)...(19): siRNA sense strand
uauggcaacggcagaaaga

SEQ ID NO: 669653 - RNA, 19 nt, Homo sapiens
  misc_RNA (1)...(19): siRNA sense strand
acaggugggugagaagcaa

SEQ ID NO: 669654 - RNA, 19 nt, Homo sapiens
  misc_RNA (1)...(19): siRNA sense strand
aaccagcgcuacaucuuuu

SEQ ID NO: 669655 - RNA, 19 nt, Homo sapiens
  misc_RNA (1)...(19): siRNA sense strand
acucacgacuacaguucaa

SEQ ID NO: 669656 - RNA, 19 nt, Homo sapiens
  misc_RNA (1)...(19): siRNA sense strand
aaagaacucacgacuacag

SEQ ID NO: 669657 - RNA, 19 nt, Homo sapiens
  misc_RNA (1)...(19): siRNA sense strand
gaacagcccuuagucuuua

SEQ ID NO: 669658 - RNA, 19 nt, Homo sapiens
  misc_RNA (1)...(19): siRNA sense strand
ggaacagcccuuagucuuu

SEQ ID NO: 669659 - RNA, 19 nt, Homo sapiens
  misc_RNA (1)...(19): siRNA sense strand
uaaaggugcuggacaagug

SEQ ID NO: 669660 - RNA, 19 nt, Homo sapiens
  misc_RNA (1)...(19): siRNA sense strand
agaaagaacucacgacuac

SEQ ID NO: 669661 - RNA, 19 nt, Homo sapiens
  misc_RNA (1)...(19): siRNA sense strand
gaaccagcgcuacaucuuu

SEQ ID NO: 669662 - RNA, 19 nt, Homo sapiens
  misc_RNA (1)...(19): siRNA sense strand
gcaagauccugugcacuga

SEQ ID NO: 669663 - RNA, 19 nt, Homo sapiens
  misc_RNA (1)...(19): siRNA sense strand
gagaagcaaucgcugaagu

SEQ ID NO: 669664 - RNA, 19 nt, Homo sapiens
  misc_RNA (1)...(19): siRNA sense strand
gaaaggaaccagcgcuaca

SEQ ID NO: 669665 - RNA, 19 nt, Homo sapiens
  misc_RNA (1)...(19): siRNA sense strand
agaaagaggugggcaagau

SEQ ID NO: 669666 - RNA, 19 nt, Homo sapiens
  misc_RNA (1)...(19): siRNA sense strand
gagacauucgcaucaaaua

SEQ ID NO: 669667 - RNA, 19 nt, Homo sapiens
  misc_RNA (1)...(19): siRNA sense strand
agcaaucgcugaaguguga

SEQ ID NO: 669668 - RNA, 19 nt, Homo sapiens
  misc_RNA (1)...(19): siRNA sense strand
ucaaccagcucuccugcaa

SEQ ID NO: 669669 - RNA, 19 nt, Homo sapiens
  misc_RNA (1)...(19): siRNA sense strand
gacauucgcaucaaauaug

SEQ ID NO: 669670 - RNA, 19 nt, Homo sapiens
  misc_RNA (1)...(19): siRNA sense strand
ggaaccagcgcuacaucuu

SEQ ID NO: 669671 - RNA, 19 nt, Homo sapiens
  misc_RNA (1)...(19): siRNA sense strand
ggaggcgucugcuacuaca

SEQ ID NO: 669672 - RNA, 19 nt, Homo sapiens
  misc_RNA (1)...(19): siRNA sense strand
gaaagaggugggcaagauc

SEQ ID NO: 669673 - RNA, 19 nt, Homo sapiens
  misc_RNA (1)...(19): siRNA sense strand
cagaaagaacucacgacua

SEQ ID NO: 669674 - RNA, 19 nt, Homo sapiens
  misc_RNA (1)...(19): siRNA sense strand
gugugucgcucgccugcua

SEQ ID NO: 669675 - RNA, 19 nt, Homo sapiens
  misc_RNA (1)...(19): siRNA sense strand
ggcccaaguugaagaagau

SEQ ID NO: 669676 - RNA, 19 nt, Homo sapiens
  misc_RNA (1)...(19): siRNA sense strand
gaagcaaucgcugaagugu

SEQ ID NO: 669677 - RNA, 19 nt, Homo sapiens
  misc_RNA (1)...(19): siRNA sense strand
gcaacgagacagccaaguc

SEQ ID NO: 669678 - RNA, 19 nt, Homo sapiens
  misc_RNA (1)...(19): siRNA sense strand
ccgagacauucgcaucaaa

SEQ ID NO: 669679 - RNA, 19 nt, Homo sapiens
  misc_RNA (1)...(19): siRNA sense strand
agacagccaaguccuauug

SEQ ID NO: 669680 - RNA, 19 nt, Homo sapiens
  misc_RNA (1)...(19): siRNA sense strand
caaccgcagccgagacauu

SEQ ID NO: 669681 - RNA, 19 nt, Homo sapiens
  misc_RNA (1)...(19): siRNA sense strand
ugguaaaggugcuggacaa

SEQ ID NO: 669682 - RNA, 19 nt, Homo sapiens
  misc_RNA (1)...(19): siRNA sense strand
gacuacaguucaacaaggu

SEQ ID NO: 669683 - RNA, 19 nt, Homo sapiens
  misc_RNA (1)...(19): siRNA sense strand
ggaggacgcuggggaguau

SEQ ID NO: 669684 - RNA, 19 nt, Homo sapiens
  misc_RNA (1)...(19): siRNA sense strand
ccacggaacagcccuuagu

SEQ ID NO: 669685 - RNA, 19 nt, Homo sapiens
  misc_RNA (1)...(19): siRNA sense strand
ccaaguugaagaagaugaa

SEQ ID NO: 669686 - RNA, 19 nt, Homo sapiens
  misc_RNA (1)...(19): siRNA sense strand
caacaacagcagcaucucu

SEQ ID NO: 669687 - RNA, 19 nt, Homo sapiens
  misc_RNA (1)...(19): siRNA sense strand
cggaacagcccuuagucuu

SEQ ID NO: 669688 - RNA, 19 nt, Homo sapiens
  misc_RNA (1)...(19): siRNA sense strand
gugugccgcucgaaaggaa

SEQ ID NO: 669689 - RNA, 19 nt, Homo sapiens
  misc_RNA (1)...(19): siRNA sense strand
gccgagacauucgcaucaa

SEQ ID NO: 669690 - RNA, 19 nt, Homo sapiens
  misc_RNA (1)...(19): siRNA sense strand
ggugguggagggcaaggua

SEQ ID NO: 669691 - RNA, 19 nt, Homo sapiens
  misc_RNA (1)...(19): siRNA sense strand
gugagaagcaaucgcugaa

SEQ ID NO: 669692 - RNA, 19 nt, Homo sapiens
  misc_RNA (1)...(19): siRNA sense strand
agacauucgcaucaaauau

SEQ ID NO: 669693 - RNA, 19 nt, Homo sapiens
  misc_RNA (1)...(19): siRNA sense strand
cgagacauucgcaucaaau

SEQ ID NO: 669694 - RNA, 19 nt, Homo sapiens
  misc_RNA (1)...(19): siRNA sense strand
cgagacagccaaguccuau

SEQ ID NO: 669695 - RNA, 19 nt, Homo sapiens
  misc_RNA (1)...(19): siRNA sense strand
cggcccaaguugaagaaga

SEQ ID NO: 669696 - RNA, 19 nt, Homo sapiens
  misc_RNA (1)...(19): siRNA sense strand
ggucggguggcguugguaa

SEQ ID NO: 669697 - RNA, 19 nt, Homo sapiens
  misc_RNA (1)...(19): siRNA sense strand
gaaagaacucacgacuaca

SEQ ID NO: 669698 - RNA, 19 nt, Homo sapiens
  misc_RNA (1)...(19): siRNA sense strand
guaaaggugcuggacaagu

SEQ ID NO: 669699 - RNA, 19 nt, Homo sapiens
  misc_RNA (1)...(19): siRNA sense strand
cgggacaggugggugagaa

SEQ ID NO: 669700 - RNA, 19 nt, Homo sapiens
  misc_RNA (1)...(19): siRNA sense strand
gagacagccaaguccuauu

SEQ ID NO: 669701 - RNA, 19 nt, Homo sapiens
  misc_RNA (1)...(19): siRNA sense strand
ucaauggaggcgucugcua

SEQ ID NO: 669702 - RNA, 19 nt, Homo sapiens
  misc_RNA (1)...(19): siRNA sense strand
uauggcaacggcagaaaga

SEQ ID NO: 669703 - RNA, 19 nt, Homo sapiens
  misc_RNA (1)...(19): siRNA sense strand
acaggugggugagaagcaa

SEQ ID NO: 669704 - RNA, 19 nt, Homo sapiens
  misc_RNA (1)...(19): siRNA sense strand
aaccagcgcuacaucuuuu

SEQ ID NO: 669705 - RNA, 19 nt, Homo sapiens
  misc_RNA (1)...(19): siRNA sense strand
acucacgacuacaguucaa

SEQ ID NO: 669706 - RNA, 19 nt, Homo sapiens
  misc_RNA (1)...(19): siRNA sense strand
aaagaacucacgacuacag

SEQ ID NO: 669707 - RNA, 19 nt, Homo sapiens
  misc_RNA (1)...(19): siRNA sense strand
gaacagcccuuagucuuua

SEQ ID NO: 669708 - RNA, 19 nt, Homo sapiens
  misc_RNA (1)...(19): siRNA sense strand
ggaacagcccuuagucuuu

SEQ ID NO: 669709 - RNA, 19 nt, Homo sapiens
  misc_RNA (1)...(19): siRNA sense strand
uaaaggugcuggacaagug

SEQ ID NO: 669710 - RNA, 19 nt, Homo sapiens
  misc_RNA (1)...(19): siRNA sense strand
agaaagaacucacgacuac

SEQ ID NO: 669711 - RNA, 19 nt, Homo sapiens
  misc_RNA (1)...(19): siRNA sense strand
gaaccagcgcuacaucuuu

SEQ ID NO: 669712 - RNA, 19 nt, Homo sapiens
  misc_RNA (1)...(19): siRNA sense strand
gcaagauccugugcacuga

SEQ ID NO: 669713 - RNA, 19 nt, Homo sapiens
  misc_RNA (1)...(19): siRNA sense strand
gagaagcaaucgcugaagu

SEQ ID NO: 669714 - RNA, 19 nt, Homo sapiens
  misc_RNA (1)...(19): siRNA sense strand
gaaaggaaccagcgcuaca

SEQ ID NO: 669715 - RNA, 19 nt, Homo sapiens
  misc_RNA (1)...(19): siRNA sense strand
agaaagaggugggcaagau

SEQ ID NO: 669716 - RNA, 19 nt, Homo sapiens
  misc_RNA (1)...(19): siRNA sense strand
gagacauucgcaucaaaua

SEQ ID NO: 669717 - RNA, 19 nt, Homo sapiens
  misc_RNA (1)...(19): siRNA sense strand
agcaaucgcugaaguguga

SEQ ID NO: 669718 - RNA, 19 nt, Homo sapiens
  misc_RNA (1)...(19): siRNA sense strand
ucaaccagcucuccugcaa

SEQ ID NO: 669719 - RNA, 19 nt, Homo sapiens
  misc_RNA (1)...(19): siRNA sense strand
gacauucgcaucaaauaug

SEQ ID NO: 669720 - RNA, 19 nt, Homo sapiens
  misc_RNA (1)...(19): siRNA sense strand
ggaaccagcgcuacaucuu

SEQ ID NO: 669721 - RNA, 19 nt, Homo sapiens
  misc_RNA (1)...(19): siRNA sense strand
ggaggcgucugcuacuaca

SEQ ID NO: 669722 - RNA, 19 nt, Homo sapiens
  misc_RNA (1)...(19): siRNA sense strand
gaaagaggugggcaagauc

SEQ ID NO: 669723 - RNA, 19 nt, Homo sapiens
  misc_RNA (1)...(19): siRNA sense strand
cagaaagaacucacgacua

SEQ ID NO: 669724 - RNA, 19 nt, Homo sapiens
  misc_RNA (1)...(19): siRNA sense strand
gugugucgcucgccugcua

SEQ ID NO: 669725 - RNA, 19 nt, Homo sapiens
  misc_RNA (1)...(19): siRNA sense strand
ggcccaaguugaagaagau

SEQ ID NO: 669726 - RNA, 19 nt, Homo sapiens
  misc_RNA (1)...(19): siRNA sense strand
gaagcaaucgcugaagugu

SEQ ID NO: 669727 - RNA, 19 nt, Homo sapiens
  misc_RNA (1)...(19): siRNA sense strand
gcaacgagacagccaaguc

SEQ ID NO: 669728 - RNA, 19 nt, Homo sapiens
  misc_RNA (1)...(19): siRNA sense strand
ccgagacauucgcaucaaa

SEQ ID NO: 669729 - RNA, 19 nt, Homo sapiens
  misc_RNA (1)...(19): siRNA sense strand
agacagccaaguccuauug

SEQ ID NO: 669730 - RNA, 19 nt, Homo sapiens
  misc_RNA (1)...(19): siRNA sense strand
caaccgcagccgagacauu

SEQ ID NO: 669731 - RNA, 19 nt, Homo sapiens
  misc_RNA (1)...(19): siRNA sense strand
ugguaaaggugcuggacaa

SEQ ID NO: 669732 - RNA, 19 nt, Homo sapiens
  misc_RNA (1)...(19): siRNA sense strand
gacuacaguucaacaaggu

SEQ ID NO: 669733 - RNA, 19 nt, Homo sapiens
  misc_RNA (1)...(19): siRNA sense strand
ggaggacgcuggggaguau

SEQ ID NO: 669734 - RNA, 19 nt, Homo sapiens
  misc_RNA (1)...(19): siRNA sense strand
ccacggaacagcccuuagu

SEQ ID NO: 669735 - RNA, 19 nt, Homo sapiens
  misc_RNA (1)...(19): siRNA sense strand
ccaaguugaagaagaugaa

SEQ ID NO: 669736 - RNA, 19 nt, Homo sapiens
  misc_RNA (1)...(19): siRNA sense strand
caacaacagcagcaucucu

SEQ ID NO: 669737 - RNA, 19 nt, Homo sapiens
  misc_RNA (1)...(19): siRNA sense strand
cggaacagcccuuagucuu

SEQ ID NO: 669738 - RNA, 19 nt, Homo sapiens
  misc_RNA (1)...(19): siRNA sense strand
gugugccgcucgaaaggaa

SEQ ID NO: 669739 - RNA, 19 nt, Homo sapiens
  misc_RNA (1)...(19): siRNA sense strand
gccgagacauucgcaucaa

SEQ ID NO: 669740 - RNA, 19 nt, Homo sapiens
  misc_RNA (1)...(19): siRNA sense strand
ggugguggagggcaaggua

SEQ ID NO: 669741 - RNA, 19 nt, Homo sapiens
  misc_RNA (1)...(19): siRNA sense strand
gugagaagcaaucgcugaa

SEQ ID NO: 669742 - RNA, 19 nt, Homo sapiens
  misc_RNA (1)...(19): siRNA sense strand
agacauucgcaucaaauau

SEQ ID NO: 669743 - RNA, 19 nt, Homo sapiens
  misc_RNA (1)...(19): siRNA sense strand
cgagacauucgcaucaaau

SEQ ID NO: 669744 - RNA, 19 nt, Homo sapiens
  misc_RNA (1)...(19): siRNA sense strand
cgagacagccaaguccuau

SEQ ID NO: 669745 - RNA, 19 nt, Homo sapiens
  misc_RNA (1)...(19): siRNA sense strand
cggcccaaguugaagaaga

SEQ ID NO: 669746 - RNA, 19 nt, Homo sapiens
  misc_RNA (1)...(19): siRNA sense strand
ggucggguggcguugguaa

SEQ ID NO: 669747 - RNA, 19 nt, Homo sapiens
  misc_RNA (1)...(19): siRNA sense strand
gaaagaacucacgacuaca

SEQ ID NO: 669748 - RNA, 19 nt, Homo sapiens
  misc_RNA (1)...(19): siRNA sense strand
guaaaggugcuggacaagu

SEQ ID NO: 669749 - RNA, 19 nt, Homo sapiens
  misc_RNA (1)...(19): siRNA sense strand
cgggacaggugggugagaa

SEQ ID NO: 669750 - RNA, 19 nt, Homo sapiens
  misc_RNA (1)...(19): siRNA sense strand
gagacagccaaguccuauu

SEQ ID NO: 669751 - RNA, 19 nt, Homo sapiens
  misc_RNA (1)...(19): siRNA sense strand
ucaauggaggcgucugcua

SEQ ID NO: 669752 - RNA, 19 nt, Homo sapiens
  misc_RNA (1)...(19): siRNA sense strand
uauggcaacggcagaaaga

SEQ ID NO: 669753 - RNA, 19 nt, Homo sapiens
  misc_RNA (1)...(19): siRNA sense strand
acaggugggugagaagcaa

SEQ ID NO: 669754 - RNA, 19 nt, Homo sapiens
  misc_RNA (1)...(19): siRNA sense strand
aaccagcgcuacaucuuuu

SEQ ID NO: 669755 - RNA, 19 nt, Homo sapiens
  misc_RNA (1)...(19): siRNA sense strand
acucacgacuacaguucaa

SEQ ID NO: 669756 - RNA, 19 nt, Homo sapiens
  misc_RNA (1)...(19): siRNA sense strand
aaagaacucacgacuacag

SEQ ID NO: 669757 - RNA, 19 nt, Homo sapiens
  misc_RNA (1)...(19): siRNA sense strand
gaacagcccuuagucuuua

SEQ ID NO: 669758 - RNA, 19 nt, Homo sapiens
  misc_RNA (1)...(19): siRNA sense strand
ggaacagcccuuagucuuu

SEQ ID NO: 669759 - RNA, 19 nt, Homo sapiens
  misc_RNA (1)...(19): siRNA sense strand
uaaaggugcuggacaagug

SEQ ID NO: 669760 - RNA, 19 nt, Homo sapiens
  misc_RNA (1)...(19): siRNA sense strand
agaaagaacucacgacuac

SEQ ID NO: 669761 - RNA, 19 nt, Homo sapiens
  misc_RNA (1)...(19): siRNA sense strand
gaaccagcgcuacaucuuu

SEQ ID NO: 669762 - RNA, 19 nt, Homo sapiens
  misc_RNA (1)...(19): siRNA sense strand
gcaagauccugugcacuga

SEQ ID NO: 669763 - RNA, 19 nt, Homo sapiens
  misc_RNA (1)...(19): siRNA sense strand
gagaagcaaucgcugaagu

SEQ ID NO: 669764 - RNA, 19 nt, Homo sapiens
  misc_RNA (1)...(19): siRNA sense strand
gaaaggaaccagcgcuaca

SEQ ID NO: 669765 - RNA, 19 nt, Homo sapiens
  misc_RNA (1)...(19): siRNA sense strand
agaaagaggugggcaagau

SEQ ID NO: 669766 - RNA, 19 nt, Homo sapiens
  misc_RNA (1)...(19): siRNA sense strand
gagacauucgcaucaaaua

SEQ ID NO: 669767 - RNA, 19 nt, Homo sapiens
  misc_RNA (1)...(19): siRNA sense strand
agcaaucgcugaaguguga

SEQ ID NO: 669768 - RNA, 19 nt, Homo sapiens
  misc_RNA (1)...(19): siRNA sense strand
ucaaccagcucuccugcaa

SEQ ID NO: 669769 - RNA, 19 nt, Homo sapiens
  misc_RNA (1)...(19): siRNA sense strand
gacauucgcaucaaauaug

SEQ ID NO: 669770 - RNA, 19 nt, Homo sapiens
  misc_RNA (1)...(19): siRNA sense strand
ggaaccagcgcuacaucuu

SEQ ID NO: 669771 - RNA, 19 nt, Homo sapiens
  misc_RNA (1)...(19): siRNA sense strand
ggaggcgucugcuacuaca

SEQ ID NO: 669772 - RNA, 19 nt, Homo sapiens
  misc_RNA (1)...(19): siRNA sense strand
gaaagaggugggcaagauc

SEQ ID NO: 669773 - RNA, 19 nt, Homo sapiens
  misc_RNA (1)...(19): siRNA sense strand
cagaaagaacucacgacua

SEQ ID NO: 669774 - RNA, 19 nt, Homo sapiens
  misc_RNA (1)...(19): siRNA sense strand
gugugucgcucgccugcua

SEQ ID NO: 669775 - RNA, 19 nt, Homo sapiens
  misc_RNA (1)...(19): siRNA sense strand
ggcccaaguugaagaagau

SEQ ID NO: 669776 - RNA, 19 nt, Homo sapiens
  misc_RNA (1)...(19): siRNA sense strand
gaagcaaucgcugaagugu

SEQ ID NO: 669777 - RNA, 19 nt, Homo sapiens
  misc_RNA (1)...(19): siRNA sense strand
gcaacgagacagccaaguc

SEQ ID NO: 669778 - RNA, 19 nt, Homo sapiens
  misc_RNA (1)...(19): siRNA sense strand
ccgagacauucgcaucaaa

SEQ ID NO: 669779 - RNA, 19 nt, Homo sapiens
  misc_RNA (1)...(19): siRNA sense strand
agacagccaaguccuauug

SEQ ID NO: 669780 - RNA, 19 nt, Homo sapiens
  misc_RNA (1)...(19): siRNA sense strand
caaccgcagccgagacauu

SEQ ID NO: 669781 - RNA, 19 nt, Homo sapiens
  misc_RNA (1)...(19): siRNA sense strand
ugguaaaggugcuggacaa

SEQ ID NO: 669782 - RNA, 19 nt, Homo sapiens
  misc_RNA (1)...(19): siRNA sense strand
gacuacaguucaacaaggu

SEQ ID NO: 669783 - RNA, 19 nt, Homo sapiens
  misc_RNA (1)...(19): siRNA sense strand
ggaggacgcuggggaguau

SEQ ID NO: 669784 - RNA, 19 nt, Homo sapiens
  misc_RNA (1)...(19): siRNA sense strand
ccacggaacagcccuuagu

SEQ ID NO: 669785 - RNA, 19 nt, Homo sapiens
  misc_RNA (1)...(19): siRNA sense strand
ccaaguugaagaagaugaa

SEQ ID NO: 669786 - RNA, 19 nt, Homo sapiens
  misc_RNA (1)...(19): siRNA sense strand
caacaacagcagcaucucu

SEQ ID NO: 669787 - RNA, 19 nt, Homo sapiens
  misc_RNA (1)...(19): siRNA sense strand
cggaacagcccuuagucuu

SEQ ID NO: 669788 - RNA, 19 nt, Homo sapiens
  misc_RNA (1)...(19): siRNA sense strand
gugugccgcucgaaaggaa

SEQ ID NO: 669789 - RNA, 19 nt, Homo sapiens
  misc_RNA (1)...(19): siRNA sense strand
gccgagacauucgcaucaa

SEQ ID NO: 669790 - RNA, 19 nt, Homo sapiens
  misc_RNA (1)...(19): siRNA sense strand
ggugguggagggcaaggua

SEQ ID NO: 669791 - RNA, 19 nt, Homo sapiens
  misc_RNA (1)...(19): siRNA sense strand
gugagaagcaaucgcugaa

SEQ ID NO: 669792 - RNA, 19 nt, Homo sapiens
  misc_RNA (1)...(19): siRNA sense strand
agacauucgcaucaaauau

SEQ ID NO: 669793 - RNA, 19 nt, Homo sapiens
  misc_RNA (1)...(19): siRNA sense strand
cgagacauucgcaucaaau

SEQ ID NO: 669794 - RNA, 19 nt, Homo sapiens
  misc_RNA (1)...(19): siRNA sense strand
cgagacagccaaguccuau

SEQ ID NO: 669795 - RNA, 19 nt, Homo sapiens
  misc_RNA (1)...(19): siRNA sense strand
cggcccaaguugaagaaga

SEQ ID NO: 669796 - RNA, 19 nt, Homo sapiens
  misc_RNA (1)...(19): siRNA sense strand
ggucggguggcguugguaa

SEQ ID NO: 669797 - RNA, 19 nt, Homo sapiens
  misc_RNA (1)...(19): siRNA sense strand
gaaagaacucacgacuaca

SEQ ID NO: 669798 - RNA, 19 nt, Homo sapiens
  misc_RNA (1)...(19): siRNA sense strand
guaaaggugcuggacaagu

SEQ ID NO: 669799 - RNA, 19 nt, Homo sapiens
  misc_RNA (1)...(19): siRNA sense strand
cgggacaggugggugagaa

SEQ ID NO: 669800 - RNA, 19 nt, Homo sapiens
  misc_RNA (1)...(19): siRNA sense strand
gagacagccaaguccuauu

SEQ ID NO: 669801 - RNA, 19 nt, Homo sapiens
  misc_RNA (1)...(19): siRNA sense strand
ucaauggaggcgucugcua

SEQ ID NO: 669802 - RNA, 19 nt, Homo sapiens
  misc_RNA (1)...(19): siRNA sense strand
uauggcaacggcagaaaga

SEQ ID NO: 669803 - RNA, 19 nt, Homo sapiens
  misc_RNA (1)...(19): siRNA sense strand
acaggugggugagaagcaa

SEQ ID NO: 669804 - RNA, 19 nt, Homo sapiens
  misc_RNA (1)...(19): siRNA sense strand
aaccagcgcuacaucuuuu

SEQ ID NO: 669805 - RNA, 19 nt, Homo sapiens
  misc_RNA (1)...(19): siRNA sense strand
acucacgacuacaguucaa

SEQ ID NO: 669806 - RNA, 19 nt, Homo sapiens
  misc_RNA (1)...(19): siRNA sense strand
aaagaacucacgacuacag

SEQ ID NO: 669807 - RNA, 19 nt, Homo sapiens
  misc_RNA (1)...(19): siRNA sense strand
gaacagcccuuagucuuua

SEQ ID NO: 669808 - RNA, 19 nt, Homo sapiens
  misc_RNA (1)...(19): siRNA sense strand
ggaacagcccuuagucuuu

SEQ ID NO: 669809 - RNA, 19 nt, Homo sapiens
  misc_RNA (1)...(19): siRNA sense strand
uaaaggugcuggacaagug

SEQ ID NO: 669810 - RNA, 19 nt, Homo sapiens
  misc_RNA (1)...(19): siRNA sense strand
agaaagaacucacgacuac

SEQ ID NO: 669811 - RNA, 19 nt, Homo sapiens
  misc_RNA (1)...(19): siRNA sense strand
gaaccagcgcuacaucuuu

SEQ ID NO: 669812 - RNA, 19 nt, Homo sapiens
  misc_RNA (1)...(19): siRNA sense strand
gcaagauccugugcacuga

SEQ ID NO: 669813 - RNA, 19 nt, Homo sapiens
  misc_RNA (1)...(19): siRNA sense strand
gagaagcaaucgcugaagu

SEQ ID NO: 669814 - RNA, 19 nt, Homo sapiens
  misc_RNA (1)...(19): siRNA sense strand
gaaaggaaccagcgcuaca

SEQ ID NO: 669815 - RNA, 19 nt, Homo sapiens
  misc_RNA (1)...(19): siRNA sense strand
agaaagaggugggcaagau

SEQ ID NO: 669816 - RNA, 19 nt, Homo sapiens
  misc_RNA (1)...(19): siRNA sense strand
gagacauucgcaucaaaua

SEQ ID NO: 669817 - RNA, 19 nt, Homo sapiens
  misc_RNA (1)...(19): siRNA sense strand
agcaaucgcugaaguguga

SEQ ID NO: 669818 - RNA, 19 nt, Homo sapiens
  misc_RNA (1)...(19): siRNA sense strand
ucaaccagcucuccugcaa

SEQ ID NO: 669819 - RNA, 19 nt, Homo sapiens
  misc_RNA (1)...(19): siRNA sense strand
gacauucgcaucaaauaug

SEQ ID NO: 669820 - RNA, 19 nt, Homo sapiens
  misc_RNA (1)...(19): siRNA sense strand
ggaaccagcgcuacaucuu

SEQ ID NO: 669821 - RNA, 19 nt, Homo sapiens
  misc_RNA (1)...(19): siRNA sense strand
ggaggcgucugcuacuaca

SEQ ID NO: 669822 - RNA, 19 nt, Homo sapiens
  misc_RNA (1)...(19): siRNA sense strand
gaaagaggugggcaagauc

SEQ ID NO: 669823 - RNA, 19 nt, Homo sapiens
  misc_RNA (1)...(19): siRNA sense strand
cagaaagaacucacgacua

SEQ ID NO: 669824 - RNA, 19 nt, Homo sapiens
  misc_RNA (1)...(19): siRNA sense strand
gugugucgcucgccugcua

SEQ ID NO: 669825 - RNA, 19 nt, Homo sapiens
  misc_RNA (1)...(19): siRNA sense strand
ggcccaaguugaagaagau

SEQ ID NO: 669826 - RNA, 19 nt, Homo sapiens
  misc_RNA (1)...(19): siRNA sense strand
gaagcaaucgcugaagugu

SEQ ID NO: 669827 - RNA, 19 nt, Homo sapiens
  misc_RNA (1)...(19): siRNA sense strand
gcaacgagacagccaaguc

SEQ ID NO: 669828 - RNA, 19 nt, Homo sapiens
  misc_RNA (1)...(19): siRNA sense strand
ccgagacauucgcaucaaa

SEQ ID NO: 669829 - RNA, 19 nt, Homo sapiens
  misc_RNA (1)...(19): siRNA sense strand
agacagccaaguccuauug

SEQ ID NO: 669830 - RNA, 19 nt, Homo sapiens
  misc_RNA (1)...(19): siRNA sense strand
caaccgcagccgagacauu

SEQ ID NO: 669831 - RNA, 19 nt, Homo sapiens
  misc_RNA (1)...(19): siRNA sense strand
ugguaaaggugcuggacaa

SEQ ID NO: 669832 - RNA, 19 nt, Homo sapiens
  misc_RNA (1)...(19): siRNA sense strand
gacuacaguucaacaaggu

SEQ ID NO: 669833 - RNA, 19 nt, Homo sapiens
  misc_RNA (1)...(19): siRNA sense strand
ggaggacgcuggggaguau

SEQ ID NO: 669834 - RNA, 19 nt, Homo sapiens
  misc_RNA (1)...(19): siRNA sense strand
ccacggaacagcccuuagu

SEQ ID NO: 669835 - RNA, 19 nt, Homo sapiens
  misc_RNA (1)...(19): siRNA sense strand
ccaaguugaagaagaugaa

SEQ ID NO: 669836 - RNA, 19 nt, Homo sapiens
  misc_RNA (1)...(19): siRNA sense strand
caacaacagcagcaucucu

SEQ ID NO: 669837 - RNA, 19 nt, Homo sapiens
  misc_RNA (1)...(19): siRNA sense strand
cggaacagcccuuagucuu

SEQ ID NO: 669838 - RNA, 19 nt, Homo sapiens
  misc_RNA (1)...(19): siRNA sense strand
gugugccgcucgaaaggaa

SEQ ID NO: 669839 - RNA, 19 nt, Homo sapiens
  misc_RNA (1)...(19): siRNA sense strand
gccgagacauucgcaucaa

SEQ ID NO: 669840 - RNA, 19 nt, Homo sapiens
  misc_RNA (1)...(19): siRNA sense strand
ggugguggagggcaaggua

SEQ ID NO: 669841 - RNA, 19 nt, Homo sapiens
  misc_RNA (1)...(19): siRNA sense strand
gugagaagcaaucgcugaa

SEQ ID NO: 669842 - RNA, 19 nt, Homo sapiens
  misc_RNA (1)...(19): siRNA sense strand
agacauucgcaucaaauau

SEQ ID NO: 669843 - RNA, 19 nt, Homo sapiens
  misc_RNA (1)...(19): siRNA sense strand
cgagacauucgcaucaaau

SEQ ID NO: 669844 - RNA, 19 nt, Homo sapiens
  misc_RNA (1)...(19): siRNA sense strand
cgagacagccaaguccuau

SEQ ID NO: 669845 - RNA, 19 nt, Homo sapiens
  misc_RNA (1)...(19): siRNA sense strand
cggcccaaguugaagaaga

SEQ ID NO: 669846 - RNA, 19 nt, Homo sapiens
  misc_RNA (1)...(19): siRNA sense strand
ggucggguggcguugguaa

SEQ ID NO: 669847 - RNA, 19 nt, Homo sapiens
  misc_RNA (1)...(19): siRNA sense strand
gaaagaacucacgacuaca

SEQ ID NO: 669848 - RNA, 19 nt, Homo sapiens
  misc_RNA (1)...(19): siRNA sense strand
guaaaggugcuggacaagu

SEQ ID NO: 669849 - RNA, 19 nt, Homo sapiens
  misc_RNA (1)...(19): siRNA sense strand
cgggacaggugggugagaa

SEQ ID NO: 669850 - RNA, 19 nt, Homo sapiens
  misc_RNA (1)...(19): siRNA sense strand
gagacagccaaguccuauu

SEQ ID NO: 669851 - RNA, 19 nt, Homo sapiens
  misc_RNA (1)...(19): siRNA sense strand
ucaauggaggcgucugcua

SEQ ID NO: 669852 - RNA, 19 nt, Homo sapiens
  misc_RNA (1)...(19): siRNA sense strand
uauggcaacggcagaaaga

SEQ ID NO: 669853 - RNA, 19 nt, Homo sapiens
  misc_RNA (1)...(19): siRNA sense strand
acaggugggugagaagcaa

SEQ ID NO: 669854 - RNA, 19 nt, Homo sapiens
  misc_RNA (1)...(19): siRNA sense strand
aaccagcgcuacaucuuuu

SEQ ID NO: 669855 - RNA, 19 nt, Homo sapiens
  misc_RNA (1)...(19): siRNA sense strand
acucacgacuacaguucaa

SEQ ID NO: 669856 - RNA, 19 nt, Homo sapiens
  misc_RNA (1)...(19): siRNA sense strand
aaagaacucacgacuacag

SEQ ID NO: 669857 - RNA, 19 nt, Homo sapiens
  misc_RNA (1)...(19): siRNA sense strand
gaacagcccuuagucuuua

SEQ ID NO: 669858 - RNA, 19 nt, Homo sapiens
  misc_RNA (1)...(19): siRNA sense strand
ggaacagcccuuagucuuu

SEQ ID NO: 669859 - RNA, 19 nt, Homo sapiens
  misc_RNA (1)...(19): siRNA sense strand
uaaaggugcuggacaagug

SEQ ID NO: 669860 - RNA, 19 nt, Homo sapiens
  misc_RNA (1)...(19): siRNA sense strand
agaaagaacucacgacuac

SEQ ID NO: 669861 - RNA, 19 nt, Homo sapiens
  misc_RNA (1)...(19): siRNA sense strand
gaaccagcgcuacaucuuu

SEQ ID NO: 669862 - RNA, 19 nt, Homo sapiens
  misc_RNA (1)...(19): siRNA sense strand
gcaagauccugugcacuga

SEQ ID NO: 669863 - RNA, 19 nt, Homo sapiens
  misc_RNA (1)...(19): siRNA sense strand
gagaagcaaucgcugaagu

SEQ ID NO: 669864 - RNA, 19 nt, Homo sapiens
  misc_RNA (1)...(19): siRNA sense strand
gaaaggaaccagcgcuaca

SEQ ID NO: 669865 - RNA, 19 nt, Homo sapiens
  misc_RNA (1)...(19): siRNA sense strand
agaaagaggugggcaagau

SEQ ID NO: 669866 - RNA, 19 nt, Homo sapiens
  misc_RNA (1)...(19): siRNA sense strand
gagacauucgcaucaaaua

SEQ ID NO: 669867 - RNA, 19 nt, Homo sapiens
  misc_RNA (1)...(19): siRNA sense strand
agcaaucgcugaaguguga

SEQ ID NO: 669868 - RNA, 19 nt, Homo sapiens
  misc_RNA (1)...(19): siRNA sense strand
ucaaccagcucuccugcaa

SEQ ID NO: 669869 - RNA, 19 nt, Homo sapiens
  misc_RNA (1)...(19): siRNA sense strand
gacauucgcaucaaauaug

SEQ ID NO: 669870 - RNA, 19 nt, Homo sapiens
  misc_RNA (1)...(19): siRNA sense strand
ggaaccagcgcuacaucuu

SEQ ID NO: 669871 - RNA, 19 nt, Homo sapiens
  misc_RNA (1)...(19): siRNA sense strand
ggaggcgucugcuacuaca

SEQ ID NO: 669872 - RNA, 19 nt, Homo sapiens
  misc_RNA (1)...(19): siRNA sense strand
gaaagaggugggcaagauc

SEQ ID NO: 669873 - RNA, 19 nt, Homo sapiens
  misc_RNA (1)...(19): siRNA sense strand
cagaaagaacucacgacua

SEQ ID NO: 669874 - RNA, 19 nt, Homo sapiens
  misc_RNA (1)...(19): siRNA sense strand
gugugucgcucgccugcua

SEQ ID NO: 669875 - RNA, 19 nt, Homo sapiens
  misc_RNA (1)...(19): siRNA sense strand
ggcccaaguugaagaagau

SEQ ID NO: 669876 - RNA, 19 nt, Homo sapiens
  misc_RNA (1)...(19): siRNA sense strand
gaagcaaucgcugaagugu

SEQ ID NO: 669877 - RNA, 19 nt, Homo sapiens
  misc_RNA (1)...(19): siRNA sense strand
gcaacgagacagccaaguc

SEQ ID NO: 669878 - RNA, 19 nt, Homo sapiens
  misc_RNA (1)...(19): siRNA sense strand
ccgagacauucgcaucaaa

SEQ ID NO: 669879 - RNA, 19 nt, Homo sapiens
  misc_RNA (1)...(19): siRNA sense strand
agacagccaaguccuauug

SEQ ID NO: 669880 - RNA, 19 nt, Homo sapiens
  misc_RNA (1)...(19): siRNA sense strand
caaccgcagccgagacauu

SEQ ID NO: 669881 - RNA, 19 nt, Homo sapiens
  misc_RNA (1)...(19): siRNA sense strand
ugguaaaggugcuggacaa

SEQ ID NO: 669882 - RNA, 19 nt, Homo sapiens
  misc_RNA (1)...(19): siRNA sense strand
gacuacaguucaacaaggu

SEQ ID NO: 669883 - RNA, 19 nt, Homo sapiens
  misc_RNA (1)...(19): siRNA sense strand
ggaggacgcuggggaguau

SEQ ID NO: 669884 - RNA, 19 nt, Homo sapiens
  misc_RNA (1)...(19): siRNA sense strand
ccacggaacagcccuuagu

SEQ ID NO: 669885 - RNA, 19 nt, Homo sapiens
  misc_RNA (1)...(19): siRNA sense strand
ccaaguugaagaagaugaa

SEQ ID NO: 669886 - RNA, 19 nt, Homo sapiens
  misc_RNA (1)...(19): siRNA sense strand
caacaacagcagcaucucu

SEQ ID NO: 669887 - RNA, 19 nt, Homo sapiens
  misc_RNA (1)...(19): siRNA sense strand
cggaacagcccuuagucuu

SEQ ID NO: 669888 - RNA, 19 nt, Homo sapiens
  misc_RNA (1)...(19): siRNA sense strand
gugugccgcucgaaaggaa

SEQ ID NO: 669889 - RNA, 19 nt, Homo sapiens
  misc_RNA (1)...(19): siRNA sense strand
gccgagacauucgcaucaa

SEQ ID NO: 669890 - RNA, 19 nt, Homo sapiens
  misc_RNA (1)...(19): siRNA sense strand
ggugguggagggcaaggua

SEQ ID NO: 669891 - RNA, 19 nt, Homo sapiens
  misc_RNA (1)...(19): siRNA sense strand
gugagaagcaaucgcugaa

SEQ ID NO: 669892 - RNA, 19 nt, Homo sapiens
  misc_RNA (1)...(19): siRNA sense strand
agacauucgcaucaaauau

SEQ ID NO: 669893 - RNA, 19 nt, Homo sapiens
  misc_RNA (1)...(19): siRNA sense strand
cgagacauucgcaucaaau

SEQ ID NO: 669894 - RNA, 19 nt, Homo sapiens
  misc_RNA (1)...(19): siRNA sense strand
cgagacagccaaguccuau

SEQ ID NO: 669895 - RNA, 19 nt, Homo sapiens
  misc_RNA (1)...(19): siRNA sense strand
cggcccaaguugaagaaga

SEQ ID NO: 669896 - RNA, 19 nt, Homo sapiens
  misc_RNA (1)...(19): siRNA sense strand
ggucggguggcguugguaa

SEQ ID NO: 669897 - RNA, 19 nt, Homo sapiens
  misc_RNA (1)...(19): siRNA sense strand
gaaagaacucacgacuaca

SEQ ID NO: 669898 - RNA, 19 nt, Homo sapiens
  misc_RNA (1)...(19): siRNA sense strand
guaaaggugcuggacaagu

SEQ ID NO: 669899 - RNA, 19 nt, Homo sapiens
  misc_RNA (1)...(19): siRNA sense strand
cgggacaggugggugagaa

SEQ ID NO: 669900 - RNA, 19 nt, Homo sapiens
  misc_RNA (1)...(19): siRNA sense strand
gagacagccaaguccuauu

SEQ ID NO: 669901 - RNA, 19 nt, Homo sapiens
  misc_RNA (1)...(19): siRNA sense strand
ucaauggaggcgucugcua

SEQ ID NO: 669902 - RNA, 19 nt, Homo sapiens
  misc_RNA (1)...(19): siRNA sense strand
uauggcaacggcagaaaga

SEQ ID NO: 669903 - RNA, 19 nt, Homo sapiens
  misc_RNA (1)...(19): siRNA sense strand
acaggugggugagaagcaa

SEQ ID NO: 669904 - RNA, 19 nt, Homo sapiens
  misc_RNA (1)...(19): siRNA sense strand
aaccagcgcuacaucuuuu

SEQ ID NO: 669905 - RNA, 19 nt, Homo sapiens
  misc_RNA (1)...(19): siRNA sense strand
acucacgacuacaguucaa

SEQ ID NO: 669906 - RNA, 19 nt, Homo sapiens
  misc_RNA (1)...(19): siRNA sense strand
aaagaacucacgacuacag

SEQ ID NO: 669907 - RNA, 19 nt, Homo sapiens
  misc_RNA (1)...(19): siRNA sense strand
gaacagcccuuagucuuua

SEQ ID NO: 669908 - RNA, 19 nt, Homo sapiens
  misc_RNA (1)...(19): siRNA sense strand
ggaacagcccuuagucuuu

SEQ ID NO: 669909 - RNA, 19 nt, Homo sapiens
  misc_RNA (1)...(19): siRNA sense strand
uaaaggugcuggacaagug

SEQ ID NO: 669910 - RNA, 19 nt, Homo sapiens
  misc_RNA (1)...(19): siRNA sense strand
agaaagaacucacgacuac

SEQ ID NO: 669911 - RNA, 19 nt, Homo sapiens
  misc_RNA (1)...(19): siRNA sense strand
gaaccagcgcuacaucuuu

SEQ ID NO: 669912 - RNA, 19 nt, Homo sapiens
  misc_RNA (1)...(19): siRNA sense strand
gcaagauccugugcacuga

SEQ ID NO: 669913 - RNA, 19 nt, Homo sapiens
  misc_RNA (1)...(19): siRNA sense strand
gagaagcaaucgcugaagu

SEQ ID NO: 669914 - RNA, 19 nt, Homo sapiens
  misc_RNA (1)...(19): siRNA sense strand
gaaaggaaccagcgcuaca

SEQ ID NO: 669915 - RNA, 19 nt, Homo sapiens
  misc_RNA (1)...(19): siRNA sense strand
agaaagaggugggcaagau

SEQ ID NO: 669916 - RNA, 19 nt, Homo sapiens
  misc_RNA (1)...(19): siRNA sense strand
gagacauucgcaucaaaua

SEQ ID NO: 669917 - RNA, 19 nt, Homo sapiens
  misc_RNA (1)...(19): siRNA sense strand
agcaaucgcugaaguguga

SEQ ID NO: 669918 - RNA, 19 nt, Homo sapiens
  misc_RNA (1)...(19): siRNA sense strand
ucaaccagcucuccugcaa

SEQ ID NO: 669919 - RNA, 19 nt, Homo sapiens
  misc_RNA (1)...(19): siRNA sense strand
gacauucgcaucaaauaug

SEQ ID NO: 669920 - RNA, 19 nt, Homo sapiens
  misc_RNA (1)...(19): siRNA sense strand
ggaaccagcgcuacaucuu

SEQ ID NO: 669921 - RNA, 19 nt, Homo sapiens
  misc_RNA (1)...(19): siRNA sense strand
ggaggcgucugcuacuaca

SEQ ID NO: 669922 - RNA, 19 nt, Homo sapiens
  misc_RNA (1)...(19): siRNA sense strand
gaaagaggugggcaagauc

SEQ ID NO: 669923 - RNA, 19 nt, Homo sapiens
  misc_RNA (1)...(19): siRNA sense strand
cagaaagaacucacgacua

SEQ ID NO: 669924 - RNA, 19 nt, Homo sapiens
  misc_RNA (1)...(19): siRNA sense strand
gugugucgcucgccugcua

SEQ ID NO: 669925 - RNA, 19 nt, Homo sapiens
  misc_RNA (1)...(19): siRNA sense strand
ggcccaaguugaagaagau

SEQ ID NO: 669926 - RNA, 19 nt, Homo sapiens
  misc_RNA (1)...(19): siRNA sense strand
gaagcaaucgcugaagugu

SEQ ID NO: 669927 - RNA, 19 nt, Homo sapiens
  misc_RNA (1)...(19): siRNA sense strand
gcaacgagacagccaaguc

SEQ ID NO: 669928 - RNA, 19 nt, Homo sapiens
  misc_RNA (1)...(19): siRNA sense strand
ccgagacauucgcaucaaa

SEQ ID NO: 669929 - RNA, 19 nt, Homo sapiens
  misc_RNA (1)...(19): siRNA sense strand
agacagccaaguccuauug

SEQ ID NO: 669930 - RNA, 19 nt, Homo sapiens
  misc_RNA (1)...(19): siRNA sense strand
caaccgcagccgagacauu

SEQ ID NO: 669931 - RNA, 19 nt, Homo sapiens
  misc_RNA (1)...(19): siRNA sense strand
ugguaaaggugcuggacaa

SEQ ID NO: 669932 - RNA, 19 nt, Homo sapiens
  misc_RNA (1)...(19): siRNA sense strand
gacuacaguucaacaaggu

SEQ ID NO: 669933 - RNA, 19 nt, Homo sapiens
  misc_RNA (1)...(19): siRNA sense strand
ggaggacgcuggggaguau

SEQ ID NO: 669934 - RNA, 19 nt, Homo sapiens
  misc_RNA (1)...(19): siRNA sense strand
ccacggaacagcccuuagu

SEQ ID NO: 669935 - RNA, 19 nt, Homo sapiens
  misc_RNA (1)...(19): siRNA sense strand
ccaaguugaagaagaugaa

SEQ ID NO: 669936 - RNA, 19 nt, Homo sapiens
  misc_RNA (1)...(19): siRNA sense strand
caacaacagcagcaucucu

SEQ ID NO: 669937 - RNA, 19 nt, Homo sapiens
  misc_RNA (1)...(19): siRNA sense strand
cggaacagcccuuagucuu

SEQ ID NO: 669938 - RNA, 19 nt, Homo sapiens
  misc_RNA (1)...(19): siRNA sense strand
gugugccgcucgaaaggaa

SEQ ID NO: 669939 - RNA, 19 nt, Homo sapiens
  misc_RNA (1)...(19): siRNA sense strand
gccgagacauucgcaucaa

SEQ ID NO: 669940 - RNA, 19 nt, Homo sapiens
  misc_RNA (1)...(19): siRNA sense strand
ggugguggagggcaaggua

SEQ ID NO: 669941 - RNA, 19 nt, Homo sapiens
  misc_RNA (1)...(19): siRNA sense strand
gugagaagcaaucgcugaa

SEQ ID NO: 669942 - RNA, 19 nt, Homo sapiens
  misc_RNA (1)...(19): siRNA sense strand
agacauucgcaucaaauau

SEQ ID NO: 669943 - RNA, 19 nt, Homo sapiens
  misc_RNA (1)...(19): siRNA sense strand
cgagacauucgcaucaaau

SEQ ID NO: 669944 - RNA, 19 nt, Homo sapiens
  misc_RNA (1)...(19): siRNA sense strand
cgagacagccaaguccuau

SEQ ID NO: 669945 - RNA, 19 nt, Homo sapiens
  misc_RNA (1)...(19): siRNA sense strand
cggcccaaguugaagaaga

SEQ ID NO: 669946 - RNA, 19 nt, Homo sapiens
  misc_RNA (1)...(19): siRNA sense strand
ggucggguggcguugguaa

SEQ ID NO: 669947 - RNA, 19 nt, Homo sapiens
  misc_RNA (1)...(19): siRNA sense strand
gaaagaacucacgacuaca

SEQ ID NO: 669948 - RNA, 19 nt, Homo sapiens
  misc_RNA (1)...(19): siRNA sense strand
guaaaggugcuggacaagu

SEQ ID NO: 669949 - RNA, 19 nt, Homo sapiens
  misc_RNA (1)...(19): siRNA sense strand
cgggacaggugggugagaa

SEQ ID NO: 669950 - RNA, 19 nt, Homo sapiens
  misc_RNA (1)...(19): siRNA sense strand
gagacagccaaguccuauu

SEQ ID NO: 669951 - RNA, 19 nt, Homo sapiens
  misc_RNA (1)...(19): siRNA sense strand
ucaauggaggcgucugcua

SEQ ID NO: 669952 - RNA, 19 nt, Homo sapiens
  misc_RNA (1)...(19): siRNA sense strand
uauggcaacggcagaaaga

SEQ ID NO: 669953 - RNA, 19 nt, Homo sapiens
  misc_RNA (1)...(19): siRNA sense strand
acaggugggugagaagcaa

SEQ ID NO: 669954 - RNA, 19 nt, Homo sapiens
  misc_RNA (1)...(19): siRNA sense strand
aaccagcgcuacaucuuuu

SEQ ID NO: 669955 - RNA, 19 nt, Homo sapiens
  misc_RNA (1)...(19): siRNA sense strand
acucacgacuacaguucaa

SEQ ID NO: 669956 - RNA, 19 nt, Homo sapiens
  misc_RNA (1)...(19): siRNA sense strand
aaagaacucacgacuacag

SEQ ID NO: 669957 - RNA, 19 nt, Homo sapiens
  misc_RNA (1)...(19): siRNA sense strand
gaacagcccuuagucuuua

SEQ ID NO: 669958 - RNA, 19 nt, Homo sapiens
  misc_RNA (1)...(19): siRNA sense strand
ggaacagcccuuagucuuu

SEQ ID NO: 669959 - RNA, 19 nt, Homo sapiens
  misc_RNA (1)...(19): siRNA sense strand
uaaaggugcuggacaagug

SEQ ID NO: 669960 - RNA, 19 nt, Homo sapiens
  misc_RNA (1)...(19): siRNA sense strand
agaaagaacucacgacuac

SEQ ID NO: 669961 - RNA, 19 nt, Homo sapiens
  misc_RNA (1)...(19): siRNA sense strand
gaaccagcgcuacaucuuu

SEQ ID NO: 669962 - RNA, 19 nt, Homo sapiens
  misc_RNA (1)...(19): siRNA sense strand
gcaagauccugugcacuga

SEQ ID NO: 669963 - RNA, 19 nt, Homo sapiens
  misc_RNA (1)...(19): siRNA sense strand
gagaagcaaucgcugaagu

SEQ ID NO: 669964 - RNA, 19 nt, Homo sapiens
  misc_RNA (1)...(19): siRNA sense strand
gaaaggaaccagcgcuaca

SEQ ID NO: 669965 - RNA, 19 nt, Homo sapiens
  misc_RNA (1)...(19): siRNA sense strand
agaaagaggugggcaagau

SEQ ID NO: 669966 - RNA, 19 nt, Homo sapiens
  misc_RNA (1)...(19): siRNA sense strand
gagacauucgcaucaaaua

SEQ ID NO: 669967 - RNA, 19 nt, Homo sapiens
  misc_RNA (1)...(19): siRNA sense strand
agcaaucgcugaaguguga

SEQ ID NO: 669968 - RNA, 19 nt, Homo sapiens
  misc_RNA (1)...(19): siRNA sense strand
ucaaccagcucuccugcaa

SEQ ID NO: 669969 - RNA, 19 nt, Homo sapiens
  misc_RNA (1)...(19): siRNA sense strand
gacauucgcaucaaauaug

SEQ ID NO: 669970 - RNA, 19 nt, Homo sapiens
  misc_RNA (1)...(19): siRNA sense strand
ggaaccagcgcuacaucuu

SEQ ID NO: 669971 - RNA, 19 nt, Homo sapiens
  misc_RNA (1)...(19): siRNA sense strand
ggaggcgucugcuacuaca

SEQ ID NO: 669972 - RNA, 19 nt, Homo sapiens
  misc_RNA (1)...(19): siRNA sense strand
gaaagaggugggcaagauc

SEQ ID NO: 669973 - RNA, 19 nt, Homo sapiens
  misc_RNA (1)...(19): siRNA sense strand
cagaaagaacucacgacua

SEQ ID NO: 669974 - RNA, 19 nt, Homo sapiens
  misc_RNA (1)...(19): siRNA sense strand
gugugucgcucgccugcua

SEQ ID NO: 669975 - RNA, 19 nt, Homo sapiens
  misc_RNA (1)...(19): siRNA sense strand
ggcccaaguugaagaagau

SEQ ID NO: 669976 - RNA, 19 nt, Homo sapiens
  misc_RNA (1)...(19): siRNA sense strand
gaagcaaucgcugaagugu

SEQ ID NO: 669977 - RNA, 19 nt, Homo sapiens
  misc_RNA (1)...(19): siRNA sense strand
gcaacgagacagccaaguc

SEQ ID NO: 669978 - RNA, 19 nt, Homo sapiens
  misc_RNA (1)...(19): siRNA sense strand
ccgagacauucgcaucaaa

SEQ ID NO: 669979 - RNA, 19 nt, Homo sapiens
  misc_RNA (1)...(19): siRNA sense strand
agacagccaaguccuauug

SEQ ID NO: 669980 - RNA, 19 nt, Homo sapiens
  misc_RNA (1)...(19): siRNA sense strand
caaccgcagccgagacauu

SEQ ID NO: 669981 - RNA, 19 nt, Homo sapiens
  misc_RNA (1)...(19): siRNA sense strand
ugguaaaggugcuggacaa

SEQ ID NO: 669982 - RNA, 19 nt, Homo sapiens
  misc_RNA (1)...(19): siRNA sense strand
gacuacaguucaacaaggu

SEQ ID NO: 669983 - RNA, 19 nt, Homo sapiens
  misc_RNA (1)...(19): siRNA sense strand
ggaggacgcuggggaguau

SEQ ID NO: 669984 - RNA, 19 nt, Homo sapiens
  misc_RNA (1)...(19): siRNA sense strand
ccacggaacagcccuuagu

SEQ ID NO: 669985 - RNA, 19 nt, Homo sapiens
  misc_RNA (1)...(19): siRNA sense strand
ccaaguugaagaagaugaa

SEQ ID NO: 669986 - RNA, 19 nt, Homo sapiens
  misc_RNA (1)...(19): siRNA sense strand
caacaacagcagcaucucu

SEQ ID NO: 669987 - RNA, 19 nt, Homo sapiens
  misc_RNA (1)...(19): siRNA sense strand
cggaacagcccuuagucuu

SEQ ID NO: 669988 - RNA, 19 nt, Homo sapiens
  misc_RNA (1)...(19): siRNA sense strand
gugugccgcucgaaaggaa

SEQ ID NO: 669989 - RNA, 19 nt, Homo sapiens
  misc_RNA (1)...(19): siRNA sense strand
gccgagacauucgcaucaa

SEQ ID NO: 669990 - RNA, 19 nt, Homo sapiens
  misc_RNA (1)...(19): siRNA sense strand
ggugguggagggcaaggua

SEQ ID NO: 669991 - RNA, 19 nt, Homo sapiens
  misc_RNA (1)...(19): siRNA sense strand
gugagaagcaaucgcugaa

SEQ ID NO: 669992 - RNA, 19 nt, Homo sapiens
  misc_RNA (1)...(19): siRNA sense strand
agacauucgcaucaaauau

SEQ ID NO: 669993 - RNA, 19 nt, Homo sapiens
  misc_RNA (1)...(19): siRNA sense strand
cgagacauucgcaucaaau

SEQ ID NO: 669994 - RNA, 19 nt, Homo sapiens
  misc_RNA (1)...(19): siRNA sense strand
cgagacagccaaguccuau

SEQ ID NO: 669995 - RNA, 19 nt, Homo sapiens
  misc_RNA (1)...(19): siRNA sense strand
cggcccaaguugaagaaga

SEQ ID NO: 669996 - RNA, 19 nt, Homo sapiens
  misc_RNA (1)...(19): siRNA sense strand
ggucggguggcguugguaa

SEQ ID NO: 669997 - RNA, 19 nt, Homo sapiens
  misc_RNA (1)...(19): siRNA sense strand
gaaagaacucacgacuaca

SEQ ID NO: 669998 - RNA, 19 nt, Homo sapiens
  misc_RNA (1)...(19): siRNA sense strand
guaaaggugcuggacaagu

SEQ ID NO: 669999 - RNA, 19 nt, Homo sapiens
  misc_RNA (1)...(19): siRNA sense strand
cgggacaggugggugagaa

SEQ ID NO: 670000 - RNA, 19 nt, Homo sapiens
  misc_RNA (1)...(19): siRNA sense strand
gagacagccaaguccuauu

SEQ ID NO: 670001 - RNA, 19 nt, Homo sapiens
  misc_RNA (1)...(19): siRNA sense strand
ucaauggaggcgucugcua

SEQ ID NO: 670002 - RNA, 19 nt, Homo sapiens
  misc_RNA (1)...(19): siRNA sense strand
uauggcaacggcagaaaga

SEQ ID NO: 670003 - RNA, 19 nt, Homo sapiens
  misc_RNA (1)...(19): siRNA sense strand
acaggugggugagaagcaa

SEQ ID NO: 670004 - RNA, 19 nt, Homo sapiens
  misc_RNA (1)...(19): siRNA sense strand
aaccagcgcuacaucuuuu

SEQ ID NO: 670005 - RNA, 19 nt, Homo sapiens
  misc_RNA (1)...(19): siRNA sense strand
acucacgacuacaguucaa

SEQ ID NO: 670006 - RNA, 19 nt, Homo sapiens
  misc_RNA (1)...(19): siRNA sense strand
aaagaacucacgacuacag

SEQ ID NO: 670007 - RNA, 19 nt, Homo sapiens
  misc_RNA (1)...(19): siRNA sense strand
gaacagcccuuagucuuua

SEQ ID NO: 670008 - RNA, 19 nt, Homo sapiens
  misc_RNA (1)...(19): siRNA sense strand
ggaacagcccuuagucuuu

SEQ ID NO: 670009 - RNA, 19 nt, Homo sapiens
  misc_RNA (1)...(19): siRNA sense strand
uaaaggugcuggacaagug

SEQ ID NO: 670010 - RNA, 19 nt, Homo sapiens
  misc_RNA (1)...(19): siRNA sense strand
agaaagaacucacgacuac

SEQ ID NO: 670011 - RNA, 19 nt, Homo sapiens
  misc_RNA (1)...(19): siRNA sense strand
gaaccagcgcuacaucuuu

SEQ ID NO: 670012 - RNA, 19 nt, Homo sapiens
  misc_RNA (1)...(19): siRNA sense strand
gcaagauccugugcacuga

SEQ ID NO: 670013 - RNA, 19 nt, Homo sapiens
  misc_RNA (1)...(19): siRNA sense strand
gagaagcaaucgcugaagu

SEQ ID NO: 670014 - RNA, 19 nt, Homo sapiens
  misc_RNA (1)...(19): siRNA sense strand
gaaaggaaccagcgcuaca

SEQ ID NO: 670015 - RNA, 19 nt, Homo sapiens
  misc_RNA (1)...(19): siRNA sense strand
agaaagaggugggcaagau

SEQ ID NO: 670016 - RNA, 19 nt, Homo sapiens
  misc_RNA (1)...(19): siRNA sense strand
gagacauucgcaucaaaua

SEQ ID NO: 670017 - RNA, 19 nt, Homo sapiens
  misc_RNA (1)...(19): siRNA sense strand
agcaaucgcugaaguguga

SEQ ID NO: 670018 - RNA, 19 nt, Homo sapiens
  misc_RNA (1)...(19): siRNA sense strand
ucaaccagcucuccugcaa

SEQ ID NO: 670019 - RNA, 19 nt, Homo sapiens
  misc_RNA (1)...(19): siRNA sense strand
gacauucgcaucaaauaug

SEQ ID NO: 670020 - RNA, 19 nt, Homo sapiens
  misc_RNA (1)...(19): siRNA sense strand
ggaaccagcgcuacaucuu

SEQ ID NO: 670021 - RNA, 19 nt, Homo sapiens
  misc_RNA (1)...(19): siRNA sense strand
ggaggcgucugcuacuaca

SEQ ID NO: 670022 - RNA, 19 nt, Homo sapiens
  misc_RNA (1)...(19): siRNA sense strand
gaaagaggugggcaagauc

SEQ ID NO: 670023 - RNA, 19 nt, Homo sapiens
  misc_RNA (1)...(19): siRNA sense strand
cagaaagaacucacgacua

SEQ ID NO: 670024 - RNA, 19 nt, Homo sapiens
  misc_RNA (1)...(19): siRNA sense strand
gugugucgcucgccugcua

SEQ ID NO: 670025 - RNA, 19 nt, Homo sapiens
  misc_RNA (1)...(19): siRNA sense strand
ggcccaaguugaagaagau

SEQ ID NO: 670026 - RNA, 19 nt, Homo sapiens
  misc_RNA (1)...(19): siRNA sense strand
gaagcaaucgcugaagugu

SEQ ID NO: 670027 - RNA, 19 nt, Homo sapiens
  misc_RNA (1)...(19): siRNA sense strand
gcaacgagacagccaaguc

SEQ ID NO: 670028 - RNA, 19 nt, Homo sapiens
  misc_RNA (1)...(19): siRNA sense strand
ccgagacauucgcaucaaa

SEQ ID NO: 670029 - RNA, 19 nt, Homo sapiens
  misc_RNA (1)...(19): siRNA sense strand
agacagccaaguccuauug

SEQ ID NO: 670030 - RNA, 19 nt, Homo sapiens
  misc_RNA (1)...(19): siRNA sense strand
caaccgcagccgagacauu

SEQ ID NO: 670031 - RNA, 19 nt, Homo sapiens
  misc_RNA (1)...(19): siRNA sense strand
ugguaaaggugcuggacaa

SEQ ID NO: 670032 - RNA, 19 nt, Homo sapiens
  misc_RNA (1)...(19): siRNA sense strand
gacuacaguucaacaaggu

SEQ ID NO: 670033 - RNA, 19 nt, Homo sapiens
  misc_RNA (1)...(19): siRNA sense strand
ggaggacgcuggggaguau

SEQ ID NO: 670034 - RNA, 19 nt, Homo sapiens
  misc_RNA (1)...(19): siRNA sense strand
ccacggaacagcccuuagu

SEQ ID NO: 670035 - RNA, 19 nt, Homo sapiens
  misc_RNA (1)...(19): siRNA sense strand
ccaaguugaagaagaugaa

SEQ ID NO: 670036 - RNA, 19 nt, Homo sapiens
  misc_RNA (1)...(19): siRNA sense strand
caacaacagcagcaucucu

SEQ ID NO: 670037 - RNA, 19 nt, Homo sapiens
  misc_RNA (1)...(19): siRNA sense strand
cggaacagcccuuagucuu

SEQ ID NO: 670038 - RNA, 19 nt, Homo sapiens
  misc_RNA (1)...(19): siRNA sense strand
gugugccgcucgaaaggaa

SEQ ID NO: 670039 - RNA, 19 nt, Homo sapiens
  misc_RNA (1)...(19): siRNA sense strand
gccgagacauucgcaucaa

SEQ ID NO: 670040 - RNA, 19 nt, Homo sapiens
  misc_RNA (1)...(19): siRNA sense strand
ggugguggagggcaaggua

SEQ ID NO: 670041 - RNA, 19 nt, Homo sapiens
  misc_RNA (1)...(19): siRNA sense strand
gugagaagcaaucgcugaa

SEQ ID NO: 670042 - RNA, 19 nt, Homo sapiens
  misc_RNA (1)...(19): siRNA sense strand
agacauucgcaucaaauau

SEQ ID NO: 670043 - RNA, 19 nt, Homo sapiens
  misc_RNA (1)...(19): siRNA sense strand
cgagacauucgcaucaaau

SEQ ID NO: 670044 - RNA, 19 nt, Homo sapiens
  misc_RNA (1)...(19): siRNA sense strand
cgagacagccaaguccuau

SEQ ID NO: 670045 - RNA, 19 nt, Homo sapiens
  misc_RNA (1)...(19): siRNA sense strand
cggcccaaguugaagaaga

SEQ ID NO: 670046 - RNA, 19 nt, Homo sapiens
  misc_RNA (1)...(19): siRNA sense strand
ggucggguggcguugguaa

SEQ ID NO: 670047 - RNA, 19 nt, Homo sapiens
  misc_RNA (1)...(19): siRNA sense strand
gaaagaacucacgacuaca

SEQ ID NO: 670048 - RNA, 19 nt, Homo sapiens
  misc_RNA (1)...(19): siRNA sense strand
guaaaggugcuggacaagu

SEQ ID NO: 670049 - RNA, 19 nt, Homo sapiens
  misc_RNA (1)...(19): siRNA sense strand
cgggacaggugggugagaa

SEQ ID NO: 670050 - RNA, 19 nt, Homo sapiens
  misc_RNA (1)...(19): siRNA sense strand
gagacagccaaguccuauu

SEQ ID NO: 670051 - RNA, 19 nt, Homo sapiens
  misc_RNA (1)...(19): siRNA sense strand
ucaauggaggcgucugcua

SEQ ID NO: 670052 - RNA, 19 nt, Homo sapiens
  misc_RNA (1)...(19): siRNA sense strand
uauggcaacggcagaaaga

SEQ ID NO: 670053 - RNA, 19 nt, Homo sapiens
  misc_RNA (1)...(19): siRNA sense strand
acaggugggugagaagcaa

SEQ ID NO: 670054 - RNA, 19 nt, Homo sapiens
  misc_RNA (1)...(19): siRNA sense strand
aaccagcgcuacaucuuuu

SEQ ID NO: 670055 - RNA, 19 nt, Homo sapiens
  misc_RNA (1)...(19): siRNA sense strand
acucacgacuacaguucaa

SEQ ID NO: 670056 - RNA, 19 nt, Homo sapiens
  misc_RNA (1)...(19): siRNA sense strand
aaagaacucacgacuacag

SEQ ID NO: 670057 - RNA, 19 nt, Homo sapiens
  misc_RNA (1)...(19): siRNA sense strand
ggaaaucgcuggacagaga

SEQ ID NO: 670058 - RNA, 19 nt, Homo sapiens
  misc_RNA (1)...(19): siRNA sense strand
ccaaucaguuuacaaagua

SEQ ID NO: 670059 - RNA, 19 nt, Homo sapiens
  misc_RNA (1)...(19): siRNA sense strand
uaaaugcucuucucuccua

SEQ ID NO: 670060 - RNA, 19 nt, Homo sapiens
  misc_RNA (1)...(19): siRNA sense strand
gaacuaagcgaaucuuugu

SEQ ID NO: 670061 - RNA, 19 nt, Homo sapiens
  misc_RNA (1)...(19): siRNA sense strand
cgacaacccgccaauauuu

SEQ ID NO: 670062 - RNA, 19 nt, Homo sapiens
  misc_RNA (1)...(19): siRNA sense strand
agaaacagcucucagaauc

SEQ ID NO: 670063 - RNA, 19 nt, Homo sapiens
  misc_RNA (1)...(19): siRNA sense strand
gaacagcgagauuguguau

SEQ ID NO: 670064 - RNA, 19 nt, Homo sapiens
  misc_RNA (1)...(19): siRNA sense strand
agacuaaguuuaccauaga

SEQ ID NO: 670065 - RNA, 19 nt, Homo sapiens
  misc_RNA (1)...(19): siRNA sense strand
ggaaacugcugagguuaau

SEQ ID NO: 670066 - RNA, 19 nt, Homo sapiens
  misc_RNA (1)...(19): siRNA sense strand
ugaaggacauuaacgacaa

SEQ ID NO: 670067 - RNA, 19 nt, Homo sapiens
  misc_RNA (1)...(19): siRNA sense strand
ggagguaaaucugcagaau

SEQ ID NO: 670068 - RNA, 19 nt, Homo sapiens
  misc_RNA (1)...(19): siRNA sense strand
guuaaacgcuucugaugca

SEQ ID NO: 670069 - RNA, 19 nt, Homo sapiens
  misc_RNA (1)...(19): siRNA sense strand
gguauuagauguaaaugac

SEQ ID NO: 670070 - RNA, 19 nt, Homo sapiens
  misc_RNA (1)...(19): siRNA sense strand
agaggaaacugcugagguu

SEQ ID NO: 670071 - RNA, 19 nt, Homo sapiens
  misc_RNA (1)...(19): siRNA sense strand
ccgccaauauuuccaauga

SEQ ID NO: 670072 - RNA, 19 nt, Homo sapiens
  misc_RNA (1)...(19): siRNA sense strand
gcaaaguccuacgagauuc

SEQ ID NO: 670073 - RNA, 19 nt, Homo sapiens
  misc_RNA (1)...(19): siRNA sense strand
aaugggaccuuagugguua

SEQ ID NO: 670074 - RNA, 19 nt, Homo sapiens
  misc_RNA (1)...(19): siRNA sense strand
ccagaagucucaauaacgu

SEQ ID NO: 670075 - RNA, 19 nt, Homo sapiens
  misc_RNA (1)...(19): siRNA sense strand
acagcgagauuguguauuc

SEQ ID NO: 670076 - RNA, 19 nt, Homo sapiens
  misc_RNA (1)...(19): siRNA sense strand
gcagauauaggaguaaaug

SEQ ID NO: 670077 - RNA, 19 nt, Homo sapiens
  misc_RNA (1)...(19): siRNA sense strand
acaggcaaaugaugaacua

SEQ ID NO: 670078 - RNA, 19 nt, Homo sapiens
  misc_RNA (1)...(19): siRNA sense strand
agaacgcgcugguguccua

SEQ ID NO: 670079 - RNA, 19 nt, Homo sapiens
  misc_RNA (1)...(19): siRNA sense strand
cugcugagguuaauuuguu

SEQ ID NO: 670080 - RNA, 19 nt, Homo sapiens
  misc_RNA (1)...(19): siRNA sense strand
aaacugcugagguuaauuu

SEQ ID NO: 670081 - RNA, 19 nt, Homo sapiens
  misc_RNA (1)...(19): siRNA sense strand
gccaauauuuccaaugaca

SEQ ID NO: 670082 - RNA, 19 nt, Homo sapiens
  misc_RNA (1)...(19): siRNA sense strand
uaacacaccagaagucuca

SEQ ID NO: 670083 - RNA, 19 nt, Homo sapiens
  misc_RNA (1)...(19): siRNA sense strand
gggcaccguucaaauacuu

SEQ ID NO: 670084 - RNA, 19 nt, Homo sapiens
  misc_RNA (1)...(19): siRNA sense strand
ccaaugacaguaaagacua

SEQ ID NO: 670085 - RNA, 19 nt, Homo sapiens
  misc_RNA (1)...(19): siRNA sense strand
gaaacagcucucagaauca

SEQ ID NO: 670086 - RNA, 19 nt, Homo sapiens
  misc_RNA (1)...(19): siRNA sense strand
cagacuaaguuuaccauag

SEQ ID NO: 670087 - RNA, 19 nt, Homo sapiens
  misc_RNA (1)...(19): siRNA sense strand
caaugacaguaaagacuau

SEQ ID NO: 670088 - RNA, 19 nt, Homo sapiens
  misc_RNA (1)...(19): siRNA sense strand
uguccaccuucaagaauua

SEQ ID NO: 670089 - RNA, 19 nt, Homo sapiens
  misc_RNA (1)...(19): siRNA sense strand
gauguguccuccacuauac

SEQ ID NO: 670090 - RNA, 19 nt, Homo sapiens
  misc_RNA (1)...(19): siRNA sense strand
aguaaagacuauccgguuu

SEQ ID NO: 670091 - RNA, 19 nt, Homo sapiens
  misc_RNA (1)...(19): siRNA sense strand
ugaugcagauauaggagua

SEQ ID NO: 670092 - RNA, 19 nt, Homo sapiens
  misc_RNA (1)...(19): siRNA sense strand
uaacgacaacccgccaaua

SEQ ID NO: 670093 - RNA, 19 nt, Homo sapiens
  misc_RNA (1)...(19): siRNA sense strand
aauaacgucucucucacuu

SEQ ID NO: 670094 - RNA, 19 nt, Homo sapiens
  misc_RNA (1)...(19): siRNA sense strand
ggaccgaacagcgagauug

SEQ ID NO: 670095 - RNA, 19 nt, Homo sapiens
  misc_RNA (1)...(19): siRNA sense strand
gauauacaggcaaaugaug

SEQ ID NO: 670096 - RNA, 19 nt, Homo sapiens
  misc_RNA (1)...(19): siRNA sense strand
gcugcuugauucucgguuu

SEQ ID NO: 670097 - RNA, 19 nt, Homo sapiens
  misc_RNA (1)...(19): siRNA sense strand
caccagaagucucaauaac

SEQ ID NO: 670098 - RNA, 19 nt, Homo sapiens
  misc_RNA (1)...(19): siRNA sense strand
ccacuauacagacuaaguu

SEQ ID NO: 670099 - RNA, 19 nt, Homo sapiens
  misc_RNA (1)...(19): siRNA sense strand
gaggaaacugcugagguua

SEQ ID NO: 670100 - RNA, 19 nt, Homo sapiens
  misc_RNA (1)...(19): siRNA sense strand
gauucucgguuuccucuag

SEQ ID NO: 670101 - RNA, 19 nt, Homo sapiens
  misc_RNA (1)...(19): siRNA sense strand
gaaggacauuaacgacaac

SEQ ID NO: 670102 - RNA, 19 nt, Homo sapiens
  misc_RNA (1)...(19): siRNA sense strand
gagguaaaucugcagaaug

SEQ ID NO: 670103 - RNA, 19 nt, Homo sapiens
  misc_RNA (1)...(19): siRNA sense strand
cccaaucaguuuacaaagu

SEQ ID NO: 670104 - RNA, 19 nt, Homo sapiens
  misc_RNA (1)...(19): siRNA sense strand
guaaagacuauccgguuuc

SEQ ID NO: 670105 - RNA, 19 nt, Homo sapiens
  misc_RNA (1)...(19): siRNA sense strand
agguaaaucugcagaaugg

SEQ ID NO: 670106 - RNA, 19 nt, Homo sapiens
  misc_RNA (1)...(19): siRNA sense strand
ggccuucagcccuagcuua

SEQ ID NO: 670107 - RNA, 19 nt, Homo sapiens
  misc_RNA (1)...(19): siRNA sense strand
aggcuacgcugguggaugu

SEQ ID NO: 670108 - RNA, 19 nt, Homo sapiens
  misc_RNA (1)...(19): siRNA sense strand
gaucgcgacucugguacga

SEQ ID NO: 670109 - RNA, 19 nt, Homo sapiens
  misc_RNA (1)...(19): siRNA sense strand
ugauguguccuccacuaua

SEQ ID NO: 670110 - RNA, 19 nt, Homo sapiens
  misc_RNA (1)...(19): siRNA sense strand
ugaacuaagcgaaucuuug

SEQ ID NO: 670111 - RNA, 19 nt, Homo sapiens
  misc_RNA (1)...(19): siRNA sense strand
ccuccacuauacagacuaa

SEQ ID NO: 670112 - RNA, 19 nt, Homo sapiens
  misc_RNA (1)...(19): siRNA sense strand
aaacagcucucagaaucag

SEQ ID NO: 670113 - RNA, 19 nt, Homo sapiens
  misc_RNA (1)...(19): siRNA sense strand
gcacugucauugcucucau

SEQ ID NO: 670114 - RNA, 19 nt, Homo sapiens
  misc_RNA (1)...(19): siRNA sense strand
ggcaaaugaugaacuaagc

SEQ ID NO: 670115 - RNA, 19 nt, Homo sapiens
  misc_RNA (1)...(19): siRNA sense strand
gaaucagaauacguaggaa

SEQ ID NO: 670116 - RNA, 19 nt, Homo sapiens
  misc_RNA (1)...(19): siRNA sense strand
acacaguauucgugaagga

SEQ ID NO: 670117 - RNA, 19 nt, Homo sapiens
  misc_RNA (1)...(19): siRNA sense strand
guguccaccuucaagaauu

SEQ ID NO: 670118 - RNA, 19 nt, Homo sapiens
  misc_RNA (1)...(19): siRNA sense strand
uagauauacaggcaaauga

SEQ ID NO: 670119 - RNA, 19 nt, Homo sapiens
  misc_RNA (1)...(19): siRNA sense strand
gcucucagaaucagaauac

SEQ ID NO: 670120 - RNA, 19 nt, Homo sapiens
  misc_RNA (1)...(19): siRNA sense strand
acgcguggcuuucguacga

SEQ ID NO: 670121 - RNA, 19 nt, Homo sapiens
  misc_RNA (1)...(19): siRNA sense strand
guacacaguauucgugaag

SEQ ID NO: 670122 - RNA, 19 nt, Homo sapiens
  misc_RNA (1)...(19): siRNA sense strand
gucaggacauuguaaaauu

SEQ ID NO: 670123 - RNA, 19 nt, Homo sapiens
  misc_RNA (1)...(19): siRNA sense strand
gcagaugaaggaccgaaca

SEQ ID NO: 670124 - RNA, 19 nt, Homo sapiens
  misc_RNA (1)...(19): siRNA sense strand
uaaguuaaacgcuucugau

SEQ ID NO: 670125 - RNA, 19 nt, Homo sapiens
  misc_RNA (1)...(19): siRNA sense strand
agacuccgcagaagagaaa

SEQ ID NO: 670126 - RNA, 19 nt, Homo sapiens
  misc_RNA (1)...(19): siRNA sense strand
acaccagaagucucaauaa

SEQ ID NO: 670127 - RNA, 19 nt, Homo sapiens
  misc_RNA (1)...(19): siRNA sense strand
ucaagaauuacuacucguu

SEQ ID NO: 670128 - RNA, 19 nt, Homo sapiens
  misc_RNA (1)...(19): siRNA sense strand
agaaucagaauacguagga

SEQ ID NO: 670129 - RNA, 19 nt, Homo sapiens
  misc_RNA (1)...(19): siRNA sense strand
guaaaugacaaugaaccaa

SEQ ID NO: 670130 - RNA, 19 nt, Homo sapiens
  misc_RNA (1)...(19): siRNA sense strand
cuucagcccuagcuuaucu

SEQ ID NO: 670131 - RNA, 19 nt, Homo sapiens
  misc_RNA (1)...(19): siRNA sense strand
cacugcaacugacaaagga

SEQ ID NO: 670132 - RNA, 19 nt, Homo sapiens
  misc_RNA (1)...(19): siRNA sense strand
uagagaauacggcaaaugg

SEQ ID NO: 670133 - RNA, 19 nt, Homo sapiens
  misc_RNA (1)...(19): siRNA sense strand
gacaacccgccaauauuuc

SEQ ID NO: 670134 - RNA, 19 nt, Homo sapiens
  misc_RNA (1)...(19): siRNA sense strand
cagccugaguacacaguau

SEQ ID NO: 670135 - RNA, 19 nt, Homo sapiens
  misc_RNA (1)...(19): siRNA sense strand
ucgcgacucugguacgaau

SEQ ID NO: 670136 - RNA, 19 nt, Homo sapiens
  misc_RNA (1)...(19): siRNA sense strand
ggaguaaaugcucuucucu

SEQ ID NO: 670137 - RNA, 19 nt, Homo sapiens
  misc_RNA (1)...(19): siRNA sense strand
gaaggaccacggcgaacca

SEQ ID NO: 670138 - RNA, 19 nt, Homo sapiens
  misc_RNA (1)...(19): siRNA sense strand
caguauucgugaaggagaa

SEQ ID NO: 670139 - RNA, 19 nt, Homo sapiens
  misc_RNA (1)...(19): siRNA sense strand
gagauucaggucacugcaa

SEQ ID NO: 670140 - RNA, 19 nt, Homo sapiens
  misc_RNA (1)...(19): siRNA sense strand
caaaguccuacgagauuca

SEQ ID NO: 670141 - RNA, 19 nt, Homo sapiens
  misc_RNA (1)...(19): siRNA sense strand
aaaugggaccuuagugguu

SEQ ID NO: 670142 - RNA, 19 nt, Homo sapiens
  misc_RNA (1)...(19): siRNA sense strand
gaaacugcugagguuaauu

SEQ ID NO: 670143 - RNA, 19 nt, Homo sapiens
  misc_RNA (1)...(19): siRNA sense strand
cucagaaucagaauacgua

SEQ ID NO: 670144 - RNA, 19 nt, Homo sapiens
  misc_RNA (1)...(19): siRNA sense strand
ucacggugcugcuguacac

SEQ ID NO: 670145 - RNA, 19 nt, Homo sapiens
  misc_RNA (1)...(19): siRNA sense strand
ugguggaugucaacgugua

SEQ ID NO: 670146 - RNA, 19 nt, Homo sapiens
  misc_RNA (1)...(19): siRNA sense strand
gcuauacacgggugagauc

SEQ ID NO: 670147 - RNA, 19 nt, Homo sapiens
  misc_RNA (1)...(19): siRNA sense strand
cacaccagaagucucaaua

SEQ ID NO: 670148 - RNA, 19 nt, Homo sapiens
  misc_RNA (1)...(19): siRNA sense strand
gauaacacaccagaagucu

SEQ ID NO: 670149 - RNA, 19 nt, Homo sapiens
  misc_RNA (1)...(19): siRNA sense strand
gacuaaguuuaccauagau

SEQ ID NO: 670150 - RNA, 19 nt, Homo sapiens
  misc_RNA (1)...(19): siRNA sense strand
gaccgaacagcgagauugu

SEQ ID NO: 670151 - RNA, 19 nt, Homo sapiens
  misc_RNA (1)...(19): siRNA sense strand
gcauuuuguuugugaauuc

SEQ ID NO: 670152 - RNA, 19 nt, Homo sapiens
  misc_RNA (1)...(19): siRNA sense strand
ugcugagguuaauuuguua

SEQ ID NO: 670153 - RNA, 19 nt, Homo sapiens
  misc_RNA (1)...(19): siRNA sense strand
gcgagauuguguauucacu

SEQ ID NO: 670154 - RNA, 19 nt, Homo sapiens
  misc_RNA (1)...(19): siRNA sense strand
uauccgguuucccgaauca

SEQ ID NO: 670155 - RNA, 19 nt, Homo sapiens
  misc_RNA (1)...(19): siRNA sense strand
agcccuagcuuaucucaag

SEQ ID NO: 670156 - RNA, 19 nt, Homo sapiens
  misc_RNA (1)...(19): siRNA sense strand
aagcaaaguccuacgagau

SEQ ID NO: 670157 - RNA, 19 nt, Homo sapiens
  misc_RNA (1)...(19): siRNA sense strand
ggaaaucgcuggacagaga

SEQ ID NO: 670158 - RNA, 19 nt, Homo sapiens
  misc_RNA (1)...(19): siRNA sense strand
ccaaucaguuuacaaagua

SEQ ID NO: 670159 - RNA, 19 nt, Homo sapiens
  misc_RNA (1)...(19): siRNA sense strand
uaaaugcucuucucuccua

SEQ ID NO: 670160 - RNA, 19 nt, Homo sapiens
  misc_RNA (1)...(19): siRNA sense strand
gaacuaagcgaaucuuugu

SEQ ID NO: 670161 - RNA, 19 nt, Homo sapiens
  misc_RNA (1)...(19): siRNA sense strand
cgacaacccgccaauauuu

SEQ ID NO: 670162 - RNA, 19 nt, Homo sapiens
  misc_RNA (1)...(19): siRNA sense strand
agaaacagcucucagaauc

SEQ ID NO: 670163 - RNA, 19 nt, Homo sapiens
  misc_RNA (1)...(19): siRNA sense strand
gaacagcgagauuguguau

SEQ ID NO: 670164 - RNA, 19 nt, Homo sapiens
  misc_RNA (1)...(19): siRNA sense strand
agacuaaguuuaccauaga

SEQ ID NO: 670165 - RNA, 19 nt, Homo sapiens
  misc_RNA (1)...(19): siRNA sense strand
ggaaacugcugagguuaau

SEQ ID NO: 670166 - RNA, 19 nt, Homo sapiens
  misc_RNA (1)...(19): siRNA sense strand
ugaaggacauuaacgacaa

SEQ ID NO: 670167 - RNA, 19 nt, Homo sapiens
  misc_RNA (1)...(19): siRNA sense strand
ggagguaaaucugcagaau

SEQ ID NO: 670168 - RNA, 19 nt, Homo sapiens
  misc_RNA (1)...(19): siRNA sense strand
guuaaacgcuucugaugca

SEQ ID NO: 670169 - RNA, 19 nt, Homo sapiens
  misc_RNA (1)...(19): siRNA sense strand
gguauuagauguaaaugac

SEQ ID NO: 670170 - RNA, 19 nt, Homo sapiens
  misc_RNA (1)...(19): siRNA sense strand
agaggaaacugcugagguu

SEQ ID NO: 670171 - RNA, 19 nt, Homo sapiens
  misc_RNA (1)...(19): siRNA sense strand
ccgccaauauuuccaauga

SEQ ID NO: 670172 - RNA, 19 nt, Homo sapiens
  misc_RNA (1)...(19): siRNA sense strand
gcaaaguccuacgagauuc

SEQ ID NO: 670173 - RNA, 19 nt, Homo sapiens
  misc_RNA (1)...(19): siRNA sense strand
aaugggaccuuagugguua

SEQ ID NO: 670174 - RNA, 19 nt, Homo sapiens
  misc_RNA (1)...(19): siRNA sense strand
ccagaagucucaauaacgu

SEQ ID NO: 670175 - RNA, 19 nt, Homo sapiens
  misc_RNA (1)...(19): siRNA sense strand
acagcgagauuguguauuc

SEQ ID NO: 670176 - RNA, 19 nt, Homo sapiens
  misc_RNA (1)...(19): siRNA sense strand
gcagauauaggaguaaaug

SEQ ID NO: 670177 - RNA, 19 nt, Homo sapiens
  misc_RNA (1)...(19): siRNA sense strand
acaggcaaaugaugaacua

SEQ ID NO: 670178 - RNA, 19 nt, Homo sapiens
  misc_RNA (1)...(19): siRNA sense strand
agaacgcgcugguguccua

SEQ ID NO: 670179 - RNA, 19 nt, Homo sapiens
  misc_RNA (1)...(19): siRNA sense strand
cugcugagguuaauuuguu

SEQ ID NO: 670180 - RNA, 19 nt, Homo sapiens
  misc_RNA (1)...(19): siRNA sense strand
aaacugcugagguuaauuu

SEQ ID NO: 670181 - RNA, 19 nt, Homo sapiens
  misc_RNA (1)...(19): siRNA sense strand
gccaauauuuccaaugaca

SEQ ID NO: 670182 - RNA, 19 nt, Homo sapiens
  misc_RNA (1)...(19): siRNA sense strand
uaacacaccagaagucuca

SEQ ID NO: 670183 - RNA, 19 nt, Homo sapiens
  misc_RNA (1)...(19): siRNA sense strand
gggcaccguucaaauacuu

SEQ ID NO: 670184 - RNA, 19 nt, Homo sapiens
  misc_RNA (1)...(19): siRNA sense strand
ccaaugacaguaaagacua

SEQ ID NO: 670185 - RNA, 19 nt, Homo sapiens
  misc_RNA (1)...(19): siRNA sense strand
gaaacagcucucagaauca

SEQ ID NO: 670186 - RNA, 19 nt, Homo sapiens
  misc_RNA (1)...(19): siRNA sense strand
cagacuaaguuuaccauag

SEQ ID NO: 670187 - RNA, 19 nt, Homo sapiens
  misc_RNA (1)...(19): siRNA sense strand
caaugacaguaaagacuau

SEQ ID NO: 670188 - RNA, 19 nt, Homo sapiens
  misc_RNA (1)...(19): siRNA sense strand
uguccaccuucaagaauua

SEQ ID NO: 670189 - RNA, 19 nt, Homo sapiens
  misc_RNA (1)...(19): siRNA sense strand
gauguguccuccacuauac

SEQ ID NO: 670190 - RNA, 19 nt, Homo sapiens
  misc_RNA (1)...(19): siRNA sense strand
aguaaagacuauccgguuu

SEQ ID NO: 670191 - RNA, 19 nt, Homo sapiens
  misc_RNA (1)...(19): siRNA sense strand
ugaugcagauauaggagua

SEQ ID NO: 670192 - RNA, 19 nt, Homo sapiens
  misc_RNA (1)...(19): siRNA sense strand
uaacgacaacccgccaaua

SEQ ID NO: 670193 - RNA, 19 nt, Homo sapiens
  misc_RNA (1)...(19): siRNA sense strand
aauaacgucucucucacuu

SEQ ID NO: 670194 - RNA, 19 nt, Homo sapiens
  misc_RNA (1)...(19): siRNA sense strand
ggaccgaacagcgagauug

SEQ ID NO: 670195 - RNA, 19 nt, Homo sapiens
  misc_RNA (1)...(19): siRNA sense strand
gauauacaggcaaaugaug

SEQ ID NO: 670196 - RNA, 19 nt, Homo sapiens
  misc_RNA (1)...(19): siRNA sense strand
gcugcuugauucucgguuu

SEQ ID NO: 670197 - RNA, 19 nt, Homo sapiens
  misc_RNA (1)...(19): siRNA sense strand
caccagaagucucaauaac

SEQ ID NO: 670198 - RNA, 19 nt, Homo sapiens
  misc_RNA (1)...(19): siRNA sense strand
ccacuauacagacuaaguu

SEQ ID NO: 670199 - RNA, 19 nt, Homo sapiens
  misc_RNA (1)...(19): siRNA sense strand
gaggaaacugcugagguua

SEQ ID NO: 670200 - RNA, 19 nt, Homo sapiens
  misc_RNA (1)...(19): siRNA sense strand
gauucucgguuuccucuag

SEQ ID NO: 670201 - RNA, 19 nt, Homo sapiens
  misc_RNA (1)...(19): siRNA sense strand
gaaggacauuaacgacaac

SEQ ID NO: 670202 - RNA, 19 nt, Homo sapiens
  misc_RNA (1)...(19): siRNA sense strand
gagguaaaucugcagaaug

SEQ ID NO: 670203 - RNA, 19 nt, Homo sapiens
  misc_RNA (1)...(19): siRNA sense strand
cccaaucaguuuacaaagu

SEQ ID NO: 670204 - RNA, 19 nt, Homo sapiens
  misc_RNA (1)...(19): siRNA sense strand
guaaagacuauccgguuuc

SEQ ID NO: 670205 - RNA, 19 nt, Homo sapiens
  misc_RNA (1)...(19): siRNA sense strand
agguaaaucugcagaaugg

SEQ ID NO: 670206 - RNA, 19 nt, Homo sapiens
  misc_RNA (1)...(19): siRNA sense strand
ggccuucagcccuagcuua

SEQ ID NO: 670207 - RNA, 19 nt, Homo sapiens
  misc_RNA (1)...(19): siRNA sense strand
aggcuacgcugguggaugu

SEQ ID NO: 670208 - RNA, 19 nt, Homo sapiens
  misc_RNA (1)...(19): siRNA sense strand
gaucgcgacucugguacga

SEQ ID NO: 670209 - RNA, 19 nt, Homo sapiens
  misc_RNA (1)...(19): siRNA sense strand
ugauguguccuccacuaua

SEQ ID NO: 670210 - RNA, 19 nt, Homo sapiens
  misc_RNA (1)...(19): siRNA sense strand
ugaacuaagcgaaucuuug

SEQ ID NO: 670211 - RNA, 19 nt, Homo sapiens
  misc_RNA (1)...(19): siRNA sense strand
ccuccacuauacagacuaa

SEQ ID NO: 670212 - RNA, 19 nt, Homo sapiens
  misc_RNA (1)...(19): siRNA sense strand
aaacagcucucagaaucag

SEQ ID NO: 670213 - RNA, 19 nt, Homo sapiens
  misc_RNA (1)...(19): siRNA sense strand
gcacugucauugcucucau

SEQ ID NO: 670214 - RNA, 19 nt, Homo sapiens
  misc_RNA (1)...(19): siRNA sense strand
ggcaaaugaugaacuaagc

SEQ ID NO: 670215 - RNA, 19 nt, Homo sapiens
  misc_RNA (1)...(19): siRNA sense strand
gaaucagaauacguaggaa

SEQ ID NO: 670216 - RNA, 19 nt, Homo sapiens
  misc_RNA (1)...(19): siRNA sense strand
acacaguauucgugaagga

SEQ ID NO: 670217 - RNA, 19 nt, Homo sapiens
  misc_RNA (1)...(19): siRNA sense strand
guguccaccuucaagaauu

SEQ ID NO: 670218 - RNA, 19 nt, Homo sapiens
  misc_RNA (1)...(19): siRNA sense strand
uagauauacaggcaaauga

SEQ ID NO: 670219 - RNA, 19 nt, Homo sapiens
  misc_RNA (1)...(19): siRNA sense strand
gcucucagaaucagaauac

SEQ ID NO: 670220 - RNA, 19 nt, Homo sapiens
  misc_RNA (1)...(19): siRNA sense strand
acgcguggcuuucguacga

SEQ ID NO: 670221 - RNA, 19 nt, Homo sapiens
  misc_RNA (1)...(19): siRNA sense strand
guacacaguauucgugaag

SEQ ID NO: 670222 - RNA, 19 nt, Homo sapiens
  misc_RNA (1)...(19): siRNA sense strand
gucaggacauuguaaaauu

SEQ ID NO: 670223 - RNA, 19 nt, Homo sapiens
  misc_RNA (1)...(19): siRNA sense strand
gcagaugaaggaccgaaca

SEQ ID NO: 670224 - RNA, 19 nt, Homo sapiens
  misc_RNA (1)...(19): siRNA sense strand
uaaguuaaacgcuucugau

SEQ ID NO: 670225 - RNA, 19 nt, Homo sapiens
  misc_RNA (1)...(19): siRNA sense strand
agacuccgcagaagagaaa

SEQ ID NO: 670226 - RNA, 19 nt, Homo sapiens
  misc_RNA (1)...(19): siRNA sense strand
acaccagaagucucaauaa

SEQ ID NO: 670227 - RNA, 19 nt, Homo sapiens
  misc_RNA (1)...(19): siRNA sense strand
ucaagaauuacuacucguu

SEQ ID NO: 670228 - RNA, 19 nt, Homo sapiens
  misc_RNA (1)...(19): siRNA sense strand
agaaucagaauacguagga

SEQ ID NO: 670229 - RNA, 19 nt, Homo sapiens
  misc_RNA (1)...(19): siRNA sense strand
guaaaugacaaugaaccaa

SEQ ID NO: 670230 - RNA, 19 nt, Homo sapiens
  misc_RNA (1)...(19): siRNA sense strand
cuucagcccuagcuuaucu

SEQ ID NO: 670231 - RNA, 19 nt, Homo sapiens
  misc_RNA (1)...(19): siRNA sense strand
cacugcaacugacaaagga

SEQ ID NO: 670232 - RNA, 19 nt, Homo sapiens
  misc_RNA (1)...(19): siRNA sense strand
uagagaauacggcaaaugg

SEQ ID NO: 670233 - RNA, 19 nt, Homo sapiens
  misc_RNA (1)...(19): siRNA sense strand
gacaacccgccaauauuuc

SEQ ID NO: 670234 - RNA, 19 nt, Homo sapiens
  misc_RNA (1)...(19): siRNA sense strand
cagccugaguacacaguau

SEQ ID NO: 670235 - RNA, 19 nt, Homo sapiens
  misc_RNA (1)...(19): siRNA sense strand
ucgcgacucugguacgaau

SEQ ID NO: 670236 - RNA, 19 nt, Homo sapiens
  misc_RNA (1)...(19): siRNA sense strand
ggaguaaaugcucuucucu

SEQ ID NO: 670237 - RNA, 19 nt, Homo sapiens
  misc_RNA (1)...(19): siRNA sense strand
gaaggaccacggcgaacca

SEQ ID NO: 670238 - RNA, 19 nt, Homo sapiens
  misc_RNA (1)...(19): siRNA sense strand
caguauucgugaaggagaa

SEQ ID NO: 670239 - RNA, 19 nt, Homo sapiens
  misc_RNA (1)...(19): siRNA sense strand
gagauucaggucacugcaa

SEQ ID NO: 670240 - RNA, 19 nt, Homo sapiens
  misc_RNA (1)...(19): siRNA sense strand
caaaguccuacgagauuca

SEQ ID NO: 670241 - RNA, 19 nt, Homo sapiens
  misc_RNA (1)...(19): siRNA sense strand
aaaugggaccuuagugguu

SEQ ID NO: 670242 - RNA, 19 nt, Homo sapiens
  misc_RNA (1)...(19): siRNA sense strand
gaaacugcugagguuaauu

SEQ ID NO: 670243 - RNA, 19 nt, Homo sapiens
  misc_RNA (1)...(19): siRNA sense strand
cucagaaucagaauacgua

SEQ ID NO: 670244 - RNA, 19 nt, Homo sapiens
  misc_RNA (1)...(19): siRNA sense strand
ucacggugcugcuguacac

SEQ ID NO: 670245 - RNA, 19 nt, Homo sapiens
  misc_RNA (1)...(19): siRNA sense strand
ugguggaugucaacgugua

SEQ ID NO: 670246 - RNA, 19 nt, Homo sapiens
  misc_RNA (1)...(19): siRNA sense strand
gcuauacacgggugagauc

SEQ ID NO: 670247 - RNA, 19 nt, Homo sapiens
  misc_RNA (1)...(19): siRNA sense strand
cacaccagaagucucaaua

SEQ ID NO: 670248 - RNA, 19 nt, Homo sapiens
  misc_RNA (1)...(19): siRNA sense strand
gauaacacaccagaagucu

SEQ ID NO: 670249 - RNA, 19 nt, Homo sapiens
  misc_RNA (1)...(19): siRNA sense strand
gacuaaguuuaccauagau

SEQ ID NO: 670250 - RNA, 19 nt, Homo sapiens
  misc_RNA (1)...(19): siRNA sense strand
gaccgaacagcgagauugu

SEQ ID NO: 670251 - RNA, 19 nt, Homo sapiens
  misc_RNA (1)...(19): siRNA sense strand
gcauuuuguuugugaauuc

SEQ ID NO: 670252 - RNA, 19 nt, Homo sapiens
  misc_RNA (1)...(19): siRNA sense strand
ugcugagguuaauuuguua

SEQ ID NO: 670253 - RNA, 19 nt, Homo sapiens
  misc_RNA (1)...(19): siRNA sense strand
gcgagauuguguauucacu

SEQ ID NO: 670254 - RNA, 19 nt, Homo sapiens
  misc_RNA (1)...(19): siRNA sense strand
uauccgguuucccgaauca

SEQ ID NO: 670255 - RNA, 19 nt, Homo sapiens
  misc_RNA (1)...(19): siRNA sense strand
agcccuagcuuaucucaag

SEQ ID NO: 670256 - RNA, 19 nt, Homo sapiens
  misc_RNA (1)...(19): siRNA sense strand
aagcaaaguccuacgagau

SEQ ID NO: 670257 - RNA, 19 nt, Homo sapiens
  misc_RNA (1)...(19): siRNA sense strand
ggaaaucgcuggacagaga

SEQ ID NO: 670258 - RNA, 19 nt, Homo sapiens
  misc_RNA (1)...(19): siRNA sense strand
ccaaucaguuuacaaagua

SEQ ID NO: 670259 - RNA, 19 nt, Homo sapiens
  misc_RNA (1)...(19): siRNA sense strand
uaaaugcucuucucuccua

SEQ ID NO: 670260 - RNA, 19 nt, Homo sapiens
  misc_RNA (1)...(19): siRNA sense strand
gaacuaagcgaaucuuugu

SEQ ID NO: 670261 - RNA, 19 nt, Homo sapiens
  misc_RNA (1)...(19): siRNA sense strand
cgacaacccgccaauauuu

SEQ ID NO: 670262 - RNA, 19 nt, Homo sapiens
  misc_RNA (1)...(19): siRNA sense strand
agaaacagcucucagaauc

SEQ ID NO: 670263 - RNA, 19 nt, Homo sapiens
  misc_RNA (1)...(19): siRNA sense strand
gaacagcgagauuguguau

SEQ ID NO: 670264 - RNA, 19 nt, Homo sapiens
  misc_RNA (1)...(19): siRNA sense strand
agacuaaguuuaccauaga

SEQ ID NO: 670265 - RNA, 19 nt, Homo sapiens
  misc_RNA (1)...(19): siRNA sense strand
ggaaacugcugagguuaau

SEQ ID NO: 670266 - RNA, 19 nt, Homo sapiens
  misc_RNA (1)...(19): siRNA sense strand
ugaaggacauuaacgacaa

SEQ ID NO: 670267 - RNA, 19 nt, Homo sapiens
  misc_RNA (1)...(19): siRNA sense strand
ggagguaaaucugcagaau

SEQ ID NO: 670268 - RNA, 19 nt, Homo sapiens
  misc_RNA (1)...(19): siRNA sense strand
guuaaacgcuucugaugca

SEQ ID NO: 670269 - RNA, 19 nt, Homo sapiens
  misc_RNA (1)...(19): siRNA sense strand
gguauuagauguaaaugac

SEQ ID NO: 670270 - RNA, 19 nt, Homo sapiens
  misc_RNA (1)...(19): siRNA sense strand
agaggaaacugcugagguu

SEQ ID NO: 670271 - RNA, 19 nt, Homo sapiens
  misc_RNA (1)...(19): siRNA sense strand
ccgccaauauuuccaauga

SEQ ID NO: 670272 - RNA, 19 nt, Homo sapiens
  misc_RNA (1)...(19): siRNA sense strand
gcaaaguccuacgagauuc

SEQ ID NO: 670273 - RNA, 19 nt, Homo sapiens
  misc_RNA (1)...(19): siRNA sense strand
aaugggaccuuagugguua

SEQ ID NO: 670274 - RNA, 19 nt, Homo sapiens
  misc_RNA (1)...(19): siRNA sense strand
ccagaagucucaauaacgu

SEQ ID NO: 670275 - RNA, 19 nt, Homo sapiens
  misc_RNA (1)...(19): siRNA sense strand
acagcgagauuguguauuc

SEQ ID NO: 670276 - RNA, 19 nt, Homo sapiens
  misc_RNA (1)...(19): siRNA sense strand
gcagauauaggaguaaaug

SEQ ID NO: 670277 - RNA, 19 nt, Homo sapiens
  misc_RNA (1)...(19): siRNA sense strand
acaggcaaaugaugaacua

SEQ ID NO: 670278 - RNA, 19 nt, Homo sapiens
  misc_RNA (1)...(19): siRNA sense strand
agaacgcgcugguguccua

SEQ ID NO: 670279 - RNA, 19 nt, Homo sapiens
  misc_RNA (1)...(19): siRNA sense strand
cugcugagguuaauuuguu

SEQ ID NO: 670280 - RNA, 19 nt, Homo sapiens
  misc_RNA (1)...(19): siRNA sense strand
aaacugcugagguuaauuu

SEQ ID NO: 670281 - RNA, 19 nt, Homo sapiens
  misc_RNA (1)...(19): siRNA sense strand
gccaauauuuccaaugaca

SEQ ID NO: 670282 - RNA, 19 nt, Homo sapiens
  misc_RNA (1)...(19): siRNA sense strand
uaacacaccagaagucuca

SEQ ID NO: 670283 - RNA, 19 nt, Homo sapiens
  misc_RNA (1)...(19): siRNA sense strand
gggcaccguucaaauacuu

SEQ ID NO: 670284 - RNA, 19 nt, Homo sapiens
  misc_RNA (1)...(19): siRNA sense strand
ccaaugacaguaaagacua

SEQ ID NO: 670285 - RNA, 19 nt, Homo sapiens
  misc_RNA (1)...(19): siRNA sense strand
gaaacagcucucagaauca

SEQ ID NO: 670286 - RNA, 19 nt, Homo sapiens
  misc_RNA (1)...(19): siRNA sense strand
cagacuaaguuuaccauag

SEQ ID NO: 670287 - RNA, 19 nt, Homo sapiens
  misc_RNA (1)...(19): siRNA sense strand
caaugacaguaaagacuau

SEQ ID NO: 670288 - RNA, 19 nt, Homo sapiens
  misc_RNA (1)...(19): siRNA sense strand
uguccaccuucaagaauua

SEQ ID NO: 670289 - RNA, 19 nt, Homo sapiens
  misc_RNA (1)...(19): siRNA sense strand
gauguguccuccacuauac

SEQ ID NO: 670290 - RNA, 19 nt, Homo sapiens
  misc_RNA (1)...(19): siRNA sense strand
aguaaagacuauccgguuu

SEQ ID NO: 670291 - RNA, 19 nt, Homo sapiens
  misc_RNA (1)...(19): siRNA sense strand
ugaugcagauauaggagua

SEQ ID NO: 670292 - RNA, 19 nt, Homo sapiens
  misc_RNA (1)...(19): siRNA sense strand
uaacgacaacccgccaaua

SEQ ID NO: 670293 - RNA, 19 nt, Homo sapiens
  misc_RNA (1)...(19): siRNA sense strand
aauaacgucucucucacuu

SEQ ID NO: 670294 - RNA, 19 nt, Homo sapiens
  misc_RNA (1)...(19): siRNA sense strand
ggaccgaacagcgagauug

SEQ ID NO: 670295 - RNA, 19 nt, Homo sapiens
  misc_RNA (1)...(19): siRNA sense strand
gauauacaggcaaaugaug

SEQ ID NO: 670296 - RNA, 19 nt, Homo sapiens
  misc_RNA (1)...(19): siRNA sense strand
gcugcuugauucucgguuu

SEQ ID NO: 670297 - RNA, 19 nt, Homo sapiens
  misc_RNA (1)...(19): siRNA sense strand
caccagaagucucaauaac

SEQ ID NO: 670298 - RNA, 19 nt, Homo sapiens
  misc_RNA (1)...(19): siRNA sense strand
ccacuauacagacuaaguu

SEQ ID NO: 670299 - RNA, 19 nt, Homo sapiens
  misc_RNA (1)...(19): siRNA sense strand
gaggaaacugcugagguua

SEQ ID NO: 670300 - RNA, 19 nt, Homo sapiens
  misc_RNA (1)...(19): siRNA sense strand
gauucucgguuuccucuag

SEQ ID NO: 670301 - RNA, 19 nt, Homo sapiens
  misc_RNA (1)...(19): siRNA sense strand
gaaggacauuaacgacaac

SEQ ID NO: 670302 - RNA, 19 nt, Homo sapiens
  misc_RNA (1)...(19): siRNA sense strand
gagguaaaucugcagaaug

SEQ ID NO: 670303 - RNA, 19 nt, Homo sapiens
  misc_RNA (1)...(19): siRNA sense strand
cccaaucaguuuacaaagu

SEQ ID NO: 670304 - RNA, 19 nt, Homo sapiens
  misc_RNA (1)...(19): siRNA sense strand
guaaagacuauccgguuuc

SEQ ID NO: 670305 - RNA, 19 nt, Homo sapiens
  misc_RNA (1)...(19): siRNA sense strand
agguaaaucugcagaaugg

SEQ ID NO: 670306 - RNA, 19 nt, Homo sapiens
  misc_RNA (1)...(19): siRNA sense strand
ggccuucagcccuagcuua

SEQ ID NO: 670307 - RNA, 19 nt, Homo sapiens
  misc_RNA (1)...(19): siRNA sense strand
aggcuacgcugguggaugu

SEQ ID NO: 670308 - RNA, 19 nt, Homo sapiens
  misc_RNA (1)...(19): siRNA sense strand
gaucgcgacucugguacga

SEQ ID NO: 670309 - RNA, 19 nt, Homo sapiens
  misc_RNA (1)...(19): siRNA sense strand
ugauguguccuccacuaua

SEQ ID NO: 670310 - RNA, 19 nt, Homo sapiens
  misc_RNA (1)...(19): siRNA sense strand
ugaacuaagcgaaucuuug

SEQ ID NO: 670311 - RNA, 19 nt, Homo sapiens
  misc_RNA (1)...(19): siRNA sense strand
ccuccacuauacagacuaa

SEQ ID NO: 670312 - RNA, 19 nt, Homo sapiens
  misc_RNA (1)...(19): siRNA sense strand
aaacagcucucagaaucag

SEQ ID NO: 670313 - RNA, 19 nt, Homo sapiens
  misc_RNA (1)...(19): siRNA sense strand
gcacugucauugcucucau

SEQ ID NO: 670314 - RNA, 19 nt, Homo sapiens
  misc_RNA (1)...(19): siRNA sense strand
ggcaaaugaugaacuaagc

SEQ ID NO: 670315 - RNA, 19 nt, Homo sapiens
  misc_RNA (1)...(19): siRNA sense strand
gaaucagaauacguaggaa

SEQ ID NO: 670316 - RNA, 19 nt, Homo sapiens
  misc_RNA (1)...(19): siRNA sense strand
acacaguauucgugaagga

SEQ ID NO: 670317 - RNA, 19 nt, Homo sapiens
  misc_RNA (1)...(19): siRNA sense strand
guguccaccuucaagaauu

SEQ ID NO: 670318 - RNA, 19 nt, Homo sapiens
  misc_RNA (1)...(19): siRNA sense strand
uagauauacaggcaaauga

SEQ ID NO: 670319 - RNA, 19 nt, Homo sapiens
  misc_RNA (1)...(19): siRNA sense strand
gcucucagaaucagaauac

SEQ ID NO: 670320 - RNA, 19 nt, Homo sapiens
  misc_RNA (1)...(19): siRNA sense strand
acgcguggcuuucguacga

SEQ ID NO: 670321 - RNA, 19 nt, Homo sapiens
  misc_RNA (1)...(19): siRNA sense strand
guacacaguauucgugaag

SEQ ID NO: 670322 - RNA, 19 nt, Homo sapiens
  misc_RNA (1)...(19): siRNA sense strand
gucaggacauuguaaaauu

SEQ ID NO: 670323 - RNA, 19 nt, Homo sapiens
  misc_RNA (1)...(19): siRNA sense strand
gcagaugaaggaccgaaca

SEQ ID NO: 670324 - RNA, 19 nt, Homo sapiens
  misc_RNA (1)...(19): siRNA sense strand
uaaguuaaacgcuucugau

SEQ ID NO: 670325 - RNA, 19 nt, Homo sapiens
  misc_RNA (1)...(19): siRNA sense strand
agacuccgcagaagagaaa

SEQ ID NO: 670326 - RNA, 19 nt, Homo sapiens
  misc_RNA (1)...(19): siRNA sense strand
acaccagaagucucaauaa

SEQ ID NO: 670327 - RNA, 19 nt, Homo sapiens
  misc_RNA (1)...(19): siRNA sense strand
ucaagaauuacuacucguu

SEQ ID NO: 670328 - RNA, 19 nt, Homo sapiens
  misc_RNA (1)...(19): siRNA sense strand
agaaucagaauacguagga

SEQ ID NO: 670329 - RNA, 19 nt, Homo sapiens
  misc_RNA (1)...(19): siRNA sense strand
guaaaugacaaugaaccaa

SEQ ID NO: 670330 - RNA, 19 nt, Homo sapiens
  misc_RNA (1)...(19): siRNA sense strand
cuucagcccuagcuuaucu

SEQ ID NO: 670331 - RNA, 19 nt, Homo sapiens
  misc_RNA (1)...(19): siRNA sense strand
cacugcaacugacaaagga

SEQ ID NO: 670332 - RNA, 19 nt, Homo sapiens
  misc_RNA (1)...(19): siRNA sense strand
uagagaauacggcaaaugg

SEQ ID NO: 670333 - RNA, 19 nt, Homo sapiens
  misc_RNA (1)...(19): siRNA sense strand
gacaacccgccaauauuuc

SEQ ID NO: 670334 - RNA, 19 nt, Homo sapiens
  misc_RNA (1)...(19): siRNA sense strand
cagccugaguacacaguau

SEQ ID NO: 670335 - RNA, 19 nt, Homo sapiens
  misc_RNA (1)...(19): siRNA sense strand
ucgcgacucugguacgaau

SEQ ID NO: 670336 - RNA, 19 nt, Homo sapiens
  misc_RNA (1)...(19): siRNA sense strand
ggaguaaaugcucuucucu

SEQ ID NO: 670337 - RNA, 19 nt, Homo sapiens
  misc_RNA (1)...(19): siRNA sense strand
gaaggaccacggcgaacca

SEQ ID NO: 670338 - RNA, 19 nt, Homo sapiens
  misc_RNA (1)...(19): siRNA sense strand
caguauucgugaaggagaa

SEQ ID NO: 670339 - RNA, 19 nt, Homo sapiens
  misc_RNA (1)...(19): siRNA sense strand
gagauucaggucacugcaa

SEQ ID NO: 670340 - RNA, 19 nt, Homo sapiens
  misc_RNA (1)...(19): siRNA sense strand
caaaguccuacgagauuca

SEQ ID NO: 670341 - RNA, 19 nt, Homo sapiens
  misc_RNA (1)...(19): siRNA sense strand
aaaugggaccuuagugguu

SEQ ID NO: 670342 - RNA, 19 nt, Homo sapiens
  misc_RNA (1)...(19): siRNA sense strand
gaaacugcugagguuaauu

SEQ ID NO: 670343 - RNA, 19 nt, Homo sapiens
  misc_RNA (1)...(19): siRNA sense strand
cucagaaucagaauacgua

SEQ ID NO: 670344 - RNA, 19 nt, Homo sapiens
  misc_RNA (1)...(19): siRNA sense strand
ucacggugcugcuguacac

SEQ ID NO: 670345 - RNA, 19 nt, Homo sapiens
  misc_RNA (1)...(19): siRNA sense strand
ugguggaugucaacgugua

SEQ ID NO: 670346 - RNA, 19 nt, Homo sapiens
  misc_RNA (1)...(19): siRNA sense strand
gcuauacacgggugagauc

SEQ ID NO: 670347 - RNA, 19 nt, Homo sapiens
  misc_RNA (1)...(19): siRNA sense strand
cacaccagaagucucaaua

SEQ ID NO: 670348 - RNA, 19 nt, Homo sapiens
  misc_RNA (1)...(19): siRNA sense strand
gauaacacaccagaagucu

SEQ ID NO: 670349 - RNA, 19 nt, Homo sapiens
  misc_RNA (1)...(19): siRNA sense strand
gacuaaguuuaccauagau

SEQ ID NO: 670350 - RNA, 19 nt, Homo sapiens
  misc_RNA (1)...(19): siRNA sense strand
gaccgaacagcgagauugu

SEQ ID NO: 670351 - RNA, 19 nt, Homo sapiens
  misc_RNA (1)...(19): siRNA sense strand
gcauuuuguuugugaauuc

SEQ ID NO: 670352 - RNA, 19 nt, Homo sapiens
  misc_RNA (1)...(19): siRNA sense strand
ugcugagguuaauuuguua

SEQ ID NO: 670353 - RNA, 19 nt, Homo sapiens
  misc_RNA (1)...(19): siRNA sense strand
gcgagauuguguauucacu

SEQ ID NO: 670354 - RNA, 19 nt, Homo sapiens
  misc_RNA (1)...(19): siRNA sense strand
uauccgguuucccgaauca

SEQ ID NO: 670355 - RNA, 19 nt, Homo sapiens
  misc_RNA (1)...(19): siRNA sense strand
agcccuagcuuaucucaag

SEQ ID NO: 670356 - RNA, 19 nt, Homo sapiens
  misc_RNA (1)...(19): siRNA sense strand
aagcaaaguccuacgagau

SEQ ID NO: 670357 - RNA, 19 nt, Homo sapiens
  misc_RNA (1)...(19): siRNA sense strand
caaauucguuguugacuua

SEQ ID NO: 670358 - RNA, 19 nt, Homo sapiens
  misc_RNA (1)...(19): siRNA sense strand
uaacauagauuucgaggaa

SEQ ID NO: 670359 - RNA, 19 nt, Homo sapiens
  misc_RNA (1)...(19): siRNA sense strand
gcagauaucggaacaaauu

SEQ ID NO: 670360 - RNA, 19 nt, Homo sapiens
  misc_RNA (1)...(19): siRNA sense strand
uuagaagacucuccacuua

SEQ ID NO: 670361 - RNA, 19 nt, Homo sapiens
  misc_RNA (1)...(19): siRNA sense strand
ggacaugucagcagauauu

SEQ ID NO: 670362 - RNA, 19 nt, Homo sapiens
  misc_RNA (1)...(19): siRNA sense strand
caacuaaagaucacuguuu

SEQ ID NO: 670363 - RNA, 19 nt, Homo sapiens
  misc_RNA (1)...(19): siRNA sense strand
gcacaguucuacucgaaau

SEQ ID NO: 670364 - RNA, 19 nt, Homo sapiens
  misc_RNA (1)...(19): siRNA sense strand
gaaacaggauguggacguu

SEQ ID NO: 670365 - RNA, 19 nt, Homo sapiens
  misc_RNA (1)...(19): siRNA sense strand
ugaaggacauuaaugacaa

SEQ ID NO: 670366 - RNA, 19 nt, Homo sapiens
  misc_RNA (1)...(19): siRNA sense strand
aaagucagauuacucgaaa

SEQ ID NO: 670367 - RNA, 19 nt, Homo sapiens
  misc_RNA (1)...(19): siRNA sense strand
cgauuuggaugaaggagua

SEQ ID NO: 670368 - RNA, 19 nt, Homo sapiens
  misc_RNA (1)...(19): siRNA sense strand
uaauguaccugaguuaguu

SEQ ID NO: 670369 - RNA, 19 nt, Homo sapiens
  misc_RNA (1)...(19): siRNA sense strand
ccauuuagauccagucaau

SEQ ID NO: 670370 - RNA, 19 nt, Homo sapiens
  misc_RNA (1)...(19): siRNA sense strand
ggagguaaaucugcagaau

SEQ ID NO: 670371 - RNA, 19 nt, Homo sapiens
  misc_RNA (1)...(19): siRNA sense strand
agaccgaccucauggcuuu

SEQ ID NO: 670372 - RNA, 19 nt, Homo sapiens
  misc_RNA (1)...(19): siRNA sense strand
gaagugaaggacauuaaug

SEQ ID NO: 670373 - RNA, 19 nt, Homo sapiens
  misc_RNA (1)...(19): siRNA sense strand
acgcguggcuuucguauga

SEQ ID NO: 670374 - RNA, 19 nt, Homo sapiens
  misc_RNA (1)...(19): siRNA sense strand
cauaugaaauccagguaga

SEQ ID NO: 670375 - RNA, 19 nt, Homo sapiens
  misc_RNA (1)...(19): siRNA sense strand
auaaggauaucgcguauuc

SEQ ID NO: 670376 - RNA, 19 nt, Homo sapiens
  misc_RNA (1)...(19): siRNA sense strand
ucacacugcugcuauauac

SEQ ID NO: 670377 - RNA, 19 nt, Homo sapiens
  misc_RNA (1)...(19): siRNA sense strand
gaaggaguaaauaaggaua

SEQ ID NO: 670378 - RNA, 19 nt, Homo sapiens
  misc_RNA (1)...(19): siRNA sense strand
uccaauggcuguaaagaau

SEQ ID NO: 670379 - RNA, 19 nt, Homo sapiens
  misc_RNA (1)...(19): siRNA sense strand
ggacaaaucaguguaaagg

SEQ ID NO: 670380 - RNA, 19 nt, Homo sapiens
  misc_RNA (1)...(19): siRNA sense strand
ggauaucgcguauucuuuc

SEQ ID NO: 670381 - RNA, 19 nt, Homo sapiens
  misc_RNA (1)...(19): siRNA sense strand
ggacacuccuaagcauuau

SEQ ID NO: 670382 - RNA, 19 nt, Homo sapiens
  misc_RNA (1)...(19): siRNA sense strand
caagaauuacuacucauug

SEQ ID NO: 670383 - RNA, 19 nt, Homo sapiens
  misc_RNA (1)...(19): siRNA sense strand
ggaaaguaagucauaugaa

SEQ ID NO: 670384 - RNA, 19 nt, Homo sapiens
  misc_RNA (1)...(19): siRNA sense strand
gacgaucuauaaagucaga

SEQ ID NO: 670385 - RNA, 19 nt, Homo sapiens
  misc_RNA (1)...(19): siRNA sense strand
uguccaccuucaagaauua

SEQ ID NO: 670386 - RNA, 19 nt, Homo sapiens
  misc_RNA (1)...(19): siRNA sense strand
guaccugaguuaguuauuc

SEQ ID NO: 670387 - RNA, 19 nt, Homo sapiens
  misc_RNA (1)...(19): siRNA sense strand
gcacagucaucgcucugau

SEQ ID NO: 670388 - RNA, 19 nt, Homo sapiens
  misc_RNA (1)...(19): siRNA sense strand
agaggacgaucuauaaagu

SEQ ID NO: 670389 - RNA, 19 nt, Homo sapiens
  misc_RNA (1)...(19): siRNA sense strand
gguagaagccacggauaaa

SEQ ID NO: 670390 - RNA, 19 nt, Homo sapiens
  misc_RNA (1)...(19): siRNA sense strand
aaauaaggauaucgcguau

SEQ ID NO: 670391 - RNA, 19 nt, Homo sapiens
  misc_RNA (1)...(19): siRNA sense strand
ggaagugaaggacauuaau

SEQ ID NO: 670392 - RNA, 19 nt, Homo sapiens
  misc_RNA (1)...(19): siRNA sense strand
guaaaggguaacauagauu

SEQ ID NO: 670393 - RNA, 19 nt, Homo sapiens
  misc_RNA (1)...(19): siRNA sense strand
gauaucgcguauucuuuca

SEQ ID NO: 670394 - RNA, 19 nt, Homo sapiens
  misc_RNA (1)...(19): siRNA sense strand
gcacgacucaacuaaagau

SEQ ID NO: 670395 - RNA, 19 nt, Homo sapiens
  misc_RNA (1)...(19): siRNA sense strand
cuucaagaauuacuacuca

SEQ ID NO: 670396 - RNA, 19 nt, Homo sapiens
  misc_RNA (1)...(19): siRNA sense strand
cgaggaaaguaagucauau

SEQ ID NO: 670397 - RNA, 19 nt, Homo sapiens
  misc_RNA (1)...(19): siRNA sense strand
uguaaaggguaacauagau

SEQ ID NO: 670398 - RNA, 19 nt, Homo sapiens
  misc_RNA (1)...(19): siRNA sense strand
gagaggacgaucuauaaag

SEQ ID NO: 670399 - RNA, 19 nt, Homo sapiens
  misc_RNA (1)...(19): siRNA sense strand
ggagagggguugcccaaga

SEQ ID NO: 670400 - RNA, 19 nt, Homo sapiens
  misc_RNA (1)...(19): siRNA sense strand
agaacgcccugguguccua

SEQ ID NO: 670401 - RNA, 19 nt, Homo sapiens
  misc_RNA (1)...(19): siRNA sense strand
guuugugaauucucggaua

SEQ ID NO: 670402 - RNA, 19 nt, Homo sapiens
  misc_RNA (1)...(19): siRNA sense strand
cuuccuccuuguccaauua

SEQ ID NO: 670403 - RNA, 19 nt, Homo sapiens
  misc_RNA (1)...(19): siRNA sense strand
gaaggacauuaaugacaac

SEQ ID NO: 670404 - RNA, 19 nt, Homo sapiens
  misc_RNA (1)...(19): siRNA sense strand
ucacuaucuuuaccuguau

SEQ ID NO: 670405 - RNA, 19 nt, Homo sapiens
  misc_RNA (1)...(19): siRNA sense strand
ccaauuagccgggauagag

SEQ ID NO: 670406 - RNA, 19 nt, Homo sapiens
  misc_RNA (1)...(19): siRNA sense strand
ggaaauuaaaucccuugga

SEQ ID NO: 670407 - RNA, 19 nt, Homo sapiens
  misc_RNA (1)...(19): siRNA sense strand
gagaggagaaacaggaugu

SEQ ID NO: 670408 - RNA, 19 nt, Homo sapiens
  misc_RNA (1)...(19): siRNA sense strand
gaugaaggaguaaauaagg

SEQ ID NO: 670409 - RNA, 19 nt, Homo sapiens
  misc_RNA (1)...(19): siRNA sense strand
ggaugaaggaguaaauaag

SEQ ID NO: 670410 - RNA, 19 nt, Homo sapiens
  misc_RNA (1)...(19): siRNA sense strand
uaaagucagauuacucgaa

SEQ ID NO: 670411 - RNA, 19 nt, Homo sapiens
  misc_RNA (1)...(19): siRNA sense strand
gcccagugccugcugcuuu

SEQ ID NO: 670412 - RNA, 19 nt, Homo sapiens
  misc_RNA (1)...(19): siRNA sense strand
aagcugcacugguggaugu

SEQ ID NO: 670413 - RNA, 19 nt, Homo sapiens
  misc_RNA (1)...(19): siRNA sense strand
gagguaaaucugcagaaug

SEQ ID NO: 670414 - RNA, 19 nt, Homo sapiens
  misc_RNA (1)...(19): siRNA sense strand
gaggaaaguaagucauaug

SEQ ID NO: 670415 - RNA, 19 nt, Homo sapiens
  misc_RNA (1)...(19): siRNA sense strand
cuaauaacagcaauugaug

SEQ ID NO: 670416 - RNA, 19 nt, Homo sapiens
  misc_RNA (1)...(19): siRNA sense strand
ucgaggaaaguaagucaua

SEQ ID NO: 670417 - RNA, 19 nt, Homo sapiens
  misc_RNA (1)...(19): siRNA sense strand
caauggcuguaaagaaucu

SEQ ID NO: 670418 - RNA, 19 nt, Homo sapiens
  misc_RNA (1)...(19): siRNA sense strand
uaccugaguuaguuauuca

SEQ ID NO: 670419 - RNA, 19 nt, Homo sapiens
  misc_RNA (1)...(19): siRNA sense strand
cugcacaguucuacucgaa

SEQ ID NO: 670420 - RNA, 19 nt, Homo sapiens
  misc_RNA (1)...(19): siRNA sense strand
agguaaaucugcagaaugg

SEQ ID NO: 670421 - RNA, 19 nt, Homo sapiens
  misc_RNA (1)...(19): siRNA sense strand
uugagaggacgaucuauaa

SEQ ID NO: 670422 - RNA, 19 nt, Homo sapiens
  misc_RNA (1)...(19): siRNA sense strand
gaucacuguuuuagaugua

SEQ ID NO: 670423 - RNA, 19 nt, Homo sapiens
  misc_RNA (1)...(19): siRNA sense strand
uggcacgacucaacuaaag

SEQ ID NO: 670424 - RNA, 19 nt, Homo sapiens
  misc_RNA (1)...(19): siRNA sense strand
ugagaggacgaucuauaaa

SEQ ID NO: 670425 - RNA, 19 nt, Homo sapiens
  misc_RNA (1)...(19): siRNA sense strand
uaucgcguauucuuucaau

SEQ ID NO: 670426 - RNA, 19 nt, Homo sapiens
  misc_RNA (1)...(19): siRNA sense strand
aacaggauguggacguuga

SEQ ID NO: 670427 - RNA, 19 nt, Homo sapiens
  misc_RNA (1)...(19): siRNA sense strand
gcccaagaccgaccucaug

SEQ ID NO: 670428 - RNA, 19 nt, Homo sapiens
  misc_RNA (1)...(19): siRNA sense strand
guguccaccuucaagaauu

SEQ ID NO: 670429 - RNA, 19 nt, Homo sapiens
  misc_RNA (1)...(19): siRNA sense strand
caguguaaaggguaacaua

SEQ ID NO: 670430 - RNA, 19 nt, Homo sapiens
  misc_RNA (1)...(19): siRNA sense strand
acacuccuaagcauuauuu

SEQ ID NO: 670431 - RNA, 19 nt, Homo sapiens
  misc_RNA (1)...(19): siRNA sense strand
gaaggugcgcgcaguggau

SEQ ID NO: 670432 - RNA, 19 nt, Homo sapiens
  misc_RNA (1)...(19): siRNA sense strand
uggaugaaggaguaaauaa

SEQ ID NO: 670433 - RNA, 19 nt, Homo sapiens
  misc_RNA (1)...(19): siRNA sense strand
ugauaauguaccugaguua

SEQ ID NO: 670434 - RNA, 19 nt, Homo sapiens
  misc_RNA (1)...(19): siRNA sense strand
gauaauguaccugaguuag

SEQ ID NO: 670435 - RNA, 19 nt, Homo sapiens
  misc_RNA (1)...(19): siRNA sense strand
augcagauaucggaacaaa

SEQ ID NO: 670436 - RNA, 19 nt, Homo sapiens
  misc_RNA (1)...(19): siRNA sense strand
caauuagccgggauagaga

SEQ ID NO: 670437 - RNA, 19 nt, Homo sapiens
  misc_RNA (1)...(19): siRNA sense strand
ggugaaggaccacggugaa

SEQ ID NO: 670438 - RNA, 19 nt, Homo sapiens
  misc_RNA (1)...(19): siRNA sense strand
aggacgaucuauaaaguca

SEQ ID NO: 670439 - RNA, 19 nt, Homo sapiens
  misc_RNA (1)...(19): siRNA sense strand
gugaaggacauuaaugaca

SEQ ID NO: 670440 - RNA, 19 nt, Homo sapiens
  misc_RNA (1)...(19): siRNA sense strand
aaaucaguguaaaggguaa

SEQ ID NO: 670441 - RNA, 19 nt, Homo sapiens
  misc_RNA (1)...(19): siRNA sense strand
gacaggccgcugcagguuu

SEQ ID NO: 670442 - RNA, 19 nt, Homo sapiens
  misc_RNA (1)...(19): siRNA sense strand
aaugacaacgcgccaguuu

SEQ ID NO: 670443 - RNA, 19 nt, Homo sapiens
  misc_RNA (1)...(19): siRNA sense strand
ggauagaccgcgaggaacu

SEQ ID NO: 670444 - RNA, 19 nt, Homo sapiens
  misc_RNA (1)...(19): siRNA sense strand
cgcaguggaugcagacuca

SEQ ID NO: 670445 - RNA, 19 nt, Homo sapiens
  misc_RNA (1)...(19): siRNA sense strand
agaagacucuccacuuagc

SEQ ID NO: 670446 - RNA, 19 nt, Homo sapiens
  misc_RNA (1)...(19): siRNA sense strand
guguaaaggguaacauaga

SEQ ID NO: 670447 - RNA, 19 nt, Homo sapiens
  misc_RNA (1)...(19): siRNA sense strand
cgacucaacuaaagaucac

SEQ ID NO: 670448 - RNA, 19 nt, Homo sapiens
  misc_RNA (1)...(19): siRNA sense strand
aagaauuacuacucauugg

SEQ ID NO: 670449 - RNA, 19 nt, Homo sapiens
  misc_RNA (1)...(19): siRNA sense strand
uaacgccaccgauuuggau

SEQ ID NO: 670450 - RNA, 19 nt, Homo sapiens
  misc_RNA (1)...(19): siRNA sense strand
aagugaaggacauuaauga

SEQ ID NO: 670451 - RNA, 19 nt, Homo sapiens
  misc_RNA (1)...(19): siRNA sense strand
acggacaugucagcagaua

SEQ ID NO: 670452 - RNA, 19 nt, Homo sapiens
  misc_RNA (1)...(19): siRNA sense strand
aucacuaucuuuaccugua

SEQ ID NO: 670453 - RNA, 19 nt, Homo sapiens
  misc_RNA (1)...(19): siRNA sense strand
aggaaaguaagucauauga

SEQ ID NO: 670454 - RNA, 19 nt, Homo sapiens
  misc_RNA (1)...(19): siRNA sense strand
caauggacaaaucagugua

SEQ ID NO: 670455 - RNA, 19 nt, Homo sapiens
  misc_RNA (1)...(19): siRNA sense strand
ugguggaugucaacgugua

SEQ ID NO: 670456 - RNA, 19 nt, Homo sapiens
  misc_RNA (1)...(19): siRNA sense strand
ggaugucaacguguacuug

SEQ ID NO: 670457 - RNA, 19 nt, Homo sapiens
  misc_RNA (1)...(19): siRNA sense strand
caaauucguuguugacuua

SEQ ID NO: 670458 - RNA, 19 nt, Homo sapiens
  misc_RNA (1)...(19): siRNA sense strand
uaacauagauuucgaggaa

SEQ ID NO: 670459 - RNA, 19 nt, Homo sapiens
  misc_RNA (1)...(19): siRNA sense strand
gcagauaucggaacaaauu

SEQ ID NO: 670460 - RNA, 19 nt, Homo sapiens
  misc_RNA (1)...(19): siRNA sense strand
uuagaagacucuccacuua

SEQ ID NO: 670461 - RNA, 19 nt, Homo sapiens
  misc_RNA (1)...(19): siRNA sense strand
ggacaugucagcagauauu

SEQ ID NO: 670462 - RNA, 19 nt, Homo sapiens
  misc_RNA (1)...(19): siRNA sense strand
caacuaaagaucacuguuu

SEQ ID NO: 670463 - RNA, 19 nt, Homo sapiens
  misc_RNA (1)...(19): siRNA sense strand
gcacaguucuacucgaaau

SEQ ID NO: 670464 - RNA, 19 nt, Homo sapiens
  misc_RNA (1)...(19): siRNA sense strand
gaaacaggauguggacguu

SEQ ID NO: 670465 - RNA, 19 nt, Homo sapiens
  misc_RNA (1)...(19): siRNA sense strand
ugaaggacauuaaugacaa

SEQ ID NO: 670466 - RNA, 19 nt, Homo sapiens
  misc_RNA (1)...(19): siRNA sense strand
aaagucagauuacucgaaa

SEQ ID NO: 670467 - RNA, 19 nt, Homo sapiens
  misc_RNA (1)...(19): siRNA sense strand
cgauuuggaugaaggagua

SEQ ID NO: 670468 - RNA, 19 nt, Homo sapiens
  misc_RNA (1)...(19): siRNA sense strand
uaauguaccugaguuaguu

SEQ ID NO: 670469 - RNA, 19 nt, Homo sapiens
  misc_RNA (1)...(19): siRNA sense strand
ccauuuagauccagucaau

SEQ ID NO: 670470 - RNA, 19 nt, Homo sapiens
  misc_RNA (1)...(19): siRNA sense strand
ggagguaaaucugcagaau

SEQ ID NO: 670471 - RNA, 19 nt, Homo sapiens
  misc_RNA (1)...(19): siRNA sense strand
agaccgaccucauggcuuu

SEQ ID NO: 670472 - RNA, 19 nt, Homo sapiens
  misc_RNA (1)...(19): siRNA sense strand
gaagugaaggacauuaaug

SEQ ID NO: 670473 - RNA, 19 nt, Homo sapiens
  misc_RNA (1)...(19): siRNA sense strand
acgcguggcuuucguauga

SEQ ID NO: 670474 - RNA, 19 nt, Homo sapiens
  misc_RNA (1)...(19): siRNA sense strand
cauaugaaauccagguaga

SEQ ID NO: 670475 - RNA, 19 nt, Homo sapiens
  misc_RNA (1)...(19): siRNA sense strand
auaaggauaucgcguauuc

SEQ ID NO: 670476 - RNA, 19 nt, Homo sapiens
  misc_RNA (1)...(19): siRNA sense strand
ucacacugcugcuauauac

SEQ ID NO: 670477 - RNA, 19 nt, Homo sapiens
  misc_RNA (1)...(19): siRNA sense strand
gaaggaguaaauaaggaua

SEQ ID NO: 670478 - RNA, 19 nt, Homo sapiens
  misc_RNA (1)...(19): siRNA sense strand
uccaauggcuguaaagaau

SEQ ID NO: 670479 - RNA, 19 nt, Homo sapiens
  misc_RNA (1)...(19): siRNA sense strand
ggacaaaucaguguaaagg

SEQ ID NO: 670480 - RNA, 19 nt, Homo sapiens
  misc_RNA (1)...(19): siRNA sense strand
ggauaucgcguauucuuuc

SEQ ID NO: 670481 - RNA, 19 nt, Homo sapiens
  misc_RNA (1)...(19): siRNA sense strand
ggacacuccuaagcauuau

SEQ ID NO: 670482 - RNA, 19 nt, Homo sapiens
  misc_RNA (1)...(19): siRNA sense strand
caagaauuacuacucauug

SEQ ID NO: 670483 - RNA, 19 nt, Homo sapiens
  misc_RNA (1)...(19): siRNA sense strand
ggaaaguaagucauaugaa

SEQ ID NO: 670484 - RNA, 19 nt, Homo sapiens
  misc_RNA (1)...(19): siRNA sense strand
gacgaucuauaaagucaga

SEQ ID NO: 670485 - RNA, 19 nt, Homo sapiens
  misc_RNA (1)...(19): siRNA sense strand
uguccaccuucaagaauua

SEQ ID NO: 670486 - RNA, 19 nt, Homo sapiens
  misc_RNA (1)...(19): siRNA sense strand
guaccugaguuaguuauuc

SEQ ID NO: 670487 - RNA, 19 nt, Homo sapiens
  misc_RNA (1)...(19): siRNA sense strand
gcacagucaucgcucugau

SEQ ID NO: 670488 - RNA, 19 nt, Homo sapiens
  misc_RNA (1)...(19): siRNA sense strand
agaggacgaucuauaaagu

SEQ ID NO: 670489 - RNA, 19 nt, Homo sapiens
  misc_RNA (1)...(19): siRNA sense strand
gguagaagccacggauaaa

SEQ ID NO: 670490 - RNA, 19 nt, Homo sapiens
  misc_RNA (1)...(19): siRNA sense strand
aaauaaggauaucgcguau

SEQ ID NO: 670491 - RNA, 19 nt, Homo sapiens
  misc_RNA (1)...(19): siRNA sense strand
ggaagugaaggacauuaau

SEQ ID NO: 670492 - RNA, 19 nt, Homo sapiens
  misc_RNA (1)...(19): siRNA sense strand
guaaaggguaacauagauu

SEQ ID NO: 670493 - RNA, 19 nt, Homo sapiens
  misc_RNA (1)...(19): siRNA sense strand
gauaucgcguauucuuuca

SEQ ID NO: 670494 - RNA, 19 nt, Homo sapiens
  misc_RNA (1)...(19): siRNA sense strand
gcacgacucaacuaaagau

SEQ ID NO: 670495 - RNA, 19 nt, Homo sapiens
  misc_RNA (1)...(19): siRNA sense strand
cuucaagaauuacuacuca

SEQ ID NO: 670496 - RNA, 19 nt, Homo sapiens
  misc_RNA (1)...(19): siRNA sense strand
cgaggaaaguaagucauau

SEQ ID NO: 670497 - RNA, 19 nt, Homo sapiens
  misc_RNA (1)...(19): siRNA sense strand
uguaaaggguaacauagau

SEQ ID NO: 670498 - RNA, 19 nt, Homo sapiens
  misc_RNA (1)...(19): siRNA sense strand
gagaggacgaucuauaaag

SEQ ID NO: 670499 - RNA, 19 nt, Homo sapiens
  misc_RNA (1)...(19): siRNA sense strand
ggagagggguugcccaaga

SEQ ID NO: 670500 - RNA, 19 nt, Homo sapiens
  misc_RNA (1)...(19): siRNA sense strand
agaacgcccugguguccua

SEQ ID NO: 670501 - RNA, 19 nt, Homo sapiens
  misc_RNA (1)...(19): siRNA sense strand
guuugugaauucucggaua

SEQ ID NO: 670502 - RNA, 19 nt, Homo sapiens
  misc_RNA (1)...(19): siRNA sense strand
cuuccuccuuguccaauua

SEQ ID NO: 670503 - RNA, 19 nt, Homo sapiens
  misc_RNA (1)...(19): siRNA sense strand
gaaggacauuaaugacaac

SEQ ID NO: 670504 - RNA, 19 nt, Homo sapiens
  misc_RNA (1)...(19): siRNA sense strand
ucacuaucuuuaccuguau

SEQ ID NO: 670505 - RNA, 19 nt, Homo sapiens
  misc_RNA (1)...(19): siRNA sense strand
ccaauuagccgggauagag

SEQ ID NO: 670506 - RNA, 19 nt, Homo sapiens
  misc_RNA (1)...(19): siRNA sense strand
ggaaauuaaaucccuugga

SEQ ID NO: 670507 - RNA, 19 nt, Homo sapiens
  misc_RNA (1)...(19): siRNA sense strand
gagaggagaaacaggaugu

SEQ ID NO: 670508 - RNA, 19 nt, Homo sapiens
  misc_RNA (1)...(19): siRNA sense strand
gaugaaggaguaaauaagg

SEQ ID NO: 670509 - RNA, 19 nt, Homo sapiens
  misc_RNA (1)...(19): siRNA sense strand
ggaugaaggaguaaauaag

SEQ ID NO: 670510 - RNA, 19 nt, Homo sapiens
  misc_RNA (1)...(19): siRNA sense strand
uaaagucagauuacucgaa

SEQ ID NO: 670511 - RNA, 19 nt, Homo sapiens
  misc_RNA (1)...(19): siRNA sense strand
gcccagugccugcugcuuu

SEQ ID NO: 670512 - RNA, 19 nt, Homo sapiens
  misc_RNA (1)...(19): siRNA sense strand
aagcugcacugguggaugu

SEQ ID NO: 670513 - RNA, 19 nt, Homo sapiens
  misc_RNA (1)...(19): siRNA sense strand
gagguaaaucugcagaaug

SEQ ID NO: 670514 - RNA, 19 nt, Homo sapiens
  misc_RNA (1)...(19): siRNA sense strand
gaggaaaguaagucauaug

SEQ ID NO: 670515 - RNA, 19 nt, Homo sapiens
  misc_RNA (1)...(19): siRNA sense strand
cuaauaacagcaauugaug

SEQ ID NO: 670516 - RNA, 19 nt, Homo sapiens
  misc_RNA (1)...(19): siRNA sense strand
ucgaggaaaguaagucaua

SEQ ID NO: 670517 - RNA, 19 nt, Homo sapiens
  misc_RNA (1)...(19): siRNA sense strand
caauggcuguaaagaaucu

SEQ ID NO: 670518 - RNA, 19 nt, Homo sapiens
  misc_RNA (1)...(19): siRNA sense strand
uaccugaguuaguuauuca

SEQ ID NO: 670519 - RNA, 19 nt, Homo sapiens
  misc_RNA (1)...(19): siRNA sense strand
cugcacaguucuacucgaa

SEQ ID NO: 670520 - RNA, 19 nt, Homo sapiens
  misc_RNA (1)...(19): siRNA sense strand
agguaaaucugcagaaugg

SEQ ID NO: 670521 - RNA, 19 nt, Homo sapiens
  misc_RNA (1)...(19): siRNA sense strand
uugagaggacgaucuauaa

SEQ ID NO: 670522 - RNA, 19 nt, Homo sapiens
  misc_RNA (1)...(19): siRNA sense strand
gaucacuguuuuagaugua

SEQ ID NO: 670523 - RNA, 19 nt, Homo sapiens
  misc_RNA (1)...(19): siRNA sense strand
uggcacgacucaacuaaag

SEQ ID NO: 670524 - RNA, 19 nt, Homo sapiens
  misc_RNA (1)...(19): siRNA sense strand
ugagaggacgaucuauaaa

SEQ ID NO: 670525 - RNA, 19 nt, Homo sapiens
  misc_RNA (1)...(19): siRNA sense strand
uaucgcguauucuuucaau

SEQ ID NO: 670526 - RNA, 19 nt, Homo sapiens
  misc_RNA (1)...(19): siRNA sense strand
aacaggauguggacguuga

SEQ ID NO: 670527 - RNA, 19 nt, Homo sapiens
  misc_RNA (1)...(19): siRNA sense strand
gcccaagaccgaccucaug

SEQ ID NO: 670528 - RNA, 19 nt, Homo sapiens
  misc_RNA (1)...(19): siRNA sense strand
guguccaccuucaagaauu

SEQ ID NO: 670529 - RNA, 19 nt, Homo sapiens
  misc_RNA (1)...(19): siRNA sense strand
caguguaaaggguaacaua

SEQ ID NO: 670530 - RNA, 19 nt, Homo sapiens
  misc_RNA (1)...(19): siRNA sense strand
acacuccuaagcauuauuu

SEQ ID NO: 670531 - RNA, 19 nt, Homo sapiens
  misc_RNA (1)...(19): siRNA sense strand
gaaggugcgcgcaguggau

SEQ ID NO: 670532 - RNA, 19 nt, Homo sapiens
  misc_RNA (1)...(19): siRNA sense strand
uggaugaaggaguaaauaa

SEQ ID NO: 670533 - RNA, 19 nt, Homo sapiens
  misc_RNA (1)...(19): siRNA sense strand
ugauaauguaccugaguua

SEQ ID NO: 670534 - RNA, 19 nt, Homo sapiens
  misc_RNA (1)...(19): siRNA sense strand
gauaauguaccugaguuag

SEQ ID NO: 670535 - RNA, 19 nt, Homo sapiens
  misc_RNA (1)...(19): siRNA sense strand
augcagauaucggaacaaa

SEQ ID NO: 670536 - RNA, 19 nt, Homo sapiens
  misc_RNA (1)...(19): siRNA sense strand
caauuagccgggauagaga

SEQ ID NO: 670537 - RNA, 19 nt, Homo sapiens
  misc_RNA (1)...(19): siRNA sense strand
ggugaaggaccacggugaa

SEQ ID NO: 670538 - RNA, 19 nt, Homo sapiens
  misc_RNA (1)...(19): siRNA sense strand
aggacgaucuauaaaguca

SEQ ID NO: 670539 - RNA, 19 nt, Homo sapiens
  misc_RNA (1)...(19): siRNA sense strand
gugaaggacauuaaugaca

SEQ ID NO: 670540 - RNA, 19 nt, Homo sapiens
  misc_RNA (1)...(19): siRNA sense strand
aaaucaguguaaaggguaa

SEQ ID NO: 670541 - RNA, 19 nt, Homo sapiens
  misc_RNA (1)...(19): siRNA sense strand
gacaggccgcugcagguuu

SEQ ID NO: 670542 - RNA, 19 nt, Homo sapiens
  misc_RNA (1)...(19): siRNA sense strand
aaugacaacgcgccaguuu

SEQ ID NO: 670543 - RNA, 19 nt, Homo sapiens
  misc_RNA (1)...(19): siRNA sense strand
ggauagaccgcgaggaacu

SEQ ID NO: 670544 - RNA, 19 nt, Homo sapiens
  misc_RNA (1)...(19): siRNA sense strand
cgcaguggaugcagacuca

SEQ ID NO: 670545 - RNA, 19 nt, Homo sapiens
  misc_RNA (1)...(19): siRNA sense strand
agaagacucuccacuuagc

SEQ ID NO: 670546 - RNA, 19 nt, Homo sapiens
  misc_RNA (1)...(19): siRNA sense strand
guguaaaggguaacauaga

SEQ ID NO: 670547 - RNA, 19 nt, Homo sapiens
  misc_RNA (1)...(19): siRNA sense strand
cgacucaacuaaagaucac

SEQ ID NO: 670548 - RNA, 19 nt, Homo sapiens
  misc_RNA (1)...(19): siRNA sense strand
aagaauuacuacucauugg

SEQ ID NO: 670549 - RNA, 19 nt, Homo sapiens
  misc_RNA (1)...(19): siRNA sense strand
uaacgccaccgauuuggau

SEQ ID NO: 670550 - RNA, 19 nt, Homo sapiens
  misc_RNA (1)...(19): siRNA sense strand
aagugaaggacauuaauga

SEQ ID NO: 670551 - RNA, 19 nt, Homo sapiens
  misc_RNA (1)...(19): siRNA sense strand
acggacaugucagcagaua

SEQ ID NO: 670552 - RNA, 19 nt, Homo sapiens
  misc_RNA (1)...(19): siRNA sense strand
aucacuaucuuuaccugua

SEQ ID NO: 670553 - RNA, 19 nt, Homo sapiens
  misc_RNA (1)...(19): siRNA sense strand
aggaaaguaagucauauga

SEQ ID NO: 670554 - RNA, 19 nt, Homo sapiens
  misc_RNA (1)...(19): siRNA sense strand
caauggacaaaucagugua

SEQ ID NO: 670555 - RNA, 19 nt, Homo sapiens
  misc_RNA (1)...(19): siRNA sense strand
ugguggaugucaacgugua

SEQ ID NO: 670556 - RNA, 19 nt, Homo sapiens
  misc_RNA (1)...(19): siRNA sense strand
ggaugucaacguguacuug

SEQ ID NO: 670557 - RNA, 19 nt, Homo sapiens
  misc_RNA (1)...(19): siRNA sense strand
gaaagcaaauccuaugaaa

SEQ ID NO: 670558 - RNA, 19 nt, Homo sapiens
  misc_RNA (1)...(19): siRNA sense strand
ggacauuguuuauucauuc

SEQ ID NO: 670559 - RNA, 19 nt, Homo sapiens
  misc_RNA (1)...(19): siRNA sense strand
ugagggacauuaacgauaa

SEQ ID NO: 670560 - RNA, 19 nt, Homo sapiens
  misc_RNA (1)...(19): siRNA sense strand
gagcccaaaugaauacuuu

SEQ ID NO: 670561 - RNA, 19 nt, Homo sapiens
  misc_RNA (1)...(19): siRNA sense strand
gaagaaagcaaauccuaug

SEQ ID NO: 670562 - RNA, 19 nt, Homo sapiens
  misc_RNA (1)...(19): siRNA sense strand
ggaaaucuuuagacagaga

SEQ ID NO: 670563 - RNA, 19 nt, Homo sapiens
  misc_RNA (1)...(19): siRNA sense strand
agaacgcccugcucacuua

SEQ ID NO: 670564 - RNA, 19 nt, Homo sapiens
  misc_RNA (1)...(19): siRNA sense strand
ucacauagauccaauuacu

SEQ ID NO: 670565 - RNA, 19 nt, Homo sapiens
  misc_RNA (1)...(19): siRNA sense strand
agaagaagcuccggagauu

SEQ ID NO: 670566 - RNA, 19 nt, Homo sapiens
  misc_RNA (1)...(19): siRNA sense strand
gggcuuauauuacggaaau

SEQ ID NO: 670567 - RNA, 19 nt, Homo sapiens
  misc_RNA (1)...(19): siRNA sense strand
gcugguggaugucaacgua

SEQ ID NO: 670568 - RNA, 19 nt, Homo sapiens
  misc_RNA (1)...(19): siRNA sense strand
aaggugagauuacuagaaa

SEQ ID NO: 670569 - RNA, 19 nt, Homo sapiens
  misc_RNA (1)...(19): siRNA sense strand
ggagguggcugaugugaac

SEQ ID NO: 670570 - RNA, 19 nt, Homo sapiens
  misc_RNA (1)...(19): siRNA sense strand
ggagguaaaucugcagaau

SEQ ID NO: 670571 - RNA, 19 nt, Homo sapiens
  misc_RNA (1)...(19): siRNA sense strand
ggaauucaagucuuuauca

SEQ ID NO: 670572 - RNA, 19 nt, Homo sapiens
  misc_RNA (1)...(19): siRNA sense strand
aaacuuaacgccucagauu

SEQ ID NO: 670573 - RNA, 19 nt, Homo sapiens
  misc_RNA (1)...(19): siRNA sense strand
guaaagggauauauugacu

SEQ ID NO: 670574 - RNA, 19 nt, Homo sapiens
  misc_RNA (1)...(19): siRNA sense strand
acgauaaugucccagauuu

SEQ ID NO: 670575 - RNA, 19 nt, Homo sapiens
  misc_RNA (1)...(19): siRNA sense strand
gaagaucagcugcagacaa

SEQ ID NO: 670576 - RNA, 19 nt, Homo sapiens
  misc_RNA (1)...(19): siRNA sense strand
agacugagcccaaaugaau

SEQ ID NO: 670577 - RNA, 19 nt, Homo sapiens
  misc_RNA (1)...(19): siRNA sense strand
caacguauaccugaucauu

SEQ ID NO: 670578 - RNA, 19 nt, Homo sapiens
  misc_RNA (1)...(19): siRNA sense strand
acggaaaucuuuagacaga

SEQ ID NO: 670579 - RNA, 19 nt, Homo sapiens
  misc_RNA (1)...(19): siRNA sense strand
uagaagacaacaacgauaa

SEQ ID NO: 670580 - RNA, 19 nt, Homo sapiens
  misc_RNA (1)...(19): siRNA sense strand
agggauauauugacuuuga

SEQ ID NO: 670581 - RNA, 19 nt, Homo sapiens
  misc_RNA (1)...(19): siRNA sense strand
agaacgcgcugguguccua

SEQ ID NO: 670582 - RNA, 19 nt, Homo sapiens
  misc_RNA (1)...(19): siRNA sense strand
ggacagcucccacuuucug

SEQ ID NO: 670583 - RNA, 19 nt, Homo sapiens
  misc_RNA (1)...(19): siRNA sense strand
gaagaagcuccggagauuu

SEQ ID NO: 670584 - RNA, 19 nt, Homo sapiens
  misc_RNA (1)...(19): siRNA sense strand
gaagacaacaacgauaaug

SEQ ID NO: 670585 - RNA, 19 nt, Homo sapiens
  misc_RNA (1)...(19): siRNA sense strand
guagaagacaacaacgaua

SEQ ID NO: 670586 - RNA, 19 nt, Homo sapiens
  misc_RNA (1)...(19): siRNA sense strand
uuacggaaaucuuuagaca

SEQ ID NO: 670587 - RNA, 19 nt, Homo sapiens
  misc_RNA (1)...(19): siRNA sense strand
ggaaguagaagacaacaac

SEQ ID NO: 670588 - RNA, 19 nt, Homo sapiens
  misc_RNA (1)...(19): siRNA sense strand
uguccaccuucaagaauua

SEQ ID NO: 670589 - RNA, 19 nt, Homo sapiens
  misc_RNA (1)...(19): siRNA sense strand
gagaagaagcuccggagau

SEQ ID NO: 670590 - RNA, 19 nt, Homo sapiens
  misc_RNA (1)...(19): siRNA sense strand
ugacagaaccauuuauaag

SEQ ID NO: 670591 - RNA, 19 nt, Homo sapiens
  misc_RNA (1)...(19): siRNA sense strand
gggacauuguuuauucauu

SEQ ID NO: 670592 - RNA, 19 nt, Homo sapiens
  misc_RNA (1)...(19): siRNA sense strand
gcagacaacugaggaaucc

SEQ ID NO: 670593 - RNA, 19 nt, Homo sapiens
  misc_RNA (1)...(19): siRNA sense strand
acuuaacgccucagauuua

SEQ ID NO: 670594 - RNA, 19 nt, Homo sapiens
  misc_RNA (1)...(19): siRNA sense strand
caacgauaaugucccagau

SEQ ID NO: 670595 - RNA, 19 nt, Homo sapiens
  misc_RNA (1)...(19): siRNA sense strand
guagaguuauuguggaagu

SEQ ID NO: 670596 - RNA, 19 nt, Homo sapiens
  misc_RNA (1)...(19): siRNA sense strand
cgccaaaugugaaauccaa

SEQ ID NO: 670597 - RNA, 19 nt, Homo sapiens
  misc_RNA (1)...(19): siRNA sense strand
gcuguacacuggcgagauc

SEQ ID NO: 670598 - RNA, 19 nt, Homo sapiens
  misc_RNA (1)...(19): siRNA sense strand
acagaaccauuuauaaggu

SEQ ID NO: 670599 - RNA, 19 nt, Homo sapiens
  misc_RNA (1)...(19): siRNA sense strand
ggaacggucagcuccacua

SEQ ID NO: 670600 - RNA, 19 nt, Homo sapiens
  misc_RNA (1)...(19): siRNA sense strand
aauccaaguuucacauaga

SEQ ID NO: 670601 - RNA, 19 nt, Homo sapiens
  misc_RNA (1)...(19): siRNA sense strand
gggauauauugacuuugaa

SEQ ID NO: 670602 - RNA, 19 nt, Homo sapiens
  misc_RNA (1)...(19): siRNA sense strand
gcucacagccacugaugga

SEQ ID NO: 670603 - RNA, 19 nt, Homo sapiens
  misc_RNA (1)...(19): siRNA sense strand
gauaaugucccagauuugg

SEQ ID NO: 670604 - RNA, 19 nt, Homo sapiens
  misc_RNA (1)...(19): siRNA sense strand
gacagaaccauuuauaagg

SEQ ID NO: 670605 - RNA, 19 nt, Homo sapiens
  misc_RNA (1)...(19): siRNA sense strand
gugagggacauuaacgaua

SEQ ID NO: 670606 - RNA, 19 nt, Homo sapiens
  misc_RNA (1)...(19): siRNA sense strand
ccacugugcuggugucacu

SEQ ID NO: 670607 - RNA, 19 nt, Homo sapiens
  misc_RNA (1)...(19): siRNA sense strand
gaauucaagucuuuaucac

SEQ ID NO: 670608 - RNA, 19 nt, Homo sapiens
  misc_RNA (1)...(19): siRNA sense strand
gagaacgcccugcucacuu

SEQ ID NO: 670609 - RNA, 19 nt, Homo sapiens
  misc_RNA (1)...(19): siRNA sense strand
gauuuggaauucaagucuu

SEQ ID NO: 670610 - RNA, 19 nt, Homo sapiens
  misc_RNA (1)...(19): siRNA sense strand
gagguaaaucugcagaaug

SEQ ID NO: 670611 - RNA, 19 nt, Homo sapiens
  misc_RNA (1)...(19): siRNA sense strand
caaaugugaaauccaaguu

SEQ ID NO: 670612 - RNA, 19 nt, Homo sapiens
  misc_RNA (1)...(19): siRNA sense strand
agauuuagacgaaggauug

SEQ ID NO: 670613 - RNA, 19 nt, Homo sapiens
  misc_RNA (1)...(19): siRNA sense strand
cgccucagauuuagacgaa

SEQ ID NO: 670614 - RNA, 19 nt, Homo sapiens
  misc_RNA (1)...(19): siRNA sense strand
cugcugcucuuacuucuuc

SEQ ID NO: 670615 - RNA, 19 nt, Homo sapiens
  misc_RNA (1)...(19): siRNA sense strand
uaaggugagauuacuagaa

SEQ ID NO: 670616 - RNA, 19 nt, Homo sapiens
  misc_RNA (1)...(19): siRNA sense strand
ccgcuugacucucgguuuc

SEQ ID NO: 670617 - RNA, 19 nt, Homo sapiens
  misc_RNA (1)...(19): siRNA sense strand
aagaucagcugcagacaac

SEQ ID NO: 670618 - RNA, 19 nt, Homo sapiens
  misc_RNA (1)...(19): siRNA sense strand
ugguggaugucaacguaua

SEQ ID NO: 670619 - RNA, 19 nt, Homo sapiens
  misc_RNA (1)...(19): siRNA sense strand
guacagucaucgcccugau

SEQ ID NO: 670620 - RNA, 19 nt, Homo sapiens
  misc_RNA (1)...(19): siRNA sense strand
ugaagaaagcaaauccuau

SEQ ID NO: 670621 - RNA, 19 nt, Homo sapiens
  misc_RNA (1)...(19): siRNA sense strand
agguaaaucugcagaaugg

SEQ ID NO: 670622 - RNA, 19 nt, Homo sapiens
  misc_RNA (1)...(19): siRNA sense strand
gacugagcccaaaugaaua

SEQ ID NO: 670623 - RNA, 19 nt, Homo sapiens
  misc_RNA (1)...(19): siRNA sense strand
uggcugaugugaacgacaa

SEQ ID NO: 670624 - RNA, 19 nt, Homo sapiens
  misc_RNA (1)...(19): siRNA sense strand
ccauuuauaaggugagauu

SEQ ID NO: 670625 - RNA, 19 nt, Homo sapiens
  misc_RNA (1)...(19): siRNA sense strand
ggucuugggcuuauauuac

SEQ ID NO: 670626 - RNA, 19 nt, Homo sapiens
  misc_RNA (1)...(19): siRNA sense strand
uaaaaggucuugggcuuau

SEQ ID NO: 670627 - RNA, 19 nt, Homo sapiens
  misc_RNA (1)...(19): siRNA sense strand
guguccaccuucaagaauu

SEQ ID NO: 670628 - RNA, 19 nt, Homo sapiens
  misc_RNA (1)...(19): siRNA sense strand
uagaaaauguuccuaaugg

SEQ ID NO: 670629 - RNA, 19 nt, Homo sapiens
  misc_RNA (1)...(19): siRNA sense strand
acgcguggcuuucguacga

SEQ ID NO: 670630 - RNA, 19 nt, Homo sapiens
  misc_RNA (1)...(19): siRNA sense strand
cuuuaucacuuccaauuag

SEQ ID NO: 670631 - RNA, 19 nt, Homo sapiens
  misc_RNA (1)...(19): siRNA sense strand
agaaagcaaauccuaugaa

SEQ ID NO: 670632 - RNA, 19 nt, Homo sapiens
  misc_RNA (1)...(19): siRNA sense strand
ucuggccauuguagaguua

SEQ ID NO: 670633 - RNA, 19 nt, Homo sapiens
  misc_RNA (1)...(19): siRNA sense strand
ucaagaauuacuacucguu

SEQ ID NO: 670634 - RNA, 19 nt, Homo sapiens
  misc_RNA (1)...(19): siRNA sense strand
gaguuauuguggaaguaga

SEQ ID NO: 670635 - RNA, 19 nt, Homo sapiens
  misc_RNA (1)...(19): siRNA sense strand
ggagaacgcccugcucacu

SEQ ID NO: 670636 - RNA, 19 nt, Homo sapiens
  misc_RNA (1)...(19): siRNA sense strand
gaucagcugcagacaacug

SEQ ID NO: 670637 - RNA, 19 nt, Homo sapiens
  misc_RNA (1)...(19): siRNA sense strand
uagaguuauuguggaagua

SEQ ID NO: 670638 - RNA, 19 nt, Homo sapiens
  misc_RNA (1)...(19): siRNA sense strand
gacaggccgcugcagguuu

SEQ ID NO: 670639 - RNA, 19 nt, Homo sapiens
  misc_RNA (1)...(19): siRNA sense strand
gaaaucuuuagacagagaa

SEQ ID NO: 670640 - RNA, 19 nt, Homo sapiens
  misc_RNA (1)...(19): siRNA sense strand
gaggccuucuggagguaaa

SEQ ID NO: 670641 - RNA, 19 nt, Homo sapiens
  misc_RNA (1)...(19): siRNA sense strand
gcugccacaucuucacugu

SEQ ID NO: 670642 - RNA, 19 nt, Homo sapiens
  misc_RNA (1)...(19): siRNA sense strand
ucccagauuuggaauucaa

SEQ ID NO: 670643 - RNA, 19 nt, Homo sapiens
  misc_RNA (1)...(19): siRNA sense strand
uaaugucccagauuuggaa

SEQ ID NO: 670644 - RNA, 19 nt, Homo sapiens
  misc_RNA (1)...(19): siRNA sense strand
aaauccaaguuucacauag

SEQ ID NO: 670645 - RNA, 19 nt, Homo sapiens
  misc_RNA (1)...(19): siRNA sense strand
guagagggcauugauaagg

SEQ ID NO: 670646 - RNA, 19 nt, Homo sapiens
  misc_RNA (1)...(19): siRNA sense strand
gagcuacguuucggugcau

SEQ ID NO: 670647 - RNA, 19 nt, Homo sapiens
  misc_RNA (1)...(19): siRNA sense strand
guaaaaggucuugggcuua

SEQ ID NO: 670648 - RNA, 19 nt, Homo sapiens
  misc_RNA (1)...(19): siRNA sense strand
gacucucgguuuccacuag

SEQ ID NO: 670649 - RNA, 19 nt, Homo sapiens
  misc_RNA (1)...(19): siRNA sense strand
aagaaagcaaauccuauga

SEQ ID NO: 670650 - RNA, 19 nt, Homo sapiens
  misc_RNA (1)...(19): siRNA sense strand
gcauuuuguuugugaauuc

SEQ ID NO: 670651 - RNA, 19 nt, Homo sapiens
  misc_RNA (1)...(19): siRNA sense strand
ggaggcaaacccgaguuga

SEQ ID NO: 670652 - RNA, 19 nt, Homo sapiens
  misc_RNA (1)...(19): siRNA sense strand
ccaguuuaccugacucuag

SEQ ID NO: 670653 - RNA, 19 nt, Homo sapiens
  misc_RNA (1)...(19): siRNA sense strand
augcugcgcugguggaugu

SEQ ID NO: 670654 - RNA, 19 nt, Homo sapiens
  misc_RNA (1)...(19): siRNA sense strand
cuggucaccugcuccuuga

SEQ ID NO: 670655 - RNA, 19 nt, Homo sapiens
  misc_RNA (1)...(19): siRNA sense strand
ugucccagauuuggaauuc

SEQ ID NO: 670656 - RNA, 19 nt, Homo sapiens
  misc_RNA (1)...(19): siRNA sense strand
uauaaggugagauuacuag

SEQ ID NO: 670657 - RNA, 19 nt, Homo sapiens
  misc_RNA (1)...(19): siRNA sense strand
gaaagcaaauccuaugaaa

SEQ ID NO: 670658 - RNA, 19 nt, Homo sapiens
  misc_RNA (1)...(19): siRNA sense strand
ggacauuguuuauucauuc

SEQ ID NO: 670659 - RNA, 19 nt, Homo sapiens
  misc_RNA (1)...(19): siRNA sense strand
ugagggacauuaacgauaa

SEQ ID NO: 670660 - RNA, 19 nt, Homo sapiens
  misc_RNA (1)...(19): siRNA sense strand
gagcccaaaugaauacuuu

SEQ ID NO: 670661 - RNA, 19 nt, Homo sapiens
  misc_RNA (1)...(19): siRNA sense strand
gaagaaagcaaauccuaug

SEQ ID NO: 670662 - RNA, 19 nt, Homo sapiens
  misc_RNA (1)...(19): siRNA sense strand
ggaaaucuuuagacagaga

SEQ ID NO: 670663 - RNA, 19 nt, Homo sapiens
  misc_RNA (1)...(19): siRNA sense strand
agaacgcccugcucacuua

SEQ ID NO: 670664 - RNA, 19 nt, Homo sapiens
  misc_RNA (1)...(19): siRNA sense strand
ucacauagauccaauuacu

SEQ ID NO: 670665 - RNA, 19 nt, Homo sapiens
  misc_RNA (1)...(19): siRNA sense strand
agaagaagcuccggagauu

SEQ ID NO: 670666 - RNA, 19 nt, Homo sapiens
  misc_RNA (1)...(19): siRNA sense strand
gggcuuauauuacggaaau

SEQ ID NO: 670667 - RNA, 19 nt, Homo sapiens
  misc_RNA (1)...(19): siRNA sense strand
gcugguggaugucaacgua

SEQ ID NO: 670668 - RNA, 19 nt, Homo sapiens
  misc_RNA (1)...(19): siRNA sense strand
aaggugagauuacuagaaa

SEQ ID NO: 670669 - RNA, 19 nt, Homo sapiens
  misc_RNA (1)...(19): siRNA sense strand
ggagguggcugaugugaac

SEQ ID NO: 670670 - RNA, 19 nt, Homo sapiens
  misc_RNA (1)...(19): siRNA sense strand
ggagguaaaucugcagaau

SEQ ID NO: 670671 - RNA, 19 nt, Homo sapiens
  misc_RNA (1)...(19): siRNA sense strand
ggaauucaagucuuuauca

SEQ ID NO: 670672 - RNA, 19 nt, Homo sapiens
  misc_RNA (1)...(19): siRNA sense strand
aaacuuaacgccucagauu

SEQ ID NO: 670673 - RNA, 19 nt, Homo sapiens
  misc_RNA (1)...(19): siRNA sense strand
guaaagggauauauugacu

SEQ ID NO: 670674 - RNA, 19 nt, Homo sapiens
  misc_RNA (1)...(19): siRNA sense strand
acgauaaugucccagauuu

SEQ ID NO: 670675 - RNA, 19 nt, Homo sapiens
  misc_RNA (1)...(19): siRNA sense strand
gaagaucagcugcagacaa

SEQ ID NO: 670676 - RNA, 19 nt, Homo sapiens
  misc_RNA (1)...(19): siRNA sense strand
agacugagcccaaaugaau

SEQ ID NO: 670677 - RNA, 19 nt, Homo sapiens
  misc_RNA (1)...(19): siRNA sense strand
caacguauaccugaucauu

SEQ ID NO: 670678 - RNA, 19 nt, Homo sapiens
  misc_RNA (1)...(19): siRNA sense strand
acggaaaucuuuagacaga

SEQ ID NO: 670679 - RNA, 19 nt, Homo sapiens
  misc_RNA (1)...(19): siRNA sense strand
uagaagacaacaacgauaa

SEQ ID NO: 670680 - RNA, 19 nt, Homo sapiens
  misc_RNA (1)...(19): siRNA sense strand
agggauauauugacuuuga

SEQ ID NO: 670681 - RNA, 19 nt, Homo sapiens
  misc_RNA (1)...(19): siRNA sense strand
agaacgcgcugguguccua

SEQ ID NO: 670682 - RNA, 19 nt, Homo sapiens
  misc_RNA (1)...(19): siRNA sense strand
ggacagcucccacuuucug

SEQ ID NO: 670683 - RNA, 19 nt, Homo sapiens
  misc_RNA (1)...(19): siRNA sense strand
gaagaagcuccggagauuu

SEQ ID NO: 670684 - RNA, 19 nt, Homo sapiens
  misc_RNA (1)...(19): siRNA sense strand
gaagacaacaacgauaaug

SEQ ID NO: 670685 - RNA, 19 nt, Homo sapiens
  misc_RNA (1)...(19): siRNA sense strand
guagaagacaacaacgaua

SEQ ID NO: 670686 - RNA, 19 nt, Homo sapiens
  misc_RNA (1)...(19): siRNA sense strand
uuacggaaaucuuuagaca

SEQ ID NO: 670687 - RNA, 19 nt, Homo sapiens
  misc_RNA (1)...(19): siRNA sense strand
ggaaguagaagacaacaac

SEQ ID NO: 670688 - RNA, 19 nt, Homo sapiens
  misc_RNA (1)...(19): siRNA sense strand
uguccaccuucaagaauua

SEQ ID NO: 670689 - RNA, 19 nt, Homo sapiens
  misc_RNA (1)...(19): siRNA sense strand
gagaagaagcuccggagau

SEQ ID NO: 670690 - RNA, 19 nt, Homo sapiens
  misc_RNA (1)...(19): siRNA sense strand
ugacagaaccauuuauaag

SEQ ID NO: 670691 - RNA, 19 nt, Homo sapiens
  misc_RNA (1)...(19): siRNA sense strand
gggacauuguuuauucauu

SEQ ID NO: 670692 - RNA, 19 nt, Homo sapiens
  misc_RNA (1)...(19): siRNA sense strand
gcagacaacugaggaaucc

SEQ ID NO: 670693 - RNA, 19 nt, Homo sapiens
  misc_RNA (1)...(19): siRNA sense strand
acuuaacgccucagauuua

SEQ ID NO: 670694 - RNA, 19 nt, Homo sapiens
  misc_RNA (1)...(19): siRNA sense strand
caacgauaaugucccagau

SEQ ID NO: 670695 - RNA, 19 nt, Homo sapiens
  misc_RNA (1)...(19): siRNA sense strand
guagaguuauuguggaagu

SEQ ID NO: 670696 - RNA, 19 nt, Homo sapiens
  misc_RNA (1)...(19): siRNA sense strand
cgccaaaugugaaauccaa

SEQ ID NO: 670697 - RNA, 19 nt, Homo sapiens
  misc_RNA (1)...(19): siRNA sense strand
gcuguacacuggcgagauc

SEQ ID NO: 670698 - RNA, 19 nt, Homo sapiens
  misc_RNA (1)...(19): siRNA sense strand
acagaaccauuuauaaggu

SEQ ID NO: 670699 - RNA, 19 nt, Homo sapiens
  misc_RNA (1)...(19): siRNA sense strand
ggaacggucagcuccacua

SEQ ID NO: 670700 - RNA, 19 nt, Homo sapiens
  misc_RNA (1)...(19): siRNA sense strand
aauccaaguuucacauaga

SEQ ID NO: 670701 - RNA, 19 nt, Homo sapiens
  misc_RNA (1)...(19): siRNA sense strand
gggauauauugacuuugaa

SEQ ID NO: 670702 - RNA, 19 nt, Homo sapiens
  misc_RNA (1)...(19): siRNA sense strand
gcucacagccacugaugga

SEQ ID NO: 670703 - RNA, 19 nt, Homo sapiens
  misc_RNA (1)...(19): siRNA sense strand
gauaaugucccagauuugg

SEQ ID NO: 670704 - RNA, 19 nt, Homo sapiens
  misc_RNA (1)...(19): siRNA sense strand
gacagaaccauuuauaagg

SEQ ID NO: 670705 - RNA, 19 nt, Homo sapiens
  misc_RNA (1)...(19): siRNA sense strand
gugagggacauuaacgaua

SEQ ID NO: 670706 - RNA, 19 nt, Homo sapiens
  misc_RNA (1)...(19): siRNA sense strand
ccacugugcuggugucacu

SEQ ID NO: 670707 - RNA, 19 nt, Homo sapiens
  misc_RNA (1)...(19): siRNA sense strand
gaauucaagucuuuaucac

SEQ ID NO: 670708 - RNA, 19 nt, Homo sapiens
  misc_RNA (1)...(19): siRNA sense strand
gagaacgcccugcucacuu

SEQ ID NO: 670709 - RNA, 19 nt, Homo sapiens
  misc_RNA (1)...(19): siRNA sense strand
gauuuggaauucaagucuu

SEQ ID NO: 670710 - RNA, 19 nt, Homo sapiens
  misc_RNA (1)...(19): siRNA sense strand
gagguaaaucugcagaaug

SEQ ID NO: 670711 - RNA, 19 nt, Homo sapiens
  misc_RNA (1)...(19): siRNA sense strand
caaaugugaaauccaaguu

SEQ ID NO: 670712 - RNA, 19 nt, Homo sapiens
  misc_RNA (1)...(19): siRNA sense strand
agauuuagacgaaggauug

SEQ ID NO: 670713 - RNA, 19 nt, Homo sapiens
  misc_RNA (1)...(19): siRNA sense strand
cgccucagauuuagacgaa

SEQ ID NO: 670714 - RNA, 19 nt, Homo sapiens
  misc_RNA (1)...(19): siRNA sense strand
cugcugcucuuacuucuuc

SEQ ID NO: 670715 - RNA, 19 nt, Homo sapiens
  misc_RNA (1)...(19): siRNA sense strand
uaaggugagauuacuagaa

SEQ ID NO: 670716 - RNA, 19 nt, Homo sapiens
  misc_RNA (1)...(19): siRNA sense strand
ccgcuugacucucgguuuc

SEQ ID NO: 670717 - RNA, 19 nt, Homo sapiens
  misc_RNA (1)...(19): siRNA sense strand
aagaucagcugcagacaac

SEQ ID NO: 670718 - RNA, 19 nt, Homo sapiens
  misc_RNA (1)...(19): siRNA sense strand
ugguggaugucaacguaua

SEQ ID NO: 670719 - RNA, 19 nt, Homo sapiens
  misc_RNA (1)...(19): siRNA sense strand
guacagucaucgcccugau

SEQ ID NO: 670720 - RNA, 19 nt, Homo sapiens
  misc_RNA (1)...(19): siRNA sense strand
ugaagaaagcaaauccuau

SEQ ID NO: 670721 - RNA, 19 nt, Homo sapiens
  misc_RNA (1)...(19): siRNA sense strand
agguaaaucugcagaaugg

SEQ ID NO: 670722 - RNA, 19 nt, Homo sapiens
  misc_RNA (1)...(19): siRNA sense strand
gacugagcccaaaugaaua

SEQ ID NO: 670723 - RNA, 19 nt, Homo sapiens
  misc_RNA (1)...(19): siRNA sense strand
uggcugaugugaacgacaa

SEQ ID NO: 670724 - RNA, 19 nt, Homo sapiens
  misc_RNA (1)...(19): siRNA sense strand
ccauuuauaaggugagauu

SEQ ID NO: 670725 - RNA, 19 nt, Homo sapiens
  misc_RNA (1)...(19): siRNA sense strand
ggucuugggcuuauauuac

SEQ ID NO: 670726 - RNA, 19 nt, Homo sapiens
  misc_RNA (1)...(19): siRNA sense strand
uaaaaggucuugggcuuau

SEQ ID NO: 670727 - RNA, 19 nt, Homo sapiens
  misc_RNA (1)...(19): siRNA sense strand
guguccaccuucaagaauu

SEQ ID NO: 670728 - RNA, 19 nt, Homo sapiens
  misc_RNA (1)...(19): siRNA sense strand
uagaaaauguuccuaaugg

SEQ ID NO: 670729 - RNA, 19 nt, Homo sapiens
  misc_RNA (1)...(19): siRNA sense strand
acgcguggcuuucguacga

SEQ ID NO: 670730 - RNA, 19 nt, Homo sapiens
  misc_RNA (1)...(19): siRNA sense strand
cuuuaucacuuccaauuag

SEQ ID NO: 670731 - RNA, 19 nt, Homo sapiens
  misc_RNA (1)...(19): siRNA sense strand
agaaagcaaauccuaugaa

SEQ ID NO: 670732 - RNA, 19 nt, Homo sapiens
  misc_RNA (1)...(19): siRNA sense strand
ucuggccauuguagaguua

SEQ ID NO: 670733 - RNA, 19 nt, Homo sapiens
  misc_RNA (1)...(19): siRNA sense strand
ucaagaauuacuacucguu

SEQ ID NO: 670734 - RNA, 19 nt, Homo sapiens
  misc_RNA (1)...(19): siRNA sense strand
gaguuauuguggaaguaga

SEQ ID NO: 670735 - RNA, 19 nt, Homo sapiens
  misc_RNA (1)...(19): siRNA sense strand
ggagaacgcccugcucacu

SEQ ID NO: 670736 - RNA, 19 nt, Homo sapiens
  misc_RNA (1)...(19): siRNA sense strand
gaucagcugcagacaacug

SEQ ID NO: 670737 - RNA, 19 nt, Homo sapiens
  misc_RNA (1)...(19): siRNA sense strand
uagaguuauuguggaagua

SEQ ID NO: 670738 - RNA, 19 nt, Homo sapiens
  misc_RNA (1)...(19): siRNA sense strand
gacaggccgcugcagguuu

SEQ ID NO: 670739 - RNA, 19 nt, Homo sapiens
  misc_RNA (1)...(19): siRNA sense strand
gaaaucuuuagacagagaa

SEQ ID NO: 670740 - RNA, 19 nt, Homo sapiens
  misc_RNA (1)...(19): siRNA sense strand
gaggccuucuggagguaaa

SEQ ID NO: 670741 - RNA, 19 nt, Homo sapiens
  misc_RNA (1)...(19): siRNA sense strand
gcugccacaucuucacugu

SEQ ID NO: 670742 - RNA, 19 nt, Homo sapiens
  misc_RNA (1)...(19): siRNA sense strand
ucccagauuuggaauucaa

SEQ ID NO: 670743 - RNA, 19 nt, Homo sapiens
  misc_RNA (1)...(19): siRNA sense strand
uaaugucccagauuuggaa

SEQ ID NO: 670744 - RNA, 19 nt, Homo sapiens
  misc_RNA (1)...(19): siRNA sense strand
aaauccaaguuucacauag

SEQ ID NO: 670745 - RNA, 19 nt, Homo sapiens
  misc_RNA (1)...(19): siRNA sense strand
guagagggcauugauaagg

SEQ ID NO: 670746 - RNA, 19 nt, Homo sapiens
  misc_RNA (1)...(19): siRNA sense strand
gagcuacguuucggugcau

SEQ ID NO: 670747 - RNA, 19 nt, Homo sapiens
  misc_RNA (1)...(19): siRNA sense strand
guaaaaggucuugggcuua

SEQ ID NO: 670748 - RNA, 19 nt, Homo sapiens
  misc_RNA (1)...(19): siRNA sense strand
gacucucgguuuccacuag

SEQ ID NO: 670749 - RNA, 19 nt, Homo sapiens
  misc_RNA (1)...(19): siRNA sense strand
aagaaagcaaauccuauga

SEQ ID NO: 670750 - RNA, 19 nt, Homo sapiens
  misc_RNA (1)...(19): siRNA sense strand
gcauuuuguuugugaauuc

SEQ ID NO: 670751 - RNA, 19 nt, Homo sapiens
  misc_RNA (1)...(19): siRNA sense strand
ggaggcaaacccgaguuga

SEQ ID NO: 670752 - RNA, 19 nt, Homo sapiens
  misc_RNA (1)...(19): siRNA sense strand
ccaguuuaccugacucuag

SEQ ID NO: 670753 - RNA, 19 nt, Homo sapiens
  misc_RNA (1)...(19): siRNA sense strand
augcugcgcugguggaugu

SEQ ID NO: 670754 - RNA, 19 nt, Homo sapiens
  misc_RNA (1)...(19): siRNA sense strand
cuggucaccugcuccuuga

SEQ ID NO: 670755 - RNA, 19 nt, Homo sapiens
  misc_RNA (1)...(19): siRNA sense strand
ugucccagauuuggaauuc

SEQ ID NO: 670756 - RNA, 19 nt, Homo sapiens
  misc_RNA (1)...(19): siRNA sense strand
uauaaggugagauuacuag

SEQ ID NO: 670757 - RNA, 19 nt, Homo sapiens
  misc_RNA (1)...(19): siRNA sense strand
gaacaccguuuauuaguga

SEQ ID NO: 670758 - RNA, 19 nt, Homo sapiens
  misc_RNA (1)...(19): siRNA sense strand
acaagaacaccguuuauua

SEQ ID NO: 670759 - RNA, 19 nt, Homo sapiens
  misc_RNA (1)...(19): siRNA sense strand
caauugagauacagguuaa

SEQ ID NO: 670760 - RNA, 19 nt, Homo sapiens
  misc_RNA (1)...(19): siRNA sense strand
ggaaauccuuagauagaga

SEQ ID NO: 670761 - RNA, 19 nt, Homo sapiens
  misc_RNA (1)...(19): siRNA sense strand
gggcaucaauaaggaaaua

SEQ ID NO: 670762 - RNA, 19 nt, Homo sapiens
  misc_RNA (1)...(19): siRNA sense strand
ccaagugggacauuaguua

SEQ ID NO: 670763 - RNA, 19 nt, Homo sapiens
  misc_RNA (1)...(19): siRNA sense strand
caaaugcacaauugagaua

SEQ ID NO: 670764 - RNA, 19 nt, Homo sapiens
  misc_RNA (1)...(19): siRNA sense strand
gguuaaauccaaacgaaua

SEQ ID NO: 670765 - RNA, 19 nt, Homo sapiens
  misc_RNA (1)...(19): siRNA sense strand
cagacaagaacaaagauua

SEQ ID NO: 670766 - RNA, 19 nt, Homo sapiens
  misc_RNA (1)...(19): siRNA sense strand
ugaaggacaucaaugacaa

SEQ ID NO: 670767 - RNA, 19 nt, Homo sapiens
  misc_RNA (1)...(19): siRNA sense strand
acgcuuggcuuucguauga

SEQ ID NO: 670768 - RNA, 19 nt, Homo sapiens
  misc_RNA (1)...(19): siRNA sense strand
ggagguaaaucugcagaau

SEQ ID NO: 670769 - RNA, 19 nt, Homo sapiens
  misc_RNA (1)...(19): siRNA sense strand
caagaacaccguuuauuag

SEQ ID NO: 670770 - RNA, 19 nt, Homo sapiens
  misc_RNA (1)...(19): siRNA sense strand
ggaacuggauuaugaagac

SEQ ID NO: 670771 - RNA, 19 nt, Homo sapiens
  misc_RNA (1)...(19): siRNA sense strand
cagguuaaauccaaacgaa

SEQ ID NO: 670772 - RNA, 19 nt, Homo sapiens
  misc_RNA (1)...(19): siRNA sense strand
agugggacauuaguuauua

SEQ ID NO: 670773 - RNA, 19 nt, Homo sapiens
  misc_RNA (1)...(19): siRNA sense strand
ucaggacacuguaaaguag

SEQ ID NO: 670774 - RNA, 19 nt, Homo sapiens
  misc_RNA (1)...(19): siRNA sense strand
gauacagguuaaauccaaa

SEQ ID NO: 670775 - RNA, 19 nt, Homo sapiens
  misc_RNA (1)...(19): siRNA sense strand
cgauguaaaguccaaauuu

SEQ ID NO: 670776 - RNA, 19 nt, Homo sapiens
  misc_RNA (1)...(19): siRNA sense strand
gagaagaaacacaagaaca

SEQ ID NO: 670777 - RNA, 19 nt, Homo sapiens
  misc_RNA (1)...(19): siRNA sense strand
uguccaccuucaagaauua

SEQ ID NO: 670778 - RNA, 19 nt, Homo sapiens
  misc_RNA (1)...(19): siRNA sense strand
uggagcaaaugcacaauug

SEQ ID NO: 670779 - RNA, 19 nt, Homo sapiens
  misc_RNA (1)...(19): siRNA sense strand
gcaaaugcacaauugagau

SEQ ID NO: 670780 - RNA, 19 nt, Homo sapiens
  misc_RNA (1)...(19): siRNA sense strand
ggaaguggccgacgugaac

SEQ ID NO: 670781 - RNA, 19 nt, Homo sapiens
  misc_RNA (1)...(19): siRNA sense strand
caaaugaagaagaaacgaa

SEQ ID NO: 670782 - RNA, 19 nt, Homo sapiens
  misc_RNA (1)...(19): siRNA sense strand
agauacagguuaaauccaa

SEQ ID NO: 670783 - RNA, 19 nt, Homo sapiens
  misc_RNA (1)...(19): siRNA sense strand
guucaguuguugaucaaug

SEQ ID NO: 670784 - RNA, 19 nt, Homo sapiens
  misc_RNA (1)...(19): siRNA sense strand
aaugucagauuguuggaaa

SEQ ID NO: 670785 - RNA, 19 nt, Homo sapiens
  misc_RNA (1)...(19): siRNA sense strand
uauuagugauugcaacuga

SEQ ID NO: 670786 - RNA, 19 nt, Homo sapiens
  misc_RNA (1)...(19): siRNA sense strand
ugaaacuccuggaugugaa

SEQ ID NO: 670787 - RNA, 19 nt, Homo sapiens
  misc_RNA (1)...(19): siRNA sense strand
uaauauugaugccauggau

SEQ ID NO: 670788 - RNA, 19 nt, Homo sapiens
  misc_RNA (1)...(19): siRNA sense strand
acaauugagauacagguua

SEQ ID NO: 670789 - RNA, 19 nt, Homo sapiens
  misc_RNA (1)...(19): siRNA sense strand
agaacgcccugguguccua

SEQ ID NO: 670790 - RNA, 19 nt, Homo sapiens
  misc_RNA (1)...(19): siRNA sense strand
uagugaaacuccuggaugu

SEQ ID NO: 670791 - RNA, 19 nt, Homo sapiens
  misc_RNA (1)...(19): siRNA sense strand
guaaaguaguagugaaacu

SEQ ID NO: 670792 - RNA, 19 nt, Homo sapiens
  misc_RNA (1)...(19): siRNA sense strand
uaacagguacaguucaguu

SEQ ID NO: 670793 - RNA, 19 nt, Homo sapiens
  misc_RNA (1)...(19): siRNA sense strand
gaaauccuuagauagagaa

SEQ ID NO: 670794 - RNA, 19 nt, Homo sapiens
  misc_RNA (1)...(19): siRNA sense strand
gcgagagcgugucggucua

SEQ ID NO: 670795 - RNA, 19 nt, Homo sapiens
  misc_RNA (1)...(19): siRNA sense strand
cagguacaguucaguuguu

SEQ ID NO: 670796 - RNA, 19 nt, Homo sapiens
  misc_RNA (1)...(19): siRNA sense strand
ggucccaccucuacagaca

SEQ ID NO: 670797 - RNA, 19 nt, Homo sapiens
  misc_RNA (1)...(19): siRNA sense strand
acaguucaguuguugauca

SEQ ID NO: 670798 - RNA, 19 nt, Homo sapiens
  misc_RNA (1)...(19): siRNA sense strand
agaacaccguuuauuagug

SEQ ID NO: 670799 - RNA, 19 nt, Homo sapiens
  misc_RNA (1)...(19): siRNA sense strand
caacacgcucucuggauga

SEQ ID NO: 670800 - RNA, 19 nt, Homo sapiens
  misc_RNA (1)...(19): siRNA sense strand
gcacggucauugcucugau

SEQ ID NO: 670801 - RNA, 19 nt, Homo sapiens
  misc_RNA (1)...(19): siRNA sense strand
gaacgccucagaugcagau

SEQ ID NO: 670802 - RNA, 19 nt, Homo sapiens
  misc_RNA (1)...(19): siRNA sense strand
gagguaaaucugcagaaug

SEQ ID NO: 670803 - RNA, 19 nt, Homo sapiens
  misc_RNA (1)...(19): siRNA sense strand
caagugggacauuaguuau

SEQ ID NO: 670804 - RNA, 19 nt, Homo sapiens
  misc_RNA (1)...(19): siRNA sense strand
uguauuggaugcuaaugau

SEQ ID NO: 670805 - RNA, 19 nt, Homo sapiens
  misc_RNA (1)...(19): siRNA sense strand
ugaagaagaaacgaacuuu

SEQ ID NO: 670806 - RNA, 19 nt, Homo sapiens
  misc_RNA (1)...(19): siRNA sense strand
ggagcaaaugcacaauuga

SEQ ID NO: 670807 - RNA, 19 nt, Homo sapiens
  misc_RNA (1)...(19): siRNA sense strand
cuacaacgcuuggcuuucg

SEQ ID NO: 670808 - RNA, 19 nt, Homo sapiens
  misc_RNA (1)...(19): siRNA sense strand
cagcgugucuguggaagug

SEQ ID NO: 670809 - RNA, 19 nt, Homo sapiens
  misc_RNA (1)...(19): siRNA sense strand
gugggacauuaguuauuaa

SEQ ID NO: 670810 - RNA, 19 nt, Homo sapiens
  misc_RNA (1)...(19): siRNA sense strand
gcaccaagugggacauuag

SEQ ID NO: 670811 - RNA, 19 nt, Homo sapiens
  misc_RNA (1)...(19): siRNA sense strand
gagcaaaugcacaauugag

SEQ ID NO: 670812 - RNA, 19 nt, Homo sapiens
  misc_RNA (1)...(19): siRNA sense strand
agguaaaucugcagaaugg

SEQ ID NO: 670813 - RNA, 19 nt, Homo sapiens
  misc_RNA (1)...(19): siRNA sense strand
gugaaacuccuggauguga

SEQ ID NO: 670814 - RNA, 19 nt, Homo sapiens
  misc_RNA (1)...(19): siRNA sense strand
gcagugaaggacaucaaug

SEQ ID NO: 670815 - RNA, 19 nt, Homo sapiens
  misc_RNA (1)...(19): siRNA sense strand
cagugaaggacaucaauga

SEQ ID NO: 670816 - RNA, 19 nt, Homo sapiens
  misc_RNA (1)...(19): siRNA sense strand
uagagaagaaacacaagaa

SEQ ID NO: 670817 - RNA, 19 nt, Homo sapiens
  misc_RNA (1)...(19): siRNA sense strand
gaagaagaaacgaacuuuu

SEQ ID NO: 670818 - RNA, 19 nt, Homo sapiens
  misc_RNA (1)...(19): siRNA sense strand
aaaguacauucccauuauc

SEQ ID NO: 670819 - RNA, 19 nt, Homo sapiens
  misc_RNA (1)...(19): siRNA sense strand
gaaggacaucaaugacaau

SEQ ID NO: 670820 - RNA, 19 nt, Homo sapiens
  misc_RNA (1)...(19): siRNA sense strand
ccacucagcacggucauug

SEQ ID NO: 670821 - RNA, 19 nt, Homo sapiens
  misc_RNA (1)...(19): siRNA sense strand
gcgcgucggauuuggauau

SEQ ID NO: 670822 - RNA, 19 nt, Homo sapiens
  misc_RNA (1)...(19): siRNA sense strand
guguccaccuucaagaauu

SEQ ID NO: 670823 - RNA, 19 nt, Homo sapiens
  misc_RNA (1)...(19): siRNA sense strand
guacaguucaguuguugau

SEQ ID NO: 670824 - RNA, 19 nt, Homo sapiens
  misc_RNA (1)...(19): siRNA sense strand
cacaagaacaccguuuauu

SEQ ID NO: 670825 - RNA, 19 nt, Homo sapiens
  misc_RNA (1)...(19): siRNA sense strand
gagucaagaaugccagauu

SEQ ID NO: 670826 - RNA, 19 nt, Homo sapiens
  misc_RNA (1)...(19): siRNA sense strand
uccuggaugugaaugauaa

SEQ ID NO: 670827 - RNA, 19 nt, Homo sapiens
  misc_RNA (1)...(19): siRNA sense strand
gaacuggauuaugaagacu

SEQ ID NO: 670828 - RNA, 19 nt, Homo sapiens
  misc_RNA (1)...(19): siRNA sense strand
guauuggaugcuaaugaua

SEQ ID NO: 670829 - RNA, 19 nt, Homo sapiens
  misc_RNA (1)...(19): siRNA sense strand
gaaacuccuggaugugaau

SEQ ID NO: 670830 - RNA, 19 nt, Homo sapiens
  misc_RNA (1)...(19): siRNA sense strand
ugauaacgccccagaauuu

SEQ ID NO: 670831 - RNA, 19 nt, Homo sapiens
  misc_RNA (1)...(19): siRNA sense strand
aaagaggacgcuccacuca

SEQ ID NO: 670832 - RNA, 19 nt, Homo sapiens
  misc_RNA (1)...(19): siRNA sense strand
ucaagaauuacuacucguu

SEQ ID NO: 670833 - RNA, 19 nt, Homo sapiens
  misc_RNA (1)...(19): siRNA sense strand
acacaagaacaccguuuau

SEQ ID NO: 670834 - RNA, 19 nt, Homo sapiens
  misc_RNA (1)...(19): siRNA sense strand
gacaggccgcugcagguuu

SEQ ID NO: 670835 - RNA, 19 nt, Homo sapiens
  misc_RNA (1)...(19): siRNA sense strand
ccagacaagaacaaagauu

SEQ ID NO: 670836 - RNA, 19 nt, Homo sapiens
  misc_RNA (1)...(19): siRNA sense strand
gagggcaucaauaaggaaa

SEQ ID NO: 670837 - RNA, 19 nt, Homo sapiens
  misc_RNA (1)...(19): siRNA sense strand
auccuuagauagagaagaa

SEQ ID NO: 670838 - RNA, 19 nt, Homo sapiens
  misc_RNA (1)...(19): siRNA sense strand
gcaagcccacucuguugug

SEQ ID NO: 670839 - RNA, 19 nt, Homo sapiens
  misc_RNA (1)...(19): siRNA sense strand
cgucggauuuggauauugg

SEQ ID NO: 670840 - RNA, 19 nt, Homo sapiens
  misc_RNA (1)...(19): siRNA sense strand
auauugaugccauggauaa

SEQ ID NO: 670841 - RNA, 19 nt, Homo sapiens
  misc_RNA (1)...(19): siRNA sense strand
aggacacuguaaaguagua

SEQ ID NO: 670842 - RNA, 19 nt, Homo sapiens
  misc_RNA (1)...(19): siRNA sense strand
gugaaggacaucaaugaca

SEQ ID NO: 670843 - RNA, 19 nt, Homo sapiens
  misc_RNA (1)...(19): siRNA sense strand
agauagagaagaaacacaa

SEQ ID NO: 670844 - RNA, 19 nt, Homo sapiens
  misc_RNA (1)...(19): siRNA sense strand
ugguggaugucaacgugua

SEQ ID NO: 670845 - RNA, 19 nt, Homo sapiens
  misc_RNA (1)...(19): siRNA sense strand
caguucaguuguugaucaa

SEQ ID NO: 670846 - RNA, 19 nt, Homo sapiens
  misc_RNA (1)...(19): siRNA sense strand
aacacaagaacaccguuua

SEQ ID NO: 670847 - RNA, 19 nt, Homo sapiens
  misc_RNA (1)...(19): siRNA sense strand
aaacccgaacuaacaggua

SEQ ID NO: 670848 - RNA, 19 nt, Homo sapiens
  misc_RNA (1)...(19): siRNA sense strand
ggaugugaaugauaauacc

SEQ ID NO: 670849 - RNA, 19 nt, Homo sapiens
  misc_RNA (1)...(19): siRNA sense strand
gcauuuuguuugugaauuc

SEQ ID NO: 670850 - RNA, 19 nt, Homo sapiens
  misc_RNA (1)...(19): siRNA sense strand
caaacacggaaccuucguu

SEQ ID NO: 670851 - RNA, 19 nt, Homo sapiens
  misc_RNA (1)...(19): siRNA sense strand
caucaauaaggaaauagug

SEQ ID NO: 670852 - RNA, 19 nt, Homo sapiens
  misc_RNA (1)...(19): siRNA sense strand
caacguguaccugaucauc

SEQ ID NO: 670853 - RNA, 19 nt, Homo sapiens
  misc_RNA (1)...(19): siRNA sense strand
aggcugcccugguggaugu

SEQ ID NO: 670854 - RNA, 19 nt, Homo sapiens
  misc_RNA (1)...(19): siRNA sense strand
gagagcgugucggucuaug

SEQ ID NO: 670855 - RNA, 19 nt, Homo sapiens
  misc_RNA (1)...(19): siRNA sense strand
ggugaccugcucccuaaug

SEQ ID NO: 670856 - RNA, 19 nt, Homo sapiens
  misc_RNA (1)...(19): siRNA sense strand
gggaacuggauuaugaaga

SEQ ID NO: 670857 - RNA, 19 nt, Homo sapiens
  misc_RNA (1)...(19): siRNA sense strand
gaacaccguuuauuaguga

SEQ ID NO: 670858 - RNA, 19 nt, Homo sapiens
  misc_RNA (1)...(19): siRNA sense strand
acaagaacaccguuuauua

SEQ ID NO: 670859 - RNA, 19 nt, Homo sapiens
  misc_RNA (1)...(19): siRNA sense strand
caauugagauacagguuaa

SEQ ID NO: 670860 - RNA, 19 nt, Homo sapiens
  misc_RNA (1)...(19): siRNA sense strand
ggaaauccuuagauagaga

SEQ ID NO: 670861 - RNA, 19 nt, Homo sapiens
  misc_RNA (1)...(19): siRNA sense strand
gggcaucaauaaggaaaua

SEQ ID NO: 670862 - RNA, 19 nt, Homo sapiens
  misc_RNA (1)...(19): siRNA sense strand
ccaagugggacauuaguua

SEQ ID NO: 670863 - RNA, 19 nt, Homo sapiens
  misc_RNA (1)...(19): siRNA sense strand
caaaugcacaauugagaua

SEQ ID NO: 670864 - RNA, 19 nt, Homo sapiens
  misc_RNA (1)...(19): siRNA sense strand
gguuaaauccaaacgaaua

SEQ ID NO: 670865 - RNA, 19 nt, Homo sapiens
  misc_RNA (1)...(19): siRNA sense strand
cagacaagaacaaagauua

SEQ ID NO: 670866 - RNA, 19 nt, Homo sapiens
  misc_RNA (1)...(19): siRNA sense strand
ugaaggacaucaaugacaa

SEQ ID NO: 670867 - RNA, 19 nt, Homo sapiens
  misc_RNA (1)...(19): siRNA sense strand
acgcuuggcuuucguauga

SEQ ID NO: 670868 - RNA, 19 nt, Homo sapiens
  misc_RNA (1)...(19): siRNA sense strand
ggagguaaaucugcagaau

SEQ ID NO: 670869 - RNA, 19 nt, Homo sapiens
  misc_RNA (1)...(19): siRNA sense strand
caagaacaccguuuauuag

SEQ ID NO: 670870 - RNA, 19 nt, Homo sapiens
  misc_RNA (1)...(19): siRNA sense strand
ggaacuggauuaugaagac

SEQ ID NO: 670871 - RNA, 19 nt, Homo sapiens
  misc_RNA (1)...(19): siRNA sense strand
cagguuaaauccaaacgaa

SEQ ID NO: 670872 - RNA, 19 nt, Homo sapiens
  misc_RNA (1)...(19): siRNA sense strand
agugggacauuaguuauua

SEQ ID NO: 670873 - RNA, 19 nt, Homo sapiens
  misc_RNA (1)...(19): siRNA sense strand
ucaggacacuguaaaguag

SEQ ID NO: 670874 - RNA, 19 nt, Homo sapiens
  misc_RNA (1)...(19): siRNA sense strand
gauacagguuaaauccaaa

SEQ ID NO: 670875 - RNA, 19 nt, Homo sapiens
  misc_RNA (1)...(19): siRNA sense strand
cgauguaaaguccaaauuu

SEQ ID NO: 670876 - RNA, 19 nt, Homo sapiens
  misc_RNA (1)...(19): siRNA sense strand
gagaagaaacacaagaaca

SEQ ID NO: 670877 - RNA, 19 nt, Homo sapiens
  misc_RNA (1)...(19): siRNA sense strand
uguccaccuucaagaauua

SEQ ID NO: 670878 - RNA, 19 nt, Homo sapiens
  misc_RNA (1)...(19): siRNA sense strand
uggagcaaaugcacaauug

SEQ ID NO: 670879 - RNA, 19 nt, Homo sapiens
  misc_RNA (1)...(19): siRNA sense strand
gcaaaugcacaauugagau

SEQ ID NO: 670880 - RNA, 19 nt, Homo sapiens
  misc_RNA (1)...(19): siRNA sense strand
ggaaguggccgacgugaac

SEQ ID NO: 670881 - RNA, 19 nt, Homo sapiens
  misc_RNA (1)...(19): siRNA sense strand
caaaugaagaagaaacgaa

SEQ ID NO: 670882 - RNA, 19 nt, Homo sapiens
  misc_RNA (1)...(19): siRNA sense strand
agauacagguuaaauccaa

SEQ ID NO: 670883 - RNA, 19 nt, Homo sapiens
  misc_RNA (1)...(19): siRNA sense strand
guucaguuguugaucaaug

SEQ ID NO: 670884 - RNA, 19 nt, Homo sapiens
  misc_RNA (1)...(19): siRNA sense strand
aaugucagauuguuggaaa

SEQ ID NO: 670885 - RNA, 19 nt, Homo sapiens
  misc_RNA (1)...(19): siRNA sense strand
uauuagugauugcaacuga

SEQ ID NO: 670886 - RNA, 19 nt, Homo sapiens
  misc_RNA (1)...(19): siRNA sense strand
ugaaacuccuggaugugaa

SEQ ID NO: 670887 - RNA, 19 nt, Homo sapiens
  misc_RNA (1)...(19): siRNA sense strand
uaauauugaugccauggau

SEQ ID NO: 670888 - RNA, 19 nt, Homo sapiens
  misc_RNA (1)...(19): siRNA sense strand
acaauugagauacagguua

SEQ ID NO: 670889 - RNA, 19 nt, Homo sapiens
  misc_RNA (1)...(19): siRNA sense strand
agaacgcccugguguccua

SEQ ID NO: 670890 - RNA, 19 nt, Homo sapiens
  misc_RNA (1)...(19): siRNA sense strand
uagugaaacuccuggaugu

SEQ ID NO: 670891 - RNA, 19 nt, Homo sapiens
  misc_RNA (1)...(19): siRNA sense strand
guaaaguaguagugaaacu

SEQ ID NO: 670892 - RNA, 19 nt, Homo sapiens
  misc_RNA (1)...(19): siRNA sense strand
uaacagguacaguucaguu

SEQ ID NO: 670893 - RNA, 19 nt, Homo sapiens
  misc_RNA (1)...(19): siRNA sense strand
gaaauccuuagauagagaa

SEQ ID NO: 670894 - RNA, 19 nt, Homo sapiens
  misc_RNA (1)...(19): siRNA sense strand
gcgagagcgugucggucua

SEQ ID NO: 670895 - RNA, 19 nt, Homo sapiens
  misc_RNA (1)...(19): siRNA sense strand
cagguacaguucaguuguu

SEQ ID NO: 670896 - RNA, 19 nt, Homo sapiens
  misc_RNA (1)...(19): siRNA sense strand
ggucccaccucuacagaca

SEQ ID NO: 670897 - RNA, 19 nt, Homo sapiens
  misc_RNA (1)...(19): siRNA sense strand
acaguucaguuguugauca

SEQ ID NO: 670898 - RNA, 19 nt, Homo sapiens
  misc_RNA (1)...(19): siRNA sense strand
agaacaccguuuauuagug

SEQ ID NO: 670899 - RNA, 19 nt, Homo sapiens
  misc_RNA (1)...(19): siRNA sense strand
caacacgcucucuggauga

SEQ ID NO: 670900 - RNA, 19 nt, Homo sapiens
  misc_RNA (1)...(19): siRNA sense strand
gcacggucauugcucugau

SEQ ID NO: 670901 - RNA, 19 nt, Homo sapiens
  misc_RNA (1)...(19): siRNA sense strand
gaacgccucagaugcagau

SEQ ID NO: 670902 - RNA, 19 nt, Homo sapiens
  misc_RNA (1)...(19): siRNA sense strand
gagguaaaucugcagaaug

SEQ ID NO: 670903 - RNA, 19 nt, Homo sapiens
  misc_RNA (1)...(19): siRNA sense strand
caagugggacauuaguuau

SEQ ID NO: 670904 - RNA, 19 nt, Homo sapiens
  misc_RNA (1)...(19): siRNA sense strand
uguauuggaugcuaaugau

SEQ ID NO: 670905 - RNA, 19 nt, Homo sapiens
  misc_RNA (1)...(19): siRNA sense strand
ugaagaagaaacgaacuuu

SEQ ID NO: 670906 - RNA, 19 nt, Homo sapiens
  misc_RNA (1)...(19): siRNA sense strand
ggagcaaaugcacaauuga

SEQ ID NO: 670907 - RNA, 19 nt, Homo sapiens
  misc_RNA (1)...(19): siRNA sense strand
cuacaacgcuuggcuuucg

SEQ ID NO: 670908 - RNA, 19 nt, Homo sapiens
  misc_RNA (1)...(19): siRNA sense strand
cagcgugucuguggaagug

SEQ ID NO: 670909 - RNA, 19 nt, Homo sapiens
  misc_RNA (1)...(19): siRNA sense strand
gugggacauuaguuauuaa

SEQ ID NO: 670910 - RNA, 19 nt, Homo sapiens
  misc_RNA (1)...(19): siRNA sense strand
gcaccaagugggacauuag

SEQ ID NO: 670911 - RNA, 19 nt, Homo sapiens
  misc_RNA (1)...(19): siRNA sense strand
gagcaaaugcacaauugag

SEQ ID NO: 670912 - RNA, 19 nt, Homo sapiens
  misc_RNA (1)...(19): siRNA sense strand
agguaaaucugcagaaugg

SEQ ID NO: 670913 - RNA, 19 nt, Homo sapiens
  misc_RNA (1)...(19): siRNA sense strand
gugaaacuccuggauguga

SEQ ID NO: 670914 - RNA, 19 nt, Homo sapiens
  misc_RNA (1)...(19): siRNA sense strand
gcagugaaggacaucaaug

SEQ ID NO: 670915 - RNA, 19 nt, Homo sapiens
  misc_RNA (1)...(19): siRNA sense strand
cagugaaggacaucaauga

SEQ ID NO: 670916 - RNA, 19 nt, Homo sapiens
  misc_RNA (1)...(19): siRNA sense strand
uagagaagaaacacaagaa

SEQ ID NO: 670917 - RNA, 19 nt, Homo sapiens
  misc_RNA (1)...(19): siRNA sense strand
gaagaagaaacgaacuuuu

SEQ ID NO: 670918 - RNA, 19 nt, Homo sapiens
  misc_RNA (1)...(19): siRNA sense strand
aaaguacauucccauuauc

SEQ ID NO: 670919 - RNA, 19 nt, Homo sapiens
  misc_RNA (1)...(19): siRNA sense strand
gaaggacaucaaugacaau

SEQ ID NO: 670920 - RNA, 19 nt, Homo sapiens
  misc_RNA (1)...(19): siRNA sense strand
ccacucagcacggucauug

SEQ ID NO: 670921 - RNA, 19 nt, Homo sapiens
  misc_RNA (1)...(19): siRNA sense strand
gcgcgucggauuuggauau

SEQ ID NO: 670922 - RNA, 19 nt, Homo sapiens
  misc_RNA (1)...(19): siRNA sense strand
guguccaccuucaagaauu

SEQ ID NO: 670923 - RNA, 19 nt, Homo sapiens
  misc_RNA (1)...(19): siRNA sense strand
guacaguucaguuguugau

SEQ ID NO: 670924 - RNA, 19 nt, Homo sapiens
  misc_RNA (1)...(19): siRNA sense strand
cacaagaacaccguuuauu

SEQ ID NO: 670925 - RNA, 19 nt, Homo sapiens
  misc_RNA (1)...(19): siRNA sense strand
gagucaagaaugccagauu

SEQ ID NO: 670926 - RNA, 19 nt, Homo sapiens
  misc_RNA (1)...(19): siRNA sense strand
uccuggaugugaaugauaa

SEQ ID NO: 670927 - RNA, 19 nt, Homo sapiens
  misc_RNA (1)...(19): siRNA sense strand
gaacuggauuaugaagacu

SEQ ID NO: 670928 - RNA, 19 nt, Homo sapiens
  misc_RNA (1)...(19): siRNA sense strand
guauuggaugcuaaugaua

SEQ ID NO: 670929 - RNA, 19 nt, Homo sapiens
  misc_RNA (1)...(19): siRNA sense strand
gaaacuccuggaugugaau

SEQ ID NO: 670930 - RNA, 19 nt, Homo sapiens
  misc_RNA (1)...(19): siRNA sense strand
ugauaacgccccagaauuu

SEQ ID NO: 670931 - RNA, 19 nt, Homo sapiens
  misc_RNA (1)...(19): siRNA sense strand
aaagaggacgcuccacuca

SEQ ID NO: 670932 - RNA, 19 nt, Homo sapiens
  misc_RNA (1)...(19): siRNA sense strand
ucaagaauuacuacucguu

SEQ ID NO: 670933 - RNA, 19 nt, Homo sapiens
  misc_RNA (1)...(19): siRNA sense strand
acacaagaacaccguuuau

SEQ ID NO: 670934 - RNA, 19 nt, Homo sapiens
  misc_RNA (1)...(19): siRNA sense strand
gacaggccgcugcagguuu

SEQ ID NO: 670935 - RNA, 19 nt, Homo sapiens
  misc_RNA (1)...(19): siRNA sense strand
ccagacaagaacaaagauu

SEQ ID NO: 670936 - RNA, 19 nt, Homo sapiens
  misc_RNA (1)...(19): siRNA sense strand
gagggcaucaauaaggaaa

SEQ ID NO: 670937 - RNA, 19 nt, Homo sapiens
  misc_RNA (1)...(19): siRNA sense strand
auccuuagauagagaagaa

SEQ ID NO: 670938 - RNA, 19 nt, Homo sapiens
  misc_RNA (1)...(19): siRNA sense strand
gcaagcccacucuguugug

SEQ ID NO: 670939 - RNA, 19 nt, Homo sapiens
  misc_RNA (1)...(19): siRNA sense strand
cgucggauuuggauauugg

SEQ ID NO: 670940 - RNA, 19 nt, Homo sapiens
  misc_RNA (1)...(19): siRNA sense strand
auauugaugccauggauaa

SEQ ID NO: 670941 - RNA, 19 nt, Homo sapiens
  misc_RNA (1)...(19): siRNA sense strand
aggacacuguaaaguagua

SEQ ID NO: 670942 - RNA, 19 nt, Homo sapiens
  misc_RNA (1)...(19): siRNA sense strand
gugaaggacaucaaugaca

SEQ ID NO: 670943 - RNA, 19 nt, Homo sapiens
  misc_RNA (1)...(19): siRNA sense strand
agauagagaagaaacacaa

SEQ ID NO: 670944 - RNA, 19 nt, Homo sapiens
  misc_RNA (1)...(19): siRNA sense strand
ugguggaugucaacgugua

SEQ ID NO: 670945 - RNA, 19 nt, Homo sapiens
  misc_RNA (1)...(19): siRNA sense strand
caguucaguuguugaucaa

SEQ ID NO: 670946 - RNA, 19 nt, Homo sapiens
  misc_RNA (1)...(19): siRNA sense strand
aacacaagaacaccguuua

SEQ ID NO: 670947 - RNA, 19 nt, Homo sapiens
  misc_RNA (1)...(19): siRNA sense strand
aaacccgaacuaacaggua

SEQ ID NO: 670948 - RNA, 19 nt, Homo sapiens
  misc_RNA (1)...(19): siRNA sense strand
ggaugugaaugauaauacc

SEQ ID NO: 670949 - RNA, 19 nt, Homo sapiens
  misc_RNA (1)...(19): siRNA sense strand
gcauuuuguuugugaauuc

SEQ ID NO: 670950 - RNA, 19 nt, Homo sapiens
  misc_RNA (1)...(19): siRNA sense strand
caaacacggaaccuucguu

SEQ ID NO: 670951 - RNA, 19 nt, Homo sapiens
  misc_RNA (1)...(19): siRNA sense strand
caucaauaaggaaauagug

SEQ ID NO: 670952 - RNA, 19 nt, Homo sapiens
  misc_RNA (1)...(19): siRNA sense strand
caacguguaccugaucauc

SEQ ID NO: 670953 - RNA, 19 nt, Homo sapiens
  misc_RNA (1)...(19): siRNA sense strand
aggcugcccugguggaugu

SEQ ID NO: 670954 - RNA, 19 nt, Homo sapiens
  misc_RNA (1)...(19): siRNA sense strand
gagagcgugucggucuaug

SEQ ID NO: 670955 - RNA, 19 nt, Homo sapiens
  misc_RNA (1)...(19): siRNA sense strand
ggugaccugcucccuaaug

SEQ ID NO: 670956 - RNA, 19 nt, Homo sapiens
  misc_RNA (1)...(19): siRNA sense strand
gggaacuggauuaugaaga

SEQ ID NO: 670957 - RNA, 19 nt, Homo sapiens
  misc_RNA (1)...(19): siRNA sense strand
gaagaaagauugugaaguu

SEQ ID NO: 670958 - RNA, 19 nt, Homo sapiens
  misc_RNA (1)...(19): siRNA sense strand
ggaaagaccuaccagaaca

SEQ ID NO: 670959 - RNA, 19 nt, Homo sapiens
  misc_RNA (1)...(19): siRNA sense strand
guagaacucucguaugcua

SEQ ID NO: 670960 - RNA, 19 nt, Homo sapiens
  misc_RNA (1)...(19): siRNA sense strand
gaagaaagcagaaguagag

SEQ ID NO: 670961 - RNA, 19 nt, Homo sapiens
  misc_RNA (1)...(19): siRNA sense strand
gaacagaaaggcggagaua

SEQ ID NO: 670962 - RNA, 19 nt, Homo sapiens
  misc_RNA (1)...(19): siRNA sense strand
cguauuggcuggucacuaa

SEQ ID NO: 670963 - RNA, 19 nt, Homo sapiens
  misc_RNA (1)...(19): siRNA sense strand
gaugaagacuauaagcaaa

SEQ ID NO: 670964 - RNA, 19 nt, Homo sapiens
  misc_RNA (1)...(19): siRNA sense strand
gcaaagaacacagaagaaa

SEQ ID NO: 670965 - RNA, 19 nt, Homo sapiens
  misc_RNA (1)...(19): siRNA sense strand
ugaaagugaugaaguagaa

SEQ ID NO: 670966 - RNA, 19 nt, Homo sapiens
  misc_RNA (1)...(19): siRNA sense strand
gcgaaaagcuguuguaguu

SEQ ID NO: 670967 - RNA, 19 nt, Homo sapiens
  misc_RNA (1)...(19): siRNA sense strand
gaaauaaccuauguugaac

SEQ ID NO: 670968 - RNA, 19 nt, Homo sapiens
  misc_RNA (1)...(19): siRNA sense strand
gaaagauugugaaguugug

SEQ ID NO: 670969 - RNA, 19 nt, Homo sapiens
  misc_RNA (1)...(19): siRNA sense strand
gaacacuggcucaaagaaa

SEQ ID NO: 670970 - RNA, 19 nt, Homo sapiens
  misc_RNA (1)...(19): siRNA sense strand
ugagugcuuugaugaaaua

SEQ ID NO: 670971 - RNA, 19 nt, Homo sapiens
  misc_RNA (1)...(19): siRNA sense strand
ccaguaaggcauuuauaua

SEQ ID NO: 670972 - RNA, 19 nt, Homo sapiens
  misc_RNA (1)...(19): siRNA sense strand
gaaaagcuguuguaguuug

SEQ ID NO: 670973 - RNA, 19 nt, Homo sapiens
  misc_RNA (1)...(19): siRNA sense strand
gaucauggccguggauauu

SEQ ID NO: 670974 - RNA, 19 nt, Homo sapiens
  misc_RNA (1)...(19): siRNA sense strand
gaagagaacaaguauagca

SEQ ID NO: 670975 - RNA, 19 nt, Homo sapiens
  misc_RNA (1)...(19): siRNA sense strand
aaacaaucguggcuacaaa

SEQ ID NO: 670976 - RNA, 19 nt, Homo sapiens
  misc_RNA (1)...(19): siRNA sense strand
gacugaagauuauggagaa

SEQ ID NO: 670977 - RNA, 19 nt, Homo sapiens
  misc_RNA (1)...(19): siRNA sense strand
gaugaaauaaccuauguug

SEQ ID NO: 670978 - RNA, 19 nt, Homo sapiens
  misc_RNA (1)...(19): siRNA sense strand
ggaaauuuauugagauugc

SEQ ID NO: 670979 - RNA, 19 nt, Homo sapiens
  misc_RNA (1)...(19): siRNA sense strand
ugaaagaggagcucaagaa

SEQ ID NO: 670980 - RNA, 19 nt, Homo sapiens
  misc_RNA (1)...(19): siRNA sense strand
agagguagcugagugcuuu

SEQ ID NO: 670981 - RNA, 19 nt, Homo sapiens
  misc_RNA (1)...(19): siRNA sense strand
ugguuugucuugauacuua

SEQ ID NO: 670982 - RNA, 19 nt, Homo sapiens
  misc_RNA (1)...(19): siRNA sense strand
gcugagugcuuugaugaaa

SEQ ID NO: 670983 - RNA, 19 nt, Homo sapiens
  misc_RNA (1)...(19): siRNA sense strand
cgaaagaagcgaaauuuua

SEQ ID NO: 670984 - RNA, 19 nt, Homo sapiens
  misc_RNA (1)...(19): siRNA sense strand
gaaguugugaugaugauug

SEQ ID NO: 670985 - RNA, 19 nt, Homo sapiens
  misc_RNA (1)...(19): siRNA sense strand
gaaaauccagggaaauaua

SEQ ID NO: 670986 - RNA, 19 nt, Homo sapiens
  misc_RNA (1)...(19): siRNA sense strand
aaucguggcggauauaaua

SEQ ID NO: 670987 - RNA, 19 nt, Homo sapiens
  misc_RNA (1)...(19): siRNA sense strand
ccagggaaauauaacauuc

SEQ ID NO: 670988 - RNA, 19 nt, Homo sapiens
  misc_RNA (1)...(19): siRNA sense strand
gaugaacacuucgaugaca

SEQ ID NO: 670989 - RNA, 19 nt, Homo sapiens
  misc_RNA (1)...(19): siRNA sense strand
caauaugcgugguggaaau

SEQ ID NO: 670990 - RNA, 19 nt, Homo sapiens
  misc_RNA (1)...(19): siRNA sense strand
ggagaaaaguuugaugaaa

SEQ ID NO: 670991 - RNA, 19 nt, Homo sapiens
  misc_RNA (1)...(19): siRNA sense strand
gaauguuacuuggugaaga

SEQ ID NO: 670992 - RNA, 19 nt, Homo sapiens
  misc_RNA (1)...(19): siRNA sense strand
acagaaaggcggagauaaa

SEQ ID NO: 670993 - RNA, 19 nt, Homo sapiens
  misc_RNA (1)...(19): siRNA sense strand
gaaacaaucguggcuacaa

SEQ ID NO: 670994 - RNA, 19 nt, Homo sapiens
  misc_RNA (1)...(19): siRNA sense strand
ggagcaauauaaggaagaa

SEQ ID NO: 670995 - RNA, 19 nt, Homo sapiens
  misc_RNA (1)...(19): siRNA sense strand
agaugaagguuacagagaa

SEQ ID NO: 670996 - RNA, 19 nt, Homo sapiens
  misc_RNA (1)...(19): siRNA sense strand
gaaagaggagcucaagaag

SEQ ID NO: 670997 - RNA, 19 nt, Homo sapiens
  misc_RNA (1)...(19): siRNA sense strand
gcaagaaccaguuuaacag

SEQ ID NO: 670998 - RNA, 19 nt, Homo sapiens
  misc_RNA (1)...(19): siRNA sense strand
ucagccaccuguugaagaa

SEQ ID NO: 670999 - RNA, 19 nt, Homo sapiens
  misc_RNA (1)...(19): siRNA sense strand
gaacuacaaccagaacuuc

SEQ ID NO: 671000 - RNA, 19 nt, Homo sapiens
  misc_RNA (1)...(19): siRNA sense strand
uaacauucuuggcacaaau

SEQ ID NO: 671001 - RNA, 19 nt, Homo sapiens
  misc_RNA (1)...(19): siRNA sense strand
ugacauacaugaaguucgu

SEQ ID NO: 671002 - RNA, 19 nt, Homo sapiens
  misc_RNA (1)...(19): siRNA sense strand
acagugguuugucuugaua

SEQ ID NO: 671003 - RNA, 19 nt, Homo sapiens
  misc_RNA (1)...(19): siRNA sense strand
gagaugaagguuacagaga

SEQ ID NO: 671004 - RNA, 19 nt, Homo sapiens
  misc_RNA (1)...(19): siRNA sense strand
gaaguagaacucucguaug

SEQ ID NO: 671005 - RNA, 19 nt, Homo sapiens
  misc_RNA (1)...(19): siRNA sense strand
cagagaagaucccaguaag

SEQ ID NO: 671006 - RNA, 19 nt, Homo sapiens
  misc_RNA (1)...(19): siRNA sense strand
acugugagacugaagauua

SEQ ID NO: 671007 - RNA, 19 nt, Homo sapiens
  misc_RNA (1)...(19): siRNA sense strand
aacuacaaguggaauguua

SEQ ID NO: 671008 - RNA, 19 nt, Homo sapiens
  misc_RNA (1)...(19): siRNA sense strand
ucaccaaggauauuauuga

SEQ ID NO: 671009 - RNA, 19 nt, Homo sapiens
  misc_RNA (1)...(19): siRNA sense strand
cuaccuggguuacuaaaca

SEQ ID NO: 671010 - RNA, 19 nt, Homo sapiens
  misc_RNA (1)...(19): siRNA sense strand
ggaacuacaaccagaacuu

SEQ ID NO: 671011 - RNA, 19 nt, Homo sapiens
  misc_RNA (1)...(19): siRNA sense strand
gaaggugucggagcugaaa

SEQ ID NO: 671012 - RNA, 19 nt, Homo sapiens
  misc_RNA (1)...(19): siRNA sense strand
gaugaagguuacagagaag

SEQ ID NO: 671013 - RNA, 19 nt, Homo sapiens
  misc_RNA (1)...(19): siRNA sense strand
caagaaccaguuuaacaga

SEQ ID NO: 671014 - RNA, 19 nt, Homo sapiens
  misc_RNA (1)...(19): siRNA sense strand
ggcaagaaccaguuuaaca

SEQ ID NO: 671015 - RNA, 19 nt, Homo sapiens
  misc_RNA (1)...(19): siRNA sense strand
acagaacacuggcucaaag

SEQ ID NO: 671016 - RNA, 19 nt, Homo sapiens
  misc_RNA (1)...(19): siRNA sense strand
ugagauugcugcccgaaag

SEQ ID NO: 671017 - RNA, 19 nt, Homo sapiens
  misc_RNA (1)...(19): siRNA sense strand
aaagagggguguuaaaaga

SEQ ID NO: 671018 - RNA, 19 nt, Homo sapiens
  misc_RNA (1)...(19): siRNA sense strand
gaacucucguaugcuaaga

SEQ ID NO: 671019 - RNA, 19 nt, Homo sapiens
  misc_RNA (1)...(19): siRNA sense strand
ugaaguagaacucucguau

SEQ ID NO: 671020 - RNA, 19 nt, Homo sapiens
  misc_RNA (1)...(19): siRNA sense strand
ucuuauggguauucucuaa

SEQ ID NO: 671021 - RNA, 19 nt, Homo sapiens
  misc_RNA (1)...(19): siRNA sense strand
gauauugacauacaugaag

SEQ ID NO: 671022 - RNA, 19 nt, Homo sapiens
  misc_RNA (1)...(19): siRNA sense strand
acagagaagaucccaguaa

SEQ ID NO: 671023 - RNA, 19 nt, Homo sapiens
  misc_RNA (1)...(19): siRNA sense strand
guagcugagugcuuugaug

SEQ ID NO: 671024 - RNA, 19 nt, Homo sapiens
  misc_RNA (1)...(19): siRNA sense strand
guuacuuggugaagaagaa

SEQ ID NO: 671025 - RNA, 19 nt, Homo sapiens
  misc_RNA (1)...(19): siRNA sense strand
aauguuacuuggugaagaa

SEQ ID NO: 671026 - RNA, 19 nt, Homo sapiens
  misc_RNA (1)...(19): siRNA sense strand
ugaagacuauaagcaaaga

SEQ ID NO: 671027 - RNA, 19 nt, Homo sapiens
  misc_RNA (1)...(19): siRNA sense strand
caaagaacacagaagaaag

SEQ ID NO: 671028 - RNA, 19 nt, Homo sapiens
  misc_RNA (1)...(19): siRNA sense strand
uugaguacauugaagagaa

SEQ ID NO: 671029 - RNA, 19 nt, Homo sapiens
  misc_RNA (1)...(19): siRNA sense strand
ggaaucguggcggauauaa

SEQ ID NO: 671030 - RNA, 19 nt, Homo sapiens
  misc_RNA (1)...(19): siRNA sense strand
aagaugaacacuucgauga

SEQ ID NO: 671031 - RNA, 19 nt, Homo sapiens
  misc_RNA (1)...(19): siRNA sense strand
cuuagaggaucgaguuaga

SEQ ID NO: 671032 - RNA, 19 nt, Homo sapiens
  misc_RNA (1)...(19): siRNA sense strand
aagcaaagaacacagaaga

SEQ ID NO: 671033 - RNA, 19 nt, Homo sapiens
  misc_RNA (1)...(19): siRNA sense strand
cuugggaaauuuauugaga

SEQ ID NO: 671034 - RNA, 19 nt, Homo sapiens
  misc_RNA (1)...(19): siRNA sense strand
cugaagagaagaaagauug

SEQ ID NO: 671035 - RNA, 19 nt, Homo sapiens
  misc_RNA (1)...(19): siRNA sense strand
acacagugguuugucuuga

SEQ ID NO: 671036 - RNA, 19 nt, Homo sapiens
  misc_RNA (1)...(19): siRNA sense strand
acagaagaaagcagaagua

SEQ ID NO: 671037 - RNA, 19 nt, Homo sapiens
  misc_RNA (1)...(19): siRNA sense strand
gagaagaaagauugugaag

SEQ ID NO: 671038 - RNA, 19 nt, Homo sapiens
  misc_RNA (1)...(19): siRNA sense strand
aaguagaacucucguaugc

SEQ ID NO: 671039 - RNA, 19 nt, Homo sapiens
  misc_RNA (1)...(19): siRNA sense strand
caacagagggaacuacaac

SEQ ID NO: 671040 - RNA, 19 nt, Homo sapiens
  misc_RNA (1)...(19): siRNA sense strand
cagaggugguggccauaga

SEQ ID NO: 671041 - RNA, 19 nt, Homo sapiens
  misc_RNA (1)...(19): siRNA sense strand
gaacaugcgguccucaaaa

SEQ ID NO: 671042 - RNA, 19 nt, Homo sapiens
  misc_RNA (1)...(19): siRNA sense strand
gcuggucacuaacuacaag

SEQ ID NO: 671043 - RNA, 19 nt, Homo sapiens
  misc_RNA (1)...(19): siRNA sense strand
gaagcgaaauuuuauucug

SEQ ID NO: 671044 - RNA, 19 nt, Homo sapiens
  misc_RNA (1)...(19): siRNA sense strand
agaagcaaauggcagauac

SEQ ID NO: 671045 - RNA, 19 nt, Homo sapiens
  misc_RNA (1)...(19): siRNA sense strand
uacuaaacaugcagcagaa

SEQ ID NO: 671046 - RNA, 19 nt, Homo sapiens
  misc_RNA (1)...(19): siRNA sense strand
gaagagaagaaagauugug

SEQ ID NO: 671047 - RNA, 19 nt, Homo sapiens
  misc_RNA (1)...(19): siRNA sense strand
guuccucgccuguuaaugu

SEQ ID NO: 671048 - RNA, 19 nt, Homo sapiens
  misc_RNA (1)...(19): siRNA sense strand
cuucuucccuuacaaugga

SEQ ID NO: 671049 - RNA, 19 nt, Homo sapiens
  misc_RNA (1)...(19): siRNA sense strand
ggaaucggcuauccauacc

SEQ ID NO: 671050 - RNA, 19 nt, Homo sapiens
  misc_RNA (1)...(19): siRNA sense strand
ccagugucuugggaaauuu

SEQ ID NO: 671051 - RNA, 19 nt, Homo sapiens
  misc_RNA (1)...(19): siRNA sense strand
aaacuaccuggguuacuaa

SEQ ID NO: 671052 - RNA, 19 nt, Homo sapiens
  misc_RNA (1)...(19): siRNA sense strand
gugauuacauguuuugcua

SEQ ID NO: 671053 - RNA, 19 nt, Homo sapiens
  misc_RNA (1)...(19): siRNA sense strand
aaaacuaccuggguuacua

SEQ ID NO: 671054 - RNA, 19 nt, Homo sapiens
  misc_RNA (1)...(19): siRNA sense strand
ggaagaggaggaggaagga

SEQ ID NO: 671055 - RNA, 19 nt, Homo sapiens
  misc_RNA (1)...(19): siRNA sense strand
gaaagaccuaccagaacau

SEQ ID NO: 671056 - RNA, 19 nt, Homo sapiens
  misc_RNA (1)...(19): siRNA sense strand
cccaaaagaugaagacuau

SEQ ID NO: 671057 - RNA, 19 nt, Homo sapiens
  misc_RNA (1)...(19): siRNA sense strand
gaagaaagauugugaaguu

SEQ ID NO: 671058 - RNA, 19 nt, Homo sapiens
  misc_RNA (1)...(19): siRNA sense strand
ggaaagaccuaccagaaca

SEQ ID NO: 671059 - RNA, 19 nt, Homo sapiens
  misc_RNA (1)...(19): siRNA sense strand
guagaacucucguaugcua

SEQ ID NO: 671060 - RNA, 19 nt, Homo sapiens
  misc_RNA (1)...(19): siRNA sense strand
gaagaaagcagaaguagag

SEQ ID NO: 671061 - RNA, 19 nt, Homo sapiens
  misc_RNA (1)...(19): siRNA sense strand
gaacagaaaggcggagaua

SEQ ID NO: 671062 - RNA, 19 nt, Homo sapiens
  misc_RNA (1)...(19): siRNA sense strand
cguauuggcuggucacuaa

SEQ ID NO: 671063 - RNA, 19 nt, Homo sapiens
  misc_RNA (1)...(19): siRNA sense strand
gaugaagacuauaagcaaa

SEQ ID NO: 671064 - RNA, 19 nt, Homo sapiens
  misc_RNA (1)...(19): siRNA sense strand
gcaaagaacacagaagaaa

SEQ ID NO: 671065 - RNA, 19 nt, Homo sapiens
  misc_RNA (1)...(19): siRNA sense strand
ugaaagugaugaaguagaa

SEQ ID NO: 671066 - RNA, 19 nt, Homo sapiens
  misc_RNA (1)...(19): siRNA sense strand
gcgaaaagcuguuguaguu

SEQ ID NO: 671067 - RNA, 19 nt, Homo sapiens
  misc_RNA (1)...(19): siRNA sense strand
gaaauaaccuauguugaac

SEQ ID NO: 671068 - RNA, 19 nt, Homo sapiens
  misc_RNA (1)...(19): siRNA sense strand
gaaagauugugaaguugug

SEQ ID NO: 671069 - RNA, 19 nt, Homo sapiens
  misc_RNA (1)...(19): siRNA sense strand
gaacacuggcucaaagaaa

SEQ ID NO: 671070 - RNA, 19 nt, Homo sapiens
  misc_RNA (1)...(19): siRNA sense strand
ugagugcuuugaugaaaua

SEQ ID NO: 671071 - RNA, 19 nt, Homo sapiens
  misc_RNA (1)...(19): siRNA sense strand
ccaguaaggcauuuauaua

SEQ ID NO: 671072 - RNA, 19 nt, Homo sapiens
  misc_RNA (1)...(19): siRNA sense strand
gaaaagcuguuguaguuug

SEQ ID NO: 671073 - RNA, 19 nt, Homo sapiens
  misc_RNA (1)...(19): siRNA sense strand
gaucauggccguggauauu

SEQ ID NO: 671074 - RNA, 19 nt, Homo sapiens
  misc_RNA (1)...(19): siRNA sense strand
gaagagaacaaguauagca

SEQ ID NO: 671075 - RNA, 19 nt, Homo sapiens
  misc_RNA (1)...(19): siRNA sense strand
aaacaaucguggcuacaaa

SEQ ID NO: 671076 - RNA, 19 nt, Homo sapiens
  misc_RNA (1)...(19): siRNA sense strand
gacugaagauuauggagaa

SEQ ID NO: 671077 - RNA, 19 nt, Homo sapiens
  misc_RNA (1)...(19): siRNA sense strand
gaugaaauaaccuauguug

SEQ ID NO: 671078 - RNA, 19 nt, Homo sapiens
  misc_RNA (1)...(19): siRNA sense strand
ggaaauuuauugagauugc

SEQ ID NO: 671079 - RNA, 19 nt, Homo sapiens
  misc_RNA (1)...(19): siRNA sense strand
ugaaagaggagcucaagaa

SEQ ID NO: 671080 - RNA, 19 nt, Homo sapiens
  misc_RNA (1)...(19): siRNA sense strand
agagguagcugagugcuuu

SEQ ID NO: 671081 - RNA, 19 nt, Homo sapiens
  misc_RNA (1)...(19): siRNA sense strand
ugguuugucuugauacuua

SEQ ID NO: 671082 - RNA, 19 nt, Homo sapiens
  misc_RNA (1)...(19): siRNA sense strand
gcugagugcuuugaugaaa

SEQ ID NO: 671083 - RNA, 19 nt, Homo sapiens
  misc_RNA (1)...(19): siRNA sense strand
cgaaagaagcgaaauuuua

SEQ ID NO: 671084 - RNA, 19 nt, Homo sapiens
  misc_RNA (1)...(19): siRNA sense strand
gaaguugugaugaugauug

SEQ ID NO: 671085 - RNA, 19 nt, Homo sapiens
  misc_RNA (1)...(19): siRNA sense strand
gaaaauccagggaaauaua

SEQ ID NO: 671086 - RNA, 19 nt, Homo sapiens
  misc_RNA (1)...(19): siRNA sense strand
aaucguggcggauauaaua

SEQ ID NO: 671087 - RNA, 19 nt, Homo sapiens
  misc_RNA (1)...(19): siRNA sense strand
ccagggaaauauaacauuc

SEQ ID NO: 671088 - RNA, 19 nt, Homo sapiens
  misc_RNA (1)...(19): siRNA sense strand
gaugaacacuucgaugaca

SEQ ID NO: 671089 - RNA, 19 nt, Homo sapiens
  misc_RNA (1)...(19): siRNA sense strand
caauaugcgugguggaaau

SEQ ID NO: 671090 - RNA, 19 nt, Homo sapiens
  misc_RNA (1)...(19): siRNA sense strand
ggagaaaaguuugaugaaa

SEQ ID NO: 671091 - RNA, 19 nt, Homo sapiens
  misc_RNA (1)...(19): siRNA sense strand
gaauguuacuuggugaaga

SEQ ID NO: 671092 - RNA, 19 nt, Homo sapiens
  misc_RNA (1)...(19): siRNA sense strand
acagaaaggcggagauaaa

SEQ ID NO: 671093 - RNA, 19 nt, Homo sapiens
  misc_RNA (1)...(19): siRNA sense strand
gaaacaaucguggcuacaa

SEQ ID NO: 671094 - RNA, 19 nt, Homo sapiens
  misc_RNA (1)...(19): siRNA sense strand
ggagcaauauaaggaagaa

SEQ ID NO: 671095 - RNA, 19 nt, Homo sapiens
  misc_RNA (1)...(19): siRNA sense strand
agaugaagguuacagagaa

SEQ ID NO: 671096 - RNA, 19 nt, Homo sapiens
  misc_RNA (1)...(19): siRNA sense strand
gaaagaggagcucaagaag

SEQ ID NO: 671097 - RNA, 19 nt, Homo sapiens
  misc_RNA (1)...(19): siRNA sense strand
gcaagaaccaguuuaacag

SEQ ID NO: 671098 - RNA, 19 nt, Homo sapiens
  misc_RNA (1)...(19): siRNA sense strand
ucagccaccuguugaagaa

SEQ ID NO: 671099 - RNA, 19 nt, Homo sapiens
  misc_RNA (1)...(19): siRNA sense strand
gaacuacaaccagaacuuc

SEQ ID NO: 671100 - RNA, 19 nt, Homo sapiens
  misc_RNA (1)...(19): siRNA sense strand
uaacauucuuggcacaaau

SEQ ID NO: 671101 - RNA, 19 nt, Homo sapiens
  misc_RNA (1)...(19): siRNA sense strand
ugacauacaugaaguucgu

SEQ ID NO: 671102 - RNA, 19 nt, Homo sapiens
  misc_RNA (1)...(19): siRNA sense strand
acagugguuugucuugaua

SEQ ID NO: 671103 - RNA, 19 nt, Homo sapiens
  misc_RNA (1)...(19): siRNA sense strand
gagaugaagguuacagaga

SEQ ID NO: 671104 - RNA, 19 nt, Homo sapiens
  misc_RNA (1)...(19): siRNA sense strand
gaaguagaacucucguaug

SEQ ID NO: 671105 - RNA, 19 nt, Homo sapiens
  misc_RNA (1)...(19): siRNA sense strand
cagagaagaucccaguaag

SEQ ID NO: 671106 - RNA, 19 nt, Homo sapiens
  misc_RNA (1)...(19): siRNA sense strand
acugugagacugaagauua

SEQ ID NO: 671107 - RNA, 19 nt, Homo sapiens
  misc_RNA (1)...(19): siRNA sense strand
aacuacaaguggaauguua

SEQ ID NO: 671108 - RNA, 19 nt, Homo sapiens
  misc_RNA (1)...(19): siRNA sense strand
ucaccaaggauauuauuga

SEQ ID NO: 671109 - RNA, 19 nt, Homo sapiens
  misc_RNA (1)...(19): siRNA sense strand
cuaccuggguuacuaaaca

SEQ ID NO: 671110 - RNA, 19 nt, Homo sapiens
  misc_RNA (1)...(19): siRNA sense strand
ggaacuacaaccagaacuu

SEQ ID NO: 671111 - RNA, 19 nt, Homo sapiens
  misc_RNA (1)...(19): siRNA sense strand
gaaggugucggagcugaaa

SEQ ID NO: 671112 - RNA, 19 nt, Homo sapiens
  misc_RNA (1)...(19): siRNA sense strand
gaugaagguuacagagaag

SEQ ID NO: 671113 - RNA, 19 nt, Homo sapiens
  misc_RNA (1)...(19): siRNA sense strand
caagaaccaguuuaacaga

SEQ ID NO: 671114 - RNA, 19 nt, Homo sapiens
  misc_RNA (1)...(19): siRNA sense strand
ggcaagaaccaguuuaaca

SEQ ID NO: 671115 - RNA, 19 nt, Homo sapiens
  misc_RNA (1)...(19): siRNA sense strand
acagaacacuggcucaaag

SEQ ID NO: 671116 - RNA, 19 nt, Homo sapiens
  misc_RNA (1)...(19): siRNA sense strand
ugagauugcugcccgaaag

SEQ ID NO: 671117 - RNA, 19 nt, Homo sapiens
  misc_RNA (1)...(19): siRNA sense strand
aaagagggguguuaaaaga

SEQ ID NO: 671118 - RNA, 19 nt, Homo sapiens
  misc_RNA (1)...(19): siRNA sense strand
gaacucucguaugcuaaga

SEQ ID NO: 671119 - RNA, 19 nt, Homo sapiens
  misc_RNA (1)...(19): siRNA sense strand
ugaaguagaacucucguau

SEQ ID NO: 671120 - RNA, 19 nt, Homo sapiens
  misc_RNA (1)...(19): siRNA sense strand
ucuuauggguauucucuaa

SEQ ID NO: 671121 - RNA, 19 nt, Homo sapiens
  misc_RNA (1)...(19): siRNA sense strand
gauauugacauacaugaag

SEQ ID NO: 671122 - RNA, 19 nt, Homo sapiens
  misc_RNA (1)...(19): siRNA sense strand
acagagaagaucccaguaa

SEQ ID NO: 671123 - RNA, 19 nt, Homo sapiens
  misc_RNA (1)...(19): siRNA sense strand
guagcugagugcuuugaug

SEQ ID NO: 671124 - RNA, 19 nt, Homo sapiens
  misc_RNA (1)...(19): siRNA sense strand
guuacuuggugaagaagaa

SEQ ID NO: 671125 - RNA, 19 nt, Homo sapiens
  misc_RNA (1)...(19): siRNA sense strand
aauguuacuuggugaagaa

SEQ ID NO: 671126 - RNA, 19 nt, Homo sapiens
  misc_RNA (1)...(19): siRNA sense strand
ugaagacuauaagcaaaga

SEQ ID NO: 671127 - RNA, 19 nt, Homo sapiens
  misc_RNA (1)...(19): siRNA sense strand
caaagaacacagaagaaag

SEQ ID NO: 671128 - RNA, 19 nt, Homo sapiens
  misc_RNA (1)...(19): siRNA sense strand
uugaguacauugaagagaa

SEQ ID NO: 671129 - RNA, 19 nt, Homo sapiens
  misc_RNA (1)...(19): siRNA sense strand
ggaaucguggcggauauaa

SEQ ID NO: 671130 - RNA, 19 nt, Homo sapiens
  misc_RNA (1)...(19): siRNA sense strand
aagaugaacacuucgauga

SEQ ID NO: 671131 - RNA, 19 nt, Homo sapiens
  misc_RNA (1)...(19): siRNA sense strand
cuuagaggaucgaguuaga

SEQ ID NO: 671132 - RNA, 19 nt, Homo sapiens
  misc_RNA (1)...(19): siRNA sense strand
aagcaaagaacacagaaga

SEQ ID NO: 671133 - RNA, 19 nt, Homo sapiens
  misc_RNA (1)...(19): siRNA sense strand
cuugggaaauuuauugaga

SEQ ID NO: 671134 - RNA, 19 nt, Homo sapiens
  misc_RNA (1)...(19): siRNA sense strand
cugaagagaagaaagauug

SEQ ID NO: 671135 - RNA, 19 nt, Homo sapiens
  misc_RNA (1)...(19): siRNA sense strand
acacagugguuugucuuga

SEQ ID NO: 671136 - RNA, 19 nt, Homo sapiens
  misc_RNA (1)...(19): siRNA sense strand
acagaagaaagcagaagua

SEQ ID NO: 671137 - RNA, 19 nt, Homo sapiens
  misc_RNA (1)...(19): siRNA sense strand
gagaagaaagauugugaag

SEQ ID NO: 671138 - RNA, 19 nt, Homo sapiens
  misc_RNA (1)...(19): siRNA sense strand
aaguagaacucucguaugc

SEQ ID NO: 671139 - RNA, 19 nt, Homo sapiens
  misc_RNA (1)...(19): siRNA sense strand
caacagagggaacuacaac

SEQ ID NO: 671140 - RNA, 19 nt, Homo sapiens
  misc_RNA (1)...(19): siRNA sense strand
cagaggugguggccauaga

SEQ ID NO: 671141 - RNA, 19 nt, Homo sapiens
  misc_RNA (1)...(19): siRNA sense strand
gaacaugcgguccucaaaa

SEQ ID NO: 671142 - RNA, 19 nt, Homo sapiens
  misc_RNA (1)...(19): siRNA sense strand
gcuggucacuaacuacaag

SEQ ID NO: 671143 - RNA, 19 nt, Homo sapiens
  misc_RNA (1)...(19): siRNA sense strand
gaagcgaaauuuuauucug

SEQ ID NO: 671144 - RNA, 19 nt, Homo sapiens
  misc_RNA (1)...(19): siRNA sense strand
agaagcaaauggcagauac

SEQ ID NO: 671145 - RNA, 19 nt, Homo sapiens
  misc_RNA (1)...(19): siRNA sense strand
uacuaaacaugcagcagaa

SEQ ID NO: 671146 - RNA, 19 nt, Homo sapiens
  misc_RNA (1)...(19): siRNA sense strand
gaagagaagaaagauugug

SEQ ID NO: 671147 - RNA, 19 nt, Homo sapiens
  misc_RNA (1)...(19): siRNA sense strand
guuccucgccuguuaaugu

SEQ ID NO: 671148 - RNA, 19 nt, Homo sapiens
  misc_RNA (1)...(19): siRNA sense strand
cuucuucccuuacaaugga

SEQ ID NO: 671149 - RNA, 19 nt, Homo sapiens
  misc_RNA (1)...(19): siRNA sense strand
ggaaucggcuauccauacc

SEQ ID NO: 671150 - RNA, 19 nt, Homo sapiens
  misc_RNA (1)...(19): siRNA sense strand
ccagugucuugggaaauuu

SEQ ID NO: 671151 - RNA, 19 nt, Homo sapiens
  misc_RNA (1)...(19): siRNA sense strand
aaacuaccuggguuacuaa

SEQ ID NO: 671152 - RNA, 19 nt, Homo sapiens
  misc_RNA (1)...(19): siRNA sense strand
gugauuacauguuuugcua

SEQ ID NO: 671153 - RNA, 19 nt, Homo sapiens
  misc_RNA (1)...(19): siRNA sense strand
aaaacuaccuggguuacua

SEQ ID NO: 671154 - RNA, 19 nt, Homo sapiens
  misc_RNA (1)...(19): siRNA sense strand
ggaagaggaggaggaagga

SEQ ID NO: 671155 - RNA, 19 nt, Homo sapiens
  misc_RNA (1)...(19): siRNA sense strand
gaaagaccuaccagaacau

SEQ ID NO: 671156 - RNA, 19 nt, Homo sapiens
  misc_RNA (1)...(19): siRNA sense strand
cccaaaagaugaagacuau

SEQ ID NO: 671157 - RNA, 19 nt, Homo sapiens
  misc_RNA (1)...(19): siRNA sense strand
gaagaaagauugugaaguu

SEQ ID NO: 671158 - RNA, 19 nt, Homo sapiens
  misc_RNA (1)...(19): siRNA sense strand
ggaaagaccuaccagaaca

SEQ ID NO: 671159 - RNA, 19 nt, Homo sapiens
  misc_RNA (1)...(19): siRNA sense strand
guagaacucucguaugcua

SEQ ID NO: 671160 - RNA, 19 nt, Homo sapiens
  misc_RNA (1)...(19): siRNA sense strand
gaagaaagcagaaguagag

SEQ ID NO: 671161 - RNA, 19 nt, Homo sapiens
  misc_RNA (1)...(19): siRNA sense strand
gaacagaaaggcggagaua

SEQ ID NO: 671162 - RNA, 19 nt, Homo sapiens
  misc_RNA (1)...(19): siRNA sense strand
cguauuggcuggucacuaa

SEQ ID NO: 671163 - RNA, 19 nt, Homo sapiens
  misc_RNA (1)...(19): siRNA sense strand
gaugaagacuauaagcaaa

SEQ ID NO: 671164 - RNA, 19 nt, Homo sapiens
  misc_RNA (1)...(19): siRNA sense strand
gcaaagaacacagaagaaa

SEQ ID NO: 671165 - RNA, 19 nt, Homo sapiens
  misc_RNA (1)...(19): siRNA sense strand
ugaaagugaugaaguagaa

SEQ ID NO: 671166 - RNA, 19 nt, Homo sapiens
  misc_RNA (1)...(19): siRNA sense strand
gcgaaaagcuguuguaguu

SEQ ID NO: 671167 - RNA, 19 nt, Homo sapiens
  misc_RNA (1)...(19): siRNA sense strand
gaaauaaccuauguugaac

SEQ ID NO: 671168 - RNA, 19 nt, Homo sapiens
  misc_RNA (1)...(19): siRNA sense strand
gaaagauugugaaguugug

SEQ ID NO: 671169 - RNA, 19 nt, Homo sapiens
  misc_RNA (1)...(19): siRNA sense strand
gaacacuggcucaaagaaa

SEQ ID NO: 671170 - RNA, 19 nt, Homo sapiens
  misc_RNA (1)...(19): siRNA sense strand
ugagugcuuugaugaaaua

SEQ ID NO: 671171 - RNA, 19 nt, Homo sapiens
  misc_RNA (1)...(19): siRNA sense strand
ccaguaaggcauuuauaua

SEQ ID NO: 671172 - RNA, 19 nt, Homo sapiens
  misc_RNA (1)...(19): siRNA sense strand
gaaaagcuguuguaguuug

SEQ ID NO: 671173 - RNA, 19 nt, Homo sapiens
  misc_RNA (1)...(19): siRNA sense strand
gaucauggccguggauauu

SEQ ID NO: 671174 - RNA, 19 nt, Homo sapiens
  misc_RNA (1)...(19): siRNA sense strand
gaagagaacaaguauagca

SEQ ID NO: 671175 - RNA, 19 nt, Homo sapiens
  misc_RNA (1)...(19): siRNA sense strand
aaacaaucguggcuacaaa

SEQ ID NO: 671176 - RNA, 19 nt, Homo sapiens
  misc_RNA (1)...(19): siRNA sense strand
gacugaagauuauggagaa

SEQ ID NO: 671177 - RNA, 19 nt, Homo sapiens
  misc_RNA (1)...(19): siRNA sense strand
gaugaaauaaccuauguug

SEQ ID NO: 671178 - RNA, 19 nt, Homo sapiens
  misc_RNA (1)...(19): siRNA sense strand
ggaaauuuauugagauugc

SEQ ID NO: 671179 - RNA, 19 nt, Homo sapiens
  misc_RNA (1)...(19): siRNA sense strand
ugaaagaggagcucaagaa

SEQ ID NO: 671180 - RNA, 19 nt, Homo sapiens
  misc_RNA (1)...(19): siRNA sense strand
agagguagcugagugcuuu

SEQ ID NO: 671181 - RNA, 19 nt, Homo sapiens
  misc_RNA (1)...(19): siRNA sense strand
ugguuugucuugauacuua

SEQ ID NO: 671182 - RNA, 19 nt, Homo sapiens
  misc_RNA (1)...(19): siRNA sense strand
gcugagugcuuugaugaaa

SEQ ID NO: 671183 - RNA, 19 nt, Homo sapiens
  misc_RNA (1)...(19): siRNA sense strand
cgaaagaagcgaaauuuua

SEQ ID NO: 671184 - RNA, 19 nt, Homo sapiens
  misc_RNA (1)...(19): siRNA sense strand
gaaguugugaugaugauug

SEQ ID NO: 671185 - RNA, 19 nt, Homo sapiens
  misc_RNA (1)...(19): siRNA sense strand
gaaaauccagggaaauaua

SEQ ID NO: 671186 - RNA, 19 nt, Homo sapiens
  misc_RNA (1)...(19): siRNA sense strand
aaucguggcggauauaaua

SEQ ID NO: 671187 - RNA, 19 nt, Homo sapiens
  misc_RNA (1)...(19): siRNA sense strand
ccagggaaauauaacauuc

SEQ ID NO: 671188 - RNA, 19 nt, Homo sapiens
  misc_RNA (1)...(19): siRNA sense strand
gaugaacacuucgaugaca

SEQ ID NO: 671189 - RNA, 19 nt, Homo sapiens
  misc_RNA (1)...(19): siRNA sense strand
caauaugcgugguggaaau

SEQ ID NO: 671190 - RNA, 19 nt, Homo sapiens
  misc_RNA (1)...(19): siRNA sense strand
ggagaaaaguuugaugaaa

SEQ ID NO: 671191 - RNA, 19 nt, Homo sapiens
  misc_RNA (1)...(19): siRNA sense strand
gaauguuacuuggugaaga

SEQ ID NO: 671192 - RNA, 19 nt, Homo sapiens
  misc_RNA (1)...(19): siRNA sense strand
acagaaaggcggagauaaa

SEQ ID NO: 671193 - RNA, 19 nt, Homo sapiens
  misc_RNA (1)...(19): siRNA sense strand
gaaacaaucguggcuacaa

SEQ ID NO: 671194 - RNA, 19 nt, Homo sapiens
  misc_RNA (1)...(19): siRNA sense strand
ggagcaauauaaggaagaa

SEQ ID NO: 671195 - RNA, 19 nt, Homo sapiens
  misc_RNA (1)...(19): siRNA sense strand
agaugaagguuacagagaa

SEQ ID NO: 671196 - RNA, 19 nt, Homo sapiens
  misc_RNA (1)...(19): siRNA sense strand
gaaagaggagcucaagaag

SEQ ID NO: 671197 - RNA, 19 nt, Homo sapiens
  misc_RNA (1)...(19): siRNA sense strand
gcaagaaccaguuuaacag

SEQ ID NO: 671198 - RNA, 19 nt, Homo sapiens
  misc_RNA (1)...(19): siRNA sense strand
ucagccaccuguugaagaa

SEQ ID NO: 671199 - RNA, 19 nt, Homo sapiens
  misc_RNA (1)...(19): siRNA sense strand
gaacuacaaccagaacuuc

SEQ ID NO: 671200 - RNA, 19 nt, Homo sapiens
  misc_RNA (1)...(19): siRNA sense strand
uaacauucuuggcacaaau

SEQ ID NO: 671201 - RNA, 19 nt, Homo sapiens
  misc_RNA (1)...(19): siRNA sense strand
ugacauacaugaaguucgu

SEQ ID NO: 671202 - RNA, 19 nt, Homo sapiens
  misc_RNA (1)...(19): siRNA sense strand
acagugguuugucuugaua

SEQ ID NO: 671203 - RNA, 19 nt, Homo sapiens
  misc_RNA (1)...(19): siRNA sense strand
gagaugaagguuacagaga

SEQ ID NO: 671204 - RNA, 19 nt, Homo sapiens
  misc_RNA (1)...(19): siRNA sense strand
gaaguagaacucucguaug

SEQ ID NO: 671205 - RNA, 19 nt, Homo sapiens
  misc_RNA (1)...(19): siRNA sense strand
cagagaagaucccaguaag

SEQ ID NO: 671206 - RNA, 19 nt, Homo sapiens
  misc_RNA (1)...(19): siRNA sense strand
acugugagacugaagauua

SEQ ID NO: 671207 - RNA, 19 nt, Homo sapiens
  misc_RNA (1)...(19): siRNA sense strand
aacuacaaguggaauguua

SEQ ID NO: 671208 - RNA, 19 nt, Homo sapiens
  misc_RNA (1)...(19): siRNA sense strand
ucaccaaggauauuauuga

SEQ ID NO: 671209 - RNA, 19 nt, Homo sapiens
  misc_RNA (1)...(19): siRNA sense strand
cuaccuggguuacuaaaca

SEQ ID NO: 671210 - RNA, 19 nt, Homo sapiens
  misc_RNA (1)...(19): siRNA sense strand
ggaacuacaaccagaacuu

SEQ ID NO: 671211 - RNA, 19 nt, Homo sapiens
  misc_RNA (1)...(19): siRNA sense strand
gaaggugucggagcugaaa

SEQ ID NO: 671212 - RNA, 19 nt, Homo sapiens
  misc_RNA (1)...(19): siRNA sense strand
gaugaagguuacagagaag

SEQ ID NO: 671213 - RNA, 19 nt, Homo sapiens
  misc_RNA (1)...(19): siRNA sense strand
caagaaccaguuuaacaga

SEQ ID NO: 671214 - RNA, 19 nt, Homo sapiens
  misc_RNA (1)...(19): siRNA sense strand
ggcaagaaccaguuuaaca

SEQ ID NO: 671215 - RNA, 19 nt, Homo sapiens
  misc_RNA (1)...(19): siRNA sense strand
acagaacacuggcucaaag

SEQ ID NO: 671216 - RNA, 19 nt, Homo sapiens
  misc_RNA (1)...(19): siRNA sense strand
ugagauugcugcccgaaag

SEQ ID NO: 671217 - RNA, 19 nt, Homo sapiens
  misc_RNA (1)...(19): siRNA sense strand
aaagagggguguuaaaaga

SEQ ID NO: 671218 - RNA, 19 nt, Homo sapiens
  misc_RNA (1)...(19): siRNA sense strand
gaacucucguaugcuaaga

SEQ ID NO: 671219 - RNA, 19 nt, Homo sapiens
  misc_RNA (1)...(19): siRNA sense strand
ugaaguagaacucucguau

SEQ ID NO: 671220 - RNA, 19 nt, Homo sapiens
  misc_RNA (1)...(19): siRNA sense strand
ucuuauggguauucucuaa

SEQ ID NO: 671221 - RNA, 19 nt, Homo sapiens
  misc_RNA (1)...(19): siRNA sense strand
gauauugacauacaugaag

SEQ ID NO: 671222 - RNA, 19 nt, Homo sapiens
  misc_RNA (1)...(19): siRNA sense strand
acagagaagaucccaguaa

SEQ ID NO: 671223 - RNA, 19 nt, Homo sapiens
  misc_RNA (1)...(19): siRNA sense strand
guagcugagugcuuugaug

SEQ ID NO: 671224 - RNA, 19 nt, Homo sapiens
  misc_RNA (1)...(19): siRNA sense strand
guuacuuggugaagaagaa

SEQ ID NO: 671225 - RNA, 19 nt, Homo sapiens
  misc_RNA (1)...(19): siRNA sense strand
aauguuacuuggugaagaa

SEQ ID NO: 671226 - RNA, 19 nt, Homo sapiens
  misc_RNA (1)...(19): siRNA sense strand
ugaagacuauaagcaaaga

SEQ ID NO: 671227 - RNA, 19 nt, Homo sapiens
  misc_RNA (1)...(19): siRNA sense strand
caaagaacacagaagaaag

SEQ ID NO: 671228 - RNA, 19 nt, Homo sapiens
  misc_RNA (1)...(19): siRNA sense strand
uugaguacauugaagagaa

SEQ ID NO: 671229 - RNA, 19 nt, Homo sapiens
  misc_RNA (1)...(19): siRNA sense strand
ggaaucguggcggauauaa

SEQ ID NO: 671230 - RNA, 19 nt, Homo sapiens
  misc_RNA (1)...(19): siRNA sense strand
aagaugaacacuucgauga

SEQ ID NO: 671231 - RNA, 19 nt, Homo sapiens
  misc_RNA (1)...(19): siRNA sense strand
cuuagaggaucgaguuaga

SEQ ID NO: 671232 - RNA, 19 nt, Homo sapiens
  misc_RNA (1)...(19): siRNA sense strand
aagcaaagaacacagaaga

SEQ ID NO: 671233 - RNA, 19 nt, Homo sapiens
  misc_RNA (1)...(19): siRNA sense strand
cuugggaaauuuauugaga

SEQ ID NO: 671234 - RNA, 19 nt, Homo sapiens
  misc_RNA (1)...(19): siRNA sense strand
cugaagagaagaaagauug

SEQ ID NO: 671235 - RNA, 19 nt, Homo sapiens
  misc_RNA (1)...(19): siRNA sense strand
acacagugguuugucuuga

SEQ ID NO: 671236 - RNA, 19 nt, Homo sapiens
  misc_RNA (1)...(19): siRNA sense strand
acagaagaaagcagaagua

SEQ ID NO: 671237 - RNA, 19 nt, Homo sapiens
  misc_RNA (1)...(19): siRNA sense strand
gagaagaaagauugugaag

SEQ ID NO: 671238 - RNA, 19 nt, Homo sapiens
  misc_RNA (1)...(19): siRNA sense strand
aaguagaacucucguaugc

SEQ ID NO: 671239 - RNA, 19 nt, Homo sapiens
  misc_RNA (1)...(19): siRNA sense strand
caacagagggaacuacaac

SEQ ID NO: 671240 - RNA, 19 nt, Homo sapiens
  misc_RNA (1)...(19): siRNA sense strand
cagaggugguggccauaga

SEQ ID NO: 671241 - RNA, 19 nt, Homo sapiens
  misc_RNA (1)...(19): siRNA sense strand
gaacaugcgguccucaaaa

SEQ ID NO: 671242 - RNA, 19 nt, Homo sapiens
  misc_RNA (1)...(19): siRNA sense strand
gcuggucacuaacuacaag

SEQ ID NO: 671243 - RNA, 19 nt, Homo sapiens
  misc_RNA (1)...(19): siRNA sense strand
gaagcgaaauuuuauucug

SEQ ID NO: 671244 - RNA, 19 nt, Homo sapiens
  misc_RNA (1)...(19): siRNA sense strand
agaagcaaauggcagauac

SEQ ID NO: 671245 - RNA, 19 nt, Homo sapiens
  misc_RNA (1)...(19): siRNA sense strand
uacuaaacaugcagcagaa

SEQ ID NO: 671246 - RNA, 19 nt, Homo sapiens
  misc_RNA (1)...(19): siRNA sense strand
gaagagaagaaagauugug

SEQ ID NO: 671247 - RNA, 19 nt, Homo sapiens
  misc_RNA (1)...(19): siRNA sense strand
guuccucgccuguuaaugu

SEQ ID NO: 671248 - RNA, 19 nt, Homo sapiens
  misc_RNA (1)...(19): siRNA sense strand
cuucuucccuuacaaugga

SEQ ID NO: 671249 - RNA, 19 nt, Homo sapiens
  misc_RNA (1)...(19): siRNA sense strand
ggaaucggcuauccauacc

SEQ ID NO: 671250 - RNA, 19 nt, Homo sapiens
  misc_RNA (1)...(19): siRNA sense strand
ccagugucuugggaaauuu

SEQ ID NO: 671251 - RNA, 19 nt, Homo sapiens
  misc_RNA (1)...(19): siRNA sense strand
aaacuaccuggguuacuaa

SEQ ID NO: 671252 - RNA, 19 nt, Homo sapiens
  misc_RNA (1)...(19): siRNA sense strand
gugauuacauguuuugcua

SEQ ID NO: 671253 - RNA, 19 nt, Homo sapiens
  misc_RNA (1)...(19): siRNA sense strand
aaaacuaccuggguuacua

SEQ ID NO: 671254 - RNA, 19 nt, Homo sapiens
  misc_RNA (1)...(19): siRNA sense strand
ggaagaggaggaggaagga

SEQ ID NO: 671255 - RNA, 19 nt, Homo sapiens
  misc_RNA (1)...(19): siRNA sense strand
gaaagaccuaccagaacau

SEQ ID NO: 671256 - RNA, 19 nt, Homo sapiens
  misc_RNA (1)...(19): siRNA sense strand
cccaaaagaugaagacuau

SEQ ID NO: 671257 - RNA, 19 nt, Homo sapiens
  misc_RNA (1)...(19): siRNA sense strand
gaagaaagauugugaaguu

SEQ ID NO: 671258 - RNA, 19 nt, Homo sapiens
  misc_RNA (1)...(19): siRNA sense strand
ggaaagaccuaccagaaca

SEQ ID NO: 671259 - RNA, 19 nt, Homo sapiens
  misc_RNA (1)...(19): siRNA sense strand
guagaacucucguaugcua

SEQ ID NO: 671260 - RNA, 19 nt, Homo sapiens
  misc_RNA (1)...(19): siRNA sense strand
gaagaaagcagaaguagag

SEQ ID NO: 671261 - RNA, 19 nt, Homo sapiens
  misc_RNA (1)...(19): siRNA sense strand
gaacagaaaggcggagaua

SEQ ID NO: 671262 - RNA, 19 nt, Homo sapiens
  misc_RNA (1)...(19): siRNA sense strand
cguauuggcuggucacuaa

SEQ ID NO: 671263 - RNA, 19 nt, Homo sapiens
  misc_RNA (1)...(19): siRNA sense strand
gaugaagacuauaagcaaa

SEQ ID NO: 671264 - RNA, 19 nt, Homo sapiens
  misc_RNA (1)...(19): siRNA sense strand
gcaaagaacacagaagaaa

SEQ ID NO: 671265 - RNA, 19 nt, Homo sapiens
  misc_RNA (1)...(19): siRNA sense strand
ugaaagugaugaaguagaa

SEQ ID NO: 671266 - RNA, 19 nt, Homo sapiens
  misc_RNA (1)...(19): siRNA sense strand
gcgaaaagcuguuguaguu

SEQ ID NO: 671267 - RNA, 19 nt, Homo sapiens
  misc_RNA (1)...(19): siRNA sense strand
gaaauaaccuauguugaac

SEQ ID NO: 671268 - RNA, 19 nt, Homo sapiens
  misc_RNA (1)...(19): siRNA sense strand
gaaagauugugaaguugug

SEQ ID NO: 671269 - RNA, 19 nt, Homo sapiens
  misc_RNA (1)...(19): siRNA sense strand
gaacacuggcucaaagaaa

SEQ ID NO: 671270 - RNA, 19 nt, Homo sapiens
  misc_RNA (1)...(19): siRNA sense strand
ugagugcuuugaugaaaua

SEQ ID NO: 671271 - RNA, 19 nt, Homo sapiens
  misc_RNA (1)...(19): siRNA sense strand
ccaguaaggcauuuauaua

SEQ ID NO: 671272 - RNA, 19 nt, Homo sapiens
  misc_RNA (1)...(19): siRNA sense strand
gaaaagcuguuguaguuug

SEQ ID NO: 671273 - RNA, 19 nt, Homo sapiens
  misc_RNA (1)...(19): siRNA sense strand
gaucauggccguggauauu

SEQ ID NO: 671274 - RNA, 19 nt, Homo sapiens
  misc_RNA (1)...(19): siRNA sense strand
gaagagaacaaguauagca

SEQ ID NO: 671275 - RNA, 19 nt, Homo sapiens
  misc_RNA (1)...(19): siRNA sense strand
aaacaaucguggcuacaaa

SEQ ID NO: 671276 - RNA, 19 nt, Homo sapiens
  misc_RNA (1)...(19): siRNA sense strand
gacugaagauuauggagaa

SEQ ID NO: 671277 - RNA, 19 nt, Homo sapiens
  misc_RNA (1)...(19): siRNA sense strand
gaugaaauaaccuauguug

SEQ ID NO: 671278 - RNA, 19 nt, Homo sapiens
  misc_RNA (1)...(19): siRNA sense strand
ggaaauuuauugagauugc

SEQ ID NO: 671279 - RNA, 19 nt, Homo sapiens
  misc_RNA (1)...(19): siRNA sense strand
ugaaagaggagcucaagaa

SEQ ID NO: 671280 - RNA, 19 nt, Homo sapiens
  misc_RNA (1)...(19): siRNA sense strand
agagguagcugagugcuuu

SEQ ID NO: 671281 - RNA, 19 nt, Homo sapiens
  misc_RNA (1)...(19): siRNA sense strand
ugguuugucuugauacuua

SEQ ID NO: 671282 - RNA, 19 nt, Homo sapiens
  misc_RNA (1)...(19): siRNA sense strand
gcugagugcuuugaugaaa

SEQ ID NO: 671283 - RNA, 19 nt, Homo sapiens
  misc_RNA (1)...(19): siRNA sense strand
cgaaagaagcgaaauuuua

SEQ ID NO: 671284 - RNA, 19 nt, Homo sapiens
  misc_RNA (1)...(19): siRNA sense strand
gaaguugugaugaugauug

SEQ ID NO: 671285 - RNA, 19 nt, Homo sapiens
  misc_RNA (1)...(19): siRNA sense strand
gaaaauccagggaaauaua

SEQ ID NO: 671286 - RNA, 19 nt, Homo sapiens
  misc_RNA (1)...(19): siRNA sense strand
aaucguggcggauauaaua

SEQ ID NO: 671287 - RNA, 19 nt, Homo sapiens
  misc_RNA (1)...(19): siRNA sense strand
ccagggaaauauaacauuc

SEQ ID NO: 671288 - RNA, 19 nt, Homo sapiens
  misc_RNA (1)...(19): siRNA sense strand
gaugaacacuucgaugaca

SEQ ID NO: 671289 - RNA, 19 nt, Homo sapiens
  misc_RNA (1)...(19): siRNA sense strand
caauaugcgugguggaaau

SEQ ID NO: 671290 - RNA, 19 nt, Homo sapiens
  misc_RNA (1)...(19): siRNA sense strand
ggagaaaaguuugaugaaa

SEQ ID NO: 671291 - RNA, 19 nt, Homo sapiens
  misc_RNA (1)...(19): siRNA sense strand
gaauguuacuuggugaaga

SEQ ID NO: 671292 - RNA, 19 nt, Homo sapiens
  misc_RNA (1)...(19): siRNA sense strand
acagaaaggcggagauaaa

SEQ ID NO: 671293 - RNA, 19 nt, Homo sapiens
  misc_RNA (1)...(19): siRNA sense strand
gaaacaaucguggcuacaa

SEQ ID NO: 671294 - RNA, 19 nt, Homo sapiens
  misc_RNA (1)...(19): siRNA sense strand
ggagcaauauaaggaagaa

SEQ ID NO: 671295 - RNA, 19 nt, Homo sapiens
  misc_RNA (1)...(19): siRNA sense strand
agaugaagguuacagagaa

SEQ ID NO: 671296 - RNA, 19 nt, Homo sapiens
  misc_RNA (1)...(19): siRNA sense strand
gaaagaggagcucaagaag

SEQ ID NO: 671297 - RNA, 19 nt, Homo sapiens
  misc_RNA (1)...(19): siRNA sense strand
gcaagaaccaguuuaacag

SEQ ID NO: 671298 - RNA, 19 nt, Homo sapiens
  misc_RNA (1)...(19): siRNA sense strand
ucagccaccuguugaagaa

SEQ ID NO: 671299 - RNA, 19 nt, Homo sapiens
  misc_RNA (1)...(19): siRNA sense strand
gaacuacaaccagaacuuc

SEQ ID NO: 671300 - RNA, 19 nt, Homo sapiens
  misc_RNA (1)...(19): siRNA sense strand
uaacauucuuggcacaaau

SEQ ID NO: 671301 - RNA, 19 nt, Homo sapiens
  misc_RNA (1)...(19): siRNA sense strand
ugacauacaugaaguucgu

SEQ ID NO: 671302 - RNA, 19 nt, Homo sapiens
  misc_RNA (1)...(19): siRNA sense strand
acagugguuugucuugaua

SEQ ID NO: 671303 - RNA, 19 nt, Homo sapiens
  misc_RNA (1)...(19): siRNA sense strand
gagaugaagguuacagaga

SEQ ID NO: 671304 - RNA, 19 nt, Homo sapiens
  misc_RNA (1)...(19): siRNA sense strand
gaaguagaacucucguaug

SEQ ID NO: 671305 - RNA, 19 nt, Homo sapiens
  misc_RNA (1)...(19): siRNA sense strand
cagagaagaucccaguaag

SEQ ID NO: 671306 - RNA, 19 nt, Homo sapiens
  misc_RNA (1)...(19): siRNA sense strand
acugugagacugaagauua

SEQ ID NO: 671307 - RNA, 19 nt, Homo sapiens
  misc_RNA (1)...(19): siRNA sense strand
aacuacaaguggaauguua

SEQ ID NO: 671308 - RNA, 19 nt, Homo sapiens
  misc_RNA (1)...(19): siRNA sense strand
ucaccaaggauauuauuga

SEQ ID NO: 671309 - RNA, 19 nt, Homo sapiens
  misc_RNA (1)...(19): siRNA sense strand
cuaccuggguuacuaaaca

SEQ ID NO: 671310 - RNA, 19 nt, Homo sapiens
  misc_RNA (1)...(19): siRNA sense strand
ggaacuacaaccagaacuu

SEQ ID NO: 671311 - RNA, 19 nt, Homo sapiens
  misc_RNA (1)...(19): siRNA sense strand
gaaggugucggagcugaaa

SEQ ID NO: 671312 - RNA, 19 nt, Homo sapiens
  misc_RNA (1)...(19): siRNA sense strand
gaugaagguuacagagaag

SEQ ID NO: 671313 - RNA, 19 nt, Homo sapiens
  misc_RNA (1)...(19): siRNA sense strand
caagaaccaguuuaacaga

SEQ ID NO: 671314 - RNA, 19 nt, Homo sapiens
  misc_RNA (1)...(19): siRNA sense strand
ggcaagaaccaguuuaaca

SEQ ID NO: 671315 - RNA, 19 nt, Homo sapiens
  misc_RNA (1)...(19): siRNA sense strand
acagaacacuggcucaaag

SEQ ID NO: 671316 - RNA, 19 nt, Homo sapiens
  misc_RNA (1)...(19): siRNA sense strand
ugagauugcugcccgaaag

SEQ ID NO: 671317 - RNA, 19 nt, Homo sapiens
  misc_RNA (1)...(19): siRNA sense strand
aaagagggguguuaaaaga

SEQ ID NO: 671318 - RNA, 19 nt, Homo sapiens
  misc_RNA (1)...(19): siRNA sense strand
gaacucucguaugcuaaga

SEQ ID NO: 671319 - RNA, 19 nt, Homo sapiens
  misc_RNA (1)...(19): siRNA sense strand
ugaaguagaacucucguau

SEQ ID NO: 671320 - RNA, 19 nt, Homo sapiens
  misc_RNA (1)...(19): siRNA sense strand
ucuuauggguauucucuaa

SEQ ID NO: 671321 - RNA, 19 nt, Homo sapiens
  misc_RNA (1)...(19): siRNA sense strand
gauauugacauacaugaag

SEQ ID NO: 671322 - RNA, 19 nt, Homo sapiens
  misc_RNA (1)...(19): siRNA sense strand
acagagaagaucccaguaa

SEQ ID NO: 671323 - RNA, 19 nt, Homo sapiens
  misc_RNA (1)...(19): siRNA sense strand
guagcugagugcuuugaug

SEQ ID NO: 671324 - RNA, 19 nt, Homo sapiens
  misc_RNA (1)...(19): siRNA sense strand
guuacuuggugaagaagaa

SEQ ID NO: 671325 - RNA, 19 nt, Homo sapiens
  misc_RNA (1)...(19): siRNA sense strand
aauguuacuuggugaagaa

SEQ ID NO: 671326 - RNA, 19 nt, Homo sapiens
  misc_RNA (1)...(19): siRNA sense strand
ugaagacuauaagcaaaga

SEQ ID NO: 671327 - RNA, 19 nt, Homo sapiens
  misc_RNA (1)...(19): siRNA sense strand
caaagaacacagaagaaag

SEQ ID NO: 671328 - RNA, 19 nt, Homo sapiens
  misc_RNA (1)...(19): siRNA sense strand
uugaguacauugaagagaa

SEQ ID NO: 671329 - RNA, 19 nt, Homo sapiens
  misc_RNA (1)...(19): siRNA sense strand
ggaaucguggcggauauaa

SEQ ID NO: 671330 - RNA, 19 nt, Homo sapiens
  misc_RNA (1)...(19): siRNA sense strand
aagaugaacacuucgauga

SEQ ID NO: 671331 - RNA, 19 nt, Homo sapiens
  misc_RNA (1)...(19): siRNA sense strand
cuuagaggaucgaguuaga

SEQ ID NO: 671332 - RNA, 19 nt, Homo sapiens
  misc_RNA (1)...(19): siRNA sense strand
aagcaaagaacacagaaga

SEQ ID NO: 671333 - RNA, 19 nt, Homo sapiens
  misc_RNA (1)...(19): siRNA sense strand
cuugggaaauuuauugaga

SEQ ID NO: 671334 - RNA, 19 nt, Homo sapiens
  misc_RNA (1)...(19): siRNA sense strand
cugaagagaagaaagauug

SEQ ID NO: 671335 - RNA, 19 nt, Homo sapiens
  misc_RNA (1)...(19): siRNA sense strand
acacagugguuugucuuga

SEQ ID NO: 671336 - RNA, 19 nt, Homo sapiens
  misc_RNA (1)...(19): siRNA sense strand
acagaagaaagcagaagua

SEQ ID NO: 671337 - RNA, 19 nt, Homo sapiens
  misc_RNA (1)...(19): siRNA sense strand
gagaagaaagauugugaag

SEQ ID NO: 671338 - RNA, 19 nt, Homo sapiens
  misc_RNA (1)...(19): siRNA sense strand
aaguagaacucucguaugc

SEQ ID NO: 671339 - RNA, 19 nt, Homo sapiens
  misc_RNA (1)...(19): siRNA sense strand
caacagagggaacuacaac

SEQ ID NO: 671340 - RNA, 19 nt, Homo sapiens
  misc_RNA (1)...(19): siRNA sense strand
cagaggugguggccauaga

SEQ ID NO: 671341 - RNA, 19 nt, Homo sapiens
  misc_RNA (1)...(19): siRNA sense strand
gaacaugcgguccucaaaa

SEQ ID NO: 671342 - RNA, 19 nt, Homo sapiens
  misc_RNA (1)...(19): siRNA sense strand
gcuggucacuaacuacaag

SEQ ID NO: 671343 - RNA, 19 nt, Homo sapiens
  misc_RNA (1)...(19): siRNA sense strand
gaagcgaaauuuuauucug

SEQ ID NO: 671344 - RNA, 19 nt, Homo sapiens
  misc_RNA (1)...(19): siRNA sense strand
agaagcaaauggcagauac

SEQ ID NO: 671345 - RNA, 19 nt, Homo sapiens
  misc_RNA (1)...(19): siRNA sense strand
uacuaaacaugcagcagaa

SEQ ID NO: 671346 - RNA, 19 nt, Homo sapiens
  misc_RNA (1)...(19): siRNA sense strand
gaagagaagaaagauugug

SEQ ID NO: 671347 - RNA, 19 nt, Homo sapiens
  misc_RNA (1)...(19): siRNA sense strand
guuccucgccuguuaaugu

SEQ ID NO: 671348 - RNA, 19 nt, Homo sapiens
  misc_RNA (1)...(19): siRNA sense strand
cuucuucccuuacaaugga

SEQ ID NO: 671349 - RNA, 19 nt, Homo sapiens
  misc_RNA (1)...(19): siRNA sense strand
ggaaucggcuauccauacc

SEQ ID NO: 671350 - RNA, 19 nt, Homo sapiens
  misc_RNA (1)...(19): siRNA sense strand
ccagugucuugggaaauuu

SEQ ID NO: 671351 - RNA, 19 nt, Homo sapiens
  misc_RNA (1)...(19): siRNA sense strand
aaacuaccuggguuacuaa

SEQ ID NO: 671352 - RNA, 19 nt, Homo sapiens
  misc_RNA (1)...(19): siRNA sense strand
gugauuacauguuuugcua

SEQ ID NO: 671353 - RNA, 19 nt, Homo sapiens
  misc_RNA (1)...(19): siRNA sense strand
aaaacuaccuggguuacua

SEQ ID NO: 671354 - RNA, 19 nt, Homo sapiens
  misc_RNA (1)...(19): siRNA sense strand
ggaagaggaggaggaagga

SEQ ID NO: 671355 - RNA, 19 nt, Homo sapiens
  misc_RNA (1)...(19): siRNA sense strand
gaaagaccuaccagaacau

SEQ ID NO: 671356 - RNA, 19 nt, Homo sapiens
  misc_RNA (1)...(19): siRNA sense strand
cccaaaagaugaagacuau

SEQ ID NO: 671357 - RNA, 19 nt, Homo sapiens
  misc_RNA (1)...(19): siRNA sense strand
gaaagaagcucaacauaaa

SEQ ID NO: 671358 - RNA, 19 nt, Homo sapiens
  misc_RNA (1)...(19): siRNA sense strand
caaagucucugacggagua

SEQ ID NO: 671359 - RNA, 19 nt, Homo sapiens
  misc_RNA (1)...(19): siRNA sense strand
caacagacaacaucaaaua

SEQ ID NO: 671360 - RNA, 19 nt, Homo sapiens
  misc_RNA (1)...(19): siRNA sense strand
ggaggugucugcaaggaua

SEQ ID NO: 671361 - RNA, 19 nt, Homo sapiens
  misc_RNA (1)...(19): siRNA sense strand
gaagaaggucgccaucaua

SEQ ID NO: 671362 - RNA, 19 nt, Homo sapiens
  misc_RNA (1)...(19): siRNA sense strand
gaccucagcugacagagaa

SEQ ID NO: 671363 - RNA, 19 nt, Homo sapiens
  misc_RNA (1)...(19): siRNA sense strand
aaaguugguucucuugaua

SEQ ID NO: 671364 - RNA, 19 nt, Homo sapiens
  misc_RNA (1)...(19): siRNA sense strand
gagaaagaagcucaacaua

SEQ ID NO: 671365 - RNA, 19 nt, Homo sapiens
  misc_RNA (1)...(19): siRNA sense strand
agaaagaagcucaacauaa

SEQ ID NO: 671366 - RNA, 19 nt, Homo sapiens
  misc_RNA (1)...(19): siRNA sense strand
gggcugagaucauuacaca

SEQ ID NO: 671367 - RNA, 19 nt, Homo sapiens
  misc_RNA (1)...(19): siRNA sense strand
gcucgaaucuccucagcuu

SEQ ID NO: 671368 - RNA, 19 nt, Homo sapiens
  misc_RNA (1)...(19): siRNA sense strand
ugaagaaugucaaauccaa

SEQ ID NO: 671369 - RNA, 19 nt, Homo sapiens
  misc_RNA (1)...(19): siRNA sense strand
gaaaggugaacaagagaaa

SEQ ID NO: 671370 - RNA, 19 nt, Homo sapiens
  misc_RNA (1)...(19): siRNA sense strand
gaagagugguaccucaaca

SEQ ID NO: 671371 - RNA, 19 nt, Homo sapiens
  misc_RNA (1)...(19): siRNA sense strand
caccugagauuaaggauca

SEQ ID NO: 671372 - RNA, 19 nt, Homo sapiens
  misc_RNA (1)...(19): siRNA sense strand
aaauguggcucucugaaga

SEQ ID NO: 671373 - RNA, 19 nt, Homo sapiens
  misc_RNA (1)...(19): siRNA sense strand
gcaaggauaguucaaguag

SEQ ID NO: 671374 - RNA, 19 nt, Homo sapiens
  misc_RNA (1)...(19): siRNA sense strand
gcaucaaccugcucgaauc

SEQ ID NO: 671375 - RNA, 19 nt, Homo sapiens
  misc_RNA (1)...(19): siRNA sense strand
cccaagaccuuccuccauu

SEQ ID NO: 671376 - RNA, 19 nt, Homo sapiens
  misc_RNA (1)...(19): siRNA sense strand
ugccagaccugaagaaugu

SEQ ID NO: 671377 - RNA, 19 nt, Homo sapiens
  misc_RNA (1)...(19): siRNA sense strand
uaaaguugguucucuugau

SEQ ID NO: 671378 - RNA, 19 nt, Homo sapiens
  misc_RNA (1)...(19): siRNA sense strand
ucacauccaccugagauua

SEQ ID NO: 671379 - RNA, 19 nt, Homo sapiens
  misc_RNA (1)...(19): siRNA sense strand
ggaugaagagggugccuuu

SEQ ID NO: 671380 - RNA, 19 nt, Homo sapiens
  misc_RNA (1)...(19): siRNA sense strand
ugaagagggugccuuugga

SEQ ID NO: 671381 - RNA, 19 nt, Homo sapiens
  misc_RNA (1)...(19): siRNA sense strand
caacaguucuaucucuucu

SEQ ID NO: 671382 - RNA, 19 nt, Homo sapiens
  misc_RNA (1)...(19): siRNA sense strand
gaagaaugucaaauccaaa

SEQ ID NO: 671383 - RNA, 19 nt, Homo sapiens
  misc_RNA (1)...(19): siRNA sense strand
ccugaaaggugaacaagag

SEQ ID NO: 671384 - RNA, 19 nt, Homo sapiens
  misc_RNA (1)...(19): siRNA sense strand
cuccucagcuugccacuuu

SEQ ID NO: 671385 - RNA, 19 nt, Homo sapiens
  misc_RNA (1)...(19): siRNA sense strand
caaaggacaaagucucuga

SEQ ID NO: 671386 - RNA, 19 nt, Homo sapiens
  misc_RNA (1)...(19): siRNA sense strand
uuuagcagcugaagaaaca

SEQ ID NO: 671387 - RNA, 19 nt, Homo sapiens
  misc_RNA (1)...(19): siRNA sense strand
agaagaaggucgccaucau

SEQ ID NO: 671388 - RNA, 19 nt, Homo sapiens
  misc_RNA (1)...(19): siRNA sense strand
ccaagaccuuccuccauuc

SEQ ID NO: 671389 - RNA, 19 nt, Homo sapiens
  misc_RNA (1)...(19): siRNA sense strand
ggucacagggcaccuauuc

SEQ ID NO: 671390 - RNA, 19 nt, Homo sapiens
  misc_RNA (1)...(19): siRNA sense strand
ucaaauaccagccuaaagg

SEQ ID NO: 671391 - RNA, 19 nt, Homo sapiens
  misc_RNA (1)...(19): siRNA sense strand
ucacagggcaccuauucaa

SEQ ID NO: 671392 - RNA, 19 nt, Homo sapiens
  misc_RNA (1)...(19): siRNA sense strand
agaggcaucugcacacuca

SEQ ID NO: 671393 - RNA, 19 nt, Homo sapiens
  misc_RNA (1)...(19): siRNA sense strand
gaaggucgccaucauacgu

SEQ ID NO: 671394 - RNA, 19 nt, Homo sapiens
  misc_RNA (1)...(19): siRNA sense strand
aaggauaguucaaguaguc

SEQ ID NO: 671395 - RNA, 19 nt, Homo sapiens
  misc_RNA (1)...(19): siRNA sense strand
gaggaggugucugcaagga

SEQ ID NO: 671396 - RNA, 19 nt, Homo sapiens
  misc_RNA (1)...(19): siRNA sense strand
acaguucuaucucuucuuc

SEQ ID NO: 671397 - RNA, 19 nt, Homo sapiens
  misc_RNA (1)...(19): siRNA sense strand
aaauagaccuaagccaugu

SEQ ID NO: 671398 - RNA, 19 nt, Homo sapiens
  misc_RNA (1)...(19): siRNA sense strand
gaucaacagacaacaucaa

SEQ ID NO: 671399 - RNA, 19 nt, Homo sapiens
  misc_RNA (1)...(19): siRNA sense strand
gcugagaucauuacacagu

SEQ ID NO: 671400 - RNA, 19 nt, Homo sapiens
  misc_RNA (1)...(19): siRNA sense strand
ggagacagagaugagaauu

SEQ ID NO: 671401 - RNA, 19 nt, Homo sapiens
  misc_RNA (1)...(19): siRNA sense strand
ccaaagagaaugggaucaa

SEQ ID NO: 671402 - RNA, 19 nt, Homo sapiens
  misc_RNA (1)...(19): siRNA sense strand
caucaaauaccagccuaaa

SEQ ID NO: 671403 - RNA, 19 nt, Homo sapiens
  misc_RNA (1)...(19): siRNA sense strand
cagacaacaucaaauacca

SEQ ID NO: 671404 - RNA, 19 nt, Homo sapiens
  misc_RNA (1)...(19): siRNA sense strand
caaagagaaugggaucaac

SEQ ID NO: 671405 - RNA, 19 nt, Homo sapiens
  misc_RNA (1)...(19): siRNA sense strand
ucaaauaccaaagagaaug

SEQ ID NO: 671406 - RNA, 19 nt, Homo sapiens
  misc_RNA (1)...(19): siRNA sense strand
gcuaaaguugguucucuug

SEQ ID NO: 671407 - RNA, 19 nt, Homo sapiens
  misc_RNA (1)...(19): siRNA sense strand
gccuuuagcagcugaagaa

SEQ ID NO: 671408 - RNA, 19 nt, Homo sapiens
  misc_RNA (1)...(19): siRNA sense strand
ucagagagcaugcuaaagc

SEQ ID NO: 671409 - RNA, 19 nt, Homo sapiens
  misc_RNA (1)...(19): siRNA sense strand
cacauccaccugagauuaa

SEQ ID NO: 671410 - RNA, 19 nt, Homo sapiens
  misc_RNA (1)...(19): siRNA sense strand
gagaagaaggucgccauca

SEQ ID NO: 671411 - RNA, 19 nt, Homo sapiens
  misc_RNA (1)...(19): siRNA sense strand
ucaccugccucagaacaga

SEQ ID NO: 671412 - RNA, 19 nt, Homo sapiens
  misc_RNA (1)...(19): siRNA sense strand
cccaucaccugccucagaa

SEQ ID NO: 671413 - RNA, 19 nt, Homo sapiens
  misc_RNA (1)...(19): siRNA sense strand
ugaagaaacagcuaaucug

SEQ ID NO: 671414 - RNA, 19 nt, Homo sapiens
  misc_RNA (1)...(19): siRNA sense strand
caaggauaguucaaguagu

SEQ ID NO: 671415 - RNA, 19 nt, Homo sapiens
  misc_RNA (1)...(19): siRNA sense strand
ucucaacaguucuaucucu

SEQ ID NO: 671416 - RNA, 19 nt, Homo sapiens
  misc_RNA (1)...(19): siRNA sense strand
agacagagaugagaauucc

SEQ ID NO: 671417 - RNA, 19 nt, Homo sapiens
  misc_RNA (1)...(19): siRNA sense strand
ccucagcaccgcuaacaga

SEQ ID NO: 671418 - RNA, 19 nt, Homo sapiens
  misc_RNA (1)...(19): siRNA sense strand
gaacggaaagacgaagcaa

SEQ ID NO: 671419 - RNA, 19 nt, Homo sapiens
  misc_RNA (1)...(19): siRNA sense strand
caaauguggcucucugaag

SEQ ID NO: 671420 - RNA, 19 nt, Homo sapiens
  misc_RNA (1)...(19): siRNA sense strand
gagacagagaugagaauuc

SEQ ID NO: 671421 - RNA, 19 nt, Homo sapiens
  misc_RNA (1)...(19): siRNA sense strand
ggcuguagcaguccugaaa

SEQ ID NO: 671422 - RNA, 19 nt, Homo sapiens
  misc_RNA (1)...(19): siRNA sense strand
ccaaauguggcucucugaa

SEQ ID NO: 671423 - RNA, 19 nt, Homo sapiens
  misc_RNA (1)...(19): siRNA sense strand
ccgaagcgccaauggauuc

SEQ ID NO: 671424 - RNA, 19 nt, Homo sapiens
  misc_RNA (1)...(19): siRNA sense strand
aagaagcucaacauaaaga

SEQ ID NO: 671425 - RNA, 19 nt, Homo sapiens
  misc_RNA (1)...(19): siRNA sense strand
cuucagagagcaugcuaaa

SEQ ID NO: 671426 - RNA, 19 nt, Homo sapiens
  misc_RNA (1)...(19): siRNA sense strand
caaauaccaaagagaaugg

SEQ ID NO: 671427 - RNA, 19 nt, Homo sapiens
  misc_RNA (1)...(19): siRNA sense strand
ggugguaaugucaagauug

SEQ ID NO: 671428 - RNA, 19 nt, Homo sapiens
  misc_RNA (1)...(19): siRNA sense strand
guaaccaagagcccagaaa

SEQ ID NO: 671429 - RNA, 19 nt, Homo sapiens
  misc_RNA (1)...(19): siRNA sense strand
agagaaagaagcucaacau

SEQ ID NO: 671430 - RNA, 19 nt, Homo sapiens
  misc_RNA (1)...(19): siRNA sense strand
uaaacaggcaaaggacaaa

SEQ ID NO: 671431 - RNA, 19 nt, Homo sapiens
  misc_RNA (1)...(19): siRNA sense strand
ccacuuuggcugaggaugu

SEQ ID NO: 671432 - RNA, 19 nt, Homo sapiens
  misc_RNA (1)...(19): siRNA sense strand
gggaagagugguaccucaa

SEQ ID NO: 671433 - RNA, 19 nt, Homo sapiens
  misc_RNA (1)...(19): siRNA sense strand
cugcaaggauaguucaagu

SEQ ID NO: 671434 - RNA, 19 nt, Homo sapiens
  misc_RNA (1)...(19): siRNA sense strand
gauaaugcucaucauguac

SEQ ID NO: 671435 - RNA, 19 nt, Homo sapiens
  misc_RNA (1)...(19): siRNA sense strand
ccaucuuggugccgaguga

SEQ ID NO: 671436 - RNA, 19 nt, Homo sapiens
  misc_RNA (1)...(19): siRNA sense strand
ugaaaggugaacaagagaa

SEQ ID NO: 671437 - RNA, 19 nt, Homo sapiens
  misc_RNA (1)...(19): siRNA sense strand
acagggcaccuauucaaau

SEQ ID NO: 671438 - RNA, 19 nt, Homo sapiens
  misc_RNA (1)...(19): siRNA sense strand
uuaaacaggcaaaggacaa

SEQ ID NO: 671439 - RNA, 19 nt, Homo sapiens
  misc_RNA (1)...(19): siRNA sense strand
agaaaaggcccaagcuaaa

SEQ ID NO: 671440 - RNA, 19 nt, Homo sapiens
  misc_RNA (1)...(19): siRNA sense strand
ucacugcugcacucgcuaa

SEQ ID NO: 671441 - RNA, 19 nt, Homo sapiens
  misc_RNA (1)...(19): siRNA sense strand
cacagggcaccuauucaaa

SEQ ID NO: 671442 - RNA, 19 nt, Homo sapiens
  misc_RNA (1)...(19): siRNA sense strand
cgacgacucagcaaugucu

SEQ ID NO: 671443 - RNA, 19 nt, Homo sapiens
  misc_RNA (1)...(19): siRNA sense strand
gaggugguaaugucaagau

SEQ ID NO: 671444 - RNA, 19 nt, Homo sapiens
  misc_RNA (1)...(19): siRNA sense strand
guggcucucugaagaacau

SEQ ID NO: 671445 - RNA, 19 nt, Homo sapiens
  misc_RNA (1)...(19): siRNA sense strand
ggaagagugguaccucaac

SEQ ID NO: 671446 - RNA, 19 nt, Homo sapiens
  misc_RNA (1)...(19): siRNA sense strand
acagagaugagaauuccuu

SEQ ID NO: 671447 - RNA, 19 nt, Homo sapiens
  misc_RNA (1)...(19): siRNA sense strand
uauuuaaacaggcaaagga

SEQ ID NO: 671448 - RNA, 19 nt, Homo sapiens
  misc_RNA (1)...(19): siRNA sense strand
aagcuaaaguugguucucu

SEQ ID NO: 671449 - RNA, 19 nt, Homo sapiens
  misc_RNA (1)...(19): siRNA sense strand
gaagcaaaggcaccucacu

SEQ ID NO: 671450 - RNA, 19 nt, Homo sapiens
  misc_RNA (1)...(19): siRNA sense strand
aagaaaaggcccaagcuaa

SEQ ID NO: 671451 - RNA, 19 nt, Homo sapiens
  misc_RNA (1)...(19): siRNA sense strand
ccugaagaaugucaaaucc

SEQ ID NO: 671452 - RNA, 19 nt, Homo sapiens
  misc_RNA (1)...(19): siRNA sense strand
aaggugaacaagagaaaga

SEQ ID NO: 671453 - RNA, 19 nt, Homo sapiens
  misc_RNA (1)...(19): siRNA sense strand
gaccucagcaccgcuaaca

SEQ ID NO: 671454 - RNA, 19 nt, Homo sapiens
  misc_RNA (1)...(19): siRNA sense strand
cuaaaguugguucucuuga

SEQ ID NO: 671455 - RNA, 19 nt, Homo sapiens
  misc_RNA (1)...(19): siRNA sense strand
gaaaaggcccaagcuaaag

SEQ ID NO: 671456 - RNA, 19 nt, Homo sapiens
  misc_RNA (1)...(19): siRNA sense strand
ccuucucucucaacaguuc

SEQ ID NO: 671457 - RNA, 19 nt, Homo sapiens
  misc_RNA (1)...(19): siRNA sense strand
gaaagaagcucaacauaaa

SEQ ID NO: 671458 - RNA, 19 nt, Homo sapiens
  misc_RNA (1)...(19): siRNA sense strand
caaagucucugacggagua

SEQ ID NO: 671459 - RNA, 19 nt, Homo sapiens
  misc_RNA (1)...(19): siRNA sense strand
caacagacaacaucaaaua

SEQ ID NO: 671460 - RNA, 19 nt, Homo sapiens
  misc_RNA (1)...(19): siRNA sense strand
ggaggugucugcaaggaua

SEQ ID NO: 671461 - RNA, 19 nt, Homo sapiens
  misc_RNA (1)...(19): siRNA sense strand
gaagaaggucgccaucaua

SEQ ID NO: 671462 - RNA, 19 nt, Homo sapiens
  misc_RNA (1)...(19): siRNA sense strand
gaccucagcugacagagaa

SEQ ID NO: 671463 - RNA, 19 nt, Homo sapiens
  misc_RNA (1)...(19): siRNA sense strand
aaaguugguucucuugaua

SEQ ID NO: 671464 - RNA, 19 nt, Homo sapiens
  misc_RNA (1)...(19): siRNA sense strand
gagaaagaagcucaacaua

SEQ ID NO: 671465 - RNA, 19 nt, Homo sapiens
  misc_RNA (1)...(19): siRNA sense strand
agaaagaagcucaacauaa

SEQ ID NO: 671466 - RNA, 19 nt, Homo sapiens
  misc_RNA (1)...(19): siRNA sense strand
gggcugagaucauuacaca

SEQ ID NO: 671467 - RNA, 19 nt, Homo sapiens
  misc_RNA (1)...(19): siRNA sense strand
gcucgaaucuccucagcuu

SEQ ID NO: 671468 - RNA, 19 nt, Homo sapiens
  misc_RNA (1)...(19): siRNA sense strand
ugaagaaugucaaauccaa

SEQ ID NO: 671469 - RNA, 19 nt, Homo sapiens
  misc_RNA (1)...(19): siRNA sense strand
gaaaggugaacaagagaaa

SEQ ID NO: 671470 - RNA, 19 nt, Homo sapiens
  misc_RNA (1)...(19): siRNA sense strand
gaagagugguaccucaaca

SEQ ID NO: 671471 - RNA, 19 nt, Homo sapiens
  misc_RNA (1)...(19): siRNA sense strand
caccugagauuaaggauca

SEQ ID NO: 671472 - RNA, 19 nt, Homo sapiens
  misc_RNA (1)...(19): siRNA sense strand
aaauguggcucucugaaga

SEQ ID NO: 671473 - RNA, 19 nt, Homo sapiens
  misc_RNA (1)...(19): siRNA sense strand
gcaaggauaguucaaguag

SEQ ID NO: 671474 - RNA, 19 nt, Homo sapiens
  misc_RNA (1)...(19): siRNA sense strand
gcaucaaccugcucgaauc

SEQ ID NO: 671475 - RNA, 19 nt, Homo sapiens
  misc_RNA (1)...(19): siRNA sense strand
cccaagaccuuccuccauu

SEQ ID NO: 671476 - RNA, 19 nt, Homo sapiens
  misc_RNA (1)...(19): siRNA sense strand
ugccagaccugaagaaugu

SEQ ID NO: 671477 - RNA, 19 nt, Homo sapiens
  misc_RNA (1)...(19): siRNA sense strand
uaaaguugguucucuugau

SEQ ID NO: 671478 - RNA, 19 nt, Homo sapiens
  misc_RNA (1)...(19): siRNA sense strand
ucacauccaccugagauua

SEQ ID NO: 671479 - RNA, 19 nt, Homo sapiens
  misc_RNA (1)...(19): siRNA sense strand
ggaugaagagggugccuuu

SEQ ID NO: 671480 - RNA, 19 nt, Homo sapiens
  misc_RNA (1)...(19): siRNA sense strand
ugaagagggugccuuugga

SEQ ID NO: 671481 - RNA, 19 nt, Homo sapiens
  misc_RNA (1)...(19): siRNA sense strand
caacaguucuaucucuucu

SEQ ID NO: 671482 - RNA, 19 nt, Homo sapiens
  misc_RNA (1)...(19): siRNA sense strand
gaagaaugucaaauccaaa

SEQ ID NO: 671483 - RNA, 19 nt, Homo sapiens
  misc_RNA (1)...(19): siRNA sense strand
ccugaaaggugaacaagag

SEQ ID NO: 671484 - RNA, 19 nt, Homo sapiens
  misc_RNA (1)...(19): siRNA sense strand
cuccucagcuugccacuuu

SEQ ID NO: 671485 - RNA, 19 nt, Homo sapiens
  misc_RNA (1)...(19): siRNA sense strand
caaaggacaaagucucuga

SEQ ID NO: 671486 - RNA, 19 nt, Homo sapiens
  misc_RNA (1)...(19): siRNA sense strand
uuuagcagcugaagaaaca

SEQ ID NO: 671487 - RNA, 19 nt, Homo sapiens
  misc_RNA (1)...(19): siRNA sense strand
agaagaaggucgccaucau

SEQ ID NO: 671488 - RNA, 19 nt, Homo sapiens
  misc_RNA (1)...(19): siRNA sense strand
ccaagaccuuccuccauuc

SEQ ID NO: 671489 - RNA, 19 nt, Homo sapiens
  misc_RNA (1)...(19): siRNA sense strand
ggucacagggcaccuauuc

SEQ ID NO: 671490 - RNA, 19 nt, Homo sapiens
  misc_RNA (1)...(19): siRNA sense strand
ucaaauaccagccuaaagg

SEQ ID NO: 671491 - RNA, 19 nt, Homo sapiens
  misc_RNA (1)...(19): siRNA sense strand
ucacagggcaccuauucaa

SEQ ID NO: 671492 - RNA, 19 nt, Homo sapiens
  misc_RNA (1)...(19): siRNA sense strand
agaggcaucugcacacuca

SEQ ID NO: 671493 - RNA, 19 nt, Homo sapiens
  misc_RNA (1)...(19): siRNA sense strand
gaaggucgccaucauacgu

SEQ ID NO: 671494 - RNA, 19 nt, Homo sapiens
  misc_RNA (1)...(19): siRNA sense strand
aaggauaguucaaguaguc

SEQ ID NO: 671495 - RNA, 19 nt, Homo sapiens
  misc_RNA (1)...(19): siRNA sense strand
gaggaggugucugcaagga

SEQ ID NO: 671496 - RNA, 19 nt, Homo sapiens
  misc_RNA (1)...(19): siRNA sense strand
acaguucuaucucuucuuc

SEQ ID NO: 671497 - RNA, 19 nt, Homo sapiens
  misc_RNA (1)...(19): siRNA sense strand
aaauagaccuaagccaugu

SEQ ID NO: 671498 - RNA, 19 nt, Homo sapiens
  misc_RNA (1)...(19): siRNA sense strand
gaucaacagacaacaucaa

SEQ ID NO: 671499 - RNA, 19 nt, Homo sapiens
  misc_RNA (1)...(19): siRNA sense strand
gcugagaucauuacacagu

SEQ ID NO: 671500 - RNA, 19 nt, Homo sapiens
  misc_RNA (1)...(19): siRNA sense strand
ggagacagagaugagaauu

SEQ ID NO: 671501 - RNA, 19 nt, Homo sapiens
  misc_RNA (1)...(19): siRNA sense strand
ccaaagagaaugggaucaa

SEQ ID NO: 671502 - RNA, 19 nt, Homo sapiens
  misc_RNA (1)...(19): siRNA sense strand
caucaaauaccagccuaaa

SEQ ID NO: 671503 - RNA, 19 nt, Homo sapiens
  misc_RNA (1)...(19): siRNA sense strand
cagacaacaucaaauacca

SEQ ID NO: 671504 - RNA, 19 nt, Homo sapiens
  misc_RNA (1)...(19): siRNA sense strand
caaagagaaugggaucaac

SEQ ID NO: 671505 - RNA, 19 nt, Homo sapiens
  misc_RNA (1)...(19): siRNA sense strand
ucaaauaccaaagagaaug

SEQ ID NO: 671506 - RNA, 19 nt, Homo sapiens
  misc_RNA (1)...(19): siRNA sense strand
gcuaaaguugguucucuug

SEQ ID NO: 671507 - RNA, 19 nt, Homo sapiens
  misc_RNA (1)...(19): siRNA sense strand
gccuuuagcagcugaagaa

SEQ ID NO: 671508 - RNA, 19 nt, Homo sapiens
  misc_RNA (1)...(19): siRNA sense strand
ucagagagcaugcuaaagc

SEQ ID NO: 671509 - RNA, 19 nt, Homo sapiens
  misc_RNA (1)...(19): siRNA sense strand
cacauccaccugagauuaa

SEQ ID NO: 671510 - RNA, 19 nt, Homo sapiens
  misc_RNA (1)...(19): siRNA sense strand
gagaagaaggucgccauca

SEQ ID NO: 671511 - RNA, 19 nt, Homo sapiens
  misc_RNA (1)...(19): siRNA sense strand
ucaccugccucagaacaga

SEQ ID NO: 671512 - RNA, 19 nt, Homo sapiens
  misc_RNA (1)...(19): siRNA sense strand
cccaucaccugccucagaa

SEQ ID NO: 671513 - RNA, 19 nt, Homo sapiens
  misc_RNA (1)...(19): siRNA sense strand
ugaagaaacagcuaaucug

SEQ ID NO: 671514 - RNA, 19 nt, Homo sapiens
  misc_RNA (1)...(19): siRNA sense strand
caaggauaguucaaguagu

SEQ ID NO: 671515 - RNA, 19 nt, Homo sapiens
  misc_RNA (1)...(19): siRNA sense strand
ucucaacaguucuaucucu

SEQ ID NO: 671516 - RNA, 19 nt, Homo sapiens
  misc_RNA (1)...(19): siRNA sense strand
agacagagaugagaauucc

SEQ ID NO: 671517 - RNA, 19 nt, Homo sapiens
  misc_RNA (1)...(19): siRNA sense strand
ccucagcaccgcuaacaga

SEQ ID NO: 671518 - RNA, 19 nt, Homo sapiens
  misc_RNA (1)...(19): siRNA sense strand
gaacggaaagacgaagcaa

SEQ ID NO: 671519 - RNA, 19 nt, Homo sapiens
  misc_RNA (1)...(19): siRNA sense strand
caaauguggcucucugaag

SEQ ID NO: 671520 - RNA, 19 nt, Homo sapiens
  misc_RNA (1)...(19): siRNA sense strand
gagacagagaugagaauuc

SEQ ID NO: 671521 - RNA, 19 nt, Homo sapiens
  misc_RNA (1)...(19): siRNA sense strand
ggcuguagcaguccugaaa

SEQ ID NO: 671522 - RNA, 19 nt, Homo sapiens
  misc_RNA (1)...(19): siRNA sense strand
ccaaauguggcucucugaa

SEQ ID NO: 671523 - RNA, 19 nt, Homo sapiens
  misc_RNA (1)...(19): siRNA sense strand
ccgaagcgccaauggauuc

SEQ ID NO: 671524 - RNA, 19 nt, Homo sapiens
  misc_RNA (1)...(19): siRNA sense strand
aagaagcucaacauaaaga

SEQ ID NO: 671525 - RNA, 19 nt, Homo sapiens
  misc_RNA (1)...(19): siRNA sense strand
cuucagagagcaugcuaaa

SEQ ID NO: 671526 - RNA, 19 nt, Homo sapiens
  misc_RNA (1)...(19): siRNA sense strand
caaauaccaaagagaaugg

SEQ ID NO: 671527 - RNA, 19 nt, Homo sapiens
  misc_RNA (1)...(19): siRNA sense strand
ggugguaaugucaagauug

SEQ ID NO: 671528 - RNA, 19 nt, Homo sapiens
  misc_RNA (1)...(19): siRNA sense strand
guaaccaagagcccagaaa

SEQ ID NO: 671529 - RNA, 19 nt, Homo sapiens
  misc_RNA (1)...(19): siRNA sense strand
agagaaagaagcucaacau

SEQ ID NO: 671530 - RNA, 19 nt, Homo sapiens
  misc_RNA (1)...(19): siRNA sense strand
uaaacaggcaaaggacaaa

SEQ ID NO: 671531 - RNA, 19 nt, Homo sapiens
  misc_RNA (1)...(19): siRNA sense strand
ccacuuuggcugaggaugu

SEQ ID NO: 671532 - RNA, 19 nt, Homo sapiens
  misc_RNA (1)...(19): siRNA sense strand
gggaagagugguaccucaa

SEQ ID NO: 671533 - RNA, 19 nt, Homo sapiens
  misc_RNA (1)...(19): siRNA sense strand
cugcaaggauaguucaagu

SEQ ID NO: 671534 - RNA, 19 nt, Homo sapiens
  misc_RNA (1)...(19): siRNA sense strand
gauaaugcucaucauguac

SEQ ID NO: 671535 - RNA, 19 nt, Homo sapiens
  misc_RNA (1)...(19): siRNA sense strand
ccaucuuggugccgaguga

SEQ ID NO: 671536 - RNA, 19 nt, Homo sapiens
  misc_RNA (1)...(19): siRNA sense strand
ugaaaggugaacaagagaa

SEQ ID NO: 671537 - RNA, 19 nt, Homo sapiens
  misc_RNA (1)...(19): siRNA sense strand
acagggcaccuauucaaau

SEQ ID NO: 671538 - RNA, 19 nt, Homo sapiens
  misc_RNA (1)...(19): siRNA sense strand
uuaaacaggcaaaggacaa

SEQ ID NO: 671539 - RNA, 19 nt, Homo sapiens
  misc_RNA (1)...(19): siRNA sense strand
agaaaaggcccaagcuaaa

SEQ ID NO: 671540 - RNA, 19 nt, Homo sapiens
  misc_RNA (1)...(19): siRNA sense strand
ucacugcugcacucgcuaa

SEQ ID NO: 671541 - RNA, 19 nt, Homo sapiens
  misc_RNA (1)...(19): siRNA sense strand
cacagggcaccuauucaaa

SEQ ID NO: 671542 - RNA, 19 nt, Homo sapiens
  misc_RNA (1)...(19): siRNA sense strand
cgacgacucagcaaugucu

SEQ ID NO: 671543 - RNA, 19 nt, Homo sapiens
  misc_RNA (1)...(19): siRNA sense strand
gaggugguaaugucaagau

SEQ ID NO: 671544 - RNA, 19 nt, Homo sapiens
  misc_RNA (1)...(19): siRNA sense strand
guggcucucugaagaacau

SEQ ID NO: 671545 - RNA, 19 nt, Homo sapiens
  misc_RNA (1)...(19): siRNA sense strand
ggaagagugguaccucaac

SEQ ID NO: 671546 - RNA, 19 nt, Homo sapiens
  misc_RNA (1)...(19): siRNA sense strand
acagagaugagaauuccuu

SEQ ID NO: 671547 - RNA, 19 nt, Homo sapiens
  misc_RNA (1)...(19): siRNA sense strand
uauuuaaacaggcaaagga

SEQ ID NO: 671548 - RNA, 19 nt, Homo sapiens
  misc_RNA (1)...(19): siRNA sense strand
aagcuaaaguugguucucu

SEQ ID NO: 671549 - RNA, 19 nt, Homo sapiens
  misc_RNA (1)...(19): siRNA sense strand
gaagcaaaggcaccucacu

SEQ ID NO: 671550 - RNA, 19 nt, Homo sapiens
  misc_RNA (1)...(19): siRNA sense strand
aagaaaaggcccaagcuaa

SEQ ID NO: 671551 - RNA, 19 nt, Homo sapiens
  misc_RNA (1)...(19): siRNA sense strand
ccugaagaaugucaaaucc

SEQ ID NO: 671552 - RNA, 19 nt, Homo sapiens
  misc_RNA (1)...(19): siRNA sense strand
aaggugaacaagagaaaga

SEQ ID NO: 671553 - RNA, 19 nt, Homo sapiens
  misc_RNA (1)...(19): siRNA sense strand
gaccucagcaccgcuaaca

SEQ ID NO: 671554 - RNA, 19 nt, Homo sapiens
  misc_RNA (1)...(19): siRNA sense strand
cuaaaguugguucucuuga

SEQ ID NO: 671555 - RNA, 19 nt, Homo sapiens
  misc_RNA (1)...(19): siRNA sense strand
gaaaaggcccaagcuaaag

SEQ ID NO: 671556 - RNA, 19 nt, Homo sapiens
  misc_RNA (1)...(19): siRNA sense strand
ccuucucucucaacaguuc

SEQ ID NO: 671557 - RNA, 19 nt, Homo sapiens
  misc_RNA (1)...(19): siRNA sense strand
gaaagaagcucaacauaaa

SEQ ID NO: 671558 - RNA, 19 nt, Homo sapiens
  misc_RNA (1)...(19): siRNA sense strand
caaagucucugacggagua

SEQ ID NO: 671559 - RNA, 19 nt, Homo sapiens
  misc_RNA (1)...(19): siRNA sense strand
caacagacaacaucaaaua

SEQ ID NO: 671560 - RNA, 19 nt, Homo sapiens
  misc_RNA (1)...(19): siRNA sense strand
ggaggugucugcaaggaua

SEQ ID NO: 671561 - RNA, 19 nt, Homo sapiens
  misc_RNA (1)...(19): siRNA sense strand
gaagaaggucgccaucaua

SEQ ID NO: 671562 - RNA, 19 nt, Homo sapiens
  misc_RNA (1)...(19): siRNA sense strand
gaccucagcugacagagaa

SEQ ID NO: 671563 - RNA, 19 nt, Homo sapiens
  misc_RNA (1)...(19): siRNA sense strand
aaaguugguucucuugaua

SEQ ID NO: 671564 - RNA, 19 nt, Homo sapiens
  misc_RNA (1)...(19): siRNA sense strand
gagaaagaagcucaacaua

SEQ ID NO: 671565 - RNA, 19 nt, Homo sapiens
  misc_RNA (1)...(19): siRNA sense strand
agaaagaagcucaacauaa

SEQ ID NO: 671566 - RNA, 19 nt, Homo sapiens
  misc_RNA (1)...(19): siRNA sense strand
gggcugagaucauuacaca

SEQ ID NO: 671567 - RNA, 19 nt, Homo sapiens
  misc_RNA (1)...(19): siRNA sense strand
gcucgaaucuccucagcuu

SEQ ID NO: 671568 - RNA, 19 nt, Homo sapiens
  misc_RNA (1)...(19): siRNA sense strand
ugaagaaugucaaauccaa

SEQ ID NO: 671569 - RNA, 19 nt, Homo sapiens
  misc_RNA (1)...(19): siRNA sense strand
gaaaggugaacaagagaaa

SEQ ID NO: 671570 - RNA, 19 nt, Homo sapiens
  misc_RNA (1)...(19): siRNA sense strand
gaagagugguaccucaaca

SEQ ID NO: 671571 - RNA, 19 nt, Homo sapiens
  misc_RNA (1)...(19): siRNA sense strand
caccugagauuaaggauca

SEQ ID NO: 671572 - RNA, 19 nt, Homo sapiens
  misc_RNA (1)...(19): siRNA sense strand
aaauguggcucucugaaga

SEQ ID NO: 671573 - RNA, 19 nt, Homo sapiens
  misc_RNA (1)...(19): siRNA sense strand
gcaaggauaguucaaguag

SEQ ID NO: 671574 - RNA, 19 nt, Homo sapiens
  misc_RNA (1)...(19): siRNA sense strand
gcaucaaccugcucgaauc

SEQ ID NO: 671575 - RNA, 19 nt, Homo sapiens
  misc_RNA (1)...(19): siRNA sense strand
cccaagaccuuccuccauu

SEQ ID NO: 671576 - RNA, 19 nt, Homo sapiens
  misc_RNA (1)...(19): siRNA sense strand
ugccagaccugaagaaugu

SEQ ID NO: 671577 - RNA, 19 nt, Homo sapiens
  misc_RNA (1)...(19): siRNA sense strand
uaaaguugguucucuugau

SEQ ID NO: 671578 - RNA, 19 nt, Homo sapiens
  misc_RNA (1)...(19): siRNA sense strand
ucacauccaccugagauua

SEQ ID NO: 671579 - RNA, 19 nt, Homo sapiens
  misc_RNA (1)...(19): siRNA sense strand
ggaugaagagggugccuuu

SEQ ID NO: 671580 - RNA, 19 nt, Homo sapiens
  misc_RNA (1)...(19): siRNA sense strand
ugaagagggugccuuugga

SEQ ID NO: 671581 - RNA, 19 nt, Homo sapiens
  misc_RNA (1)...(19): siRNA sense strand
caacaguucuaucucuucu

SEQ ID NO: 671582 - RNA, 19 nt, Homo sapiens
  misc_RNA (1)...(19): siRNA sense strand
gaagaaugucaaauccaaa

SEQ ID NO: 671583 - RNA, 19 nt, Homo sapiens
  misc_RNA (1)...(19): siRNA sense strand
ccugaaaggugaacaagag

SEQ ID NO: 671584 - RNA, 19 nt, Homo sapiens
  misc_RNA (1)...(19): siRNA sense strand
cuccucagcuugccacuuu

SEQ ID NO: 671585 - RNA, 19 nt, Homo sapiens
  misc_RNA (1)...(19): siRNA sense strand
caaaggacaaagucucuga

SEQ ID NO: 671586 - RNA, 19 nt, Homo sapiens
  misc_RNA (1)...(19): siRNA sense strand
uuuagcagcugaagaaaca

SEQ ID NO: 671587 - RNA, 19 nt, Homo sapiens
  misc_RNA (1)...(19): siRNA sense strand
agaagaaggucgccaucau

SEQ ID NO: 671588 - RNA, 19 nt, Homo sapiens
  misc_RNA (1)...(19): siRNA sense strand
ccaagaccuuccuccauuc

SEQ ID NO: 671589 - RNA, 19 nt, Homo sapiens
  misc_RNA (1)...(19): siRNA sense strand
ggucacagggcaccuauuc

SEQ ID NO: 671590 - RNA, 19 nt, Homo sapiens
  misc_RNA (1)...(19): siRNA sense strand
ucaaauaccagccuaaagg

SEQ ID NO: 671591 - RNA, 19 nt, Homo sapiens
  misc_RNA (1)...(19): siRNA sense strand
ucacagggcaccuauucaa

SEQ ID NO: 671592 - RNA, 19 nt, Homo sapiens
  misc_RNA (1)...(19): siRNA sense strand
agaggcaucugcacacuca

SEQ ID NO: 671593 - RNA, 19 nt, Homo sapiens
  misc_RNA (1)...(19): siRNA sense strand
gaaggucgccaucauacgu

SEQ ID NO: 671594 - RNA, 19 nt, Homo sapiens
  misc_RNA (1)...(19): siRNA sense strand
aaggauaguucaaguaguc

SEQ ID NO: 671595 - RNA, 19 nt, Homo sapiens
  misc_RNA (1)...(19): siRNA sense strand
gaggaggugucugcaagga

SEQ ID NO: 671596 - RNA, 19 nt, Homo sapiens
  misc_RNA (1)...(19): siRNA sense strand
acaguucuaucucuucuuc

SEQ ID NO: 671597 - RNA, 19 nt, Homo sapiens
  misc_RNA (1)...(19): siRNA sense strand
aaauagaccuaagccaugu

SEQ ID NO: 671598 - RNA, 19 nt, Homo sapiens
  misc_RNA (1)...(19): siRNA sense strand
gaucaacagacaacaucaa

SEQ ID NO: 671599 - RNA, 19 nt, Homo sapiens
  misc_RNA (1)...(19): siRNA sense strand
gcugagaucauuacacagu

SEQ ID NO: 671600 - RNA, 19 nt, Homo sapiens
  misc_RNA (1)...(19): siRNA sense strand
ggagacagagaugagaauu

SEQ ID NO: 671601 - RNA, 19 nt, Homo sapiens
  misc_RNA (1)...(19): siRNA sense strand
ccaaagagaaugggaucaa

SEQ ID NO: 671602 - RNA, 19 nt, Homo sapiens
  misc_RNA (1)...(19): siRNA sense strand
caucaaauaccagccuaaa

SEQ ID NO: 671603 - RNA, 19 nt, Homo sapiens
  misc_RNA (1)...(19): siRNA sense strand
cagacaacaucaaauacca

SEQ ID NO: 671604 - RNA, 19 nt, Homo sapiens
  misc_RNA (1)...(19): siRNA sense strand
caaagagaaugggaucaac

SEQ ID NO: 671605 - RNA, 19 nt, Homo sapiens
  misc_RNA (1)...(19): siRNA sense strand
ucaaauaccaaagagaaug

SEQ ID NO: 671606 - RNA, 19 nt, Homo sapiens
  misc_RNA (1)...(19): siRNA sense strand
gcuaaaguugguucucuug

SEQ ID NO: 671607 - RNA, 19 nt, Homo sapiens
  misc_RNA (1)...(19): siRNA sense strand
gccuuuagcagcugaagaa

SEQ ID NO: 671608 - RNA, 19 nt, Homo sapiens
  misc_RNA (1)...(19): siRNA sense strand
ucagagagcaugcuaaagc

SEQ ID NO: 671609 - RNA, 19 nt, Homo sapiens
  misc_RNA (1)...(19): siRNA sense strand
cacauccaccugagauuaa

SEQ ID NO: 671610 - RNA, 19 nt, Homo sapiens
  misc_RNA (1)...(19): siRNA sense strand
gagaagaaggucgccauca

SEQ ID NO: 671611 - RNA, 19 nt, Homo sapiens
  misc_RNA (1)...(19): siRNA sense strand
ucaccugccucagaacaga

SEQ ID NO: 671612 - RNA, 19 nt, Homo sapiens
  misc_RNA (1)...(19): siRNA sense strand
cccaucaccugccucagaa

SEQ ID NO: 671613 - RNA, 19 nt, Homo sapiens
  misc_RNA (1)...(19): siRNA sense strand
ugaagaaacagcuaaucug

SEQ ID NO: 671614 - RNA, 19 nt, Homo sapiens
  misc_RNA (1)...(19): siRNA sense strand
caaggauaguucaaguagu

SEQ ID NO: 671615 - RNA, 19 nt, Homo sapiens
  misc_RNA (1)...(19): siRNA sense strand
ucucaacaguucuaucucu

SEQ ID NO: 671616 - RNA, 19 nt, Homo sapiens
  misc_RNA (1)...(19): siRNA sense strand
agacagagaugagaauucc

SEQ ID NO: 671617 - RNA, 19 nt, Homo sapiens
  misc_RNA (1)...(19): siRNA sense strand
ccucagcaccgcuaacaga

SEQ ID NO: 671618 - RNA, 19 nt, Homo sapiens
  misc_RNA (1)...(19): siRNA sense strand
gaacggaaagacgaagcaa

SEQ ID NO: 671619 - RNA, 19 nt, Homo sapiens
  misc_RNA (1)...(19): siRNA sense strand
caaauguggcucucugaag

SEQ ID NO: 671620 - RNA, 19 nt, Homo sapiens
  misc_RNA (1)...(19): siRNA sense strand
gagacagagaugagaauuc

SEQ ID NO: 671621 - RNA, 19 nt, Homo sapiens
  misc_RNA (1)...(19): siRNA sense strand
ggcuguagcaguccugaaa

SEQ ID NO: 671622 - RNA, 19 nt, Homo sapiens
  misc_RNA (1)...(19): siRNA sense strand
ccaaauguggcucucugaa

SEQ ID NO: 671623 - RNA, 19 nt, Homo sapiens
  misc_RNA (1)...(19): siRNA sense strand
ccgaagcgccaauggauuc

SEQ ID NO: 671624 - RNA, 19 nt, Homo sapiens
  misc_RNA (1)...(19): siRNA sense strand
aagaagcucaacauaaaga

SEQ ID NO: 671625 - RNA, 19 nt, Homo sapiens
  misc_RNA (1)...(19): siRNA sense strand
cuucagagagcaugcuaaa

SEQ ID NO: 671626 - RNA, 19 nt, Homo sapiens
  misc_RNA (1)...(19): siRNA sense strand
caaauaccaaagagaaugg

SEQ ID NO: 671627 - RNA, 19 nt, Homo sapiens
  misc_RNA (1)...(19): siRNA sense strand
ggugguaaugucaagauug

SEQ ID NO: 671628 - RNA, 19 nt, Homo sapiens
  misc_RNA (1)...(19): siRNA sense strand
guaaccaagagcccagaaa

SEQ ID NO: 671629 - RNA, 19 nt, Homo sapiens
  misc_RNA (1)...(19): siRNA sense strand
agagaaagaagcucaacau

SEQ ID NO: 671630 - RNA, 19 nt, Homo sapiens
  misc_RNA (1)...(19): siRNA sense strand
uaaacaggcaaaggacaaa

SEQ ID NO: 671631 - RNA, 19 nt, Homo sapiens
  misc_RNA (1)...(19): siRNA sense strand
ccacuuuggcugaggaugu

SEQ ID NO: 671632 - RNA, 19 nt, Homo sapiens
  misc_RNA (1)...(19): siRNA sense strand
gggaagagugguaccucaa

SEQ ID NO: 671633 - RNA, 19 nt, Homo sapiens
  misc_RNA (1)...(19): siRNA sense strand
cugcaaggauaguucaagu

SEQ ID NO: 671634 - RNA, 19 nt, Homo sapiens
  misc_RNA (1)...(19): siRNA sense strand
gauaaugcucaucauguac

SEQ ID NO: 671635 - RNA, 19 nt, Homo sapiens
  misc_RNA (1)...(19): siRNA sense strand
ccaucuuggugccgaguga

SEQ ID NO: 671636 - RNA, 19 nt, Homo sapiens
  misc_RNA (1)...(19): siRNA sense strand
ugaaaggugaacaagagaa

SEQ ID NO: 671637 - RNA, 19 nt, Homo sapiens
  misc_RNA (1)...(19): siRNA sense strand
acagggcaccuauucaaau

SEQ ID NO: 671638 - RNA, 19 nt, Homo sapiens
  misc_RNA (1)...(19): siRNA sense strand
uuaaacaggcaaaggacaa

SEQ ID NO: 671639 - RNA, 19 nt, Homo sapiens
  misc_RNA (1)...(19): siRNA sense strand
agaaaaggcccaagcuaaa

SEQ ID NO: 671640 - RNA, 19 nt, Homo sapiens
  misc_RNA (1)...(19): siRNA sense strand
ucacugcugcacucgcuaa

SEQ ID NO: 671641 - RNA, 19 nt, Homo sapiens
  misc_RNA (1)...(19): siRNA sense strand
cacagggcaccuauucaaa

SEQ ID NO: 671642 - RNA, 19 nt, Homo sapiens
  misc_RNA (1)...(19): siRNA sense strand
cgacgacucagcaaugucu

SEQ ID NO: 671643 - RNA, 19 nt, Homo sapiens
  misc_RNA (1)...(19): siRNA sense strand
gaggugguaaugucaagau

SEQ ID NO: 671644 - RNA, 19 nt, Homo sapiens
  misc_RNA (1)...(19): siRNA sense strand
guggcucucugaagaacau

SEQ ID NO: 671645 - RNA, 19 nt, Homo sapiens
  misc_RNA (1)...(19): siRNA sense strand
ggaagagugguaccucaac

SEQ ID NO: 671646 - RNA, 19 nt, Homo sapiens
  misc_RNA (1)...(19): siRNA sense strand
acagagaugagaauuccuu

SEQ ID NO: 671647 - RNA, 19 nt, Homo sapiens
  misc_RNA (1)...(19): siRNA sense strand
uauuuaaacaggcaaagga
